United States Patent Application Publication US 2026/0022370 A1 - sequence listing, part 5

SEQ ID NO: 23447 - DNA, 353 bp, Homo sapiens
  source 1..353: mol_type = other DNA
ctgagccagaatgcctcctgcagggattcttcctgcttggagctgagcaggcttttcctcatcaggccattgtccctgaagagaagggcagggctgaggcctctcattccagagtcataaatttatggttctcaggcctgactctcagcagctatggtaggaactgctgggcttggcagcccgggtcagcctcctttcccctccctcaggccgaaggaggagtcagggagagctgaactattagagctgcaagggaagtccttgtcattcatggcctgggggatgtacaatgcttttcctcaaaggtagagccagaggtctggccctatgcttccggccaaggaattattccc

SEQ ID NO: 23448 - DNA, 523 bp, Homo sapiens
  source 1..523: mol_type = other DNA
gatggatatgttaagcttgacttagtcgttccatattgtatacatatattaaaatataacattgtaccccattaaatatttacaattatgatttgtacatatatttaataataataaaaatctaaataaaatattaaagaatgattaaatattgtaacatttattgagcactacgtatatatttttgaattaaaggatctcggaatcccggccggggctgcgggaggaaagcgcacggacaggagccccaccgctcgaatgcagcgcccggcggctggcctcgtgaggtcacaggcccttacgaggtggggcaggcaggcgcggccgcagtgccttccagtcagcgcggaggcggtattgagttcagccgctccccacagccccggagcccctgggcggtggcggtggccgcggcagcaccggctcgacagccgatagggtcctgggcccgctccgctcggggtggtcggtgggcggagcgtcgggctcggtcaggtgaccgcgggggcggggccgcgcggcg

SEQ ID NO: 23449 - DNA, 395 bp, Homo sapiens
  source 1..395: mol_type = other DNA
tatgctcctgtagtcccagcaactcgggaggctgtggcagggacagagagagactctgtatagtagcattccagatgcagcagagggtattggcttcaccctatcatataagttggctcctgaagatcatcaacaaggtggaaatgtatgtctttttcaacttcctaatggaaagatacaaagagaaataaaactagataggaccttcctttggccacatttttatgtgcataatgtcatattgctatccccaaataaataaaactatgtatctatccatcaatctatccaatctatagctcatatattattatgacaaattaagttatccatcagtatagcaaacattttaaagcatgtgaaattaatctactttcctttcatgaagaacacga

SEQ ID NO: 23450 - DNA, 453 bp, Homo sapiens
  source 1..453: mol_type = other DNA
ccaggctggtaaacattaaatcatggaaacaaaaatacagtttttgattgaagtaacctagattattaaaggttccaggctggagtgcagtggtgtgatctcggctcactgcagcctcgtgatccgcccgcctcggcctcccgaagtgctgggattacctattaaaggttttataacaaaactttcaaatcatcctttgaatttgctacttaacaggaactaaggccagagagcctcaagtcagggcttttcgctgacctggagcagatcctggaaggccgcccccagtcctgagcggcgccgacaggtgcagcgcccgcctccagccctgcgctcgcgcgagcaacccgacgccctcccgccccgccggccgcgccctcgtcctcgccgctccgccctctgcccaggcgtgcgcgcgcactccacgggggcgcgcccggccggcggggccgc

SEQ ID NO: 23451 - DNA, 238 bp, Homo sapiens
  source 1..238: mol_type = other DNA
tcgctctgtcgccaggctggactgcagtggcgcgatatcggttctcctgcctcagcctcaggaatagcttggagatatgcattttgctaagaaaaggcattcatgagtttgagaactgaaacaggttaagaaccattttggagggtgaaacatttccatcctgtcaagtacctaagaggaggaatcccttagctcacttggacaagttccaggtggcagtggagccacatgcggcgca

SEQ ID NO: 23452 - DNA, 472 bp, Homo sapiens
  source 1..472: mol_type = other DNA
acagttttttgaagtaacctagattattaaaggttccaggctggagtgcagtggtgtgatctcggctcactgcagcctcgtgatccgcccgcctcggcctcccgaagtgctgggattacctattaaaggttttataacaaaactttcaaatcatcctttgaatttgctacttaacaggaactaaggccagagagcctcaagtcagggcttttcgctgacctggagcagatcctggaaggccgcccccagtcctgagcggcgccgacaggtgcagcgcccgcctccagccctgcgctcgcgcgagcaacccgacgccctcccgccccgccggccgcgccctcgtcctcgccgctccgccctctgcccaggcgtgcgcgcgcactccacgggggcgcgcccggccggcggggccgcgcacgcagccgccgccaccacttccctaggcagcccgcccgccagtccgcccgcaccg

SEQ ID NO: 23453 - DNA, 254 bp, Homo sapiens
  source 1..254: mol_type = other DNA
cttggacaagttccaggtggcagtggagccacatgcggcgcagagcgacgaccgcagccccagcgctcgacgggggcgtcccatcgtgccccgcgccgggctcctagggttgccgggcacctcccgcgggcgaatgggcgcgagacggcccttcgacgctgagcgcctggccagttagggattccgcgtggccaggacaacggccaatcgtcgtggagcgcggcgcctccgcggagaggtccggtccgaatatc

SEQ ID NO: 23454 - DNA, 332 bp, Homo sapiens
  source 1..332: mol_type = other DNA
atcgttaacacttcctgagcatcaatctccagcttagaaaggttaaggtaacttgcccaaggtagcaaaaaacttgtttctcttgctgctcaaatcaaagaagttacagctttaatctctctgtacggcccctgccacacgccaccacgccacactgcgccgggaggcgtcggggagggggcgccagcgcgggccgctggcgccgcagggagccggtgggctccgggcgcgctgccaggaagggccgcaccgtaggggccgccgcctctcgccacgtggtggtggcagcggcggggtccggggcgccttcccagctggagaaacccggagca

SEQ ID NO: 23455 - DNA, 443 bp, Homo sapiens
  source 1..443: mol_type = other DNA
ggacagagccccgccagcggggtgggcgcagaggggaggtggggccggccctacaaacgcggacccagtcactcgcgtttccctggcacttagatgggcctgtggtggattgaattggagcctgcgccggagccctttgcaccccaagctcctgcagcccgacctgggggccccgctgtctgaactcacagctccctgccggcccctcgcgtctcacgtgacacgcggcccggacgtgccaccctgcccacgcgctcacgcacgcgtgcacacaccagcctcctgccccatttcccggtgcgcgggcaccctgagacttcctgtgggtcccaggtcaggggccaaggggtcctggaccgctgccacagccccggtgcgcccgggggaggcgcttccgtgccgactgtggaggggccgaccctcgcgcagctctgggccttcct

SEQ ID NO: 23456 - DNA, 429 bp, Homo sapiens
  source 1..429: mol_type = other DNA
ttcaaagcagctttttaaggcaaggaaaatgacttgcctgggtcacatatacctggcaggcagagccagacctgggactctcagcactggcagcccaatgcccagtgcccatgactgccatgcagggtaggggagcttttgtgggccctgccaggcccagctcagggccctgcaaacccctggtctgcccccagggctagagctacatcagcacatgtggacctctggtgggtctgggcacacagtaggtatcaataaagatcgattgaatgttcatgggtgcccgtgctccgagcctctgagtgccaggagaatgcccagcgagtcccacttgggccatctcggaaggcttcctgtaggagagggcctttgagctgagacttcaaagctgtgtcaggcagcggagctgacgcgcgcaggcatgggggg

SEQ ID NO: 23457 - DNA, 338 bp, Homo sapiens
  source 1..338: mol_type = other DNA
tggcccatgtcacttttggggtcagagaagaaacttgaatcacacattcatttgaatgaattttagatctttgttaagagccgatttttcattagaattgattgcagcccttttaacggcagctgtgactgccccaggcctgctcctgatcagagactgcaggctgtggggtgtcttggggcctgacctagtggggcatcaccccagtgaagggcctcagtgtggggactgctggctggctccaaattttgcagtctattttcagatgtaaagggcagtctgctcagccctgagtcctccggggagcaggggggcagagctgagcggctgcccggagc

SEQ ID NO: 23458 - DNA, 135 bp, Homo sapiens
  source 1..135: mol_type = other DNA
gaaaagatgagtccaactgtgacacttccccggagtcgttgctaagagactggaaaggcgggctccgttggcccggcctagcgcatgcgtcttacggctacagccggcgggtacgcccactgcttccggccccgg

SEQ ID NO: 23459 - DNA, 265 bp, Homo sapiens
  source 1..265: mol_type = other DNA
ttggccaagctggtctcttcagttgctgcgtctgtaaagaggagatgcgaatgtctttgctttagatttaaatgatttaaaagatttaaatgagctaacacatataaaaatagttatcacagtgcctatattaagtgactcgtgaggacctgggccactccttacccgcctggggcaggacggcccggggccggaagcagtgggcgtacccgccggctgtagccgtaagacgcatgcgctaggccgggccaacggagcccgcctt

SEQ ID NO: 23460 - DNA, 526 bp, Homo sapiens
  source 1..526: mol_type = other DNA
ccttggcagggggcatcacggcggccagcatggtgtctgtcctgccccacccatccaggtgggaagaggatctgatatatctccgtgcttcgggatgggggtggcccaggccccccaggtgctgtcccccactttcggcataccctctaccgtggacaccaggcagccctggggctgatggagataggtatcccccagggagtaggggctaccttgaggggatgatagacctcccccactcccagtgggactagaggagttcctcccttcaaagccagcaactgccggtggtacacagtccccccttcacctggcgggaagcctgtcccggggcaggatcgggggcagcagctccagcagaaacagcaggatctggagcaggaaggcctcgaggccacacaggggctgctggccggcgagtgggccccacccctctgggagctgggcagcctcttccaggccttcgtgaagagggagagccggcctggggtggacccaggacccctggggcctgggtgccctgagt

SEQ ID NO: 23461 - DNA, 439 bp, Homo sapiens
  source 1..439: mol_type = other DNA
accaaatctttgaactagaaagttctaaatttccctttaaagcgatcttcctatgggtttgagcactatcagacagataggtcagacagggtaccgcggtgtgatcttggctcactgcagcctcaatctctctggctcaagagatcctcagctaattttaaaatatttccagagtgctgggattacaggtgcgagccccccgcctgggatgcgcctctgggattcaaaccaggactcaagtactccccgcagtgactccgtggggttagcagcctgtcaggcctcaaatgggcgcctgagccaggtgggactcgcaaggccgctctgctccgggaagtggtgcaggcgcgcgccctggtggaaaacggcggagctgcaggctccgttccggctccgaccccgaggccgaaggccttccaggtcacctgagagtctccgc

SEQ ID NO: 23462 - DNA, 307 bp, Homo sapiens
  source 1..307: mol_type = other DNA
ggcaagggatagctcaattccttccagaagtgtcccttcccagggccattcaggcgcctgcccattcttcagaaccgggtcagagagatcgaggcaacctaagggttgctgcctaaggtagaccgagctagctccccacccggcggggcgggtcttagaacctgaatcaccccacccgggcccctctccctgggagtggaggggaccagggaggagcgagggagcgggcggcgcacgccctagttatctctcctcgcggccctggctgggctccggtccagccgagccctcaagggttaggcggccg

SEQ ID NO: 23463 - DNA, 239 bp, Homo sapiens
  source 1..239: mol_type = other DNA
ctggctcatcctgggctcctgtcctctgccaagggcattgggctgtggtcaaaaacaggatgtgtatacctaaacttacaaccaccctaaaattaggctcatataaatagagatctgggggctccccctaaattcaaccctcctggagttccaggagtcctgaactgtcggcatgagcccttcaggtctcaaaaaggatggaatttggagagttccagctatcccagctctcggaagga

SEQ ID NO: 23464 - DNA, 170 bp, Homo sapiens
  source 1..170: mol_type = other DNA
tctaggccgggggcttaaccgattgtgaaaatccccttgagtggcagccggctactgccaggcagatctatcattcatcctctgggttagaggtgggtggaaggtcaacctcgatcaaccacccagcgggcgggactttgcctccctccaattggctgatgcacagactc

SEQ ID NO: 23465 - DNA, 491 bp, Homo sapiens
  source 1..491: mol_type = other DNA
ggccccagaagccctgaggggctgtgagggcaagttatttgaccttgctacctgtcgagtagcagggttctaagcactttacaaactgaactcctcccctggtgggatgtctttgaagcccctcccacggggggtaacctccttgccccaccgggtggccccagaagccccgaggggctcctactacggggaccccttttcccccgcccctgcaggaggcctggccctagcggcggcacctctcggtccccgcggtaactcttgcgcatgggtcccaggtccatggcagcactgcgaccacacaggtgactgaggtagcctggccactcggcaggtcgcccgaacgtcgccgtgacgccccgcagccagcacgtcatggggggccgccggccacgtgacccggctgtggcccggcactgggtttctaccccggggaaggaagaggtcctaagtcctcggagccaatgagtttccaggagcggccaatgggt

SEQ ID NO: 23466 - DNA, 99 bp, Homo sapiens
  source 1..99: mol_type = other DNA
gcgggcgcctgtaatcccagctacccgggaacccattggccgctcctggaaactcattggctccgaggacttaggacctcttccttccccggggtagaa

SEQ ID NO: 23467 - DNA, 289 bp, Homo sapiens
  source 1..289: mol_type = other DNA
tccaggccagtggcactttgctagtggggacactggcacaggtctctttgagagtctgattcaagggccttgaagcccacctccaaccaacccagtccccactttgaggcttgaggcaggggagggacagcctgggaaccggtctgccaaccagtttaaccgggactggtttcgactcagggagttcaaaggaagctggggtgcaccccgtcctacccaggttgtgccctgggcaacatccaggtggtggtccactggatgagaaccctggcttctggtattcatcagc

SEQ ID NO: 23468 - DNA, 208 bp, Homo sapiens
  source 1..208: mol_type = other DNA
catctacggtatagaggttattttgtaacaacagctgtgacatgtctattagagcctcccagcccgccaggggaagcggctgccaggctgggctctcgagcgccgcctgtcgcaatcccacggccgctgcagcgccctcccgagctcagccattcggagcctggggtgggcggggctcggccacaacgccactggattggtggtaggg

SEQ ID NO: 23469 - DNA, 299 bp, Homo sapiens
  source 1..299: mol_type = other DNA
ttcttgtgaaggtgtcaaatgtaaaatacacgcacagtgtttttaccggtaatacgtagcactaacatatcactgggatgtgaatttcccacttgccagtgtaccctgaaatgagagcttgtcttagttagacttagaccaaagaaaccaaaacatgcatttgtcctcatggtacctaccagaggtcaacagacaaaagtgggctttgcttgtgtttgctgctggccccaggacagcctataggccacgcgcgagagggggccgcggggcggcgcggaggcggggcggcggcggcgggc

SEQ ID NO: 23470 - DNA, 408 bp, Homo sapiens
  source 1..408: mol_type = other DNA
ctcggccccgcgcggggcccctccctgtcaggcccagggccgggctctggcgggaaccccgctcggcccccgcctccgccccgcggcgctgggcgtcgcgcctccacagcaggccctaagcccgagtcccggcctcgccgccgccaccgccggccggcctagagctcggagccgccgaggccggggccgtcgacggatgtccctctgattggcagcagagaggcctaggcccgccccgcggtatggacccaccaatgaggagggcgaaggccctagtgtctggcattctgggcccctcggccgcgccttcgcggcgggcgagccagagtgcggaacaccctcgccttgagggttcccagtctagtgagacgccatcttgggtgctggcggcggaaaccggtaccccaa

SEQ ID NO: 23471 - DNA, 424 bp, Homo sapiens
  source 1..424: mol_type = other DNA
attcgtagcttagcaagctccccaagctaacgtttgagagtcacaaacatgttttggcaatataacccctttgggctgtttctaccatgacaaaaatactgctccagcgaaggtacccttgcctgggccatgaggcgcaaccgtccctcacagctggggtggcttctccaggttcgcaccgaggggaagttggggtaccggtttccgccgccagcacccaagatggcgtctcactagactgggaaccctcaaggcgagggtgttccgcactctggctcgcccgccgcgaaggcgcggccgaggggcccagaatgccagacactagggccttcgccctcctcattggtgggtccataccgcggggcgggcctaggcctctctgctgccaatcagagggacatccgtcgacggccccggcctcggc

SEQ ID NO: 23472 - DNA, 377 bp, Homo sapiens
  source 1..377: mol_type = other DNA
cgcacccgtctcactagactgggaaccctcaaggcgagggtgttccgcactctggctcgcccgccgcgaaggcgcggccgaggggcccagaatgccagacactagggccttcgccctcctcattggtgggtccataccgcggggcgggcctaggcctctctgctgccaatcagagggacatccgtcgacggccccggcctcggcggctccgagctctaggccggccggcggtggcggcggcgaggccgggactcgggcttagggcctgctgtggaggcgcgacgcccagcgccgcggggcggaggcgggggccgagcggggttcccgccagagcccggccctgggcctgacagggaggggccccgcgcggggccgag

SEQ ID NO: 23473 - DNA, 543 bp, Homo sapiens
  source 1..543: mol_type = other DNA
gaatctaagattcaaaaattttgaggatgtgaattaccttataaaaatcatatgttctaatttttttttttttttttctcgctccatcaggctggatcgctggacctcctgagtagctgggaccctcaggtgatccacccgcctcggcctcccaaagtgctgggatgacaggcgtgagttcctactgtgcgtgcgcggcgcgcggcgcttcgggccttgtagtcttggacagacccccgaggcccatggtgccgtgcggcgggtcgttgcgcctgcgcggtgcgagcggcgggcagcgcagactgcgaggcggagggccgttggccggggcctgcggtacgccgcttcagtgagggacgccactgcggccacccggcttgctgccttcctgggcgccactcccccaggcgacccgacgcgacgcgccagcagcgcagcaccgattcctctcgggctcttgggcgctgctctgaggtgaggagcccgctgggggagggggcgcggcggcggcggcggcgggagccctgcgtgggaggttaggag

SEQ ID NO: 23474 - DNA, 291 bp, Homo sapiens
  source 1..291: mol_type = other DNA
gctggggccagggaatctaagattcaaaaattttgaggatgtgaattaccttataaaaatcatatgttctaatttttttttttttttttctcgctccatcaggctggatcgctggacctcctgagtagctgggaccctcaggtgatccacccgcctcggcctcccaaagtgctgggatgacaggcgtgagttcctactgtgcgtgcgcggcgcgcggcgcttcgggccttgtagtcttggacagacccccgaggcccatggtgccgtgcggcgggtcgttgcgcctgcgcg

SEQ ID NO: 23475 - DNA, 429 bp, Homo sapiens
  source 1..429: mol_type = other DNA
cctgaatagctgggattacaggtgccggctggtctcgcccggttccacccgcctccgcccaaagtggtggaagtacaggcgtgaggcactgtgcccggccccagtgatcagggctcactgcagcctcgaacccctagtagctgggatgcccggctaatttttaaaatattttgcagaggcgagggtctgtagggcgtgtctcaagcctggcctcactgaaattatctttaaataagttgttaaaagaccaccaacagtctgaccgaatctgaatcggagtccccttgatagctggatccagggatgtgggcttcctaaagccccgaacctctgctcccgggacccactggctgcccgtcgctgacgccccctggccgctgattggcttcccctgacagtgggcggaacgcggccccggattggatatcc

SEQ ID NO: 23476 - DNA, 482 bp, Homo sapiens
  source 1..482: mol_type = other DNA
cagtgatcagggctcactgcagcctcgaacccctagtagctgggatgcccggctaatttttaaaatattttgcagaggcgagggtctgtagggcgtgtctcaagcctggcctcactgaaattatctttaaataagttgttaaaagaccaccaacagtctgaccgaatctgaatcggagtccccttgatagctggatccagggatgtgggcttcctaaagccccgaacctctgctcccgggacccactggctgcccgtcgctgacgccccctggccgctgattggcttcccctgacagtgggcggaacgcggccccggattggatatcccgtgcactctccggcgtcccaagtgagtggaggggggatcccgactccagtccggggccttggccagcggagggaatcccactcagagcccgggcctgtaggggcggggcgtcccgggcacccgggattggggcgtctcccgtcgtgcaccggg

SEQ ID NO: 23477 - DNA, 407 bp, Homo sapiens
  source 1..407: mol_type = other DNA
tattgtacttaaaaaacctctttattttgagaattatagattcacagagagtttcagaaataatagaggaactctgtctacctttacccagtttcccccaagggtaacatctggcactattacagtaatgtcaaactgtcccttgaatgagaccgtccgcagctcctggagggaaagggctcccatcctgagggagaacagcacagcttattgggaattaatcatttcctttcaaggcgcacctttggcctcgcacggtgcggtgcttccggcacccccgtggggctccggcgtgagcgccacgtgcacccacgccccgcgccccgttccggtccccgcctgccgcccgcgccacttcctgacgcgcccggggacccacggccccgccccgcggccgggctgggcgg

SEQ ID NO: 23478 - DNA, 374 bp, Homo sapiens
  source 1..374: mol_type = other DNA
ttttcttttttcttttttaactagcacaatggcaaaaatgggagggaaagtctctttgtcctaggggaaaatctccccaatctgaactttgagagtgctctaagttaaaccaatggctacctcagttcttgttcatgtccctggatatggatacagatacaagcttgaggcttgagtgggtacatgcacatcttttcctggggaaggccttaatttactctattaaaatacttggaaaagaggaaggtttctcctgaaaccttctaaccttcgaaggggatgaggaaaaggttcctctagcttttctggatttttgaatcaattaaaccaaagcgattggcggaggccggtgaccacgaattccctgtaatttc

SEQ ID NO: 23479 - DNA, 261 bp, Homo sapiens
  source 1..261: mol_type = other DNA
tggctctctagagagatatagggagccagctacagctatggatgagagagggaagatggggcatttctcatccttttctcttgaatttgtccaaatctaataacccaggagctgggagggaaggaaagtcttgaatattctcctaactttttcctctttccaaaagtctttgaagaaagatgtcaaactctggcccgcttagcccattggcctgggagagatcacatgtgccccctacccccttcctagggaagcgcttgc

SEQ ID NO: 23480 - DNA, 416 bp, Homo sapiens
  source 1..416: mol_type = other DNA
gccaggcctcggcgccctccaacccggagccctgctgagcaaagtccgaattgctgccgcccgcggggctcggccctcggccggctggtgtgctgggaacccgtaggtggctggtagcttgtcgccagtcgccgcggcagcagcgaccggctgaggcagcctggcagcagcagccagggactacccgggtgcagttaaattattgttttattattattactatcatcatcatcgtcatcattattattgctgtaacaatcagactaaattaataacaaattaattcagccagggctgcttggaagctaattttggttaaatcagcagaaggacctgctgctttgcagacccatgtgtatttccagaaaccaatcggaactcagggttacactgattcccttttgagtataaatctg

SEQ ID NO: 23481 - DNA, 255 bp, Homo sapiens
  source 1..255: mol_type = other DNA
attctcagctgaggagtagccaaagaagggctgggccttactgagcaagagtctttccctgccaggcacggacgattctcctgcctcagcctcccgagtagctgggctgaacagtggtttcagagtttagattctgtgatagcaggcctctgagccctggcttcttgggaggaagcacacacagggtgccacagcactctaccgggtctcctctagggtagccaggacagaaggcctgcatggtggaagactccc

SEQ ID NO: 23482 - DNA, 457 bp, Homo sapiens
  source 1..457: mol_type = other DNA
aaaggtttagggaaacctcccctcccctcattctcccattctgggggccccaagctgagggggagagtccccgctctccctcagaaggaagaagaggtgcgctgtgttccctggaagaaaggactctctctttcgggggcaataaaacggcggggagcccaagcgctctcggaccgcctacacgcgccagcaggtcttggagctggagacggcgccggagggtggagatcgcccacgcgctctgcctctccgagcgccagatcaagatctggttccagaaccggcgcatgaagttccgctcgggtggtgcggcaggctcagccggagggccccctggccggcccaatggaggcccccgcgcgctctagtgcccccgcacgcgggagccacgaacctcggggtgggggtgagggggccctggggcctgggccccggaactcccccacactttatatac

SEQ ID NO: 23483 - DNA, 419 bp, Homo sapiens
  source 1..419: mol_type = other DNA
aataaattttagtatattttgtgggcaattcccagaaattaatggctatgagttcttttttgatcaactcaccactcgcccgggtactacgccggcggccagaggcgagagagcagcttccagccggaggcgggcttcgggcggcgcgcggcgtgcaccgtgcagcgctacgcggcctgccgggaccctgggcccccgccgcctaccgcccggtctgtcccctcgggctcctgcgccgccacccgccggggccctcctcccggagcccggccagcgctgcgaggcggtcagcagcagccccccgccgcctccctgctcacgtgagcacgggtgagtgcgtgggcaccccttccccctcccacccctggacaccaaagggaggggaagccaattgtccccgctacccataaatttttatg

SEQ ID NO: 23484 - DNA, 293 bp, Homo sapiens
  source 1..293: mol_type = other DNA
tattcgccgcggaggcggcgacaattagaacgttggaattagcaaattgctaatcaattttgctctcggactgacggacacagtctagctgaaaagccccaagctctgtgctctggcccccgtatgggttcccctttcgagacggagcccccatagagacgcagggtgctagcgctccctcccgccgaggggaggagactgagccccaacttcttaagggatctagggtttgcgctctgcctagcgctctctctcgctctctctctgatcccggagagagcgaggcaaggagg

SEQ ID NO: 23485 - DNA, 264 bp, Homo sapiens
  source 1..264: mol_type = other DNA
tagaaatcaggtgggcaggtgggaactctcctcctacccacctgcaaggtcccaggactgggcataggcagagatgttaatgaaattgatattattttgacttcctcactaaagaaggtggggaaatggggttcctccccacacctccccgggatagaccctctctcctggctcccaggatgtgtgagaggctgggaggggccctataatgaataaatatccggggccccatctgcttggtctcaatatctagatattcgtttg

SEQ ID NO: 23486 - DNA, 453 bp, Homo sapiens
  source 1..453: mol_type = other DNA
ggaaggggcctcttgctcaggcctgctctctggggcccaggtgcccaaacctatccgaatgttctgctctgtcatttttttcccaagtaatgacctacgcaaaattcaatatgacccagcgaactgcgcgagcatattatagtacggcgtctaaaaattattaaaatgtttgagagcctcgtgacgcgcctagctgtttaacactgagggagcccgtggctgtgtccgccgccgcggtccggttttccggacactagtggacaggagagagctcagctgttgcccggcgcgtccgcgggcggctcggcggccggcggggctggggagcctcccggtgagtaccctcgcccgcgccctctcctccgcgccgccgccgccggtgcgcaggccggctggggactcgcctccgctcggggggcacgctagcaacctgtggctgccaggagaaggcgg

SEQ ID NO: 23487 - DNA, 373 bp, Homo sapiens
  source 1..373: mol_type = other DNA
aaggacagttaaagctctgaaagttatgtcgccgcaaacctgctgggttgtgtggaccaaaatcttggccccaagaggtttctaggccctggagcttccaaagcttttgcccgttcagggaaggggcctcttgctcaggcctgctctctggggcccaggtgcccaaacctatccgaatgttctgctctgtcatttttttcccaagtaatgacctacgcaaaattcaatatgacccagcgaactgcgcgagcatattatagtacggcgtctaaaaattattaaaatgtttgagagcctcgtgacgcgcctagctgtttaacactgagggagcccgtggctgtgtccgccgccgcggtccggttttccggacact

SEQ ID NO: 23488 - DNA, 485 bp, Homo sapiens
  source 1..485: mol_type = other DNA
ggtgcagggaagtcactggcttggtcttgggccagggacagaccttcatgcctgggggactccaaggcccagaaaccccatgtggggctggggcagaggaaaggctgagctagacttcatcctggtcttccactagctggccaaggaaggtaatttgggcctaagtcctcagcaggagggggagtggtagaggcctgcccagccccagctggatttcaaacctcttgattaggagttagggtcctttcagaaagacccctggttccctttcagcctggcccagggctagggcccagtcgagtcaagtctggatggcccaacttcttactggacttggagccgagggtcgtggaggctctacttggccctccttagcaaactatcccaaaagtcgctatgacatttagatgtcaaatggataggggttttatctcgaagttagaaagtcacgtgaggtccataaagacaccgcgcagtatatttca

SEQ ID NO: 23489 - DNA, 464 bp, Homo sapiens
  source 1..464: mol_type = other DNA
ggtgcagggaagtcactggcttggtcttgggccagggacagaccttcatgcctgggggactccaaggcccagaaaccccatgtggggctggggcagaggaaaggctgagctagacttcatcctggtcttccactagctggccaaggaaggtaatttgggcctaagtcctcagcaggagggggagtggtagaggcctgcccagccccagctggatttcaaacctcttgattaggagttagggtcctttcagaaagacccctggttccctttcagcctggcccagggctagggcccagtcgagtcaagtctggatggcccaacttcttactggacttggagccgagggtcgtggaggctctacttggccctccttagcaaactatcccaaaagtcgctatgacatttagatgtcaaatggataggggttttatctcgaagttagaaagtcacgtgaggtccataaa

SEQ ID NO: 23490 - DNA, 478 bp, Homo sapiens
  source 1..478: mol_type = other DNA
agctgggtgccgggacgcctgggtcctgctcccccgccccctgctccagatatgaccgggccggacgggaaaagggcccggaccgcgtatacccgctaccagaccctggagctggaaaaggagttccacttcggcgacggcgcatcgagatcgcccacgcactctgcctgtccgagcgccagatcaagatctggttccagaaccggcgcatgaagtggctggctacagctggcagcgccttccagccctgagcccgcccagaggagcccagcggcccaagagcccgtgcccgctctgccgccgcccgctggggaccggttccctatcttgttattattgttaataataattattattattattttccttcgtggttgcagtctttcccccaggaaaaaaaaaaaaagaaattcgcatgtttaattaacttatttataaaaagatgatcgctgccctaggcccaagtctcctaggggct

SEQ ID NO: 23491 - DNA, 418 bp, Homo sapiens
  source 1..418: mol_type = other DNA
ctaaatatagattcattttacatagcttcgtagacagagccaaaaagggtctctctgttaagagctgaaccagcccgctctcctccctcccggggcgagcggccgcctgagcccagccaagggtgaagctgggtgccgggacgcctgggtcctgctcccccgccccctgctccagatatgaccgggccggacgggaaaagggcccggaccgcgtatacccgctaccagaccctggagctggaaaaggagttccacttcggcgacggcgcatcgagatcgcccacgcactctgcctgtccgagcgccagatcaagatctggttccagaaccggcgcatgaagtggctggctacagctggcagcgccttccagccctgagcccgcccagaggagcccagcggcccaagagcccgtgcccg

SEQ ID NO: 23492 - DNA, 383 bp, Homo sapiens
  source 1..383: mol_type = other DNA
gcagtggcagctctctgagcggctcttacagggatcccgtcggcctcctccagccactttggggcggtgggcgagagctcgcgcgccttccccgcgcccgcccaggagccccgcttcaggcaagcggcttcgagcggaggccagcgcgtcctcggagcctgaggaagcggcaagccagctaagcagccccagcctagctcgggcgcagccagagcccatggccacctccacagccgcgcccgaggggcagattcccctggatgaggaagcttcactaaatatagattcattttacatagcttcgtagacagagccaaaaagggtctctctgttaagagctgaaccagcccgctctcctccctcccggggcgagcggccgcctg

SEQ ID NO: 23493 - DNA, 428 bp, Homo sapiens
  source 1..428: mol_type = other DNA
caggatgcaggccggatggggaaaacccgttgcaataattgtttttcactccaattcggagacttgcaaagcccaagaaagggaaaagcaactctatctttgatcttctcatccaaagttaaaataataacaaggctcaaccctgtggctgagccttggctttctctcccggcgactgcagggagcctgcagggagccagcagggaggcagccgcccgccgccatggcggtctcacgcccgcgctcccgtcggtcgccgggaggtggcgcgctctgctcagaggccaaagctcttgaggtcatcagcgagaatttacgaagtacagtgcatcgctataattcattaatacatcataaatcgtggcagtggcagctctctgagcggctcttacagggatcccgtcggcctcctccagccactttggggc

SEQ ID NO: 23494 - DNA, 489 bp, Homo sapiens
  source 1..489: mol_type = other DNA
aagcagcagacgcggtggccgctgcagtcttttcggcaactaggccgcttagccccccccaccaccaaggaggtccggaaggggatttcgaacttccaagtggcccaggagaagtgaagcctcccgcccagccctgccggctcggcctgggcgctgtggaccgttccaccaggatgcaggccggactactggggaaaacccgttgcaataattgtttttcactccaattcggagacttgcaaagcccaagaaagggaaaagcaactctatctttgatcttctcatccaaagttaaaataataacaaggctcaaccctgtggctgagccttggctttctctcccggcgactgcagggagcctgcagggagccagcagggaggcagccgcccgccgccatggcggtctcacgcccgcgctcccgtcggtcgccgggaggtggcgcgctctgctcagaggccaaagctcttgaggtcatcagcgagaattta

SEQ ID NO: 23495 - DNA, 502 bp, Homo sapiens
  source 1..502: mol_type = other DNA
ggccgacaactttcccttgctccttggagaccccagggcaggaggccaggtgatggggttcttatttttaaagaaaatagtcccctcctaataggagaccagctgcggcggtctctggccgcccagcgtgctcagcaaagcatgcgggtccttggaaccccttttccgggaaggcggctgccaccaggcaaattccctaagcagcagacgcggtggccgctgcagtcttttcggcaactaggccgcttagccccccccaccaccaaggaggtccggaaggggatttcgaacttccaagtggcccaggagaagtgaagcctcccgcccagccctgccggctcggcctgggcgctgtggaccgttccaccaggatgcaggccggactactggggaaaacccgttgcaataattgtttttcactccaattcggagacttgcaaagcccaagaaagggaaaagcaactctatctttgatcttctcatccaaagttaaaataataac

SEQ ID NO: 23496 - DNA, 268 bp, Homo sapiens
  source 1..268: mol_type = other DNA
gttggccttaagtcccaactgatgtccattaggttaatgtgtacgtcattacccctccccccaggctcaggtgggagtagtctagaccggtactggggagggggtcctgggcccggtgaccgcaggcctcagctttgggcccagcggccggcgaggccgccagaccctgacgcggcggcggcgcatcgagatcgcgcacgccctgtgcctgacggagaggcagatcaagatatggttcactgctcagcgcgtctcagctcagtgccga

SEQ ID NO: 23497 - DNA, 546 bp, Homo sapiens
  source 1..546: mol_type = other DNA
ggcggagcagcagcggccgcgcgcgcctcccctccgtcactctggccagcgggcaggagtccttcctggattaccccgcgccctacgggccagggccgggccaggacaagggctttgccacttcctcctattacccgccggcgggcggtggctacggccgagcggcgccctgcgactacgggccggcgccggccttctaccgcgagaaagagtcggcctgcgcactctccggcgccgacgagcagcccccgttccaccccgagccgcggaagtcggactgcgcgcaggacaagacagagcagaagtgctccactccggtctacccgtggatgcagcggtcccgtcgccgtcgccccggctcccctgggcgcccaccccgggacacagaagtgagcgccccctgccccaatctcccacagggtgctggggggcgccggccgggggtctctcgctgtggggagcaagtgtgctctcctggggcgcctggccagagccggggttccaggacagggaagggagcaggagcctgcagtcactctggtaggg

SEQ ID NO: 23498 - DNA, 305 bp, Homo sapiens
  source 1..305: mol_type = other DNA
gggatacccctcactccttcactccatatcaccaagtgaggagagggctagtccctttcccttcccctgccaagggtgagcagctgcattgggcagccaccctccgccttccaagaagctccagaaggggaagcttgggctcagtccctcctgccagggatctggcctgccccctcagaccagagcggagaaaccttctttagttctctctcaaggcgattcggagacatttacccaaccctccccggagagaaggtgaaaacacaattaactttttccactgagcctgtttcacagatcctacg

SEQ ID NO: 23499 - DNA, 342 bp, Homo sapiens
  source 1..342: mol_type = other DNA
atggagggtaaatggacaatcattttctatgcaaatgtcagaaaaattctctcccaagtcagagaaggggaaccttcctccccacccattcctttaaatccggagggggaaactcctcccccgttccaagacggggctgaaccccacctctgggcgctctaagtcgcctttgcttcagtggcacccaaagaagccagtggttctggcctccgcgggcgcggatatcgctgggttcccggcagcactggcatctccgccgaggccggcgaaaagacaatttacagagaaatgtttactatctcccttcggagacatttttgagagggagactcccccctcacc

SEQ ID NO: 23500 - DNA, 386 bp, Homo sapiens
  source 1..386: mol_type = other DNA
gagtggggaggttcggaaaagaacccccttcccagcccttctcagattggggtttccccaatgaagaaatgcaataaattccttgttgttttatgaaaatttacaactttgtgatagaagtgcgattggccggcgccggtcatgtggccgggcgatcgtgaacacctaggtcggagcactgtcgtccttcagggctcttcagtatcagctcgagaaccaaaaataattttgattcctaagttaatttgctcactgatctgggattttagtcaccatggagggtaaatggacaatcattttctatgcaaatgtcagaaaaattctctcccaagtcagagaaggggaaccttcctccccacccattcctttaaatccggagggggaaa

SEQ ID NO: 23501 - DNA, 466 bp, Homo sapiens
  source 1..466: mol_type = other DNA
gcggctagacccgctgaattgatttttagcatttattcgattataaactctggattgtttaaatttaaacagactttggatattgaatttgaatttgtatgtaaaatgcttttaaacctgggcgggagaagccaggatccggctttaccctcccccagtttctgggttccggaggcgagaatcaggttgtcagactatctgctcttttcctcctggggcaaaaaaagccctaggaggcccccacgcctgcaatgctgcaagcctcacaggtgggggtcctgctacactgaagctttcattttgcgagtggggaggttcggaaaagaacccccttcccagcccttctcagattggggtttccccaatgaagaaatgcaataaattccttgttgttttatgaaaatttacaactttgtgatagaagtgcgattggccggcgccggtcatgtggccgggcgatcgtgaa

SEQ ID NO: 23502 - DNA, 353 bp, Homo sapiens
  source 1..353: mol_type = other DNA
ggagtgcaggcctgctgagcatagcaggaggagaagggagaccgctcttccctgcctctccctgctccactgaggcatccgcctccgggaaccgggagagcagcgcgcccgggccaacctcggcagcgtccaaggcccgtgggctggatcctgtgccctaggagcactggggcaccaagagagacagagtcgtgagccaggctcgcctcattcctcgtggtttcgcctgcaagcggcctccagcccgcgggagtcggcagcggcccttgagcccccagccccttattgatcatattttataaatcccgtggggagacggcccggccattggcggaggggacgtcacgtgggcg

SEQ ID NO: 23503 - DNA, 351 bp, Homo sapiens
  source 1..351: mol_type = other DNA
gaacccgtgcgccgtggcgtgccacggggaccccggcatgcgcaggatccagacctggtgcagtacgcagactgcaagcttgccgccgccagcggcctgggcgaggaggccgagggctccgagcagagcccgtcgcccacacagctcttcccctggatgcgcccgcaaggtgagctcgcctcggggccgacaagggcaggagggggccggaagggcccaaggcctggcaggccggggcgcatttcctccagcttctggaagacttgcatagtttaattaccctgaagaaacttttcttcgggggagggggctccccgcgccccccccgcccccgcacggggtagaaggtcc

SEQ ID NO: 23504 - DNA, 588 bp, Homo sapiens
  source 1..588: mol_type = other DNA
tccctccctccccgacccgcctggggagagggctctacagcctgcgtccctcccaaggcagcagaactgccccccttcctgcagcgggagggggggaccgggcggccggtagctggggctgaggttacgtggccgccggagccctgggagttcggaaaaactttgaccaccactgggggggctgggggggtcgcgtccgaaagccctcacaccggtccgggtgccacctctccctgcttgggcgccgccgcgcgagcgcttcagtccacttaaggacgcgcctccagccaagtttccttctggccagtacgcgagctcgcggcagccgggccacgcggagcacctggagttcccctcgtgcagcttccagcccaaagcgccggtgttcggcgcctcctgggcgccgctgagcccgcacgcgtccgggagcctgccgtccgtctacctccagccccagggcgtcccgccggccgagagcaggtacctccgcacctggctggagccggcgccgcgcggcgaagcggccccggggcagggccaggcggcggtgaaggcggagccgctgctgggcgcgcctggggagctgct

SEQ ID NO: 23505 - DNA, 295 bp, Homo sapiens
  source 1..295: mol_type = other DNA
ctccctcagctactgaggggcccagggaagctcgtgttgtttaataaacatcttttgttgtggggggacaggagcacctcctcttccagtccctccctccccgacccgcctggggagagggctctacagcctgcgtccctcccaaggcagcagaactgccccccttcctgcagcgggagggggggaccgggcggccggtagctggggctgaggttacgtggccgccggagccctgggagttcggaaaaactttgaccaccactgggggggctgggggggtcgcgtccgaaagccc

SEQ ID NO: 23506 - DNA, 384 bp, Homo sapiens
  source 1..384: mol_type = other DNA
cagagctccaacttccagccttagtcacaaatatttgatttcaaaagaaatgcaggggccacctcagcaggaagcttcaggtccttgaagagggctcagtaggtctcattctgaaaggcaaacactgagagctcttgcaatctcagcctaaagccctcagggtcctgtcgaaggccccctatgggaccagacccagtggccaaaggcttcccactggccttgggctgggctgggggtacacataggtcctgagtgccacctcctagggcaagactctgaagcataagctaacttttgttcccaaaccttccccctgctgcttgaggcagaggagcccgaccggatggggcttcggcgccaggctgatctgctagagcagagggg

SEQ ID NO: 23507 - DNA, 464 bp, Homo sapiens
  source 1..464: mol_type = other DNA
gatcagcttggccaagcctgtagttccagctactcgggaggctgaggcaggagaatcgctgagccgagatcgcgccactgcactccagcctgggtgacacgagcctgggctttcgcaaggaagcgccagggagcccagttctgctctagcgagacaagcccggcgggccgagccgatcatagggtctgcgcgcttccagtctctgccgggcgcgggctgggtcagcgccgactcctccgagagaagagcgcgcctggcggccggttcggcggaggccaagtcccgggggctggggctgcttctctccacgcggacaaagtgtgcgggcaaagaaaggggccgaggcgggtgcttctgcaaaccgtttgaagttcatcaacacggtgaagtttcccgggagggggagcgggcggccaggtggactccctcgctacctcgtggccactcggaccctcgcttctggg

SEQ ID NO: 23508 - DNA, 319 bp, Homo sapiens
  source 1..319: mol_type = other DNA
aggttaaacctctatttgggtctcagaaataaagatggaaagtgaaactttcaagctccttctctaaccttttccctctgggttcatagaatagggcttcagcctgcaggagccgctctgggcggaggagggtccggcgctctctttctccggatctcccgcccagggtgtgagcgccccctccctgctcctccgcgcctctggcctccccgcggcgcgccaggcccatctcctcaccagccgctctgggatccgacggcgccgtgggtgggggcaggtgagacggccgagccccgcccgggcggaggcaggaagcgct

SEQ ID NO: 23509 - DNA, 359 bp, Homo sapiens
  source 1..359: mol_type = other DNA
aaagactaactttagggaaatcgttttctaaattatgacaacttctttcattgcatattatgcaatctaaaaatagcacttagaagactgcaataacttgaggaattgcttaggacacagaaaatgtacagtatgttttcaaaccaaattaggttgtgtataaagtaactattaacagtggttaaaaattataaaacatacacgttgaaacaatttttttaatttaaaaggggctgtttataaaaaagttttaaaagtagctctgtgttttaagacacatcattttgcatcaggccctgtaagtgatctcgtttgctctgaatcgaattccaaaaccaggtccgtgaactcctcttttc

SEQ ID NO: 23510 - DNA, 434 bp, Homo sapiens
  source 1..434: mol_type = other DNA
cattaaagttatattgaaggcaggggagaccctgtgccccccggaggggagaaagctcgggagcggccccgggcctctagcccaacccgcccctccccccaggcactggcctgggcctgagcctttcttcctctctccctaccagagagtgagggaaagaattccaccattaccttctctcctccccgcacagggggcagatcgcccctagaataatgctggcgcccagcctggggggagggtcagggactttgccattgaacttgaagttccaggctggtggtctcgcccccgcccccattttcctaaaagttttatgggaagagggaggtctctgaggctgctgggaggagacactccagctttcgcccctacttgcagctatgaggtggggagccaccagccccgccccagactctacagggagaggggca

SEQ ID NO: 23511 - DNA, 519 bp, Homo sapiens
  source 1..519: mol_type = other DNA
aggctcccaaattcctgggagaccctcccaccgatcagtttaccttattagagagaatgggcgcacaacatcgctgttctctccagcttgcctgaccttgcaagcaagcatcggccttaggctaggagaggaaggacgggagcacagcactgggtgcccctctccctgtagagtctggggcggggctggtggctccccacctcatagctgcaagtaggggcgaaagctggagtgtctcctcccagcagcctcagagacctccctcttcccataaaacttttaggaaaatgggggcgggggcgagaccaccagcctggaacttcaagttcaatggcaaagtccctgaccctccccccaggctgggcgccagcattattctaggggcgatctgccccctgtgcggggaggagagaaggtaatggtggaattctttccctcactctctggtagggagagaggaagaaaggctcaggcccaggccagtgcctggggggaggggcgggttgggctagaggcccg

SEQ ID NO: 23512 - DNA, 395 bp, Homo sapiens
  source 1..395: mol_type = other DNA
cgtatgtctttacttaaagggaaatccaggctccatttccccttcaggtccggaagtggagtgtcctccctgggtaaggggcgtccagggcacctccctggggcccggagcagctcattccgaactggggtgctagtacccaggcgggttctcctctgaggccgggagcggcctcccagccccacccccgtttatagagagagctttttattctctcgttaagaggaggagaaggaggtggggcccggctcctcgtcccctcttcctcaaagcagcgaaaggacacctccttccttttctctcttgttgtttttaagtggaatgagagagctggggtaaagtattttcgcagttccgcagccaatcagcgcgcgtgcccgggcccctgcgtctct

SEQ ID NO: 23513 - DNA, 406 bp, Homo sapiens
  source 1..406: mol_type = other DNA
tcccgatagctgggaccacaggtacgcggtgttgaacttctgagctcaagcaagacctggttgctctgaggtctcactgactcttcagtcggtcgccatgacccccacactctggaggtgaggtcagggttcaatacgcctgagcggtcaagccccgcgcagctggacctctggagccagacgttctggccgcgcccgcgcacggcgcccgacggcaccggcgcggatgggctgggtagggctgcgggagcgagcggcggtccagcccctggcgcccgggtgcgcggtgcgcgcgtcctccgcgtctcccgggacaaccgtgggcgcgcccctcccctagcgcctgggggcagctactgcaggggccaatccaggcccctgagggccgggcggacccaaagttagg

SEQ ID NO: 23514 - DNA, 368 bp, Homo sapiens
  source 1..368: mol_type = other DNA
cgccaggctggagtgcagtggtgcgatcttggctcactgcatgagactgcactccgccaggatggtcatgatccagcaacactatggcaaaggcatctccatcttacagatgaggaaactgagtctcagctgagttgccccaggtcccgcagctgtgactgctagactgggtggagaagcgaggtctgttagaccctggtgggaggcagtctcccccttttccagaagctgagcgtggcacacttgccaactaggcttggacaagttactctgagcctgcacttcttggtctggaggatgaacggagcacctcacagggtctctgtgaggttcaaatgacttgtgatggcaacacagacagtgtgcgt

SEQ ID NO: 23515 - DNA, 350 bp, Homo sapiens
  source 1..350: mol_type = other DNA
agagcagcagatgggccactggttccactttgggccttctgttcactccggggtgactgtaagcaccacgtccagggtcggcttgaggctaagctacacccttgcctctggtgttctgcctgtgcacatcagcaggtgaaggggactcaggcccaaatgaacaatgtttatttatttatttgagacactcccgatagctgggaccacaggtacgcggtgttgaacttctgagctcaagcaagacctggttgctctgaggtctcactgactcttcagtcggtcgccatgacccccacactctggaggtgaggtcagggttcaatacgcctgagcggtcaagccccgcgcag

SEQ ID NO: 23516 - DNA, 312 bp, Homo sapiens
  source 1..312: mol_type = other DNA
cacccaaaatgttgtaatcccagctactctgagccgagatcgccccgctgcacaccagcctgggcaacagagtgagaagactcttagatgacctcttaatggcccttcaaatgtataaagctttccagctggacctcttgagcccaggagttcaagatccgctactcaggaggctgaagtgggaggatcacctgagcccggggcttcttccaggggatgaagtcgctcctggggcccggtcacctgaaccaagtcccagcaagcgccgcgcgggggcggggcttgcaggcgggacgggctctcccttgggtg

SEQ ID NO: 23517 - DNA, 258 bp, Homo sapiens
  source 1..258: mol_type = other DNA
gtgttgtttttacaaaataaacaatttttttgtttgttttttccccaatcctgctcagttgcccaggctggagtgcagtggcgcgatctcggctccctgcaacctcgtcaagctcaggtgctgggactccatggaaagcggtctttccacaaacctcctccgcgggatcgccccgtggcccaagcgcccgaatgaaggctcggggccaaagtcatgtgtctgactgcgtcacagcctctatccgcatggaggcgggaa

SEQ ID NO: 23518 - DNA, 341 bp, Homo sapiens
  source 1..341: mol_type = other DNA
ggctggagtgcagtggcgtgatctcaactcactgcaaaagctgtcactttaaacattttaggaaagacccaaagaatcctcagggtttacactcacaggattcctgtatattccaagatttgtgggaagaaaaagtactaagcttggagtcaggaggcctgatgtttcttcatttagtaggcccttcataaatatatgttgaataaactctaaaagaggtaggcaagggcaatggtaccctgccctaggaggatgctggatccccaatcctcacccctcccgtcctggaggaccgtaggtggacgctcttgcagagcgccggagccagcaccgtctgggct

SEQ ID NO: 23519 - DNA, 349 bp, Homo sapiens
  source 1..349: mol_type = other DNA
ttttatctcaaacaatgaataacaatcataaatgatatttatttgtgtgccaggcattgcactatataatttaagtgctgggattacaggcagcggatagtgaaacataaagacattaaaataatttgtcttaagttcctggatgtcttcagagttcaacttaacttcaaggcgcttggtagtcagaaccttggatggccaacacagcgtgtggcacgtagtgggccccaggcgcctacggccttggctgccggggctccatgtcccagcactagccaaggagggcctcagccgctggccactagctactcgcggcaggaatgcggctcgtggcttccggcgcgtgcag

SEQ ID NO: 23520 - DNA, 90 bp, Homo sapiens
  source 1..90: mol_type = other DNA
gcttgaggccctcctacgtgcctgtaattccagctactcgggaggctgaggcatgaggtgcccctgcactccagcctgggcaatacagcc

SEQ ID NO: 23521 - DNA, 303 bp, Homo sapiens
  source 1..303: mol_type = other DNA
tccgtcgcccaggctggcaggcagtggcgccatctcggctcactgcaccgagtagctggggatggtctcgatctcgtgacctcgtgatccacccgcagtgaactcgatcttggctcactgtaacttctgcctcccaggttcaagtgattctccaggctggtctcgaacccctgacctcaggtgatccgcccgtgtcgtcctcccaagcgctgggattacagacgtgattcatcgcgcctggcctacaagtatcagggtaccctacccacaagctggagatagccatgttaatcaccaattagc

SEQ ID NO: 23522 - DNA, 349 bp, Homo sapiens
  source 1..349: mol_type = other DNA
tttgggggaggcagacttgagcaggagctctaggcttgggggccctccccacagggtccaggacactctcttgtctgtgcactgcagggatcacttgaagtcaggagtgagctgagatcgtgtcactgcactccagcttaggagacagagtgagactccgtctctaaattaataaacaaaatgaagtcatggctgctagaggccccagactcagggttcccagggaatgttgtccacttttcttggatactgttgcctccaggcaggaggcagatttgcttctgagctcattaactgtgttgctcagcagaaaacaagagaggtcaaatctgaatcgacgtctaatctc

SEQ ID NO: 23523 - DNA, 396 bp, Homo sapiens
  source 1..396: mol_type = other DNA
gcttccccgtgcgcggagcggaaattaccccctccccccgcgggtctgacctggggacgtgggcggggcttcccgcttagccccccgccctccgtgatcggtccgagacccgaacctagtgccagcagtgtcccgggtggtgcaggctctggaaactccacctgtctgtccccgactctgggagggaaaaggggaccccgggtgcgaacgtcccgcgctcgcagggtcccccggtcctgcatccccggaggcgggggagttaaggcggagaccccccccaggaaaaggttcctttcccgcctgtcagtcgctagcagttaaccggggaggggtgagcaaccccgccccccaaccatcctcccccagtttgggctgggggggcctgtagagcttcag

SEQ ID NO: 23524 - DNA, 362 bp, Homo sapiens
  source 1..362: mol_type = other DNA
gaccccgggtgcgaacgtcccgcgctcgcagggtcccccggtcctgcatccccggaggcgggggagttaaggcggagaccccccccaggaaaaggttcctttcccgcctgtcagtcgctagcagttaaccggggaggggtgagcaaccccgccccccaaccatcctcccccagtttgggctgggggggcctgtagagcttcagggacgctgccgcaccgccccagtttaccccgggggtgagttgagttccccaccctcaggcgggagaggccggagggccgaggggccctgtggcgtcgggaggcggcgccagggcggccgcggagaaacgtgacccagccctctcggaggggtttcggac

SEQ ID NO: 23525 - DNA, 515 bp, Homo sapiens
  source 1..515: mol_type = other DNA
gtcccgcgctcgcagggtcccccggtcctgcatccccggaggcgggggagttaaggcggagaccccccccaggaaaaggttcctttcccgcctgtcagtcgctagcagttaaccggggaggggtgagcaaccccgccccccaaccatcctcccccagtttgggctgggggggcctgtagagcttcagggacgctgccgcaccgccccagtttaccccgggggtgagttgagttccccaccctcaggcgggagaggccggagggccgaggggccctgtggcgtcgggaggcggcgccagggcggccgcggagaaacgtgacccagccctctcggaggggtttcggaccgaagggaagaagctgcgccgtgtcgtccgtctccctgcgcgccgcgggcagacctctgcgcgccctcaggccgccttccccgccctgggctcgggacaacttctggggtggagtttgcggctcctgccgccggcctctccgcctcttggcctaggaggctcgccgccc

SEQ ID NO: 23526 - DNA, 276 bp, Homo sapiens
  source 1..276: mol_type = other DNA
atgctctctacaaattattattattattttttaattagtacactattgcactccaggcgggtgacagtttcaaaaaataaattcttgtatttgtggcagctgggtcattagaatacaatataatctcctgcaaatctaatttcatctgaagttcaacagcccagcatgagctgcggagagaagggcgggggccgtcccaagcgtcctgcacctgccctactcgccgagaatttgcccgggtcggtgccagggcggggcagtcggcggcctggctgc

SEQ ID NO: 23527 - DNA, 260 bp, Homo sapiens
  source 1..260: mol_type = other DNA
caggatcctgtttttcaaattcttagagctcccagctgagagtaggatggacggcgggcctcctctctgcccctccaggagaataagaggatcaatgtctgttaaatggcataaaccaggatgtgggttctgtgctcaggaacccacattcagggctctaggacttgcctcaggaggaaggacagcctcagagcgggcttagaactttgagcctatgatcagcttaggcatccatctgctttatctgaagattttcagct

SEQ ID NO: 23528 - DNA, 192 bp, Homo sapiens
  source 1..192: mol_type = other DNA
agagcactgagcctgcctaggagcaggatcctgtttttcaaattcttagagctcccagctgagagtaggatggacggcgggcctcctctctgcccctccaggagaataagaggatcaatgtctgttaaatggcataaaccaggatgtgggttctgtgctcaggaacccacattcagggctctaggacttgcc

SEQ ID NO: 23529 - DNA, 190 bp, Homo sapiens
  source 1..190: mol_type = other DNA
tccttgggaaagagcactgagcctgcctaggagcaggatcctgtttttcaaattcttagagctcccagctgagagtaggatggacggcgggcctcctctctgcccctccaggagaataagaggatcaatgtctgttaaatggcataaaccaggatgtgggttctgtgctcaggaacccacattcagggct

SEQ ID NO: 23530 - DNA, 217 bp, Homo sapiens
  source 1..217: mol_type = other DNA
gctctgaggctgtccttcctcctgaggcaagtcctagagccctgaatgtgggttcctgagcacagaacccacatcctggtttatgccatttaacagacattgatcctcttattctcctggaggggcagagaggaggcccgccgtccatcctactctcagctgggagctctaagaatttgaaaaacaggatcctgctcctaggcaggctcagtgctct

SEQ ID NO: 23531 - DNA, 368 bp, Homo sapiens
  source 1..368: mol_type = other DNA
gaagtgatttccatcatctgaatcggctagaagcctgctcccagcagttataaactcagggaaagagcccctttccttcttctgaactctggattgacccgtgggaactcagaaggatgaacctgaggtgacccctgtctgtcccaggcatctctgaggctctgagagacagaagggcactgtcaggatgggtcccagggccccacttggggcagggctcagggtcccccctccgggggctggggtgtcaggcttccgccgacccgcagcagggcactgtggttgcccctcagagcctcccggccagtggggatctcaaactcctgcagctgctgtagctccgccatcacccccagcctctgagggag

SEQ ID NO: 23532 - DNA, 249 bp, Homo sapiens
  source 1..249: mol_type = other DNA
gggcagagaggaggcccgccgtccatcctactctcagctgggagctctaagaatttgaaaaacaggatcctgctcctaggcaggctcagtgctctttcccaaggaggaccagggagcaatcacagctattgggggctgggcccccaaatgggcccctggcttcccccttcctctgggcaggggacagagagacacaggctcggggagcaggactgacttcctcttgtcccggaatgagcatgcctgccc

SEQ ID NO: 23533 - DNA, 295 bp, Homo sapiens
  source 1..295: mol_type = other DNA
cccctttgtgacccaatggagtctgagtaaatactagtcaccacccgctccaccaactttacgggcgggggtgggggtagggagtcattcctcccgccaacccccgcagggtcccgagggccatcccgtgcctcccactgacttctctgtccacagccgctctagtgagggtgcccccacccacgttcctcggaagggcagcgctcaccttagctggcgctcccggagcctccggggcaggagggaggcgtggcctcgggcggcccgcccctttgatgtgcgccggcaccgggga

SEQ ID NO: 23534 - DNA, 304 bp, Homo sapiens
  source 1..304: mol_type = other DNA
ccggagtagctgggattacaggcatttgctaccacacccacctaatttttgtatatttagtagagacaaggttcgccatgttggccaggctggtctaggccaaggcgtgagttcagcatttaaacaggctgggagtgccaggtcaggagttcaagaccagcctggccgtgcctgttgtcccagatactcgggaggctgaggcagaagaatctcttgagtggcacagcggagcagctctgaaaaaattccagaacatctgggagaatatttaatggaaaagatagtcactgactagcagcttcat

SEQ ID NO: 23535 - DNA, 466 bp, Homo sapiens
  source 1..466: mol_type = other DNA
actaatagtaccactgagtatattaatgattaatagctaattagtcataatactgtaatacagctgctgtacctattcctggccacaggacaggcgtcgaaactgttcagtttttagcggtcccattcatacggcgaatgaccactactgggagaacaagactcacggagagcgccgcgcatgcgcagctctcgtctttacctgggctcccggcagtggcgcggggagccggcggtaggtgcgcccgggccggcccgagggctgcgcatgcgcgccgccgctcccagcggccgggatgctgagggggcgggcggaggggatccccgttgggcgggggggccagcgagggaaggggccgcgggcgcgcgcgggcgcgcgcgtcctcgccgccgctcgcctcccctgccgcccgccccgcgctgcccgccccgccggccccgctcgccctcgcgcgctgggaagggag

SEQ ID NO: 23536 - DNA, 310 bp, Homo sapiens
  source 1..310: mol_type = other DNA
cgtgatcatgctactgcgctccagcctgaaagaaaaagaaaatgtttatgtgctattggggtcagccttagtgcaagaacattagttaagtgcttttaataatggaaactaatagtaccactgagtatattaatgattaatagctaattagtcataatactgtaatacagctgctgtacctattcctggccacaggacaggcgtcgaaactgttcagtttttagcggtcccattcatacggcgaatgaccactactgggagaacaagactcacggagagcgccgcgcatgcgcagctctcgtctttacct

SEQ ID NO: 23537 - DNA, 210 bp, Homo sapiens
  source 1..210: mol_type = other DNA
tgcggtgagccgagatcgcgccactgcactccagattgttaacaataggtgaatctgagccaaagtttaacgttttccaaataaaacgtttcttctaggggacctggattccaagcgaagacggcccttcgtttccccagtcttagcctcagagaaaacgcttttctccgcgggcgtagttcatctgctaagagccgcagaaccagggtg

SEQ ID NO: 23538 - DNA, 504 bp, Homo sapiens
  source 1..504: mol_type = other DNA
gtatacatgtgagggcttatgcagacacgactgtatacatgcatgtgtgaatgtgtacatatgcgcgtttgaatgtccggatcacatatgtgcccgtgtgcatgcctggagaggtcacacgtaagtgcacgatcacacatacaagtgagcttgagagtgtgtattcctgtgcactgtgtgcaccacgaatgtcgatggccgaggtaagggcgcctgcgcccctcccctccccctaggcctctgcccagggatctcctgcactgggaaggggacgggccgcagccccgcagtggggacgccctggtccccgggcccacagcatccgggacggacgcgcagtagcgcgggccgggaactgggtaccaagcgcagcggggtgcggggaaccgcacgccctccctttgcctctgcttcccaccccgaggcggcagggcgggcgggcgcggttccgggggtgggcgggctgggcggggcggaggcggggccgcagcactggcttcaccc

SEQ ID NO: 23539 - DNA, 600 bp, Homo sapiens
  source 1..600: mol_type = other DNA
gaggatgggcccccatctttgggaatctcagggaggtttgcagagaccccactgggacaggagccactctcggcctggtgacccctgtggctccaggaaggccttgctcccctcagcccaggggccttcctgtcacagtggctggaccgagaaggtccagggattatctcagcccctccagaatgggttttttaaaaaaaggatctttcttaattccaggactcctgagttgggggcagggcagccgattcttgctgcccgctcccggggaacgggcgccctggaggtggaaacggtagggtccgtatcccctggccaccgccgtcctctcctggctggagagccggcgtcctaggtccccgggctgcgggccggcaggggaggagttaactccggaggtaccggctgggctcactgtacctgccgccgccgccgccgccgccggtgggagggacgaggaagcgggagccgcctgggcgccaggagcgctctagtctggcggggcgcagcgcagcgcggggagcgggcggccggggctccgcgcggctgggggcgtccgccagggggcgcgccgcgacggggcgggtggagcagccggac

SEQ ID NO: 23540 - DNA, 314 bp, Homo sapiens
  source 1..314: mol_type = other DNA
ataactgggaagggaactattagtaagccttacttaactccaaaaccgcatgttcttgggccttaaagtatatgttcctgttgccatggttacagttagaaccaagatgcatatatcttcctgggaaagagctggaaactcacctttttttcctaccccacccttaggtttgggtttcctatgtccatacttagatattacttaggtagtatctagaagtgaaactattgtaggctctgtcacccaggctggagtgcagagccaagctggtctttttctagaaacattttgtctagttgaattcactgaagcct

SEQ ID NO: 23541 - DNA, 732 bp, Homo sapiens
  source 1..732: mol_type = other DNA
agcccaggggccttcctgtcacagtggctggaccgagaaggtccagggattatctcagcccctccagaatgggttttttaaaaaaaggatctttcttaattccaggactcctgagttgggggcagggcagccgattcttgctgcccgctcccggggaacgggcgccctggaggtggaaacggtagggtccgtatcccctggccaccgccgtcctctcctggctggagagccggcgtcctaggtccccgggctgcgggccggcaggggaggagttaactccggaggtaccggctgggctcactgtacctgccgccgccgccgccgccgccggtgggagggacgaggaagcgggagccgcctgggcgccaggagcgctctagtctggcggggcgcagcgcagcgcggggagcgggcggccggggctccgcgcggctgggggcgtccgccagggggcgcgccgcgacggggcgggtggagcagccggacgggcgcgcgcgcaggtccccagcacatctgggcgagagcggcgccgctggagccgaggggggcgccgagcgcagatctggagcagcagagccacggcgcagctggggcccttcgaggcgctcggggcgcacatctgggacctcgagcgggggccgtgccgcgcgcagctggaccaggggaggggggcggcggctgcacagctggaccgaagggggcggggtcggccctgggcgacccgctgagggg

SEQ ID NO: 23542 - DNA, 298 bp, Homo sapiens
  source 1..298: mol_type = other DNA
ctcagcctccggagtagctgggactacaggcgcccgccactgcgccctctcgatctcctgacctcgtgatccacccccaaagtgctgggattacaggcgtgagtcaccgcacctgtttttgtttacaagtgctaaattttaaaagttacctaacaaaaaatattttactgacagggctggcttttaaaaaatgagttaacctcgcacctcgcagcgggctcccgcgccctgcgcgcgaccccccgggccctgaccgcgctggctgcgtcgacgtgctgacgccatgacgccccggctg

SEQ ID NO: 23543 - DNA, 374 bp, Homo sapiens
  source 1..374: mol_type = other DNA
cctgaggtcagtcttgccctggcaattcgtgccagcaagtgaagaccctcattaatgggaaatattcaggagcgcggcaactgacttcagtaagcttccatttccaccccataccttaagcttgcacagcatactttacagtttacaaaacactcttattgctattactaattatccctagtttccagacctggaaaactctggctcagaactctgacgctgggcagcagctagaccgccgcggctaggacaccctgtggtgctctgggtgagggatcagtctcgaggctgccggttcccctggccctcagggatggagccaaggtcccagggcgcagccatgagccggcagttctggtagtgactgctgggcc

SEQ ID NO: 23544 - DNA, 319 bp, Homo sapiens
  source 1..319: mol_type = other DNA
caaagccttattgagtcaggccctttgcctgaggctgtgccaaaagagcaggctgctagaagaggacctgaggtcagtcttgccctggcaattcgtgccagcaagtgaagaccctcattaatgggaaatattcaggagcgcggcaactgacttcagtaagcttccatttccaccccataccttaagcttgcacagcatactttacagtttacaaaacactcttattgctattactaattatccctagtttccagacctggaaaactctggctcagaactctgacgctgggcagcagctagaccgccgcggctaggacac

SEQ ID NO: 23545 - DNA, 309 bp, Homo sapiens
  source 1..309: mol_type = other DNA
gagtacccacaacatagtgagcctaatgggaataaccatctcaatatttcaatgatgctttggaatttccgaagcattttactaccccaagggcagtcataataagtacaattgtaaccagctaccatgttaagtgctttacataaagtgttattgaaatatgacaaaacctgatcatttgaatccagtgcccaatttcacgtgaggaaacttagagctggcaggtctccatcgcgggctgagccagtagatatcgaggagacagtgggctggggacaccctatcttcaaagccttattgagtcaggcc

SEQ ID NO: 23546 - DNA, 267 bp, Homo sapiens
  source 1..267: mol_type = other DNA
tattattatatcattcattctgacttgtaagtcagagagcattgatcttggaagactctgaagggaaattcccaataatataatgcaaatcacatgcaaatgatatgcaaaccttgcagcttgtaagtagcactgagatcctataaggatttaaaactaatgttttttaggttaaattaaatgtaatactttttgctgacgtcacgtgacctgtcctcaggaaaggatgagggggccggtccccgccccgtacagcagataagcagc

SEQ ID NO: 23547 - DNA, 210 bp, Homo sapiens
  source 1..210: mol_type = other DNA
tcaagcatctggatgccagaggtcatttgagactaactcacttgctgttagctaagggcaaggacaatgtctcctctaccagacaggaaactttgtttcttaaaatacaaagtttcttttacaaaacatttgagtttatataataaacggaaacatggttggctccgggttccgtaacgtcaggtgacgcgagacccagccgaaaaagcg

SEQ ID NO: 23548 - DNA, 392 bp, Homo sapiens
  source 1..392: mol_type = other DNA
taaatattgaccatcacgctttatctttggtaacaagtgctattattaatcctgttttacagacaaggattctcgagaagagttaagtaatgtgcctaaagtcacacaactatttgcaggcctctgtgaccacagagcccttgttctagaccgatgagtggtgaggagcctcatttctttaagcaatgatttctcttaaaggaaccagggagaggcctctctgtacaggggagggtagggagaaggcatatggccccctcccttatttctaagatgagaaggtcccttcaggttttccagcctggaagctgcaagctccaggtctcagagtgttaagccctgggatcaagggggcagcagtggaagaggtctgatccctcctcctgagcagc

SEQ ID NO: 23549 - DNA, 477 bp, Homo sapiens
  source 1..477: mol_type = other DNA
tgagagcatgtgtgtgtgtacaaacatgaatatgcctgcccataacataaggcatcttagatgtgtgtggagagcaggaacacaagtatacattttatatgcttggatcttctgtattttctagtaggtacaccagtgatttgacttgtatactcatgaatccatgtaagagacaagtactagacatctttaggtatgtagatgtatacacatcacagcctaatttacaaatgaacctctctttttatagaggctagtgtgaacatcagtgtaggtacctccatgttggttagttgtgtacacgtgtcaataaatgcttgtatacgtggacacgtgtccatcgaggccatggatactaatgtttagcgccagggagactggcctgcagtatttcctgcccctgcggcgccaggtaaggcggggcaccgcacaggctaaagcccagagggcggatcccttcttcagcctcgggggcct

SEQ ID NO: 23550 - DNA, 629 bp, Homo sapiens
  source 1..629: mol_type = other DNA
tagttgtgtacacgtgtcaataaatgcttgtatacgtggacacgtgtccatcgaggccatggatactaatgtttagcgccagggagactggcctgcagtatttcctgcccctgcggcgccaggtaaggcggggcaccgcacaggctaaagcccagagggcggatcccttcttcagcctcgggggcctggcccctgccggaagcggaagccagcacgcagggcggtggggtgcagcggcggcggtctcggcgtgccaggcccagggcgccccgcgggggcgtgcgcgccacacgcgtgcggggcaggctgggcgccgggcggcaccctcccagccccggcgtcgccggcgctcagcagcggcgcattccgacgcgctgactaagcggttggcgctggcggtctgcacttgactccccttcaggtccaccgcggctggaccagaatcgaccccgaaatcgggagactgcaaatgcagattccctgcgtctccgcagcccccgggcctctgcaccccagcacctctcggaggagaccccgaggtagaccggcctggagcgggctgtcccggggggcggggcccggctgcaagtctccgtgaggtcaccgcgggcggtagccaatccgggacg

SEQ ID NO: 23551 - DNA, 278 bp, Homo sapiens
  source 1..278: mol_type = other DNA
aatgaatccctttgctttatctaggctccaagtgagcggtgccaccaccccgttgagccgtagggagcagcgggcctggagggaggccttggggctccatgatcgcgacccgggccggcctcagagactctgcgtccccgctcgaattgcgcagtccacgcagccagagaggcgcgggtgggctctgggctgccagcccagagctgccagcagtggggtcgaggcagcagaagcccgcagcgcccgaggccacgggtgagggggtgaccgcggctggc

SEQ ID NO: 23552 - DNA, 354 bp, Homo sapiens
  source 1..354: mol_type = other DNA
gaaggtcacagagccagcctgtgtccacccaacctcgtggggaccccaggtcccttgacatacatatggagttcttcctaaataaaaagaaaattttttaaattacgtttttgtaattatgtaatacaaggatataatagcaatgactgcattgctattaagataatatattaatatcatatattcaaacattctctttaaaggtgttttccttttcttctgattttaagagaaatcatttgcacagtgcgtgcacacgtgtgcacacacacacagttttgagtaacaacagtgttttgcctggaaggcaagacttgcagtccctcggcgactccactattgagtctataaccg

SEQ ID NO: 23553 - DNA, 254 bp, Homo sapiens
  source 1..254: mol_type = other DNA
catttttctcgttttaaaacagagataacacttcaaagattgttgtgaggatttaacatttgtgaagcatttaacatggtgttttgttcttattattttaagaatagatggagaaaaggaggtcaggagttcggttgcaatgttccggggaaaatgccaagaaagtacatagtaacctcttttttttttttggctggagtgcagtggcgcgatctcggctcactgcaaagaccttcaaacacctgatgggtgct

SEQ ID NO: 23554 - DNA, 361 bp, Homo sapiens
  source 1..361: mol_type = other DNA
gaccttcaaacacctgatgggtgctgacgtccgagcccagtctccaaacactctgttcgagcttggggcttcccggctacgcagtgcgttctgtgaaggacggactcatttctacattgacaaaatgctttttggtaattataattagcgacatttggttgttaccactgctaaatatctgaggagccaatctcagctcggaagaccgccagccacctcttggggactcacagcgctgcggaggggccagccgcgcacggacccggctggccttttcagcagcagcagcagcagccgcaggacccaggcgacgctttctcggagaagcgaggggcggtgctgcccctttaagaggaggcgg

SEQ ID NO: 23555 - DNA, 476 bp, Homo sapiens
  source 1..476: mol_type = other DNA
gaccttcaaacacctgatgggtgctgacgtccgagcccagtctccaaacactctgttcgagcttggggcttcccggctacgcagtgcgttctgtgaaggacggactcatttctacattgacaaaatgctttttggtaattataattagcgacatttggttgttaccactgctaaatatctgaggagccaatctcagctcggaagaccgccagccacctcttggggactcacagcgctgcggaggggccagccgcgcacggacccggctggccttttcagcagcagcagcagcagccgcaggacccaggcgacgctttctcggagaagcgaggggcggtgctgcccctttaagaggaggcggccgagccgggatctttttctctttccccggaaggaaagcgcagcccgggctgggctcgcgggcgtggggaggcggggcgcgcgccgggggacccctccctcctgtcctccttgcg

SEQ ID NO: 23556 - DNA, 461 bp, Homo sapiens
  source 1..461: mol_type = other DNA
ggcgcgtcacattttctccaagagaagctgggccgctgatgaaggacgggctccgggcctcccagagacacttcacctcctgggatcttgctctaaggaagcccggtgcgaagatagctgctgcctccaccgccactagtagtgatggtttttttttcagttggaaaagcaaactccgccttttccttatatacaggacgcaccctggttccgaattttgcaaatattcgcagtctgggtcactgtcatccggactgggaatccccaagacccggaaggggttaacccgggcttcgccccgcggaggaaaggtgggaactcggcgcggcctccccaaaacaacaggccgccccggcaaagcgtgggttaagggggcgggcccgggggaagccacgtgccggggcggatggccattggcgacgtcgaggcgccatgacgagccgattggctgggcgttggaa

SEQ ID NO: 23557 - DNA, 590 bp, Homo sapiens
  source 1..590: mol_type = other DNA
ccctctgtaaccctgtctccaggggagccaagggtgctttgcgcgcgcgcgcgtataaagtgcaagccccctgccagcccagctcccgccgcggccgcctggacccaggccgggccaggggtgcgctctcccttccggcaagaagtgccctctgttagctgggcccatggcgcccaggctcgtgagggcctccccactcgtctgagcccccgactggcccactggccttgagcgcagttagggggcgggggttctgttcaccgctgtcccctccagcctcggcgccccggctgctcggcggacgtttgttggaggcggaagccccgtgggtcccgtggcgggaccgccccggagccgctcccacccgcgcagactccggtgcgccgcgtctcccgcgggcagagaagtagctgcaactccgccgcccgccccggagacccccgcggacccctgccgacgcgacgccgcgcgaatcggccctgccaggcgggggccccgcgtccggccaggcctggcgggcggcaggggcggggagggaggtggcgctcgctcttcgctcttctctctctctctctctctgtcacacacac

SEQ ID NO: 23558 - DNA, 328 bp, Homo sapiens
  source 1..328: mol_type = other DNA
cccgcaggtcccagcccaggggagaggctggcctgagagccactccaggccaaggagagtccagggacctggacacttccatggggcggacctggggccgggtgcagctgagcctggtccccccaggggatgttccctccccatcagggctgttccgtggggatgagacccccaaaaggggcagctcccatccctctttcagggctcccagagaatgtggcaagaacacttggggcctgccaaggccatgggagtctgtcctcagggggaagtgcccctccctgtgcaaggaggaccgggcagctggcctgcagggacccccagggag

SEQ ID NO: 23559 - DNA, 431 bp, Homo sapiens
  source 1..431: mol_type = other DNA
ggttcagcctcggagattctccttcacgcctcccctggccaacgtccgggggcagcggaaggctctccgcgagggggagggctcacaggctccggccccggaaatccgatccctttaggacccagaggtgccagtcccccagcggcggctgcgagaagggcagccgctcggtctccggcagccgccgctcgggcaaagccagaggggaggcgcggcggcggagcggcccgggccggcggagcagccatgggcgttggggtgccgggccccccgagagccgaggcctccggccggactgggggacgcccgggctgccagccccgctgacaccgtctcggacgatgtgagccggcgacaccgcggctgcttcgcgggcagggcgcgcgctcccaccggccccagacgccgctttgctggtgggggcctggctg

SEQ ID NO: 23560 - DNA, 317 bp, Homo sapiens
  source 1..317: mol_type = other DNA
cactattcttgccagttttggtgcactcaaggcctcatccccagcaagtggccaaggtggcccacctccaggcctccgaatgaaccctgactccatgggccagagagggtgcctccgctagattgctgttaaggaagctgccgccagccagctacacctactagttaccaggccctgtgccaggcccaaagatcctagtcttcgcccagcttggcctacttggagacttgagagagtctgccaagctaggcggtgcatgctccaggcggggaggggaggctgacgctgggacccagctgccccgagccacctccctc

SEQ ID NO: 23561 - DNA, 399 bp, Homo sapiens
  source 1..399: mol_type = other DNA
aaaatacttcccaactctggggtggaagagtttgggggatttaggggattgcaagccccaatcgattctgttctggagcacagcagaagaattgcttaatgtctagaaaggaatctgtaagagaggtccccttagctcttgccaggatatcagagggtgactggggcacagccaggaggaccccctagagagcagaggggcacccctacccactggacccctaccacagcacctctggcccaggctgggctggggggctggggaagaggggagatgtggggtggactcccttccctcctcctccccctctcccaaattgggggccgggccaggcagctctgattggctggggcacgggcggccggctccccctctccgaggggcagggttcctccctgc

SEQ ID NO: 23562 - DNA, 331 bp, Homo sapiens
  source 1..331: mol_type = other DNA
ccgtctggctacaggatccggtctcagacagtagactgaaggccaggcatgggggctctcaagaccctcacgctagtcaggataatgggagcagcttggagccccatgcccatcaccccaagagttggaaaggggactgaggtccccatcccatggccaagaagtcctattcttggactctgcctcctccaggaaggcggaccgtaagccaagcattccttggggagtcacaaatttgagcattccccaaaccacacagccagtgtggtggggagcccagtcagtctgaactcctccttcaccaaggactttggaaatgaattccctaccc

SEQ ID NO: 23563 - DNA, 461 bp, Homo sapiens
  source 1..461: mol_type = other DNA
gccccagctgcggaccccggggcagtctaaaccctggggccttgagttcccgttttgtcaatgggagaaaatgcaccaacacctcctgtaggatttaggggaggggacacgaaggtacccacgttgtgctcctggtcttcaaatctcagggcactctgaaatcagccaggctgctctgtccctccctttttggtcaaaacacaatggggtgatatcccccccggcacccctccctggagtctggggcagctaaatttaggttatttatttatttatttatttatttagagatggagctcactgcaacctgttcaagcgattctcctgcctcaggctcctgagtagtgccctctagtggagacggggggtctcaccatgtagcgggaccgcttttttaaaacggtgcagctccgcccccatcccgaggcggggccccataggtggagagaagtgggagaggt

SEQ ID NO: 23564 - DNA, 503 bp, Homo sapiens
  source 1..503: mol_type = other DNA
gagcattgctgctcactgcacagtgctgagcagcatgtgtcgaggtctactggttctccaaggcatcagcatcacctgggaacctgctgaaaagacgcctgtggctctcacacgccctctcccaaggcggcgtctctgggagccctggcgttccctgggcccccgggaccgagagcttacccgcgtggaggttgtgccgcagaccctccactccccagcaccaggcgctcgccgtccaggtggaggggagcacacgtgggagccaggggcaccggcggagacacgagcgcagaaggcacgcgctcaagcccacgcccgcgactgccgggactgaaggtgttgcgagccccggctccacccctagcctgcggtgcgccgtgctttggccccgcaggccccgcccccggccccgccccggcgcgcgcccggcccgcctccctaggcgtggaggagggggggcggctcagccccgcgcccgtgcgcgcgctcgcggccgggttgca

SEQ ID NO: 23565 - DNA, 189 bp, Homo sapiens
  source 1..189: mol_type = other DNA
tagggccccattctgtcacccaggctggagtgcagttgaacatagagctcaggtgatcctcgaactcctgggctcaaggcccacctaggcctcccaaagtgttgggactacaggcgtgagccatctgctgaatcaatagattaattttttcaatgctgaggatgtgtcacgtgaggtcctccgcgggga

SEQ ID NO: 23566 - DNA, 388 bp, Homo sapiens
  source 1..388: mol_type = other DNA
tacatgtctcatagattgattcatagataagactgaagcctggtgattggataggtattagtgccagaggtcccacttggccatcaagctctactgtctggccatcgctggggagggccagacgtgggagccacctcctgggcaggacccagcttccaaaggaagatcacggacacccagcttctgctcctaatcagggggattggggtgatctgatgaggtggcactgccagcaataatgcccgcgggccacgggtgaatccaaccccacccctccggcggcggcgacgtgcagtgcatcaccctgggcaccagggggcgtgcccgcacacgctcgggccgctctggcccagcccatctcagtggtcgcggaaggtgacgtggacac

SEQ ID NO: 23567 - DNA, 432 bp, Homo sapiens
  source 1..432: mol_type = other DNA
agtggaacaggtataaactgctcacccctgggcctcaggaaccctaaggaggggcacacagggaactgtgccacgtacgtgtccggcccccaaccctgtgcagaaggtcaagcctggcctcagctgggactctggcgccagcgggcccgcagggggctcacccgcgacaccctttgcagctggcatgcctcaaggacgcttcgcgcctgctcctttggcccccggctcgcaagtagcggggccagcacgtgacccgagggggcaggggatggatggatctgccaaaaatttttgcgcttctatcggactgcagctggggccttcggatccagaggaaaccaggtcggaggggaaggtggccccgcgcgaagtcgccgccgccgcgccccgccccgccccgccggcggagaccgaatccgccgcaccgctgcg

SEQ ID NO: 23568 - DNA, 535 bp, Homo sapiens
  source 1..535: mol_type = other DNA
acggagcccatgggcacgatgcttgcatcctgggggagcccttggtcccacgcctactgtgcaatggacttgagaatgcgcagggccatccaccagggcctctatggggcatggagaatgtcttcccccaccaggaacagggtctctttgtgggcctgatctgcccatcctcaataaacaaaccttcctttatggggtggtgccctagggggcctttttcccactccttttatatgtaagaaggtgccagctgtggccctggctcctggggcctccaggaagggcagccaggagctcaccttctccaggttggtgtttatctgccaaaggactggaaggggttgtgggacagcttcagctcctccaccacccgtagcttgctcagggcagctgaggggtagctggacagctggttcctgtccacgtggaatttggcgaggttctccacgtcgtccagggccccgggctgcagggagctcaacgcgttttccacaggtagagccagcgcaggtccttggctccctggaaggcgcct

SEQ ID NO: 23569 - DNA, 514 bp, Homo sapiens
  source 1..514: mol_type = other DNA
ggcagccagagccgtccagggctggtccctcgacctgccccccgcccgaatgtggcatctgcccagccgccaccctgagacccctcaggggcgggtcctgaccacttcagcggtggccagcttcggcgcgtcgagtctgaagtgggagaccgacgccggggcggctctcacgctcggcaggcgccgcacaagcgcccctttaaagcgcaggcagctggcccaccgcagggagacgcatccagctgtccggcccccccgcctcgcatccagggcacccggccgagcgtgtgtggatggcgcggcgtggagggggctacagccggggctcagggctcggggctcgggggccacggtcccaccccctcatgcacggtagccggctgggggaacggccccgcccccttccccgtggagggcgggggcgcatctctggggagcgagttaagcccagtggcctcgatgctccaggagctggctcggctgccggctgcggtcagggccaccgtataaagag

SEQ ID NO: 23570 - DNA, 360 bp, Homo sapiens
  source 1..360: mol_type = other DNA
ctgtcctgcttgggttggcctgacccaaaacagtctactctcccggccaagccaattctgccgaggagttcaagacctcccctatttgtaaacactgaggcggacggctctggctcctgccagaatgcaacctggctttatgcacctagatgtccccagcgcccagttctgagccaggcacatcaagctcctggatgggtccgggaactcgcccgggcactgccaaaaggcaagcagcccgcctcgcggcctggcaggaggccgcagtgagcgcccgggcgcccggcaggtggcgccgcagccccgggcccgggccctcttgtcgcgcggtcacggctgcgcactcacagtgatccctgc

SEQ ID NO: 23571 - DNA, 524 bp, Homo sapiens
  source 1..524: mol_type = other DNA
gtctcaaaaaaaaaaaaaaaaaaatttttttttttttttagaatggagctcagccttctaaagcactaggattgtaggcctgaaccactgtgcccagcagagaaacggctgctgggattagaacccaatagggcctgaggcagctcctgctctcatacattcgtttataaacttaaagaatgccccaagtcagggcaaaagttttggctggctgcagcgagcgtggacccgggaggtctccaggcgcgtcacgaaggggtttcagcacgtcctgaaaggcccgatccccccccagaaccgctgtgaggggggcagagggagaggaaggcgggaagcaggggctggcacccccgacgccccacccgccccccgtggcctagcagcagggcggggcgaggcgggtcatgcacccctaccagccagcgctcccgcaactcgcgggggtcctcgcccgggtcccccgccccgccccgcccggctggtgacgtcacggcgctcgtcggcgccgcctgtggcgtcacagg

SEQ ID NO: 23572 - DNA, 535 bp, Homo sapiens
  source 1..535: mol_type = other DNA
tgcagcagagaaacggctgctgggattagaacccaatagggcctgaggcagctcctgctctcatacattcgtttataaacttaaagaatgccccaagtcagggcaaaagttttggctggctgcagcgagcgtggacccgggaggtctccaggcgcgtcacgaaggggtttcagcacgtcctgaaaggcccgatccccccccagaaccgctgtgaggggggcagagggagaggaaggcgggaagcaggggctggcacccccgacgccccacccgccccccgtggcctagcagcagggcggggcgaggcgggtcatgcacccctaccagccagcgctcccgcaactcgcgggggtcctcgcccgggtcccccgccccgccccgcccggctggtgacgtcacggcgctcgtcggcgccgcctgtggcgtcacaggccgggcccgcagggctttctaggggtccgtcgctcttgaagccgccggcggcgggcgcgtgcgcggcccgatgaagatcggtggatgcgcgcccccgcgcggg

SEQ ID NO: 23573 - DNA, 302 bp, Homo sapiens
  source 1..302: mol_type = other DNA
tgacagagcgagactctgtctcaaaaatgtgatttcctcactcagtgccttgcagagtggcaggcggcaggcacttaataaatattggctgaatgtagccaatgaatgtccgtttatttaaggtggacctggccaaggagctgaagctctggcatccccttgagaagggctgtcctccccaggcaggggcagagcccagttttatgttctgcgctccgccgcagggcgacgctcggagaccagccacactgaagtcccggcgaagacccgcccgcggctccgtaggtgcccggcccgcccct

SEQ ID NO: 23574 - DNA, 630 bp, Homo sapiens
  source 1..630: mol_type = other DNA
cttgagaagggctgtcctccccaggcaggggcagagcccagttttatgttctgcgctccgccgcagggcgacgctcggagaccagccacactgaagtcccggcgaagacccgcccgcggctccgtaggtgcccggcccgcccctgtcctcagcggccgggcccacggccccgagcagccatgctgggcgcgcgggcctggttgggccgcgtccttctgctgccccgcgccggtgcaggcctcgccgcgagccgcaggtacgggcgggcgagcgggcccctagggcactccctgcgcctgcctgcgggcccagtggagggtcttccggacaccggtccccagtgccagtctggaccacccctgcatgcctgtgcagtgccagctcctcagggactgttctgacactgcttccaggaagccttccttgcaccccagtgctggatgctgggtcaagggcctttctccaatagtaccctgtgccctgtcatatttaggtctgcctgcagtcccacttccaggctgaactcgtgtcctggagtctggcccaggacctggccccacaggagtcccagcaggtgggcgctgagtgagggagtttggcctgtccagccaccaacagtaggctgccttc

SEQ ID NO: 23575 - DNA, 645 bp, Homo sapiens
  source 1..645: mol_type = other DNA
ttctgcgctccgccgcagggcgacgctcggagaccagccacactgaagtcccggcgaagacccgcccgcggctccgtaggtgcccggcccgcccctgtcctcagcggccgggcccacggccccgagcagccatgctgggcgcgcgggcctggttgggccgcgtccttctgctgccccgcgccggtgcaggcctcgccgcgagccgcaggtacgggcgggcgagcgggcccctagggcactccctgcgcctgcctgcgggcccagtggagggtcttccggacaccggtccccagtgccagtctggaccacccctgcatgcctgtgcagtgccagctcctcagggactgttctgacactgcttccaggaagccttccttgcaccccagtgctggatgctgggtcaagggcctttctccaatagtaccctgtgccctgtcatatttaggtctgcctgcagtcccacttccaggctgaactcgtgtcctggagtctggcccaggacctggccccacaggagtcccagcaggtgggcgctgagtgagggagtttggcctgtccagccaccaacagtaggctgccttccagtggggccacacccaggcctgccagagagatgcctccaagcagctgctccaggaagggccg

SEQ ID NO: 23576 - DNA, 596 bp, Homo sapiens
  source 1..596: mol_type = other DNA
gcgtcccgcagccaagctcaactccagggtgggagattaaccaggtggagacctgggatttcgctctgggaccccctggtgacaaccgcccagagctgagctccgtcctccggctgctgccctcaggggttggacaaaggatgcctggggcctgcggccctacgccaggaccccgcgccgaatacttcttcgggctccctccaagggagtcccaaagaccccaatggccaataggaaagtgggctccagcctcgctcccgcccgcactgccacggcggacggccaatgggcgcgcggctcggggccggcggcgtccggcgattggctggtgtgcgcggggctcctcgccgccgctttcgctcgctcgctccgcgtctcggccggaggaggaggctgtggcgccggcgacagctacggcagcggcagccaccgcggcggctgcggcggcggcatctccgcctccactcccgcccgggactgccccccactgtctccccgcccctcccggacagtgagcccgcggcggggcgggggaaggagccgcccccaccccctccaagcccactcctcccctcccccgccgcctggcgcggagc

SEQ ID NO: 23577 - DNA, 687 bp, Homo sapiens
  source 1..687: mol_type = other DNA
gtcccgcagccaagctcaactccagggtgggagattaaccaggtggagacctgggatttcgctctgggaccccctggtgacaaccgcccagagctgagctccgtcctccggctgctgccctcaggggttggacaaaggatgcctggggcctgcggccctacgccaggaccccgcgccgaatacttcttcgggctccctccaagggagtcccaaagaccccaatggccaataggaaagtgggctccagcctcgctcccgcccgcactgccacggcggacggccaatgggcgcgcggctcggggccggcggcgtccggcgattggctggtgtgcgcggggctcctcgccgccgctttcgctcgctcgctccgcgtctcggccggaggaggaggctgtggcgccggcgacagctacggcagcggcagccaccgcggcggctgcggcggcggcatctccgcctccactcccgcccgggactgccccccactgtctccccgcccctcccggacagtgagcccgcggcggggcgggggaaggagccgcccccaccccctccaagcccactcctcccctcccccgccgcctggcgcggagccgggacgatgctgaccccttagatccggctccagctgcgccgcgggaagagggggcgcccctccccggacccccgccctccgccgctgcctct

SEQ ID NO: 23578 - DNA, 779 bp, Homo sapiens
  source 1..779: mol_type = other DNA
cgctcccgcccgcactgccacggcggacggccaatgggcgcgcggctcggggccggcggcgtccggcgattggctggtgtgcgcggggctcctcgccgccgctttcgctcgctcgctccgcgtctcggccggaggaggaggctgtggcgccggcgacagctacggcagcggcagccaccgcggcggctgcggcggcggcatctccgcctccactcccgcccgggactgccccccactgtctccccgcccctcccggacagtgagcccgcggcggggcgggggaaggagccgcccccaccccctccaagcccactcctcccctcccccgccgcctggcgcggagccgggacgatgctgaccccttagatccggctccagctgcgccgcgggaagagggggcgcccctccccggacccccgccctccgccgctgcctctcggggcggcttcgccgaaggtagcgccgaatccggcaaccggagccgggagccggccggctggcccgggaagccccaggggcgcaggggaagcgggactcgcgccgggcggggtttccctgcgccccggcgccccgcgggcagcatgcccctgcgggcagggggagctgggctgaactggccctcccgggggctcagcttgcgccctagagcccaccagatgtgcccccgccggggcccccgggttgcgtgaggacacctcctctgaggggcgccgcttgcccctctccggatcgcccggggccccggctggccagaggatgggacagccccggagcttcat

SEQ ID NO: 23579 - DNA, 357 bp, Homo sapiens
  source 1..357: mol_type = other DNA
ccagggaaagatttgccagggagaattccttctgagcgggatccccgcatctgaggggataccgggaggacgaggacgaggacactcacgtggggctcctcctggggcttcacccacacatgttgggtgcccactaagtgtgagaaccctgcccgctggacgatgctgcggcccccacccccgcctcacgggtacacacccgcggagcacaccccgtgtgctccccgtgtggcgcctgccagtggtctctggaacctgatggggaagaggtcagcttcctgattcagatgaggaaactgacctccggagaggaacgtgaccttctcaaagattccttttttactaggaaagattgtt

SEQ ID NO: 23580 - DNA, 348 bp, Homo sapiens
  source 1..348: mol_type = other DNA
cctgggctcaacaaaacaatatttcctttttctcccactgggtatagctgtttacatgtacaccacagctcttccctccttatatggccttcatgaagagtaactaattacaatctgtaagcagtaattacagttcataaactgtgagcacaatataaatatttttcctgaaagccaggttagaagaaatcctgtctaaaatgaattgaaataaatattgtctaatctatctctgtaataatgggcgtattatagtaggatcgtcctgctggtaaggctttagtcaatgaatcatggcatataatattgtgcagcccgggcgccggagccccgggtcggcacactgaa

SEQ ID NO: 23581 - DNA, 494 bp, Homo sapiens
  source 1..494: mol_type = other DNA
gaggacgaggacgaggacactcacgtggggctcctcctggggcttcacccacacatgttgggtgcccactaagtgtgagaaccctgcccgctggacgatgctgcggcccccacccccgcctcacgggtacacacccgcggagcacaccccgtgtgctccccgtgtggcgcctgccagtggtctctggaacctgatggggaagaggtcagcttcctgattcagatgaggaaactgacctccggagaggaacgtgaccttctcaaagattccttttttactaggaaagattgtttgtatcccagttcccctccccctggcttggcccaggggccgctcgcaggggctgtcgccgtgccaagggcccccccacctctgtccctcccagggaggcgctgtcgcaacccgcgggacgggggcagggagaccggacccagaggcactggggtagggctcggcagggcgggtccgggcggagcgcggggtgcggagggcgg

SEQ ID NO: 23582 - DNA, 475 bp, Homo sapiens
  source 1..475: mol_type = other DNA
tagctttaagcacagtgcctggcacataccatttgttgaataaatggatctacctatctatatatatgtgtgtgtgtgtgtgtgtgtgtgtgtgtgtgtgtatatatatatatatatatatatatattttttttttttttttttttttatggcgcgatctcggctgccaccacgccaacctatatctttttaaaaaattccacactgggaggaagccgtaatcttccctgcatgaggcaccatgtgcaccacgtggactaaaggagacactttctccattttgaagcggtgtccaggcttcaagacccgcttggggaggcgcgcgggcagaggctacccgtccccgcggcctctagacaggggcggagtccctacccggcctccgcgggccccgcccccggacggcggaagccgagctcgccctctccgcccgggcctgggcgtgtcccacgggcgcacggcatgctgggaaggc

SEQ ID NO: 23583 - DNA, 216 bp, Homo sapiens
  source 1..216: mol_type = other DNA
ccagcatgctgggaagacagcatcggcctggcagccaggtgacccaggtccagtgccaggcctgtgcctggctggccacgtgactagtggtaaacatggccaaatcgggaacctttcaaaccagaccaactaaatcagactttatcggggggctgcgtctgtcaccaagactggggttaaatgactgcctttgaggcagcagcctcactggggact

SEQ ID NO: 23584 - DNA, 318 bp, Homo sapiens
  source 1..318: mol_type = other DNA
catctggcagctggtaccaccaggctgaagagcagccactgtggtcgtcagcgagggcagctggactccggcacaatcctgagacactgtgaccgcgccgtcccagccgccggcggggccagagcatatcttgcgcacaccccccacaaagggccggggccggggtgggagtcggcttacagggcacagcgcggcgcaggcccgccctggaatggcccctcctcgtaacccttcagagtgagcttgcgtgtcctggagccagctccccgcaaagcacatgccatttctggcccttgaaggggttaaaggcctcctgga

SEQ ID NO: 23585 - DNA, 676 bp, Homo sapiens
  source 1..676: mol_type = other DNA
gcctctccggctgttaccgtgagagggagggagttttttaaaatcagactaaaactcttaaacagaataatcaatagttttaatttgtgtcttattttcagatttagaaaaatattttattatattgtatgctcttagtatacttaaggccgaaactatatagaataatttggttcataattatttactaggatgaagttcatttagtactcagtgtctttaattttagcatcatgtactatggaaattaaaatgatcttcctaacgtaaccaaatttttaaatgtcagtgacagagcagatttaaacagtatatatccaaagtaaacttggattcacttctaagttggtgaataacaataaaaattactacctaaaagtggcatctatatatatacaataaatattcttgtgagaacttgttctagagatttttcttcttagaactctattcagaaacaggtttttaaaagcattatttcatttgtaaatctacattttcctgtgtcattttaaactttaataaacgattttctattttatgtctaacacaggatcttagacattttgaaaggtattacatttatcttatttggatatgtttgcttttgttttaaggaacaagatcactcaaggtgaatgaaaatttgtttctctgccacaaactgaacatcttt

SEQ ID NO: 23586 - DNA, 526 bp, Homo sapiens
  source 1..526: mol_type = other DNA
gcttttagaaatgcacgcatgcgtgtgtgtgtagacatggacacagatacatacgcagtgtgtcgccacactctgggcacggcgtgggcatccgagtcgcagccggggtcgcaccgggaggcctgaggctgcggaagcagttaaactgccggcggggcgggagctgtggcggcctcccttccccacccccagcccgctgcagctgaatattcaattaccccgcccctggggtgggctggaggccgacacgagcaggatcctccttggccgcagacccccgcggagagggcactttcggcggttcattggccctcctggagcccggagggtgcggcttccccacccctgcgtccgccgcgcgtccggacaggggcaggcgggacttggccaatggcgtcggggggcagggcaggggcggagccggccggcgggggaccggggtgccgggcggggagcgcggggaatggctgcgccgccggagctgtgtgacgcggagcgggcgcgcgcaccccgacggaggggatga

SEQ ID NO: 23587 - DNA, 591 bp, Homo sapiens
  source 1..591: mol_type = other DNA
ttagtgaatggctttctcaaatgccatctattattgtgttctttatatcaatattattttaatagcatcacatattgtaaaaaaagtgggttttttttttttttttgaagatattagctacttttgtggacaccagcatccttaaatgtaagcatttgcatattactttcccttaaaatttttatattctctacttggaatcgagtagtctgatagataagaaaattgtaccaaaatgttttccttgttataacactatgattttattccaggtattagccttaaatattgtgtattttttctttctttaaaatagatgatccataattatatggaacattttagtagaattaggtaagctttgttatatattttgccttgagaaaaagtaaaataaataatatgtttgtttctgtttttctctgttctttgaacaataattcaaaaagctctccactgtggttggaattttttaccattaaaaagataaattatgagccatccatataagcagcacattgagtatttagattatactaggtttaaaattttgtaatttatgggaatgctgaaatattttatttcttagct

SEQ ID NO: 23588 - DNA, 521 bp, Homo sapiens
  source 1..521: mol_type = other DNA
atgtgggaaagtgccacatgtaacgttccagtttcaccctttattttttaataacttgagatataattcacacgccatatgattcactcacttaacgtgtaaagatatttagagttgtgtattcatcactataatacattttttagaacatttttattatccccacaaaacagttctattctattcgtgaaacgaggtccaaatatctacctcttttttgtgagctttaaaaagccatagaaatcccgctgtggaccgtcttcgcggcgccgggtgttgacgccatggcttcctccgccagcgcccgaagacgcttggccccgcccccggccgcgcctggcctcccgcggcgccccgcccatcgggccgacgcggcgccggccccgccccgcggatgacgtgtggcgcgcgcggccgggccgccccggcagttggtgcagcggcggttggggtgagagcgcctacgccacccctcccctcctccggccccggcccccaccccgccgggcccagccccagcc

SEQ ID NO: 23589 - DNA, 469 bp, Homo sapiens
  source 1..469: mol_type = other DNA
ttccgccccacttcaagacttgaggagaggagggtggctggagcctggaaatgtcccactatgtgggaaagtgccacatgtaacgttccagtttcaccctttattttttaataacttgagatataattcacacgccatatgattcactcacttaacgtgtaaagatatttagagttgtgtattcatcactataatacattttttagaacatttttattatccccacaaaacagttctattctattcgtgaaacgaggtccaaatatctacctcttttttgtgagctttaaaaagccatagaaatcccgctgtggaccgtcttcgcggcgccgggtgttgacgccatggcttcctccgccagcgcccgaagacgcttggccccgcccccggccgcgcctggcctcccgcggcgccccgcccatcgggccgacgcggcgccggccccgccccgcggatgacgtgtggcgcg

SEQ ID NO: 23590 - DNA, 305 bp, Homo sapiens
  source 1..305: mol_type = other DNA
tggccctaggtcctgagaagtgatttattgttttacatttaaatctatgattcattttgagtaaatttcagatgtcatgccttgtgcaaaatctgtattagcatctcacaacataatacaaaatgcgatctattacatattaatttgctagagcatactgttttatccctagggcctagaataatgcgtccaaggtactcaaaattttttgcttgacaggctatcacgcaacgtgtgaaagccaatttgctcctgcagtccggcagcggatctgcgcagaagcgttccgtgcgtgcaagtgctgc

SEQ ID NO: 23591 - DNA, 268 bp, Homo sapiens
  source 1..268: mol_type = other DNA
aatgaagggggttgtaaagatatattctctaaaacccctaatgctatgtggcattaagtcaaactattatttcttactttcacattagtaaaacttttcatcagtgtagtttctcccaagcttgattattgagaaagatcacagtagatgtttaaaagaagcttattaaattcccaggagccaaggtcgcaccactataaatcaaatgggatagaaattatagtccttgcttttggattaaaccagctttatgggataatccgctaga

SEQ ID NO: 23592 - DNA, 253 bp, Homo sapiens
  source 1..253: mol_type = other DNA
tcagggcagtaccactgctgtgcggctgtcagtcagtgctgcaggcgccgagaggaggttgaggccgaggcttaaccagggcgagcacaggagcaggttggagaaggaatcacttcctgtcccgtctcgatctctgcctggcgagggcgcgccccggctgggcgtggacactgttctccggccgcgtcgggccgggcgggtggggcgttcctgcgggttgggcggctgggccctccggggtgtggccaccccg

SEQ ID NO: 23593 - DNA, 562 bp, Homo sapiens
  source 1..562: mol_type = other DNA
ttgaggccgaggcttaaccagggcgagcacaggagcaggttggagaaggaatcacttcctgtcccgtctcgatctctgcctggcgagggcgcgccccggctgggcgtggacactgttctccggccgcgtcgggccgggcgggtggggcgttcctgcgggttgggcggctgggccctccggggtgtggccaccccgcgctccgccctgcgcccctcctccgccgccggctcccgggtgtggtggtcgcaccagctctctgctctcccagcgcagcgccgccgcccggcccctccagcttcccggtaaggcggtgggggcgcatcccctggcgactcctcccgttccccttgcgctgccgcaggtgggcccggtctgtgggcgccccccgatttcccgcaggtcccgcgcggcgtcggagcgggagattcccttgcagcttgcgccccgcgggccttcgggctccgcagagggacgccggccctgcgcggggcggaagcggccgggaagccacgtgtccccgcggccgcgcgtggtgggggaggagggaccggcggcgcccacg

SEQ ID NO: 23594 - DNA, 419 bp, Homo sapiens
  source 1..419: mol_type = other DNA
attaaatttggggcacagatctgaatccctacacttacgggtaagaatctaagtactgaaattcaaccaggctcatcggtgaagagaatgttctcagttattatctgaaatatttaaaagggcattgtgagtagcccaggggagtttaacatgacctctgccaggcagatgacctgacatatgtacttcagttgcaaaatttaattcttttaggcttacaaaacccctaatgtcattgacggtatgaggcataaataaataaataaataaaaattaattgggctgcagtgagcgcagcaaaaaaagaacagtctttctgttaaaatggcattagtttcataaaaaatatttatgtgtgtgtatatgtgtgtatatatatatatatttccacacaccacttaggaacgtgggctagaata

SEQ ID NO: 23595 - DNA, 318 bp, Homo sapiens
  source 1..318: mol_type = other DNA
ttttctcatgaaaaattcaaaggtaaggatgtaagaagttctcaatcctatactagaagcagtttcttctgcacctgtaatcgcctgtaatcccagctactcgggacgctgaggtgggagactgcacagaaagtagatctatttcctgttggctgcataaggattctgcaacattgtttatctctgtctcagctaaactgggaagtccccaagttgagctgataatcatgtcactgatcggtctcataccctacctgtcctgagtggcaggtctgattataaatccattttcacactttcgaggtctgggaggggctg

SEQ ID NO: 23596 - DNA, 435 bp, Homo sapiens
  source 1..435: mol_type = other DNA
gagaaaaactttcttctcgaatttttcttccatggaggtcgttttcctggggtcggagagctgcaggcgtcccccccacctggcacacaaagcggctgccgcgctatgggtaggggttgtccgtgctccccgagcccgcggcgccccctccccgggctgggggcaggtgcctctccccgggactgcggcgactacagggggcccccggctgggcccagaccggtggcgggtgcagcagcccccggatttccctgcaggctccgtactccaaggaccgtaccaaggttgcagctgcgaaattgtgttggaaaaattttccactctggccctcccggaggaactcccacacggggcggggctgggtggcaagaggctgcgcaggctccttccggcccccggggcttcggcggcggcggcccgcgaggggcctgggcg

SEQ ID NO: 23597 - DNA, 641 bp, Homo sapiens
  source 1..641: mol_type = other DNA
tgggtctcccgcgccgaacccgcagcacgaagttctttttaagaagagaaggaggcggctgccagggactggggccgaggcggcggccaaggtggcctgaagctgtgacacccagcctccgcccgggcctcctgcctccgcccccgggtgccgggctgcggagctgacgctgggacgcccggcggcggcgaggacgctcacctggccaagcctcctcctcctcctctctgagttgggaagcgtagggatccgtaggcgagggacccctgcagaagggcgcgcgcgacctggagagtctgtgtgcccccaccgcgccccagtccccggggcccagcccttcccctcggcgccctggacgcactgccggaacccggctgagaggctgcaggctgcgcgcggacctggggagcagggagggtcggcggaggctgccggcggctggcggtttctgctccttccccgccccccggaagcaggagaagaactgccccggagcgcagcagccaccctccgaccatgccccggtgaggggggcggacttcgagggcaacttgccgcggactgcctgggcttagccagcgagctacgcgctcccgggagcccggaattgcacggcgcagcccggcggggggctccagacg

SEQ ID NO: 23598 - DNA, 442 bp, Homo sapiens
  source 1..442: mol_type = other DNA
gccgcccctactttcccctggggccctggagagccgcgcgcctctaaagcccgggtttccaatagtcccggggcgcagttggcagcagccgctgctggcacccggacttggaaaggcggtgttcccccttttcgggaggagggcacagcactcccaggatgagtcctgcctgggtctcccgcgccgaacccgcagcacgaagttctttttaagaagagaaggaggcggctgccagggactggggccgaggcggcggccaaggtggcctgaagctgtgacacccagcctccgcccgggcctcctgcctccgcccccgggtgccgggctgcggagctgacgctgggacgcccggcggcggcgaggacgctcacctggccaagcctcctcctcctcctctctgagttgggaagcgtagggatccgtaggcgagggacccctgcag

SEQ ID NO: 23599 - DNA, 324 bp, Homo sapiens
  source 1..324: mol_type = other DNA
ccacccaagcagggatggtactttttttttttctttctccctctctcctcaaaaaaagaaaaagaaaaaagaaaagaaagaaaaaataataataattcttcatgcagtctactttatttcccaaatggaagtttcatgcttttccctgctgagcctggaagctgcctagagactacgtagctctggctcccgcagccgcccagcccagacagctcagagagctgctgatctgctctgttggagtcccttggcggatcttctaaacatcaaatattaaaagtggataaaaaatccccgcggggtatgtccgcgcttgtgcaaaat

SEQ ID NO: 23600 - DNA, 393 bp, Homo sapiens
  source 1..393: mol_type = other DNA
gaaaaattataaataattgagttacagataattaaatgttaggttttgacctctatattaaaattcacaagaccaaggagctcatctatggctatctgacatcgcctggggactctctggcaggctcctgctggctggagattgttaacatcgccaatcagattctcagattccaacctcccgtttttagaatcagcagggatatttctagttattcagtatattcagtggctaactatttattttgtgggtaccagacaccgacataatcggttacttaattctcataattctgaggtttgtgttatggtctacccagggcagccaaacctgggtctctaattcccaggctggagattctgggctgcctgctcctcctgcacggggcgaaaa

SEQ ID NO: 23601 - DNA, 477 bp, Homo sapiens
  source 1..477: mol_type = other DNA
tctcagattccaacctcccgtttttagaatcagcagggatatttctagttattcagtatattcagtggctaactatttattttgtgggtaccagacaccgacataatcggttacttaattctcataattctgaggtttgtgttatggtctacccagggcagccaaacctgggtctctaattcccaggctggagattctgggctgcctgctcctcctgcacggggcgaaaagcccacctgggatccgagcgggcggccgcgccactctcgcaggctccgcctgtaccacctgcagccggcagcgcagcctcctcgcgggtcccgcagggcgcgctgcaggtgcgctgggcgtcccgaagccccgccctcgcgtccctgccccgcgcccagctcctcacgctcggtgcccgcgccccgcagcggcagcgcagaacgcaccgcctctgccagagcccgggaagcgctcgggcgatggagg

SEQ ID NO: 23602 - DNA, 292 bp, Homo sapiens
  source 1..292: mol_type = other DNA
taactacattcttactatgcctcagtcatcatgaaagacgttatatgaatattattcatttactgttctgatttccattttacaagtaatttatagtttctagaaagatgcttccttctaacactgtgggacaactgaagaacagctgtggtgctttccactgggcaaggagcgtcgccggggctcggcctccgtagcccgactgcaagcgctgccacctgaggagcctggtagccaaggcagcggagatctcgcgagacggagcacgcctcgcgagatttgacctctcgtc

SEQ ID NO: 23603 - DNA, 318 bp, Homo sapiens
  source 1..318: mol_type = other DNA
atacatgtggtttgcagagtgaatgtatgaataatacattttaagataatatcggaactgcgccaccctgcgggcggcgccggcccctacctggccgcccccagcatgcccacggcgacagcggccacgtaagtggcgcgcgtgtgaaagggttcgagctcttaggccgccgcggcggctgcaatgctggatgccgggctcgaaggctgcagcgcctaccctctctgcagccctggttggagacccagggtggatccagcgccagcgacgagaggtcaaatctcgcgaggcgtgctccgtctcgcgagatctccgctg

SEQ ID NO: 23604 - DNA, 345 bp, Homo sapiens
  source 1..345: mol_type = other DNA
atacatgtggtttgcagagtgaatgtatgaataatacattttaagataatatcggaactgcgccaccctgcgggcggcgccggcccctacctggccgcccccagcatgcccacggcgacagcggccacgtaagtggcgcgcgtgtgaaagggttcgagctcttaggccgccgcggcggctgcaatgctggatgccgggctcgaaggctgcagcgcctaccctctctgcagccctggttggagacccagggtggatccagcgccagcgacgagaggtcaaatctcgcgaggcgtgctccgtctcgcgagatctccgctgccttggctaccaggctcctcaggtggc

SEQ ID NO: 23605 - DNA, 379 bp, Homo sapiens
  source 1..379: mol_type = other DNA
gaagaacctgcctggccccccgcggagctctgcagggggcgtcgcggctgcacgccagcgcccgcaccaccccaggcgggaaggcgcacgcagatctcggggaccgtgggtgccacgggagacgctgcagctgctgtaacagcaaggaaagccgactttacaaaattattttaatcctctctgcagcgtgggaaacagtgcccagcagctcagtcctccgcttggggagctttaaaaatttttaaaactgttattcccagcttgaaaactatggatataaatttctcattgagcggcgacgctaaacacgcggcggcggggcgagcgggccaggcgggcggtgccgcgcgtggccccgcccccgcacgcctatgggcgc

SEQ ID NO: 23606 - DNA, 486 bp, Homo sapiens
  source 1..486: mol_type = other DNA
tggggagctttaaaaatttttaaaactgttattcccagcttgaaaactatggatataaatttctcattgagcggcgacgctaaacacgcggcggcggggcgagcgggccaggcgggcggtgccgcgcgtggccccgcccccgcacgcctatgggcgcgaggtgcgggccctgacgtcactcttgtcagggccgcggcacatgggcggccggatgcgctgagcccggcgctgcggggccgcggagcgctggggagcagcggccgccggcgcggggaggggggtggggtgggacggcgcaccgcctccggtgctggcactaggggctggggtcggcgcgtttttttcaattttgaacattttgcaaaacgaatcctgcacgtcgccggggagcccgcgggcacttggcgcgctctcaagtttttttttaatatatatttttatgcagatgtatttataaagatataagtaatttttttcttccctttt

SEQ ID NO: 23607 - DNA, 437 bp, Homo sapiens
  source 1..437: mol_type = other DNA
gacctcaggtgatccgcccaccttttacaggcatgattcaagtcaactcgtttatttgaaagctgcctggataaaaacataaaaggatccttgcagaggattcctccttttgtggatctcactgaatctcagagttagaagacgctcagagatcagggcgccgcctccccagcgaggccccgcctcgctgcccgagcccggcgggaatgaatggcagcgtagccgccgcgccgctcggggtgccgattggctgaccggcgcgctgacgcgccggcgaccgcgggtgcacgcaggcgaacagagccggcgggggcggagccgggctccggggcggggcgcaggagccccggggcggaggagccgggggcgggaggtgttggggccgttgaagcggcctccctcccgcccccagccgcccggtctggccccagccctgt

SEQ ID NO: 23608 - DNA, 415 bp, Homo sapiens
  source 1..415: mol_type = other DNA
agagagagacagagtctcactctgtcacccaggctggaatgcagtggtgcaatctcggccccatctcagccccccgagtagctgggattacaggaggacctcaggtgatccgcccaccttttacaggcatgattcaagtcaactcgtttatttgaaagctgcctggataaaaacataaaaggatccttgcagaggattcctccttttgtggatctcactgaatctcagagttagaagacgctcagagatcagggcgccgcctccccagcgaggccccgcctcgctgcccgagcccggcgggaatgaatggcagcgtagccgccgcgccgctcggggtgccgattggctgaccggcgcgctgacgcgccggcgaccgcgggtgcacgcaggcgaacagagccggcgggggcggagc

SEQ ID NO: 23609 - DNA, 355 bp, Homo sapiens
  source 1..355: mol_type = other DNA
gaagtttgagaacctcttcccagatttcagaagatgtatggaaatgcctggatgtccaggcagaagtttgagccccacacagagtctctactggggcactgcctagtggagctgtgagaagagggcctgtgcctcccaagaccatgggaacccatgttttgcatcagcatgatctggatcccccaatttcttccatttggaaggaatatctcccttatatctaggaagtaactacttgattttgattatatatgccttgtctcagatgagacacctgaaaatgatatggtttggctgtgtccccacccaaatgtcattttgtattgtgactcccacaattcccaggcattcgttt

SEQ ID NO: 23610 - DNA, 467 bp, Homo sapiens
  source 1..467: mol_type = other DNA
ccaaaatgttttgctggtgcatcccatcaacaaagtctaaatatatgtacgcttacttataaattttatatagtgctatgatcgatccatatatgatgtattaataatatttcatattgaagtagaaaagtaacactaaatgaaaggctaatatagtctttccaattcttgtaaaattaggtgaatctagattgctttaaaaataaagagccatagttagtggaactgaggaatgatcatcaataactactcattctgaatctaatgaaaactttacaattaatgaataataagaaaattgttattagctattatatactataataaaataaaatatatagcggaatacaaagttaattttttataaattattatataaactaaaggaaacattgggttaaacggtttgatctgtgttcccacccaaaactcatctcaagctcatgagatctgatggttttataagc

SEQ ID NO: 23611 - DNA, 418 bp, Homo sapiens
  source 1..418: mol_type = other DNA
tgtttgaatgtttaaaataccttgatccttaaggtagggagcttgttacagacttactgaatcagaatctaaatttaacaatctccccaaatgatatatatatccattaaagctttgttaaattacttaacatttatgaactagtgagaattaacattaatatgtgacatttcttaatattgtgccatgtccacagtagctataaatggtagcaattatcatgatgatgataatcttggtgctgctaaagttaccaaagcagtaaacaatcatgtttaaatcaatataactggctaaatgaattaacactcaacaagtggggttttaagcttcagatgtcagctgcctcagccgggtctgcaacgctgactctgggattttcttataaaaaatctgtagaaatgattcggactcatca

SEQ ID NO: 23612 - DNA, 373 bp, Homo sapiens
  source 1..373: mol_type = other DNA
cgctatcattttctagaatctaggttatagcacatttctgactctccaatattatgcaattaaaattagccattaactgaaagtcgagaaacttgagtttgatgtcagatctcaggattctgtagatacttcattattcttttcttagaaaaaaaaatcctatctgggctcagaatatcaggtaggaagcctcttttttaaaaaaatattccctgatgcaacaatctatttccagctgcaactgtaaactgcatttgactcacacttgtggagcctcaccctgctgtgacgtaagtcggatctgggtaccactgggctcccctgaggctgccaagagggtgtgctctgatcacatggactgtgcatttcctta

SEQ ID NO: 23613 - DNA, 456 bp, Homo sapiens
  source 1..456: mol_type = other DNA
gtggaaattgttattgaacatttacttggaactgtggaaaattattccttgtccaacccattttacagattaggaaacatgagttcacgtggctgttacatcgttttgatgttcaaacgacctactttattcaaagtcaggtagtatacagtattactaattatgcaagttgcagaaatcctttcagatcagtttctaccctcaagggtggcaacaaccttgtagatccattatggattaggtttctaaactgttttggtgttatgaacccctagagtcttctggggaatccaaaatgttttacaatgtatagcagaaagaagagaaattatattgaaatacacttctgagagactttctctactttattcagaaaggtaaatgagagacccccgcctcctcagtttcctgccaatgacgctggggcagccggggcagccggggcagcccggtcac

SEQ ID NO: 23614 - DNA, 600 bp, Homo sapiens
  source 1..600: mol_type = other DNA
cagtttctaccctcaagggtggcaacaaccttgtagatccattatggattaggtttctaaactgttttggtgttatgaacccctagagtcttctggggaatccaaaatgttttacaatgtatagcagaaagaagagaaattatattgaaatacacttctgagagactttctctactttattcagaaaggtaaatgagagacccccgcctcctcagtttcctgccaatgacgctggggcagccggggcagccggggcagcccggtcaccccgcccccaggcccacactaagggtgtccgcggcctgccctccaggcggaggagcccggactgcggaaggatggagctggccgccggaagcttctcggaggagcagttctgggaggcctgcgccgagctccagcagcccgctctggccggggccgactggcagctcctagtggagacctcgggcatcagcatctaccggctgctggacaaggtagcggccaacccgctggaggaccgcggggcctagaatgcgccggggtcgacctccccgcagggagtgcggggcggcagtcgcggaagggacaggggcgcgtcttctccggctcaggaag

SEQ ID NO: 23615 - DNA, 380 bp, Homo sapiens
  source 1..380: mol_type = other DNA
ttttattatgtgtcacgaactttacacatacctcttttaaatattaaccttatgaggtgaattttattataattctttttttttataagtgagaaaacagtgatttggaaagttaagaaatttccccaatgtcactgccaggtctgttgatgactcagtagaaactcagtcacttttgaatgaattagctattgtcagagtaatgctatgaaacaaaccactcctagtcttagtggcttaaaataactgtcatttattcaggctagctgaagtcagctgagctactttgcatgtaagctaattctgagactcataacatatgtctgcacagtatgcctgtaaataaatgtttacagggaagcaatgaagatcatcattgc

SEQ ID NO: 23616 - DNA, 344 bp, Homo sapiens
  source 1..344: mol_type = other DNA
ttcctgggaaagctgccaaaagaactcactgttggctattgccaacatttcttaaagagtacatcaggagtatccttctccctatctcccagttactgtgggaggataggaccctctattacaatagtatattattaaaatctgctttaccacttatcttctacagttaatacaaatatacgcacatacacatgcatatatatgcacacataataatatatacatacacacatacacgtatatatacatctatatgtgtattcttaatgaatcgtttggaagatattatcaatagaggaagtccgcaagcaacacgctgagtgcagctgtgcgcgccggggcgc

SEQ ID NO: 23617 - DNA, 707 bp, Homo sapiens
  source 1..707: mol_type = other DNA
tgcccgtccgcaaacaggccctcggagggcgagcccggcgccggccgcctctccgcttcggtgcaccccgacaaaccgggcgccctcagtgaaggtggctccgctctcccgagggcgggactgcgcctcgtccccccgtctcccgggacctgccgcgccgagaaggcgaccccgccccacctcgggagcgcgtccaggagcccaaggcggctgctgctgccgccgccgcctcaccttgccgccggtctgacccacggaagggcgcaacatcaggggcaagctgccctccaccgaaaggccgggcgttcaggccaggcaacgccggtcggcgcccgtaaccgtcggcccaggcctcgcactcccctccggggcgccgtctcctcccgggccccacccgctcccacgcgcggcccggcgaccctagcccctctcgggaggcctccggagacctgcgccgcgccggtcctcgaagccctacctcgcgcgggtggaggcgcggctccgggccagcaggccttggccgcctcgcgcaggaggagaacgacgctgggccgccagcagggatgaagccgggcgggggaaacgcttaaggctccagccgcacgcacgccgatccggcgcgcggggccgcgagctggaggcggggcctgtggcggcgagccccgtggctgggcggagccagggctgacggcactgcggctgggggc

SEQ ID NO: 23618 - DNA, 715 bp, Homo sapiens
  source 1..715: mol_type = other DNA
gcagcggtgcttccgcgtccgcgttctccgggtagctgatgtgctgcaggctgcagcccgcgtggtcgcggctgaggactccagccctccggaacctggggctggacgacagcagcaggaggcgtgctcccatctccggtagtccccggctcccgctgctcccctttctccccggcctcgggcgctggcgggcgcgggcgagggggtagcgcaggggaggcccgcccgccacggcagggggcggaaaccgcggccgggctcggggtcagcggcgacgagcgggcggctgccccgctcgccctcggcctccgcgcccgcccgccgctccgcagcggaggagccctcaggtttgcgttactgcggccgccacacctacctcagcccgccgcggccaggtcgggcggtgccgcgcaggccgcctccccccctcgcttcccagtcggcttacgcatccccggcggcggcggcgccggcatcggctagaggttcggctcaagtcgggggcactcgtgtctgcgccgagcggcgggcgtgagcgcggcccctgggccccgcgcggcgcggtgctgcgaggaggatcctcgtggccttgccccgccgtacgaagttttggcccccagccgcagtgccgtcagccctggctccgcccagccacggggctcgccgccacaggccccgcctccagctcgcggccccgcgcgccggatcggcgtgc

SEQ ID NO: 23619 - DNA, 775 bp, Homo sapiens
  source 1..775: mol_type = other DNA
gtcagccctggctccgcccagccacggggctcgccgccacaggccccgcctccagctcgcggccccgcgcgccggatcggcgtgcgtgcggctggagccttaagcgtttcccccgcccggcttcatccctgctggcggcccagcgtcgttctcctcctgcgcgaggcggccaaggcctgctggcccggagccgcgcctccacccgcgcgaggtagggcttcgaggaccggcgcggcgcaggtctccggaggcctcccgagaggggctagggtcgccgggccgcgcgtgggagcgggtggggcccgggaggagacggcgccccggaggggagtgcgaggcctgggccgacggttacgggcgccgaccggcgttgcctggcctgaacgcccggcctttcggtggagggcagcttgcccctgatgttgcgcccttccgtgggtcagaccggcggcaaggtgaggcggcggcggcagcagcagccgccttgggctcctggacgcgctcccgaggtggggcggggtcgccttctcggcgcggcaggtcccgggagacggggggacgaggcgcagtcccgccctcgggagagcggagccaccttcactgagggcgcccggtttgtcggggtgcaccgaagcggagaggcggccggcgccgggctcgccctccgagggcctgtttgcggacgggcacaccttctggtgtagcctccagcggtcgcgccggcagctgcaccgcagggacatcttccgcaagagcaagcacgggtggcgcgaca

SEQ ID NO: 23620 - DNA, 430 bp, Homo sapiens
  source 1..430: mol_type = other DNA
taaaggaagtaagtttaaatcaataactttgagaaaaatatttaagttccaattatgtccgcatgtccgagtccgggaaggaagaagaaaaaaagcactgtggtttaacagttcctttttatttttttaccacctctggtctcagatgagtccgagcgcggacctgggctctgaatccgggggtccggggttctgcacccaggcgtcagcttcctcatccgcagagtggcccccagaagcctccgggtggtcgcgaggatgctctaaatcccgggggctaaggccgagcccggcgtcccgcgcccagcccgcgggagctcttggggatcggagcgcggccgaccttcgccagctcatgggcgactgggactgcggtgcccgcaggctcccgggagtacctcgcgaggcccgcccagtcctcgccgcccgc

SEQ ID NO: 23621 - DNA, 394 bp, Homo sapiens
  source 1..394: mol_type = other DNA
gttttcaccatgttgaccaggctggtctcaaattacagatgtaagccaccgtgacgggctcatgtgttacaaccctgggattaggcagtgactcacatcttactcatttagcactcagtctgttgcatgcctattgcagtagtaaatatctactgcatggaattgataaaccagcctggaaagtgaattccacattctggcatgaatgccacctcacccatgataaataagaggggatgtttcctggaaactgctccactcctccctttggaggcagcattttctttggaaagcagatgggctgtgtgccaatgtccattcttagacacacattctatgcatagctgtacagagaccttgtctctacaaaacaatgttttcaaaaattagctgg

SEQ ID NO: 23622 - DNA, 514 bp, Homo sapiens
  source 1..514: mol_type = other DNA
gctggagtgcagtggcacgattgctggaggtcttttttttaaatcctctaaataaggataacagttcataattcctaacttttgttatgaaaattaaaggagttaatatatattatgtggagaaatgtaaattctagttcaaaaaatagaagaaataatgtaaatactgatttatttatctggtaggtatttatattccactggatacatttggaagaatgattaacagtgttatttcaaaatttcaacattgagaacactacatctttttcaactcatcatgatgaaaaattttgtcagcgaaatgtgttaggattgttttataaaaatctttcacgtcgatgagcaaatatcttagaagactactgctgaggagaaatgtttaagtagaaatgtaataaaggcatttcacttattccctcgcctagacgcagcctgtagtagccaggtggtggcacacgccaaaggctccggcgggggcgagccgcccgagcacgcctctcggtggccccgt

SEQ ID NO: 23623 - DNA, 417 bp, Homo sapiens
  source 1..417: mol_type = other DNA
ttagaagtgaggtgagttattcagtaccctctaacgtcaaaaaagaaaaaaaaaataaaaatctttattagtgttttttaaaatgacgtaaaagactatgggaaaaaatgccaacaatagttatgtataacttttttgttcatatttccaaaacgtttataacatacataactttaaaagaaaaataatttaaaaaatacatatctgaaatttgaccagctgttcttttgcttagtatttcgatccacaacctaagaacggcccctgcgcatttgcaggggtcctggccgggcagagggcgtgcgggtctcagcaagctgccgggtccgcccaggccccgccccatggcccgacccgcaggccccgcccccgacccgccccgtccgcctccgtcacgtgatggggcgccgggtccag

SEQ ID NO: 23624 - DNA, 606 bp, Homo sapiens
  source 1..606: mol_type = other DNA
caattgggattcatatatatatgaatttgacttaaatctcattaggtatagtaaatggcatctgtcatttaaacttgcatttgatcactagtgaagattaagcattttcccaagtaattgttagttcttagcatgatctattttctatattttggccaaacaaatgttcatttaaagtcactttgttttaaggattggaggaatttattttcccaaggtcctggcagagatagtgactcaccgtgactatcttcatttcgataactcgggtaccaggtttcaccattatgcagttatcgagcaattattaatggcagggcgctctccgtcccgaggcaggagatggcctggtcagtcccgcccggcccctctcccgggcaccggagagatgacggctctctcgcgagagcgcgagcaagacccggctccgggcggcggcgggatgttagcccagcgctgtagaccgcgccccctctggcgcagctgggagaggcgcggcggaggcactgccgggagcggccggcggcgcgcacgcgcaggtgagcggggcgggctcgggagcgcgcgggcacaagggcgaggggcggggcctgcgtcgcgctgcgg

SEQ ID NO: 23625 - DNA, 412 bp, Homo sapiens
  source 1..412: mol_type = other DNA
ttccaaagcccacagtggatttgaatcctatgaaaattaatggaaaagtgttaattgggcatcaattcatgcttaacattaatctcagtatttgatgaaccacaactttatgttgctattaactcagtttattgcaacaatttaaaacgatacagatttaaaacaatatgggtaattgtatccgtattgtttcaaatgccccataaattgaaaccagcccgaatttgggcgctacagacaacccgtgctgcacaattctgaagccttctgccaccctagctacctctgcacactttactatcctggcatacagtgagaaatttctcgttatatacaaacatttgcatcttattacatttttaaaacactgtatgattaacgacctttcccgggcacggattggtacctctac

SEQ ID NO: 23626 - DNA, 610 bp, Homo sapiens
  source 1..610: mol_type = other DNA
acctttcccgggcacggattggtacctctactttgtgcaggagggtctccgccatcctgaagccccccgatcctggggcgtctcgggggccgccaaaggagcgccagggtagggcacagcggagggcgggcggctggtgccattcccggatctcggcggcaggggccggcaaggcgtcttctcccaggtccgggtgaggagccgcagcaagctccccgcgcctccccccgccccccgcagcccatgtgatccagggaagtcggggtgcgctccccctcgccctgcgccctgccggcccggaggcggggtcccctccgcccgcggggttcgcgcgccacccttgtgggtccggccgtggggggccgagtgtgcgcgcgcgggcaggcgggggccgcacgggggtgcgtgacgtcaccggcgttctagaactccgccccacgtgcgccggggaggagggggaggagcagcggggctgagctaagccgagcccacgtgtgacggctctcgccgctgccccggctccgccgctcgcagagagattcggaggagcccgggggagcggagatctcggggctcggagccggccgccgctccgctccgatcgctgtgg

SEQ ID NO: 23627 - DNA, 206 bp, Homo sapiens
  source 1..206: mol_type = other DNA
gcttcccgagtagctggggtctgacctcaggtgatcctggaattacaggcatgcatgttcactttttctgcttgttcagggaaactgaaaaaagttcctctgtaagtgccggcaggtgcaggggcaggcatataaaggagttgagcttattcttgctaatgtttccaagtataccatgcataacatctcagggtactgccagctgt

SEQ ID NO: 23628 - DNA, 524 bp, Homo sapiens
  source 1..524: mol_type = other DNA
ttctcgttatatacaaacatttgcatcttattacatttttaaaacactgtatgattaacgacctttcccgggcacggattggtacctctactttgtgcaggagggtctccgccatcctgaagccccccgatcctggggcgtctcgggggccgccaaaggagcgccagggtagggcacagcggagggcgggcggctggtgccattcccggatctcggcggcaggggccggcaaggcgtcttctcccaggtccgggtgaggagccgcagcaagctccccgcgcctccccccgccccccgcagcccatgtgatccagggaagtcggggtgcgctccccctcgccctgcgccctgccggcccggaggcggggtcccctccgcccgcggggttcgcgcgccacccttgtgggtccggccgtggggggccgagtgtgcgcgcgcgggcaggcgggggccgcacgggggtgcgtgacgtcaccggcgttctagaactccgccccacgtgcgccggggaggagggggaggag

SEQ ID NO: 23629 - DNA, 482 bp, Homo sapiens
  source 1..482: mol_type = other DNA
aaatacatgtggatctagctcattcattttaatagctgagaaagtatgaacaataattttccagctatttctcaatggttttttcccactacaaacaatgctgcaacgatgatccttgcacaaacatcctcatgaattgatgctttaatttctaatatgattactgggtcaaagtacacacagtttatatttttttacagtttaacactgagagataggaggtagcccgcgacaccggccgcgggaaacacgagttgcagccagcatcctagttagcgtgtagcacgacgctgggcaagtgacggcccctccccggccttggaacattaggctcagcctgggcctagagctggtgacctcaaatctcgccccaccttttcagaggagttgggatgcgccgctctcccgcaggggctgcggtgaaagcccagcgatccttggctcggccagcaacttatgcgccctttacctggagcagccgc

SEQ ID NO: 23630 - DNA, 591 bp, Homo sapiens
  source 1..591: mol_type = other DNA
agggtgcttggtggtcaccacctgacctaccaccatttattaaacaagttcttccgtggaaaatcttcccagggctcagcagcccttgaagtgatcatgtcccaagccccagctgtgcgtcctcaccctgggttcctggcactgacctggaacctgtcgggcagcccccccgcggagtctcggaggtctcaggtctcctccgcccaccctctccgcagctgggaggggcaggatgccccgcaccccgctctgcgcgggaggtcgaggcaccccgctcacgccctcctgcccgcaagctagggagtcactgcggccggggagggggtttccggacccccaggtccgcttccctcctctctggaaaggggtcggtagggaaagggcccgggggcgccgcagccgggcccccgccccgccccgcccgcagccccgctcctccccgcgcggccccacttgtggccctgccggcagccgcgcagggacagctgcatttctcgccgcccgccgctaggaagccggcctccctccccgcgccccagccgcgccgccgccgccgagcctggccccgccgccaccgctgcggattgcagc

SEQ ID NO: 23631 - DNA, 591 bp, Homo sapiens; identical to SEQ ID NO: 23630
  source 1..591: mol_type = other DNA

SEQ ID NO: 23632 - DNA, 524 bp, Homo sapiens
  source 1..524: mol_type = other DNA
cccagatgggcaaataaggcagacttttccaagggtgcagaccctttgcaagtggggagggtgcttggtggtcaccacctgacctaccaccatttattaaacaagttcttccgtggaaaatcttcccagggctcagcagcccttgaagtgatcatgtcccaagccccagctgtgcgtcctcaccctgggttcctggcactgacctggaacctgtcgggcagcccccccgcggagtctcggaggtctcaggtctcctccgcccaccctctccgcagctgggaggggcaggatgccccgcaccccgctctgcgcgggaggtcgaggcaccccgctcacgccctcctgcccgcaagctagggagtcactgcggccggggagggggtttccggacccccaggtccgcttccctcctctctggaaaggggtcggtagggaaagggcccgggggcgccgcagccgggcccccgccccgccccgcccgcagccccgctcctccccgcgcggccccacttgtggccctgccg

SEQ ID NO: 23633 - DNA, 441 bp, Homo sapiens
  source 1..441: mol_type = other DNA
ttaagtactttaaagtactctttgtcctaatgtaccttaccagcttaacgtgaaatttaagataattggtactaagaaaaaaaaaatcactttttcaggactgcctccaagtggaagttggcatgcgtgaagttcgaaaacactaagtttagtaaattgccagaattgtattcattcagcatgtctgaagatagatgaaagcttagatctttcaatggaaagttctgtctatccaatagggagaaactgccgagtcgcagttactcccggagaagcagaggatttgtagaacccatgttgtatacagtttttattcagtacaatcttttcattttttaattcaaactgttttgttcagaatgggctaaagtaaattgtattttaagtgatgtcatagacaggattgtttaaatttagttaactccatactcttcagactgt

SEQ ID NO: 23634 - DNA, 607 bp, Homo sapiens
  source 1..607: mol_type = other DNA
ccagtagcagtgacgcctacactggggtcacctcagtgactgtactaaaggactaaaataatttgtctatactatctcagaatttcacatcctatcttgaggtctctacgcgtgggaagtgtttccctccacactgagaggattccctgagttggaaggccatctcgccatgagatgcatatcaccctgtgcatgagcgactgaagagccgagtgtccgccgtggcctgtgccctccgctgagggtctaacagcgacggtgctggacaccgtgtctgagtcacgggagacggcccagctgtgcccagcgggccagcgccagaccctggcgtccttgctccagctgcctgagccacggaccgcagcaccacacacccccgcggggggggacgccgcgccccatccccgccccgggccccaccccagcccccccgcgggggccctgaccccaccgccagcgggcactggctgagctccgaggcggcgagccggcagcggggacgcccagagggggtccgggcgactgggggcggcggcggccgggccggggctccccccccgcccgcgctcgccgccgcggtggtgcgtcccggaggttaccggaagtg

SEQ ID NO: 23635 - DNA, 480 bp, Homo sapiens
  source 1..480: mol_type = other DNA
accggtattttcaaaacctggtgtatcagtaacttttagggaaaacttttgaaaaaaggactgcacctttcttccttctcgttctttgaaaggaaacaacagaaacgatcccataggcggtacggtgttaccccttctggttggcgggtaccacgttgccggtcgggatacggacccactgcgactagcactaggagtgctgaccggattaaggaatctaaatcggtttcgctaaattagacacatctgtctaagccgggtttccggagcaaccgcccgggccgaaaggccgttatcgccgcagagcatggtgggacaacgctccttcaagatgactagctcctttaacgaaagttcgttatttaacttttaccaaacggggactcccccttcgtggggagggtgacgtcgcgcgtgcgtgcgcgtgcgctgaacgtagccctcgcagcacccgttgcgctcccgcgcgtgcgtgttggg

SEQ ID NO: 23636 - DNA, 408 bp, Homo sapiens
  source 1..408: mol_type = other DNA
gctggtctttgaattttaattcattagcgacgtttaaaaatcccaggattttaaaatgttagcaaccgcggtatctagtggttacgaccggtattttcaaaacctggtgtatcagtaacttttagggaaaacttttgaaaaaaggactgcacctttcttccttctcgttctttgaaaggaaacaacagaaacgatcccataggcggtacggtgttaccccttctggttggcgggtaccacgttgccggtcgggatacggacccactgcgactagcactaggagtgctgaccggattaaggaatctaaatcggtttcgctaaattagacacatctgtctaagccgggtttccggagcaaccgcccgggccgaaaggccgttatcgccgcagagcatggtgggacaacgc

SEQ ID NO: 23637 - DNA, 413 bp, Homo sapiens
  source 1..413: mol_type = other DNA
gaagcaagtcaagcctgacctgcgggatctggcagggctggctcctcacagctctgacaggcaccaccttgtctacctggacaggcagggacagacacaaataccggctgggggcccagctgggagtttaggtccttcagcctcaaagaaccttgaaggtgaggggagggagtcctggggctcctatgcctctccctctccctctctttctcacagatacgggaggagggagtaggcctggcctctccagccccggggggaggggtccgcattcctcccccctccctccgccccgaggcattgtgggaggaggagaagcccgcagtgcggggccgggcgggctcagccaatggggagcgcggacggcggcgcgcgcggcgggggggcgggggcggggcactatttcagcgggg

SEQ ID NO: 23638 - DNA, 403 bp, Homo sapiens
  source 1..403: mol_type = other DNA
aaatggtgctatttatggtgacggtgttacacaactagtggctatggcacccagagcttccaatgccaaatcttttcaggaagccagtgcagtaaaggtaagaatcagttcaataataacatcgtttccttgttttttctttctttgctcagtgaatatcaacacaaagactaataaatcttctgacactttttttgtcttccaagaatatatcgaagactcaggccacctggtccccgtcatccttatgaagtcacagccggtgagcttttatcgcatacatggtaagcggtgaggctgcacttgcactgtgtggccaactgcgaccgtggcgccgtgacgggaacggcgggttgcgcgcgcagcacctccgtcgcctcccgctccgttgccaggaaaacag

SEQ ID NO: 23639 - DNA, 350 bp, Homo sapiens
  source 1..350: mol_type = other DNA
gctggaggcagtggcgcaatcttggctcactgggatttctagtagagacagggttttttaaagtcaatgataccttttcctccaaaaccactcaatgaaccctgcaatgggtcccctgtcctaactataaggacaagagcccactgagaggtcaagctgtttgagattattcatgcctttagagggtctgcaagacatacggggaagtctgtcaggcaaagctccagtgggagctgagccctggggagaatggctggggggcaacctgaggctgctctccttagtgtgcttctggattccaccagtgaacgccgtgctgcagggagagcacaggcgccccacgctgtggc

SEQ ID NO: 23640 - DNA, 351 bp, Homo sapiens
  source 1..351: mol_type = other DNA
ggctggagtgcaatggcatgatcttggctcactgcaaccccaggttcaagtcccacctcagcctcccaggtagctgggattacaggtatgggtcaccctatccattgatttcagccaaaagtattttgaaattttgaccaaaaaaattaatgtttattgatcactttaaatccaaaagatgaatccactggattccacagtaaatttaattgcggtttttgcaatacttttgcaccaacctaataattgttcataattctaagagctattcggatcccattaggagcttaaaagggacaaatgtgctcagggcatgctttgccttccggaactagatcaggatcatgtgtt

SEQ ID NO: 23641 - DNA, 458 bp, Homo sapiens
  source 1..458: mol_type = other DNA
gaggttgcagtgagccgagatcacgccactgcactccagcctctcacccaagatgttaggaaatagattctacatttttaccaagatcaacagagattcattttatacatgataaagtttatactgctgtacatcatcgtggaggatgacttcaacatttcttcactcaaagaataaatcgaggatgtaaactgtggaatgaagccaatgatctgaatccttcttaggcaacttactttctataaaatggaactgaaggcagctgttgttagtagtaattattaacaccagaaatttggagccctcactgtgaggactgaatgattaccctcagttctttcacacaacaggatgtaatgaacttcaggatattatgagcctggtaccagggtcctaggagggtgccatcagcatctttgcatccagacttgccctggggagaggttgccaggacccag

SEQ ID NO: 23642 - DNA, 297 bp, Homo sapiens
  source 1..297: mol_type = other DNA
ccaagaaccagaggctgcccattgggtggctgttggccaacaaaggaaccctggataaccagtgtaaccagtgtgtatcccctggggacacaggctggggccagtggctcatggtcaggagttcaagaccagaattagcttcttgcctaaggaaaaatacaaaaattacttcttgcctaaggaaataattgatgatgtatcccagctactcgggaggcgctggggacaatgctggcccctccttttgtaccttccaaccccagtgggggaggagaaagagttcagtctccaggatca

SEQ ID NO: 23643 - DNA, 363 bp, Homo sapiens
  source 1..363: mol_type = other DNA
caacacatcatgcagtggcgtgcgtgttgacctacacactgctttagggaagtgaagatgtccactcattggctcttgcctgggtggagcccacagtcaggggcttgtgggggtgccacacgagggcccccgtcagagtggagaggggctgcctctcggggcttctcccaacacccctggctctggggactctgtctagacccctgccactgcagccaacccaacaggccatgtgggcttccctggtggcctgggacagccaggttgccccccaagtgcaaggaggaagcagaaggaattctccgtctatttcatgtgggagccctgggctgacataggaggaggaggggagggctggctctt

SEQ ID NO: 23644 - DNA, 619 bp, Homo sapiens
  source 1..619: mol_type = other DNA
tccagagccaagcccatggagatggtatgggctgggctcagccgacgctgtcccctgcccaccccccacctactcccctcccccagccaggggccctgggctgggcagcttcctgccttccccatggggaaatcgggggtggcatgcaggtgggtgggccccatgcccacatccggtggcccaccgggcctgagagtgtcccccgcactgtgccctgcaggctgaggctgcaggaggggcaacagtctccatggacgcccttcatctccatggcacacgcagaggagccagggcctggcctgtttgggcactcaccgagggccctgtcgaggagccctggtcttctggggtcaccctcaatgccctgagtcagtcccaggctcttgagccatcccttggagctggtgccacggggggaagggcagctggggccggaagccacctgcccagggcatgagagagggtccccagccctcccgcgggcccacccgtcagtctgtcctccccagggagggagggagggagggcgctcatcccctgcgggcgggggcggggcgcgctctgagaccgttgggcgccctgagatctggcccacgtggcctcggggttataagccctg

SEQ ID NO: 23645 - DNA, 486 bp, Homo sapiens
  source 1..486: mol_type = other DNA
gcgcagcgcgttctgcctgcactcgggctattgcgaggacagagagcttccagggccagaaggggcctttgtcgcttcctcacaaggcacaagttcccctgcatttcgcttcctagacctacaaatggtctttagtaaaggaaccgtgtctaagcggagttttaaaagataaatacgcatttttttccgatttcttctcggtctctgcagagacaatccagagggagacagtggattcactgcccccgcccagggccacctcggcgctgcggctcagcccgaactcccgcgcaagcgcagccgcccccccgccccgggggcccgctgactaccccacacagcctccgccgcgccctcggcgggctcaggtggctgcgacgcgctccggcccaggtggcggccggccgcccagcctccccgcctgctggcgggagaaaccatctcctctggcgggggtaggggcggagctggcgtccgcccacaccg

SEQ ID NO: 23646 - DNA, 373 bp, Homo sapiens
  source 1..373: mol_type = other DNA
taaaatgtctcaccacagtcaaatataatctggtaatttgaaacttcaaatgttataaatgtattagaaactgttgtattatttctaatggtaattagccagaaattcattttctttttgttattaaaagaaaataacagttggattccagacatctgacatcaacctgatttgaaagttccatataggcacagtttagacagagctactgaatttaaattactaaaacacaggatcactttattctggctttctgccatttatagacactcaaacttggaatgagcagaaatccttttgaacttatatttgcaaacagagaaagggagtggttgcctctagcagctccaccctcactttgtcagtaggtgat

SEQ ID NO: 23647 - DNA, 444 bp, Homo sapiens
  source 1..444: mol_type = other DNA
ggctggagtgcagtggtgcgatctcggcgaccatgttggccaggctggtctcgaactcctttcaagcagtccacccagtcggtttcaaatgaactggctagggatcgattcttatggataccgtagaattctgcacaagatagtacttgtcttgaacaaatactgacttaaaagagtgtatcttaaaagatacaaacaagatattatacctccagtagcatcatttttgtttgagaggtaagcagttccactgttagcaaagattacagaccagaccctttggtccggcagacagccttcccggcctgaagtctgggaacgcctggggaaggggctcctgcccgggtcccgcaggcgtccggcgggccgagctggggcacgcggccgccgagggggaggtgcccacgccgcgtggcgggaactcgaggccccattggccgcgct

SEQ ID NO: 23648 - DNA, 326 bp, Homo sapiens
  source 1..326: mol_type = other DNA
ctgagaatatcagctgaattggtatcgcggggccacggcgacctccagcggccacccccgcgtcctggtctcccttcgactaggaggccgcagctagctggcagtctcagatccaggtttcccatctctgggatgagaggagagttcttcactcaggactgccagcgcaatgcaggtcgtgaaagactgaacctcaggcccagcctgacagcgccactggggacctgtttcagaagtacctcctgggcggggccatcaccggaagtggccagtaggcgacgagccgcctccccagagcagtggccagcagcgcccgactcgaccaa

SEQ ID NO: 23649 - DNA, 276 bp, Homo sapiens
  source 1..276: mol_type = other DNA
ctttctctccccagcctcgctgggaggcaaggaagggcagctctgaagcttctgggctgccagcctcccaaacagctcccctgttgacactatggaagcggagtccctggagcaaagtcttctctgtggctgatgctccctgcatcccacaaaaacctatatgggggagtataggacatctcacctactccagcactgcttaaagttaaggtgaaagagagtgtcgcgtgcccaccgtgatcctgctgcagctgagctccacaggcttttttggcc

SEQ ID NO: 23650 - DNA, 325 bp, Homo sapiens
  source 1..325: mol_type = other DNA
gagctcctgacctcaggtgttaaattattaaagatgatgtgagccatcaatctagttttgttcggtgggcggatcacctgaggtcaggagttcaagagcttgtaatcccagctactcgggaggctgaggcagaagaattgcttgaacctgttaatggctgtatgaattctctgaaaaaataacaaaagttacttctattatatgagcctgtgcagaaaaaagaaaaaaaatttcttatcacacaatgcgatttctttttcgcgggagaaattttctagcgaattaaaaacaactcataatacaatttgccatgagtatgttgtgt

SEQ ID NO: 23651 - DNA, 462 bp, Homo sapiens
  source 1..462: mol_type = other DNA
agaagccagtctgcttctggaaacttccacaggagcctgtctgagcctctaatgcctctaaagcttctggggcatcctcggcatctcacctgcttgtcagaggaagagtggcccagctgggcctgggtcacgcctgggttggcctctcctgaggccctccccactgtcctcatccctggataatttgtgcagcaaaaacctgccccttcacagctcgggtggaggtggagaaaaaattgaacccccgcggtgcttctggacagcccggggacgaggagctgaggctccccgctctgtcctgggtgactctgcatactctgcgcatccgggggtcgcgggctgcgaggccggcccccagctgggcaccccgacccacttcgcgccggcaccgctagcagctgaggtacaggccccgccccggggccgactcgctccgcccccgccgccgggcccctcccgcag

SEQ ID NO: 23652 - DNA, 460 bp, Homo sapiens
  source 1..460: mol_type = other DNA
atctttgtcatgcctttatccatgaaatggggatttatgctttaaggtttaagctgttcgttaatgtatttgttttagtcttcacaaaaactcctccaaggaagtcttgcattgtgaacgctatattgcagtccagatcttggattccaaaaagtacagcctgctagcatgccctgttccccttcttggaataagaggaaatgaggccttaggcaggaaaatggcctgacagaccgagatgagaacgcagttgcgctctctgaccagaggcctgcatgacgtcacgccgggaggtggagtatgtagattaaagactgcattttggaaacgcgttccttggaaggatttgcacaacaccaagatatagtataaaaaatctgtttattttgttcactatatgtggataaagtccaattagagtcatttcaggagttacccgcacttgcaatccggggattgc

SEQ ID NO: 23653 - DNA, 330 bp, Homo sapiens
  source 1..330: mol_type = other DNA
ggccaagcaaacaagaaaagaatctttttttttttttttttttagccagatcactcggagtgcggtggcatgatcacggctcatgggattaaggcacatctttgtcatgcctttatccatgaaatggggatttatgctttaaggtttaagctgttcgttaatgtatttgttttagtcttcacaaaaactcctccaaggaagtcttgcattgtgaacgctatattgcagtccagatcttggattccaaaaagtacagcctgctagcatgccctgttccccttcttggaataagaggaaatgaggccttaggcaggaaaatggcctgacaga

SEQ ID NO: 23654 - DNA, 341 bp, Homo sapiens
  source 1..341: mol_type = other DNA
ttgccagtaaatgttttcacgaccacagttctcctaaccattcagacaacttgtaagtggagtcgagtgaggcggcgctgacggcggccggtgtgcctcagcttgaggagtaccgctggagacagccgccaaactccgcacgccctcgctggggcgtgcggcgtgacgtcagacgtaaagcggaaggggccggctctgcggcctggccgcacggggctccgggccttgcagctttgcgcagtcttgtaaattttcacagcgtaacgggcacacactagggaacaatcattagaattaatctcccgccctcgcgagggattgtgggccagcccccaacggcc

SEQ ID NO: 23655 - DNA, 363 bp, Homo sapiens
  source 1..363: mol_type = other DNA
cacagtgagactcttttctgtaatttagaggcggtccacaaaaggagctcttgtgtagcccagcccctccttctcaggaccccaggagcccagacacactaatggggacattagttgcttacttttccagctactgcttaagctaggcaggggtgcggggaatgcggactgatccctcccagcggccgttgggggctggcccacaatccctcgcgagggcgggagattaattctaatgattgttccctagtgtgtgcccgttacgctgtgaaaatttacaagactgcgcaaagctgcaaggcccggagccccgtgcggccaggccgcagagccggccccttccgctttacgtctgacgtcacg

SEQ ID NO: 23656 - DNA, 422 bp, Homo sapiens
  source 1..422: mol_type = other DNA
ttgcagtgagctgagatcgcgccactgcactccagctgcactattgaatcctgagttctccaacgccaaggctggaagtttggagaaacaagtaaattaccattaatatcataattttcagtttccttttaagaaatgagagtaacaccactttcttcacagaatcaaaggaacttatcacttggtaggtatttccctctgcctgaaaactacagtgtgtccaattgggatccatggacttggagatttagactccgcggaccggttgccatggcgacagtctctaggcagcgtgggctgagtaaagggtgggccgccgctggaccctgcgcgcgcccgccaccaacttccctccagatccgagaggggcggcgcgctccgcccccgggccgcgcacgtcggtgctcggcggcgcgcacgcc

SEQ ID NO: 23657 - DNA, 478 bp, Homo sapiens
  source 1..478: mol_type = other DNA
tagattattagtgattctctatataattagttgtttgcaataaatacaggaaaaattaaattcaaattacgaatttgatatgcctcttgcaatctttacacatctggcaggagggaacgaagacttcacagtgtgtggtcccgtcctccagagaaatgacacctcagtttggagccttctaactcgattagctttggtaggtggaacgcaagtcctaccaccagggccatctcagagtccgaatatggcgcgcaagtttgagagccgtggggccccgccctccgccaaggtgggcgtgggtggcgtagcagagccccaagctcaggccgcctgcgcaggctagggccggaggcacgcaaccctgaggcagcgagtcgccaagtctcgtatgcgccccgcaacgcgggaactaggcggcttcgcagcttctctcgccgccgcgcccccagctgcataggcgcgcgcccgcgtcacgtgg

SEQ ID NO: 23658 - DNA, 536 bp, Homo sapiens
  source 1..536: mol_type = other DNA
acaaataattcttactgaaagaatttttcagtctcagattaatctttctaaattatatcttgttcatgacccaagtagttaaaaaaaattgttaatgcctgatattcaagaacttatttctagattattagtgattctctatataattagttgtttgcaataaatacaggaaaaattaaattcaaattacgaatttgatatgcctcttgcaatctttacacatctggcaggagggaacgaagacttcacagtgtgtggtcccgtcctccagagaaatgacacctcagtttggagccttctaactcgattagctttggtaggtggaacgcaagtcctaccaccagggccatctcagagtccgaatatggcgcgcaagtttgagagccgtggggccccgccctccgccaaggtgggcgtgggtggcgtagcagagccccaagctcaggccgcctgcgcaggctagggccggaggcacgcaaccctgaggcagcgagtcgccaagtctcgtatgcgccccgcaacgcgggaactaggcg

SEQ ID NO: 23659 - DNA, 453 bp, Homo sapiens
  source 1..453: mol_type = other DNA
tcatttggaaggagatttagatcagctcaagaactcgcagaatctgggcacggcatccttggtaccgggccagccctctccacagcggcaggggcggggtaggggtgccctaccgggtgggggcggggactaaccaccaccctcacaactccggctctcggcggggccgctggcgacccgcaggctccgcagtctgacctcttaggcgccggcccgaggtcgccagatcaaatcgccgataaagcccggcgcccacgtcagggggctctgacaaccgccccacggcgcgcccgccccgaggcgcagaagtagggcgaacggtggccgcagctcctttctcccggctcagccgccggccagcagccgcgccggaacctcggcccacgtgacgcgggcgcgcgcctatgcagctgggggcgcggcggcgagagaagctgcgaagccgcctagttc

SEQ ID NO: 23660 - DNA, 292 bp, Homo sapiens
  source 1..292: mol_type = other DNA
atgctttgctccaagagtcatggagtccctcccacgccaattaaatccttgtcagggagaggccaatcgtagacacggtctctgcacgattccttgtgattggctgagatagcacagagctccagccaatcagagctgaggcgcttctggaaggtgtgttacgtcccgctcttcttccaattgcaccaatctcatgcagagccctaactgcgttttgtgcctttgcccaacaggaaaatgtgtctcatgcgtggaggccctccgtgctagtacggcttgcggcttaagcgcc

SEQ ID NO: 23661 - DNA, 292 bp, Homo sapiens; identical to SEQ ID NO: 23660
  source 1..292: mol_type = other DNA

SEQ ID NO: 23662 - DNA, 233 bp, Homo sapiens
  source 1..233: mol_type = other DNA
gcccgcgctccgggagcggagctcgtggttacgttaggaatacaagtctagcatccatttagacaccagacggtggcggctcgtgcaggaggagggaactcgactctggtccagcctccgccgcccggagtttccggcgactccaaattgtgcccacctccgaggccatggggcgcggcggcgcttaagccgcaagccgtactagcacggagggcctccacgcatgagacaca

SEQ ID NO: 23663 - DNA, 241 bp, Homo sapiens
  source 1..241: mol_type = other DNA
aatttccattagcagtccaattgacttaaactttaatgtgcatagaaatactcagggaaatcttgttaaaatgtatattctgatttagtaaaatgctttgctccaagagtcatggagtccctcccacgccaattaaatccttgtcagggagaggccaatcgtagacacggtctctgcacgattccttgtgattggctgagatagcacagagctccagccaatcagagctgaggcgcttctg

SEQ ID NO: 23664 - DNA, 367 bp, Homo sapiens
  source 1..367: mol_type = other DNA
atttagacaccagacggtggcggctcgtgcaggaggagggaactcgactctggtccagcctccgccgcccggagtttccggcgactccaaattgtgcccacctccgaggccatggggcgcggcggcgcttaagccgcaagccgtactagcacggagggcctccacgcatgagacacattttcctgttgggcaaaggcacaaaacgcagttagggctctgcatgagattggtgcaattggaagaagagcgggacgtaacacaccttccagaagcgcctcagctctgattggctggagctctgtgctatctcagccaatcacaaggaatcgtgcagagaccgtgtctacgattggcctctccctgacaa

SEQ ID NO: 23665 - DNA, 422 bp, Homo sapiens
  source 1..422: mol_type = other DNA
acatcttacacatgtaactcctgggtcaagaagtattacatattggaatggctatatcatcttatgttaggctggagtagtggcacacgggctggccatcttggccaggctggtcatgaactcctgtttttaatgtaacacatagaactactttctaggatgttgcctatagaaatgattgctttcctttgggaaaaaaataataaaatctggcaagttctaattttttttttttttcttgctctattgcccaggctggagtgcagtggtgcaatctttgcagcctcccgagtagctgggctaattttttgtatttttaatagagacaaggtttcaccgtgttagagaggtaatacactctcatatctttatgccttccattttaaaagttgccataaaatacagctactgttattttcaat

SEQ ID NO: 23666 - DNA, 232 bp, Homo sapiens
  source 1..232: mol_type = other DNA
agccgaggaccctggggctgcagccgggggttcagttcggggaaaagggaggcaggctcccaggactacagccttctgcaggcctactttcagagcggttctggaagcatcaagagaagctgcagtgccggattgtccagttggcaaagactggaagctaaactgccgaccttgcgaggctgcagcatgcactgtgaaggacccggaatctttgctggtgcctgcaccccct

SEQ ID NO: 23667 - DNA, 456 bp, Homo sapiens
  source 1..456: mol_type = other DNA
aaaaaaaaaaaaaatagaattatagggtatatacacttttgtttctgatttctttcaatcaacatttattttaaagattcagtcatgttattgtatagtgctatagataatttttttagattcaaagatttttattttttacaaaaccccagaataataaacgttataattatacatttaaatctggttgtaagttttatcctggcagctatttgtcaatatttctagtattataatttacatacaaagatatttcgcaattttttttttttttgagacggagtctcactctgtcgcccaggctggagtgcagcggggtgatctcggctcactgcagcagctgggagtgcaatggtgtgatctcggttcactgcacccgagtagctgggattacaggcgccctgttggccagctttgatatctcaattcctacagttgaggaaacgtcggttttac

SEQ ID NO: 23668 - DNA, 559 bp, Homo sapiens
  source 1..559: mol_type = other DNA
gcgtgggccaccgcgcccggctgaatcaggattttaaatattcactctaatttctcccaactactaggacttttaggtaataccttataaccttaacaaagtttccttattttatacggacttgtaagtcaacaaatacttctacagtgcctattgtgtacaaagaaaggggccgatctctcagatatttgactgataaaccagtaccttttctagtatatgcgaccataggggaaattctctctaggctagataaacggatttatttagattcattttctagagcaatttttgatgtggattttccaattaggaaaggctgcctttgcttgagtgatggccaacacactggcaggtttgcaagctttctcttcatgagggtccacagagctaggtgcaggatctctgcaggttcctacacgggagccggagagcgcctgcgcgtcggagcctctttgttgctggggcgctggggtccagctgcgcgtgcgcagtaggccggcaccgacaagtgcgctgcaccagtggcaccggctgggggcgagccgacctcgagcag

SEQ ID NO: 23669 - DNA, 342 bp, Homo sapiens
  source 1..342: mol_type = other DNA
aaagcaccgattaccgtcatctgcctctgaaagtattcgccgtagcactatcattttcttttaattttattattattatactttaagttttagggtacatgtgcacaatgtgcaggtttgttacatatgtatacatgtgccatgttgttttaaattcaattacccggggcctgtaaggtgagagcccacccagcggcactctgggtccctgccctccggcaagttgccgggacgggcgggaccctaaccagccgctctcccctagcccaggctgggccgggccgaggggtgggggactctgcgcggatgggctgcggctgcgcccggccaacccgcggcgtg

SEQ ID NO: 23670 - DNA, 415 bp, Homo sapiens
  source 1..415: mol_type = other DNA
attaccgtcatctgcctctgaaagtattcgccgtagcactatcattttcttttaattttattattattatactttaagttttagggtacatgtgcacaatgtgcaggtttgttacatatgtatacatgtgccatgttgttttaaattcaattacccggggcctgtaaggtgagagcccacccagcggcactctgggtccctgccctccggcaagttgccgggacgggcgggaccctaaccagccgctctcccctagcccaggctgggccgggccgaggggtgggggactctgcgcggatgggctgcggctgcgcccggccaacccgcggcgtgaggtgcgggggcgcgtccatcacggggtagcccccggcccggacccggagggatgcggagtggcggccgcggcggtggcggc

SEQ ID NO: 23671 - DNA, 387 bp, Homo sapiens
  source 1..387: mol_type = other DNA
attgcaatgattttgttacagttgacactaatttaaaaattggcccttttctgaaaaagttgccctgcctcagatgctgtgtatctgttgaacttttcagctactgtggtttccaaggaatgcacctctatcaaaaatgagcttaattcctaaggaagtcaattattattttgaatcactgtgctggtgacctaagttttgataataacataactaaaagtggatcatggttccagcagagaccactgtggcggtcgtcgcgaccttcggcgccggagcttcgggccctcaggtatggctcagccgcccaaggcgaagcgcacgtggctggcgatccctggggggtggagcctcggctcgaggtccggccgccccgtaccacgtcag

SEQ ID NO: 23672 - DNA, 422 bp, Homo sapiens
  source 1..422: mol_type = other DNA
aaacttctcactgtaacctaaactgcttagcatacaaaactatcgtctacccaatagggttttatgtcctttaactgaaaaggacactaaaaataattattgtggacttgctttcatcctttattgtattggtgcgattatgaaatattattatggcttatactttagcaagaaagtaccagaaaggttattattaatcgacaatgaatgccgttgatgctctttgaagacaggatgctccggctttgaagaattatctaaatctttgagacgtaaattatttgatgtggctaaaaatcctcctgctagaatttaggtccaatcctttaatgttcggatactcaaattctttaacgaaacataaggccagcttgaaagacatcataaaaggccttcgctgtcctttgagttaattatctaac

SEQ ID NO: 23673 - DNA, 513 bp, Homo sapiens
  source 1..513: mol_type = other DNA
atctaaatctttgagacgtaaattatttgatgtggctaaaaatcctcctgctagaatttaggtccaatcctttaatgttcggatactcaaattctttaacgaaacataaggccagcttgaaagacatcataaaaggccttcgctgtcctttgagttaattatctaactgaagcccggcgggggaggagtgctgcagccagctgccgagggagcgctctgcggcgaggccgtttccctgagtcacggagagggcgggaggctgcgcccgtctgcccccgccacgtcctcctgtgaggggctcaggagattcaaacgaacgtgcacctggaagtacgtgggtgggacctaaagcgcccacggaagtgacgtcggtcgccccgagttcctctgtttccccccatgtggcgtcaggaagcgaggcaccgggcgcactgcgccccgaattcctgcgcccgccgcgcgcggcgctccgtggaggggtacctgggcggagttctgtcgccgggatccttc

SEQ ID NO: 23674 - DNA, 219 bp, Homo sapiens
  source 1..219: mol_type = other DNA
cagtgaatctgagaagttcctctccaagggctctgcggagcgaaggcccattcccttggccttctccacttactccaaggtcctggacatcccgggactaagaggttctccagcgtgcacgccaagctctgaggacagcctcaggcttcggttccggatctcaggatcctggaagctgctagacagcctccagaagggcttttgtgattcttgatccgg

SEQ ID NO: 23675 - DNA, 247 bp, Homo sapiens
  source 1..247: mol_type = other DNA
gtgaaaaaggggggaaattttttctttctttcactctgtcgcccaggctggagagcaatggagcgatatagcctcccgagtagctgggattacaggcaaggtgattttcggagagagcgcatcgatactgaactagaaattccaggttcgcagaacagggagggctcagcggcccctggagaaaatgaataatgatattggtctccttcgccctgtaaggagccaaccaacccggatcaagaatcac

SEQ ID NO: 23676 - DNA, 444 bp, Homo sapiens
  source 1..444: mol_type = other DNA
cgaggaatcgaccacgcgcccgttctcttgctgacctgggtgcgacctgcacctgcgagccccgcagaggcctcacacagctcctcaggagcccccctgggtctccacgggacacaccgcgcttcctgagcccgcgccgccgccccggccctgtcacctcgggcccccggggaccccgggcctcaccgcccgcgtcctctggctggtccattccctgtctcggaagtccggggctgggtaaaagccctccttcgtcgcctcatgggcccggacccgccgcagccaccacagccgctgccgccatcaccggctgcttaggctcagtgcgtctgcgcctaggccttagtcggcaggatccaggcgctggcatgcgcattgtaagttcgtaaattgaaattgaacatgcgtaattaatctttctgaataggaaaaaatatgagcatg

SEQ ID NO: 23677 - DNA, 239 bp, Homo sapiens
  source 1..239: mol_type = other DNA
cactctgtcgcccaggctggagagcaatggagcgatatagcctcccgagtagctgggattacaggcaaggtgattttcggagagagcgcatcgatactgaactagaaattccaggttcgcagaacagggagggctcagcggcccctggagaaaatgaataatgatattggtctccttcgccctgtaaggagccaaccaacccggatcaagaatcacaaaagcccttctggaggctgtct

SEQ ID NO: 23678 - DNA, 491 bp, Homo sapiens
  source 1..491: mol_type = other DNA
gtggctgtaacagcagcggcagtgctactcccgacagaagttttcagctgtcacttctaacagctgagcgcttcctatgaagattcaatacttgaaattctagactcgaaggcgaggaatcgaccacgcgcccgttctcttgctgacctgggtgcgacctgcacctgcgagccccgcagaggcctcacacagctcctcaggagcccccctgggtctccacgggacacaccgcgcttcctgagcccgcgccgccgccccggccctgtcacctcgggcccccggggaccccgggcctcaccgcccgcgtcctctggctggtccattccctgtctcggaagtccggggctgggtaaaagccctccttcgtcgcctcatgggcccggacccgccgcagccaccacagccgctgccgccatcaccggctgcttaggctcagtgcgtctgcgcctaggccttagtcggcaggatccaggcgctggcatgcgcattgt

SEQ ID NO: 23679 - DNA, 339 bp, Homo sapiens
  source 1..339: mol_type = other DNA
ctagtctagcgggaggatcacctgagcccagggattccagaccagcctgggcaacacagcgagaccctgtctccatttgaaaaggaaacattagagcagttcctcattatttttacctaggaaaagacaagttttgataaagactaaaccggcaaagtaggtttattattatcctcattttacagataaggaaactgaggctctgaaaggttattgacttttccaaggccacagaactagtcatgctcatattttttcctattcagaaagattaattacgcatgttcaatttcaatttacgaacttacaatgcgcatgccagcgcctggatcctgccga

SEQ ID NO: 23680 - DNA, 374 bp, Homo sapiens
  source 1..374: mol_type = other DNA
atgaccttttaattttagaacagttttagattaacagaatttattttatttatttattttttgagaccgagtctcactcacggccaggctggtctctactttcttaataaccttttaattttagaacagttttagattaacataattattttgagggcagtagggtcctctataggcctgatcctcaccacgattgtgaggaaaggtcagctcagaatccgagcccggaaaccctaacacttccaggggtaggtttttaacctcaaaacgcccaggatctcggacaccccggcagccgtgagctctccactcggcgcggtgcgggggcggggctagccggggcagggcgcgcgcgcgcgcgtgagaacgtccgg

SEQ ID NO: 23681 - DNA, 235 bp, Homo sapiens
  source 1..235: mol_type = other DNA
agattatattttacatgattcagttaaactccaaaattagcctcatgatccatgagaggattgaacgtagttagaactagcggtttctgctactgccactttctggaagcacaaattgagaactcacttttcagtcagggctcaagaaaagcccagcctcccgagtagctgggaaggacagggtaccggtcggaggagtgggaggatgtcccggaagtatttccctgggatcacc

SEQ ID NO: 23682 - DNA, 495 bp, Homo sapiens
  source 1..495: mol_type = other DNA
aacaatatcaatgttcttaaactgaactcacttagaaattgtgaaaatggtacattttgttacgtatatgtttctcggggagaaactctgggagagaggataagccttttgcacagcgctttccagtgtcacaggaaagccttgagattctcaagacgtccctaaggttgggagctccctagattctgcggtaggtcccggcaactgccaacaaccgtcagcggaccccacccgccgaacgccagaacatgtgggcgcgggggcggggggggtcgtcctcaagcgccccggaagtcaccaccccccgtcgccagcggaggcgcccgggcggggcgcgcggctgcgattcggagatgcgtccccctccccggcgctcctgcgcgcggttagcttggggaggggcggagcgtgcggccctgggcggccgttaccgggaacagtgtctggcctcgggtcccgtgaccctcggcggagctggcgaggcggtggcggcga

SEQ ID NO: 23683 - DNA, 312 bp, Homo sapiens
  source 1..312: mol_type = other DNA
tgggggcatgggggggaccccatttccccaaatgttggagccgcccttaagggaacttcccctggactcctctggaggtcttgccagatgggagaaccaggggtccattcaggggcttttgctctgtattcgaagaaaggtctttggtctgctgggtggcgccagaatgatcaaagtcatcatggggcactcatccctgttcccaaaccagggaccaggagtagaggggagggcaggccccgccagggggaggagccgcctcccgcgtccagctgtcggggctccctcccgtcgcggctccgctataaaacc

SEQ ID NO: 23684 - DNA, 528 bp, Homo sapiens
  source 1..528: mol_type = other DNA
gggcaacggtctctcgtcgccgggaccccgccgtgtgccgcccagggacgcgagggggcgctgctgccgcgccaggggcgagggtcccggggcctcctgagcacctcccggccctgcccggtccgccctcggcctcgggtccctggagggctcgcgggtcggggtggcgggactttcgccgacacccggctccccgcctggtggctgcgcacacgaggccggcgacgggacttgcccgcgtctcagcgcctcctgtgtgaagcgggaccgctgcggtacctgccccagggaaggccgcggggagggttacagagcccgtctggcggggatctttatcggagggcttattattaacaacttcctggaggccgcaggggcagtgctggctcactgtgttcagaaaagaattttacaaactgtgctttcctctcggggagcccccaccacggatcagcatctgacagtgggagaaggggcgccagcctctcctccagatcccagctggaggggccagctgcagccacccct

SEQ ID NO: 23685 - DNA, 520 bp, Homo sapiens
  source 1..520: mol_type = other DNA
gtgtttattttttgtggaattatttaaccacttaacactgaagtaccaggtgaagggtaaattgaaataactctttccacttctttaaatatcaatcaggacattattattatggctgtttgagtttgatagtgtcaccaacaattatggccaataatttccatggtaaattcctagaacagaaagatgttgcatcaaattcttgaaatcgcagacttaggaaattaagttacataaacagcagatgtggaattgaaataccattttgtaattccataatcatttcttttttcggaaatttcatttggataaagaaacatggtcaaaaagttacaaatggttatacaaagaaaaacaagtctctcttctatcttacccctagttcctggaccgcgggttcttaacttgggttaggaactagtaatgtgaattttctcaatgcataattttcaatgtacagataatttctccactccggggccgcttggaagggacagctcccctccggcgcgccggcgtg

SEQ ID NO: 23686 - DNA, 291 bp, Homo sapiens
  source 1..291: mol_type = other DNA
ctcccagcctcagagttctttgaacatatttataatagctgatttaaagtctttgtctgctaaagtcaaaatcgctggagtgcaatggcgtgatctcggctcactgcagagtagctgggattacaggtctggtcttgacctgacctcaggtgataaataattctgtagatttgatccctgggtcaataaaatttagtgatcaaccaatgatcagtcagaagaattcctttaatgccctttaatgtgagaaggcatgccttcatacttcaggcagtttacaagacagcctta

SEQ ID NO: 23687 - DNA, 168 bp, Homo sapiens
  source 1..168: mol_type = other DNA
tgatctgagctcactgcccccctagtagctggaactacaagtgcacgccagtgcctggcctacattatattaaatgtgatggaagccatgtattgagtaaaagaatgacttgatctgattcggtggctcacacctgtagtcccagctactatcacgtcactgcactcc

SEQ ID NO: 23688 - DNA, 308 bp, Homo sapiens
  source 1..308: mol_type = other DNA
ccctaattacaatgctaatatttcatttaggatttttgtacataatgcttaggttttactaacagggttatgatgccctggaacatgaatatcttcaattgtatttatttttacttagttgatctattcagaattttgcttatttatatttttattgatataaagattttttctatttttaccatttgaaaatctcaaaggttttacaccaattattttcaagtgataacttgaagtgataccgcaggaattcgttagattacgtctctgacatacctagttatgaaatttcctaagtgctttttaaa

SEQ ID NO: 23689 - DNA, 250 bp, Homo sapiens
  source 1..250: mol_type = other DNA
caccaattattttcaagtgataacttgaagtgataccgcaggaattcgttagattacgtctctgacatacctagttatgaaatttcctaagtgctttttaaattggaagggaggtttcccgggaggagggtgaactcttcttgcgcgggcccagcgccagcggcgggaggaggcagcgcggccgtcgcaggcgggagcgaaggcggggacggagggcgggctcgctccactcgactccggattggtcgag

SEQ ID NO: 23690 - DNA, 348 bp, Homo sapiens
  source 1..348: mol_type = other DNA
caccaattattttcaagtgataacttgaagtgataccgcaggaattcgttagattacgtctctgacatacctagttatgaaatttcctaagtgctttttaaattggaagggaggtttcccgggaggagggtgaactcttcttgcgcgggcccagcgccagcggcgggaggaggcagcgcggccgtcgcaggcgggagcgaaggcggggacggagggcgggctcgctccactcgactccggattggtcgagggggaagcgcagtgcgcaggcgcaactgcctggctctgctcgctccggcgctccggcccagctctcgcggacaagtccagatcgtcgaagataaacaa

SEQ ID NO: 23691 - DNA, 438 bp, Homo sapiens
  source 1..438: mol_type = other DNA
ggctgttctagaacgcctaggcttcccaaaatgttgggattgcaggcgtgagccaccacgcccaattaaatttgataatacattagagtattgtatatgaagtatacggtcagtcagtattattctacttatattaataaatgaactgatgaaatcgagatcgccggcgcgagccagcctaggctccattggcagctgccatgtccacgtgctccgagcttggaaccagctgaaacgctcacgtgagcgggacaggagtctggatcatgttgcttttcttttcaaagccacgaaggttctgtcttccaaaaaaaatgtacatgttcgtaattataaccgaacctgctcggcacattcagaaggcgggtccgcctctttcctactaagctgacctccaagggcggtgcccggccatagccggttgtggctgccgtcaat

SEQ ID NO: 23692 - DNA, 408 bp, Homo sapiens
  source 1..408: mol_type = other DNA
attaagattcttctatgcatttgtatacacacatatatacgctattgtttgtaaaatgaaatcacactgagcttatttaccattaggtaatgattacttagcactatattgtgaatatcatgaacaaaaaagaataacaataggtaaaattcagagtattattttaatttactgttaaaattacccaaatctcacatactttattcagtctatatttttaaaaattggatatataggtcccagttactagatcgcgccactgtaccccagcctgagcaacagagtgagactccgtttttttaaagatttaactgcaattgcatagtattttgtgatttcattattcatctttctaaatgtggtgtaatagactataattttagtaagtccttcttcacgtggttgcag

SEQ ID NO: 23693 - DNA, 657 bp, Homo sapiens
  source 1..657: mol_type = other DNA
aaggagactttcgtctccggtacgggtggagaatccggggtccgcccgcgcggtgccgccctgtgctcagcgaaaggtgcgctcaccttcctggccccgaggatccgctcctcccggccgctggaaagctcagggcggggcccgggcctgcggagaactccagggcgggcgcgggtagggggtccccgcgtttccccagcgcaaggccgcgtcccgctcccgcccgcgccggccccagcagggctcggccatggccgccacctgggatccgctcccggacctcggccgcccgagcctcccgctttccggggcgcagggacccccaggcggcgccacgacccggagctgggtcggaggccaggctggggctcgggccagagcggccgggcctctgggcgcgggagaaggagggcgccccctctccgctcggggtggggccggcgtgcggctgcgggtccttccccaaggccccgggacccgggctcccctcgcctcaggccctttcggcgggtcaggtcggccctccgcgctctccagtccggcgcaggcagccgcaggcgcgggcgggcggtgggggccggggcaggaggaggggtctcggggcccggcggcccgtcccaggccccccctcccggccggagcttggcctgagctgtc

SEQ ID NO: 23694 - DNA, 801 bp, Homo sapiens
  source 1..801: mol_type = other DNA
tgggagcaggacgctccccagtctccacttcctagactaggcagctctccaggatctcaaggagctgccgcggaatcctggccctgggccgcagtttccccaggaggctctgccaagcctggcaccttgcagcccggcctgggctctgtcaaggcccgagccggactcggctccactcagaggccggcccagcacttccctgccgccgccgccccgacctccgcggccgacttcgaggcgcgccaggccgggtccagcgcccgcggccccctgggccgggacaaggagggcgggtgggccgtgcccagggcctggaagtgcaaggccgcgtgaggcgcgtgtgcgcctgcgacctcgggaccggggctcccaaatgaacagcgcgcacagctgggagcagggcttggggagcggggctctgcggccggggatccgtagaagccgctgcctggaagcgggcgccggcagggggtggccagacccggtcgtggagcgtcctagtcttcgggcacggcggggccaggcgagccctcctggttgtcgagcctcggctgagagccgggctgctcgcccttgcttcccgcgcggggctcccagcccctacccggctcgcggggcccgagggccaagaggagggcactgggccgcgcggtggaggagccggcggctcgcgtggggctcgggatcttggggaccgcgacgccggggaaccctggagcccccctccccgggggacagcgggcgcagaccagcggcgacgtcagcgcggagggggggcgggaggccccaaagtgcagcctt

SEQ ID NO: 23695 - DNA, 328 bp, Homo sapiens
  source 1..328: mol_type = other DNA
atgcagctgctaccgtggggcgcagccaaatgaactgtgagcggcccccgggggctctggcagccgcgcctccagggcgctttgctaagctttgtccagccgcggcaacccgcctcccccagcccacggcatcctcaagggcccttgggatcgggggccgggctgggagcggccttaggcaggtctgaaggcaaggcgtgaacgcccagcactctgtctcagctacgattgcggcactgcagtccagcacaaaaaaagttacagtgggacattttcctcatttacagagaagcccagtgacttgtctgagatcaaacagtgactcggt

SEQ ID NO: 23696 - DNA, 308 bp, Homo sapiens
  source 1..308: mol_type = other DNA
atgactacaagttttgtcatttttggtaagatatatcacaattgacatccccaaactagttacttgaatttgagaaacagtatttgagccaagtttaggttatacagattttttaaaaaaataacatgatttggcaagatcatgatgaacctccttttctttgagtaaattaaagtactactggcaaataacagagccttcttacttaaaagctgggtaatttaaattgagtggcactgatgcaaagcttaaagatacttcctttccgctggtctacggacgtgaagaatgagactttctactttaaa

SEQ ID NO: 23697 - DNA, 481 bp, Homo sapiens
  source 1..481: mol_type = other DNA
tcctgacctcaggtgatccgcccgcctcggcttcccaaagcgctgggatttttaaagaggttataaagtgctatatctttgtaaaatatttttatttccagctcctagcacaatatctggtaaatagaagttgaaatatcaataaatagtaatggactagcggttcttcatatataggttttggaccctcttcccagaagaagtgccgagcactcagttctgaacggattccagagaattcctgaatccccgtgtttaacttctgactcacttttaaaattctcccacaaatcctgggattctagaattttggtttggtaccactagtgtcaaagaatagtgggaacgatttaacacacgttatgccatttgaatgccatggcaatcctgtgataattaggctctggaaatcagagcctaccatttctaaatttttgggcggggccgcgcacgcgcacagttgcattggcgccgacgtctc

SEQ ID NO: 23698 - DNA, 531 bp, Homo sapiens
  source 1..531: mol_type = other DNA
tccaaagaactcaaactgatttccacgtaattctcactgatttgtgaaatgaaccttcctggactgtaaatttccccgcaaagagagggccagggccccgggtcgttttatactggccggggcacccagcagatggcgctatgttagtggccaccagctggctgccccccacgtgacctcaaggcggccaatgggtggccacaggagggccgccaccacctccgccgctgaggagactctgggcttaaggacatcgccgctgccgcgccgggggcctgggcttcttgcgggcgcctctccgcccgggagaaccgcccctccgtcccccagagagggacgagcgtctgcgggatccgcagtccggcccgccaggcgagcgcggcgcggccctcccgcctccggccctcggccccgggcggctgggtgccggccgggcggcgggggctgctcgcggcggcggcggcggcggcggcggcgggggggtgggtggggagggcgggcgcccggcggcctcctcttccaccgcccccc

SEQ ID NO: 23699 - DNA, 472 bp, Homo sapiens
  source 1..472: mol_type = other DNA
atgtcttggaatttttgccaatactttctcttccaaagaactcaaactgatttccacgtaattctcactgatttgtgaaatgaaccttcctggactgtaaatttccccgcaaagagagggccagggccccgggtcgttttatactggccggggcacccagcagatggcgctatgttagtggccaccagctggctgccccccacgtgacctcaaggcggccaatgggtggccacaggagggccgccaccacctccgccgctgaggagactctgggcttaaggacatcgccgctgccgcgccgggggcctgggcttcttgcgggcgcctctccgcccgggagaaccgcccctccgtcccccagagagggacgagcgtctgcgggatccgcagtccggcccgccaggcgagcgcggcgcggccctcccgcctccggccctcggccccgggcggctgggtgccggccgggcggcgg

SEQ ID NO: 23700 - DNA, 474 bp, Homo sapiens
  source 1..474: mol_type = other DNA
gggaaagagaataaaccttttgtttggttcttcatttgactatacaaatatcaagcacctactgtgtggttctcctgctcgtcacaataactatatgaggtaatgatgacaacaataatagttaactcttaacagttgtattaactcattacaataagcttgtggttttccccagtctattaactacaggcaatattttgtttcttaaatttatatcttcatatcacaacttttaggttgaggagtcatgtcttggaatttttgccaatactttctcttccaaagaactcaaactgatttccacgtaattctcactgatttgtgaaatgaaccttcctggactgtaaatttccccgcaaagagagggccagggccccgggtcgttttatactggccggggcacccagcagatggcgctatgttagtggccaccagctggctgccccccacgtgacctcaaggcggccaatgggt

SEQ ID NO: 23701 - DNA, 272 bp, Homo sapiens
  source 1..272: mol_type = other DNA
aaacttctaaccaaacattcagagactttttttcctcatggttggatagtattcaattatccattattcctaagtcagcaacctagttttcttgtcagtgaactatcaaatacactctacatttttttattattattatactttaagttttagggtacacgtgcacaacgtgcaggttagttacatacgtatacatgtgccatgttggcctacaaaggacatgaactcatcatttttttggaggccttgtggctgccctcgggggcagcatg

SEQ ID NO: 23702 - DNA, 584 bp, Homo sapiens
  source 1..584: mol_type = other DNA
ttttttaaaaaaatctttccctttattctgacattatgacattaaataaagtccaagaggtattctcaaataacttatgtctataacatattcttctagaagagtctatttgtgttagatctagaaatagaaatgtaaggctgaaatgtattactatgacaaacttgtatgtgtgtattacaatcttaattgtgctaataaggataattataataaatatgcatgattcaaaaaggttagatggttataatttaaaaaaaaattgtccttggatattccatttgatttgctaaaaatatatatacacactgtgtatacatatacacccacactattaagagctgaatatagaagctggaaattgccctgtttccaactcttataatgattcaagatttttcctgttttataacttgagggctggggaacctgttaagaggatcccagcattcaagtggaatgctagaaacgactcctccggggagaatttccccctgcctagcgccacccggaccagactccagtgccgcccccagactccgcgtcttctgaaagagggcgtggtcgaggatcacgttacggaa

SEQ ID NO: 23703 - DNA, 296 bp, Homo sapiens
  source 1..296: mol_type = other DNA
catcttctctgtgtggtggattctccacccacccagtgtggggaacgctgcatcatcaatcttaagcttggtaccaatgtatctgcctcaagcacattttttttttttcagacagagtctcgctctgtcacccaggctggagtgcagtggtgcaatctcggctcactctcagcctccctagtagctttggccatgctggccatgctggtaatgagtactacccaagtgcattaggtactgtacagcaagattattttggctcctaaagcaagattattgatctgtcaactgaattt

SEQ ID NO: 23704 - DNA, 753 bp, Homo sapiens
  source 1..753: mol_type = other DNA
gggagggccgtgtttttcatcggaggttgaaatggaacctccccctgggtgcccggggagagtaccttgggggcagcgcccctccttccggagggcagcatccccgcgggggcgggggctcggctttgatcccagggcactggagacgctctgccagccaggtacgtggagggagtgcagcccgccctcccgggcgacgcgcggggctggggcgggccggcggctccggggagtggcggccgggagcccgcgaacgcgggtgggcgccgtcgcctcactaaccgggcgcctccgggaagtccgggcggggtccgccgctcacccaaactcgcggagccgaggggctgggcaggggttgggcgggcgcgggggccggcgaggcggatccgggaacgggtggacccgggcggccaagccccttcagcgccggcccaaccgccccggcccgggccagtccagcggggcgggggccggcgacacaaaggcggcggcgggtcctccgggcctccggcctcgggcagtcgcagggcgccccgggccgccggacctcccctcgcgttgcggcccgtcagccggcgccgcccgtcgcccgccctcagccgtccggcgaggcgcggcttcctccgccggcgcggggtcccctggttaacccctgcccggcagcgcggccgctgattggagaaggcggggcgccggggcagcggggacccccccccaccttcctcgtcgcgaggaaacacgcggtttcactag

SEQ ID NO: 23705 - DNA, 829 bp, Homo sapiens
  source 1..829: mol_type = other DNA
ggctggggcgggccggcggctccggggagtggcggccgggagcccgcgaacgcgggtgggcgccgtcgcctcactaaccgggcgcctccgggaagtccgggcggggtccgccgctcacccaaactcgcggagccgaggggctgggcaggggttgggcgggcgcgggggccggcgaggcggatccgggaacgggtggacccgggcggccaagccccttcagcgccggcccaaccgccccggcccgggccagtccagcggggcgggggccggcgacacaaaggcggcggcgggtcctccgggcctccggcctcgggcagtcgcagggcgccccgggccgccggacctcccctcgcgttgcggcccgtcagccggcgccgcccgtcgcccgccctcagccgtccggcgaggcgcggcttcctccgccggcgcggggtcccctggttaacccctgcccggcagcgcggccgctgattggagaaggcggggcgccggggcagcggggacccccccccaccttcctcgtcgcgaggaaacacgcggtttcactagtgtgtttcatcactactaatccggaccgaaccgatccggatggggccggaggcgggtcctgggcaccagcggttccgacccccccgccctccgcgccgcacccgagtggcccccagccgagcgggcccccacctcctggcccggcctgggccctcctgcgcctccttggcctttgtccggcgccaggaggccggtcccgcgccccccgcggccgcccgggcccgggcccgcgtcgggcgcctggctctgtacgcgagcccggggatctgcggccttcgtg

SEQ ID NO: 23706 - DNA, 242 bp, Homo sapiens
  source 1..242: mol_type = other DNA
ctggagtgcagtgcagagtagctgggacccacatagttgcctttatggggagcacctggagggcccctacattaaaatataaaacaactatttataacattttcctttgacctgggtcttccaccctggcccactggatgagggcaggcctgggagcaggtctgggacctctgggggagcccagcgtgagggggtcagagagcagctggctggctgactgactagtgcccagctagagagct

SEQ ID NO: 23707 - DNA, 406 bp, Homo sapiens
  source 1..406: mol_type = other DNA
aggaaacaatacaatttatattacagttttattattatttaaaaattttatattaacaaaatgagatgggtgttgcccaagggctggactccagcatcctgactcctctgtgctgcagaaatttccagctggtcttttgctaccggccagcagtccagttaagaattgttgccctggtggccaggccctgggctccgccccttccccaccagaccgggggaggggtcctcctcggcatggagggggcggatgctggcggcccgggtctggccacctgggtcagctgcacgcccccgccccgggctggccggacctcgtagcccaggtcccaccacgccgtgaagtttgcggaaagttttgcagttgcttccccgcccgcgccagcgggggagttgtgacgcagcgt

SEQ ID NO: 23708 - DNA, 358 bp, Homo sapiens
  source 1..358: mol_type = other DNA
agggctggactccagcatcctgactcctctgtgctgcagaaatttccagctggtcttttgctaccggccagcagtccagttaagaattgttgccctggtggccaggccctgggctccgccccttccccaccagaccgggggaggggtcctcctcggcatggagggggcggatgctggcggcccgggtctggccacctgggtcagctgcacgcccccgccccgggctggccggacctcgtagcccaggtcccaccacgccgtgaagtttgcggaaagttttgcagttgcttccccgcccgcgccagcgggggagttgtgacgcagcgtggcgcacgctggggtcctcctggacccggcg

SEQ ID NO: 23709 - DNA, 364 bp, Homo sapiens
  source 1..364: mol_type = other DNA
agggctggactccagcatcctgactcctctgtgctgcagaaatttccagctggtcttttgctaccggccagcagtccagttaagaattgttgccctggtggccaggccctgggctccgccccttccccaccagaccgggggaggggtcctcctcggcatggagggggcggatgctggcggcccgggtctggccacctgggtcagctgcacgcccccgccccgggctggccggacctcgtagcccaggtcccaccacgccgtgaagtttgcggaaagttttgcagttgcttccccgcccgcgccagcgggggagttgtgacgcagcgtggcgcacgctggggtcctcctggacccggcgtgtcct

SEQ ID NO: 23710 - DNA, 416 bp, Homo sapiens
  source 1..416: mol_type = other DNA
aagtgacctcaacccagatggagaggccccaggccctgggggctgccccggtcacagctgcaagggacagggggcacgtttgggttcctgcggttgtgctgaagtgaatagaacccgagatccacgagcagcactggttctggggttttcttgagggccgggcccccagtcggagccggcttcaggaaagcaggtccgagaggggtcacccggcccccggtgagaattcgcagctcaggccaggccgcatgggggcggcctgcacctgacatccgaggctgggtgctggacctggcctccctgcagtgggtggccatgcagtgcgacacacagctggactggatctgcaagatcccagggagcggacgtgcgggagcccgacgacaggctacccatcgcgtgggagagggcggggt

SEQ ID NO: 23711 - DNA, 324 bp, Homo sapiens
  source 1..324: mol_type = other DNA
tgagccaagatcgtgccactgcactgtcctggtgccctggctccaaagctgtagggcctggtctctccttggaaagcattccagatgtcctctgcagaggtcgaactccaggactgcaggcctggatatctgggtctgggcttgggcacccagacaaagccagcccgcctcgttcccacggcaaccggcgggcgcccacgactggcttgggaccccggggccacagccccgccccgccccgccccgtgctctcggcggctgcacctggtcgcgcgggggcggggaggcgcggttgctagggaaaccggaggacgcccggtagcc

SEQ ID NO: 23712 - DNA, 597 bp, Homo sapiens
  source 1..597: mol_type = other DNA
tggccttttgaagtcgtctacttgtaggcttcgaggactctcagagtgacacgtgacagcagcagccacctccatcacccctgagggcggagcccaacagccccccggggatacgagaaatggagcgccagagccagggccccgtctctccgcgcggaggagggctgcgtccccactccctcttccagccgttccccacccccaaactgtggaaggggcgggggcgcgcgcgctccaccacgcacgcgcccccacgcacgcgcgctccctccgcgctcgcgcccctccccaccccagcccggagggggcggggctgcgggcggcctcagagggtgcgacgcccccagcgcggcggcggcgctagcgagcggccggcggggcgcgggttgctgggcgcgctgctccggcggggcccgctggcacagccgcctcgcgcgagccgcccgcccggcgggggaagctgcgagcgctccgagcgcccggcctagggccgctggcgctgccctcccgccgccaccgccctccgcgcccgggcggcctcgcgctcacctcccggctgtgccgcgcgctaggcggagcgaggcgcccgccgccgcc

SEQ ID NO: 23713 - DNA, 662 bp, Homo sapiens
  source 1..662: mol_type = other DNA
aagattagttagtttaaccactcattaatttgaagagaccagttttgccttttcattttatcaaggaataagaagctttcaattgttcttgagaaaaaaataagttatctaaatgtttataacataaaaataaccctactgattctcttatttctgttctgtggcaaagaaatctatttatgttgcctctgggataataggagaggaaaaatagagccttgtttttctacctttgatttttcacagatggaacttgagttcagtactgagaagttgatataaatgttaaatggaataataacaatgcagatcttaccttctatttggagtggtttactgtgtaatactgaatatcctaaataataggatatgattgtgttcatcaaaccgtatgacagatatatctgaccccataaaaagatttttgtaaagtcctttaaaatctgtaaatgctctgaatttagatcaacctaacataaacagatactcattttaggtaaaattttttttctgcctacatttataatctttgattcgtgtaaattttttacttggaagcgaatttatatttccaagaaaaacctcataactttgtaatttttgagttaaaatgtgaaaactaaagaagttgcagaactagaccattttattttgaaagattc

SEQ ID NO: 23714 - DNA, 440 bp, Homo sapiens
  source 1..440: mol_type = other DNA
gtgctgacaggtccctgtgtgcagcacggggcacttctactctgcaggcgcggccgggcggggagggggtggggaggcctcctcatcgccagcatggactcttcatgacgcgtctggagaaaaggtgtgaccagccccttccttccctgtcccaggtcacgcctgtccccgtggggaggctgggcccctccccccagccactcccgtctgcctcagggagcgctgcttccagcgggagcctcgggggagggtggcggggccgccgtgggaggagccgcgccgcatctcaggcgcagtctctaggggctgtgcgcatccgtgggggggacatgcgcatctcaggggggctgctcgggctgtgcgcaacccggggggggtgttgcgcgcatgtgcatccgcgggggctgtgcgcatctcggggtgctgtgcgctgctcctct

SEQ ID NO: 23715 - DNA, 453 bp, Homo sapiens
  source 1..453: mol_type = other DNA
cacaggagggggggcaccgcccgggagcttcccctgcgtcaaagcctcagtctctggtagttcctgggccttggaaaggccaaagccactggaggcccagattagttgggtctgtaccaaagcttgcttagggcagggaccaggccccctctgtgtggccctagcacctggccaagtgcaggtggctgcaaattggggcaatgctcctgttatccacacagtgtcatcacagagcaggtgctcacaggctgttgggtccccaccctaccatggtggggagcaaacaatgttatggttccgactccccgggaggccaggccgggctcgctgcgagaagagagcctggctctgatgtccactgtcttccagggagcctggtgggaaggaaggagtgggcagcggcccctcgctctgcgggcctctcctgagggagaggtgatgtcccctctagcc

SEQ ID NO: 23716 - DNA, 762 bp, Homo sapiens
  source 1..762: mol_type = other DNA
aatggaggccggtttccctctgcggggaggaaaccccatttccccagacaggaaagaaccctttcttcccagcttgtaggacacttcctggaccgggggcctggaccgggctccgaaggggctggctcccggtcttgggacggcaagctctcggctttcgtgagagcctggtggaatcggtgttccccgaaggctactctgcgggggcgggggctagtccgggccttcccggcagtatcgtctcccccgtgggggctggggaggtgcccccagggctcccggagcggcggcgtggccaaggcccgaaccgggtctgagtggcctcctgggcccgggcagggcgagggcggggcagggcaagccggggaagggcggcgggtctcgcccctggcacccgctctcctcggggcccgtcccatcccccaggcctggccgaccccaggtccttccgtgcgcagtcggggctcgcaaggacgaatcccgcggccctcgaggcaggcccgggggagctcccggccctccacccccgcaggccgcagatcccacgcacccccgatcatgggggccccggagggaggtcgcgaggccgggctcacggtggccgcggttcgcccacgtgcgggcccggagctggcagggcccggtcccgagcgtggccgcaaccgcggggacctggcacgtgcggggcagccccgggggccgcgtacgccacttccggtcccggagacaccgcccagcccgccgcccggttgccatggcgac

SEQ ID NO: 23717 - DNA, 533 bp, Homo sapiens
  source 1..533: mol_type = other DNA
acactgctggcagggaggcggctgctcttcctcctaagggaaaagcctgcagccccgtgctgctgggccgtggggtgagggggaagccaaagggcccctatcacccctcaaggcccggggctctcacgagggaactcagccctgctcagccggtcaggactctttcttactttaaattatccattaatttcctccaactgaaagatactctacaaattttctgttgttcctctgaggaggtgtgccatgtgccaccgtgtgccatatgcagctgacacgcctgtgcgtctcgcctggcgctggagagcgagcttgcccactgcctgtggcaatacacaggcctgccccccggcctcccagaacctcggtgcctggagggcaggtgggggagggcggaatggaggccggtttccctctgcggggaggaaaccccatttccccagacaggaaagaaccctttcttcccagcttgtaggacacttcctggaccgggggcctggaccgggctccgaaggggctggctcccggtcttg

SEQ ID NO: 23718 - DNA, 660 bp, Homo sapiens
  source 1..660: mol_type = other DNA
agcagacgccatggtgccgaggtggcctccacaaccgccctgtgcgcgaccctccctcccccacacttgtcactttgagggacacgtgctcaaagcctgctagctggcagcctgtgtcctcggggggaaagagggcaggcgctccaaagctcctgcgctctgtggctcccccaggtgtgccggccgccctgagcccctccagcacctcccggaggcgcctgcaagacacctaagcaggcgacgtccccgcccctcgaccatggcctggtgaagaagccggccaggcccgatcagccccatccccgccgcacgagcggcgcctgcggacagctcctggggccccggccttgtcactccggaggcgggaggctccggggggtcgggctgggaagatcgagccggaggccgctaggctcccaggccccggccgaggctgcgcggccgcacggtgggcaggctcgggtgttccggcaaactgccgggtccccatcttctaaagagaggaggccctttctccagctctgcgggagcccgacccagcccacccccgggctgcacctcggcccctccccggcccgcgcccctgcccggggcgggccaggaacctcggcccgcgccgctggggactctggagcggaggaggaagggttttataacccg

SEQ ID NO: 23719 - DNA, 394 bp, Homo sapiens
  source 1..394: mol_type = other DNA
gtgagccgagatggcaccactgcactccagcctgggcaaaaaaaaaaaaaaactcaatttcagattttgatgaacatttactcaatgcctgagcaattcatctctagtaacagaataatttgtacataaataagtggtgctcaagtcgttttttaaaagattgaaagcctctgtttgtctcctctacaaaaagcacaaagcccaacagccttgcaaaattggtgagcttattcccattttacagatgggatttgatattaactctgacagagctaataccaagcggctccttcctaagggccttactgcatccaggacgttatcagcgtcttgcagctcccacttggggcctcccgctcagaggctgctctggagctcctgggccctgtgacac

SEQ ID NO: 23720 - DNA, 590 bp, Homo sapiens
  source 1..590: mol_type = other DNA
ggtggggggcaccaaccacagagctggaaaataagtgggccttctggctggcatggggcgacacaaatgccccatgtgggccggggtccaggagcagactccagcctgagtcccctgtgcccatggtacccaccaggaaggtgctgcaggctggctcctccaggccctggcaggaggtgctgaaggacatggtcggcttagatgccctggatgcccagccgctgctcaagtacttccagccagtcacccagtggctgcaggagcagaaccagcagaacggcgaggtcctgggctggcccgagtaccagtggcacccgccgttgcctgacaactacccggagggcataggtgtgggtcctcaactctgggcttggcccaggccccaggttcctggtcagctcctaccagctgagccctggtaccctgtcctggagggccaggcagccccccaagctcatcagcagggcctgcgagtggggacaggcatgtctttgggtgtgctcagacctgagggcccctccccttccagaggggacggtagctgcaggactctgctctcctgcggccatgggccagggttgggctactgc

SEQ ID NO: 23721 - DNA, 369 bp, Homo sapiens
  source 1..369: mol_type = other DNA
cagggcttcgccatgttggccaggctacaggtcctctcaggaccaggccctggctggacttggcggcaggagctctgcatgggacctaggtctcagctgagctggagatcacttgctatgcccagtggtcagacccggaagactgcctgggaaactccctgcactgggaggggaggccccgtaggatgcaaggccccgccccagccccgtcgggtcgccccgcccagcggccccctccccgccgccggcgcgcggcttctttcagcaccaaggcgtggacagctcccgggccggcgcagcgcaggctggcgggcggggcgcggagcccggcggccctccccgggggcggcgcccaccggagccggacgc

SEQ ID NO: 23722 - DNA, 463 bp, Homo sapiens
  source 1..463: mol_type = other DNA
ttccataggaacagcacgcaggctacaagattgacagctgccctcgaccctgactgtggggttctgtctggcaggctggagtcccgcgtgtcctcagctccagaagccctgcctccaatgacctggccttggttcctatagcctcggagacgacgagtccagggcccaggctgccccagggctttctgcggggattcccaggggcttacctgcgagcagctcatcaggcccagagcctctgtggccccagagcagccagggcttcttatgatcagagtcatgatagggttagcctgggcaaggtgctggcaagcccagtgactccagagcctgcagctggggccagggcagcaggaccctgattttgcctgatcccatccctgaaatcagggtggattaacccgcagcctggcctggggtgacttggatgactagcctgaggggctctggccacccctagcct

SEQ ID NO: 23723 - DNA, 418 bp, Homo sapiens
  source 1..418: mol_type = other DNA
gtctttaaaaaaaaaaaaaaaaagtatttaatgttatcatccaacaattcaatacaaacctccttcaattttgatgaaagctgagaattggaaataatttatatactcacaggcacagatacctttgccaagctggtcgggtcggtgcctaccccagaattcgggggcgcgggagggcctgactcaagctggcctggccctgagcgcatctgcgcgcccgaagcctgtccctgaggcacggagagagcaggcgcaggccaggctgccaggccgcagggctctgtcccgactctcagagacttggcctagaacttggaggcccgctgctcaagacctttggggctgccaaagcgcctgaccaacggccggtgccgctgcgggggtccggcggcttccgttccgagagggcggggcggcg

SEQ ID NO: 23724 - DNA, 362 bp, Homo sapiens
  source 1..362: mol_type = other DNA
gtgcagtggcgcgatctcggctcactgcaactgttggtcagactggtctggcactcctgacctagcgcagcatgggagtcactacaaagcttttcagcagctgttcggttttctctttcgagacagcagagagaaaataagtgcactgtggctatttacataaaactttattactttaaagctctaagggctcattttgtgtttctaactttcctatgttgataaagcaaatattagatccttatttataaatagggaagcaattctcattctggacttgctcagatttaggcagcaatttggaagcaaagtcagtttcataactcagattgagggcttgaagcgtgcagccacggaacgga

SEQ ID NO: 23725 - DNA, 559 bp, Homo sapiens
  source 1..559: mol_type = other DNA
ttttcctacaaaaagctcgtgttgcttttataagaaaaaagttattttctgaaagaacctctggccagcctcgggtgtctgaggtacctcagggaaagctgggctgggccggccgcccctgcccggggcaagagcagcgtcgggaccggaggaccagtcgggggatggggccgcagaggtggccgcgcgccgggaagtgctcaggccagaccctccccactcgttacacgccctgtgctgggcacggggaggagcaggacgccaccctctggaaccacccagatcgctggggcctccgagaacccggagggcggaaggcctgagggccccctgcagccgcctactccagccggcggggaactgcgccagcccgcgcgcccgccgagccttcggtgactgacgggaggcccaatctctcccaagagagggaggcttagaggcctctacgtgattggctaacagcgcagggagccgggcgctgtcccgatgattggcaggcgctagacagccctcggagggggacggcgggggctgccgacttccttcccagcggctgccc

SEQ ID NO: 23726 - DNA, 832 bp, Homo sapiens
  source 1..832: mol_type = other DNA
agcgagtggccgtctctcgccggctgtgcctccggcctgctgtgcggctgcagggagggagcagctctgcggcccaagctctgtcacctcagctctctgggccgcggctcccacgtgagaaatgaggtgcgcttgttggagagggggcccccgttgctgcgtggagcctcgggggacgggtgctccgggaaccacgcataccggcctccccagcccgtcgcagggttgcagaggcgccgagggctgggggggctgccggggctgccgggccctcgtgcaggctcctccccgcagcctcgcggccgggcctggagaccgcgtgcccggacgccgccgccagcctcgtgggccgcaaaggggcgggggcggcccctggcggcgggaggactcggccgcccgagggaccccgggccaggctccggggtcgccccggctgggtctctgcggccccacagctctgggcggggatgggggcgccggcgcctacgcgcgaggccaaccgggggaaaccgaggcagtgaatggcccaggccccgcccggttatcccggagccaggccgggagcgcccagtgtcccgcgaccgcagccgccgcagcctgacagtaggatgcggagcgcgggttgcttccccacgccgggccgccgtcgggatgggcagacggcgcggccggtacccgaggcctgcgagcgcgaggcccgcggggcgctgcggagccgggagcgcggagccgggggcggaggggggtcggcggcggcgccggggccccgaaggcggctccgggcgcggcggagccaatgggcgggcgcggggcgggggccggcgggggcggt

SEQ ID NO: 23727 - DNA, 787 bp, Homo sapiens
  source 1..787: mol_type = other DNA
cctgcgagcgcgaggcccgcggggcgctgcggagccgggagcgcggagccgggggcggaggggggtcggcggcggcgccggggccccgaaggcggctccgggcgcggcggagccaatgggcgggcgcggggcgggggccggcgggggcggtggcggcggcggtggctcggggaccactggtagcggcagcagctcgcgcccgcgccctcctcgtacccgtgcgcccccggagaccgatcccgccccgcggcccaggccgggcctggtgagagccgcggggggaggggccgcgtccggctccggaaccgggagaggcgccgccgcccgtggggtcccggcgagtctgcgagccgctctcgcccggggcgcacaggctcgagtcctcgtttcagggccggcccccggctgggcggagccgagacccgctggcggggctcgcggcgtcggggtctggggtccggtcctcgcggggccaggtcgggggccgaggggcggggcgggcggggacctcgggcgctgtccaggggctgcgcagcctaggcctggacgcccgggcgcggcgcagggcagcgagggccggggtcaggtcggggcagcggcttctcatcgcggccccgccggccccgacccaagcggtcccagcccgcgggacgcacacggcggctgcgcgggagcccccggcccctccgctcccgctatcttccgagggacggtgccactcgggaccccggcccctggggagcaggggtgggtgtcaacaccccccaccctgcaggctggggccggg

SEQ ID NO: 23728 - DNA, 455 bp, Homo sapiens
  source 1..455: mol_type = other DNA
cctggggtcgggggcggcggggagcatttccggccctcctcccccgagtctgtcgcccaggctggcgtggctgttggggcatcctcaatgcccatctgcagctcagcccacaggcccgtcctgggcagggtgccggggcctcaccatgcccaatggcagcaagccctgctcctagtacccccggggcttcccgtttcttgcatcaaacagcccctttggagaatctgatgacaggtgtggaagctttcccgagaggcagccactttagagggtctgacgctccccactagagagtcggatcttcctctagagagtccgccagcctgggaaacagctggtcgctggggaagctgcagcctccctgctcccctgccaggcgtcgggcgagagctgttctgtccgacaagcgcacagtgtgggaaggcgctgggctaagggctgtgcttcccggagct

SEQ ID NO: 23729 - DNA, 435 bp, Homo sapiens
  source 1..435: mol_type = other DNA
tggcagacggctgggctttccctctagggtgaagactctacggtaaaatggcctggctagggcggagctgccacgccagtttggacttactccacttccaccttttccactcttcaaatgatcacatttgcatattgggaacagtgtaaaactgaacggcacagtgccctgggagctgaccatgagcccttcgcgctcagtggccaactctggcctgagtgacagtgtggagcagtgccttcagcgcaacccggatgccaggtatccctgctggcctgggcctgggcttcgggagagcagggacttacctcccaaaggttggagctacacacaggagggatcagctcctgggtgtgtcagaggccagcctggggagctctggccactgcttcccatgagctggggacacggcagtgatgctgcggtctctcctcc

SEQ ID NO: 23730 - DNA, 333 bp, Homo sapiens
  source 1..333: mol_type = other DNA
ggccttccaggggcatatttctataagtccctggtacccctcctgcgcacgcgggggatacaagctcgcataacctggcttggacaaacctgataggtttccacaaacggcctcaggaacagccaagtttgcctttctacctgcttccccctcctgctgcgggggcggaggctgtaggcggaagcgctgcgcggagaaccgctctcggcgcggcggcggctgctagggcctgccgcagccgcggccactcggaaagggcgggacttccccgcagggcggggtggggcggagcgctctatcagtcctcccggtcgcccccctcccagcaaccgg

SEQ ID NO: 23731 - DNA, 681 bp, Homo sapiens
  source 1..681: mol_type = other DNA
cagataatcaaattattttgattattttataaaaggaatgatctatgaaatctgtgtaggttttaaatattttaaaaattataatacaaatcatcagtgcttttagtacttcagtgtttaaagaaataccgtgaaatttataggtagataaccagattgttgctttttgtttaaaccaagcagttgaaatggctataaagatctgcaaataatgattggaattgcacaataaacattgcttgatgttttcttgtatgtctacattaaacttgagaaaaagtaaaaattagaacactgtatgtagtaatgaaatttcagggacccagaacataatgtagtatatgtttttaggtataacaaaattaagatactgacatgtacatggaaaattctagggacaggagcatcattttttccgtatgtttattttcttgagtaacaaatgcatgaaaaattaatgcttcacctaggtaagatcattggtctgtgtgaaatcacaaatgtttttctttcaaagaaatggccatgaatatgtgtaagtatacttttgaaaatgagctttcctaaactattgagagttctttccacctctatctgcacgagcacttagcttgttcagatctctgcattttataaatgcttcttaccaagaaagcatttttaggtcattgcttgtaccag

SEQ ID NO: 23732 - DNA, 579 bp, Homo sapiens
  source 1..579: mol_type = other DNA
aaggaaccctagaggcctcccttcccggcaccccggccgccggtgccccgaggctctgccgactctttgttaagcgaggccgcggttcctccgccctcgctaggcccagcagttgcctccagtgcccccaaggactggcggccttgacctgctgctatggctgcagcggcagctgctacaaccgcgggcgcggagcgaatcccggagcccaaagtacgcgctgtcccggcccggtcccgccgcaccaccgccaccgcctcacggcccgttgctgaaggggggaggaagggcggggccggggctacggctcccggaaggcgcctaggctcctcagatactctgaaccatatttacatgaacatgcctatagtttaaactgttgcatatatggccacgtggtcccacacagcatggccagcttccggagcaccggttccgtgtgacgtcaacttgaccccaggggcggggattatgtaattttcccaaaagccccacctcgcctcagccgggcgggagagagggaggtctcgcgctttccccggggttgcgtcccgccccgcaggctgcgcgcaggcgctg

SEQ ID NO: 23733 - DNA, 610 bp, Homo sapiens
  source 1..610: mol_type = other DNA
tacaaaaataagaagtttgagattgtagctgaaataaacttttaatcaggtgtgaccactagtggccaacagtgaagtcatactttgacttgacctctaaggcttctatcagtccacgtaataataacctgaatgtaacttcctaattcctaaataaaaatatgataaatttgataatttttatcacatttgataaatatgatgtctcaaatagagcattatgggaacaagattcttaaaatttattgaactgaagtagaatgtatcttctggcagttatacatttatgatataatgccatcatgaatggtatcaaaccagaataacaaaggctggttaattatagtagtttctttcaaaactgagattttagtttacctttgcttcatttgaagttgatttaatttttattcactaatgtagatattggcaattatttttataactatcttctagaatgttatggtgcaagcctaagtttttgaataatactataggcagtattctaatttggatttttttttaacatatgtttcaagcttaatttgaacagagatttgagttctgatgccacctgtaagctctgaattcacaggaatcaaccttaaaa

SEQ ID NO: 23734 - DNA, 521 bp, Homo sapiens
  source 1..521: mol_type = other DNA
cctcagcgactgagtctagacttgaggaaagaggactgagtgaggccatcattccttgttgtcattttagattaggtcttcctgacaacggccaaaacgagtattctggaaatcagttggatacaaacacgttgctcacagctccgtgggaaagttcccccgcaactcggagtcaccgctcggcctggcccggccacgccgacgagcgcgtcctggcccgctccttacctgtggccgaagccgaaacccggcccagcgccctgcgtccgacacccctgcccggcctgcctctcggcctggccgccgcctccgcgatcgcagcggttttgccccggatgcccgtagaatgcgagcggctcgtcagcgcctgcgcgcagcctgcggggcgggacgcaaccccggggaaagcgcgagacctccctctctcccgcccggctgaggcgaggtggggcttttgggaaaattacataatccccgcccctggggtcaagttgacgtcacacggaaccggtgctccggaa

SEQ ID NO: 23735 - DNA, 524 bp, Homo sapiens
  source 1..524: mol_type = other DNA
ttgctcacagctccgtgggaaagttcccccgcaactcggagtcaccgctcggcctggcccggccacgccgacgagcgcgtcctggcccgctccttacctgtggccgaagccgaaacccggcccagcgccctgcgtccgacacccctgcccggcctgcctctcggcctggccgccgcctccgcgatcgcagcggttttgccccggatgcccgtagaatgcgagcggctcgtcagcgcctgcgcgcagcctgcggggcgggacgcaaccccggggaaagcgcgagacctccctctctcccgcccggctgaggcgaggtggggcttttgggaaaattacataatccccgcccctggggtcaagttgacgtcacacggaaccggtgctccggaagctggccatgctgtgtgggaccacgtggccatatatgcaacagtttaaactataggcatgttcatgtaaatatggttcagagtatctgaggagcctaggcgccttccgggagccgtagccccggccccgccctt

SEQ ID NO: 23736 - DNA, 298 bp, Homo sapiens
  source 1..298: mol_type = other DNA
tttgaaaggcagttcggaggctcagtacctcatacgacttttaggaggaccggcgctttgcactgcgtgaagtgctcggagccaaaggactggcgtcccgtctcctgcgacccgtgggccggccattcctgactcaccgagggcggcgctgacacagcagatccggtcgcaggcagcgtccagcatggactggtccaggcacctccgcctgccgggccgccactgcacagagaccgccggcatccgagccgtcttggcgcgcaagcgcggaaggaaggagtagaactcctcctcagtg

SEQ ID NO: 23737 - DNA, 281 bp, Homo sapiens
  source 1..281: mol_type = other DNA
gggattcgggttcccctcccgcagtgaaactggaagccatccggcgagtgttggtccagcaaggctcgggctttctgcaggaagctggatcagcccccttctgcaggagaggtggcgaaccgggcagagatcgctcgctcgctcgcagactgagcgaatccgaactttgcccttcttgcccatggtggaaagggggagttgggaacgtctctttccgaaccgcacaagtatgcagctaactacttccgcactgaggaggagttctactccttccttccgcg

SEQ ID NO: 23738 - DNA, 281 bp, Homo sapiens
  source 1..281: mol_type = other DNA
aacttccaaaaggctttgctagaggtacctttactattaagatttgactaaggagaagcagcagcttcttccactgcactcccaaaggaattagatggatttgtggagagctccatctgaagacacagagtgagtctgccacttttgaaaggcagttcggaggctcagtacctcatacgacttttaggaggaccggcgctttgcactgcgtgaagtgctcggagccaaaggactggcgtcccgtctcctgcgacccgtgggccggccattcctgactcacc

SEQ ID NO: 23739 - DNA, 505 bp, Homo sapiens
  source 1..505: mol_type = other DNA
ggggatcctaccgactctgagttgagtctttaaagacttgacaaaactattttcggtcactgtcgctcccgcccctccgacgaaaggctgggccaaaggtgggggggttgcccgctgggggcgggtctcgcggtaactcgactcgggcggccaaacctccggaggccggggacggaaggcgggcccgcagcagatcctggatccggaatctcccgggcaggagcggaatctgtcccgaaccgggtctgtgaggaactcgcgaacttggattaggaaatcccggagcccggatcgacaaatcccggaacccggaattaagatcgccaagtcccggatcgcggagcacagagcacggagtggactcgacgcggagcccggagtccggatcgcggcaccgcgggacgggacggagcgatgtcgggccgaggcgcgggcgggttcccgctgcccccgctaagccctggcggcggcgccgtggctgcggccctgggagcgccgcctcccc

SEQ ID NO: 23740 - DNA, 415 bp, Homo sapiens
  source 1..415: mol_type = other DNA
cttgccgcccaggctggagtgcagtggggcctggggatcctaccgactctgagttgagtctttaaagacttgacaaaactattttcggtcactgtcgctcccgcccctccgacgaaaggctgggccaaaggtgggggggttgcccgctgggggcgggtctcgcggtaactcgactcgggcggccaaacctccggaggccggggacggaaggcgggcccgcagcagatcctggatccggaatctcccgggcaggagcggaatctgtcccgaaccgggtctgtgaggaactcgcgaacttggattaggaaatcccggagcccggatcgacaaatcccggaacccggaattaagatcgccaagtcccggatcgcggagcacagagcacggagtggactcgacgcggagcccggagtcc

SEQ ID NO: 23741 - DNA, 346 bp, Homo sapiens
  source 1..346: mol_type = other DNA
aaattctataaatactggagaaagacctctttttttaaacggaggtttctcataagccaaatttcttttgactagaagcctcagccttggccaagtcgaccgttcaccagctgggtcaagtctggagcctcctaggtcccttggcagttccgagctaccagtgctgttctgccccacagagcacttgccgcccaggctggagtgcagtggggcctggggatcctaccgactctgagttgagtctttaaagacttgacaaaactattttcggtcactgtcgctcccgcccctccgacgaaaggctgggccaaaggtgggggggttgcccgctgggggcgggtctcgc

SEQ ID NO: 23742 - DNA, 399 bp, Homo sapiens
  source 1..399: mol_type = other DNA
aagttttagggtacatgtgcacaatgtgcaggttagttacatgtgtatacctgtgaaatcttcaagagctcttccaaccttgagattctctgatggttctgctgcaggtccaaggagctgaggcaataccttgagtctgggttcttcgtccccagtgacctgggggagccccaccgcctccgccccaaggttagcactgcatccagctgactcaggtgggcccaggagtcatcagcgtgattccagaacccccaatctattggctgtgcttttcccaacacacacattctgtctggtggaaggactggctatcctgacagccttccccgcattcaggttgaccaacatggcctgcggccagagggcacccacctgactgcagccccatgcataaatgta

SEQ ID NO: 23743 - DNA, 276 bp, Homo sapiens
  source 1..276: mol_type = other DNA
taaagctggggaagagactcaaatcttcaagagctcttccaactttgagattctctacaggtccaaggagctggggcaataccgggttattcgtccccagggacctgggggagccccccccccaccccactgcatccaggcgggcctgtctcaggcgaggtgccccttttcccaacacacacattctgtctggtgggtgatccttcaggttggccaccatggcctgctgccagagggcacccacttctgtgcacaaccctcacaacgctggtgatg

SEQ ID NO: 23744 - DNA, 372 bp, Homo sapiens
  source 1..372: mol_type = other DNA
aggtcagacgtgagaataggcaggcctttgacaactaaagctggggaagagactcaaatcttcaagagctcttccaactttgagattctcgtccaaggagctggggcaataccttgagtctgggttattcatccccagggacctgggggagccccaccgcctccgccccaaggtgttagcactgcatccagctgactcaggtgggcccaggagtcatcagcgtgattccagaacccccaatctattggctgtgcttttcccaacacacacattctgtctggtggggactggctatcctgacagccttccccgcgttcaggttgaccaacatggcctgcagccagcacttgggtcaccccatgcataaatgta

SEQ ID NO: 23745 - DNA, 411 bp, Homo sapiens
  source 1..411: mol_type = other DNA
cccttccaaagctggggaagagattcaaatcttcaagagctcttccaactttgagattctctgatgctctgctgcaggtccagggagctgggccagtgacctgggggagccccccacccaaccccctccctccgccccgccccaaggctcagggaaaggggagttagcactgcatccagctgactcaggtgggcccaggagtcgtcagcagaagtggaattcaggactgacaacccacaatctattggctgtgcttgcccttttcccaacacacacattctgtctggtgcaggttggccaccatggcctgctgccagagggcacccacgggtggtgtctgtggttgacactctgtgcacaaccctcacaacgctggcatgtggagtggccccatgcataaatgtgcacaga

SEQ ID NO: 23746 - DNA, 336 bp, Homo sapiens
  source 1..336: mol_type = other DNA
gcctgatagagcatcggaagagactcaaatcttcaagagctcttctaactttgagattctctgatggaaggagctggggcaataccttgagtctgggttcttcgtccccagggacctgggggagccccagcaatccagctgactcaggctgacccaggagtcctcagcagaagtggaattcaggactgacaatctattggctgtgctccttttcccaacacacacattctgtctggtgatcctgacatccttcgccgcgtgcaggttggccaccatggcctgcggccagagggcacccacgtgaccctgccccatgcataaatgtacacagaaaca

SEQ ID NO: 23747 - DNA, 336 bp, Homo sapiens; identical to SEQ ID NO: 23746
  source 1..336: mol_type = other DNA

SEQ ID NO: 23748 - DNA, 482 bp, Homo sapiens
  source 1..482: mol_type = other DNA
aggctgcagccggtgcagttacacccgggacagagcggtgaccatggccaggctggcgttgtctcctgtgcccagccactggatggtggcgttgctgctgctgctctcaggtacagaacccacgacgaggcctgtctcatggccctggggcctgggtctgtggggtggtgatgggctcaggagcctgtggccccagttcctctcctgcctggagagcatcaggctgagctggggggagaggctgtcccaaccggaccctggaagatgcaagatccaaatgtggtcccctcctctgggagggactttcttcctgtctctctttaaaaaaaaaaaaaaaaagagagacagggtgtccctatgaagggggctgggggcagggcttccggtacccccaccccatatctgtctcccaagtactgggggcagggaaggggtggggcagcccaggccagaggaggccctgactggccccgcccacttcg

SEQ ID NO: 23749 - DNA, 399 bp, Homo sapiens
  source 1..399: mol_type = other DNA
catgttgtgccctgcacaagggcatctccatccagcactctgaggacaggcaggatacagctggaggacctgagggctcccccacaccaaagcccccagtggctgcgtggtggattttcgatactctttcacagcatgaggaagggaggcctctcagccaagaggctctgctctgggcccctccagacctgctcttcccgctgggtgaggaatagtgccgggctcggcccttacctggcacaggcttcccccagaagactgagaggccccccagaggcatccacagaggaccccagctgtgctgcccaagctgggcgaccgccaaaccttagcgcctcccccagggtccccggagagctggtgcctcccctgggtcccaatttgcatggcaggaagggg

SEQ ID NO: 23750 - DNA, 282 bp, Homo sapiens
  source 1..282: mol_type = other DNA
ttctccacatgaatgggagcatgtcacatgcatgaaatccataaacacaggggcatggctgtgtgtgcgcgtgtgcttgtgctgtggtgtgtgtacacacaggcaggcactcctcagggcacaatgtgactgtgggcacaactagatgtgtatgtgcacaagcctgcttcactcctggagcagtgaggctggagcccaagtggtcgcaggctgagcccagagtacacccggcgagggaatgaccctgtgacatcagcggcagcagctgtcctcgccggcccg

SEQ ID NO: 23751 - DNA, 415 bp, Homo sapiens
  source 1..415: mol_type = other DNA
gctactcggggtgctaagcccagcttccttcacagctgcagcctgttcttaagcaaggaagaccttgctaacttcctgtcaaaagaacgcgtgctttggtaacttttccagtacgggagacagtactggggacgcgggtgctgaagtcaccacgattttcctcgtctgagggtttccagccagagtctttcctggcaggaagcccctctctctgtcagagtgacagggaacagacgtcgggctctgggacccactaacccaggcccagttctgggaaccagcaaggggcgcggcgggaggtggacatgccggggaggagactggcctcctggtggcgggggagggctcctggggaccccaagtccgcggagggagcacgggcgggctccgcgcatgcgtgggaagagaccttggc

SEQ ID NO: 23752 - DNA, 377 bp, Homo sapiens
  source 1..377: mol_type = other DNA
ggggtgtggctgcagccagactgaccccattcttttcctgaggctctgggcctcaagttggccctgaatcagctgagtcaagatcaagtctctcaggcctgtaatcccagcactttgggcagtgaaccaaaaattgtgccacagcactccgtaactgcaagtcctggacaggtcctggcctttggatgctttgcatcccatgggatttggggttccccagatctggtgcacacgtctcatacacgcatgcgtgcacccattgcctgccccgccccttgcacagggagtcagcagggaggactgggttatgccctgcttatcagcagcttcccagcctggattcttagaggcctggggtcctagaatctctcagataa

SEQ ID NO: 23753 - DNA, 332 bp, Homo sapiens
  source 1..332: mol_type = other DNA
tgcggattcctccctaggaataaccaacccaaggctccctcctggagggagagagaggatggggtgtggctgcagccagactgaccccattcttttcctgaggctctgggcctcaagttggccctgaatcagctgagtcaagatcaagtctctcaggcctgtaatcccagcactttgggcagtgaaccaaaaattgtgccacagcactccgtaactgcaagtcctggacaggtcctggcctttggatgctttgcatcccatgggatttggggttccccagatctggtgcacacgtctcatacacgcatgcgtgcacccattgcctgccccgc

SEQ ID NO: 23754 - DNA, 202 bp, Homo sapiens
  source 1..202: mol_type = other DNA
aatgtacttagtgccccagctcaaggtgcctgtggtcccggttactctgcgggctgaggcacaagaatcacgtgcagaggttgcagtgagccgagatcacaccactgcactccagcctgggtgactgagactcagtctaaaaaaaaaaaaaaaattgaaatggtaaattctgttgtgtacgttttaccacaattaaaaaaaa

SEQ ID NO: 23755 - DNA, 291 bp, Homo sapiens
  source 1..291: mol_type = other DNA
gccatgtgtggaacactgcgactgccgcgcggggcagctgcgccgtgtttgctggaagcctccggtagctgctgaaaccttcgctccggaggtcgcctcggtaagaccgggaccgcccgttggggcattgccggtctttcccagcccccccagcgcccccagacgctggatgccgaggcctggtcctttacagccgccccgccccgagccagccccccccgcccggggcacgccctcggcccgccccgccccgaccggaagaagccgcggcacccagcgcttatagggccg

SEQ ID NO: 23756 - DNA, 272 bp, Homo sapiens
  source 1..272: mol_type = other DNA
agaagtcactttaaatgagtagttaatactatataagttctaagctctaagacgcctgtaatcccagcagtgacggcactgcactccagccctccgtgaaactgggaatttgcctttttaaatgcaaatcgagtgaatttgcccagggggatacccctggttctcacttgttgctcgcgcggtgctccgcccccgcgccctctggttggcggcggcggccgcgggcgcggggcgggtccgccggcggggcggggcggcgtgtgcccgggggc

SEQ ID NO: 23757 - DNA, 377 bp, Homo sapiens
  source 1..377: mol_type = other DNA
acatctattaatatgcattaaagtgacagaagcttaatggatgttgctggcgaacaggaaccccagagacgggcacaacagtgaccactgaagttcaacccatcacagcctgagcaggagcagcctcacagtcaccttctgtactgtcaagttgatgcctgtcctctggtgcctgagcacatgcaggtgcggctgatctgcagctcattctcataggttggaaactctgtactatttgaaaaatattttgacttaattgccttaggcacattagtcagctgatcaagaatttctcttgttacaaaagagaaaagtaggactctaactgtagtcatagactcttagaatttagagccttctggaaaattccttgaaga

SEQ ID NO: 23758 - DNA, 491 bp, Homo sapiens
  source 1..491: mol_type = other DNA
cctgaacctctttaaaggttttcgtaactgaggagaaatcatggactttggaatcaaacttcctcagtctgggtaggtcttaaggtctcgacctatttaaatagaaactgcaaaatcagaaacctgcaatttaatcatgagtctcttaataataacagtcacaagtctcattgttttgatgaacccatagaaggggcccctggggagggtttaagacatgtcctggccggaagcttaagcgtcaagacaacggctctggggttaggcctaggccacctggcggcagcatttgcctagttaagaaggcctgggcttttggataatactgaagtattttaattttctggactgcaaaacgaataacctttactggtgcttacgaggaaaccatccgagccggcgtccgccatggtgggcgggggacggctgcggccggaacgcagacatgcgcttccggggtggggcctgccgcccgcaagcacgctcacctc

SEQ ID NO: 23759 - DNA, 502 bp, Homo sapiens
  source 1..502: mol_type = other DNA
tttgaaatatgtgatcaaactgaattgtgttttcactcttaagagtctgattaggcaaacagatttcctgaaagactatattcatataaacattggtgcacttgacaaccacaacattcttcagattgtggatgtgaaggatgaaaagtaagttttattaactctgttatatttgcttcctaacaactttaaatcctgaaaatttcttgaatccttcaaataatggctgtcaccatttatagctttcctatagaaggaattcatggtcccctggttgacttaaggaccaagggtcgaactgctcgataagtggattaacttaatgttttgctgaccataaacctattattagacttattcgtctaatggaagagataaaaccattgtttttgtggaaaccaaaagaagatgtgatccattgaagcagattgattaaatatctgatagtgaatttaactttttcatttctggcgaaattaaagagattgtgagtttaataaca

SEQ ID NO: 23760 - DNA, 493 bp, Homo sapiens
  source 1..493: mol_type = other DNA
cgccagcgcgacgcggcgtctgaaggtcacgagccccgccgacagcccagacccagtccgggctagcccgaggcctccctggaggtggacggtttcagtcactgggactcaccagcatccgagcctgccatgtttcagaggcaggtcgccgccggactccgacgcggccgggaaggcgacggtgtcctggaaggaccgatccacgcagacccgacactggggcgggtcatcagaggagcacttcctttcacacgggtcggacggtccacatcagccggcagcccgggcgggtcccggggtgcgagcagcgcacttccgccgacgtcaacgggaaagtagtgcggaccgctctctcggtggtccggggtggtacagccacgtgacaacgccaggccccgcgatcctggaacgccagcgggcgttgcggcctatgcgcgaggggcggggcgattaggtcatagagcggctcccagcgttccctgcggcgtaggcg

SEQ ID NO: 23761 - DNA, 246 bp, Homo sapiens
  source 1..246: mol_type = other DNA
ttttgagctcctccgccgggcggggtaacaaaggcgccgccgccatgtccgaggccggcattttgtaccatggctgatgccggccgccctcggccgcgcgaagccttgcgggggcggcagcggaggtgaggtgccggccgctttccggcagccgcctacgccgcagggaacgctgggagccgctctatgacctaatcgccccgcccctcgcgcataggccgcaacgcccgctggcgttccaggatc

SEQ ID NO: 23762 - DNA, 237 bp, Homo sapiens
  source 1..237: mol_type = other DNA
ggccgcgcgaagccttgcgggggcggcagcggaggtgaggtgccggccgctttccggcagccgcctacgccgcagggaacgctgggagccgctctatgacctaatcgccccgcccctcgcgcataggccgcaacgcccgctggcgttccaggatcgcggggcctggcgttgtcacgtggctgtaccaccccggaccaccgagagagcggtccgcactactttcccgttgacgtcggc

SEQ ID NO: 23763 - DNA, 330 bp, Homo sapiens
  source 1..330: mol_type = other DNA
ggccgcgcgaagccttgcgggggcggcagcggaggtgaggtgccggccgctttccggcagccgcctacgccgcagggaacgctgggagccgctctatgacctaatcgccccgcccctcgcgcataggccgcaacgcccgctggcgttccaggatcgcggggcctggcgttgtcacgtggctgtaccaccccggaccaccgagagagcggtccgcactactttcccgttgacgtcggcggaagtgcgctgctcgcaccccgggacccgcccgggctgccggctgatgtggaccgtccgacccgtgtgaaaggaagtgctcctctgatgacc

SEQ ID NO: 23764 - DNA, 700 bp, Homo sapiens
  source 1..700: mol_type = other DNA
aggataaggtacacattttttaaaaacttttctctttctcctcctgagataacgaaatacagtagcgagggaggcaggtaacctgatctcctccaccaggtgagtcccggatggaggtgtcaactaagcattcctgggcctcgcccgaaagacgccaagttcccggcaggcagcggaccagcctctcggagcgccctgcacgcagtgggcgggtgccacagagctgccgcgcccgccgccgctttgctcccagcgttccgcgtgggaccctcggcggcagctcacaccctccctgactgccggtgcccgccagggcaccctgcgcgcgcccgccggccccgccccggccccgccccgccccgccggccccgcctcccgtctcctccccgccccccggagccgacgagtggcggcggcggccccaggtcccgggtccctcagacaagagggcgggtggaggaggaagcggccgagcccagagttctgctccggcgcccccgagcaccgcccgcttcagccgaccagccccgtcggctactgggcctcgccgagacgaaaggcctcggcggccgcgaggaggcggcgggggcgcgggcggaggcggcgcgggcggccgcggctgccgctttgttgtgcggcccgggccgaggaaggagaagtgggaggaggggggagctcggcgtcccgctccctccgcggc

SEQ ID NO: 23765 - DNA, 567 bp, Homo sapiens
  source 1..567: mol_type = other DNA
atcgaaacatgtctctactaaaaatacactgtggtctcagctactccagaggctcaggtgggaggatcacctgagcctgcagtgagccgtgttcgcaccactgcactccagaaaaaataaatttctagcagtacagttacaatgtcaaaggataaggtacacattttttaaaaacttttctctttctcctcctgagataacgaaatacagtagcgagggaggcaggtaacctgatctcctccaccaggtgagtcccggatggaggtgtcaactaagcattcctgggcctcgcccgaaagacgccaagttcccggcaggcagcggaccagcctctcggagcgccctgcacgcagtgggcgggtgccacagagctgccgcgcccgccgccgctttgctcccagcgttccgcgtgggaccctcggcggcagctcacaccctccctgactgccggtgcccgccagggcaccctgcgcgcgcccgccggccccgccccggccccgccccgccccgccggccccgcctcccgtctcctccccgccccccggagccgacgagtggcggcggcgg

SEQ ID NO: 23766 - DNA, 359 bp, Homo sapiens
  source 1..359: mol_type = other DNA
gggattatgggtggcactaaaataagatgaagcaccttcttggagtttacatgctggatttaacatgctgactctccatgtgtgcacacagggtagatctctgaacacaggtgacccgtcaaggcaggatgacagttcagcctcctcccaggctagtgcaaagggctcttcactcggattaactaatagggtggtgaattaattatcaaacatgcgacagtttagcgaaaatggcaacactttggaataaaaatgtccttaccacagcaggcgctggagtcctgggaccaccaggatctgaggcccaaatccttcctcactaaggggaggaccctggtgacatggagcagatctgtggc

SEQ ID NO: 23767 - DNA, 401 bp, Homo sapiens
  source 1..401: mol_type = other DNA
caagcgattctcgggcctcagcatcccgagtagctgggattacagaaagacagggtttcaccatgttgcccagagtctcactcttgcagcccaggctggagtacaatggcgtagtagaatttaggagtttcctaactcctgccttcctctccgagccgcggaaggggagacgcagggaggaggtccggccggctttgggctccagccaggggtccgcggagactatggtctccgaaggccttagccgcggggcatttcgcgagctgcgcgtctctctcaacggcgccaccgcgcccggagtccagccgcgccgcgctgcgcccagccccggcgccccaggctctccgccctagcggccgccgcgccacctcgccccgtcccaggctcgtaggctgctcagc

SEQ ID NO: 23768 - DNA, 607 bp, Homo sapiens
  source 1..607: mol_type = other DNA
ttaagtcattttaggaaatggtggtttgctattaaaattaattggtgttagcaaaatacagggcttattcctccttgaataatgtgctttaaaaattattgtccattcgattacattttcttttattttcctacaatgtaagtcacaaactcttttgacttgctaaaaactgaactaaattttatatgatgcatttattcagcaatcataagtgctgtgcataactattgtacatatttttggacaatttcttagggttcagcttaaaaatataatttgcctactgcaactaaattttatgtactgtggttaaatctttgtagttttagaagataattttcactaaataaatccaagcagattttgctctgcaaatgctgaatgaagtattgaactaataaaaaggattaataattttctactgtctaaataatcttagaaatcagtgaatttgattcatttatgagttaatatctctccagtcaagagatttttcaggcctcagacttttaatggttgaataatttaacgagggacagagggccgcgttgctccctctagggagcaggcagctgcgggaccgctatagccggccctgcgctcgggc

SEQ ID NO: 23769 - DNA, 591 bp, Homo sapiens
  source 1..591: mol_type = other DNA
caggcctgggcctgtggagctcaggacacgcctgtactcccagctactcgggaggctgagggtgcactccagcctggaggcctgccaggctcacgccggctggggtgggcggtgacagcgggcagcgggcgcgcaacggcccaaagaaccgcgtccgggacctggtctccggcctcccggccttggggaaggagcccttctgcccacaagtgggctcaggccattcgggctccccagcctggcccacgtgaccgcggttcctcagccctccccgcgcgcccggccgcggctgcgggcgcgggcacccgagcgacacatcgagctcgtgactcgccgcccagggcgggaggcggagaagcggccgcggcgtgcgagcgcgcctccgggaggcagcgggagcgcgcacgctccggggccaccgcccctccggggccgggcccgccctccccgctgtcctggcccgccctgcccggcccgccctgcgagtcagttccctccctgggcgcgctcgggccgccgccgcgctccccgccctcgagcctcggtgccggagccgcccgccgccggaggaggaggtggagggagccggag

SEQ ID NO: 23770 - DNA, 486 bp, Homo sapiens
  source 1..486: mol_type = other DNA
gagagccctggtagggaccaggcctgggcctgtggagctcaggacacgcctgtactcccagctactcgggaggctgagggtgcactccagcctggaggcctgccaggctcacgccggctggggtgggcggtgacagcgggcagcgggcgcgcaacggcccaaagaaccgcgtccgggacctggtctccggcctcccggccttggggaaggagcccttctgcccacaagtgggctcaggccattcgggctccccagcctggcccacgtgaccgcggttcctcagccctccccgcgcgcccggccgcggctgcgggcgcgggcacccgagcgacacatcgagctcgtgactcgccgcccagggcgggaggcggagaagcggccgcggcgtgcgagcgcgcctccgggaggcagcgggagcgcgcacgctccggggccaccgcccctccggggccgggcccgccctccccgctgtcctggcccgccctg

SEQ ID NO: 23771 - DNA, 314 bp, Homo sapiens
  source 1..314: mol_type = other DNA
ctccctctccacaaacaatttttgtaaaaattagcggggtgtggtggcacgtgcctgtagccccagctactggggatataattcgcttctatagcaaccttttcaagtccgtattttccaccggccctgccctgcgggtctcacctgctgctccgcggggtcccggcgggggccggatagcgccccctggcggcaggtgggcgcccgcgcagcgcatgctaatgagcccgcggcgccgctcgcggattggctggcgcggattccagctgcttcccggcgcctagtgagagtcaggggggcccggcccgcgccct

SEQ ID NO: 23772 - DNA, 329 bp, Homo sapiens
  source 1..329: mol_type = other DNA
catagtacatatcactaacatactattttttatttaatgtaaacttcaagagggcagttgctagtgcctaggagaagacatagtaggtgctaatcttaatggattgcacagaccaccacataatattctttttattaatcacgctgtactggtttataaaaagaaatacattagagttatgcatgcttcactaatgcctgatttacctatccataaggcactggttcctggtttgtgcatccaaggaagtctcaagatggcatatgacagtagcccatgtgatgtgctgaaaattagagatggaattcctccttatcaaggccaatggc

SEQ ID NO: 23773 - DNA, 711 bp, Homo sapiens
  source 1..711: mol_type = other DNA
gcgggcggggcggccctgcggagcggtggcggggctgcggggggcggcccggggcgcggccggcgcgtacctccctttcaggaccgtgcgctcggctcgcgcctttgaagtgcacagttaaatccacagcgcagcggaggacatttggtgcgccgaggacctgcgttgaaagccgggccgggcgggggcggaggcccgctcggatcttttgcataaaaggggcggcggggcgcgccgttccccctccccggccggttccccatgttccccgacgccgcggccggcccgggggggcccggggctgccgccgcgagccgagccgggggccggggccgggcccctgccaggggcgcctgcgaggtctcgccgccgagcgcgcgcggggatctgccgaggccgaggcggccgggcggaccgcgcgctttgatgtgcggggcggccctttgaagttggcaggccggctatttcggggcgcgctaggggccggcgcggaggggagcggcggacccggcgcccagcgttccggggggcttggccgggcagccttgcgcgccctgcgccggagccccctccccagcgcggtgaccgggttggcggggggccgagggggcagataccccccgggggtcgcgtcgctgtgggatgaaagggtagcggcgccccccgcttgccctcccccccctccctgccgcgggtccgcgctaaggggcc

SEQ ID NO: 23774 - DNA, 639 bp, Homo sapiens
  source 1..639: mol_type = other DNA
atgccctcggggccgcggggggctggcaggggtgcggcgggggcgggccggggcggggcggggcgggcgcggggcgctgtccctttaaggcgggcggcgcgggccggccgagcgcggctgtgattggcgcggcgggatcactggctccgcgagcctggcccgggggagtcggctggagccggctgcggatggatttcggggccgcccggcggccgaggcgcccgccgaaggccctgctagctcggccccagcggagccgcttcaaagaaagcccccctcttacagggggcgaggtcgcgccgagccgcggcgtgggcgcggggggcgggagggggcccggccaggcggaggccgggcctggaggggggcgcgggcggggcggccctgcggagcggtggcggggctgcggggggcggcccggggcgcggccggcgcgtacctccctttcaggaccgtgcgctcggctcgcgcctttgaagtgcacagttaaatccacagcgcagcggaggacatttggtgcgccgaggacctgcgttgaaagccgggccgggcgggggcggaggcccgctcggatcttttgcataaaaggggcggcggggcgcgccgttccccctccccggccggttccccatgttcccc

SEQ ID NO: 23775 - DNA, 339 bp, Homo sapiens
  source 1..339: mol_type = other DNA
aaaactctgggtttgtgacatattttctcattttaacggagaagagaataaaacggcatgcatgcctttatgtaacacactgaggtatgcctcctaactggtgttagcactcaggcgatgcacgtgcacaagcgcgcacaggcatgcacacgcctccagcggctgggcccgagtccgccctatgacagcgggccagcgcttgcagttcttgcgatggccaatgccctcggggccgcggggggctggcaggggtgcggcgggggcgggccggggcggggcggggcgggcgcggggcgctgtccctttaaggcgggcggcgcgggccggccgagcgcggct

SEQ ID NO: 23776 - DNA, 596 bp, Homo sapiens
  source 1..596: mol_type = other DNA
tgcacgtgcacaagcgcgcacaggcatgcacacgcctccagcggctgggcccgagtccgccctatgacagcgggccagcgcttgcagttcttgcgatggccaatgccctcggggccgcggggggctggcaggggtgcggcgggggcgggccggggcggggcggggcgggcgcggggcgctgtccctttaaggcgggcggcgcgggccggccgagcgcggctgtgattggcgcggcgggatcactggctccgcgagcctggcccgggggagtcggctggagccggctgcggatggatttcggggccgcccggcggccgaggcgcccgccgaaggccctgctagctcggccccagcggagccgcttcaaagaaagcccccctcttacagggggcgaggtcgcgccgagccgcggcgtgggcgcggggggcgggagggggcccggccaggcggaggccgggcctggaggggggcgcgggcggggcggccctgcggagcggtggcggggctgcggggggcggcccggggcgcggccggcgcgtacctccctttcaggaccgtgcgctcggctcgcgcctttgaagtgcacagttaaatcc

SEQ ID NO: 23777 - DNA, 380 bp, Homo sapiens
  source 1..380: mol_type = other DNA
tttttaaaatatactttaagtaagagtaaatatgattttctgatggatttgagccagaaagtgccaacagtgcagccttcagtctgtgggtttaagtccaagactctaaaagctgaagaacttggggccagaagactcagcaggtctgctctttccaccccatgcaggcagctgattagatggtgcccacccgacactcagtattaatcaggaaaaaatatgctagttcatttctctgtgagatgggatatgtgaattattaagctgaacagtgatgcacagaagtctttctgcccctgggagaccagaatagctgacatcaggaactgagccaggcagtgtggttgtgatgtcactatctcacctcacccccacctaag

SEQ ID NO: 23778 - DNA, 571 bp, Homo sapiens
  source 1..571: mol_type = other DNA
taaattcctgcaattgcatgcttgattttgcatccttgattctcagtactaattatctggattatatatgttataaacatgttcaagtatgcttttgaaaactaaacattcttaaaagcattctgtaccctttattttccttttttgtctttgagacaaggaagagctagcagataggttttaaaaagaaccttttgaagaatttggggacccgccaaggggcccacaagctggggtgcgagtctggcggttgctgggccagcaggagcgtcgccatggcaacggggccgcgcgcacgccgccacctgtgggtggagaaatgcccgcgcggaagtctccgcccccagcctggggcgccggtggtcgccgccgccgggaacgtcgccatggcaaccgcaccgggggcggggaaatgcgagcgcgaaagtccccgcccccgggctgctgggcggcggcgacccagcggcccgcaaggatttgaaaccgtttggcaggggcggcggtggcggcggcgttggcggcagcggccgagcgtggctgccgccccgcccttgcgggcccgttcgggaag

SEQ ID NO: 23779 - DNA, 520 bp, Homo sapiens
  source 1..520: mol_type = other DNA
acagggtttcaccgtgttagcccggatggtctcgatctcttgaatgtattaactgactggttaaattcctgcaattgcatgcttgattttgcatccttgattctcagtactaattatctggattatatatgttataaacatgttcaagtatgcttttgaaaactaaacattcttaaaagcattctgtaccctttattttccttttttgtctttgagacaaggaagagctagcagataggttttaaaaagaaccttttgaagaatttggggacccgccaaggggcccacaagctggggtgcgagtctggcggttgctgggccagcaggagcgtcgccatggcaacggggccgcgcgcacgccgccacctgtgggtggagaaatgcccgcgcggaagtctccgcccccagcctggggcgccggtggtcgccgccgccgggaacgtcgccatggcaaccgcaccgggggcggggaaatgcgagcgcgaaagtccccgcccccgggctgctgggcggcggcgac

SEQ ID NO: 23780 - DNA, 293 bp, Homo sapiens
  source 1..293: mol_type = other DNA
tccttttttttttttttagagcaaatgatgtagaaggttgttaatttcaaatcaattttcaaattcctgaaacagatctagaaacctgtctagacagatccatagctctaaggtcctaactggagctattcttttggtgttccatctacaacatacacaaaacaaataatgaactgttttgtgccattaacaaaaacgttatgatgggtctcagaaatcatgatactttatcttctatttacaaagataaaagtacaccagaaaatggttaatgtttaagcgctttcatattt

SEQ ID NO: 23781 - DNA, 185 bp, Homo sapiens
  source 1..185: mol_type = other DNA
tggctatgggctccacgggggctccctggctgagcaggtgctgcaacttattagagtcacatgaggaggacactttcctccaagaaatctagagactatttgagtgctgaatgaatgaatgaatgaatgaatgaatgaatgaatagggggtccttgcagtggcatgccaagccctagccccagag

SEQ ID NO: 23782 - DNA, 501 bp, Homo sapiens
  source 1..501: mol_type = other DNA
gtcaatgcttaattatttaaaaatcgctctcttctgaaagtgacattttggccaggtgaaagccctggagacaccgggggtcctggcaccgggcgggaggctccggggcaggggctgcgcgtggagcccactcccggacgcgggctcctctcggcccggcacgggtggcgcaggactccgagcccgtaaggcggcggaggagcgcggacccgccactcccggcctcctcccccgcactcgggccggccctcccccggccgccgccgccgccgccgccgccgccgccgccgccgccgccgcctccccttgcccagtgagcaccgcaaggcactcgcctcggtccggtccgctcagcgccgccgccgccgcaccctcgccgcacccccgcgcgcgcccggcccgcgcgcccccgccgctcgtcctcgcggcctcgcgctcggggcatgcgcggtgggcggtgccgctccgggccgcctctgccgccgcgagtaggaagcgcga

SEQ ID NO: 23783 - DNA, 361 bp, Homo sapiens
  source 1..361: mol_type = other DNA
tggagcctcggagaccagcctgggggccaggcgggtgcacaggaccgtcggatgagatttttcaaattcaaacaaagtccagcaggattcctcgagagctttgggaaccacctaaaaccttcctatggtttggcacaggccctggactgggttcccgggatgtcatatcgccctcagatcctgccggtaacaggcttaccccgtgggagcccgggacagccgtgcagcccgcagctcctggtctcctcccctggcctgggctgccctttcccatcagcccagagcaggcagatccccacccccggggccccgccgcactggggtatttctggctcccagaggggcaggcagcctccctcag

SEQ ID NO: 23784 - DNA, 350 bp, Homo sapiens
  source 1..350: mol_type = other DNA
atttttcaaattcaaacaaagtccagcaggattcctcgagagctttgggaaccacctaaaaccttcctatggtttggcacaggccctggactgggttcccgggatgtcatatcgccctcagatcctgccggtaacaggcttaccccgtgggagcccgggacagccgtgcagcccgcagctcctggtctcctcccctggcctgggctgccctttcccatcagcccagagcaggcagatccccacccccggggccccgccgcactggggtatttctggctcccagaggggcaggcagcctccctcaggcccctgacgcgtctgggcagctgctcagcacgtcccgcgtccct

SEQ ID NO: 23785 - DNA, 742 bp, Homo sapiens
  source 1..742: mol_type = other DNA
cgcagcgggtcgcagcccggagacgccgggcgtccccacctccagcctcccgagctgcagcggcgcccgcggttctcccccgacccgccaggtggacccggactggcgcaccctggcccgggaccctcccccgagccctggctgcctccgcgccccgccccgcccggagcccgcagccggcgccccggattacctgccccggagtcacagtccgcagcccggacgctcccagggtggctccgcggagcctggagccacattcctaggggaggggtccccacctagagggtcgcggatcacgttacccgcccgggtaaaaagttgcatttggctcaattttttttgtggactcggggacacggcgtcctcccagttcccggagcccaacggccccggggcggtttcccagggcagaggcacctctccgggcggcgggtgcggagctggtctgcgcggcctctgaaggcgaccccggccgctcgcgggcttcctggaagcgcggccgcaggagcaatccgcgagcagctccgcgccgcgccgcgggcggcaaggaaacctcgggttgattcaatgcagacgcggggcgtctgcccgggcaggaacgcggcgaggcgttttaaaaatgcgggtgagggaggggaaggggccagctgcgggcgccggggtcggcagtccacccggggcaactttccgggcgggaggcgcggccggagggggcggcgccggcggcgggaggcgggag

SEQ ID NO: 23786 - DNA, 608 bp, Homo sapiens
  source 1..608: mol_type = other DNA
acctggctcctccagtttctccacttattccgaggtgagaagcaggtgaggggaggttgctccccagcacgctgcgttcttggctgggaatgactcacccacgagtgacccggggggcaggagtcctcgggtagatccaaggccccaggccctgccgttcaacagcattttgtaccgaatacaattcgcaactccttgttgtaaaaacttgcttggaaaaaaaactgaccaaggggcctccgttgctggggggacctgggcggctggacgccggggtcagtacgctgctcgccccgcgcagccgaaagcgggcgtggtgtcgcggggagaggatgcccggcagcagtgtggccggcgggctgggggtactcgcccgggtcagagacctcagcccgcgccaaggcgccccacactttccagcgcagcgggtcgcagcccggagacgccgggcgtccccacctccagcctcccgagctgcagcggcgcccgcggttctcccccgacccgccaggtggacccggactggcgcaccctggcccgggaccctcccccgagccctggctgcctccgcgccccgccccgcccggagcccgcagccggcgccccgg

SEQ ID NO: 23787 - DNA, 187 bp, Homo sapiens
  source 1..187: mol_type = other DNA
gcagtcagccaagattgcgccactgcactccctttttctagcccaagttttcttacctgtaaaataaggataatagtaataaacaaatatcagttattgttagctagctgctagaaagctcttcttcagtaatgtggcaccattaagaatgcatgcatgacttgactaattcatcacgtagcccctt

SEQ ID NO: 23788 - DNA, 568 bp, Homo sapiens
  source 1..568: mol_type = other DNA
tctgtcgcccaggctggagtgcagtggcgcaatctcgccggctcactgagtagttgggactacaggcgtgagccaccgcgcccggcctcatcctaagcttttttaagatctcaagctattatggtattgataacacataaaacgtgtaaggcccttaagaattgaaattgtctcaaatcctatagggataacaaatatgtctttttaacttttctttttaccaacttagtggattacagtgaaaatgaaaacaaaggcttattctcttaggagctttcttctcaagtagataaaaccttagaattttctattttaaggtttattttagcctcctgatgtagagatgagaaaactgagaaatcatatttcgaagctattacactcgcttttctcatcgcaaattttaggtaaaaagtctgatcctgacgctgcaggctggagtggcgagtcccgccccgcgcgcctcaagccccacccccaggctgtccgcggcagtgcctgagtggcaaccagcgccggggacctcgaggggtcctttgcgtgggctcccgatgggctgcctgagcgg

SEQ ID NO: 23789 - DNA, 619 bp, Homo sapiens
  source 1..619: mol_type = other DNA
atgccattgcactccaagttcgggaaattcagagaagtagctcctcaacagtgaatcagtgtcaggaaatgtccaggaacctacacatccatgtcccaagtgcatgcgcatgtgtggctagccaatcccttgcctttaggtcttccatttgttttcaagtaagaagcaaaaaaaaaaaaaaaaaaaggaaaaacagcttgagtttctttccatatctgtgttattattcaacactgcagtgtaattagttgctgtgaatatttctgagccaactctggaaagcatttatctggaaaatagtttccactaaaatataagctggatattttgtatcagttaacagttataaattctctccagcccttttgcgtcatattggttaattacttattaattaaacacaattcaaaatactgtattgaggcatctgcatcgccatctaagctctagcttcaggacttcagagcgtgaagatttttcggagaaaagataatttttcatccggcaacttttcataaaaacaagctgaaaaacttcagcagttccatgctgcttcctgagtaactgaagaatgtgctttgagagatctgtttaatatggatcaaatagcaacactcca

SEQ ID NO: 23790 - DNA, 554 bp, Homo sapiens
  source 1..554: mol_type = other DNA
tcatccggcaacttttcataaaaacaagctgaaaaacttcagcagttccatgctgcttcctgagtaactgaagaatgtgctttgagagatctgtttaatatggatcaaatagcaacactccaggcattttcattgacatttcactgtgacacctactctttctttctgctgcgcggagcctgcacaatctgcagaaagattgcagagccgggccaggcgaggtaggcaaggtgacttgtccctagggtcaggggaagccgaggaaagcccctctgcccgagcctccccagcgccggccgggctccgctccggagcagccccgccgtctggcggccggatggggctaccctccccgccgcggccgctgctgatgtcagcctcgcggccccaggcacactgcatcggcgcggacgctccggccccggcgaggtggctgcaaactcgcgggcacgcacggcgcccggggagccgagggactcgggggaggggacgcgcgcggaaggcgccagcttcctcccgcccgcccctggcagccgcgagccgaggttggaggc

SEQ ID NO: 23791 - DNA, 632 bp, Homo sapiens
  source 1..632: mol_type = other DNA
ccccagcgccggccgggctccgctccggagcagccccgccgtctggcggccggatggggctaccctccccgccgcggccgctgctgatgtcagcctcgcggccccaggcacactgcatcggcgcggacgctccggccccggcgaggtggctgcaaactcgcgggcacgcacggcgcccggggagccgagggactcgggggaggggacgcgcgcggaaggcgccagcttcctcccgcccgcccctggcagccgcgagccgaggttggaggcgcccggggccccagccgggcagagccgagcggcggcggcggcggcggcttcccttttctccccgagccgagccccggagcggcgcggggaccggccctcctattagcatcgggcagacccgccggaggaggggggtcgccaggttcccgtctgctttcgaccaccctgggcagccgagcagagtcgtccccagccgcgttccgggaggaccggcctcggcgagggaggaggcgggggcgacccaaaccctgacatgctctggggcgagaggaggaagccaggagctgagcgcgccgcgggggctgcttcgccctccggctccgagcgccgggctccgggcgccctgccctgcgcctgggcag

SEQ ID NO: 23792 - DNA, 625 bp, Homo sapiens
  source 1..625: mol_type = other DNA
ctacttttgaacaacaaaagacctattagcattataaaaatagactgcatttgattcttttgcccatgtcgtcatgttggggcaatgaaactgaggcactttgtcacactgggtacatttgtttagtaattgcctattaaatggtttctccctaagaacatcacaatttatctttacttatttatttaacattattgattgaatctgccatgcttatctgagaaacatacatttctcccggaaatattcaccttcatcaaactagtctgaatttcctgtaagctgaggagagattttccccactaaaagactggagatctctagagggttccaagacctacagagataaatattttttctttggcagtggaattcctagggagttcccttgcaattaaaaaaaaaaaaatctagcttatttatattcgacctggagcacatccgggactcggcgaggcgtggtctcgggaggcggagtctgacgcaagccggcccagcccacctggctgctcgctccttccgcccgccagaggtcgcaggctgcgagagcaggttcctggtttggcaagcactcgccccctcaggcccgttcattctcgcgagagaaagcgcgaggcctgccggg

SEQ ID NO: 23793 - DNA, 561 bp, Homo sapiens
  source 1..561: mol_type = other DNA
tcagggttgagtcgcgctttgggctaagctgaaacctagtgacttgtcaggtcaataaattaaggttatttcccgataatacaaacatttaacaccgtgaagtccctcttttccactgcaaaggagaggagggcgcccctccctccgggcgtggcagcccggggcgtggctcctggcacagatccggagcggagggaagggaatgatatttgggggctcccttgccttcctctccgagccgcgaaaggggagacgcggggaggaggtccggccggctttgggctccagccagcggtccgcggagactttggtctccgaaggcctttgacgccgggcatttcgcgagctgcgcgcccctctcagccgcgccacctgcgcccggagttttgccgcgccacccgcgcccggagtccagccgcaccgcgctgtgccgagcccaggcgcccagggctccccgcccccgactcgacgctcccgcgctccccctagcggccgccgcgccgcttcgctccgtcccaggctcgtcggcggcgcagctcacgtgaccgcgctctgggcctg

SEQ ID NO: 23794 - DNA, 815 bp, Homo sapiens
  source 1..815: mol_type = other DNA
ggagggaagggaatgatatttgggggctcccttgccttcctctccgagccgcgaaaggggagacgcggggaggaggtccggccggctttgggctccagccagcggtccgcggagactttggtctccgaaggcctttgacgccgggcatttcgcgagctgcgcgcccctctcagccgcgccacctgcgcccggagttttgccgcgccacccgcgcccggagtccagccgcaccgcgctgtgccgagcccaggcgcccagggctccccgcccccgactcgacgctcccgcgctccccctagcggccgccgcgccgcttcgctccgtcccaggctcgtcggcggcgcagctcacgtgaccgcgctctgggcctgcggccgctgtcggttcccccagtcaccgagcgagagtggggccccagcaattcggatcttccgtcggccgggcccctcccgcccggccccgcgggcctccccacccggccccggcgcctccccccgcctcggctccgacatgaggggccggcggggcaggccgcccaagcagcccgcggctcccgctgcggagcgctgcgccccggccccgccgccaccgccgccgccgcccacgtccggacccatcggggggctccgctcgcggcaccgcggcagcagccggggcaggtgggccgccgcccaggctgaggtggcgcccaagacgcggctgagctcgcccagggggggcagcagtagccggaggaagccgccgccgccgccgccggccccccccagcaccagcgccccgggccggggggggcgaggaggcgggggcggcaggac

SEQ ID NO: 23795 - DNA, 633 bp, Homo sapiens
  source 1..633: mol_type = other DNA
ttttatatatatatatatatatacacacacacacacaccacacatacacacatatacgtatatattaaaggaagggcaaaaaagtttgttatctaaccagtgttgtaagacatgtttagtcttagagtaaatagggggttgtaattttaaaagctataatcttagaggtcgcctgggaagcgcgtgccccgcttggccgcgacgctgcgtccgggtcgccgcacagcagaaagccggactcccgcggctgcccgagcgcggaggagacaccggggccccgcgcgcagccactccttgaggccccgcagcggccgcgcgcggccgaggtcgctcccgccgcccgcgcctggcctgacccgcgccgccggaagcccccaccgccggccgacaaccaggccagcttccgggaggccgcacgcgcgcccgctggcccgccgggcccgcgcctggcgcaagccgagaaccgcgcgtcgccgcgccgcgagcccgcgtcggaggacgccccgcgacgcgcgcgctcacgggccctgcgcttccccgccgcccggccgcccgcgctcgccaccgagggctccgccggccacgcccaccccaaccggccgcgcgccgccgcgctggccccgggacccgcgc

SEQ ID NO: 23796 - DNA, 638 bp, Homo sapiens
  source 1..638: mol_type = other DNA
gttatataagagaatgtcttttcttaggagagacaccgtgaggacatgattctgaaactttctcttaaagtaacatattaaaatcacacatatgtacacgcgtgcatatgtatacatatatatgtatagagaaagcaataggtggcaaaatgttaagatttggcaaatctggataaagatttgcaattctgctgcatttgaaattatttaaaaataaaaaacttgagtttttggagaaacaggcataagaaaccttttgtttccatatttgcttctatacagtcttttatgatgcaattaaaaaaaaactaaactaaagtactttgggtgtcataataggaaaaaaatgcaaagcaatatgtttttctataaagattacttatttactaattagaatttttttattttcatgaagatcaacaacaaagtttttaaaataatgacttagagaatcattttgtggtatttggcccagggcgccccttcgcgctgcttgacgggatctggagtcctcccgctccgccccgccaggcgctcagggaccgcccggccgctccctcaccgcccggccgctccctcaccgcccggccgctccctcaccgcccggccgctccctcaccgcccggccgctaaatcgc

SEQ ID NO: 23797 - DNA, 736 bp, Homo sapiens
  source 1..736: mol_type = other DNA
ccggtgccttcggtcgctcgggccgccccggcgggaggggaatgatatttgggggctcccctgccttcctctccgagccgcggaaggggagacgcggggaggaggtctggccggctttgggctccagccaggggtccgcggagactggtctccgaaggcctttgacgccgggcatttcgcgagctacgcgcccctctcagccgcgccatccgcgccccgagtccaggcgcaccgcgctgcgccgagcccaggcgctccgggctccgcgctcccgactcgacgcccccgcgctccccctagcggctgccgcgccgcctcactcggtctcagggtgcgcatctcacgtgaccgcgctgcgggagaggccgaccggggccctcccgcgcggcctcgcaggcctccccacccgcccccgtcctcggctccgacattaggggcaggcggggcaggcagcccaagcagcctgcggcttccgctgcggagcgctgcgccccggcccctgccccggcccctgccccggccccgccgccgccgccgcccaagtccggacccatcggggggctcagctcgcggcaccgcgagcagcaggggcaggtgggccgccgccgccgcctaggttgaggcagcctccaagccgtggctgagctcgcccaggggggagcagcagtagccggaggaagccgccgctggtcccccaagcaccagcgcccgggtggaaggggcgaggaggcggggg

SEQ ID NO: 23798 - DNA, 561 bp, Homo sapiens
  source 1..561: mol_type = other DNA
cggaagccgcggggtccgcggggtcggtgcctctagggagccagggaggcctttcccgaggctcctggggaagagaggcgaagcgagagtccctggggaacccccactccactcccagctggagactgggttgtgtcccacagtgcgagttgctataggcaaccagccagggtggccagctctttgggaccaaagcatcctagtcccgcagcttccctagattaggcttgggaggcaagaggaggcctcctgacctttcacactgcctttttaatattaagatgaagtagacatgtccgtccttgtaagttaaaagcttccatgggagccttccttcctaatcaaggtaggtagactacaggaaggtacatcttgtttttcagagctttgagtacagttcaaccccagaatttataggttcatggcaaaatctaaataattagaaaatatatgttcaacttttttgattagtcatctgatgtcttccctaatgtgacatgactttgaggccataaacttcagtggctaagctgtagtttctcagcctgcagttaaattgca

SEQ ID NO: 23799 - DNA, 572 bp, Homo sapiens
  source 1..572: mol_type = other DNA
gcacctgtagttccagctactgggttgcactgagcccagactgtcccactgcactccagcctgggctagctcagccctaatgccggccccgcggtgcgggtttcggcctcggagcgccagggacgccacgaggacgcgccccaccttgcgcttctgggttccagcacggccccggggagcgctgcggctctacgtcaacctgcggcggccgccgactcatttggggccacgcagtcacgccggcgatgcctctcaaacccgcggcctgccgaggacacacgggagaccccagcgacgcgggcgcatctgtggctctcgagaaccgggccgcggagccgccgcgagcgcaagcgaggaatcggcgactgcgggggtggacagctggggcttagtcccctcggaagaggcgggtcgcggccgctgaactccagctctgcgcctgcccaggcggccgcacgctcaggggcgtggcatgttgggcggggcccacagggcgtgcgcgacgcagcggcgcggcgcgtggcgtaaggggcgtggcgccagtgggcgtggcgtggcgcagtgcgaaggga

SEQ ID NO: 23800 - DNA, 634 bp, Homo sapiens
  source 1..634: mol_type = other DNA
cattctacttgattgaacccatttaagtcattttagaaaatggtggtttgctattaaaattaattggagagggcttattcctccttgaataatgtatttaaaaaattattgtccattcgattacatttttttttattttgtcacaaactcttttgaactaagatttgcctagttgaataaataagtcttgctaaaaattgaactaaacataaattttatatgattcatttgttcagcaatcataagtgctgtgtataactatatatttttggataatttcttagggttcagcttaaaaatataatttgcttactgcaactaaattttatgtactatggttaaatctttgtggttttaaaagataattttcactaaataaatccacgcagattttgctctgcaaatgctggctgaacaaagtattgagctaataaagagaattaataattttctactatctaaatactcttaaaaatcagtgaatttggaatgtttttcatttatgtcatagatcctgagatttttcaggcctcagacttctaatgaataatttagggacagagggccgcgttgctccctcttgggagcagcacaggcagctgcgggaccgctatagccggccctgcgctcgggc

SEQ ID NO: 23801 - DNA, 360 bp, Homo sapiens
  source 1..360: mol_type = other DNA
gatttgtagagtaaattcagaacattagattttaaaaatagaaaaccaaaaattcacctgtatacaattgtataattgtaaagaattttctttttacattttatttattattttatttatttatttagacagagtcttgctctgtcacccagactggagtgcagtggccccgggttcaagtgaacctcagcctcctgagcagctgggctacaggcacgtgccaccacacctggacagagtctcactctataggctggagtgcagtggtgtgacctcggctcactgcaacctccctaggttcaagtgattctcgtgcctcagcctcctgggtagctgctactaatttttgtatttttagta

SEQ ID NO: 23802 - DNA, 796 bp, Homo sapiens
  source 1..796: mol_type = other DNA
acccgcagcggcccggccgctcgctccctggggcccactgcgacactccctccccactgccggaaggggaactgtggggggcgctgcaggaggaactcaggcgccgcgcgcgcagctcacaccctggaaggaacctgttctgcccggggcgggcgcgaagccgccgcagccgcgagcgccgcgcgggatcagccccggcgcgcgcgtgttccccctcgccgctcctcagggcgcgggcgggactgggcggtgggcgcgccgggaaggcgcccgggggtggggacggggacccgcgcgctcgcgcctggccgaggtgctccgagacaggcaaagctccggggtctgggcgggtcacgcgcgcagaggcgcacccgggatcggggcgttgtgccaaggaccccggcggcgctggcgggggcggcccggccccggaccgcgacgcggttacctttcgtgacccccagcccaggcggcaggctggcgggcgcgcgaccggcgcggctcaggtccacgtgggacggcgcgcgcgcgccaggcaggccccctccttggctgcgctcagcgctcgcagcacatggtcggcggcggcgcgcccccgaggccggcggagaccggctgcagccggtagcgacgcggggccggggcgcgggcggcagcacgcacggcccgggtcgcaggcggccggggtggggggcggcccgagtcgcgggagtgggtggagggcccgggcgctcgggcctcaccagcccgagccaacttgcgctagagtcgggcccgccccctaaggggaggaggg

SEQ ID NO: 23803 - DNA, 815 bp, Homo sapiens
  source 1..815: mol_type = other DNA
cgcgccccgggccggggatgctgactcagcccggctcaacgcggatgctgttgctgccgctgctgccggtgcagcaaagtgggggaagcaaggcacccgcagcggcccggccgctcgctccctggggcccactgcgacactccctccccactgccggaaggggaactgtggggggcgctgcaggaggaactcaggcgccgcgcgcgcagctcacaccctggaaggaacctgttctgcccggggcgggcgcgaagccgccgcagccgcgagcgccgcgcgggatcagccccggcgcgcgcgtgttccccctcgccgctcctcagggcgcgggcgggactgggcggtgggcgcgccgggaaggcgcccgggggtggggacggggacccgcgcgctcgcgcctggccgaggtgctccgagacaggcaaagctccggggtctgggcgggtcacgcgcgcagaggcgcacccgggatcggggcgttgtgccaaggaccccggcggcgctggcgggggcggcccggccccggaccgcgacgcggttacctttcgtgacccccagcccaggcggcaggctggcgggcgcgcgaccggcgcggctcaggtccacgtgggacggcgcgcgcgcgccaggcaggccccctccttggctgcgctcagcgctcgcagcacatggtcggcggcggcgcgcccccgaggccggcggagaccggctgcagccggtagcgacgcggggccggggcgcgggcggcagcacgcacggcccgggtcgcaggcggccggggtggggggcggcccgagtcgcgggagtgggtggag

SEQ ID NO: 23804 - DNA, 350 bp, Homo sapiens
  source 1..350: mol_type = other DNA
gcgagagatgtcatctggcgtggctggcaaactgaccacccccatccaccccctttggaggctgtagctgtgcatccccacctgaatggagaagaagcccaccttcaggggatgctatatcagcaagtcatctttgaaatttgaaccaagcttccttcctatattgatataaacaagaaagccataatgtcttctatgttcatggaatttctgtgactgagacgcaagtactgtgactgatctgaagcagcaacttcactctcagttgacaatagattcaggtgtggggaggagccccaccttggcggcatcctctcagagctgtgaaactccgggggacagctgtttac

SEQ ID NO: 23805 - DNA, 624 bp, Homo sapiens
  source 1..624: mol_type = other DNA
cggtggccgccgcgggtcgggggaggcagggagccccactttccctcgcgctgcctcagtgcccggcctgcgtgcgcgcgccagcctggggtaggaagggaggggctgagcctggagcccccgactcttccgacgtcccggagcccccaacccggggcagggggcactcaaaggccaggcgtgcctttaggtatcttccgggaccccgagcgcgtcatcccggtggccctgggctgtcagagcgaatatttttgggaataacctctccaaaatgtgaagatgtttttttaaattttaaacatgtaataaggcggaggcttggcctccccctcctccccttagggggcgggcccgactctagcgcaagttggctcgggctggtgaggcccgagcgcccgggccctccacccactcccgcgactcgggccgccccccaccccggccgcctgcgacccgggccgtgcgtgctgccgcccgcgccccggccccgcgtcgctaccggctgcagccggtctccgccggcctcgggggcgcgccgccgccgaccatgtgctgcgagcgctgagcgcagccaaggagggggcctgcctggcgcgcgcgcgccgtcccacgtggacctgagcc

SEQ ID NO: 23806 - DNA, 507 bp, Homo sapiens
  source 1..507: mol_type = other DNA
gaaaacctagaatctcgcatgctaggtgctacgttgtttttgcaaattactgtttagcagttatttagtgcacagatcattttccacacaagcaagggttctcaaccgctcggcaatgaagataacttgctatctctctggctgaggcagccccatttcaggagctgtctaacgctctctgctaaactctgtaagtttaataggtcctcctgtcacccttgcggcggccccgacgcagttgccggactgaaaccagcgaccgccacgtgggcctgctgcctttgcgtcacgcgcctttgtccaatggagagccgcgttacgaagccaggggcgggtcgccagccgggcgggtccgcccacagctgccacggattggccaaggggggcggtgcccgccagccgtggcttgggctcgtggccaatggtggccggaggcaggggccccgccctatcaggtgctctggtcctcgggaccagcttaggggcggggcaggaccggcgacccgg

SEQ ID NO: 23807 - DNA, 646 bp, Homo sapiens
  source 1..646: mol_type = other DNA
tgaaattaactttaatattttacctaatatatcaaaaatattatcatttcaatctggaatcaatataaacactattgagctactttttgtattgttgatttactttaaacatacagcccttgaagtatatacaatgttactacaacattatgaatttaatcctccttagacagatactctgatggaaaaaaaaaatggctgaaagagtaaagtcgcttttcctccgaattttcctgttctagaaggactcaggcctcctcttggaccctgacaaagtcctttcccgtgcctggtttccacagggacggtgttgcctgcacagacgacagcacccccggcgggggagagcggccccagcggagactcggcagggctcaggtttcctggaccggatgactgacctgagcccggggcccgggcggcgctggccgggcacaggatgcgcggcccggagagcgcatcccggccatccgcccgcgctcggccccgcagcgcagctgctgcagatccgcgggggccgccacctcctccgggggctggcagcgacaggactctccccgccccggcccggggccctcccttgcaggggctgcggggaggagtcgcccacctgtcatctgagacgccccacgtgggtcggccaggg

SEQ ID NO: 23808 - DNA, 445 bp, Homo sapiens
  source 1..445: mol_type = other DNA
gttctagaaggactcaggcctcctcttggaccctgacaaagtcctttcccgtgcctggtttccacagggacggtgttgcctgcacagacgacagcacccccggcgggggagagcggccccagcggagactcggcagggctcaggtttcctggaccggatgactgacctgagcccggggcccgggcggcgctggccgggcacaggatgcgcggcccggagagcgcatcccggccatccgcccgcgctcggccccgcagcgcagctgctgcagatccgcgggggccgccacctcctccgggggctggcagcgacaggactctccccgccccggcccggggccctcccttgcaggggctgcggggaggagtcgcccacctgtcatctgagacgccccacgtgggtcggccaggggttgcgcccttactgggccgaacgctgattggct

SEQ ID NO: 23809 - DNA, 379 bp, Homo sapiens
  source 1..379: mol_type = other DNA
ctgcctgggcaagcagcttctggtggatttcctgaaattcagcagggtggggccgcctctccaatgacttcactttactatactatggggtcattaaatagaggagccaggagttcaggactccctccctcttcttcaaatgtgtcctccagtgattcatttgggtggccaacggagtggggtaggggcagagttggaatcaaaattctaggtaaaactgataccttacttttaaaggtcaagctctttccttcaccagagcacctactatgtgccaggcatgtggtctgcgctctgcaggtggtttttttttccctaaaaataatagaaatggtaaaaagagacccctcgcgtgagtcccttaaagtgactggagggc

SEQ ID NO: 23810 - DNA, 580 bp, Homo sapiens
  source 1..580: mol_type = other DNA
tgtgtgtgtgtgtgtagataaaaataaacggataagaatggctatattattaatatgaaacaaagtagactttagaaagattaacattacataatgataaaaacatgggagaaatttgaaagtccctaagttttgttaaaatcttcaacattcctctcttagtaatcaacagaacatcatcaaccaactaaatgtaatagatattatataatattccactcaaaaactatacaacttttcaagtgcctatggaatatctgccaagatagatcatatcctggaaataagccttaacaaatttgacatacaaaatattttttctgagtataattgaacttctgatttaaaattaaatcaataaccaaaagataagaaacttcagacacttggaaattaagcacatttctgattaatccgtgggtcaaataaattggtttgattatctctctgggtagagagaagagcttttctctgattaagctgtttcatggcttaaagacagcactttaaattttggtattagccacaataatcttggacgtaaaagagaaattgctccctataatatgatatagccagg

SEQ ID NO: 23811 - DNA, 451 bp, Homo sapiens
  source 1..451: mol_type = other DNA
tgttcaggaagaaattacagtactgaagaatttaacagacttatggctgtaaggaattataagaattttggaacagtcttttcttctacttacataagatgctcaaaaatagacagaatggcatctattaccagttaaaaatgtttctctaacaatactggagacatactaaaattcagtagttactggtcaggtaattgttatgtgagatttctctaaagagaaactcagagtttcttttgttaccctgaagaaaattacattgctttatctggattcaagttttaagaatctgttgaaggttttaaatagtttctaacccaatttgtatgtatttacttgtcacttaaaatatatatatatataacatatatatttatgtatttttcactttgaccagattctcctgggaaatttgtataaaacagaactattcacaatgaatgtgaaa

SEQ ID NO: 23812 - DNA, 527 bp, Homo sapiens
  source 1..527: mol_type = other DNA
tatttccttgttgaaggagcattcacattagcatagttcaacaatagaaatagaaatagcaataaagattttgctattatcttacaaaatcccactgtgtggtattttggtacaaataaattgaaaagtaacttatcttcttaaggttttttaagttgtatgctaaatacactagaaaacttgcggaataatgattgtatattggaaacaataattttagatgaccaaatacatttttgtttgaagtttccgttgaatgtttataaaaagaatttctctggagaaaaaaaaaatctaacatatattaatttaatcaaacatcttaaaacaaaggggcctagatttcctggcctataagataagcacagagatgagcatctactataacaaaataaactctttgtttttatgtactgcctgacaagaaaactctgactataacttgtaatgtaattgtaattgtactagttagtcttatatagggtaagaataaaaaagaaacctgtataacccaatttctttccttc

SEQ ID NO: 23813 - DNA, 483 bp, Homo sapiens
  source 1..483: mol_type = other DNA
tagcaataaacacttagatttcattgaggattaagtgatttacatgtaccattttacatttaggcctgtgaaagacatgttaatatatctctcccgtatactttgcatttaaaaattacaggccaggcctccactgcactccagtctagaacaaaaaaaaaaaattacaaacataaaatttgttaatgtatttgtttagttgtcccaatattatttattaaataaaccatctttctaatacatttgaaaggtcattttattaatctttatttttataaccagtaacatattattttaattattatagttctgtcacatattattttggcaattaggaaaatattgatcattgtgtattttaaagtattgaaatgctgagaaatatgccactaaactaaatagccttgttctatgttggttatactgttaataatttgttaacaatttgttctaaaaataggcttgctctttgacatatatgaa

SEQ ID NO: 23814 - DNA, 569 bp, Homo sapiens
  source 1..569: mol_type = other DNA
aggagagaaattttatatatatatatatacacacacacacacacacacacacattatatatatacacatatgtatacattatatatatatacattttatatatatacacacaggcacacacatatacacataatagtatcatggctgtaaaaaccgtgtcaaatatttgagatttcccaattcatggcactgtggcaggtcaagaaaagtttgcaactctttacagagcagagaggactatgctatatgaattaaacatgtttcagtttgttgtagtcttcgtgcacaaaaatttatctgaatctttttatatgttttgtatgttcataagaagcaacaaatttgttaaaaattcttcatgattgcttagctttattaggaaaaaaaatcagctccagaatactctgctaacttagtctgaattagttaaatatacaactaactggcagttgtgtttattcatcagtagtgaaaagaaaatagatacagatttcttatacaaatttaactgctttgtgctaagtgaacaaacacagagtttattaaacaagttcatcatgtacagcttg

SEQ ID NO: 23815 - DNA, 688 bp, Homo sapiens
  source 1..688: mol_type = other DNA
atattcctaatgaaaatggtaatcatttgaagagtctctgagtccttagaagtgtattattatagttaaaatcacataaaaagattttcagggttgataaagaggcattatttgccattctgagaatatccaatttagttgtagctgaaaaaaaagtaacaaatcattaaagttatgccatctagtctataccactacactttttaaatgggtatcagatatgattagcaccattttcattccagatactattctggactcatctgttggcttcacacttatttaaacatctgcaaataacttcacctgttagccccacctttcaaatttgtttaatggatgtgagtagaatcaaatgggagaattcatttaaacccttagaacactttctagtacataggaattagtgaatacaaggaaccatttaactgaaatgcagttaactttcagatgaaactttctcattggaatgattcagatttctgagatgagcaatcctcgctgtcaaatttttaattattaaaagtcatgcaattgtaaatatgtagttatccatgcaattgtaaatattgatctctttttttgtgtgtatgccaaaaagagcaataaacaaattcttaacagaatttgttggcatgttctacacacagaccatggcttttcagaagccaagctgaatcaaaacagt

SEQ ID NO: 23816 - DNA, 496 bp, Homo sapiens
  source 1..496: mol_type = other DNA
agtgttaataacttttgactaatgaagctcaaaacactagattatatttttagcaaagttcacagatgtcatgtgtctcaggccgtttggaaaattcagcatctgccgcattccgcaccctcagtgggaggacctcccaggtcggggtgtgcagcactccagatgccgcggcgggaccgtgggccaaggtcacggcgtgggaggccctggggaagagccacgaggcccgactctagtggctcaggggccctgggcagcggcgcgccaccgctcgccccaccctcagcctcttccgggcgcgctgcttgcctgcgtgcgccgggacgcgcggggccgagcgtctgaagcgcgcccgtacgcggagcggcgctttctaggagccccgccctcaggtgcgctctgcaggaggcggggcgcgacttcggcgccgccagctctgcctgcgccaggagcgcgcgggtgcgcgcggccgcgccctcgcacagatcccagctgg

SEQ ID NO: 23817 - DNA, 493 bp, Homo sapiens
  source 1..493: mol_type = other DNA
agtgttaataacttttgactaatgaagctcaaaacactagattatatttttagcaaagttcacagatgtcatgtgtctcaggccgtttggaaaattcagcatctgccgcattccgcaccctcagtgggaggacctcccaggtcggggtgtgcagcactccagatgccgcggcgggaccgtgggccaaggtcacggcgtgggaggccctggggaagagccacgaggcccgactctagtggctcaggggccctgggcagcggcgcgccaccgctcgccccaccctcagcctcttccgggcgcgctgcttgcctgcgtgcgccgggacgcgcggggccgagcgtctgaagcgcgcccgtacgcggagcggcgctttctaggagccccgccctcaggtgcgctctgcaggaggcggggcgcgacttcggcgccgccagctctgcctgcgccaggagcgcgcgggtgcgcgcggccgcgccctcgcacagatcccagc

SEQ ID NO: 23818 - DNA, 461 bp, Homo sapiens
  source 1..461: mol_type = other DNA
agtgttaataacttttgactaatgaagctcaaaacactagattatatttttagcaaagttcacagatgtcatgtgtctcaggccgtttggaaaattcagcatctgccgcattccgcaccctcagtgggaggacctcccaggtcggggtgtgcagcactccagatgccgcggcgggaccgtgggccaaggtcacggcgtgggaggccctggggaagagccacgaggcccgactctagtggctcaggggccctgggcagcggcgcgccaccgctcgccccaccctcagcctcttccgggcgcgctgcttgcctgcgtgcgccgggacgcgcggggccgagcgtctgaagcgcgcccgtacgcggagcggcgctttctaggagccccgccctcaggtgcgctctgcaggaggcggggcgcgacttcggcgccgccagctctgcctgcgccaggagcgcgcgggt

SEQ ID NO: 23819 - DNA, 358 bp, Homo sapiens
  source 1..358: mol_type = other DNA
ttgataaagttagcgttgatgtataaaaagcagaacttccaaataactgacctggattgtttctgacaaaataaaactttgcatcttctccacagagcaaaggtaaccttatacatttttcttactagaaaaaatgtttttaaaaatggaggtgtggccgggcgcgggctcacctaattagctcccagctactcactgcactccagcctgggcgacagagcgagactccctcctgctgacaagccaaaagctctttagctaacctaatattctttagcgaccggggcgaccccccgtggactccgccggaggccttcgcgcccttcgcaggaaggacgtctgcgcactaagatactca

SEQ ID NO: 23820 - DNA, 344 bp, Homo sapiens
  source 1..344: mol_type = other DNA
ctgagattctgaaatctggcttcatgccagaaaccttaagaacttccatctcttaatctcaagaatggacttcagccctgtagccagaatacgagtctaattacagtcgttgggcttcaagtaccacaacgtggaaaaacaatttagaaaatgccttcttatgatatgttctagacttaatttagtctcttcattcaaagtttacataaatggaaataggaaaatacacttttcaaaaaaaagttaaagattgtagtctatagacataaacatctaaggaaagttttgatgctttttgtacatttgttactactttcttaaaaaatgatgggaaatttgatgaa

SEQ ID NO: 23821 - DNA, 480 bp, Homo sapiens
  source 1..480: mol_type = other DNA
agagtgtgttagcgaacatttctgtggcctggtaaatattttctaactattggcaaggctttttaaatttaggattatatatgtgtgtggtgggattacactattttcagagaacacagtcatggtctgatgcaatatagtgctgcatatgcccaatcaggccgacgaggcttaccctttgcagactgtgccaagtcgaggcttgttgcgatctgcagaaatctacagaattctctgtttccgagaaggcttgttgctagcatatgacatcatagaaagcctttttttttttctgacattttttctgctttgctttagaatatcaaaggcaaagactgttgaacatagttggccacttagctttatccacatattgtttttctttcttttaagaaatcaaagaggcatttatagaaaagctgtcagatttatagattggttaagcaatttcctcggaacaatgagcttgcagaggtttgc

SEQ ID NO: 23822 - DNA, 303 bp, Homo sapiens
  source 1..303: mol_type = other DNA
gaagcaaaggaaaaactaattccttgctagcaagcctagggttgaggaaaggaagactttccaaccccaatgttgattagttaatcattaaagaatggatgaaagagttctgatgaaagggatttatttgtactattccaacagcctgtctgtaaatatttgagtcacttacctgatcaagtaaaaacttagtcaggatatacacactgtacctcctccagaggtacagaggtggtgacgtaatcactgccacagcggctacctatgtagattcccaaaccggtgtcaatggttaacccatcc

SEQ ID NO: 23823 - DNA, 394 bp, Homo sapiens
  source 1..394: mol_type = other DNA
cataataaagaagagaaaatctataaatgattaatttcctttttctatttaggcttaacatgttttaagggataattaaacttaagaagcttattgaactcattcattatcctttggttaatacagagtgaacttgtctaccctcaggttcatttagctttaggctacagcctttacagtattaattcaagctgtttataaataacacatgactaaatagatgttaaagaagaccccttggggcaggcattattcccacgctatcagagcagccacaccgagtgcatcatctcctaggggccagctagtttgctgaattagttcagcgacatttgatcatatcctgtcctttaggagcaaagcttcgttaggacaccgaagtactcagaaataa

SEQ ID NO: 23824 - DNA, 587 bp, Homo sapiens
  source 1..587: mol_type = other DNA
tcgcctggggagttgctattccaaaaaaaatcattactctctaattgttctgattttagaacgagccgtccacccttcggagaagcctaggcgccaagcggcgctgcagtggccgcacttgcgcgcgtctcaatcctgggggctctgcgcgcccgccccagtccctcgccccattgactcagtggcttctccgggcgctgcagcctccgcggggggcttcgaagggccgaggctgcccgtctacccggcgctggcacctcgcaggcccctcgaggagcacgcagggcaagcggcctttgcccaaggccaggctgcaatcaggcagccgcaacagccgggcgcggagcttcccacctgctgctgtcccagctgggccgcaacttcctcctccccggcccgggcccgactccccggccgggctccgagggtggagggggacgaggcggcggcaggttccctccgctggcaacgcctcgcagcatcctcccctccccgccgcggttcccggggccggccgcgcggccaggcgcgctgcgattggccggcagcggccgggggcggggccaggagagccggtgtccgaccgc

SEQ ID NO: 23825 - DNA, 296 bp, Homo sapiens
  source 1..296: mol_type = other DNA
cggcctgggcctcgcggcccgggacagcgggcggctgacgtttttgacccggccaggaggcgatgtggcgcggggcggcctcgagagcgccgggctcctgcgtggccacggccgccgctgccaaccttcgcgcatgttaatctatttatatggattattcatttgcttcaaaagactatttctaagcacttttgcaggcagcagcgctaagaagcggctgcttttcgacctagtctagacaaaattctggcattccgagagtacgacaaacttacacacttggaagtcccgggtcc

SEQ ID NO: 23826 - DNA, 398 bp, Homo sapiens
  source 1..398: mol_type = other DNA
gctaaatctgcagatcaaagcctttgacctagggcagtgcttttcaaagatccagcactttgggaggcccacacgagtggatcatgcacctgtgatcccagctactcgcaatcacccgagattgggccacggcactccagcctgggcgggaaccagagcctctgggggtgctaccccctccagtgattcttttgagggtcattgactggagaatgatctgctgcgcacccagtggcatggtgggggctgcagtcactcgcagactgctgggctcttggcctcagggctctgttctgcccgcccagatctgttcctgagcctgcagacggctgtgaaccagagaatctattcttcaggcggagttgcggccaagggggcggggcccggaggcgggaggg

SEQ ID NO: 23827 - DNA, 166 bp, Homo sapiens
  source 1..166: mol_type = other DNA
ttggatgatctacattagattggatattccaggaagtcagcagagtcatactctgtggttcaagcgattctcctgcctcagcctcgtaagtagctgattaaaacatgagggtaatttaaaaaatcccctgaacaaatttctatggttcccatctgcaaatctgaga

SEQ ID NO: 23828 - DNA, 229 bp, Homo sapiens
  source 1..229: mol_type = other DNA
gtacctattaatgattcattcctaaattctgcagtcaaaaatcttctctaactttattcaacatattgatttcatttatggcttagaggcatggagcatcacctccaggagtttcttgttggtgcctccaagaatgactaatacatatgatggatggaaagaggtggattcttcagcctcagtcaagcctcagatgactgcggggaggttttccccatactgttctcat

SEQ ID NO: 23829 - DNA, 340 bp, Homo sapiens
  source 1..340: mol_type = other DNA
cttattaaactattgaaaagaggctgaatcactcacagcatgtaggagagactgtgctgggtcagaccagcaggtgctcgctgcacctccaagctgtgggacgcagggacagctgggaccagtcgacgtccactggccctctgatggctcctaggagcctggccctgcgccctgcgcccggggctggcccacggtaaagctacttgagaatagcgcttgtccttagaccgaaaacgcttacgtctgtaagctctgcctgcggccacccgcaggcgtttcagccggtctcacccctgtccttctgcaggacccgggaggaggggtggggaaatgtgccgag

SEQ ID NO: 23830 - DNA, 573 bp, Homo sapiens
  source 1..573: mol_type = other DNA
ttttggcatttcctgcaaggccaggggctccgggacccgcctgcgggtcgcagggtgggggcacggggactgacctgctgggcccgcggtggccggggcgcggccgagccggcctggcggaggcgggcgcagtactggtcggtggccttcacggcgtccactagccccacggcgcagcggcgcatctggccgatggtgtcggccgcctcgatcaggtcgcggtaccggaacctggcgctccagcccgcggatctcctccgctccatgcgtctcgaaaagagccgcagggtcgcgcagatccagccgcttcagcgcgggtgaggttgccgcggtggccatggtgcactcgtcagcccgccccctccgccatcttcgttgggggcggaagcgcttccgccccgccgggggccatgtttgttacccgagggggcgggcgcgagggggcgggcgcgagggggcgggcgcgagggggcgggcgcgagggggcgggcgcgagggggcgggcgcgagggggcgggcgcgagggggcgggggcgggcgcgggcgcgggggcgggcgcggtcctgcgcgggg

SEQ ID NO: 23831 - DNA, 510 bp, Homo sapiens
  source 1..510: mol_type = other DNA
gggtaggccctgagttgctgggggctcagcatggccgctgcggagcgcccacccgtctggcgctgcgttccccggggcgtcccagcctgggctaaacatcggttttaaacgaaatggaaaaaccccttcaggggcggcgtggtagctcttcccggggaacagcgaggggcgcggacggggtgcgatccgagacccagcggcggcgagcgcgcccgagtctgctcgcgggcgccaggcgcgcggagagcggcggctgcgcctgcgccaacgccgtcagtccgcggggcccgatcccccgcgcaggaccgcgcccgcccccgcgcccgcgcccgcccccgccccctcgcgcccgccccctcgcgcccgccccctcgcgcccgccccctcgcgcccgccccctcgcgcccgccccctcgcgcccgccccctcgcgcccgccccctcgggtaacaaacatggcccccggcggggcggaagcgcttccgcccccaacgaagatggcggagggggc

SEQ ID NO: 23832 - DNA, 323 bp, Homo sapiens
  source 1..323: mol_type = other DNA
cccagcctccggggaggggggtcggcccggcagctcctgggtcagggacagccgttcccgcagccccaccgaggatttcctcctgcggttccaggaagagagagtctcaagcccaggcggccccggcgacaagccccccagggaagcccccggataggtgttttaaaatatgttacacggattcaactcaaatacttgtatgatattattatgacataattgaatttatttgaaaccgaacaggcgagcgcttctgccaccccaggggagggggatggtgccactgcgcagccgcgagagggcggtaccacggcggcagcgac

SEQ ID NO: 23833 - DNA, 362 bp, Homo sapiens
  source 1..362: mol_type = other DNA
gggtggacgcagccggtggcgagtacccctcagtcggacgtcgctgccgccgtggtaccgccctctcgcggctgcgcagtggcaccatccccctcccctggggtggcagaagcgctcgcctgttcggtttcaaataaattcaattatgtcataataatatcatacaagtatttgagttgaatccgtgtaacatattttaaaacacctatccgggggcttccctggggggcttgtcgccggggccgcctgggcttgagactctctcttcctggaaccgcaggaggaaatcctcggtggggctgcgggaacggctgtccctgacccaggagctgccgggccgacccccctccccggaggctggg

SEQ ID NO: 23834 - DNA, 421 bp, Homo sapiens
  source 1..421: mol_type = other DNA
cggcccgcagtgcaccccacagggagccccgccgggtccactatggaaagggggtcccttccctctcacctgggacggaggcgctcgctcatggcagctggcggatggaagctacgcggcgccgctccgcgaagagggggttgtgtttcggcggccgccacgcccaccccctcgggccttggctctcgcagccgctcgggtggacgcagccggtggcgagtacccctcagtcggacgtcgctgccgccgtggtaccgccctctcgcggctgcgcagtggcaccatccccctcccctggggtggcagaagcgctcgcctgttcggtttcaaataaattcaattatgtcataataatatcatacaagtatttgagttgaatccgtgtaacatattttaaaacacctatccgggggcttccctg

SEQ ID NO: 23835 - DNA, 659 bp, Homo sapiens
  source 1..659: mol_type = other DNA
ggggaccgaggtaggcgacgggcaaccgcctctgtctgtggtagccgcctgggtgggcttgggggtctcgagtccccctgtggggcagagaggccgcggcgcggggagaagggcgcggagcccccacttctcggcgctcgcgcttttcaccgcgcccaccgcggtgcctgggaccctaagctgcgcacctagtgaactcccggccctggccaagggtgcgctgagggggttgggggccggttttaaagggcctcccccttcccaggaatggcgcagcaatcggcggcgcgcggcccgcgatctccgcgaggggggcgtgtgtgcgcccttctcctaagaaccgaattctccgcctgtacgggcagaggcgtgtacacatcgaatggccgaaggaacaaatggtcctcctttcccctactcccgccccgcccgctccctcggaagcccgggaggccgaggcgcctcctggcggggtgcggggggagggcagtcgagccacccgcccccttggagccggggagacggccgctcctgggctagtgcgccccgagctcagcgcgctcagcgggatcgcagaatcgcccgcttggggcgggtgcgcgcggatcggccgtccctggccccgccccctctccggagcgcccccagccggggtcccc

SEQ ID NO: 23836 - DNA, 730 bp, Homo sapiens
  source 1..730: mol_type = other DNA
tgtcgcactgcagagggaaacggaaatgcagaatgttcctgagggcttagggacctcgcagccatggggaaagtctggggccttcaccctcacttcctttaaaaaccgagggtgggaagggttttcactttgcgccttgtccaagttgactccttgataatgatcatttcaactgaaactattcctctaaaaagaatagagtccaaggcctgggacttggattcaggctctgggactcaggagttgatcctccttgacgttcacctggtgcaaatttagcctcagctgatacttagggcccagtccaagcctggcctcggggctggccggctcctccccgctccctcgtttacagcgagagtctgggatggcacccacgaagctggtggcgccagccctcctgccccatctcccgacagtactgcagccaggtggttagcacccgggctggagttcttggtttcttgccccggctcgaatggggaagagcctcaaaagagcctcgcgccaggcccccggagggagacgcgcccctggccctgggggccccagtgggggttcgcggccggagcgcaggctggggcgggagtgtctcccggaagccgggcgggcccaggctgccccatacggaaagtctcagtcccgacggccattggctgctgcggcgccgtgacatcagcgcagaggcgcgcgggcggagcctggaaggggagtgtcctggaggctccca

SEQ ID NO: 23837 - DNA, 413 bp, Homo sapiens
  source 1..413: mol_type = other DNA
gtgtcactgatctgtggtcagatggggcacaaaaaagagctgcaagccaggctgctttcctgctttgcctgctgtgggaacttgcccaagatcttgcatctggcaggaaggtggcaaacccaggcagcccggctctcaggcctctgggagtcctttgctgtcgggcggcatcagtgaccacaaccgccgcaccggcagtgacgccggctactacgagtgtgaggctgtcctgcgcagcagcagcgtcccctcgcgcctacctctcagtgctgggtgagagagggtggggctgctagggctcccctgaggggtaggggcagcacggcgagggtcctccttaagggtgaccccctacagtggctggatcaaagcgagcatggctctgctgcagaaccgcctcagtttgtcaaaag

SEQ ID NO: 23838 - DNA, 314 bp, Homo sapiens
  source 1..314: mol_type = other DNA
tagggggagaaaggaacgctgccctccccaggcttcccaagcctccccaggaagtggccggagcctgggctggggaatctgcccagcaggggttcaactcctgagtccacctctcccctctggggccgcggtgagaccccgcaagagagccctaggggtgagacacttagcagcttttggaagtattattattattatcattattgctagatctaaagagcccagggccctggtcatgacaaaacctagcaaagccaggctggggatggtccattccattcttggagctgcactgttgacttcgaccacaaggg

SEQ ID NO: 23839 - DNA, 312 bp, Homo sapiens
  source 1..312: mol_type = other DNA
ggagggcccagggacgcgaggctccccgatgggcaacctcaattttctgagtgagacaggcgtcctgcaggcggctcagatgcgccgggagctcccgtgacaagcccttgggacgggcagtcgcccctctctggcctatgacttcataccggccaggacagatccccgcccagaaaggggctgttgactgcagcgggctgcgcgcccagaactgggactgggatcgcggcggggcggggcgggcgcgggcccagggagaggcggggccgggggcggggcgggcacggggccccggccgggaggtgagcgcag

SEQ ID NO: 23840 - DNA, 316 bp, Homo sapiens
  source 1..316: mol_type = other DNA
tagccaatctgggattcaaattcatttttttctagccccaaattcccttgttttaatttacatgatcgcaattgccatgactcgtttcattcattcaaccattcattcaatgaacacgtggcgggcacctgtagtcccagctactcggggagccgagatcgcgccactgcactctagcctgggcgacagagcgagactgcaaatgcatacaaacgtaggcttggataagcgccttggcaacgcccctacaaatattcatgatcattattagtatgttaccaacctattggttaattcctaactcaggagacctcta

SEQ ID NO: 23841 - DNA, 629 bp, Homo sapiens
  source 1..629: mol_type = other DNA
tggaaagtgaaacccatcgtggcttcctctcccagtcttgggggggctcagcttcggtgtccaacatcccccaggactgaggccccagctccaggtggctggccgagttggaggcggaactgggaccagaatccaagttttcccagggcctcctgaggacaggatgcaaccgttgttattgtcgccaagaatggaggcggtcgacaccccaggtaacagcatgccagtgggcagtgggtgcagacactcacagcacaggcacctgctgcgatgcacgcggcgcccacggaaacccgaggctgccagccgccgccctggagaccccagagacagcggcagatgtgtgcttcaaggggcagcgtggctgctggggcgctccctacacggggtcgcgccgcgagcagaggggcgcgggtgggcgcgcaggaggcgccaggcggacgcacggacgcaccgagggccgcagggccgcacagccgggcacacatcgtcgcgcagcggttcaggctcgggggcctcctcggcggaggcggccaactctcaccctcagcgcggggaggggcgggcgccgggggcggggcggcgccgtccgggccctccccctgccccgcctcgggtcggcgtcctta

SEQ ID NO: 23842 - DNA, 593 bp, Homo sapiens
  source 1..593: mol_type = other DNA
aagacagtccccagccttgggctggctggagcgcagagctagaaggtggccagccccgctctgggcaggggtcacccatgcagtggtgcacggggcagggtgcatctgctctatgcccagccctgccacctggctcagcttgcccctgggggaggcgacagtcactgacatcagttgcccatgggcccctattcgagagatctctgagcttctctctgaggagctgccccaccccaaaatgggagtgggggaggggtgggagcctcagccgcctctcctttcctgcagccggctcaccatggtgctccaggcacgacgctgccaagtgtgctctgtgccagggccgaggcctggggttgggggagggaactggggaccctcaggccaatggctgccagtggtcctggagcccctcgaaactttccagggagaggcacggctagccttccggatctgttccccttgggggcccacaggcagcacaatagcccccggggctgccgctctctggcttagtggttgcctgggcaacagctggggccagtttccaccaatccaaggaaggggggtgccgtccccttgtgccggatcct

SEQ ID NO: 23843 - DNA, 180 bp, Homo sapiens
  source 1..180: mol_type = other DNA
ccggcgggcacctgtaattccagctacgtgagctgagatggcaccactgcactccagccccaggcttaagctttaagcttctcagaggccaggttaaaaaaaaaaccaaatttttttaataggaaaatagaccctcagaggaaattggtcctcaaacgcaccatcagtggttctgaattt

SEQ ID NO: 23844 - DNA, 606 bp, Homo sapiens
  source 1..606: mol_type = other DNA
aaactgtcagcagctttcccaagccgacgggagcctcgcagaggcgggcgggggcctgattgcagcagatgggccgcagccacatgtgcacgcacagcacatgcaggcccgtggtgcaggagcagagcatctgtaggacctgaatgctgatggcgtccccattcagcctctgcccaggacaatgggcaatggagggtcctcttgtccttaagagctgcctgccaggcccacagatgagtccgtggagctgtccggtccaccccgtgctctccccagcagctggacaccgccccctcctggccggccgcgtgcagccagggctgggacgacctgccgctccaccctgccccgcacctgcatgggtgaccaggcccaccaaggtcagcatggcccagaagctgccccaggacccaggcttggagtagcctctcctaggcatcaggatccggcacaaggggacggcaccccccttccttggattggtggaaactggccccagctgttgcccaggcaaccactaagccagagagcggcagccccgggggctattgtgctgcctgtgggcccccaaggggaacagatccggaaggctagccgtgcctctcc

SEQ ID NO: 23845 - DNA, 430 bp, Homo sapiens
  source 1..430: mol_type = other DNA
tacaagcgtttgcctccctggcatggcagcagcactgcgcccctcttcttaatattgaagagacttgaatcttcgccaccccagaccagcccgtgagggcaaggccaggaagcctgaggcccggcccctccccctcgcgggcgctcagggttgagcaaacactccgggccgcccgccccgccaccagctggctccgaccggcgcaccgctggcgaaccccgagactcggcgccctgccctccctccgcgtctccagggccctggccaggccctcagcccctacgggcctctggcgcgggctaactaggcctcgctgcgggcccccaggactgcgcaccccaccccccgcgaggccagcagccccgggggaaggcggccggatcgggctgcaacccacagatccaccccggaacagggagtggggggtggg

SEQ ID NO: 23846 - DNA, 339 bp, Homo sapiens
  source 1..339: mol_type = other DNA
tggcagtgggcagggctccgctgctccgtccaggcctcagatgccccagcctttcccccgcctgggtcgggagggagtggatctaggtagggaaaagagattcccaaagcttagcacactgtgttacaagcgtttgcctccctggcatggcagcagcactgcgcccctcttcttaatattgaagagacttgaatcttcgccaccccagaccagcccgtgagggcaaggccaggaagcctgaggcccggcccctccccctcgcgggcgctcagggttgagcaaacactccgggccgcccgccccgccaccagctggctccgaccggcgcaccgctggcga

SEQ ID NO: 23847 - DNA, 382 bp, Homo sapiens
  source 1..382: mol_type = other DNA
ggagcccctccaccgcctgcctctcggtgggagtccgcgggaagtgactggttcccttgctccccattccagggggtgtagaccccagtaccgtcgacccaagtagggacgagagggttcagaatccccctgagggaagtttggaaattcagactatcaatctggtagcctggcccctagacgatcaagatcctaaacccccacccctgtgccttcaactggactgggggagggagtgccccttgaagatttccaagtctcagagagctcagggcattttggcccaaatgcctggtcggggtgtctaggctgaggttcgaggaaccccaacccaccccccttccaggcacaggcgtctcctgtgcgctggtatccctggggg

SEQ ID NO: 23848 - DNA, 193 bp, Homo sapiens
  source 1..193: mol_type = other DNA
tccttgcaggctcgctgagtccctgctctgtgcccagccccgagttggctccaatggggcccgaagcccaggcctggacctccaagggactcagggaagaggggagttccccctggcagcctcctcgtgggcaccaccgagggtgagaggagccagctcagcgggtcccacccccagggttgcccacccttcc

SEQ ID NO: 23849 - DNA, 193 bp, Homo sapiens; identical to SEQ ID NO: 23848
  source 1..193: mol_type = other DNA

SEQ ID NO: 23850 - DNA, 193 bp, Homo sapiens; identical to SEQ ID NO: 23848
  source 1..193: mol_type = other DNA

SEQ ID NO: 23851 - DNA, 388 bp, Homo sapiens
  source 1..388: mol_type = other DNA
ggctccccctgttctgagactgagggaggcgggctcagccttttaatatgcaaatacaggcgccttctacacacatgggtgtatgtagcagctctaagagccagggcttttcttctagacaagaaacatttatggagctgctttaaaagaaaaaaaaatctttttcttaagttaatagatacaataactgaggcacagagccaggtctgtctgacccaacagtctgcatgtttatgcacggctataacacctgaacaaatgcatgttcaggtgtgccatgacccatccgacatctgatgtggtatagaacagctctgaatgactcccagagtgttataccccttggacccaaggcctttcgtttaataattaaaagcaggaactaccc

SEQ ID NO: 23852 - DNA, 377 bp, Homo sapiens
  source 1..377: mol_type = other DNA
ctcaacctcatggctgtgtgcacatactgacagacaggaggtaaatcctgtgtctgcgcctcctgggaaggcctgtctgccatgtctgctccctgcggaggcccctggccatcacagtggacccaggatagacaccagcagccgctgctcatcaaacacccctccgtgtgccctggggtgtgtgctggctcaagaggaaaactccccaagcctgtgggattttaacctggttggggatcagcattctgaggccagagaaggtggcagatttagcctccaaccacaagattgtccatcctgaccaggaagtgacatgtcacagagggtggaagcccatgtggtaggaaatggcccagcttggctctgccttctgcagt

SEQ ID NO: 23853 - DNA, 341 bp, Homo sapiens
  source 1..341: mol_type = other DNA
aagaaattatattttcagatagctatgtcttagagaagagtatcttctgtggtccaggactattctaaaggtatttaatattaactgggcagttggcactgtatcaagcactttacttacattaactcatttatttcctgtggcaaccctttgagaaagaattgtcatgagtactctattttacagatgagacctatactgaactaggttaacagtgtataaccgtagtgatcaccacagctccttaaaactgggactgactttcatgaaattccgagtcatgaaatctcattacgttcacattaaattgctaagtaaggcttaaaattaggaagcattct

SEQ ID NO: 23854 - DNA, 314 bp, Homo sapiens
  source 1..314: mol_type = other DNA
tttttaaaaatacagtctctaaaatcaatatttgatccaaggattggaaaaggcaatttctccatggcttcagagtgatttcagagtggcttcagagtgactcatgatcccagtggaaggtcagacagcccagggcaggaagaggcaatgagatgtcttacaggctgcctggaagaagcctggctttctccacactgtgagtagatcccgcagctcttttccacatgcacaaaagtttgggcacaccttgcaacatacaagtcttttcaaagaatgacacctcttttctcctaatatgtaaaaagagaagtagc

SEQ ID NO: 23855 - DNA, 275 bp, Homo sapiens
  source 1..275: mol_type = other DNA
cttgccatgttgcccaggctggtcttgaactggggttggatacccaaagcatctggctacacctgaagctccaggtttaggacatgccgtggctctccaggacccctctggtggagccgcgtgcccctgcccccagccaacccaccaggtttggaggattggataagggctggccagacccagtggatctgtctggttctctttttagagaacccacggtggctgtgtacagagaggtacagaatctgtcacccaggctggagtgcaagtggcag

SEQ ID NO: 23856 - DNA, 524 bp, Homo sapiens
  source 1..524: mol_type = other DNA
ccacagagcccctgagctctgctaccggcctgtcaccaggagctgccgggtgcctgggatatcctggcaggccagggtgagtgtcagggttaataaggccggccccgccttcaggagcggtccactgggagatgtgtgctgcgcagccctcttgcgaaagctctcccctggtgggacatatgtgctctcggggccatcggcggaggcgcagcccaggggtccccagctccccgcctcgccacctggggacagcccacggcccggggctcgggcgccgcctgctgtcgcggtgcgcagcgactacgggaactcttccgcagcagacggggtccccgcggcccgctcccccaggggcaagcaagcgaccacaggggaccggtcccggggctggatgtcggagccgagccggtgttgctcagggaggctgcccgccccttcacgcagaccctgcggctctgcgtgccctcagggaacagcaaggtccgagcggggcgggggtggggccgttcctgcgctctccttcg

SEQ ID NO: 23857 - DNA, 579 bp, Homo sapiens
  source 1..579: mol_type = other DNA
tcagcgggctgcccctcgaggtcccaggctctccgcggagcccggatcagaacctgcactcctctatgcgagtcctgggacagcacagactgaccggccctcgctgccccgagcgggagcagttgccccggcaacagccgctccctctctggagctgcacccaggctttggctaaaggctgttaaaacgcgaaatttcgcgcctgtaaccccagctgctcgggaggctgaggcaggggaatcgctgttgcagtgatccgagatcgcgccacggcagtccagcctgggcgacagagcgagatcctcactccccgccacaggtaggggaaaccaggccggagccggcgggcccacccgcccagaaccgggaattcggcgagccccgcccctgaccccagcgccggccgctcagcgctagtcttcgcccgccgcggggcgccgcgccgagcgcaggccccgccccgcgcgttcccaatggccggcgccgttcacccggccggagcgcccaggcctgcagccccctattggcccgcggaggtccccaccctcagcgcggccccgcccccggggtaaggagccg

SEQ ID NO: 23858 - DNA, 445 bp, Homo sapiens
  source 1..445: mol_type = other DNA
tggcagcagaggttccttaggtgcaaggacggcggctgccgcagctccttaaaacctatagacaggggtgggaggaggcttgcagacttcccctgccacctcagacacttagggcctccccccgagggaggggtcaccctttgctgtgcagggcactgctctgtgcccagcacggatgttttcaagatttaaggggcctctaaaacctagttccaggaaccaggagcgcctctgcctagggcagggagctgcaagccgccgtctcccgccggtccgctgctgccggcgccagctgtccagcaccagcttccgcagcgcgcatgcgccggccccacagcccacctttttcgcgcgcgctgattgggcgcctcgcgggggcgggatggggcctggcggctgccgtcagcatggcggaagtgggcggggcgcgttctcacgcgcatgc

SEQ ID NO: 23859 - DNA, 384 bp, Homo sapiens
  source 1..384: mol_type = other DNA
aaccaatgtttcttcttaggggaaatagccctgcctacacagctctgggtgctggtgtagggtacaaggaccaccttcttccccagcagcaagcatggtagcagcctgcatgcagatgcctgaagacacttcaaagaatacattcttgcaccaggctggttaaggataattaaacaatccttgactcccatccaagaggccaagcctgggctccgacttcagggcaaggcgggcttagtcttaggcgcccggccggctaccgccccttccgcatgcgcgtgagaacgcgccccgcccacttccgccatgctgacggcagccgccaggccccatcccgcccccgcgaggcgcccaatcagcgcgcgcgaaaaaggtgggctgtgg

SEQ ID NO: 23860 - DNA, 582 bp, Homo sapiens
  source 1..582: mol_type = other DNA
tgggcacctgctgcgcactcgcctcggcgcccagatgctggcccgtgcccggctcccgggcgagcaagacctggcgctgggccctggctgcgcaccagccgcctgcgccggtctctgggggcttcgcccaggatccccgacggcggggaggggaagccccgagtctcctgtttcctgcctacgcgggcagggcggggacacgcggagaacccccaggtgcgtcccgcgaccctgcaaggagctgctgggtgagcaagacgggaattcccgccaggccctgatgcccaccccacagccctggtcgtccaagggggtcccccagccctcggatggtttcagtccctgaccccgggccacagtaggcaggtccgggacacctgggttcgcccagggcccccgggcgggcctgggatggtactggggccgcctgccaggctggcttggtccccccactgcgggactcggggtcacgacccagcttgggggagtgggggtgggggccccggagccgcggacgccggcggggggcagcgtggggcggggggcgccgggtgcgtggtgctcagcttggccgccaggagg

SEQ ID NO: 23861 - DNA, 808 bp, Homo sapiens
  source 1..808: mol_type = other DNA
tgtcaggtctggggacgcggttccgcgggaggggcctcgaggggcagcgggccgggccgggccggggcggaggtggcgggccccggcggggcgggccctcgcgggcggcggtgagagctcccgcacagtcggctgcgagctctgggagcaggaggcgcggtgcgcagcccagcccgggacggagccgggcgccgtgcgagcttcgggagggtcgcggggcgcaggggcgggtcggggccagcggaccaggccgcgccacccgcccccgcccccgccccgccgcgcccgggctccggcgcccgcggagctgagactgagcgcgccagccctccggggccgaggctctgggacagacaccgcgagggaggcggccggcgcgggctctcgtcgcgggcgcagcgccccttcccctcggtaagtggcgagcggcgggcgaggggcaccaacttcgccgccaacttggggctgggttcccgcggcgcgcgagcaaggacacacccggggggttggacccacgcaggactctcggggctcaaggagggggcggctggaggacccggaccctcaagaacctggccttgggttttgacccgggcggccggaggcgcggcggacgcgagagaaggacgcgggcgaagcgtccaagacgttcgtccccagggtcgccgagccctcctcctccttcgcttggcgcggcagcaccgcgggaccaggggagtctgggctgccgcggacccaaactgttgctgctggaagccgccggggctgaaagggggctgtgcggctccccagcccagtgccccagttt

SEQ ID NO: 23862 - DNA, 630 bp, Homo sapiens
  source 1..630: mol_type = other DNA
cgggggtcaccttctggccgtagctcccctaccatcaccaggtggcgctgcagagacggctccctgctcaggggcctcattgggggcttgatggggctcggcagccaggcctggcatagccacccttccactagggctgcccgggaccgggaccgggaccacccctccctggggagcagcttgtcccctgtacctctgggtgccccaggcgagtctagcctggggcagggccaagagctgcgggctcaaacccaggctccgggcaggctggtgtgtcctccgagcacttgccccgagtgtcaggtctggggacgcggttccggacgggaggggcctcgaggggcagcgggccgggccgggccggggcggaggtggcgggccccggcggggcgggccctcgcgggcggcggtgagagctcccgcacagtcggctgcgagctctgggagcaggaggcgcggtgcgcagcccagcccgggacggagccgggcgccgtgcgagcttcgggagggtcgcggggcgcaggggcgggtcggggccagcggaccaggccgcgccacccgcccccgcccccgccccgccgcgcccgggctccggcgcccgcggagctgagactgagcgcgccagccctc

SEQ ID NO: 23863 - DNA, 471 bp, Homo sapiens
  source 1..471: mol_type = other DNA
cttatttttaaaaacattttgatcatattttaaaacgttgcagtatgttttgccttaaattctgaacccgaggggagtacctcaactctggtcccggctcggctgcacgggggtcggacgctctgtcgtaccatacgtagccccgcttttcttcacctatgtaatgggaaaggaggtgaggtctccctggcccggcaaagacggggatttgaacacccggggtcgaagaaggaggctgctgggctccgggaaggagctccctcgccccagacttccgcacgactcgtgattggctaagcctcccgagaggggcgcggctactctcttccaaccctaggcttccgggatttggagggaaccccggatgctccgagggggagccgcaaggctccgctttcccggagcgcagggggcggggtttggggcggggcctcgcttgtgggcgggcccgggcaggagcgggcttgccct

SEQ ID NO: 23864 - DNA, 611 bp, Homo sapiens
  source 1..611: mol_type = other DNA
cagaggcttatcccctgaggaccaaggccatctccagcagtgcggggtgggggggatgtgacaggtgtggctcccacatctcagagggcttggctgaggccctggccctgggttcaggcctgggcgtggcagcgggacccggctggtctgcctgcccacccagtctcacccaaaacaattgggctgaagaggacctctcactccttgacccacggggagggggagtggggagtccttgaactttctgccctaggaattcccagatgttctgtgccaagcattgccctaggtactgaagacagagcttgggcaaaccgtctgttggcagagacagacgacagcatgtgtcatgtgtgtcacgtacgaggagctgctcagtgccaccgagggaactcagggagttatctccactggggtctccgtgcccctgggtctcaccgcagggtcgcctccccgcctagccatgccgcctgccagggtcgcgcgcctgagccgggcctgggtcgccagcgcccgcagcagaggagccagggtgtctcgcaccttgaccccgggggcgggtgtccccaggcggcgcgtgactccgccccggcccgccccgcctcgcctgc

SEQ ID NO: 23865 - DNA, 535 bp, Homo sapiens
  source 1..535: mol_type = other DNA
tttctccaaggtgaatttaccgtcaccccggtgcggccaggctcgggcgcggccccgcactgcggcacctagagggcaccccgcccctggtgcccaccgcgccctggcgcgcagcattccaggcgcccagagccccgagagctaagcgctggccctccagccggatggcaaccccctgcccgcccccgccgccggcccgcgctccgttggactccggggcttgggtgcgaagttccacgcggcacgcggagccgctgccagtcctccagcgccccctgctggagtgcggtcgagggactccgttcaggcggcggcggcctggcccgtcccactcgctgaccgaaccgcggtcggtcacggtgccccttcttaggtccactgtcctggggctcaggacggctcccccaccccgccctcccactgacagtagatctctgactgtccccggactgggcgtcacagtgcgcggccccggggtgggcacggggcggctccctggacagcgggagatttcgtcccccgccccctccgcccc

SEQ ID NO: 23866 - DNA, 503 bp, Homo sapiens
  source 1..503: mol_type = other DNA
gtgcccaccccggggccgcgcactgtgacgcccagtccggggacagtcagagatctactgtcagtgggagggcggggtgggggagccgtcctgagccccaggacagtggacctaagaaggggcaccgtgaccgaccgcggttcggtcagcgagtgggacgggccaggccgccgccgcctgaacggagtccctcgaccgcactccagcagggggcgctggaggactggcagcggctccgcgtgccgcgtggaacttcgcacccaagccccggagtccaacggagcgcgggccggcggcgggggcgggcagggggttgccatccggctggagggccagcgcttagctctcggggctctgggcgcctggaatgctgcgcgccagggcgcggtgggcaccaggggcggggtgccctctaggtgccgcagtgcggggccgcgcccgagcctggccgcaccggggtgacggtaaattcaccttggagaaatcggcgtgggagagaggag

SEQ ID NO: 23867 - DNA, 524 bp, Homo sapiens
  source 1..524: mol_type = other DNA
accgcactccagcagggggcgctggaggactggcagcggctccgcgtgccgcgtggaacttcgcacccaagccccggagtccaacggagcgcgggccggcggcgggggcgggcagggggttgccatccggctggagggccagcgcttagctctcggggctctgggcgcctggaatgctgcgcgccagggcgcggtgggcaccaggggcggggtgccctctaggtgccgcagtgcggggccgcgcccgagcctggccgcaccggggtgacggtaaattcaccttggagaaatcggcgtgggagagaggagacgctcgccgtcccctgacccccagctcagcgccggctccaagcccagccaggtgggtgccccgggccggagggcagtcggacttggggggtccaaccgggtgctgccgcttctcctttcttcccatccagcgagaggggcagcccaaccctgcgggtcaggaactccctagtccccaagtctagggatgacctccgccatgtccgaggagctgg

SEQ ID NO: 23868 - DNA, 433 bp, Homo sapiens
  source 1..433: mol_type = other DNA
tttaaaaggagttgggagtctcagatcctcaccacttgccccaggaggtccccgaggagtttcccctaagccctagggtttctactctacaaagggtatagtctcagaggccgcaggtggagctgaggaggcctcctcccctgtcagaatggggctaggcggcctccaggcctggggcgactccaggcctggagggagggcgtccattcccagcttgaaaacgaggcctgaattccgaagctctttacttccaccccatccgagggcgggctgcgagttggagaccctgcaggcccgcgcctgcacagccagctgcctcaattggctgcaccctctgggtccgagcccccgggagggttgggccgcggagcccgagcggcggctgcgcagtcccgctgggggagggcgtcgcgggcatcggtctcacctggac

SEQ ID NO: 23869 - DNA, 370 bp, Homo sapiens
  source 1..370: mol_type = other DNA
ttctgctacttcagcctccagagtagctggccaggctggtctcgaatcgccataaagagcaggctgttatgtccgctgatctcaaaggattctctgggaataccgcgagggactctcgcgctcagcaaggcgaggagctgctttcctggagtaactgagtcagcgcctccctccctcagcagcggaggcgggtacaatgctccgacgcagaagagcgtcgaggctccgggtgggacctggaaggcacccggcgtgcggcggcgctgggttggaaccgccgactccgcgggtcttcggcggcgggcgctgcaggtgcaggaggcggagccacgcgggggcggggcctgtcggggcggggccgacgagggcc

SEQ ID NO: 23870 - DNA, 298 bp, Homo sapiens
  source 1..298: mol_type = other DNA
ccgaacactcttctaaggaaagaatgcttgcaacagaactgtaaattagtattcattcattcaaagaatgtcgatggaaggtatcaatgaccagcatgttgtttgtctccctctgagccaggctggtctcgaaacccctgacctcaggcgatctgcccgccaggtgctggaattacaggagtcaggcatcgcgcccgactggtgagcagcaaacaatattcttgcttccaggagaggagggtcccgccctcgattggtcggcggcggcaggccccaccccgcggagccgagctccgca

SEQ ID NO: 23871 - DNA, 420 bp, Homo sapiens
  source 1..420: mol_type = other DNA
agtaacttaactaaggtttagctgttttcaaacactgcttgctctactgttatgaaagggttctagttacatcttgctccataaagctgacagagctgctgggtataagccagtacacacttaaagagcctggcgttcctaaaactcagctctaccagaacccaactttcaaaagtacattcctacagaattcattttatcagtactcatggggtgcccatgccctcctggagctagacaattaggactgagtgatttttgggcgggagatgccccaggctggccgggcaggcctcgctgctggccacaagatcgccaaccaggcctcccggaggcggccggccagaaagcatcggcgggaccccagtttgccgcctcccctcgagggcggctcgagtttgcggaccgcggggaggaagc

SEQ ID NO: 23872 - DNA, 301 bp, Homo sapiens
  source 1..301: mol_type = other DNA
tgggctctgaagcaaactgctcagacagagtctcactgccacccaggctggagtgcaatggcgcaatctcgggtcactgcaatcagcctcccaagtagctgggaactcaggtgcccgccaccgtggttagtggcactgagctagtaccccaatttaagaaaggacttaaaagtgacagctaagacatttagtctttcccctacagaggctgtggcaggaagactgctctcatggctggcaactgaccccctgtgagcagtcagggacatggatgatgctgtgcactcacacagcaacgtca

SEQ ID NO: 23873 - DNA, 563 bp, Homo sapiens
  source 1..563: mol_type = other DNA
gggaggtccctctgaggcccctgcgaggggggttcgaaggcccgggggcgcgcccgagggcggggcacaccttgtctgagtccagctccgggtcctcctgtcacgaagtaggtgcctcccacgttcagcctgacccagcgggccgcgccgccgccccctgcccgctcgggtggtccgggacccggctccagcggctgcgcgacggcggcagccgggcggccgtgcccgcggggcgtggggccagccgggcgtgggctggggggcccgcggactgggccacccccgtcgcccaccccactcgccatcgccgggtccagctgcagttccgccatcttggaccgccgccgccaccgctgctgcccgcgcgcagccgggccggcccatttctcggcagggagagccgggccggcccatcggcgggggtggggcagagggggacgggagcgcccccaaccagcgcccggggacccgcgcgggggaggcgctgtgcccgcccccgggaagatacttccggagaagcaaggcccacccccttggctttggggttggctgaggaaagatct

SEQ ID NO: 23874 - DNA, 518 bp, Homo sapiens
  source 1..518: mol_type = other DNA
ctcctaaaacgaaattttttttaattcttaaaaatctattctcaatgaatctttctgccgaaggggaagggcgcagccccgcagccagctgagcgtccctcgggaagtctgccgcgctgggagcggactgcacgagacacggcttgtggcagcgcctacatcagcggcgcctgggacacagccgggcccccctgaccccgcgcgccaaggagggctgaggaactctgccagcggggcaagccgagggcccagcgtccttgacagcagaggagccctccagggatcggatccaatgggctgcccacggtcctccgcagcaagtaacggaagggaagatctttcctcagccaaccccaaagccaagggggtgggccttgcttctccggaagtatcttcccgggggcgggcacagcgcctcccccgcgcgggtccccgggcgctggttgggggcgctcccgtccccctctgccccacccccgccgatgggccggcccggctctccctgccgagaaatgggc

SEQ ID NO: 23875 - DNA, 498 bp, Homo sapiens
  source 1..498: mol_type = other DNA
ggttaaactggaggagcccaggcctacctcagatccaaaaatgttgggctggggacccaagcccaggcaggggtggggctgctgcccagagcagagctgctcactcagctggtgttttacagcccagagggggtgtgacactatcgcgggtgagtaagtgctgctgaaagctgggtagcactgctcacagcagaggggctaggcctctgccatgcgaccagaggctgaatccaggccgagaccctgccaggggaccctggccaggccatgactgagacagtctggggaagcggaagatttgggtgcaccatggagccacctccacattggctctgacccaggggtccgggaaaaattagtgacccggtttttccttcaagctcctctgaggaagccctggctacagcctcgtggtagcctttcccctggagccttcgctcagctctgagcccagtgactcattccccacaggctgctgcccctgtgaagtaaggaatg

SEQ ID NO: 23876 - DNA, 351 bp, Homo sapiens
  source 1..351: mol_type = other DNA
tgctcaagcatggagcacataaggtacgtcaatgagcctttaccggatcctgagtatacagggttctgaggctgtgaaactcatcacctgaggtcaggagttcaagacccctagctactgtgagctgaggtcgcgccgctgcactccagcgtgggcaatgtagttctgagggccacatgcagaagtggtgggtgtcctctcacctgctcccagggctgaggggtctgccagggactgcctggactcccaccggcaggcgcagccctcaaagctcgaggctttcattggaagggctcctacttcctgggaggtgccgccccaagcccggggccctagaccctgagccggggc

SEQ ID NO: 23877 - DNA, 467 bp, Homo sapiens
  source 1..467: mol_type = other DNA
tctgaggctgtgaaactcatcacctgaggtcaggagttcaagacccctagctactgtgagctgaggtcgcgccgctgcactccagcgtgggcaatgtagttctgagggccacatgcagaagtggtgggtgtcctctcacctgctcccagggctgaggggtctgccagggactgcctggactcccaccggcaggcgcagccctcaaagctcgaggctttcattggaagggctcctacttcctgggaggtgccgccccaagcccggggccctagaccctgagccggggcatccgggttgtgcaaatttcagacacacggatatcccgtggcgcctgcgtccggagcccggccctgctgctggactgtccccggccacgcccgccgccccttccccacccgacggaatcccggggaggctggaaggtgggtccccgcccacaccgccctgggcccgccctgcctggccgc

SEQ ID NO: 23878 - DNA, 352 bp, Homo sapiens
  source 1..352: mol_type = other DNA
cggcctggcagcagatgagaagagctcttctcatagaaagagacttctccatagacttcttcctggcagagcaagagggagcagggctggggtccagcctccaggcctcccaaatgctaccagggcctcggggcctgggagtgccagggctaggtggaggctgtggccttttgtggcctttccgtttgctgagggaacagcccatctgcgatattgcctggcctggagctgggccaggaggagggccaggcgagggcaagcagtgctccgccttacaccctgaggctgcgatgaatgggacggtcaccttggtggggctcccagggtcctctgggaggccggcttaggtgct

SEQ ID NO: 23879 - DNA, 342 bp, Homo sapiens
  source 1..342: mol_type = other DNA
ctcctcgggctcccccgtgctgccccgggcgcgcgccatccacggacggacccacctcggggctgagctgacgcccgcgctccaaaggggcgtcctggtcaaggaggatgggccgcgcccccgccagccgtggggaccctggaggttgagttgctcctggcggaattccagccacccgacatgggtgtctcgggacggcggaggaccccgggggaccggcggcgggaaagccgagcgaggccctcactcgcccatctgttggcgggggcgctggaagcgcgccgcgcacgcgcgccaaggagttcggcgacggccccgccccttcgggggtagggacagcgc

SEQ ID NO: 23880 - DNA, 327 bp, Homo sapiens
  source 1..327: mol_type = other DNA
tgaggacagtcctggatcaaaatcatgaattagtctcttaacgagctagacttacacaaaccagttaacagattcatttcactttgtatttggccaggtgcggtggctcaagcctataatcccaactgtaatcccagctactcggctgcagtgagccgagatcgcgccgccactgcgccgcagcctgggcgacagagccagactccccacgggtttagcctaggatggcctcgcgcaaccgcagggccgtcggcactggtttacgacctgggcggggcggcccggacactgcccggcggactccggaagcagcgctccctccgcttc

SEQ ID NO: 23881 - DNA, 346 bp, Homo sapiens
  source 1..346: mol_type = other DNA
tccagtagtcctaatattctgctttttactcaaaaactaagttttgcagtgagctgagatcacgccactgcagtccagcctgggtgacagaaatcctgtctcaaaaaaaaaacaaaaaagttttatctaatagtcatttgatacattaagctatgagacatctaaaataatgaaacttggaacttagtggaacatgtacatgttttcagcatacttaaacccaaaaatcattaattttcagaacttaatcagtgcgtctactgaaaagggaacctgcttctttactccagaactctgttctttaaagaccaagattacattctcaattagaaaactttattgtaca

SEQ ID NO: 23882 - DNA, 488 bp, Homo sapiens
  source 1..488: mol_type = other DNA
ttcaattattatggaaatattgagacatgagaagggcctgccctctttttgcatttgtcgcatggatagataggcctgagctgcttccatagtcttggtagcagggaatgagtccattcctggtgccaggcattaaggcccccaaataggagcgactgtaattttgctaaacagtaacattaaaatgtaaggaatttccagtccttttaaaagggattctaagggacacacagtaggtattcaacagataaatgtcaacttgttgtaactccccaagaaagagcttccccctctgtcaggtaacgccttccgtccaatcatcgccgagattttggggtgggggaggagagtcccaaggccttcccagtccaggaagggggcgggcttaggctgagccgtggccgccacagcccatcgtaatgccgcatggtgcttggcactccagagagccaataggaatgaaagaattcatttgaatcggccaatgc

SEQ ID NO: 23883 - DNA, 283 bp, Homo sapiens
  source 1..283: mol_type = other DNA
aaggatctcgttgaatgaatacatgaatattttcccgtagctagcacggtgaaaccccgtcgtacctgtagtctcagctactcgggagagaatcacttgaacccagaggttgctgtgagagccccgcccagagccaggcgcgcccccgcggcgggccgggtgcgcgtgtccgcgcctcttcccgccggccgggcgggcgcctggcccaggacgcggtggcgtcgcgctcccgcgaggcgccagccagctactcgtgctcgcgcacgcagggtggggggaggga

SEQ ID NO: 23884 - DNA, 223 bp, Homo sapiens
  source 1..223: mol_type = other DNA
ctggtcttgaactcctgacctcaggtgatccaaccacctcggcgtcccggagtgctgggattacaggcgcgcagtggtcttgcaccttgggctgccaaagtgttggggccacagcgccgtacgcttactgggacctaaatcccgacagttcgcctacgcacgcgcaggcaccagggtgtccccggcgccgcctgtgagtgcagcgccgcagcggcgctgcagg

SEQ ID NO: 23885 - DNA, 433 bp, Homo sapiens
  source 1..433: mol_type = other DNA
ttcaaggctgcagtgagctatgatcgcacccctgcactccagcctagacatgtagcctattaaactcagcttaggtcatttaaattattcaatacccatattaataccttctggttatagcaagtatggcagtagtgcctgctttgctagaatacttggtaaactaatttaatgaatatctgtaaagtactttgagcaactgcagattttgcaaacgtgatgagcaacctcctgaagggggtttcttactaggaaaaatcagcctccaagatccttcaggcagagtactacctgctaaccaggttcgtagcactgtaattcacagtgcaatgacagcaaacagcttcagactgtgctctactcagaatagcactgagggggaattcccgacaccgattgtggtcactgcaggaaaaaggtagagctctctgtt

SEQ ID NO: 23886 - DNA, 413 bp, Homo sapiens
  source 1..413: mol_type = other DNA
atggcagtagtgcctgctttgctagaatacttggtaaactaatttaatgaatatctgtaaagtactttgagcaactgcagattttgcaaacgtgatgagcaacctcctgaagggggtttcttactaggaaaaatcagcctccaagatccttcaggcagagtactacctgctaaccaggttcgtagcactgtaattcacagtgcaatgacagcaaacagcttcagactgtgctctactcagaatagcactgagggggaattcccgacaccgattgtggtcactgcaggaaaaaggtagagctctctgttaactgcagccccaatccgaagcttctcccttagtcagggattggggcgctgggttcctggtgtcaccgccgggcggcgaccccaccagatcttggctgtcgcctg

SEQ ID NO: 23887 - DNA, 379 bp, Homo sapiens
  source 1..379: mol_type = other DNA
attccttgtcaatcaagggatccttgaatcattccccaagcaggcgggtaaagtctcctcctggacggtaaggatgggcttggcgcctacacacccatcccagctctttagctgaaccgtcacgcagctaacttagaagcttgaatccagatactccggcccccagggcaatgctctctctaggggcccacgcggcctgcctgtggcccctcgggcaactgcgggggcagccatcttggctggccacgaggaccccacaaggactgccctcggcgcgcctgtttttcactccggggtccaaaggggagcgccaaaaggaaaccgtcgcagtctggcgcggccctcggtgacggcactgtctcagctcgtgcagactctc

SEQ ID NO: 23888 - DNA, 526 bp, Homo sapiens
  source 1..526: mol_type = other DNA
ttcaggcagagtactacctgctaaccaggttcgtagcactgtaattcacagtgcaatgacagcaaacagcttcagactgtgctctactcagaatagcactgagggggaattcccgacaccgattgtggtcactgcaggaaaaaggtagagctctctgttaactgcagccccaatccgaagcttctcccttagtcagggattggggcgctgggttcctggtgtcaccgccgggcggcgaccccaccagatcttggctgtcgcctgcggtgcccgacaggagcccgagttcacgccgccgcgcgccagagcaagaggacgcgccgcagcgagggaagcgggggccggactggggcccggcgccctgatagggggcgtgatcgcaggctgctcgcggcgagggcgagaccgggcgtgggctgccaagaggcgacgccgtggagcccggacggccgcggctactcactgagccaggcagccgcccggccccgcggcttcaaaactcgcgagagtctgcacgagctgagac

SEQ ID NO: 23889 - DNA, 520 bp, Homo sapiens
  source 1..520: mol_type = other DNA
gggggaattcccgacaccgattgtggtcactgcaggaaaaaggtagagctctctgttaactgcagccccaatccgaagcttctcccttagtcagggattggggcgctgggttcctggtgtcaccgccgggcggcgaccccaccagatcttggctgtcgcctgcggtgcccgacaggagcccgagttcacgccgccgcgcgccagagcaagaggacgcgccgcagcgagggaagcgggggccggactggggcccggcgccctgatagggggcgtgatcgcaggctgctcgcggcgagggcgagaccgggcgtgggctgccaagaggcgacgccgtggagcccggacggccgcggctactcactgagccaggcagccgcccggccccgcggcttcaaaactcgcgagagtctgcacgagctgagacagtgccgtcaccgagggccgcgccagactgcgacggtttccttttggcgctcccctttggaccccggagtgaaaaacaggcgcgccgagggcagtc

SEQ ID NO: 23890 - DNA, 662 bp, Homo sapiens
  source 1..662: mol_type = other DNA
cacgcgcgcgcgccaccggcccggcaggtgggtcccggctcccacgccgcctctcccgcccgcgggaccctgggccgtgggctccgcagcccgccctgtgcctccgggaggggcgttccgggcgcggggggaacggccgagggctgccaaggcgcctcctacggccagaggggagcctccggcgggagccacctctccggggcgcatcatcctgccccccagtaagaggaaggctccagaatggagctcgtctcgagcgtagggccgggttactgccactcgggagccgatccgaccagcctgtcccagggagaagctggcacgggtctggggagttcaggctgctcccggcaggggcggcggacagggcgcctgcgtccccacccacgcaggccggccccatccgggggatgcagcggcgggtgttgctcctgcctcctgctgggactggagggctcttgtgtaatcccacaagcgagggattgcaggtgcctggctgatgcccagtccccaccagaagccaagcctggtgggccttcagccccgcacgccacggaccgcccaggagtccctgtcccgagcgcgccgtcagccccgtccagggcctgcaggacggaacccgccctgcgctccatcaagagctaccggggctggctagtcat

SEQ ID NO: 23891 - DNA, 428 bp, Homo sapiens
  source 1..428: mol_type = other DNA
aatgtatacgtattaaaaagggaatgcttgtcctttaaagacacatacaaatatttacggagagcgactctatcttgaaattttctacaataaaaatgtcttaaaattgtgcgtcaaaatgataacacgttctgtctatatacttttaatattacttttataatgagaaatactaaaagtgagacccgtcggaccccgcctgcaggctgactttcgagtcacacgccagagcacggcgacccctaaggtcgcagcccggcttcgccgcgtcggtcgaactcgcgcgcccgcgagcagccggactacatctcccaggaagctgtgcgccgtccagctgtcctgcccttggtcgcgaaggactgcgcacaaccattggtccagcgtctggcggggagctgcacggtgattggcccaggagcccgccagtt

SEQ ID NO: 23892 - DNA, 338 bp, Homo sapiens
  source 1..338: mol_type = other DNA
acagaatcttttacctgcaaaatgcagtttgcatcagtactctgcttgctctaagaagctgtgcacagggtgactgtgagagagacttctctttgaccttctagggattcctttcaaggattaggacttcagctctgctccggggaccccagagtcttggggatctaaatggattgaaaaagcagttcctacatttactttctcctgctctcctgggagcagatcatggtttaggacccccgtgggactccagccggttcctgcacgcagtgcacacccagcgggcaggcagctgtgccattggccggcaggcctgtcagtcgcctgggggccgagga

SEQ ID NO: 23893 - DNA, 460 bp, Homo sapiens
  source 1..460: mol_type = other DNA
cagaaagatttggacctatttgcaaaggtacaagattaggtactaaaatgccatcttcttgtccagctgagaaagggattttaattacgtaattaaacaattatataaacaagtttttgtttgtttttttttttaaacaagacttatgggaaaagagaagtaaatacccaggcgatttatctaattacctagaaaaaaaatttaacttgtttttccctttagatttccctgagggagtccctccaaggcctctcggagcgtgggaaaaaaggtggggcgcgccgtctatctttttagaataattgccctctggtcagggtttctggactagaaactgcctgagctttacgcacaggaaaggacagtggctcttcactaattccgccaggctcccagaggggcggttgcagctacagggcctgactttagctctctggccggcgcctctccggaagggagg

SEQ ID NO: 23894 - DNA, 461 bp, Homo sapiens
  source 1..461: mol_type = other DNA
tttgggaactgaaaaataagaattatttctccgcatcacatctgtgaaggctcttctgcaatgggcagtgtagcagtaccccctccattagcaaactccaaataattataacagtacttatggcattatttgtttattttccccagcacagtgttcggcctatattggagaatcgtccgtacaaactctgcagtgattcaatcattctcaaatattttaagacctggtcctctcctaggtcatttacccgctctggcaccgagagggttacggcgacccgggggcggagccgtgcggaggccacctgctgcggggaggtctggcgcatgcgccctgacacctagctggttccctacccgcaggggcccggctgaggaggagcgcttgcgctctgggccttttccgccgggggaagtctcgcgggggcggggcggggcctcgtggagaagttctcgcgggac

SEQ ID NO: 23895 - DNA, 740 bp, Homo sapiens
  source 1..740: mol_type = other DNA
gccccgcccaccgccggagctccgcgctgccctagtgcccgccgatccgcaatgccgcggcagccccgccccctgcggtcctagcgcccgcccggaagcgcaccccgacgccgggtctgggagctcagcccgcaggttgctgggcagaacggggcttctctccagtaaagcctgaggagcagtgcgaatggtcacacttgtgaccgcccctctgcagcctcgcgctgcttagtccccaccgcccgggctgggcaaggagggcagagccgaaggccacccgggaactgtcaggagcggtccggggcttccgtccggtccctacggctgggctccgaagccaggtttcgagggccgggggcgggaggcgctgtccggcccacgacggtgctgaagcgccacctccgcccggcacgagcgcctcctcgaggctggggtccccgcactggtgccgtccgctaggtggtgccattgcccggccggcggctgcgggtgggcgacgccggccgcagacggggggtactgcaagtggggtcccgcgtcttggttgcctcagacccggggtgtctagcccttgggtctaagtccagagccccaggtcacctgggcgcatgcgctgatccggtcagcgcccccggtccgggcgggcacgagttggggcgggatctggcgcggcggagccgccggtgctgactgacagcctgactgcgcggccgggacggtccctccgttcccgatccggc

SEQ ID NO: 23896 - DNA, 738 bp, Homo sapiens
  source 1..738: mol_type = other DNA
ccctcccccctccctcccgccggatcgggaacggagggaccgtcccggccgcgcagtcaggctgtcagtcagcaccggcggctccgccgcgccagatcccgccccaactcgtgcccgcccggaccgggggcgctgaccggatcagcgcatgcgcccaggtgacctggggctctggacttagacccaagggctagacaccccgggtctgaggcaaccaagacgcgggaccccacttgcagtaccccccgtctgcggccggcgtcgcccacccgcagccgccggccgggcaatggcaccacctagcggacggcaccagtgcggggaccccagcctcgaggaggcgctcgtgccgggcggaggtggcgcttcagcaccgtcgtgggccggacagcgcctcccgcccccggccctcgaaacctggcttcggagcccagccgtagggaccggacggaagccccggaccgctcctgacagttcccgggtggccttcggctctgccctccttgcccagcccgggcggtggggactaagcagcgcgaggctgcagaggggcggtcacaagtgtgaccattcgcactgctcctcaggctttactggagagaagccccgttctgcccagcaacctgcgggctgagctcccagacccggcgtcggggtgcgcttccgggcgggcgctaggaccgcagggggcggggctgccgcggcattgcggatcggcgggcactagggcagcgcgga

SEQ ID NO: 23897 - DNA, 482 bp, Homo sapiens
  source 1..482: mol_type = other DNA
tgagcaccctcccaaccagtgctctggggcgctcttcatcagagccctgtgttttggagacagaactcatgggtcagaattcttgcaccccaactcctggagccacctctgcagcctcaatcagggacttcacgttgccccaggatgtggggcactgacctcacagctctgcagaggatggagcttgctccgggggaccgggactgtctgttctcagggaccacctgtacccagactctaacctgtagcttcagaggccagtctgggccttggccctgggtgtctgatactcacagagtgaaactgtgaccctctccccaagccaaagccattaaaaatagatttcttttctgctgttttgagcctttcccgggcctgcgtcggaggggatgggacgtcgcaggcttcccgaagggaggagggaggacggcgcgccatcggcccttccctgggcgcagcggggtgcgggtggcgagaggcgc

SEQ ID NO: 23898 - DNA, 700 bp, Homo sapiens
  source 1..700: mol_type = other DNA
tgagcctttcccgggcctgcgtcggaggggatgggacgtcgcaggcttcccgaagggaggagggaggacggcgcgccatcggcccttccctgggcgcagcggggtgcgggtggcgagaggcgccacctgcagctgggcggtggagcgcgctgcagccccggcctccgcgccctttccggccgacacggaggaggtgggcgcccccccgcacccccccccgaggaaaggcgtctcgccgcgacgccccggtccgtggggctggaaacccggccctgcgtcccccggtcaccctctctgggctgggctctggcagaggagctggcccggatccgcccctccctcggcagctcccgggagttggagggacggctcccctggagtctgggaggcggcccgggaccgcaggcgttccgggaactatttccgcttgcgggaggcggcgggacactgggcgcggcgcgccgttctgcgtccaggtgcgcgcaggtgaggccggggcgggcctgcggaaccccgaggccgttcgcgaggccccgccccgcgcttcccggggccgcggattggcaggagcgcagcccccacccccgagggtgcccccgcccctgcggcgccgagctggggggcgggccgggggcggggcgctgggccccggcaggctcgccctttatgtaaatagcgcggctccgccccaggctcgccg

SEQ ID NO: 23899 - DNA, 479 bp, Homo sapiens
  source 1..479: mol_type = other DNA
tttttatggtattattatgaaatcaccagattacattgttaagtgaaaattgtgctaaaggggaaaaatataatatttgcttttctctgcatggaaatttgttgttgtttctttgtttttgagacaaacaaaatgctgtcacccggctggagtgcagtggtgtgatctcagctcactgcaagcgagtagctgggtcccagagtgctgggattaattatgtgaatgtattacctgttttaaaaatagatattttaaaaacacacacattgttttacaccagttcaagatgtacatttatgttttatgtacttttcggtaaattgtatttattccacaattgaaaagaacaaaaagggtgggcctggccccagtccaagaagtccagacaggttctctgggcccttccttgctgggcaagcactgaggtgggagtggagcatggaccccctcagtctggcgcggtgcgaggctggcctggc

SEQ ID NO: 23900 - DNA, 496 bp, Homo sapiens
  source 1..496: mol_type = other DNA
gtgagggtgtcacagggagacgcagcctcgcctggagtcctcagccctcctggggtgagcggcctctgcccatgctgggagcagggagcagcctctggctggcccacgagtcgacccttggggcagctgcagaggccgcaagaggggccatagctctctcaggctccaggcagggctgtctggggtgctagaactcctcccagtgtgagcactgctgcggctgcaagaagccctttgaggggctgcgaccccaaggaaggaagcagggcctggctgactttcttttaggcctgacctgggctgggacagccgaggcggccaccagagggcgctcctgcccccaccaggagtccgtgcgcccgcacagcggccgcctgtccagcctctgggaggctctggcatccgagtggtgtgaccacagcctagcctgctgggagaggcaaatgtcacagggcccggcccctggactctggagccctgccctgacagctgggcc

SEQ ID NO: 23901 - DNA, 506 bp, Homo sapiens
  source 1..506: mol_type = other DNA
ctgggacagccgaggcggccaccagagggcgctcctgcccccaccaggagtccgtgcgcccgcacagcggccgcctgtccagcctctgggaggctctggcatccgagtggtgtgaccacagcctagcctgctgggagaggcaaatgtcacagggcccggcccctggactctggagccctgccctgacagctgggccaggagtgcggtcacagccccagcagaaggccctcacctcggaacatgaggcgccttgccgggcgcgcaggccactggcggcacaagggcctgagggcagggtgggtgccccagacctgagagcgctgcaggactcccctccacaggctcaggtggagcctccccagggtcctcctggccaggaaggcagagagccgacttctttcttcagctcccaacccaggcccagcccacggcgtgggagtcggggagacttgtcttgtccctgagcagcgctctcagggcagaggtgaggcaccaagttcccaagc

SEQ ID NO: 23902 - DNA, 375 bp, Homo sapiens
  source 1..375: mol_type = other DNA
ccaaggcagcggcaccgggagtgactggcctcactgacgtagccatctcagcgagaatctctaaagaggcaccagctccctcggcaccttgggcctcttgggcaccctgagacaggaagaggctctcctggggcaaggggaggggctggcttgagcaacctgggcctcctgaccccgggacacggtgcggcctccccctctggcagaacatgaacctgctctcgggagaacctgctccttctgtccccacattgatggaaggcaagagtaccagcttggcatcctcgccgccttggccggcagcccccgaagcaagcggcttcctccaccctgagctgtgtcagctgggtggggactgagggccaccactaggtg

SEQ ID NO: 23903 - DNA, 355 bp, Homo sapiens
  source 1..355: mol_type = other DNA
atgttaaattcaattatgtaattacaagtacaactcaggtttgggaaccaacactgcccactgctgtgagcgcatgccagggccttagttcaaagctcctagatctttaccagctgggagggctagaagggaagcccttggagggcagggcccgcctctctgatccacagtgcctggcatggtcagggcacaggcttgatcccctcttcattgtgccagtgggcagattgctgaccgtgcccagcttcccccagaaacagttccaggacagtcccagccccagggcttcctgagctcggggcaggtccgcagtccacacgtcaccccagccacaggtgaggcggcctgatggcct

SEQ ID NO: 23904 - DNA, 274 bp, Homo sapiens
  source 1..274: mol_type = other DNA
tgtgcttctcaacctgaggaggagaacatcaattcctaactaaaagttataaagttaacgaacaggcagtggctgagcagccgctccctcttttcagtaagtttaggcaaattaatcgaaataagggaaggaccccggaccctggaccattcttcggggtccggtgcttggagcacaatgacctgttccctcccgacttccgggcggaaaggcaggttctttcggatcccaggagaccccgccctcatgccagcgctcgcgctacgtcatcact

SEQ ID NO: 23905 - DNA, 371 bp, Homo sapiens
  source 1..371: mol_type = other DNA
tcaaagctcctagatctttaccagctgggagggctagaagggaagcccttggagggcagggcccgcctctctgatccacagtgcctggcatggtcagggcacaggcttgatcccctcttcattgtgccagtgggcagattgctgaccgtgcccagcttcccccagaaacagttccaggacagtcccagccccagggcttcctgagctcggggcaggtccgcagtccacacgtcaccccagccacaggtgaggcggcctgatggcctggggcaaaggccctcggtccagcaggagggactagggagccgtggttgccaggcaaccagccctagcccacctttgtttgtttggtgacagcaactaaggtctgg

SEQ ID NO: 23906 - DNA, 292 bp, Homo sapiens
  source 1..292: mol_type = other DNA
ggtagcttgaatgtaccttctcctgtaaaggtcttagccaagaacagtggccaaagccctctgttttgcattaaaaatacagattatttttctgtaacaatttgctatattacacttaaataatgtattatttttaagtaataaagctgaatctccacttttacgctcaatgaaaatgaaaacattgaactttggagaacggggaaccgttttcctaagagtgatgacgtagcgcgagcgctggcatgagggcggggtctcctgggatccgaaagaacctgcctttccgccc

SEQ ID NO: 23907 - DNA, 364 bp, Homo sapiens
  source 1..364: mol_type = other DNA
atggaggctcagggaggctgtgtgaccatcccattcactcaaccacgagcacctgctatgcaccaggcatggtgctaggtgctagagcacagtccaacacaaaccaatgtggcaaatgccatgtaaaagccatggcccaagggttatcctgttgaaaaagcacggtggcttgaaaccgcatggtttggacagtgctgtgccagcagtctgattgctggccagtaagcctagagtggatcacctgaggtcaggttcgagaccagcctggccaacatgatgtacgcgggcacctgtaatcccagctactcgggaacagaggttgcagtgagccaagattgcaccactgcactccagccttgctctc

SEQ ID NO: 23908 - DNA, 594 bp, Homo sapiens
  source 1..594: mol_type = other DNA
gtcagttcgagaccagcctggccaacatgatgtacgcgggcacctgtaatcccagctactcgggaacagaggttgcagtgagccaagattgcaccactgcactccagccttgctctcatccatgccaggtcggcactgacactgttcacactgtaaggaagggtgcaccgaggacccgacccttcctcggctctcccgacggggagtcaggcctcccgaccgggccgggggcactccctgggcccatgcctcgcgctggcacggagagcggggaggggggtacgcggctgacgaccgtcggggcagcagcagcagcacagcccggcgttggctagcggcccagagtcggggcagggagggttcccgtgcggacgggggctaagaggccgcctccagcccggggcagtccgcgcacccgagcctggagcccggagcctggaggggtggggaggccccgcgcccagggccggaccggagggagagggagagcggtggctcctcccccggcccccgccgctagccgatcggggcgctgggcgggcgccgcgggagccgcagccctttccggggggcggacccggctccggcggcggc

SEQ ID NO: 23909 - DNA, 591 bp, Homo sapiens
  source 1..591: mol_type = other DNA
caagattgcaccactgcactccagctgctctcatccatgccaggtcggcactgacactgttcacactgtaaggaagggtgcaccgaggacccgacccttcctcggctctcccgacggggagtcaggcctcccgaccgggccgggggcactccctgggcccatgcctcgcgctggcacggagagcggggaggggggtacgcggctgacgaccgtcggggcagcagcagcagcacagcccggcgttggctagcggcccagagtcggggcagggagggttcccgtgcggacgggggctaagaggccgcctccagcccggggcagtccgcgcacccgagcctggagcccggagcctggaggggtggggaggccccgcgcccagggccggaccggagggagagggagagcggtggctcctcccccggcccccgccgctagccgatcggggcgctgggcgggcgccgcgggagccgcagccctttccggggggcggacccggctccggcggcggcacccagctcctgccccgacaggtgcgcgccgcgcgaaggaatgcagccggtctgacgcgcccgccctcggacagtccctgct

SEQ ID NO: 23910 - DNA, 336 bp, Homo sapiens
  source 1..336: mol_type = other DNA
gaagtagtgcctgctggggccaacagcacaacctcttaagggaggggctgggcccactgctggccaccgccacggtgtgatctcagctcacccagcccgagtagctgggaggtgatctgcacacctctacttacagtgagtgtcaggtcaccctcttggagaccggtgatcagaggctgatgacctctcacagctgctggccctggggacctaggggatccctttgggaatcccaggtcaaccggtgaccacccagcagctggattcccacgggagttgcgggtggggcggggcgtccgggcgcggggcggggctggcgggaatgtgcgcaccccc

SEQ ID NO: 23911 - DNA, 585 bp, Homo sapiens
  source 1..585: mol_type = other DNA
aagacatttacttaggcaaaggtagggattagcatatttacacatttgtcatgtttcttcagaagtaatacctgccaggatatgctattaaacaaaagggcacatatctagtttagttatcttttgtttattctttatggacatgcaaatactatagtaggactatttactttctagctgtagtcatttcattcacttgaagtacataattcaagtaacatgttgcttagtaagttacctcttgtttaagcatatggaaatcaaaaaatattttgtgacaccttaaaaacatacaaaacagttcctctaaaataatttattaacatgtttatttgtatttattatttgttaaaaatgtatgtgcatgatatatgaaatacttgataatataacatgatttactgaattctaattatcaaaatattatgaaaggtaaataatccagggaacacattttattttacatcggaaaatatttacaaaaattttgttaaagtagccgatagagaccaatgcaattcatttgcattgactttctattgcagagctttggaaccaatgtcagcgcgtcggcgaaagcgcccc

SEQ ID NO: 23912 - DNA, 337 bp, Homo sapiens
  source 1..337: mol_type = other DNA
cttattttataaagtgaagaactttgctagactattctaggcggagattaaattcgtccttgattgcaggtgcctgcagcacagggcccattaagccctgcttggagcactgctctgagctggcattagaaccgaacctagctgtactaagtataaaggcaaagtagttatgacactgttggcagtgaaattatacttggaactctttcgcagaaatcgctagggcctccctagctcttcatggaaaggcttccgccctcagcatccgggacactagcagcaaggatccctgggtattgtagcaacccctgctgctggcgcggcgcaggcgcactgg

SEQ ID NO: 23913 - DNA, 863 bp, Homo sapiens
  source 1..863: mol_type = other DNA
ttgtcgctcagcagctgtgtccctcccccactgagtccccagggcctggctgggacagaggtggatgtggcccaagttggggctgccaccttgtcccctgctcctcgaggaatggcagccctggcctaagtcctggttgctggagggacagccctggagcacgtcaggacctgtgacagggacactgaggtagccaagccggcttgccaccacccacgtcacgtgccctgctgtgaacttgaagggacaggagggtgggaaatggccaaaggccgtgaccaggcccacgccgtcccccagcccagcactgggcacagggtgggcaggccacagagctctaggaaagccccatgctgaggcgcattttcctgtcccccgggagccaagtctgtcctcaggagagatcgggcagcagcccctctgcctcctcctcctggccagcctggcccagagctctctgggacttggctaagcccccttcaagggtgtctgaagggagcactgtcctgactgccaaggtgggggcaggggcacagggctgtccctgcccagcacagcttggcccctgtggggccaggcaggctgagcaactggctgtcctccagggagacgcctcttgggagcccccaccctgggcgccgccccgccccacgtctggacgcactcgaggaagtggggtgagaacccccccgggcccaggtcagcttctctcagggttcagcccagcctgggcacagcacatggatggggcaggatgctgcccgcctgttctgggcccccccgccccctgttgtccccttcccagggcctctgtaggagggtggggcggggccaggcctgcccacggggtccaccttctgctc

SEQ ID NO: 23914 - DNA, 803 bp, Homo sapiens
  source 1..803: mol_type = other DNA
acccgggggtctcttccggaaggagagccgtctggccgctgagggccctggagacttctgggacggttccctcccatgggaggatccccacagcctgtctggtcccaagacagcggttgtcgctcagcagctgtgtccctcccccactgagtccccagggcctggctgggacagaggtggatgtggcccaagttggggctgccaccttgtcccctgctcctcgaggaatggcagccctggcctaagtcctggttgctggagggacagccctggagcacgtcaggacctgtgacagggacactgaggtagccaagccggcttgccaccacccacgtcacgtgccctgctgtgaacttgaagggacaggagggtgggaaatggccaaaggccgtgaccaggcccacgccgtcccccagcccagcactgggcacagggtgggcaggccacagagctctaggaaagccccatgctgaggcgcattttcctgtcccccgggagccaagtctgtcctcaggagagatcgggcagcagcccctctgcctcctcctcctggccagcctggcccagagctctctgggacttggctaagcccccttcaagggtgtctgaagggagcactgtcctgactgccaaggtgggggcaggggcacagggctgtccctgcccagcacagcttggcccctgtggggccaggcaggctgagcaactggctgtcctccagggagacgcctcttgggagcccccaccctgggcgccgccccgccccacgtctggacgcactcgaggaagtggggtgagaaccc

SEQ ID NO: 23915 - DNA, 437 bp, Homo sapiens
  source 1..437: mol_type = other DNA
acgtgggaagtgccccctctctccgcctcacggattcagctcggaggtgcagccaggggccttcagtcttccggccgggaccccgctgggcgctaaggggggagcggcgccaccgcgaggccggagagggggctgcgaggggcgcccggccggcctgcgaacgtggtgggagccaggcggggcacacggcctccccttcccggactctccccgccccccgggctcagcgctgggagtggtgagatggatggcggggtgatccgacgccgccagcccaccgcgtccccaagagccggggcctccggctcagcaggggacagctcggcgctcccacgccatgtccaggtctgccggaccaagatcgcgcccctgccaggagcggaaagcatagggacaggccgaggctgcgggggctgtttgggccagcctccgcaccg

SEQ ID NO: 23916 - DNA, 405 bp, Homo sapiens
  source 1..405: mol_type = other DNA
ataaaacgcaccactttaagtgcataattagatgagctttaaatacacctgaggtcgcgcccctgcactccagcctgggcgacaagaaaacatatgtacatcagcagttatttttctctgcagtcagctcaggaactttcagctagacgcgcccagcccctgcggagcgctggcctggcccagaaggaccagagggatggaggctgagtccttcccattcaggaccacgcggactcccctgggggtcgcgcgggctcggaggcctccctgcgttgtctgggcggggactgggagtccgcgggcccgcaggcgggcggtgctgcggggcgggccgagctgggggcgggcgggggccggagccctggcctaggtcccagggggaggtgccgcggcgcgaacggcccg

SEQ ID NO: 23917 - DNA, 641 bp, Homo sapiens
  source 1..641: mol_type = other DNA
gctgggattacaggcgcctggctaatttttgtatcattagtagagatacaaaaatttttgtatctggtttttattactattattttattattattattattattgaaatagagtttgtgcagtggcgcgatctcggctcactgcagcctctccctcagcctcccgagtagctgggattacaggcccacccgccttggcctcccaaagtgctgggattcccggcgtgagccaccgcgcccagccctcaatctgggttttaaaccaagcagagtccggaatcggagctcgcaccccttctcccaaccaggcctgcgtccctggggaaatcaggacgcagcgtccaggggttggaggagggccccggcggccgaccccggtctgtgccgccccctggtggccagccatgggcgagcatatgactgctctcggctccgccccgccgtccaacgggcacttccggagccgggcgtctacagaccgcggccaccttccacctgcgcccgaggcagacggtgcaggggcctccgggacaggcgtctgaggcctgctccgcagcgcgggcccgggggcgggcctaggggcggggcctgctgtggtgcgctcaggcaccgcgctggccacctgtgcccgggtcctagtgg

SEQ ID NO: 23918 - DNA, 607 bp, Homo sapiens
  source 1..607: mol_type = other DNA
gaggacgcagtgcttgctgcagcagtgagagctcgtgccgcctcaaccctgccctgtcaggtaggtgggcgctaggccccagacccgccttgttgcagatgaaagctggtttgtgtattcattcagggccatttgaaaaataccagttaactggtccctgtctcttactttaaaaagggagacaccccagtctgcagcagtgctcgggtctgcagggagcccgccagcccgtttcatcgccaagccccgggggattgttcgcgcggcccgtggtcagaagcccggagtcctggcggggttttcgagcctctggtctccaggacctgggctgaaggcccaggggggtgggatggacccgccaggctgggaccctagagagccgaactcagctctcagccggggtgtcgagcgggccaggccgaggtgggcaggggtggcctaggcccctgcggcggtcgctcgtcgagggtgtcagagaagggcctgccgcccccctccgccttcccgggcgcggatctcgccccgccccgcccggatctcgccccgccccgcgttagccacgcccaggcgccctcagcgcgcgaggcccgcggtccctttaagacgc

SEQ ID NO: 23919 - DNA, 563 bp, Homo sapiens
  source 1..563: mol_type = other DNA
cctgacagctgtcaggtaagcactagtgttaacctgctttttcccaaatgaggaaaccacaaggaagacagtaaggtcacgatctggtttttgagacggtgtctcactctggcaccgaggtggtggcgcaagctgggattacaggcgcctggctaatttttgtatcattagtagagatacaaaaatttttgtatctggtttttattactattattttattattattattattattgaaatagagtttgtgcagtggcgcgatctcggctcactgcagcctctccctcagcctcccgagtagctgggattacaggcccacccgccttggcctcccaaagtgctgggattcccggcgtgagccaccgcgcccagccctcaatctgggttttaaaccaagcagagtccggaatcggagctcgcaccccttctcccaaccaggcctgcgtccctggggaaatcaggacgcagcgtccaggggttggaggagggccccggcggccgaccccggtctgtgccgccccctggtggccagccatgggcgagcatatgactgctctcggctc

SEQ ID NO: 23920 - DNA, 524 bp, Homo sapiens
  source 1..524: mol_type = other DNA
aggcgtgatcctcagggcgggaaccacgctctcagtcctgccctgggccctacaggaacgctggcgggtgactgccgagcagtccaaggcggagtccatgcagcgcgctgcccaggggcggggaggagcggcggcgcctggctgccgagtgggcggagttctccgcgcagccgggcattgcaggtggacacccagcgggagggcaccctcatcagcctggccaaggtagggcccagagcctccggacagtggagggcccagggttgcctgcgcccctccaagaaaacagtaatcgcatcatcatgctaacatggtgcattatacacattttatttgatcctcatgttcccatgactttggtcatttagaaatgaggaagccacagtcacgtggcgtgagggcccaggcctctggctctccctggaagcccctggctccaccacctcctcccaggggcagggtgggcagaggggaagcagggcctccgctgtctccaggagcaggctgagctgaagatcagccag

SEQ ID NO: 23921 - DNA, 450 bp, Homo sapiens
  source 1..450: mol_type = other DNA
gggatgctgcagtcagaaagcagggccgcagggtcctggtttcccatgtgtggcagtcacctgtgacacctgggcctgggaggtgtgccccccccccccccaggagtgtgtccctgggagatggtgggtagcttagccgcagtgactgtttggccccatctgcagccacagatcagatgcagggaggtccagtgggccaggaggtagctgatctcagctgggcccctcccagagtccctggcccggagcctgctgccgagcacagaataccagaagcagctcctggcagcacaggtgcaacttcagtgcagccccgctgagctccaggccgagctgctgcatagccaggcccggctggcagagctggaggcccaggggcagcgtggagtacagccacctcccctccctggttgctggccctcctgctgtctcccaggtgcggaagctgga

SEQ ID NO: 23922 - DNA, 325 bp, Homo sapiens
  source 1..325: mol_type = other DNA
aaagaaagcttttttcctaggacctggacggcatggagctgtatcttaggtctgaagaaatctaatcaagcctgcaggtgggtcacctcccttcctcgagctgttccaggccctctgggtccaacatgggcagctcctggagaaggtctctggagtgactcatgatgaggaagcagaggtagctcctacctcgtggccctcccttggctgtgcccatggccatgagcccccagcttcccaggaagaagtgcaccccatcccaggggccccagtccatgatatgggaggaggactttggccaggagagactcaggcccatgacctt

SEQ ID NO: 23923 - DNA, 203 bp, Homo sapiens
  source 1..203: mol_type = other DNA
cccaggctggaatgcagtagtgcgatcttggctcacagcctcttgagtagctggcagccaaagaaaataatttttgtatttttagtaggtaattccactgtaaactttgctaaaaccaggcaggtttggcttcacaacagaagcaaggggccaggaccctgagttttattgggccagaggcagacccacaggctctgctccag

SEQ ID NO: 23924 - DNA, 404 bp, Homo sapiens
  source 1..404: mol_type = other DNA
tggaaaattcgggattttttagaattctgaaccaaaatatgttttgagtccagttatggattcaactaaatgactgccctgtgacattgaataaaccttaataaaattcataattagcacatactagaaaaaatgtgacttaatcttttcttccctcaagctttggggtgtggaataaacaccggtgaatttgtggattcacccgtcaacctcacgcctccgcgtcggccacgtgtcagccctcaggcgccctcttcccggagaggcgttggggcagctcctagcaacgtgcccgccgccggcagaagcccggccccgccaactgccgcgcgcggctccctgggagctgtccccacctcctctgtgagggcgggtgagtcgaccgccgactgcgactcccagga

SEQ ID NO: 23925 - DNA, 445 bp, Homo sapiens
  source 1..445: mol_type = other DNA
gctgggattccaggcgtgagccaccgcgatgtctggtttccaaaggtaactggagcctgagactggttcccgtatccgggtggatttggcaaaagcccaagagtctcccgaccactctcatttcggagaggcctaggggcacggacccggaagcgtgacagctcgcgtggtcacgtgacgggggaggggcgggatacaaaaagtgctttattttcccactccccggcggagcccctttcccgaggatccgctcgggagcctcccctggccaggagcaggggattagtctgccccgcgaccggccccagccacgacgcggacatcgccccctctgtctgggccgctgtcactcacgcgccaaagggccacggggcgggccggggcgggccgggcgagcggaggcggggacttgcgccgtcctgaggctgcctcctagggtccggcc

SEQ ID NO: 23926 - DNA, 517 bp, Homo sapiens
  source 1..517: mol_type = other DNA
gacggccacacatataactttataaagttgcatgaaaatatgccagtttgcatcttcaaacacgctgtaaagtttaggcttaacaacacttgctctgttctaagggacagccacctcataacgctggctgcgagtgaggaagttcaagtcctcatgctggaagtctgggaatggcgatatccccccaccagggacacaggctgttcctcgaagtgggggtcccggctcccctaacgctgggccagagggcctaggccccacagcgcccctgactccgatcgagggagtctccagcttttctcgggaaaggagggaggtctcgcccgccgccctcaccgatctctcggcggcgccgggtttcggggcgctccgggttggcggaatcccgctccctgcgcaggtccgggttcatggcgacgaccagctggcagcgcagctccagcgccggccggaccctaggaggcagcctcaggacggcgcaagtccccgcctccgctcgcccggcccgccccggccc

SEQ ID NO: 23927 - DNA, 224 bp, Homo sapiens
  source 1..224: mol_type = other DNA
gagtgcaatgctgggattccaggcgtgagccaccgcgatgtctggtttccaaaggtaactggagcctgagactggttcccgtatccgggtggatttggcaaaagcccaagagtctcccgaccactctcatttcggagaggcctaggggcacggacccggaagcgtgacagctcgcgtggtcacgtgacgggggaggggcgggatacaaaaagtgctttattttc

SEQ ID NO: 23928 - DNA, 623 bp, Homo sapiens
  source 1..623: mol_type = other DNA
agacagccacctcataacgctggctgcgagtgaggaagttcaagtcctcatgctggaagtctgggaatggcgatatccccccaccagggacacaggctgttcctcgaagtgggggtcccggctcccctaacgctgggccagagggcctaggccccacagcgcccctgactccgatcgagggagtctccagcttttctcgggaaaggagggaggtctcgcccgccgccctcaccgatctctcggcggcgccgggtttcggggcgctccgggttggcggaatcccgctccctgcgcaggtccgggttcatggcgacgaccagctggcagcgcagctccagcgccggccggaccctaggaggcagcctcaggacggcgcaagtccccgcctccgctcgcccggcccgccccggcccgccccgtggccctttggcgcgtgagtgacagcggcccagacagagggggcgatgtccgcgtcgtggctggggccggtcgcggggcagactaatcccctgctcctggccaggggaggctcccgagcggatcctcgggaaaggggctccgccggggagtgggaaaataaagcactttttgtatcccgcccctcccccgtcacgtgaccacgc

SEQ ID NO: 23929 - DNA, 381 bp, Homo sapiens
  source 1..381: mol_type = other DNA
aaatattagccacgtgtgatggcaagtacctatagtcccagctactcaggaggctgagatgggaggattgcttgagcagcctggaaggtcaaggctgcagcgcctggtggcaggcacctgtaatcccagctactcgggaggctgaggcacaagaattgcttgatgctccattgcactccagcctgtgatcatcaacaaaattaaaagcttctgcttatcaaaatatgccattaagaaaaaaattaaaaggaattccttcatattctacagtgtagactgaaacattttttttttctatagatttcttggccatgcaaatgctcagcacggatccgatcagcaccaggttcttgtctgtaccaagttggtggagcccttcca

SEQ ID NO: 23930 - DNA, 598 bp, Homo sapiens
  source 1..598: mol_type = other DNA
gcagccgctcatcctgcctgggaacctggctgggggtcggaaaccgcccctcacccagcccagcccggaccccaagggggtcagggggcccccttcacccagcccagttcagccaggacccccaggcttctcgcccatgcccggcctcggagggcagggcccacactctcccacccaggcctctcacttgtgccgggccttagagggccagccagtcccaggctctgggtacacatggcggccaggaagggctgcccaggggccagggccactgggggcagaggtcaggggtctaaagccacagtcctgtcttaggctgcacggtcagggcccagggcctcagcccggcccgtgtgacgacgctcagcctcctctgaaggcagagcctggccaggggcagacccctgcatcctgggccccccaccccagcccctgggcccctggtgccctaccctgaggccccaggcccagcctgagaggctgcagcccacagcctgggttgcagctccccctcctggcccccgccggcgctgcagcacggccccggcgcccaagctcggccacctgcagtctcctggggcccaaagtaggggaaggg

SEQ ID NO: 23931 - DNA, 331 bp, Homo sapiens
  source 1..331: mol_type = other DNA
cctgacctcaagtgaaaagaaagaaaatttttaaaaagtctctcggagatgtcttcctcgtccagggtgggagggagctcagtctcttggatttttaaaatgatgacattgtgtcccaaggtgccaaagacacgggccgactgtgcatgacaggccgcttcagagcccgaaccctctggagctgcaggagcccgggagagcacagacgcctccccagcgacggccttgtctggagctcgaaagccgaggggcgggtgatgaatccagccccttcccctactttgggccccaggagactgcaggtggccgagcttgggcgccggggccgtgc

SEQ ID NO: 23932 - DNA, 585 bp, Homo sapiens
  source 1..585: mol_type = other DNA
gccccccccaggagactgcaggtggccgagcttgggcgccggggccgtgctgcagcgccggcgggggccaggagggggagctgcaacccaggctgtgggctgcagcctctcaggctgggcctggggcctcagggtagggcaccaggggcccaggggctggggtggggggcccaggatgcaggggtctgcccctggccaggctctgccttcagaggaggctgagcgtcgtcacacgggccgggctgaggccctgggccctgaccgtgcagcctaagacaggactgtggctttagacccctgacctctgcccccagtggccctggcccctgggcagcccttcctggccgccatgtgtacccagagcctgggactggctggccctctaaggcccggcacaagtgagaggcctgggtgggagagtgtgggccctgccctccgaggccgggcatgggcgagaagcctgggggtcctggctgaactgggctgggtgaagggggccccctgacccccttggggtccgggctgggctgggtgaggggcggtttccgacccccagccaggttcccaggcaggatgagcggctgc

SEQ ID NO: 23933 - DNA, 499 bp, Homo sapiens
  source 1..499: mol_type = other DNA
tcaggctcccgggcctcagccagagcccaggcttactggcgcctgaagccagccctggtgctgctgcactgtgcacactttataaaatggggccctgtgatcccagcatttcgagaccagcctggccaacagatcccagctactcgcatgccattgcactccagcctgggtgacagagcgagactttgtctcttaaaaaaaaaaaaaatggaccttggagaacagagagtcaggccctgggctggcaggacaccccctcctctcctgggcctgcctggcagcaggtcctctgagctccggggctggggcctctccgctgagcctgcacctgcatgtgcacgtctgtctccaggctcccctaggtgtgggagtcgggcaggctcggccccgccctcagggctgtgccctttcctcccagactggttgtgcaggtgcatgcgcgtcaggcctgggacccggccgcccgcccgctgcctcacctgcaaggaggggcctccca

SEQ ID NO: 23934 - DNA, 453 bp, Homo sapiens
  source 1..453: mol_type = other DNA
aggggggtgccatcgcctctttcttgaagacgcttgtctgatcaggctcccgggcctcagccagagcccaggcttactggcgcctgaagccagccctggtgctgctgcactgtgcacactttataaaatggggccctgtgatcccagcatttcgagaccagcctggccaacagatcccagctactcgcatgccattgcactccagcctgggtgacagagcgagactttgtctcttaaaaaaaaaaaaaatggaccttggagaacagagagtcaggccctgggctggcaggacaccccctcctctcctgggcctgcctggcagcaggtcctctgagctccggggctggggcctctccgctgagcctgcacctgcatgtgcacgtctgtctccaggctcccctaggtgtgggagtcgggcaggctcggccccgccctcagggctgtgccctttcc

SEQ ID NO: 23935 - DNA, 496 bp, Homo sapiens
  source 1..496: mol_type = other DNA
tacattttattcattcagattcaggttataaatgacatgtcttaacagctgtgatgcttagagagtctatgattagcacatgtcttgcataaaagtattaaggtttttctttcaaaagaagaatggccagattctccttttaataatcttaaaatatttaagattatgtactaatctttagaaagtccaatgaccttcatctatataggtatagttttaatgtttcctcaacacttctctagagacatattttaaaatagtgaacgctaaaaggactctttaaattactacttggaactattaccagtaattcaaaatatttaataagcacattaagatgtcaagttgaatgatttgttattcatttcaaaaggtcacaaactagtaccacaagcaccgattcctccagcttatatgaatgactgtcagcaagatcgactgtcagacaagaaggtgccaaagcaaggtgcacttggtcacatccaactggactgcg

SEQ ID NO: 23936 - DNA, 560 bp, Homo sapiens
  source 1..560: mol_type = other DNA
aggcgcctgtaatcccagctactacaccatttacttaaattggttatccccatttcatagatttacagggagattaagttacgtgcccaacatgtccattggaatcccagtgcaaagcaaaaattcatattttcccggactgacggccccaaagtgcagtggtccacggccccaagcggtctgagacccgttaggacaccgtctgctgactgcgcggtcccttacggacggggtgtcccgttccggtagggaggaccccatctcttgagtccctggggatgcagacaccccgaaggtgctttctgctgggcaggacgtgaaccagatccccagtccaggatgcaggacctggggtccacctccggttctccgcccttagtgggtgggaggtgggactgccccctgagatctcagcagccacggtctcactgcggcctacaggatccctcgcgcaggcgcgctccagcacatggcgccctgctgcagcaagggccgacggcggcggagtccgccgctatcccatcagcccggccaggcaggtccagctctcacccgcccag

SEQ ID NO: 23937 - DNA, 489 bp, Homo sapiens
  source 1..489: mol_type = other DNA
ttggccaacatggtgaaaccaggcgcccgtcatcccagctactcgggaggctgaggcaggagcagtgagtccagcctgggacagagtgagactctgtctgccgagatcgcgccactgcactctagcctgggcgaaagagccagactccggggcccctgagggcaccccagcccctcgacggtcccgggatatcctgcacccctgccaggctgcagggaagcgccgaggcgcgcggagtgcgaggtccgtgctccctgcggcgcggcgcacacgcagggtccggggtcgacccctccaccgctccggcgtctgccggggaagtcagtccgcctggtcagcccagaacccccgactgcgggggctggagctcggaagcaggtacaagcgccactctccgcctgcgccgtggaatgcgcgccgggaccactccgcagcccttcccccagcgccgccggccgctgctggggacaacccagatgaggcaaggct

SEQ ID NO: 23938 - DNA, 523 bp, Homo sapiens
  source 1..523: mol_type = other DNA
accagtgggtagtcaccctctcagtggagactgtggttgcagtccccgggggcagcgggagaatggcttgaaggcctgctgccgggcccgcccaggctccgctgagtgtctgggacacgctgggaggcccccacctgggaccgaggtgcaggggtcgcggccctccagcatgatccgctacccgctgcactcccgcgagctgcgcacgcctcgaaacgcgctggcagccatcgggctcatctgggggctgtcgctgctcttctccgggccctacctgagctactaccgccagtcgcagctggccaagtgtgccatcccgcgtggagcgcccctcgccgccgcgccatgggctacctctggcgcgccgtcgacccggtggccgcgggctcgggtgcccggcgcgccaagcgcaaggtgacacgcatgatcctcatcgtggccaaccccatcgtttacgcgctggtctccaagcacttccgcaaaggcttccgcacgatctgcgcgggcctgctgggccgtgccc

SEQ ID NO: 23939 - DNA, 373 bp, Homo sapiens
  source 1..373: mol_type = other DNA
cctgtaatcccagctactcgggacgctgaggcacgagaatcacttgaatcgtgccacttgcactccagcctgggcgacagagtgagactctctctcaatcttccgggtgtctggacactgaggccacagaaggggccttgtcctgttttgcaggagctgggtctgcaaccacaacatccagccccaggggcgccccccaccccgtcccctggagctgcagttggacgctgggtctgggcctggagctccggagcagccccgccagcccgacacacgttggggaaaggaattcgtcgccggcaaggaacccgcgctcaaaatggccgtcggtccgtttgggatggctccgcccaggcgtcccggggcgggacca

SEQ ID NO: 23940 - DNA, 356 bp, Homo sapiens
  source 1..356: mol_type = other DNA
gctcctcaataattaaagaggaagggacacagtccccagagtccctctactcttaatccctgtgacttaaaggttggtgaaattaattgggcaaatgaatttgacaagtcccagctgtctccagaggagtgagtgcgcttctgcagaagcctctggaatgtcagcttcctggaacctcgagggcaggtggcatggatacggttcccgagcctgagcccgctcccagccggttcccggtgccgcaggccgcgcgcttctccgaccccagcgcggggccctcgggcgggaatgagccgagccgggacgagtggcaagtgcccgcggtctccttggagacgtgggctacttaatgccgg

SEQ ID NO: 23941 - DNA, 614 bp, Homo sapiens
  source 1..614: mol_type = other DNA
aaacacaatctaactttagggctacaaggagccttagaggcggcatcttcctagccggggggcaggagacatgcgaatgcaccgtgttccgaagacctccgccggccgacgctgaggggcggggttgggaaggcttcctccaggcgcgggagcagcggagcggggaccgcccgctttgggacgcccaggacaatggcgagcgagctcccggccagtcctcgcggaccgcgggagggggcggctccctgcgcggtaatccgagccgggataaacaggcgcggaggggcgacgcgtcccggccgggtgcagcgctcgtctcctggggtcccagctccggccggtcccgccccgccccgccgcgggcacccggccgcgcccccgtccccgtcgcgagtccccgcccacgcccacgcccccgccgcgaggccctgggccgcgtccacgcgcgccgagtccagccgcggctccccgcgcgaggcacgcgccgccggctcctgctgcagtcccgcgctcattggctgctccggcgcgggcgctcccgccccgcctcgccattggctggggccgccgcggtccccgcgcggagcggccgctgacatcacgcggcctgaggc

SEQ ID NO: 23942 - DNA, 412 bp, Homo sapiens
  source 1..412: mol_type = other DNA
gtttttttaaaagatggtagaaattaaagcttcatcttagctttcgtgacaagcaagagaaaattaggtcaaccgatttaacaagaaaaaattcttgacttggcattttggccactgagaaagtctcacatcttcagagagcaaagtctttggtctaaaaactgagaaactttcctaatgtacgttatatttcaataaaagatttttttaaattggactgcttgaaagttatttttaaaaattacatgcttttgagacttgagcagaggaaatgagtcaaagccactctgtctgcactccgggttttcaagttgagttcgccagagtgcgcggccccgccccgaacgcccggccgtggccaatgctggggagccccacggcgccgagctccgccaatgggcgcggccgggcg

SEQ ID NO: 23943 - DNA, 459 bp, Homo sapiens
  source 1..459: mol_type = other DNA
ttaggtcaaccgatttaacaagaaaaaattcttgacttggcattttggccactgagaaagtctcacatcttcagagagcaaagtctttggtctaaaaactgagaaactttcctaatgtacgttatatttcaataaaagatttttttaaattggactgcttgaaagttatttttaaaaattacatgcttttgagacttgagcagaggaaatgagtcaaagccactctgtctgcactccgggttttcaagttgagttcgccagagtgcgcggccccgccccgaacgcccggccgtggccaatgctggggagccccacggcgccgagctccgccaatgggcgcggccgggcgtacgggagccgggcgctggcggagcggcgccccggccaatcagcggcagtccccgaacgttgggccggcccagccccgccccgcgctgttgtttgtggtgtcggccgggc

SEQ ID NO: 23944 - DNA, 331 bp, Homo sapiens
  source 1..331: mol_type = other DNA
agtgagccgtgatcgcgccactgcactccagcctgggcggatttcaaaaaataaataaataataataaaattaaaaaaatgggttacatcctagttagaaaatagatgtttgcaaaggtacataaatatgagtcccgcgggccgggcggctctttggccgcttcagtactgcggtcaaccagctgtctccggccggcgcacgcgcctcgtggggcgggcgctgtgacctcctcggttgggtgaacctgtgacatgcccctcagtcgccaggctccctgccctcatccgagatggcggcctgagggcgctctagccgacgctcttcggatgc

SEQ ID NO: 23945 - DNA, 358 bp, Homo sapiens
  source 1..358: mol_type = other DNA
gtggtccttcacgacattctctaaaggacattctcagaagatggtactgtcaatgtgagaggcacctctcctcccctcgagttctggtgcagctgataactagagatctcaaatgcaagtactgattgcgggcctctgagtgagccgtgatcgcgccactgcactccagcctgggcggatttcaaaaaataaataaataataataaaattaaaaaaatgggttacatcctagttagaaaatagatgtttgcaaaggtacataaatatgagtcccgcgggccgggcggctctttggccgcttcagtactgcggtcaaccagctgtctccggccggcgcacgcgcctcgtggggcgggcg

SEQ ID NO: 23946 - DNA, 733 bp, Homo sapiens
  source 1..733: mol_type = other DNA
ctcgaggtgctcgcggacacgttctgtggcttgccgcgataagtgtatcaaagaagtgacaacttctgagcgcgtttccggcgccccttcttcacgctgagccagagggggcggggggcacgggggcccccaccggctcggagcccccggcctgtcgcctgctctacccgggacagcgcgctaggcggcctcaggctcggtagcccagctgcagcgtgggcggcgggcgagacgccccggcctggagaggcgccccgggtggcgtgcgggcctcgagggcagagcgcgcaaaaggggcgctgcatcccggcgccgacagcacccgcgggggcgaggtcgtggcgtcgaggtaccaagggtcccccgggagagcggagccgcgcgcgcccggcgctcgctccgacacgagttcgcgcggagcccgcgcctccgtctgcgctgcgcggtcgctttcgcgcgccccagacactgcgctcgcggccgggcccgggactccgcgcctcgcggcctgccgcctcagctcacccggccaggtcgcggcgccgccttctagccagacgcctaggacgagcggcgggggcgcgcttgccgcttcctaggacccgggcgggaaccagctcgtggcccggccgtgggcgcgggccgtgccggaggcggcgcgctgaggccggaggcgggcagaggccgaggccgcgccgggctcaggttccacccccgggagcgcggggcggag

SEQ ID NO: 23947 - DNA, 916 bp, Homo sapiens
  source 1..916: mol_type = other DNA
gcggtcgctttcgcgcgccccagacactgcgctcgcggccgggcccgggactccgcgcctcgcggcctgccgcctcagctcacccggccaggtcgcggcgccgccttctagccagacgcctaggacgagcggcgggggcgcgcttgccgcttcctaggacccgggcgggaaccagctcgtggcccggccgtgggcgcgggccgtgccggaggcggcgcgctgaggccggaggcgggcagaggccgaggccgcgccgggctcaggttccacccccgggagcgcggggcggagccaggccggcgccgaggctcagtgccctccccgctccgcggcgccggctgcgaagttgagcggggagcgaggccggggagtccgctccagcggggcgctccagtccctcagacgtgggctgagcttgggacgagctgcgttccgccccaggccactgtagggaacggcggtggcgcctccccagcaaaccggaccgactgggtagggccgcccaccctgccttcgcgccgctcgtggctcctgtgcggcccgccctcgcggggccccgggaactgggccacttgtcgcttgggcgagagcaggcggcagctggtggcccggttcgggcttggctttggcgcgacccgggagcggctcccacgagcgccgcgcgcgtcgcaacggagcggggccctgagaagcgcgcgccgcggctcccaccgctctggagctccgggcaggggacacgccctggatggctggggcagggatcctctcccagaacttcgtgcctggactcccctccccctggcagccccgaggggtgaggagctagtccgtcggagggagccacggggctctgactcatccgtcgggccggaaccgaaccccaagccccagggagaaagccccggagcaggcgccc

SEQ ID NO: 23948 - DNA, 434 bp, Homo sapiens
  source 1..434: mol_type = other DNA
gggggcacggacagcgtcagccccccaccctcccaggggcacgcgtgggacagggctctgggccctggtcacatgcctggggaggcttaagaacactgctggcctcccaggagtccagtgaagcgtctcggatgctttgaccatgctcagagccaagattgcctgggaccatttccatggccaagaaggacagtctgtgctttaggccttggggggcagccctgatgacccttgccggctactcaggtgtatacagctgtcatccccccagcctgagatgcctagggccaggcctgcccaggtgcacctcaccgatcatgtcatgctccccagacacccagtgttcccgggaccattccatggaaagccctgaggagacgcccgatggctctgccagtccgaggcaggagagcagctgcccccattcctgctaa

SEQ ID NO: 23949 - DNA, 638 bp, Homo sapiens
  source 1..638: mol_type = other DNA
gccctgggctctcacccagcataatggttcaaggaagctgccagcgcgttgccagagcctgctgggaggctacacaggggcttctggatggcggtctcccagtcaggccgctccatgagcccgttcaccacctgttgaagcacacgtggcctcagcctgggacgcaccgcgccaagccccaggcctagccgcgcagtgcggtcctcaccccagctcctccgaccgcaccagctcccgcgcgtggttccgccgctctgcagggagaccggcagctatcaggactgggggggtcccctgccaggggatgctcccgaaaccccctccgagaggtactcaccagtgagcatcagcgtgaaggagatttcagcctcagccaaaaggggctgcacgtgactccggaagagctgcaaggccttgcccttgccgccgcgcgggttcagcagcaccagcacgcggcagggccgcgggagcacgccccgggggccgcccgctgagtggggcactagtgtgggaacttggtgcccgaaggagacctggggtggggacgcggcgcccctgccacccccttccttggctcagatcggccggcttctggcctcgtgagggataatgtttctcccgatcgttcgacccgcggc

SEQ ID NO: 23950 - DNA, 481 bp, Homo sapiens
  source 1..481: mol_type = other DNA
ttaagcttatcaattgcccaatgagatgagtattgctattatcatccctatttcacagatgagcaaattaagatgaaaataagttaatcagtgtgcctatttttaatggcagtgccaaaaattggaatccgtggtccccactgcttcagggagctttgaatttatctgcatggatttgtagccaaaccactgggaccactggacgttcgaactgcttggaattcctgaatacagtgcattatacatatgctctacacgtatctattagacagtatctttctctttctgcaatgctcccagtgcctgggggctaggctagggcatcttcagcgtcccctagcgacgaggcggtggctcctagcaactgcatcccggctccctgacgacggcgccacgcagggacacgtcagcgcgctatggccccgcccccggcgcccgctggtcccgcctccccgcgcctcgttcgccgccgctgtcgccg

SEQ ID NO: 23951 - DNA, 417 bp, Homo sapiens
  source 1..417: mol_type = other DNA
ccagggcccggcacatagcaagtgctgtaagcagtggcactcacaggctgccaggacaggaaggaccctcagaggtccgtcccaagctgtgtttgcatcccgagggaatgccagcaccaagtgccaaggcctgggcagccctgggaatgaacctcctgaatatttaaatatttaattaaattaaatatttaaataaacttgaagtagaacgtacttaaagtgccccccacataagaggtgggcttgtcccagagggagaatcgctggtgcccagccagtcggttgaggcttagccccacgcgcccagggcaccagagctcagcaaggcaggggccgaggctgccagagccctgctggcgtcatcctgcctaacagcaccacaggctgcccggggaacatctgctactacagccttgc

SEQ ID NO: 23952 - DNA, 354 bp, Homo sapiens
  source 1..354: mol_type = other DNA
gccccagccactctaaccgggttaaggggagcccagagccggatggtcagtcccctgaagctgcccctgggggtaacccacgtctgcgcccacttgccaccagctccggcctctggggaggtggtgctgagagtggctcctggagacagacagctgggtgtcccaccctcagaggaggccagggcagcgtcactggctacgtccttccgggcctctggggctggagaaaccccggggtcagcagtaccacgggttttgctggggattgcacagtgaggctcagctcccagcagggccacaggcagggaaaatgagtttcagtttctgtggcaagggagctggggagagaagcag

SEQ ID NO: 23953 - DNA, 418 bp, Homo sapiens
  source 1..418: mol_type = other DNA
ccagaggttttgccttggccctgacaaccctcctggcctagccaggcctcctggagagggacggcggaccttggagttcggtcctagctgccctggccccaagaggcaggcccttggagtcaggtgtcgccagcgtccccaatctccagtctggctctggcccgcatggcagctggggcaaatgcagataggacctccacaagggaacaggcccacttggcctgaggcttgaagacggcaatcaagacctagatgacctcaggcgaaaacagggctctgcccaggcggggacccagctgggtggagggcgccgactgagcaaagactgcgtccaggccccgcccccatgagcccggccacgccccctggagcccagccccgcctcccggccgcccgcgcgcaggtagggaagaggcgg

SEQ ID NO: 23954 - DNA, 62 bp, Homo sapiens
  source 1..62: mol_type = other DNA
tgcgttcctgatgaaccaggtgaggccttctgtttaatgacacagctgggtctggttacaaa

SEQ ID NO: 23955 - DNA, 244 bp, Homo sapiens
  source 1..244: mol_type = other DNA
ggccttctgtttaatgacacagctgggtctggttacaaagaccaaggggcacacacggggggcccccctggcaagcctgcactgccggccaggagccctcggccctcggagctgagggtgagacccaggcatgtggtcccgccgacctgctgcccagcagcccggatcccccggggctgccctggtggccaaggcaggtgtttctggactgaggcccctcccccagtgcgtcagttcctctgag

SEQ ID NO: 23956 - DNA, 716 bp, Homo sapiens
  source 1..716: mol_type = other DNA
aggaggaaggatttgcctcccccaggcccggaatcgggcccttggtggcggctgagatgtccccagcagcctgcgcaccagctgggctagaattcagggcagcggctggttcttgctgtccgtgtcattcataagccacgggggacttctggccgccgccgccgcgttcgtgcaccgagggcatggaggtgctgggcgagggggcgcaggcctctggcgcccgaggtcggaggtgcgctcgttccgacagccggggcggtgggcgggcagggggacgacccccgtgctaaccccccagagcctgggcgtccagagccgtgggagtggcgccgcggcccccagcggctggctcgggggcgcggggagaggcccgggcgaggggagcccagctaggtccacggcggccgccggaggggctcctgttcgcccccacgggcgggctggcggtcggcctcgccgcgaaagctcagttccccgccgcgggaagggtccgcacgcgcacactcgcgacgccgcaagcactgggacccggaacccagcgctcccggcccgcgcccgccccagcgcactcctgtgcggcccgcgccgcccagcgccgcgtgaccgcccagcgagccccgccccgcggtgcaactccgccgtggcctgcgggtgggcgggcggcagtcgcgtcgcccccaccccgcgcagcggatttgtttttttaaacattttcc

SEQ ID NO: 23957 - DNA, 719 bp, Homo sapiens
  source 1..719: mol_type = other DNA
agccaacccttagcaatgcttgggcaactgccaggccctgtctggcctcaggctgtccccaggactgagcagccgctgcagggcaggcaccatgggatagggcccaccaggaggaaggatttgcctcccccaggcccggaatcgggcccttggtggcggctgagatgtccccagcagcctgcgcaccagctgggctagaattcagggcagcggctggttcttgctgtccgtgtcattcataagccacgggggacttctggccgccgccgccgcgttcgtgcaccgagggcatggaggtgctgggcgagggggcgcaggcctctggcgcccgaggtcggaggtgcgctcgttccgacagccggggcggtgggcgggcagggggacgacccccgtgctaaccccccagagcctgggcgtccagagccgtgggagtggcgccgcggcccccagcggctggctcgggggcgcggggagaggcccgggcgaggggagcccagctaggtccacggcggccgccggaggggctcctgttcgcccccacgggcgggctggcggtcggcctcgccgcgaaagctcagttccccgccgcgggaagggtccgcacgcgcacactcgcgacgccgcaagcactgggacccggaacccagcgctcccggcccgcgcccgccccagcgcactcctgtgcggcccgcgccgcccagcgccgcgtgaccgcccag

SEQ ID NO: 23958 - DNA, 333 bp, Homo sapiens
  source 1..333: mol_type = other DNA
ggcagtgcctctgacactgtctcccccgaatctaatgcctggtgggttcaggttctcacaccactcccagacccatgtctcagcgtggccataagaaaataggagaaatcgtgtaactatttcttttcatctcatggtgtaggatctgtacagtagtctagcatataatttttgcagttactggcagatgctccatgcttcagtagcttcggcagcggaactctgaaagtgcagagtggcagctccttgcaagcaaggcccagtcggccttgacccggaggggagaacctgggcccagtagcttaatcagtcctcacaaggtcggggccgctg

SEQ ID NO: 23959 - DNA, 313 bp, Homo sapiens
  source 1..313: mol_type = other DNA
aaatgatatcttttaaaaataattcttcccagaagaatggatcatggcagaagctcatgtgatttcacagctgaggaagtcagccaccatgccatgtttcctaaaaaaattacgctatgacagtggaaattttttcctgagagttcttaggaccgtgaaacagtgtcaatataaaaatttaaaaacctgggatcactgctttaagtttcaccgagctttaatggcagagcactgcctctagagtattactcaaaaattgattttttaaaaataaaaataaatgaatttgaagacgccagcttgtacttaaata

SEQ ID NO: 23960 - DNA, 391 bp, Homo sapiens
  source 1..391: mol_type = other DNA
tactcatttttatcattaaaataattagcattctgaattttgagtaacacgtattctcatacttgaacttcagaataaagcacagatttaaaactacggctttccagaagtttacaatcctattgactcctatcgtcttcacacgttaacactcctgatgctgaattaagaaccaccatcgtcagagtctgcccgtgcgcgggcaccgaagacccctgggcagctcagcacacgcgcggcggaggcgcacggggctgcccaggttgttaggcgctctcccccgcagaagccggccctatgacgccgaggacgggaacattttctcaacgtttggaaagcatttgcgcgcaagtcttctcggcaatctctccggaactctcgcgatgttgag

SEQ ID NO: 23961 - DNA, 324 bp, Homo sapiens
  source 1..324: mol_type = other DNA
aagcagcagctttcaaggagacagggtctcaactctgtcacccaggatcctcctgcctcagcttcccaagtagctgggtagctgggatcacaggccctcagcttcccagtgttgtgactgcagtccccagtcccttgagtccaggggacacagtgagtcacccctgaatccatctccccacttgctaagtgggaataacttcacccaagtgtctgtacacactagagtatttttcgaacgaaaaatgaagctgccctgtggagggacctgcacaaggccggcatccttcagctgtaccagcgctgaccccaatgcactgacaaa

SEQ ID NO: 23962 - DNA, 102 bp, Homo sapiens
  source 1..102: mol_type = other DNA
cccttaggggctgcctcagagacatcgggtggacctaagccgaacccaccccgcccgtggaggtcctggtgagcgggaagccgcacgtggtccccaacgtac

SEQ ID NO: 23963 - DNA, 638 bp, Homo sapiens
  source 1..638: mol_type = other DNA
tctcaaaggagtgcgcttttgtgaaatgcgcatgccatgcctgatgatctgaggtggaacagtaaattgtcttccaggaaaccagtccctggtgccaaagacccaggtggtctctctgactggcctcgttctgtgaaaggaactcaatgcgtggccatgggcgtccgcagactgacagatctgagggtcctttggagggagccgggcacatctcctcccggccgccgcccacccgccacagagtctagaggccgagtgccgggcccgcagagggcagagcgcagccagcgcagcaggtggcggcgtctacccgcgcctagctagccccggacggcgcgaggaaagcgccctgcccaacccgagactggcggcctcccggggctgggctctggagagagcgcagtggcaggagtggccgctgccgaagtcccccgggcagggggcagggccaaaggagcgcgcgctctgggcgccgggacgacactccagccccgggggacccgccgcccagctcccgagggtgcggcagcctctggccactcagccggggccgagagggagctgccgggcgggcaggcgccgcaggcacccggcgggcagggcggggcagggcaagacggccgcctccgcaagtgcca

SEQ ID NO: 23964 - DNA, 581 bp, Homo sapiens
  source 1..581: mol_type = other DNA
tcactcactgccagggagtgttccagcacgggtgctgagcttcccagcccctgatgctggagcctgctagaccaggggtccccaatcccaagcctggtccgagacctgttaggaacagggcaggaaggagcattaccgcctgagctccgccttctcaaaggagtgcgcttttgtgaaatgcgcatgccatgcctgatgatctgaggtggaacagtaaattgtcttccaggaaaccagtccctggtgccaaagacccaggtggtctctctgactggcctcgttctgtgaaaggaactcaatgcgtggccatgggcgtccgcagactgacagatctgagggtcctttggagggagccgggcacatctcctcccggccgccgcccacccgccacagagtctagaggccgagtgccgggcccgcagagggcagagcgcagccagcgcagcaggtggcggcgtctacccgcgcctagctagccccggacggcgcgaggaaagcgccctgcccaacccgagactggcggcctcccggggctgggctctggagagagcgcagtggcaggagtggccgctgccgaagtc

SEQ ID NO: 23965 - DNA, 241 bp, Homo sapiens
  source 1..241: mol_type = other DNA
catcccagctactagtgagccgagatcacgcctctgcactccagcgaagttgaataaattactaatgaatgattctccttttctccatgaagccagtgaccctgactccattcctgaccacaggcccaggccctgggaggttttcgggtgcagcctgctgacagttgggagtctggggcatgtcacagcctgccgcatgtcacagcttgccgtcactcactgccagggagtgttccagcac

SEQ ID NO: 23966 - DNA, 425 bp, Homo sapiens
  source 1..425: mol_type = other DNA
gctactcaaagattgcgccactgcactccaggctggtggctgggcatggtggccgccttgagacccatctctatttcttaaaaaaagaatgcaatctctaccaagccagtggctcaccatgtgctcttgggcccagcccctagagtggctgtgagggttccatgagtgcctgtgaagactccccactgcccagctcagagtgagcgtgtgttgggtgcctaccacaaacaaagtggcaaggttcttcatgataatcccaaaaggaagataactgcttttttccatttattaagtaacctgtgactttcagatattggcttcaaagacaaaaaaggaaggtaaacatgtttgaacacaaggagtttcccttcctttaagccacgcagcttataaccttcccaggcagagactgataaatccttcct

SEQ ID NO: 23967 - DNA, 461 bp, Homo sapiens
  source 1..461: mol_type = other DNA
aaaaactggaaccgtgttttttttaacattaggcttatgtttggccatgcccgtcctgtgtttatttaaaataactaaagatgtttttggttacaacgtgtttatctcaaaatccactgttcagcaacatcccaccctgcatgcattctggaattgtgcaaaacctgcagctgaatttcaggaaggctgctggcctcagctccgaagggagcaactcctgacatgcctataataagcatttcaaattgaacctgagctacgtcaaggctgcccaggccgggcaggggttggccctcctgtgcctcccaggtggtcagggctctgccccctcacccccgcccgcagcctgtgcgtcaccctcccggggccggagggggcgggggcggggcgcggcgatgggggctccgccccgaggcggggcgcggcgaccgggcgcggcgacggggcgcggcgggctccct

SEQ ID NO: 23968 - DNA, 260 bp, Homo sapiens
  source 1..260: mol_type = other DNA
gataagattttaaccacagtgagccgagatcgcaccacggcactgcagcccttagctgcagaatactttacctgtaacagtgaaaaactttggcaccttgtagtcttccaaaagtttccttcttttagggtgttcaccatagctgctgtcaaagatgtctccatgtactcgatgtagtatactctcgtctggctcctccggggtgggggcagggcgcgtgcgtgaggccacggagccttgacagccaggtcccctagggg

SEQ ID NO: 23969 - DNA, 474 bp, Homo sapiens
  source 1..474: mol_type = other DNA
agcctgaccaacatagtgaccagggtcacttcaggaagctgcgcagctgagcgtccgcacccccggtccctcaggccgctcctgacctcaggcgcctcctggcgggtgctgctgcacgcacctgcgggacgtggacctccaggacagccccgtcggcccccggacccggctcctccgagaatcgaaagcgctgggcccggaccccctgtcctcggaaatcgtgctcgcccagtagggcgtcgttgggccccgggcgggcgggggaccgcggaaggctccgggctgccagactgcgcgagcgggaagccgcgggccacgtggccgcgcgctgcgcggggcggtgacgcagccgacgtgaccttcccaacatggcggaggcccgccgtatgtgagtcggggcggggaagacggcggccgcttgcccaacccgaggctcgggaggtggctgggtgggtactgccgtcgccgccgccc

SEQ ID NO: 23970 - DNA, 605 bp, Homo sapiens
  source 1..605: mol_type = other DNA
actctcgtctggctcctccggggtgggggcagggcgcgtgcgtgaggccacggagccttgacagccaggtcccctaggggacccgccgcccaaaggagtcagggacgacgggcctttgagagcgccacaggcgtgggactcccgtcgtccgccagagcagacgggcggccacagcacggcgccccggaatccgcgcctcggggaccccaaactccgcggggtgcgggtgagcctctacgaggtcccgggcgctcggggcgagggcagcctcgggcccagagaaagtagcggctggaggtgccgatgcccggcctggccacccccgcccgacccgctcaccgccacggccgccgggctcagcgagaagctctcgtagtgccgctgagctccggccgcgcactccgcttggcctcgccagctggttccgctacgacctcggcgcaaacgcacccctccccggcctgggcggcggcgacggcagtacccacccagccacctcccgagcctcgggttgggcaagcggccgccgtcttccccgccccgactcacatacggcgggcctccgccatgttgggaaggtcacgtcggctgcgtcaccgccccgc

SEQ ID NO: 23971 - DNA, 498 bp, Homo sapiens
  source 1..498: mol_type = other DNA
caattcttttgccacatccattagaagtacaacaatagttgaactgattgtttctctaagaggatagtgcatctttaacatttaaagacaaaactggccaatattcttttatcaaacgtcattttcattaataggtctcaaacagtttacgaaacagccctccgagcagcactcctaatgataggagtcattcttacattaacaaccccaaatcccatttatgaattagggttatgtgtctcggattcccaacaccgctccttcctcttcaggagactcctggaccgagaccgggacctggaccgcgaacgagatgacttggaggtcgaccgagatcgagacgagaacgactccgactccgggatcggctgcggcgacgccgcctagggctgcgggcggtccaggcagcggggccggccccgcccgcgcgctcccgcccaggccgcccagaccatttccccagtcgcgaggcggggtcctccgccccgcgccgcccac

SEQ ID NO: 23972 - DNA, 656 bp, Homo sapiens
  source 1..656: mol_type = other DNA
ctagcagcactcctaatgataggagtcattcttacattaacaaccccaaatcccatttatgaattagggttatgtgtctcggattcccaacaccgctccttcctcttcaggagactcctggaccgagaccgggacctggaccgcgaacgagatgacttggaggtcgaccgagatcgagacgagaacgactccgactccgggatcggctgcggcgacgccgcctagggctgcgggcggtccaggcagcggggccggccccgcccgcgcgctcccgcccaggccgcccagaccatttccccagtcgcgaggcggggtcctccgccccgcgccgcccacaccccggccactcccgggtcgcagacggcggaagctcgcggggtggccggagggtcgcgagacgcggcgtgcacccccgccccgtccgggcccgcaccacgtgcttcgccgcggacctttgtgaggtcgcccgggcctcccgcgcgccccgccccgcctcccgcggtccctacctgcggctccggcgtccgtagccaccgcccccgtacctgcggggtggcggtccccggcggctgtggtgtgagtccggggggcggccgtagcgcgccatttgcacccgcagctcgcggccgtccagcacggccccgtccatggcatcg

SEQ ID NO: 23973 - DNA, 398 bp, Homo sapiens
  source 1..398: mol_type = other DNA
ggagccaggcagccaagctgtcaacttccagttcctggatcggaaccccaggtaagtgccagccgcagcagccggcgcggccccgccctcccagcctgactcactgcggccaggcgaccgggtcacctgaccgcagccgcggcgccggccgctcggcccgctgggaaacgtagtcccgggtggcctggcacgcgcaagcgctccgcggggagtccccaccgccaggacgcagagccgacggagctctcgggctctggaaaggtgggggcccagatggggagcacctcctcttcctcctgcccaaggcggaaaaagcgtttcgcgggctttggcccgcccgccgggctgtgcgcaggcgcttcgggtaggggcggggcgcgcggcaggcgaaacgggcg

SEQ ID NO: 23974 - DNA, 536 bp, Homo sapiens
  source 1..536: mol_type = other DNA
ccgtagctcatagctctgagtggcggcccggagccccgcgaactggcgccggcttcctcagctctgggcggtgcgacgccgcgcctctcaggcagttgccttccgcgtggggacactgggaaaggccttgccgcacggggctccgcaggctagcgcacctgagtaacaactgggcgggcagccggcctctgcgcccgtttcgcctgccgcgcgccccgcccctacccgaagcgcctgcgcacagcccggcgggcgggccaaagcccgcgaaacgctttttccgccttgggcaggaggaagaggaggtgctccccatctgggcccccacctttccagagcccgagagctccgtcggctctgcgtcctggcggtggggactccccgcggagcgcttgcgcgtgccaggccacccgggactacgtttcccagcgggccgagcggccggcgccgcggctgcggtcaggtgacccggtcgcctggccgcagtgagtcaggctgggagggcggggccgcgccggctgctgcggctggcactt

SEQ ID NO: 23975 - DNA, 739 bp, Homo sapiens
  source 1..739: mol_type = other DNA
cccgccccgtccgggcccgcaccacgtgcttcgccgcggacctttgtgaggtcgcccgggcctcccgcgcgccccgccccgcctcccgcggtccctacctgcggctccggcgtccgtagccaccgcccccgtacctgcggggtggcggtccccggcggctgtggtgtgagtccggggggcggccgtagcgcgccatttgcacccgcagctcgcggccgtccagcacggccccgtccatggcatcggcgaagccgcgggactccttggtgtagcggtcccgcgggatgtacacgtcgccgacgcgcccgtacttctcgaagacgcgcctcagcgtgtcgggcgaggtgcggtaggtcaggttgtccaccttgagggaggtcataccctccacatcgggaggggggcggccgtagctcatagctctgagtggcggcccggagccccgcgaactggcgccggcttcctcagctctgggcggtgcgacgccgcgcctctcaggcagttgccttccgcgtggggacactgggaaaggccttgccgcacggggctccgcaggctagcgcacctgagtaacaactgggcgggcagccggcctctgcgcccgtttcgcctgccgcgcgccccgcccctacccgaagcgcctgcgcacagcccggcgggcgggccaaagcccgcgaaacgctttttccgccttgggcaggaggaagaggaggtgctccccatctgggcccccaccttt

SEQ ID NO: 23976 - DNA, 410 bp, Homo sapiens
  source 1..410: mol_type = other DNA
ggcagccggcctctgcgcctgccgcgcgccccgcccctacccgaagcgcctgcgcacagcccggcgggcgggccaaagcccgcgaaacgctttttccgccttgggcaggaggaagaggaggtgctccccatctgggcccccacctttccagagcccgagagctccgtcggctctgcgtcctggcggtggggactccccgcggagcgcttgcgcgtgccaggccacccgggactacgtttcccagcgggccgagcggccggcgccgcggctgcggtcaggtgacccggtcgcctggccgcagtgagtcaggctgggagggcggggccgcgccggctgctgcggctggcacttacctggggttccgatccaggaactggaagttgacagcttggctgcctggctccccgagg

SEQ ID NO: 23977 - DNA, 368 bp, Homo sapiens
  source 1..368: mol_type = other DNA
tggggttggtgggagggcgcccctctcagctctcagaagagccccaaggctgtgctggtgagctcagcttgccggaagggttctgtgccttgttccctgctgtccccctggggttaccccagagccggcaggaacaggagtcctgttctgaccagccggacaccctggccagtccgtggtgcaggctgctgcagcaaggcctctgcacactgcaccaaggctggcctgagtgattgatggggtctggctggcctcaggccctgctgtgtccacaccccagagtatctgattcagtaatttggggttggaggctagagcccgcctgcctcatgcctaaggggggccctcctgggtctggagctcagccc

SEQ ID NO: 23978 - DNA, 688 bp, Homo sapiens
  source 1..688: mol_type = other DNA
tctggtcactatcatttcataatggatgcgcctggctctgtgagcgggccccagcaccacaggagaagagaagggtctccgctgggtgggagccaaagcagctttcggccctcggggctggtggcgccctgggaagctgcttggctcaggggaaggagcagggacccccgcccgcccgtcctcgaagctggtcctcggcgtcccagccccgcacggccccgggcagggcgcacagcggggctgcggccacgaggtggcgccggcgcgccttggaagcgcagctgcagctcccgggccgccccagcgccgctcggccgcctcctccgaggaacaatgcggcgcctccgggcgtagcgtcgcgcggggccggacgccggacaccagagcgcgggcggcggagccagcgggcgagagagcgcgcggcgggcgcgggttgccctcgtcgagagccatgggcgcggcgcggcgcggggctgaggatcggcgcggcccggaggcgctggggaccggggcgcgggcccggggccgcctttagccggcaccgagggcgcggggccggggatgagggcgcccgccgcggggagcccgtctgcgcgccgcggcaccttcccgcccagcgagcgagcccgagcaggcagacgcgcggccggcggtctgggggcgcgccgcctcccggtccccaaaatgt

SEQ ID NO: 23979 - DNA, 498 bp, Homo sapiens
  source 1..498: mol_type = other DNA
agaggacgggcgggaagcgctgcacagagccactgggcggagcggccggaactccaggggagctcgcgctgcctgccaggctcttagcaggctgagctcatccttgcctcaagaaatttccaagggttggtcttaggcttcagccttccctctcctcctccccgacttaggaggagaaggcagggctggggcgggtgagcagccgagggtctccaggcagagctcctcatgcataaaacaggcgggcttttcctccgcagctaatcagaacctctggggaaagatgcaaatgaagggcctcgtcaagtcatttcccttgcaaatgaagctgccgctccgtgacccggagcccgctgctccgctcggccccgccccgggcagctatttggcacatttcaattagcgtaacgcggtaaacagccgaggccggctgcgggcacctgcaatccccgacccccgacgccctccccgagaccctggagacgcggctccgccccc

SEQ ID NO: 23980 - DNA, 364 bp, Homo sapiens
  source 1..364: mol_type = other DNA
accagtgagggcaaccagaggtcactctcatagccatcagcaaggtctttatgagctgtatgactattcaagatggagttgctctggtttctgctcagagcaagattcctgttcgttgcttcctgtgcccacagacagtgaactgtttcctgccacctggggtggtggaaaaaatgacttaggtgtgaacccagctctgccacttcctgcgtgcttgctttcacggctccaggaacccagcgggctttcaagaaacagggccctcccctctggcccagttggatgacccagatccaaagtcatcgactctttatcacttccggccggaagttgctgacggagctacttccgcccacgctctcgc

SEQ ID NO: 23981 - DNA, 578 bp, Homo sapiens
  source 1..578: mol_type = other DNA
ggaacaacagtgactttgacagtgaaattgcatgttggttataaaaccatgagctcctctgctgaaattcgggagctacttagcagccccaccttggcaccctcgtttccgaggggcaggccctgggcgcgcgtctcagtttcaagcccgcggcccgacactagagccgcaaggatgccgctgggctccacccgggctcacccgggccctcccgagccctgggccgcgcagcaccggcgtccgcctcctccccattactcggcgagaatgcggtcggggcactggcgcgagcagggggcagccgccagggcgaccagaggcaggcctcagagcagcagccatacgggagggccccggtggttttggggcttgcgagcggccccgcccccactgggaggggccacgaggacctcgggcacatccagcagtgcgacggggccggcgccttctccgagctcctcccacgctcgcgggtcggagctcgcgcctgcgcagttcgggccccgggccgctcccgcccccgctccctcggccgcggccgcgcacgcgcgcccctcccggcgcccggccccgcccac

SEQ ID NO: 23982 - DNA, 578 bp, Homo sapiens; identical to SEQ ID NO: 23981
  source 1..578: mol_type = other DNA

SEQ ID NO: 23983 - DNA, 305 bp, Homo sapiens
  source 1..305: mol_type = other DNA
gcacctctgacttgtgctgagtaaaatggaataacccagattcttgagacaccgctggactttgggaatcccaggcattaggctcgtggcagtgtcatcatggctaggctgggggcagtgtcatcatggtgcttgctggccaagtcaggacacggcctaagccggaatctgctggaatccggactcagttgaagtccagtgtccactccggtccaatcagctctacctggggtgaggggaaactcctctggctgggctgctccctctgcaggctggcagctgtgcaagggcccggccctgcctct

SEQ ID NO: 23984 - DNA, 598 bp, Homo sapiens
  source 1..598: mol_type = other DNA
cagtgactttgacagtgaaattgcatgttggttataaaaccatgagctcctctgctgaaattcgggagctacttagcagccccaccttggcaccctcgtttccgaggggcaggccctgggcgcgcgtctcagtttcaagcccgcggcccgacactagagccgcaaggatgccgctgggctccacccgggctcacccgggccctcccgagccctgggccgcgcagcaccggcgtccgcctcctccccattactcggcgagaatgcggtcggggcactggcgcgagcagggggcagccgccagggcgaccagaggcaggcctcagagcagcagccatacgggagggccccggtggttttggggcttgcgagcggccccgcccccactgggaggggccacgaggacctcgggcacatccagcagtgcgacggggccggcgccttctccgagctcctcccacgctcgcgggtcggagctcgcgcctgcgcagttcgggccccgggccgctcccgcccccgctccctcggccgcggccgcgcacgcgcgcccctcccggcgcccggccccgcccacccccggccccctccccggaaccggcgg

SEQ ID NO: 23985 - DNA, 679 bp, Homo sapiens
  source 1..679: mol_type = other DNA
cggctccctgtgtctgccccgctgcaccgatacaccgagctgcgcacggtgcccagcgcagggagaacaaatgatcattaaaagtagcaggacaggtgtcctgtcccgcccccggcccactaagccggcaccccggctccgacccccggctgtgcccggcgccgccgcggtgcccggcgccgccgcctcgcccggcggggccgcccggagcgcccgcacctccgcccgcttccacctggccgggcccgccccgcccggactcgggactgggaagtgcggcgactcccggaaccagccattggcgccagcgcggggagctgggggtgcagagctgcgggcgcggcgggccacgcaggcggcccccacccccggcctggcctggtctggtctggtctgcgctgccgcgcgggggcgccccctcccaggcccggcgcccgccagccccgctccgccaggtgcagcgcagcgcaggggtgggcgggggtggggctcggcgcgcacgttcacggggcggggagggggcgggtcaggggcgggaccacagccggctgggccggggttctatgcgcatctccggggaggggcggggcgggggcggggccggggcggggcccggtcggtgcactccagacggcgggccgccccctcttccccccaggattagcgccctgggagcgcg

SEQ ID NO: 23986 - DNA, 529 bp, Homo sapiens
  source 1..529: mol_type = other DNA
aaggctgggaatggtcctccccaccccccaggaagatgtcctttctgccaaggaatcccaggcagagagcggacgggactgtggcctgaagtggcacttcagggcctttggctctgtcatctagccgagggctgtgcatgggcctcacctggtcacaggtaactcacctggcctgtgcggccaggcaggaaggcttccgtggtgcggccacgcgagagattgcctgagttctcagcacacattctctttacaggcttgggtttgaatgaacccttgaggtgaagcttagcccttggcctcagcatggaccctgaccatgtgctggtggggaccccccaggtaagtgcctctgaggaccccggatgaacagtggggaacagcactgatcccccagtggggccccgagttcccggagaggaagactcgctccctcccaggggacggctagagactcactgactcatgcgtgtgtcccgtcccgttcgccctctctgcctgggcggggacggcaactgcctcctcctgggca

SEQ ID NO: 23987 - DNA, 558 bp, Homo sapiens
  source 1..558: mol_type = other DNA
cacatggcccctgactctgggcagaggccgagggtctgggcgagtggaagaagcgcctctctctcttgtaggtgacacccaggtccccaggtctaccccagcccctcggctggcctggagggaaggctaggcctcaggttagggcccagaagggagggagaagcccttggggcagctccctacttcctgctctcaggaggcccttattgtggaggaagggaggcgtcgcccgtccctggcttccttctccagggctcacccaggagggtgcagcggtggcccccggggcggtgggtgccatgggactcgcatgttcgccgcgcccctcggctcttgagcccacaggccgggatcctgcctgccagccgcgtgcgctgccgtttaacccttgcaggcgcagagcgcgcggcggcggtgacagagaactttgtttggctgcccaaatacagcctcctgcagaaggaccctgcgcccggggaaggggaggaatctcttcccctctgggcgcccgcgcccggcctccacatccgcccacatctggccgcagcggggcgcccg

SEQ ID NO: 23988 - DNA, 710 bp, Homo sapiens
  source 1..710: mol_type = other DNA
aggtctaccccagcccctcggctggcctggagggaaggctaggcctcaggttagggcccagaagggagggagaagcccttggggcagctccctacttcctgctctcaggaggcccttattgtggaggaagggaggcgtcgcccgtccctggcttccttctccagggctcacccaggagggtgcagcggtggcccccggggcggtgggtgccatgggactcgcatgttcgccgcgcccctcggctcttgagcccacaggccgggatcctgcctgccagccgcgtgcgctgccgtttaacccttgcaggcgcagagcgcgcggcggcggtgacagagaactttgtttggctgcccaaatacagcctcctgcagaaggaccctgcgcccggggaaggggaggaatctcttcccctctgggcgcccgcgcccggcctccacatccgcccacatctggccgcagcggggcgcccggggggaggggctgaggccgcgtctctcgccgtcccctgggcgcgggccaggcggggaggaggggggcgctccggtcgtgtgcccaggactgtcccccagcggccactcgggccccagccccccaggcctggccttgacaggcgggcggagcagccagtcagggaggccggtgcgggtgcgggaacctgatccgcccgggaggcgggggcggggcgggggcgcagcgcgcggggaggggcc

SEQ ID NO: 23989 - DNA, 556 bp, Homo sapiens
  source 1..556: mol_type = other DNA
tggatggggaaggtcaaattccacatattgagtgacaggcccagggccttggatttcagtgtttgactcagaacccaggtctctgatctgccaccagcctcccagatgggaacagggacctcccccggctctggcctggcgcccggagaccagtagcagcagctccccacggccgttcactgtgagggtggggaggacgggtcagatgccagtgactgctggctggggagccgctggtggcggccagtgtggcgggtgccccggggcttcagtcacccccagccacgtgtgggggtgcgggatgagcccagtcagcactcaacatgaggtcccgtgggggctgcctgagggcgcctcggaacgagcccactcccaggcgctctctcctagtgtgggagtggccacgcccctgctgggagtgactgagatgggtctggcagatcccagcgtccaggcccagcccctccctctgggtcccagcacatcccaggcctgcagggagggggagaggaagagactgactcactggccaggtcccccaggggctggagaggct

SEQ ID NO: 23990 - DNA, 317 bp, Homo sapiens
  source 1..317: mol_type = other DNA
cagggtgccacttgccaagaaccacttggggtagccatctgaggaccacactggagaaaggccccagaccctcccttccaaatgggcttggggtggggggtacaatctctcatctgtgaaatgggaataaccaggctccccccgccggggtcggggagagtcagcaggggggctggaatgaatccagcccagctcagacctcaggagagtcgccgcggggcgcccggaggagggcgggggcgccgcgggccgggccgggtcacgtgatagccgaggcccgccccccccccccccgcccacgtgggccgggaggtgcg

SEQ ID NO: 23991 - DNA, 441 bp, Homo sapiens
  source 1..441: mol_type = other DNA
ctctggggagcctccccagattgaaccctgggtgcccagcttggcaaagatatgtcttaaacatctacacttactaccggccaggtgctaggcctgggtcttggcacaaccataacgccctggaaacccagcagccaggttctggggagcccaccatcctgtcattatcacaccctccagggtgagcaggcctcgaggtcaagtcctgcctatccaggctggaaggagctgcaggctggacatccctggaggcagccaggcggcagacccggaccagtggaccctagggctgcaggagaccaggccctgactcctgtgcagaggggaagggtgggccacccgcagcccagcatgcacagagctccctgggaggccaagtggcctacgcctgtcacctcaggggcccacagggtgcttggggaagctgggtttcctgtcata

SEQ ID NO: 23992 - DNA, 468 bp, Homo sapiens
  source 1..468: mol_type = other DNA
cccagcccgggtgagcaccaggcccatcaggtagggagtgtccaacgtgcccacggtcacagggcccaggaaccccattggtgaccactcgatcttcgcttctcccagctgggctctgaggaccacgggcatgtgtccatgagtctatgttgggcacagtggggagcagaggtcctcttccctgggtctcccagactctggaccataggccaggcggggactggcggctaccagggtggtgaggctcctataacccccaaccctggggaggcctgggcagggggctggagccccggggcctgcacggcaggaccacgcccagcgttgtcgccacgctctgggccctgggccagcccccccatggcgcaggtgggcaccggagcacttcccctggtgggcctcacactcactcaagttcagggtggggcctgggtcaggggggcgcagaccaggacgaagcttgcggtg

SEQ ID NO: 23993 - DNA, 492 bp, Homo sapiens
  source 1..492: mol_type = other DNA
ggggccagttccctggggaatgaccatccatgtgacctcccaccaccctcagtggggcctgagggacttctgaagggcggtgcttgggcacaccacgctccgggacccaggactccaggacccatcacactccaggaccaggggcctcgtcggtctggccttttctcagcccagcaggtccccagctgcttggaaagggtaggacgggctcctcctctcaaaatgagaagaatggtagctgggacatgttggccaggctggtctcgaactcctgacctcaggtgatagccactgtgccccgcggagcatggtgcccaccacgtgagcccgggatcctgcggctcagaggtgactgctgagtctaagccgggcctgccggggctctctgggccccgccctggtagctgaggccctggggtgctgcggcctccaggttatctccccactgcaggcacccacccagggagcatcccaggggcctcagggtggggg

SEQ ID NO: 23994 - DNA, 353 bp, Homo sapiens
  source 1..353: mol_type = other DNA
tggccaggctggtctcaatgacctcaggtgatccaagcccggcgagtagctgacctcaggtgatcttggggctctgcccagaccaggaggaatggggagggggtctttgaccctaccccaggcttagccccagagagtcttcccgggggactctggtccgtgctgcggccggcgtggcccggagactagcccctcaaccccgaggtggggtggacccgggtgctccgcggccacagcccctccccgcctctagaagcgcagtcccgcggctcgcccgccgctcgcgagggccgcactttgccctcggtccctagcggcgcctggccacgcccccggcgggtggagtcgggcgg

SEQ ID NO: 23995 - DNA, 476 bp, Homo sapiens
  source 1..476: mol_type = other DNA
gtctcagcctccccagtagctgggattacagaggtacatggtctcaggtgtgagccgccacgcctggcagggtctacatattcaattttctttatcctgaaaaccaggttaacaggggacctggcacgcactaggcgctctgcatgcccacatctagacggcttctaagcttccttcttggaattccaatctaattcttccaaggaaccttgcttgggaacagccgcatgggcgtgcgtccctctgtttatatggccagagccccgcctcgctccgcccctttaaacttggtgggcggaccgaggcggggctcagaccaggccccaccccgatccccagtccctgggcgcacgtcccggattcctcccacgagggggcgggctgcggccaaatctcccgccaggtcagcggccgggcgctgattggccccatggcggcggggccggctcgtgattggccagcacgccgtggttagc

SEQ ID NO: 23996 - DNA, 321 bp, Homo sapiens
  source 1..321: mol_type = other DNA
cagctcccagccagggctctgaggctggctgtgtggcacagcatggctttgccactgggtgcccaggtggacaagtccggaagtgaatttaactcccaaactgaggttgcaggaggctgccaggtgacgggcagagtttctgaacactggcaggctcctgacacttcaaacattgtcaacactggctccagcccagggagtggagagtgtgcgctaccttgccaagcaccttggaaagtgtgctgatttgaatcattcaatgttcaaatgattaaccatccactggacaggcgtcatgtgtgcagaagctgctgctgtagc

SEQ ID NO: 23997 - DNA, 347 bp, Homo sapiens
  source 1..347: mol_type = other DNA
aaggtccagaactgtctcagcctccccagtagctgggattacagaggtacatggtctcaggtgtgagccgccacgcctggcagggtctacatattcaattttctttatcctgaaaaccaggttaacaggggacctggcacgcactaggcgctctgcatgcccacatctagacggcttctaagcttccttcttggaattccaatctaattcttccaaggaaccttgcttgggaacagccgcatgggcgtgcgtccctctgtttatatggccagagccccgcctcgctccgcccctttaaacttggtgggcggaccgaggcggggctcagaccaggccccaccccgatc

SEQ ID NO: 23998 - DNA, 543 bp, Homo sapiens
  source 1..543: mol_type = other DNA
gttgccaccttctcagaggacttggtggggaagacagctaagctgtaagcagctgtcaccagctccaggagggagtggcgtccaccttcctcctggactgaattcaagggaggagcaccccaggcggagctccccgccctgcgcggagccacgcgcagggctggcccccgcacctggatctgcccccgggtcttgctgggggagccaggcagcacagtgggcagtgcagctcattgcgcctccgggaagttcacgaacccgagtactcccaaggccgtcccgcagtaagcccctggttcccgcgccgcgctaaccacggcgtgctggccaatcacgagccggccccgccgccatggggccaatcagcgcccggccgctgacctggcgggagatttggccgcagcccgccccctcgtgggaggaatccgggacgtgcgcccagggactggggatcggggtggggcctggtctgagccccgcctcggtccgcccaccaagtttaaaggggcggagcgaggcggggctctggccatataaacagag

SEQ ID NO: 23999 - DNA, 418 bp, Homo sapiens
  source 1..418: mol_type = other DNA
agggctaataaggccaggcctcttatctctggccatagaaccagagaagtgaagggaaaggaggagtttgccctgagcacaggcccccaccgtagtggcccagtccctggcccctgactccagaaggtggccctcctggaaacccaggtcgtgcagcgatgtactcgccgggacagcgatgtcagtgcaatggcatcaccgtgatggccaggctggtcttgaactccaggcacccggcctgcacgcgttctttgaaaggacgagctggcgcggcgtcgctgggtgcaccgcgaccacgggcagagccacgcggcgggaggactacaactcccggcacaccccgcgccgccccgcctctactcccagaaggccgcggggggtggaccgcctaagagggcgtgcgctcccgacatgcccc

SEQ ID NO: 24000 - DNA, 379 bp, Homo sapiens
  source 1..379: mol_type = other DNA
tctctagcacgcagcccaaatggggctcctctgaagcaatattgattcttgtgtgtttagggggggaacgaggccccaccccctatccagccccagctccaagggggcggtgctgcaggtgtgaggacggctacaaaatacctgagccattctgtcactctgtctgaactctgtttgaaatattgtttcaatcctccaagggccaccatccgggaggatgtcctcagacctctgatgtgtggcaacccagaggaagcctccccttcgtttgagatttaaccccagaccttaggcgatgggtcccttccgcctgtgtggctgcccacgcgggcgttgctcatggggcgtcctgggtggatgggtgggggcctctcgccgg

SEQ ID NO: 24001 - DNA, 687 bp, Homo sapiens
  source 1..687: mol_type = other DNA
tattccaaggcctgggccgcgcagcacactgccctcccctaggagaccccagggcgccctctggcggacgcgggccgtaggttggggccatcgttccacctcgagctctccagcccggccgagagcgggaggggaggggggctccacactcgcgttggcagtgggccgaggctgggtagctgccacgaaggggcgtcccctgcagccctgggtctcccctctggaatctgcccgcaggtgactgtcgcacgtctccaacctccggctcccgggtctgaccccagccccgctgcctggctgtggggtagccccacttccctttcggctggcccgggccgcctgacccgcagttgggccctcggggaggcccgggtggcggcgagggggtgtccccgcggggggaaccgggaggctctccaggtcggcctcctagaactgcccgctctccgaagcggcgcccccgcctctgccagaaatcagccttcttagaagggagggggggcggagcgcgcggcggggaggggccgctgccaggaacgcgccgccggggctggcgccgcgcccaccggccgcctcggccgcctctcgtcgcccctgctcgcggcccgccctcggcgcccgcggccccaggccggccgcgcagttccaggaatcggggggcggggcgcggcggccgcctatataccc

SEQ ID NO: 24002 - DNA, 420 bp, Homo sapiens
  source 1..420: mol_type = other DNA
ctcacttatcagtgagaaggctgcgccggccgaggagtcaatcttgacagccagtggtcaggccttgagcccaggagctcgagactttggtggtcccagcactttgggagtggtcccagcactttgagaggatcccctgaggccggggcgcaatgcgactgcactccagcctgggacacagaccgagactctgtctcaaaacaaacaaacaaaagcttttttgacgtctgcgccgcatcctttcctccgcgaccgtgacgagtgactgcaggaatgcaggccacctggcgcctcctcgcctgtgtcccccagaggggaaactgaggcttgggggcggtgcagcgccgccctccccgagccaggggttccgcgcctgcgcgcctgagccgtgtccgcgctcgcctttgtcaataaagttcg

SEQ ID NO: 24003 - DNA, 434 bp, Homo sapiens
  source 1..434: mol_type = other DNA
agagagaatatatataatacttataacaaaagtctggaaaatgtctaccaaaatgtcaccaatggctatctcttggtgatagtactattttctaatcttcaacaatgaatatgtgtcatgaacatgatgacctcataacatgctgtaatgattacgatctcttagtccattttaacatggatttaacctattgtggatggaaaatatttggaaaataaaaaaaggtcacacctgtactgaatacatacagacttttttcttttcattttctttaaacaatatagcataacagctgtttacatagcagttacattgtatttggtattagaagtaatctagagatgatttaaagtatattaaggactcaagctcccccttggataccaagggtcctggaggtgctactaaactagtttgactccagtgtaagattg

SEQ ID NO: 24004 - DNA, 375 bp, Homo sapiens
  source 1..375: mol_type = other DNA
gtgagcggacttgaagtgccctcctttcctttcgccaaggaccgggccctccctggcaagctggggccgggtctgaccttccaggttggcgtcagcaaggaccaccctgtcgtgcagtagcctggctgcaggccaggtcgagtccgccaccccggggacttcctgctcggccccaggaggcggacgcaggggaggagcctcgggtggacgcgcgtgcgcaggccggagcctcgggaggaggccgggtacccggggtgcggcgcgcgcgggaggaaggcggggcctcgggcgaggggcggggcctcgggccgggggcagggggcgggcgcaggcgcaggcgcgggcgggcggggcgcggggcgcggggcgccgggg

SEQ ID NO: 24005 - DNA, 428 bp, Homo sapiens
  source 1..428: mol_type = other DNA
tgtctattagcctcggcttccaaatgtcatgcaaagacctgaggtcaggatgtcaagaccagcctggccaacctgcagtgagccgagatgtgcaactgcactccagcccagtcatccatggtcagggatagccctacccagtggacacatgcatgcattcatttgcaaccagaacaaacactgtctctgtattatgtgtgatagactacaattttttaaaaattctattttcttttcatctaataagtatttgtttcataaccattaagagtcatgacccgctgtttgaaaaacactgttcttttttaaacagggtctcactctgtcccccaggctggagcacagtggtattttttgtagagacagggtctcatttgtaaacagtcatgttctctgctaatctgtgattagcagtaataccagtatcc

SEQ ID NO: 24006 - DNA, 350 bp, Homo sapiens
  source 1..350: mol_type = other DNA
tgataagagtctaaaaatacaagccacaaatataatttaaaattttatagtagccacattaaaaagaagcaggtgaaattcattttcataatttatttaactcaatatatataaaatattaccatttcaacaggtaactgatctaaaaattactgggatgttttacattcttacatagccacgtgtggcctgtggcctttgaagagtgcaggtctgtacagacatgcatgctcatctgacctgcatgctagagccacttgatgagtatctgatgaaggtttcctttgtgcagctgatccaggggatcactgatccaggggagcataatgaagaggagatcttaagagatg

SEQ ID NO: 24007 - DNA, 525 bp, Homo sapiens
  source 1..525: mol_type = other DNA
acacagcagatacgactgtgtttgcaaagttctgccttttggataaaggcttctctgagtttctgaggtcaggccaggtctttttaaaaattcgcaagccaggcgctccgcgtgtgggagtcacggatggccccagagcccgggacgttaaggccgagcgcccgcgcctccgcttctccacagccacctgacggccaggggcaggtgggggagcccagccttctccctgcccgggagacagcgcgggagggctgttgcccccgttctggggcgggggcgcgcgccactgtcacacttcaggcgtccgccacgccgccaggtgtgctcggccgacccggaagtagcggcacctctagtgcgctgcggagacgtcaccctgccgcggcacaggggcgggagcgcctgtggctctgcgcacttgcgtcatcacgtaggctggcggggtcccgtgactttcggagttagcgcagcgcgaacgctgggtgcggcgcctttaagcgtcgcggtgacacgtgtgtgaggcgc

SEQ ID NO: 24008 - DNA, 369 bp, Homo sapiens
  source 1..369: mol_type = other DNA
tggccaggctggtctggaatcgctctgtcgcccaggctggagtgcagtggcgacatctcagctcgctgcaacccaagggattctcgtgcctcagcctcctgagtagctgggattaaccacaccccctcaggtgatccgcccaccttggcctccaagtgttgggattacaagggtgagccagcatcagactaatatggttatcttgtttgcttttttcaaaaaacaccagcgcccaggtaataaatacaaggtgaattttgttccaagtacatcacacagcagatacgactgtgtttgcaaagttctgccttttggataaaggcttctctgagtttctgaggtcaggccaggtctttttaaaaattcgca

SEQ ID NO: 24009 - DNA, 626 bp, Homo sapiens
  source 1..626: mol_type = other DNA
cactctggaatgctgacctgagggctggagtgctgacctgagtgcagcagtgtccatggagccccacggggcacacaccaaatgtacagggtgggtgcccacagccgggcacaggcaggttgaacacaaaactgttttgggaaaagtccttcggctcccacatttgtgagccaatgcctcgtggcgcctgggccggtcaaaaatatggccagtttatataaaatcctgttttgttcaaaaattctaaggcctccatttgaaaaagggatcctgtcagtttctcgggaggtggcgacagggaacggcccctgctccaaaggacaccccttggctcgccccgaggctgggctcgaagggaccccggggtggcgggggacggagcagcgtagccctcgtcctggaagaacggggcgcgagtcccccgcgctgagtcagggaccccgggcgcagaaggccacgcagcggggaccggggtcggggggctgggggcgtccggggacccccgcgcgggtgcgggtcgcgggcgccaggtggtgcgggaagcccccgacgtgccaggccgggcacaacaaaagagggggctgctgggagcgcccagagcctgcattggccgccagccaccggga

SEQ ID NO: 24010 - DNA, 624 bp, Homo sapiens
  source 1..624: mol_type = other DNA
agctcaggccggaggatgcctgcttccctctgctctgccggccccagcagcctgggcccacatcctctcagtcagaagctggctctcaccggctggctgggctcacagccccaccctgaaaccagcagtgtggcccggggcccccgcagggctcagacagccaggccttgggtggttgaaggccaagagctgggggccctctgggaaccctccccgccattatgtcacccagagaggctctgtcccccgccccgctgagggggagacagtctggggtcaggtgttggagcagggtccagctcctccactggccagcttctcagtgcctccctcccctggggacaggggacagtgccatgcaaccttgtggggcacaggccctctgtgtggtcagcatgcagagcacagagagggtggatttgcacataagcagccccctgtgtggtgttcaccgagcgctctgtcagagtccacagccacaccaccaggtgcagactgtctgggcccagagcctgttagtcctcttgcaggccttgctccagccagactcccaccttgggcctctgccagcctggcactgatagccacaggtcccggaagacatcggtttcaagcatttcctgg

SEQ ID NO: 24011 - DNA, 381 bp, Homo sapiens
  source 1..381: mol_type = other DNA
aaggtaatttaacatttatataatttgaattgggcagggggctggtgcacccttctgccaagctctcctgccagaggctccacggccaccaggcctttctcagaactttgggatggaggtcaactgcagattttttgcagggacggttttccgcctccagggtcgggaggcccatgtaagggggccctcgctcggagtgggcccacgttccagcgcaacgcggtggaagacggccctcatgtgccagtgcggaccctcgcgcccctccagcctgcagccagccggccgctcctccagcgcgcaggcgcaggcagcagccctcgcgccgtccgcgcgcagccgcagagcagaggctgccgggaacgcgggcccagaggcggg

SEQ ID NO: 24012 - DNA, 527 bp, Homo sapiens
  source 1..527: mol_type = other DNA
ctgttatcatcagagcatggtaagggatggagactgggtcccaaccagggccggctctggagcagcctggatcagggatcagaaaaaatatttgtgtatgactgagaaaatgtcaggttttcatatagaaaatggaaatcttcccgttagatcacagagctctcaagactctgaaggtgatgcgcgcgcgcgcacacacacacagtttggcattttgttatagggggttcagattcccccctgtttggagacctgacccctcagggttggccacagcggatcccggaggccttggggctcatccctctgctaccaagtgactaggagcgctcagccttgctgggcacccccatcctgcggggggcattctcgtccggggctcgcagcccctccgcctctggacggacctccagactcacccccactctcagcctggcgggctccccagggggccgggaggaggcggccgctggatttccctgaggcgcggcgcggggcacacacggttaatcctccgcggctgctgt

SEQ ID NO: 24013 - DNA, 342 bp, Homo sapiens
  source 1..342: mol_type = other DNA
cctcttcctacccgctttgggaggccaaggctggaggattgatcctgtctctaaaaaaaaaaaatttttttttttaattagctggattgtagttccagctacccggcagtgagccatgactgtaccactgcactccagcctgggtgacaggagaccctgtctcctaaataaataaataaataaatgtaggccccaggctggggataaagccctgtcttatgccaggcttcctcaggagctgcctggaaaatgctggggcttgtccaggccccagacaaccaaatacgtgggcaccaggcccggtcggtccccgagggcgtccccgctgcctagggaagtggg

SEQ ID NO: 24014 - DNA, 412 bp, Homo sapiens
  source 1..412: mol_type = other DNA
aggccaaggctggaggattgatcctgtctctaaaaaaaaaaaatttttttttttaattagctggattgtagttccagctacccggcagtgagccatgactgtaccactgcactccagcctgggtgacaggagaccctgtctcctaaataaataaataaataaatgtaggccccaggctggggataaagccctgtcttatgccaggcttcctcaggagctgcctggaaaatgctggggcttgtccaggccccagacaaccaaatacgtgggcaccaggcccggtcggtccccgagggcgtccccgctgcctagggaagtgggcggcgggccaggccacctgcagaggggcaagcctgccgcccgaggccttccagctgggaggtgagctgaggacagctgctctactcaagga

SEQ ID NO: 24015 - DNA, 410 bp, Homo sapiens
  source 1..410: mol_type = other DNA
gcagtgccactcttgcagaggtgccactccaggccctgcacgcttagtttcactggaaaactatgcatcctacatagtcgagtgcaatggcacccagccggttccagcgattctccagtctcagcctctcaggtagctgggattctgacttcaggtgacgcccggtctgaaaattatcttgagattgcttaatctctctgggataaacctcggtttgcttgacaaagaagccttctagagccttcgggctcggaactcgcccaggccccccgcccccggcctgtcaacaaagtccccgccgcgcggccgctggccgggagtcagctcggagtcccgtcccagcgcggcgtcagcgctgcgcacttcccattggccgagcgcggcgcgggggcgggcccgggcctgcgatt

SEQ ID NO: 24016 - DNA, 531 bp, Homo sapiens
  source 1..531: mol_type = other DNA
gggagaaccgcacactgaatccaggggttcctctcaagggagtcccctggagccatccggttcccggtctgctcacaggcacccagcctggggttccccccggacaaggccatgctgtgacccaggcttggtcctggccctgaccatgggaagcccaccccacaggccctcacccaggcaggcctgaggcccatgcaccactaaaggcctggagagggggtcccaccccagcctcacctgggtcccctggggtcagggtgagctgggacagagggaggagagggcacgactttcccagtggaatgggctccgctgtgctctgagccctgggtcactgtccccactctggggagggaggggagctggcaggcagatgctcaagttgatgccaccccacgcacgtgaggctgggaccaggggtggcactgacacggctggggagcccactcccgaggttcgacccggggatgtgcacagccacattccaaaggcgcacgggatgagatcagcccgggtgaccctgggacttcc

SEQ ID NO: 24017 - DNA, 688 bp, Homo sapiens
  source 1..688: mol_type = other DNA
aaggggtcacccccactttcataacatgggacccttttctcggacgccggctgcccagccctggcgggccactactgacctagtccgaagttaggaaggggaaaaattcagaaaaggtgcagctggttaataagaactccgggcagttcgtattacttctttctcaagttaaagcattttggggaaaaagcctcggctgctggggtttgtgttgctctcgtccaaaacagagcgactcccccgctgccgaggcgggggaagggtggggccccgcgtgccccggagcagcgcccctcgaaggcgggggcaggaagcagccgccgcgccccgtcccgcttccctcccttcgggccagaacaatggctttttgcccggaaaacggaagggcgggcgcgccccgggaatcacgcgggactcggtgggcgccccaggcccgaagtccctaggcacctcctcccccagccaggggcccgcccgcgcccccacccccgcccccgcccccgcccggggccccgcgcgggaccccccgccggagcgcgaggcccagcccgccgcggacaatgcgcgccccgccccgccccgcacccgccccccctcgttggcccgcacgggatttgggcagcgcgcgggggcgggcggcgggccggggcgcgggcgcggagcggcggtgcgcgtgcgcggggcgggc

SEQ ID NO: 24018 - DNA, 568 bp, Homo sapiens
  source 1..568: mol_type = other DNA
agccgcgcgacatcctctgtggggtcctgggctgcagccgggctccggagggaacagcccggcctccaccaggtctgtgttcggcttcggagccggggacgagcgctccagccagcccggctcgcagggcccggagggtggccgagggcagggccgcgcgacaggagcctggaagccagccgatgggcgcgccgcaggctctcggggttcgggcgcggcccgcggcgccccagcacctgtgcattgtgcattgtgcggcgcgggcggggcgggccggggtctgccgaggggcggagccgggctgacatcgccgcggggatcccagcgagagctgtggggcgggggaggggggccccggcgaggacagagggcggcctgcccccctcgccagccccgcagactgacagcggccgggcccgccttcccctggcgtcacttccggcggcgccccctcccactcgcgcgctcggtctctggagtcgcctcggactccgccccctgggcgtggctcggagctcgtccaatcagcgtgcgggggcgcaggcctccggccgctcggctttagcaa

SEQ ID NO: 24019 - DNA, 529 bp, Homo sapiens
  source 1..529: mol_type = other DNA
tcccgggaccccacgaagtcccctcaggcccccaggcggaccctggcctcgatttggagccctttctgccgaggttcttgggcgccagggccccgggattggctgctcccgcgctccaaaatgcccggagcctggaggcgaggcggggcccgcagtggggcgcgagctgcccctgccccattccgccccctgccggcggggcccgcgcgtcccggggcgctggtgacgcaacggtgcaactgggagcggcggcggatgcttccgtggcccccagcaggggtcccggggccgtgaacactgagaacgtgccgcgagggggaggcccgggcaccgggatgtgggcgaggggtcgccgccgagacccttccgggctgtcaagctctccgcccgcctccgccccggcgctccccccgccgcccaggcccggggcctccggtaggcccggctgcgccaatccgcgccgcggcccgccccctgacgccgagctgggcccggcgaggccccgcccgctgacgtccgggatttcttg

SEQ ID NO: 24020 - DNA, 426 bp, Homo sapiens
  source 1..426: mol_type = other DNA
aggtctccagagaggagctccagggccccccagagcagccaactccactgggactcactgtttccaaataaaacccccgtgtttcctgcaccagcggccagctggtcgttgccagcttccaccacggcggcctggacaagctgtctgacgtgttccagctccctcctgggtcctgtgtctggggtccccgggccccgggggcttacggggtgtgaccccccagggcttaaaatcatgttttgacaagacttccttattttaatctacgtacaaatgtaataagagctctttaattatctgtttaaggtactgtatgtgcttattagaaatggggccgattttaaaattcccttcaacctttgatttttgaattaaatgtcagctcgcggaggcaatctgacaggctggctccctgctcgcagaaat

SEQ ID NO: 24021 - DNA, 660 bp, Homo sapiens
  source 1..660: mol_type = other DNA
cgggggccacctgagcgcggcctggcgactccaagacccgctgcccctcggcccggcttaccggcccgccgcgccgcccggttccgccagacgctgtcaacatccggccgggccgggaccacgcgcgctgcgagggcgggggccgccgggggcggcgcggcctttgtgccatctccacgcacgcagaggcgcgcgccgtctcgacgtgtcgttaatgattagagcacgaccaggctgcggcggcgtcacgtgcccagcgggcggctcgaggtcccgaagggacctgccgggcacctggggaccccggactgctaagcgcccgggaatggcaggcgggctgggggcaccgggggccggggaccccgcgcatggcgagcggtgcccttctccaggggtcctacggagactccttgcatggacgcccggggggtcttccggagcggagggccagcgcgcacgcggagcgtccgaggagccctgcctttcctttggggacgccaggctcgggacggggcacagtccccgaggccgggacgcggcgaggcctgagggagggccagcggcttgggcccagggctgggccagagaccggcgggggcaggcaggggccgggccgggggcgggcccgggggcgggccgggggccgggcctccccgcgcg

SEQ ID NO: 24022 - DNA, 580 bp, Homo sapiens
  source 1..580: mol_type = other DNA
gcaggctcagcatgtattttatttataacagctgcttgctaatcccagcactttgggaggccaaggcaggcggatcacctgaggccccgcagaaaattagccgggcgtggtggcgcgcgcctgaggtcccagctactccagaggctgaggcggaggccagcctgggcgacggagcgagaccctgtctccaacccaggcgcgtcccctaagagggacgccggcttcaggggccctggccctccccagcgcagacccgccggagcccagcgccgcgccggggcccaccaccggcggccgtgagggtttccactcgaatctccccggcgagctgggcgcctccactacgggtctgcgacgcagtccacccactgcgggcccgagagaggctatctggggaccccgcccggagcggaggcccctcgcggccccagcctgttcatccctttcgtaaggaactgggtgccccgccctcaacgagatcccgcgggaactgcatatggcgccgtcccccagaggcgtggccgcgtcgcgcgtacgcacgtacgcacgtacgcacgcacgtctctcgctcggcagcggc

SEQ ID NO: 24023 - DNA, 692 bp, Homo sapiens
  source 1..692: mol_type = other DNA
tttttatctagtaagcctttctgagtcagccttacttattttaaaacattgtagaaatacagaaaccacaggctggagtgcagtggcgcggtctcggctcgctgcaagctggaaagggggcttttaatgcccctaactcacatgtaaaaatgtgctcctcttaatgtaagcattttctcattttatgaaaaaattccccaatgttttgattattcctttctggaataactgtgagttatggagcacacttaaggactttccaaatgttgcctcgggacgcgttggcaggaggaatccctgggcgcaaggcgcggctgggccagccccttacaaagccctacgagctgcggggacccaggccggggcagcgggggccacgccccatctccgaccccacggggaccgggccgggactgcgccagcgggggcctcgccccgtctctgaccccagaggaaccggcagcgggcagcacgcgtgggcctctccccgcgggacgccggacgcgcagccagacgcgctccccaggccccctccgagagcgaggacgcgcccaggcccgctctgccggagccgccactggggggcgtagcgcggacgcgcacccttgcctcgggcgcctgcgcgggaggccgcgtcacgtgacccaccgcggccccgccccgcgacgagctcccgccggtcacgtgacccg

SEQ ID NO: 24024 - DNA, 781 bp, Homo sapiens
  source 1..781: mol_type = other DNA
cggtcccgcggctgcaggcccacgcgccccacgcgccccgcgcgcccccgccccagctccgccgagggggcgctgctcgctgcgcggtggacccctcggaccccgcccccgcggccccgtccgggccccgatacccacccgggtcccgctgcgggggccggattcgcgccggctccgagagccgccaccgtcgcctccgccgctgccgccgccagtgaggcgcggcggggcggggacgcgcggggaggcccggcccccggcccgcccccgggcccgcccccggcccggcccctgcctgcccccgccggtctctggcccagccctgggcccaagccgctggccctccctcaggcctcgccgcgtcccggcctcggggactgtgccccgtcccgagcctggcgtccccaaaggaaaggcagggctcctcggacgctccgcgtgcgcgctggccctccgctccggaagaccccccgggcgtccatgcaaggagtctccgtaggacccctggagaagggcaccgctcgccatgcgcggggtccccggcccccggtgcccccagcccgcctgccattcccgggcgcttagcagtccggggtccccaggtgcccggcaggtcccttcgggacctcgagccgcccgctgggcacgtgacgccgccgcagcctggtcgtgctctaatcattaacgacacgtcgagacggcgcgcgcctctgcgtgcgtggagatggcacaaaggccgcgccgcccccggcggcccccgccctcgcagcgcgcgtggtcc

SEQ ID NO: 24025 - DNA, 261 bp, Homo sapiens
  source 1..261: mol_type = other DNA
agaccagtgatggtgaaaccttgtcttggcatgcacctgtgatcccagatactcagactctgtctcaaaaaaaaaaaatttttttttagcagattttagcagctagggcccaccctaatgacctcaacttgattacgttggcgcagagctgccctttccttccgggcaaggagactcagcagaagggtatggcctggccctgtggggagccgcagacaggcctgtaggcttccaagtgctaaggaagcttctcgagttatt

SEQ ID NO: 24026 - DNA, 693 bp, Homo sapiens
  source 1..693: mol_type = other DNA
ataagaaactgataagcgattcctcattgagaagtctgaagactaattaggctctctccccagggaatttaacggggagctgggcccgcgggcgcaccgtaggctggcggggggtgcgggtggcagccaggagatccagcggggctccgaggggcgggctccacccgctacggtggactgcggcgctcgagggagagtgggggggtcctccgctcctgaggccacgcctcgctcaggcgccaggtgcgcagcatcttccagggccccggcgcccgcgcgcagagccgccacggcccccggccccgcccacaaggccgctggctccggatcctggggtctccggaggagaccctgcgccacctgaccgtccgcggtcccttggccccgagcaaggccgagggccgcggggacccgggtagggacgcggcgggggagtggtccccacgggaggcccccgcacttcaggactccgcgctggcccccgcgtcggctgcccccggcgaccccggccactgtccgctccccctgcccctggtccccgctcgccgccctcgcgggccacggactctcggcgatgcagcttggggtctcctggcgtcgccgcagctgggtccgcaggaatcgccggggacaggccggggcggggtctggcgcgcacgtgaccggggtcggggcagggggcggccagagagc

SEQ ID NO: 24027 - DNA, 485 bp, Homo sapiens
  source 1..485: mol_type = other DNA
taggaattctgatccgcaggtgagggtccatgcagattctctttgggtttggccttgtcacttgtcatgaaatgagagccaggagggcaccctgtctgcagtctctggggaccggagcaccagcccctcctctgggatcccctcccaagagggatttgagatccgtggacccctgagccctggctgggcagggtcagactccagcctttgctgccctctctggggagacacccgtgaagaccacgggtggggaggaggccagtggccacttccccgggccaccgcaggtgggcgtgggggggcggcgccggcactcaccgaggagcagcagtgcgttccggggacgcgcccggcagagccccaggactagcagcagcgcgcagcaggcgggcacggggcagctcatggcggcggcggctcggactcgggatcgggatccggctccggctctctggccgccccctgccccgaccccggtcacgtgc

SEQ ID NO: 24028 - DNA, 566 bp, Homo sapiens
  source 1..566: mol_type = other DNA
tccttggggcccagggagggtcagacgcctcacctggggcgggagtccagccacttcagcataggccctggcatcttcagccactgcagggagtagctgggcagccacgccaggatgggcagcctcctctgcagggccgcaggggagcagcagcaggcgctcggggccatcccggggccagaggacctggcctgacccagcgccgtcaccgaagaaggcatctctacggtggggctgaacccggcaacactggtcagggtccggtcactatgggtctcccctccccaggggggcgaacggctactgggccaagactggaaggcccaccccgataagaaactgataagcgattcctcattgagaagtctgaagactaattaggctctctccccagggaatttaacggggagctgggcccgcgggcgcaccgtaggctggcggggggtgcgggtggcagccaggagatccagcggggctccgaggggcgggctccacccgctacggtggactgcggcgctcgagggagagtgggggggtcctccgctcctgaggccacgcctcgctca

SEQ ID NO: 24029 - DNA, 505 bp, Homo sapiens
  source 1..505: mol_type = other DNA
gccatctcaaaattgaccacagaatctgttttggggtggcatagattagtctcccacacacgtccctcgttcaggcccagcctgagtgagcccaccccagtgggaggagacagggagggggcctgagtgtcctcctggctgctgaaggcaccagtcagctgccgctccagccagatgcaagaagtgaccccggaggcctgagtcctggccttggtctggtttgatgccatccaccgcagaggctgttatggcagcctccccccattactaggaatctgactgccagcccagtagccctgggctgcctgctcaggccccatcacctgtggggcaggtgctttagtccatgaggagggtgaggcatcagcaggctgagcgccttgctcagggcaggccgtgggaccctgccgaacagcacgtggctgccccacgcctgccaacccatgttctcagcagcagggatggtgatttcactttcgcagaaaatgaaactgatatagcaggc

SEQ ID NO: 24030 - DNA, 829 bp, Homo sapiens
  source 1..829: mol_type = other DNA
caagcaggagcattcagctggggttccgcgcggtcccctctggaatgcgcagaggtccctggtcacaccatgagcctcactgaggcacgggggatggtgcggaccgccgtggcccctccatcatcagtgacagagcgctccgcgcggggccgcggaggtcccttaatctgcaaaggcccccacgcggcgcgctgacgacgtccactgcacccgccgggcgccctctgggccgctcccaggctggccgccggctctgcgcggccgcagacactgtccgaggtgctgggcgccggggcggggggcgcgcctgtcccgccccactcggctgctcgggcctgcccggggtctgggcttccgggagacccgcatgcgccccacgcctggcgggaaccgaggcccctcccgcgtctgtacccggcgcgcagcggcccgaggcgcctcccgggggctgggggcccggagtcactgggaggcgccaccggcggggaattccgcacacgcctgcgcggggccggcggcggcggcgggcagggcggggccggcggcggcggcggcgggcagggcggggccggcggcggcggcggcgggcagggcggggccggcggcggcggcggcgggcagggcggggccggcggcggcggcggcgggcagggcggggccggcggcggcggcggcgggcagggcggggccggcggcggcggcggcgggcagggcggggccggcggcggcggcggcgggcagggcggggccggcggcggcggcggcgggcagggcggggccggcggcggcggcggcgggcagggcggggccggcggcggcggcggcgggc

SEQ ID NO: 24031 - DNA, 458 bp, Homo sapiens
  source 1..458: mol_type = other DNA
tctcatttcaaattttatgtacgaaatatttttatagagcctgtgtgtgctttctaatgttcaaaaccaggccaggcacggtggctcacgcgtgtaatcccacactttgggaggccatttttaaaaccagctgggtaatcccaggaccaaaaccagcttgggcaacatggtgaaacgtttacctatacttgagcccaggaggtcaaggctacagtgagctgggtttgcaccctgcactccatcctgaatccatctcagtggatgtccaataagcagtgagcccgtgtgagggtctcagcccggccgtgaccgtgccgagtgtggcgagcgcttcaaggcccaggaaaaatctaagaaataaagtgagtgtctctctttctgtttagagcaaaaagaagaaaaggaaggggaacaagtccgcttcctcagagctggcttcggcctcaggacacagccct

SEQ ID NO: 24032 - DNA, 533 bp, Homo sapiens
  source 1..533: mol_type = other DNA
acgagactttgtgaagctttctgcccagcaaggtcacacctgccctcaaaagcttgagggcacccctgagctgccatcgaggtgggggcgtaacgacaggcgctcagtaagtgctcctgaggcaactgccggtgtcctggacctggtgaatcctttcggggttcagcaaaggcgccaaggagtgggacctgcagtgctggaccacccttttccaagcgcagaagtgccgtgcccgccggctctcaacagggcaagaggcccctctcgccgtgcagagcgcagcgcttgcggcggggacagcagaggcgggacgggcgtcacggagttcccgggtcctcgcgcggtcggcggacggcctcccgggatccgagccgatatcgcgcgcggcgccgcggggcaacctgaagccgtgtgcgtgcgtgtgcgttcacgcaggggctcacccagcggccacgggcttctgaagacccgggtgggaagtgcctccatggcaacgagggcggacggcgtcagagcgagtcgcttccggaagt

SEQ ID NO: 24033 - DNA, 681 bp, Homo sapiens
  source 1..681: mol_type = other DNA
gctttctgcccagcaaggtcacacctgccctcaaaagcttgagggcacccctgagctgccatcgaggtgggggcgtaacgacaggcgctcagtaagtgctcctgaggcaactgccggtgtcctggacctggtgaatcctttcggggttcagcaaaggcgccaaggagtgggacctgcagtgctggaccacccttttccaagcgcagaagtgccgtgcccgccggctctcaacagggcaagaggcccctctcgccgtgcagagcgcagcgcttgcggcggggacagcagaggcgggacgggcgtcacggagttcccgggtcctcgcgcggtcggcggacggcctcccgggatccgagccgatatcgcgcgcggcgccgcggggcaacctgaagccgtgtgcgtgcgtgtgcgttcacgcaggggctcacccagcggccacgggcttctgaagacccgggtgggaagtgcctccatggcaacgagggcggacggcgtcagagcgagtcgcttccggaagtgacgccgggacgaagccatggccctggaggcggcgggagggccgccggaggaaacgctcaggaggcgggggccgaggccgggcggcccttcgcggaccctccgagctcatagtcttcaggctgtggaatcggagctgccaccgcccgagtttccggcgcggaa

SEQ ID NO: 24034 - DNA, 813 bp, Homo sapiens
  source 1..813: mol_type = other DNA
tccacgcacaggtggacacccggggataccgggcgcgcgcggcgcctggcaaggggaagctgctggagacgcgggcggctgctcccgcggggcccccttccgaagcgccgctgcgaacgtccagccccggcgacgccgcctgcccgcgatcgggccggcgccgcggacaggaagtccccagcgccccgcccgcacggggtggggactgacagtcccccggggacggggccgggtccacagagcccgggagctgggggaggggaggcgccgggggccccgacccgtgggaagtccctgtacccaggctgcccggcggcttctcaagaaacgcggggcggcccggtgacccccgctctggacttagtggcgccgcgaggccccactccgagccgttgaccaccgggcactcgggtgttgacgacctgggtccttgggcacccagcccggctccaaacgaccccggcccaagggtgttcagtgcagccaggagtggtttcccgcccgcctggagccccgtcggaggttcggggacaccacgcaggtggtccatcctcgagtccggggccggagcccgacttccttccccctgagctctcggagccttcggggcagcagcgccggcccaggcgggggcgggggaggagggggccgcggcagctcccagggcgggggggacgcgagcggaggcagccccggtggcgcgctcgtgagacccccgccgcgccgcgggcccgggccgcggacaattaaagcgggattcctcccccgctgacgtcggcggctcgaggcccctcccgcggcggcataaaaggc

SEQ ID NO: 24035 - DNA, 503 bp, Homo sapiens
  source 1..503: mol_type = other DNA
acatgtagttttagatgtctgcacgtgaagctatagaaacagattaaacaaaaaattgtattagatgaaattttttttcatcgaatttcagacccttcttcatctgaagagtcttgcggctggagtgcagtggcacgatcctggtcacaggcgtgagccacggcgcccggcctttcacttggttctctatgaaaaaattaaagagaaaatctgattgacactgtgctacactccaaaaaaaaaagtactatattttctaatattatcagtgctttttaatattttctaatattatcagtgaagcttttgccgctttttcaaaatctggaagaaacaaggcggttgattcctttaatttcaggagcatgtaacttcatttataatgacaatgtttttgaaaaaataaattaaaccgacagtttcatttgtaggattgactttaatactttctccttcgctgcatgctgggtggcggggagagagtcggccacgccgtaggccgc

SEQ ID NO: 24036 - DNA, 529 bp, Homo sapiens
  source 1..529: mol_type = other DNA
ctggtcacaggcgtgagccacggcgcccggcctttcacttggttctctatgaaaaaattaaagagaaaatctgattgacactgtgctacactccaaaaaaaaaagtactatattttctaatattatcagtgctttttaatattttctaatattatcagtgaagcttttgccgctttttcaaaatctggaagaaacaaggcggttgattcctttaatttcaggagcatgtaacttcatttataatgacaatgtttttgaaaaaataaattaaaccgacagtttcatttgtaggattgactttaatactttctccttcgctgcatgctgggtggcggggagagagtcggccacgccgtaggccgcggtgcattctgtcaggactcgttctcaggcaggagagagcctcggggctgaaggccaggaccagccaggccgcgcggacctgaggcagctcagacgagtgcgggacccgcagggctgagagtggctggaggagacccagggccctttgaacccgcccttggccgga

SEQ ID NO: 24037 - DNA, 445 bp, Homo sapiens
  source 1..445: mol_type = other DNA
cacacgtatataagcacatgcacatacagacatgtacacatacacatgcacatagacaacacatgcacacatgtacacgtatactcacctacatttacatacatgtatgcacacacatagacatatatgcatatagacatgcatagatgccaacacgcacatatacatacatgtccacacatataaacacatgcacatacacatacacatgcatgtgcgcacacatacatgcacatatagacacgcacatgtatacatgtgcatacacacatgcacacgcctatatacacatatatacatgcccacctatacatacataaacatacacatatacatgtgcacacagaaacatggacatatacacacatgcacacatacacacaggtacatgctcatacatgcacatctatctctcttatgactcagttcattagagaagtaagca

SEQ ID NO: 24038 - DNA, 447 bp, Homo sapiens
  source 1..447: mol_type = other DNA
agggaagaatgcttctgtgggggacgcccttggaaggagaagctgagcccagccatgctggtctcctcctggcactgatcagggagcatgcaaagcgggccgggtgcggcggctcacgcctgtcatcccagcagccagccgtgtggcagcaggcacctgtagtcccagctggatatcacatcattaatgcggcattttgagactgaattatgttaatctaaaaggatcccacctaattaggagataagaaatttttgccttcacctgcacaggaagggtgcacggaaacaggtccaaggaggccgcggtgttcgcggcggtcgccgagaccggcgggctgtggtttcgaacccgcggcaacggcgcgcggccggaggcggcgctcggccttcgcgttccgcggcgcctggcccggcgcggccgccgtagcgggaggacccgagctac

SEQ ID NO: 24039 - DNA, 560 bp, Homo sapiens
  source 1..560: mol_type = other DNA
gcaggagggtcctccccgtccctaagggtcgccctgtccccagggggggttcctgcagcacccctcccccagggttctcctctctgccccgaggggccggccggggggtcgccgcccgcccggcgggcttacctgcgaagcggcggggtcggggcctctcccacctgtaagcccggcccgcggcgtcctgcgtccgagccgctccccgccccgcagcgccaggccgcgacccggcgggccgcccgccccgaagtgccacttcgcgaagtgccgcctccacgcgcgctgccgccggcgccccccgctcccagcccggctgttgcccgggccccctcaggctgctcccagggccccagcccgcgccgcgacgccgccgcagaccaatcgctgcctggagtcggccactaggccctcccccttctccggaacccaccaatggaaagggcggtgcgggggcggggcctggcggttgcctagcagcggcagcgccgggcgggggcgggtggtcgaggggcggggactgccgcggggcggggcctgaggcggctataaaggtggcc

SEQ ID NO: 24040 - DNA, 667 bp, Homo sapiens
  source 1..667: mol_type = other DNA
ggcgcggaggactgcagccacccactcagagcgtgaggccctcggaccttcccggatggctgtgggggtccctgagccctgtgctgaccctgctgggagctgccagggaccatccgagggggtactgcccttgggtccaggggcaggtgtgtgcctggcccccgaagattctcagagccacctctgggggcaatggccccacccgctggggaccgcagagaaggacggctgcctgctgcctccggcagtgcccagggcctctgaactgtctcagcaggtcaggacccccacacttgctcagggacagtgtgggcctgggcgccccagggtgagagagggccgcccagacaggctgggctcaggacacagcacccggtgggccgtctccaggccctggaaggagccccctccccctgggctctcctggcagccaggctcagacccaggcctgtcagccctcgcgtgggcaggcatgagtgggctctgccagcgctggccccttcgtcccgggcctgacctcacccggcctggccctcggggagaatgggccagtgtgctccgtgcggggccgtgccaagcagcccccaacaaaggagccgcccggcgtgggatgccagcctgcggcagggtgggggtgggccgctccagtgccctctctgtgccgtgg

SEQ ID NO: 24041 - DNA, 592 bp, Homo sapiens
  source 1..592: mol_type = other DNA
acatggtgcccggaacattccagcaccagtgtgcccctgggaagtcctgcctccacaccgctgggctccctgtgagggaaggggctgggcaggcccccaatgctgaccctgtgctacgcacgctgtatcggcaggacccggctggcccccgggcagcaggtaatgcctggagcccgggcccgaccccagggagagacagcatctgtgtcctgggcccctctacaaagcccagatgggtggggccaggccggggcggcccaagggtggtcttctgggtcccggggaggggaagttgcccacgcagcacctgcgtcccccatccgggcaggctgggcctggcctgcgggaataccgacagagccacctgcccctctctttgcagcccagggaagggaggcgtccccagggtcacacgtcgtacttgaggagcccaggcctccccggactcaccagcccgggtgctggccagcatccagctcctcagcttccccaccagggcactgggggttgggggtatcccctatacaggtgcagcctctacatagcagcctggcagggagtggcccagccctaggctgcacggggccaggct

SEQ ID NO: 24042 - DNA, 569 bp, Homo sapiens
  source 1..569: mol_type = other DNA
aacggacacaattattcagggcctctcatggccaaggacaaggctgggccccgaggcagggtatgggccgagggtcctctctgttctgggggcagaaaggaccaagcaccgtgaagcctcctccaccccctgcccttgggccggggagacattactggctgttgggccaccccacagggacttccgagccccaggggtcactacaggtcctccagggagcaaagatctgccccggggacccccgtgcctccctgccaggctgcgtgcactgggccctgctccagggaaggagggctttgtttgggctggctcagcctggtgccagagccccagtgacgtgtgggtgggacttggccctggggccatggatggggagaagcagaggttttagaaagcccactgcttcctggtgacagatggggcttccagctgtccccagtgaccacagccaggaggccaggcagccatggtctcgccctgcccggtgcactggccatacggggtaagaggcctggcctcaggtcccctgcagcctcgggcccccactgtcaggggatctggggctctgt

SEQ ID NO: 24043 - DNA, 542 bp, Homo sapiens
  source 1..542: mol_type = other DNA
gtcactgtccgaggtgggccctcccctcccatgagccggccaggtgtggggtgggtgcttcaggcattcatccgtcacggcctccgctgcggcttctgccgtgacccggggggcaggtgggctccacacaggagcctggcccagcccccagcatctaggcagttgcctgaaacgaggggcacgtgggccctgccacgggaagctcggacccttgggtgatgtgcagggctccccgaggcctggtcctctcgctctggacacctgccagggtgcctgggagccgagtgtcaggagccctgagccccacaggctgggagaggcgccgtggccctgtgggggtctcttccccacctcgtgggcgtcaagactcagcttggatccaaggaggccctgggtgggcggggtcccctctgggcctgagacaggctggtcttgtgccagggttggacttcccgggcccaccctagctggacgtggccctagctggtgccccgcccccaggtctggagcccgagatccagaatgcggaggctcaagagcct

SEQ ID NO: 24044 - DNA, 402 bp, Homo sapiens
  source 1..402: mol_type = other DNA
gcgacatcccttttagcagaaaaaatgtggattttactgaaaccaaactttttattttacagagcactggactttttaaaaagcgggatggcttccctggagaggacctgggcggaatccccagggctcccggagagagcctaggacactgggggagccccgggccgcgggagtgcggcggcctgggggtgtcggggagccgagccgaggccgcgtgctcctcgcgccctccctggtgtgcgaaccgctggggccccgcccctgcccggccagccgcgtccaatcggccgcttgaacttcccgaaggacagccgagcggcccaatgagctcccgggacggcctgagcggggaagggccaatccggagtcggcgcgcgcaggaaaggcgggccggcgtgacgg

SEQ ID NO: 24045 - DNA, 585 bp, Homo sapiens
  source 1..585: mol_type = other DNA
tgctgggcactttccgggagtcctgtgttgggtcaatcctggcatgacaccccccggcggcagtgctaacacgaaagcttacgcgttttacaaggcgctcggccgaggtttcgcgggctcgtcgatggctcggtgattttgtcagccggcgtctaaagcacgcggggcccgctgtgggaaggggggaaggggcccgcgcccacctaccgcagcggcgaagcagctccgcagggcctcgaactcccgcgcgcagaagtccttactcaggcggccgcccggggccgtggaggcctgcacgcacctgccgtacgccgcggcctgcggaaaggacgggcgtgggtcgtggggtcccctgaccccgtcaccgtcccgcgcggctcctcctgccccgcagcactggcccgcccgcggctcctcacctcggccccgcaggcggccagccgctcggggaaggcgcggaggcggcttcgcacgcggccccacaccgctccgttagccgacatgagcggtggcccaacctcagggcccgccctaccgtgagggattggccggcggacccagacccgcgcagtgattggagggccc

SEQ ID NO: 24046 - DNA, 431 bp, Homo sapiens
  source 1..431: mol_type = other DNA
agcctgcactgccagtgcctgaggaacgggcctctgttctaagacacctggtcctgcaggtgctgcagacaacttgctgcttagcagctaggtgggaatccacagatctatcgtgtgaaaaggtgaagttcaacattgccactgggcgcagttcggcagggcaccgcctccccttggagctgtgtggccttagcggagtggccgggctgaggcagtcagggcccccgcccccgtgccctggcgccaagcactccaaaccgaggcctcgcggggcgagtcccttgtcctccagctcgttgaactggggccccgggcacaggtcggctggaccagcttggcgaaccggacagctgcgagaccctcaggtgcccaccggcccagtttccgcccgcccctccgggccccctggccgtcacttccgggcaacggag

SEQ ID NO: 24047 - DNA, 614 bp, Homo sapiens
  source 1..614: mol_type = other DNA
cccaaggtcgcgccctgggaccacccagccccctctgaggtcgggcggacgacacctgggaactcgccccaggggtgcctctccaggaccggagtcctctgaaacgccaccgtcagggaggacggcgggctgccagcccacctgggcgccagcagcacggacacagcggggtccgccgctccttccctcccgtcggaggccactgaatgctggccgaggcctctggctgtgcccatcgcccttgcgctcggcgggtccggcttggaaggcccggcttggaaggccccgggacggcgcggcgggcgggcagctcaggggcgtcggcgcgggcgaaggggccaggagcagctacccggcgcggagacgcaatggctccggcccggggcgagtccggggaatgcggcgctcgagaggagccgtgggaccggggcccgggcggaccgccctcactcacccggtggctcaggcggtcccgtagcggcggcgcggcagccatgatccaggtcccctcccggtctgccccgcttccgccaggcccgggccctccaatcactgcgcgggtctgggtccgccggccaatccctcacggtagggcgggccctgaggttgggcca

SEQ ID NO: 24048 - DNA, 723 bp, Homo sapiens
  source 1..723: mol_type = other DNA
ccctgatcgctgctcttaactagcatcgtgaagagggtatccccccgaccgcccgaagctggggagccgaccttcaggcttctcagcacataagggggcggggtagccccaacccggagcgcgcgcctggggacaatcaggcccggagatccggggcagggcgccccgtggagggacctgcatggtggtggccggggcgaggtgagggctcctgagagctcccccgcgcccagggacgcagagcgtcgcggacccccgccgcgccccttcctcagcccggcactggcgcccgagatcctcgtggagcccgagggcgtcccagggagcaaagccccgcagcgtggccggggactcggggacccaccccagctccggcgcggccccgccccgggtcaggcagtttcggggcgcagcagggccctccccacggcgcggcagtcccggggaggggccaggcccgtcagcccttcggccctcccggcgaccctcggagggcgccccaactcagacccgcccgccggcccgcgcagggtcgcgagcgcgcgggggtggcgcgggcggggccggtgcgggctgggggcggggcgggccggggccccacgtgtccctgcccggcgggccaatgggtgcccggctttcggaaagatcgccatatatggacatgttctggggccgcgcgcgccgccgggccgcgcgggcgcgccgcttccgcttaaataacgg

SEQ ID NO: 24049 - DNA, 651 bp, Homo sapiens
  source 1..651: mol_type = other DNA
gggccctgctgcgccccgaaactgcctgacccggggcggggccgcgccggagctggggtgggtccccgagtccccggccacgctgcggggctttgctccctgggacgccctcgggctccacgaggatctcgggcgccagtgccgggctgaggaaggggcgcggcgggggtccgcgacgctctgcgtccctgggcgcgggggagctctcaggagccctcacctcgccccggccaccaccatgcaggtccctccacggggcgccctgccccggatctccgggcctgattgtccccaggcgcgcgctccgggttggggctaccccgcccccttatgtgctgagaagcctgaaggtcggctccccagcttcgggcggtcggggggataccctcttcacgatgctagttaagagcagcgatcagggctggcgtgggtagccacaggcttgtccagggcgctcactcctcgccaggagcggcgccggtgctttggcccgagaggcgcccggctgcgctgctgccgcgcagtgaggggacggactcacaggctggggggcggggccggggtccccacgcggagtccggggccctgcaacgttagctcgcgaccccgtgtttgggacgagtcagggcaaggcggccggcccagctcacc

SEQ ID NO: 24050 - DNA, 581 bp, Homo sapiens
  source 1..581: mol_type = other DNA
ggccccaagcccctgaggcaggtgcaggagccaggcacggtgagcagggcccagtgcccctcaggctctggggaaggggtactcccagattccaagggccaccgctgggagcatggggtggacatcgtcccaccagcctccaaagtgaagtgaggctggcttcactccagctcacagcaggggggcagcctcagggcccagcaacttgctcagagcgcacaggagtgcgctggggccgggccagcctggcccagggcctctgactctgccccctgcctgcagggctgcacggccactgtgttccaccctccagcgtgggtggcagtccaggccagaggcccttgctatgcttctggcagcaggaatcagagaagcagtaactgtggcggccaccgagggtacgggcggcgatcaggttgcggccgagccgtgagcgttccactggacggcttctacatccggaagggctgggccgggccgggccgggagcccacacctccagccccgtaggccctcaggccctcgggctctgggctctgtgcagctccccctctgctgcccgcgggccctctaagagctgc

SEQ ID NO: 24051 - DNA, 627 bp, Homo sapiens
  source 1..627: mol_type = other DNA
gccctggggcatggagcaggtgtccgtactgcaggcccctccacgggcgttctctggtcagtacttctctcctggaggaagtggagagccccacgtgttcagccacggagggagggacgcatccacctaagctggctcactccgctgggccctgaacgcgggggcggccggggcggctcgcagagcacagggccccctaggacgacaagagccggcgctgccccaccccgaccccggctggagtgcgctccggcaggacccagctgctctccgagagcccagagaatcgaggcgtttacgctgagcgcttgctccggggagacgccccgcccaagagcaacctctgctcggccaggacccgcttccccaccctggggaacccgtgcagcagccggggccatgaagccgccgagggctcccaccagcccggccgggtcaacctcgacctgcggcacggtgccgcggcccctaggaaggctcccctgctccccgtgggtaccagcgaccgccccagctcccggagtccctgcagcgcgtccggcccgcccccggcaccgccgaccgctttacggcggaggtcgcgccgcacagcgggctgccgtaaagcgctccgaggcggagccgccg

SEQ ID NO: 24052 - DNA, 298 bp, Homo sapiens
  source 1..298: mol_type = other DNA
tggaacattcatgttgggtcaaagctcggggtcacaggttgtccccctcatttgcagcagcttttcacaagaagcttgttgatagaaagattaattttttcacctttagacagtttaaaaaattcctgttctaacagtttcagagtcgccagcttccagaccccaagctcacagctgcacagttggcatttgggtagtgggggccagtgggcagcagcccccaggaggttctttttcttcactgttcaagccaacaggaaatgccaaaattctttctgagctgctccgccatgactca

SEQ ID NO: 24053 - DNA, 521 bp, Homo sapiens
  source 1..521: mol_type = other DNA
ctaatacaattactaacataatttaatcaattaatgtaatttaacatagtttaaaaaaactgtcacagtaattgtgatgttgtgaaatatgtatacatttatatccaactccaaaaatccttagaatctgtgaagtgcccagactggagtgcagtggcaccaactcagttcatcaagagattctccggcctcagactcccgagtagctgggattacaggtgcccgcccggtcaggctggtcttgaactcctgacctcaggtgatctgaggatccgtccaccttggcttcccaaaatgctgggattgtttaaactcgtttgtttttcttatgttaaatttaaaaaatacttaaaaaaaaaaacatgaatgaaattgtttctctacttacctgtgcatggagagaagttattataatacgctataataccccctcctccagttgcagggatggcgggggcgggtcagcggcgccgccctgcgcatgcgtcgagccgttggtggggccggaacctggtttcccg

SEQ ID NO: 24054 - DNA, 640 bp, Homo sapiens
  source 1..640: mol_type = other DNA
caaatttcaatttcaggtaaaaagtgaaatcaacatcatttacaacattccttttaaagaggaattgtcaagttgtccttccaagtaatctgtaacgtccccgtctgcagagctgctctccttagtgactcattggctctgagaggggcaggactggctgggagtcccgggcggtttctcttcgccctccctgcttagaaaggctcggcctttccctgcccagggcggggaaccggggtcgtaagtcccctggggagggagaaaggggccgagtcgcggcgccggcaggcccgcctcccccacaggccgaggccggcaaatctgctgcctcatcccggcgtccccgctcccgcccggccgccgcactcacgatgctctcggccatggcggctgctcctgcctccgggctcgagccccgggccgccgccgcctgccgccccaagggcctcgcagacccggccgcggcctcagccccggccccggcctccctacgccgccgccaccgccgctccagcttcgcccgcccggctccgccagccgccgacgtcccggtgcctcgcgctcccctcgggcgcgaggccgggaaaccaggttccggccccaccaacggctcgacgcatgcgcagggcggcgccgctga

SEQ ID NO: 24055 - DNA, 204 bp, Homo sapiens
  source 1..204: mol_type = other DNA
ttaaaacttttttaggggtggatcacaaggtcagcagcctgacacagagcaaggacctcccggcagctcagaggcaggctcctctgctgggcctggcaggcccattcccagcaggagccatagccgggcatggtggcagacgccggtaatcccagctgctgtgcagtgagactgggagtcacgcttccctggggtggggaacgc

SEQ ID NO: 24056 - DNA, 427 bp, Homo sapiens
  source 1..427: mol_type = other DNA
aggaagatctgaagactcagagtggccttcaaggcctcaccctcacgcgcgcctgcaccacccagaccacctctttggactgctgagtgttggtggctgagtccgggcacagtggctccagcctgtaatcaatcacttgagtccggggttcaagaattgcgccattgcactccagaaccaatttaccagggtctgattccctggttgggagctgatggagcggctgctgaccctgcagagctgaagtccgcatggggggctgcagtgagagccacaaggctggcacccaaacatgcctgcctgagtcacacctgcgctgagcttaggggacccacagagccagggctggggagaaatatatctcctgattctgcatctgggtagggctcgcacctcccccattcccatgcccagggctgcactgttc

SEQ ID NO: 24057 - DNA, 254 bp, Homo sapiens
  source 1..254: mol_type = other DNA
tgtgggcatggcctcctccaggcccctcaggatgggcatagcctcctccaggcccctcaggtggtcagaggccagtcctcagctcccgctcatgtgaggtctgagcacctgctgaagacccacaggcccctaagggcgggggggggtcagcagacactgtggttgcttccatctggaagatgggcagctgcaggagcctggctgttcagggtcacacttctctttgtgccccccctcggggcccaacaatctca

SEQ ID NO: 24058 - DNA, 569 bp, Homo sapiens
  source 1..569: mol_type = other DNA
gtgcagtggcatgacctcagctcactgcaggttcctcagcttcctgagtagctgggattacaggccaccacacccggctgggggtcttattttcaccacactcggctgggggttgcataatgccgacctggacctgctctcctgttgaggccaaatcagcagccattctggttggcagacatactgcctgtgaaaccaccatagagaatttatttttttctcaggtgaagtcagtaactaattcttcgaaggaggctgcggctgcgtcctggactccgtcctgcggtagggagtccagcagggatggctcagcctccgcacctggtgtgcagccggatctccatcctgaggaaggccttgaggttctcatcagccacgtgctcctccagggcagccagggcccgctccccaccgtcctggaagtgctgcagcagcctgtccgcgtactccacccacacgcagttggggcagccactcatgcagcagtttgggcggcctggtgccgtccgcacctgcttgggagcccacctctacgtggtctgtccctccgggatggtgcctttgaagaa

SEQ ID NO: 24059 - DNA, 456 bp, Homo sapiens
  source 1..456: mol_type = other DNA
ggcagccactcatgcagcagttgggcggcctggtgccgtccgcacctgcttgggagcccacctctacgtggtctgtccctccgggatggtgcctttgaagaaagctgccacctccaggaagcctctggcagcagtccgggctggccccctgaggatgcagacaaacatgtgactctccaggaagctggtgaggcccggtctacccccagcagtgaggacatttcagctctcctgtcattgggagacatgttatttcacctctctagactctcatgggtatgacacggtgtgattcacaagaagtgccaggatcagggcctggcgccgggtggggggtgggggaggcactcgacacctccagctatggccagtccccagagcccaggagggctcgcacacaggcgctcgaaagtggccgttcaccgggctgcttcctctaagcggcccctccacaga

SEQ ID NO: 24060 - DNA, 475 bp, Homo sapiens
  source 1..475: mol_type = other DNA
ccgggcccgagatgggcggatcacgaggtcaggagatcgatcccagctactcgggagcagtgagccgagatcgcgccactgcactccacactccagcctgggcgacagagtgagactcctctggcttctgtgcgcgaggccgaaaggcactccgaaagcccaggaggcctttccgcctcgcgcctcggcggagcgtgggccgcgggcacaggcccgaccggaaggggtccgagcgaacgctccctagggggtcccgggcggagccttcaaggcgtccccttctctggggaagtgtggcggcctcgcggggcagcgcagtcacctgcgaagcccgggccacggggctgggcgctgcttccccagcggctgcacttgctgccgcccccgcgctcgccggggactcccaggacccgcctgcaccctggacaccgctgctccgcgaccagctcccgccatctccacgccgggaggctcc

SEQ ID NO: 24061 - DNA, 533 bp, Homo sapiens
  source 1..533: mol_type = other DNA
gatcacgaggtcaggagatcgtcccagctactcgggagcagtgagccgagatcgcgccactgcactccacactccagcctgggcgacagagtgagactcctctggcttctgtgcgcgaggccgaaaggcactccgaaagcccaggaggcctttccgcctcgcgcctcggcggagcgtgggccgcgggcacaggcccgaccggaaggggtccgagcgaacgctccctagggggtcccgggcggagccttcaaggcgtccccttctctggggaagtgtggcggcctcgcggggcagcgcagtcacctgcgaagcccgggccacggggctgggcgctgcttccccagcggctgcacttgctgccgcccccgcgctcgccggggactcccaggacccgcctgcaccctggacaccgctgctccgcgaccagctcccgccatctccacgccgggaggctcctgcgctcagcctcacgctggctggagcggcgcgacttcctgaaggtccgggattggccggagcgcccgccgctcacg

SEQ ID NO: 24062 - DNA, 525 bp, Homo sapiens
  source 1..525: mol_type = other DNA
gacacggtgtgattcacaagaagtgccaggatcagggcctggcgccgggtggggggtgggggaggcactcgacacctccagctatggccagtccccagagcccaggagggctcgcacacaggcgctcgaaagtggccgttcaccgggctgcttcctctaagcggcccctccacagattccggggcggggactcggtagagcgaggggtccttcggcggcggccagcgcgcgatcctcccggctccgtccccacatgcgggtggaggggccggggctcctcccggtacgtgcgggcccccggacagcggcctctcggacgtgcccttcggcgctgccaagacccgtcctggtacttgccgagccacggaccgcggcggctaccgcccggcctccctcgaccaccctccgcagcagcatcgcccgcggacgggatccggcaacccctgaccgtgagcggcgggcgctccggccaatcccggaccttcaggaagtcgcgccgctccagccagcgtgaggctgagcgca

SEQ ID NO: 24063 - DNA, 612 bp, Homo sapiens
  source 1..612: mol_type = other DNA
cacgtgctgctgggcacgtgcacatcaaggtgggtctgggacccgcagcccccaacgactgagtcacccacttcatgactcaggccttgtggcccactcggccgggtgctcgtcggtcaagaggaaatcggccgaatgcccgggcccgcggaggagcgaggtcgccgagcgcccctggcgccctgcgcggaccctcgcagagcacgcccgacggacgccgaccccacggccgcgccgagggtccaggatcggcggctccgaacccgggaggacagcgggccggggagaggcgggcagggcggccggtccgcgcccctcgggccctcggggccgcgctgactcagcgccgggcggaggctgcgggctgaccaaggccgagccgtcgggtggggacgcgttacctaggagacgctcgaaggtgccgctgcctcgccccatggcgacctccgacgccgcgggcgctcccctgctacgagctggcgcgccccttccctccagtgcgcgcacgcgcacgtcaccgcgccggccctagagccgcgaggaggcggggtctctgcgcgctaattggacgcgcccttggaacgtgggcgggccttgagccgcggcgccgag

SEQ ID NO: 24064 - DNA, 582 bp, Homo sapiens
  source 1..582: mol_type = other DNA
tggaccagatggggcccatgcaccccccactgtgccacgatgtcagtaagattggtgcccacctctgtcccgttgtagtgcccgtggagggcggcaggccccctcatcccgcgccaaagctcgggccgtcccccgctcccgaaggctggccttaagtcacgacctgacccgctgcgcctcggcgtgcacttagaggagcccggagctcttcgccaagcgcagaccccgcaactccacccgcgggggcggacacctaccgtgggccgtgtcgggggcggctcccccaggtcgcctttccctcccgggagctcacctgtgcgaagcggtccactccgggtgccccccgcgccccggtcccgtccccgcgcggaaggatatcctgcagccgtttcaccagcagcgtcttcccgacgcccgtggcccccagcaggaggcttcgctccacccggcacccgtagctcggcgccgcggctcaaggcccgcccacgttccaagggcgcgtccaattagcgcgcagagaccccgcctcctcgcggctctagggccggcgcggtgacgtgcgcgtgcgcgcactggagggaa

SEQ ID NO: 24065 - DNA, 600 bp, Homo sapiens
  source 1..600: mol_type = other DNA
gacctgcatcaacgtttgctcagggggcaggtggtcaggctgatggcccagctgcaggcagggtcatttccagcctgcccctccctgaggctgctctgcactgaccccgccggtagctggggaacggtgggagctcagcgctccgagtctgcggccgggggccagcggggctgaaacgcgcctcctgagtgttgaaagcggcaggcgccggcctttgcacccagaggccagggcgtctcactcaccttctgggcccaagccgcccttggaggctctgcctgttctgatctgaaggcggaggctcagccgtgctctcccaggaagccacctgggcgtttggtcgcctgcggctgcgaaggcgccaaagcccagacctcgcgcctccgcccgcgacggcggcactgggggcccggagcgggcgggaggggcttcggggccctagcctcgaccgcgacgttcgctcgcatcgcgtacggacccgtcgctcgtttgcgcgaccccaaaacctggcgggacgagggtcgcccgatgtctagctgccgccacagacgacgcttttgcgtctgcgcagcgcgccgccttgtgggtaatctacggcta

SEQ ID NO: 24066 - DNA, 611 bp, Homo sapiens
  source 1..611: mol_type = other DNA
tttccagcctgcccctccctggctctgcactgaccccgccggtagctggggaacggtgggagctcagcgctccgagtctgcggccgggggccagcggggctgaaacgcgcctcctgagtgttgaaagcggcaggcgccggcctttgcacccagaggccagggcgtctcactcaccttctgggcccaagccgcccttggaggctctgcctgttctgatctgaaggcggaggctcagccgtgctctcccaggaagccacctgggcgtttggtcgcctgcggctgcgaaggcgccaaagcccagacctcgcgcctccgcccgcgacggcggcactgggggcccggagcgggcgggaggggcttcggggccctagcctcgaccgcgacgttcgctcgcatcgcgtacggacccgtcgctcgtttgcgcgaccccaaaacctggcgggacgagggtcgcccgatgtctagctgccgccacagacgacgcttttgcgtctgcgcagcgcgccgccttgtgggtaatctacggctatccggctcgaatgcccggcagccgtggcggctagagcgttcctccccagctcgaatgcccggcggccgaggcggctagagcg

SEQ ID NO: 24067 - DNA, 786 bp, Homo sapiens
  source 1..786: mol_type = other DNA
ggctctgcctgttctgatctgaaggcggaggctcagccgtgctctcccaggaagccacctgggcgtttggtcgcctgcggctgcgaaggcgccaaagcccagacctcgcgcctccgcccgcgacggcggcactgggggcccggagcgggcgggaggggcttcggggccctagcctcgaccgcgacgttcgctcgcatcgcgtacggacccgtcgctcgtttgcgcgaccccaaaacctggcgggacgagggtcgcccgatgtctagctgccgccacagacgacgcttttgcgtctgcgcagcgcgccgccttgtgggtaatctacggctatccggctcgaatgcccggcagccgtggcggctagagcgttcctccccagctcgaatgcccggcggccgaggcggctagagcgtcgcctcctcccggggacagcccgcggaccgatgctgccggcggccgctcgccccctgtgggggccttgccttgggcttcgggccgctgcgttccgccttgccaggtacgcgggatcctggggcggtccgggccggcaggcgggttagggggcagccgggcactgaggggtcgatccgggcgaggagggcggcggggccggcctccctgcagcggccaggccgggcttgggggtcccatcgggggcgcggggaggaggcctcccggtgcgcacgccccttccctcctgggccgtggaaagcgccggggtcggccccagatgaccttggattccgcagcaaaggcccatccgtgggtgcggcgttttgcggccag

SEQ ID NO: 24068 - DNA, 378 bp, Homo sapiens
  source 1..378: mol_type = other DNA
gccttcccaggccgtggggacacgcagccccctgccctcgggtggtgctgggtctccatgcgccacgtcagaagcgcagcgtgcgcacacgtgcactgcagtgtggctgagaaaggaatggcgctgcttttatctacaaattatgaaaccgagtctcacttggagtgcaatggcgcgatctcacgcagcctcccgagtagctgggattacagagagacatattggtcaggctggtttcaaacttgacctttggcctcccaaagcgctaggatgacaggcgctcagtgagctgaggtcgcaccactgcactccagcctggatgacagagtgagactccgtttccaactcggtggcccagcagtggtgctccctaaggcg

SEQ ID NO: 24069 - DNA, 703 bp, Homo sapiens
  source 1..703: mol_type = other DNA
gtgcacctgggccaggaactccttgttcttcgccaggggcccagatgcaggcaggcatctcctggccccagaatccaccccggggccccacttccagggtggttgcctggggcgtctggtcagagccagaccagaactgagcaggagcgaggcaagtccttccaggctggagtgcagtggcgcgatcttcactgcactgaggcgtgagccaccgcgcccggctcccgaagccggcggggctgagccctcggtgggggcaggggttgcagacctgtggacgcagggcccacgccgcacacacgtggcccccgccaggtgactcacgagccagcgcctgcgcggcggggtggccaccgggtgcaggttcagggccaggggccgggcctcctggggattggcagggcgcccgccgcggtcccatgtgcctggggccggtccccgggcggtggccttcggccctgcgctccggcctggagaagggaggacgccaggggcccgggggagtggaggcggccacgcagcagccccggagcacccgcgcgtccgcaggccgggcccaccgcgctcggcgcccctcgcggccgctttaaggcgccgggcccgcctcaatcgcagggggcgtggcctagcggtcccgcccccggggcgcgcgcgcgcattggctgtgcggggtgcgggcgcgcgggcggcgctttgaaccggg

SEQ ID NO: 24070 - DNA, 649 bp, Homo sapiens
  source 1..649: mol_type = other DNA
tgggctctcctgggccatggcagccgaggcgcgcgtgtcgcgctggtacttcggggggctggcctcctgcggggccgcctgctgcacgcacccgctggacctgctcaaggtgaggccggggcccgggacgcggggcggatgggaccctggcgccgccgagacgcctgcaaaggcagcagcccggccccacgcacccggggatcgccgcgcccggggctccctcctggagagcgcgaggaggcccccgacgcccggatggccgatcccgggtggccctccagtggtggccgccgagctcgaggcctgcagggcgcagccgcgctccccagcttcccagccggcttcccagttctcggcaggtggcgatccagccccagctcttgggggagtcatacccagggtgtgggccaagccgccccccacccaggggtgtttagcacaccgccggacgtgtccctgggcaagtggggtgacccgatgccccggctgcacgcgtgtggtcctgaaagcgggcgtttctcagcacgatttttttttttttaatgcttatggggcaaaataagacagagctctccttgtttcccagggacagccaaggggcgttgcaagggcctgaggctttgcacagtctgcccagcaggccctgccc

SEQ ID NO: 24071 - DNA, 647 bp, Homo sapiens
  source 1..647: mol_type = other DNA
gggaccgtgtggccaagggcagccaggggcctctcccctcccgcagacttggtcaacgtcaggttggtgttcccccaccccacctgcaaggccaggggctttcttgtccccagacatgccagggcctgccagggctgcttgcagggtggggtcagcctggaataagccactgagaccctggtgtcctgggcataggagggtgggtgtccctgagccccggcgtgccctgtcctgtgggccccgctgaccagcgtgagctcccctgtgctgccagggctgcccatgcccctcggcccgcccgctgcttctgtttcaggatgcagaacgacgtgaagctgccccagggtcagcggcgcaagtgagtcatgggcaggctcgggcgggagcggacccctggctgctctgccgtgacccagctgaggctccagcaggccgaggtgcctgcacggtccatggagggtcctgacgactctgcgcccccaggacctttgggttaccccagggtggtgagtgcggaggcgaacgccccaggcatggagaccgaaggaggcgctgcctccctgcccagctcagggcagctgtgccctcctgccacggcctggggtctttccagggcccggggtccgctccaactgcagccccttcca

SEQ ID NO: 24072 - DNA, 590 bp, Homo sapiens
  source 1..590: mol_type = other DNA
caaggcgccatggggttgtggtgaccccaagatcactgggcacatagggccccaaagcgctggggcttctccactcccaggaaaggagagcgccccgcggccgcaggaccagcaggtgggggaccagggtcagggcaccccagggaccgccctgccggtccacccccagcccccgtctgctctgcaggggaaggaaccgggagccgcggtggcgagaggaaggggggctgagccacggcccccacgcccgcgcgcccctccgcgtcccagggcgtcccctcccggagctgggacccaccgcgaccaccacctgctgggccagggtccgcgggctcaggggtctgcaggattagggtctgcggaaccaggacccgtgggacaaaggtctgtggggcgcgggtccgcggggtgaattcagcgcgccgagtctgggccggggtacgaggcgctccctgcgcagggtgggcaggaccgaagctcgccgggaggctgcgcggagggcgggcggggaccctcggctgccgctcccacccccgcggggccgcccccgagcccgccctccgccgccgccctcgccctgcgtcgccgcc

SEQ ID NO: 24073 - DNA, 628 bp, Homo sapiens
  source 1..628: mol_type = other DNA
cgcgtggtggcgcgcgcctgtaatgggtgactgcaaaccctagaggcttctggaatcctgtaccaacttgaaaagctggccacagcttccaaagggccggaccttaggaccccaaggtgggggacacacaggtgaccccaggactctggccctctgacccgggttggggcgagcactctcctggctcctccccttatctccctgggagcggacagggatgcaaccaacgacgatggcgacctgccctccgacctcatcgacccggactacaaggagctggtggagctcttcaaagggaccacgatggacgagccagctttgcccgcccgcccccgcgcccagggccgcctccctggagaagccgcgcgtcgcccatgggccagcacgtgccccacccgtgggccaggggcggccggacccgtccctccacgaccccgccacccccctgggtctacacacgtggtccctttactgggctctggccgctcccagtggccggcggcgctcaccgttcgggccagggaggtccggagcttccgccacgagccccaaccccgcacgggaatcccggccgcccccgccctccgccagccgggcggtcacgtgagagcgcgctgcgcctgcgcct

SEQ ID NO: 24074 - DNA, 355 bp, Homo sapiens
  source 1..355: mol_type = other DNA
cactatgagggtaacccatgagtgtgtagggaataccctgtcccctgcaggtgtgtgagaggagcctgaggcactgagatcccagccaaggatgcctgcggggtttctgagcagtcttgctctgtcgcccaggctggagtgcagtggcaccccaagtagctgggactataggcgcccgccatcacgcccggcgcctgtttcaccacagcacggtggacctgtgcttctgcagatgtggagggggtggccgcccctcactttccaggattgctttggccgggcacggggtgcggggcgggggtgcagctcagtttcagcccctcgcgccggggagatatagcccctgagccctata

SEQ ID NO: 24075 - DNA, 333 bp, Homo sapiens
  source 1..333: mol_type = other DNA
ctgtctcaaaaaaataaaaaataaaaattttaaaaaaaggacatttttttactattttttgagaccgctgggcaatattattatgtaatccaacatatgcatacagaatatttcaacatgtagtagtcaatgtaaagttattaacgaaatactgtacggctggagtgcaatggcgcgaaagcgattctcttgcctcagcctcccgagtagctgggattacaggcgcgcgcaccaggccgctggtctcgcccgtctcaggtggactggccatcaaacccagctgctgccttcggagtgaagcagcgcccagggtatttccacagctgtgtaaca

SEQ ID NO: 24076 - DNA, 515 bp, Homo sapiens
  source 1..515: mol_type = other DNA
aagggccgctccctgaaggccttagcgggggctccacgcatgagcagcgtcttcctggggcctgggagccggcaggtccccggggcccaggtcccgcccctcccgccgaggcttcctcgcactgtgcgcacgattcccatgcccaggccctgcccatgctgacctcgcggagcgcgtcggaccgggccggctatcccacaccgagcccaccgccttccacggccgccgccgcacgcttgacacgcgcgccggaaattgcgtcaccccaacttccggtccgggggccggggggcgtgccagggtttcggaagcgcagccgcagctccgcccctcgacgaaggaacgcgcagagtgcgcgcatcccttggccaatcaggaggcgcagagtcctttccgaatccggggccaggcctgccgccggccaatcgaaggcgggccccagcggcgcgtgcgcgccgcggccagcgcgcgcgggcgggggggcaggcgcgccccggacccaggatttataaagg

SEQ ID NO: 24077 - DNA, 653 bp, Homo sapiens
  source 1..653: mol_type = other DNA
gcccgggccagacctgagggcccctccttggggacgcggggggcgccgggccggcagccgcggtccatcgcgttcgggggcgacgcggggattggggcgcggcctcccccagcgcccgggccacgcccggcacggattgcgggccctgcggaagtgcgggccgcgccctaggatcccggcgcctacggctatcctcgcgcggcgcggaggccccagcccctggaggaagcagggcggcctggaccccggcctgggtgtcccgggtgtgctgctcccgacccacctcccacgctgccgggaaggatctgagcctgacagatcccctgccgggtcagtgctgccccgggcactccgggcccaccatctacaagagggcccgagagtactgagtggctgtggtagctcccaagttgtaggtcacagaccctcacacaataccgagccccgttaccccgggggcctgctagccccgccccacacatacagggggctgctgcctcctccatcgtggagggggaggtgtgtcctctctccccaccacactgccccagaggatgcccctgagcagaggagcgaaggtggcccccttggagcccttttggagctccggctgcagcccacactcctgctcagaagtgcgcctccgttgggga

SEQ ID NO: 24078 - DNA, 547 bp, Homo sapiens
  source 1..547: mol_type = other DNA
aaatgcacactggttttcattaataagttgcaaaaataatttttttttggagacagggtctggctctgtcgcccaggctggagtgcagtggtgccaccacggctcactgcagtagctggtagtgggattacaggcgtgaggcccgcgcccggcccgcagcagctcgtctgcagcggctgccgcccgccgaagccgcgcccgccggaccccaccgcgagccgagcgcacagtcctgggcgggagcccaggcacccgccgcgcccgtagcgcccccagcgcccccagccctggccgatcgggcggagcgtgcggggagggaggggcgcgtaggctccgcctccaacggccgccgccccaccccccgcccttccgttggcagcgccggcgtccgcgcgggaagggcccgccgagtctcgcacgccagtgcgcacgcgcctccccgcctcaccccgtcccgcgcgcgcagccgtccgccagcggccaatcagcagccgctccgaggccgtggcaccggaaggcctcacgcggcgccggaagtgacgtgccg

SEQ ID NO: 24079 - DNA, 735 bp, Homo sapiens
  source 1..735: mol_type = other DNA
aggctggacgcggggcagcgtcccacccagtgtctggtgggcctccaggagaggcgagcccggggctgggtgcgagcactgctgctgggccaggccagccgaagcccaggctgaggcagcccctcatctgctcacggtgccaggagctccctgcctcctggtcctgaggagccgcgggattcctcagggacactagggcctctgcagcggcgcctgcgccaggcagccacgcgcgctgcgcacgaattccgctgcgccctcgcccagcaccagctttccgcggggcgtgcaaggggctcctcctagccccacagccctgtctttccacgggggacaccaaggccctggaacggcccgcgcgccagcgctctcgcccgtgttgtcccgttacctccccgaagtcccgggactaggtgactaggccccgaagcaagagtcgcagtcggaccgactgggccggggagggcagcgcactgcacctgcgcgggcttccacagcccacgcggccgccgcaggcctcgagtgggcgcgggttgggcagcggcgagaggcgggaccggacctcgcctcccgggtgcgggcgccctgggctcgcgtagggaagtgccgaggcccagccgcaagatggcgacggcgtgcccccggccacccgcgcgccgcgcatgcgccctggccttccccgcccgagtgagcggaagtctcgtgaccccggaagtgacaggggcgggcggggcg

SEQ ID NO: 24080 - DNA, 723 bp, Homo sapiens
  source 1..723: mol_type = other DNA
ccggcaccaccgccgaagccactgtcgaaaagatcggccacttgtcgggaagttgttttggctgaaaaaaaaaccgcaacaagagcctgtgagtctcagtccagggctttccttcccggcctgagaggatccggccgaaacggggccgccagcgctccctccggcgctgcagctgccccagcccgaggccgcacggtcccaccgcggccgcagggtctcagcctccgggaccggaccccgaaagcggacctccgggcggccgctccaccagccttatccacccgccggcccgggtctccgccgcgagcggccccggccccagccccggctggccccctcccactctccggcgcggccggcctccgcactcaccctgctgtagggcgccggtcggttcctgccgcctccgccggccgcgccgcgggcgatggccggccggttccggatgggcccgccgcctcgattcactcgcgcggcggcctgcgccccaccgccgcggccgccctgggagccggcccggccgcggccccggcccccgccccggccgcctcgctggctccggtgccatggcgggcgcggaatcgggcatcggctcgagcccgcgcgtcagcacgccggcacgtcacttccggcgccgcgtgaggccttccggtgccacggcctcggagcggctgctgattggccgctggcggacggctgcgcgcgcgggacggggtgaggcgg

SEQ ID NO: 24081 - DNA, 493 bp, Homo sapiens
  source 1..493: mol_type = other DNA
atgacattttcaccgtgacattacacctgcccatccggcctctgtgtcaagaggtggcagccgcacctttctgtgagaacatgaaaaagtgtgaacttcctctcgcggcagaggggtggctccgagcctcggctctatgcagggtgtccccgagtggtcggcgcgggctccccgggctcaggtctgccgcctggtgtagattattgtgccaaaaaataacagcgccccgtggaggttcccggaggtggcggcggtgggacggtccccacgccgcactgccccgccagccgagcgccaggtgtgggcggtgcggagagaaagcgcggcacacgccattggctgtggggggcgggactctgtcaggggctcacgccattggccgtgcgcggagcgcgggggaggcgggggcggggctcgggccgagcggcgcacgccattggccgtgcgcagcgggtgaggcccgcgtgacggccgctgagcgtgcgcctggcgg

SEQ ID NO: 24082 - DNA, 596 bp, Homo sapiens
  source 1..596: mol_type = other DNA
ggccataggtggtgcccacctggattgagggtgggtctccagaaacaagtgccagggctccagtgccagtgcctgtcctgggaagatacccatgtcacctgccaggagagcggctggcagtcctgcctggtgccccccaaggggcagagctggcgcctccaatcgaaggccaggagtcgtggagctccagtgccttaacagccctgctggtggaaccttccccgggccccacaagccacatggactctgatgcctggagcaccccttagggtggtagaaaccgcccccggggcactgtgcagtgtggctggctctccagcatcaggagtactggggattgggggacgactcctagggctgggcgcccgtgggccctcccctgctgccactgcggcccacgcaagccgggcctgaagggcgcgagcggcatgggtggggagcttgagggggcgttgggctcccaccaagcgccagatccttgcgcgcctccagcgctcgcccgcgcggctggttcctttgggatgcggaggtgcgacggctcctccgcgcgcgcccgctgcaccccagcccgcccgccgcccctcccggccctccgc

SEQ ID NO: 24083 - DNA, 707 bp, Homo sapiens
  source 1..707: mol_type = other DNA
gggtctcagcctccgggaccggaccccgaaagcggacctccgggcggccgctccaccagccttatccacccgccggcccgggtctccgccgcgagcggccccggccccagccccggctggccccctcccactctccggcgcggccggcctccgcactcaccctgctgtagggcgccggtcggttcctgccgcctccgccggccgcgccgcgggcgatggccggccggttccggatgggcccgccgcctcgattcactcgcgcggcggcctgcgccccaccgccgcggccgccctgggagccggcccggccgcggccccggcccccgccccggccgcctcgctggctccggtgccatggcgggcgcggaatcgggcatcggctcgagcccgcgcgtcagcacgccggcacgtcacttccggcgccgcgtgaggccttccggtgccacggcctcggagcggctgctgattggccgctggcggacggctgcgcgcgcgggacggggtgaggcggggaggcgcgtgcgcactggcgtgcgagactcggcgggcccttcccgcgcggacgccggcgctgccaacggaagggcggggggtggggcggcggccgttggaggcggagcctacgcgcccctccctccccgcacgctccgcccgatcggccagggctgggggcgctgggggcgctacgggcgcggcgggtgcctggg

SEQ ID NO: 24084 - DNA, 428 bp, Homo sapiens
  source 1..428: mol_type = other DNA
tgccacacagaggcagggcgtgtctgagagactctgcccctggagcagcagctttgataccatggtccccgataaactgtgagacctccagaaagccttctcctggcaacaggacaagggctgcccgcgtgtccagccctgttgctctcagtccctgcctgccctgcctaggtctagccaggggaggtgaggcccgagcgctcacacttcgtgtagggcgggcaggggcctgacctcttgcagggcagtggccttggtgccctgccctgcgcagtatttattgctaaattattgtccaggaggggcagcactgggcctggccccctataaggttttctttattttgtatatgatcaataaaccttttaaagagggtgggtgggggcggggcccatcttgcgcatgcgccctgagcgcggcctgccgtg

SEQ ID NO: 24085 - DNA, 307 bp, Homo sapiens
  source 1..307: mol_type = other DNA
tcatatatccatgaaaaacaggccctcctgctgtgggtggccatccattttgagcacctctgccaggctgcagacctggagcccgtctagggcgaatcgagggctttggccaaggccaggtctctcagctctcaccaggagagtgaggcccctggctgctgctcgatgtgtgtacacttctgactggtgatcagggcccggcccacggccctgagcggctgcagcctgctttgggactctggagtggccacttggccaaagcgcccatccacatctggaaagtcggagccgcagcctgctgcaccgt

SEQ ID NO: 24086 - DNA, 416 bp, Homo sapiens
  source 1..416: mol_type = other DNA
gatgggtcccgtgtcactagccctttatttaaaagagagaagttccttttacaaagttattaaattaattatatgtttaaaagttaaagaaaaaagagctgcagagtatttataaaactgtcttttagaaaaaaaacagtataatagaaactttgctagtaaaaaaagaaaaaaaatccctttcttgtatttagtttttatatacacagagttatcagacattatttataaaacttagtttaaaaaaaagacaaaaaaaaaaggccgtcctctttgagcccaccaccagctcctggtccgtaggagggaaactggggtcccttggggcgccccacgctgcttccacacccaccacctctggccttgggtggtggtgggtggccacagggctatggccaagcgttccctggccgtct

SEQ ID NO: 24087 - DNA, 472 bp, Homo sapiens
  source 1..472: mol_type = other DNA
tcccagctccctggccctgtgggcactcacccggggcagggaccagagagcaggctgcagctcggaggggctgactccgccagccttcacgttgggcaggcccggggtggctcactgtgggagcccttggcaggggctgcttcctgcaaccaggaaggtctagaggggcctcgggccaggctcctcccagctgatggcctgccacctggaaggtgggggaactccctggtcagtcctgccaacagaccagagcggacggcccacccccagcttttcaaagttaggaggctgggagactcggggttccctgtagcctcctctctggccaggtcccccgtggggcccctgtgcacccagggagcagggggctttgtccggacagggtcactggctggccctcacctgctattggccaggctggtcagcgtgactcgccaggaacagccgcgctctgggcagtgccggggttatt

SEQ ID NO: 24088 - DNA, 530 bp, Homo sapiens
  source 1..530: mol_type = other DNA
atccagtggctggagcctcgggaccttgccttgtggggaggggtctctggcctcccctccctacctcctggtcccaggctgggtgtgaggatgtgtgcatccgcctggccacacttcagctcccctgctgtcccagctccctggccctgtgggcactcacccggggcagggaccagagagcaggctgcagctcggaggggctgactccgccagccttcacgttgggcaggcccggggtggctcactgtgggagcccttggcaggggctgcttcctgcaaccaggaaggtctagaggggcctcgggccaggctcctcccagctgatggcctgccacctggaaggtgggggaactccctggtcagtcctgccaacagaccagagcggacggcccacccccagcttttcaaagttaggaggctgggagactcggggttccctgtagcctcctctctggccaggtcccccgtggggcccctgtgcacccagggagcagggggctttgtccggacagggtcactggctggccctc

SEQ ID NO: 24089 - DNA, 716 bp, Homo sapiens
  source 1..716: mol_type = other DNA
gcctgtgagactcgggctgtgtccagagcagggggaccccacagcgcacacggcgacaacgtgctgtgggccggcctgttcatggacggagcccaggaggaccccatccccgctcacctgctggcggggcggccacccttcccctcccaggattcacagctgcgaagggaagagacacgggatcccccgtttcgaagtctcccccgggcggagctctgggtacacgtggcgcaggaagggcctgggcagctcggggtctgctgcgcgggcggggatcgcccctcgctgctgggagctgccaggccgtccccgccccgcgccgctccgggacccccgagttggaatcgcggggccccggcggcgccgtcctgacgcaagagcgcctctgcctggcagggcccaggccggcactcgagggggcgcacgcagagcctgccctaggctgagcactcgagctggaaaacgccgccggcgtccgcgagcttggacaggggccctggacggcgggcgcaggagccaggcgaggcaggctccggctgcaggacgccgggggctgggggtggagacctggcgctttggccgtgcgcccaggcccgcccgtgagaccccgccaggcgcggacgacggcgcgcgggttgcgcatgcgcagtttgccctcccgccgccgcgccttcccctttaagcgccggccggccgcgtcgccgcttcatgaatgg

SEQ ID NO: 24090 - DNA, 697 bp, Homo sapiens
  source 1..697: mol_type = other DNA
atatttaaaatgcttccacttggcaaattattttcaactctgcccccaagggaaaaaaaaagagccggccgcgcgcccagggacgccagctggacgcgtccgtgtccgggtggcccaagacaaagccctgcgtggagggcccctcacaggccccaatcgggccgccccctccgcccgcgtcctcggaccccacgtgtaggtcccgggaagcgcgaccaggaggagcgcgggtcaggggaccgcgtgccgggtctatccgggggccgggggatcccggggcgcgagagaggcgagggccggcggtcggcgtgggaggggcgcgcagatgatgcaaccgctctggcgccgccgcgcgctctgattggccagcgcctggcggccgcgcccggattcgctggcgcgacgggggcggggcctgggtgcgggtgccgcgtggcggccgcagcgctgaggggtgggtacgacccgcgcacggtagcggcggtcgccggggcgcgacggtagcccagttctgggcggggtgggaacccagacgggggacccctaggcgccgggccctccctctccccctccacccctccagtgggtgcgggaccctaggcagcaggccaggcaccgccgctctgactgggggccccgaagcagttaacggggcacccggctgcgggaggagcggccaggctggcactgcccccct

SEQ ID NO: 24091 - DNA, 508 bp, Homo sapiens
  source 1..508: mol_type = other DNA
gctgcgcagttagaggaacacctgtggccgcctggagtgcagtggcgcaatctcagcttctcgagtagctggaattacaggcacctgtcctgacctcaggtgatccgcccgatatttaaaatgcttccacttggcaaattattttcaactctgcccccaagggaaaaaaaaagagccggccgcgcgcccagggacgccagctggacgcgtccgtgtccgggtggcccaagacaaagccctgcgtggagggcccctcacaggccccaatcgggccgccccctccgcccgcgtcctcggaccccacgtgtaggtcccgggaagcgcgaccaggaggagcgcgggtcaggggaccgcgtgccgggtctatccgggggccgggggatcccggggcgcgagagaggcgagggccggcggtcggcgtgggaggggcgcgcagatgatgcaaccgctctggcgccgccgcgcgctctgattggccagcgcctggcggccgcgcccggattcgctg

SEQ ID NO: 24092 - DNA, 757 bp, Homo sapiens
  source 1..757: mol_type = other DNA
tctgatcacggctgtctatttatagcgctggggggagccgcctcacatagacagcagagaggctgccctgctgcaatgtcaccgtcgtcactgcctctgcaggctgcaggcacctgccactaccgcagaggactgaggggccttggcccagcagggaccccagggccttgggggactgtgtgctggccagatgggcagcaccatggagccccctgggggtgcgtacctgcacctgggcgccgtgacatcccctgtgggcacagcccgcgtgctgcagctggcctttggctgcactaccttcagcctggtggcccaccggggtggctttgcgggcgtccagggcacccctgtgagttcacacggctccacggctgcctgcggctctcgtatgcgcgacggctgcggtttgcccggcgggagtgttcccccgagcccgccggctgtgctgccagggacttccgcctggcagccagtgtgggctcctcttcctggcctacgctgtggaggtggccctgacgcgggcccggcccggccaggtgagcagctatatggccacggtgtcggggctcctcaagatcgtccaggccttcgtggcctgccgtggtccagggcgctacgtggccacccagtggtgacagcctgtgcttcctggccacagtggccgtggtggccctgagtgtgatgggccacacagggggcctgggctgcccctttgaccgtgtacaccttcctggctgtgctcctgtacctcagcgcc

SEQ ID NO: 24093 - DNA, 357 bp, Homo sapiens
  source 1..357: mol_type = other DNA
tcaagaccagcctggccgatcgcgccattgcactccagcctgggtgacagagcgaggctccatctcaaaaaagagtgtttttctaggtgtttctgccccaggcagggctcggggagcagaggccacggtctccatgctctgctcctctggccgcagcagaaccctgtgaaccaggcaatgacagcaggatcctgaagcccatgcaggctctagccccaggagcccaggctgccgcctccctcccccgcacagctggccctggaggctgctggagctggggttaccccgtggggaccctcatcctctgatcacggctgtctatttatagcgctggggggagccgcctcacatagacag

SEQ ID NO: 24094 - DNA, 866 bp, Homo sapiens
  source 1..866: mol_type = other DNA
ggccagcagccaggctggggcgggcggagatccaggacctcacctctggccccgcagcaggagcgccccggaactgagcgactcccccgcggcgccttgctggggcgcgcggtccctcccgcaggtctccgagggagccaggacctcgcgcttctccaggaggccccggcgccactgctgccgggccctcggctggaagccctgtgtccgccgccgctttgatcccggggggccctgctggataaaagtccctggcggctccgcgccagcgccagagggggagcgcagccgagccgggcgcaccagcgggacggcgcagggccaggggcgctgagaggacggggccactgggccgcccgcgctggccgcggtgagagcggggccccagggctgcgcgaggtggggcgatgcgggccggggtccgaatcccccacggcctgctctgggcctgggcactgggggatgagagggacactggcggctccaggtgagcgcgcctgccccgcgcccccagcccgtcgggctcggccagctgcgccgcgggcggagttccccgccccccaccccggcaggcgcggaaaagcctcgcccctccccgtcgccgccgccccttccagctgccccgcgggggggggcggcggcgccgggctggccgcggtgaatggagccgccggggccgcccggccgcgctgcccccccacggagccgggccgggagcgcctccggcggccgcggcggggtagtccaggcccctccgtcaggcagagcgagcgcggccccctcccccctccgccgagcccgggcggcggcggcggcacatctaacgcgcgggcacccgggccgccgcggcccccgcaaataagccc

SEQ ID NO: 24095 - DNA, 870 bp, Homo sapiens
  source 1..870: mol_type = other DNA
cccactgcccagagcctcgggagtggacaggggtcccttcgtggcatgaagggccgcaagcagaggcctagcgggcagccactggacccttggcctcctcccccagtggcggctggggcaggttcttggggggtcctcggctggggccagcagccaggctggggcgggcggagatccaggacctcacctctggccccgcagcaggagcgccccggaactgagcgactcccccgcggcgccttgctggggcgcgcggtccctcccgcaggtctccgagggagccaggacctcgcgcttctccaggaggccccggcgccactgctgccgggccctcggctggaagccctgtgtccgccgccgctttgatcccggggggccctgctggataaaagtccctggcggctccgcgccagcgccagagggggagcgcagccgagccgggcgcaccagcgggacggcgcagggccaggggcgctgagaggacggggccactgggccgcccgcgctggccgcggtgagagcggggccccagggctgcgcgaggtggggcgatgcgggccggggtccgaatcccccacggcctgctctgggcctgggcactgggggatgagagggacactggcggctccaggtgagcgcgcctgccccgcgcccccagcccgtcgggctcggccagctgcgccgcgggcggagttccccgccccccaccccggcaggcgcggaaaagcctcgcccctccccgtcgccgccgccccttccagctgccccgcgggggggggcggcggcgccgggctggccgcggtgaatggagccgccggggccgcccggccgcgctgcccccccacggagccgggccgggagcgcctccgg

SEQ ID NO: 24096 - DNA, 298 bp, Homo sapiens
  source 1..298: mol_type = other DNA
ggcgtgatctcagctcactgcgagctctcccaaatatttaataactttttaaagaagggagccatgattttgcagctttacggtttaacactgaatctactcattaactgatgctaaaactgttgggcaaatggttcacggaccttgaccataagtggttcaactcctatggctagcctggggctttccccagggatatgtcatagcaatgactgccgggtgcggtggctcacgtgtgtaatcgcaccagttcccccttccacaggctactgggcagctgagccctagccaggagtgc

SEQ ID NO: 24097 - DNA, 546 bp, Homo sapiens
  source 1..546: mol_type = other DNA
gggcagctgagccctagccaggagtgccagctcctgctgggctgccaccaagcccctcctcagcatgggttggtgcgggaagtccttgagtgcctgtgggtcggcaggagctccggtgagactcaagttcgctcaccccacggttctgaaaccggcctcagggggaccgtcgcggcagccctagggctgccagattctagtcccaacacccagggaggatccgtacaggggcggggggactgccccaaaccataaggtctggacgctgaccacggtgggcgagcgcggaccgctgggaccccggggctcagtgccgctcaccgggggtgaccgcgcgcccagccccggcccagcctggccccggcgagcccatccaagccgcgcttcccggaggcagaggacgaccgcgctttccgggtctggcgcgggctttggcggcccaagggcggggccggggcgccgtgggtggggaaagggcggggcctggcaggacccggaagtgcgctgcggccccgccccctggccgcgtggctgcgcgtcctggct

SEQ ID NO: 24098 - DNA, 760 bp, Homo sapiens
  source 1..760: mol_type = other DNA
gcatgcaaggaccagctccgtgcacagcgtctccctcggcagcagcttgcccagggccctgcaggtctccaccgtcaggctttgcgtggccaggtccagccggcccctgggaagctggtgcagctgctgcaggacagcctcctggggctcggccccacctgcacaggcggctgtaggagcgccggaactcctccatgacccgcggggccggcagggcctcctccgcatgctcccgcagctgctgaaagggagccgcgcggtgcggagcagtcccagcgccgggtacaggagacggggcctccgccgacccgggcggagagcaatccgagtgggctccgcgggcgggaggtcctgggagcgcggggctgccgctttgggctggggccccgcagtgcttggggaccacccgtgcaggaagcaggcaggtgcgtcgcgcgcccccacccagccctgccccgcctgcagccccgacccccgccctcgcgacagccgcgtcggggcctcagtatccgcgcgacaactcctagcaggctctgcgcaggcagcgcttggtgcgggcgcgcctttcgggccgcaagctgagagggggcagcgcgctccaggggggcatgagggtggggccccgggagggcatgctccgggctcagggcgcgctccgggctcattggctgagacgtgggggcggggctccgagagcagcgctaggggcgcggggcggggctccgggggcgcgctccggtctcattggctggaggcgcgg

SEQ ID NO: 24099 - DNA, 597 bp, Homo sapiens
  source 1..597: mol_type = other DNA
ctagcccagtgctggcgcccaccggggagcaaaggggtaggtcctgccggctcctcgggctggacgatctcaccccaggctcagggcgcagggcggcggcccagctcctcctctctcttcgccggcttggactccgccgtgacggcgcccgagacaccagcccacgagggcgcggggcgcgcggcccggccggagatggagtctgagaacgggcccaacctcaaggcacagggggcggcgcgggggctggcgtctggccctcacagtgtcacgcgtgaggtcgggacggagcgtccgcgcctgcctagcccctgccctccgcttccggaagccggatccagctcctgctcgccccgcgcctccagccaatgagaccggagcgcgcccccggagccccgccccgcgcccctagcgctgctctcggagccccgcccccacgtctcagccaatgagcccggagcgcgccctgagcccggagcatgccctcccggggccccaccctcatgcccccctggagcgcgctgccccctctcagcttgcggcccgaaaggcgcgcccgcaccaagcgctgcctgcgcagagcctgctaggagttgt

SEQ ID NO: 24100 - DNA, 334 bp, Homo sapiens
  source 1..334: mol_type = other DNA
aatgtttatactaatgattgataattatccatgatcatgatcatttttatatctaatttgtattatgactatttttattcccaggctggagtgcagtggcgcatgagtagctgggactacaggtgcccgccactctcgatctcgatccagataaagcggagctgttagccctgaaattctccatttcaatctggcctgaggcagcggagaccccgccccgccccggcgcgcccactcctgcagcggggagcagctatttgaatgtccccaccgcctatctgaaggccgccctgccattggccccgccgcgccccgcccatcgtggccagattcc

SEQ ID NO: 24101 - DNA, 828 bp, Homo sapiens
  source 1..828: mol_type = other DNA
agggcgagcttcctgcagaacgccgtcctggcttacgtgcaggcgtcccccgtgaggaccctggaggacccgggcgcagtaggagtgcatcaggcggcgcccgagatggaccaggggctgcgtcccgcccgcgccgcctctttgagacccgggtcgacgcggcggttgcggcgacgggtgtcgcggctgcgggggaaccccgtgggaggcgcctgggaagggctccctaccggccccttcttcccggtcgacgccacgtgggagcacaccgggaaggggtcccgcgggcgcgtctccccctcgccttttgctcaccgtgaacgctgcggccgcctgcgcgcggcggggcgcggccctctgcccccagccctgcagggagggcctgccggggtgcggctgttcgcccctcctcgccgctgccttgaagggacgggagggccgcgggggctgtccgtctgggggttcgggcggctgcagaccccggagttcccagctggctcccggcggcagggggcgggtccccgagaaagcgcagcgcgcggagccctccccgccgggtccaggtcgctgggctctctccggcctgcgctgcgccccgagggacccgtaggagacccccgggccggggtcgcgctggaggcgggggcgccgcagctcgcgcagctctgcccgggttcgggcggccccgccccgccagccgcgcggccgggcgccccccgcccgcccccgcccccgccccccgccccccgccggccgcgctcggctgtctccgcgcccggcgctcggcggcgctcggctgtctccggccgatcgctcggcgctcgggtc

SEQ ID NO: 24102 - DNA, 727 bp, Homo sapiens
  source 1..727: mol_type = other DNA
gggagcctcatggcccccagctgggagacacagcgccatgccgggcactcgccggacccgtgggcctcccgcgctccttcgggcccaagagctcggctccctccgcaggccccgggcccaccggggctccctcccctcctgcgcttggcactgagtccctgtcctcggccagcagagcagcaggggcccagccacagcaggggcggccggggccctgctcccccctccctcgctcgggggtccctgtcctggaaggtacctcgtagagcagcgtacaggccgacaggctggcgctcaggctgaagtccccggccgtgccgggcaggacgaggtctgacctctgggagctggctggctgcggcggccgggaacctctcccgtgagctgctgggaggggaggcggggcgggcgcggcccggcggcccccgatcgcagcgcgcagccacggcggagacgcgccctcggccctgcagcccccgacgcgcgctgcccgcggaggcccggcacggagcgtgcccgaccgactcctggcgcaggccccgcgcccctgctcgacctcagcccggccccagtggcggggggcgcgggggcgcggaggcccggggcggcctcggctcgttacctgcaagtgcacccaccccgccgcggcgtgccgtccacttccggggcagcgaagccgtcgcttccggggcgcggggcggggcggggccgctgcgttcttaaaggg

SEQ ID NO: 24103 - DNA, 545 bp, Homo sapiens
  source 1..545: mol_type = other DNA
tgtgtggggctgagcctgctacctcaccgggcccctgagcgtgcagggtgggggggacctgtgtcccgcctgacagggcagctcctggcctgcgtggatgcaggaaagggtgcagagggggtgcaaggcttcggccccaccagccttaacacaggtgccagccaggccatgcttgctttctgcaggacgaaggacccccagagaccctcaagagggacacatgggcactgtccacttggtccctggggcttcctgcccacagcagcctctctgctggaaggaggtggctgtgaagttgcctgtcctgcaccacccacccgtgccagggcagagtccttgctcgggcccagccccagatgtcggagacagagccggccttggccctgcttgtctgcccagcaacctgagggagacacccagatggtggcccgggctgcctcccagcctcccggcaaagctgcctgggctccgctgtctgcagggccctgggctctggggcttggccgctaaagtgggaacaccatggccccctcagacgtgcaaaa

SEQ ID NO: 24104 - DNA, 842 bp, Homo sapiens
  source 1..842: mol_type = other DNA
ccctgctggtgccaccgaggctgaagcggcagctcgccctgacctggcctggaagggcggattccctgctggcgcttcttcaggggacgtggcactagccccacgccccgggaagcggctaggctggcagggtgggccctccgcaggccgcgtgacctgggcagcgtcggggcctccccgggcctcgggagcctgggcagagaaaggcacccacagcagcgaaggggccgtggcttcggagcgagaaggctcggggggcagatcccgcgggcgccggggagtgggggacactcaccgccctggagctcgagctcagggtcgtccccgtcggtgaagatctggggcgctgcccaggccggagaccgacccgccccgcgcggagcctccgggggcctgggccgggcctagaccctgggaggcggggcgggtgggcgtggggctcgccgtcggggtcggggtccggcgcacctgctggcgggcccgggagatccaggtgcgcagcagcagccgcaggcgcggcccgtggttcttccgggtggtccgatgaagacgtcgtcaggccgcaggctgggggcagcgggccgggacgggggcgcgcgcggggccggggcgggggtccgggccggggcgggcgcgcggggcagcggcagcggcagtaacagcagcgcggccagggccgcggccagcgcgaggcaggcccggcacagcgccccacgcgcgcggctcatgcggccgccgggacccccggcgctgcgagcggagaacctggccggagccgtgggtgggcggcggcccctttaagaacgcagcggccccgccccgccccgcgccccggaagcgac

SEQ ID NO: 24105 - DNA, 622 bp, Homo sapiens
  source 1..622: mol_type = other DNA
cccaagagatttcaccagatatggaaagctctgacaaagctgctttttacatctgttgggtctctggggttcccagtgggtccccacattttccgcaacgcagcggcggaaagtgagtggctgaagcccccaatgcgaacttgggggctgggcagcgcagggcctcagcgcccacggtctacccgcggcccgggccttatgtgcgcctccgagctgtcggtgagtcccggcgagccccgacccctctctagccacggcctgacgggtacggtggtgacctcagcctctgacctccgaccccgcgccgcgacctctcgtcgccggtcccctcggagccgggcgcggtttccggggaacgcgtttcccgccgcaccgtgggccgcccggaccgcgcaggaccgggcaccttccggtggcggcgcggagccttgggcccggctgcggcccggcggcggccccggcgcggtgcgggcgttcgcggcgccccgggagctgcaggggccccgggcggcggcgaggccggagaggggcgggcccgggacaccggcacccggcgccctcggagccaaaggcgcgcggcggacacggcggggccctcgcgcggtgaggacgcggaggcgtg

SEQ ID NO: 24106 - DNA, 274 bp, Homo sapiens
  source 1..274: mol_type = other DNA
tagctgcggtggctcacgcctgtaatcccagcactttgggaggccagcggatcacctgatgtcaccatctctactaaaaatactaaaattagctgggtgttgcagtgagccgagatcacgccaccgcactcgttcaagcgattctcctgcctcagcctcccgagtagctgggactacaggggccagtgatagcctcagtcagattgccctgagcccaagagatttcaccagatatggaaagctctgacaaagctgctttttacatctgttgggt

SEQ ID NO: 24107 - DNA, 889 bp, Homo sapiens
  source 1..889: mol_type = other DNA
ccaggtgggtgtcccggccgactccgctcgccacgtggccgcgcccctcccctccgccgagctccagcggcctggagtgcgctcgcccgttcggccctgcgcctcgtccgggtccccgggaagctgctaaggaggccgtctcgggtctgggttccccgccgcacccgcgaggaaaaccggggatgcgctgcgatgaccggcagtaaccccggccggggcgcccgcggccggggtcaacgcccgcacttgcgccgcggcccgcgaggcatccgggaccgccccgccgcccgcccacgcccacccgcgcgccgccattgggccggtgcgaacacccctggcgcccgattggttgctgctgccgccgcgccgcgcaacgccgcgccctcagccagctccgcgcgggcagcgacggcggcgtggagtcggcggccgaagtgcgggcacgcgggtccgtccgtccttccgcgcgcctgtgggtccgagcgccccgccgcagccggctggacccccggtgtggccacggggtagtccccagtgtggcccaagcattcccatcccgcacacgtggccccggcggacacgggggtcggggatggctcgggaggcgcgccgcgggctcggtcgcagccgcgtgcgcgtcggggcccgcggggcgggaggcggaagtcggggggcggtggtttcccgcccgccccgcccccggcgctccacccccccaggcgcgttcccgcgcagggtcccggctcgggcggcggcgcgcacgagcatcaccccaccggcggcggcgcgccgggtcccggggcgcagccccgacgctcattggcctgggcggcgcagccaagctgtcagcccatgtggcgtggccgcccggggatggccgcggtttagc

SEQ ID NO: 24108 - DNA, 734 bp, Homo sapiens
  source 1..734: mol_type = other DNA
ggttcggggaggacaggctgcagggtgcctgggctgcaggcacggcacaatgtgggtggaggatgacaccagacccctggcttattgccccctccactcccacgcagaattgcgggctgagggttcgggtgagccaggctgctctgtcccggggccgggctctgttcatccatccggatggtgggggcgacttcgggcctcggtgggtcccgacccccctccttcccccagttccctaatcagggtctgagcgaccgcgcgcacggcccctgggccccgccggtctccgagcccgtgggcagcgccgggaactcgtgccccggtggccgcagccgacccttaggcaggacttcgtggcgcccccggcccgaacagacccccacgggcagcctcggccgccccgtgctcccccttcgggaccgcgagccgggcggcctcaggaagcgggcgcctggggaccctcggccgggccgggggcggcgaaggtgggggcgcctcgcgcggcggaacccgccgtccccatagcccggagccccgtccggagtcgccccgctgaccggtgaggaggccgggctccctccttcgatctgcggcggtggtcgggtcggccggggcgcccctcggacccgggcgcagcgcggaacccggcggggcgggaggggccggaacctagcgccagggaccccgtttcctgtcggcgggacccgagcgctgcaccgagcgcagccggacgc

SEQ ID NO: 24109 - DNA, 319 bp, Homo sapiens
  source 1..319: mol_type = other DNA
gcccggcccacacatggatacagaccaagcaagtcctggctcctcttctgggtgtcccagcccgtctcggacacccacgcttacccaggcctggtggctgtcaaccccagcactgtcctgtgggtgggggcaggccctacatcctgttcggtccagggggctagacacacagtgtggggccggttcggggaggacaggctgcagggtgcctgggctgcaggcacggcacaatgtgggtggaggatgacaccagacccctggcttattgccccctccactcccacgcagaattgcgggctgagggttcgggtgagccagg

SEQ ID NO: 24110 - DNA, 680 bp, Homo sapiens
  source 1..680: mol_type = other DNA
gctgaaagggtgaccatgggcaccatttgcctggctcccaggtcctgaggccagtccaggaggaggggggtgggcactgactcctgcctgagggctggaggcagggaggctcctctggacaggaagaccctccaggaacagaccagcaagactggcactgtccagcagcggccgtgaccacagccacttcctggaggtcaagacctggaggcagggccagtgctgccagggatcctggtgtggacacgggcaggaccaggggatgctccctcgagcaggccgtgctgcccagtgggtgggcacccaagggggctccaagccaggctgtcctcccaaggccggcttcgtccagaaggagaggagccaaggtgccccggcatccaccttcctcggctgccttgtccactgcagggacagcagcctgtgagcaggatgctttgggggggaccctgggggacacacggcatctctggaagggacggggctggaccccggccgccgacagtttcctgagcctgttgcggcaaggggcaagggacaggcactgtcagaagccccatgcccctcccgaagttccactgagttctcagtgctgagtcactggctgcggggcctgcggtcctggccggacaggaaggttgggcaaggccttgccctccccctcaggcgagaggcacaga

SEQ ID NO: 24111 - DNA, 582 bp, Homo sapiens
  source 1..582: mol_type = other DNA
aggggaccaggaagatgggagcaccacctgccctgggcgggagcaccacctgccctgggcgggagcaccacctgccctgggcgggagcaccacctgccctgggcgggagcaccacctgccctgggcgggagcagcacgggccagtgacacttgccacaggcctgtgttctgctcacaggcacgtgccctcgggggtggttgggccccaggtaggggtgagggccagacccagcctctggacctgatgtcccgcaaggctgggctgcagatggagagccaaggcccacacggcctcactgtcaggggtggcctccccttgccctctggaggggtcctccataaggcacgggcttaccagtgcctcggtccccgaagcccccgggtccgggaggggccagttaaagcattcctgtggccctggcagggtggccctgacaactagactccttggtccaggcacgaggtccagcgggtgggcagccctcgcctccccgaaggtgggagccgccccggcctccgcgtcgggttctgggccgcgagaggggcggggcagtagggccccgcagggcgcggagccacctg

SEQ ID NO: 24112 - DNA, 726 bp, Homo sapiens
  source 1..726: mol_type = other DNA
gtgcctcggtccccgaagcccccgggtccgggaggggccagttaaagcattcctgtggccctggcagggtggccctgacaactagactccttggtccaggcacgaggtccagcgggtgggcagccctcgcctccccgaaggtgggagccgccccggcctccgcgtcgggttctgggccgcgagaggggcggggcagtagggccccgcagggcgcggagccacctgggagggcgaggccgtgccccacatccaggcagcgcaggccgcgggccgctcccctagccaggaagagccgccgtccgcaccgggaccggagaggtgggccccggagctgagccaggcggccggaaccccacgggacccgcgcgcacctccccaccaaaggggccccggcgttggggggcgaggggtcgctgccctggaggacgttgggacctgccgcgctgcgctccgaggcggggaaacggagggctggactccgggggagggcccagtcccgaggagcagagggggcgggccagctccgggccgggggcgccgacggggccggttccggttgggggggtccctgggcccggcggggttgcgggacgcgccgtcggggagctgcggcccgggagcccgtccggaggcggcgcggggtccgggcggggcgcgcaggggcggcgccaggcggtgacgtgcgcgggggacgtgccgcgccagcgacccgagcacttaaagtcg

SEQ ID NO: 24113 - DNA, 590 bp, Homo sapiens
  source 1..590: mol_type = other DNA
catggggacgggttcttcaaggtccccatgcacctgcagcctgggggggcgggctttcttcccagtgatgggaatcaaaggccccgatctttgaagctggccatcagcctgagaacacactccgttcaggctggacatcaggacctcccagggcgcgggcctgctctgtctctggcccaagcccgggaactggcagcccagtgagggggtctcacctgtgtcccctgagcctgcctggcttcctcgacatctcgggggacacacgaaaagcccccgcgagagcagcaggagcctgcacgtggaaggggctggcggcccgaggtcccacggcgcagggtcgggaggaggcctggagcgctcgccccgcccggccccgcccctggagcgccgcggccccgccccgccgggttgctaggggaagtgacgtcacagcgcgatggcggcggctcctttaggcagcttccatccgcggcgggaccggtaggggccggagcagcggcggcggcgctcggactgtcccatccgccccgtattgaggcgctgggagcgggggcggagccgggagccggacccgcagtagcggcagcagc

SEQ ID NO: 24114 - DNA, 491 bp, Homo sapiens
  source 1..491: mol_type = other DNA
cctccagctgtttggagctgagcacggctgctgtctcactcacacggcggtgcccacaccacagtgacacatggacgtgggaccatggggacgggttcttcaaggtccccatgcacctgcagcctgggggggcgggctttcttcccagtgatgggaatcaaaggccccgatctttgaagctggccatcagcctgagaacacactccgttcaggctggacatcaggacctcccagggcgcgggcctgctctgtctctggcccaagcccgggaactggcagcccagtgagggggtctcacctgtgtcccctgagcctgcctggcttcctcgacatctcgggggacacacgaaaagcccccgcgagagcagcaggagcctgcacgtggaaggggctggcggcccgaggtcccacggcgcagggtcgggaggaggcctggagcgctcgccccgcccggccccgcccctggagcgccgcggccccgccccgccggg

SEQ ID NO: 24115 - DNA, 719 bp, Homo sapiens
  source 1..719: mol_type = other DNA
acgcacccgtctctgcacacacaagtgtccacacacagccgtctctgtacacgcacgtccacacgcacacgtctctgcacacacacgtccacacgcacccgcctctgcacacgcacgtgtccacacgcatccgtctctgcacacacacgtgtccacacgcacccgtctctgcacacacacgtgtccacacgcacccgtctctgcacacacatgtccatacgcacccgtctctgcacacacacgtgtccacacactcctgctttgggcaccaacgtcgcttcgtcattgtggcgggaggccctcaggacagagaagtgccccctcccagaggactcagtcaccctggggtcagagcccaggcacaggtctccctcagcccctgaagctgggcactgcggcctgacgcactcctcccagggaggtcgggaaacctcaggcctggaccaccctcccgcctcgttgggtgcgggtgcaggcccaggctccttccccacggccaaaccagggggtgccaattctggcctgccctgtgttctgggcataaattgggtcccagaggaccaggcaggctgggggccagctctgccgctcacttccgccttgacctcctccctgtggagatgcaggggcagtggggggacgccctgctctcagggcagctctcagggaggcagtgctggggaggggtaggtgagaccgcccctcccaccgggcccaca

SEQ ID NO: 24116 - DNA, 670 bp, Homo sapiens
  source 1..670: mol_type = other DNA
tgcaggctccaaggttcagcgtccagtctggaaactgggggcattgcccacgccccagtgtcatcacgtgactgcacgcccgcacctgcccgcgtgccccctcgggttctagtggaggacgtggcccgcctgccaccccgccaggcgccgggtcctccaggcctcctcgagccacctcctgcccacctgggatgtctgtgggttcccggcccggatgcgtcttggactgccccaacaggctgggcccctcctcccgggctggccaggccagcacctccgcaggggccgcaggacgcctgaaggcccaggccgcaggtgcaggaccctctgcgggggagctgggggaaaagggcctctgaccctccgggggtccagctcactctgcccgcgcactcccaggcatctgggggccgccccccgccctccccccgcggcccactcggcccgcccagctcgccccgtgcacagactcgaggcctccaggagcggagccaaacagccccgcggggaacgcgcgccgcacgcgagctggacccgcccaggcacgaactctcctggaaaaatgctcccggcggctttcctccgtgccgaaacttggaggcttcccgtaaacccagctccttcctcatctgggaggtgggtcccgcgcgggtccgccgcctcctccctg

SEQ ID NO: 24117 - DNA, 701 bp, Homo sapiens
  source 1..701: mol_type = other DNA
cagccccctctccagcatctcactggcagccagggtggctggggtttccccgagggcgggggctggggaatctgacctctgtgccccggccatggtgccgtcttgctgggaggatgacaggctgtgtttcacctgccaatttggcccacccacctctggaccctgggtctgatggctgagctgcaggctccaaggttcagcgtccagtctggaaactgggggcattgcccacgccccagtgtcatcacgtgactgcacgcccgcacctgcccgcgtgccccctcgggttctagtggaggacgtggcccgcctgccaccccgccaggcgccgggtcctccaggcctcctcgagccacctcctgcccacctgggatgtctgtgggttcccggcccggatgcgtcttggactgccccaacaggctgggcccctcctcccgggctggccaggccagcacctccgcaggggccgcaggacgcctgaaggcccaggccgcaggtgcaggaccctctgcgggggagctgggggaaaagggcctctgaccctccgggggtccagctcactctgcccgcgcactcccaggcatctgggggccgccccccgccctccccccgcggcccactcggcccgcccagctcgccccgtgcacagactcgaggcctccaggagcggagccaaacagccccgcggggaacgcgcgccg

SEQ ID NO: 24118 - DNA, 624 bp, Homo sapiens
  source 1..624: mol_type = other DNA
ggatgtggcctcggggacaagcccctctgtgcagaggacgtgggcaggtgggatttcagccccctctccagcatctcactggcagccagggtggctggggtttccccgagggcgggggctggggaatctgacctctgtgccccggccatggtgccgtcttgctgggaggatgacaggctgtgtttcacctgccaatttggcccacccacctctggaccctgggtctgatggctgagctgcaggctccaaggttcagcgtccagtctggaaactgggggcattgcccacgccccagtgtcatcacgtgactgcacgcccgcacctgcccgcgtgccccctcgggttctagtggaggacgtggcccgcctgccaccccgccaggcgccgggtcctccaggcctcctcgagccacctcctgcccacctgggatgtctgtgggttcccggcccggatgcgtcttggactgccccaacaggctgggcccctcctcccgggctggccaggccagcacctccgcaggggccgcaggacgcctgaaggcccaggccgcaggtgcaggaccctctgcgggggagctgggggaaaagggcctctgaccctccgggggtccagctcactctgccc

SEQ ID NO: 24119 - DNA, 453 bp, Homo sapiens
  source 1..453: mol_type = other DNA
tgacagagtgtgacattttggaaaccgtctgtacaatattagagtggtgggtctgcatgattatacatgtgtccaaacctgcagaatgctttggctcaattttgctatgaacctaaaactgctgtaaaaaatagagtctactgaaaaaacaagtgttaatttataagcgtcttgtttaagtgtttaaacaataactaattgacaattggctggttcttaaaattcagagaaggaccaggacgtcgtgcccacgacgggccagcaaccacaggctggatgctcaccctgtgccagcctgcagacggagacccccagaggagctgcctctccagggccttcctgcaggtgcccaggggctgcacatggccctccttggagggagctgctcagcactttcatttcctggaaactgaggctcatgggagatacccagaccatgggaaatggcccttt

SEQ ID NO: 24120 - DNA, 290 bp, Homo sapiens
  source 1..290: mol_type = other DNA
gagaatctcttgaacccggctgcactcccatttaagatcctatctagttatttctaaactgacgacttcaatgtgcaaatcgtcaatgggattgctctagaattccacggggaaagcaggtttcgtttcccggagcagcagcagcagctcatcaggctggtaggtgggcctctgccgtcggctaccgcggctcccgcccgcacctgccctgctcccagcatgggctgcggtagaccccgccccccgcggcagaccccacccccccacccgggtcgggccaggccccgccc

SEQ ID NO: 24121 - DNA, 676 bp, Homo sapiens
  source 1..676: mol_type = other DNA
tgtgtgatttgttgctaaaacaaaacagcactagtttgtttataagatggttatgatctataataacacaaataactgccaaacaaccttgttttaaagaccttgttaaactagatgtactatgctttcttatcaggccgcacaatatgatgcttctgtaggaaatttatccaaattttaggtaatattaaaactaatttgtatttctagagctcagatcagcttgattataaataaaatttatgtattttttatttatttttcctatctactatgaaagcacaaaggatttccagcccctggttccgtgcaggggttcggaggctgctgaccctaagggctctgtaacacagcactttcagtttacaggctctgtgcgagcctctctcagcagccccgcatcgccgctgcgggacagccacgctgggaggcgtcgctcgggagcccggccgtccctcttcaggtactggcgcgggggaaacgcttccagccaggagccgcccggcctagcgcgcagagccagagccgcacccgcacctcacctgcgccgccgcggtcccgcgaggtccgggggcgcagccaggcccggccgccccgccctcgcggccgccgcctccgctctgagccccgccccgctcggccgccgattgctcgggcctggccgccagcccagggg

SEQ ID NO: 24122 - DNA, 498 bp, Homo sapiens
  source 1..498: mol_type = other DNA
tatttctaaactgacgacttcaatgtgcaaatcgtcaatgggattgctctagaattccacggggaaagcaggtttcgtttcccggagcagcagcagcagctcatcaggctggtaggtgggcctctgccgtcggctaccgcggctcccgcccgcacctgccctgctcccagcatgggctgcggtagaccccgccccccgcggcagaccccacccccccacccgggtcgggccaggccccgccccatcagccccagtcccgccctgtccgccgccgcagcgcgcgccggttccggcgctcggccgctccgttgccctcgggcgccttggttgcggccctccgctgaggagccatcggaccaggccgccgcggagccgggccggacgcgggcgccaggcccggggacgaacgccgtaacagggcaggcacggcgcagggacgcgagtgcgacgcgctcggccatcggcccctgggctggcggccaggcccgagcaatcggc

SEQ ID NO: 24123 - DNA, 476 bp, Homo sapiens
  source 1..476: mol_type = other DNA
gggaggagggagtgaggtatgtctgtctcccccttcccgtttttcaggataacttgggaatgctcttggccaagcggaagggtccattcagatggtagaatcctaggttaaattttttctggcaagactacttatgttaattagcagtcgggaaaacttctataatgagaaattcttctcatgcagtatttcataaaggcaggacaaatgcttgatgctttccttttatttacattattatgaattacagactggagcatctgaggattttaaattcactcgaattcctgttggcaatgagaaccgtttctttttttcaagaaaactggcttctttagcaggaaccatccgcccggatcccggaaaggaaatgcttgcggccccgccccaatcccgtaagcgcgcgcggccccgcccccaatcccggaagcgcgcgcggccccgcccccgaaagtcggctcggctccgctccaatc

SEQ ID NO: 24124 - DNA, 476 bp, Homo sapiens; identical to SEQ ID NO: 24123
  source 1..476: mol_type = other DNA

SEQ ID NO: 24125 - DNA, 352 bp, Homo sapiens
  source 1..352: mol_type = other DNA
gcctgcagggtggccattctgacagacagggaagcactgcctctggccagaagcctgtgtaaatatacatatttatcaagctacaggagaagtcatgaatatttttgaagattcacgagggtcatgcaccagaaccactccatggtcagtgtctcttatcagtaaggaatactggtggtttccgttaagctcttagccaagaaaacctaatggtagttagccaagggttggccttaataacaggtgtctcaccttggtttctgtaatacacacacactgatttcataaaacgtttatgagtccaagaaatccgtggttactgacaggcaggccgcgcatgcgcgctgctact

SEQ ID NO: 24126 - DNA, 526 bp, Homo sapiens
  source 1..526: mol_type = other DNA
tttctgtaatacacacacactgatttcataaaacgtttatgagtccaagaaatccgtggttactgacaggcaggccgcgcatgcgcgctgctactccgccgagcctacgtgacacgacgtcaagtggcaatggcggcggacgagggctgtgcccccggcccgccccgttaggagccgcgagtaaggcgagtgtccaacgccgagctggctgacagagcccggccgcggcctccgcgggcccaggggcctccaggccccgtgaccaccggaccgagcaccctggaacggccccagcttggcctcgggacagtccgcgcgctcaccgactccctggtgaacgccgcttggccgccgccgccgccgcaggacccacgagaagcggaaaccggcgcaaggacccggtccccccggcgccgtacgtggagtgagcctgcggtccgccccgcgcgctccgattggctctggggcctggcccgcgctctcattggccgagcgcggccgttgggggtgaaggacaacaaagggc

SEQ ID NO: 24127 - DNA, 307 bp, Homo sapiens
  source 1..307: mol_type = other DNA
ggagcagtccacctcacaggtgcccagtgcgcaggacctggaaaatagatgtttatgtcctgacatggacttttaatagctgggactgcatggtctcgagctcctgggctcaagtgatcctctcccctcagtggtggctgccaaccatgggcctgacccggcgagcccgtaatatagtgactcataggattactgtcctttgatttatgttaatcatagccttgaacgctttcttaaagtgtaaaagttacagttaaaaaaacctccaaccttaaactgtgcccagccacacggagggcctcagaga

SEQ ID NO: 24128 - DNA, 509 bp, Homo sapiens
  source 1..509: mol_type = other DNA
agctggggaatacccaagcctggctgcagccgcttagctgtcttgccctctgccttccaggcggcctcaggtaagaaaggcgagcctgcagccagggagctccgtgatgttgctggcacctggcagggcacagggtgcagccctgggcccagaacctccagactgggggctgccgatggggtgaggctccctgtgctgcacccacaggccgtgttgtgtgagtcttacagacccaacagagggaaccttctgagcagctcagaactgtcccagggcttggccaagctgctaggctcaaaacaggcccagaagttgagaagagatggtccctactcttctgggggagggcacgcccaggcttctttcttcgtcaagcctgcccgggcaagggctcctgcacatcgcaatactagtggggtggggcagcccgcacctggtgacaggtggcctcactcatggcgcaggggccaggccggaaaagaccctgaggctggacctggtcgtatctg

SEQ ID NO: 24129 - DNA, 616 bp, Homo sapiens
  source 1..616: mol_type = other DNA
cagactgaagtgcagtgacgcctcccaggttgaagcaattccaatctctgagtagccctgacctcaggtgatccgctcgcctcacggacagttaagtaaatgtgattcagaacttctgcgtattttgcaggacagttttcatgactcgctgtgtcaccgggtcccctgggtctgaggccacgcggcacgcggcccctccgcgatattcccgcacctcgcggggaaaaggccgctcggcggccgggcctgggctcgcgggccgccgcctatccgcaccccggcgtccacgccgggttgggggccgctgcgtgcctggcgcccgctgtgaccttgggcctggtcccgcccgccgcgcctaaggcgctgccaggccgggctcagacccccgagctcccgcgcccgcgccaaccccgcgccagccccgatcccgcgcgggctgccgactgtccgccccgggttttccgcggcgcccggagtcgggactgcgtcgggcgtcgccgccggacgtgccggcagcttggtggcctgcttcggtagccccactgccgtacgccgcccccattggccggcgtaaccgtccgtcagcgaggggcgggcccggcgtgccggctcggtg

SEQ ID NO: 24130 - DNA, 250 bp, Homo sapiens
  source 1..250: mol_type = other DNA
tgtcctgggggcactgtgtgtcctggggggacctctgtgtcctggagactgcgaccgtcctgcaggagctgcgtgtcctgggggaccctatcatgagggatgatgcaccgggccccgcggcgaccccgcgcatgacaaggccacctcccgcgaacgtgcggcgctccataggctccctggtggggcgcgggcgcgcgcacggacgtccagcacgcacgcacgcacgtccagcacacacgcacatccagca

SEQ ID NO: 24131 - DNA, 584 bp, Homo sapiens
  source 1..584: mol_type = other DNA
gcacacatgcacacgcacatacatgtgcagacacctgtgtgcagacatctgcagagggacacatgcacacgcacatacatgtgcagacacctgacatgcacacgcagacacatacatgtgcagatatctgcagaggcacacatgcacaacacatgcacacgtacacaggcgcatgtgcacacacgccatggcgaggcggattctacggcgacagggactcctccggcgaggcggcctgcgggggccttccggccgcgtccgccaactggaccgaccccgagccccacccggccaggcacccgaggtctccctggtgggcaggtggggaggccccacgctgggaccctgcaccgcccctcgcccctcccgactcggggcgtgcagacccgacgaccgtgggagcgagttcgtggcgctcacgggcgcacgcgagagtgtaaacaccccaccccgccccgccattggctgcgggagcagagtccccgcctcctggggtgacagcggcagctgccctagcaactgcggtccaccaatggcggggccgggcggggatgcgcgctgtcagcgctgggcggcggggcggg

SEQ ID NO: 24132 - DNA, 429 bp, Homo sapiens
  source 1..429: mol_type = other DNA
ctgtgagccggagaccccgggactcgggtagccgggctcagcccaggtcggaaggcctcagacggggaagcggatggtgtggccctcagcacgacccaccccaaatcatgccttgccaggtttctgggaattcctggtccagcccagctggcacctgacactggccgtaacggcagggccactggcttagcctcagggccccaggtttaggggcggtgtctccgttgcacgtgcaccccgagcgcgcccgcgctcccggctttagaaaatatattctaactatttccatttgaacccaaaccgtctgggtcggggtcggtcaggccccgccccctgacgtccgcttgtctctgcggccgggccccgcccccacccgcccccccgcgcggactcatgtttgcccgctcggccgccgtctctcgagtctcc

SEQ ID NO: 24133 - DNA, 543 bp, Homo sapiens
  source 1..543: mol_type = other DNA
acctggccatcccagctactcggggagatcgcgccactgcactgcagcctgggagacagagactccatcagcacggactgggctcaggtgcgcacctgctcgtgtgcacgcgtgtgtacccacgtgtatgcatgcatgggcgcgcgtgggcattcctggaatcagcagccccaccctgggccgggtcagcgcgtgccatcggagccctgcgcaagccccacgtcatcacgggggccgctgggcccggcctggtctgcagtgtgggaagccggccaggcctgtgaccagcgcccgggccgagggccggacctgcgtccgctgcggggcagggataccgggtccctgcagggagctcaagccccagcgcgcccgcgaagagctgcgcggactcccggctgcttcccccgaatcccgggcgcaggaagcgcgaagccggacgaacgcggggagcgcgcggcgagcccgcctgaggccgcccctcccgccgcccggggtcacgcgccgcgcgctcccgccccgccccgccccgcagcgcctcagccg

SEQ ID NO: 24134 - DNA, 643 bp, Homo sapiens
  source 1..643: mol_type = other DNA
agcccgcagcgggtctcggctggcgtcctgcgcgctcgtggggctgctttcagggccagacgcacggcgagctgtgcacgccaaagtcggcgcagcgcccaccgcggcctccgggccccgctcccgctcccgctctggggcgcgccaccactcggcgcggggcccgtgtgatccgcgcgggtcccagcgtggcgcgtctgaggggtgggtcccggggctcgcctcgcgcccccgactgcgtgctcaggccccgccccgaggctccgccccgctccgcgggccccgcccccgccccgccccccggcgtgttgtggctccgcccctcccacccacgcgtgcccgggccccgcccccgttgcgcgcagccccgccccgtgctcaagccccgccctggcggcccccggcccctgctcaggctccgccccgctgtcctccggcggcggcctcaccccgcagcccggccgcccaccgcgtgctcaggccccgctgagcggtcccggctccgctcgcgccctgtggggtccacggcgcgctcttccagagcctttgggacccgtgcccgctcgcgtcctcaagtgcacgcgccgtcccgcgcgcggtattttggcggccgacgcgttccgtagcgaggccggcgagtggg

SEQ ID NO: 24135 - DNA, 465 bp, Homo sapiens
  source 1..465: mol_type = other DNA
agccctgcagcctctgccctgcagcctcaggctactggggtgcggcctccgggcccccaagttaagtgcctctgcaatttaaagtggggggagggtggtttgcgggagtgcacagctggccccctcccccgcacccacacaccctgctccgcagctcttgcggtgcctggtgtcgggcaagctccggcaggtccctgcagccaggctctgggataagctccctccctgccggctcagctcctgaggaggaccagggacagagactctcctctggacctcatggcaaggacgccatgaatactgtgcctcccatgtctttatcatgacgccaaatattcatcgggtgtgattctgatgaatatagtaatctctattatggccgtccaggcagcaccgacgccgcactcacagacagttgagtctggagacagcgccagtgctggggaggctgcccgcagcagctcg

SEQ ID NO: 24136 - DNA, 366 bp, Homo sapiens
  source 1..366: mol_type = other DNA
catagtgaccgtgcctgtagtcccagctactgggtacagtgaaccgtgatcgcaccactgcactccagcttgggtgacttaagtcttgcactttgggaggccgacgtgggtggatcacaaggggcgcctgtagtcccagctactagccctgcagcctctgccctgcagcctcaggctactggggtgcggcctccgggcccccaagttaagtgcctctgcaatttaaagtggggggagggtggtttgcgggagtgcacagctggccccctcccccgcacccacacaccctgctccgcagctcttgcggtgcctggtgtcgggcaagctccggcaggtccctgcagccaggctctgggataagctccc

SEQ ID NO: 24137 - DNA, 351 bp, Homo sapiens
  source 1..351: mol_type = other DNA
tgagtcatggaggtccaggccctgcccttgcggatctctgtcaggggcactcagtcagggggtccaggccctgccccccttgctgtcagtctctctgtcagggacactcggccgtggggatcccagggcctgatttcccgcatgtaacacgtagcacatgtgtaacaagtacgtagcatgtatttgctgcgggtcagctgccaactcagccaccatgtcccgaggagcccgcatgtcctcgtggtcatgtgctgtgtggcccagcaggccagtgaggagaactggaaaagctgtttcccaggtactgcggggggccccccgtgctggccccgcagccatggcgagatcatg

SEQ ID NO: 24138 - DNA, 268 bp, Homo sapiens
  source 1..268: mol_type = other DNA
ctgtgccacctggtcacccaggagcttgctctgatggatctgagcaaagtaatgaaaacctttgaataaccgttgtccatataaaatgcaaattctacacgaatctggtttagtttttcagaaacagcctctggagccggctgagcatgggaaaagaggttcctccttgtcctgcacacgctgtgtccttggagggcccagagcccccacggtaggggcagctggcagtgaagccgctggagcccccgggctctacggaaatttccag

SEQ ID NO: 24139 - DNA, 724 bp, Homo sapiens
  source 1..724: mol_type = other DNA
ggggtcagggcctcactcctgggcacccctcctcctgggggacctcgcggtggggtcagggcctcactcccgggcacccctcctcctgggggacctcctggtggggtcagggtctcactcctgggcacccctccttctgggggacctcacggtggggtgagggcctcactcctgggcacccctcctcctggaggacctcctggtggggtcagggcctcactcctgggcacccctcctcctgggggacctcgcggtggggtcagggcctcactcccgggtacccctcctcctaggggagctaaccccgggcacccctcctcctggggggatcagtggggtcaaggcctcaggcctgggcacttctcctgggggacctcgccccgggcacccttcctcctggatgacaccccggtggggtcagggcctcacccctctcctggggccagcaactccaggccgcctggcttgggtttgcagcgcggcgccctcgcacagccccgccttccccgcggcggcgtctacgggggaccagagaccacgggccaaggaggcggctccgagaggtgacccgggaccggggcgtggcccagggcggaagactgaggcggcgacctcccggccccgccccgcgccgagcagccccgccccttcccctccgggaggcccagacccgcctcctggtgccgcccgcgcaggcgccgtaggccgaagcggcgggatgagc

SEQ ID NO: 24140 - DNA, 775 bp, Homo sapiens
  source 1..775: mol_type = other DNA
ctcctcctgggggacctcctggtggggtcagggtctcactcctgggcacccctcctcctgggggacctcgcggtggggtcagggcctcactcccgggcacccctcctcctgggggacctcctggtggggtcagggcctcactcctgggcacccctcctcctgggggacctcgcggtggggtcagggcctcactcccgggcacccctcctcctgggggacctcctggtggggtcagggtctcactcctgggcacccctccttctgggggacctcacggtggggtgagggcctcactcctgggcacccctcctcctggaggacctcctggtggggtcagggcctcactcctgggcacccctcctcctgggggacctcgcggtggggtcagggcctcactcccgggtacccctcctcctaggggagctaaccccgggcacccctcctcctggggggatcagtggggtcaaggcctcaggcctgggcacttctcctgggggacctcgccccgggcacccttcctcctggatgacaccccggtggggtcagggcctcacccctctcctggggccagcaactccaggccgcctggcttgggtttgcagcgcggcgccctcgcacagccccgccttccccgcggcggcgtctacgggggaccagagaccacgggccaaggaggcggctccgagaggtgacccgggaccggggcgtggcccagggcggaagactgaggcggcgacctcccggccccgccccgcgccgagcagccccgcccctt

SEQ ID NO: 24141 - DNA, 532 bp, Homo sapiens
  source 1..532: mol_type = other DNA
ccacacctgcagttgtgtcctgaactcaagccttgaacccttgtgggaaaagacttgacagtaatcatagatcactggaacagatataatagtatttaaaaagttcaaaatattgtgagaattaccaaaatgtgagccacaaaccttcaatttatatatatatatatataaatatatataaatatataaatatatataaatatataaaaatatataaatatataaaaatatataaatatatatatatagaacgcaataaactgaggtttgcagacatcatacagctagctagtaacagctgggtttcaaaacacctctgactttacaaccactaattttatttattgagtgcggtgctcagcctcagacagcaggtgggataccaagttcccacttcatctgccgcagggctgggccgcgccaggaccacgtggccagtgcgcgcagggcgatgggcggcagtgcgcaggcgcgcacctgctgcggtggatggggccccgcgcccgtccctcagtcgctccggagctgcacg

SEQ ID NO: 24142 - DNA, 764 bp, Homo sapiens
  source 1..764: mol_type = other DNA
gagtctctagggcctccccagtccgggcgggggtctccgctgtcccccccactgggtcaggcacgtggtggccgcggtgaccacctggggaaggcgccgactccgagtcgagcaggacgctccgcaggtgattctgccccgcgggcacgggacaccacccggccccgcgtatccggagcgaggagtgggcagcgctcggcagaggccccggcgcggcggctgcacgtcctccgggaggagggagggaagccgggctcaccgccgggcctcccccccggtcaggagggagccgggaactcccgaggcaccaactctgcggaacgcggggcgcccggatcgcccctgatcaccgcccgctggcgaggcgcgggggacccagaaccggcggggccgggagcctcctttaccgctccgcgccggggctgcccgcaggatggggcgcaggatggggcgcaggatgcggccccggcaccgcctcgcgggggtctgcggggggcgaccgcggctcgcgtcggccactacttgcccggactccgtccaggccgggctcctccggaccccgctcgccgcccggcgcggccccctcctcctgcagcgccccccgccccggcgcccgcgcccccgattcgctgctgactcggtgtctgcgcgtccggccgggcgccccgggaggagtttccggcgcggggcggggtcgggggcggggtcgggggcggggcggggcggcgggtgggccccaccccccagctgagcccggccgggcg

SEQ ID NO: 24143 - DNA, 384 bp, Homo sapiens
  source 1..384: mol_type = other DNA
ttatgactgggaactcattttaaatttacagacttcgagttacccgagtctgagtcagtgcttccttctccaccgtgtaactccaacttagagttactgccacagcctcggcccagtagagaccttttaataataaatactacttacatacagctctgtgagacaggtattatttctatttcggagcagagaccacagggcttcccgggatccgcggactggcggcccaggaccactgctccagctgtttccccaggtaatccacctgccttgggttacttcacccaagaaccccgagtaggctgtttggctgactcaggcgcccaacgcgcccgaccggtgttcacaggccactctagccgggctcagagagaccgcagtctc

SEQ ID NO: 24144 - DNA, 426 bp, Homo sapiens
  source 1..426: mol_type = other DNA
tgcccggctgagcctctcagcagcccggcctccctggcttttccagccaaggcaggatgtccactcgggctctccctgggtgacagagagagtgttccctcaggcgtcaacatgccccagagccgtttggggaagggcccaccttaccccccgccacacttgctaggtagtttggggtgtagaagcgaccccagcagcagcggcaccttaggtgctcgccgaaggtgaacgctggaccgccccgggaagggctttgctcccgacttcatcccccgcgcgagtggggccagggcgcgcagtgcccggcgagggcaggcgcgggccgagggcggggcgggcgcgggagggcgcgagaggggcgtgggcgcggccgctcgctcggccgggtcgggccagggggaggggcgctgggagagcgagagcggc

SEQ ID NO: 24145 - DNA, 526 bp, Homo sapiens
  source 1..526: mol_type = other DNA
ctgaaatattgctctgaaattttacaattgtagggccctttaacaagggtagacttgcaagttgtccagcatccagagtttgtgaacctggggcccaaggacagcacctggcatgggcaggcccacttggcgactctctcagggctgctgcagctgtgtcagtgtcccccagaggctgacatcgggcaggggagcaactgctcagaggcacctttgtttttttttttaactgaattaagttgccaagtttgaaaaatcaggaatttcacataagcatccctatttctgtcttcttttgaaaaactgaatgtcggacgcgcaggtcctctgcaggccccgcccacccggcgtcacctgcaggtcccgcccacccggcgtctgcaggccccgcccacccggcgtcacctgcaggccccgcccacccggcgtctgcaggccccgcccacccggcgtcacctgcaggccccgcccacccggcgtctgcaggccccgcccacccggcgtcacctgcaggccccgcccaccc

SEQ ID NO: 24146 - DNA, 313 bp, Homo sapiens
  source 1..313: mol_type = other DNA
gggccgatcacttgagtcaggagttggaggccagcctggccggcatggtgaaacagccactgcactccagcctgggtgagattctgtctcagtttatggaattatcagcccaacttgataaaatcagtattggttaactgaggttaacgaagtaaagagctgcagacactattaactgctaccttaaaccagtggacaacatgatgctttatcttgtttttctctcggtggaaaagtttctaaaaatatgcagcagcacaaatcacttaaactttgcgtgaccttgaagaaagtcacgatgatccaggaacag

SEQ ID NO: 24147 - DNA, 568 bp, Homo sapiens
  source 1..568: mol_type = other DNA
aaaataataatagttatgagctgatctgtttgtcactctctgtgcccaggcagagcaaattcagaattgtcaaggtctgacctgcttgcatagtaaggatggattggctagtctctcaaaacttatcatgactaacagctgtctaagttgtttttaaatgaatcattaagggctacattttcagttcagctaatcaagtagaatacttatctattgcattatgtatatgctagactttatcacatcgcttcatatactaaatgactgtgtaaatacacttttcgaactgttttatctaagagtttactcactttcacattgtggcttatagtattttcaatctaagagactaattttgcttacataggaaactacatattttaaattgaaaattaaaaaaatatttttaaggttttaatgagtcctatcaaaacacatttgtatataggaaggtatcactgttgccaattgtgtacattctgaacagtaccaaattttagatcatagttgtaaatctcaaaatgttgggttaataggattaaacactgtgtcatcaaactgataggac

SEQ ID NO: 24148 - DNA, 279 bp, Homo sapiens
  source 1..279: mol_type = other DNA
taatgttataaacaattcaggtggcggcgcctgtagtcccagctacgcgagaggctgaggcagcagtgagccgagatcgcaccattgcactccagcctgggtgagagagcgagactctgtctcaaacaaaaaacctcggaaaagccctggcggtcttttttttttttttccaggttcaagtggtcttgaactcctgacctcaggtgatcttgcttcggttgcttcaggagaacgaagaaatggaaatgagatctcaaacagcagttttgttgacaagat

SEQ ID NO: 24149 - DNA, 372 bp, Homo sapiens
  source 1..372: mol_type = other DNA
ggtggcggcgcctgtagtcccagctacgcgagaggctgaggcagcagtgagccgagatcgcaccattgcactccagcctgggtgagagagcgagactctgtctcaaacaaaaaacctcggaaaagccctggcggtcttttttttttttttccaggttcaagtggtcttgaactcctgacctcaggtgatcttgcttcggttgcttcaggagaacgaagaaatggaaatgagatctcaaacagcagttttgttgacaagatggccctgggctccgttctgtgccacacccctggcgcacgctctctagagcgggggccgccgcgaccccgccgagcaggaagaggcgcgcggccgcgggaaaaggcgcgcgga

SEQ ID NO: 24150 - DNA, 449 bp, Homo sapiens
  source 1..449: mol_type = other DNA
tcgcaccattgcactccagcctgggtgagagagcgagactctgtctcaaacaaaaaacctcggaaaagccctggcggtcttttttttttttttccaggttcaagtggtcttgaactcctgacctcaggtgatcttgcttcggttgcttcaggagaacgaagaaatggaaatgagatctcaaacagcagttttgttgacaagatggccctgggctccgttctgtgccacacccctggcgcacgctctctagagcgggggccgccgcgaccccgccgagcaggaagaggcgcgcggccgcgggaaaaggcgcgcggaaggggtcctgccaccgcgccacttggcctgcctccgtcccgccgcgccacttggcctgcctccgtcccgccgccgtcccccgcccgccgcgccatgcctgtggccggctcggagctgccgcgccggcccttgcc

SEQ ID NO: 24151 - DNA, 586 bp, Homo sapiens
  source 1..586: mol_type = other DNA
caccgtggcccgggctgcagtgcagtggcgcgatctcagttcactgcaagctccaggcagttctgcctcagcctcccgagtagccgggactacgggcgcgcacgcctgacctcaggtgatccgcccgcctcggcctcccgaagtgctgggatgacctgcctcttaatttatcaggtggcaaaagggggtacgctggcgacaaccagcggcctcggcttgggagctgagccactggccggaatctgccgctgagcgaatgcactcgccctctagggcgcggctcccgggcaggtcccttcacgagtcttccatccgagcagagcagggtcccgcggaggcgccgaccgggcgcgaggcctcctgcctgcccaggttccccggcgaccctgagcgaaccctctcggggtcagctccgtctaggctgaggcgaaggcggagtgcgcccccgggagcccggagctgggactgcagctcccatggggccaagttcacggggtgcggccgcgcggccaatgagcgccctctatgccctgacggtgccccgcctcgcggcgctgccgcgctcccgccctcccgccctcccgcc

SEQ ID NO: 24152 - DNA, 461 bp, Homo sapiens
  source 1..461: mol_type = other DNA
cgccagctcctgggggcagggacaggatccctgcctcggaaggaggcgtgtgagtaacgcccccggctcacgcggttgggcttattcaatctccgcggcagccgagcgtcggtgggttcgcgggtgggaagggacgccgcgggcctgctctccgggcagggaagcacctcgggaatccgccccggaccccgccgccatgttgggtcgggagaagtgacacggaccggtcgcctatcctgaccacagcaaagcggcccggagcccgcggaggggacctgacgggggcgtaggcgccggaaggctgggggccccggagccgggccggcgtggcccgagttccggtgagcggacggcggcgcgcgcaggtacccgcagcccccgcccccgctagaagtcagggggcggggccgggggggggggaggcgtggggagcccgggaactccctcctcctgaagtaacg

SEQ ID NO: 24153 - DNA, 210 bp, Homo sapiens
  source 1..210: mol_type = other DNA
actctaaagggcctcaaggttcagtccatgaggaccttgacgccagctcctgggggcagggacaggatccctgcctcggaaggaggcgtgtgagtaacgcccccggctcacgcggttgggcttattcaatctccgcggcagccgagcgtcggtgggttcgcgggtgggaagggacgccgcgggcctgctctccgggcagggaagcacctc

SEQ ID NO: 24154 - DNA, 386 bp, Homo sapiens
  source 1..386: mol_type = other DNA
aggagatctaaattaaatttattaatagggagctctagagaaatcgtaattatatagttaaaaacataacttttgtcatcctcaaaattctaaaaattctaaacaattggacttcttaaaaattggattgtctttttctgatacccgatcattacgtgactgagaaaggctctccaaaaaccatgttcggatagatttttgcgaactgcacagataaactctgtaaccagcggtagcagcagcagaagccgcagcttcagaggcagccggagagacctcggagcagagaaggcgccgccgaccctcgcggctgcctggcccgcggctcctacaaaggcgggctagccgcccgccctcgagcccacgagccgctggttcctgcggct

SEQ ID NO: 24155 - DNA, 368 bp, Homo sapiens
  source 1..368: mol_type = other DNA
aattctaaaaattaaacaattggacttcttaaaaattggattgtctttttctgatacccgatcattacgtgactgagaaaggctctccaaaaaccatgttcggatagatttttgcgaactgcacagataaactctgtaaccagcggtagcagcagcagaagccgcagcttcagaggcagccggagagacctcggagcagagaaggcgccgccgaccctcgcggctgcctggcccgcggctcctacaaaggcgggctagccgcccgccctcgagcccacgagccgctggttcctgcggcttctgctcagacaccaacgccagacggcgatgcctctcgggtggctacctggcagctctcctggcagcgg

SEQ ID NO: 24156 - DNA, 164 bp, Homo sapiens
  source 1..164: mol_type = other DNA
aatggtctataggcaaaatttgtctcctaggatacacatgattgacaaaacttttgaggtgtagctctcatgatttaagatgaagacttctaggagctctgcagaaacaaagttaatcgccaaagccgttcgaatttgaaattctccgccggcgctgacgtcca

SEQ ID NO: 24157 - DNA, 296 bp, Homo sapiens
  source 1..296: mol_type = other DNA
tattatcagacggttgcctaattttcatataatttttatattaatataatccttgccaagtatccagacttcctggagctgtgagatctttcatcaccaccactctccaggtaccgggcagtgcctgtttcccgaatttcggcacagaaaagcggacgccagagaaaaagctttctccttttctaagagcccgaccccagttcctggggtgacgcagctgggcgcgaccagcacgcagccttccagcgacgaggcggtcgcatggaagttactgcgcgcgtcgtggacgtcagcgc

SEQ ID NO: 24158 - DNA, 360 bp, Homo sapiens
  source 1..360: mol_type = other DNA
tgcctctgagacgctgagctgcagcagcctctgggacctggcctcggaaactgtcagatggtgcctaaggcagagttgggcaaagaaagaaccagcgttcgtttcctcctggactctctaggtccatggagctggtgggggaacgcccgaggaggaaattcgagtcgagcccccactcctctccccgcgggatgtccctcattcgccccgggaggctggcacccaggcacgacgcgaggacggccagactcgccgacggcggccgcgtcccggggggccgggagcgagcctgtcggtcgctcggtgagtcatgccccgagccccctgccgagaagcgaagggactcctgtgcgtcattga

SEQ ID NO: 24159 - DNA, 648 bp, Homo sapiens
  source 1..648: mol_type = other DNA
cttctccccagcttagtgaggctggagtgcagcgggcgatctcggctccctgcaaccccgagtagctgggattacaggtgcgtgggggctcaagtgatccggccgcgtcggcctcccaaagtgctgggattacgggcgtgagccaccgcgcccggcccgcttagttttaaaacaaaactagacccgccgatttttgtcgggtcctaaacaaaaatcaaatgtgttgcgctttggacgggcaccaggctgacgcttggcgagcgggtccctcagccaggcccgggtcggcttcctggagggctcgttccgggaacgagttcaaaggaggaaagggcggcagcttccggcgccttccccagagggccgggagacgcacgccaggagcttcctccgttggaagtcccttccgctggcgacgtgggcgctgtggccgcggccctcgtggagcctgagccctcctcacggcctccgcgcagccctggggccccccggcagggtccctcggcagcccgcgggagaggccgtggggccccggcaggtggcctcaggtccctttcgtcacttgcgacgcacccgcggtttccgcgtgctgtgaaatcgggaattgttgatgcccagccgtctgcgccggagaggctggaaacgccc

SEQ ID NO: 24160 - DNA, 559 bp, Homo sapiens
  source 1..559: mol_type = other DNA
atttcaaattttctagtaatcacattttaaaaagtgggaaaaaaaaaactaggtaaaagtaaatgtaatttcttatttaactcagtatatccaaaatatcctttaaacatgtagtatatattagaaattatgagtttttttattctcttcagtgtgtagccattgctcagtagccacacgtggctaatggctgtttgtgatgaactgaaaaaaacagtgtatcttaattcagaaatctaatatgtttgtccttttagaaaaattcagttaaaattactatgttttgaaataccaggaatgttttaattttacagtgttgcattatcatattcttgaaattaataaattctgcttgttatatacagtactgagcaggatatctcccagaattgtgaaaataccttgggtcacaccagtctgacaaaggaaataaattacttcccttacatgattagcttatgtaagatcttttatttctaaaaaatgaggatgtgattggtttagagaatcattaactcaatccctgtccacatggcaccctgcttatctccttactgtg

SEQ ID NO: 24161 - DNA, 576 bp, Homo sapiens
  source 1..576: mol_type = other DNA
cctaccgccgccgccgcaggacggaccggcggggtgcgcggggagccgggggcgtcggggcgtcagtggtggctgctgaggactctgaacccgcgcagttccctcgccgccgccctggggatggttacccgagaccacccctacccctgggtttggggcgcggaggggagtgcggaaggcgcgcgggaggccgcgtctccatcccgcccccggccctgcgggagggggcgccgggcacgtgatctgcggcgaggcgggggccgccgagttgctggaagactcttttcattgaaaattcaagatgacattttttaggcataattatgcaaacccttcctttccgaaaagtactggaactctgaatacttggaaatgctttgaaggactacttagtaaatggccaaactaatttttaatgcacatttggggcttacccattttttttttaattgaaaacgagggttctttacccagtagtgaactgtttattaaaacttggcctggctagattataatgttttgacaatacaaagtcggttttgaaatacattttgaaatatttacgaattatttagt

SEQ ID NO: 24162 - DNA, 479 bp, Homo sapiens
  source 1..479: mol_type = other DNA
atcctataatttggatatgattatccccatttttacatggctactagtgctatcaagatctggctcttaattggtcacaccatttaaagaacaaagaaagagaatctcttattagatggactgaccctactctgagttaggaaagataaaacactgagttgcgtctcaaaatttagatcacatattcaggcttgaagctaagacttaaccttgtaaattttccggcaaaaatcgccaccacgtgtcttttaaatgtaccgtacgtgtgttgttaacagcacactcagaatatatcttggcattaaaattccacgaagtccattttgagttccattacacttttaaattatctactgataaagtgacattgaaaataactcttgttgccaaataaaaaccctatatttggtttaatcgggccagacccattgaccggcattatgcaattatattacggttgtgtggcctgacattcgact

SEQ ID NO: 24163 - DNA, 544 bp, Homo sapiens
  source 1..544: mol_type = other DNA
catacatgtaatctaacaatgagcttttatattattggtatcagtaataacagctgatatttactgagtctatattatgtgactgtcacatcctataatttggatatgattatccccatttttacatggctactagtgctatcaagatctggctcttaattggtcacaccatttaaagaacaaagaaagagaatctcttattagatggactgaccctactctgagttaggaaagataaaacactgagttgcgtctcaaaatttagatcacatattcaggcttgaagctaagacttaaccttgtaaattttccggcaaaaatcgccaccacgtgtcttttaaatgtaccgtacgtgtgttgttaacagcacactcagaatatatcttggcattaaaattccacgaagtccattttgagttccattacacttttaaattatctactgataaagtgacattgaaaataactcttgttgccaaataaaaaccctatatttggtttaatcgggccagacccattgaccggcattatgcaattatattac

SEQ ID NO: 24164 - DNA, 391 bp, Homo sapiens
  source 1..391: mol_type = other DNA
caagtggctggagacttcgcagagcccctttgaccctggctaacaaggacagcctgacttggatgcaggaaggaaggcgactctaacgtaacgatgaatcttattaaaaagagaaagtcactttatctagctctctgacctcacctaccagaggagagagtggggggacagtgaccagtgtggctgccgggaacgttccactaacgtattccaaagttaacttcgtggattcaaaagtgatctgtttcccaaacttccttgatggtaaagaatgacttggggtactaattaaaaataaaaataattaaaccccagacggctgcgcggatgcgtttgttcctggagcttgcgagcacttgcaatgcatggacacctccacagggtggtggcc

SEQ ID NO: 24165 - DNA, 446 bp, Homo sapiens
  source 1..446: mol_type = other DNA
gtctgacttcacggaggggcgatagaatatagagcaatatataatggtcctcttggctttgcctggccgcacattccagggcacggcgaagggcggggcccgtcggcccaagtccttgggagagggctgcgggcccacgtgactgaccctcgccccgccccgaagccgggctccagcttgtgggcggtagtgcgcctgcgcttgacgccccgcgcggggtctgggtctccgcctgagggccccggagcagtgcgcgtatcccgggagcggtgtgtccctggggccaggtcacaagtggctggagacttcctctgcagagcccctttgaccctggctaacaaggacagcctgacttggatgcaggaaggaaggcgactctaacgtaacgatgaatcttattaaaaagagaaagtcactttatctagctctctgacctcacctaccag

SEQ ID NO: 24166 - DNA, 332 bp, Homo sapiens
  source 1..332: mol_type = other DNA
aattatttttatttttaattagtaccccaagtcattctttaccatcaaggaagtttgggaaacagatcacttttgaatccacgaagttaactttggaatacgttagtggaacgttcccggcagccacactggtcactgtccccccactctctcctctggtaggtgaggtcagagagctagataaagtgactttctctttttaataagattcatcgttacgttagagtcgccttccttcctgcatccaagtcaggctgtccttgttagccagggtcaaaggggctctgcagaggaagtctccagccacttgtgacctggccccagggacacac

SEQ ID NO: 24167 - DNA, 391 bp, Homo sapiens
  source 1..391: mol_type = other DNA
taatccacgaagttaactttggaatacgttagtggaacgttcccggcagccacactggtcactgtccccccactctctcctctggtaggtgaggtcagagagctagataaagtgactttctctttttaataagattcatcgttacgttagagtcgccttccttcctgcatccaagtcaggctgtccttgttagccagggtcaaaggggctctgcagaggaagtctccagccacttgtgacctggccccagggacacaccgctcccgggatacgcgcactgctccggggccctcaggcggagacccagaccccgcgcggggcgtcaagcgcaggcgcactaccgcccacaagctggagcccggcttcggggcggggcgagggtcagtcacgt

SEQ ID NO: 24168 - DNA, 445 bp, Homo sapiens
  source 1..445: mol_type = other DNA
agataaagtgactttctctttttaataagattcatcgttacgttagagtcgccttccttcctgcatccaagtcaggctgtccttgttagccagggtcaaaggggctctgcagaggaagtctccagccacttgtgacctggccccagggacacaccgctcccgggatacgcgcactgctccggggccctcaggcggagacccagaccccgcgcggggcgtcaagcgcaggcgcactaccgcccacaagctggagcccggcttcggggcggggcgagggtcagtcacgtgggcccgcagccctctcccaaggacttgggccgacgggccccgcccttcgccgtgccctggaatgtgcggccaggcaaagccaagaggaccattatatattgctctatattctatcgcccctccgtgaagtcagacaagaaaggtgaccgggcttcct

SEQ ID NO: 24169 - DNA, 654 bp, Homo sapiens
  source 1..654: mol_type = other DNA
tcgtaaatttagttatatgagattttatataatagattaaaaaatcagatgtgtcagccgtttgacctcatcaatagctgacatttcgtcattagggaaagacaatgttgtcacacaaaacagactatttttaaagatgtgctttggcttgcaaaggcgtgacatgcctaaaatattcaagtccttgcgtacatttaagaattggaggaataatatattctatatctctttgtattttttaaagacagcatttataacagacgaggaaagtacatcctcatgtagtttagatgtgatgttatagaatgaaaatatgcatttatgaatagttttaagtcatgatcctaaaagttgattaaagaattctaggaaatttgggaacagcatatatatcataacttctgtgctatgtaggatatatcttttcaacaatatattccagttgccatacggtgctgtattggatgttgtggaatttcctattaaaatctgaaaacagatttagctttaaaaaatttgaggcagagcttttctaatcattccataattgtatttagtctggacgatatggttataatcaaggaaagaatgtaagaaattactttttaaacttttcagaacgtaagctttaaaattgttaagaatataactcaa

SEQ ID NO: 24170 - DNA, 369 bp, Homo sapiens
  source 1..369: mol_type = other DNA
acagagcccagactggaggcagacccgggcgctgtctctgcgtgacagttcgtttgcttcaaaacaacaggaatctggtctttgaaagcgcaatttcatcaagaaactcctgttggatcctcctaactgtggaccaaaataagccaacaggaacgggtgtgggatcccctagcagggttccaaggcacggcgtggtcaccccttcctcggcgactcggggtgtcgagtcttggtgaggcaggcgcgcgcccggccgtccccgggcagagacgtgtcagatttcgaaactgccttgacctcccactgtcgctgctggaggaagagccccgggaggagaagggtgcgccgcgccgcgcccgcgtgtcaatg

SEQ ID NO: 24171 - DNA, 646 bp, Homo sapiens
  source 1..646: mol_type = other DNA
ctattagattgccgatcctccaccatcctgaagtaatgctattttagtaatgctagatgaagtaatgctagattacctcaaggtgaggaacaaaacctgaaaaacgtagctttgtgtttttatttttttcttgataaaggaaagcaaatcaaacagccgtaggctgcggccgtagcctgatacggccgtaaaccgtctgaaattcaaatttagaagaactgtacttttacttgctacatctggcaactcagggttcggcgccaggggaccccaaatcctaggcggatcgcgccccgcctgggtcaaaggggaccccaaatcctcggccgatcgcggcccactcgggtcaaattccagcggcctgcccagccgcgcccagcgggcccaggaatgcgggggacgagggccgggctgcggacgaccgccgcagcgcaggccgcgataaggccggaggggcaattaagaccccggccgtgtgcgtccggcctcagcagccccgccgctcggcggacacgcagaccccgccggcccgggcgcgaacactcagcgcacccccgttccacttggtcccgccgcgccttccggtgcgccttccggtgcgccttccggtgcgccttccgctccgccccttcaggcaggaagtgtc

SEQ ID NO: 24172 - DNA, 451 bp, Homo sapiens
  source 1..451: mol_type = other DNA
gggatcccctagcagggttccaaggcacggcgtggtcaccccttcctcggcgactcggggtgtcgagtcttggtgaggcaggcgcgcgcccggccgtccccgggcagagacgtgtcagatttcgaaactgccttgacctcccactgtcgctgctggaggaagagccccgggaggagaagggtgcgccgcgccgcgcccgcgtgtcaatgcgccccttgaatcagaggcggctgtctcgtgcttccggagaaacctggggcgctcggctggtgcccccaccgccgggcgagggatgcgggcggtccgtgcgcggcaggcggacccggccaccccccgcgtccgcaccgccgcccccgagggacgagtgacagcggccgccgcgctcggtccagtcttcccggctggaaggtgcggggggctgggggcggaggcaggacctcctgtaccttcc

SEQ ID NO: 24173 - DNA, 380 bp, Homo sapiens
  source 1..380: mol_type = other DNA
ctgttgtggggcgagcctctccacgcaagaaacacgctcagcgccttgtttacgctcggcccagccgccgcgtggcttctggaggacccagcccctcgtttttcccgatccggacccaggcggccggggccgcgggaccgccgcggctttgtctgctttggaaagctagacttttacaaatccccagtctctaaaagttttcccacgatgaattttgacaagcaggcttggttgagctttacaactaaaacttgccgtcagtttggtttaaaaacaaaatacggaggggcggcgctactgcgcatgcccgggagccgcctggagtttggaactcagacccggcccgctgcggggcgttcctggggggtagcctcaaggcc

SEQ ID NO: 24174 - DNA, 534 bp, Homo sapiens
  source 1..534: mol_type = other DNA
acctgtgcttttattaattcagtagagcactcagtaaatgctgcccacttaaaacttataaagtgaagttcctttgccccattcaataagattttctgggatgtttctctatggaagtcaattttttaaaaaatgaaaagtgtttgccaagaggtttctacaacacgtttaattcttttgaagaaaatgaatgaattgttgagaagtattacttaatttttctctaaaagagaatttgatatctcaaggatggaaatctattgttattttacatttgtgcatgtgcacacttcaacattgtaaaaggagacaatcaggcatgcttcttttagcaagctgcaaggatcgttccctgatggggacttccattaccccctatatgggtgagcatgccagactctgtaagcaaaattgcacaggctgaaaaatctgcactaagtattcacttaagtgttattcttcagctatagggttttatttcattaagtatctttatatgaatgaaaatgtaaagttgcaaatcttgagttgtga

SEQ ID NO: 24175 - DNA, 170 bp, Homo sapiens
  source 1..170: mol_type = other DNA
gagttattgtttcaaataatttaaaaacaatttggtttttttttaaatatagttttcgctggagtgcagtggtgccatggccaggctggacagagctctttaggggacactaggcctgcagggttgcctgcgcctgtgcactctagaagacgggtctggagcctgacttc

SEQ ID NO: 24176 - DNA, 329 bp, Homo sapiens
  source 1..329: mol_type = other DNA
aaatccatcattactgaacggttactgtacttctatagagtaaaagtgttgcctgactcatttgggtaagcatatctaatatgcatagccaatattcactttcacatctagtctctttattttaaaaaacaaaattccatacatccttcattcatgtattaattcaggagctcgcaaaagaggctgaaatttgtcctcatgtagttcacatctggcatagagacataaatagatgcacaagtgccctatgtgggtatctgcactgcatgtgaaccagtgccctgaagcagccttactgaaaggagtaacgtgattcgactgacttttta

SEQ ID NO: 24177 - DNA, 679 bp, Homo sapiens
  source 1..679: mol_type = other DNA
cgggagggacttcccagctcccgacgccgccgccgcgtccagcaacggagccattactgagctctccgaatcgagtccagggtctggactgccacagacgggtcgccgcctccagcccctggaccttggagtgtccgggcgcggacctactagctccgaagcccacaaatcgaagacgtcgtccactcccccacaagaccgcagacccgtgggcgcgcctcccggtgtcggccggtgtgcgcggagggcgaaagtggccggggcgcccgctccgagacgcggcagagccccgcagcctcagcgcccggcctgcgcgcgcccgggggaggctctggcccacgcacatgcacacgcacgggagcgctggctcccgcgtccccggcgctgcgccggcgccgggcgcgggcggaagcccacgaaccaggggggcgggtgtccgcgagcagcgctcgtgcttaagttccctggctcttctcccgcgcgcgggctccgcgcgccccaagccgcgcgcgtgcgcgcgcgtgcgcaggccagggccctccgggggcggccccgtagtctccaacgaaagcgtcggcaagggcccgggacccggtcgggttccgtgcctgcgcaagccggcggcgcgccttccccccagcccgcaccgcgcatgcacgggaaggggggggcggtgggg

SEQ ID NO: 24178 - DNA, 642 bp, Homo sapiens
  source 1..642: mol_type = other DNA
cttaaatatacatacaatttattttaaaaattaaaaaaatttaatattttattttcaatttttgtgggtacatagtatgtatatatgttacaggcatgcaatgtgtaataatcacatcatagcattatcattggtgttacaattcaattatactttattttaaaatgtacaatcaaattattttgactatagtcatattctttttgtgcccataaaaatatttcttaaatatcttggttagtcggttagatcttaagatattgtgagatgaccaggagttacttctttcacttacaagtcagtgagcatcaaaaatgggcgacttacttgaagacaccaccaacttgattttattttctttccaaaaagaaaaaaaaaatactgcccctctccctcctttctcacaggggatgtctgggaggggagaggtggcattggcctccaggcgtcgtccgcggagcctgaccctgcgccaggacggaggagggcggtggccccctcccccgcggctgggagggcaggcaggacgaggttggctttcctcgcacggtctctgggcgtgggcccccgccgcagctccgcggagcctcggtgtctcctgcaacagggggcggggggaacagcggcgagcagccctgggct

SEQ ID NO: 24179 - DNA, 672 bp, Homo sapiens
  source 1..672: mol_type = other DNA
agcttctgctctaatctttagatattaaattacgctctaaggcggcgcggcattgctgtccggcctcctgcatctcggtgagcagaaaacgcgggagcgggagggacttcccagctcccgacgccgccgccgcgtccagcaacggagccattactgagctctccgaatcgagtccagggtctggactgccacagacgggtcgccgcctccagcccctggaccttggagtgtccgggcgcggacctactagctccgaagcccacaaatcgaagacgtcgtccactcccccacaagaccgcagacccgtgggcgcgcctcccggtgtcggccggtgtgcgcggagggcgaaagtggccggggcgcccgctccgagacgcggcagagccccgcagcctcagcgcccggcctgcgcgcgcccgggggaggctctggcccacgcacatgcacacgcacgggagcgctggctcccgcgtccccggcgctgcgccggcgccgggcgcgggcggaagcccacgaaccaggggggcgggtgtccgcgagcagcgctcgtgcttaagttccctggctcttctcccgcgcgcgggctccgcgcgccccaagccgcgcgcgtgcgcgcgcgtgcgcaggccagggccctccgggggcggccccgtagtctccaacgaaagcgtc

SEQ ID NO: 24180 - DNA, 546 bp, Homo sapiens
  source 1..546: mol_type = other DNA
tattttaaaaaaattttttgctaaatgagtatattatagctactcttgccacatagatatgctaatgtgttccactataataaccattttactatatatgtatcttatgttgtatgccttaaatatacatacaatttattttaaaaattaaaaaaatttaatattttattttcaatttttgtgggtacatagtatgtatatatgttacaggcatgcaatgtgtaataatcacatcatagcattatcattggtgttacaattcaattatactttattttaaaatgtacaatcaaattattttgactatagtcatattctttttgtgcccataaaaatatttcttaaatatcttggttagtcggttagatcttaagatattgtgagatgaccaggagttacttctttcacttacaagtcagtgagcatcaaaaatgggcgacttacttgaagacaccaccaacttgattttattttctttccaaaaagaaaaaaaaaatactgcccctctccctcctttctcacaggggatgtctgggaggggagagg

SEQ ID NO: 24181 - DNA, 622 bp, Homo sapiens
  source 1..622: mol_type = other DNA
aaacttcattagcaaaggggtttatatttctcttttcagtaaggacacgataaaaagcaagttttcattctctgtttatggtagcccacgacaaaccaaaaagatcattttggatggtatcattgttaatcctgctaaatgattcaatttcctgctgaaagcaacaaactaatacttatttagtacctactatttattatttgcatactagggtttatacacaaggcgtcctatgaaagaacatttcattcaaaagtcaacatatagtcttcaattatcagctacctttatttgtaagccaaaataaatgatttaataagcagttagaacagggtcagtaaacactgcttgccacttggaaagagtattcttttatttggaaatggcttcgctgccagggagcaagctggcaggcaggaagtagctttgggggaatccttcccagggaacgaatacagagaaggacgcatctgaatccgcgctgggaaagccccgacctcggcgggcccagcgccacccggctccccggggtgtggaacactgagcgaggcaggtgcggcgggagcatgcgcgcggggcgggcagggggcggctcccgcgcccccaccccgcgcgtgcaccc

SEQ ID NO: 24182 - DNA, 518 bp, Homo sapiens
  source 1..518: mol_type = other DNA
ggagtgcagtggcagctcactggagcctccagcgattctagtgtctcagcctcccgagtagttgagattacaggcgcccacaaatcgtgtgtttgcacttacaaatttctatgatcattgttcctagtttaaaaacttcattagcaaaggggtttatatttctcttttcagtaaggacacgataaaaagcaagttttcattctctgtttatggtagcccacgacaaaccaaaaagatcattttggatggtatcattgttaatcctgctaaatgattcaatttcctgctgaaagcaacaaactaatacttatttagtacctactatttattatttgcatactagggtttatacacaaggcgtcctatgaaagaacatttcattcaaaagtcaacatatagtcttcaattatcagctacctttatttgtaagccaaaataaatgatttaataagcagttagaacagggtcagtaaacactgcttgccacttggaaagagtattcttttatttggaaatgg

SEQ ID NO: 24183 - DNA, 397 bp, Homo sapiens
  source 1..397: mol_type = other DNA
tatgaccttgacacttgaaaattgcaggtaattttattgatgtccacttcaatcacttacttaagttgggaggtaccttcaaactgtataaacatcccactctattctttatatcgattgccccacattttatctgggagtcagttagggaatatatatggagactctaagcatcccatttaaaaacaactgctgaaagctgtttttaactaacagtcaagttaactgtgggaactaaaatgaactcccttcctctctaatagagcacgttagagtgattaaaaaaaaagcagaattttttttctctcaaggagatgataatctagtagaagagaaagtaattaatgaaataatataaatatatttggaggagacatgaccttatcttgatgagttc

SEQ ID NO: 24184 - DNA, 539 bp, Homo sapiens
  source 1..539: mol_type = other DNA
gagtctcgctctgtcgcccaggctggagtgcagctggtgtgatctcccaagtagctgggactgcaagcgcgtgcaccagaatttacttttattaaaaattctttatcggggaccagacatagttttaaaataataataattataataacagcagagggtatctaattataataattaagtccaagtgaccttgccttctttaggcaaacaaagtcgggaactgcccacggcggaaagggcggcgggtcggccgagcctgggtggcttcccgaggggtcgcctctcgcccagctcctggcaggggcgcgtgggtcctggcccggggactgcagggccgcggcggggcgggcagggtctgcccacctcctacccggagccggggaggcggccgcggtcagcccggcctccccgacttggggtccgcgtgcgccgggacccagaggccaagctgggcgcccccgggggaggggtctgggtggcggggccaagccggggcgggacggggcggggcggggcgcagccgagcaggactccaggag

SEQ ID NO: 24185 - DNA, 386 bp, Homo sapiens
  source 1..386: mol_type = other DNA
aataacacccatttggcttataataataaagtctaattttcagacaagctgcaaactccctttacctgacccaaaaggaaatcaagtttattgtaacttgactaagtaaacagcaatgtaatccagttcttcaatttttgatgtggatgctttaaatgagagagtgtcacattttctggatcccggccggtttccagtttcctagaagcggggatcgcacacatgcgcgcgcacgcacacactcacacaggagcgcgcgcgcgcgcgcgcacacacacacacacacacgcaccccgcccccactccagcccgtgggcgtggttcccagcgtctgcgaattcgcgcgcccggggcggggcgggcctgcccgggggcccctgacagcc

SEQ ID NO: 24186 - DNA, 306 bp, Homo sapiens
  source 1..306: mol_type = other DNA
ttctgagatttcaatgttcatttcacaattaaagataatattaacacgtgtttataatcgccaatgtcactcagtcttacaaaaaaatttacaattaaaataaaaaaattattttttgctgaagcattgtaaggtttttttaattcactcagacccaaaatcgtaactaaaatatttcaaagaaaccacgggttatgtccaaaccctggttttggtgtgacgcctgcggctcgcttcgggcccacacgggacacgcagaagcgcgccctgcttcccgggcgccagtgctcggggccagcggcgtgt

SEQ ID NO: 24187 - DNA, 794 bp, Homo sapiens
  source 1..794: mol_type = other DNA
tacaaaaaaatttacaattaaaataaaaaaattattttttgctgaagcattgtaaggtttttttaattcactcagacccaaaatcgtaactaaaatatttcaaagaaaccacgggttatgtccaaaccctggttttggtgtgacgcctgcggctcgcttcgggcccacacgggacacgcagaagcgcgccctgcttcccgggcgccagtgctcggggccagcggcgtgtacccggcgggcccggccgggagcgggctggcgatcgcggggctcggcgctcccggctcccgcgccatctcccggcgcccgccaacttcgctccgcccgcggcgtagagaagctcgcagccctccggagcctcagcgatctcctggctcgctttcccgcagccgccgagcagcgcaggcccggcgactccgggtgcagctggccctgtgcggtgacatcgccgtccggcgccaggctcgaagccgcctggccgcgcccgcggggtcgcaggccgctggtcccgcccggccgcgctcacaaactactcgcggctcgtgacccgggacaaacttctggcggcggcgcagcctctggggcgaggaggtgggcggggggagcccggtggccgctcctccccgcgcggctgacgcccgcttcggcggcggtagtggctgtggccgcggggccgcccccagccgagctcccggaggcgctcgggcgcgggccggcggggcacgggcgctcacgccctctagcgggccgcggcggcgccgggcggccgtgacgtgagcgctcccttcagccgg

SEQ ID NO: 24188 - DNA, 532 bp, Homo sapiens
  source 1..532: mol_type = other DNA
tgaactactcatagtgaaattctttaaaatatcatttgaaagggtaggatttaaaggcacctatgttatatttattttcaaacacttctcatccaacatgctttgaatatctgttatgtagctagtatcatgaaaacttctcacacatggcaatttaaattcaaattttcagttcctcaggctcagtaaccagatgtggctagtggctactccatcatttcagaaagttctattggaagacattgctctaaagaaaagaaattaatatgacccataatgatcactcttaatgatcctaagtcaaattatggccactagattaaagatgaggccttattctaaacccattgtaatgtagttttacaaaatgacattttgaaagcaaacaacttcaaagtattagatattctaatctataactcagcagctttggcggagttccttcatcccttcagtggatttggataaagatgcaatctgagtccatctaagagtggaagagtttcaaagctgggaaatgaaacccattttc

SEQ ID NO: 24189 - DNA, 510 bp, Homo sapiens
  source 1..510: mol_type = other DNA
tgaattttattattagttattgttaatctcttactgtgccaaatttttaaattaaactttgtcataggtatgtatgtatagaaaaaaacatagtatatagagggctctatactctctgaggtttcagtccactgtggtcttgggacatattcccaggggattaggggcactataataattgatttaaaatagtgaatatgagttcattaattattctagtggcagaaactacatatggggaagatattttattttgggcaagaaggtcttcagccccacactgcctattaagacaggcgattaattttgtaaaatcacagtattcctgaaaagccatgcataaatcagtttctttaatcccttacatttatatagtgccttatggttgcagcagactgcaggcttttttcctaacaatgctagaggaaaggaggggatgttctgcggcggagcatctcacactgttgactagcctggttaactgtacaaaaaatttttaaattgctcagc

SEQ ID NO: 24190 - DNA, 538 bp, Homo sapiens
  source 1..538: mol_type = other DNA
tctcacactgttgactagcctggttaactgtacaaaaaatttttaaattgctcagcgaaaatcacttgggcccaggagttccaggctgccgtgagctgtgatcgcaccactgcactccaggtgtttcaaataatatagagggatcatattttacatattctcagaattcatattataaagatccctacagtgactgcacagttaagaatgctctcatagatgtaaacttccaatctaacgctagatttttacaaatcaggtttgtgcattactaaacctagttctaaatacagcgcaaatgctgagatgctcaagttcaagctgaggaatttgctaaacaaatctctggcaaggaatcagcagtgattttctgtatcctttcaatcttctcgcactgtttgagttttaggagtatgccatttacttaatttaaaaattaaacagcataaaaacttctgaactctgagtgagacagcgatcagagttaaaaataactgatttcgcgcgtcagtgccacggcccggtagagggtgcgggg

SEQ ID NO: 24191 - DNA, 540 bp, Homo sapiens
  source 1..540: mol_type = other DNA
tcaagctgaggaatttgctaaacaaatctctggcaaggaatcagcagtgattttctgtatcctttcaatcttctcgcactgtttgagttttaggagtatgccatttacttaatttaaaaattaaacagcataaaaacttctgaactctgagtgagacagcgatcagagttaaaaataactgatttcgcgcgtcagtgccacggcccggtagagggtgcgggggcttgcacccgcttagacgcgaacgcagcgcaggcggcccggcggcgcggcctcaggtcggggcctttccagcgttccagctacaccgagcgcgcgggggcgaaaacatgtgctgaagttcaaaattgcctacggagaattttaagactaaaaccacactaagtttcttgtgttaaggcgcgggttgcgggaaagctccgcgcgcagtacccaaccgaggcccgggcgcgcggtcctcccgccggcagggggcgcccacccgcccgcctccggcccctcgcggccagccgccccgcccgcgcctgcgcgctgctgccg

SEQ ID NO: 24192 - DNA, 491 bp, Homo sapiens
  source 1..491: mol_type = other DNA
caattgtagtcaggcaaacctaaattaacatttccaaaaggtatctagtttgttggttaccatacagctgttgtaacttgtaaagccgttaatttgaaagccctttaagacattaaaaaagaatttttagagaacttagaagctctacatgttgactctatagtcggttgtagttttaaaattcagttctaagggaaaaacaagcttggggagcttgaatgagccccaccattccttaatgtttgaggaacccatttcatttattattaatctcttgagagaaaagaaaatcctatcaaggagtttggatcagtatcttagatggcagcaaccaccctagtgcaccatttaaaatgtttatttttgagccaagcatggtaggccacaactatgtctcaaaaataaataaatatatacataagaaagaatgtttatttttgttctcagaagatgttcagaaacaagcaagggaaaaaaagaattcgtttctg

SEQ ID NO: 24193 - DNA, 563 bp, Homo sapiens
  source 1..563: mol_type = other DNA
tggacatgaagaggtcccatgtgcaaaggagctgggaggtccccacagaccccagtgttggatgcagactccagcttcaaccttggttcttttcaaagagtatgatttcatgatttctcatgacttcaaccaggaatgctttcatattttaaatgtgcctttctgttaaaataaggggaaaagaaattctgcatataattctgcctgggagtatagagtgaagtatacacatttttttttttgtctatgagtcaaaccaagtaaaaaaagaattcatttctctttatataactgtatagacacagaatagatttctaactctctgagtgagagtttggaatctgagtgaaaaatctggtttgctcatattttaagagttttgaagattatttcactggtgttaaataatgatgatgattctgaagattatttcactggtgttaaatgatgatgatgacttgataacaataccttgatttgaccagtttacctggtgtcaaagcctcaggtcttgtcaccataccacaccccctggccttgtgccagcatttacaatccagggt

SEQ ID NO: 24194 - DNA, 268 bp, Homo sapiens
  source 1..268: mol_type = other DNA
gcctgcaggctctactgtgtcctgggccctcagctgagagactgcaacgccagggctggaggacaggctggcccctattcctatgggcacccaatggtatgtgaactgtactttacagtttgcacggtaccgtggcagtacgttggtggccgggctccgggctctgagcggaaagcctgcaggactcggaatcctgagacctgggtttaaaccaagtgacttctctgggactccagcaggcctggctcgcagccggaactataaatgt

SEQ ID NO: 24195 - DNA, 324 bp, Homo sapiens
  source 1..324: mol_type = other DNA
tctgggcagtggaggagccctgctgctcagacaccaccctgggaaaggggcggcctctccaaggccaaaaaacacttcaggacgagtgtttctgctgccccatcaaatgtgagacaatcacctggtcagatttcaggaaggagaccaggcctgtgcccagattgagtttctgggtcagaaatctcaaagagcgtgcctgcttttatccttcaatcaaggaagcacacactgcttttgaaataagtggttgcaaaactggccatagcattgctaggcactctagtgatggccatgaaaagcctggttacaattgtcaagactagt

SEQ ID NO: 24196 - DNA, 481 bp, Homo sapiens
  source 1..481: mol_type = other DNA
gcccggcgtggcggaggatgtccgggggcgctcgccaccggagcgaccagtccccgggacccccaaggagcccagcctgggcgagcagtctcggctcgtgccagcggcggatggaggagctgcgctcggagaacgactatctcaaggtgagccgcgcctcggccgcaggtgtcccggggcgcccccggagggcctggctgcggcggggacccgccaacccctccttcccgggcagcggacgccccccccctgtaggaacaggtgatccttcgccgagggcccccggccgcttgccccttctcctgcaattacggaaagagctgggggctctcagggtctcctgggctccgacatcccgggtagagggggccgccggtgttgccaggagaggccacgccagcactttctaaggaatcgcggcgcctgctgcactctctgagtattttccggcagggcctgcgggcagtggcgtctttttctc

SEQ ID NO: 24197 - DNA, 583 bp, Homo sapiens
  source 1..583: mol_type = other DNA
tttctgagtttttaaactaatgagggataaatttttaaaatcgtgaatgttctagaaattattcacaagtttattatagcaaagaatacttgttggaatttccagagataaccaaacaaacatgaagaaggaagtgggtttttttttcagctttattatggaaaatatctaatatgtacaaaagtaccgtgcagcttctatggccttacgcacatatctctaatgcaaaagattgggaaccaagacatttggtatttatagtgggttgcaacccgactttatttttaactaatcacccctaatccaggcgggcgcttcgttacccaggagcccaaggtgcagctccggccgggacccctgcagcggcccgtaggacacctccctttccgagcacggactggtccccgcccctcccccgggaagtctccgcccacagggccccagcagcccccgcgcgccctcgctccctcccgtcagcccccgcccctcggcgaagggagcggcgtgccgtccgggtcgcctaggcctggggtcgggagcgcgcacgctgtgcgccctgggcgcgctcgggattctcgcctgg

SEQ ID NO: 24198 - DNA, 336 bp, Homo sapiens
  source 1..336: mol_type = other DNA
aacagactattcactagtaattatgctttgtgagttcactgcaataccctggcctcagcctcctgagcagctgggagcacaggcaggcgccgccatgcccgcctgagcctcccaaattgcgattatttttaagtatgtctttaagattttttttttaattgagagaaggtaaacaacagttaattttccaagtggcatttttttctttgtatttcacatcataaataaccaagttaaatgtagtcaggtcttcatctgctgtgatcacacctgaaccataaacttgtaactgcatgcactaagtcataaacagacgctgttgttgcgaggggacgc

SEQ ID NO: 24199 - DNA, 524 bp, Homo sapiens
  source 1..524: mol_type = other DNA
ccataaacttgtaactgcatgcactaagtcataaacagacgctgttgttgcgaggggacgcgctctagaccccctggtgccagggcaggtgcacgctaccgcgctttcggggcggggcccagggccccacctgaggcggggggccgcgggctctgggcgtaggtgcagcttctccggcctggtgcggggccagacggccgccgccggcttagcgggggaacttcgcctagtcctcgggctgccagaagcttccagtcacagccactgccacggtgctactgcagagcccgcttgcccagcagcgtcaccggcgccagaccgaccagcacgaagggcggagttccggcccgcacccctccgccgcctgccggtacgtcccgcttccccgccctgcggctcgcggagcctggctgagcagcaggaggggcgggcgccggggggcggggcggtcacgccgcccgtcccgtgcccgcggtagtcacgtgtccgcgggtgtcacgtgctcgcgtcgcagccaatcgcgg

SEQ ID NO: 24200 - DNA, 655 bp, Homo sapiens
  source 1..655: mol_type = other DNA
gaggggacgcgctctagaccccctggtgccagggcaggtgcacgctaccgcgctttcggggcggggcccagggccccacctgaggcggggggccgcgggctctgggcgtaggtgcagcttctccggcctggtgcggggccagacggccgccgccggcttagcgggggaacttcgcctagtcctcgggctgccagaagcttccagtcacagccactgccacggtgctactgcagagcccgcttgcccagcagcgtcaccggcgccagaccgaccagcacgaagggcggagttccggcccgcacccctccgccgcctgccggtacgtcccgcttccccgccctgcggctcgcggagcctggctgagcagcaggaggggcgggcgccggggggcggggcggtcacgccgcccgtcccgtgcccgcggtagtcacgtgtccgcgggtgtcacgtgctcgcgtcgcagccaatcgcggggcgacgctgtcctgggagggagatgttttcaagcccggctccggcggctttacaggcggctgcagcggcgacgaagacaacgacagcgacggctacgccgaagcactcgttccgggggtgaagcctcctgcgccggccttgcctcgggtccgtacgggtgaggttcgagcttgtccccggc

SEQ ID NO: 24201 - DNA, 449 bp, Homo sapiens
  source 1..449: mol_type = other DNA
tgggaaagaactgagtgtcattcaccgcgcaccttctacctaggctgcgcgacctccgcgccgagctccgatgcagagctcagcgccagccactcacaaggagcctggcgtgaacgaagttcgaaagctctacccttggagatccttattcagtaggtctgaggtagacctaggaaacgcgcattttatataaatcctcggcgacgcgctaggctactcagcgccccgagcctcggcctcgcatcgctagaacccggccatggccgcttccttacagggcagctgtgaggagtcctgaggaaggctttaatcttaacactgttgatcttaacagtctgtcggaaccttcccagcgcgacgcctgggggcgtggcctgcgggccggcgggcgggcgggagcctgcgacgcctcctggcgggagctggcggctgtggaccccagcgggggc

SEQ ID NO: 24202 - DNA, 309 bp, Homo sapiens
  source 1..309: mol_type = other DNA
caggcaaggcctccataaggcccagcgtggatcagtgcctgccccttggccgaatcagtgctgtcacaggcagagaattgtcactgccatgccagtggtcagagaagagcccctgaatgaatctaagcgtgctgcaaaacacgaagactgctgaagccgtttccagccttcaagcctgggtgaaaggcttctcgaagaattcctcgggggctgctcggtaactgctgagccgggggcgcgctgaagccctgcagaagcccacacccgcttcaggaattccgtcgaaggcggggcagccgccccacccag

SEQ ID NO: 24203 - DNA, 828 bp, Homo sapiens
  source 1..828: mol_type = other DNA
agaccgaccagcacgaagggcggagttccggcccgcacccctccgccgcctgccggtacgtcccgcttccccgccctgcggctcgcggagcctggctgagcagcaggaggggcgggcgccggggggcggggcggtcacgccgcccgtcccgtgcccgcggtagtcacgtgtccgcgggtgtcacgtgctcgcgtcgcagccaatcgcggggcgacgctgtcctgggagggagatgttttcaagcccggctccggcggctttacaggcggctgcagcggcgacgaagacaacgacagcgacggctacgccgaagcactcgttccgggggtgaagcctcctgcgccggccttgcctcgggtccgtacgggtgaggttcgagcttgtccccggcgccagggaggagatcccctcagttctgcgctgctcccgttccccccagagcaaggtaggggacgcgccctgcccgccccccccggtcccgacgcgccgcccgcccagcctggcccgagccgtagctcgcctgacagtgacaggccgttagtgccccccggcgcgggtccgccggggccccgcccgccgccgcccctcccggcgtcgcgaggagccgcggcgcaggtgggagccgccaactgggcgggggcgctgcgcggggcggggcgggggccgggcggagggccgcgagctggcctcgtcgcgggcgcccctcaccgcggctggcggggctgggctgccgccgcctcccggaacatggcggggccggaggagcggccgagagggcgccgctggcgtgcggcggtcggacccgcgggggcgggggcgcgcccggcc

SEQ ID NO: 24204 - DNA, 563 bp, Homo sapiens
  source 1..563: mol_type = other DNA
gtgctgcaaaacacgaagactgctgaagccgtttccagccttcaagcctgggtgaaaggcttctcgaagaattcctcgggggctgctcggtaactgctgagccgggggcgcgctgaagccctgcagaagcccacacccgcttcaggaattccgtcgaaggcggggcagccgccccacccagcggccagccgggcggcccccagtctggtttaactggtcttgctgggcgcaggctggccagagcgtggagaggaaagccctttccatcctcaaggccgttgcaggagatgcccgcgagccaccttcgccaggccaccgactgcgcaggcgcctgcagagcactggccctcggcgcgttctctcgcgctcttctcagtctcctcagcgagcctggggacgaagggggcgcggtgcctccgggctggctggacgccggggccttgggaactacgcctcccagcgcgccccgcgcgagagcccaggtcgcctgcccttgacggcttcagccgtctgagcggagaggaggatccgggaagccggctgcggcgggaggagggaatgcg

SEQ ID NO: 24205 - DNA, 718 bp, Homo sapiens
  source 1..718: mol_type = other DNA
agaaccatgctaggttccctacattcttcatttaatgtggctgaatcaggatctgaccccgggcctgccaacgctcccgctggtggattgcccgccttgtcagcgccccagccttcaccgtgctgcacgaggaagctggctaggcaggcatgactcagtcaaccatcccgcagccgggccctgggctttgttagcagccacttggcgagggccccgggcgggtggggaggcggcgcttcctccaagaggaggtgggaccccggccccgacgacctcggagccgcccccggccccggatcgccgacgacgtacgtgcaggcctggggatggggcgctggctgcgagcggcgcgcccgccgagatggctgcggctggcagggcggtgggctaaagcggccgggccgcgggaggccccgcccggccgggttccggcactcgccgcagggtcccggccggcggcaggttgcgcgcccccgtccgcagcgctcggcgtgagggcggctcgggaggagggtgtgagcgcgcgtcgccgggccgggacccggcaagcagcgggaaaggcgggaggcgggagcgccggtcgcccgggagccgcgcggaggggcaggcggggcggggcggggcgcggccgggggcccgggcggccgggagccgcgccgcccgcggcaggcccgggccctcggcccgccccgcgcgcgcgcccccgccagcccggccc

SEQ ID NO: 24206 - DNA, 577 bp, Homo sapiens
  source 1..577: mol_type = other DNA
ttgttcttcttatttgaaaatgagtttatgagggacattttgtcaatctggcttcaaaaaagatgaatgaaatgaatggtaaaaatttgtttaacgtgctcgtttcagctgtgcaaagatgacacgcaaatttcattttaaaaaagcaaataaatatttgtttaaaaatcatttttaatcatgtaagtactgtttctcttttcatcatttaaaacaataaataatagggctgtccttatatactttcagtttcaggaatgataattctgaagaaaaaagtgaatggttcaatcaccgatacaagcaacatcagttgtttgtggttgaaaagccagacacattaatttccaaggctcattggctgctaagaaaaattgtcactgtggccaggcacagtggctgatcacctgagcccaggagtttgagatcagcctgggtgtggtggcgcccacctgtagtcccaactactcagggggctggtgcagtgagctgagactgcaccactgcactccagcctgggtgacaaccctttccttatcatttggaagaggacttattcttaaaaatgcaggcctta

SEQ ID NO: 24207 - DNA, 588 bp, Homo sapiens
  source 1..588: mol_type = other DNA
aagtttcaaaaaatcagtttttaaaaaaacatttcccatctgaaatgccagtgaattgttcagatagattacattgaaacgactgtgtgcggccacagactctctgagaaaaagacttttgctccagaaagcaagtttcccgtttcagacacggacagcgagttttgcttctagaatcattttcagctgcatacagaaaaatgaacttggctgcatatgtgaaaagttagcccggcctcggccgagagcattcgctttccagatgagaatggcatcttcagggacccgctggtagtggggccaggtctccacagggccggtccagtccttcctacccacccgggccctgcggccaggcggggccgggaggggcggatgccggagggcgctgggggaggccgacccgcgcggggctggtccgagggcggaggcaatccgccggcgacgccgcaggtcccgggtggctgacgccgtccgggggcgttcctgggagctgggggccggcgaggctggacccgacgcgcccgggaggagccggccggcggccacgtgacccaccgcggcggggccggcggcccagaaatagca

SEQ ID NO: 24208 - DNA, 433 bp, Homo sapiens
  source 1..433: mol_type = other DNA
ccagaaggcagaacctgtgttttctctggcccctggcatgcagcagctgctggagaataggaactgctttcacattgaaaagaagggtggtatgtagaccccatccaagtactagccaggcctgaccctgcctagtcacccaggctggagtgcagtggtgtaatctcggctcactgcaagctcatttaaatagagtccatggaactgtcacagcacattgcatattttctctgatttgtgaaagataatatgtaaaaagtttcacaaaagcatgtgtgcacaaacatactaacagttttttatatcatatcttgaatgccagagactgggttttaaactttaaaaagtctcactcatactaggttcttgctgagtgattgaattattattctacaagaagataagtgatttgtattttacaaacaaacattca

SEQ ID NO: 24209 - DNA, 222 bp, Homo sapiens
  source 1..222: mol_type = other DNA
agtacgatgtagtgatcacggctcactgcagtcctcagcttcccaagtagctgggacaggcgtgtgccgatcacggtgtgagttgttggggtgaaactgaaacatatgaggatttgtataagtctccctgggggacaggtatttggcttcccactggacgggacttgtggcgagcagtccagcacagcgctgtaaactactcatcataatggctgacctcag

SEQ ID NO: 24210 - DNA, 381 bp, Homo sapiens
  source 1..381: mol_type = other DNA
aaaactatgcagagattttattaatatatttctaacgctctgagaggcagggccgcaaagggccaggccctcggcgaaggccccgccccgcagggggcatgccgggagttgtagtgagtgggcgcttccctactactacttgtctgggcattcccacttggaagatagttccgtactcggagctcaaggtgacagaggactgcgcttccagccctgcgctgcgcatcgcgtcggtcccgcggacccagctgggctgcgctccgggccgcggcaagccgcgagcgcgcaggcgcagcagccccgcgccgcgctaggccggcctggagggcgggacaagcgctagaagctcccggccgggggcgcgcacgtagccgtcacgtg

SEQ ID NO: 24211 - DNA, 567 bp, Homo sapiens
  source 1..567: mol_type = other DNA
atgcagagattttattaatatatttctaacgctctgagaggcagggccgcaaagggccaggccctcggcgaaggccccgccccgcagggggcatgccgggagttgtagtgagtgggcgcttccctactactacttgtctgggcattcccacttggaagatagttccgtactcggagctcaaggtgacagaggactgcgcttccagccctgcgctgcgcatcgcgtcggtcccgcggacccagctgggctgcgctccgggccgcggcaagccgcgagcgcgcaggcgcagcagccccgcgccgcgctaggccggcctggagggcgggacaagcgctagaagctcccggccgggggcgcgcacgtagccgtcacgtgggtcgccgaggctcgcaagtgcgcgtggccgtgggacccggagctgctgacccagcgggtggcccaccgaaccggtgacacagcggcaggcgttagggctcgggagccgcgagcctggcctcgtcctagagctcggccgagccgtcgccgccgtcgtcccccgcccccagtcagcaaaccgccgccgcgggc

SEQ ID NO: 24212 - DNA, 468 bp, Homo sapiens
  source 1..468: mol_type = other DNA
cacaaataaaatcagctttgattgtggtgatgtggaagggggaggaaaaagtgaacgggctcctgcctcctacaccgacaaggttctccgtgctccccagaggagccaggcactgggcagacctgcaccgcacccacgagggggccccatggctgcgcgctggcacacaccccggctcagcaggccgctttgcttggatcccacgccaggcctccagccaccccctttgaacacctttccccaggggagtgggcggaggcggcgggcggggtgcggggccaaaggctcccaccccctccaaggaggaagcgcgcccggaatgggggaggggaggcgttgcccgacgcgccctttcaagtctccgcgctcccccccggcggcggctgcccgggggcggtggctcggcgtcgcctcccccgaccgccccctccagggcccctcctccgtgccgcggccaggctgcccggc

SEQ ID NO: 24213 - DNA, 365 bp, Homo sapiens
  source 1..365: mol_type = other DNA
ggaatcatccatgtggatattgaaatcaccatgaattatgaatgaagccaactgtattactggttactatacggcttgaaatatcagggtttacaagtctgtttcgtttcttgactgacatacagaatggatagaagaatactattctatctgtcatacagagaaacttcagatgtaataaattattaaaatagtgcctgacacatattaggtgctttgcaaatatcgcctgcgctagatgccctaggtggggccagccttgacgcgctgcgcctgcgcaatgtctctttgcggggcgcaccggcaggctcccagccccgcttcgtcgcagcggcttgggccctccggccctccgtagccgctcg

SEQ ID NO: 24214 - DNA, 150 bp, Homo sapiens
  source 1..150: mol_type = other DNA
ggctacagggcagcggcgggcctgaggggggaagcgccgcctggggagccggggcgggctggggtctgttctcctgaagaaggccagctccgcagtgaagaatgccacgcgccctagggatcgcccgccaggagcagggacgcgtccgag

SEQ ID NO: 24215 - DNA, 515 bp, Homo sapiens
  source 1..515: mol_type = other DNA
tgccacgcgccctagggatcgcccgccaggagcagggacgcgtccgagccaacacggggcgcgcgcccagacgcactttcccggctcggggtgcaagagagccaggcggccgcggcgcagcggaggggctgcgggcccggaacccaggccggtcagcgtgtaagcgccccagccggccgggctccgtggggggtcagctccctgacccctacagcgcggtagcgcctctccgagagctccgggaccagcggcccggccgcccccaaactctcccttccccgcaccgggatcccagaccagggagggggcgcacgtccgacggctgaggaatagcagggcgcgagccggcccggcaggtgcccatcgtcgccctctgggaccccggtggcgcgctctgtcctccgcgccacgctcagccaccaccccggctgtttgggacccggcacccagccgagcgcgccgccccctcggggacccgctgggcggggctgagcgaggcttaagggacgtggggc

SEQ ID NO: 24216 - DNA, 744 bp, Homo sapiens
  source 1..744: mol_type = other DNA
aagcaagtgcataataaatattatagttatcctgattgtctccttgcgcagccaggcctggtgggtcccggaggggcagcgcggcgcgggaggggaacggggaggcacggcctggctgccaccgcgcgcggaacccgggagcggctccggggctgtcagctgcccgcctggctcctccaaggcctggagctcggacgcgggctctgggggcttctggggcgcggaagcgggctcgcggggagcagtggccgcccccggccgccgcggtggctgtgctcagaagccggccctggcgtcaggaggccgggcgcgcggcgcggggcgcgagttcccctgcccgcctgtgcgccccgcaacgggcctttcctgggccccgcccttcagcggtgactgcccaggggactctgtaacgcgacactcagactgccgagcctgccaggcacttcgcggagggcgctaggggccgggacgcggccgccgagcgtaggttccggcctttactccgagttgcgcacggagccccagctgcggttgtccgctctggggatcacaggccgcggagacccgggagccacccgccgggccccttcagacgacccgcttccgcaaaccggccgtgggactccggcgccgggcggacgaagcggctccgggaagactcggtcttccccgcccgcctgaggtcgccggggcggggcttcagtgacaggcccgcgcgctaccgcggaaacaggaagttggctg

SEQ ID NO: 24217 - DNA, 552 bp, Homo sapiens
  source 1..552: mol_type = other DNA
cggtacacttaaagtttcaggtgtttcagcataaagtactcaaaaactaaaaacgtttaatttcattattaggttaagtgtgtaaagtggcactccagaatatttataaaatccaaattcgagttttgggtgtgagtttgcgaccaaacttgccgcgcggggcggccgcttgcaggaacactgcggccttgtgcgctcggcggtctggctcctgcgaggccgagaacgacgcctagcgcccagcggcctccgaccggtcggaaggtgctggcccagccgcccctggcgctcgagcccgaatccggccacagacctgaagggacgcccggcaccacgtgcgcggggatccgcggacgggacgctccccggcacctccggggctgggccggcaccgcacggtcccacccagacagtagctgccccggggtggccaagccgccctccgcgcgcttgacccagaacagtacggagttctgcacgagccgggggtggggcctgtctcagcgcgcggcggtggggcggggcttggacacgggcccggctcaacttgag

SEQ ID NO: 24218 - DNA, 733 bp, Homo sapiens
  source 1..733: mol_type = other DNA
tttgcgaccaaacttgccgcgcggggcggccgcttgcaggaacactgcggccttgtgcgctcggcggtctggctcctgcgaggccgagaacgacgcctagcgcccagcggcctccgaccggtcggaaggtgctggcccagccgcccctggcgctcgagcccgaatccggccacagacctgaagggacgcccggcaccacgtgcgcggggatccgcggacgggacgctccccggcacctccggggctgggccggcaccgcacggtcccacccagacagtagctgccccggggtggccaagccgccctccgcgcgcttgacccagaacagtacggagttctgcacgagccgggggtggggcctgtctcagcgcgcggcggtggggcggggcttggacacgggcccggctcaacttgagggaggcggggctcgaggctcagaggagttggagcccgctctgcgcgctgcgggacggggcacggcggagcagggttgggtccgcctcgagcggggagggtgatgctgcaccacaggggcggggccaggctcggcacctagcccaggggcggggccaggtacggggcgcagccgggagcgggaggggcggtgcaggacggggccgggcacggcgcgggaagaggccaggagcagcaacgggtgcggggcgggcggggagctgggctgggctcggcacggggcggggcggagggtggggagcggaaagcaggacgcacg

SEQ ID NO: 24219 - DNA, 553 bp, Homo sapiens
  source 1..553: mol_type = other DNA
aggaggagccggcgagggtcccgctgcagctcccgaaacgctgtttccaggcggcagtcagcagttgggagcccacctcttcagtcctgtagtgaggggttctgggaacggaggtctcagaggccctaattgcgtcttccgatgggggtgtggacggaagtcccccagccccagcggcaaatgctcatgacatggccttgagagcagcgagcccaggcgcctcggagaacctgaagggctgcaggtcccggtgtctgcggcagcttccgcatccctgcagggaaccagcggctcgctgagcctggggctgggctctgggggactccagagctggaggcaagtggcgctcaagacccggggagcatctgggcttccaaggtcctcggtacggccggacgcgcggctccaggctgcgggagccaggacgaccgggggctcccagagcgcgaagtcgcgatcctcggcggtggagagctcgtgccaaaacgtcctcccctgcgccagtcaggccttcgcggggctggcaggcgggcgggggcggggccgccgcact

SEQ ID NO: 24220 - DNA, 505 bp, Homo sapiens
  source 1..505: mol_type = other DNA
caaatgctcatgacatggccttgagagcagcgagcccaggcgcctcggagaacctgaagggctgcaggtcccggtgtctgcggcagcttccgcatccctgcagggaaccagcggctcgctgagcctggggctgggctctgggggactccagagctggaggcaagtggcgctcaagacccggggagcatctgggcttccaaggtcctcggtacggccggacgcgcggctccaggctgcgggagccaggacgaccgggggctcccagagcgcgaagtcgcgatcctcggcggtggagagctcgtgccaaaacgtcctcccctgcgccagtcaggccttcgcggggctggcaggcgggcgggggcggggccgccgcactacctccaggcccgctaggggatccgcgccatggaggccgcccgggacaggagccctcatcaggcgagtgcccgtccagccgcgcccgcgggcagagccagctgggcacaggtaccaggtgtggctcttg

SEQ ID NO: 24221 - DNA, 501 bp, Homo sapiens
  source 1..501: mol_type = other DNA
aaattcctcaatttggaaacatttgcaaaactccagaagaaaaacttttaaaagttctccattaggaatttcccaaagtttctgggaggggacgcagaggctaccccggtggtcccagcctgccacgtgagggcatgcacattctgactgcagaggccagagcatttggaggctgaaaggctcccctaggataaccttttccgttaacagaggagtccgctgaagcgcagagctctggcgcgccctcccaggccgaagcgcatttcgccggatggcctctgtatctccggagacggaaacaccccagggcagtgtcccggcttggctggactgggcgcgggcggctgcaatgctcccgggcgcggcgctgggaccccgcgggccacgtcggctccgctgccccgacgccagggcccgactcgcgtctccctctggcggggcaccacaaggggcagcgaaacggtggtgggggcgggcgccgcgctccttcccgtctcctcc

SEQ ID NO: 24222 - DNA, 579 bp, Homo sapiens
  source 1..579: mol_type = other DNA
ctgggaggggacgcagaggctaccccggtggtcccagcctgccacgtgagggcatgcacattctgactgcagaggccagagcatttggaggctgaaaggctcccctaggataaccttttccgttaacagaggagtccgctgaagcgcagagctctggcgcgccctcccaggccgaagcgcatttcgccggatggcctctgtatctccggagacggaaacaccccagggcagtgtcccggcttggctggactgggcgcgggcggctgcaatgctcccgggcgcggcgctgggaccccgcgggccacgtcggctccgctgccccgacgccagggcccgactcgcgtctccctctggcggggcaccacaaggggcagcgaaacggtggtgggggcgggcgccgcgctccttcccgtctcctcccccgcccggctcccggcaagggtcccccgactggcgcccgcgcgtcctccctcggctgctgcaggccgggccgcggcgtcgagcgggggcggcggggcggggcccgcagccattggcgagcggcggggcgggggcgggggcgcggagggtcggccccgg

SEQ ID NO: 24223 - DNA, 272 bp, Homo sapiens
  source 1..272: mol_type = other DNA
aatcacaggcgtcgccagcctggacggtacaggaaacaatgtgtagtttccactacttgctctccgagaaccagttccccgacagggttcaggcgtgtctccagagcctagcaccaccccatgactcagctggcgctcggagggtccttccatctgccgccgctctggctggcccacccggctgcccaggctcggaagcccaggatcccagtcggaggtcgcggcgggcctcggagaggagacgccgacgtcagcgcgccggggcggggctg

SEQ ID NO: 24224 - DNA, 466 bp, Homo sapiens
  source 1..466: mol_type = other DNA
cataaaggtatgaaaattcatttttcctttggataaaggcaattagcaaacgcaaatggccactgcatttaccaatggccactccatcatggtgtagtggagtcccctccccggagggctgtctcgtggggtaggttgcatcctcccggctgtttgatacaggaggctggagtgcagtggcgggatctcggcagcagctggtaggcgtgagccaccgcgcccggcctcacatgcagacccaaactgcagtggagttttcgtccccggcgtcgcctcctacgcccgcggcatctgcagcaagcgcgcatcgcgcaccccagggtagcagcgcaggtctggggctgcgccacagccgcgcccgcagagctccgctgcagccagcctagccaccagacggggtgggcggcatccaagggcgccccgcccatcgaggccccgcccacgccgcgcccggagccgcgcggcc

SEQ ID NO: 24225 - DNA, 490 bp, Homo sapiens
  source 1..490: mol_type = other DNA
ggccccgacccgtgggacacggtcatccaggcgctgggcgtggatgtgctacagcgccgcgtggacggccgcggccgcctgcacagcttgcgcctgctcagcaccgagtgggggctgcccagcctcgtgagagcggtgagcggggcgggggctgcggctccgaacgcgcccgactcccccactcctggctgccatcggggtggccccgagggggtcgcgggaggctctgcctggcgcgtggcgtctggcaccaaagggcccgggcctgctggattagcactgccaggcgccccgcatcctagggcaccgggattaggcttcaccatggttcagccccccgtggcctcttcctcagagccagggaggtcgcctgcagtccacaccctggcctggcgcaggcctctcagtcagcccagctcctgctgcaggggcctgcacctgctgcccccagcctgcccagcactatggtggtaccttcctctttggggct

SEQ ID NO: 24226 - DNA, 549 bp, Homo sapiens
  source 1..549: mol_type = other DNA
tggagtgcaccggcgcaatcccgagtagctgggattggccaactcatatactcttaaagaggctactctctgttacaaactgtttgccgaaaggcagtactttgccgagtaaaattaattaccaattttatgggagttaagtattcttaactaccaaaagcattaatggtctgaacaaacaatcatatgtataaataaataaaatgtatgttataaatcactgttgaatgtagagttttatgtaacaataaataaatatataagtaaaataacagtcttatacttatcaaaccctattatataaacccttagctagtaagctcattttatatatatgttcatgtagtctttattgctcatatataatttttaatttaattcatagaacctaaggcttctcattaggatcattaagagtgtttttttttcaaccaactcatttcaaataagaaattgtggtttcaattttattttttattttaagaattgggagcatacaaaagctattatttgtgatttttcttttgtgatgtcatctagttaagtact

SEQ ID NO: 24227 - DNA, 484 bp, Homo sapiens
  source 1..484: mol_type = other DNA
acttagtcacctgcaaattatgtacatgtttatattccgatccccgtctttacggtgccgcggggtcacgggaaactgccggaggctttcagggcccagggcccggcggggaggcttcagcgctctcccgctgtgcagggcggtgacccgggttggcgcgcccagttccccgccagagtcggccggggacttccctctgcgccccccgaccgcgcgcccggccccgcgtgtccggccgcgcatcccctccggaccagctgtgtgtcccttgcgaccgggccccccgaccgggcgtcaccgcctgcgactctgagagccctgcgggctagagaccgtgcggccatctcgcctcgaggcgaggccctcctgcctgcctccagagcgtgcatcccccggcccgtgcggccccctaaggggcgggcgctgggcggcgctggacggcgcgaggcggggcggggcggggcggggcgccggacgccatcgc

SEQ ID NO: 24228 - DNA, 430 bp, Homo sapiens
  source 1..430: mol_type = other DNA
tgctgggattgcaggcgtgagccaccacacctggcccatgcctgcaagtgatttgcccaccttggcctacccaagtgctggaattgcgggcatgagccaccatgcctggctttgagacagagtctcgctctgtcacccaggcgcgatggcgtgatctcggctcactgcaactagctgggattacaggagcccgccaccatggctggctttacttgtttgttatcatactatcaacatttttagaacacagattaggaaatatcccataatctataaaattagtttactaaaatcaagtcattcaaaaagtgtaattaaatatacatttgtatttaaatacaaactaaacaaactaaatagcatgcaattcaagatttttttctattttaatattttttctatattaatcaatggcgcgatctcagctcac

SEQ ID NO: 24229 - DNA, 558 bp, Homo sapiens
  source 1..558: mol_type = other DNA
acagactttattaaaacaatgaatgagttctccggttaacaacgataatatgctagcttaagactaattctaaaactagtcgtagaaagactttctagtacagtgtatctagaacgtacgactacaaattgtagacttgactacgtttggacggctgcctccggctacaacctccctgttttttccggccgaaaacatgaaatagaaaacaccccgcgtcggggtggcgacaccgcaggggcctcgggaggcggcagccccgagcgcagggccgactccccgcagggaacgaacatggtcgcagtggggtggccagcagggactaaccgcggccctggcaaggaagcccgagaccccggagcctcgcggggcgcgggagggtcctttgagtccctgggcgccgggcccttgaggcccgtccagctaactgccggttcagagggcggaaagaggccgccgggtggccgcgaagaggggccagcagcgctttcggagaccctggcccatcaggcagcgtgcgggccagccccaagccctgtttgtttgaaaacagttggc

SEQ ID NO: 24230 - DNA, 555 bp, Homo sapiens
  source 1..555: mol_type = other DNA
tgccactgcactccagctttctcggagacgaggacgcgcagatgccgctgtcggcccggggccgccgggcaggagggaaagggggtcggcccggcggtctctcccacaccttgctcagctgctggtggatgagctgcttcagctcggaggctttctccggaggcagcgacatgctggcagccggcgtctccccgccgcttctatgccctaactgcgcggccccggccgggccagggagcgttaggagcgactggagcacaaagcgccgcagccgttcgcctagcgcagctcccgggggacgcaacgccgcgtcaggccgggggctgacctggaaatgaggccccggcggcggcggcgccaactgttttcaaacaaacagggcttggggctggcccgcacgctgcctgatgggccagggtctccgaaagcgctgctggcccctcttcgcggccacccggcggcctctttccgccctctgaaccggcagttagctggacgggcctcaagggcccggcgcccagggactcaaaggaccctcccgcgccccgcgaggct

SEQ ID NO: 24231 - DNA, 254 bp, Homo sapiens
  source 1..254: mol_type = other DNA
agcaaaaccccccggatccttgatctgagccaggcctcttcccaggggctctggcccggaggactctggctcccgggtagcaagcagcccacttccccggccgctagccttcgctcttaggctgccgagcctggactgcttacggagcgcggtccgcgcgcctcgcatgtgtctgggcagcaagcaccctccgccgccgaacggtcagagcctggaggaacccgcaccaggatcgtagggcagtcatgacgggc

SEQ ID NO: 24232 - DNA, 578 bp, Homo sapiens
  source 1..578: mol_type = other DNA
gtcttcgatgatagaaacgttctcatatggcacctgaggaattaagttaatatttaaaatttaaatcccaatactaaaaagaactatcttaaacgtttgtttggtaaaagaggacgtgctattttttacagttaaatctaattcgtaagttgtagaacgttttcttaacaaggtatccctctcccaaattccgggagaggctggcgaatgaggaatttgtttccaagttggtcacatgacctagatgatgtttaaaataatattcaaatacagcactttaaaacgacttctcaggggacttcctcagggagtccgcccaaggggcggctcacctcgtgccgcgcgcagggaccacggccgccgggtggtcccctggccccgccccctcccacctgggcaccccgagccccgccccccgagcgccccgccccgccccgccgccgacttcgcgccgcgctcgggcgccgagtctgcgcgctgacgtccgacgcggtactttccccacggccgacagggcttggcgtgggggcggggcgcggcgcgcagcgcgcatgcgccgcagcgccagcgctctcccc

SEQ ID NO: 24233 - DNA, 296 bp, Homo sapiens
  source 1..296: mol_type = other DNA
gacgtctggacatctttcagtaacttgaacgaagttaaggagttagctttggaaaagagggactcttttccctctgtgactatatggaataaattttgagataagggaccttactgaaaaagtactctgtcacaaagaggattgaaggtgaaacctgacgcctttcagctattttcacttgaaggcggcgccaacgggagccgtcccccgggtcccacgcagcgcagcagggcgcgcggcttcctcgccagaggcgggcgcggtacggccgttccgggctccagccggtgcggggg

SEQ ID NO: 24234 - DNA, 802 bp, Homo sapiens
  source 1..802: mol_type = other DNA
ccctgcccgctccgcgcgccgccgcggccggccggggatcccctgcaagccactgagccgctgccgccgctgcagccagacaggctgcgggtgcctggggtgaggtcctcagctcttaaagaaccccggcgcgccgcgctccccgccggcccgccgcgcgccccctgccgcgccccgcacagcgcccctccccctggccagcagggccggtggccgcggagccgcactgcgggcagtccccgcctccgctccgggggggcggcccaggtgagtgcggacccgaggtggccgcagtggtcggggcttctggcccaagttcaccgctgcgctccggagggaggggtggcggggaccggacgctttgggaactggacgtccgcgagcctgcgccgtcggctggggccggagggagaagctgggcgccgagcgcgcgaggtggcttgccggtgggcacggcggggatccggggctggcccgcgggcggggttacgccggtggagggacttcgccgacccccacccggtgccctggggcgcagggtgtccccaccgcccggaggccaggatgggcgcgcggatggcagccccaactgtctccgcgcccctaggcctcggcgagccgtggcgggcagggacttgcgggaaggagggggcgggccaagccccgcagcccctcagtcccgccctgcaccgcgcgctccccggccccggcccctcgggcccgcttcacccggcgtccccccgggtccccccgcgcgcgttgacgtcggtcgcgggaccgcccggagctcccggcattggct

SEQ ID NO: 24235 - DNA, 391 bp, Homo sapiens
  source 1..391: mol_type = other DNA
ccatttttaattcggaaattgctcgaagcttctgcacctggaggaccctgcggtgacatcagggcccagtccctgctgtcatgccccaggtgacgtgctgggctgacagcagggctggccgctaacgtcactgtcctggcttctaacgctggtagtaaaaaactattgttgcccacatgtcattcctatttaccctaaataaggaaaaacaaagcagcgttaccatggcaggctgccctttccaccacggccaccccgtgattttctctgaaaactgcgacagactcgcagcctggggcatccttacactcagatgaaacaaactgtttagacctcgggggagaaagcgccctcctgagacatgtctctgtaaaacttaggaacattgagc

SEQ ID NO: 24236 - DNA, 333 bp, Homo sapiens
  source 1..333: mol_type = other DNA
aaataggaacattgagccggtggcaagagccgctgggagctgctcccatcagttagaacagcccgcagcctggctcgcagcctgagggacgctgtgggtgctcccagccgggcgagcacgctctgggagcggagcaggggagaagcacgcgagcctaacgtgagcgtcccgcctgtcacactgaaagcttccagcagagagtgtgtgacacgtccaggtgtgaggccaaaccagaagtgcagactaaacagtagacccgctcgacacggccggcttcctgccgcagagcatttgagtctagcacctggggtgggccctgcagctataactgca

SEQ ID NO: 24237 - DNA, 471 bp, Homo sapiens
  source 1..471: mol_type = other DNA
caaagtatcacctgcacctgcaaatatgtgcaacttctatgtatcaatttaacaaattggggcaggccgccagggccgccggggtcccgacccgcccgcttgaccctctaccacggggcccgagggtttccgaagcgccgctgaagaggaccccacgcccctccccagcacggccctggggcgcgagctggagcagctcttcgagctgcttctcccacccgggctcgcccagtctggaggaggaacaggagttcccattttccttgggactgaggacacaaggcaatagacccaggggtgggagtgccagttccacccctccacggcggccaacgcgattctgtttgcggaaacggcggcccgcgccacgcgtgtctgcttacgtcacttccggaggtgcgagagtcacgtggagacggtcaggcgagagtgccgcgacgcacgtcctccgcgccggaactacgagtcccg

SEQ ID NO: 24238 - DNA, 669 bp, Homo sapiens
  source 1..669: mol_type = other DNA
gggtgatggccaaaaaaagtgtgttgtctcccccagtctgccagtccctaataagaaattgctaattttaaaaattccgaacgcgggcgcttccgggcccctcttcaactggcttcggaagaaggggggcccggaagggcggggggacctctctcggccgccggggtctgtggggtcggcgagtgtggacgacccgtctggcagtcgtacactgccacagcccgaagagcggcgcacgcggagcagttgccgggttcgcgccgcgagtcagctcccggacacggtgccctctagacccctcccgctccagaggcctgggcccatgctacctcttaggacgctggagccgccgccgccgcttcccgccgcgcaggctggaccacgatgccacggcggtgtcactcagcagagcagcgtgggtccgcgtgcaggaacccgccgggctcagccggacgctagccccctgccgcccccggccccgccagccgcgcccactagcaacgtgctcgcgacctccagtgcccgctcagtgaagcttctgcatgccgcgcgcggcacgtcgggactcgtagttccggcgcggaggacgtgcgtcgcggcactctcgcctgaccgtctccacgtgactctcgcacctccggaagtgacgtaagcagacacgcgtggcgc

SEQ ID NO: 24239 - DNA, 497 bp, Homo sapiens
  source 1..497: mol_type = other DNA
cctgaaaagccactttataaaattgtgtttacccgcctgggcttggggcgtggaaacttggcccaattccacgttgctgtgactgacacagcccttccctgcaggccccggcaggccaccctaaaatggaagaattttgctttgacgtcatatgtgcacttgagcacacagttccctcatgtgaaatagggataatggggctattcccttcttcttaatgaaactaatgagccaaatatttgcaagatatatcaagaagtttgctagaagttttaaaacaaattcttccaaaaccattttctcaaaaacctgatttatttaattccttagttctttttggaaataaatgcaactctaaagtggcatttaaaaagagcaagatgacaattccatatctgctagaaacattgtcataaacatgaagtaaccttgactagctgagctcatggaaattataacttcacattaccagaaatgcacagttcatgtgggatgac

SEQ ID NO: 24240 - DNA, 575 bp, Homo sapiens
  source 1..575: mol_type = other DNA
ttcacctccctgagatcggagcatcagagccctcatggctgcttgaagtaaaatgtgctgcaaacataaaatacacagcgagtttaaaagatttagatccaaaatatttataattatttgttgaccacacatgaaaaataatattttgggtataatggcttaaagagtattacaaacaatttcacttgtttctttttattatgctctgtcacccaggctgcagtgcagtgcaagcagctgggattacaggcgcccgccatctgacctctggcctctcagagtgctgggattacaggttattactatttttgatctggctaataagacatttaaaattcacaatagctaacgttttattttttagaggattgcttctctcttaaaatcttagggttatgaaatctgaaatattaaataattgtcattatattgcttccatttgtgaacaacgtgtgtgtgtgttttataaacgaacataaccttcataacgttatacaaagtgactggagccaagagcctgtcactctcggctcattccgtgcagtgtatggtagcatcgcagggcggcttccgga

SEQ ID NO: 24241 - DNA, 543 bp, Homo sapiens
  source 1..543: mol_type = other DNA
agcacctgcagtatgggtgaagcagcctggagcctggctacataagcctgggtcccagcaggagggtcgaggtgccactgcctgggtccagctcacaggctgccagggaggctccgatctggctccctggtgcgttcccaggatctgcacgtgggggtcccccatcaggtagccagctccctcttgcaggcctggagacagcggcctgcgggccagaagccccacagctgttggccctggtttggacaccaggcagggggcaccacagcaggagctagcagcccagccccgaaggcgcctcaggcaggccctgggctccgtgggcgtcttgtccagctccgccaaccagagctctaagctgcagcggcggccacccgcaacagcaccaccactagtgtgggggcttcgaaagctggaaggctgtcactgacatttgtggcgccaagacttgcgcacccggattgcacagtgcaatgacgcgcgcacgcctcacgcgcacgccgcgtaacgtctgaggcgcgcacgcctcacgcgcgccccgca

SEQ ID NO: 24242 - DNA, 453 bp, Homo sapiens
  source 1..453: mol_type = other DNA
ggagtcccagattgtctctgcaacacagtgagagggtgcaggcccgggaaccatggcgtgtgggctcaggattcccaaggaaacattgtgcccctctagaatctagagtctgggaagaggaggacggccccttccttggaggccacagctatcgctgccacctccgtggcatgccacccactgcctccagcagtgcagccagggatagtgcccccaaccagcccttgctgggggtagtgacagcccagatagtgcccccaacctgccccccctgtcatgacagtgcaggagcctggcgaccggcaatgtgaccttgatagtgctcctatccagggtagtgcatccctggatagctcacctaccctgcaggcgagcctagatgccacaggctcaagcctccagctcggggtacgtggctcagctgagctcccagagaataggcctagaagtttt

SEQ ID NO: 24243 - DNA, 634 bp, Homo sapiens
  source 1..634: mol_type = other DNA
gcctgtagtggcagcagcggtggcaaccccagaacctgtccgtgccaccagcagcggggaaccccagggtcggacgccgccactgcgcctaaatcaggcggtgggacctgtgtgagggcgggtcgcgagcctgcgctgccagcgcgggccaaggaagagcagagcccagggtggaagggcggtgcactcggcgaccctcagcggtctgggcccagccctgcagcctccaccgtggactcaggtgcagctcccacctgaacatggcacgcggcagcgggggctccaacccggaccctgtccgtgccagcagcagggcggatacttgggccagaagcttccagggcgcctaagtgagggggtcggtccccagctgcaggagggcgggaatcgacgctcagcgcggccctggaggctgcacggtgcccagtaccagggtccagctcctggatcgcgggtcgaggagccgtgttgcagggagccccacacgttccgctccagggaggcccgccagcccggcagcgcctcagcggccggtgccacctgcacgcggtgcccggtggagcgcggccagggcgcgtgtctcctcagcctgctgagctgcgcgtgagctgctgctgtaacgctctaacgttag

SEQ ID NO: 24244 - DNA, 550 bp, Homo sapiens
  source 1..550: mol_type = other DNA
cgggggtgagtgacaagtctttcacctttcctccggaactaggagaaatgcccattattctcatgtcctacattagttctgataaaaatcacaattaagtttcactgaatgttttgacattcgaacgacttaaaaatattgatttttttctacgagattattttcctttaaaaaaattaaattgagcttgacttctattgacttggctcccctgacacacacgcctggcgtgggagggctgagcgctgcagcgcttcggaactttcgagggctgtccatggagtaccactgaaaaccaaacgccactgtctctggactggctgcaacccagaggaaccagagctccgcctccgtccggacctccaaggccgctccagagccctgcatggctcctcagagccggccaaggcgagaaccttgccggcagctgcttacccgcaccccaccccaccctgcggaggcgacagagtgcgcgcgcgcgcgcggggtcccggctggttccccttccgagcgtccgcgccccgcatgcgcagtctgccccggcggtctc

SEQ ID NO: 24245 - DNA, 563 bp, Homo sapiens
  source 1..563: mol_type = other DNA
atccagcatggagctgctgcttccagacgcctatctgtggcaacaattagttttaaaaatggagccgcatctctaataacaaaagcctccagctgtgaaaagtggaaaggcccagggccagctggacgcggctgccctggggtggagccgtccccgtggtcccgggaggctaccgacgagccggggcccggggccggagggcgtgctcctccgggaggtgcccaggccgagttcactggggctcttcgctccaggggaaataatttttcctcctggcttcgcgcactggggtgcagccctccccctgtacacccccgcggggctgcgcgttcgtctgtgcggcggaccgcgcatcgagggctccacaggctgggggaggggggtaggggagaaatgcgcgcccaccaccctcacagagggcgaggactcgcggacgccgaggcggggggagggggcgcgggggtccccgctgcggaggccagggcgggcgggaggggcagcacctgaggaatccgcctccggctgcggcggccgccgcctcgctccgccccggggaactgagc

SEQ ID NO: 24246 - DNA, 415 bp, Homo sapiens
  source 1..415: mol_type = other DNA
ttgtctgaacactcagtctgactaagtctagcagaatattttacaatttctgatgattcttgcactctctcgtccagactagagtgcagtggcccatcagcctctcgagtagctgggacatgttggccatgttggccaggctggtaccacaaccgctgggggcctgggtggttttcagctcccaggaacgacaagcggccgccgctagggggcgccgccacttccctgccaggcgaccacccgcggaggcgcgcgcgctaggcctcccaccgcgcctgcgctgaggatgcctttcctcgacgcccagccgtccgggccggggtgaaaaactgcgtgacacgcagtgagcgtggcggctcccatctgacgagcgaggcgtcgccgtcgtcgccggaagtttggtgtttgcgccgcg

SEQ ID NO: 24247 - DNA, 496 bp, Homo sapiens
  source 1..496: mol_type = other DNA
ctgcagaggcctccaggctcaggccgggtcagcgggttgcgccaggaggcggcgggggcggagacggggcccggagctacctgcgggaccagcactggcgctgccccggtgctagcaatggctgcgcgccacctcggggctcccggagccctcgcggcagtgctgggaactccggccctgccccgtcggcggtcacgacccccgcggcaggtggtgcgcggacacgcgagcacgttagctgcctacctcgcgacggcgtcttggagcctagagcctcccacctccctcccaggggcgcgaagagctgggccgctcccgcggggaccgtcagggacgctcgcgtaccttccttttgcctggcggagggtgccagcggatcgcctcacatccgggtatcaggagacactcagctgcttctgctgcggccgccgcctcccccgcggcgcaaacaccaaacttccggcgacgacggcgacgcctcgctcgtcagatggga

SEQ ID NO: 24248 - DNA, 218 bp, Homo sapiens
  source 1..218: mol_type = other DNA
gagccacagcgcctggcccattgttgcttcaggtacagtaagcaatgctaggttcctggtgttgagctgggactgaccagtcctattaattggatttaaaggcaacctccagccgccaggggccgcagtcgcgctcctcgcggccggaagagagtgcggcccagcgcagcctcggcgtttccgccatgcgcctgcagtgctccgcgcgctcttgacgt

SEQ ID NO: 24249 - DNA, 633 bp, Homo sapiens
  source 1..633: mol_type = other DNA
taaattacatcattaatttacaatttcttcctacctctctgaggaaggagttcataagagtaggaataggctattaaattctaaccatttcagataaccataagtatcctgatttatcatattgccataaataagcctaggagaccctacttcataaattccataagtctctaaattcaaagcattaatgaaccacaaataggcttttaacaattgaatcccggttgcttctcatttaagtgacacttagcaactaaaaagattcacagagtgattcagagtcgagtatgatcactgttgaatgctcatagaatattttttctctttccatagacatatctttggcattaactccccacaccctaaactgctgcaggtgcggggccttaaccagcgctgccgatccgtcagctctcggcccacccttggggatccccatcgcccactgcgacctagctgggagaacccagtccgcccgccctcccggtggccggtcttggaaccgcgcttctggaaggttcctgagtggctggcagtgggggcggctccaggaagccggggcggagcgggcggcgttggagtctcgggctacgcctccctgggccgctccgccccgcccgttgtcggaagccg

SEQ ID NO: 24250 - DNA, 683 bp, Homo sapiens
  source 1..683: mol_type = other DNA
ggggattctcctgcctcagcctcccgagtagctgggattgcaggcgtacctcaggtgatccacccggagtcattttcaaaagcgccacggcgttcccgagtgcgccgccggcttcgcgatcggtgaccgggcagcgccgcagcgcagaagtcagccgggttcaggctgcgctccgaggaccacccggccgggacccccagggggcgggcgaacgggcggggcctgttggctttcccgcgcgcgctgggggctgccgctcgggagcagctcgccgcctatccccggggctgccgaccgcccctggccgcgcagcctcgcgccgcgcctgctaccctagctcctggcccagcagcccgcggccctgcgccacccccggctaaccccacccggacttggtgttccaggtagagggagagctcccgggacaacatccgcaggtccatggccaggcgctgcatggcccccgagcgcggcgcgcgggtcctgcggcgggaggagagccggctggcgagcgggcgagagcgggcgagagcggacgcggcgccgctgcctactcccgaccacctcctgcctggcggagcgcggcttccgacaacgggcggggcggagcggcccagggaggcgtagcccgagactccaacgccgcccgctccgccccggcttcctggagccgcccccactgc

SEQ ID NO: 24251 - DNA, 698 bp, Homo sapiens
  source 1..698: mol_type = other DNA
ctgctctgtctggtttgaaatgttttcaatttacacacaaatacagatcgccctgaatttgtgaatgtatttctaccttcgttaaaaaagaagactaaaagaatatggaatccctaattcacatttagttccattgggcgcgcggcaccaccgggcggcaactccagggatccgcccctgggcccgcccctccatcgcccggggctggggttgggcaaccgtccgccctttttctagaccgcgcgcatgcgcactctcctaccctggagagccgaggatccccctcctagacactctgagaaggtgccgctccggccttgggtacggcggtacccggctctcgcccggctgggactctgtggcggggcggagcgcggcggggggcctgagggcccgggcgctcgccggacgccgggaggtaccaccgctgcccacgggggaggaggcggcgccggcgcttgggtgcccgcccccgagcgaggggccggggtggcagaaaggccggcagttaagcttgctccccgccgcccccccgggctagcctcccccggccccctgcgctcctcgcgctgccggccgggggagagcgtggtttccttgcggccgtcgctgtagcctggccggggagcccggaggaagcgggagagtccccgcccacggccccctcccctctgcccgctctccgccgccgcctccga

SEQ ID NO: 24252 - DNA, 492 bp, Homo sapiens
  source 1..492: mol_type = other DNA
acagatcggcgctgataaccccgcgaccgtatcagtttgtacagagtcagggaggtgacaccctcttcgcagtgtgtgacttacctgaaactctccagggaaatatcagaaactctccagggacatttaaagttcccaaaggtcagctggggaatgttgtcttgaggttcccgaaaccaccacgggggggcgggggggcgcagagcacgttcccccttccttctgggggcgtgctgacccaaggtctggagcgcccctcccgccgcggcggcggcgcgggactgtgcactgccaactcctcccgcaaggctccctccccctccctcgtgtgggtgtgtgtgtgcgccagtccgcccctcccccggggtccctgggctcggtgccccccgggtggactcgcccccactccggggacagggcttgcggctcagcccacgcccgcaggcagcgcggctctcattgtctgcctgggcggcgcgctcccctccccag

SEQ ID NO: 24253 - DNA, 730 bp, Homo sapiens
  source 1..730: mol_type = other DNA
cattgggcgcgcggcaccaccgggcggcaactccagggatccgcccctgggcccgcccctccatcgcccggggctggggttgggcaaccgtccgccctttttctagaccgcgcgcatgcgcactctcctaccctggagagccgaggatccccctcctagacactctgagaaggtgccgctccggccttgggtacggcggtacccggctctcgcccggctgggactctgtggcggggcggagcgcggcggggggcctgagggcccgggcgctcgccggacgccgggaggtaccaccgctgcccacgggggaggaggcggcgccggcgcttgggtgcccgcccccgagcgaggggccggggtggcagaaaggccggcagttaagcttgctccccgccgcccccccgggctagcctcccccggccccctgcgctcctcgcgctgccggccgggggagagcgtggtttccttgcggccgtcgctgtagcctggccggggagcccggaggaagcgggagagtccccgcccacggccccctcccctctgcccgctctccgccgccgcctccgagcagccgcgggccgccctccactccgagcggggggcgcggcggcgacagctgggcagcggctttgggctccgcggggaccgcgccgccgcccccgtgagttattctcacgtcccccggggctcgctgccgcccccgccgacgcctagagtccggcccgggccc

SEQ ID NO: 24254 - DNA, 503 bp, Homo sapiens
  source 1..503: mol_type = other DNA
cagggaggtgacaccctcttcgcagtgtgtgacttacctgaaactctccagggaaatatcagaaactctccagggacatttaaagttcccaaaggtcagctggggaatgttgtcttgaggttcccgaaaccaccacgggggggcgggggggcgcagagcacgttcccccttccttctgggggcgtgctgacccaaggtctggagcgcccctcccgccgcggcggcggcgcgggactgtgcactgccaactcctcccgcaaggctccctccccctccctcgtgtgggtgtgtgtgtgcgccagtccgcccctcccccggggtccctgggctcggtgccccccgggtggactcgcccccactccggggacagggcttgcggctcagcccacgcccgcaggcagcgcggctctcattgtctgcctgggcggcgcgctcccctccccagcgcccagctgctcgctgagcgcagttccgagcagtaagaggcgcctcctctctccttt

SEQ ID NO: 24255 - DNA, 538 bp, Homo sapiens
  source 1..538: mol_type = other DNA
taactttttaagttatatttattcatcccttaagatgtgggacaggtggaaaaattacctttccactttgtatttatgatttctaagtactaaacttttaaagcctgttaatattatcccttcccaggtcttagaataattacacaaaagtactggactggtttaaaagatatttgattctagtctattttgttcatttgtagaatttctagtggtctaaaaacgattcttttacaaataaaatggactttttaaaaaaaattatctaacagcatgttgtcccaataaataatgctgaaggagattccttctcgtttcaaatttgttttgatctatggcgttaccgcacaaccctgtcagaagctagacacagtgtgcgcaattcagaaatgctgtggcggtcgccagactcttcgggtagctcccggcagctccgaggtagcgctgccctccgggatgggccgcaccgaagagcccgctcctcagctagggcacgatgcgccgccgccgtgacgcaagtggaactcccgcgtgacgt

SEQ ID NO: 24256 - DNA, 512 bp, Homo sapiens
  source 1..512: mol_type = other DNA
attatctaacagcatgttgtcccaataaataatgctgaaggagattccttctcgtttcaaatttgttttgatctatggcgttaccgcacaaccctgtcagaagctagacacagtgtgcgcaattcagaaatgctgtggcggtcgccagactcttcgggtagctcccggcagctccgaggtagcgctgccctccgggatgggccgcaccgaagagcccgctcctcagctagggcacgatgcgccgccgccgtgacgcaagtggaactcccgcgtgacgtcgcgcgggctcccgggcggggcgggtccggccgcctccgagcccggccggcagcccccggccttaaagcgcgggctgtccggaggggtcggcttcacagcctcgggggctttcgcgaatcccgaggcaatctcggaggcggtgagtaaaagcaatctctttaccccacccggagctctgggtcggagcgactgctccgggcccgggctacactcggtggtggtggaccggcggg

SEQ ID NO: 24257 - DNA, 541 bp, Homo sapiens
  source 1..541: mol_type = other DNA
ggcgttaccgcacaaccctgtcagaagctagacacagtgtgcgcaattcagaaatgctgtggcggtcgccagactcttcgggtagctcccggcagctccgaggtagcgctgccctccgggatgggccgcaccgaagagcccgctcctcagctagggcacgatgcgccgccgccgtgacgcaagtggaactcccgcgtgacgtcgcgcgggctcccgggcggggcgggtccggccgcctccgagcccggccggcagcccccggccttaaagcgcgggctgtccggaggggtcggcttcacagcctcgggggctttcgcgaatcccgaggcaatctcggaggcggtgagtaaaagcaatctctttaccccacccggagctctgggtcggagcgactgctccgggcccgggctacactcggtggtggtggaccggcgggaggacgagcgctacctcagtactacttctgggtctcccgcgcgggctgaggaagcgcctttcgccgccaagcccgccccgcgcatgcgccgactgcggctcgcgc

SEQ ID NO: 24258 - DNA, 385 bp, Homo sapiens
  source 1..385: mol_type = other DNA
atacaaatttaattcattgtaagttttacatcccaaagaaatggttaaacttgtgcattgttacttttagtttaacgaaaagtggacagggaacccagcaggacctgttaaccccatcaatttccccttaaagtggttgttttttgaactttacataacagtaacttcttgagaagatggtcatgtatttacgtatatatttgggacactcttttctcagagcctttgaaacacctggagtgcagtggcgtgacctcggctcactgcaacctgaagcttagcaagagcagatgctgcagttcttctcatgcctcgaaagcttttttcctttcctgacagaccttagggagcttcccgggagaaaggctgtttcctgtcttgggcg

SEQ ID NO: 24259 - DNA, 484 bp, Homo sapiens
  source 1..484: mol_type = other DNA
aggctaaaagaatatatatacatatctctctataaaatatatgaaaatacaaaacagaaatcaaaatttaagttttacgttatttccacagaagatattatgttctgaaattaacatttatcatttttgaatgatggaaaatatattttatcatgtaaattaagtcaattgtcataaaagggcttggaagtttcaaggtagttagccaaaataattaaaatcctggtgaaatttcacagagctggctgacatgaggctgctgtaaacagacaccagtcaatttactttcctgaacttgaaatggagtggaatttcaatgtagagttacccattagctccagggctaaatttaaacctttaattaaattaatccgttgatctgataccgcctggggaaacccgcacacgtttcccacccccaaccaaaacaagcattcgttgtgggtggggactgcgactcctcccagattcagagctactgctc

SEQ ID NO: 24260 - DNA, 532 bp, Homo sapiens
  source 1..532: mol_type = other DNA
tcccaaggcgtgcatttatcccgggggctgcatccttggcctgggaatgaaaaagaccgggttctgctcgctcacccaattcccagtgcgagcgcgcgggggaaacgtgctcgcctcccgcacctggcttccgcggccccgggagtcgccaactctcccagcaggcagctccgacaacccggacagccgggccgcgtctgcctctgcggccgccgcctgcggctggagcgcgagcgcggggcgcgcgcacctataaatacggacacccggccccggagcccgcgagccagcggccaggcgaccggcgggcggccagccagcgagccgaactagccgagctaggtagcgaggcgtgcgcgtgggccggggcggcggcgcccccatccccagcaccgaggggcgagcatggcccgcccgcgggggggctggaccgccgcgcacgccgcccgatccccgcgccctacccagcccgggtcgccgccgctcgcgcccgccgcttagcgctcgggcgccgctcgcttctccgggcatc

SEQ ID NO: 24261 - DNA, 234 bp, Homo sapiens
  source 1..234: mol_type = other DNA
cccagggctttggacctcatttctacaaaaaaaaaaaattctttttaaattagccaggtgtctttattcataatagcacctaactagatgaaatagtccataacttcagttttaaaaatcggatgctcagaaagcagagcccaacgtgctgaacctgccctcctgtttgttggcccaggcccggcagcttcccgagcagagccctggggccacagatcttcagctcggtgccaa

SEQ ID NO: 24262 - DNA, 289 bp, Homo sapiens
  source 1..289: mol_type = other DNA
ggagggaaggggtgaccagcctacctccatctctatgttggtcccctcttcagccctccctcaatgctggaggaggcactttttgctattgtccaagtccatcaataggttttcttgcatgattttatagaaatgtcaagagaatggaatgactttaaatacaaattgaacatttttcttcttctgccactttctactctttaaaagaagataaaaaaataaaagtccttcgagggcgcggcccctttaagaaggcagacgccgggggcggtccccgcgctgattggcg

SEQ ID NO: 24263 - DNA, 447 bp, Homo sapiens
  source 1..447: mol_type = other DNA
gaagtccatttctattaatagttacacccatttttcttaaactatttatcgtccaattataatcctttgaacactgctatagttgccttattaatggaaatcattaagatcagtaaccaaaacagttattcagtacctatttctagaatgtttgaatatacaacatatagacagtgtatagtttatagtcaaaatataatgtacagccagttgtctgtgcctcagtttcaatatcagtaaaatagagataatgacagaatttagctctcacggtaattttgaggactaaaaagttaatgaaagatttgaacagtgcattgatatactaagtgaaatgcaatgtttagttatcttttatctggtcattttattagaatctctacaaaatacagaaacaaaagttttattatgcagtcttatttttgttcactgttacgtaacacattt

SEQ ID NO: 24264 - DNA, 474 bp, Homo sapiens
  source 1..474: mol_type = other DNA
ttaaaacagttattcagtacctatttctagaatgtttgaatatacaacatatagacagtgtatagtttatagtcaaaatataatgtacagccagttgtctgtgcctcagtttcaatatcagtaaaatagagataatgacagaatttagctctcacggtaattttgaggactaaaaagttaatgaaagatttgaacagtgcattgatatactaagtgaaatgcaatgtttagttatcttttatctggtcattttattagaatctctacaaaatacagaaacaaaagttttattatgcagtcttatttttgttcactgttacgtaacacattttaatgaatgaacagagagagcctagtttgtttatttatttacaatccactagtctaatctagtttagacagccagctgatgcttgcttctccgagcccggcggtcagcagccggaagtagcccgcccgggggcgggcaattgc

SEQ ID NO: 24265 - DNA, 569 bp, Homo sapiens
  source 1..569: mol_type = other DNA
ccaaaatatgtccaaaaattggtatattattttgagctaaaaaattgtagtttcagaaagggctagatgacctgtcgtttcctacaggtggcaccctctctgtacccttagaactcaaatgcatcattctttgtctaaaaagtataaattttgaaggtccccatgaaaaactaataaagtgtgtatgcttttctttttctggctccagcggaagagcccgcagaagcgctgaggggactggagacggtctctggcgcccctccctgacgaagctcccagaggctggaatcctcccgcaaggaggagcctttcctagaccgggagcggtcccacgcgggggtacaggttggggcaggcgagccggcagcagggtagggttggcggctacgccgccctcggtccgcggggaaccacgcgggcttccgggtcacgccgccgcgttccgaccgccctcggggagaggggaggagcctccagcgccgggcggggcgtggttaaggccggtgggccccaccgcagccagacgctgcccgtttaagcgcagagggccgcgggcgtggcaccaggaa

SEQ ID NO: 24266 - DNA, 439 bp, Homo sapiens
  source 1..439: mol_type = other DNA
actgttgggaaagagatcttcacctccattttcttaacttcaaaatggaaatgagataaatacatatatcacgcgtcttctttatcttcctcgcgcccacgggctgcgctgcgcagctgggccagcaggtggcgaggctcccgcaccccgggcctggccgcaccgccaccgcccaccccgcgctgcacggtcaggccaccgcgcgtcaccgccccgggctctgctagaaagtgccggggtccggccgggcgggaccttacccggaagcccgggccgagccagactccataagtcccgcgcctggcccccggggattgcaggggctggaccttgaagcggggtcgcggcggcgccccagcccgggccagggagtcccggcagcggcacctcccagaaagggcggagccgacgacgccttcttcgaccggcgcgcgcagcc

SEQ ID NO: 24267 - DNA, 398 bp, Homo sapiens
  source 1..398: mol_type = other DNA
agtagctgagactgcccagctaacttaaaaaaaattttttttttgtatagagggagttgaggatccctgcatgaaggcatacacaggacttgagaggaccacgaggtcgtcgtggaggacctaggcactgccaggccagccaggtggacatctcagggctgaggaactgttgggaaagagatcttcacctccattttcttaacttcaaaatggaaatgagataaatacatatatcacgcgtcttctttatcttcctcgcgcccacgggctgcgctgcgcagctgggccagcaggtggcgaggctcccgcaccccgggcctggccgcaccgccaccgcccaccccgcgctgcacggtcaggccaccgcgcgtcaccgccccgggctctgctagaaagtg

SEQ ID NO: 24268 - DNA, 350 bp, Homo sapiens
  source 1..350: mol_type = other DNA
cgatcctcccacctcagcctcccgagtagctgggactacaggtgtggcctcccaaagagaaaatgctctcaaagagatactgcaatactccagggctgcagcatcagattggcctttgcccttcaaagaggaaaagaccacttattgtttgtgcaatcaaaaggtttgtttcctagatattttccccaggagaaaaaagtttcccaggaaaaattataacgaaaatagctattggatgaattttttcctcaagcttcatttttacatcattataatatttgtgctgtaatcacgcgcgtgtgtggcaggtcctggagcgcgtccacgcgacaccccatgtgtagtgtgcg

SEQ ID NO: 24269 - DNA, 424 bp, Homo sapiens
  source 1..424: mol_type = other DNA
taaaactagatcagcttgtcaatttctgaaaaaaaaaaaagtcgggattttgatccctatcaaaatccattgttgctttaggaaatattgccatcttcacaatattgtctaacatttctttcaaagaggttttgcaatttttattgtacaaatattgcttatttgtaaaattgagcagattaggcaggcaaattacaacttgcatctggctcagcctgtggctgcagtgccacagggatcctaggtgcacagtgttgaggagttgacgactcaacactcaaagagaggaggtcctggcgcctggagggttcgaagatcccaggctcccgttcccgccgcctgggtgggagcccgggaacgcctctcccattccccgcccgcgaagtttgcagcgcgcctcgcgcgggagagacgccgtctgctg

SEQ ID NO: 24270 - DNA, 488 bp, Homo sapiens
  source 1..488: mol_type = other DNA
ttcatgctttaggaaatattgccatcttcacaatattgtctaacatttctttcaaagaggttttgcaatttttattgtacaaatattgcttatttgtaaaattgagcagattaggcaggcaaattacaacttgcatctggctcagcctgtggctgcagtgccacagggatcctaggtgcacagtgttgaggagttgacgactcaacactcaaagagaggaggtcctggcgcctggagggttcgaagatcccaggctcccgttcccgccgcctgggtgggagcccgggaacgcctctcccattccccgcccgcgaagtttgcagcgcgcctcgcgcgggagagacgccgtctgctggcgcgcggctgagcgctgtcagttcctgatccggctggtgcccgctccagccgcggcaggttccagagctgagaggccacccccacgccgcgggcttccagcgcgtggagcaaggggagcggccccggcgccg

SEQ ID NO: 24271 - DNA, 414 bp, Homo sapiens
  source 1..414: mol_type = other DNA
ctccataagtatttatcattattatttatcagtttttaaaataacatattttttaaatgaaggagctcgttgaattccagagaatatcctggatttcttagagtgccataaaatgaaactgtttaatttctttaattaataaaagtagcaaacactcattctgtgtattccatacatccattaggcgaaaacatctgcgcatacgagttcctttttaaacctgcaaaaacaaatcttctggggactccaaagttgattaaaattgatagcccgagggaaagagagggactctggatttccaccctcctacccagctcagccgaggtgggtggaaggtgatgcccgccccacctcacaggaaggtggggcccctgccgcagacagccttcctcacctgagtcaggcaggcccggg

SEQ ID NO: 24272 - DNA, 366 bp, Homo sapiens
  source 1..366: mol_type = other DNA
aaaaagtttttcattttcgcaaaaaggtcagcttccagcttccataagttgaagtaacacgtagcttttgagaggcttcctaaacaggcattctctgagtgatattccctcagatgtcatcagtgctattggtttgaaaaaaaagtgagaatcagcaatgattgtgcccacagaaatgccgaggcaggcgagtggtcttccagggcctggcccaccaacttttcttcccagaaggcaatgtgcctgatacaaggagaacgtttttttttaaagaatcagaactctctgttcttaggggaaaaaatgctcttccccaaggaacaaaattcatcattatctctccaagtcttgatgggcaaaattttc

SEQ ID NO: 24273 - DNA, 693 bp, Homo sapiens
  source 1..693: mol_type = other DNA
tagtattatagcaaaaaataatgtaattgtacattttaaagtaactaaaataatataaatggattgtttgtaacacaaaggataaattattaggcattgcatgcctatatcaaaatatgtcatgtaacccataaatatgtatacctattatatacccacgaacattaaaaataattttttaaaaaaaattaataggatattatgtcatgacgtattgtctagttaacttggttaaataaggactcaatgaatggggaaaaatgtatttggaaattctttcctaaaactgaaataccgtggtcatccattcattaaatagtcactgaatgtgaacaagccagacatgtggtctttgctcacatgaagaatataccattacacgttgtaattaattgaaaatatttgtgtagagaaagcccagtgtgctgccttactgtaatttccagtctcccagaaataagaaaggcactgctccactgccttttaattgcagcttatttttgtgctcagagtgcagcaatctgcctaacaagcacttcgagtaattggcaggcaggccggactgacctgcgcagagccagagcccgctgccaatgcttcaggcccaagggctgtgctcctgggtgcatagcacagaaaagactgccaggctgtgtcaatctttttaatcatgcttacgcatataggttaacc

SEQ ID NO: 24274 - DNA, 665 bp, Homo sapiens
  source 1..665: mol_type = other DNA
atgacaaaattattttgcatttttctgtaataacttattatattggtcccatgataatggatgacataatgtttaaaattcaggagttatttctaaacctgaggattgctttcatttaaaaaaaattctgttataaatgtttcagcaaagtttcttcaagttgaaattaataaactacactctaaagttgtccaatttggcattagagcataatcttgattgcaacactacattaagggattttgctaaattagagaaaaataaatttgtggaaaaaacataaagatgatttatgaattgcttgtctctagaatagctgacatttggtcatatgaacgccaaagcttcagctgaatttataacttttaaatatttgggcacatggcactgccccacttccgaggggctctgccttgcagtcccgcagcgcggggctccggggagctgcggggcaggtgccagagaccccgcccccgccgcccacctcctcgggaattggctgccctggtcctagggggcggccccagggtcgggatgaagtctggggtcgggagtttcagttactcgtggacaaagcgccgcgcgctagcatagcggcccgggcggatcccgactcctgggtccggccccttcgggggagggtggggcgctcgggtctccgggtc

SEQ ID NO: 24275 - DNA, 633 bp, Homo sapiens
  source 1..633: mol_type = other DNA
ttctgttataaatgtttcagcaaagtttcttcaagttgaaattaataaactacactctaaagttgtccaatttggcattagagcataatcttgattgcaacactacattaagggattttgctaaattagagaaaaataaatttgtggaaaaaacataaagatgatttatgaattgcttgtctctagaatagctgacatttggtcatatgaacgccaaagcttcagctgaatttataacttttaaatatttgggcacatggcactgccccacttccgaggggctctgccttgcagtcccgcagcgcggggctccggggagctgcggggcaggtgccagagaccccgcccccgccgcccacctcctcgggaattggctgccctggtcctagggggcggccccagggtcgggatgaagtctggggtcgggagtttcagttactcgtggacaaagcgccgcgcgctagcatagcggcccgggcggatcccgactcctgggtccggccccttcgggggagggtggggcgctcgggtctccgggtctcgcggaaggcgcggcttggggacccgggaggggccggggcgcgggggctgcaggaagtggaggcggccgccgctcggggaccggcttggcgg

SEQ ID NO: 24276 - DNA, 575 bp, Homo sapiens
  source 1..575: mol_type = other DNA
gctgacatttggtcatatgaacgccaaagcttcagctgaatttataacttttaaatatttgggcacatggcactgccccacttccgaggggctctgccttgcagtcccgcagcgcggggctccggggagctgcggggcaggtgccagagaccccgcccccgccgcccacctcctcgggaattggctgccctggtcctagggggcggccccagggtcgggatgaagtctggggtcgggagtttcagttactcgtggacaaagcgccgcgcgctagcatagcggcccgggcggatcccgactcctgggtccggccccttcgggggagggtggggcgctcgggtctccgggtctcgcggaaggcgcggcttggggacccgggaggggccggggcgcgggggctgcaggaagtggaggcggccgccgctcggggaccggcttggcggggtgagagacacccggaaacggattccgcttcggggcccgcgcgagcgggcgggtgctgctgagtaatccccgcggcggcggccggacgcccacctcccacgccgcgccgcagccgggccgcggctcctccc

SEQ ID NO: 24277 - DNA, 344 bp, Homo sapiens
  source 1..344: mol_type = other DNA
ctcagtagcccaggctggagtgcagtggtgtgatctgggctcactgcaacctagagtagctcttggccaggctggtcttgaactcctgactattcctttagtttggtaaaattgagctgaagttacacacagtaacatcaactgtggagaaacaggaagtttctggattcaaagaaaaagtgctctgttgcatacaattattcactgtgtgtctacaagacagcactgccattctttaagaaaaggggaaataagtctccctcgccggcattggctgcggccgctgtggccccgcctccggagcttcgtgatgcacgccccgatgcctgcggggctataacgct

SEQ ID NO: 24278 - DNA, 624 bp, Homo sapiens
  source 1..624: mol_type = other DNA
ggggtgactcacgcctgtaatcccaacactttgggaggcccaggagttggagacaacatagggagagtctgtctctaccgggcgcggcagggcgcgcctgccgccttgctgcagtgagccgagatcgcgccactacactccagctggaattatactagagtttgaaccttcacgttatagactatttgctaactcctctagctagacgcgtgaggaaattttgtaaatccttgtctcacgcatatctattctataatggttacacctgtaagcgcttcctttcacaggtgaaagtaaaaggaggtgtttttttgtaaattgtctaatttacattgccaattaagactattaacccaggacttatattttgcctggggacgcgagtcttggctggcctgccacttcttccctcggggtgtggtgggaggagcgcgaaggctttacgcgtccctagtagctggcctggaaccagcgccggtggcccaggcgggacaggagcgggccgggggcgtgggcaggcgagtgggcggggaacgggcgtgtccccgctgcggtcacgtgtcgggagggatgccagctcgccaggaggatgcgcgttccaggggcgggctgcggggaggggcg

SEQ ID NO: 24279 - DNA, 477 bp, Homo sapiens
  source 1..477: mol_type = other DNA
tctacaggtgttgaactcctaactcttgagaagagttttatttttctctacaatgatttatcttaagacaacggttttaaaaaagatgtaatattttgagtttttgtatatgccttgcaatcaagaggttgatataattcataaccaatgtattagaatgtcattgaaacaaactgattcatttttttgggaaaatgaatcaatgggagaataaggttccccctctttggtaaatcaaacctatctttgccaaaatctgagtcccttcccgggacgcgggccattccgatggcgccaaggccgcaatggccccggcgcattcctaggagacagagccgtgagggcctcgaggtcggctttccctgggtctccgccctacgggagacagtgatcggcccgccacccggaagcagatgccggcggcgcggcgtggcagggttgtggttccgggtcgggccgcgccgcagccagctctcg

SEQ ID NO: 24280 - DNA, 496 bp, Homo sapiens
  source 1..496: mol_type = other DNA
aaaaaaattagctgggtttggtggtgcaggcctgtaatcccagctactcctggggcacgagaatcagagcaagactctgtctccaaataaataaattaattaattaatacaataaaataacaatgaaaagtgcaattacagctaccaccaacttcaatgggacttaaagtacctaggatcttgtgaaagaaatatttaattttgttcatttttactctgaactcactaaagtatgaggacagagttaaacactttagtaaggtgaaaggtttgaaacatgttgaaacaaaaagatttctttccctccatcagagtgttacagttaaccataaatttcattaacctgaacatcccacttaagtgtggtatttgtcaagcctggctggaataattttacctaagtaggtttcacggtagtaggattaatactacaaaagactgcctttcagtcttggttttaacgtttcgggccgagcgcacagcagctctaggacct

SEQ ID NO: 24281 - DNA, 395 bp, Homo sapiens
  source 1..395: mol_type = other DNA
gtgctaatcagtactctggtgaatacttgaagggggtcctctgcagatctctggagttctgctcagtgtggctctgcagttcagaagggagtctcctgggcgaaaaagatcactttaggtcatgagctcaagaccaacctggtcaacctggaatcccagctacttggaaggcatgagccgagctcacatcagttttatttcctgtataatgattatattttatagatattacatgattttattctaataatggagatggatgcatcacagtaaaatgtttaaggtaaaacatttcactgttttttggaaatactttctcagtgtcagttaaagggaaactgttaccacaagcttactttatcaagaatcaggaagtactattagattaaaacagt

SEQ ID NO: 24282 - DNA, 562 bp, Homo sapiens
  source 1..562: mol_type = other DNA
tttcccttaagataaggtaaaagaaggaaacaggtgatggtttcttgttttatttcaatttattttagaaactattttcttgtacacatattcttaagtgcatatttccttacctcttgcttaaagaaaaaatcaacagaaagctttattttctggacaaagatctatgtcaatttgagaatgttaaaaaagtgaactcaaagctgtctcttttgaatcacattatgacatccaaataacttgcctttataaagattccaagtagagagacttggcgttttcagatgctcctctgctttaatttctgaagaggaaaaaaagcgtccgccgtggagctctaataacgcagctgcggcggcggcgacggcggcggcgcggggtgtgcgagcggccgggcgggcggcgcgaggggcggcggcgcaggagcgggcggggcgcgcggcgcgtgggaggcggcggcggcggcggcggcggcgggcggggctcggggcgctcggccgccgcctggctccggatccgcgcgccgcggccggcgcctccagtccgggtcttggcgggcccc

SEQ ID NO: 24283 - DNA, 333 bp, Homo sapiens
  source 1..333: mol_type = other DNA
ctggcagcttgggcctaatttacaaggcactaagtaagtactctcttaaaaaacagagaggcgagctcttctctgtccgctccagccaagctggcctgagcactggacagctcccctctccgggctgccgggacaactcggggcggccactcttctctgccacggcgcgaagggggcgggccggcttgggccgctcgcatttcctgtgacaggggctgccccagcctctccttctcccgcggcggcgggaccatttcctaccattagagacatccctggccagagtgcctccttcaggcctgccccgccgcccgtcagcccgagaggccggcg

SEQ ID NO: 24284 - DNA, 382 bp, Homo sapiens
  source 1..382: mol_type = other DNA
tgtaaagagtttctgctatagctaaatttccagacatcttttaagtctcatactttgggcttttacaaaatttctccaattaaaagaatattgtcccagctgctccggaggctgaggcagagccgagattgcaccactgcactccagcctgggcgacagaaaacaaaaaaaagaacattatcttaattctcatcattagcttagttatctgctctattttgctcacaaggcagaaaatatcagaagcaacaatattttgaagtttgctttctttccttcatgtatgcgataacaaaaatatctgatatttgaagacctcatttttaagccctaatccttgggaagcagccgaagcgcgggcgcggggacttccgggaggcag

SEQ ID NO: 24285 - DNA, 377 bp, Homo sapiens
  source 1..377: mol_type = other DNA
agcctaacaaacaatgcatttaatcaatgacattcttgacatttttgtgaagagcatcagtcatggcttactgcagcagcctccttagtagctggaactacaggttttaagtgattaaatttttaaaataatgtattttttctttatttttccaatttatataaaaatggaaatattttttattattcattaacgttgggtaacactttatataaactttccctttgtgttatatggaagtctaaatttacagaatactttaaaaccctggcagcttgggcctaatttacaaggcactaagtaagtactctcttaaaaaacagagaggcgagctcttctctgtccgctccagccaagctggcctgagcactggacag

SEQ ID NO: 24286 - DNA, 505 bp, Homo sapiens
  source 1..505: mol_type = other DNA
caaccaatggtgccactgcgttggttcctacaaacatacaatataatgactttagcttgaaattaaggcatcttctctgactgcattacaaacaggcattcactaccttttatttatccagataatatctaggatcacgcttaatatctaagtgctagaatctaattatatagatatcaaaaggcattaagtttttcacatacaattttaatgattttccatttaagattttaggcagtttaactctaaaatatgaaaataggcacatctcacagactataaaactatacgccattttaatttttacaatgtcaattctaactgcgaattttagcaacgcttcagtgtgaaactgaaaatgcgtgattgaattcttattgagtcataaaaaatagaataacgctccctggagccgtccccagtgacgtcacgggcgcggctccgctccttggccaatcacgcggccggatcccggggaaacccggggcggtggcggcggcctggg

SEQ ID NO: 24287 - DNA, 675 bp, Homo sapiens
  source 1..675: mol_type = other DNA
caccccagggactcgcagctggcccgcgcgccagggtacacacgggctgcgggcctcctaagagaacagccgaggtccccggcggctctgggaagctgcccctgggccgggagagcgggaggcggcgacgcaaggacgcgcccggagcctgggcgcgccgggggcgggcgtttgggaaagcgagacccggcgagctctcagtttccgaggtgcccgcccccgcgcgcctgaggcagcgcagcccggagggctgcgctccggatccgaattgccgaattgtggctgcggcagggtcggccgagacacaagctgcccgatgggccttagggaagctccagcttggtggagcgcctcgcccgagggagttgtgtcactttgctcaggggcagggagggcggcgccctgggcgggtggggaagggtccctgtggcccctggggtcccaagcgcctcttgctccttcccggggctggctggaccggcgcggacttgccccagacctacggggagcgccccaaaagggagttgggagccgcgcggctggccccaggcccccgcgcctcgccgccagcaagtaggtgggggagccgccgccgccgccagccccatcccgctcccaagcctcgcccgctgcgccctggccgcgggcgccgagagggtgcggggcctcgccgtg

SEQ ID NO: 24288 - DNA, 680 bp, Homo sapiens
  source 1..680: mol_type = other DNA
ccagggccgggcaggcacgcggctggtctttcattctttcttaaaaaaaaaaaatgcaaattgatggatgggtttcaattgatgcgtaaaatgcttccctcagcctaactgccgagaattcggacttggaggtaaattgcacccgaggagcaggcgaggctgcctcccagcaggacggcctggcaccggggcgcactgctggggacctgactccctcgtgtcccctcaccccagggactcgcagctggcccgcgcgccagggtacacacgggctgcgggcctcctaagagaacagccgaggtccccggcggctctgggaagctgcccctgggccgggagagcgggaggcggcgacgcaaggacgcgcccggagcctgggcgcgccgggggcgggcgtttgggaaagcgagacccggcgagctctcagtttccgaggtgcccgcccccgcgcgcctgaggcagcgcagcccggagggctgcgctccggatccgaattgccgaattgtggctgcggcagggtcggccgagacacaagctgcccgatgggccttagggaagctccagcttggtggagcgcctcgcccgagggagttgtgtcactttgctcaggggcagggagggcggcgccctgggcgggtggggaagggtccctgtggcccctggggtcccaagcgcctctt

SEQ ID NO: 24289 - DNA, 366 bp, Homo sapiens
  source 1..366: mol_type = other DNA
tttgttttcttttaattttgccattaaaaaaaatgcggtgtactccttcaatctttctacaattctgcatggttgaacatttgaaatgctgattcagacttgattcaaagcagactgcgtcatttgggacgttatgtcgccaaaggaaccaaaaatgtgctgctctattgccaaatcagacagggcgatgatcctcaacaagttgtgcgaccttagtggcaatgtcaggtcaaccaacaatccttataattatcatcatctgctgctaatgagactgtttttccaccaaaaaaaaatctggaaaaaaatttcctatgtgtatatttctctatacgtatatgtagagctttatttggtttcaaagcc

SEQ ID NO: 24290 - DNA, 371 bp, Homo sapiens
  source 1..371: mol_type = other DNA
caatattggattagtacctgaatctagcgtgtagtaggtacctaacaaattatctttgtgaaacacaagacaactgtctggaacaccaccctctagttcctcacatcatggctccagggctgaccttgatgcccatctcagccaatgaacaggctggtcctttgcagacagtttctttcagaagccgtaactcggtcagtgccacagataggcactcagtgaccttctaagcagagggggctgaaagactaaagcacctccctttcagccagatcctgagtttgtggatttgcaagctaacaaataaagccatgctcttttcccacgcctcctccttcgcaggcaaggagggcggggagtccgtatacacc

SEQ ID NO: 24291 - DNA, 388 bp, Homo sapiens
  source 1..388: mol_type = other DNA
cttgaagcaatggcaccaggcctgtcctaagatatttcaatttcttaacaggaaattttagctgctggtttgaatttaattgaagtattttatatagggtatatttttaataaatcaaacaaataaattccaagtgaaaaattcaagaataatgctgccttagtagcaaatatatatatgaaaagcagttttaaaagagaaagaaattcatggcctaaattttcctggaaattgatcccagttccaacttcagaggttaagtgatttcaactgactcaggtattcttttaaataaccagagggctttgttgtctcttagaattggagtttcaggggctgtttgattgagcaacccaaaaatgtcattaagaaaagatccggcttcttt

SEQ ID NO: 24292 - DNA, 419 bp, Homo sapiens
  source 1..419: mol_type = other DNA
aatcaggaattctgattattccaatcccatgatctgtttaaacatgcagcctgcgcagctgcacaaatttaaacactgggaccagtaaattaggttaaatttacctattattaatgtaacagtcatataaatggagctgcagttatatattgttcttataatgcttcttctcagatcaaaaacttcaaatctaaaaactaaatgcactgattaactgctggattatacaaattcattttctaataattgccaaattctgaacaattcttcatggtagaaagaattcaaataaagatttaaggaaatcctcattttcaaaaattactgtctcaaaaaaaaaaaaattaagtaaatgtttttgcattcctgcttcaagttcaaatataacttagcgagactcccagcacacagggagctgc

SEQ ID NO: 24293 - DNA, 583 bp, Homo sapiens
  source 1..583: mol_type = other DNA
tacacgtgcagaacgtgcaggtttgttacataggtatacatgtgcctcactggggaattttatgtaagattttgtaaatcttttctaaagagagggctcacattttcatcagattctcaaaaaaggatgcaatttttttaaaaaaaataaaaggttaaggttatattaaacgagattgttctaaaagaaaatctgttcagtatttttaaaaaaataaaatagctctttattactgaggtagatttctgtaatctgaggtagatttcagtaatttcatgttaggtccggattttaaatgtgctctttaaattggagaaatctgttactttatatgagagaaaaatgatattacaccttcaatttttgaactttatatattcttaaattctacaagcatgtttttcaaaacccgtcctttaacaacccatgcaattattttaaggtatcccaaaccttactttacactttacaatacaggaggacttaagtctggccagactttgcctaactaaatgttaggatgttacttattaactgtaggataatacattccttagataagataaaagtatgcaatagaaaa

SEQ ID NO: 24294 - DNA, 460 bp, Homo sapiens
  source 1..460: mol_type = other DNA
ttttctttgttaatttatagaaatcatctgaatgcaaaataagcaatcaaggattcatttatttttatttgccctagtttggtcaaattgttgatagaataatgtttagaactaatttttaaacctgaatgaaccatttttattctctcccaggctggagggcagtggcaggatcagagctcactgcagctttaaatagtgttggtctttgcaaagccctttaaaaccgccaactttttgaaaagcactttattgatctattataattgatgtattaaaataaacaaacgaaaagcaaaacacattttgactttggagttaagggtttctagaaatggcacctgagccctggcacgcggggctgggagggcgagtcgccagcggagctgcccgggcgggcgggggcgggggcgcgggcgggagcgggcgcggaggcggcgccgcagccccagccgggccg

SEQ ID NO: 24295 - DNA, 664 bp, Homo sapiens
  source 1..664: mol_type = other DNA
cgggcggctgccgcggatccggccggctacagccgcagcttggtggcctccgattggccacgacgcgggcggggaggctagcgggccgcgcagccaggcagcgcgtggggcgagcgcggggagagcggcggcggctcgcccaggtcgcgcagcggaggccgagcggggtgcgcggtcggcgacggagggcggcgcgcgcgagtgagcggcgcagggcgaggaccggcgggcgggtgccggtgcgcgggcagcaggggcggctgcggcagcagctgcgcgggacggagccgcggcgggagagaccgcgccggcccctcgcctcacccccttgcggccgaggccggaggccgagaagcgcccctcggcccccacgcagcggaggcgcggagtggcgggactgctgctctttgtgggtgcagcacgcacgacccggagcgccctccccgcggcgctgtccccggcgtcttcgtcgcgccgagcggccctggagcggggactcgcgtggcggagctcttggggagcgccatccgctccacccgccgctgcatccctcgcggcttccgctgcgctccgggccggagccgagccgcctgcgctgccacagcagccgcgagtcccgcggactccgcggcccgccagctcgctctccattggcggggagcgg

SEQ ID NO: 24296 - DNA, 634 bp, Homo sapiens
  source 1..634: mol_type = other DNA
cccgcagcccctccacctgccggggcggtgctcggcgcactctaggcttccctccggcgaccccccgcgggctgcagcaaaatacggggcgcttcggcggggcgggggcgggcggctgccgcggatccggccggctacagccgcagcttggtggcctccgattggccacgacgcgggcggggaggctagcgggccgcgcagccaggcagcgcgtggggcgagcgcggggagagcggcggcggctcgcccaggtcgcgcagcggaggccgagcggggtgcgcggtcggcgacggagggcggcgcgcgcgagtgagcggcgcagggcgaggaccggcgggcgggtgccggtgcgcgggcagcaggggcggctgcggcagcagctgcgcgggacggagccgcggcgggagagaccgcgccggcccctcgcctcacccccttgcggccgaggccggaggccgagaagcgcccctcggcccccacgcagcggaggcgcggagtggcgggactgctgctctttgtgggtgcagcacgcacgacccggagcgccctccccgcggcgctgtccccggcgtcttcgtcgcgccgagcggccctggagcggggactcgcgtggcggagctcttggggagcgcca

SEQ ID NO: 24297 - DNA, 400 bp, Homo sapiens
  source 1..400: mol_type = other DNA
ttgtgactcaaacttgtaaagtctctcactgtgttgcacttgaagttcatgccttaaaggatttatataaaactgttggccccaaatgtgaacagtaccactaacaggtagtaatgatttcaaacttgggctgttccactgaaggtgcgagctccagagaggagccgcggcctccgccctcccccgcccgcaggtggctcccggcgagcgcctcccgcagcccctccacctgccggggcggtgctcggcgcactctaggcttccctccggcgaccccccgcgggctgcagcaaaatacggggcgcttcggcggggcgggggcgggcggctgccgcggatccggccggctacagccgcagcttggtggcctccgattggccacgacgcgggcggggaggct

SEQ ID NO: 24298 - DNA, 598 bp, Homo sapiens
  source 1..598: mol_type = other DNA
acaggaatattcctttgaccacctgaaaaatttcattttggtaccagtaagtagtaaaccaataattcacatctaagaacaaagtcgtttttagaaggttcatatgagcaaactgacagttaatagagcgctgagtgtaatcactcatattttgggtgcgtaaaaatggttagattagaatttcttaaatttggttttaatttctgacatgccaaaaactgtttatcatgccataatccggagagaatacagtacatgtattttgctttaatctgaaaacattggcagctggcatccagcagagcccgtgtcgaggcagggatccctgcgggcggaggggttctgcattgagatgcaccgcgcagcgccggcgatggggccgccctgggacgatctgggctgccagggcctctctgcgggccgggcggggcggcagcgccgcggggcagccgaggggcgtgggagaactggcagagggtgcgccagagaccgctttcccgagcgcgaacgcccgggtggctgctggggagcagaggggcaggctcgggcagctcctcagccgcgccggcgatgaggagtggcctctgctcccgggcag

SEQ ID NO: 24299 - DNA, 542 bp, Homo sapiens
  source 1..542: mol_type = other DNA
agagggatttcctcctgaattagggagaaataagtgtccccctggtgttacaattaaaaagtggctaggaaacaggaatattcctttgaccacctgaaaaatttcattttggtaccagtaagtagtaaaccaataattcacatctaagaacaaagtcgtttttagaaggttcatatgagcaaactgacagttaatagagcgctgagtgtaatcactcatattttgggtgcgtaaaaatggttagattagaatttcttaaatttggttttaatttctgacatgccaaaaactgtttatcatgccataatccggagagaatacagtacatgtattttgctttaatctgaaaacattggcagctggcatccagcagagcccgtgtcgaggcagggatccctgcgggcggaggggttctgcattgagatgcaccgcgcagcgccggcgatggggccgccctgggacgatctgggctgccagggcctctctgcgggccgggcggggcggcagcgccgcggggcagccgaggggcgtgggagaactgg

SEQ ID NO: 24300 - DNA, 537 bp, Homo sapiens
  source 1..537: mol_type = other DNA
ataattcatttagtttaagtgcacttcaaataaaaatgtaaattatcccattcttattcatttctcacataatttgtgaccgggatgttcttggagaaaatcagactttacgtacgtatgtatgtatatatgtatttttgtcttgtcttgtatcattgtcatgccagtaaattcctaaaaaaattcactccagtagagtgtgtaacagtctccctggagtcaactttctgtcaggtgggcctcaggcagctgtgacctaaaacccagcctctgcggctcagacctcgcaccccagggcagggaccacggccgtcgccgagggcagcgggcagggcggagccggggccgaccgcgcactcaggagtgagtgcagggccggctgttaatctcgcctggcggagcgtttcttagagaaatgaagtcttaagtcttaaatagacaacaaggaggggccgatcggtgtcttttggacgcgtctggagcccctccctccgccaaaggaaaagccccttggatgagaggcaggcgcttagagaa

SEQ ID NO: 24301 - DNA, 524 bp, Homo sapiens
  source 1..524: mol_type = other DNA
tcacataggattctcaggacatccctgaggaaaagcagacaagtttctcttttgtcttgtcattgctttctgaagagctaaaagaaacagcatttatatcttaatcttccagattgtggcaataattcatttagtttaagtgcacttcaaataaaaatgtaaattatcccattcttattcatttctcacataatttgtgaccgggatgttcttggagaaaatcagactttacgtacgtatgtatgtatatatgtatttttgtcttgtcttgtatcattgtcatgccagtaaattcctaaaaaaattcactccagtagagtgtgtaacagtctccctggagtcaactttctgtcaggtgggcctcaggcagctgtgacctaaaacccagcctctgcggctcagacctcgcaccccagggcagggaccacggccgtcgccgagggcagcgggcagggcggagccggggccgaccgcgcactcaggagtgagtgcagggccggctgttaatctcgcctggcggagcg

SEQ ID NO: 24302 - DNA, 538 bp, Homo sapiens
  source 1..538: mol_type = other DNA
gtttgacattaatttttaatttaaatatacactcagtattgcagtaatgaacattttcaatcacataggattctcaggacatccctgaggaaaagcagacaagtttctcttttgtcttgtcattgctttctgaagagctaaaagaaacagcatttatatcttaatcttccagattgtggcaataattcatttagtttaagtgcacttcaaataaaaatgtaaattatcccattcttattcatttctcacataatttgtgaccgggatgttcttggagaaaatcagactttacgtacgtatgtatgtatatatgtatttttgtcttgtcttgtatcattgtcatgccagtaaattcctaaaaaaattcactccagtagagtgtgtaacagtctccctggagtcaactttctgtcaggtgggcctcaggcagctgtgacctaaaacccagcctctgcggctcagacctcgcaccccagggcagggaccacggccgtcgccgagggcagcgggcagggcggagccggggccgaccgcgcac

SEQ ID NO: 24303 - DNA, 364 bp, Homo sapiens
  source 1..364: mol_type = other DNA
ttccatcactgccattgagtgcaattggtatcactgagctcactaattggcctgattgtactattaagctaggatatcctatgtttagagagacttgctctcaaagattgtagttgtccttgaaaaaaaaagccacaagaaagattatatgctagctatttctttattctcatgaagttgctgctttaaactggaatgccagttctctagcagaactacagtgtatgagtgtgattacacacgcttaggtcctctgatttgccaatggcagttgaccatggcgtttgtgcacaattgaggagggctgaggatgaagggtgttccctcctccttctgcctaagggggaaagaaattctcccgttg

SEQ ID NO: 24304 - DNA, 404 bp, Homo sapiens
  source 1..404: mol_type = other DNA
ttctgtctctacatacaaggagaaattgttcccattgtcaaataagctgaagaaaacctttctcttccatcactgccattgagtgcaattggtatcactgagctcactaattggcctgattgtactattaagctaggatatcctatgtttagagagacttgctctcaaagattgtagttgtccttgaaaaaaaaagccacaagaaagattatatgctagctatttctttattctcatgaagttgctgctttaaactggaatgccagttctctagcagaactacagtgtatgagtgtgattacacacgcttaggtcctctgatttgccaatggcagttgaccatggcgtttgtgcacaattgaggagggctgaggatgaagggtgttccctcctccttctgccta

SEQ ID NO: 24305 - DNA, 636 bp, Homo sapiens
  source 1..636: mol_type = other DNA
agagtgttatttttttgtatttatcacaacaccctgacttattggcaatcaattaatactatctagacaaatggacttgagcaggtgaccaggttcttactgattcattcatttattgtggttttggaaaatttgtaaatcacttaaatgtacagggatttatgtcttttaaggtatgaaagctatgttttttttttttcattcaacaaactttagcgcaaagtaaaagagacaatgtttctgctttagtattaactgctgtgcagaccatattctcctttttctctaaatagaaatcaacagactttcttgaaaagaggacttgattatcagaatcaactgtggagtgttttacaaataacaggttttcaatgctctacagattttacagggatgtaaaccagaaccctgaaagctctagtgtcttcacaacagttcccttgaaaacactggtactgctaggggaatgaacaatttacatataaataatttatattttagttgtctctaagtgtgagactgtaagaaattcattttgaaaaccactcaaaggtttccgatttgacttctaaaataccttctaacttgaattcatttgaaaagcccgaagtgttaaaactcatggattgagataaa

SEQ ID NO: 24306 - DNA, 462 bp, Homo sapiens
  source 1..462: mol_type = other DNA
tgtgaaggttgctatttattttcacaaacctctgctgagcagaccgaatctcatttttaaagttattatcaggattttaattgcttaagtttagtaatatttaaatttttattttgttgcatttaataaaagaatcataaagaaagaaaaataattaagagaaaataatttcttttctaataattgtaagtatcatggttttacttgtttgaattaataactttaaaaaatctcagtctagcatattttctgtctcttaacaaccgaaaataactgaaacttttactaaaatggaaagtttgtcattttctactatgacatggaatgaataagatgagcattcaagttatacctgcctgtttaatatagagcctgccactgaaaacattcagtaaatcttccttgccccatcaagagtcgaatgatcttgtggggatccagactggttatacgtaccttcag

SEQ ID NO: 24307 - DNA, 436 bp, Homo sapiens
  source 1..436: mol_type = other DNA
taagtggtttctaaaacgtaatacttgcaaagataaaattgaacctttctttcaatatttctgaaactgtaaaaagtactttaaattctaatgttataagcaaagtagctaaaatcccctctgcgttcaccacactggggaaaatgtcttgacaagataatctaccttattaggcaatctaggcttttttgaaagttataaatgaaaagaaatacagtataaaagatgtcatttgagtattatcagagtaattttgcaacgcattatttatatatttcaaatattcaaggcaccatataactgttcaattttaagtgcctttcaataaaatatatcattgcttaacatctacattttgcttaactttagatactcaggctgaaaataaatgctccatcatgattaatttattattcatctcaacaaaggatttcat

SEQ ID NO: 24308 - DNA, 539 bp, Homo sapiens
  source 1..539: mol_type = other DNA
cccatactaagtcttttcaagatgtcaatttaacatctcacctcgcaatcgttgttctaattttaacaattatttattgaacccttaagttctagacactgcagaatgctttacctaagatttgacagatctggaaactggggcccagagaggctagtccaggccactcagctagtcactgtaatagaaattgtaaatcatttcaaagaatatatatatttcccgtacctccgctccaggagagcgggccgaacgcaccgcggtcgcagctttcctgaggacacgggtccccatgtcactagcgacacctgcgctccggagtgcgggacctttgggcggtgctgggcggcctggccccgcagccactgggccggttggtcccgcaggactccgtggagtgtccttgggccggggccctgcgacccgcgctacccaggtcgagccccgccaggaggctccctcctcccgccattctccagagagtagggggtcgggaaggagagaacggcggggcggggcctgccacccacagtccccaa

SEQ ID NO: 24309 - DNA, 641 bp, Homo sapiens
  source 1..641: mol_type = other DNA
ctagacactgcagaatgctttacctaagatttgacagatctggaaactggggcccagagaggctagtccaggccactcagctagtcactgtaatagaaattgtaaatcatttcaaagaatatatatatttcccgtacctccgctccaggagagcgggccgaacgcaccgcggtcgcagctttcctgaggacacgggtccccatgtcactagcgacacctgcgctccggagtgcgggacctttgggcggtgctgggcggcctggccccgcagccactgggccggttggtcccgcaggactccgtggagtgtccttgggccggggccctgcgacccgcgctacccaggtcgagccccgccaggaggctccctcctcccgccattctccagagagtagggggtcgggaaggagagaacggcggggcggggcctgccacccacagtccccaacggtcccaggtgcgagtgcgagcgggcgggagtccaccccgcgcctccctcctcctgtaaaagcggcccgggccggcccccggctccattttctcgcggcggccacacctggagccgcgcctttgggttgggctgggctgggccgcgcaaccgccacgggaagacagccctcggggcggggagggccgggccg

SEQ ID NO: 24310 - DNA, 394 bp, Homo sapiens
  source 1..394: mol_type = other DNA
tcaatgccaggttgaaatatgccattctggcccagcgcgggtggcttgagctcaggagttcgacaaggctgcagcgactgatcgtgccactgcactcgagccataagcaaagcttccaaatgacttagtttggctaaaatgtaggcttttaaattgttgacccatggatccatcaagtgcaaacatttttaatgcactatatttaagcctgtgcagctagatgtcattcaacatgaaatacattattacaacttgcatctgtctaaaatcttgcatctaaaatgagagacaaaaaatctagacctaactggtcaaatgacctattaagaatatttcatagaacgaatgttccgattacttattctctctttgttgactaagtcaataatcagaa

SEQ ID NO: 24311 - DNA, 758 bp, Homo sapiens
  source 1..758: mol_type = other DNA
ctgggcgcgggcctatcaggacgcgcggtgtttcgggcgcggggagggcggggacctccaggtttcctcggggcccggcgcagcgccgcctgccgagttccgagcgagcgcgcgaagcgcgcaggggtctcgagacgttcccgccggtcagacgcggctccgacggcgctcggcctctgctctccggctccccggctctgcccgcagcgcgcgtcgcccggttgctcttcgcctggtgtccgcgggcccggcgggggcgcctcaccccgggcgcgcggcggtaatgccgctgccgcccttgcggccaggcaggcagctggcggcggccggagtcggagcgcgttcgtcgctggccgggacgccgccctggcctgtgctcagctcccgcggcggccgcggggcgccggggcccggcgcggcatgaggaggcggctcggtgcaggcgagcgcccagctcctcggccccgagggcccccgcgggcccccgcgcgtggcgcgcgctggttgcggccccggcgcccacgctagccccgcgcaggcaggagacgccgcggcccggagtaggaggcggcgcagggcctgccgagcggacgcgggcggcccggaccttaagcacggggcttcgcggcgggaccccgccgggcgcgggcagcggagccgggcgtgctgcagttagctgcccctctccgcaggggcgccgcggcgcgcagcctgcgcctcctcccacctgcagcccctcgccgctgcttggcggagaa

SEQ ID NO: 24312 - DNA, 870 bp, Homo sapiens
  source 1..870: mol_type = other DNA
gcgtccctcaacccccagcagcgcggtcaccgcggggtccccgggcgggcgggggcggcggtgacgcaggaggcggtggggccccggtgcggcgggcgcggggagggggctgctgggcgcgggcctatcaggacgcgcggtgtttcgggcgcggggagggcggggacctccaggtttcctcggggcccggcgcagcgccgcctgccgagttccgagcgagcgcgcgaagcgcgcaggggtctcgagacgttcccgccggtcagacgcggctccgacggcgctcggcctctgctctccggctccccggctctgcccgcagcgcgcgtcgcccggttgctcttcgcctggtgtccgcgggcccggcgggggcgcctcaccccgggcgcgcggcggtaatgccgctgccgcccttgcggccaggcaggcagctggcggcggccggagtcggagcgcgttcgtcgctggccgggacgccgccctggcctgtgctcagctcccgcggcggccgcggggcgccggggcccggcgcggcatgaggaggcggctcggtgcaggcgagcgcccagctcctcggccccgagggcccccgcgggcccccgcgcgtggcgcgcgctggttgcggccccggcgcccacgctagccccgcgcaggcaggagacgccgcggcccggagtaggaggcggcgcagggcctgccgagcggacgcgggcggcccggaccttaagcacggggcttcgcggcgggaccccgccgggcgcgggcagcggagccgggcgtgctgcagttagctgcccctctccgcaggggcgccgcggcgcgcagcctgcgcctcctcccacctgcagcccctcgccgctgcttggcggagaa

SEQ ID NO: 24313 - DNA, 298 bp, Homo sapiens
  source 1..298: mol_type = other DNA
ttgtaaacaaccagtggagaggggaaaatcacaatttttgcttcctcagcattcatgacaaatgttacaaaatagtgtcattacctttcaaattaaacatcaaattagccagagaagttgagaaaatgaatttcaacttgcatagccttgcaagggggtattatatccactgtttgagggcggagattaatattccaaatttattggctatcaactacagttccaataatggcagtaaggcatcccgccctgaggcgctcaagggcctattggctgcccagaagcctttgcagcgcgg

SEQ ID NO: 24314 - DNA, 471 bp, Homo sapiens
  source 1..471: mol_type = other DNA
agttaccgtaagttcacacttttcaatggaacatttacctcatgatggcaggtagctgctgtgctggagccttctgctctgttgaagagtggaccccctcggcctccagctttggttgaagaaagttctaccacctcagggagctgtggaagctgcgctgcagcttcttgcgtttcaggctctagatggaactgagaaagtccagcttgctcaggaggccctggaggctcatctgagctcacctggagttctggaggcaggctgcccagatacagtatatcccttgaatctaaatacccattctgcagagtttgtttctgacgctgaggttttgatacaaatcggtatggccaacaacaaccttggcaagcctttgaggtggaacaagtatttcatatgcctgatgatctgcagcctgatctagatctacagttagaaagggcctggttctgatcccagtctagcattgca

SEQ ID NO: 24315 - DNA, 262 bp, Homo sapiens
  source 1..262: mol_type = other DNA
caaacaattgagtgacacattagtaaaattcctttcattcatttccctttaaagcaatctttgaaaagttaggaagcgcaattacacttgaagtgacagtccgtttctaaaagcatggctgtatttaaaggacacatggtccctctctccgagcaggtgccactagctgctccgccggcgagcgtaggaagcagcgcgaccgtctcgaggctccacctgccgctagtaggtggctctcaggctaagggcgagcttgagaaga

SEQ ID NO: 24316 - DNA, 330 bp, Homo sapiens
  source 1..330: mol_type = other DNA
tggagtgcagtggcatgatctcggctcactgcaggcccaagtagctggccaggcggtctcactctgtcgcacaggacggagtgcagtagtgtgaaattacaggcgtgagccacggtacccggccgctaaatacgtacatgtattatatgcgttattatatcccatgtgttatattatatattattgtatatgtgtattatatactatgtactattcttacaactgtatgtgaatctataattatctcaaagttttgtaaaagtgtaaattaacgcccggctaatttttgtattataagcccgcccaggcgtgggccaccgcgcctggctg

SEQ ID NO: 24317 - DNA, 323 bp, Homo sapiens
  source 1..323: mol_type = other DNA
ggtctcactctgtcgcacaggacggagtgcagtagtgtgaaattacaggcgtgagccacggtacccggccgctaaatacgtacatgtattatatgcgttattatatcccatgtgttatattatatattattgtatatgtgtattatatactatgtactattcttacaactgtatgtgaatctataattatctcaaagttttgtaaaagtgtaaattaacgcccggctaatttttgtattataagcccgcccaggcgtgggccaccgcgcctggctgtaagattggaatcctatctctccattaatggactattgattggatga

SEQ ID NO: 24318 - DNA, 314 bp, Homo sapiens
  source 1..314: mol_type = other DNA
aaaagtgtaaattaacgcccggctaatttttgtattataagcccgcccaggcgtgggccaccgcgcctggctgtaagattggaatcctatctctccattaatggactattgattggatgactgcagttgaggttagacagagcacggggcggctgccgcctccgcctccgcgccttaacctaggcggcttgccgaagatctcagccccgcggccgcgcgctcgccctgccctagaccagggttgggcgcagcggcggaggtgtctgggctgcgcgagctgggagagctgggaggcggcgatcgcagctgggccg

SEQ ID NO: 24319 - DNA, 381 bp, Homo sapiens
  source 1..381: mol_type = other DNA
ccagggctggagtgcagcggcgcgatcgcggctcactgcaacctctgccgggtacaagcgattctcgtgcctcagcctcccgagtacctggggtcttgaactcctgacctcaagtgatccagcctccaaagggctcatcttatagattatcaattgtacagataacatttctcttcaaagcagactgcatctgcgggattaaaatcccgtaacaaatatttgtttataacacatcttgacaagatcaactaaatcttgaacattgacgaaaacttcctgaaaggcccaatgtcccgggcctagcgaggcggggcggggaggcgcaggtgtcaccgcgggcgcccagctgcttacgtcacaacccgcggaaggcgccgtgcg

SEQ ID NO: 24320 - DNA, 662 bp, Homo sapiens
  source 1..662: mol_type = other DNA
cattgacgaaaacttcctgaaaggcccaatgtcccgggcctagcgaggcggggcggggaggcgcaggtgtcaccgcgggcgcccagctgcttacgtcacaacccgcggaaggcgccgtgcgccggttgctccgcccagatccccggcgctcccgcgttcggtgacggccgggtaggctgtaggcagcgcaacagagctgctggcggcggcgggcgaatctccctgcaccatgagcctcggctccggccccgttaggggccgataagcacagcgcacgccgccctccatttgccccggggcctcggctgcgaagatagcggcggcccgccgcttcggggctcctaggtgagagtctccccggcggagacgggggctgagggcggggcgcgagcccgcgcctggagcccggtgagggcgtggcctagagcgtgaggccgcgtcctggggcggggtgaggggcgagcggggcgggcccacggcatgctgcgagcccagcctcccgccaagcaccgtcccccatccagccccctgtgggaggagccgtgggaggggtcgcctcttgcccggcgcgtgcggcagtagcgtctctgcgttcggccccgccctacccagggccccgcccccttcctggcgcgcccctcccccctccgggttcatgtagg

SEQ ID NO: 24321 - DNA, 511 bp, Homo sapiens
  source 1..511: mol_type = other DNA
ggtgtgatctcggctcaccgcaacgggcttgaactcccgacctcaggtggtccacccatggccaaaaattagtattcaaaaaatattatcctgcatcttaagtaagttgaatatgtttctaaagagaaattgggaacattattttattagaaaatcagtgaccattcctacatacattgctatgttactactctatatggatttctagcacattaatggattttataactcaataaattataggcactcaataatttttattaaatgagtgaatgataaaaagataagatcaagattaaaaattaatttgatatatatattttttgcttaagtggtgtttactagtctaaggaccagtacacatacattagagaatgtattcattaagaagtctcagccaggcacttaattgttgaccttgattggaggtattattacagcatcaagctgacctgcaatatggatcattgagatcaaaggctataaattataatgtttgcctttaaagaag

SEQ ID NO: 24322 - DNA, 693 bp, Homo sapiens
  source 1..693: mol_type = other DNA
acgccaaggcgtgctccacgcctgccgtccgcagccccgttgggctgtggagtggaggcggacggtgcccgacaccacgactcagggagcgatacctgagctcgctcggcaattcccgggctccggggacgggcctgggcggggaaggagccggggcgcgcagcagcacccggcgagactgcagggcgcccgagtggtcggacggtaaagcttgcggagcgcgccgagccgcgggcgctggcggccccggccggggagctgacgcgagcctgccgggccgcgggagctgcgggaggcggaggccgagctgggggcggagcgggcggcgcctgggaggcggaggcggtgtctcccagagctgcgcagggggagcgctgctatggcgtttctcagacccgcggctcctcctcacacgctcgaggcggagggaaggaggggaggaggaggcgagcgggcggccgccgcagctgcagacccagggccagaggaggaggcggagcgggagccgccgcagccacccgggccgccgccgccgcccgcagccgcgcggctgctctgagtcttctccgggcgtgagggcacgcggggcgccccagccatgccccgcagcggcagctgagccgggcgccggccccctccctccgggccgccccagtcgccgcgcccccccggctgcccgcggccggagctgcc

SEQ ID NO: 24323 - DNA, 263 bp, Homo sapiens
  source 1..263: mol_type = other DNA
ctgttgaagagctgacagaaaaatatgttttcaaataagatcaatgtaaagcaaagggctgtcctctcaccttttaggcaagggctagtgtctttcaggacagacaataaagtagtgtcttagcatactttgagatcagaccataaatctctaattagcaatgcgggagagggagggagggggggctcgctttttccccttctttcttccaaagatgtttgaaatcgcacatttacgctcgacaatttttacaatagccttga

SEQ ID NO: 24324 - DNA, 356 bp, Homo sapiens
  source 1..356: mol_type = other DNA
gcatgctaagcagggtcaaaaatgtgagcctatgtggttgcccttatatatcagatgagctctaaagttgaaaggttacatttgtgcaaatcaaagactcctaattgaaatacaaatccaacaatatgataatctttcagtccttatctgttgaagagctgacagaaaaatatgttttcaaataagatcaatgtaaagcaaagggctgtcctctcaccttttaggcaagggctagtgtctttcaggacagacaataaagtagtgtcttagcatactttgagatcagaccataaatctctaattagcaatgcgggagagggagggagggggggctcgctttttccccttctttcttc

SEQ ID NO: 24325 - DNA, 618 bp, Homo sapiens
  source 1..618: mol_type = other DNA
cagtgttgcctggaaaaatgatttctctggatgagaatgctaatctttattctgatttgttttcattgaagaagacggtgacaatagtgtaagacacgactgtcctctgaagcctatttcagttcacagtgtatattcacagatgaagaaacaaaatgtaggtaatacattttgtgccactgatttatgtgtgcagtggcacgatcccagttcagtcctgggacaggacacgcctggcacagggttgtgccaccacagtcagaaggatcaatgcttcaaaaatttgtttttgaaagaaacagacccttagagaaatggcttgaattagtcttgaattagtcattttccccactttcagacaattgttgaggtttctcaatactgaagtcacaaccaaaccacatggggttatcgcatggagtcctggttgtatcatccctgtacgaaggggcgttgactcgtctccactccttccctctccggtaaagagggaaaggagttctgatcgggcgccgaaacgccgggagtcgggggctaagggctcgagccaggaggccccggagcagcagccgcccgctcctcacgccgccgccgccgcccccgcggttgcctggacac

SEQ ID NO: 24326 - DNA, 597 bp, Homo sapiens
  source 1..597: mol_type = other DNA
acaaattatgaaattggtgactacttcagaaacattggctaaaattgcttgaaattactatctaaggatttaaacaatgcaattggatataaatgtatgcatatacatgccacatatataatacaagagaaaattatatgaaaacatacatatagtaagataaaataattttcaatcttggtaacttaaaaataatcaacaatgttttcattattttcagtaaactaagtatctgggaattgtgtgagtagctatgcaattaatatttatagtgagatactgacttattatgtgagtctctgaagtgacaatacttgcaaagatgctctgcaaataagaatattccatattcaagccttgtatattttttttaaattgaaattgtataagttctgaccaaaatctgggtcaacataagagaataattatttttaattttaaacctgattctctgttcctcctgcacgtgtgaggctttggaagagaaaaatctctatctgaaggatttttttttttttcccactatttccctagaggaatatttcggtccaggaagcgtgcgcgcccgcggatcatagtttcaggatcctcaggaaa

SEQ ID NO: 24327 - DNA, 548 bp, Homo sapiens
  source 1..548: mol_type = other DNA
attgaaatttaagttctgaccaaaatctgggtcaacataagagaataattatttttaattttaaacctgattctctgttcctcctgcacgtgtgaggctttggaagagaaaaatctctatctgaaggatttttttttttttcccactatttccctagaggaatatttcggtccaggaagcgtgcgcgcccgcggatcatagtttcaggatcctcaggaaaccctggtactggcagcagccagcctctgctgcattattaaataataagggcgaggagtgggcgcgaggccgggctgccgcgctgcccccggccgcccggtgcagaggagcccgccgcggggcgggaggtgcacatgacgcgcagccccggctgcgcagggaccgcagccgcccacggcgccggggcgcggacacaggcggctcggcgctggagcaagggcaggcgccgcgagagcgccggcgggggcagggattcgcctcaacgcccactcacggggttcccacctgtgcgccggcgccggccgcggctagcgcgaagcatgtgccgg

SEQ ID NO: 24328 - DNA, 357 bp, Homo sapiens
  source 1..357: mol_type = other DNA
gcaagacagtcctgaaaaagattgaaatcagtttttccacaattcttacaacaagtttttctctaacagtaagactcattcaacttttaacaaaaaatttgtcatttctctgtaaaattacatgtggacattaaaacttaaatgctgtcctacaatgaaaatatttttaatgccctcctcaaagttaagaaaaaaaatttactatttgtattttgtgtacctgggaagttattcatgctgagtaacagtacatccaggaatgccaatcagagatctccttttacccacgaaagcctgccattggcgagcttaccaaaggcatcttggaatgtgaaaccaaatcattttcaagttaaa

SEQ ID NO: 24329 - DNA, 454 bp, Homo sapiens
  source 1..454: mol_type = other DNA
ggaccatgctgacatgctggcaagcggggaagctccagactccccagcaggctgtgttgcctgctttaaatttaaatgataaattttaaaagaactgaaatctgtttaaataacagttaaacacagggttttgatgaaaagaaaatgaagaattttacctcccacatctaagctgtgattagaagtttgctctagaacttcatacactgatgtagtgttttcagcatctgtgtttactgaatacattactgcattttttaatggcatttcctattgagttagtaactgacatttaaaaatatttagtagtagataatgatcagtatttcaaaagattaatggtgacttaaaatgcatagagatattttgttcatgaagttgagtcagcaagagaagcatattcaaattagacttgtcatacagaaaaaaaaatctgactttaaagcaacttttt

SEQ ID NO: 24330 - DNA, 339 bp, Homo sapiens
  source 1..339: mol_type = other DNA
cttggatttgatcacttaaatctaatattttactttgcttcaaatcttatttttttataattcaaatttcctaccaaagaaagttaaccgtctcttgaggcatttgaattatttagaactgttttcagataatttgcacatcttttttagggacctgcctcaggaaagaaaaaaaaatctgtttgtccattagtcactctattttttaaaaaataacttaattatctcagatttgtttgattgaaaagggcagtgagatcgctaccgatgccaacagtgtcacaattaccagctctgtcaggactgcttctcatgccggtggttctcatagcaaccagc

SEQ ID NO: 24331 - DNA, 571 bp, Homo sapiens
  source 1..571: mol_type = other DNA
ccttaagcagtttacttaatcttactagtttactcatctttaaaatgggaataataatagtatctgtcacatagccaatatatttgaaagcggtattgcaaggatatagaacagcttgaatgttaagcactttcaaatactaagtgaggtgatcacttttgtaattcaaatggaaatagaataaatgtcaatgaattaatgatcatggtggttatctttttttaaaagaaaaaccctctttggggattcctttgtacagatgatctcttaatttgccatctttaatcctcacattattaaaggctacattgattagaaggagagaaaggcagaaattttaaccttagtctgataccttaggtttttctgaaacctgaccaagtttaattgtcatggcataaaaacttggtatttgtgtacacagctgcagggcctgccccggtgcctgcctggagctgctggcgtggtcacgccgcgaccctgtgcgagttgccatggcaacaggctggccacgtgaccagggtgctgctgccggcgctctgacgtcagctgccagagggcggggccgcag

SEQ ID NO: 24332 - DNA, 394 bp, Homo sapiens
  source 1..394: mol_type = other DNA
aagttgaaacatgaggcatcatttttcaccgactaataggctccaggagtctacgataccagtctccttgaactatggggacgtggacgtccctatttgggtatagccacagcacagaactaaagcaatataagtgactgttagtttttgtggaaaagaactggaatcacaggaaaatctgaggtttttttttttttttgagtctcgctctgtcgcccaggctggagtgcagcactcccgagtagctggaacttcaccgtgttagccagggatccgcccgcctcggccaccgcgcccggccggcccaggcgagatgcgggaccctccaggtgccgccgctcacaaggcctggccttggagattccgccgggctagcggctagcggaacactgcg

SEQ ID NO: 24333 - DNA, 277 bp, Homo sapiens
  source 1..277: mol_type = other DNA
caactggacacctcagtgtgcaagtggagaattaccagactacagatgtaatctctgagactggagaaaacaaaaaatctcatttgacttccagttgcttcagtgaattctagtggttaacactatgttatttctggcgttcattcggttgaacccaaggccagcatctccgtgcccgggagcgaccccgggggccttcactctccaaggactcgagaaaccatgcagctctatggcgcttcaccgcgcaggcgcagggcgggggtggggcaccggg

SEQ ID NO: 24334 - DNA, 455 bp, Homo sapiens
  source 1..455: mol_type = other DNA
taaatgagatcacttccattaataacagtgccatgaagggtcatcttgggccacaatcattataaggagtttttatgtcataaattattatgacataaattgattttaaatggtataaaatgctttaagatgaccatgcattctacaaattcaccgtgattatctagttttcctgacagataaataggtcggccaaagatttgaatcacgtcttggtttcaaatcttgctacccacaaatgagttgtgagcttcctacatcatttatttgtggaaaaaaaaatgataaggactatcttagagtcctctcagaggacgctgggctgttcgaggagaggcgcgaggccaagcgcagcctcaatgcggtcattgtcgtggggccgcccctcccccgcccggggcgcttccgcctcctcaggcccgcagaccggaagcagcccgcgccgggggcttctg

SEQ ID NO: 24335 - DNA, 311 bp, Homo sapiens
  source 1..311: mol_type = other DNA
attaattagcaagtgcgtacattttccaggagtccctagggaaaggcttaaatttatttatttatttatcaggctggagggcagtggcgcatggctaactgcagtctccacctccccagattgaggtgatcctcaccccttgttggccaggctggtctcgaactccttggctcagcctcaaacttatttttcaattgagattaagattatctgaggagagattgtaacaaatttttattttctgtaaaatgggaataaccttactgagttaccggagtaaataccggtgcccgcgttccgggccccgcccc

SEQ ID NO: 24336 - DNA, 276 bp, Homo sapiens
  source 1..276: mol_type = other DNA
actgcactgaggacttgggcctttgtcccaagagcaggggaggggcacatgcccagcatgctgggcgtcggctcctgctcttggacctgttgcagcccttgaggcaccaacaagaagagtcgtttctagagtctgggaaggtggcagagtaagacataatgaaaatatatatcactttcagtgaaatagaaaaaatttttaaacttgaacttaaaatatgctgccctctgacgtcgtcaccggctacctggccctgaggaaggccacgagcatcgt

SEQ ID NO: 24337 - DNA, 474 bp, Homo sapiens
  source 1..474: mol_type = other DNA
ggcattgccgtggcaacttgttcagagtaggaactgtcttataacaacctacattattgtattgtgtttgcatcattgtaggaaataatttttacaatatgataatattggtgtttctactagacaaacttcttattcaaaagtctactcttaaaatgtgtttccaaaaacattacttaaagtgagccagtgtttagtaaatacttcatgctgcagtgtgtccagatttatgtaatatgttctgttcactggaaagtagggggtgactcacatgggtgacaagtgagctagtcaccatcagcccatgtagtgtgagatcaaatacagggcagggctagatctggagcctgcacctctagttaatctccagagacttctgtgactacttaatcacaaaggaaattttcaggaatattatcaaatactattttagaaaaaaaaagagaagggatttgaatgttttcagttcagttt

SEQ ID NO: 24338 - DNA, 484 bp, Homo sapiens
  source 1..484: mol_type = other DNA
ctgaaaacttcttttttaaactaagattaacatgttaatgtgtacagtgaaataccttttaaaaaaagtctcaggggtcttaatgattgttgacagatgagaggtatattacagttatgattaggcataaattcaattcaagcactctggccacggtggcgcagtgggcattgccgtggcaacttgttcagagtaggaactgtcttataacaacctacattattgtattgtgtttgcatcattgtaggaaataatttttacaatatgataatattggtgtttctactagacaaacttcttattcaaaagtctactcttaaaatgtgtttccaaaaacattacttaaagtgagccagtgtttagtaaatacttcatgctgcagtgtgtccagatttatgtaatatgttctgttcactggaaagtagggggtgactcacatgggtgacaagtgagctagtcaccatcagcccatgtagtgtgagat

SEQ ID NO: 24339 - DNA, 320 bp, Homo sapiens
  source 1..320: mol_type = other DNA
cttcgcctgcagatcacctgaggtcgggagctcgagatggcacatgcctgtgatcccagctactcgggaggctgaggcaggacgccacagtagcttggcggtctacctcttctatatgagaaaagacaacacgctcattaattttttaaaacgtagttacttaaaaagattgggagacttcccgtcccgacggctacagcttggagtccaggccgggttttcaagcgcaaattccaattgtggccaccacttccactcccggaaagaagaggccggccagcccttcccacaatggcagcagcggcgggggctatggcgcc

SEQ ID NO: 24340 - DNA, 260 bp, Homo sapiens
  source 1..260: mol_type = other DNA
ccgattataaatcatttagttatatgatgtcgcaaagtaaaatttcatgctcaacttcgcctgcagatcacctgaggtcgggagctcgagatggcacatgcctgtgatcccagctactcgggaggctgaggcaggacgccacagtagcttggcggtctacctcttctatatgagaaaagacaacacgctcattaattttttaaaacgtagttacttaaaaagattgggagacttcccgtcccgacggctacagcttggag

SEQ ID NO: 24341 - DNA, 748 bp, Homo sapiens
  source 1..748: mol_type = other DNA
tactacagccagtgttaactaatgatgttgaacacctttttatgtaattgttgatcatttaaatatctttggtaaaacgtctattcaattgttttgcccatttaaaattggactattagtcttattactgagttgtaagagttcttcatacaggctacaagtcctttaacagatatatgatttgccaatcttttctcccaagataagagtattttttaacgatgacaactttattccaaagtgaagtttccttgtggaacgtcatgattgactttgtttcaaaatattatataagtacttttaaaatagtaacttttaacttttattttagaatacttggaagatgtaaaaacaggatactaaaattccagagataatcttcaggtttttttttttttatgtgagaggtaatataaatttaaaagtgggaccacttaaatattaagtaatctcttattgcagctcttggttggcaagcaataagacacaaacctctgaattatttaagtagaaaattaatttattaaaagaatggttggtgtaccaagcagtgtttcccaagggggcacagagggagggcccctctccgggcactgtgcgggagccacttccccaaacagtccccgttctgcaagggccccggcgttgctgcccccgagacccgggtgcctgccccggcggtgcgggtcgcgggcctccgctctcgccgtcctccctcagtcccgggcctcctgcatcgcggtcgcca

SEQ ID NO: 24342 - DNA, 494 bp, Homo sapiens
  source 1..494: mol_type = other DNA
gtgacacaggctttgagccttagagtcagctgctgagcaggagattctctacctctctgaggtctctcaggctgcttcatcatgctccaagatgaattcctttcaaaattggtcattttctcatcatggtataacataataaagggaattattgtcagagccaagactaaatgtcagatcttatgacatatactaactcaggaagctgctgtctgaatgtggacagttgaaataattaatagcttgacttttaccttaacgtataatacagcagtgcatttcctaattgtagggaattgaatttgtaggaattatttatatagtcctgatactctttatatattttataagcatttttccaagtctgattttcaaacatagtcttcatagtgaaatttcttattcttaatgaaattaataattcatattacttaatgtttataatattaaattaattttataattcacttttgatgttctgaatttttaagtta

SEQ ID NO: 24343 - DNA, 569 bp, Homo sapiens
  source 1..569: mol_type = other DNA
tgcatgtacacacatgttcacaattcaaacgttcaactgatgaatggataaaccattgtgataccgccatacaatggaatattattcagccataagacctgatacatgtgtatgattccatttacatgaaatgcaaatattttggaaatagcagaatggtgcttgcacaacattgtaaatttactaaacgccactgaattgttcaccttaaaatggtcaatattacgttatgtgaatttcactttaattacaaaaagagaaacgctagcgcgcaggcggagggcaggctggactggggacgctcctcccggccgcctcgttgctggcagcgcttccgcccgccggcgcaccagtcagtaccgcgcccggcgaagctacgcccgagctcaagtctccgctgggtgcctgagaggacccgggggggcggggacgcggcgggcgggtggggccgcctcccggctgggcacgcctccaagccagactggacgcgaaggaaaccggaacctgtctgcctacggtgcctgtttccggaagcagcttgagtccggacaccaacgacggggacgctg

SEQ ID NO: 24344 - DNA, 578 bp, Homo sapiens
  source 1..578: mol_type = other DNA
tcatggcactgaactccagtctgggtgagagtgaggccctctctcaaaaagaacttggattaatccatattttaaactgctgcatgtattatggaatatagacgtatctgtgtagactgcaacagtgaatgttccaatttttcactgttactgtgttgttcctggtgcaaacatgctggtgttttttccagcactgacagcaattagtgaaattgctaggaaagagtattcttataatttttaaatttttattcatttttcattttgtatatatttatggagtacataagatatttcatggcaatgcctaataatcgcattatgcaaagttatttatcctttgtgttacaaacaatccaattatccttttagttattttaaaatgtacaattaaattattactatactaggtcctatttatatttagtcctggtcatgcaaatagtctttaaagagtttacatgcctatgtagagatctgtaatcactgcttctttgacagggacaactcccaccatgcctctgagagtaacccaggcgcttgcagcgggaggggcggggcgtgggtccctgtgacgt

SEQ ID NO: 24345 - DNA, 617 bp, Homo sapiens
  source 1..617: mol_type = other DNA
gcagctcatgggcagcaatgaccgagccgacccgactcgcctcctaggtctggggcggccgtccagcgacctctcttaccagggggtcatagagcaccacggagggccagaagtcctctgggcccagagctccagttcaggactccccgcacccggtttgggcagcaaaacacgtgcgggtgccaccatgtcgccaactgccgccctcggagcggaactactagggtgcagccagccgagggccagacggaggcagccccgcccccctgagactctaaggccgccgctttgctagctctgctcttggaccgtggccccgctccgcgaacgagccaggatccgacccgagtggctcgggaccctcccgaaggacccggggctcatgtgcctggggcagcgtcagaaacatctcgctgccccttacgacccggctcccagcagcagccagggctggccccgggggcgctggctagcgagtatgcgctagggccgcgccacgcccccgcggcgtcggcgaacacacggaaaagcggatccgtctgcggagccgggttccggggtcgcactgcgcatgccctgcagtcctgggcgaagggggcggtggttccccgcggcgc

SEQ ID NO: 24346 - DNA, 523 bp, Homo sapiens
  source 1..523: mol_type = other DNA
tggaggccctccctattgaggcacctgttctccaagacagagccgctgtgtcccaggtgctctggggggattgaaggaggcgctcttattccactctgtccgggacaggggcggctttgtcctagggcactcttgctttaatagagagggcccggccacacccacgtgcgggaagtgcaagctcagctcacttggatcccagctgcagggcccgctccgggggaagcccccgagcttcccgggccgcattctaacaaacggcaccccgcccccgccagacgccggttcccgcttgagagggtgagggtcccgagacccctgcgaggaggagggtcgcggggttccaagcaggaaagatcacctcgttgcttaatcttcgtgggacccatcgagaggttgttcacccgctcccgcgcccaggtggggaaagggctggccagacggtcggggcgccacacctaggctgcggattccgagggaggcggcgtggcgggggcggagtcgccgggggccggcttcgcgc

SEQ ID NO: 24347 - DNA, 720 bp, Homo sapiens
  source 1..720: mol_type = other DNA
agggtgagtgggcgcctgcggcgggctccccccagcatcctccgcaggatccggttctccgcccgccacgcctgtctggcctgaggagctccctcccggacctgaaagactcacgtctccgcggcctcgttgtcccacggcccggccacgcgcgcaggggttccacacgggcggtccagagggctcggaacgggcccactggtgtcttcgagaaatctctaccaggcgggttggctgcccctcggtccgggggcagcgccgcgcagccacccggcagccgcgcccctagccttcgcgaataccgccgcgcgcagcgccgcggggaaccaccgcccccttcgcccaggactgcagggcatgcgcagtgcgaccccggaacccggctccgcagacggatccgcttttccgtgtgttcgccgacgccgcgggggcgtggcgcggccctagcgcatactcgctagccagcgcccccggggccagccctggctgctgctgggagccgggtcgtaaggggcagcgagatgtttctgacgctgccccaggcacatgagccccgggtccttcgggagggtcccgagccactcgggtcggatcctggctcgttcgcggagcggggccacggtccaagagcagagctagcaaagcggcggccttagagtctcaggggggcggggctgcctccgtctggccctcggctggctgcaccctagtagttccgct

SEQ ID NO: 24348 - DNA, 718 bp, Homo sapiens
  source 1..718: mol_type = other DNA
agcggtgggaggcagcgccgagtcttgccgctcccgcctggcaggggcgggcaggacgcaaaccttccttcccagtccctcggttaccagggcatccccggctctctgcaattcgggaaccttgccagaagggctcccacctcgcccccgcggccccacaaggtccaattagggctttcggcggcctaactggggcatccgccgggagccccggggtccaggcccggcgctggagtcccgcagcgaagcctcgcagcccccacgcctctcgactctaggcctaagggaaacctccccgtacccttaggtggggctcccggtgtgccgaagccggctccctggccacctggtgccctgccggggtattccaaatctgggcagcagaagccggccgccgccgccttcatctggaaaggcttaagccttctccgggtggggaagaagtcagaaggccgcctgtctccccgtccctcctccaggctccgaggggtgcagctcggccctgggccgcggggcgcacgtgcagcagagtccggccgcccggcctccccgccccgcctccgccgccggcctttggcgcagggctgcggatgccgcgcgagccgtcgcggtccggtcgttcggggcagcccggccgggggtagaggacccggagggagaggggaaggagggggcccgccggccccgcccccgccccgccccccgcggccggagcccg

SEQ ID NO: 24349 - DNA, 287 bp, Homo sapiens
  source 1..287: mol_type = other DNA
catctcttcttgcccaagagcgccttgtcagccacggctttgactgctcatgcagtgtcttgacatcctcaacggcggtagccagccttgctaccaggatatccaccctgcaggccaactctcagacccaggatgagagtgtcaggctggggagaggttccatctcccctgatgcgagtctgatatctcaagacatggatttcactgacctgggggaggaggatgacattgatgtcctagatgtggacctgggtcacagggaggcccctgggccacctcccccaccc

SEQ ID NO: 24350 - DNA, 584 bp, Homo sapiens
  source 1..584: mol_type = other DNA
gagggccttttaagtccgaaaggtcctgacttaagtcagcctgggggcactctgacagggtgggcagagggacctcggagggccatctcagccctggactgagcctggactcaaggctagtgagcgctgggaagcaacctagactggggccgagcagcacgtccccatccccggggttagttcggaggactgccacgcgacggctcgcccctcgccgtcccgtggagggcgccggcgccccctgtcaggcgggcacagtcccggctccagaacgccgcggcactggggcgggaggggcccgccacgtccgccagccactcggggcgtcgcgcctgggccgccacgcctcggcctgcaggctcggtccccattggccgcaccacgcagaggcccgcccccgcctgcgcggccggcccctgcggggcgagagggtgggggcgaagcccggaggtgcggtgtggggcaccgggcggggccgcgggaaccggcgccccacggagctgctgctgtccgggcccccatcatcactgcgccgcgctttcaggcgccgagaactaccgttcccggcatgcggcctcggcgct

SEQ ID NO: 24351 - DNA, 456 bp, Homo sapiens
  source 1..456: mol_type = other DNA
tcatcactgctgctgaactggtaatactaccactggatggagggccttttaagtccgaaaggtcctgacttaagtcagcctgggggcactctgacagggtgggcagagggacctcggagggccatctcagccctggactgagcctggactcaaggctagtgagcgctgggaagcaacctagactggggccgagcagcacgtccccatccccggggttagttcggaggactgccacgcgacggctcgcccctcgccgtcccgtggagggcgccggcgccccctgtcaggcgggcacagtcccggctccagaacgccgcggcactggggcgggaggggcccgccacgtccgccagccactcggggcgtcgcgcctgggccgccacgcctcggcctgcaggctcggtccccattggccgcaccacgcagaggcccgcccccgcctgcgcggccggcccc

SEQ ID NO: 24352 - DNA, 493 bp, Homo sapiens
  source 1..493: mol_type = other DNA
gaaaaactctgagtcattcagtggtgcaaggttggattccattacttcccccagagaaagcttcctgtaacaacggaagtcccagcagcgatgtccactcctgttctggggccagcgtcgcacgcttctccaggtgcggcttgctgcagcccagccccggggacgatgcctcctcctccatggctcgcgaccgcgattcgcgcgcggcgggagcgggtggagggccggaccccgcctcagcgccgaggccgcatgccgggaacggtagttctcggcgcctgaaagcgcggcgcagtgatgatgggggcccggacagcagcagctccgtggggcgccggttcccgcggccccgcccggtgccccacaccgcacctccgggcttcgcccccaccctctcgccccgcaggggccggccgcgcaggcgggggcgggcctctgcgtggtgcggccaatggggaccgagcctgcaggccgaggcgtggcggcccaggcg

SEQ ID NO: 24353 - DNA, 447 bp, Homo sapiens
  source 1..447: mol_type = other DNA
ggatccccgggctcgcttttctagtctaaataaataaataaagcgcttcgcccgcctggcgccctaatagagaataaaaatcactatttttaaaatacaaaaagttgcacctgctgctattaggaggccggctgcccggctcctcacggacacccgctccccgcggccgccgggcccggaatctcagcgcctcccgaagagccatgcgcctggcgctatttatagccgggggccgtctcggactgtaccatcgccacggcgcggggccgccgacgggggaggcgcggtggccgccgccccacgccgccctgcccccggccgccgcccgccgtggcgcgggcccccacagcgcgcccattcccggccccccgcggtctggctgggaacttgaaccggtccagcctgtttaaacggaaaggacagagatcctgtctgttcaatgtaagg

SEQ ID NO: 24354 - DNA, 516 bp, Homo sapiens
  source 1..516: mol_type = other DNA
cgcgcgcgagagagctcttgtctatagatttatccacataatatatatttatgtagcttgcgcgctcggatccccgggcggacctcgcttttctagtctaaataaataaataaagcgcttcgcccgcctggcgccctaatagagaataaaaatcactatttttaaaatacaaaaagttgcacctgctgctattaggaggccggctgcccggctcctcacggacacccgctccccgcggccgccgggcccggaatctcagcgcctcccgaagagccatgcgcctggcgctatttatagccgggggccgtctcggactgtaccatcgccacggcgcggggccgccgacgggggaggcgcggtggccgccgccccacgccgccctgcccccggccgccgcccgccgtggcgcgggcccccacagcgcgcccattcccggccccccgcggtctggctgggaacttgaaccggtccagcctgtttaaacggaaaggacagagatcctgtctgttcaatgta

SEQ ID NO: 24355 - DNA, 639 bp, Homo sapiens
  source 1..639: mol_type = other DNA
ctcccgccagccaccgggggaccagccgcgctctccggggcgggggaggccgcccgggacggggacccccaccttccgccttcggaagcgggttggggcgggggtcggaccccgagtctctactccccgtccctctgccccccggcgcggcccgacagctcccagccccatcctggcaggtggcttgggtggcgcgcgcgcgagagagctcttgtctatagatttatccacataatatatatttatgtagcttgcgcgctcggatccccgggcggacctcgcttttctagtctaaataaataaataaagcgcttcgcccgcctggcgccctaatagagaataaaaatcactatttttaaaatacaaaaagttgcacctgctgctattaggaggccggctgcccggctcctcacggacacccgctccccgcggccgccgggcccggaatctcagcgcctcccgaagagccatgcgcctggcgctatttatagccgggggccgtctcggactgtaccatcgccacggcgcggggccgccgacgggggaggcgcggtggccgccgccccacgccgccctgcccccggccgccgcccgccgtggcgcgggcccccacagcgcgcccattcccggccccccgcg

SEQ ID NO: 24356 - DNA, 505 bp, Homo sapiens
  source 1..505: mol_type = other DNA
aatggagactttcattcaatatcatcattaataaccagtaagtaggaagttcttaccttccaagagttttcaatctaattggaagggagtattacaattttagattataataattataaaaacaaacattatagtgttctgtagtctagattctttgaaactacattgaatttgaatattcccagtttaaacatgcacgcaagtattatgtccaaagtagcatgaatactgacaacaccaaacatgaaacccagatttatttattctctatttagtcctttccctactctttagagcagaaagagaactggaatttaaacctggcaaaattccaatttttgtgcttgtaacaaagttataattctttttgaattgaattttcaaatgatagcgtctctttttctttaaaaaaaaaaaaaagtgctgtcaagacaggaaaactggaatgtaaccagattagccgtttgtttcggcggggagttccgccgcgtcggaactcgctccg

SEQ ID NO: 24357 - DNA, 477 bp, Homo sapiens
  source 1..477: mol_type = other DNA
atctgataatgattcaagctttagaaaatagacaataaacatgttaaacatcatcatgttgattaaaagacaggatcttattatgacaattaggaattattgaaaacattcttgaccctctgtagtttagaagttctttagaattcaaacaggtaataatagtttggacatttaaaaatattcttctacaatcttttatgctagtataattgtcagtaaaaatatttatcaattatctctttcatgcttgatagtcgtgatttaagttgtttctaataacttaacgtaaacaagcatgagccttgtccaaatatgacaatgatctaattcaattacactgaagtgcttttccattttcccggaatgaaaactgcaatagaagaaatccttattaattgactttgattaaaagaaaatagcatctttgaagctcacctgtgagacatagcacctgtgagtggtgctcgagcggaggac

SEQ ID NO: 24358 - DNA, 528 bp, Homo sapiens
  source 1..528: mol_type = other DNA
aataaccaatgttaccaatgttactttagatattttggaaactattttgtacaaacgtactaacttttaaccataaatgtcatttcagaagcgccttattattttcaaatgtcttccagcaaaatatttagactaataatttattagaacataaaggattatactgggaaaactatcttatatcaaatgcatcaatttgtagtgaatcttttctaaatgtaataagtatcataggtataacatgtaattaaaaagcaagaaaacatgtttttgcatgttaaaaagagtaatttgaagcagaaacttctcctctgtaagttacgttattctgaaaactcagaaacatatttttattcatctaggtgatcgacagggatcagtttcggggcttatctcggtgagcctctgagcccccacaaaacagcaaagctaatctctagtggtccaacagttaaaataattgatgggagtctcggagacgagcttctcagagagggcgagtggacctccctcttttcagcgctccga

SEQ ID NO: 24359 - DNA, 621 bp, Homo sapiens
  source 1..621: mol_type = other DNA
gaaattctttgcagagcaataattgctttcctttgaaaaattgctaagcatttgttttagaaaggcacactcttcagattccaatgaatcagacagtttttcacctccgagaatatcatcagtttagaaaaaggaatgctttcctttgaaataaccaatgttaccaatgttactttagatgttattttggaaactattttgtacaaacgtactaacttttaaccataaatgtcatttcagaagcgccttattattttcaaatgtcttccagcaaaatatttagactaataatttattagaacataaaggattatactgggaaaactatcttatatcaaatgcatcaatttgtagtgaatcttttctaaatgtaataagtatcataggtataacatgtaattaaaaagcaagaaaacatgtttttgcatgttaaaaagagtaatttgaagcagaaacttctcctctgtaagttacgttattctgaaaactcagaaacatatttttattcatctaggtgatcgacagggatcagtttcggggcttatctcggtgagcctctgagcccccacaaaacagcaaagctaatctctagtggtccaacagttaaaataattgatggga

SEQ ID NO: 24360 - DNA, 625 bp, Homo sapiens
  source 1..625: mol_type = other DNA
ggactccggcgcgcaggagccactgggccgcaagggcgccggggagcgggaggggcgctgggggcggcaaggggtcccagatcccaggccacccccgctcccttcaactgacagagcaggggggggggagagaggtcgctcagggctcgctactggctgcgcctccccaagcggctctgggccctccgggcgagcagcttgggcgccggcgccccctgcgaggaagatcgcggggtgacggtcggtacccgttcggctgggccgcgctgccgctccgatccacccttcctttcactaggagtccgggattcggagagggcgcgggaggcaggcacacgggcccgaccccactccagcgctcaccggggacgcgggcgggcggcgacgggacgcggcgggggcgcggggcgggcgcggccatggagcagcagcggcggcggcggcggcggcggcggcaacactagcgaccgcgggcggacgagcgggcgggcagggccgccgggctcagcggaccgaactgcacagctcagcgagagacggggatatatatatatatatatatatatatatatatataaaattttttttggctcctgctaaaattaaggactcctcgggctccgga

SEQ ID NO: 24361 - DNA, 301 bp, Homo sapiens
  source 1..301: mol_type = other DNA
gagttttagaactttgttagcttggaaaaatgtttccttggtccaacttatcttttccaaaacatatgcatggcattttgttcttttcaaaaatatgatgacacaagttggtggccaacctggggccaagagcctcacatctgaagtgacaagatcctctttgaaatgggattaaataataccagctaatttctgtaattttcctggaaactggtgcctgggattattgttgccatagcccagcaattaataaccccgtccatataactgtatatattgaattattagatgcctcaaaagg

SEQ ID NO: 24362 - DNA, 514 bp, Homo sapiens
  source 1..514: mol_type = other DNA
gagagacggggatatatatatatatatatatatatatatatatataaaattttttttggctcctgctaaaattaaggactcctcgggctccggacgcggcggaggcggcagagtcgggcgggaagcgcggggccggccggggcgcccgccgctcgccgccgcctccgcgcgcccgggggccccggcgccccccgagctagggcggccagctcgcggctcgccgttcatggagttgccgcagcagcacctttgggggctcgggcgagcgacgggagccgggatctgagcgagcgccggggccagcggagccggagccgccgggacatgggtgagcacgcgcggcgaccttggcccgggagcccgggcgcccagcctccctccgcgccgcgggcccccgcactcccggaaccgggggcgacgtgtgtgccctggggcgggatgccgggcgcgattccggcgggccggcgggtgggcggcgcctccctcggtcctgcagccggctggcggggctggc

SEQ ID NO: 24363 - DNA, 562 bp, Homo sapiens
  source 1..562: mol_type = other DNA
ttcagcaggtattaataagctattgttgctggtttaaacaaagaaacttaaatgtttattgttgcaacctatcttttatgtgtgcccagactccaaagctatagatatagcaaaagcccaaaggacagcatgctgagcctttggaaaaacagtttcatttccaaaggcaaggaatccttaggataaagtcatagctaatgtaaggttttcagaataaaatctaagatttcagaggtttttacccaatgtttgaggcaaataaatgttatcaaacataacattggggagtaaaatattatttttgtttcgttttgtgataatcatagcaaagaggatttaagttacttcagtttggaaattactatagtggtgtaactggactacagtctctctcaaagagaaggggatcagattctatgggaagtggttctcttgacatggagttttccacctggagaaggccaggtgtacaagtcctccttatcttccatcagctcaaagacaataagatttgtaaaaatttaacctctcagcgttccagtggtctggctacttaagaagc

SEQ ID NO: 24364 - DNA, 449 bp, Homo sapiens
  source 1..449: mol_type = other DNA
gtgggattacatatatatattatatatatatttaaaagtatatgtatatatgtatatatattacatatatacacacatatatatctacacatatgtaatatatgtatatatgtatatttattatatgtatatatctacatatatacatgtatgtatgtaatatagatgtatatatgttacatatatacacacatatacatatatacacatatatttttttaaaattctgcactcataaaagtagatttgagttagatttttggatattttaattcagttttagatttccacttttaaagaggcaggaagacagacattccagggaaacactgatatttttgttttctcctaaaaggcagctggccttcaaaacaacttgtgtgtagaagttgtgccaagctctggggaccagttcccacagagcagagtggggctctgagtatataact

SEQ ID NO: 24365 - DNA, 121 bp, Homo sapiens
  source 1..121: mol_type = other DNA
aagagaaattatcaatttcattgttttcaatagctcagctttcctagatggtaacaggctctgtgctccacagttggaactgctcaaatttctggatggcagccacaggaaatggccctgt

SEQ ID NO: 24366 - DNA, 196 bp, Homo sapiens
  source 1..196: mol_type = other DNA
cttttggtaacaggctctgtgctccacagttggaactgctcaaatttctggatggcagccacaggaaatggccctgtgacctcaggctgccaggcttcctgtccccagttcctccggctcccgcagagcccacagggacctgcagatctgagtgccccccccaccacgcctgggagggccctcactggggaggtgg

SEQ ID NO: 24367 - DNA, 629 bp, Homo sapiens
  source 1..629: mol_type = other DNA
tgagccactgcgcctggcccaccatttgtgtgattcacgaaatatttatttagtatctactatgtgctactacgtgcagtgttctaaagacgaaccctgcctttgaggatcttacattctgggaggatacaagtttttcacatctggaaatttcaaatgaagcacactgtaaaatgtatactaagaatacttttacggatcttattgaatttgtacagtaatgataattaataactaccatgtaccgacatgcctgccgctaccaggcacctttctgggagagcccattaaattctcatgacatccgaaaagggtgatcattcccctttacaaaagaggacgccgaagtgcacaccccgatgggcgtcagggtttcttccttgcgcgcagtgctggtttatctgaagatgtgtgcgagcgcgcccgggatccgcactgagtgaggttccgcagaggtgggtcagcctgggtcgctgcccttgtccagcgcaacccaagacacctgcgcgccgggtggagccagggctaggggtggggcctgggctccgggaagggggcgggcctgccttcctccagtgcaagttgcggcccgtagaggcgccgactcaccgcctcttctccgggagtgg

SEQ ID NO: 24368 - DNA, 346 bp, Homo sapiens
  source 1..346: mol_type = other DNA
tttagaagggcagagctctaacctggcctggccctgcattactattaaaagtcatggcaaaaaccgcaattacttttgtaccatagcccccagggcctgatctgcagcaggtgccggtggggcccgccgtgaagccaaggcgtctgcgggagttgtcggccccaactgatcagattggatttcgtgctgtccagggggccttgtgggcaggaacgaggcagctagcttcgggctgagggcctgggtccgggtgcgggctgcagcccctggccgggtgagcgccgagggtcccgcccaggtctcgcgcagggagcgcagagcgccgacggcggccgtcgcaatcggg

SEQ ID NO: 24369 - DNA, 333 bp, Homo sapiens
  source 1..333: mol_type = other DNA
gttggcagaggaaaaagcgagtctggacaattctcagtaggattggcaatgactcttctagaatttaaagttccggaatacatgtccaggacgtgcaggtttgttacacaggtactgacaggattcttttagaatgaatctaaatccacggtctacactaccgaaggccctcatcctcgcaccagatggggcctgggaactgctgcttagcagattcagctacccacgtggtcacccggggcaaccacggaatatatctaatcattcattttgaggtttaaacttaaaaatgttacataaaaaaataacgggtcaggtgggccggctgtcttg

SEQ ID NO: 24370 - DNA, 260 bp, Homo sapiens
  source 1..260: mol_type = other DNA
agctgagagccgagagccgagatcgtgccactgccctccagcagcctgtcccagctacttgggagcagtgaccactgcactccagagcgagactctgtctcaaaaaaaaaaaatgtccctagtttttaggttggattctgagtttgctaagcaagaaccaaacgtttcaagtacttttttttaacgacaagtgattcaaacaagaaacttgcaccccagaaatcccgggcccggcgaggggcgggtgccaacggcggggc

SEQ ID NO: 24371 - DNA, 262 bp, Homo sapiens
  source 1..262: mol_type = other DNA
tacttagctagcacacactacgttctctgtgattctcagtgaggatccaacactgccacttacttggacgccatccaactcatagggttgtattcagtggatttaacccatttaaatgcaaggtgcctggtataataaaattattttcttttcttaatttattctgtaaaggtaaagaccgagcggggcagagcggggtctccccagcgggccacgtcccaccagcaggtggcggtcgatctgcaaggcctgcaaggtgccc

SEQ ID NO: 24372 - DNA, 384 bp, Homo sapiens
  source 1..384: mol_type = other DNA
tctgtaaaggtaaagaccgagcggggcagagcggggtctccccagcgggccacgtcccaccagcaggtggcggtcgatctgcaaggcctgcaaggtgcccggacagaagggcacgggctctccgctggagcgcaagctgctttcggaagctgagcagcgcacagaaaagggagcgctgtcctttgctgaccccgggaaagacagggaaagaagcccggggagccggcgccttcacgccccgcggtctgcagcgggaggagcgcgggttccatcgcgccagatggcgctgtctggcttttctcgggcctcgggcgccagtctccagaggtctccggcgcagctgcctctctagccggccgacgcgggctctttccgggcgggcgc

SEQ ID NO: 24373 - DNA, 352 bp, Homo sapiens
  source 1..352: mol_type = other DNA
tgtgtgtgcctctgtgccaccgcccagcacacatgcacagtgcagctgcagctcaaaggaacacaggtttgtcactttacaaagaactgcagggttctttgggctggccatcccccaggacacctggtactttttggaagcacacttattacataaaaagagatgtatctgtgtaaagctattttttatgcctgcctggataagagcaaaaaagtgtcaggctcgcacttttgcaattttcttggtaaagcaagaggctcttcatctcctgcgggccaggcctgcacagattctagaccaggcccctgcacctgaaccttcagacttcactgtgagtccagggtgctttctc

SEQ ID NO: 24374 - DNA, 454 bp, Homo sapiens
  source 1..454: mol_type = other DNA
gttgggcgccggggcacgggcaggcagccccgcaggccatcagcatgcaggagcggcgcgccgtccttgaagggctgcccggctgaccttgctccgctttctccggagaaaacgcggccacgatggtgactcagtgccctgcgcgccgcacgctcgctctgtcgcccaggctggagtgcagtggcgcgatcccggctcactgcaacctccaagtagctgggagtgctgggattacaggagtgagccacggcgaaccggaggccccttgctgcgggcccggagatcaaacgtggcccgcccccggcagggcacagcgcgctgggcaaccgcgatccggcgccggactggaggggtcgatgcgcggcgcgctggggcgcacaggggacggagcccgggtcttgctccccattggccgccacctcggcgggaggggccgcctccggctcgtggcacc

SEQ ID NO: 24375 - DNA, 253 bp, Homo sapiens
  source 1..253: mol_type = other DNA
accttcaggtgcccttcaaggtcagaaaaagaattcccgaggccaggcccgcggataacgcccccagctctaggcagtccgcaggggcctccgccggggagggaaggcacgacctggggccgagcggggccaagccgcggggcagcacgccggggcaggcgcgggcgggcgctgtcgccgcgcggactgaaggcgcgggcggaaggcggtcgcgcgggcaccgctaggggcggggcttcggcgcgtcggaggc

SEQ ID NO: 24376 - DNA, 313 bp, Homo sapiens
  source 1..313: mol_type = other DNA
tattaaataatctgtaatcggatttcccaattaggaagttattgacgactctggaatgtagattgaggaaacttgaatatttttgtatcctgcagaggaaaacacgtccatgtttttccacgtctaatgagaacaggtctgatgtgatttgcatcccagaaggctcttgacaaccaatggtacatggccctgggtcagcttgtatttgtcatgcaaacactctggattaaacatgcatggtctaacattgattggcatgttaaagaatccttctgtggccagcgattggctgggctctagccaatccggaccg

SEQ ID NO: 24377 - DNA, 612 bp, Homo sapiens
  source 1..612: mol_type = other DNA
atgatcttgttttaagactgagaagaaaaaaatatttttcctcaagagtaaaatttgcagatttcttactaaaacactaagaaaatatcggaaggggccttttctcgtgacacatcggccctcactgcgaaccgggatgtcgggtccccatgtgcccctcctggagggcgccccgaccccccgcgccaggtgtgcggaccactggcagcactcaggagccggctcgccgcggcccaggcccgccgcccccgcgccgcccgcgtgccctccgccggcccgctcccctcccccgcgccctcggcgcccgttcgtccgcgggccggggctcagggctccgccaaccggccccagaggcacgagcaggcggcggccggcgacgttgcggtttccccaccacccgcgggcgccgccgccgctgccgccgcacccactcccgctgccgccaacgacgctgccgccaccacggccgccgccgcctccagcaccatcctgcactgggcgccgcttaagacgccgcggccgccgccgctacagccgggcccgtcacgtgaacggcgcgggagctccgcctccgacgcgccgaagccccgcccctagcggtgcccgcgcgac

SEQ ID NO: 24378 - DNA, 411 bp, Homo sapiens
  source 1..411: mol_type = other DNA
gcagtgagcctgctgcttgatgccaagtggcctgtcctgcctggcccctggcctgcgagcagctgggctcccgggctgcctggatccctgcgtggcagcagcacatcctgtcccagtgcctttgggagcggatgagtcctctgcccattaatttaatgaaaatgatttcatcagctgtgaacattgaatgccacatttctttgaattgcctcatttacatcctattccctcatgctgtggaccacattctgcagcacctattgtgaagcagtgtgtgcatctgaagcaacttgaaatgcagcttcaccctcttttgttgtgcattaattagaaagaaaggtattgaaggctagccagtaagccttgctaatctcttttattttgtaactgaagatgagacccaaagaaagg

SEQ ID NO: 24379 - DNA, 543 bp, Homo sapiens
  source 1..543: mol_type = other DNA
aacagggcaagtttagctgtaacagaaatggttggaccttgaatcaggattttgacattctgaaactcattttcaagggctgttgttgaacaatattaatggtttttaaggaaaaaaaaaaactttcttcaggcatggtctgaatcaatcctgcttatagacacaagattaagaattttaattaccttgcattcatcatcattgatgatgtatatttatccttatcttgaataataattagaaagaggagcttctttttcagactgatctgttattcccaagtgtgaagtgaacatcagacagtcagagtctgtttaagtatctggatttaacttgattctacctgttaggacaatgggatagaaagtaaggataacatactatgtgggccacagaaaagctatcttctgaatctaggatagaatgcatttttccatgatgagaattgtaattgtaactcagctctctgtgttcatcttctcttttctatttcaataaaaaacatggcagtaatgtttgttggctagcttactgaagacactg

SEQ ID NO: 24380 - DNA, 357 bp, Homo sapiens
  source 1..357: mol_type = other DNA
gctcctaacagggctgactgcagcgttttatcaaggggtataacccttgtataaggtgtaacccagttgttcagtcattttcatagtgagtgcataagagtgacttttctgtactctattattcaggtccacataacttacctggatcaagaaaagtatgacttcttagttaaattcagcagtggtgctgtcccggcccaggaggccgcgcccttgggaaagcgggtctccagaagggcctagctttccgtcagcggcggtgcagacagaggacaacacggcgcggtagctgcaccgcctcggcggaaatcccgggcgaaggggtggggcggagccgggaaatccggggcttccggc

SEQ ID NO: 24381 - DNA, 403 bp, Homo sapiens
  source 1..403: mol_type = other DNA
tcactgagtaattttaaaacagttattttgttttagcattctgaaatctgaaatgggaatattagtatcagaaatataatgcaagcgtcacatgtcatttacagtatcttcataaccacattaaataaaataattaaaaataaacactcagcctcctgagtagctgggattacaggagcccatgccatgttggccagactggtctcctcaaaatattttcatttcaacatgttatcaacatttaaaaattattggacggtggtcccagctactccactgcactccagtttgggcgacagggccagacatctcaaaaaaaaaaaaattattgggatattcttcatcctttgtattttgcacctgcagcactggccacatcagagcgattcaccggtctagacaa

SEQ ID NO: 24382 - DNA, 318 bp, Homo sapiens
  source 1..318: mol_type = other DNA
cgcactatattgacaaaactgtgaggaaatgttttctcatcctagttgttttcctgattaaatttatttatttctccaggaaaattggcaacttgctgatgataaatcgatgtgcatatgcacatattggggtcctcacctaattgtacgttttctggattctgtcttcagacacagagattcatgacttctagaatccggggcctccaggatctaggtcccgggatgcaggcagacctgcggctccagcaccattgctgcagttgagtgtcagggagacggtgacgtcaccctgcccgctgggtggcgtcccctcgg

SEQ ID NO: 24383 - DNA, 824 bp, Homo sapiens
  source 1..824: mol_type = other DNA
gcgcgtcctccgcgctgcgcggggcctccccgtgggatgagcacgtgtccgctgccggcctcacgacggacggtggacgaggcggcaggcccctacaggccccacccacgacgctggcgagggatcgggcggtcaccgggaatcgtcttaatgcgcggcaaggcgcgggcctctccctctccgcccgtgagccccggtgggagcgcgccggcgcccaactcaagcgaaaccgcgggcgtcccgccccgcccggccgcgccccgcctcgcctcacgctagactggggaggcgggacgattcgaggcccccgatgcgcggctcacaccccgctgattggctgcgggcgccgccggtccggccgggaggcggggcgggccgtagggaggtggggaggcggtggccggcgactccccgcgccccgctcgccccccggcccttctacccgccccgcgcggctttcggccggcgtgcctcgcgccctaacgggcggctggaggcgccaatcagcgggcggcagggtgccagccccggggctgcgccggcgaatcggcggggcccgcggcccagggtggcaggcgggtctacccgcgcggccgcggcggcggagaagcagctcgccagccagcagcccgccagccgccgggaggtgggtgcgtggcgccgcggcggccggcggccgagggcggagggcggaagcggggggagggcgcggccgtgcgggcggccggtagggctgcgggcgcgcgcctgaggggaggaggggcagcgcgggcgcgcgcgtcctcaccccctccttccccgcgggcggcggccaggctccctcc

SEQ ID NO: 24384 - DNA, 720 bp, Homo sapiens
  source 1..720: mol_type = other DNA
gggacatcgtgacagatgtttcttttagacttcacaaagacccttcgggacatggattattgatatcatttttactgaagacggaaccaaaatttaggttaaacacgagggccccgcccgctcatttgcatagggcgcgcccagtcacgggccgggtcctcgggcttgcgcgtcctccgcgctgcgcggggcctccccgtgggatgagcacgtgtccgctgccggcctcacgacggacggtggacgaggcggcaggcccctacaggccccacccacgacgctggcgagggatcgggcggtcaccgggaatcgtcttaatgcgcggcaaggcgcgggcctctccctctccgcccgtgagccccggtgggagcgcgccggcgcccaactcaagcgaaaccgcgggcgtcccgccccgcccggccgcgccccgcctcgcctcacgctagactggggaggcgggacgattcgaggcccccgatgcgcggctcacaccccgctgattggctgcgggcgccgccggtccggccgggaggcggggcgggccgtagggaggtggggaggcggtggccggcgactccccgcgccccgctcgccccccggcccttctacccgccccgcgcggctttcggccggcgtgcctcgcgccctaacgggcggctggaggcgccaatcagcgggcggcagggtgccagccccggggctgcgccggcgaatcggcgg

SEQ ID NO: 24385 - DNA, 636 bp, Homo sapiens
  source 1..636: mol_type = other DNA
tgtgtcacagtgggtgcatagtaaacacctgatgtgattagttgctaagggtaaccgcaacaaggttttccctggcgttggggcgggacatcgtgacagatgtttcttttagacttcacaaagacccttcgggacatggattattgatatcatttttactgaagacggaaccaaaatttaggttaaacacgagggccccgcccgctcatttgcatagggcgcgcccagtcacgggccgggtcctcgggcttgcgcgtcctccgcgctgcgcggggcctccccgtgggatgagcacgtgtccgctgccggcctcacgacggacggtggacgaggcggcaggcccctacaggccccacccacgacgctggcgagggatcgggcggtcaccgggaatcgtcttaatgcgcggcaaggcgcgggcctctccctctccgcccgtgagccccggtgggagcgcgccggcgcccaactcaagcgaaaccgcgggcgtcccgccccgcccggccgcgccccgcctcgcctcacgctagactggggaggcgggacgattcgaggcccccgatgcgcggctcacaccccgctgattggctgcgggcgccgccggtccggccgggaggcggggcgggccgtagggag

SEQ ID NO: 24386 - DNA, 352 bp, Homo sapiens
  source 1..352: mol_type = other DNA
gaaggtgggacacgttcatttctcagaagaaagcgtatacttcaaaaactcttccaaaaaaaaactgtgttctagtcttgtctctggcacgtgtgaaacctaagtttctctgtgtcacagtgggtgcatagtaaacacctgatgtgattagttgctaagggtaaccgcaacaaggttttccctggcgttggggcgggacatcgtgacagatgtttcttttagacttcacaaagacccttcgggacatggattattgatatcatttttactgaagacggaaccaaaatttaggttaaacacgagggccccgcccgctcatttgcatagggcgcgcccagtcacgggccgggtc

SEQ ID NO: 24387 - DNA, 276 bp, Homo sapiens
  source 1..276: mol_type = other DNA
cttggtgcatgaattcactccatgctgggaggtgtggacgcaggggaaggccatgcccaactcctgagccctcctggcacccagtggtgccagtgtcaacatcaccctcccatggcctgcgtgcggcgggggtggggtgggggaggaccgtacacccatccccactgaggatctgagcagagcacagtggggtactctttgcatgtttagcttgcacacccaccctcgcagcccgctgccaccaggaccctgcccagctggcttcatcctgccagc

SEQ ID NO: 24388 - DNA, 782 bp, Homo sapiens
  source 1..782: mol_type = other DNA
gacccggggagtgacgggcggccagcggctgctccccggcgtgtggggtgcggagtgcggggcccaaggctccagaggggtggggactccgggccgcagcgccgccgagcgcgattgcccgctgagattcggcgccccggggtgcggcaagcttgcgggtgccgagagcattcgggtagaaaagcagttgcctgcgccggggcggcagagcccatctctgccgcaccgctgccccgggtcggcagagcccatctctgccgcaccgctgccccgggtcgggtgtggacctaaaaatacccggcggtcccaagcctgcgctgggggtgcgggcgggtccggccgggccgcagagggcgtcaggagaccggagaaacggcggccgcctggccccctcgcctctgccggggctgtccctttaaatcctggaggccccgagcggttggtggcggtgcccggcccccccactccgcctccgcgtcgggtcctgactcccgcccgcagcctccgccagtcccgggcgccccccgccgcgccgcccactcgccacagttacgagccgggcgggggctgcggcgcagcaagtgcatgtgccgcgcggcggggagggggcgggcgcgagcgacaggcgaccgcacacatccgggccctttagccctgtgcgccccccgagccggcggcgcgggcgcggggcgcggggcgcggggctgacagccgcggcgcgggaggcggggcgcggggagggcggaggcgcggcgcggggagggaggagctgcccgctcgcc

SEQ ID NO: 24389 - DNA, 380 bp, Homo sapiens
  source 1..380: mol_type = other DNA
actttcattgactgtagtcttttggcattcctagacacacctggtctgactcaaaatgtgaatataaactaatgaataaatgggtttctacagcagtttatactgcaatacagtatttaaccaaaacattggtgatctggttaagtcattactgaattatcatgctcaaatgttaattataacatatgcatctcaatggcatttagtgcagcattaatccgcagaggcccccacccagggctgcgccagcgccgtggggtcgctgggcggcgggctagactgggctgtcttggcagctaaggcgacatcccgagcgtcctggggccaccctgctctccagggcccgccatcctggaaaagaaaggcggaggggagggcgg

SEQ ID NO: 24390 - DNA, 380 bp, Homo sapiens
  source 1..380: mol_type = other DNA
tagacacacctggtctgactcaaaatgtgaatataaactaatgaataaatgggtttctacagcagtttatactgcaatacagtatttaaccaaaacattggtgatctggttaagtcattactgaattatcatgctcaaatgttaattataacatatgcatctcaatggcatttagtgcagcattaatccgcagaggcccccacccagggctgcgccagcgccgtggggtcgctgggcggcgggctagactgggctgtcttggcagctaaggcgacatcccgagcgtcctggggccaccctgctctccagggcccgccatcctggaaaagaaaggcggaggggagggcggggcctgaacgtcactctcctacactgtgcgc

SEQ ID NO: 24391 - DNA, 665 bp, Homo sapiens
  source 1..665: mol_type = other DNA
agaggacaccggggcctcctgccgccgcagctgggtcgaggcgagcagcccatgcggggagcctcggcggccagccgcggccaggggaagggacatcggcggcccctgcactagcaagcagcttgtgcccggggggggcgagaacgcgcgacccgtctggggccctccgccgccgccgcgccaccctcccccgcgctgtcagccccgccgggctcagccgccgccgcagcatcttctgcccctgcgcccgcgccagcctcgaggaagtccccgccgaggacctgggcccccaggagcgcagggggttctgtggattaaaaaaatacacgatttttttttttttttttggcagaagaaaaggagaggaagacaactcgtggatacatttttccacccatcaaacatcttgttatactttgtaaacccccagacctctgaggttcgagggtgaagtccactcggccccctcccctgagtcttgcgcggaattcgaggatatagaggaaaaaaataaatcgcttgcttttttttttttaattgcccaaattaagttgcttagcaagggggaaagaggctttttccttcttccaggaagccgaggctggcgagcccgacattcgggagccactgcgggggggcctctttttggggaggcgccgacgggg

SEQ ID NO: 24392 - DNA, 425 bp, Homo sapiens
  source 1..425: mol_type = other DNA
atcatcacggtaactggtaattagaagagttattcatctgtagttataaacacaagtctaactaacttgttttgcaagggtgccccccgtgcctcttcttaagagagagggcaagaatcagcccagcagtctcttcctttttcatgtgtggcacagtgactctccttgagtcacggagcagcccagatttggctgctatgctgcccagtataggttacaaatctacagtggaaatgtcttaacttagaaaacagttcttgcttacttagagctgcctactctccacagccatggcagagcactgagcaaagtcatcgtttatcaaaaattgtggacatgagtaagtaaagcaatcattttttacttaaacttttcttccccattacagatactaaaaaatattacttggtattcagaacgagttt

SEQ ID NO: 24393 - DNA, 270 bp, Homo sapiens
  source 1..270: mol_type = other DNA
ataatgtgaattgttattactacagtcatgtcaacatttcctgtaatggcagaatcatcatcatgcatatatttgaaacctcagctcatttgacttcaaattccatattccgacaactttgcaggcagggctagccctgccaggaatcccacacaatattgcttgacttaataagggccaggatggtctcgatctcctgaccagaagcccgcgcgcgccgcgtgccacgtgaccacctggctggcgcgcgcgcctgggggtctggtccct

SEQ ID NO: 24394 - DNA, 407 bp, Homo sapiens
  source 1..407: mol_type = other DNA
gggaggctgcagtgagcactactgcaccccaaaaagtttcattatcccaaaaggaatttgcagtggttttctttgcagaacaatccagtagatcatccccagttggaaatgttgatgctcaacctgtatcatttcgtcaattgatattgagtatatacaaggttacctgagtaaacatctgaggaacttccaaatatttcccagtacttttcgtttataaagtgatgtaactgcttcttttaagcattgaatttaagaaaccagcaaaacggctagctgccacctgacgcgcaggactttcgcgctacctgcaggccgcagagccggaagcctcgccgcgccccttgggcaacactgctgcgtgctgtgcgaccccgggttgacgcaagcgcgcctttgtcgtcccc

SEQ ID NO: 24395 - DNA, 351 bp, Homo sapiens
  source 1..351: mol_type = other DNA
acaaccctgtttttaattgactgacatttaaaaccctgaatttttatttctgtatacaaaaaagagaactttgagctcgcgagaagtcaagttctcatgatgccatcgccgccatcctggcttcgggggcgccggcctccaggcccccgggaggagaactcctagggctactagccggggtcagtcggcctctgaggtccgcagataccgggctcctccactggtgggggcgccggcccgccgtggggtgcgggccgcctggggtccgtgcggactccggaggtccgcagagagacggcactcactacctgcagccctgcctggaagatccagcattggattgaaacaggc

SEQ ID NO: 24396 - DNA, 289 bp, Homo sapiens
  source 1..289: mol_type = other DNA
tttcataacctcaggtcttcagggacctcccagaaaggatgtcctagcctggagtctactctcctagacaaaaggttttctcctccagatgaagataatacaattgattggatgacattcccatcctgagaatttcgccaactaatgttgacgaataaataaaatgtttctttcatatctaataaaactacaaccctgtttttaattgactgacatttaaaaccctgaatttttatttctgtatacaaaaaagagaactttgagctcgcgagaagtcaagttctcatga

SEQ ID NO: 24397 - DNA, 485 bp, Homo sapiens
  source 1..485: mol_type = other DNA
gagtgagtgctcatcggcagacactgggctctggccacgcgtcttagactagccctccaccccaccgtaggagagcgcctgccacgagctccgcgcctcgctaagtgctttgctacgagctggctggctcgcttgtactgtgcgatcctccagcgccggccgcagctcacagccccttagctccgccgggttattgtgcggccgcgccttctgcacctgttgcggccctcgctaggcgggaagggagggtggctctcccccgacggactcccggcccagggagcggatagaccactcccagagagagtagccttggagaggatgctctccttctccagggatcgcctccccagcggacgcagagtccgcctccgccacttggctggagctgctggagtcgcagctgcctgcggagcgggcccgggaggaagcggggccgagcgtgcggcgtccacgcggtgagtgtgcagcgtcaccatctggcg

SEQ ID NO: 24398 - DNA, 425 bp, Homo sapiens
  source 1..425: mol_type = other DNA
agcccggccctccgagccctggtatcgaggggctctccgcccgcgggtgcccgcggcagaggcctccctatggggacccagtacagtacccaaaaccggtccgggtccagctcggcggcccaagcctctgcccagcggactgcgcacccgcccgtcccgccgccgccgccgcgccccgcccacaggacgttcggtcccgcccccagctggcggccgcggccgcccgcgcgccaagttcctcagcccttggctcctgcccagtgttcaaattctctcggtttggagccccgtcccctgggctccctcgggctggggtgaggcgggcagcgctacgcgtggggtaggaccatcttacgctgggaccccgccaaaggggcgtggctctcggggcgccacccacgctcttgaaatctgggtgattgcga

SEQ ID NO: 24399 - DNA, 318 bp, Homo sapiens
  source 1..318: mol_type = other DNA
aagttctagtacatatagcaaaatgttaacaattgggtcgatatgtgtccactgtacaagtcttcccacttttctgtaagtttgtaagttttcataatacaaatttggatttaaaaacaccccactcgctaggcagcccggccctccgagccctggtatcgaggggctctccgcccgcgggtgcccgcggcagaggcctccctatggggacccagtacagtacccaaaaccggtccgggtccagctcggcggcccaagcctctgcccagcggactgcgcacccgcccgtcccgccgccgccgccgcgccccgcccaca

SEQ ID NO: 24400 - DNA, 347 bp, Homo sapiens
  source 1..347: mol_type = other DNA
agtgaatttttcatttcagttctaaaattttttccagttgatgccactagtggaagccattgcatcccaaggaatgtctggccagctagctactccaggaatgtgagctgctatccccatagcttcaggggagccaaggtagcttcagtggagggaccaatccctagggcactatagtcatatgggtatttatattctcccttagacaattttttaaagaatgctagaattgggagagtgctacctcaagggtgaggagatcacattctcctgtcgtagaaatctttccatgatatatgccaactcacttttgtgaattcacttaaactggctatttttaggggtac

SEQ ID NO: 24401 - DNA, 376 bp, Homo sapiens
  source 1..376: mol_type = other DNA
tggaagccatccgccagatgaatgcctttcatacagtcatgctcttggagcacaggcggccctcactgactgtgtttctaaaaatgaaatccaaatctaattgacagtctgagatggttgacttggtaaacaaattagttcaaagcttaaagatgttgacatactctaagttaaagacctcacatagaagtataaatacatttgtgaatgttaaatataaatacttacaattcagtatatttaatgcctgtctcattcatttattcattctttattcaacaaatagttcctgagtgcaagcttttctacctatggctaaggtacaatataacagagtggagcagttcagaccatggaacctctgatccaagcagcc

SEQ ID NO: 24402 - DNA, 439 bp, Homo sapiens
  source 1..439: mol_type = other DNA
accaatctagaaatacattacttgaaatgaggttcattcccttcctgtcaagctggagatactcagaataatgtgaaggttaaagacagacttgggtttaaatcctagtagtaatggctgcttagtaagtatgacggaccaatgaagctcttatttaaggtctaattgccagtaaattaaatgaaaatgctgtccacagctgttttattccatacagaaatcaacacattagaaattttttgccaaatgttataagttcctaagcatgtcaacatcatgtatcattgctaaagcccggagcactaaatgatttgagtggtccaatctttgcaactgtgcttttatttcagtttctgccatgttggaaaatgagagcccggctaccggaagcgctcctcctggaagccatccgccagatgaatgcctttcatacagtcat

SEQ ID NO: 24403 - DNA, 404 bp, Homo sapiens
  source 1..404: mol_type = other DNA
gagccagggatcctgctttggctctgagtagaactcagggttcacaggagaccttcggtagccacagagattcctggctcaattctcagatgcctctcaatttaagaagtatttttaaagatttgcttctttatcaagatgaataaagttcctaacaacatctataactaggtgtgtagcttgggatggccacatccctgggactgggccaactcctgtcaacaggaagccggctcgtccctggccacagaggaccactgctcagctgggatggaggtgacattaatgacagcaaactcctccctcagggcaacagctgctagggtctggggccacaccagtgtcctgttttgccgctggctgcccgccccaccctgggactcctaggctgagtgtgtctcctg

SEQ ID NO: 24404 - DNA, 448 bp, Homo sapiens
  source 1..448: mol_type = other DNA
ggatcttgagttccaggtgggatgcctctgagaatcaccttctggggctcaacaactgccccggctggtacagatatatcacccctgggtcagggacagatgtcagcttcagaagggagtgtctcctctgacagcccctctctacttgccctctgagatgagtggcctggagtctccttggtttgtacagaacttaataacgatctaactgaattttaacgttcatgccggactccgcggggcccggtgcgggtggaagcggagcgcggcagggcaggtgcgggcgccggggcgcacctgtgcctgcgcgcgcgcggcgtccagcagggggcggcccgcgccggtcccggagctcctctctgagcgccccgcccccggcccggaggcccaggtggcagcgggggcgcgggagggcgcgtcgggccgggcaccggcagggctcagaggc

SEQ ID NO: 24405 - DNA, 429 bp, Homo sapiens
  source 1..429: mol_type = other DNA
gccaatggcaaataggaagattttattaacaggttttaaaaaattattattattactggttatttggtttgatggaaaataaggatagtattacttgctattctatcaggagttccagaccccctgtctcttcaaaatttgtttttaaatatactctggaggctgaggcccaggaggacgaggctgcagggagccatttgtctcagaaaaaatctgttgaaaatatcttggaaattgtaaagaactacacaaatataaggttttcctgtgattattaccagatagtgcaaaatttaagcttcccaaaaaatgttcgctaacctttttcatacttttagaccattacaagatataaatagcaaagtcaactggaattgtaattagagctttgattttagctcagcaggcgtctgcggcccccatggtgac

SEQ ID NO: 24406 - DNA, 365 bp, Homo sapiens
  source 1..365: mol_type = other DNA
tcgcccccaccttaccggcccagctctgcccgacgagcaggaagcaggtggtggctttgtgctgccccggcgcaagcagtcctgtgcaggtgccgggccctgttgcagcttccacagaagccctgttgcaggtgagggccccaccctgtcctacccagctgcatgccagggagctgagaccaagtcttcctccctcacgcaggaggcccagtgctctggcctgagttgggttgtggccttaccccaggtggtggacaccaggcacagctgtccttgatggttctcttgagcagagcaatagatgtggctccaggcagtagacccaggcctgccttctgtgaagcaattctgcctccaaattggcc

SEQ ID NO: 24407 - DNA, 592 bp, Homo sapiens
  source 1..592: mol_type = other DNA
ttatcagagggactgtccccgtcgacaggtgcggagtccactcccctgggttttgttaataaaattttgaagaaaccaaggaagcattgctgcggttgcaactgttccagggggggcgcctgcaccccgcgagagcccagggaccccagagctgtcgtccgctgtggacgccaggccccggccccacgttggggatccgcctcctgcaggggcgcgccctcccgcgtgcctcagttgcggtgtggcaccgcccttccccgccccgcgcgctcccacagctgttcggcggggaggagggagcgggacacgaccccccctggggttgatgttcggagtgcgcaggcgcgaagcagcttccttgccgcgttcggtatcggctgtaccgcgggagggaagggagggcgcaggcgcaagccctccccgaccgcttcccttcaggtgaggctggaaagcgcccagtcccgctctcggcaggggggcgcgcgcaccgctgcggagcgccggcccgtaggcgcgggagcctccctattaagggcacgcgacatcgaggagcccgagaggcaggcagcggacttccggttccggggccgcg

SEQ ID NO: 24408 - DNA, 578 bp, Homo sapiens
  source 1..578: mol_type = other DNA
ggtacaagctggacgagctgtttgagcaggagcgcaatgtgcgcacagcaccgcgcgggattgctggccctgatgctgcaccagacgatccaggccgaccgctgagcctcctggcccggagggagccgcccgttgaccgcctttatcagagggactgtccccgtcgacaggtgcggagtccactcccctgggttttgttaataaaattttgaagaaaccaaggaagcattgctgcggttgcaactgttccagggggggcgcctgcaccccgcgagagcccagggaccccagagctgtcgtccgctgtggacgccaggccccggccccacgttggggatccgcctcctgcaggggcgcgccctcccgcgtgcctcagttgcggtgtggcaccgcccttccccgccccgcgcgctcccacagctgttcggcggggaggagggagcgggacacgaccccccctggggttgatgttcggagtgcgcaggcgcgaagcagcttccttgccgcgttcggtatcggctgtaccgcgggagggaagggagggcgcaggcgcaagccctccccgaccgcttcccttc

SEQ ID NO: 24409 - DNA, 498 bp, Homo sapiens
  source 1..498: mol_type = other DNA
ttacagctgttaaccagagttacacctggtatatcacatttgtatatttgtaaatttgtatatcacatttcacaagaaataatcagggatgagcatacagatctatgtttaagaatgttcgttgcaactttatttagaataatatttgaaaatgttctaaatgctaaacaataaagaaatgactgtgtttaggcttattgtgcagcttatagaactaaaataagatttgatattagtttaagaattgtttttaaataaaaataaaataaatagaaaggtcgccgtcataggattccaagatgacggcatctatgaggaagtcacgcagtaggtgcagccatgttgcctgtacgtcgaggccgtacaagcagccgccgtacggactctactgacaaggtggcggcgccctcgggaaagccacattagagcgcggccatgttcccggcgaacatatggattcggccaccatacaggccggccacgacgcatggggcctgc

SEQ ID NO: 24410 - DNA, 513 bp, Homo sapiens
  source 1..513: mol_type = other DNA
acgcagcactagtgaaatatagctggttttgcagggagtccatagaatggcttccaggcgggccaggcacgcggtggttcacgcctgtaatcccggcctaggtcttgcagtgagctgagatcgcgccattgcactccagcaagtaaataaataaaaataaataaataaatacataataaataataaataaaataaataaataaataaataaataaataaataaagcctggcctccatcttacagctgttaaccagagttacacctggtatatcacatttgtatatttgtaaatttgtatatcacatttcacaagaaataatcagggatgagcatacagatctatgtttaagaatgttcgttgcaactttatttagaataatatttgaaaatgttctaaatgctaaacaataaagaaatgactgtgtttaggcttattgtgcagcttatagaactaaaataagatttgatattagtttaagaattgtttttaaataaaaataaaataaatagaa

SEQ ID NO: 24411 - DNA, 503 bp, Homo sapiens
  source 1..503: mol_type = other DNA
gcctttcctggtccttgaaaagaaggaattcttaacaggacctgttcaagattaaacaagtttttattgggggtctgaaaaactcccccagacctccacaaacaagtttatcgggggtctcatctagattaagtaaatttacttaaataaagaccttccttaggactgatcttagttatagattagaaacagttaatcatttacgtctttacacacatgcacacttacatgtagacagatagtttagaaggtatataagctctggaaaactttgtaattttgaatggtttggctgtctaagacccagaagacagggtcactgtttcttcaccgacttgcaaagaccaggacttggtgacgccaggtccctggctgggctgcggtcaagactgcatgacctgctgaaatctccccaggcgcggaaagagcacctccgggttaccctttcgtccggagcccagctgtggccccggatgacgcaaaccgggaacagcggctgagcc

SEQ ID NO: 24412 - DNA, 330 bp, Homo sapiens
  source 1..330: mol_type = other DNA
aatgttaaaatgttctctttggggaagacacattggaatgtcttaccagaggttaatgaacgctaaaattcgacagcgaattcttgcaacaattattaagcagacttttgcaccgcgttcagtgacgaccctcatcggtgcccacagctctgggctcgctgaaggcagttagggcagcccaggcggcccgctcggaatcccaggccggctggggaccggtgcacttgggctccgcgccccctcgaccctcggcccagtgccccttcccgcgcgcgcgggtctccccggttccagagcccaccggtccccgccggccaccctcccaccggg

SEQ ID NO: 24413 - DNA, 648 bp, Homo sapiens
  source 1..648: mol_type = other DNA
cagacttttgcaccgcgttcagtgacgaccctcatcggtgcccacagctctgggctcgctgaaggcagttagggcagcccaggcggcccgctcggaatcccaggccggctggggaccggtgcacttgggctccgcgccccctcgaccctcggcccagtgccccttcccgcgcgcgcgggtctccccggttccagagcccaccggtccccgccggccaccctcccaccgggcccccggcggctgcagccgcgcggggctggcggggcggcgaccgggctcaggcagatccccgcttcccgccggcgccccctccctcccggacggagcccgaggatcccccacccacggcgggcgtgaggaagggcttctctaccgcgtgtgccccgggaaggccaggctacccgggacggggctcggctccccaggtgagctcgtctccgcgggactgggtccgggaaggccccaggaccgcgcggctgagcggcctggaggctgcgggagggcagagcagggcgcgcgggagactgccgcccccgggcgcccagggcccggctccccagcgccaccgccgcagcaggtgggggcccagtgggcgggggcggggcccggctctgggcggagccgaggcggcggcggcgcaggctgggg

SEQ ID NO: 24414 - DNA, 441 bp, Homo sapiens
  source 1..441: mol_type = other DNA
tttaattgaatgttatctattagcataacaataagtgcctctgtctttgaaaatataactgttcttttttcctttcaggacagacgataactaattattgttaaatagatttaaccaataaatcattttgagagcttaaatcgctccttcgggacatacggtgtttcttgagcaggaagggacgtcaacggttaaagctcttgttgttggtgcaacaatcagctgcttggcaggaggcagccacggcggcggctttgtgcaggggtcgcctggaacccgtccattgagtcatgccgccatctcgcggccgcatggggaacgggccaggtccccagaattgccatctgcagaatttctgcagaaagtcatgcttgaatattcttttcccttcttgtatgttaggaattcagggctggccgggaaagcagccctcccgagtca

SEQ ID NO: 24415 - DNA, 426 bp, Homo sapiens
  source 1..426: mol_type = other DNA
gattttaactccacaaattaactgcatgacctttgtcaagtaacaattgaatgagatagtctatgtaatatttatcacaacatttggcacacagaagttttaattgaatgttatctattagcataacaataagtgcctctgtctttgaaaatataactgttcttttttcctttcaggacagacgataactaattattgttaaatagatttaaccaataaatcattttgagagcttaaatcgctccttcgggacatacggtgtttcttgagcaggaagggacgtcaacggttaaagctcttgttgttggtgcaacaatcagctgcttggcaggaggcagccacggcggcggctttgtgcaggggtcgcctggaacccgtccattgagtcatgccgccatctcgcggccgcatggggaacgggccagg

SEQ ID NO: 24416 - DNA, 430 bp, Homo sapiens
  source 1..430: mol_type = other DNA
aatattttaaatctatatacattatgaactatcatttatgtagaaaagtttccttcatccaacctgctgcatcttgtaagttctactttaggtcattcatatttataacctctccttgcctgcggtggttattatagcaaccacacctattcagagaggggcggtttaggagggagcaattcactcttccctacttatttttgaaattgtcattaccatgccttgttttaagagtacacaagctcattatagtaaagagttttgggtgataacattttctgaaataagggtgaagaaatatcctcccatgtcacaaccgttggggatgttggaaggcacggtccctgcgtatggtgactgtgacaggtgattggtaaattcaccgcaggccaataaccttgccaggctgaagtgcggaagcctcgcattt

SEQ ID NO: 24417 - DNA, 259 bp, Homo sapiens
  source 1..259: mol_type = other DNA
tcttagagtcttcttcaaggaagagtcaacagttccaataatggactggatctttacattgtgcctgacattacactcattgtcataaaacattcgactggattctactctaagtataaaattgagggactttttaaacccaatactagctttgggactttggggaagttccccactgttaagagaaacatgtgagaatcttagaagtttgcaaaactgcatcatttagaatgtatataaaatccttaaggacaaaatg

SEQ ID NO: 24418 - DNA, 564 bp, Homo sapiens
  source 1..564: mol_type = other DNA
gtttaggagggagcaattcactcttccctacttatttttgaaattgtcattaccatgccttgttttaagagtacacaagctcattatagtaaagagttttgggtgataacattttctgaaataagggtgaagaaatatcctcccatgtcacaaccgttggggatgttggaaggcacggtccctgcgtatggtgactgtgacaggtgattggtaaattcaccgcaggccaataaccttgccaggctgaagtgcggaagcctcgcatttcaactcccagcttccctggcctccgcgggttcggagactgggacccccgggccaggagtgctggggggcgcggtcggccagccccggcttccttcatggagcggcggagctccacctcctcctccggaggccgcccgccccgcctcagaaccgtaacctccaggagctgggttgagagcgccggcagctaagcctccagacggagcccgcccctccggccggttcctgcctccaattggcccgcgagcccgtccgtctccaccgtgggccacgccttccgggccccgcggctggccg

SEQ ID NO: 24419 - DNA, 422 bp, Homo sapiens
  source 1..422: mol_type = other DNA
ccgctgacctcaggtgatccacctgatattgtatgtacatttaaacaaccgattacacttagtccttttataatttagaaatctgatatgtttcactgttagcaaatgtttctttaatgcttaaataaatcttacagaaattttgtcgtagattttaaagttttatttcaagactttacacatagtttctgcaacacagtctttttgcacagtggtgcaaaacatggctcactgcagtagattgtccaggctggtcttgaactcctgggctccactttttacatttttaaaacctgagcacaggccttgaaattataccaaggtttaaattctaggtctgatgtacatttttcttatttatgaaatggggaaatatataaaagtgtcttgcataatgtgacacatgaataaatggtcgttta

SEQ ID NO: 24420 - DNA, 409 bp, Homo sapiens
  source 1..409: mol_type = other DNA
ggaatgcagtggtgcgatcttggccgattctcatgcctcagcctcccgagtagctgggactcttggcagcttgaaatactttttttaaaagttgttattcaaacttgcccgttctgtatacagccagcctgggtttttcaatccagcttcagatgttaagcaaatattccaacctagagtaggtgtggaaaatattacacggaaaacaaaagaagagtaactttttcccttttggtttatcccgctctggtcctcagggcgatagctaccacctgacgacctgggatcactgccctcgcggcccggggggagcccggaagcgcgcccagagccaggtcccgcgcgggcgccaccgagcgcggacctccctcgcatcctagagcggccgcgcgggacccggccggcggcg

SEQ ID NO: 24421 - DNA, 620 bp, Homo sapiens
  source 1..620: mol_type = other DNA
attgtccaggctggtcttgaactcctgggctccactttttacatttttaaaacctgagcacaggccttgaaattataccaaggtttaaattctaggtctgatgtacatttttcttatttatgaaatggggaaatatataaaagtgtcttgcataatgtgacacatgaataaatggtcgtttaaaaatgaactaaaacatgttaaatattgtcagtatgcgttttgaaacataaagggaaaaggatctcaatagtgtttcaatttttgtaagttaaattataaatttggaagatagcccgcgactttaaataaggttaaagaatcagacatttttaatatacgtatttaaatttgaatttaggaacaaacttatattttgactgctaaaaccgagtattgtagttttagaacattgtttttgagaaataagatggaaagcattataaatttgaatacttagttatgtattgttagatagcacttctgaattgaaatggttcatgaacttttgtaatctttggtttaaatttacattctctgtttttaaatggaaaatactttcattgtaatgattaatgtttcatttgttttcccctttaaacaattaagatctctcagga

SEQ ID NO: 24422 - DNA, 484 bp, Homo sapiens
  source 1..484: mol_type = other DNA
ctctcttccatctgattatactcccatttagaaaagaatgaggtgatgccagttataaataattataactttagtgctttccaaataggattaacagtcgagttaattaatgctctttaagaaaccaaatttccactttaaaataggatggtttttgaatagaatacaagccaagagaagcttgattctcttggtatattacatacagagagggcaattaatttcttgtacaggtgttcttgaaaagaaatgattcttggtttataaaagctcttgaaaaaatttgaaagtagactgatagtttttttgtttgtttttaaccagtaaatggtataaaaattactagtatcagtgctgatagtgattaataattagttagacattacctaaaatggaataattttgagcttcctcaagttaaagtttgcccttcatttagtatatgaaatcataagatgacatctatgaatgtaccatgttaatg

SEQ ID NO: 24423 - DNA, 381 bp, Homo sapiens
  source 1..381: mol_type = other DNA
tcagccttgtagatccctcagaaaacaacaaagttaagaaaatgggacagttccttcatttttgagttaaacctgtgtattcattttaacaagtatttaataagcatgtattgcctgatgcttagataataaggtgttttgtctactcaagtgagcttatactctagtggaggagaaagaacacagacctaaggtgggcccatagagaatatattctttgaccctcttagaaagtagctgggatcaggtgcccgaacattttataatcactatatatatgtataactactctaaaaatatggttaaataataatagctaacacttactcgtgtgtcaggtcagactgagctaaatgatttctgagtattgtgtcatcattc

SEQ ID NO: 24424 - DNA, 247 bp, Homo sapiens
  source 1..247: mol_type = other DNA
actgtcacagccctgtcatcaccagctgtgactgtagccaaggaacatttatttgttccagctgaatgatctggtacttggagatggggtgtgcatgtgtccacacacgtgcacacacacacacacacaagaactcatataacactgttaacagtgctcactcagaggggactcctgctaatgactcaggagccactcaaaggggactctatttgaccaacagacctcatctggagttcttgagttc

SEQ ID NO: 24425 - DNA, 375 bp, Homo sapiens
  source 1..375: mol_type = other DNA
cccgggagccacgcggctcaccccgcgaggggatgaaggggcgcttcgaccgcacgcgcctgcttttcccgcccccgccggggacgtcacaaagagtgacgtcagtccctctccgcgcgtgccgggaggaatgagaggcttcgggaactggctggtcccggtcacccaatcagagagctctggagcgcgccggcttcattcggagagcggcgtggggcgtagccgccgccgccgcgcgcgccgggggctggttaagaggggagccgctgccacctccaccctccggtctccgggcggccctggcgctcctcggcccgggtccccagccccgccgcctcccgagctgagcagggccctggccctgtccgccatggg

SEQ ID NO: 24426 - DNA, 474 bp, Homo sapiens
  source 1..474: mol_type = other DNA
ggctgataacatgtgctttacatttttcaatcttccaaatatttcataatatattatcttgaatatcaatagcacacttctataagtgttcgacaacttatagaaaatatgcatttctaaaattcaagttgaatggaatatttaccaaataaaaggccactgatttttgtattagacaaagacatctggaaatttctagatggatttagggattctggtaaagccgagttggtatgtaatataagatctattttgcttgttattcattaattgggaagcaaacataccttcccagctccgcgcgcccagtgggggccggaaaagcgcgggcctaagaggcggtggccggggccacgccccgggcaggagggccgctctgtgcgcgcccgctctatgatgcttgcgcgcgtcccccgcgcgccgcgctgcgggcggggcgggtctccgggattcctggggagggggctggatgcg

SEQ ID NO: 24427 - DNA, 374 bp, Homo sapiens
  source 1..374: mol_type = other DNA
tcagcttaaaacagtttcctgaaagggctttagtgtgtgcttgtgtgtgtgtgcacacacacgcgtgtgtatggttcatatttatcacgatactttataattatccaggatagagactgagtctcactggatgtcagtgcttttaaatatgttaaagaaaaaggaggccccttagctattatgtcaggaaataaccgtcctagaagggagattctttccaaatgaaaaattgtattttaaataatgccaaagaaggaagtaaacatcctggccactgagtgtcaaacgctgcaaaacctccagacctttgcccacagagggcatccctgcgcattgatacgcgcaaatgcagctcctggaagcctcctcggtcc

SEQ ID NO: 24428 - DNA, 359 bp, Homo sapiens
  source 1..359: mol_type = other DNA
agattttgtctgactacaacactcatgtatcaaatcctattcagttttgatgttaaaaattctgtggttgaattcgtcacagtgtctttaaataaaacaacatttgcaagaaatttgtgatgtgggcctaactcccagctacttgggaggctgaggcaggagaatcgcttgaatcagtgagccggtattgcgtcactgttgcccactccaaaaatagccatttgtgcttcccggcgggaatgcgtgtcactctgggcaacaggctggtcggccacgactgcgcaggcgagaggcacagagcgactggagactgtagtcccccggtttccctggagaccaggcggaagcggccctgcggt

SEQ ID NO: 24429 - DNA, 597 bp, Homo sapiens
  source 1..597: mol_type = other DNA
aagattgttcaaaatgaaattgaaagtaatttgacttgaatgatttaagtatacactgaaaccttgtcaaggtctttgactcaacatgtgagtatctgtcaaataaacaatatactttaacttaaatgaaattctttatgttcatttacgtttatgaaacaaattcaactgtaatatttatttagatttccaaaaaattaagactcagggatttgacctattttaaaacccacctgagctttgtcctaaataactttgcccatgctgttcagattcttatagaaccctgtatcagattggattttttaaaaatttcaatggatgccataaactaataactattgctactttaaaatatctaattttatttggaaaatattagttttttctgtctaaattttataagcatgccaggatttatatgaatttgtaatttctcataatattaacttttggagccaattgttttcttaattatgattaccatttaacataatatccttgataaagccctcagcttttgtgaaaagctttgtaaagaaaagacagggaatctaagcctgagatttatttgaatacatgaacatatttccctgt

SEQ ID NO: 24430 - DNA, 295 bp, Homo sapiens
  source 1..295: mol_type = other DNA
agtcccctcccgcagaccccggggccggctgaagggagatcagcaagtccccgcgcatggggggcagcgacttggatgcagcccacatccccccattcccgctcgcgcccggcgccccactgccgcgcatgcgcaccgcaggccggcgccatgttggggcggtgagcctgaggcgggggttgtcccatcctgtgacagccccctgggagggtcgcgggacgcggcggagggggctcacacgggcgtctgcggacctgaggcggcgacaggaaggggcttgcaaaagcatcacttt

SEQ ID NO: 24431 - DNA, 278 bp, Homo sapiens
  source 1..278: mol_type = other DNA
catttgctaagagaaaaacataaaccaacattgggatggcctcttttgacttacagacaggttcacacatgttagtgagtctttacatcctgggaatcaaggcttcctaggctctagtcccctcccgcagaccccggggccggctgaagggagatcagcaagtccccgcgcatggggggcagcgacttggatgcagcccacatccccccattcccgctcgcgcccggcgccccactgccgcgcatgcgcaccgcaggccggcgccatgttggggcggt

SEQ ID NO: 24432 - DNA, 403 bp, Homo sapiens
  source 1..403: mol_type = other DNA
tacaagaaattctctgggagctgataacagttaagtaattaaaattcaagcagtcattggcatctcgttgtttactaacaaggtttggaacttttaaattttaaaggttgttattataatgtacctaaccttgtattctttaatctaatgtgtttagaacacggcatagcacatagtaggtgcttaacaaaagtgacttcatactgattaatgcattcatacgaacacatcctaacttttaaaatattaatttctgtcagggccccagttctcacagcgccctgggctctttgaatgagagagccccacagtgtggagacttcatccccggcaagacttgcctgaggtgagctccgcacatccgcgttgttacccagccccgccgccgcggcggactccgagg

SEQ ID NO: 24433 - DNA, 378 bp, Homo sapiens
  source 1..378: mol_type = other DNA
accattggtccctaactaaattacaaaatataaatacatgaagtgacacttgaacgttttgtctctttttgcatttatttcattttaaatgtttgaacagcataagctactaattaggcttttagcaaacactttttgcaaatagttacgtaaatatatcagactttgaaaacctctacttcttaatttttttcccttacacattaaacatggaaaaaagaaaacaaaacacatggattttagtagatataggatattatcaaattagttttctttgagcatcatttatttaacagacaagatcatctataattttggtgataatcattagaagaatcaccagaaacaggaggcactaggggcagccacgcttcacag

SEQ ID NO: 24434 - DNA, 319 bp, Homo sapiens
  source 1..319: mol_type = other DNA
ctcacgtgtgtaaactcatgaaaattcatttcatttcattatcggaactgttcaagcactccggtttggatcagggaacagctttaaacctgcaggaaaggcttacttacaaatcttggcatatatgtgtgtgtgtgtgtgtgtgtgtgtgtgtgtgtgtatatatatatatatacacatatataatctacatccacacacatatatgatttgtattgaagaagcatattttccaggatcaattctctctttaatggaggggaaaaaatccatatactttgaagcctttacaatgaaagccataagacttctagttgtt

SEQ ID NO: 24435 - DNA, 403 bp, Homo sapiens
  source 1..403: mol_type = other DNA
ttctgtaattattacagaatccatgataccttctccaaaattctaacaaagaattctaaattgcaagtaatgttctttggcagtcatggcattttacatcaggtaaactcagttgcacccattgccagtagctggtggaagtaggaagagaaggaggttcttctttcctctcccacttacttttttgctttactgctatcaaagagttaaggaagtccattaaattggaggccattcttctctctacttgggaaaatgtcagatattttgagaaataaatgcattgccccaaactgaaaacaccacttttattctgtaaaagaggcattcagggaaggagacctcctctattcccaggaggtcacaggaacgggctccagatgcagctttatccagggggtgg

SEQ ID NO: 24436 - DNA, 517 bp, Homo sapiens
  source 1..517: mol_type = other DNA
aagtcaccagtgataagtcacctggccatcgtgccatcgtccctgagaggatgcagtggggaaggcacttcatctctgagtgggtgtcgaggtacccccactttactagaattctttacagctgtaatgttaatgtcttttaaaaaatatttttagtagaaatgatcctgagctccctctcaaatgtgagattatttcttagttttgacaaatgtgccacagttatgatatagacgactctctctactatctttgcaactttttttaagttccaaaagaaagttttttaaaaaaacaacaaaattgcacttgtactccataaatttatactaaaaacaataaaatcaaaaattatttaaaaaacaaaaacaaaagtttataaactttccccccacccgcctgtacagcaccctagcgaggggcgtgaggggcagagcctggctctccagcgctgggcgtacgcgtcctgccgcgactcctccccggggcctcaccggcgccggactctgccctgggc

SEQ ID NO: 24437 - DNA, 570 bp, Homo sapiens
  source 1..570: mol_type = other DNA
tgaatttggcaagctcaagtcagcttttgttgattggtataatatttttaaaagacaataaataaatatatcaacttgctattctattgttcagttgtgatcaataaaggtgaacaaaggttttcacgttcttaaagtttagcaaaatcgaagtttagtaaaaatgtgcatgagatgtttgctaaaatatttatacagataaaactgacagctgtaagatattcgtcggttcgaaggtaccaataaacagtagattgtctaaagctacagactccagagtggagaacgtgcgcccttggggcgcccagcgccagcgaggggagcagcgccccagcccctccgtaggctctgggcccatgcggctgtgcggcgggggtgaagttcatgggcggccgcgcttcccaccagctccggggaggccggggcccgcggagcccggggcgggccgcactgcttgccccctctctccttttgagcgaggtcagtcaggcagctgcgtacaatgctgggagctagccagcagcgcattgccactcgctttttaatcaaattaaaacaaaaaagaaagag

SEQ ID NO: 24438 - DNA, 447 bp, Homo sapiens
  source 1..447: mol_type = other DNA
gtatcagtattaatcatgtatttaaaatcttttttaaaaatttatacttcctttttataagttggaaaactcttgatggaatttaataatcctctttaatattcagagctctctactgtttttattattcacgcaaacaaaatgtactttttttttttcaaatgatgggggaaaaaaatctattttaattttattttaaacagcccatttaatatacccctgaaaaatgtaagcaaagttttgtttttgtaattaaatcgagcctatgaggaaagtttcctttacgtaccagacataggaaggtactcctgccggagtgagttctggcagtttgtttggaaagaattctgcaggaaagaaatttagcctgggcgacaagcctctgagtgctgtgtcaagaaagttgacaacatccttcctactaataggacttcctctgctgagtaa

SEQ ID NO: 24439 - DNA, 484 bp, Homo sapiens
  source 1..484: mol_type = other DNA
tctcaaaatacaagtttagagttttcctgttggaaaaaggaatactgtagtcctatgtatcagtacaattactgtaaagctccagtcttgacgaaagaagtatcctttagtgatttcattatcctccctaatgattattggggttaaactttaaaaagaaacaaatgaacacccttgattttattcttagacgaagggtctatagatctctgtagagcagtctacagataaaaagaattggaacaagacattattttaattccatcatcatcttgatcatgatggggttgactcagaattttgaatagtttcttttgattagttttggcctcactattaagtgtcaatataatcaatgggaattactaggctagggtcattacatagataatttgcctgctgtgtaaataaaaatgaaattgtttaaattttgtgcaagagaaagtgaaaaaggatatttttcagagtgaggaagtgttattcc

SEQ ID NO: 24440 - DNA, 608 bp, Homo sapiens
  source 1..608: mol_type = other DNA
tgtcatgtaactttattgagaaatgcaattcaatcaggaataatttagtttaggtaaaacttctttgtccaagaaatatactgtcaggtccaaatacattttaagttttgaaaaaaatatttatttagataaaaatttgtaatcactgaagcataatttacttccagaatgaatttagaactctgttgttaaagtacttggtacaatttgtatatccagtaaaataaaagttgccatttttgcaagtcagtgttttggtacttttgctatgtgaaattccccatactccagtataggaactgaatgaaaacatataccttattaaaatagtagaggtaagtattttcagcttcctaaacagcagagaatgcttttttttttttttttggaattactctattacctacatctaagttgcaaatccaaaaataaaactaggattttattaacatattctgatgttgaaaaataattccgtgtattgtgtgttgaaaatgatattaaaagtatatgaaattaggcacgtcctgcttttattgtgggattcccagaagactgaacaaggctgtcctgagacctctgtttgtttcagtgactgatatatacaa

SEQ ID NO: 24441 - DNA, 586 bp, Homo sapiens
  source 1..586: mol_type = other DNA
tggctggaagtcaaggccagcaaaataagagtactttaattaaataataaaatgccagtgtaatacaaaggtatagcatgtgactttaaactctccagagagagcctatttctaaaaatactgtcaatagctaaaagtataagctttgtttcaagacaactgagtttttatagatgctttctttttcagttcagtatcagtattaatcatgtatttaaaatcttttttaaaaatttatacttcctttttataagttggaaaactcttgatggaatttaataatcctctttaatattcagagctctctactgtttttattattcacgcaaacaaaatgtactttttttttttcaaatgatgggggaaaaaaatctattttaattttattttaaacagcccatttaatatacccctgaaaaatgtaagcaaagttttgtttttgtaattaaatcgagcctatgaggaaagtttcctttacgtaccagacataggaaggtactcctgccggagtgagttctggcagtttgtttggaaagaattctgcaggaaagaaatttagcctgggcgacaagcctctgagtgctgt

SEQ ID NO: 24442 - DNA, 439 bp, Homo sapiens
  source 1..439: mol_type = other DNA
gtgtgtgcatgcattttgtgtatgtactcgcacatctagcaataccaggatttgtagaatgtgtgttttttttttcaaacacacgttaaaatagcttatgttgcatataataaagcacgcttgttattacgaaacgatagaattatgaagcttaaattttatcctaaaaagtgatgtgaaaaagtatgttttaagagcacctataatggtaaatgttgaattaaaaacttcccaaaaattgcccttttttttttggaaaatgtggcttgatttatagacgaaaaagaaaaatattgttcctcttggcaaagttcaaagtgcctccgagggcaaaaactgaactgttcaggcttcagattgtaactgacgaggggtgggtgcgagggggatgcatcctagcctgcccgacccgggccctcccctccccggagaagagagt

SEQ ID NO: 24443 - DNA, 564 bp, Homo sapiens
  source 1..564: mol_type = other DNA
aggaaaaattataactatcctgtgttcatttttttttttataaacaataagaaaaagttgttggatttttttttaatgatttgtaatctgtggatatccctggtgagatactaagtacttgcagaatttttgtctctttcaatttgccgtcagagtaaactgtttgtaattgaatttaatttttaaaatgtcgatcccgatgttttattaaaacaaaagggacaacctattaaataattgccaatgggaaaaagtgtgtgcatgcattttgtgtatgtactcgcacatctagcaataccaggatttgtagaatgtgtgttttttttttcaaacacacgttaaaatagcttatgttgcatataataaagcacgcttgttattacgaaacgatagaattatgaagcttaaattttatcctaaaaagtgatgtgaaaaagtatgttttaagagcacctataatggtaaatgttgaattaaaaacttcccaaaaattgcccttttttttttggaaaatgtggcttgatttatagacgaaaaagaaaaatattgttcctcttggcaaag

SEQ ID NO: 24444 - DNA, 436 bp, Homo sapiens
  source 1..436: mol_type = other DNA
tgtaaatccccagatctgcagattttgagatctcttatgtttgaagcatcagttattcgtcccaaagcaatgtttggaaaagtaagagcaaaattcctaaattcccttgaagtgctgcaccacctaatttggtatttttcctctatggccataagtctcaattgggagattttttaaaatctcactagaccaattaatttagaagttcttaggatgacctatcatgccatgaattcatggggaatagattctagcagctcgagctccttttctttgggtctcagaaaatgtgcttctctgggcagagcaggctggtttttcgcagctcttagagtgcttaatatgctcaatatgtacattaattctcttggcaagaatctttcttttgtttacaacaatgccaacagcatgctgggttacacagtagactcttcgc

SEQ ID NO: 24445 - DNA, 347 bp, Homo sapiens
  source 1..347: mol_type = other DNA
agaacttatgtcttgtacatcatgtggtaaatattatgtcttcatctttttggtcaaaacctaaagacaggtgtaattaagtctgttaataaatattcctaaacgttattttgtcttgtatgtagacctgccccgaatacagtacaggagcatcttcaaagtacttccaggcgcggatgcatatgccaacttttgagtctcagtctgcgcctgcgcacgtgacctctacacgtctcctctgcgcctgcgccttttgggattgggcgctgaaggccaaaccggacgacgcggaaatgacgtcacgccgggggccctgccgcgcggtggctgctgggtgccgcacgtcc

SEQ ID NO: 24446 - DNA, 300 bp, Homo sapiens
  source 1..300: mol_type = other DNA
atttgttgtaaagcaattttaaaaacctgaataccatgtggttaggaaaagtgctacactatttattagtcaaaagtcttcaattacttttcattgtctttggaataaagaccaaaaagcttatatggccactaaaagcctcttgttatccaaatttaactttctatttattgcatatattcatgttttacatagggaattccctacctcttgcatctcagtgggaagcagtgtgttggtcctcccaactggagagaggacagcctagatttttgcgacagttgcagcgaaagtcacggc

SEQ ID NO: 24447 - DNA, 266 bp, Homo sapiens
  source 1..266: mol_type = other DNA
aaatttaactttctatttattgcatatattcatgttttacatagggaattccctacctcttgcatctcagtgggaagcagtgtgttggtcctcccaactggagagaggacagcctagatttttgcgacagttgcagcgaaagtcacggcagttactgcagtggcggcggcggcggcaccggcaccttgcagtatcactggggagacggcggctgtatagcgcttgccgccccacggattatccgcccacgttcctgcaccgtggag

SEQ ID NO: 24448 - DNA, 386 bp, Homo sapiens
  source 1..386: mol_type = other DNA
actctcagaggcagtgttttttaatggcctcagcttttgggaggctcaggccacctagcccagggctgacttcaacaggcccagtcctaaggggagaggaaggcaggccctcccgactcgagatgcttttaaatagctgccttccaaaaaccatccttattccgtgatattataaagtaatgaatggtccattaaactcctcgccggcaccctcagccggggaggccgtaggctcgggctgcagcctggcagcctcagtccccgattagagttcattaattaaatcctgtgcttagatcgaactgtaacattattccaatcacataacgcgcgggggagcctgagccggcggccggggacgcacggcgctgcgcgctccttcgcca

SEQ ID NO: 24449 - DNA, 545 bp, Homo sapiens
  source 1..545: mol_type = other DNA
aagcctcataactgagatttatgactgctgcccgcgccgcccgtgggccgccggccggccgcagctcgctggcgacgagggcactacgaatttaccatgcattagaatacattagcgcctgcattttaaaaggctaaatggtccctcgcctccaggaaagctttggggtgaggcgaaggcgattgaagcaatgccccttcccccagatcgcagctgcttttgattccagtagcaacagccactggtagcttcccgtggaaggcccgcctcccggggcagctgcggcctcggagtggttgcgcttggcgcccgtcgggcgtggccccgccccaggtccgggagggtaggttggctgccccggcgagcggcagagcccttctggacagctcccgctcacccaaacagaagacgtcggcgccggagcgggctcggacatggcgaggctgcgagccggcccgagcggcggggcccggtgatccctccctccctccccgtcccgcccccaccccgggcgagcccgcccgcagcccggggcgcacacccgc

SEQ ID NO: 24450 - DNA, 429 bp, Homo sapiens
  source 1..429: mol_type = other DNA
tcattcttcttttgtcctgagagggaaaaagaagagggcaaagtattacatgttgtgccagtgcacatagtaggtgctcaatatttgttcaatgaatacatgggcgcctgttcctcccagtgatctcagtgtgcgaccttggagagagggtgcagagaaactgaataatccctttttctattctgaaaataaagcaaaacaaaacaggatctgcacacttgtgttcttatatctaaataatggggagcgggcttctagctcagcccccgggcccattttcacgcagggagcggcgcccagctggggcgggctctccgcgaggggcgtgtctctgcctggcctcgcccgccccggcccggcagcgaatgagcgggcgcgccgggagggcgcgaggtcagggggctggggacgcgcgtggggatcgctacc

SEQ ID NO: 24451 - DNA, 427 bp, Homo sapiens
  source 1..427: mol_type = other DNA
atgaagctcattcagtttaggtaatttatctgaactaacggtaatccttacaattttaaatgaacgcatctggccgggcgcgatggctcacgcctgaccagcttgacttcccagctactgtgcggtgagccgagatcgcgccactgcactccagcctgggtgacagagcgagacttgcgtcccctccaccgccgcgcaccccgtctcgcagctggcgcggtgtttgctggtgacatgaactcaaccagcctccacgtgacactgtgccagggtctccagggccgcggagctccgggacaggcagcgccttccgagctgcacaaacgcgtggggcggggcgtctctggatccggaagttgcctctgccctcaccaaagatggcggccccggcgccgctcgcccacctcaccgcggcgctcggccgatt

SEQ ID NO: 24452 - DNA, 394 bp, Homo sapiens
  source 1..394: mol_type = other DNA
cctttattagcacctcttacatgtgaatttatatatttcacaaatagaaaaactgaagctcattcagattaggtaatttatctgaagacacagcagcggggcaggggcaggggccggagccaccgccatcgcagcccggggaacaacggactcggggaagcccggcctggcccttcaagtcccgggcccagcaagggccaggaccctccctaatgaagctcattcagtttaggtaatttatctgaactaacggtaatccttacaattttaaatgaacgcatctggccgggcgcgatggctcacgcctgaccagcttgacttcccagctactgtgcggtgagccgagatcgcgccactgcactccagcctgggtgacagagcgagacttgcgtcc

SEQ ID NO: 24453 - DNA, 425 bp, Homo sapiens
  source 1..425: mol_type = other DNA
ggcctcctgccgcgtggttaaacccaaaaaaactcgatagcgtttggactcggcagaaagcctgctggctgcaatctttgacgcgcattcggtgaccggtcccccttaccgagggagctcaggtcccgggcgcgccgcggccccgccagctttccaggctggctcagtcctcgacccggggtgacggccaagccagccaagggcagcgcccggggagctagcagccgcagcaactgggtctcaggctgtgcccacctgactccaggacgcacggagggcgtggggcaggagctggacctgggccgcctcgggccgccccggggcttgcagtccagcccctctccgccctagggagggaaaaagggaggggagaaggccgagcccgcctccagccccagccccagccccagcgaggctcggcggcc

SEQ ID NO: 24454 - DNA, 239 bp, Homo sapiens
  source 1..239: mol_type = other DNA
accttgatcatgctcatgtgttctgtcgttagcttcagaatataagtgctggctcactagtcagagatcggggttggtatcagaaagattctaccagttggccacccgcttaaagctgtggatctggcctcctgccgcgtggttaaacccaaaaaaactcgatagcgtttggactcggcagaaagcctgctggctgcaatctttgacgcgcattcggtgaccggtcccccttaccgagg

SEQ ID NO: 24455 - DNA, 615 bp, Homo sapiens
  source 1..615: mol_type = other DNA
ttaacatctaaatttaaggaaaggcttccgaaaaagtcgactgacgaatttctttcacttatttaaagtagtctcttgcagtcctataaatcggaaggattaaatgaactatttgcatatgcaaaggataaccttaagcttgagtttgatatttcacgcgacttgcggccacactggggcagcctctcctcggctggcagccgggccgggcggctcgctcccgggagctgacaatgtagccaagtttcacagttaacagcgagctcagggctctcggtaaaaagaccacgaggaagaaacgctcagggcgtttttgttccccctccctaaagcggagggacgggagaggagggagggtcggcggcgccggccaagcgcgccagtacacgcccctgcggatccgccccgcggccgggtgacccccgccgcgccgcgctggaggccccgggccggggtgggcgtggggctgaactccgccacccccgcagcccgcggcccgctcgccagcccggcctgtgattggcttggggggcgcgtgtgcccgccccggcgaacggggagggtaccctcgcggcgccggtgggagggcccggacggcgctagcgaggaggcggg

SEQ ID NO: 24456 - DNA, 577 bp, Homo sapiens
  source 1..577: mol_type = other DNA
atttgcatatgcaaaggataaccttaagcttgagtttgatatttcacgcgacttgcggccacactggggcagcctctcctcggctggcagccgggccgggcggctcgctcccgggagctgacaatgtagccaagtttcacagttaacagcgagctcagggctctcggtaaaaagaccacgaggaagaaacgctcagggcgtttttgttccccctccctaaagcggagggacgggagaggagggagggtcggcggcgccggccaagcgcgccagtacacgcccctgcggatccgccccgcggccgggtgacccccgccgcgccgcgctggaggccccgggccggggtgggcgtggggctgaactccgccacccccgcagcccgcggcccgctcgccagcccggcctgtgattggcttggggggcgcgtgtgcccgccccggcgaacggggagggtaccctcgcggcgccggtgggagggcccggacggcgctagcgaggaggcgggcgagccgggtccccgggagcgcggtcgcggggagggaaagcccggccgggtctgcgccgccgccgcgcgcag

SEQ ID NO: 24457 - DNA, 507 bp, Homo sapiens
  source 1..507: mol_type = other DNA
agtggcacccccttcctgctcgggactccccggggagttcctatcccgcgccggcagggggaggggaaaggggccgtccccggggtgctcgtgcccagcgtctgcaggggagccccaaagcgggagcgccccggagcgggatccaggggagcttgggtccttccgcacccccccggcgcgacgcccggttcactccgcagctcctcgctttcgggaggagagggagggggcatgcgtgcctctcttccctcttcctgggtgttgggcaacccctgcagcccgggagtccgtctgggtcgcgcggctggagacccgggactgcggcgctcagaagcctgtgcgtgcttatcccggcgggaatgggggacacgctgcgtgtgtccctcccctcgtttggaaacttggggaggaagcttgcagccctgccattttttcctcccgaggattcaaagcccggcgcttaattgatctcttttattaataaagcgactgaatagcggcgtgaca

SEQ ID NO: 24458 - DNA, 273 bp, Homo sapiens
  source 1..273: mol_type = other DNA
tggccatctagagcctcaacatggaagttttggagggagacacacttctacccataacaccaatgtcatattaagctttatggaagaatagaccaagaatcttttcttagaagaaaagtgaatctgtatatttactttatgatttctacactactggtgcctccagacctatgaggagcctaatatttttgtcttggcaatgcaaatcctgggttttgagatgctcacagccagctgtctgattacgtaaactgaaggcaggttcataagaca

SEQ ID NO: 24459 - DNA, 272 bp, Homo sapiens
  source 1..272: mol_type = other DNA
agaaaaagaccttttggctcaataaagcctttattttcctaaagggccgttctagaaaatgattttaaaattggcctccctaatctgttggagacattagttaaatatgcactggatccatttttaaattcaaggctgtttagcttgctggatgatttctttttaacattgctatggacatttaggaaaagatgccactgatattccggatccctgaggctccagggtcacctgggccaagctggcaagttggctgttatcataacttccca

SEQ ID NO: 24460 - DNA, 218 bp, Homo sapiens
  source 1..218: mol_type = other DNA
tcagctgagatgccagggtggtcaggttgccagactaccccgtagagctctgctgccttcaaggccctggatgcacagtacagactgcagattccgagtgtggggcctcgagggccagaacctcagtggaagcccactgagaacttcacttgaagatgctgcaggaacaactgcagggatggtaggaggtggagcttgacgcaacccccttttccacc

SEQ ID NO: 24461 - DNA, 424 bp, Homo sapiens
  source 1..424: mol_type = other DNA
caaataaaggattctctatgtttttggacttggataaacttcaataaaagaattgcccatattacagaaggaataggacctgtgtgtgtgtgtgtgtgtgtgtgagagagagagagagagagacagacgggtgaggagggtggatcctgccttccttctgtggcttctgctttctcagagaacttcagaggaatgaacaacatatgacacatattagcaagtttttcctttcctaaggagcgagcaactaagcccagggtcgctttgtaaagagctgctcggtctcctgagcagcagccagtgacagctcgtctgggttggggctaccaggcccccttgccagggcctccccagcgtgtcgtgtcaatctccgcttcagcactgaagggcggggaaaaaatgctcttcttccagaacttccccg

SEQ ID NO: 24462 - DNA, 421 bp, Homo sapiens
  source 1..421: mol_type = other DNA
tctggaacagatcccaaacagtgctgggaagacctcagcagcacagttggaccacctatgtgctccgtagaatcctgccctaaattgcagccagtcatttctagaacaatgttggccagtatagatgattctctgactcagtgttattagtcttaaaaacccaggtatcttggattatcaaataatcaaataatggctaagatggccacccttctgctgagatgcaccctagcgtgaaaaaagtatctacacttctgaagatagtgtgctccacaagtatttctctgtgtggctaagagtgatctaagagaagttatttcctcaagatattttgaagctgtagtgtggggaaacagttctcaaaccccagtgtggatcaggatcacctggagggcttactaagctagggtccacccctcgc

SEQ ID NO: 24463 - DNA, 555 bp, Homo sapiens
  source 1..555: mol_type = other DNA
agaatataggtataactacctgactggtcacatttcgtaagttacttcctttttgtcccaaacgaagccatagtttttccagggaaaggcatcctctacagggttattgtttaaaagtctaggcaaagattttggccaagtccgctgtgtcgccgggcacatgaaagtccctgagtcaggggagagcgctcgccggggactgcgggcgggagccggcgactgagaaccgcttgccccgctctctggcgtgagtacgcaggcctcctcccacggtctcaggaagcccagacgccgcaggcttccccgccgtagaggagctgccggggcgtaattcctccaccgctcacccacccgtcctttcctgctcgggagggctgggtttgaagcgcgcgccacggccagcccgggaccgcgggggagggcgagggaggcgcgcagccgcacgcacgcagtaggcagccccgccccgcccctcgaggcccaaggtcccgcccctcgaggctccgtgccccgccccccgggtgccccgcccctttgcgcggctggcgcggccag

SEQ ID NO: 24464 - DNA, 449 bp, Homo sapiens
  source 1..449: mol_type = other DNA
tcatcatcttgtaatgcaaatttgcagattacataggtctttctaaacgtgtgtaaatatgcaaatatgtattccaatttatgtgcaattccaaacaatttgctgtttgaaattaaagaccaacaactcttctgtgagacaataattcgggtcatttacatgaaaagtcttaaacagcaaaaatgctacttgcaatttacatggtatactgagattttttttttaacttttcagcacagtttgcaaatactaaccaatgaatcaaatttaaaataaaatagaaatgtttcttatgcttgttcagattcctatcaaacaggagtgatttaaaaacctttcaatggagtgcacgtacgggtcacgattataacctgctgtatgtacaatattttaaagacctagctattacatcttgtttactcaatatatgccattgaaagcaaacgtgt

SEQ ID NO: 24465 - DNA, 435 bp, Homo sapiens
  source 1..435: mol_type = other DNA
tttagatgagttttcatcttgtgaaaagttgcattccatcaaacaatttgcttttgaggattgcagtgccaaataaaggattctctatgtttttggacttggataaacttcaataaaagaattgcccatattacagaaggaataggacctgtgtgtgtgtgtgtgtgtgtgtgagagagagagagagagagacagacgggtgaggagggtggatcctgccttccttctgtggcttctgctttctcagagaacttcagaggaatgaacaacatatgacacatattagcaagtttttcctttcctaaggagcgagcaactaagcccagggtcgctttgtaaagagctgctcggtctcctgagcagcagccagtgacagctcgtctgggttggggctaccaggcccccttgccagggcctccccagcgtgtcgtgtca

SEQ ID NO: 24466 - DNA, 728 bp, Homo sapiens
  source 1..728: mol_type = other DNA
cttcaagatcctgggtgtccactcgagtaagtcgcggcttgccgctccactcccggggcgaagccgcgagccagcggccccgtatgggcgagacttggcaggtccgcggggcgccttctcgccgccgccggactcggggctccgcagcggccgggcgtcggcgcccgccggccgcggggcttcgcgctgccgccgcccggtcccggagctcccttccccgctcgccgcccgggccgagccgccgccgccgccgccgcccggcccggcggcgaggccgctccaccgcacacatggaagccgccgccgccgccgctccgacgacagcagcagcagccacagcagcagccgccggcggcgccgcgctgaacaaaggtcatccgagctgcggcccagacgcccgggcttgaccgccgcgaaggccaaccccgggaagggggtgggtgtgcgcctctgggggtgcggggcggcgggaggcggccggggcgagcgcagggcagccggacccaggggcgcgggtgggcgccgggcagaggcggggtgcggcccctcgtgcccactcctgcgggccggggtgagcgcgtgaggctcaggcccctgggcctgcccgcagtggcctgtcccaccctggccttggggacagccggccttcgcgccccgccagctggcttggggggccgaggaggaaccgcccgggctaggccccgcaggttacgagacgggggccacgt

SEQ ID NO: 24467 - DNA, 631 bp, Homo sapiens
  source 1..631: mol_type = other DNA
tggaagccgccgccgccgccgctccgacgacagcagcagcagccacagcagcagccgccggcggcgccgcgctgaacaaaggtcatccgagctgcggcccagacgcccgggcttgaccgccgcgaaggccaaccccgggaagggggtgggtgtgcgcctctgggggtgcggggcggcgggaggcggccggggcgagcgcagggcagccggacccaggggcgcgggtgggcgccgggcagaggcggggtgcggcccctcgtgcccactcctgcgggccggggtgagcgcgtgaggctcaggcccctgggcctgcccgcagtggcctgtcccaccctggccttggggacagccggccttcgcgccccgccagctggcttggggggccgaggaggaaccgcccgggctaggccccgcaggttacgagacgggggccacgtgagcgcggctctcctactccccccgccggcgccggccgggcacagatgcgtttccagaggcctccgtgcccccgaggtgaagggatacttctccccccaggccagcaccactgtgctaggaggccaggccggctctgcagccgacgcatcccgtcgctttcttgggggctctttgtcagccaccaacacagaga

SEQ ID NO: 24468 - DNA, 435 bp, Homo sapiens
  source 1..435: mol_type = other DNA
gccggggtgagcgcgtgaggctcaggcccctgggcctgcccgcagtggcctgtcccaccctggccttggggacagccggccttcgcgccccgccagctggcttggggggccgaggaggaaccgcccgggctaggccccgcaggttacgagacgggggccacgtgagcgcggctctcctactccccccgccggcgccggccgggcacagatgcgtttccagaggcctccgtgcccccgaggtgaagggatacttctccccccaggccagcaccactgtgctaggaggccaggccggctctgcagccgacgcatcccgtcgctttcttgggggctctttgtcagccaccaacacagagatgaccttctcctcctcaggaagacctaagagggaaaccggctgaaactggtttgaggcagatcagctcctgaacacaa

SEQ ID NO: 24469 - DNA, 410 bp, Homo sapiens
  source 1..410: mol_type = other DNA
tgagtctctgtgacccaggggaactcggtgtctttctgtagattcaggaattcatggtttaactgcaagcctgactgctattcaaaaataaattgtatattgtatacagaggcaaagattttattttttgtagatgtagctcactgtaaccttgaactcctgggctcaagccagactggtgtttttattccatgcttttacaatacaaaacaaaaaccaaagtgagctggtctttagaatcaaattgcactaattttgcccttttcaaatttgaaatccagtgagtttaagttttatgttaatgatgatagttagctaagcaatttaaaaagacatgagtatctaatgtggctatttactaacgtattgatcttagagaattcctaataatgtattagcctatttaaaca

SEQ ID NO: 24470 - DNA, 462 bp, Homo sapiens
  source 1..462: mol_type = other DNA
tgtccctccaacaggagggttaaccaatagcaattgcaatatcttgcttttgaaagttttacacattctatggttaagtttctcccacaccttggaaagcaattgaaggcagaacttacctttcattagcttcatggtaagtcagcttctggtatattttaaatttaccgtataaattatccattatgtctgccttcggtagaatataagcttcatgagggcaagaatctttgcagtgcctagaacaaggcgatttgtggataaataaatacaataaagaatgcataatgcatacacgagtgagtgtaatctaggatcagaactgtgatgatctaggacttctaaatttaaaactttgagttatattccattaggtggttatgtattcatttaattaatatctattgcaacccaaggcattcaaagatacttccttgcatacaagtgcaaaatgcagaattc

SEQ ID NO: 24471 - DNA, 441 bp, Homo sapiens
  source 1..441: mol_type = other DNA
taccgtataaattatccattatgtctgccttcggtagaatataagcttcatgagggcaagaatctttgcagtgcctagaacaaggcgatttgtggataaataaatacaataaagaatgcataatgcatacacgagtgagtgtaatctaggatcagaactgtgatgatctaggacttctaaatttaaaactttgagttatattccattaggtggttatgtattcatttaattaatatctattgcaacccaaggcattcaaagatacttccttgcatacaagtgcaaaatgcagaattccccccgaggtatgcgggtccgaagggtcggacaaggctccggagccctgtagctgccctccctaggagccccgggtcttcaagactggcgagacccaagcgagtcgccggtcacgtggccgcaaggacgctgggccggtgggcg

SEQ ID NO: 24472 - DNA, 261 bp, Homo sapiens
  source 1..261: mol_type = other DNA
gggaaactggcataaagcagtttctttctctattccatggaagtagagctgcaccaggtggttaaggatactgcccttaaccttaaggtaggccttcccctcccggcccagatcaggcagcggggtcgccggctggaggcgccgggagggggcaatgtacactcagccttttcatcactcggcggggagatggatggttttccggaccgggcgtcccagcgccccggttaagcgctctggcccgggcttccatataaagta

SEQ ID NO: 24473 - DNA, 327 bp, Homo sapiens
  source 1..327: mol_type = other DNA
aggatactgcccttaaccttaaggtaggccttcccctcccggcccagatcaggcagcggggtcgccggctggaggcgccgggagggggcaatgtacactcagccttttcatcactcggcggggagatggatggttttccggaccgggcgtcccagcgccccggttaagcgctctggcccgggcttccatataaagtaggggccctagtggaggccgcagcagtagcaccagcggctgcggcggcggagctcctccgaggtccgggtcacaagggcttcccgtcgggaccatgcgcggccgtgagctcccgctggtcctgctggcgct

SEQ ID NO: 24474 - DNA, 511 bp, Homo sapiens
  source 1..511: mol_type = other DNA
cctcggggaggcgagaggcctcttccccgggagaaggtccttccccagccagctctgggccatctccttggcccggagtgttgggcgggagtgcgacaccgctgctcatcagtaaaggagcccgccctccccgcaggacaaggggcgggagcgaggaactccaggtgggtctcctgcgggacctgagcccggcagcacatccgactcggggctcccagtctcctgctgggcgatcgggcgctagaggggtctcggcgcttccagggggcacaggccagggtggcggccccgcggaggtgagcccaagggcgtcggccccactgaggcaggactaggggtgcgccgcgaccaggttcccgagcccatcaggcatcccgccgcggatccccggatcctagtgccggcccaggggtggccactagaggaccctgtggctgggccgggtgaggacacgcccctctgtggagggagggggaggagccgagggccagttggctccccgcctttagcg

SEQ ID NO: 24475 - DNA, 396 bp, Homo sapiens
  source 1..396: mol_type = other DNA
tccagattatgtaattctatatgatcagagagataatcacctggtatactagtgtagattgaagtcttagccatactcaactcttccaagtacaccagtgagcttaaatagagcacccaggaggtgcactctttatgcaagagaaaaaaggtgaccccttacatattgatgaatcatttccatatagacaagtaatatttccatgaaatccttgcatagtacttaaagtccaatgagataaaatgatggatcgaaaggattatttttgcttaatgaagcattattccacaacagctatataatcagtcagctctgattaatttaattgaaacaggactcttgattgctgtgcttataattaaaaatttagaatattaattcagaaggtaggcagtt

SEQ ID NO: 24476 - DNA, 306 bp, Homo sapiens
  source 1..306: mol_type = other DNA
gtggcatgcgccctaagagatgctctccagggaggcctagcacctttggcacagaccttggcagtctgtgcaagggcagcaaggtgacccaggtggctggtctccccagcatgcaggctaggaagaagagagctgtctgtattcttggcctttcctttagcaaagaatgtttttacaaaaagcccatggagacctagtgttctacagcagggctttgggaggggcatttccccgcgtcggtgaggtcagctcccggcccactgctgtgctccctttgaagcccagtgcctgcacttggggaatatt

SEQ ID NO: 24477 - DNA, 637 bp, Homo sapiens
  source 1..637: mol_type = other DNA
cgttcatgtagcccacgtgtaaaaacaatataaatcatactgctgtttcttggacttgaaaaactcatcatgacacatttttgaaaaaacaaaactttggattaccatgaatattttgacgatattttttcctaacaagaaagaggagtcccctttaaaaccaaaccaaagtcagtttcatttgaatgcactcttgccatggtttcaaaatttggaaagctcttggaattaaattttgagatgtaaaaccccgtgggtgctggttctagtttgcaacgctctaacatagcttggtagagcgtcacatcaaaaggaacacctttcttctaatatactaaaaaggttttgtacctgctcccaggtattctaagaagccggagaaagctccctgcaggtaatcggcgcttcccgcactctgccgcgcgggaagcgaaggttggagtcctttccccacccccggagggtgggcggggccgaaggaccgcaccgccccagacccgccccctgcgcgtggccccgcccacagctgctcctggccgtgcggccgcgcggaaagcggaggccgggggcggggctcaccccttgcccttgggggtcccccgggctctgccaatcagcgagcgccctgttggccatc

SEQ ID NO: 24478 - DNA, 339 bp, Homo sapiens
  source 1..339: mol_type = other DNA
aattagggtcaccgtcaagggagccgatttacggcccctagcaggtagcagcacctgtaaatggtttattgaccaatgaaacaaccagagaactttcttctaaaggttttaaggaagagtgattacactatataaatagcgctatttcaggtttgaacaattcttcctcacataatctaagagaactccccggtggagaatcagctcctcctcctcccggtcgttgcctttccccaccctgcgcgcttctcccagaggagggagagggaagaggcgacgtgaacgtcccgacgagggctgctccccgtgcaggtggtgcaaacgcccctgctctccggc

SEQ ID NO: 24479 - DNA, 348 bp, Homo sapiens
  source 1..348: mol_type = other DNA
cagcctgggcgacagagtgagactccgtctcaaaatgtatgtgatatgttcagttgaccagcatattctgtatatcaaaatatgtgcttacctttacaccggtcacttgtgaacaagccacaattagggtcaccgtcaagggagccgatttacggcccctagcaggtagcagcacctgtaaatggtttattgaccaatgaaacaaccagagaactttcttctaaaggttttaaggaagagtgattacactatataaatagcgctatttcaggtttgaacaattcttcctcacataatctaagagaactccccggtggagaatcagctcctcctcctcccggtcgttgc

SEQ ID NO: 24480 - DNA, 374 bp, Homo sapiens
  source 1..374: mol_type = other DNA
aatgaacttggtaaatgcatgctaattactcttcataatagtagaattactcatgcaaacattatgcaaatcgttttccatatgataacgatccactcgtttttgctaaacatccacaatgggcgatatctgcagtgacttcctgggacccggagctttctcacagggcctctgaaaaacgacgtccagcgtttgcagatggtcttcggggccgagcgctctgcgccccccgccgcgggtcggcgccgccgcgggtcgggagcgtgtccgggcaggtcgcgctcagcggggtacttccccgcccgcgtcccgcgtccgctcccataacgccgtctgcggggcggggacaggggcggggacaggggcggccgggc

SEQ ID NO: 24481 - DNA, 566 bp, Homo sapiens
  source 1..566: mol_type = other DNA
aacgccggctgctccagggacccctggcgcccccatccccggcgggagaagtagcgcagccgaggcagctcccggccactctctaacagctcggtatgcagctccagggcggtcagcaagtattgatcgcgcaacagctgagcagcgatcgcatcaattgataatcgggccggggtctccccggtgccccccagggccactgcagccgccgacgcctccccagggagccctggccgcgcactgcttcctaaggccacgggatcctgtggcgacagcgagcccgcagagccaggatctagccggcgcccagccgaagtactgccgtcaggagtgtgggcgcctccctgactggttccgacgggccgcagcccgaatcctctaggcctcaggaaggcaggagatccggatgcagctgcacctgatgcctcagcctctgctgcaccagcagcccggctctgcaggcggtctccagtctcgcgagaactggagcgtgcgactcctccatgattggtcagagaaggaagactggcccgagaattatcgcgatagcagcagcggccgggcag

SEQ ID NO: 24482 - DNA, 408 bp, Homo sapiens
  source 1..408: mol_type = other DNA
cccggcgtggagctgattttataacaaccacagtttacttatctgtctactggtgagacagcattagatattctgaagggtccctaaatgtattaaatcctaagcgtttattgagtacctaacaatcaggcaaatgccaacctcagaccacctccggggctgagaagtcgctaggcctcccgagttctacaggcctgggcacttgctatccatggggacaaaatgtcaccactggcgcgtccgcgggcgcgacaccacagtttgggcgccgacaccctccgcgcctggagcttatcccggtcaggcctgatctcgaaaacgctgcccggccgctgctgctatcgcgataattctcgggccagtcttccttctctgaccaatcatggaggagtcgcacgctccagttct

SEQ ID NO: 24483 - DNA, 632 bp, Homo sapiens
  source 1..632: mol_type = other DNA
atccttacttgcaagccaactgaaggtcaggatttaagcacctcagtttttaggtaacactgtgccccagacatctggccactttatgtctgaaagggccaaggctggcggtcgacgaaggaaggatcctcctcccgcattctcgacggtggcgcatccactttcggaaggccgggcctcgaagggtgggcgcgcggggcaggagcaggaccaccccgatgcccccattccttcccgggaggcggggcccacaggcctggggtgcggcaaggcaggagccagtgccgtgaagggcaacccagggctggtctcccgccaacctgtctgcagcccgagcacctgggccaggggcggagaccggaccaaggaggcaccgggcgcggcgaacacccccggggcccctccccgagcggggccccgcgtcccaccgcaaaccaggggagcttgggcaccacctggctggcaccgccgggcccggccggaggggggcgcaggagggcggcgcgggggcgtgcggggcggggcacgggggcgggaccacacagggccgcggcagccgcgcccgctgggccacagaggccgctgaggccgcggcgcccgccagcctgtcccgcgccatggccccgcgcgcc

SEQ ID NO: 24484 - DNA, 794 bp, Homo sapiens
  source 1..794: mol_type = other DNA
ccggaaaggtgagagcggccgcgtccctccgctcacgtgggcctgccgagcaccagccttaggaccgcacggaagccgccgagagggaggcggccggccagcagttgggcgtggcttcctggagaaaggcggccccccagggggcggggagagcgacgtcaccgtcgattcgcggtgctgattggcggaggtgaggtgcgcggagcccgcaagcttctccgcccggcccggctgctcagccgctccgtcctcaccggctcgcgagggaacagctcaggcaccgccgccccggctcagcgcggacggcggagagagggaggcggaaggaggacaccctcgctcgcttgctcccacccgcacccgggctcccagaaccggcgaggagcccagggggaggagccgtcgcgggcacgccccgcccccagcccgggaagacgacgccagcgaccccgccggccggccaccgcccccctcgccggccgagacccgcccccggccccggccctcccccggcggcatggaggggccccgctcctgacggccgcgccgccgcctcggcccgtgctccaccgctcgcatgtctgcgccgccctagccgaggatgctgaggatgagctgccgctgaagccaacgcaccccgcggagccgccgcccgaggcggaggagcccgaggcggacgcgcggccgggcgcgaaggcgccttcgcgccgccgccgcgactgccgccccccgccgccgccgccgccgcccgcgggcccgtcgcggggccctctgccgccgccgccgccgccccg

SEQ ID NO: 24485 - DNA, 534 bp, Homo sapiens
  source 1..534: mol_type = other DNA
gaggtctgtactctcctagtctttgtttccttgggtttctaaataaaggaagacagacgtatataatgtgctctgttctcataaacagagcaattcatacttgacagcagaacaaaatatttttaaattgagatttatttgcctaattttttacagaaaaaaatattaatgtatgtttactgcagatttgtaaaatcataattgattcttaaaaccaagttgattttgatatgagtagtgttttgaataaaaaactgtcataaggctatttatttacttacttaatatgatgttgtaacaaagaactcagttaggtttagagcacccagttgctgttagatgactgaaccttcatgtattgatgatacctttcataagactttttcctaataaagcatctttttagactgttattaaaaccaaacaatgaataaaaatggtgtagtgattcttgttggattcagaattgacatcattggcaactctgtatattattaagcaatttcctgtgtcccaagaaacagtcaataatta

SEQ ID NO: 24486 - DNA, 393 bp, Homo sapiens
  source 1..393: mol_type = other DNA
tggcagtagaaactattttttttttccctgaatgatgaaagaaaaaaaccaggagcaatgggaaacaatgaaacctcagtcctttgctattttccttttcaggtacaggagagggagaggacagctagaattccacgctgcctgtcttaccaggacctgcgaccttcgtacgagttaatgaacatgagcattcgtgttcattaagaactctggcacagagttcaacggcctcactggccacggccagctgctggcggccaggagaagcagaaccaagaccgctgggacttgtagtggattgccgatccccgagaaccacaactccctctccgaggccggctcaggaacctcccgggagcacgcgtccgtggaatgccgtcatgccggcgatga

SEQ ID NO: 24487 - DNA, 426 bp, Homo sapiens
  source 1..426: mol_type = other DNA
gggaaacaatgaaacctcagtcctttgctattttccttttcaggtacaggagagggagaggacagctagaattccacgctgcctgtcttaccaggacctgcgaccttcgtacgagttaatgaacatgagcattcgtgttcattaagaactctggcacagagttcaacggcctcactggccacggccagctgctggcggccaggagaagcagaaccaagaccgctgggacttgtagtggattgccgatccccgagaaccacaactccctctccgaggccggctcaggaacctcccgggagcacgcgtccgtggaatgccgtcatgccggcgatgaggcgcatgattaatattcaatgagcccaggggggtagcgggcggggccggcgctggggagcccgcgacccgggcggggagggcgtgtgtcgg

SEQ ID NO: 24488 - DNA, 436 bp, Homo sapiens
  source 1..436: mol_type = other DNA
gaaaatgcatttgctgttgtctctctcctggggaggcgtgaagcggtcccgtggatagagattcatgcctgtgcccgcgcgtgtgtgcgcgcgtgtaaatttcattgggaagtttcaaatcagctataacttttgttttggttttacaaaaaggaaacttgatgtacttaaaaaatacaagtaagttctctgcacaggaaattggtttaatgtaactttcaatggaaacctttgagattttttacttaaagtgcattcgagtaaatttaatttccaggcagcttaatacattctgctttcactcagtgtgtacaaagtagactgatattaacaatacttactaataataacgattggaataaaaatttcctgcatctgggaaacaccagaatcaagtgttccgcgtgtaaaatagctggattataactcctcttct

SEQ ID NO: 24489 - DNA, 539 bp, Homo sapiens
  source 1..539: mol_type = other DNA
gggcgcagcggagcgggcgggtggccggcccggacgcgccctccccggccgcggccccgcgcgccatgtgcccccggcgggacgcgccactcccgggcctgccgcggcgcctttaacccgggccagggagcggggcggagggccgcccctccgcgccgcctgcccgcccgcccgccgcgctcccgcccgccgctctccgtggccccgccgcgctgccgccgccgccgctgccagcgaaggtgccggggctccgggccctccctgccggcggccgtcagcgctcggagcgggctgcgcggcgggagctccgggaggcggccgtagccagcgccgccgcgcaggaccagcgcagcccggaggcggggtgcgccggtggcctttagcgcgggcttctagcgctcggcaccggcgggccaggcgcgtcctgccttttcggaaaatgcatttgctgttcggagtctctctcctggggaggcgtgaagcggtcccgtggatagagattcatgcctgtgcccgcgcgtgtgtgcgcgcgtgtaaat

SEQ ID NO: 24490 - DNA, 579 bp, Homo sapiens
  source 1..579: mol_type = other DNA
aagggtccaggcggtcgcactccgtcgtccgcccggcccggccgcgtgcggttccccgggagcccccaccccgtcgcggaccccaaagtccgcacgcggcctgccgcaggcctgagcagaaggccccgcgcacacccaccgcgccgcggccgcgcgggaggcctgtgccgcccgcgccacccactggccgggccccgcgggcgcagcggagcgggcgggtggccggcccggacgcgccctccccggccgcggccccgcgcgccatgtgcccccggcgggacgcgccactcccgggcctgccgcggcgcctttaacccgggccagggagcggggcggagggccgcccctccgcgccgcctgcccgcccgcccgccgcgctcccgcccgccgctctccgtggccccgccgcgctgccgccgccgccgctgccagcgaaggtgccggggctccgggccctccctgccggcggccgtcagcgctcggagcgggctgcgcggcgggagctccgggaggcggccgtagccagcgccgccgcgcaggaccagcgcagcccggaggcggggtgcgccggtggccttt

SEQ ID NO: 24491 - DNA, 541 bp, Homo sapiens
  source 1..541: mol_type = other DNA
agtaaacaccacgctcggggcgtccctaacagcagggcagcgctgaggtcccactgctgggggcggtggggggcggcattggcctgggtcttcccccggcggccgagcgccggtaacacaacgtgtgtgtgtgtaggcgcgtgtacacactctcatacacggctaaagggtccaggcggtcgcactccgtcgtccgcccggcccggccgcgtgcggttccccgggagcccccaccccgtcgcggaccccaaagtccgcacgcggcctgccgcaggcctgagcagaaggccccgcgcacacccaccgcgccgcggccgcgcgggaggcctgtgccgcccgcgccacccactggccgggccccgcgggcgcagcggagcgggcgggtggccggcccggacgcgccctccccggccgcggccccgcgcgccatgtgcccccggcgggacgcgccactcccgggcctgccgcggcgcctttaacccgggccagggagcggggcggagggccgcccctccgcgccgcctgcccgcccgcccgccgc

SEQ ID NO: 24492 - DNA, 677 bp, Homo sapiens
  source 1..677: mol_type = other DNA
caacccaccatgcccggcatcatggccaggctggtctcgaactccagacctggggattacaggcgcgagctacctcgcccggcctattacgcacgttaaatcgggaattgtatgggaactctgaactcaatgaaattgaattaccttagttaaggctttccggtcctctgaaaagcgaaagcccgggatttcagagcgtagtcgctgggctcccaggctgagcccgctccgggagcctccagccgccctttccgatgctccggggcctccgagcaacccagcgggcagtcccaagccgagggctgaactccagggaggagcgctcgtcacgcccacactggaggccgtggcaggcctggaaacccgccctgcggggtcctaagaagccattcgagctcccgaagagcgagtcttcgcccggcgcgctcgcatctggcgctgtccggagcccgctcgcgacgcacagggacgggaggccttccacgggagaggctgcggactgcgggccccgtcccgaggccgggggagtgggagacacccggcgacccccgagagggtggcggtggcggtggcggtggcggcctactcgccccctggaagcaccgccccgcctgggtggcgcgcgcgccggctcctcctcttcccctccgccgcggcccgccccggcccgaacactc

SEQ ID NO: 24493 - DNA, 539 bp, Homo sapiens
  source 1..539: mol_type = other DNA
atgaaaaaggctacatattatatgattccatttatgtgaaatatcccgaataggcaagattagttgtgacaaaaatgttctaaaatttatggtagtgatgggtctacaactgtgactatattaaagacaatttattataagctttatttatttatttatttcaccgcgctgcaacccaccatgcccggcatcatggccaggctggtctcgaactccagacctggggattacaggcgcgagctacctcgcccggcctattacgcacgttaaatcgggaattgtatgggaactctgaactcaatgaaattgaattaccttagttaaggctttccggtcctctgaaaagcgaaagcccgggatttcagagcgtagtcgctgggctcccaggctgagcccgctccgggagcctccagccgccctttccgatgctccggggcctccgagcaacccagcgggcagtcccaagccgagggctgaactccagggaggagcgctcgtcacgcccacactggaggccgtggcaggcctggaaacccgcc

SEQ ID NO: 24494 - DNA, 382 bp, Homo sapiens
  source 1..382: mol_type = other DNA
aatgatggagtgattaaacatctatgttgctttcctttgagaatgttaactatgaaaagaatttgcttgtaaacataactggcataaataatatctgatatgagcgccgacccgcccgcggcctgactgctagcgcaccgctgtgcggccgcctcaccgcgcagacgaggacggtgatcgcccccattccagagtgaaggcgcagtcacaggcccaaagcccccagtcggcgggtcttggaaatggacgactttttcactcaaaagctaggtctgccaggctgccgcccgcgcctaggccagagtctcagtgcgcctgcgccgagcccgacttccgccagggctcgctacttctcccggcccagggagggcctgcgctgtgg

SEQ ID NO: 24495 - DNA, 271 bp, Homo sapiens
  source 1..271: mol_type = other DNA
gagatttcagagcagagctgcgtctcactgcagctttgacctcccaggcagtgatcctctcgtctcagctttccaagtaacctaccaatttggtagtaaatattttgctaatagtacctaatttttaggtaggcactgtgtttatacatatatccagcatctagcagaatgagctgctgcagttcagagtactttttgtgccaccaacgtgtctgagaaatttgtagtgttactatcatcacacattaggcgtggcggtgctgcccaggtg

SEQ ID NO: 24496 - DNA, 340 bp, Homo sapiens
  source 1..340: mol_type = other DNA
tgtggaaatccaagggcatggctttgctttaagactgcaaattgaatgcattatttttcttaaccaaatatgaaccacgttttgaaaaagagctgatgaaaataactggtgaggatgctcaggaaattatcctagagctaataacagttgataatacctgaaaagtctagcttcacacttgactgagaacctcacagtttaatatgaactcatgtgttacataagggacagagatatgacacttcctctttcctctaaaggagaggccctcaggagtgataatgtagagataatcactttaacttaaaattcattgaattgatggccataaatgcatgtc

SEQ ID NO: 24497 - DNA, 544 bp, Homo sapiens
  source 1..544: mol_type = other DNA
aaagaaaactaacagcacgtttcttttctatgcttactattgataattcagaaaaactctggatgcttagtcattaatttccactggtcaatatcttataaaacttgttttatttatacactagctacataagtagtttatattttccataaaggccatctctccattttagaaagttaatgtatttgtagataatattgttgtctgacaacttttgttgtaaaatatgtgtgtcaataatcaaataataattctcatccaactttgaagtaacattttgcaaatcctatgtaataacttagaaagattttagaataatgcaaaaattcaaatataagaaatcatctaagacaatgtgtatatgaagtaaaatacatttctgcttcatggtcttctagtatagaaatttgaattgaaaagtgtgagctgctttgagggctctataaaaagagcaaagaaaatataagcatattaagttaaatattcaatgtagttaaaagcatagcatttgttttaaaaatatatgccactctttgatatattt

SEQ ID NO: 24498 - DNA, 311 bp, Homo sapiens
  source 1..311: mol_type = other DNA
actcaatttgcaagattctcagtgcctattaaaaagcaaatcaactaaatgtggctttgagtttgcttaaagagcagcaatcaaaatattttgaaaaaagtaaattgtgacatacgtttcttttaatgacctggtacataatagacttgataaatgtttattgaatgaattaaaatgagatattttacaattaatggatggaatatttggcactcctaaataatgcaaatgcaaaaataactctgttacagagaatgacttgtcaggacacagctctgtccatcttgataattttaaagttccaaggagat

SEQ ID NO: 24499 - DNA, 477 bp, Homo sapiens
  source 1..477: mol_type = other DNA
agcttattcttacacccatcggatctcctgaggcttattaactatcatgagaatagttgagatttgagataactttctcacatagaatcctattctccatagtatgctataagatactgaagtacactctacattccttgttatacagaaaaattactaaggaaattcaaactgaaaaacaggaaatgtaagctttttagttctttggtattcgaagtatgcctaaaagacaatgcaaaatccaagaaaagaatggtggggtttttgtttgtttgtttttgtttttgttttacagctggagtagaatacaaaaattggaattctaaacttattctcattggcattagaaaggcacctacatgtatttcacatgtgcattcttattttttccctatagattaaaaaggaggtacaatggtagcatattcataaaggtgaggcttgtgaaatctgaagttgagtaacttctaaatttag

SEQ ID NO: 24500 - DNA, 513 bp, Homo sapiens
  source 1..513: mol_type = other DNA
taggaggcaaaagttattcttacatggtggctgcccattggatctcctgagacttattaactatcatgagaatagcatgtggttgagatttgagataactttctcaccaatagaatcctattctccatagtatgctataagatactgaagtacactaattagcactatattccttgttatacagaaaaattactaaggaaattcaaactgaaaaacaggaaatgtaagctttttagttctttggtattcgaagtatgcctaaaagacaatgcaaaatccaagaaaagaatggtggggtttttgtttgtttgtttttgtttttgttttacagctggagtagaatacaaaaattggaattctaaacttattctcattggcattagaaaggcacctacatgtatttcacatgtgcattcttattttttccctatagattaaaaaggaggtacaatggtagatcctgtcctaggtgagccgcttgtgaaatctgaagttgagtaacttcaaattcag

SEQ ID NO: 24501 - DNA, 487 bp, Homo sapiens
  source 1..487: mol_type = other DNA
gttccacgtcggtaggaggcaaaagttattcttacatggtggctgcccattggatctcctgagacttattaactatcatgagaatagcatgtggttgagatttgagataactttctcaccaatagaatcctattctccatagtatgctataagatactgaagtacactaattagcactatattccttgttatacagaaaaattactaaggaaattcaaactgaaaaacaggaaatgtaagctttttagttctttggtattcgaagtatgcctaaaagacaatgcaaaatccaagaaaagaatggtggggtttttgtttgtttgtttttgtttttgttttacagctggagtagaatacaaaaattggaattctaaacttattctcattggcattagaaaggcacctacatgtatttcacatgtgcattcttattttttccctatagattaaaaaggaggtacaatggtagatcctgtcctaggtgagc

SEQ ID NO: 24502 - DNA, 280 bp, Homo sapiens
  source 1..280: mol_type = other DNA
gatcttgggatgagtttcctcaggccaggaagcatctcccagctgcaccatgtgcactgaatgttaatgttttcccttagtaaaacaggcagggccgggcatggtcgttcacgcctgtaatccggtggttgcagtgagctgagatcacaccactgcacgaactgagcacttctctgaaaagcactggtcatctcattacaaattttatttttattttttaatttttaaaatagagatcagggtgtgctgggattacagaaatatgaaggctttatatttc

SEQ ID NO: 24503 - DNA, 364 bp, Homo sapiens
  source 1..364: mol_type = other DNA
tattattataataatagctacacttatcaagtggttactgtgtactaagtactttacatgttacctataatactcttaaccatgacgttatgaaaaatttccccatttttcaaacaagaaggtatatcttcttgatattggtaaaaaccatctgtatgttgcaaacttatcctagtcaatgactgccatggaaatagataaaacccaggcatctaaccttggtcctcgtccaggcggacaatacaagtgcctttctgagctggacaggaaagcccctgtggagtcccttgtcaccagtgctgctgctgtcatcaacctctcccttgggaggccaaagggaagtcttgggaattttccctgaacc

SEQ ID NO: 24504 - DNA, 307 bp, Homo sapiens
  source 1..307: mol_type = other DNA
ggtaggtgcaacatacagctcaacctcgtaggcaacaacaaactctagcctgtattataggatcctatctgaagctgctcagttcaggtaagcattatgtttctctggaaaattccaaagaatgataaaaaacattgtgtgagattctattttaggtcatagtggcaagttgcaataaaatggcaccttgtttttatggttatgttaaaaccattgtcattataagaaacagagatgaatctgattcacatagatactattttgaaacctggttcaaaacctaaatgcttaatgctctgagtcatag

SEQ ID NO: 24505 - DNA, 534 bp, Homo sapiens
  source 1..534: mol_type = other DNA
gagttaataattatcaaatttgctcattttttggatatttattgatgggggtagatatccctaatataatactcaattttagcattaatcatatgagaggaaataccatgttagtgattatacacatacatagcaacacacacatatatatatgtgtgtgtgtactaatgaaaatgtaattggtgtgaatttttattttatggatgagaaaaggcccactctattcagaatatgaattattcacatttccacatgtaagaagtgccagttgtgccttaatgtaaggatatctaaatttactacataaaaatactatgtgatactaaatatcaaatgaaataacatttcatgctaaaatttgattcattaaaaatatctatttgactactttgaattagagctatagctaatattctacagacttcttttaaattgctctataaagcatctgaatatatttattttaatgacattatttaaaactatcatggccatcataaaaaaaagtctgagtcagaggctttatatttcaga

SEQ ID NO: 24506 - DNA, 612 bp, Homo sapiens
  source 1..612: mol_type = other DNA
aagaaagattctgtatataataactaagtcactgtgctatcaagcatgttcattctagctcaccaagaagtgcttgaaattataggtaaatataaaatgagttcttgtcaagtgtaaaattagagtttctatttctgaataaatacttttcatataaaataaatatgtacaaatagtggaattaatagtatttggttccttttttgtcaacttcagttaatactaaagtaccatttctaacactatcttatgtgatcaagatagaagagtctattcacgtattcaagctttcctctctgaaatcagtaagtccagctgcaatcacatggcaagtggaatttttgcagaagcagctcatccacttctctagaataaaacatgtttccataaataaagtcgaaaccttttctttctgtctttagataaatacatgctaatatagaatataaaatatattttatacatgcattttgtttcatataaaatacaaaagagtttaggattctaactttcagttgctagcttgtaacaacgctgaagcatgaatttttcaagcactatctccttggtgctattctcacgatagtgagttctcatgaaatctgatcattt

SEQ ID NO: 24507 - DNA, 473 bp, Homo sapiens
  source 1..473: mol_type = other DNA
actcacgggagaagaacttaacacgtgtaaaaggaagctcctaataaaggataagatctgttttctttttattttatggagtctcactctgtcacccaggctggaggcatgattcttctgcctcagcctctcaagtagctggaactggagggccaggctgtaagatctattttataatcaagagaagatgaaaaattcttcttgtgtcaggatttagagaatttctaagacagaaaatggattttttcttgcttgggtcgctcaaaagagagagtaaatctcattatatttatatattggaagagctagaagaagtattgtagaatttgatactatccttgagcacaagtaatcttgaaactggggctgacagattttagctaactttcacaggcatgtgtagatattgacaaattcttaagtttctttacaaacaagtatttctattctaatgatgtcttcctgagtaaaat

SEQ ID NO: 24508 - DNA, 420 bp, Homo sapiens
  source 1..420: mol_type = other DNA
taaaggctcagattctagaactcccatatgctggagatgttaggagatgagatgaatatatactccttacaaatggtgtggtaatttctcatggaaatatatgaaacagttgatatggcatgccgttaccttcttgtaaaaatctgaccaatctgttaactttctatatcacccacaatatagtaaagtcactgatttttaatattagacttaaagttgtttttgctttgcagctggaaagtgaaataagtatacataccccagttcaaattagaagagcattatgaactcttctcagggatgtccatccttttctttttcttattatgcataagataaccaactgcattttatttttcggcagattttcctcattctgcaaaagatttttgtagatgagattgctatttcaaattgcca

SEQ ID NO: 24509 - DNA, 528 bp, Homo sapiens
  source 1..528: mol_type = other DNA
tatataaaatagtttataaatagagaggctccttctttgtctatgcaaatgaaacaaatggcctgttatttttcttttgtaataaataaggagtgaaaaagcattcccaataatggtgtctaaaattttgatccaaaacccttgttgcctttcacatagtatctgagagccatttttaacaggcttacaataaaggccaggcatgatgggttgtgcctgaaatcccagcacttgagctagaagctgctgggaaatattattgcactgcccttcagtctgggtgacagagtgagacacaacacaaattaataattcagtaatattttcagtttcattgatcattattattccactaatttgaagctttctatttgtgttttataaaaaaaatactacctgggaaaccaaatattctctgttggcagtcagaatccaggtctctcatgtgtacagagatggaaaatgtgataaacaactcaggtctctttctgtctttttattgagacttctgacaaaaataagcctgaa

SEQ ID NO: 24510 - DNA, 430 bp, Homo sapiens
  source 1..430: mol_type = other DNA
cgaaaatgtattcagtaaaatcctacatctctttatgataaaaatccttaacacattgggtatagaaggaaaattgaaaacctttcctataagactggattagctttgctcaccaatggtataatcttatagatataaaatatccgtaagatgtctatacatctacagttacaatagctataagaaatatgatgtataaaatacctagtaatcaatttaattaaaaaagtgaaagacttctggttggaataattaatgttaaaagtacaatgctacccaaacaatttacagattgaatgcaatccctgtcaaaataccaatgtgttggggctttttagggccacttcctgcacatcaggagatccccgcggcctgcgggacccgccccgccctcctgcccaggcgcccgctaggtggtgcctggctgggc

SEQ ID NO: 24511 - DNA, 387 bp, Homo sapiens
  source 1..387: mol_type = other DNA
gtgggaatgtgcatctttaaaagcagaattcccaagagagctctgtgagagcttcctgcaggatgaaagacaagcttgcatgtaaataatttgctattctaatttatctttttggataagaggatgttataaaggattttaaactgaggtataaaataattagaattgcaggactgttgatcatttagttaaaagaactattttgaagaaataagttaaaagttgaaacatgaacctaagatcatattataaaataagacctgggatgtattttttggccattagaaaatgattagtatccttatcaggagcagtctaactacagtggagtcaaacgtgaatcaacggtgaaaaggacaatagccaatgtgtacactttttataaaa

SEQ ID NO: 24512 - DNA, 335 bp, Homo sapiens
  source 1..335: mol_type = other DNA
taaataatttgctattctaatttatctttttggataagaggatgttataaaggattttaaactgaggtataaaataattagaattgcaggactgttgatcatttagttaaaagaactattttgaagaaataagttaaaagttgaaacatgaacctaagatcatattataaaataagacctgggatgtattttttggccattagaaaatgattagtatccttatcaggagcagtctaactacagtggagtcaaacgtgaatcaacggtgaaaaggacaatagccaatgtgtacactttttataaaactggccctaagccagagcaatcgaacggtt

SEQ ID NO: 24513 - DNA, 412 bp, Homo sapiens
  source 1..412: mol_type = other DNA
ggataatttttgaattttcaacaggtgtgaggcaccacacccgccctgtataggccctgagattggctattttatgaataaaccagtgtttttgtttattggtgtgataacactttaccacaaatttagtggctgaaaaatgacacacatttattatcttatggttctggaagtcctaagtccaaaatggtacagcatagcaatgttattttctggagtctctagaagaaaatcccattaagcccactgggataactcaggataatctcagatcttggagggtggttcttccacctaccacctcagcgtccactgactgggggggcacttttgccatcagcttatttaaaatattgggggaagaggacaactcaagaaacgtattcttctctcccatgatctcctctgccct

SEQ ID NO: 24514 - DNA, 191 bp, Homo sapiens
  source 1..191: mol_type = other DNA
atatatgtaatgttaccagaaaaatctgaattgaatctaaagattgtactacagaataattgagccaaggtttgatacctggctaccaggtgtaaaaaaagatacggaggtcttttctaccctggattaaaatgcattattgctgtcagaattattagcatagaattcggttttaaacattgaattactgc

SEQ ID NO: 24515 - DNA, 146 bp, Homo sapiens
  source 1..146: mol_type = other DNA
attactgcaagcaagaaaactgtaagttctgattagttttatgaaggggcagcttgaaaataccctcaaaactcggagagatggatgggctgcaggccgaggcccccaccgggtctctgggaggcgccgaagtctcagtggctccc

SEQ ID NO: 24516 - DNA, 357 bp, Homo sapiens
  source 1..357: mol_type = other DNA
aagcaagaaaactgtaagttctgattagttttatgaaggggcagcttgaaaataccctcaaaactcggagagatggatgggctgcaggccgaggcccccaccgggtctctgggaggcgccgaagtctcagtggctccctgggccggcctccgacagcgctgacagcaggcgcccgccgcccaccatcggcgctcccgctggctccggaccctgcgtctcagctgcccgggcgagccggaggggcccctcgcagtgagcagacgcagcgggcccccggcgcccgaggccggggcagggtccccgcgcaccgcggagtgggctgtgagaggaggagcccgtgccgggcgggcccgagcg

SEQ ID NO: 24517 - DNA, 529 bp, Homo sapiens
  source 1..529: mol_type = other DNA
gccgaggcccccaccgggtctctgggaggcgccgaagtctcagtggctccctgggccggcctccgacagcgctgacagcaggcgcccgccgcccaccatcggcgctcccgctggctccggaccctgcgtctcagctgcccgggcgagccggaggggcccctcgcagtgagcagacgcagcgggcccccggcgcccgaggccggggcagggtccccgcgcaccgcggagtgggctgtgagaggaggagcccgtgccgggcgggcccgagcgggtgtcgagccggttcctccagtctgccccgcgcgcggagctgcgcgcactgggtccccaagagcccgcgggcgtccggcagccgagcgcacgttctttcggatgcacacgcccgggtccctggcgtctgacgccgtggggagggcagcgaggccccaggttctgcctgcgcggggctggggaggcgccgctgggcagatgtgcgccgtccccaagttactgcgtgttgcagtgagatggctctgcaggagctcctcaa

SEQ ID NO: 24518 - DNA, 589 bp, Homo sapiens
  source 1..589: mol_type = other DNA
atttgttcataaattattgataatattcacaacctcataggatgtgcatttgtgcgtgtgtgtgcatatgtatgtgtgtgcacatgtatgtgtatgcatgtgtgcacatgtgcatgtgtgtatatgtgtgtgttctttcctcaaaagctaagaggagactttcttattatataggtataatttaagaaacttttaatattttaatgtttctctagtttggttcaaaaatggtttttaagtaaataacagcttgagtaaacagcatagaaaatacatatgtattttatgttaaataataatagcttatatcaaaatctaattataaccatgaataaaataaaagattttacataataataaagaaaaggacttattaaagtttagacatttctctctcattatgtctttacttgatttctgaggagaaatgaccgctctacttgcaaaattcttgtatgtaagttgaattactttattttgtttttgcttgttgttaggggaaaaaaaaaaaaaacaaagataatctactcagagacaaaatagcattgagtaagcagtgacatactgacagtgttgtggtactaaaagc

SEQ ID NO: 24519 - DNA, 576 bp, Homo sapiens
  source 1..576: mol_type = other DNA
atattgtcacctagacgtctacatagggaatttaaatactcacttatttgaatgataaagaacagcttctgtgcagagggtattttttcgcagctcttaaaaatagcaaaagttcaagtcatagagaatatgaagctcatgaagagattattggtgatcaatgagccaactgatcagcaagtgctcagccatggcatgtattttattaatgaggcttttcaaaattttcatatgcatatttctcaagctgtattttttccatgttatttataaaaattaatacatatgtatgcatgtatttctttattagaaactggactctaaattccaagagggtggagtaagctcaggcatggcgggctgcaggtccgagccctgccctgcggggaggcagctaaggcccggcgtcgagcactgcagctgctggcccaggtgctaagcccctcaatgccccgggcttgcgggccggcccgccgccgccgctccgagtgccggcccgccgagcccacgcccacccggaactcgcgctggcccgcaagcgcggcacgcagccccggttcccgcccgcgcctctcc

SEQ ID NO: 24520 - DNA, 529 bp, Homo sapiens
  source 1..529: mol_type = other DNA
agggcttgctctcaattagagtgcaatttaatctcctaaggtgaaccggctgacatcaatttggtttgatctaaattctctggtaccttatgtcccataaaaatcagtaaccgtcttataaaagtatatggtttttacaaatcattgtcgtatagaagaaaaaacaggtagcaatataaatatttcatactactttatctagttccaaaataatcatgttctcaagtttcaagagaaagtttttaaagaggcaatccttactttggcaaaaatgcattaaagcttgctgcatttaagagatgtcccattatgcaaacaggttgaaagaatattacaaatacgttttggaaaaatacggagtgtcgcgcagctcagcaatccgcagtcttaagggttcccacgctcctgggcgtggaggagacatgactgcgcaggcgctgtcgcatgcgccgcactcccctcgcatgcgccgcactcccgcgcatagccggagacggagactggccgggtagccccgcccccgtagtta

SEQ ID NO: 24521 - DNA, 469 bp, Homo sapiens
  source 1..469: mol_type = other DNA
ttagtagcaattacctcttccgtaaaaactccaaatgtttacgtaggaagaaagtcgagctgcaactctaatactgcattggtccggcacagcggcggcggaaggaccccaaggtgtccgctccgtcagggccaggcagggtggcgcggcgggggcggcaggacgctgccgggaatgggtgggcatctccacccgcaggcctcgccccagacccgggtccaatcccggccccacggcggggccaggtcccacgcgcccgccagcgtcccgaccgctgagcccctacctgtggcgcagagccgcagggccgtccaactcttccacgctgccatgctagcccgggagagctgcgccgcctgcccgcccggaaagggacgtaactacgggggcggggctacccggccagtctccgtctccggctatgcgcgggagtgcggcgcatgcgaggggagtgcggcgcatgcgacag

SEQ ID NO: 24522 - DNA, 627 bp, Homo sapiens
  source 1..627: mol_type = other DNA
agttgatctagactaaatacttaatttcttttaagacatgggcttagaaattaccttattccactggataagacaagtttattgaattggggaagtgtactctgcttccatgacgccaaggcaaggttgtggatgcatcctcctacctcagaggggggagaattgtggctaataattcaacctatggtgaaaaattaactagatcatattctgctcagtaaaacctgaaagattttcagcaattcctgtcaaaagtgatttattcctgtgtacattgtttttaataggatgatgcattttattacaaggaagcctgtgtaattttgtaaagtttttcttaaatctcaaagttgtaatatatcttgatgcataagagcgctttgtaaaaggaaagaattttctgtgaatttaacaagctgagttttacagatttagagcgaagctcagagtactcagcatggtgttttaaaccatcaaaggaagaatatttaatatggtaaaataccaaatactgcattaaaataaatggttctgcagggacctagattgatattaatagatttggggaattcccagatttgggatcttgcaacataaaatctgtttacattatcctgcaggcagctc

SEQ ID NO: 24523 - DNA, 517 bp, Homo sapiens
  source 1..517: mol_type = other DNA
tgaaaaataaaataatttgaagacatttattgcctaaatttcaaatgttgtttttttgctacttaaaaggagcaaggctatcctgttaccttttgtcaaccagagatctttttccccagggaaaggggccagagagctttcactgggcaccccgcacaattcctgccaatgtgaccacaatcaagggttttgacatgtttcatgatttgtatactcaaatcttttattaaatatgatttcttttgcttttgtgcaatctaatgcaaatcagattggatgaatattttatattgttcctgtaatgtgcagtataatttccttttaaatatttttcagataggtattagtttttctattattattacaagttatactgttgtaattaaacattaagaacacttgtttcaaatggttgtatggaaagctttggataaccatacttagggaacattaaaaatggttttattttggttggtttcaataaaacttcacaaccaatgggaatcttttttgagtt

SEQ ID NO: 24524 - DNA, 541 bp, Homo sapiens
  source 1..541: mol_type = other DNA
aaaaaataatcctaaaaattaaaacatctttacaataatgaaaaacctacttttaaaatgccatgtgtttctacattaaggggagaaagtttttcattttggtatccattgataacctccttcagcagaggacgtcggcgcccggctgcctcgcccgcctgcctgtctctaggctgcgggaggaacacatgcgcactccttaggaatctcgcgcccggggagcgctgagggaccggggagccgggtggggagcgggcctcggggcgcccggcggcggaggcgctcccacccgcgcggagagggatggagcgcgctccgagcccagccaccccacgggccagggggagggagcggggccggcgcatcagcccgccccccccggcccgccccctccccccgcgccggggagccgcggtggtgcgctccggccagctgtgcgccgccgagcgaggcgccagcccgtgggtgctgccgggggcggcggcgcggtgggggctcccgcagctggcggaggcgcgggccgcggcgctgggctcgcggc

SEQ ID NO: 24525 - DNA, 519 bp, Homo sapiens
  source 1..519: mol_type = other DNA
tttacaaaacagagataacagatgcctcttttgactacaaaataatatcatagatgtgaaaacttttagaaaatataatgccatataaacacaaggtgacaccatgcttgattatatgtacacattacaattttgttctgattatcattgcattgatacactttgagactgagtcacaaacaaatgcatttatacattttatactaacatgctgatatgttcctaacaagttcttaagaattggaacttgtacctaacaagttcttaagaattggaacttgtattttataagagaacctgaaaaatgaatcctgttttgatattgtactataattatgtaagatatgacccctgacagaacctggggacagggacctgtctgtactctctttgtgacttactgtgactctataattatttcaaaatcagaagttaaatctctcataatggtagatcgtcctcatcaaagcaaatgtctgagagggctgtcagcgctgggcgtaggctccctccgcccac

SEQ ID NO: 24526 - DNA, 120 bp, Homo sapiens
  source 1..120: mol_type = other DNA
gcacatcacctgtcctcaggacctcaggaattcattaggacataataggacataatagatgaaattaatttttccaattctgactcaggaatgttaacgtcacaggcgtttataaaacct

SEQ ID NO: 24527 - DNA, 219 bp, Homo sapiens
  source 1..219: mol_type = other DNA
tgcccacaataagtcttagtaaacacttgtgtccctgcatgcataattatgtgcaggccacaatccttcatggtggtttaaccagcagggacctagtgtttctaagagacatgtactttttctgtcggagaatgggagacaaagaaaaagctgcaatagtaaagttgcttccagaagcaggtaacttgactcatgaaatttagtgattcacttcagttg

SEQ ID NO: 24528 - DNA, 438 bp, Homo sapiens
  source 1..438: mol_type = other DNA
cccagaactggtttccttcaaacccacagcccccttggtggctcttagggtgaccataaataaatacaacaaatcttaaccacattagataacattgtaccagattcagattgcagccaatgtgtggctgaggctggagaccctccctcattcaggcacctttagatgctaactaagcagttcagatataagctacattgtccaattgcagatgaaaatgttctcagtaaaatattctagaaagaatatatcttaatttaaacaatatgaggtttctgccattttggaaaatgaaattttctttaaataatctgagatacagcaaaaacaacctttttgacactgagagtgttaaaagaccctcagcacgccaggcgtggactgcctaagtagccacaatgcagtgtgcaatggggtatctgcaagtccctgttagaa

SEQ ID NO: 24529 - DNA, 468 bp, Homo sapiens
  source 1..468: mol_type = other DNA
atagggatacatccctttcccagggaacgtgaaccgagaaaatgcaaatcattttccaaatgtaattttgttgttgttcttaccgctgcttataattaaaaaaaaaataattttcactgtgcacggtgcaaaaaatacttgggtatccaaagacactgcttgactttgctgtcgacgagccgggaggcggggctcctgctggggcctctgcagcccgcgctgggttcccgaattcccgcgctgtaagccggaaccccaggccagcgggcgccgcggcgggcccggagatcggtgcaggacgcacggcctagccagaactacaactcccgacgtgcgcggcggccaacgctagagaggctggaagctctcctggcgacgctggggccgcgaagggcctactcctggtgagcgcaggcgttgcggaactcaccgtcccacaggacgtgtttccgggggtacattaattgc

SEQ ID NO: 24530 - DNA, 434 bp, Homo sapiens
  source 1..434: mol_type = other DNA
tcaatctgtcacttactagttaatgtctaagtttcctctttggcaaaataggaatgggaatccactggttgcacacagagaattcaacactaatatgaataaaagtacagtgtaacaactatttacatagcatttacagtgtattaggtattgtaagcaatctagagatgatatgcaaatactacaccattttataaatagggatacatccctttcccagggaacgtgaaccgagaaaatgcaaatcattttccaaatgtaattttgttgttgttcttaccgctgcttataattaaaaaaaaaataattttcactgtgcacggtgcaaaaaatacttgggtatccaaagacactgcttgactttgctgtcgacgagccgggaggcggggctcctgctggggcctctgcagcccgcgctgggttcccgaattccc

SEQ ID NO: 24531 - DNA, 662 bp, Homo sapiens
  source 1..662: mol_type = other DNA
ttttgtaactaacaactttattgagatataattcgggtaccaactcatacctgaactttcttttaaaaaggtccatactattcaagaaacacaacttttaaagtccacaataattctcattagattttaatatttatactgaaatactaatgatattcatttttttaaccacttttcatcgtaagagaaatacaaattttcctattgattcttatgcacaaaaatcaagtttttgtggtactgctatacattagtagtatgttcagcttgaaacaaggaatgtttggttttttaaaaagcatttttcacaacgcgtcctggggtcccctccctgcggggacgaggccggggtccccgcgcgagcccagcggacctgggcagtgcgggggtccgaccgcccgccacagggggacagggaccgcagccgccaaatccgcggggccggggaacgaggagactttcctttccgcgttagccggggccacccccgccagagggactctgggggccggaggagcggcctcctgcaggcaccagcggaggggcgcgggggtgggggaagggatcagggctccgcgctccgtccgccccacgaccccggcccggcgtgcccggcccccgccccgccccgcgcggcccccggcctcagccccgcgcgcccc

SEQ ID NO: 24532 - DNA, 602 bp, Homo sapiens
  source 1..602: mol_type = other DNA
gtcttctgtcggagtccgccggtccgcagcctgcggcagggaggcccgggcacccgcaggtggcgccccacgtccgtgtttgcgccctcagccgagctccaggcgcagctgggaaacccagcgcgtctccccgggtccttgcgcggacaccgcgaggagcagacacacagacccgggccggaggcccctcttctagccctgcgggaaccggacagttccccaactgggagacacgccattcaggtgcttttgttccgagtcctagggaggcggcagcgctcggctatgccctctggagactggcggggctgcggggccgaggggacccgcgagggagccgcgctgcggacgcgctgagcgcgggagctcgaggggccccaggcagcggtgcgggcgcgaagcccaggggttggaggcacctgggcgcacagcgcggggcgctgagccgggcgagacgcggggttcccggtcccgggcgcggcgcctaagcgggcgcgcggggcgtggtgcacccctgaagcggcgcaggctggcgcgggaaagcggcagggcggggcggcgcggttattggccacgcgctgggagcagggtcgcgctccgtg

SEQ ID NO: 24533 - DNA, 682 bp, Homo sapiens
  source 1..682: mol_type = other DNA
taattctcattagattttaatatttaactgaaatactaatgatattcatttttttaaccacttttcatcgtaagagaaatacaaattttcctattgattcttatgcacaaaaatcaagtttttgtggtactgctatacattagtagtatgttcagcttgaaacaaggaatgtttggttttttaaaaagcatttttcacaacgcgtcctggggtcccctccctgcggggacgaggccggggtccccgcgcgagcccagcggacctgggcagtgcgggggtccgaccgcccgccacagggggacagggaccgcagccgccaaatccgcggggccggggaacgaggagactttcctttccgcgttagccggggccacccccgccagagggactctgggggccggaggagcggcctcctgcaggcaccagcggaggggcgcgggggtgggggaagggatcagggctccgcgctccgtccgccccacgaccccggcccggcgtgcccggcccccgccccgccccgcgcggcccccggcctcagccccgcgcgccccgacgccccgcctgcgccgcgggcccgagtagtggacggggggcggcccgctcggctcctccgcacccgctccccgctcgggccgaggcgccgcggccgcgcgcccctcctggaggaggaggaggaaggagg

SEQ ID NO: 24534 - DNA, 472 bp, Homo sapiens
  source 1..472: mol_type = other DNA
catatccattccagttgaactgatcgtgaatttcatctccagtgcttagctggctaactttattattattattattattattattattagcctatcagaaaagacgtataatgcaggacaaagtattttttaaccatgttttaaaaaaaaatcaggctatagagtgtagatttaaatattgattgttttttagaccagcataaacgataataaccgatgataacctcaccgcagcatttatcatcttgatcaggcggcggttgctatcattattattattattatattattattattgcagaggtcagccaggtcccccgtcttctgtcggagtccgccggtccgcagcctgcggcagggaggcccgggcacccgcaggtggcgccccacgtccgtgtttgcgccctcagccgagctccaggcgcagctgggaaacccagcgcgtctccccgggtccttgcgcggacaccgc

SEQ ID NO: 24535 - DNA, 389 bp, Homo sapiens
  source 1..389: mol_type = other DNA
cctggcaaatgccagtacctatctccagcatggtacaaaagttaagtattgtatattttctactattttcatatccattccagttgaactgatcgtgaatttcatctccagtgcttagctggctaactttattattattattattattattattattagcctatcagaaaagacgtataatgcaggacaaagtattttttaaccatgttttaaaaaaaaatcaggctatagagtgtagatttaaatattgattgttttttagaccagcataaacgataataaccgatgataacctcaccgcagcatttatcatcttgatcaggcggcggttgctatcattattattattattatattattattattgcagaggtcagccaggtcccccg

SEQ ID NO: 24536 - DNA, 634 bp, Homo sapiens
  source 1..634: mol_type = other DNA
atccggctcgggggcatcctctctctgcgccctggcgggccgagccgcggatcccagccgggtcctcaccccctccccgcccctcccccagatccgcgcggctgggatgtccttgctgccgccgccgcggccccattctgccgcgcaccagccccggggcgccggccgcgcgcagcctcgctatcccacccaggctccgggcttccaggagggtcgtggagccccaagccatgcgctcctctttccgcaagatagcagaggtggcgcgcagcccggcgagatccccagggctggagcgaggagcgctgccgctggacatcctcccggggaggctgctccgacctgctgcgcggcgcgtctgagactggggactgagccaccccgccgccgccggcgccgccgccgccgcccgctccgtcgctgccgtcggtctggactggccctcgctgcgccctctccccggccccggccccggctcggggcgtcccggggctcgccctgcgaccgccgcctcccgcgcgccgcgtcctcccgaccccgcggcggcgacgatgcccgggaggagggtcctgacggcggcggcgcggatggtggcggccggcgcccgggtgtgatgcgagcgtcacggtggctg

SEQ ID NO: 24537 - DNA, 443 bp, Homo sapiens
  source 1..443: mol_type = other DNA
ccgttgcggcgcccagggagggactccctgcacccccgcgcgctccagcccttcccggcgctgccctttaacgcgccgcgcgagcctgtaggaggcctcgaggcccacgggcgcgcccctgccgtgtctcccaagctgagcgcggagtccgcggcgaaacctgcgccccagggagggagggagagggggcgcccagttcctttacgcatccggctcgggggcatcctctctctgcgccctggcgggccgagccgcggatcccagccgggtcctcaccccctccccgcccctcccccagatccgcgcggctgggatgtccttgctgccgccgccgcggccccattctgccgcgcaccagccccggggcgccggccgcgcgcagcctcgctatcccacccaggctccgggcttccaggagggtcgtggagccccaagccatgcgc

SEQ ID NO: 24538 - DNA, 375 bp, Homo sapiens
  source 1..375: mol_type = other DNA
ggtgtgcgccatgccttcgcaaagtcacctgggaaaccccacggcgcaggtccttcccgcgcccccagacgcctccgcgcccagcgtcggcgcagacgctgcgcgtccctggagcggcgtgggggaattggtaccacccaccctacgtggttgcaaaagccaaattagcagttacaatctaggactgtgcacagtgggaaatacccccttggactgtggtcttgccacgttttactgtgttttcagaaaaactggacaacaaagcaggcaccggtttccagccgcgaggcttggcgccctagggtctgcgcaagggtgggcataccgttacttttgctcacgcgcgcatgcgcataaggggtgtggcgacgtgcg

SEQ ID NO: 24539 - DNA, 478 bp, Homo sapiens
  source 1..478: mol_type = other DNA
gcggggccgcgcagtgacgggcttcccgccaggggaccccacccgcaggccctccaaaggccctggcgcgcccccgggccgcgccaccgcccctgctgggcccgcgcagcgtctggaggccgagccagtgctgctgcacgcccgcacgtcgccacaccccttatgcgcatgcgcgcgtgagcaaaagtaacggtatgcccacccttgcgcagaccctagggcgccaagcctcgcggctggaaaccggtgcctgctttgttgtccagtttttctgaaaacacagtaaaacgtggcaagaccacagtccaagggggtatttcccactgtgcacagtcctagattgtaactgctaatttggcttttgcaaccacgtagggtgggtggtaccaattcccccacgccgctccagggacgcgcagcgtctgcgccgacgctgggcgcggaggcgtctgggggcgcgggaaggacctgcgccgtg

SEQ ID NO: 24540 - DNA, 370 bp, Homo sapiens
  source 1..370: mol_type = other DNA
acatgtgaaacctctcgtgtggttctttttctacataaaatatcaaattttaacatgctggaatttttctttattggaaagagggtttggggaagttctcttccagacctagaagagaatctgatttgttcagtcacagaaataatttggacacttttgctttttaaggaaaagatgatttaaaccccagcgcagcgcatttgcttcccgaagtgagttgcgaaaccgttttggactctgcacaggccatccatgccccgggcgcgcagactccgtggagtcctgtcacgctctccgcgcgctgcggcagccgggagattgcaaggatgatggccaaccgtcggaggcccttctactgcgccccgcccct

SEQ ID NO: 24541 - DNA, 335 bp, Homo sapiens
  source 1..335: mol_type = other DNA
gcctcccaaaacactgggattgcaggcatgagccagcaggcttgagcagtccatacagccagcctgtgaaaccctgctgttgattgagtgacacccaaaccccaagggtctgtcagcacgcagtgatcagggcattcagtgaatgcaggccccgggcgtggcggctttcacagcccctcagctgtgacagttcccctggggtggcgccgcctccccctatcctggggaaagggctggtgagaaccagggacgccctgtgggcccagggccagcctgctttatgcgaatctataaatatagacttagacacacgtggtggacgtgttctcctcccc

SEQ ID NO: 24542 - DNA, 469 bp, Homo sapiens
  source 1..469: mol_type = other DNA
ttcttcggacatagcaaaataaccaaatgcatgaagaaatgttcacttatgtgactgcattttctgtttgcattcaaatacttggcactgtcagtgcccaagtaaggttttcaaaacaatgtttggctcagaaacatcacttaccattaagtctgagtcaaatcaatgtattacctttctgctttaaggtcttgcatttaattaggaaatgaaagccacgctggcaagttgcagtgtttttctctctcagtaccttacagtcagccacactcaaagtaatttatttctctcacagatccagagaccagaagtctgaggtcaagtcactgtcagggacacgccatctcaggctgccctaattcagtacgacctcattttaatgaattacatcagtaaaggccctatttccaaataaagtcctgttctgaaatccaggtacatagggttacaaagcagattctgtgttcct

SEQ ID NO: 24543 - DNA, 440 bp, Homo sapiens
  source 1..440: mol_type = other DNA
gactctgtctctaaataaataaataaataaataaataaataaatataaaaaaaattttaagggaggagacaattttaacattttacttttatacatctcttacaactattaaattcatttttaaaaaataataactccatcactccttaaagaatgtgcaagtttaaagaaagtcttttgagaacactctatggaataacaattttacccccaagaattgttgttaagagagtccgtgccccgactccgccgggacttggactccattgccgcactctccggacacgcgctcccgtgtcgccacgcccacatccccgtctaccgtcggggaggggcgacgaggcgcttgtggaccaggctgggagaggtgacgtcaccttccgcacctggctcagggcggaaatggggcggggagagagtgacaccacccctctgcctgt

SEQ ID NO: 24544 - DNA, 312 bp, Homo sapiens
  source 1..312: mol_type = other DNA
cagtgccctgcgacacagcaatacctgcagcatgtcaatgcacaggagacacacagctgtgactctgaggcacttcattttccattgtattcattgtgactaacaaaaagagtctttctggactaagatcatcaactttcttaaactgaactctgcaataacagaaagtgaaacttatctttgtgctttaagagtgtaaaaatttttattaaagtaccagtaaaactaaaagtgcctacttttagttttcacctgacacggaattttgtgtaattttccttccaagtaaagaaggaagccgcagtcacttcc

SEQ ID NO: 24545 - DNA, 360 bp, Homo sapiens
  source 1..360: mol_type = other DNA
ataccccaaaatatggtgaaagaagaaaggaatgacctctagtcccttccctgagttttcgttaactgaacacttgtcaagaccattgtctgctccggggcccagtgttgcgcgagaatccttgtggaacctcaagagggtgtctcagcttcccaaccccattcaatccaattcaactgccctttgcaagctgattttgcagcgaaccttcagagagaagggcccacagccacagtgtgtgggggcctgtcatgtgagggggctgtcacctgagggggctgtgccgctggctcagctctgcctgctggccgggcaggctgggccaggctgctggcttccagtgacatcacatgactttgg

SEQ ID NO: 24546 - DNA, 359 bp, Homo sapiens
  source 1..359: mol_type = other DNA
aaagaagaaaggaatgacctctagtcccttccctgagttttcgttaactgaacacttgtcaagaccattgtctgctccggggcccagtgttgcgcgagaatccttgtggaacctcaagagggtgtctcagcttcccaaccccattcaatccaattcaactgccctttgcaagctgattttgcagcgaaccttcagagagaagggcccacagccacagtgtgtgggggcctgtcatgtgagggggctgtcacctgagggggctgtgccgctggctcagctctgcctgctggccgggcaggctgggccaggctgctggcttccagtgacatcacatgactttggagagagatatttaatgt

SEQ ID NO: 24547 - DNA, 462 bp, Homo sapiens
  source 1..462: mol_type = other DNA
tgagtttcagaaaaagcctctgcctttttttttttccaaaaaacccgttataaaaaagtccttgtcgaacgttttaaacagccaaggtgtttcagctttaataaaagccaccaagccacagtccgcttcttggcctgctagcctctcatttctcgaaatcggagcgccagaagcgacaggagccactccaggcccgcgggctgcgtttgccaacgtaggcctctcgggtcctccggcgccgccctcggggtcccttacagagggcgggaggcgctagaaatcccagacagccctcccgggctgacagcgcctgccttggagcccgacgcgctcatcgaaggtctcttagcggcttccggcaagagctgatgtgttaaaaacaaaaccagtttggcgtccggcgctgcatccactacggagtcgccttggaagccaccggaagtccttcgacggagaaacagg

SEQ ID NO: 24548 - DNA, 544 bp, Homo sapiens
  source 1..544: mol_type = other DNA
tcctcacacagcagtggggaaacctgtaacagtcttgtagatctccagcctggggagcgggaggcactggacatttccccgccccgcggtcggtacgggtgcgcgtgcggcagcggcggcaggggctccccgccctgcccggggtccccggtcgtgccccgccgcccgggccgcgctcggggttgtcgcacgggaaggggaggcgcctgcgccggccgccgcgcagctccggggacgcccggggctgccgccggctcggggccgcagacgaccgcgggacgcgcgagtcccccgtccccccttgcgctcggggagggtggggatatccggtgcctctcccgcgccaggaggaagggggagggcggaggcagcggccggggcggcagcggtccccaggccgggacacccggggtggtgcgcccgggttcgcgggggctgcgccggcgccggggaggcggggggagcgggggggagggcgccggccggaggaggggcggacccgcccgccctagccgagcagagcacagccgagccgagcggcccg

SEQ ID NO: 24549 - DNA, 340 bp, Homo sapiens
  source 1..340: mol_type = other DNA
agatctacaagactgttacaggtttcccgcactgctgtgtgaggacctcattttgcatggaccaaatgtcaattcactttttatagaggggccaaattaaatatttccacacttttctgtgatgaactaagtccatctttacatttttatttaaattgtaaaatttaattttaaaaatatcttgcttttcagttacccaaaaatctgcaggaactaatgtctacttaacttagagcatatgggttttacccggtatcagccagtgggttctgaatgaattcctccaatgtttcttttttttgtcatattgtttagctccgaaaaaaagaaaacaaagcaa

SEQ ID NO: 24550 - DNA, 522 bp, Homo sapiens
  source 1..522: mol_type = other DNA
tgggtaactgaaaagcaagatatttttaaaattaaattttacaatttaaataaaaatgtaaagatggacttagttcatcacagaaaagtgtggaaatatttaatttggcccctctataaaaagtgaattgacatttggtccatgcaaaatgaggtcctcacacagcagtgcgggaaacctgtaacagtcttgtagatctccagcctggggagcgggaggcactggacatttccccgccccgcggtcggtacgggtgcgcgtgcggcagcggcggcaggggctccccgccctgcccggggtccccggtcgtgccccgccgcccgggccgcgctcggggttgtcgcacgggaaggggaggcgcctgcgccggccgccgcgcagctccggggacgcccggggctgccgccggctcggggccgcagacgaccgcgggacgcgcgagtcccccgtccccccttgcgctcggggagggtggggatatccggtgcctctcccgcgccaggaggaagggggagggcggag

SEQ ID NO: 24551 - DNA, 585 bp, Homo sapiens
  source 1..585: mol_type = other DNA
gttcggctgcccacccgcctccgctgcgccctggctgcgtctgacccgcacaatgggcgtattcacagcgcgcagaatatcggtagtgatgtgtgtggctcgcgtagtacgcacctcgggaagcgtacggacccggagacgcggtgtcttccgggagcaccgcggggttgctgcgcttctgcactacctccccggagacccctgcagggagacccctgggagggacctcgtccatgcgcgggtgtgcccggccaccaggccgcaccgaggtcacccgagggtccgtgggcgaccttcgagcgtcccccctccccaatctcaggagccggcggaaccgggactgggcagccctgagcagcagcggcgctggggcgctactgggggacctggggcacgcgcggccaggggccgggggcgagagcgcagggcggccctctgggctgggggcgggtcggggggggactcacctgcccgccccggggtgggggcggtggccgcggaaggggcggagaagcacggggagggcctggcccgccgcccccgccccccggcgcccgccccccgccccccgcccccgtcatgtgg

SEQ ID NO: 24552 - DNA, 665 bp, Homo sapiens
  source 1..665: mol_type = other DNA
gatggcggcgggttcaacttcccgggatctcgcaaactcaggctgtgcgcccgagcgcgcgccggagtgtgggcacgcgggcgggctggggactgcgggagcggcgcggcgcggcgcgagcccggggcgagaacgggggcgtggggttggggggcgccgggctcaccggttccggacgaggaggtctccgtccccggggagcggcaccgggcagtcccggctcagggtgacggcctcgcggaagttggggctcagccgggtcaccaccagcttctgcatgggggaatggcggagccctggaagtccaggaagtggcgggcgtacgacatgtccacgatggcccgggccccggtgggcaccagccgcagcatggcctgcgcctccgcccgctctctgcgccgacgctggccggggtcggcccccgcccgggccgctcggctcggctgtgctctgctcggctagggcgggcgggtccgcccctcctccggccggcgccctcccccccgctccccccgcctccccggcgccggcgcagcccccgcgaacccgggcgcaccaccccgggtgtcccggcctggggaccgctgccgccccggccgctgcctccgccctcccccttcctcctggcgcgggagaggcaccggatatccccaccctccccgagc

SEQ ID NO: 24553 - DNA, 610 bp, Homo sapiens
  source 1..610: mol_type = other DNA
gagagttggagtcaaattaggatttctagtcccataactactgttttaaatggccgggtggcagagccgctgtttgaagtctttccagcgggacttgattcaggacttaatgtattgatcctgcatcgtgacacgcacacgctacgccgtgtgtaatgcacacgcacctgggacccccgaaggggtgtccccatttcgggcgcagtgcccaggtacccgccggcgggacccgcatcccgagcacgtctgtacgtatggatgcgcgtgtgcgcgcggaaacggcctccgggagccggggctgcagcagccttagacctggctgtgtctgagtcactgcaagcctccagactgtcccctcagtgtggcagccatttccaggctgggggaagcctccggcctgcgccgggccgtgagcgcccggccccctccccgtgccgcgcagccccccgagcccggctcgcgccggggcccccgcggggcggacgcgtccggggcgcgcgcgggcggcgcgaggagggggccgggcgcgtggcgggccccgcgcgccctcgcgcgtcccccgcgcccgggcgcagctggcgcggtcggtctagtgcagcgctcggctccg

SEQ ID NO: 24554 - DNA, 309 bp, Homo sapiens
  source 1..309: mol_type = other DNA
taaacgtgattgctgaagaatacatcccacttaggcattcatgctgaagccagcacaggctgcccgccgccaggattgcagcgctgattgctacgcggaggcctggtgggacctccgcaggccgccccgggtctacgtcaccggccgtgaaggggcgctcgccctcgctagctccgacccgcgagagttggagtcaaattaggatttctagtcccataactactgttttaaatggccgggtggcagagccgctgtttgaagtctttccagcgggacttgattcaggacttaatgtattgatcctgcatc

SEQ ID NO: 24555 - DNA, 408 bp, Homo sapiens
  source 1..408: mol_type = other DNA
aaagcacttaaaatatttatcaatatatagatgaattccaacataattatgagtctcagctactcgggaggctgaagctctgtataaaaagatatttaaaaactccaggattcttgattgtgatgtgtttcacagtgtatacatgtgtcaagatgtatcaaactgcacactttaatggtgacagagtaaggtcgctttccccgggctcggccggcctctccacccggcgctcgggtccacttcgtgtaagttagcgcaggcaacaacacacgtgaaatggtccattttaatgcaccagggaaaggaacattaccggggccatgccgggtttgggctccgaggcccttcgcagcactagggcggcgcgagtagggccgccctccgagccatgctgcggtccgaggtgac

SEQ ID NO: 24556 - DNA, 359 bp, Homo sapiens
  source 1..359: mol_type = other DNA
tctaaaactgtaaaaacaaaattgtctattaattttttttagaaaaccggcaactctgtcctccaggctggattgcagtggcatccatgttggccaggctggtctccaactcctgagctcaagtgatccactcacctcagcaccgcacctaaattttttttaaatttaactgggcgacaaaattataaaataaaattttagaaaacctccagtgttcactcactgcttggtgcgcattcaggccgcgcccacccggcatgggggtcacgtctgcacgcgcacctgcgctgtcccaggacagggaaggcccgttacaactgggcggcctccgcccgcccctccaggatggcgaaggcgag

SEQ ID NO: 24557 - DNA, 724 bp, Homo sapiens
  source 1..724: mol_type = other DNA
tctgtataaaaagatatttaaaaactccaggattcttgattgtgatgtgtttcacagtgtatacatgtgtcaagatgtatcaaactgcacactttaatggtgacagagtaaggtcgctttccccgggctcggccggcctctccacccggcgctcgggtccacttcgtgtaagttagcgcaggcaacaacacacgtgaaatggtccattttaatgcaccagggaaaggaacattaccggggccatgccgggtttgggctccgaggcccttcgcagcactagggcggcgcgagtagggccgccctccgagccatgctgcggtccgaggtgacgcgcgcacgcgagttcgcggacacgcacgagacgcccgggccacggaggcgcggggctggcccagggtccccgccaggccgagctctagggctgccggcccggcccggtgacccccgcgctcccctccgtccgctaaggccccgcggcgccgcgcatgcgccccgccgccgcccccgcccccaccgcgcccgcgcccgcgcccaacgcccccaccgcggcccgcgggccatggaacctgccaaggccggcgcggttcgagcgctccggtgcgcgcgttcaggcgcctttcccccgtgagcccggcggcgctcggaccgggccgcccgccgccgggcagctccgcccgcctctagcgccggctgggcgcgcccccgccccggtgcccgcgcgtgc

SEQ ID NO: 24558 - DNA, 463 bp, Homo sapiens
  source 1..463: mol_type = other DNA
tggagaggaaactaactaaatgatatttatttaaacctaacactctaacttgaaagcaaaatggatatgagatgctggtatacaacatgaaatatctcaatcccacttcagatttctaattgtttctgcttccagaggagaagccaagtcaaaaggaatctgggattgaaacaattctaaatgccccacttctttcatgcatgaattgcaaaaagatgtggcaagttttgtttctaccaagaaaactaaaaacaccttttgtcaaataaatgctccttgcatatttaacttatgcagtggccttttaaacagtcagtgcctgcacatctgggctctccgggagcagccatggcagcaccgtaactgaggaattcccagacccctcagagaaagctgctttgtccggtgctcagctttgcacaggcccgtatttgttgtttgcaggagagccccggggagggag

SEQ ID NO: 24559 - DNA, 781 bp, Homo sapiens
  source 1..781: mol_type = other DNA
ttcttgattgtgatgtgtttcacagtgtatacatgtgtcaagatgtatcaaactgcacactttaatggtgacagagtaaggtcgctttccccgggctcggccggcctctccacccggcgctcgggtccacttcgtgtaagttagcgcaggcaacaacacacgtgaaatggtccattttaatgcaccagggaaaggaacattaccggggccatgccgggtttgggctccgaggcccttcgcagcactagggcggcgcgagtagggccgccctccgagccatgctgcggtccgaggtgacgcgcgcacgcgagttcgcggacacgcacgagacgcccgggccacggaggcgcggggctggcccagggtccccgccaggccgagctctagggctgccggcccggcccggtgacccccgcgctcccctccgtccgctaaggccccgcggcgccgcgcatgcgccccgccgccgcccccgcccccaccgcgcccgcgcccgcgcccaacgcccccaccgcggcccgcgggccatggaacctgccaaggccggcgcggttcgagcgctccggtgcgcgcgttcaggcgcctttcccccgtgagcccggcggcgctcggaccgggccgcccgccgccgggcagctccgcccgcctctagcgccggctgggcgcgcccccgccccggtgcccgcgcgtgcgcgcccccgccgccgcgtgtgagtgtgaggtgcgagccgggccgccgacgatgccgcggggccgccccccgaagcccagggagagcaag

SEQ ID NO: 24560 - DNA, 853 bp, Homo sapiens
  source 1..853: mol_type = other DNA
tgctgaagtctgagtcccgcctcccagcgcgggccgggacagcgctcacccctctccctcactgtgtgggtcccaggctgctccaggtcccctggaagctccagatccagatcggggtgtaggtcaggaggaacgcggggcctcattctgggactcccccaacctcctcctcttccaccatcaggaggctgagaatccagagaaagatctctgaccactaaatctgtgtgcaggtgagtcacggctaaacagcaggctttttctttttaacaagacagcacgcttcctgcgccggtcctgcaggagaaggtgcgcccctagctcccagctcccagctcccagctcccagaggagcacctgccagccggacatgggcctggcctgggctccaggggagggagggagtgccttgggaggacctgccggctcctttcgcctccaggccgggctgactctcctcctgcagggccggggctgcgccaagtcctggggtttccagcccctgaggacgcggggagatgcggcctggcacccctcccgcgaggtcgaggtcggggtcggggtgggttcggaggccaagcctccgaacgggaagggtcgacgggccgcagttcggagcccagttcggcagcgggcgaggctccaggccgcccctccgaggtctgaccctgcgcgtgggccccgtgcgccccccaagttccgcgtgggcagagcgggcccggggtcctccgagctcccggggcggcgccggcggccgcgtccaggtggggcgggcccggcgggatcggcctgtgtttacctggctcgcaggaagcccggggaggcggggccggggagctgggtgcgcgcccgt

SEQ ID NO: 24561 - DNA, 415 bp, Homo sapiens
  source 1..415: mol_type = other DNA
taaccgggagggcatgaaagcccccaagatccaaatgtgaatccactgttttattaaatagtattatctacatgttttctttgaagaatccatgacttttctaaactgatgcacggtgaaatttcataaatactttaaaaagacttttaactagaaggccgcgtgtgcagctgtcactgtggcctgagggacgctccagagcccagcacacgaggtggctgtttcctaaagcaggtatctaaaatgggacccattttagtgttccagggtgcacccgggttcattgacttaaagtgaggttgtggggcagaaaaattggagaaacacactatcttgcatgggggaggctggttttaggccgaaaccccgaccccgtgctgaagtctgagtcccgcctcccagcgcgggccgggac

SEQ ID NO: 24562 - DNA, 692 bp, Homo sapiens
  source 1..692: mol_type = other DNA
agagaggcgttctcacggacagccgatgaggaggcccgcgcacccctccgcctcccaccccggcgcgccctggaacgccctggagcgcgcccggcttccctcgcccgcctggcccgcggcatccggcagccccgccttcagcccgccgggcaggtccgcactccgcagaggcgagcgcgctccggttccagccgggaggtgggcggcgacccatcccggcgcggcagccgagctgttttcgcctctcagttgcagcagagaagccctcggaggcgccagcccactggggaggtggcgctgggcgcgcgggatgcgcggggagccttctctgcaggagccgcacagtgcactgctgcgcgctgggcagtgcggggaagcgccgcgggaaggagcggctccgagcaacaggtgcagcacgcagcccctccagaagggtctttccacctgcgcggctgcagccggcggatccctcttcccaggctccgtggtcgcgcagcgggcggaggcgcccgggaaggggaccccagtgctctcgagatcaccgtcccttcccgagaaggtccagctccgggctcccgaacccaccctctctcagaaggtcccggcgcaaagacggtgccaccaggcacggccaccggatccccgctcccgctggctcgcgcctcgggggaagcgcgccgggacccctggcc

SEQ ID NO: 24563 - DNA, 569 bp, Homo sapiens
  source 1..569: mol_type = other DNA
gccgtgtattcgtttattcagcccggcgcggtgggcgcgcctgcagtcgcggcgctttgggggcccgggccacgtagcacgaccctgcctgtgaacgcacagacaccccgcgcggcgaggagggcgcgtggggccccacacagccatggggcgcgcgtactactggcagcgcaggctctggaccgctaaggaggccgcgcgcgcccacgcgtgtccccggcagagcttccaggagacggctgcgaggcccttccacccgcggaccagagcgcgccgggtcgaaccacgacccacgtgcaggccctcgcgcgctaccggaaggccagcctgtggcgcacgcgcgccccgccccgccgatcggtgacgtcatcgggcccgtcacgaggcgggggcggggcctcggaacgcgacgccccccgtcccagccacgtcatcgtgcgccgacgccaaacgagggcggggcctagggacgccacaccttccgcgccgccgctcgttcgtcatcggacctcgccgcttggcggaggcggggaaggcccgcaggcggcgcctcagccggggttggcgct

SEQ ID NO: 24564 - DNA, 480 bp, Homo sapiens
  source 1..480: mol_type = other DNA
gcggtgccgtgttggcagctgagctgcgtgagtggccggggggcctccccccgtcagaagtcgcgcagtcgcgcccataaaacgccccctccgggcggctagggcaggtgagcgcgtccccgggcctccccacgccggcccctgccacagggaatttcctttctgtgaagcgcttttccaaacagcgggggaatgccggccgccccttttccagcagggccgggctccctccggacacccgcgtggactcaggcgtcccgtctggctgcgccccccctccccgggcgcccccctccccgggcgccccccctcgcgccccgcctcttgcgcccctgcccccaggcgagcggctgccgcggcgcggggaggggcgggcgctcggcgactcgtccccggggccccgcgcgggcccgggcagcaggggcgtgatgtcacggcagggagggggcgcgggagccgccgggccggcggggaggcggg

SEQ ID NO: 24565 - DNA, 583 bp, Homo sapiens
  source 1..583: mol_type = other DNA
gaatttcctttctgtgaagcgcttttccaaacagcgggggaatgccggccgccccttttccagcagggccgggctccctccggacacccgcgtggactcaggcgtcccgtctggctgcgccccccctccccgggcgcccccctccccgggcgccccccctcgcgccccgcctcttgcgcccctgcccccaggcgagcggctgccgcggcgcggggaggggcgggcgctcggcgactcgtccccggggccccgcgcgggcccgggcagcaggggcgtgatgtcacggcagggagggggcgcgggagccgccgggccggcggggaggcgggaggcagagcgcggccctgcgtcagagcgagactcagaggctccgaactcgccggcggagtcgccgcgccagatcccagcagcagggcgcgggcaccggggcgcgggcagggctcggagccaccgcgcaggtcctagggccgcggccgggccccgccacgcgcgcacacgcccctcgatgactttcctccggggcgcgcggcgctgagcccggggcgagggctgtcttcccggagacccgaccccggcagcgcgg

SEQ ID NO: 24566 - DNA, 610 bp, Homo sapiens
  source 1..610: mol_type = other DNA
atgccggccgccccttttccagcagggccgggctccctccggacacccgcgtggactcaggcgtcccgtctggctgcgccccccctccccgggcgcccccctccccgggcgccccccctcgcgccccgcctcttgcgcccctgcccccaggcgagcggctgccgcggcgcggggaggggcgggcgctcggcgactcgtccccggggccccgcgcgggcccgggcagcaggggcgtgatgtcacggcagggagggggcgcgggagccgccgggccggcggggaggcgggaggcagagcgcggccctgcgtcagagcgagactcagaggctccgaactcgccggcggagtcgccgcgccagatcccagcagcagggcgcgggcaccggggcgcgggcagggctcggagccaccgcgcaggtcctagggccgcggccgggccccgccacgcgcgcacacgcccctcgatgactttcctccggggcgcgcggcgctgagcccggggcgagggctgtcttcccggagacccgaccccggcagcgcggggcggccgcttctcctgtgcctccgcccgccgctccactccccgccgccgccgcgcggatgccaagca

SEQ ID NO: 24567 - DNA, 763 bp, Homo sapiens
  source 1..763: mol_type = other DNA
aggcagtgcccgcggggcaggccagagggagcgctccgaggagctttggggttgccagccttgacacgcgcacccctcggggcccagggcggcctcagctaagcagcccggctttccggatccccgccgcgcacaggctcgggccgcctagggtgggacccgaactcgccttcccgccccgctcaaggaggtcatctttggaggtgcccctagaaggaccggcgggtttcccgcggggcgggggcgcgcaggcgcaggagaggccggtgggtgccgggcctcctgcagggggttgcaggccgaggggcgcgccacgaacccagcgggaatccctgcgcttcccggcaccgtcgggccggggttcctagcgttggcggcctcgggctgggacctccccactcccggggctccgcagggcgcgcacgtggcgctcgggggtcaccgttgcagccgctttccttgaaaacttctttaaaaaaaaaacttaaaaaaaagcgcagccttaggtacctggtgccgctcgtggggtcccgacgcccctacccccgggtccggaggagcctgcgccgggccgggacccccagggcacaagaggccgggggacccctgcggtcgcgcgcgcgcgagggggcgggggcgggggggacacgagtttatttaaaaactcgtgtccggggagtttatttaaaactcggaagccggcggccgcgagccggttgtttatgtaaacccggaaacgccccggggggcgggggcggggcgg

SEQ ID NO: 24568 - DNA, 762 bp, Homo sapiens
  source 1..762: mol_type = other DNA
gcccgcggggcaggccagagggagcgctccgaggagctttggggttgccagccttgacacgcgcacccctcggggcccagggcggcctcagctaagcagcccggctttccggatccccgccgcgcacaggctcgggccgcctagggtgggacccgaactcgccttcccgccccgctcaaggaggtcatctttggaggtgcccctagaaggaccggcgggtttcccgcggggcgggggcgcgcaggcgcaggagaggccggtgggtgccgggcctcctgcagggggttgcaggccgaggggcgcgccacgaacccagcgggaatccctgcgcttcccggcaccgtcgggccggggttcctagcgttggcggcctcgggctgggacctccccactcccggggctccgcagggcgcgcacgtggcgctcgggggtcaccgttgcagccgctttccttgaaaacttctttaaaaaaaaaacttaaaaaaaagcgcagccttaggtacctggtgccgctcgtggggtcccgacgcccctacccccgggtccggaggagcctgcgccgggccgggacccccagggcacaagaggccgggggacccctgcggtcgcgcgcgcgcgagggggcgggggcgggggggacacgagtttatttaaaaactcgtgtccggggagtttatttaaaactcggaagccggcggccgcgagccggttgtttatgtaaacccggaaacgccccggggggcgggggcggggcggtacgcg

SEQ ID NO: 24569 - DNA, 809 bp, Homo sapiens
  source 1..809: mol_type = other DNA
ggcccagggcggcctcagctaagcagcccggctttccggatccccgccgcgcacaggctcgggccgcctagggtgggacccgaactcgccttcccgccccgctcaaggaggtcatctttggaggtgcccctagaaggaccggcgggtttcccgcggggcgggggcgcgcaggcgcaggagaggccggtgggtgccgggcctcctgcagggggttgcaggccgaggggcgcgccacgaacccagcgggaatccctgcgcttcccggcaccgtcgggccggggttcctagcgttggcggcctcgggctgggacctccccactcccggggctccgcagggcgcgcacgtggcgctcgggggtcaccgttgcagccgctttccttgaaaacttctttaaaaaaaaaacttaaaaaaaagcgcagccttaggtacctggtgccgctcgtggggtcccgacgcccctacccccgggtccggaggagcctgcgccgggccgggacccccagggcacaagaggccgggggacccctgcggtcgcgcgcgcgcgagggggcgggggcgggggggacacgagtttatttaaaaactcgtgtccggggagtttatttaaaactcggaagccggcggccgcgagccggttgtttatgtaaacccggaaacgccccggggggcgggggcggggcggtacgcggaggacgcgcgggcagcgccgggagaaccgaacccctggcggccgcgaccccggctcccgccccggccccggcccgacccgccatgacggggctggaggaccaggagttcgacttcgagt

SEQ ID NO: 24570 - DNA, 582 bp, Homo sapiens
  source 1..582: mol_type = other DNA
aggcctggccgcccgcccgcgcctggggccactgagaccacgcgccggtgcccgccctcccgctgcgcttccgggcgccttgccccagacgggcccaccgcctgcgcgggccgagggcggcgcacctgcccctgcgcttccgcatcgaaggtgaggtaccgcaacccccaagctcccgcggcgtggggtccggggggggacacgaggcggggccaccaggacgccgacagcctcacgtctctgggcccgcggcgcgcaaggcatgccgggacccgtagtcccgcgacgttgcgactcacagtgcatgccggaactcgtagtctcgggatgctgggtctcagctaatggcacgcaggcctgcgttgaacgctgggactcgtagtcccgctgtccgcggtgcacgccgggatacgtagttccgagcgcgccaagaccgtcgggcgacagcggcccgcgttgcatgccgctgctccacggtgccggcgctccgagagggttggtcccaggacggagccggctccggccccgcgcggcgctcgtatttacacgcgcacgtacgcacgtacgcggcgcccttgcgtg

SEQ ID NO: 24571 - DNA, 513 bp, Homo sapiens
  source 1..513: mol_type = other DNA
aagcagcctctgccctttcagaggcagcagtgcaggcacctcctgctctgaatccggtagatgtttccatggagaagagcctcccttccaagacctggtgctccggctggagctggagaggaacatttcctttttgtggatgcaaatgagaaacatccactcactagaggctccgctgcggctccaggatccatcccacagaagcgtccggagtcctcacagctggcgtctcctggggatccgctcaacgagaagtgccttggctgttgactgaaaacccacagtcctgtctccagggctgggggcggtgtgcagagtggggcctgggcctcctgcccccaagggcagctgggtgggctccgtgctccctccgagtggacttggccccggctccaaacccagccgagggtcggctcgctcctggggacccgcggatgtcgcgagggggcgccgcgccactgaaggctgggacgggggcggtgcgcggggcggcgccggagtccgggatgccgg

SEQ ID NO: 24572 - DNA, 733 bp, Homo sapiens
  source 1..733: mol_type = other DNA
cgccctcagtcctcacccgcgcgggccaagagggtcccgggcgagggcagctccccgcgggcgggtgtggggctcggagttggcttggcacgcgaggccggcagcagggcccgggcttcacgcacgcctggcccccgagtctgtcttgaggctcaggagcggggatggggagaggccgccccgcgtttctgcagcgacagcgaccgtggccgcaaccacgataatgacaatggccacggtgacggccgcgcgtccagccggccccccggcgacggccccggcgcatctgctcgtggggcacttgcatcggagcggagacccgcggggggcgctccgtttcccgagaccccggccgcctctgggcgctgcaaactccgagccgggtccccgggtctcctgggtcaggacagagctggacgagactcgtccccgggtggcccgcattcaggacacgcgtgagaggggcgtccggaccccgcgcccccggccctccaggacgacgccctccgcttggatggccgcgcgccgggacatgggcgccaggcctgagggaccggccccgcccggctggtatttcccgaccgggcgggaggagccacgcgcccccaccgccccgacagccccggctcccggccccgcctgcgcccgccctgcccagcgcgctctaggacaccgcggcgcctccgcgcagctccggcgtgggcggggcccggcattgtgacgtcacggggcg

SEQ ID NO: 24573 - DNA, 739 bp, Homo sapiens
  source 1..739: mol_type = other DNA
tcacatcccctccgggtcctcgctgggcaccgtggcctggactcaccgcctggcctttagggttcaggccacccgccctgaagtaacctggcgggaaccgccacgccacagcggtggtgctgggtggctgatggagacaccagagcttccaggtgtggtcactgggctgtgcccgctggggtgaccagacatagccctgttcccacagcgctgcacaggggcctgggaggtcacccacaaggtggccagggaaggcccggcgtggtggcccaggcctgcggtcccagcactttgggcgaggcaggtgtgcccaggaattcgagaccagcctggacctggtggcgcgcgcccgtggtcccagctactggccaggccgaggcaggaggatcgcttgggcccgggaagtcgaggctgcggggagccatagtcgccactgcaccccagcctgggccacagagcgagcccccgtctctgagaaacgcagcaggggtgaccgaggcccatgcactgcccgtgcggagctgtaggtggccggtggcgcccacgggccctcttgagtaaggcggctccgcccaggccgtcccggggcctcggctcggctcggctcgggaagccgcagagcctgggggcgcggaccagtcctccgaggcggccgctcggtgacattgcgtccctgcaggtgcagcgcccgcctctccgctccggccccgcctccgccctggaacgcagcgcgctccgc

SEQ ID NO: 24574 - DNA, 289 bp, Homo sapiens
  source 1..289: mol_type = other DNA
ttctgaaactaatcttctgaaaaatacgtctggtgacaagaatcaaaataaacacacattgtcactttgttttcttaacgagctaggccgcatgggcgccggatgagcggccggggacaccgcgcccagggccccgctcatcgcggctacggaacagggcccggagacccgcgcgggagcgccacagcccgcccgccgcagcccacatggcgcggcgccgggacccggagcgagcagggactcacgcctggcaggcggcgtgtgtgggcggggccacggcgcggggcgg

SEQ ID NO: 24575 - DNA, 465 bp, Homo sapiens
  source 1..465: mol_type = other DNA
aaaagagaaatattaacttatttctctttgagacttgaccccgggaggcctgcagctgcacgtctcaaaaaaaaattttttttctttataaaaagacaaattaaaaaacctggttacaacaggcagctcagcagccggcctgatggtgacattaggaatcaagtttcacaaatgaaacgagccgcagtgccgggcattccgggcctttctggacgtccccatccgtggctggaggacagcccgggcggcggcgggcggcctcggggcgggagcgtgggggcagggcacggcgagcccggggcttctcaggaccaccaggccgcctggacgctggggagaacggcgctccacggtgcccaggtcgccgccgctccacccggccaactacacgttcgcgcggcgcctatacgcacatgccgtcagcacgcacggcgctagcgcgcgcgcatgccgtcagcacgcacg

SEQ ID NO: 24576 - DNA, 206 bp, Homo sapiens
  source 1..206: mol_type = other DNA
tggggactttctctcagcctcccgccgacagcggccctgcccaggtctccaggcttcgatgccttcgttgctttgtgcggcgtacgcagcgccaggcaaccaggcggttcccacgcttccccgagtggcgcgcagcccacgcggcctcccgccggccgccccgcgccgtggccccgcccacacacgccgcctgccaggcgtgagtc

SEQ ID NO: 24577 - DNA, 657 bp, Homo sapiens
  source 1..657: mol_type = other DNA
agaatttaggtaaaaattatgaggttgaattaaaaccatcttcgttatcaattaaattctgaaattttttaagatgtccagtaatgtaacatctaagtttagctataaacagttatggtatcataacctcttaaattagcttatgtaactttttgacaacataatgcttattttctccccaaagaaaaaaggtttggtatgaaagtccagtgagggtttaaaagttggcaaaactcttacctgccattggcaacatggagttttgatcttttcaaaaaaaaatgtactgacattaatgttttctggaaagtcatatcttttatcaaattataatatggtaatatccattcagtttttagtgtgtgtgtactgtaaaagtttatacaatatatggctcattctgaaaaataaatacatcacgtttccaaaaaattactgaattattcatgtgaattatatctcaacaaaaactttttttgagaaaatatttactggcagtacttttaatcttggagggttaccaggtaaaatttaaaaggatcccggtttataaaactttatcttaatgaaagctgaggcagctgagagtgatagctgctgtatccagccctcccccagccggagactccaagttggaattcctcatgaggagcacct

SEQ ID NO: 24578 - DNA, 427 bp, Homo sapiens
  source 1..427: mol_type = other DNA
gggcgcctgtagtcccagctactcgggcggctgaggcaggaggcagtgagctgaggccgcgcctctgcactccaccctgggtggaaaagccactttagcacttatgaagtcttagttctgggttgtgctgtgcagaggcagatgtctcactgcaaggcgggagtcctgtggcatctgcatgtacctcagtacagaggtacaggagatgacttcctctgacccactcagtgagttgtaactgcaaaccaggtacttcacctggggacatggtgcggcagcaggaggtggcctccagcagcatgccagagccctggcttgggggcggggtctcaggtttccctgactccagacttctcagcctgccgagcgtactggaagacaacgctctctgctgagcagaacgcacacatggaggctgtcctgcaga

SEQ ID NO: 24579 - DNA, 496 bp, Homo sapiens
  source 1..496: mol_type = other DNA
gcttatttcttactgtttaacaaaagcaagaaaatgagagattaaagtgttgaaacagcattgttttctgatttttaggtatcagaaaattcagttgagctccaactcctgcggtcacccaagatttagggtcaccgttttccatagctgtgtaccaaagatctgtggtcactgtattatgtgatgtgcatgatacaaatatcacttctgtgggcgtgtccactgggcacaggaggacaggctgttagtgcacagaccctggagcccaaggctacggcgatgagttcagatcaggttatttgtacagatcgcacaagttgcgttgagaaaagtcaaggcaattgcagttatgatgcattttgcattgagtaatacgataagagtggcacagcctcccgagtagctgggactacaggtgcctgccgccacgggtctcgattacaggcgtgagccaccgcgcccggcctctcactcactgtcacgcctctccactgag

SEQ ID NO: 24580 - DNA, 324 bp, Homo sapiens
  source 1..324: mol_type = other DNA
taacactaatgatttcccttgctagaaaaagttccctggggaggacgtgaacaggcttgtgggccattgccatggtgtggcatcccatgcttttgtcccccaaggcacacaaattctgtggcaaaactgaagcattttgcaaaactaccttagaaaccagttaatggttagttagttaattcaactaacgcttaactggtttcttcataaatttgactaacaagtctaaaatgtagtttttaaaaagcctcacttcgttatcagagaaaatgtgttatgttaaagtaacagattgtgcaaagtctgatcaaaagctctgcagtt

SEQ ID NO: 24581 - DNA, 574 bp, Homo sapiens
  source 1..574: mol_type = other DNA
cggtgggcggaaggcccagcctgggcacggcctctgccccgcggtggctggagtgggcctcagggctggaggctggcggcgggttgcaggggctcggcgctggaaggagacgtggccttgtgctgaaaggggcacgtgtcctgcagacggcttcgccaagaagctgcctggaacagcctgggggaggcgcctgcgctgccctcgtggttactcccacgtgctctggggcacgagggcgtccgccagaggcctggggactccacggaagtttccactaattttgtggaataaattattattgctacacaattgataaacacctgtgcaaaaatgaacttttaggttaagagtttatacaaatgtatgttctcaagagaaggtgtgatcactttcccacaggaatgcaggagaccaggatatgccaatcatggcacacttgtcccagttctgggagccaaagttttgtcttccaatggcaaggcagcattaatgtgggcggggtcaccactcctggagctgccactagctccagaagtcaaagctgtggtgagtccacgtgattagtcacatggtt

SEQ ID NO: 24582 - DNA, 301 bp, Homo sapiens
  source 1..301: mol_type = other DNA
agttgaactggcccgaggcactggccatgcttagagaaaaaagttgcaaacgcttttttttttttttttgaggcagagtctcactctgtcgcccaggttagagtggttggccaggctggtcttgcacagtgctgggcaccgtgcccggcgcaaatgcatttattgcatacaggacggtgcacctctgtgctggccgagggaccctgattgcggcaccacagagccgaagccccgcctggagcaggacagctccctcaagagttacctgcccggagtacgaatgctatgccccggacacaga

SEQ ID NO: 24583 - DNA, 562 bp, Homo sapiens
  source 1..562: mol_type = other DNA
ctgggggaggcgcctgcgctgccctcgtggttactcccacgtgctctggggcacgagggcgtccgccagaggcctggggactccacggaagtttccactaattttgtggaataaattattattgctacacaattgataaacacctgtgcaaaaatgaacttttaggttaagagtttatacaaatgtatgttctcaagagaaggtgtgatcactttcccacaggaatgcaggagaccaggatatgccaatcatggcacacttgtcccagttctgggagccaaagttttgtcttccaatggcaaggcagcattaatgtgggcggggtcaccactcctggagctgccactagctccagaagtcaaagctgtggtgagtccacgtgattagtcacatggttaactctcacgagagtttgcacagatgtggaaaggagctggcagggcagttcagggagtcagggggtccaacaggggccccccactgccaccccagagcctccagtccatctttagccaggggccccggggggcctgtgggaagtgccaggggcccccaagcacac

SEQ ID NO: 24584 - DNA, 459 bp, Homo sapiens
  source 1..459: mol_type = other DNA
ttgtagattacaattcatagtatacttcaaaatgattttttaaaaactgtcttgtcttctgaactttctttttctagctgccttagaaaaagtctcctttcgcatcaggcaggtgtagagataggctatctaataaagcgggctggagtacagtgatgcgatctcggctcactgcagcctgctgctctaagcctatttgataaaattagcattcttcacttgaatattacccaaaacaattcgcgatgctcctttccccaggctctgggattgtggacaggagggcgcgcacccactggcgatccgacgcggagctgcagcgtgggggcgtggtggggtcctccggagcgcgtcctccggggctcgggggcggggcggggcgcgggcgcgggcgccgggaggtggggcggcgcgcgccggcgtcccccgcgctcctcccgcgcgcggcccctggagtcc

SEQ ID NO: 24585 - DNA, 610 bp, Homo sapiens
  source 1..610: mol_type = other DNA
cactcctgaggcctcccggatggtcccagccgaaaggacccagtgtgggtcccttgggcctgggtttccctggctcaggtgccctcaatccccaggcaccctcagctcagggctccccacgacctggtgggggcacagaccccggcgccatttcatggggttcccagctcctggcgcccccgtgctcttctgtggtgcctgggcacagggctgcgcctggacaccctacgccgtcgcaaggtgggtgccgaggaactcgagcttctaacgtgccaggggtccaagaggtgcctaggcgcacacggcgcggctgccacaagtcgggaaccgtcccgcggggccggtcccgccgctgctcgtcacgtccccgcccggggctccgccggcccgacccgcggggaacctccagcctctgaggacctcacgccgctcggagacccgcacagcccgggtcagggccgggactccgggcggacgaggtccccgtggcgcccgcacgctcgccccacccgctcttttgggcgccgcggccaggcgggggcagagtccgcgcggtcccgggtccgccgcgccccgccccccccgctgctcccctcccctcctctccgcg

SEQ ID NO: 24586 - DNA, 310 bp, Homo sapiens
  source 1..310: mol_type = other DNA
tggaaatttaaggtgtggcgagtccttgtaaacgccctgaagacaggcgttagggctgtctccttcaaacctcaggatcagaacgtgcacgtgtttgcagaaccaaatggccctggggtcaagcctctccggcgcggggcgggtggcccgtcgccctgggcctacaggaccacgtggtccccacgcaggtgtgagctcgccagaagccgccggccacgctcggctgcgcgcccgcgcccgcgcccgcgcacctactacgcgcccggcccccacagccaatgagtgcgcggcccctcatccggggatcccg

SEQ ID NO: 24587 - DNA, 629 bp, Homo sapiens
  source 1..629: mol_type = other DNA
cccggcaatcagccctgcttggggcggggcaggtgcaggggagctccagccaagtcgggccaggaggctgggtcccggggtgacagtgacaccccgttttctggtgcagaaggaaccgacccttgaggggcctgggaggctgaggcccagagctcagatactgggctccccagaagtgagggaagaagggccgcgaccctccagcccgctcccctgagttacagccggagaaactgaggccgggacaggccgcagagcaggggcccggctccgctcctagccccgccccccccccccacccccgagccggcactcctgggtttgagataggggtgaccctaaggtaccttccgcctcccggggcctcagtttccccactaggaaataggggaagcttctccagctcggtccttctgggggttctgggttcaaagccccgtcccgccttggctgcgggttccaggccagcgcccggtgtcctcggagggcctcagtttccccagcctcgcggccaggctccgggacgaggagggccggggtcccaggggcgcagccccccgcggctgcgcgctgggccgggcggatgacatcaccgggccggggggcgggagggagcgggcggagcggga

SEQ ID NO: 24588 - DNA, 302 bp, Homo sapiens
  source 1..302: mol_type = other DNA
cagtgagccgagatcgcaccagcgcactccaggctgggtgacagagtgagactctgtctcaaatcaaaatccattgtggtttaaatctcggaggcatctgggaggcagtgaggacggctctcacctccccgctgtcctcgccgtgccccagggcgcagtgaatgcttcttggctcagagctgaaactcccagtttccccagcggggcgccctcctgctgcaaggctgccctggggccggccctggccccagctgcccagctctgccggctcccgggagacgcactctgctgccggcctggac

SEQ ID NO: 24589 - DNA, 536 bp, Homo sapiens
  source 1..536: mol_type = other DNA
cggaacagaggcagcccctactcgggctcccaggctccagccaggcctgctaggtgggcggcctctccaggctcagagatggggtgacttgtcccacgtcctggagggtctcacagctccaccacggccaggagacaggcctgcagctccggaacgggggagggctgctctccaccgcccctgtgcggccgcccgggaaagtgcaggcgggccgggcgcggtggctcacgcctgtgatctcaggccgaggtgggcggatcacctgaggtaacgcatgcctgtaatcccagctactggagtggctgaggcaggatgagctgagatcgcaccatgggacccgccgtcggggtgggggcggcgctgcccagcctctgtccctgaggcttggagtggccccgggaccccgccccatcggcccccagcccctgcctctctgccgcctccagggtcgggggtcaggccaggaaagccccttgggaagcccccggggagcagctggagcggggtcgccgggctgggcgcctctatttaagcgg

SEQ ID NO: 24590 - DNA, 488 bp, Homo sapiens
  source 1..488: mol_type = other DNA
tcattgccccctgcccggggcaacgcccctgagggacggggacggcacccagcaagctctgcccggggcggggaaagtggtttcctcgggtcgcctggggaaacacacccagaggcggcttatggaggagcctggaggtgccagcccgggggccctggagagccatggcagagtttacagctctggaggctgcggtgtcagaaagctctggggggcgcgggatgctcgcccgtgtggccgccaataggggctcagcgcagctgcagcggagctggggagggggcttctcccacgaggtgagctacgcactcagacgttgactgagttaggccaggctgagcgggggccgggcgcggggctgggtccagcagtcctgggcaggtccagccccgcgcatgctccgtcaggcttctctgctaaccagggagactggttgatggcaagcaatccggctttgtgccgagtctggcaaatagcgtaccctggcc

SEQ ID NO: 24591 - DNA, 425 bp, Homo sapiens
  source 1..425: mol_type = other DNA
gagccgccgcgcccggcctaaatttatttatttttgagacagggtctgtcacccaggctgaagagcagtggtttacggctcactgtgtctttattcatgaagaccaagaggctctgacacaggccacagcctggatgcaccttgaggacgtcaggtccctagagccgggcgcggtggctcatgcctgtaatcccagcactgggaggccgagccagcctggtcaacatggtgtcccactactcgggaggctgaggccggagtatggctgcagtgagccgagatcgcaccaccgcactccagcctgcagagcgaaaaaaaaaaaaaaaagtgttactttgtcaggtttgagaaacactttctagcggtgggcggggctgtgaccgtcacctcacctcccccacaggaagcgcgtgtggggaggctcg

SEQ ID NO: 24592 - DNA, 717 bp, Homo sapiens
  source 1..717: mol_type = other DNA
cgagactctgtctcatttaaaagcacagccaggctcgggctcagcttggggtgggggctccgtggggctggcgcctctcccgggtcaggtgctgagccgatgctggccggcgtaggtggggggcaggagcaccttgccagggaccagggaagccccacttctcagagctcccgctgtcgggggaaccgaggcagcgccgcgcctggaagccaggtctgcggatcccgcctcgcccagcgcgaaggacagacttcgcgcccgtcccctgcacagacggggaaacggagacggggacgcggggtcgcgccggatggaccggccctgcccctccggtcccggtcaggaccccgcgccgcgccccgttcaccgcccgcggccccgccccgcgccggcacgggggaccgggccggtgacggcgcagagcagccctgcccgcctccttgcgcacagcgtccgcggtgctggtcgagcagggggcgacggcggcggcctcggggatcggaagagcccggggctgcgcgctcgaaccctccctcccggcggaggcgctcggcgccgtaggcgggaccggggccgggactccacctcccggcgtcccctgcggccgggcgcgcaggcgcaagtcggacctggccgcggagcgcaggcgcagtcggggccaggcggtgcgcgcaggcgcagcggggggcggggcgcgcgggcccggccaaggcaagc

SEQ ID NO: 24593 - DNA, 612 bp, Homo sapiens
  source 1..612: mol_type = other DNA
aaatttctcagcgagagaagggggctgcctgcgtgggatgcaatctccagagcacacgggacaaaggaagggagcttctgttcctctgtcctttcccggttggctaaaacttaaaacttttttaaaatagggtaaaggaagttgagtttctgaagaggaacttacttgtcccagtttatactaagaaattattcattttctgagaggaggaggtcacttcctcccacctaatttattaatacgttcatatatatatatatatatgtacatttttaaaggcagagatgtgcgtcttcgagctcccgggctcaagcacctcccaaggctctgggagtacagacgtgagacagcggccggcccgtgtttaactcagataaaatctgggtaacatctgcgctcattgcaactttgaaagcaggaattcctagcaacgccgggtcacgtgcgccgccgcccggattccgtagcgtgagcctgccggagccggcgcgtacatgcgagcgtgtgcgcgcgtgcgcaggcggggcgaccggcgtccccggcgctcgccccgcccccgagatgacgccgtgcgtgcgcgcgcccggtccgcgcctccgccgctttttatag

SEQ ID NO: 24594 - DNA, 227 bp, Homo sapiens
  source 1..227: mol_type = other DNA
cacagcaggcgctcccgcctctggcctgctgccccggctgaacgacacaggtgggtgctcctcctaggcaggatcacgcggagaccagggcaggctctaggctccggctcctgcccctgagggcttgccagccggcgtctgcaatcccagcgctttgggaagccgaggggcgaggatcccagcagcaggaggaacccggcgcaactcccggcaggcggcgcgggcgc

SEQ ID NO: 24595 - DNA, 751 bp, Homo sapiens
  source 1..751: mol_type = other DNA
tagggacagaggcctcatgtcacctggcaccaagcagccggcttcggcccagaagcagagcacctgtctcggactggaggcactgggggcacagctgcacccggagtccgaggggtcgcaaccccggggcagggggctctggtacccgtttgggtctccctgtgaccgacccccgccgcacggctccccagggcactgtttgaggggtgggtgggaaccccacaccctcgggggcctcagtttcctcaaatgcagaccagggagccagggcccacaggcgacccagcaagggctcctgttcgtcgtggaagtcttcaaacctcagaaagcaaggaggcgctggccgtggcggcctctcccgtctcccaggcccgcgtccaccctccccgcgccggtgccctccggacagaggtggaagccgcggcgcaggagaggcggctccggccgggcagcggggcccggtgaccttgggcgcgtccttacacgtcgcgggcctcagtttcccctcctggggagaggcccgcgcggggctccgaggcctcgggccgcgtgaccttggggcgcccccgaccccgcggcccgagtttcccggcgccgagcggaggcggcgcgcggggagggggcgcagccgaggcgggtctcccgcccccgcccctcccccgcccctcccccgccgcgaggctccgccccccgcggctccgccccgccccgcccccgcctcccccctccctcgggctccggccggcggcgg

SEQ ID NO: 24596 - DNA, 536 bp, Homo sapiens
  source 1..536: mol_type = other DNA
cctggggctgtggccgcagggccaggactgggctgctgggagctgtgtccccacagcggaggtcgccgcccctctcagtttggggcccagcgcatggggcaggcagaggaagggtgggggccagccgccttgctgggtggttccccgtgtgggtgcgaatggggccgccccattcctgccgcctccgacgtgccccgccagccggccaccgacaggggctggctttcgggaatgcggggagagaagtcccacgagggcatgccccggagcctggctggtcccacggctgacgcacgcggcaggacctccccgaggtcctagcccgcccggggactcggctgactcacggcgcggaggccgagcgcggagtcccgcacggccgcgcccctgtgcacctggcccccgcccccgagacgtcccattggccggcgccctagcctggtcccgcccaagtggaccccgcccccgccccgaggcaccccattggccggcgtccccgccccagcgaacccggccccgcccccgaggcgccccat

SEQ ID NO: 24597 - DNA, 342 bp, Homo sapiens
  source 1..342: mol_type = other DNA
ctctctttccccaggcagagccagagtcaccccctgtccaatctcatgggactggtcctagctactcgagaggctgaggcgcgcttgaaccctcggcaggcggaggttgcagtgagccgagatcgggccattgcaccccagcctgggtgacagagtgagactccgttctactgattaaatttggaagcagagaggcgcctgggccgtcagcccctgtctgaccccacgggtcccagtgaggcccagacagcgccctgagccccgggtctgcctgtattccgcagcgctgagggaataggcgctgctgcgggtttgctgcgcagctgacctgacagtgcatcg

SEQ ID NO: 24598 - DNA, 545 bp, Homo sapiens
  source 1..545: mol_type = other DNA
tgaaccctcggcaggcggaggttgcagtgagccgagatcgggccattgcaccccagcctgggtgacagagtgagactccgttctactgattaaatttggaagcagagaggcgcctgggccgtcagcccctgtctgaccccacgggtcccagtgaggcccagacagcgccctgagccccgggtctgcctgtattccgcagcgctgagggaataggcgctgctgcgggtttgctgcgcagctgacctgacagtgcatcggtcgggagagcgctgcaccgggcagcgggcgggggagagggcgcctggcgagcccgcttcgggaggggaggagggcctcggccccgccccgcgcacgccccgcttttggccccgcccccgccggaagccccgcccccgcttggagccccgcccaacggccgggcctagtttgtctctcagcggccaccgtcgcccgggccgctgcccgccgagtacgcagctttcgccgctcccgcgcccccgctccgccccgcgtgccgtgcgtgccgtgcgtgagcgtgcgcgggc

SEQ ID NO: 24599 - DNA, 372 bp, Homo sapiens
  source 1..372: mol_type = other DNA
gaaagccccctcgggcgcagcgcctccaggtgctggaaacagtgtttgctgctgcccaggggccccaggcgtgcgcgcgcacacacaacacgcagtggcctccctgggggccgtggctgggcgaggtgggtctgtcccggccgcacccccccacccacaggccggctccagcggccaggtggacgggtgcgcggcccgcgctgtgagcaggtccggaaggggacccgggcgctcgcccccaactgccccccgcagcggccgggcccggcgcctgcccaccccgcgcgggacacggcctcgcccccgccactcccgcgccgcgccccgccccgcgccccgccccgcccgcggcccgcgggacctttataggga

SEQ ID NO: 24600 - DNA, 369 bp, Homo sapiens
  source 1..369: mol_type = other DNA
cctgtagttccagttactcgggaggctgaggaacgagaatcactcgtccggatcccacagaacgtcagtgctacaggctggggtgcggtcactgcctcatcctcacctcctagcatgaggtctggtatacactacttctgtgatctcattcctcgctgtccccacagccctgaggtcggccctgggggaggcgagctgcgggtctcgagtgccgctgtgacgactaggggacaatgattattatcaacatgattattaccagcacgcccgcctgggctccaggcgttgctggtggggcctcccgaccacaggccacagccaggctccccctttccggccgttggctgagggtgggagccacggcccgaa

SEQ ID NO: 24601 - DNA, 950 bp, Homo sapiens
  source 1..950: mol_type = other DNA
tcgctccccaggccaggagggccgtccagcgccccgccctccccgacgcctcctgggggaaggtcctggcagccccagactcgcgcctggcaagggcggaacaccccaggctgacgcagctggggcccctccggccttcccagaagagcgcgtgcatcgggagcagacgtcagccagctgcaaggaggagcggcccggggctgcgtagctccgctggaccccgattccgggcagagacccccccccgccccggcccgcgcgcaccgagcccagcccccgccccccagcgcaggcgcagcgcggacctcggccccaccggtcccgcgcccggaccctgagccctgcccctgggaacccgagggccccgactccgacgaccctgacctgggacggcgcccccgcctccgccctgcagaaggggcgcagggaggggccccgaggccttcgcgcggccccacgcccgggaccctcccgcgcccggccccacgcgcgtgtcctctgtccgcagattcgtgcgacggcgtggagtgcggcccgggcaaggcgtgccgcatgctggggggccgcccgcgctgcgagtgcgcgcccgactgctcggggctcccggcgcggctgcaggtctgcggctcagacggcgccacctaccgcgacgagtgcgagctgcgcgccgcgcgctgccgcggccacccggacctgagcgtcatgtaccggggccgctgccgcagtacgggaggggcggggcgggacctaccggacctgcgcgtcatgtatcgaggctgctgccgcagtaggcgggggcggggcctggggcgggaccacccggacctgagcgtgacgtatcggggctgctaccgcaatgcgtgagggccaggcctgcgggggcggggcctgctggaggggcggggcctgctggaggggcggggccgctgccgcagtgcgtaggggcgggg

SEQ ID NO: 24602 - DNA, 218 bp, Homo sapiens
  source 1..218: mol_type = other DNA
tgctgggatcatttctcccaccacaggcctggggcactgcagcgcccatccgcgtcctgtggggagcagtcactgcactgaggctctgcctcctgctggccccgccccctgtgcctcggcctcgcctcccaggcaatgtcggccccgacgttggcctgaccccttcctggactcagggacaggggaggagtgaggtttccctgagggcgcccctgccc

SEQ ID NO: 24603 - DNA, 177 bp, Homo sapiens
  source 1..177: mol_type = other DNA
agacaggattgtctgggctcagctttgccgggcactgggccataaggcctcagcgggcaggggcgccctcagggaaacctcactcctcccctgtccctgagtccaggaaggggtcaggccaacgtcggggccgacattgcctgggaggcgaggccgaggcacagggggcggggccag

SEQ ID NO: 24604 - DNA, 495 bp, Homo sapiens
  source 1..495: mol_type = other DNA
gtcacacagctttagctttgttaacctttgctaatttatcttattgtcttaaatgctaaaatgaatacacattcattgtaagaagtttggaagaatctttccttcctgcccaccctggacccccatgagtaggtgtgctggggctggtctgcagtgttctcacgggaaaccagttggggaagacaggtcctgcctgtctcctgctgtggctccccagtgctctgaggacaaagcctggccatgggggccctggggccgattaaattccagccccggggaccaggctcagctcccagccagggcacagacagcacctgcggttgtctccgaggcctggggaccctgcgagcggggccgggggtgcagggagctgtcagctcctcgcagcggcctccccagggcgagggtcccggctctggcccaggagctggggaggggcgggacttggtgacagccgggtcccagcaccgcgcccagacctaggcccttctcagg

SEQ ID NO: 24605 - DNA, 654 bp, Homo sapiens
  source 1..654: mol_type = other DNA
gacccccatgagtaggtgtgctggggctggtctgcagtgttctcacgggaaaccagttggggaagacaggtcctgcctgtctcctgctgtggctccccagtgctctgaggacaaagcctggccatgggggccctggggccgattaaattccagccccggggaccaggctcagctcccagccagggcacagacagcacctgcggttgtctccgaggcctggggaccctgcgagcggggccgggggtgcagggagctgtcagctcctcgcagcggcctccccagggcgagggtcccggctctggcccaggagctggggaggggcgggacttggtgacagccgggtcccagcaccgcgcccagacctaggcccttctcaggggtgccccggggcggggcgcgcggggcggggggcggcggcggcgcagccggcaggaggcgcagcgcccgctcgcagcgcggggaggtgggaggggcgggagggagaggggagcgcgccggagacgcgcgcgcccagcccaccccccgcgcccgccgccgcccagctttgcgcggggcgatgcccgagccggtgccgccgcccccgcgccgcgcagccccggccgccaggccttagcccgccccggcccccgccaggccgcgtcgcgcgccacccgc

SEQ ID NO: 24606 - DNA, 354 bp, Homo sapiens
  source 1..354: mol_type = other DNA
gctccacaagcagcccctctggcgtaggtcaggacagagccccagcctggggaactgaagtccctaggcccagttccaggaggaccatgggcgcctgagggcctctgcgtccccattcggctcactgcctgggattataatacccgctaaatgccaggctggcctcccagcagccctgagggagcccgggcgtgatgttcccccacgtcccggaggagacaaacctggttagggggccatctgcccagaaggcacggacgggattgggactcagcccctccggccccccaggagacacaggccactgtgcacgctgagctgctgtgtggccgacacctgctgaccctctctgag

SEQ ID NO: 24607 - DNA, 635 bp, Homo sapiens
  source 1..635: mol_type = other DNA
ggggagggggaaccccggggacatgcccccacccgggaggggccggtaacccctgggctacggggcgaaccaggggtcattgacctgccccctgcacagggcagggaccgagtgagccactccttgtcccgaggggaccccaggggccgcccccggcctcttctgcttggaccagggtcctgggtgccagctctactgggcttggagcacgtccgggctgcccccagccccctctcattggaagtggcaaggggcttccctcctgggggcagctacactcgtcaacttggtccctgccctagggacctccagcctggtgcccagtgctcaggccacctctggtccagtcaccacctgcagcctcggcagggcaggtacaggggccacctcggatgggagcctgggtccctgcctccgctctgcccctgggtggctgggaggagaggccctctcgggggtgacctgggcgtcagccgtggaaccccctcctcctccctggaggagtccctcgagccgcgtgattttcccagagaagcaaataaacagcgtgaacagccccagttcctggagttcttgcctttcaacctggcgaggaaggcgtggccaggccagggggtggggcctgccggccttgg

SEQ ID NO: 24608 - DNA, 435 bp, Homo sapiens
  source 1..435: mol_type = other DNA
tcggctcactgcctgggattataatacccgctaaatgccaggctggcctcccagcagccctgagggagcccgggcgtgatgttcccccacgtcccggaggagacaaacctggttagggggccatctgcccagaaggcacggacgggattgggactcagcccctccggccccccaggagacacaggccactgtgcacgctgagctgctgtgtggccgacacctgctgaccctctctgagcggtgctgagaggcggtgggagtggctcctcggggccacctggaggccctgggggtggaggggcagccggcagcgggcacggtgcccgcccttgcccagcatcccaggtggggctggggggagggggcacacctgcctcccctgggtggggcctctgttccctggcaacctggcgggcagggcggagctgggaggcc

SEQ ID NO: 24609 - DNA, 597 bp, Homo sapiens
  source 1..597: mol_type = other DNA
ggagcccgggcctcacccgtggactgtgtgtggcccggacctcagcttccggttggccgcggactgtgcaaagtccaggcctcagttccccagctgtaagcgggcggccgcccactgtacaaggtccgcggactgtatccaggccggcgggcggccaaggactgcaaggtccaggcctcagtttccccacctgtaggcgggcggccgcggactgtacaaggtccccgcggactgtacagctgtaggcgggcggccgcctactgtataaccccagctgtaggcgggcggccgcggactgtacaaggtcccagctgtaggcagccggccgcggactgtgcggggcccggacctcagtttccctccgcagtcgggatcgctgttccggggcgaacaaagaacggtcgggggtgaccccggatcatggcgcgcccgcagtatctgtggccactgtggaaacagccctggcgtgtccgggacgcgacgcggcctttccctccccgcgcgatcacccagatgtgagcgctcagttttggccatgtgcccacaaccaacatggagccctgagggtttcctgcccgactgccgactccctttgcc

SEQ ID NO: 24610 - DNA, 727 bp, Homo sapiens
  source 1..727: mol_type = other DNA
ccaggcctcagtttccccacctgtaggcgggcggccgcggactgtacaaggtccccgcggactgtacagctgtaggcgggcggccgcctactgtataaccccagctgtaggcgggcggccgcggactgtacaaggtcccagctgtaggcagccggccgcggactgtgcggggcccggacctcagtttccctccgcagtcgggatcgctgttccggggcgaacaaagaacggtcgggggtgaccccggatcatggcgcgcccgcagtatctgtggccactgtggaaacagccctggcgtgtccgggacgcgacgcggcctttccctccccgcgcgatcacccagatgtgagcgctcagttttggccatgtgcccacaaccaacatggagccctgagggtttcctgcccgactgccgactccctttgccctcacggcccaggcgggcgggtcctgcccacttgcaagatggcggcagcctgggcaaagcacgcttcccgccgcctgactcgccactggcgtctcccgcaaagccacgcgccagctgactggctcagacgccgtcacgtgagccgcctccctaggcgcctgcgatttctctgggtcccgcccccgggcggccttctggccagtgggaggtgctggcgggggcccgcggggctctccccgccccctggctgcagcgggagccaatgggcagcgcgcgcgggggacgtgtgcgggcgtctcc

SEQ ID NO: 24611 - DNA, 699 bp, Homo sapiens
  source 1..699: mol_type = other DNA
attacagggcacggcccaaaaaccgatttttgtaaatcctgccgtttggggcccggagacctcggattgcgacccagggtgcccaagccgcagggcagacagcaggcactgcccgagtgcgggtcccgagggccctgcccgcatcccgcagcccccacccgcgccccgcaatcccgccgtgcgcaccgagcggctgcggccaggcggagggtggaccccggcgcggcggaggggggggggaagggagggaggcaccgggagaccccccagtccccctcccccatgctccgggcgccctgggagcctcgccatggaaacgcgcaccagcgagcggcgggctccgcggaggggcgggcggaggcgcggggtccgcccccgtctcgatggcgccccccgggccgaccgcagccacccgggaggggaggacgggaccgtcaccgccgcaggcccgaagggaggaggacgcgacccccgagccccgccagccgctcgcgcagacctgagacccccgagacccccggcggtgggaggcggcgccagggaggcggggacggtgcgcggggcctgcggaggacgcgcccagacaaagagcccccgcccctggctgcggcgtctgggctgcggcgtctgggcgcgcgcgggggtctccgggccggaccctcccctcccccgtccccctccccttcccggctcccggcc

SEQ ID NO: 24612 - DNA, 640 bp, Homo sapiens
  source 1..640: mol_type = other DNA
ccctgaggcttcggagcccacgcgaagggcaccccggtcctgccccgccccgaggccactgccggggcagctgcgccggctccggtcccccagcgcgggggtctctgcgggcgggcggaaccgaggcgtctcccccgggccccagcgcgacccccacgtagaagcagggcagaagcgtcatgctgtccttcgggatctcatggtgccgcgggcgccgcaggccgtggcgcgcaggcggagcccgggggagacacggtggccggcgccggcgggggatgcagagagcggcgtccgcgtggcctccccgcgccccggcccagcacgcggcttccgggcgcccctacacccgggatcggggggtcggggccgggatcgccgaggagggcggggggtctccgggcgggagccagtccccgcgtggtggtgcatccggggttccgggcggcggaggagactgggtccgcgcccccagccccacagcccctcacctggcgcggccggcgcccagcacaaagcgcgtctcctccgtggggcggggccgggagccgggaaggggagggggacgggggaggggagggtccggcccggagacccccgcgcgcgcccagacgccgcagcccagacgccgcagccaggggcg

SEQ ID NO: 24613 - DNA, 352 bp, Homo sapiens
  source 1..352: mol_type = other DNA
aaaaatcggtttttgggccctgtaattcgagaccagcctggctactaaaaatacaaaaatttttagggtgtactcgggaggctgaggcaggagaaactgcaggcctataatcccaaggccaggagttccagaccagcctggccaacaatggtggcaggcgcctgtaatcccagccattgcagtgagccgagatggcaccattgccctccagcctctgcccccgggaactcggaggcagcccagcttcctgggacagggtctttggccccccggttcctgcaggggggctcggggaggccctgtgagcagttggtcacaggtgggtcccatctgttcctccccaacagccctg

SEQ ID NO: 24614 - DNA, 379 bp, Homo sapiens
  source 1..379: mol_type = other DNA
agtagctgggactggtcttgaacgcccaactcaataaagctgttgaaaaagtttaaaaaaatcacccaagtcgttgcagtgacaccattgcactccagccgtctcaaaataataataataataataataataataatcacccatctccactgccctgagccccccggtgccaggcccagcgggcagtgctggagccccagtggcttgggtgctggctgcatgcccgccatgtgctgggctccgggatccactggttcctgacaccctcacctgcccctgggggtgtggcctggcccaggtggaggccttgggcaaactgagtggggctgtccctgggcctgggcggggacgccaccaactgccaaggcctgtggggcag

SEQ ID NO: 24615 - DNA, 461 bp, Homo sapiens
  source 1..461: mol_type = other DNA
gcgacacagctgcatgtggccggtatcacagggccctgggtaaactgaggcaggcgacacagctgcatgtggccggtatcacagggccctgggtaaactgaggcaggcgacacagctgcatgtggccgtatcacagggccctgggtaaactgaggcaggtgacacagctgcatgtggccggtatcacggggccctggataaacagaggcaggcgacacagctgcatgtggccggtatcacggggccctgggtaaactgaggcaggcgaggccacccccatcaggtttggcaggtttggcaaaaagtgatcccggcggaggttgccgtgagccgggatcacgccaccgcactccacattgattatctgacattttggaggccccttttcatcaacgccctgtgccaggggagaggaagtggagggcgctggccggccgtggggcaatgcaacggcctcccag

SEQ ID NO: 24616 - DNA, 387 bp, Homo sapiens
  source 1..387: mol_type = other DNA
ggcctgacctcaggcccctgggccctgtggacatcggggcggggcaggcccgtcctgggcactgcagggtgctaggcatcatcctcctcagacctcgcccagggtcccctgggggcagaaggagttcgctggggcctcaggtgaggcactgagggcactcgtggtggggcccgacacacctgccacggccggctttgctggggccacagggacctcgtcagggaggcgtctcctcatgttgcccacctggccagggacccccgacttgggtgggtgacagccagcctccccgcccccacaaaggttgggaccttgagcccaaagcccccacctcctccccggagtccgttctgactcagtgggcattgggcaactcaacggcctctg

SEQ ID NO: 24617 - DNA, 428 bp, Homo sapiens
  source 1..428: mol_type = other DNA
gtggtaggtgggagccactgtgcccggccagccctgactctgttcatcagaacctgccctcagtgaacagtttgggagggggcgtgtgatccaggctccaccaacccaaggcacccttgagacttggggcccactgagccactgggttgagtgtggggtccctggttgttcacttctctctaatatagaggagtccatgaaacaccctgggggaaagttggggccggggtgggtgcagcccccctctctgcctcctgcccatctgagggactgccccccaccagggccagcaggctgtcaggctcacagaggcccgagggtctcccagcgacttgtcgactctgtcccggggagggcggaggctgggcgggcgagttcccctttccccagctgggccgctgcccacccggggagcggcccgccccctc

SEQ ID NO: 24618 - DNA, 273 bp, Homo sapiens
  source 1..273: mol_type = other DNA
cagctactcgggaggctgaggcaggagaatcgtactgcactccagcctgggccacagagttcgcttacagtttccccactcttggacattagaaaatggaagaaaagctactgaacgcttcacgaatttgcgtgtcatcctttaaagcccctggaacaaatgtctgtacacattaaatgacctagagatttaacctctatttatattagcccaatgtgtaatgacccggaggcggggcagagcctgagccgcaccgccctcccagaagtcttt

SEQ ID NO: 24619 - DNA, 540 bp, Homo sapiens
  source 1..540: mol_type = other DNA
ccatcttttaaaagactcacgttgaaagaaatgtcaataatgacttgacaaatttgatttgaaatcaaatagtgcccgcagcagccgctggtgcttacacagcacttcctgagaggtctgcacagtgcggcccagggcctgacggcccccgcctgggtttgtgagtggcaccagctgcctgtgtgccgccacggcagagccagagccaagtcgttgcaacagggaccacctggctcccagaaccagcatgctgctgtctgtccctttacagaaaggggaggtgatgccgttccttcatcaggatctgaacccaggtgcacacactcctggtcatggggcagcccccatgagcctgagcggcccctcccagcttcggggagaagttctcccgagccgcgctgttcggcggcaagcccatggagggctggatcgcggtgacggtcagcggcctggtcaccgtgtccctgctgaagcccagcgggcaggtgctgacgtccaccgagagcctgtgccggctgcgcggccgcgtggccctggccg

SEQ ID NO: 24620 - DNA, 358 bp, Homo sapiens
  source 1..358: mol_type = other DNA
cctcccgagtagctgggactacacgcttggcttcccaaagtgctgggattacaggcgcttgcctagccgaggctccaagttttaatttccgcccgaggctggattcctggctcagtccgcagcccggatcgggacgcagggttgtggtctcgcctaggtgtccctccttcccgatctgggtgtagggatcgtggccggccccgcctcccgcctcagccccccaggggctggatcccggccccgcgcgtccccccaggggctggatcccctccccgcgcgcctgggtttccgcgttcgttcccggcagccgggaggtgggcgcccccgccccgccgcgcagccccaggccccgcccctg

SEQ ID NO: 24621 - DNA, 332 bp, Homo sapiens
  source 1..332: mol_type = other DNA
ggcaacagagcgacaccctgtctaatccaccactttggagggtggatcgtcccagctactactgcaaatacataaatcagtaataataataataataatgaggctggtccctgcgggtatcagacaccccttgtcagtcatgtgggacacattccatggctctccagggtcctgggggtctccgctgagggctggcctccccgccaggctgggcccaccccctggagccccagcccacaggccttagagttcgcgccttggctgggctcctagtccgggctgagcgtctcgctctcactccgaccttgcaccgggaggagggaattaaacgc

SEQ ID NO: 24622 - DNA, 661 bp, Homo sapiens
  source 1..661: mol_type = other DNA
ccgagccgttggcccgcgctgcaccggggcgagccccgcgagtggccaggtcgaggctccccaccctccggcccgcccgggcccgcccgcgctggagtttgcgacctctagcctcaggtgcagggggacccctgcaggggacagagccgggtccgagagggccccgatgcgtcgcgagagggcgccccaggccgctcggccctcggagcccccgggacggcagcaggtgcggcgcagcgcccgcactcacctcacggtccgcatcggcttgtggcggcagatgacgtagacggcacgagccaggcgtccacggcccgcggcgaagggactgggccgtccgaggcgttggcgccacagcccgggcagccggaggcgttggccggtgccccccaggacgcgttgggtccggacgtagccacggtgtgcatggccgcgcgcacctcctcctcccggccgccctccaggattgcgccctggcaccgccccggggacccctccgcccgaccgcccgggggctgcgcctgtggaactcaggaaggggctcggctggggtccgcagggtccagagggcagctgtgctgggctcggcggctcctctgccggcgccgctgcggccgagcgtttaattccctcctcccggtgcaaggtcggagtgagagcg

SEQ ID NO: 24623 - DNA, 727 bp, Homo sapiens
  source 1..727: mol_type = other DNA
caggaccggggacccgagcccgccagagaccctccacaagtgagggtcccccggggtggcccctgcccgccctccaggctcccctggggctcacgtccgggctggagcctgggcctctgcgcttagccccctggggtcgcttcccgcgcacacagctccctgcagtcctgctctgcgcagtggcgacaagacgtgcagggacctccctggagggaggcgcggggcgtgtaagtcatcaccaccttcacgggggggtggtgggcagccgagctcccgacgctggtgacagccgggccgggcagggtcgtcctggtttcacaaaggggctccgggtcccagcgcgcacctccccacgcccgcgccgagcccccgtctgcagcccgtccctccccagagggaggccggcgggaccctggttccctccctccgacgcaagcccatttctcagacttggaaacggcggctccggagagtgaagtcactctctcagggtctctccgtctaaggggcgaaggtgaaactccgaggtcccggatctggctccgatgcctccggccagcccgcccaggcggagcccccccggggcgctcccgccccagcccctgcccccggcaccctctgcgcttggggccgcgtcgcgcactttgcccaccgtccctaggccgggggcggggcctcccgcggcgctgttccccttcccgtttattatttattatcctttaaaggg

SEQ ID NO: 24624 - DNA, 717 bp, Homo sapiens
  source 1..717: mol_type = other DNA
acgtgcagggacctccctggagggaggcgcggggcgtgtaagtcatcaccaccttcacgggggggtggtgggcagccgagctcccgacgctggtgacagccgggccgggcagggtcgtcctggtttcacaaaggggctccgggtcccagcgcgcacctccccacgcccgcgccgagcccccgtctgcagcccgtccctccccagagggaggccggcgggaccctggttccctccctccgacgcaagcccatttctcagacttggaaacggcggctccggagagtgaagtcactctctcagggtctctccgtctaaggggcgaaggtgaaactccgaggtcccggatctggctccgatgcctccggccagcccgcccaggcggagcccccccggggcgctcccgccccagcccctgcccccggcaccctctgcgcttggggccgcgtcgcgcactttgcccaccgtccctaggccgggggcggggcctcccgcggcgctgttccccttcccgtttattatttattatcctttaaaggggccgcgacctgaaaaccggctccccagcgcccccgggctggttgcgcgtcgtcagaccgcgggagggggagtggggagccctggcgaggccctcccgcgcccgggccgcggcgctgaatcaccggccaggtattgggggaggggcggggcgggggccggccgcgcgcggggcgcctctta

SEQ ID NO: 24625 - DNA, 803 bp, Homo sapiens
  source 1..803: mol_type = other DNA
caccgtccctaggccgggggcggggcctcccgcggcgctgttccccttcccgtttattatttattatcctttaaaggggccgcgacctgaaaaccggctccccagcgcccccgggctggttgcgcgtcgtcagaccgcgggagggggagtggggagccctggcgaggccctcccgcgcccgggccgcggcgctgaatcaccggccaggtattgggggaggggcggggcgggggccggccgcgcgcggggcgcctcttaccaatcgggcgggacgcggacgcggctggcggctcggtgagtcggcgcgcggcacagccccgtgggtcgggggccgggagccagcggcgcgcaccggcggctggaagccaggcgggcccgggcaggccgaccccaggcgcggggcgcgcgccccactacgagccgccctgcgcggtaaggctggggagcgcgctggccgttcccagcgcgggttccggtgccggggtgggcgcagtgcgtcctggaagccaaccccaagttggtcccggactgggaaggcggccctggcgggctggggttcggggctctgcaccccgcttggagacttcactccccactcgctcaggggcgagcaggggcgatcgggggtcgcgagtgcgcgcccccccctccccagcggaaggaaatggtctctgcgcgcgcgcggggggctgctccccgaaatcagggatttattcgggagcccagagaggagggagggtagttcccggcgagcctccccagccgggctggtttatttaaagtgtccgccccagcgcagagag

SEQ ID NO: 24626 - DNA, 404 bp, Homo sapiens
  source 1..404: mol_type = other DNA
gctcactgagacctgcgtgacgggcgacttgtttgacctacaccaagctatccgactaatattgaggcccctagccgggcgcggtggcgtaatcccagcacggccgagctgggaggatcacttgagctcaggagttcgaggccagcctgggcaggacagtgagacaagcagtgaattccaatgtattcatcgcgaactttattatttgaacatttaaaaataaatgaatccaagagcttgagtcacttggccagagaccctgggccttgggaagtcgcctccccagatcagaaagcccctctctccgaggcacgggcgcatgcgcgggtcggccacccgctggggccgcggggccgccgctctggcccgcgtggggcagtcgtccgcgtctcgctcatgatgac

SEQ ID NO: 24627 - DNA, 384 bp, Homo sapiens
  source 1..384: mol_type = other DNA
ttgcagagagccgagatcgcgcttctgcgctccagcctgggcgacagagctcagtaagtgcccctgaagagcacttatttcattgctgcgcgaagctacgggggcaggtggcacagcgccacgcactggccctgtgacgtcatggcaggatcccaaaaatatggaacgcttcacgaatttgcgtgtcatccttgcgcagttaggataacttatatttagcataattttaaaatcccatatcttatcgtaggtggcccagatgcaggcccgccccctggagcggccgaggtagggggtgaggcctccgcgggcgccgctggcatcccagcgttctctgcgggcgcaggggggccgctcttgcccggcgtggcgactcgctagcgt

SEQ ID NO: 24628 - DNA, 368 bp, Homo sapiens
  source 1..368: mol_type = other DNA
ccactgctggagggcagatctactcagacaccgagtgcgagacaagcaagacccttcctgggcccatcgctctgtcgcccaggctggagtgcagtggcacgatctcggctcactacagattctcagcctcccgagtagctgggatttggccaggctggtctcccgcgcccggcaagtcggggtggcctgaatcagagcagggatgggcagtggttaggcgtccccggcccccgccaggtgtcaccgccgccggccggcactgtttcccccccatcccgccctgggcagggcacgtcccactccccccgcgcggttgctgggaacccggaggccgcccgggcggagcgcggagggcgcgtcggaacctg

SEQ ID NO: 24629 - DNA, 480 bp, Homo sapiens
  source 1..480: mol_type = other DNA
ctggagtgcagtggtggaattacaggcatgtgccccccgccaagctggtctggaactcctgacctctggagcgtcatgttgtaggaacctgccctggttccctggtccacctcccagctagtagagttccctgggaaggggttagacgcctctaagtggcagagaggggccctcattcctgccccacttctcccctcccctttctggcagaagagccgcccacgagctctgagcagagagcccgcaggagtgccacgtcccggcggcctcggcccctccctgcctcagtttcccgtggcatcaaagggggcgaggggcccctccaggcctctggtgacgggggtgctgtgcccaggcgggggtccgggggcgaccgagggggctcaggaagtccgcggccgcaggaattcggcgcctccacgctccgggccaatcagcggcgggggcgtggcgcgcggagcccggcgcgtcccaaccccg

SEQ ID NO: 24630 - DNA, 510 bp, Homo sapiens
  source 1..510: mol_type = other DNA
tgtccacctcaccattgggcctggccatttggagaagaggcagttccctcaaatgccccccatgcgctttggctgcactctaccttatgccacctcctgccgcgggagccgtcccctttcaactcttcttccagagtgggaaacgggttttcctcaaaatcagggtagccactacctcctgccatcctctgcagaagccgaggagcgttcgtggaagtcccagagtctggactgccagccccggggactgcaattcggagctgcggtattgcagccggttaaacgtggggaggcagcctggctccccaaagacagcgcagcctcgttcccggagggcggcctgcctgggacctgccgggcactccgccacccgtgcaagagccgcgcggtccctttaagaaacccggctaggcgaggcccttcctcccttggcccgcgcagctccgacggagcaggccagtgagtgacgggcagagcgtgcagaggcaggggcgtgccccggcgctgcta

SEQ ID NO: 24631 - DNA, 318 bp, Homo sapiens
  source 1..318: mol_type = other DNA
tgatcactgaaaggggggcatcggacatctgggacccttaagagaagggtctgggtctgaggtcccagttccgtcagcgtcagattctccatctgtgtcagaggtggattcgtgcctccagctgggtattcgttgctgttatcttcggagaacagtgagggaatccttgcctgggctgggccaggtcctggaggattagaggatgatctttaagtccccagctgtcagccctgctcagagcgacagtcctggcagccaatcagatgcgaggacggcgcgctcccattggtttactccacccctggggtagcggagcct

SEQ ID NO: 24632 - DNA, 563 bp, Homo sapiens
  source 1..563: mol_type = other DNA
cagccggcagcggccttcgtggcggccgagttccctggggcggagctgcgcgaggcacatggaggccgcctgcgcttccagctgccgccgggagggcgctgcgccctggcgcgcgtctttggagagctggcggtgcacggcgcagagcacggcgtggagacggcgccggggaggcaggctgggggccaggcccgtgggctgaccgtccctcttttcttgtacttctccaaggaccaggggaaggagtgggagtggaccccgcgccaggcctgcagcacccgctctgagcctccctcccctgcggggccgcggggaggccctgggaatggcaagggcaaggcctaggagccctggactcaggctggcaggcatgtgtgtccttgagccaggctgcacacatgtccacacagctgcctgcacatgcgtctggatatggctggccccttgcaagctgagtgtgcacatacgggctgcccagctgtggccagcccaatgtgagtgcgggcctcataagggcctggtcacaccgtccctgcctggttacaggagcccggtgtcccgga

SEQ ID NO: 24633 - DNA, 614 bp, Homo sapiens
  source 1..614: mol_type = other DNA
ctgcaggccccagctcttggccaatgccgcctcaggctgttatcagcaacgggtgcctgcgtcctgctgcccagcacgtccggtggtccagagtcactggaatgccttgcgaggtaaccaggtgtcctcagcatattctgccgatggtggggtccacaccacactttggggacccctgtgcaggcagcccaggaccaggtggacgtggggacccagacggacgtggggacccagacggacagggcccggtaacctggattgttctgacttcctggactcgacctgacccacttcacggggctgcagggcgggtgatgggggggaccctactctgcccggccctgctggggcccggccacaccctagggtctgcaggagaggcggtggagcggtgcaggggcgcagcttcggccctccaatcgtgcacgtgtctgtgcacgcccactcgcgtccgggagtgagagtcagcgccctgcagtcggccgccccgtgcccgccagcgtcaggcaggggctcccggtcccaccccgcgagcggcgcggctccgagctcccgaaggcggaagcggggggcgcggcccggggctgggggcggggcctgcgacctcaccttcg

SEQ ID NO: 24634 - DNA, 749 bp, Homo sapiens
  source 1..749: mol_type = other DNA
tgtcctcagcatattctgccgatggtggggtccacaccacactttggggacccctgtgcaggcagcccaggaccaggtggacgtggggacccagacggacgtggggacccagacggacagggcccggtaacctggattgttctgacttcctggactcgacctgacccacttcacggggctgcagggcgggtgatgggggggaccctactctgcccggccctgctggggcccggccacaccctagggtctgcaggagaggcggtggagcggtgcaggggcgcagcttcggccctccaatcgtgcacgtgtctgtgcacgcccactcgcgtccgggagtgagagtcagcgccctgcagtcggccgccccgtgcccgccagcgtcaggcaggggctcccggtcccaccccgcgagcggcgcggctccgagctcccgaaggcggaagcggggggcgcggcccggggctgggggcggggcctgcgacctcaccttcgcgcccactccgcagagccgcaggctgaggccgggaagggtcgggggcgaggccgcgtcgccgcctccccgaagccttttcctgttggggggagggcccgccagtgacggccgggcctgtcacgtgggcctgacagctggtggtcccgaagcggccagcgccgggagctgcagcgctgagacccccagcccgccccctcgggctcccggccggggccccatcatgttctccaggaagaaacgagacgcgggaagcccc

SEQ ID NO: 24635 - DNA, 256 bp, Homo sapiens
  source 1..256: mol_type = other DNA
tttattatattttactaaagttgctgagtaaatgttgaattaacgaatgcatcactgaataagttactgatagcctagatacccaggctaggctggggagatacccaggctataagcacctagagagatgcctaagactctcagttaaccgtctaaagtagtgtacagtttactcccgaggcgagagactcgctcagccactgctcgggctgcccttggcgctgccgacgacagaccgcggggcgggggggcctga

SEQ ID NO: 24636 - DNA, 375 bp, Homo sapiens
  source 1..375: mol_type = other DNA
ggctcgctcgtgtaatcccagctactcaggaggctgagtcaggagaatcgcttgccactgcactcccggccgagcctttggctcacgcatgtgatcccagcacttttgggagcctgttgtcccagctactcggggaggctgcagtgtgccctgatcgtgccacggacacttttctgctggcctgcggccgcgctgctgtcaaccagccggataactgcgctgcctcccgacgcgccgccagccaggccacactccggcctcccattggctgacgtcggcgcgagcgctcaacaccgacgcgtctggcgcaaagccgacgcgcgtccattggtcggctggacgaggggaggagccgctggctcccagccccgccgc

SEQ ID NO: 24637 - DNA, 654 bp, Homo sapiens
  source 1..654: mol_type = other DNA
ctgccccgtcagtcgctgagtacaggcagatggggcccgtcctctcccagcccgggccctggggcctccccagctcgtggcccaatgtgaggtcccatcaggtggtctaggcccctgtgatgcgccagggtcctcacagtgcgggcaagagtgtggccgcgggcgggctcgcggcccggggttgccccagggacgctaccacttgttcctgcccagggggccgaggccgggtctggccagagcctggagaggaggggcccaggctcagctctccctccgccagccccagatcaagggaggccacggggcccgctgaaccccctgggcacggctctcggggacctcagcctgcaggggtggggtggggagagccccaggggggcgcagcagggcctgaggtgcgcttggtttgggggcaccaggaacagcagctggtccccgtggaacggaacccagctccctgcagtctggggagaccgaggcccatgcccacctgggcattctgcacgtccgccgggtgccccaaagggggctggtcctgcggcggggcgccctgacttacggggccggcatcatttcctgaaagtcagccccggccttagaggaagtaggcgccggcggcggtgactaatgcagccgggcggagagccgccc

SEQ ID NO: 24638 - DNA, 419 bp, Homo sapiens
  source 1..419: mol_type = other DNA
ccctgagagggcagcgccaccgagaggaggagcccctcaggcccccgtggccctgcctgaaaggatcctgctctcttgggggtagcccctgggacttacccaaacccccatgtgccagtcaccatgctgacgtccagagataacttttcgtgagagatatgtcgtgcagtggtgcgatctcagctcactagcgatactactgcctcagcctcctgagtagctgggattacaggtgcccttgcacggtgatgctggggtctcaagagaaccaggcagggcgggattcgaacccagagccgtaggagtcccagccccttccgaatagcggaaggacctcaagggattggcttggaaggtggccccgcccccgaaccgagaccacgcccccgcaggtggaggccccgccccgcggcatgacc

SEQ ID NO: 24639 - DNA, 410 bp, Homo sapiens
  source 1..410: mol_type = other DNA
agcctggaatcccagcaagctcgagaccatccgcacgtgcctgtaatcccagctactcaggggttgcactaagttgagctcatgcccctgcactccagcctgggtgaaagaaaaaaaaaaagaatttcatttggaaatattcgtagtggaacaacctagcagctagttgctattattattattatcattattattattttttttgagacatgctctgtcccaggctggagtgcagtggtgcgatctcagcctccggagtggttgggaccacaggtacgtagttaagtaactctccttgggtctgtactccaggctgggccatgagccccagtactgattccctggaaatcccccaacttggcagattcctgcctgctgagatggctggacccaccccggcctgggcaaac

SEQ ID NO: 24640 - DNA, 413 bp, Homo sapiens
  source 1..413: mol_type = other DNA
aaagaaagaaagaaaaaagaagttcaaagtttggctcttttttttttgagacagaatcttgctctctctgcaagggtggagtgcagtggttcaagcaattcccttgcctcagcctgccgagtagctgggcctcaggcagtccacctgccttggcctcccaaagtgctgggatgacaggcgtgagcatgagccttctgagctgagactttgcatccctgcacagggcgaccggcagattgctgatcttccttcacccagcctgcctgacccagactaggctgctgcagcctgtacccagcctgaggtgctatgtcaggggtgtcactgggcccctgagaaagcctgtcccatgtggaatctcaaacccgtcagacagctgccccgacctggcctggtaggatctcactctgggc

SEQ ID NO: 24641 - DNA, 841 bp, Homo sapiens
  source 1..841: mol_type = other DNA
caccgaggtcacagccgtggccctgcccgtgacgggcgtctccgaggaccaatgagcgcgctgtatccacccctcgggcggggccaagcgccgaccaatcgccgctcgggcgcccggccgggtccaaacgctccaatcgtcagcggcggcgaacgggtgggcacgtcgtcctcgcgaggaggcgtgccctgcggccgggcgtgcggtgtccgcggcggcgcaggggcgcggaagggggaggcggcccggggcgcccgcgagtgaggcgcggggcggcgaagggagcgcgggtggcggcacttgctgccgcggccttggatgggctgggcccccctcgccgctccgcctcctccacacgcgcggcggccgcggcgagggggacgcgccgcccggggcccggcaccttcgggaaccccccggcccggagcctgcggcctgcgccgcctcggccgccgggagccccgtggagcccccgccgccgcgccgccccgcggaccggacgctgagggcactcggggcggggcgcgcgctcgggcagacgtttgcggggaggggggcgcctgccgggccccggcgaccaccttgggggtcgcgggccggctcggggggcgcccagtgcgggccctcgcgggcgccgggcagcgaccagccctgagcggagctgttggccgcggcgggaggcctcccggacgcccccagccccccgaacgctcgcccgggccggcgggagtcggcgccccccgggaggtccgctcggtcgtccgcggcggagcgtttgctcctgggacaggcggtgggaccggggcgtcgccggagacgcccccagcgaagttgggctctc

SEQ ID NO: 24642 - DNA, 932 bp, Homo sapiens
  source 1..932: mol_type = other DNA
gcgcggaagggggaggcggcccggggcgcccgcgagtgaggcgcggggcggcgaagggagcgcgggtggcggcacttgctgccgcggccttggatgggctgggcccccctcgccgctccgcctcctccacacgcgcggcggccgcggcgagggggacgcgccgcccggggcccggcaccttcgggaaccccccggcccggagcctgcggcctgcgccgcctcggccgccgggagccccgtggagcccccgccgccgcgccgccccgcggaccggacgctgagggcactcggggcggggcgcgcgctcgggcagacgtttgcggggaggggggcgcctgccgggccccggcgaccaccttgggggtcgcgggccggctcggggggcgcccagtgcgggccctcgcgggcgccgggcagcgaccagccctgagcggagctgttggccgcggcgggaggcctcccggacgcccccagccccccgaacgctcgcccgggccggcgggagtcggcgccccccgggaggtccgctcggtcgtccgcggcggagcgtttgctcctgggacaggcggtgggaccggggcgtcgccggagacgcccccagcgaagttgggctctccatgtgggggtcccggggggtagcgacgtcgcggacccggcctgtgggatgggcggcccggagaagactgcgctcggccgtgttcatacttgtccgtgggcctgaggtccccggaggatgacctagagccccggccggcctccccagggtccccgaggacgaagttgaccctgaccgggccgtctcccagttctgaggcccgggtcccactggaactcgcgtctgagccgccgtcccggacccccggtgcccgccggtccgcagaccctgcaccgggcttggactcgcagccgggacaatcgttttggaagaaggg

SEQ ID NO: 24643 - DNA, 773 bp, Homo sapiens
  source 1..773: mol_type = other DNA
cgcagccggctgtgggctaagcggccggagagtccggcgggcgtggggaccgagatccgggccttgcgccccccacccggctgcctccagagggacccccgctcaggccccgccccagcctcagtttgggcgaggacgatggcgtctcggctcagccctggcgtcccctggctcgccatccccacccttggccggctcgggggcgcggtgctgccccgtggggaacctccgccctcggctcccgcagccgcctccccccttcccccagtaccagggcccgggcagcctgtgaccgggagcgctgaggacaccagcccccgccgggaccctgcccggctttgggcctcagtttcccgctgtcgcgtgtgggcggaagtccgggaagggcaggagcggctgccgcctgtgcgctcctctcgctccggtcgcgcgtgcggtgctgacctggggccgccgagcaccccggcgccagccccgaccccctgcgattcccgggcctccccacccggctgcgccgcacagcgtccaggcggctccttcctggtgccgcgccccgcctcagtttcccccgagcgtaaggcggccggggatgctccgggcgcccgggctgggcacggcggggaggcggccgcggccatcttgcggcttcgcgcccgcccccccgaggccgccgcccccccccaggccgccgcccccgcggcaacccgcccccccagccgcggcctgctccgcagtcgccatgggaaccagcttctccggggctgggaacagat

SEQ ID NO: 24644 - DNA, 442 bp, Homo sapiens
  source 1..442: mol_type = other DNA
gacagaggcctgggtacagggcacctgcggctgagctgggccagccacgtgccaacccccacacagaggagaggcatggcgagtcctccacagtgccaggacctgcgcaggcggggcgcctgtgtccagagaccctgggcggccgaggggccctggctgtgccgccccagaacccccacggaccgtgagaggggagtccgtgcccccccggaccccaccccctcctgcgcacgcggcgcacctcgggctgcagagtcgtgaattccaggacacccccagctgcgtccctgggacctcaggaccgggcgaggtgaatcgtgccgatgggccgggggcggggctcggccgccgcggcgggtgcggggggcggctccgcgtgcggagtgggcgcccgggagcgcaggctccgccccccgccccgccggaagggaaggggaggcgg

SEQ ID NO: 24645 - DNA, 285 bp, Homo sapiens
  source 1..285: mol_type = other DNA
tagctctcggctaattttagtagacctcagggcttattccagagtgggattctcactctgttgcccaggctaggcagtggcgttaggcccaagcgatgctcccgcctcagcctccccagtagctgggacgaggttggagccaccacacctggcccagggcttcactgaagttcccccctggttctgccgcagcccgggccggaacaagacggggcactgcgtcgtcaacgtcgcgtgcgccctgccgggagtcgtagttcgcgcttgcgctctcgccgggactcc

SEQ ID NO: 24646 - DNA, 608 bp, Homo sapiens
  source 1..608: mol_type = other DNA
aggagcgcagccctgggaggggcgcccatggccagggttaggaatggggtccccttctctaaatagaggggcaggacggggccaccccccagtgcatgtcctgcattaatggggggtgatggccccaaagtgatcctgccgcatcgaaactgaggcttggagaggccagttacctcccggggtgccggctggtgactggctgggcacaaggcaggcctggcactggctacaggaggccagggctggccagggcacccccactctcccgtcccccccacgcgggcgcccccaggcggaagcaccgggcctggggcgacaggaagggggcggggcagcgagtcgcgctgtacaccccaaaaccctgtcccattcggggtgcatctcagcccgcggcgaggcgggccgagacccttggctcggggcattcaaggggagtccccccatgaactgcgccaagcctgggtcccgggtggcccagccgtcaaggcgccccagggccagggccggcaggcaggggcgggggccagtctgcgtcaccgcccgcccggccccccgcccccctgcccgccctaactccaccccgagggaaggcggcgcggataaaggct

SEQ ID NO: 24647 - DNA, 513 bp, Homo sapiens
  source 1..513: mol_type = other DNA
ttaagactcccctccgccaaccaggctcagtaggggaggcctggcctggccccgcgtggggagcgagtgcgccgttgctgtgcagcacggggtgcagtggggactcggggtgtccgcctgcacccgacagcagggacgcacaacactatccggccaggcgagtgtgggggtgtgggccacgcacccagccgtgatcaccaaggcaaagtcggggtcccagtgacacccagaagtccccatgaggcctgaggcctgggaatcggggctagaggcccatttgttccccgccgcaggccagggagcaggcacgcgtaactgggtcagccccgccccgccccgccgcgcgctggtcacgccccctcgagcgcgggtggaggactgcggactgcaaacgtctcggccaatagtcgagcccgacaccagtccgcgggagggggcggaaccgagatagactcggcccccagcgcaggcgcgccctctggggcggggcccggcggaagcgtatataaggcc

SEQ ID NO: 24648 - DNA, 840 bp, Homo sapiens
  source 1..840: mol_type = other DNA
cctcccctgccaggggcagcgcggcgccccctccccgggactccgggcggcgctcccaggcgggcccggcagagggcgcgcccgagctgctgactcaccgcatccccgagcgcgcgcgggcgcagccggggacgccgcgtcacgtcacggctcgagcgggcgcgcctcggggaaacgggttctgcccgcggccggcgggtgggcgcgcggggcccccggcggcagccacccggccacgtcaccgaggtgcgggcgccccgccccggccacaactccgcccccacgcaccacgccctccccggggccgcggccctagcctcaccgtcgcccgcccgccccgggaccccggccacgaggcgcggacttcgcgctcccgcttccgctcgcggcttttcccggacgaaggcggcggggtggccccacgacttcctgcccctcccggcgccgggaacaatggcccgcgccccctcccgctcccggccgctcccttgggatcgcgaggggtaccagacccgtctccagacctgggtcccgcgccccccggggcgcgcccgccctttgttgcgggctccgggcgcttatgaatggctgcgggcgcgggcggggcgggggcgggcgcggagaggcgccagccccgcccccgctgcgctccccttggtcgcctgggcgctgggggcggggcgagggggcgggcccggctgccacgtggggcggtgccgcggcggctctcataggcccgggctcgcggccgactgggcgctcggcgcgcggcgattggccggcgcccggccggcggagtaagtgaatgggagggggcggcggccccgccccctggaacgt

SEQ ID NO: 24649 - DNA, 514 bp, Homo sapiens
  source 1..514: mol_type = other DNA
aagactcccctccgccaaccaggctcagtaggggaggcctggcctggccccgcgtggggagcgagtgcgccgttgctgtgcagcacggggtgcagtggggactcggggtgtccgcctgcacccgacagcagggacgcacaacactatccggccaggcgagtgtgggggtgtgggccacgcacccagccgtgatcaccaaggcaaagtcggggtcccagtgacacccagaagtccccatgaggcctgaggcctgggaatcggggctagaggcccatttgttccccgccgcaggccagggagcaggcacgcgtaactgggtcagccccgccccgccccgccgcgcgctggtcacgccccctcgagcgcgggtggaggactgcggactgcaaacgtctcggccaatagtcgagcccgacaccagtccgcgggagggggcggaaccgagatagactcggcccccagcgcaggcgcgccctctggggcggggcccggcggaagcgtatataaggccggg

SEQ ID NO: 24650 - DNA, 835 bp, Homo sapiens
  source 1..835: mol_type = other DNA
ggccgcgcagccgctgtcaggccccgtcttgggccgagtcccgggttccctgtagcaggcttgggagcggggcgccaccttcctgggccctggacgtggccgacgcgttctcagtgtccgtgagcgaggtcctgaagtcggggtccgccccgtctccccgctgccagctcggaagccgcgaccccccacgctgggctggcagttctgggctctgccggctgcgccttgccgggactcccacgggcgggctccgggcctccgtcctgatcccttggagcggttcgacgaagcaagttccgcggcgggcgcgcggggcactgtgggtagcgccggggctcaccaggcggaggcggggcccggcgtcaagctccgcctccgcgccccctccgcgcgcctgactgacagcgcgcataggggcggggcgccgccaccgcttccgccgggccatggggccgcgcgtgctgcagccgccgctgctgctgctcctgctggcgctgctgctggcggcgctgccgtgcggtgccgaagaggcctcgccgctgcgccccgcgcaggtcacgttgtcgccgccgccggccgtgacgaacgggagccagccgggcgcgccacacaacagcacgcacacgcgtccgccgggggcgtcgggctcggcgctgacgcgctcccgcgctctacttcctgatccgggcgtttaggtgcaggcgcacgtgggcgccgtcccttggccaattagcgcgcgcctagtgcgtcacgtgccgggccgcggggtcctcccctccctccctccctccctctctccctgttggagtgggcgtgggcggacgtggtgtgggcg

SEQ ID NO: 24651 - DNA, 357 bp, Homo sapiens
  source 1..357: mol_type = other DNA
tcctgagtagctgggattaaaggtgctcaccactaccaggctggcctcgaactcctgacctcaggtgatctgcttcttgcttttttaaggcaggaaagcggctgctgggcccctccctgagggatgaggtctaagtcgcctccagggagcggccgggctgcgcagatgccgggcgggactggggtaggcctgggagggaggcactgggatccctccgcatgctcctggctgggggccccttcccccggagtgggcagttgcacagggcccaggaggccctggtagaccgaggggcctggacaggctgcctgcccctgcctgacctgggtgagcctctgcccggcagggcgggccctt

SEQ ID NO: 24652 - DNA, 652 bp, Homo sapiens
  source 1..652: mol_type = other DNA
cccaggtccttcctctaggagcggccagcgggcgcggggaggtctctgaccttgagagagacaagaacagaaggaaaacggagcttctgctcaaatccgttcagcggtggcggtggtggcggctctcgcctcggtggcccctgcatgcaaatgagtggccctgccatgcctgggtggaggtggtgcccttccagctcccacctgtgcaggtcccagtcctggtttgagaagagagatcccttgaagcaggagggggcttctggtcccagggtagaaggaagcttccccacctttgccaggtggcatgctggggccgggcacgccaagaccccaggctcacggccccttgtcctgtgcttgggtgcagccgccactcacctccgggagtggccgtccccaccagacggagccgcccgggaagcttctccagcctgtctgggctacagagccttgtgtggctagaggccctcactccaggggtgctgagagagcctgtccagagggcctgcctcagccaccacctgggacaggtgccagccctgggccttcgacctgggacgtcggggtcaggggatgagacctggagctcagaacagacgggctgagctccctggaggagtcgtgtggcccgcgtggcccgctggggaatcgg

SEQ ID NO: 24653 - DNA, 206 bp, Homo sapiens
  source 1..206: mol_type = other DNA
cctcttccctgctgcggggacgccccatggcagccaaaagagcagtcgtttttccgctcctgttaactccccaaattggggatcctgccgaggtcggagttattcaggagccttttaaaactgatctagatagaacctgactgtgctgtattttatttatgaaaaaatgcaggcgcctcccatctcaatgcaagattgtggaatta

SEQ ID NO: 24654 - DNA, 787 bp, Homo sapiens
  source 1..787: mol_type = other DNA
gggctgaggtgtagggacttactccatccccagggaacagcgtgggtccggagaggcgactcccaggagggccccagggaggtcgcagcccgagcagctttggactttggccagcgcccctctgaactctgccccggcccccgcagggagactggagttggcgcccgggcaggtgagaggcccgggacccagggccgggccgggtggagcgcgtgggggcgcgggaggcagggtgcgcccccgcccctcggagaccccaggccgggccacgcggatgccggcggggggcgcgcagaatcggggtcgctgggggcaggccccgggggacgagcctgagacggggtgggccggggcagggggcgggcgcaggctggagacccccgcccagtccccgcgcggccggggcacggcgggagggggcgcccgcggccctcccgacgctcgggcgggacaaaggccggagcccgggcccctccccggcgggtgcggcggcggcggcccgcgctccgacagtccgcgcggccgggtcctgcgcccggggcgaccccggcgccccgccccgccgccgcctgacttctcggcgcccgaggtcgcgcgcgcggaggcgggggcggcccgggatctccaagcgccgccgcgccctcctcccgcccgccctccgcccgcccgctcggcggcggcggcggcggcggaggaggcggagaaggctggcaggcggcggccgggagagcgagcgcggcggccggaccggggccatggcgcccgcgcagcgcccgctgctcccgct

SEQ ID NO: 24655 - DNA, 318 bp, Homo sapiens
  source 1..318: mol_type = other DNA
tgcggtggcacaagtgattctcttgcctcagcctcccgagtagcggcctttgcctctgtttttgtaatcataaaacaggcagacaaaaccatgcagaaagcgttctgcaatttttatatcattagtactggttgtaaacttatcatgagcccccgggatgagtccacatcgcggcgactcctctaacgctctcccaactgagctatttcggctgggcggcagagtcgctctcgccgggactccgtcccgcgctgcgccttccctgcgcaggcgcagtcgtttcgccccagggcgccggagcgcagtgtcctgtggcgc

SEQ ID NO: 24656 - DNA, 473 bp, Homo sapiens
  source 1..473: mol_type = other DNA
gcctttgcctctgtttttgtaatcataaaacaggcagacaaaaccatgcagaaagcgttctgcaatttttatatcattagtactggttgtaaacttatcatgagcccccgggatgagtccacatcgcggcgactcctctaacgctctcccaactgagctatttcggctgggcggcagagtcgctctcgccgggactccgtcccgcgctgcgccttccctgcgcaggcgcagtcgtttcgccccagggcgccggagcgcagtgtcctgtggcgcttcggctgaccaaaatgagtgtcgcctctgtttttgtcggtccgccgcagacccgcggcccccctcgggtgatctgggggtgcacggcgcaacacgaccacggaggccgaaagcgcagcggaacctcccggctccaggttccggtttccgcatgcgctccgagccgctttgggcggcggccccgggaacccggagcgcta

SEQ ID NO: 24657 - DNA, 710 bp, Homo sapiens
  source 1..710: mol_type = other DNA
gacgccaccgcagcgggcttgggggcccccaggaaacaggcggggggtgtgaccctaaggggctaccctgggctgggggaggcctaattccacccccgcacaccccagctgcagggccgccggaggaaagggcactgctgggattgagtcctggtctccagaactggaggcgtcggcggaatcccccattagggacccggggtctcagatgacccccagcctatgggggtgtgacatgggctcatgaaaggggggcatcagagctctaatgctgggtccccaccctcgtggccaccagtaaaatgacagtcggctgctctatggagtagccattcatttttattccttaataaacttgctttcaaaaaagaaaggaaggacttgcgccaaaagacagcactgtagcatcttctgaagattaaatgattttaaacacttaaagcacttccaagattctcacaccccagcgaggagggggcctttctgcggtaggcggggattccagtccccagcctgcaggttcgcgtccccgggcgcggggctgcggtgcccgctccgcagagggggcaccgaggctccttggggagggggcggccggggccccgaccccactcccgccacctctcgcgtggccgccgctagaggccgctcccggagccgcgcgcgcgcgtcctctcgcgggtccgccccccgggcctgttggacccgcc

SEQ ID NO: 24658 - DNA, 575 bp, Homo sapiens
  source 1..575: mol_type = other DNA
cggttatcccctagggggcaaagtcatttggctattaatagtaatttcatagtcattgaatttagttaattgttttgatttgattccaactgggtgaccttggccaagtgactcagcctcaggggaaggagcctcgcgcgggacgctcacgtgccgttcccgctccgtccgcccgcctggggtgcgggcgggtacactcccactccccgcagcgccccacgcggctccaccgcttccgagtgaagagttaaagaggaagcggcagccgcgcctgcgcccacagtgcctagcccggagcgccggtctcgcaagcgcgcacgcgcacgcaagcccgcacgcgcgcgcacgcacgcacgtggctcggcccgcgcgcatcctccccttgcaggggcggggccagcgcagggactccatttcccagcgtgccccgcggcaacgccaggagcctccgagggacggccccgactgcggcggcgcgaaatccgcctcagggacgcacgcacagacggagtacccctggacccgcccccggagaccccgtgcgggagcgcgcccgggcgtgcgcaggggcggcg

SEQ ID NO: 24659 - DNA, 431 bp, Homo sapiens
  source 1..431: mol_type = other DNA
gaccaacatggcctgggaaaccgtgtctttgtaacaggtgcctgtaatcccagctacttgttgcagtgagccgagatcacaccactgcactcccaaaccttgccgttggcgcgatcacggctcactgcagccttgacctcctgggctgaaggctcagcctcccgagttccgtgtgtacacaaatttttgtatttttttgtagagaggcagttactaactttatatacaaaattttatctgttaaagaggggcggcgacttgtccaaagtcccactccgtggaggaagcggctctgcagacctcaggcggcggctgctctaatccctgcagcctgtttgccctccagacggcagagggcgcgtgttcgccgccgggaaagcggaagcgcgtgtgcgcgcacggccgagggggcgggacatgccggcagtctc

SEQ ID NO: 24660 - DNA, 544 bp, Homo sapiens
  source 1..544: mol_type = other DNA
ggcctgttctccccgcagccgccagcgggcgcccgcgagcctggagccgggcgcggccctgctctgtccacagcccgcggtggctcccacctcccgctgggcctgcgcgacctgccccccggggcctcccagccctcactgccctcgcgagcagctccccatgccctgcccgccgcgctggagcattcggtgtcgcccccttacggcggccccccgcgcgcccagctcggcgcccagcaagccttgtgcgcgcaggtgatgtttgctcagcgcgccaagccgggctgattcgggggtggttccgagcttccgcagggtgaccgtccgcgggcagcggaccacagccgcatggcgacgccgcctctggccccccgccagcgtggtcggacccggaccctggcgccgctcggcccacgcggcagcctcggtcccgcgagactccccagccctcgcccctttcgggaggagccccgccccgggcccgcggactgacccctcccgcccctctccgcgcaggcgcagggcggccccgttcgcgtcccgc

SEQ ID NO: 24661 - DNA, 505 bp, Homo sapiens
  source 1..505: mol_type = other DNA
ctcctctccattttacagaggaggaatttgccctgcctgcccagcacctttctgtgtctgtgtccagagcaggaagggctgctccgagctgcagggacggagcatccaggacacctggagatggcgactcctgggacccctgggggagatgcagcgtcccaggtgctccccagtggaggcaggaccctcagggagctccagcctggacccgaaccctgtcccaccctgacgcacctgcaccaggccaggctggacctgtggggtgggtgcaggcctggccccagcccggccactgccctggaagatgtaacatccaggatttgatgttttactctccaattcaccctgcaataaagtgcgggacacaggaatcttggtcctcggggcacccccttccctcgggggggtttcgccccccgcactcacggcccctgagcccgcgcggaggcccgacgccccgcggccgacgccggtccccgccccgggccgccattggctgttgcca

SEQ ID NO: 24662 - DNA, 307 bp, Homo sapiens
  source 1..307: mol_type = other DNA
tggcttcggtcagctgagaaacatggggctcgagccagaccccagggtctccctgcgtgtagcatccccactggagacctgaacagggatcagggtgggaggtgccagcctctgccacctggccctgcaggttcctcagaggggcgggtcttgtcgggcctccagcctggacttcccagcccctggctaggctccctctgggaacagccaaatggtggtccctgagatgtcccagccgtgcccctggtgacatttgggtggctccggcgggagggccgagccgagggaggaggcgccggccagctgg

SEQ ID NO: 24663 - DNA, 545 bp, Homo sapiens
  source 1..545: mol_type = other DNA
accatgttggccaggctggtctcaaactggccaggctgaatttacagtttaaacaggcgaatttggccgggcgacgcccgtaatcccctgggaggctgaggcgggcggattgcctgagctcaggagtttgacaccagcctgggcagctacgttgcagtgagctgagatcacgccactgcactccggcctgggcgacacagtgagactctgtctcagagaggaaaagggccctctgctctttctgccttcccaggcatcagcggagaggaaaaggtgacctccagcaccgtccccgaggtgggaggacccgccttggccggaagtggaggcgccgcgaccgccccgcccccgctgtgttccggccgccgagttgtgctcccgtcagccacatgtttcagaaagacgagcctcggatgccctggactcgaactcgctctcatcgtagcgcgtccaggttcgggttcgcctgagaggctgagatccgagtctcaagggcactatccctttaagacggggcggagccccgcgatgagcggcgggccggc

SEQ ID NO: 24664 - DNA, 427 bp, Homo sapiens
  source 1..427: mol_type = other DNA
tctctcaacaatatttttttttttgagacagagtcttgctctgtcgcccaggctggagtgcagtggcactggtcttgatctcctgatcctgggtaccatgttggccaggctggtctcaaactggccaggctgaatttacagtttaaacaggcgaatttggccgggcgacgcccgtaatcccctgggaggctgaggcgggcggattgcctgagctcaggagtttgacaccagcctgggcagctacgttgcagtgagctgagatcacgccactgcactccggcctgggcgacacagtgagactctgtctcagagaggaaaagggccctctgctctttctgccttcccaggcatcagcggagaggaaaaggtgacctccagcaccgtccccgaggtgggaggacccgccttggccggaagtggaggcgcc

SEQ ID NO: 24665 - DNA, 492 bp, Homo sapiens
  source 1..492: mol_type = other DNA
gctccaggaagtgctccacgcgctgcctcaggccgtccatggccccgacgcgcccggggttggctgctcgagctcgcccgcggaccagggcacccaccccgctgcacgcgcaccgctttcccgcagcctgagccgcgatgctccggccccgcgccggtgtccgcccccggccccccgctaggaccaatgggagggcagggcggacaaaggaggaggggcctgccccgtctcccccgccgcatagccctccgccacggccgccgctgcccagaccccgccgggagagggcggggcgcggcggcccagggcaccgattggccgggccggagtgcggaagacgggcaggcgtgcgtccctctcccgctcctcctggctgagtagccgcaaggccccctgggagtcgaagccttctgcgttgctatggcgccgggggcgggtcggacgcctgggcccactcggcggtttggcgggagggaggggatttgcgcaggc

SEQ ID NO: 24666 - DNA, 508 bp, Homo sapiens
  source 1..508: mol_type = other DNA
accctgggacacctggacggcccagctgctgacatagatgggggctcggaccggggcccaccccacagcccgggggcggacaagggccagggccaagaccaggcgcagccacagcgcaatcggggcgggccgcatggaggcggggcgggagcggggcctgcgcaaatcccctccctcccgccaaaccgccgagtgggcccaggcgtccgacccgcccccggcgccatagcaacgcagaaggcttcgactcccagggggccttgcggctactcagccaggaggagcgggagagggacgcacgcctgcccgtcttccgcactccggcccggccaatcggtgccctgggccgccgcgccccgccctctcccggcggggtctgggcagcggcggccgtggcggagggctatgcggcgggggagacggggcaggcccctcctcctttgtccgccctgccctcccattggtcctagcggggggccgggggcggacaccggcgcggggccggagc

SEQ ID NO: 24667 - DNA, 720 bp, Homo sapiens
  source 1..720: mol_type = other DNA
gggcacagagaccgggtcaggcctgtccctggcacagaggctgggggtggggcaggggcctgaccctaaagcccacctgatagcaaggggtacttggggactgggaccccaggccctggggggtgcaccgtggggcgggggttggaccctggccttcgaagagaggaccccacgcctttatgcagggaggtgggggtccctggcacaaggaagcggagcaagagacctcgctgcgggacctcgggccctggggcgcgcgaggcagggactctcaggcttggggagggagcgctgtccaggcaggggctgagccgcacacacctgcagcagcgcccgcacgtgcggatgcgcccgggttcccgcccgagcgccgggcggaggcggggcctggaccacgtgcccggcgccggccccgccccggccccgccccgcgcgcctgcgccctgggggccgcccattgttgggccgcggcgtgacgtcgcgggggcggggccggggcggggccgcgggaggcggcgggagggaaggagcgtcccgcgccgccgccgccgcctcggccgccgaggagccgccgccgccgtcgccgccgccgccgagccgcagccagagtcgctgccgccgcccggcccggcccggcccggccccgagcagccccgcgccgccgccgccccgcccgcccggccccccgtgcccgcccccgccgctggatgcaggcggccg

SEQ ID NO: 24668 - DNA, 952 bp, Homo sapiens
  source 1..952: mol_type = other DNA
ggaggcggggcctggaccacgtgcccggcgccggccccgccccggccccgccccgcgcgcctgcgccctgggggccgcccattgttgggccgcggcgtgacgtcgcgggggcggggccggggcggggccgcgggaggcggcgggagggaaggagcgtcccgcgccgccgccgccgcctcggccgccgaggagccgccgccgccgtcgccgccgccgccgagccgcagccagagtcgctgccgccgcccggcccggcccggcccggccccgagcagccccgcgccgccgccgccccgcccgcccggccccccgtgcccgcccccgccgctggatgcaggcggccggcggcccagctcgcagaggcggagggcggcgcgggcggcggcggcggcgcgggcggcaggagcgcgggccccagcgctagctcccgccatgcccagctcgctcggccagcccgacggcggcgggggcgggggcggcggcggcggcggcgtgggggcggcgggggaggaccccggacccggacctgcgcccccgcccgagggcgcccaggaggccgcgcccgcgccccggccgccgcccgaacccgacgacgcggccgccgcgctccgcctggcgctggaccagctgtcggcgctcgggctggggggcgctggcgacacggacgaggagggggcggccggggacggcgcagcggcggcggggggcgcggacggcggggcggctccggagcctgtgccccccgacggacctgaggccggcgcgcccccgaccctggcccccgccgtggcccccgggtcgctgccgctgctggaccccaacgcgagtcccccgccgccgccgccgccccggccgtcgccccccgacgtgttcgcgggcttcgcgccccaccccgcggccctggggcccccgacgctgctggccgaccagatgagcgtgatcggcccgagtg

SEQ ID NO: 24669 - DNA, 350 bp, Homo sapiens
  source 1..350: mol_type = other DNA
tgagccaactcacctggccagttgtggttatggaacccacagatacagggggttgactgcccatatctcgctctcacccaggctggagtgcagtggcaggatcttaactcagtagctgggatcagccatgttgaccaggctggtctgacctcaggtgatccacccggctgtggaaagcctgggcagggtctggagacccaaggcaatgccccattgggacccacatggggcaaggaggccaggtgggcctccctggagcccagcaaggacctggagtggggagagggcagaagaagctgagcggcctgaacgccttcgacattgctgaggagctggtcaagaccatggac

SEQ ID NO: 24670 - DNA, 501 bp, Homo sapiens
  source 1..501: mol_type = other DNA
agctgttagggcctggccccagatcttagaacgagaccctaaattccatgtctggaatgttctggacatgtgagccatcctcccagagccggggcccaaagccctgtacgtctgctgtgcctgacgctgccagggctcggggccagtgctctgggtctggctggcgcccagatctaggggccagctggggctggggccagggcctgcctgtcgcgacctgaagctttggggtctggggtccgcccggggcgccgaccgtcccgcctccccgcagcccgagcgggaagaagttccgcagcaagccgcagctggcgcgctacctgggcggctccatggacctgagcaccttcgacttccgcacgggcaagatgctgatgagcaagatgaacaagatcctccaaccaggtcaaggtgagtggtggcgtcacgcaggtgacgtcggcgcggggcgttctaggcggggacgcggccatgacgtgagctgcaggcgacacagcccgg

SEQ ID NO: 24671 - DNA, 616 bp, Homo sapiens
  source 1..616: mol_type = other DNA
ggcggcagcggcagcggaggcagctgaggcggcggcggcgagtgggggtccgggcggcggcggcgggcccggcggcgggccgaggagccgggcgcaagtgggagtgcccggcgctcccgcagggctggggggctgtcggccggccacaatgagcgcgccggccgcgcagggcctcaacgggctcctcccagcggcctctgcggcggcctcggcgcccctgccccgggccgcggcctgggccccgcgcgtgcgtcgtgcgtgcgtgcgtgcgtcttgcgtgcgtgtgcgcccggcgcgcggaggcccagtgcgcgtgcgccgcttgttgggccgcatggctttcggccggccgttcagggactggctgccggacggcgactcgtgcgcgctgggccaggggcgcctggcggcggccagatgctaccggggggcaccgtgagacgcagggggtcttggggcgctcctggggtggcgcggagcccgagggggtggccagccttcttgggctcgccccagtcggccccctcagggtggagacctgatggtggaaggctttcagagacccccccgtccccaaattggaacaaggcgctgagacttagtcgcctgctgcagc

SEQ ID NO: 24672 - DNA, 697 bp, Homo sapiens
  source 1..697: mol_type = other DNA
cctgggtgacagagacccgtcccccagatgtccagtcactgggccagagtccccaagatgtccccgcgcacgcgcaccaggcggccggcgcgcggactccgggcacagctgctgggcactggcagctcgcaaggcacagcgcgcaggcgcgcacgccacttaaggccccgccccctcccagcgcgctgattggcggggccgtagaggggcgggggcatggcgccgcggctgcgcagcgcggggccccgcgcgggcgggtgggcggagcgggccccccgagcgggggctggcgagcgcggggagggggccgaaagggcggcaaagccggcgcgcgcccggctgggggcggagggcgggggcccgcgggccggaacagccgcggcaagtggcggcggcggcagcggcagcggaggcagctgaggcggcggcggcgagtgggggtccgggcggcggcggcgggcccggcggcgggccgaggagccgggcgcaagtgggagtgcccggcgctcccgcagggctggggggctgtcggccggccacaatgagcgcgccggccgcgcagggcctcaacgggctcctcccagcggcctctgcggcggcctcggcgcccctgccccgggccgcggcctgggccccgcgcgtgcgtcgtgcgtgcgtgcgtgcgtcttgcgtgcgtgtgcgcccggcgcgcggaggc

SEQ ID NO: 24673 - DNA, 403 bp, Homo sapiens
  source 1..403: mol_type = other DNA
ggaaggtcctggaactctcccggccagagttcccagcgcgcctctgcactccagcctgggtgacagagacccgtcccccagatgtccagtcactgggccagagtccccaagatgtccccgcgcacgcgcaccaggcggccggcgcgcggactccgggcacagctgctgggcactggcagctcgcaaggcacagcgcgcaggcgcgcacgccacttaaggccccgccccctcccagcgcgctgattggcggggccgtagaggggcgggggcatggcgccgcggctgcgcagcgcggggccccgcgcgggcgggtgggcggagcgggccccccgagcgggggctggcgagcgcggggagggggccgaaagggcggcaaagccggcgcgcgcccggctgggggcgg

SEQ ID NO: 24674 - DNA, 382 bp, Homo sapiens
  source 1..382: mol_type = other DNA
ccttgaacacctgtgcaggcccgcccagccctagccttgggagcgacgctgtagggggaactgatggggggcagcccacccgtttccatttcaggaaggtcctggaactctcccggccagagttcccagcgcgcctctgcactccagcctgggtgacagagacccgtcccccagatgtccagtcactgggccagagtccccaagatgtccccgcgcacgcgcaccaggcggccggcgcgcggactccgggcacagctgctgggcactggcagctcgcaaggcacagcgcgcaggcgcgcacgccacttaaggccccgccccctcccagcgcgctgattggcggggccgtagaggggcgggggcatggcgccgcggctgcgca

SEQ ID NO: 24675 - DNA, 382 bp, Homo sapiens
  source 1..382: mol_type = other DNA
tgcttccgtctcagtgggcactgcagcctgaactgggtcccacagtggctggacaccccatgagctcttggaagcgcctgtgaggccctggacgcatccacgcagtgcctgtggcatcttcccagtgcccacatgacagtggcctgaggcctgaggccatgccactgtttgaacctgggcctcagagccctgctccgggcccggggccggggccacttccgcagccagcttcatatggaaggggagacggagtctcagactggatacggtattcttgtgcctcagcctcccaagtagctgggactacaggtgcccagcaacctcaggtgatgcgcccgtgctgggattagaggcgtgagccactgcacccagcctggaaggg

SEQ ID NO: 24676 - DNA, 202 bp, Homo sapiens
  source 1..202: mol_type = other DNA
gacgctggcctaggctatgagtccaggagggcttcctgaggaatatgcccctcttccttctgcccacaccggcccggtgtgcaggggggaggctgggaggctcagggacgtggccgcccactccggaccaccggaagttactgtaagtggcttccgggtctgcgcgcacagcccccccccccgccctccccgcgcgcgtgcg

SEQ ID NO: 24677 - DNA, 238 bp, Homo sapiens
  source 1..238: mol_type = other DNA
gtcagagctggagtgaaggacgaatgttgctctgggaccaaggggctgatcgtggtcccgtgtagctcaggtgaggactacggcagggcccgcccccttctacgtggcaggtacatggcagggcgggggctcgccagggacggtagggcagggctggggttccccactcggcccccacctcagatggcagcctgcacccctcagccgagctctggagtcccccgggccaggcgggctt

SEQ ID NO: 24678 - DNA, 735 bp, Homo sapiens
  source 1..735: mol_type = other DNA
cggcaaaggcaccgctgagactccccgcggggctctctgacccagagccggagccagagtcggttttcccgccgggaaaatgggtctgacgtagccccctcggggccgtgatacccgccagcacgcggggccggccccgcgcgggcggtctcgctcgcagagtcccgcctctgctgaggggcggggccgagaagaaaggaggcggggcctcaccacgaatggctaggatccccgcccatcatggactaagcgcacagcttccgcggacggggatagtccgtgatttctccccgcgccgtccaggctctggacctcacgggattcggggtcctcacgagggtgctcgagaggccgagctagggcgttcgggcccgagccgcccggaggtggcggagggatccgcgtgggccgccgggcggggcactcgggggcggggcaggggcggggcctgcacggggcggggcggggcggcgcgggcggggggcggaacatgtctcccgccgcaggaagatgaggcagcggcggcggctgcgggcgtagcgggccggagccgacgcggcggcgggcaccgcgggcaccgcgcacgccgctgccccaggggcgccccggccggccgcgcgcacgggccccgcgggacgggccacgcgggggtgggaggggcccgggccacgcgcgccgccgccgccgcccacgcgcgaccctcgggggcccggccgcgacgcacctttgtccggg

SEQ ID NO: 24679 - DNA, 486 bp, Homo sapiens
  source 1..486: mol_type = other DNA
gcctcagcctcccgagtagctcgaactcctgacttcaggtgatctgcccgccttggcctcccaaagtgctgggaatacaagcgtggtcaactttttaaattattattttaaattattttaaatatttttagagactgggatcacaggcaggagccacggcgcccgatcctaggcggggtcactttttactaaaatgtagacacggactgaagccagatctggcctgagttctgtccaaagtcaggtccggcaaaggcaccgctgagactccccgcggggctctctgacccagagccggagccagagtcggttttcccgccgggaaaatgggtctgacgtagccccctcggggccgtgatacccgccagcacgcggggccggccccgcgcgggcggtctcgctcgcagagtcccgcctctgctgaggggcggggccgagaagaaaggaggcggggcctcaccacgaatggctaggatccccgcccat

SEQ ID NO: 24680 - DNA, 343 bp, Homo sapiens
  source 1..343: mol_type = other DNA
cctgctggaaagaaccctgcgggcttcctcttggccttaggcgcctaggaggcgctcgcggatcagacatgacttagccccgtcaggtctgcaaggcccagacccgccctgcggtgcaggttcccctgaccaagcccggcccggccctgccctgagcccctgcactggctggccaagcccctgagtcctggccccgtctgcgaggctctgcgaggccccgcccttcggccgtgaccgcgtccctgaggcctggccccctgctcggccgtgctccgctcggcccgccccgcccccggcccccttccggggtccgaactgggccttggccgggccccgaggcccc

SEQ ID NO: 24681 - DNA, 524 bp, Homo sapiens
  source 1..524: mol_type = other DNA
ggtgtatacccaggaatagagttgctcatagggtaattctgtttaactttttccatctctacacaaaatacaaaaaaaatcacctgctgcagtgagccgtgatcgcaccactgctctccagcctgggtgacagagcaagaccctgtctcttaaaaacaaactttttgggttttttgttttacatagcagtggcactattttacaatcaatatttgttgaacaaatgagtgggacctggtcattagactgatgagtttcacctgggcgggccccgcggggcttttttggtcaggcgcgccgtggacagccctggcgccgcaggggcctggggctcaagatggcgccgctacagccgccgaaggtcgggcggcggcgctggcgaggctcccggagaccgcaggcagggcagcccctgccctccttcgtctgtcccggcccaggggtccgtcaccagccttggtcgcgcaggagcaggcgtttctgagcaggcgcgctgcgggcagcccctcccggggtcccttgcg

SEQ ID NO: 24682 - DNA, 632 bp, Homo sapiens
  source 1..632: mol_type = other DNA
ctcaccccgcgccggcccccacccaggggctgcatgtggaccccccgggcggcccaggggaccccgccccgacccaggggctgtggacgatgtacagcactcctttccttttggaagcaagaagaaaatacgtgaaaacggaaattaaagatttaaaattttagggctgcctcactctctcgagcgctcagcgagctcgaaagggggccggggcgtgacccctgcctgcttcctagggaggctggtgagccctgctgggggcgcgatgaggacgccaggcgtgggggccctgctgccatcgcgggactgccccctcgacagcttcccgtcagtcctactgcagaggggccaggacagcgcactctgggtcctgaggtgccgcgcttgacggacctcagagctcggaccaggtgcttgggccccgagggtctccccagagttcctacgatctctagggcagaaggcttaggaccgggaggactcgggaaccggtggcctgttgtcgcgaccaggcggtggcgaggccgggatcccaagctgcatccagctagctctagtccgcggcccctttaagggggggcggtgcgaaggcgctgcgtcacgtgcggggccgcagcacggacggaagcgga

SEQ ID NO: 24683 - DNA, 795 bp, Homo sapiens
  source 1..795: mol_type = other DNA
accggccctccccacccccagtggggcgcgctctagtagctccttgccccaccctcccgggccccgccgcgggcgcgggataccgggtgtctcggccgggaggctccgaggggctctgtgagcgagggtcgcgcacgtggcctgggggcggggccggccgcttccgcacccctccaaccccggccacgtggggatcggagccctcctccatcgcgaacgggggcgcgcccggggccaggagggaagcatccggggagggggcgggctcccgccggccgcgcgccccggcgtggggtgggcgcgccagcgaggaggcggggcgcgctctgggagggaggggcgtgccgggatggggcggggcgcgctctcggaaggaggggcgtgccggagagggggcggggtcctcggcctcccgccccggcttgagggggtggtgctccggggcgcgcgctggagtggggcgcgccgggagggggcggggctcccggccttgcaccctagcgcggagaaggcgcgctccgggcctaagacgctaggcgctggcggaggccggagtgggcgcgccggggggcgggttcctccggcccgagccccgcccccggcggccgcgcgcggctcggagagtggtggagggcgcgccgggcggggggcgtggctgcggcgccccgagggggcgtcctccgggcggggcgggctgtggccgcccccgcgggctccggtgcgtcaggacgcgtcaggcggggcggggcaggccgagcgcgggcgtcggcggcggcgcgcgccgggcctcctcct

SEQ ID NO: 24684 - DNA, 649 bp, Homo sapiens
  source 1..649: mol_type = other DNA
caggggtggagaaggaccccctgacgccagtcccctgcccctcagcaggcctggctccagcacagagaagagccattgttgctgctctgggggccctaggcagacatcgcaggccggtgggacccggcgcctgtgcacgctcacgtagcggggcctgttcgggtccctcccgcacccataggcagcagtgcggaccgagtcctggcgcaggtgtgggcggggctggggtcatatcccctgcatgccccgcatgccatggctgtactcacatggcaagaggtggtgatcgccagctcgggccgaggggatggggactgacaggccccgggcccatgccgccccctggcacgggtggatgccccgcctcccgggggtgcccagctggactgtggcacccccaaagcagggcttcccacggcacgacatggagacctgtggttgcgaggctccctggggctcggcttggaccgcgatggggctgggccctggcctcctaacggtctggggcggtagctgggggggcgctctcccccctgcccgcgactcggagcacccccacccctcccctgccgggccaggccgggcggcgttgttggcgggggccccggtggaggcccggcctgggcggcgcccgccatgaatgggctgt

SEQ ID NO: 24685 - DNA, 279 bp, Homo sapiens
  source 1..279: mol_type = other DNA
ttctcctgcctcagcctccggagtagctgggactacagggtaatattttaaaaactaatgcaaaagaatttctgatgagcaatatataaagactttaaagtcacttgatccttgcagtgagctatgatggcaccagcctgggagatcgcgccattgtactccagctcataaagaaaaatattttaaaacatttctaaatgttgatgtctgacgctagtcgcgcggtcgctctgtgcctgcagacccccgccccgcgcgctcctcgcgtcacttccgggg

SEQ ID NO: 24686 - DNA, 452 bp, Homo sapiens
  source 1..452: mol_type = other DNA
tgaaggggtttctggaggcctagctgaaaggaagtcaccttgacaaattccctcccgttgagaaccacttggttaaacctgtccaactggaaggagtaacaaattgctcataaaatatgcatgttttggtgacactgcactccagcctgggtgacagactgaggctctaaaaaaaaaaaaatgtgcttgtttggccaggtggcccacgccggagtgtggaacctggccccatcccggactcaggggacgggtgtcatataccccctctgcgcgctcgcccagcgcagcggccccgcctctcctcccctcccgccgcccggaggtcatgtgagcgcagtgccggagcggggcggggcgaggcggcggcgcgcagtgcctactagcaattgtagtccttggcgaagggactacgctcccgtcgtgctccgcggctccaggcggagacgaggcgg

SEQ ID NO: 24687 - DNA, 450 bp, Homo sapiens
  source 1..450: mol_type = other DNA
tgaaggggtttctggaggcctagctgaaaggaagtcaccttgacaaattccctcccgttgagaaccacttggttaaacctgtccaactggaaggagtaacaaattgctcataaaatatgcatgttttggtgacactgcactccagcctgggtgacagactgaggctctaaaaaaaaaaaaatgtgcttgtttggccaggtggcccacgccggagtgtggaacctggccccatcccggactcaggggacgggtgtcatataccccctctgcgcgctcgcccagcgcagcggccccgcctctcctcccctcccgccgcccggaggtcatgtgagcgcagtgccggagcggggcggggcgaggcggcggcgcgcagtgcctactagcaattgtagtccttggcgaagggactacgctcccgtcgtgctccgcggctccaggcggagacgaggc

SEQ ID NO: 24688 - DNA, 380 bp, Homo sapiens
  source 1..380: mol_type = other DNA
ccaggatcgtgccactgcactccagcctgggcgacagagtgagactccgtctcaaaaaaaaaaaaaaattgtgtgtgtgtgtgtgtgtgtgtaaagaaacaagccccaggctgggcgcagtggctcacgcctgtgcacatctgttgtcccagctgcttgggagcagtgagccaggatcgcgccactgccctccagcctgggggacagagtgtgtgccctccttccaggctgggctgtgggtccgaggagccccgactcttatgtacctgacagccctgccttaaaaaaaaaaagtcaggactggtgcctgagttctcgcagtcaggaattgaccgcgcggacatacccaggtcccggcgcggaccttggcctcctcatct

SEQ ID NO: 24689 - DNA, 280 bp, Homo sapiens
  source 1..280: mol_type = other DNA
catgattaaagctgaaggaacatgtggaccacatttgaagcacggtggttttgctctgtcacccgggctggagtgcagtggcacgatcctggctgttcctgacctcaggcctaagacagtccaggctagagtgcagtggtgcaatcacagcccactgcagccgcaatcctcctgcctcaggatcccaagtagctggggccacaggcatgcggacaggtcatctgaaatcattacacagggctctaatacatatttgaatgaatgttgggggatgtgggaa

SEQ ID NO: 24690 - DNA, 812 bp, Homo sapiens
  source 1..812: mol_type = other DNA
gggggatgtggaaccatttctgcagctgccagtccccttccaggccctgtcatgggatggagcagggcatcactgtgcggcgccttggcctgtggatcccctccccacgtttcttgcccggtgcaggccggaaggcaggcaggtacaagcaaggagtcggctctacgcgcagagccccaggggagcggcccgtgctgggcatggcagtcccagcagtgcctagctgccggccgcgggtccggggccagaagacaacggggcacccacgtcacaactgttttcccctcctcgcccaggaaagccagatggaaaaattccagcgcctgtcccggaaacctcgcggcctagcgcgcgcagcccgccgcctccccgcgccgcgcccgccaccgccccacgcacggaacatcccgcggcgccgcccgtccgtgacgtcaggtggcgagactggaacacacggcggcagggcggtgccaggacgaccagccacgcgtcgccatggcaacagcgggcggggaggggcgggcggcggaaggcccgcccctagaagggtgtggaaaccgttagaccccctttcctgcccgcgcgcgccctcgcggccacgcgctttcggtgtcccccgcgggcagcggcccggcggcctcgtagcggccgcaaaacgccgtggccgtcgcgcggcgccatccgttgtcgcaaagcggcgcgagaaacgcccagccgggtgttggccccgccccgcgctgtgacgtcggcggcgcgcgcccccggcgccgtggccgcggctgcgcagtggggcgcgtatggctgccgccccc

SEQ ID NO: 24691 - DNA, 382 bp, Homo sapiens
  source 1..382: mol_type = other DNA
acactgaccaccccccacacctggcctggagagggtgctgggcgtctggtgtcagtgcacgtggcctgcatccggcctcaggctatgtctctgtacagcggagcctgcgccacggagcaggcccgccacctgggtccggggtctggggtcgtatgggatctggaatccggagtctgaagtctggggttcagagtctgggatctaggattcaaggtctgaggcctgggatcccggactgaggtctgtgctccagggtttaggattcccggtctggagtctggggcctggtgcctggaccccaaattctggacctcggtctggagtctgggcttcaggtcaggatgcttagggagtggagcaagaggtcttccaccagctcctc

SEQ ID NO: 24692 - DNA, 199 bp, Homo sapiens
  source 1..199: mol_type = other DNA
tgccaggctgacctgctgagaagccaggcagcgccacccccaccttctctggtttcacagaagacgcgaggcccgcctctcctggccaagggctgacctcagatcctggaggaggccagcctgggctgaaatcccagctgtatccaggctactgtgtgcctcagtttccggattcatcaagcgggagccacttgaggcc

SEQ ID NO: 24693 - DNA, 571 bp, Homo sapiens
  source 1..571: mol_type = other DNA
acccctcttgagctcaggaagcttctggaaacccctgcagaagccagcaggggaacccccactccttgtgtgccccaggcccggggcctggggagaagcctggtttggggccccagcgtgggtctcaggtcctccctgaaatgctattcgaggacagaggaagggtccttcacagacaactcggggagctcagtgctccccaggcagggtggctgggactccaagcgtgctggtggtgcacggccagttgccctgtgtggggccaggcggtaggacacggcccagggcctcgcaggtcccacgggccccgcgagcctcaggcggcaaaaacaggccagctccgggcgcgccgcagggtcgctgcctaggttccgcaccgagacccccgtgcgccgcactgcgcaggcgtgcgctagccgtttcggacacgccccaccgccggagcgcgcagccgcactgggttcccggagagcgccctcttctggctccgcccacgtcgtgcgcagggggtgaggccgggcggagcctgcgtcgggggcggggccagagcaggtccgggcctataaaggtg

SEQ ID NO: 24694 - DNA, 270 bp, Homo sapiens
  source 1..270: mol_type = other DNA
ttgtagtgagctgccactgcatactccttgctctgtcccaggctggagtgcagtgcaagtagctgggactacaggtgcccagctgggattacacgcgcccagcgccttttcaggacagattctgggctgggagcatcttccagccaagtatgagggctgggctgccaggccgggagccctcccgtgctctggggcagcggtccccgaggcaggctgctacacctcggagaaactgtgttgttcaaaaaaaaaaaaatgttgcagcagggg

SEQ ID NO: 24695 - DNA, 753 bp, Homo sapiens
  source 1..753: mol_type = other DNA
ccagcttctcccgggctgcgggcaggaggagaagccaggtgaccggcctgccccggggtctcgctggcgggggggatggccaggtgcagctccttcatcgtgtcgtcgctccagtcggtgagcagcgcccctgacacggggatcgcccacccaccaggacttgaagttcacatggtggcggtagaaggagaacttctggcagtgcagacagccgtgggccagcgccgccgtcaggcacaccaggcacagcagcagggccatgcccgtcccggcccgccgccggccaaccacggcccccactcgggcgcttggccgtggcctccgtcctcagccgactactgacggcgccggctccgcctccaggccccgcccacgacccgactccgccactgggtgggccccgccccaaggccgcgccctacgcatgcgccaatggcccgtgcctgtgccaatggccggtgcccgctcctcggccggctcccgctgaggccccgccccgtgtcgcagccacggtgcaggctccgcccacaggccgcggccccggttgctaggcaacggagacctccgcccggcccggctcagggcatcccagggctgctgcccggaacttggctccgtgcgccttcgccgcccgggccccttaaagcccgcgggaccgagtctgggagacccctgcacgccgcttctgcgcggagccccgggccctttaaggaaagtaggtccggtccgcgggtgcggtcgggcatgcgtgtg

SEQ ID NO: 24696 - DNA, 623 bp, Homo sapiens
  source 1..623: mol_type = other DNA
ttggccagactggtctccgacctcaggtgatccacccgcgtcggcctccggattacaggcgtgagccaccgcgcccggcctcgcccttcctgaaggctcggcctgagatcggactggccgcctcggccgcctcagccgccgcaccgcctcgcagccgccgcggagggacacggccgcgggaacgccccacacgcatgcccgaccgcacccgcggaccggacctactttccttaaagggcccggggctccgcgcagaagcggcgtgcaggggtctcccagactcggtcccgcgggctttaaggggcccgggcggcgaaggcgcacggagccaagttccgggcagcagccctgggatgccctgagccgggccgggcggaggtctccgttgcctagcaaccggggccgcggcctgtgggcggagcctgcaccgtggctgcgacacggggcggggcctcagcgggagccggccgaggagcgggcaccggccattggcacaggcacgggccattggcgcatgcgtagggcgcggccttggggcggggcccacccagtggcggagtcgggtcgtgggcggggcctggaggcggagccggcgccgtcagtagtcggctgaggacggaggc

SEQ ID NO: 24697 - DNA, 635 bp, Homo sapiens
  source 1..635: mol_type = other DNA
tacaggcgtgagccaccgcgcccggcctcgcccttcctgaaggctcggcctgagatcggactggccgcctcggccgcctcagccgccgcaccgcctcgcagccgccgcggagggacacggccgcgggaacgccccacacgcatgcccgaccgcacccgcggaccggacctactttccttaaagggcccggggctccgcgcagaagcggcgtgcaggggtctcccagactcggtcccgcgggctttaaggggcccgggcggcgaaggcgcacggagccaagttccgggcagcagccctgggatgccctgagccgggccgggcggaggtctccgttgcctagcaaccggggccgcggcctgtgggcggagcctgcaccgtggctgcgacacggggcggggcctcagcgggagccggccgaggagcgggcaccggccattggcacaggcacgggccattggcgcatgcgtagggcgcggccttggggcggggcccacccagtggcggagtcgggtcgtgggcggggcctggaggcggagccggcgccgtcagtagtcggctgaggacggaggccacggccaagcgcccgagtgggggccgtggttggccggcggcgggccgggacgggcatggccctg

SEQ ID NO: 24698 - DNA, 348 bp, Homo sapiens
  source 1..348: mol_type = other DNA
ctggagtgcagtggcgccatctggcacacaatgggccttcgacaaatgtttactgaatgaatgacaattgtgaggctgcgggaaccacaggatccgttcccccacccacccaggagttgggtttggaggcgggaacttgccggctaagctccacgtgggcgccccgcccacatccagccacgctcacacctgtcagctggtgggagggtcaggaccagcctctaaggggcgcctgtcgtcgtcagggaaacgcagcgtctccctgccggggaggtggcggggcggggctttctgggaggcggggcttccggggccggctcggctgggaccgggcgctcgtcgtcagct

SEQ ID NO: 24699 - DNA, 620 bp, Homo sapiens
  source 1..620: mol_type = other DNA
gctgggattacaggcgcccgccaccggcatgagccagggctcctggccgtcctcaggtgatctgaagtgctgggattacagtttttttttttgtacccaataaacagcattgttgtcgaatgaatactggacttggagctacagcaagtcctgggcgtcctcctcctgggacgggattcgaacccgctatccgacgggcccgcccacagggtctccccgggtccccgcttcgggccggcgagtgggggaaggggtcggccgagggcaaccgaggacgtgcgtgcgtacgttcgtgcgtgcgtggattcgggcgggcgggcgagtccacggggcggggcgccgagggggtggcgcgcgcgggtcggcccgctgggcggcgggcacgcgccggcgtcttcgctccgggctcccctagcgcgcggggcgagtggttccgcccggcccccggctcattgtgcgcggaggcgctggaggccccgggcctgtgactacaaagagggagtcgggggccgggccggaccggagcgcggcggcggcggcggcggcggccgaggccgaggccaggccccctcccctcagcctcgccccgcccctcccccaaccgcccgcctagcatggtg

SEQ ID NO: 24700 - DNA, 571 bp, Homo sapiens
  source 1..571: mol_type = other DNA
tcctggctaattttttaaaattttttgtagagatggcgtgaggccccgcgcgcggcctcccaacagaaatagagttcctggcgggcccgaccctccaggcccgcccagcgcggggcctcaggatgcacaaggcacgggaggagggaggggagcgacgccgccgccccaccctcggcccgcggcctgtcgcaccgctgtcccccagggaacccccggtccgcgtcggccgccgccctcttcgtttggcgaacggcgggccctctggtgtgcgcatgcctggcccgcccagcggcgtgaaggcaaactgcgcgtgcgcacaacgctctcaacgaaccctcggtccgctgcggccgcacggggccaactttcgcgagggagcggctgacactctccgggcgacgttatcgctccctccgcctgcgcctggccgctctagaaaggggtgccagccatcgctggggtgcccgccagcagccacgggtcgccagcgccacgcagcggaggcgggcggcatggctggcccaaggtgcgcaggcgcactagccctgggggtccgtgtctgcgccctgag

SEQ ID NO: 24701 - DNA, 741 bp, Homo sapiens
  source 1..741: mol_type = other DNA
gctttgggtggggctggcccacctgccctgtaagtacagcctgggcccacaggggcccgccaggagaacttgaccttgagctgcccgtggcgccaggctggggacacagccttgggcgcccggggaggggaaagtgcggcgctgcgggtgccccgggctgcgggaagcgccgctggcttccctagccccactcactatggagaaggtgccgggctcttcccggacgactctgcagcgctccagcagcagggctccgacgggctggaggagcgggcgccgggacggggcagtgagcacccggcctccgaggggcccagcctgggacccgcccgcgcgcccgggacgcccctacctcggcctcgcgccgcttcagcactgcgggcacagcgcgcactcaggggcgcaggcagcccccgcccggaccccggcctcccgtccccggcgccccgacccggactccggcctccggcacccccgcccagaccccggccccggcctcccgcccctggcactgtctcggtctcccgggtcccctgcccttcttggggcccctcatgcccagctcggccgccatctcggccggctgccgggacagagcctgcagctccttctcttgtaccgcatggctccgcggggaacgggaacccgggccgcgccctcccggccgccgtccccgctcaggctggggccggcgccaaaaatgtctcagggcgcagacacggacccccagggctagtgcgc

SEQ ID NO: 24702 - DNA, 756 bp, Homo sapiens
  source 1..756: mol_type = other DNA
gcccgccaggagaacttgaccttgagctgcccgtggcgccaggctggggacacagccttgggcgcccggggaggggaaagtgcggcgctgcgggtgccccgggctgcgggaagcgccgctggcttccctagccccactcactatggagaaggtgccgggctcttcccggacgactctgcagcgctccagcagcagggctccgacgggctggaggagcgggcgccgggacggggcagtgagcacccggcctccgaggggcccagcctgggacccgcccgcgcgcccgggacgcccctacctcggcctcgcgccgcttcagcactgcgggcacagcgcgcactcaggggcgcaggcagcccccgcccggaccccggcctcccgtccccggcgccccgacccggactccggcctccggcacccccgcccagaccccggccccggcctcccgcccctggcactgtctcggtctcccgggtcccctgcccttcttggggcccctcatgcccagctcggccgccatctcggccggctgccgggacagagcctgcagctccttctcttgtaccgcatggctccgcggggaacgggaacccgggccgcgccctcccggccgccgtccccgctcaggctggggccggcgccaaaaatgtctcagggcgcagacacggacccccagggctagtgcgcctgcgcaccttgggccagccatgccgcccgcctccgctgcgtggcgctggcgacccgtggctgctggcg

SEQ ID NO: 24703 - DNA, 513 bp, Homo sapiens
  source 1..513: mol_type = other DNA
ccagccccagggatgcaccctcaggccccgggggtccacccccaacctcccggggtccatccgtcggctcctggggtccaccctcagcctccgggagttcacccctcaaatcctggggtgcaccccctgcactgatgtccgcagcgccgcctactgtgtcagtgtgtgtgggagtgccaggcacagcaccatcccccagtttgggccgactggggagggcctggggcccgccaggagacacctgtgggactggtggaggacagaccccaccagccagctaggaggggatctggggtccttccacgatatccttggggtctccagatagcccaccaggggtggggagggtgagcagggacagggcgcccccactgacttgggaccctcctcctgacacatcaggcccagctctatcactggggagggagaaaggccactctgcctggagtgggggcgccgggcactgtcccccaaggtcgcggcagaggagataggggtctgtcctgcacaaac

SEQ ID NO: 24704 - DNA, 685 bp, Homo sapiens
  source 1..685: mol_type = other DNA
ctttttgctaaattcaatttagatctttgcttattaaaagcaaagtgcagttcatacctgagattttttttctggatttaaccaggaggggaaatatttttgctaggtaagtccacattttacctcacggaaaccaccaaagaaatcgttttttccttgggagatccacattttagttttagggtaagtttcagtttccacaggaaaaatctgaatttatctgcaaggagtaaaatttttgcttaagtccaaattgtacacgaaatattttactaaatttgaatatctttaacattggaagttctttttttttaaacactggaagcattttaagaactgaatatcatcgatgattaccaggtgttactggaaataaggacaaccccccaagcacccgggggcctacccaggggaggggtcccgctgcgtgaagggaccctagggagggcgacgtggaccacgagccgcccccgcccccaaggcacgattgtgggggcggggacggctcggggcgcgcgcagcgcgtacccggcgccacggcagccccgcccccagaaggacgcgcgcaggagggggcgtggcccgaggctgggaggggcgggcgcgactttttttcccggcggccccgcggctctgcccctcgtgcggtcgcgttcccggcggcgcggggggcgtggcctgggcg

SEQ ID NO: 24705 - DNA, 736 bp, Homo sapiens
  source 1..736: mol_type = other DNA
ggcagtgagcacccggcctccgaggggcccagcctgggacccgcccgcgcgcccgggacgcccctacctcggcctcgcgccgcttcagcactgcgggcacagcgcgcactcaggggcgcaggcagcccccgcccggaccccggcctcccgtccccggcgccccgacccggactccggcctccggcacccccgcccagaccccggccccggcctcccgcccctggcactgtctcggtctcccgggtcccctgcccttcttggggcccctcatgcccagctcggccgccatctcggccggctgccgggacagagcctgcagctccttctcttgtaccgcatggctccgcggggaacgggaacccgggccgcgccctcccggccgccgtccccgctcaggctggggccggcgccaaaaatgtctcagggcgcagacacggacccccagggctagtgcgcctgcgcaccttgggccagccatgccgcccgcctccgctgcgtggcgctggcgacccgtggctgctggcgggcaccccagcgatggctggcacccctttctagagcggccaggcgcaggcggagggagcgataacgtcgcccggagagtgtcagccgctccctcgcgaaagttggccccgtgcggccgcagcggaccgagggttcgttgagagcgttgtgcgcacgcgcagtttgccttcacgccgctgggcgggccaggcatgcgcacaccagagggccc

SEQ ID NO: 24706 - DNA, 671 bp, Homo sapiens
  source 1..671: mol_type = other DNA
ttagggtaagtttcagtttccacaggaaaaatctgaatttatctgcaaggagtaaaatttttgcttaagtccaaattgtacacgaaatattttactaaatttgaatatctttaacattggaagttctttttttttaaacactggaagcattttaagaactgaatatcatcgatgattaccaggtgttactggaaataaggacaaccccccaagcacccgggggcctacccaggggaggggtcccgctgcgtgaagggaccctagggagggcgacgtggaccacgagccgcccccgcccccaaggcacgattgtgggggcggggacggctcggggcgcgcgcagcgcgtacccggcgccacggcagccccgcccccagaaggacgcgcgcaggagggggcgtggcccgaggctgggaggggcgggcgcgactttttttcccggcggccccgcggctctgcccctcgtgcggtcgcgttcccggcggcgcggggggcgtggcctgggcggcggcagaggcgccattttgcgaacggcgagcagcggcggcggcgcggagagacgcagcggagtcctggtttcggaccccagcggccggatggtgaaatcctccctgcagcggatgccgctcctaagcctgcacagccgcggcggcagcagcagtgagaggccc

SEQ ID NO: 24707 - DNA, 639 bp, Homo sapiens
  source 1..639: mol_type = other DNA
ccttggggggctggtccgcggacaggcagggcccgcggggctggtgggtcccggccgtcgagcgtgcgctgcgggagcggggagcgctttgcggtggacgagctcccgcgggtccctgttgcctcgatgtggcccctgcacgcgacggacctcgtgggcccctgagcgagtcggtctggatggcccgggacgcgccgggcgaggccgcgcacgtagacggcacccagggcttctccgcgggggccgccggggagctgggggtggcgcactccgacagcccggcagcgccctgggaagacccccgccgcttcccgggaagacgcgtcccgcttccgggggcgcgggtgccagctgcggttgtgggggagcccgcggggtctcggtcgagctttcccgactgcgtcccccgaggtgggcgtcgctcagccccggatcgggaggttgggccgcggtgccctgcgcagcaaatggctgctggcgctgccggctgcgcgattgtgaaaatctcccccggggcgcgaggccgcgtctgcctggatgacgcaaccgggagggcccgggcctggagcgggggcgggggggcgggcggccgggagccggagcggggcgcgtcctccatgaggtcaggctaggcccgcc

SEQ ID NO: 24708 - DNA, 731 bp, Homo sapiens
  source 1..731: mol_type = other DNA
cgctgcgggagcggggagcgctttgcggtggacgagctcccgcgggtccctgttgcctcgatgtggcccctgcacgcgacggacctcgtgggcccctgagcgagtcggtctggatggcccgggacgcgccgggcgaggccgcgcacgtagacggcacccagggcttctccgcgggggccgccggggagctgggggtggcgcactccgacagcccggcagcgccctgggaagacccccgccgcttcccgggaagacgcgtcccgcttccgggggcgcgggtgccagctgcggttgtgggggagcccgcggggtctcggtcgagctttcccgactgcgtcccccgaggtgggcgtcgctcagccccggatcgggaggttgggccgcggtgccctgcgcagcaaatggctgctggcgctgccggctgcgcgattgtgaaaatctcccccggggcgcgaggccgcgtctgcctggatgacgcaaccgggagggcccgggcctggagcgggggcgggggggcgggcggccgggagccggagcggggcgcgtcctccatgaggtcaggctaggcccgcccggtcttcgcggggacggggggtgaggctctgccccggcggggctgcgtgaggggaaggggccccccgccctgggaaggttgggctgtcctgggcggcgccgcccgaggagtcggggctcagtgaaccgggtgggcccctgcctgggcggggcggggt

SEQ ID NO: 24709 - DNA, 690 bp, Homo sapiens
  source 1..690: mol_type = other DNA
ggtctggatggcccgggacgcgccgggcgaggccgcgcacgtagacggcacccagggcttctccgcgggggccgccggggagctgggggtggcgcactccgacagcccggcagcgccctgggaagacccccgccgcttcccgggaagacgcgtcccgcttccgggggcgcgggtgccagctgcggttgtgggggagcccgcggggtctcggtcgagctttcccgactgcgtcccccgaggtgggcgtcgctcagccccggatcgggaggttgggccgcggtgccctgcgcagcaaatggctgctggcgctgccggctgcgcgattgtgaaaatctcccccggggcgcgaggccgcgtctgcctggatgacgcaaccgggagggcccgggcctggagcgggggcgggggggcgggcggccgggagccggagcggggcgcgtcctccatgaggtcaggctaggcccgcccggtcttcgcggggacggggggtgaggctctgccccggcggggctgcgtgaggggaaggggccccccgccctgggaaggttgggctgtcctgggcggcgccgcccgaggagtcggggctcagtgaaccgggtgggcccctgcctgggcggggcggggtgtgctgaaggccgcccggacgccctggaggggtctccgcccggagcctggcgctgcctcgtgacc

SEQ ID NO: 24710 - DNA, 550 bp, Homo sapiens
  source 1..550: mol_type = other DNA
gccctgggcgctggtcaccctggacagagcggggatccgaccccagtgcagggctggactcctggccgctccaggatgctgccagttactgggggacgcgcgggacgcctctgggttcccccaccgcaccccctagggtgaggttccgcctaaggggacgagaggggtgggcagccgcctgctcaaggccacaggtcccggcgctgcagcggcggagggcctccgaggacagacccgcaaggtcacggccgagccccggcaccgccggccgacaacgcggggacggcggatccccgaggctggacccccaagacgggccgagcggggtcgttcctgcgcgtagcccggggacagagaggccgaagggccgcagcccgcggtgccgtcgggaccggtgccgcgctcacctgggccgcgaggaagccgcgccagcgcagccgccaccgctgccgccatgtcggccggtgcccgccgcaaccaacggcagatgtttccccaacgccccgagaccccgggccacgcatgcgccgcgcatgcgcgtgggggaggt

SEQ ID NO: 24711 - DNA, 574 bp, Homo sapiens
  source 1..574: mol_type = other DNA
aaaatctcccccggggcgcgaggccgcgtctgcctggatgacgcaaccgggagggcccgggcctggagcgggggcgggggggcgggcggccgggagccggagcggggcgcgtcctccatgaggtcaggctaggcccgcccggtcttcgcggggacggggggtgaggctctgccccggcggggctgcgtgaggggaaggggccccccgccctgggaaggttgggctgtcctgggcggcgccgcccgaggagtcggggctcagtgaaccgggtgggcccctgcctgggcggggcggggtgtgctgaaggccgcccggacgccctggaggggtctccgcccggagcctggcgctgcctcgtgacctaacccgggtccggggcctcggtggtgctcctgatgcccctcacccacccctgaagatccgaatagtcagagggatcacaatctttcagctaacttattctctggggccacagaatgtaatcgtgggaaccctgagtttcatcagagccggcgcacagtctcctgcagcccaggcgttgcctgagctcaacacggcctaggcccaagcttta

SEQ ID NO: 24712 - DNA, 581 bp, Homo sapiens
  source 1..581: mol_type = other DNA
actgtgatttttaataactctcatgccaccccaatggtttgggtccctccaagaggctattgaataagtgaccccctgtgaagtgggtggagttaccagccccatttgacaaatgagctcacttgcccagtgctgggcatggtggctcatgcctgaaatcccagcaatttagggggctgaggcagggcttgaggccaggagtttgagaccatcctggccaacatggcctctctactatattagccggcagctactcgggaggctgaggcacaagaatcacttgaacctggaggttgcagtgagctgagatcgcaccactgcactccagcccgcatgcgtcctcatcgggggtaccgacagcgggagcctcctcaccttcgcggcgatcgtcttgtcgatgtacttggacaagtccaagatgctctcctttttcttcttctccttatcctgcggggaaagcagagcgcatgagacctggagcgcggcccgagctccacgccccccggctccagattccgccgcgcgctcaccacctcccccacgcgcatgcgcggcgcatgcgtggcccggggtctcggggc

SEQ ID NO: 24713 - DNA, 570 bp, Homo sapiens
  source 1..570: mol_type = other DNA
ggagggagggtggcgtgcgggcctggcccccggcctcacggccctgcccctgcagccaccggcctctacagctgcctggcgccctgtgtgcggcggctgcccttcggcaagtgcaggtgagtctgccctgctggccccgacgtgcctggcggtgatggccacggcccctttgccgccccatagccccccatggtgcaataccctcagtgctggcctggggctcctaggcccaggagcagggcggagtcgagcccaccagcagccaggcgccaggggtggcggggggagggtgcccttgtccccaggaaccctgccccaggtcgcaggccgaaccctgggttccccagggttctccggggaacccagaaggttccccacagcccagagcttggcctggctcttagggcagacctgggtctaggaagcggggctagcccaggggcgcaggcgaggggctctgtgggtacagcccgtggcccccagcgcctgcccgggtcgggctctgccctgcccttggggactctgcgggcttggccccacaagcgcccgcaggcccgtatgctgctcctg

SEQ ID NO: 24714 - DNA, 416 bp, Homo sapiens
  source 1..416: mol_type = other DNA
gtgtgacttagtgacaaatcacactggcctggatgccagtaacagggtgggaatctaaaactcttctaaaacgtttagccccatctctatttttttaaaaaattaaaaatttatattaaaaatactgtagtagtctcagctactccagactctgaggtgggaggatcacctgagcccgggaggtcaaggctgcagtgagctatgcgcccccagggctgtcctgggcacacccctccctgcgcgtcacctgcccaggtgggcccacctgcccacagcgcccactctgcgggctgggttggctcccgccagggttgggaatccagggtggaggtggcagagccctgggacccctgtcctccggagactccaagcctgggcggcacccccggcccggagcaggaggtactggggaaggg

SEQ ID NO: 24715 - DNA, 581 bp, Homo sapiens
  source 1..581: mol_type = other DNA
cccgctgagcccaggagccgggaggcctgcgggctgacccagtcatgcacctgtcctcatgccagcggctctgagggactcctcagtcctggggcgtcgccgcctgcggctgcagctaagaagatgcatgtttttttccaatgatttgtaatatacattttatgactggaaacttttttgtacaacactccaataaacattttgattttaggtttactggctagtgtagctagtgtaaacaggacccagtgatgcgaccgggctccgccccggcggcaacacgctgtatagacgcgccgggtgcctcgtgcgcatgcgcggcaggcccttcgggacgagctggaggcagaggcctcggccgcacgtagtagcccccctactccccggccaagtcagggcctccctcttcccgcggagtcgcaaccacgggtagctctccaggcctccgcatgagcggagggccccccgcgcgaccttgaatggcccgggcgcgcgcggtcgtgtgggagttgtagtcctccgtccccgtccgcgcggactccgtttcccgtggtgccccgggcggcccgcttccggcgcag

SEQ ID NO: 24716 - DNA, 462 bp, Homo sapiens
  source 1..462: mol_type = other DNA
gtctttggaaacactaagaaaatcaaatttttaaaagttatttatggcctgggaaacaatttgcatttgtccccaaataaagcatcagacgccacccagccctggggggaggcccacgcctgctggagggttctggggtgcacagcgccaggttaacgctgaagcctgccccgctgagcccaggagccgggaggcctgcgggctgacccagtcatgcacctgtcctcatgccagcggctctgagggactcctcagtcctggggcgtcgccgcctgcggctgcagctaagaagatgcatgtttttttccaatgatttgtaatatacattttatgactggaaacttttttgtacaacactccaataaacattttgattttaggtttactggctagtgtagctagtgtaaacaggacccagtgatgcgaccgggctccgccccggcggcaacacgctgtatagac

SEQ ID NO: 24717 - DNA, 251 bp, Homo sapiens
  source 1..251: mol_type = other DNA
tcattggagtgcctatttaatagattgaatgctatccaattcatgaattgctaataagagccaatgagatcattaaactcaatttgttgaaattcatcacgcccggccctatatggccctgtttcctcgtctctggagtcagcgcctctgcgaagcgagagctggacggagacttcaacttccggcgtgccccgcgcgcgcccggcggtcggactaccagtcccaggctgccccgccgcggcgggcggcgg

SEQ ID NO: 24718 - DNA, 610 bp, Homo sapiens
  source 1..610: mol_type = other DNA
ggggggtaccaggtccgcaccacgcactcaatgcgcccacccgtgggccctgggtggcggcgtgcagccggagcctgcaccattcccctcaacaatggctttctccagggcctggaggcctccgcacgggcaaaggctggaacgccaggcagccggcgggggcggggccgcgccacctgcacctcccacgcgcaccccaccctgatactcgcggggtcggcgaggaggcgcccgccctttcggggccctcgaggaggcctcccgcgaccaccaggtgacagctgatgtgccaggggctggggtcgtcgcagccaggagagactccggccctcaccaccacctgggcgagatcacgctgcaaacggggccccttcccggtgcagcccctccacccccagcagaacttgggaaaggcgcggtccgggactctccgcggatcgggaggggattccaggcccccccgaaagtccgggccgcctcgcgcgctggaaatcccgcgcgcgccccgaaccgcggctcggctgccgggaaatcaggagaaaaaaacttctgcttttttttcttttctggcggttctcgcccccacgtggggcgcccccgcacgccgccg

SEQ ID NO: 24719 - DNA, 426 bp, Homo sapiens
  source 1..426: mol_type = other DNA
ctgtggccccagctacccggaaggctgaggtggaaggactgcttgagcctgggacttcaaagctgcagtgagctatgactgcaccactgcagtccagccacggcgttccccatgacacctttctgagacccagtttccacctctgtaaaatgtggatgagggtccccggagctggcatgcaggattcgaaccagctcacctagcgcggcgccttcctgacgtcacgaagtcaccctcttcgccccgcccccggccccgcccgcgcccggagccccgccccactctcctgggcgcagcctaccccgctgcctgccccgcgccccgcccccgctccggcctcccgcagccggggctcgcgattggccttgccgggacgccagggcccgccccccgagtgtcggccccgcccccgcagaggggagcgag

SEQ ID NO: 24720 - DNA, 426 bp, Homo sapiens; identical to SEQ ID NO: 24719
  source 1..426: mol_type = other DNA

SEQ ID NO: 24721 - DNA, 393 bp, Homo sapiens
  source 1..393: mol_type = other DNA
ctgtggccccagctacccggaaggctgaggtggaaggactgcttgagcctgggacttcaaagctgcagtgagctatgactgcaccactgcagtccagccacggcgttccccatgacacctttctgagacccagtttccacctctgtaaaatgtggatgagggtccccggagctggcatgcaggattcgaaccagctcacctagcgcggcgccttcctgacgtcacgaagtcaccctcttcgccccgcccccggccccgcccgcgcccggagccccgccccactctcctgggcgcagcctaccccgctgcctgccccgcgccccgcccccgctccggcctcccgcagccggggctcgcgattggccttgccgggacgccagggcccgccccccg

SEQ ID NO: 24722 - DNA, 538 bp, Homo sapiens
  source 1..538: mol_type = other DNA
tgggtcccagagttggcctgggcgccttctacagctgcggcctgggactgtcccgcacctggcctggtcactagaccccaaagtccagtctcctctgggatctgcccgatgaggccatgttgggggaacacagcgctgcccatcccgcccctgcccaggcccctgggatgggtgggcctccaggtgcaccccattgacctgaaccgccctgcgtgtgaccgggccccagccggcctcaggggtcccgttctgccaagccgggctcctggcccccactcggggttccccgggaagcggccccagctcccaccccgagggagggcgcgcgcaggtggctacgtggcagggcgggggtcccggatcctggcgacctctcccaccccgggcgcgggcaggggtcccgcgtggggcggcggtgaccttggccgggcggcgcgccggccccgtgggcgcgggtccccggggcggggcggggcggggcggggcggggcggagcgcggggcccggcgggcggggacggcgcgggcgcgactgcggc

SEQ ID NO: 24723 - DNA, 345 bp, Homo sapiens
  source 1..345: mol_type = other DNA
gctaagaatcgcttgtgcagtggatcgcgccattgcactccagcctgagtgacaagagcgagactctgtctcaaaaaaaaccttttttttttttttagagaattttttcatggtttgaacatgtaacatctatatgcaatgcattcaacagagatttgttgaagggatgaaacgctgagagaggagccgcctccgttggaaatcccggaaccgttcctcgccaatccgggtttcccgccggggccgcttggtggctgcgcccgccgctcagcgggaggaaaccccttgggtctcggggaggccaatgggcaggggcgtgggcggggcgtggaccagccgcgccga

SEQ ID NO: 24724 - DNA, 477 bp, Homo sapiens
  source 1..477: mol_type = other DNA
ggcctcacctcctttatttctgcaaaagaaattaaaataatccacgccattaatcgtgcatgtattttgagcaacaccaagaatccttgaaatccaaatgtaaaggtatttatgtactagtttattagtttatagtccgtctatgcaaaataatgagctttgcaataaatattgaatgaatattaggcacctagcgggtaacactgactcccattcattgcgcatgtgacgctctggagtccaggtgtccaaacgcggctgcaccacgtggccggcccagcaccacgtggtcagctcggcgaccggctggagtcagccactgttccaccgtgcaccgcccgctctagagggcaaaccagacccgatttccggtgccctaacaaccagctggttccctccatcattaacgcgcctgtgcagaagggaagcaaccgggcgcctttcttttgcgcaggcgtcgcgccctggggccggggc

SEQ ID NO: 24725 - DNA, 419 bp, Homo sapiens
  source 1..419: mol_type = other DNA
aaaaagggaagaaaggaggtcggttgttttggtttaagatgttttttgttttaacccacaacattatccgtttacttgcttttgtttctgacaaaaaaaaaaaaaaaaaaaaaaacatcctggccaggctggcgcctgtagtcccagctcctgggattgctgctactgcactccagcctgggcgacagagcgagaaccaaagcaccaaaacttctggttaatttaattgattctcagcgcaatgagccgcgcagaggctcagaggcgtcgcgcggtttccaaggaaaccgtccgtcctagccaccccagcggctctggaatggtagagggttacggcgagtgcgcagagggctccagcgcactcccggccctcctcctttagctgtgggcggggctcaggggcgcgtgcgtcctgccct

SEQ ID NO: 24726 - DNA, 511 bp, Homo sapiens
  source 1..511: mol_type = other DNA
cagtgagccgagatcgcgccgctgcactccagcctgggcgcagaaacaatttacaggctaaaacctttgaagaggaatttgttgtatcctacaacagtatattaattatagtagttttactattttaatttctcataaataacaatcagtagaatattaaataaatatttaaacaataatttaatttggtcccagcccgtaatcccagctacggtttcagtgacctgagatcatgccattgcactccagcctacaacaattacttaagcaatcattttaataagtatgtaatacattatacgtttatataacttgcttaataaataatagtagttattaatatccaatgtttgaggattggctccgcgaaccccacaacccacacggggtggatccaacagccgcaggggcatcgtggtcctgcggagacgccgcccgcccggaggcggcgctgtgacccaggttggagagtcaggagcccagcgccgcgctgcggggcctgctggcaggc

SEQ ID NO: 24727 - DNA, 555 bp, Homo sapiens
  source 1..555: mol_type = other DNA
caggctagactgcagtggggcggagattacaggcgcccggcaccacgccgggcagggtttcaccatattggccacgaaacatctcatatgccaggctttgggttcggcctcccccagaccgggtctccggattcgcagccccctgggcggggtctccatgtcgcccgcagcgcgatgacgtcacgtctgcgggtcccgcccccacgtaggtctcggcccttcggacccggcgcccagcccccgttcgccctgccaggcccgggccgcccgcttgcatccacctcctgtccggacaaggggtcgcctcgtgaggaaactagtctggagttcccacgcccgtcccggaggaggacgcgggcggggcgcccgaactgcggggagagggcgattccgccccgggctgaaaccatgtccccgcagggcgggacagccacgcgtgttcgcaacgctcccgtcactcaccggcagggggtgggccctagggaactacccagtgaattctccaatcagagtcgccgacgttggcagcactgtccgagctctgtctaatcaggc

SEQ ID NO: 24728 - DNA, 225 bp, Homo sapiens
  source 1..225: mol_type = other DNA
caggcatgagccaccgcgcccggctggctagaccattccccatgggcctccccaggtgtctactggtcaggagagggacagaagaagctgcttttccgtggatgggggctgctgcctgcaggacccgagacctgaaaactgaccaatcaggcttgggatgtgactggtgaactctccaatcagagatgagagccccaggggcggggcgttgctgtcctccctgca

SEQ ID NO: 24729 - DNA, 329 bp, Homo sapiens
  source 1..329: mol_type = other DNA
tgcccggccccggatttcttgatctaaagaatgtccgccgggcgttcaagaccagcttcaatctcagcttgcagtgagccgagatcacgccactgcactccagccggggcgacagtgtgagaccagacaggataggggctccctggggtccgcccccgatcacgaggtctggtgcctgtgtcccagctactcgggaggctggccgagatggcgccactgcactccagcctgggcgacacgtgctccagcacggggcagggcctccatggggtccgcgcccacgcggggcagcgcggtgacgtcacggctgaggaccccgccccacgaag

SEQ ID NO: 24730 - DNA, 475 bp, Homo sapiens
  source 1..475: mol_type = other DNA
ccgatcacgaggtctggtgcctgtgtcccagctactcgggaggctggccgagatggcgccactgcactccagcctgggcgacacgtgctccagcacggggcagggcctccatggggtccgcgcccacgcggggcagcgcggtgacgtcacggctgaggaccccgccccacgaaggcgcagcactccggctgctccgtggggaaacccgtcgcgggaggcgcggccgagctgcggggagaggttgggctcaccccgggccagagcgagttcgcgcaaacgggagtgtccaccgctggcgggtcagccactagcgttggctacgcgccggtcactcgggcgacaggaggcggggcggcgcggccaaaacgctgtccgctcagagcgttgaaagggcgggggcttagagattgtccaatcagggcgccgcttcctgagctccgaggccccgagggcgggacgtttcgtcctccctgcc

SEQ ID NO: 24731 - DNA, 508 bp, Homo sapiens
  source 1..508: mol_type = other DNA
agcatataaatgttctcctgcctcagcctccggagtagctgggattacaggcgcccgccatcacggtgctgggattaccggcgtgaaccaccgcgcccggccgagagttttaagaacacagggagcgcctggtggggtccggcctcctggggcctcgtcgtctggtctccagatctccaggtctctggaccccaggcgtccgcgcccacgcgggacagcacggtgacgtcacgcacgcgggtcccgcccccacgcaggactcccttcctctcctccccgcacgaggggccgctccgaggggaaactgagtcagggaggaggacgccgcgccctccctggactggagtgagttctcccagatccgcggctgcccggctagagggtcagccagccctggagaattctccaatcaggggtgcggagtcgacagcactgtccaatcagagtctccacttcccgagatctgtccaatcagaccccgaggacggtaagccgagttcccctctgc

SEQ ID NO: 24732 - DNA, 342 bp, Homo sapiens
  source 1..342: mol_type = other DNA
tagagacgcggtgtcactgtggcctcagccttccaaaatgctgggatcacaggtgtgagccatggtgacttggcttcatattttgaataggccaaaacaaaactcaggcctgttcggagtgcacgcagccccgagcctccctggctgctccaaccagcccagctccagagcctttgtcactgggctggaagagttgcattgcacgttatttaatattgaggaaaatgtaattagcccgttcccttcccggcagcgggaccgcccggctcgctgagtgacagcatggccggcggccggggagagccgaccaatcagggagggcgtacgcgacccacgtgcgta

SEQ ID NO: 24733 - DNA, 368 bp, Homo sapiens
  source 1..368: mol_type = other DNA
aggcctgttcggagtgcacgcagccccgagcctccctggctgctccaaccagcccagctccagagcctttgtcactgggctggaagagttgcattgcacgttatttaatattgaggaaaatgtaattagcccgttcccttcccggcagcgggaccgcccggctcgctgagtgacagcatggccggcggccggggagagccgaccaatcagggagggcgtacgcgacccacgtgcgtaaacggcctcgctattggccggcgccgccagaggcctgccccccccggagcccaggtggcggctgggtggggcctgggcgggacggggcggggacaaggcgggacgaggcggggcccgatgggtcaaatggc

SEQ ID NO: 24734 - DNA, 399 bp, Homo sapiens
  source 1..399: mol_type = other DNA
cacatgcggtggctcccgcccgtaatcccagcactcccagctactggaggagttcgaggctgcagtgagccatgattgccccactgtactccagcctgggcaacacagggagagaggcccccagagggcgagggcccctggcagggttccctgccagcgcttggcaaggccacggtgggtaacacggtgtgatttcttctcccgcccctccgggagggggtggggaccctgttttaaggcactgggcgcctccccaccccggcccagggactgaagggggcgggtgcccgggggccggggggggcgcgggcgcgggcgcgggggtgggcgcggggcgggccgcgggcgcgtgggggcggcggcgccaccttaaggcggctcagcccgcggctcccggcc

SEQ ID NO: 24735 - DNA, 222 bp, Homo sapiens
  source 1..222: mol_type = other DNA
tcatgtctctattaaaaatacgctacttggaggagaatcccttgaacccggggggttgaagtgagccgagatcatgcccttgaactccaggtccagcctggattgattcaggcaaatgggtataatcacagaaccgatgattctcctgcctcagcccccgaggtagctgggactacaagcgcccgcatattggccatcggcctcccaaagtgcgaggattac

SEQ ID NO: 24736 - DNA, 775 bp, Homo sapiens
  source 1..775: mol_type = other DNA
gcgccggggccgggcgcgcggggagggggcgcaggaagcgggcgaggccgggcgcgggaggcggcggcggccccgggagctgccgatcggcgccgggacaaaggcgcggccgcccggcgcccccagcagcccgagccggggcgcacagccggggcgcagcccgcgccccccgccgcgcggtaagcggggcccgtccggccggcgcccccaccccggatccgggccctacgcccccgacccccggctcccggccccgcgccccccaacccccaggcccggtgcctccggcccggcgcccccctccgggccccgagcccccccgccgcagctcccggcttggcgccccccccccccaacccgccgggacagtcagggcctcggacggccttggcctcgggcctggggcgctccggaagccccgcgaggcacctctagcccggggatcctttgggggcctgtggtggggggggtgatccgaggcgcacccctcccggaagagcgtgtccccgaggaagggcgggccctcccccaggactttgcagggaggaatcgctgccccccaacttggggagggggctccctagggcgcgtttctacccccctcggatgtgcactccctcccggcgctttggagggcggtagagggcgcaccctgccccccatctagggcgggccttaaaacgcacccccactgcctgggggtggcgggggacggggcggctccgggcgcacccacccgctcggcttcccccgggagaggcggggggcaggaagc

SEQ ID NO: 24737 - DNA, 580 bp, Homo sapiens
  source 1..580: mol_type = other DNA
gccaggcacagtcctgccccagggaggggtggaggaagccgtctctgatcctccctcgaggcagggacccacccccgccccgccccaccccagggccctggagcagcggggcctggcactgtgtcacaagaatggcttccctcaggaaggcggcattaccgctgcctttctgcagaaaggtcacagagcacgtccgtggcacgcgtccaggtcgtgccacagcagggccggcggcttcgacgcgggcagccgggtcccttggaaaccgaggcccggccggctgccgggtaggagagggtggcgggggccgctgcccggggcgggggcgggccgggcccaaggtcaccgcggcgggcgggccacggggaggcgggccggcgtggggatccgcaggcctccccgggcgcgcgcgtcccccccctcggcggcgcgcacggggcacgggcggcggcaggtggagccgaagcctccgcagcagccgagccgcggccactgccggcgtcgccgccattagacaatagcggtggggaggggcgccgggcgcgcaggaagcggggcccggggcgcgccggggccgggc

SEQ ID NO: 24738 - DNA, 521 bp, Homo sapiens
  source 1..521: mol_type = other DNA
ggggtgggggggccctggacaaaagcacgaagcccccggccctgcctcccgccaggcacagtcctgccccagggaggggtggaggaagccgtctctgatcctccctcgaggcagggacccacccccgccccgccccaccccagggccctggagcagcggggcctggcactgtgtcacaagaatggcttccctcaggaaggcggcattaccgctgcctttctgcagaaaggtcacagagcacgtccgtggcacgcgtccaggtcgtgccacagcagggccggcggcttcgacgcgggcagccgggtcccttggaaaccgaggcccggccggctgccgggtaggagagggtggcgggggccgctgcccggggcgggggcgggccgggcccaaggtcaccgcggcgggcgggccacggggaggcgggccggcgtggggatccgcaggcctccccgggcgcgcgcgtcccccccctcggcggcgcgcacggggcacgggcggcggcaggtggagccgaagcctcc

SEQ ID NO: 24739 - DNA, 205 bp, Homo sapiens
  source 1..205: mol_type = other DNA
cagtctggccaatatggtgaaacctgtctctactaaatatacaaaaaggctgcagtcagccatggcacgtgcctgtaatccattgctggactggcctgggggtgggggggccctggacaaaagcacgaagcccccggccctgcctcccgccaggcacagtcctgccccagggaggggtggaggaagccgtctctgatcctccctc

SEQ ID NO: 24740 - DNA, 487 bp, Homo sapiens
  source 1..487: mol_type = other DNA
agcctcccgagtagctgggacggggtttcaccgtgtcagccaggatagtctcgatctcctgacctcgtgatccggagtgcaatggcgtgatctcggctcactgcaaagcacctccattaacgctttttaatggatgagtgaaggttcctgtcaggcaatgtcagggcgcttcccgggggcagcgactgctgcccaggcacctggagacccagagagcgcagcggccgcgtgcgcgcctccgccaccgcgcctgggccgagccgagcgggaccgagcggggccgaacggagccgagcggagccgagcctggccgggccgagtccgccacattcccacaatcccgggcggccccgccccggctcccggctgcgcgtcccccgcgggccccccgcccgccgacgccccgcccaggccgctagtcccgcccccatggtgggcgcgcttggccgccggcccctcccattggccgcaccgtctgcccgtcgcg

SEQ ID NO: 24741 - DNA, 535 bp, Homo sapiens
  source 1..535: mol_type = other DNA
acccggctaatttttgtatctttcaggcaagctgcccacctctgcagggtggatcacctgaggtcagggcagagtcgctggaaacagtccatgacacctggcctgagctgtttcttaaaaatatatcagaagggccgagggtggatcacctgaggtcaggtgagaccagcctggagctactcgagaggctgaggcaggcagatgttgcagagtcaagatcctgccactgctcaaaaaaaaaaaaaaaaatatatatatatatatatatatatatatatatatatatatatatatatacacatatatatatatacacacacatatatatatgatatatatataatgtatcagcagtgacagctccgggtgaagcctgaggagaatccgccccttctccagaaggaggaagaagggccctgctggtcacacaggacccagtctgcggtgggggttttcccgccaccgccccgccgtcgggccgggtctgagcaggtctggaggtgggcggggagccctggcctccccacctcctccc

SEQ ID NO: 24742 - DNA, 666 bp, Homo sapiens
  source 1..666: mol_type = other DNA
cttcactgcaggggagcgcttgccaccatggtgcggccggtggccgagagcggggccaccaagaccagccgcgatcggcctctgctggctgctggccgcgctgctgggggccaccatcatgggcctctatggggccatcttccgcctggtgcaggccagcgggcagaaggccccacgcccagcggcccgccgcaaggcccgccgcctgctgaagacggtgctgctgctggccgacgtctttggctccaacctctgggcccaggagtacctgcggggcatggactggatcctggccctggccgtcctcacgcagcagggaggtgtgcagagccgtgctcagcttcctctgctgcgggtgtctccggctgggcatgcgagggcccggggactgcctggcccgggccgtcgaggctcactccggagcttccaccaccgacagctctcaggccaagggacagctttcgcggctcccgctcgctcagctttcggatgcgggagcccctgtccagcatctccagcgtgtggtgcagccaccgggtgcgtgccaggcaggccctcctggggtacaggaagctgtgtgcacgcaggagcagggaacgggacaggcccccatggtcttcccggtggcctctcggggcttctgacgccaaatgggcttcccatggc

SEQ ID NO: 24743 - DNA, 456 bp, Homo sapiens
  source 1..456: mol_type = other DNA
ggcttgcaccctggggcaaagggacgttccttaggtacctgggttttaactttaaatttctgatgaacaacaaatacttttttagtataagtatgccccaaatatgaataaagataaattttctatttttcattcattcattcaaaaatggccaggtcttgtgctagatgccgtatgcacaaaacagacaaaagtttttgccttcgtggagttgacgggtcccagaagacctagcgcgccaggcaggcagcaaggtcacaagtgatatcgcgaaatagttttttaaagcattttattgcattttatgtgccgcaccttccgggagttccagagtgggcctacaactcccacagggctccgcgagcgccggacggacggactacaattcccgacaggcagcgcggctggcggggcggttcgccgcggtgcccacaggacctcagggcgagtgcgggc

SEQ ID NO: 24744 - DNA, 387 bp, Homo sapiens
  source 1..387: mol_type = other DNA
ctgtgtaaataaagttttatggcacacagccatgctgatgcatgtctgctggcccccgggctagagcagaatccgacaaggaacccgaatgcctggctgaggggctcagccccgttcccacgtgggcggatcatgagatcaggagatcaagaccatcctgtaccactgcactccagcctgaatttcgacctgagggccagagcaggagtgggtccctgttcccggctctacctcctccctggaggagctccctggggctcccagagtcagaggctggcacctcctgtggtcctcagtgctgaggccgatgctggcacccagcggacgggccccacgtggcccagaggggaggggtctccaagccccccccctgctctctatccaggg

SEQ ID NO: 24745 - DNA, 408 bp, Homo sapiens
  source 1..408: mol_type = other DNA
tatgacattgtacatacttaaagatagaactggaagatacttttacaattagtagctgggattagccatattattagtgttattaatattattgatgagttcggccgatgccctccgcgggagccggcggggacccctgggaagccggctaaggcccgtcccgcccgcagctccgccctcgcccacccgtaggcggggcccggggccttccggcctcagtttccccccgcggcccggggatgcggggaggcgccggctgccccgcgcggcgcggccgccaggggccgctgcggagccgcctttgtggtcccgatgccggggcgggcgcgggcgggaggagggcgcgggggcccgggagggaggcgggaggcgcggccgccgctccagctgcgagtccgcccgccgccc

SEQ ID NO: 24746 - DNA, 806 bp, Homo sapiens
  source 1..806: mol_type = other DNA
gggggcgctgacccacctcggcccggcccctcctccgctgcggaggcctcgccattaatcctgaccgggggagggggcgcccgctgccccccacttcctacgggggccgctgcgagcgctcccctgccgccccctgcctggagcccctgcgggacccccaggggacccccgccccaggtctgtcgccctcggtgtcggagtctcgtgtgtgtagccgcgtgtcccccggacacctgcagtcaccggccagggctgctcggggaggggtcccgggggtcggcggtccgtgagatctcggggtgccagccccacaggctgcgagtgtgcgtcctgcagaaggtaccaccggcttcgagcatgggtccccgtgtgcccggcggacacccacgggccgtgtgtccgtcacacgctgtaggcgccgcgcgtggggatctctgcgcggctgagtcgaggaggcccggcccgccggtgtccccgagtcgcctgcgcgcgtgtgtgtgcgcgcgcgccgcggcgaaggtggatccgctcgctccgcagcgagcccagccggggccccgcgacctgcagccgccgccgccaccgcctccgccgctccccgggcctccccttgcgcgggccgggccggggatggagccgcagccggagccgccgcagccggggccgcggcgcggagcagcctgaggcgcgggcggtgcgcgggaccggggggagggcgggccgaggggagggtcctgcgggccgggggggcgggcgcggcgcgccccctccctggcgcgctcgctccctcccccgcgctcccgccg

SEQ ID NO: 24747 - DNA, 790 bp, Homo sapiens
  source 1..790: mol_type = other DNA
gcggaggcctatcctgaccgggggagggggcgcccgctgccccccacttcctacgggggccgctgcgagcgctcccctgccgccccctgcctggagcccctgcgggacccccaggggacccccgccccaggtctgtcgccctcggtgtcggagtctcgtgtgtgtagccgcgtgtcccccggacacctgcagtcaccggccagggctgctcggggaggggtcccgggggtcggcggtccgtgagatctcggggtgccagccccacaggctgcgagtgtgcgtcctgcagaaggtaccaccggcttcgagcatgggtccccgtgtgcccggcggacacccacgggccgtgtgtccgtcacacgctgtaggcgccgcgcgtggggatctctgcgcggctgagtcgaggaggcccggcccgccggtgtccccgagtcgcctgcgcgcgtgtgtgtgcgcgcgcgccgcggcgaaggtggatccgctcgctccgcagcgagcccagccggggccccgcgacctgcagccgccgccgccaccgcctccgccgctccccgggcctccccttgcgcgggccgggccggggatggagccgcagccggagccgccgcagccggggccgcggcgcggagcagcctgaggcgcgggcggtgcgcgggaccggggggagggcgggccgaggggagggtcctgcgggccgggggggcgggcgcggcgcgccccctccctggcgcgctcgctccctcccccgcgctcccgccgcctgcggcccccccctcgccggggaccgagc

SEQ ID NO: 24748 - DNA, 451 bp, Homo sapiens
  source 1..451: mol_type = other DNA
caagccacacttgccatacctcagtcttgagatctgtgaaaagggcacacccctgaggccagctggagatcccgcctggacaccgtcctcctggggtgctgagacacacaggcgaggccacccctcccctgccccttgggtgcgggcctcccgtgttagcctgggcccttctggccaaggaagggacagctagctggggacccgcagcccctgcctggctctggggggagaagggagccagggtgctgtgggaccagctcaccgtgcacccaaaggggaaagaggcgcgctggccggcctctgcgcacgtcatcctccaacttcccggccagctcgggggtgatgggggggtggggagggggggccttaaaaatccacccctggcccctcgcagtcctggggtcctggtctagtgccctggggcatggagcgcgccggccgcggggcgggg

SEQ ID NO: 24749 - DNA, 14 bp, Homo sapiens
  source 1..14: mol_type = other DNA
cttctgaggtccgc

SEQ ID NO: 24750 - DNA, 372 bp, Homo sapiens
  source 1..372: mol_type = other DNA
ctcaaatttgcagtggtgcagtcgtagctcgctgcagcctcgaactcctgggctcatttgagtagctgagactacagggagtacccagctcacccaggctggcggccataactggctgcagcctacacttcagcacaccctagtagctgggcctgcaggtgcccgccgcgcctgcacggggcctgggccgggacgggaggtcgcagccatctcagctcagcccctgcagcagggatcacaaaggggtggccctgaggctgatggtcccgtccagagtctggcctcccggagggagagggtggtgccaggggcgggccccgctcccaggtctcaggcatcccccgcccggggaccgcctgtgccttatcacgg

SEQ ID NO: 24751 - DNA, 251 bp, Homo sapiens
  source 1..251: mol_type = other DNA
gatcacctggcctaggctggtctcccacctcggcctcccaaagtgttgggattaccgggccatgtactatttattacatacatgaatgaatgaacgactgcatttcttcctttttttatggagtctgaccacgcctagaaacactgcgcatgctccgttgctagccagcccaggcagggcgctgaaggcatacttactgttcctgcgtttgcatgagctgtggcaccacacccgcggctgcgttggtgccg

SEQ ID NO: 24752 - DNA, 321 bp, Homo sapiens
  source 1..321: mol_type = other DNA
attctcctgcctcagccacccaagtagctgggattacaggctgagccactgcgcccagccaaattaaaaaaaattttttttctgttgagacggggattacaggtatgagccaccactcctggcagtcacccacattttaaaaagatcacctggcctaggctggtctcccacctcggcctcccaaagtgttgggattaccgggccatgtactatttattacatacatgaatgaatgaacgactgcatttcttcctttttttatggagtctgaccacgcctagaaacactgcgcatgctccgttgctagccagcccaggcagg

SEQ ID NO: 24753 - DNA, 428 bp, Homo sapiens
  source 1..428: mol_type = other DNA
aatttttttaaaaacctgtttcgagtagctgggattaactccgtacctcaggtgatccgccgggattacaggctgagccaccgcacctggcctaaaaacctgttttgttccctgggtcccatctgcgattaggcgcgacgtcaatgccgcactgaggtggcctggccgatctaccctaggaagggtctgccctggggcgccccattccgcgactgtcccggtctcttccggccgcggttgccctgggcaacgcgtggagccgcgcttctcgcgggagacgtcacgtcctcccgagatgcccaacgcgcgcaggcgcagccactcggagtgggcagggcctggctgggcgtggccgcgattagccgcgcgcggcgtgggggcgtggtcgggttgcgggggtgcgcgcggccggccgggcgcgcgcggcg

SEQ ID NO: 24754 - DNA, 399 bp, Homo sapiens
  source 1..399: mol_type = other DNA
gggctgaagtccagtggcgcgatctcggctcacagtgatgttggccaggctggtctcctgcccgcctcgaggcctcccaagtgctgtgattacaggcgtgcgccgcgctcggaacttctgggtttgggagtcccagaatggaattggttctcccggggaccaggggtctccactgcccaattctgtccccaggggacatttggcagtatttcagtgcccccactgtgcccagaccctgtccccaatgtctggactgtgagccccgtgagggcagtgagtgtgcctgcctggtccccgctccgcctccggcctgctcagtgccctgggctgtgtgcttgcccacagcgggccccctgttggcactgccacagggacctgggcgtggtcaccagtgacctg

SEQ ID NO: 24755 - DNA, 479 bp, Homo sapiens
  source 1..479: mol_type = other DNA
tgggattacaggcgtgagtcaccgcgcgcacaggcctgggagtcacagacgcctgactcactgcgagcctcggggattacccccatcattaccgttagtaaccaattaattgcccgatcgcgtctctctaggccggggagtcagcggaccccgaggccagctcgggctcagacctccccgctccaccccggcccgcagtgggctgtccagctccgggtggactggaggccgggtctgggtgggagccggcggtgccctctgggggggtgccggccactcctgcggcgcgctcggggttcgccctcatacccggcgggcgctaggaccgcgtgggcgcccgtcgtagaggcggaacgagccctgcggccacgcccctctcctctctccttggcgattggctgcggttccccggggcgcggctccgattggctcaggcaccggaacctccccgccctgccccgcccggcgcagtcgcccgg

SEQ ID NO: 24756 - DNA, 509 bp, Homo sapiens
  source 1..509: mol_type = other DNA
ttgcagtgagccgagatccagccactgcactccaccctggacgacagggtgagaagccccaacttgggccagaagcctagactgctgctgggaggatatcgtgtgatgtccccgttgcacaggggggaaagccgagaccccagagggagagcagcccctatggccagaagccctcggatccggacgtcgggggctctataggaaacttctccgctaggttttccttgcctagggctggggactgccctccgtccccatggcaaccggggcggggcccgacccggatccgccggtcgccccatccggcagcggctgggaagagagggaggaggagtccgcgcctctcctactggccctttaagaggactcgctcccgattggtcccgagcgcggccgagcgcagccgaacttgaaccaatcgccggccggcgcgccgatcggtatctgcatgggctcgcccggggggaaggtctcacccaatgggaccgttcgccgaggccttcgcggcc

SEQ ID NO: 24757 - DNA, 333 bp, Homo sapiens
  source 1..333: mol_type = other DNA
cggagctcccccacctgggtcagggggagccccgccgtcgggggtcaaaacgccctgggggcggtatccttggctccaggccggcgggcggcaaggctccgggccagcatgggggcttgcggcgagggtccacgcgcgggcgagtccctgcgctgagctgggggaggccccgggctcccgccccagcctcgaagccccgccccaggctgccgcccacagcccattttcctctggaagctgagaccccgccccgtgccagctgccacgcccctgacaggtcctccactccttgggggcggcaccctccccttggtcctgtgggctggccaggga

SEQ ID NO: 24758 - DNA, 366 bp, Homo sapiens
  source 1..366: mol_type = other DNA
agggaattgctccagcacctccgcctcccgggttcaagagatctcagcctcccgagtagctgggattacaggcgcctgacctcaggtgggtcctgagctcaggcccccccggactgcgggtatccccggggagggcacagctggccctggcagggcccggacacctggggcccgacccacccctgcgcaccccgcggtgtcgccttcccgggaggctcgggttcccagatccccttacccgggcgtctcggctgtcgcgccctgggccgggggaggggaggctgcaggaagcggcggatccggcggcggcggcgagggcccgggtgggtggccgaacttctcccgccatggagggagcagcggccc

SEQ ID NO: 24759 - DNA, 347 bp, Homo sapiens
  source 1..347: mol_type = other DNA
ctcactgttgcccaggccggagtgcagtggcacaattgtagctcactgcagcctcgctcctccacactacacccagatatatatatattttaagagatagggaccgccacttccccacacaagtgttttttgttcccaaaatagaactggatttcagggtttatttcttattataaaaccaggctgcagtgagccttgattgcatcactgcactccagcctgggtgacagagcaagattacactgaaccagtgccagcctgccctgtctgcagcatcggcctgatggggtggtgactgatccctcagggctccggagccatgtggcccaacggcagttccctggggc

SEQ ID NO: 24760 - DNA, 551 bp, Homo sapiens
  source 1..551: mol_type = other DNA
gggctgacgagagggccgggccaggctgggaatacccctcactcacagcctggactagcagccctcccgggcccaggggacggggtggggtgcagtcagggcatgcaaagagacggtcccagtccctgcgtctccctccttccccagcccgagctggggggtggccaggaaagagtgcccccctagcagggcatactactactgtgtgccgcgttccagcggagccctggagtctgggcgacccccgggagccgatccgcctggacctgccccgccccctccaggccttgggtgctgcccagcctggcggcgggagcgccgggaagaggcctggcagggcgctgggcggctggaggggctgaggctcccgaggaagcgcccctgccacccctacgcgggccattgcatccctgccaccggtggcctgggggtcccaagggcgccgccttccccagaaggctgtagggtgtcccggcgtgcggggggcacccactgactccaagtcagccaggcccgggcccgaggggcgtggccagcgcagggtgggcggg

SEQ ID NO: 24761 - DNA, 381 bp, Homo sapiens
  source 1..381: mol_type = other DNA
ccagccccgagtggttagaactgcacggggtggtggtagcagccaccatgggctacccacaccacaaagctgggcagcctgggttgagaaggcaagtgttaagagtgactttccctctctgagcctcagtttcttgtttttttttaaagcttaactcccaaaatacatactcctcggccacgcccctggccacgccaatgaagcgctgtttctcaggccccctgaggcgtggggacccgcctagggctgcctccagcactgcctgttgctctttcccggctcaggcgcaaacggggcagcctggagagcgccgtgggcgaggaaggcccccagcgcaggcttcggctattggtgttggtgccgcggccactggcccagccg

SEQ ID NO: 24762 - DNA, 648 bp, Homo sapiens
  source 1..648: mol_type = other DNA
caatgttagttacatgtattgtgtagatcaatgttattggtattcattgtgtatagcaatgtgattggcatgtattgcatatagcaatgctatttgtatgttttatgtagatccatgtcaatgatatagtatagattcatgttattggcatgtattgtgtatatccatgttattggcatgtattgtgcatatccgtgttattggcatgtattgtgtatatccatgttattggcatgcatacagagtctcactctgtggcccaggctggacaatggtgcgatctcagctcactgcaaccgtcaggatggtcttgaactcctgacctcaggctcccaaagtgccgggaatataggcgtgtcaccgcgcccggccagcatgttattgtcatgcgctgtgcaggtatgttattggcatgtgctgtgtacatccatattattggcacgtgctgcacagcaatgttattgatacgtatcgtgcctgtcaatcttacagcctggctctgtactcccacccctgggcgcgagggggcactcgaggcgctcctggctgcgggtcgcaagcaggccccgcccccgagccccgattggccgcgcgccgtccgcggcgtcgcacgcacgcaggccccgccccgtccgccccgcgccggcc

SEQ ID NO: 24763 - DNA, 503 bp, Homo sapiens
  source 1..503: mol_type = other DNA
aatctatggtgatttcttcagacttttgtagacaaggcgttcaagggatatttcattgacttcttgcccttcttcaattacataacatttactaaaaatatcacactttatatgttcctgattccatccaatgagtaattattcaaagctttaaagttaaaaaaagaagattatgagtctaatatactccagagtctaatcactgttaatttttataacattatatttttaaaattatatataacatatataatacatataatatatagtatgttttatatataatatataaattaataatatatattttatatattcttttccagctctcacaattgagaggtagtactattttttcgcttataatgaggaaactgagtcggtcctggggccagccggggcagtctgcgggccgggaagcctgggttgtcccagcgcccccgcgtggcgaggctgggtgggagaactaccagcaggcctcgcgaggccgcgcatgctcaatg

SEQ ID NO: 24764 - DNA, 501 bp, Homo sapiens
  source 1..501: mol_type = other DNA
catgcgcggcctcgcgaggcctgctgtagttctcccacccagcctcgccacgcgggggcgctgggacaacccaggcttcccggcccgcagactgccccggctggccccaggaccgactcagtttcctcattataagcgaaaaaatagtactacctctcaattgtgagagctggaaaagaatatataaaatatatattattaatttatatattatatataaaacatactatatattatatgtattatatatgttatatataattttaaaaatataatgttataaaaattaacagtgattagactctggagtatattagactcataatcttctttttttaactttaaagctttgaataattactcattggatggaatcaggaacatataaagtgtgatatttttagtaaatgttatgtaattgaagaagggcaagaagtcaatgaaatatcccttgaacgccttgtctacaaaagtctgaagaaatcaccatagattgacgtc

SEQ ID NO: 24765 - DNA, 428 bp, Homo sapiens
  source 1..428: mol_type = other DNA
tgtctgtctgccctgctagaaagtcagccccgttggtcactactgctgtgagcagtacctggtacacagtaagtgctcaataaatgtttattgaatggtgaggctggagtgcaatggcatgacctttgcctcagcctcccgagtagctgggagtgggttacaggcgtgagccactgcgcccggcgtccctaccccttgtgtccagaggaaccaactgcagtgctctgacatctgtgagttctaagacacctttttctgcccccagcagataaaaatattaacagtgagcattcatgcgatgctctgagaagctgaaatccccccagggtaggtcctagtgtggcagttttacagccagggggagaggcccttgccgtctaagtgggaggggccgccctcccccacgcagccccgacctggctcggctc

SEQ ID NO: 24766 - DNA, 601 bp, Homo sapiens
  source 1..601: mol_type = other DNA
cagctacacgggaggctgaggcgggaggctggcttgagcccaggtggtcaaggctgtagtgagctatgatcacgccactgcactccagcccaggggatagagtgagacccttgggcgttttggtcaccccaaccacaaagccatcgctgggggccagggccctgtccagaaagcgggtggggcccccaccctccatatgggggaggaaatcccggctggaaaaggggtacctcctaccttcccttaatgttgatgattatgataatgatattgatagcggctgacattttgaaagctttttttttgtcaaccaccaatagccctctgagacggtccccgccgcgcgcactggcggcgcccgttccacgctccaagaaccccgcttcccagggtgggtggggggtgcacgcccgacagggccaggtcagggccaggcgtggagcccgcgtgcgccccgggaccccgcccggggcgcgcgggaggcgccgggggccgcggaggcggggcggggaggggccggcggcggcggcggcgcgcggaggagaccgcagtgcggccggcgctaggacccgcgggggcctcccaggccgcggcgcctccc

SEQ ID NO: 24767 - DNA, 521 bp, Homo sapiens
  source 1..521: mol_type = other DNA
ggccaattcttggattcctcccaggacagggccagctacacgggaggctgaggcgggaggctggcttgagcccaggtggtcaaggctgtagtgagctatgatcacgccactgcactccagcccaggggatagagtgagacccttgggcgttttggtcaccccaaccacaaagccatcgctgggggccagggccctgtccagaaagcgggtggggcccccaccctccatatgggggaggaaatcccggctggaaaaggggtacctcctaccttcccttaatgttgatgattatgataatgatattgatagcggctgacattttgaaagctttttttttgtcaaccaccaatagccctctgagacggtccccgccgcgcgcactggcggcgcccgttccacgctccaagaaccccgcttcccagggtgggtggggggtgcacgcccgacagggccaggtcagggccaggcgtggagcccgcgtgcgccccgggaccccgcccggggcgcgcgggaggcgccgg

SEQ ID NO: 24768 - DNA, 83 bp, Homo sapiens
  source 1..83: mol_type = other DNA
ctatcatttatttccttcgcgcagggggcggagcttggggcgcgtggccaggcgcgagcggcacgcggctcgggggcggggcg

SEQ ID NO: 24769 - DNA, 395 bp, Homo sapiens
  source 1..395: mol_type = other DNA
tcatgcccactggtctgccagctggggagtggctgggctagagttcaaacccacttccagtccgactgagacaactgcagggggcgccgttcccacagcagccctgcaaagtgccctgcacccagccctgtttagggcacgaggctgaatcaatggtaagtgaccatctaatggacccacaacacggtgacctggggacagagtctccctctgccgcccaggctgcagtgcagtggcgccatctcggctcactgcagcgattctcctgcctcagcctcccgagtagctgggattacaggcccctcacccctgctccctttgcaaggagaagtgctgatgcgccatcagaaaattatttcagggggctgtgcttttccgtcaggccgccacccccc

SEQ ID NO: 24770 - DNA, 287 bp, Homo sapiens
  source 1..287: mol_type = other DNA
gttgaggctgcagtgagctgtgatcacatcaccacactccagttgggaggcctgaggcgggcagatcacctgaggtcaggagttcaagaccagagtaactgtgacagagcaaaactctgtttcaaatttatttatttttattttattttagtagctgggtggccaggctggtctcgaattacagaaaaaaaaaattaaaacatttaataagagaatactttttccctttaccagtagaagagagaagcagcagagtgtcattccgatcctgtggctgggcccccggt

SEQ ID NO: 24771 - DNA, 390 bp, Homo sapiens
  source 1..390: mol_type = other DNA
gtagctgggtggccaggctggtctcgaattacagaaaaaaaaaattaaaacatttaataagagaatactttttccctttaccagtagaagagagaagcagcagagtgtcattccgatcctgtggctgggcccccggtcacctgggcaaggcaaggatcttaagcccaccttggccctgacctcggaagctccccgcagggtcccggcctctagggctgctgtgcgggtgggaggagggaagaggcagccccctgcccggccagctcgtgactaatttaggcaaaaggcagcctggagctatttccattcggcggcgggaacaggtgccggcgcctccgccccatccccaggggccgcctcccccggggcggcctccaggctgccgagacc

SEQ ID NO: 24772 - DNA, 130 bp, Homo sapiens
  source 1..130: mol_type = other DNA
agttccaggctgcagtgagccatgattgcaccactgcactccagccgaggtgacatgacaggacccagcccagtaaacattaggggactcctgaggtcctccaggctgcggtgactgcactttccctgga

SEQ ID NO: 24773 - DNA, 570 bp, Homo sapiens
  source 1..570: mol_type = other DNA
cctgtaatcccagcactgtgggaaataaaaaataaattgcactaaaatacttgattattgaagtttgaaatccacttgaagccacttagctccaaagccaaggagcgctttggagaagggggtcccgccgccgggcgcccccagccagctggttgccgagcccacgccccatctgcacaccaggacccggatgtgcagcgcgcggggtgtctgggcccgtggagcctgcaccgcgctgcgctgcaaggcgcctcactgtacgcactggcggccgttgcggcggagcaaccatcccctgcccgacgccgccgggagtctggagacgcacctggcggccgccgcgcgcaggaagccacggcacctagctgcattgttgtcgctgctgcgcagggccaggcgccgccggggtaggcgtggtcgccgcgagcgggggattggccggaggcccgggcggtggccgcgcgcgcctgcgcaggaggcagcagcgcgcaccggcggcgggaggagcgcgcgcgggtgctaattggcccgggcggcggccccgcccgcgagtggtgagcggtcacgtga

SEQ ID NO: 24774 - DNA, 738 bp, Homo sapiens
  source 1..738: mol_type = other DNA
ggctaagtgcatgagcttgtgcgccagccccccccaacccgggtgcatggcttttcggggctcccaggcgcgcggggagcgggggaggggcgcgtcgcctgctaagtttccagctgaagacgaggggcgctctcgccccccgggggcctacgggcagggccgcagggacctctgggcttcgtagtccctccgccgtttgcagccggcaggtggcaagcggcttggactacaagtcccagggtgccccgcgccgacagcccgccgcggcctgcgggtaggggcggtgcggaggggccggagagccaatgggcgcgggccgatcgcgcggcgcggcgcgggggcggggccagcccgccagggggcggggcctggagccgggctcccctcgccgggggccggtggcggtcccggcttccggctgcgcggcccgcgggccggccccctccccgccccggggcccctccccgcctgcccagcccccctcccctcggccccccgcccgtggggggggggtcaccctccccgcgctccccggggagggcggcggcccgggcggccgcgcggtgcaggcgagcccggggatgcgcggcctagcgcaggccgggcccgggcgtgggggaggcgggcgggcggacccagatccggggtaatttgcatcgccctccccccagcccgggtggggattggccgccggcggcggggggtggcgcggggccaggctcactgccgcctcccggc

SEQ ID NO: 24775 - DNA, 739 bp, Homo sapiens
  source 1..739: mol_type = other DNA
cccttgtgccaaggagcggcccgcgcggaccaggcgtccagggcccggtccccgtcccgccccgcggcccgcagccgggtgggggaactcgcgaagccccttcccccgctgacgcccctagcgcagcggggtggaggcagggacccgggagccccgcggacccgggctgtccttggcaaggccaccccccggggtccctggcgcggcaagtcccactgaggcccggggaggcccagggcctggccttgcggggggatccccaccgcctcaccccgcccaggccgcgcgacccacacgcccgcgtcgctcctcgctgtgcgcaccgcgctccccgcccccgctgccatcctgccacgccccgggcgtcgggggcacagcccgcgcccccccgcaccccgcccctgcgcagaggctgggggcctgtttatctggaggcccccaccccccctccaccccggggggcccgctccccccgcgccccggggagctctggggccagataagctggcaagctggcacggcgccgcgcggcggggcggagaggtcagaggcgggggggcgcgccggggcgggccggacccccccccccgacttgatctccccggcgcagcgggcgaagccccacgggagggcagagacgtggcaagaggggacctgccgagcctgttctggcctccgaggccaggctggggggggcgggctgggcgtgggggggccggcggctgcggcaccttccctc

SEQ ID NO: 24776 - DNA, 738 bp, Homo sapiens
  source 1..738: mol_type = other DNA
aatgaggaaggggaaactgagtcctggagccctcccccccccccccaggcgcgcggtcgcaccagccagccctccccgggccgggccaggacgttctcaccgtcccccgccggacctctcccacgaccggggaggaagtgggcccttgtgccaaggagcggcccgcgcggaccaggcgtccagggcccggtccccgtcccgccccgcggcccgcagccgggtgggggaactcgcgaagccccttcccccgctgacgcccctagcgcagcggggtggaggcagggacccgggagccccgcggacccgggctgtccttggcaaggccaccccccggggtccctggcgcggcaagtcccactgaggcccggggaggcccagggcctggccttgcggggggatccccaccgcctcaccccgcccaggccgcgcgacccacacgcccgcgtcgctcctcgctgtgcgcaccgcgctccccgcccccgctgccatcctgccacgccccgggcgtcgggggcacagcccgcgcccccccgcaccccgcccctgcgcagaggctgggggcctgtttatctggaggcccccaccccccctccaccccggggggcccgctccccccgcgccccggggagctctggggccagataagctggcaagctggcacggcgccgcgcggcggggcggagaggtcagaggcgggggggcgcgccggggcgggccggacccccccccccgacttga

SEQ ID NO: 24777 - DNA, 497 bp, Homo sapiens
  source 1..497: mol_type = other DNA
tcccaggcagggtccttggagcaaagtccctggaccctccggggggccctcccgggtttccaaaagccaatccaacccgtttgggtgttgaaaggcgcttttaataaatctctcgctgggtacactacacccaggccggtggtgcctgtcaggtggtgttggtactaagaatgccagataataataaaacgggtcacccactggataaaaagcagctaatgaggaaggggaaactgagtcctggagccctcccccccccccccaggcgcgcggtcgcaccagccagccctccccgggccgggccaggacgttctcaccgtcccccgccggacctctcccacgaccggggaggaagtgggcccttgtgccaaggagcggcccgcgcggaccaggcgtccagggcccggtccccgtcccgccccgcggcccgcagccgggtgggggaactcgcgaagccccttcccccgctgacgcccctagcgcagcggggtggaggc

SEQ ID NO: 24778 - DNA, 472 bp, Homo sapiens
  source 1..472: mol_type = other DNA
tctcaaaaaaaaaaaaagggaaatttttctttttttttttttttctgctaggttacactcatatgaagtccctagaatcatcagattcacatttagaaatggttaaaatgacaagttttatgttatgtgtattttataataaaaatgtttcaacatgcgcatagtaatatatgcaattttatttgtcaattaaaataaattttaaaaatgttttagagtggcccagccccagcctggggcaccacaggctctcaggagtctggccccgcgcctcatgccccaagcgcttgggcacacgcgccgtggtaaggcaagcgagggcgcccggtcccggcaccgcctcgcgtcggtctccgccccttcccctccgaaaggcggccttgtgctgctgcgcaggcgcggcggctgggggtggggtccatcgcggctcccgatcccgttatcgcgagaagccggtccgcgatcttgtggc

SEQ ID NO: 24779 - DNA, 255 bp, Homo sapiens
  source 1..255: mol_type = other DNA
ccagtttggctccataaatatttgttgactcaatgaacgatagaagattctagagcccatggggactcagacgctgctgtccagggagtggacaggacccatgtaagggccctgggctatcccagaacccatgtaatccccgcacttaggggccgggagttcgagaccagcctggaaaacccagctactgccgaaaccactgcactccggcagagtggaggtaccccagacttctcagcacctggaggtgggcgg

SEQ ID NO: 24780 - DNA, 459 bp, Homo sapiens
  source 1..459: mol_type = other DNA
gtcaccattacctggtcacatgtttggtaccacctttgctctccagtgtgcccagtacaaagtaggtactccaggacctgtcctgcagaatgcagaacctaggcggtcagatcacctgaggtcaggagttttgctgggtgtggtggcgggcgccatcccagctactagcgcttggttgcagtgaaccgcactgcactccagcctgggcagagcgttcaggtaactctgcgttacggaatttactaatccgtaaaagggcggccgcctcccgcccgggtcatcggggagccccttcaagaggcaggcttccttctgacagcagataacatgtcgcctgcggcgtcagcaagaggcgcatgcgccttgccgtgggaggccgggtgcgcaggactggaacgcggttcctccttcttccccgccccgccccgcttccggcggaagcggcctcaacaagggaaa

SEQ ID NO: 24781 - DNA, 574 bp, Homo sapiens
  source 1..574: mol_type = other DNA
gttgcagtgagccgagatcgcgccactgcactcccatctcaaaaatataataataataataataaagtgactaacgggcgcacaccatcagcgctcattaaatgcatgagtcagaatgcatgggccagccttacttccccaaatcccacagtgcgtggagggggcagccgatccctccacttcccctctgagtggctggagggatccccagcctggcatttgagccccgtcctggcccggctctggaaacctcccatcagccccgacagggtgaccacagagttgggcgtgttggcgtcccccggcgcgcaggggcgtcacttcccgccccttcctcactgggaagccatccggccgctcccagcccgcggccctggggcgcgatgctcgggaccctcagacgcgctcacctccgggaggccgcacttgcccttgtccgcgtacggcgacagccccccacgggaacaataaagtttcccttgttgaggccgcttccgccggaagcggggcggggcggggaagaaggaggaaccgcgttccagtcctgcgcacccggcctcccacggcaaggcgc

SEQ ID NO: 24782 - DNA, 83 bp, Homo sapiens
  source 1..83: mol_type = other DNA
ctgcctgcctggggtttcccccgcttcagggcagcggaaggaaggccagcaggacatgctgtgctgggaaaagccagcaggtc

SEQ ID NO: 24783 - DNA, 269 bp, Homo sapiens
  source 1..269: mol_type = other DNA
ctaaaaaagggaggtatgaataatccaccccttgtttagcaactttctaaataaaccgagatccaagaaccctctcctggggtctggatccggacccctttcctggagtctgtgactcaaccccatgagagttgcgggttttaacgagccgctgcccgcttctagggggcgcagcgcactatggagggaagacgctgggacttccagcttgatatgctgcagccaataatagcggccgagcggaagtaaggcttccgtcggaaaagctc

SEQ ID NO: 24784 - DNA, 229 bp, Homo sapiens
  source 1..229: mol_type = other DNA
ctgcctgcctggggtttcccccgcttcagggcagcggaaggaaggccagcaggacatgctgtgctgggaaaagccagcaggtccccgcccccaccctcggggccttccgagcaggggtggcctgtgctccccagggggctggggctcctccacccccacgagccccaccagtgagggggagggggcgggccttgaccctgggctgggctttcccctgggcaggtcccaa

SEQ ID NO: 24785 - DNA, 358 bp, Homo sapiens
  source 1..358: mol_type = other DNA
gaagggtctagacgcctgcatccttcaggggctttctggataatggagctcatccctgaggtcaggagttccagaccagcctctctactaaaaatataaaattatataaaaattagctgtcccagctactgagctgagatcgcaacacggcactcccctgagctgtggagtggctctgaacaagtttccccatccataaaatgaggaagccaggtgatagctcggtccctcctggaatccttcctctgggatttcctgttagaaccctgccctcagccccgccgggctgccaggaggccccagtcatagcataggggcaagccccctttgcactggaaaattggccagtggctccctt

SEQ ID NO: 24786 - DNA, 268 bp, Homo sapiens
  source 1..268: mol_type = other DNA
taggggcaagccccctttgcactggaaaattggccagtggctcccttcctccccctgcccgcaattagtcctctggggcgggagcggggcatgggggaggggaagcccgatccgcacccaccccggtcaaccgggcacacctcccgcgctccgcgctcgctgcggccagtctcgggcgtcccggtcagtgtccagctgccgcggcctcggccccggcgactcccgccccccctccgcgggcagcggctcccctcagtcacctccgagg

SEQ ID NO: 24787 - DNA, 287 bp, Homo sapiens
  source 1..287: mol_type = other DNA
ggtcttgaactcctgacctcaggtgatccacccgccttggcctcccaaagtgctgggattacaggcctgggccaccatgcctaccccaggttgatcttaaaagggaccctgtcattctagatgtgtttatgtagagccttccagacccaggctggagtgcagtggcgtaagtagctgggattataggcgcccatcaccatgtccagggtcctagcccccagcaggctggaacaccggacgtctgttgtctggccctgggtgttgcatctgcttctgcagcgggaggc

SEQ ID NO: 24788 - DNA, 368 bp, Homo sapiens
  source 1..368: mol_type = other DNA
tctctaaaaaaaaataataataataatttaaaaaatcttcctttgaggttcagagaaatagatttctgtggtcccgtggaggaggttcatgggctctcgagcacccctgattctgtagtgcattctgggaggaggctcggaccggaggttctgcggtggctatgcctgcacctcccctggtctgctgagggaccctggatagagtcccacggcagggccaggggtcgagccccttgtcttccaccgcccagtgagccccaggcgctggatgtgagggctctgggcgaggccagcgcttcccaggcggccgcggcgggtgcgcctgcgcaatgcgcgcggtgatggagcgctaaccgggggcgcggcgg

SEQ ID NO: 24789 - DNA, 389 bp, Homo sapiens
  source 1..389: mol_type = other DNA
ctggaggatcacttgagcctgtaaggtcgaggctacagtgagtcatgatcgccccactggtcccagctcttcgctgcagtgaactatgatcgtgccactgcactcaattgcagatgaaattaaagttgctagtcagctgactttaaaagggcccaatgtaatcattagactgagcttggactcagtctctgaacccgggaggcagcgcagtctcttgaacccgggaggcgagcagcctgggcaacagagtgaaactctgtctcaaataaataaagagacagaccatgtctctgtctttgcagatatagcgaagattattctgatcactggacctgctgggatcagcctctgcccagccctggcaggggagggagttgacgggctgacac

SEQ ID NO: 24790 - DNA, 369 bp, Homo sapiens
  source 1..369: mol_type = other DNA
gactttcaaccctgccagggactgagggaaatcccagagcctgggctccgggacgaaggtcccaggacagggccggggctgcactgatcaggcgcgcaacgagcccggccctgcctcctgctccgcccaagggtatggagggccggactcggctggccttataccaaatccgcaacggtccaatcatggaatcagtcgagggccgcccgggtcctaaaggccgaggcctctgagttcctcaagtgcggtgaccgcaggtcgcaggctgagccactcgcgacagcgaggaggggccgagcccttcccccgaccccggcgacggccaatggttggggcgcccctcccctccccggggcggggccgcgtgac

SEQ ID NO: 24791 - DNA, 341 bp, Homo sapiens
  source 1..341: mol_type = other DNA
ccaccgcccctggccctgaattgcattctagaagcatctttctggctgccatgaggcatgaagacagacctagatgtctagatgtgtcacgtgggaggttgcagtgagccgagatcacgccactgcactcgggccccttctgtcacctccacgactccagggggcgctgcaactgctacggcccctgacagaggcggcctctcccgcggtagacaatgtgcacgtgcgctcttcagccggcagagggcgcgcgtgcgcagacggggccgggggcgcgcgcgggggccgggggcgcgcgcgggggccggcaccggaagcgtgcggttgccaatatcctggcc

SEQ ID NO: 24792 - DNA, 460 bp, Homo sapiens
  source 1..460: mol_type = other DNA
cctgtttctacactcacaggctgacactgaagttctctttgatctacacagttcaatcaaatatttatacattcactcaaacatttattgacctggtaaatatgatcagttactaacaggtcctgagtgaggaatgagtcctctaatgaggcagaaattaattcattagtcaaataacaaactaataaatagacacatcttacatgttatttactgaatgtagaaagcaatttataattttaattgctgttgctatatatcagccagtcgcagcgcagagcaatgagcttcgcagggcagctcctcccagccaatgacaggcctccgaggggaagcccagtccctcgcggatatgtcgggcgagccctggggatctcgcgaggatgcccccggcgcccctcaattcccgaggcgggccgtcacgtgacccgggctcgcccaattggcgcgcggactgcgg

SEQ ID NO: 24793 - DNA, 341 bp, Homo sapiens
  source 1..341: mol_type = other DNA
gcccttcattgattcaaccaatgctggatcagcccagagccgtggtggacaggagaaggcctctgctgtcccagggctcaccttcatgagcgctcaggcgatgagtgcttggatgagtgcccagggcctgaaggcctctcccaggacacagtgagactcagctgtggggaaatctgcccctctcccccggagaacattctgggcagaaggtgcagacagtgcaggccaggctgggaagggctctctggccagaagggtccctgtggctgcccaggggggcagggtccgggtgggtctcatgagtcatctcctcttccacccaagatgctcagctgtgggag

SEQ ID NO: 24794 - DNA, 189 bp, Homo sapiens
  source 1..189: mol_type = other DNA
gaggggcagatttccccacagctgagtctcactgtgtcctgggagaggccttcaggccctgggcactcatccaagcactcatcgcctgagcgctcatgaaggtgagccctgggacagcagaggccttctcctgtccaccacggctctgggctgatccagcattggttgaatcaatgaagggctggcaag

SEQ ID NO: 24795 - DNA, 297 bp, Homo sapiens
  source 1..297: mol_type = other DNA
tatcaccgtgttagccaggatggtcccttgtgatccgccaccgcgcccggcccaggtgcatcctcttaaacctacctaggagacagggtctctctctgtctggaatgcagtggcttgatcacagctcactgcagcctcgacctcttagcgatcctcccgcctctgcctcccaagtagctgagaggcgcgcgccacctgagcctccaaagtgctgtgcccaatcgagactcgtcgcccacgcggctccagcgtacagagcggccgccctgggccagcaaggcacgtggcaggccaggg

SEQ ID NO: 24796 - DNA, 585 bp, Homo sapiens
  source 1..585: mol_type = other DNA
gcagctccctgaggccgaggacccccagaccccgggaggggctcctgcaggcccagacggcgggtcctgcaggatcggctccctgcagcccaggacccccaggccccgagggcggggctccctgaggcccaggatccctagaccccggggcgcggctccggcaggccccggacaaccccagacccctagggcgcagctccctgcggcccaggacccccagacccccagggcggggccgctgcgggtctcggacacccccagaccccatgaaccccagacccccggggcgcagctccttcaggcccaggacaaccccggccctccagtgcccgcctccggcccggggcccccgctgcccccccctcaccctggcaggccagtgagggcgaacaccaagtccccgggcttgaaggcgtgtggcatgctgacggcgagaggcccaggccgcggaaagcggctgcagcggcggtagcggctgcggcggcggcggcggcggcagcgggaggcgaagccgggggcggggggcgggggaggctgtctgggcagcctgccgacgcgcgcttatccggccgtcacgggccggca

SEQ ID NO: 24797 - DNA, 209 bp, Homo sapiens
  source 1..209: mol_type = other DNA
caatcattatgggccccatcatttttcttgaatagtaggtactcagttaagtttttaactaagtgaagaaataactattttgtgcctgagcgggagaggctgtcaatgacccgcccattgctgccggcccgtgacggccggataagcgcgcgtcggcaggctgcccagacagcctcccccgccccccgcccccggcttcgcctcccgct

SEQ ID NO: 24798 - DNA, 405 bp, Homo sapiens
  source 1..405: mol_type = other DNA
gtgtggtggcaggcgcctgtaatcccagctactccggaggcagaggttgcagtgtgtcaagatcgcgccactgcactccagcctgggcgacagagtcagactctctgcctcagcttgctcatctgtgaaatggggatcctctgtaatcccagcaatttggctgatcccagctacttaggagactgaggcgggaggatcacctcagcctgggagggcaaggctgcagtgagctatgatcacaccactgcactctagcatcgataaataataataattaataagaaaagtctgtgatcgcatggactgtctctatggcaacaggagggcgagggaagcctggagccacgccccctgggcacgcccccgcacggcctctccccattgggaggcccccactgcgcgagc

SEQ ID NO: 24799 - DNA, 251 bp, Homo sapiens
  source 1..251: mol_type = other DNA
atctgtgaacagaagcccaggtgggcatgggcagcaggaggcctggggccacagtgaccaaggcctgccgggccagggaagccctggaggaggaggggaagccccaggcttccaagggttgtgcagtgagctgtgatcatgccaagacacactcagaaactcaactttcctagaattataattctccctggaacaggggccacttctggcagctgtcggaccgcctgcagcccaggctgctgctgctgttg

SEQ ID NO: 24800 - DNA, 329 bp, Homo sapiens
  source 1..329: mol_type = other DNA
gcttgcagtgagtggagatcacgccactgcactccagcctaggcataaaggtgacaccatcatacctaaatatttagaattattcagaaccaggtttgccactgtctaaggaccgtagagacgtttggcattactcactattggactgtatttttaaaatgacttcttttaaaaaaagcaatatcaacataccatgaaatcaagacgagtttttttgttctttttccaggaatatcttgatttccaggactggcttaggctcagcccctatcaggaactggacgggggtggggacttccccagggttggttcccctgcccccagtccag

SEQ ID NO: 24801 - DNA, 306 bp, Homo sapiens
  source 1..306: mol_type = other DNA
cctcctgggggtggcacgggtgggggcaccctcaaaagtcaaggccaggccgggcgcggcctgttcaagagttcgagactagcctggaggcttggtggcgggttcctgtaattccagctactcggccgactgcagaggttgcagtgagctgagatcacaccactgcactacagcgggaaacatggagacttcggggtccccatctgagacagagtctcactttgtcacccaggctggagtatagtggcgcgatctcggctcacttccagtagctgggacttgatctcatttcattaatggattgtg

SEQ ID NO: 24802 - DNA, 380 bp, Homo sapiens
  source 1..380: mol_type = other DNA
aggctggagtgcagtggtaggccggtcttgaactcctgacctcagatgatcctcccatctcggcctcccaaaatgttggccagcttgtggcttataaaattccaagagcctttgactctttatatttttgtgttttaattctaagtatttttatgcatgtattttgcgattgcatttttaaatatatgttttaggatatttgtatctattattataataattattattagttttaaattacctgataattaaatcagtgctgtgtattattattattattgccattattgtttttattaattattatccgcccgccgtcttgtggccacgagcgggactgcaggccgctcacctcgccgccccttgcggccctgctgctt

SEQ ID NO: 24803 - DNA, 374 bp, Homo sapiens
  source 1..374: mol_type = other DNA
tctcaggtacttgtgctgtgaaccaagatcatgccactgcactccagcctgggtgacagagcgagacctgtaatcccaccagtttgaccaacatggtgaaacgccatgtggtggcatgcacctggagtcccagctacctgggaggctgagaatgagctgagatggcaccactgcactccagcctgggcgacagagcaagactctgtctcaaataataatactactaataatagttaaatgaaaatggttaagatgacagcttttatgttatatatattttagccattaggggccttgaatcccagggagaggctggggcctggactcaggggtccctgggagccacgtgccctgaacacacgtggaatccgggt

SEQ ID NO: 24804 - DNA, 570 bp, Homo sapiens
  source 1..570: mol_type = other DNA
aggcatggagagcagcccctgctgtcctgaattcattgaagggtcaggagggttacaggaaggtctctgaaacctctaggcttttctgggccacgtcccacagggcgctggcgacagagggaggactgggtgaccggggccacccagaccgtagggttcctgacagcctcattgaccccatgggctcggctcaattaataagtccaccggaccacagggtgacccccttgggggctccgccctccgctccgcgccgcggttgctccgggccgggttttgcgcggctccagcccggctgtggcagagccgcgagtcgcagcggcggccgcggcgggcggaggagatgcggccgcggcgcgcccccggtccggccgccgcgcagcgccccccccggagccgacgccagcgcgcggggggccggggctgagccccctcccccagcgcagcgccgtgggcccgggggcggggagagcgcgcgcccccagcccccctccccagccggggatgccgggctgagcggcccggccgggacaggtgcgcgcacggacccccccagcccgcgccctcccg

SEQ ID NO: 24805 - DNA, 456 bp, Homo sapiens
  source 1..456: mol_type = other DNA
catcctccccgggggaccccagctggcgctgcgcagccgggaggctcctgtgtgtcctgcaggctcatggctggacctggggatcctctgatgaggtctccaggagccctccacctcaacagaactctgtatttttaaaattttaacttatttctccctgcccagggggctcaagggatcctcctgccttggcctcccaaagtgctgggattccaggcgtgaggcaccacaccttttaaaatggtgagaaccgtgcagaaccacgtggttggtcgacggcctcgcccccgcatccgggccccttcgcgattccggaggaatcccccagagccgccccggagcgctcggcccgccccccaggcctggcaactctccggtcccttccgcgcgggcggggcgagtggagggcggggcgaggcgagtggagggcggggccgcgctgcccgccccgccccg

SEQ ID NO: 24806 - DNA, 417 bp, Homo sapiens
  source 1..417: mol_type = other DNA
cgaggtcctctctcagggcctttgcatgggctgtgccctcctccctggatgggccggacccaggacctgcacaggcaagggctgggaggggcagtcagggacgctgtacctatgggttgggtgaatcgggcactggccagagctggacccctgcagggaatatggggctctgcagacgggtgcaggtctgaggccccgcggtacggcccctcccactgtgtggccttggaccgacggtcaggtgcccccagagcctcatccccgttcccccaggggtcagcccaggtgggtgaggcggaggcctcagtgtccctgtctgtccaatcaggtacagctcaggtgggcaggaacggcccagttccacagcatgcagctttgacgcagggacctctggcagagttcttgggatcttaatgg

SEQ ID NO: 24807 - DNA, 433 bp, Homo sapiens
  source 1..433: mol_type = other DNA
tagggattattttctttttaactttttattttgaaataatttttgcctcccagaaaatctgcagaaactgtagggtttcaagaccagccgtggtggtgaacacctgtcccagctactgtgcagtgagccgagatcgcgccactgcgcaagcatcctgctgctgcaacgattatgagaagttcgcctaataactgaaagagctgcagtcagtctgagggacctgagggaccctccaaggatcgccgggctacgcagggtccctagggtacgaggccgccccctcggcggccccgccccctcggcggccccgccccctcggcccgcccccaagatggtggccccgggcggtggacagggcggggcgtgccgggtcacgtggacagccgacgccgacgtggcctccggcggacgctccacgtgtccctcgccgcgc

SEQ ID NO: 24808 - DNA, 411 bp, Homo sapiens
  source 1..411: mol_type = other DNA
ccgggacgacctgcccagtccggccgccgccccacgtcccggtgagcagcgcccgcgcgcctcgtcccgccccggccgcgaccctgaacccgccattgaccggccccgcctcggccctgaccctgccctcgccatcgcctggccccggagcctccatgcacccgtctgtgggtccctccgcaggctctgaccccttccggaggtggccgcacccaagaacgtcctcggccatgcaaatgctgtatatgcacagaggccacctagggcaccccctggtcttccccaggggccccaggaggaagtcacttgcctcccaggcaagaaccaacctgtgggactaaagcccagggggtgtggaccgtaggcaccaatccctgcattcctctgctgggtcccaggggaatcggggcc

SEQ ID NO: 24809 - DNA, 384 bp, Homo sapiens
  source 1..384: mol_type = other DNA
cgcgaaaggtccccggttcgatcccgggcggaaacaggtcagctgtttttccagtaaggatttaaaaaaattttcttagatgggcgtggttgagcggagatcacgccactgcactccagcctttcgcatgcgttggccgggaatcgaacccgggtcaactgcttgcatcctctccggattgactgagtgataccaagtcacaggggggtgtctctccctatggggcgttacgcaccttaggccgccgcgccgcgggctcccccccaagcgccgcggacgccttggtacgtgcctggtggtgtccaatcccaggccgccgcctgggtcgctcaacttccgggtcaaaggtgcctgagccggcgggtcccctgtgtccgccgcggc

SEQ ID NO: 24810 - DNA, 393 bp, Homo sapiens
  source 1..393: mol_type = other DNA
atcacctgaggttgtggtggcacgtgcctgtaatcccagctacgtgagccgaggtcgcactaccgcactccagccccaaggcaggtggatcaccgcctgtaatcccagttactcagggcgccattgcactccaataaaataaaaacagctgctacatttatttcctgatcccactttacaattgtgcatctgggacccccgcccagatgactgtgggctccccgagagcacttctggccccctgcagacagtaggtgctcacacttgctgaacgtgaccgccggggcgacccggggactttcccggtgctgcggggcaggactccgaaaccgtgacctcacgtcccacacccacccgggacgcggaaggggcggcgcgcttccttcccagggc

SEQ ID NO: 24811 - DNA, 360 bp, Homo sapiens
  source 1..360: mol_type = other DNA
tgatccagcagtcacagagcctggagcctgaccccctgtgatcccagcactgtctcaaaaaaaaaaaaaaagtgtgtgtgtgtgtcgtggcccctgacgcgctggcgagggtcaccctgcaactctcccagggttctcgcagcctcagtttggccataggggaaatgggcgacctggggaatcccagcacctgtgcggcgcccccgaacagggtccccagctgcggagcgggggtcccgtggctgggacaggcgtggtccaagagtgctccctccccttcaggggcagggcgtggagtccttcccggacttcatgacttggcgagagaggggcgggcctggcgcgggcaatccctcaacc

SEQ ID NO: 24812 - DNA, 579 bp, Homo sapiens
  source 1..579: mol_type = other DNA
tccgattccagctcaaatgtcatcttctctgagaggcccaccgcagtggccccagtgagagagtatcctctctctcccccagataggaatttacaccgctgggttctgcagctctgagcaacctgtccggctgctttgtaggtgcccagcacaggtcactcctgtgcccgccaggactggtcagagtggaacagacagggcggagggggcagggcagccctgcccgcctggacagcctggagaagcctggcaggccctgacgccaggcagtggggcttggggcgatcgggcgcagggtgcaggtggtctcctaggggccccccacgtctgtaccctgggggtccccaaggctcctggggtgtccacgtgcggggggtgaccaggccctgccacgcagcccctttgcacgctgggcgcgcccagcagagcgcgcagggctgggcggagccgtggcccactaggcggaggcgccgtggacagaggcgggggcgccccccaccctctttctcgcttcccgccactgcgtcggccaatcaggaggcaggcgcccgcccccggcacggcctcctgcggccccgc

SEQ ID NO: 24813 - DNA, 779 bp, Homo sapiens
  source 1..779: mol_type = other DNA
gtctgtaccctgggggtccccaaggctcctggggtgtccacgtgcggggggtgaccaggccctgccacgcagcccctttgcacgctgggcgcgcccagcagagcgcgcagggctgggcggagccgtggcccactaggcggaggcgccgtggacagaggcgggggcgccccccaccctctttctcgcttcccgccactgcgtcggccaatcaggaggcaggcgcccgcccccggcacggcctcctgcggccccgcagctggcagcgcggcgggcagcgtttgccgagcgggcgctccgggtcgcacgcaagtccgcgcggggtccgggccacgcacgcggtttcatcgccatccccagccgggccacgcgcgcaggcagacaagctgttcgcggcgaccggagaggtgagcgggcgggccgggtcggggtgccagcccgggccgggcgcacggggctcgggaactttgcaaaactttcccgcgcggccagcccgggcgcacgcatgtcccgcacgtcccgggatccagggaatcgttccccggcacacatccggctggagccgggaccagcgctgcgtccccggagcccggcggggggtcgagcgcgccgggtgggggagggcctggcgagccgccggggaggatgtcaggctccgcgcctgcgcgcggggcgccccgcgattcaattgtcgcgcccgagcccgatttcgcgcgccctgagttccccgggagcatctgggccagggggcgggacttgacgagcgggggccccctctgtag

SEQ ID NO: 24814 - DNA, 771 bp, Homo sapiens
  source 1..771: mol_type = other DNA
gggggcgccccctcccgccactgcgtcggccaatcaggaggcaggcgcccgcccccggcacggcctcctgcggccccgcagctggcagcgcggcgggcagcgtttgccgagcgggcgctccgggtcgcacgcaagtccgcgcggggtccgggccacgcacgcggtttcatcgccatccccagccgggccacgcgcgcaggcagacaagctgttcgcggcgaccggagaggtgagcgggcgggccgggtcggggtgccagcccgggccgggcgcacggggctcgggaactttgcaaaactttcccgcgcggccagcccgggcgcacgcatgtcccgcacgtcccgggatccagggaatcgttccccggcacacatccggctggagccgggaccagcgctgcgtccccggagcccggcggggggtcgagcgcgccgggtgggggagggcctggcgagccgccggggaggatgtcaggctccgcgcctgcgcgcggggcgccccgcgattcaattgtcgcgcccgagcccgatttcgcgcgccctgagttccccgggagcatctgggccagggggcgggacttgacgagcgggggccccctctgtagtcccggcggcgggggtgggcgtgggctcgctggcgcgacccgcgcgggccagtgggagtgcgggagggacgcgtcgcggggcgcgcgcgctcgcgggtggccgggacggggcggccggttaccatggccaccgcggggcgggcccggtcgcgcacgcgcgcgggggg

SEQ ID NO: 24815 - DNA, 636 bp, Homo sapiens
  source 1..636: mol_type = other DNA
gactcagcgaggttactttgctggaggtcaaccacagtgtagctttgaattctcccatacattttagggaactcggggagagggaccctaactattccgaaggccttgccccttggcaaaggtttgttgagcttggcactttgcaaattggggaacgctaagcccacattccggccacgggtttcgaacctccagcctgcacgttcccggccggtgcgggtctcacgtactcagccgccgcctgataaccagggcggggcccggagcttgcgggcagtgattggcacctgccccagcctgtccgcgcctcgggctggccgggcgggccctgaggctcccttgtcaatccaaggcccagctgccgtcgggttggtcgcggcagccttggctggcgtgcgccccctccaatgagcagagccggtcagcgggcacgtgggtgggcgccggcgtgtccccgccggtctgccaataggcgaggccggcgtttgtccccgcccaatcgcggcgcgcggtgggcgggccgtgcggtgtgcggaggggaggggcggagctgtcagctccggccaatgggcgctcgggcgtggatccggcagccaatggcagtcggggcggagctggcgcgcggccttataagcc

SEQ ID NO: 24816 - DNA, 232 bp, Homo sapiens
  source 1..232: mol_type = other DNA
agacctgaaatatatatgtcttggttaactgctggcgctcctgcaggagccctctggggtggccaggggccgtccctgatgagccggggaggagcctcagctcccagggccgtgcagtccgctgccctcgggcccagctcagggagcaggcccttgacccagtcacttgctcagtgacaaagcaggagcccactcggggcggggggagctccgcaggcctgcactggtcacc

SEQ ID NO: 24817 - DNA, 312 bp, Homo sapiens
  source 1..312: mol_type = other DNA
ctggcctggctgtacctccaagccttcccctgggggctctgggagccatgacagcacatagtctggagtcccctccttcctgagctggggctcagcacccctcagtcctggtgtggggcttggtctgagtcaggggctcaggtcctcagtcctggtgtggggcttggtctgagtcaggggcccagcctgggttggggactcatgctccatttgggctgctgtagccaaatacccctgtgtcctcacgtggcagaaagggcaagggagctttctgggagatcctttatgcgttcatgagctcggctcgaggcc

SEQ ID NO: 24818 - DNA, 503 bp, Homo sapiens
  source 1..503: mol_type = other DNA
ccagcctgggcgacagagtgagactccgactgggcttctcccaggcgctgcttatttgagcagaaggatcacccgagcccaactactcaggaggctgaggcgggaggatcacctgagcccaggagtttgaagctgcagtgagctatgatcataccagcaaagaaggagcagctggttttgcacagtgcagcgcacagaaagtgccatgccctttgcacccgacgctggggctcccgcacggacagtagccccaggggcccttcccgccgccgccgcagccgccaccgtgtcccgcgaagccccgcgccccacgtgctcccgcggccctttaaacaccccggagccacgtgaccgcgctgcgccgtcccattggccggggggcgtggcggccgcgcggctgcgcagtgacgcgcacgggccggccctgcccccgacccggcggcggcggcggcggcgctggcggaagggatgacgtcaccggctgggggggcgcgcgagcggga

SEQ ID NO: 24819 - DNA, 423 bp, Homo sapiens
  source 1..423: mol_type = other DNA
tgcctcagcctcctgagtagctggaactacaggcatgtgcaccacgcctggctagctgggattccagcctggcctaaaagtaaattttttttttaatgtaatcccaccgctttgggaggccaacaggagcgcctgtagtcccagctacttgagaggctgaggcgggaggatcgcttgagcccgggaggtcaaggctgcaacgaaggagcctccaccatgtaaccccctggacattcgccactccgcctctagacccccgggcgcactctggggccagcagtggggagcggacgcctgaggggaccgtggcacccgccccgccccgccgggccgggcctgcccactgcgtgccgggcgtgtccgggcgggcggagcgcgggcgcggcgggggcgggcggccaggctagtcgggcgggtgcgcgg

SEQ ID NO: 24820 - DNA, 649 bp, Homo sapiens
  source 1..649: mol_type = other DNA
ccttcccctcgcctgggaagtgagggtttcagggtctcccctccaggtacggaggaggggacgagacgaggggagaaccctcctctcagtggacgatgtcacccgtcaccgtgcagctctctccggggcctcggaggagccgggggacgcgagagcgccaggtccggcgaggccgcgaacgcggccgggggcggacgccagggcccgcgagccaccgtcgcggccaagaggaccccgcaggtcgctgaggcgccgcgtcccggtctctgacgaggcggagctcagagccgccgcgcccgccgctccagactgacagagtctccgccattccagggaccctggctccgcccgggccggtgcgccgcctgcgagggaaccgctccagtcgccccagcgcgcctcgcttctgcgcaggcgcaccaagcgtaggtcccggttgcaactgcacatgcgcagtgagaacaacgcggggatgtgcgcagacgcgttgcgtctcgtcagcctcccgccgggaactgccgggacgcatgcgagctgcagattcagcgcttgcgcgttgtgccggggaacccgcggttggtggacgcgcgagcgtcgctagtgggggcggtgcgcgtgcgcgtgcgcggccgcaaagcggggcgggagg

SEQ ID NO: 24821 - DNA, 495 bp, Homo sapiens
  source 1..495: mol_type = other DNA
agaacgcatcggccccccacccgctcagggtccagcgggggtggggtcccgggctgggagccacgcgaacgcccccacgccgggtccccgaccgcaccccctcccgtagggcacgggtcacgtgactcgaagcccacctcctcccggggaggggccgggcctcggggacccagcgccggagcgtcgccgggcaacagtgcccgcctggtcttcgcctcccagcaggggcccggccccgcccactgggcggacgccccgcctccgaatcgatcacgtgagggggccgcagcgctcgaacaatcccgcggcccttggtcccccgcgcgggcgcgggtggatctccagggacaggaggctccgcggccaggtgcaaacagcgccgtgctgacggcggcccgggccagcggccctccgctgcgagaccgcagcccttctctggagtctcagagccgcaagacattccagaggcctctgcggcgccgcgacaggaagcgg

SEQ ID NO: 24822 - DNA, 685 bp, Homo sapiens
  source 1..685: mol_type = other DNA
agtccgccagacacccattctccggaggaggaacaaggctcgatcgggagccccaggaggggtcccggggccaccctggtagcgtcacacagccggccccctgggtgcccgacacctcgaaccggggtcggccaagacgcggggcgaacccagggcgccccgggtccgggagccgcggtgacaggtgcaggcgggggcgtgcccgggcctcctgcgccacccccgagccccgcgcagccgctccatcaggacgctcttgtggctccgcccgcagatcgatcacccgcagctcgctgagccgcctcgtcccagtctccgcaacgcccgggccgagagaagccgtgccagggcccgagtcgcccgacccgggcagagtctccgccgccaccgactcagtcgcacaccgccggcagctacctcccgccccgctttgcggccgcgcacgcgcacgcgcaccgcccccactagcgacgctcgcgcgtccaccaaccgcgggttccccggcacaacgcgcaagcgctgaatctgcagctcgcatgcgtcccggcagttcccggcgggaggctgacgagacgcaacgcgtctgcgcacatccccgcgttgttctcactgcgcatgtgcagttgcaaccgggacctacgcttggtgcgcctgcgcagaagcgaggcgcgctggggcgactgga

SEQ ID NO: 24823 - DNA, 471 bp, Homo sapiens
  source 1..471: mol_type = other DNA
ggatggatgaatggatagatggacagatgcatgtatggatgcatagatagaaggatggatggatgtatgaatggataaatgggaacacataaatggatggatggatggatggatggatggacggacggatgcatggatggatggatggatggatggatggatggaagaacgcatcggccccccacccgctcagggtccagcgggggtggggtcccgggctgggagccacgcgaacgcccccacgccgggtccccgaccgcaccccctcccgtagggcacgggtcacgtgactcgaagcccacctcctcccggggaggggccgggcctcggggacccagcgccggagcgtcgccgggcaacagtgcccgcctggtcttcgcctcccagcaggggcccggccccgcccactgggcggacgccccgcctccgaatcgatcacgtgagggggccgcagcgctcgaacaatcccgc

SEQ ID NO: 24824 - DNA, 493 bp, Homo sapiens
  source 1..493: mol_type = other DNA
gtgtccctgggcgcctcctgcccgctgtcactcgcagctccgaggaggcggagggggattggcgacctcgggaagccccgcccctctctcagtttccctatctggcccataggcggggaacgcccacaaaaatggactttttcggggactcgggtcccctccggcgcccccaccatggtcgctcggatccacgcgcaaggacactcggctcgcccgccgcttcctgtcgcggcgccgcagaggcctctggaatgtcttgcggctctgagactccagagaagggctgcggtctcgcagcggagggccgctggcccgggccgccgtcagcacggcgctgtttgcacctggccgcggagcctcctgtccctggagatccacccgcgcccgcgcgggggaccaagggccgcgggattgttcgagcgctgcggccccctcacgtgatcgattcggaggcggggcgtccgcccagtgggcggggccgggcccctgctgg

SEQ ID NO: 24825 - DNA, 569 bp, Homo sapiens
  source 1..569: mol_type = other DNA
gaggcggagggggattggcgacctcgggaagccccgcccctctctcagtttccctatctggcccataggcggggaacgcccacaaaaatggactttttcggggactcgggtcccctccggcgcccccaccatggtcgctcggatccacgcgcaaggacactcggctcgcccgccgcttcctgtcgcggcgccgcagaggcctctggaatgtcttgcggctctgagactccagagaagggctgcggtctcgcagcggagggccgctggcccgggccgccgtcagcacggcgctgtttgcacctggccgcggagcctcctgtccctggagatccacccgcgcccgcgcgggggaccaagggccgcgggattgttcgagcgctgcggccccctcacgtgatcgattcggaggcggggcgtccgcccagtgggcggggccgggcccctgctgggaggcgaagaccaggcgggcactgttgcccggcgacgctccggcgctgggtccccgaggcccggcccctccccgggaggaggtgggcttcgagtcacgtgacccgtgccctacgggaggg

SEQ ID NO: 24826 - DNA, 730 bp, Homo sapiens
  source 1..730: mol_type = other DNA
cacatcggcggcgccccggccggcacgcgagcccgcagcccccaggcaactcgctggctcatgcaggtgctccgctcctccgcggccccggcccgcccctctatctcagggaccggtggtccgttccagggagggctcgccgggtttctggccccgtctctgacccggccctggccccgcccctgggctccgcctctgccggtgactcgcgagtgccgcctgcaggtaaagcgctgcccagcctgacggacagcaagggctccctggtggtggtgtcctcgctgctcggtgcgtgcacccggccccggctctgcgggacggggagtggggaggagggtctgggcaggcttcccggacgagggggagccactcagccgctgccgtccgcgcccccaggccgcgtgcccggcggccaagtttgcgctggacggcttcttcggctccctgcggcgggagctggacgtgcaggacgtgaacgtggccatcaccatgtgcgtcctgggcctccgagatcgcgcctccgccgccgaggcagtcaggtgaggcccggacaagctgggggctgggctgggggccatggcccagccccagccgcagtccccaccgtgccctcctgtccccaggggagtcacgagggtcaaggcggccccggggcccaaggcagccctggccgtgatccgcggcggcgccacgcgcgcggccggcgtcttctacccgtggcggcttgctc

SEQ ID NO: 24827 - DNA, 378 bp, Homo sapiens
  source 1..378: mol_type = other DNA
acaccacctaaattgtccgcaagaccttctagaccaattgataacaaaaccaatacctttttttttaaatggagggctggagtgcagtggtgcgatcctcagccctatttatttatttatttatttatttatttatttattgagacgctctgtgcccaggctggagtgcagtggcacgagagtagctgggactggtctcgagctcctgacctcgtgatctattccctggttccgactccagctcccgggctcgcaggagtaaacgcgcatgctcagggagctcggtcgcgcatgctcagcgcaacggcggggaagactccagccgccagggggagcgcgtgccgttcttgcctgcgcctcctgagccggatatcccgg

SEQ ID NO: 24828 - DNA, 725 bp, Homo sapiens
  source 1..725: mol_type = other DNA
cagagctgagctgtgaccagcggtcggaggagtcgctgcacaatccgagtacgtgcaggctgaagccctgcgcatgcgcatcaatgagtcccgggagcgggcctccgcgcactgcagcccggcgctccgcctgaatcttgagcatgcgcagaatcccgggaagcccgaatccgcgcaccccaaagtgcgctcagagcctgagtatgcgcacccggccacccgtggccagtctagagtctgagcatgcgcatgttgtccgcgcgcctaagcatgtgcacaggctgctcgttgcgtttgcaacactaccagtgttttgtacgggcgctggcgcctgctcagccttaggcggagacgatccgatgctcgaactccgccccctcttctccgcgtaggcccagctccctgaagcggctgtttcgagccacgcgcccatcgggtaccgaggcacgcgccgggcgtcacgtgcgtttcgcggcgagcggaaatgacgcgccgccagtgcggcgcggtgctgggtgctgcggcggccgatgctggccgccgccggggggcgggttcccactgcagcaggagcgtggttgctccgaggccagcggacctgcgacgcctctcctccttgggcactgtggggccgaggcccggcaattgggggccaatggcggcgagcagccgcggcggaggcgcattctcggggggcgaggacgcctccgagggcggcgcggagg

SEQ ID NO: 24829 - DNA, 572 bp, Homo sapiens
  source 1..572: mol_type = other DNA
gagccgagatcgcgccactgcactgcagcctgggcgacagagggagcaggcctcggctccaagaggagtcctggcagcccccgacagagctgagctgtgaccagcggtcggaggagtcgctgcacaatccgagtacgtgcaggctgaagccctgcgcatgcgcatcaatgagtcccgggagcgggcctccgcgcactgcagcccggcgctccgcctgaatcttgagcatgcgcagaatcccgggaagcccgaatccgcgcaccccaaagtgcgctcagagcctgagtatgcgcacccggccacccgtggccagtctagagtctgagcatgcgcatgttgtccgcgcgcctaagcatgtgcacaggctgctcgttgcgtttgcaacactaccagtgttttgtacgggcgctggcgcctgctcagccttaggcggagacgatccgatgctcgaactccgccccctcttctccgcgtaggcccagctccctgaagcggctgtttcgagccacgcgcccatcgggtaccgaggcacgcgccgggcgtcacgtgcgtttcgcggcgagcggaaatga

SEQ ID NO: 24830 - DNA, 324 bp, Homo sapiens
  source 1..324: mol_type = other DNA
atgttggccaggctggtctcgaactcctgacgtgcccagagacagtctcgcgctggagtgcaatggcgtgatctcagctcactgcaagtagctgggtggccaggctggtagctcccgacccctaatttacatttttaaaaaccctagcaggggccgaaatttaaaaattatgtcgtgatcgtaccgctgcactccagcctgattgcagtccagttcgcaattggccaggcctgaggctccacccatgtgcaggcaccgcccccgtggcgtcacgagcgagcaatggcgtcattggaacgacatgagcatgcgccgtgacccgga

SEQ ID NO: 24831 - DNA, 745 bp, Homo sapiens
  source 1..745: mol_type = other DNA
tgatggcgatgacgccatgggcgtgagcgccgttatgaccgggccttccccggcgcccgcgctgccccccgcgccgccggctccttcctccgcgccgccctcggaggcgtcctcgccccccgagaatgcgcctccgccgcggctgctcgccgccattggcccccaattgccgggcctcggccccacagtgcccaaggaggagaggcgtcgcaggtccgctggcctcggagcaaccacgctcctgctgcagtgggaacccgccccccggcggcggccagcatcggccgccgcagcacccagcaccgcgccgcactggcggcgcgtcatttccgctcgccgcgaaacgcacgtgacgcccggcgcgtgcctcggtacccgatgggcgcgtggctcgaaacagccgcttcagggagctgggcctacgcggagaagagggggcggagttcgagcatcggatcgtctccgcctaaggctgagcaggcgccagcgcccgtacaaaacactggtagtgttgcaaacgcaacgagcagcctgtgcacatgcttaggcgcgcggacaacatgcgcatgctcagactctagactggccacgggtggccgggtgcgcatactcaggctctgagcgcactttggggtgcgcggattcgggcttcccgggattctgcgcatgctcaagattcaggcggagcgccgggctgcagtgcgcggaggcccgctcccgggactcattgatgcgcatgcgcagg

SEQ ID NO: 24832 - DNA, 408 bp, Homo sapiens
  source 1..408: mol_type = other DNA
gcttgggagtgagagagtttaaggtcatcctccccaggaatccctggacttctgctttgcactgccctgcaggagtgggaggaagcttctctgaccgtggcccagcctctgcaacagctgctccagtggtgaagacccagcctgctgagactcctcctgcggaatgcccttccatcccttttttattcaaaaggctgcaattttaattgaagaaagttccctgcacttagtgctcaggaaaagcggaaaggtagaaattctgctcacttcctcattcccgaacccctggtgtccctgtggaacccgctttgggaaccggtggtcaggtggggcaaggtcatgcatgacctgagtctccaaatccctaaggatgtccgggctccaggacaggatgccctgggtcacctg

SEQ ID NO: 24833 - DNA, 335 bp, Homo sapiens
  source 1..335: mol_type = other DNA
tcacgcgcctgtagtcccagctactcgggaggctggggcatgagaagttacagtaaactgagactgtgccactgcactccagcaaaagagagagataggggtatctctgttttccctaggcactgtcgcccaggctggagtgcagtggctcgatctcgtgatctgcccacctcggcctcccaaagtgttgggattacagtggagctctgggagacctcccagaacctcactggtctgggcgtggctgggcactgagatagtagaactcaggcagcatgatgcagcctcccagaaacacccagcttgggagtgagagagtttaaggtcatcctccc

SEQ ID NO: 24834 - DNA, 281 bp, Homo sapiens
  source 1..281: mol_type = other DNA
caggcagtcgtccccacaatgattaaacaccaagggaaggctgccttcccaagatgtgtctcctttgtctataccagaaaatgaaaggaatttaagaggccacttacccaatttaaaatcagtgagcaggggactgctgtcccgaaggagtcccgctgacccgggtcttcgggagaattacaaagaacctttttttttttttttttgatggctctgcttcctgcctcagcctccggagtagctgggaccacaggcgcccgccacccgtgcccggcctacaa

SEQ ID NO: 24835 - DNA, 194 bp, Homo sapiens
  source 1..194: mol_type = other DNA
caaaaccttcgggtatattgtacaaagtatgtggcaggaactcatctggatgtacacgtgcagggtgcataagcaagaaacccatggggcccccgtgggacccactttgcagctgtgcacccaaagccaggcagccttcaggctacagatggagcccgggtcacgtcccgggcctcccccggaaactggcttcc

SEQ ID NO: 24836 - DNA, 323 bp, Homo sapiens
  source 1..323: mol_type = other DNA
cacgtgcatctgcgatcagtgcagacagatttcgctagtcccagctcagggagtcctaggttagggactactaggccgggctcaggatgtggccacacccagtgtctctgcatagcgagtggtcatgccctgtggtcagtcaccaagccgtgctactcaccccgcggctgtcccacgccctaggccggatgaagtacacaggaggggcgaggccgtgcctggatctacccctgacaggccggccaagcacgacccagccctctggggtggggtctagtggggcggggccctcccgggggcggggcctgtgccagttccgggcc

SEQ ID NO: 24837 - DNA, 327 bp, Homo sapiens
  source 1..327: mol_type = other DNA
gaccccaccccagagggctgggtcgtgcttggccggcctgtcaggggtagatccaggcacggcctcgcccctcctgtgtacttcatccggcctagggcgtgggacagccgcggggtgagtagcacggcttggtgactgaccacagggcatgaccactcgctatgcagagacactgggtgtggccacatcctgagcccggcctagtagtccctaacctaggactccctgagctgggactagcgaaatctgtctgcactgatcgcagatgcacgtgggccggtccccggcgcgtgcgcgcgatctgccggcccgctagcccgaaaggtt

SEQ ID NO: 24838 - DNA, 473 bp, Homo sapiens
  source 1..473: mol_type = other DNA
ccgggctttctttcttttttttttaaagagacaaagtctcactgttgcccaggctggagtgcaatggtgtgatcacaaccggcctgtaatcccagatactcgggactgcactccagcttgggcgacagagggagactccatgctacctcctgccaagtagctgggaccatgggcatatgccaccatgcctggctgcgtttttgcattttttctagagataaaaattcttactaaacatttacaaatgagatgccaaaacagcacttcagtaatagtggttatattttatagttctctacacagaaaaaaaaatgactcatagacatgaaagtatttctctgcctatttaaataattctggattgcagtgagccaccaggattttggcagccagatgtcaccatgatttctcataaaactgatgatgttacatcagtggtggaataacctacagattggtttcagactccaaag

SEQ ID NO: 24839 - DNA, 371 bp, Homo sapiens
  source 1..371: mol_type = other DNA
tgagcagaggtgtccctcaggctcagctcagtctctgcctgggtgggaggtcttagggccccaggacctgggccacctggtcgcccagactggagtgcagtggtgcaatcttggctctttttgttgctgtacaatagaaacaagttctctgccctggctcgggctgagaagcccctgtgaagccagagagacctgtccagggtcacacaggaatcatgcgtcagggcatttcagcccctgcagggcagtggcctgcccctcctccttggagccaggaagggatgcagtgccacagggatctggctctgtcccaggccctgtggggctggcagttgagtaagcagtcaggctgggcgcacccatccctcccg

SEQ ID NO: 24840 - DNA, 327 bp, Homo sapiens
  source 1..327: mol_type = other DNA
cccctggcaaccgttgttacttagcaaacaatgagggccgtttaattgaacatctgcatatatttttctctgattaaatttgagtttgatttaatattgtaatgttgaatatgtcctagactgctctcaactggagacttattttagtcttaagtggaatttcttttttgatctaattcctggtgttcagaaaatcattgacccagccgcacgttcccactaacaaagtgccctgttgatgggcactttgcagccacaggttggattttgagcctgacaagggtttgttgcttaggtaaacaccacccctgaacgcgttcagaactg

SEQ ID NO: 24841 - DNA, 519 bp, Homo sapiens
  source 1..519: mol_type = other DNA
acagcctggccaggaccctcccatgagccttgtgagtgggtaacctggaggcgcgcggttcccctgctccgaggggtcgagtccctcgcgccggctccccccgcccccaacgccagcacctgggtcccagggctgcgccggaaagcgtttgccgaaggtaccggctcctaaggcggaggcaacgcgtctcccgcccgcgcgtgtgggaagcccccgcaggcccggcgataaggcctcggctgcggcgccgctcactgtcccaccgcgggggaatcaagacccgcctcgggccgcgcggtgccgcctcactgcgcccggccctttccccgccctctcagtcggcgggaaaaggaggcgggaggcaggtgcgtgctaggagcgcggctcgtcagggcaggctgctctgcagggcaggcgatccggggctcgcctccgcgcggcattcagcgcgcaggcgcgagctggccgcctcacacggagtcggcttgcgcacgcaagcaggcgagcctgggccggcgc

SEQ ID NO: 24842 - DNA, 539 bp, Homo sapiens
  source 1..539: mol_type = other DNA
gccaatctttaaactagttcaaaatactgggcccataaaagagagtctcccaggctggagtgcagtggtgcgatctcggctgctgggactagggtttcttttaaccatgtaaaaaatatatatatatttaaattttcagctggggagcgagagtttgctgacccctgatcagcccacatgtcccacactcctcctgtggggtaaacggagtcccttgggtcccacccacggcgccgcgcgcgcgaccggttcgccaaccctctgagccgcgcgcgcctcccgccaagacccgcccctcttcgcggccattggccgagtctcgggggcctcctccttccgacagactctgcagaatggaacgccgtagggtctcgcgccccgccctcttgggggcccgttggaggcgagcgtggcggagcctggtaaccgttgccggtaacaacgccccgccccgtcgggcgggcgggctgcgcgaggctggctggcggcgggagccggaggaggagcggccgccgccgccaccgccgccgccatagaga

SEQ ID NO: 24843 - DNA, 380 bp, Homo sapiens
  source 1..380: mol_type = other DNA
ttttaaattcggacttggcctcccaaagtgctgggattccaggcacaagccactgtgcctggtagtggacattggccaggcgcggtggcgcctgtcatctcagcactttgggaggccaaggcggagaccagcctggcccgggcgcctgtaatcccagctactcgggaggctgaggcactgcagtgaactgagatcgcaccattgcactccagcctgactccctgcctgggcgggatcctttgattcacaatggcctgccattagggtcatggcttcataaaaacgtcacgaatgcaacgcagaagtgcatgcatgcatgaataaatgaatgatgcatgaaaagagcaatctccctgtcctggaagcagcttcccctaggg

SEQ ID NO: 24844 - DNA, 514 bp, Homo sapiens
  source 1..514: mol_type = other DNA
cttgggtcatttgaatgtagcacgatttcaaatttgtatcattcaaattagcatgaagaatcacacagtactgttcttcaacctatttcacagatgcacaaactgagacattagaaaattaatctccagcataatggcgagctcctgtaatcccagctactcgggaggctgaggcagtagaatctcttgaaccacactctagcggggatccctccacagggctcgcagcccccgggacgctcccgccctggaggctccagccacgaggcagcgccccctgcgggccgcagcgcgcaggcgccgcgcgcccgtcccgcccccgcccccctccacgtgcggcgcacacctcgcgccaggcattggctgcgggcttcgtccctccggccgcagcccggcaggcccccgccaggcaggaagtcccgcgccacaagcggccgtccgcgccgtcgattggcccaggtggctgtcagtcgatgcggcgggccctagtcggcggcgggggcccgtgatcggt

SEQ ID NO: 24845 - DNA, 357 bp, Homo sapiens
  source 1..357: mol_type = other DNA
ccagtcatcccagctacttgggacactccagcctgggtgagccagactgcatttttaaatcccagctactcgggaggctgcttgcagtgagctgagatcatgccactgcactccagcctgggacagagcagcatgtgcctgtggtcctggctacttcagaggctgaggcaggagtattgcctgtaccccagcctgagcaacagagcaagcctgactctaataaataaagtaatctggatgggaggcctggacagtgccagtcccacggtgctcagggctgctgtcactgcacagccaggctgccctggtgcaactggggagcggcccagcaggtgcctgccgcggggcaccgggctg

SEQ ID NO: 24846 - DNA, 307 bp, Homo sapiens
  source 1..307: mol_type = other DNA
cggccctgcagctatttttaaaataaggaacccatctctaatacatatatatatatatttgccagatgtggtagcacacaactgtagtcccagctactctggagagcttgggcccagaaatttgaggccacattgagctatggcgccactgcactccagcctgggccacagagtgagattctgtcagaccagcctggcatctgtaatcccagctactggggcagctgagccaggaacatcgtgccaccgcactccagcctgggcccagactcctggaagtgagcggcctagcgagcgagctcccagg

SEQ ID NO: 24847 - DNA, 239 bp, Homo sapiens
  source 1..239: mol_type = other DNA
gtgctcaatcaaaattgactactttttttggggaaaaaatctaccaattatgattattttttctaccaatttttaaatgtcagccgggtccaacaggcccttttggtggttgagagagaacatccctgacccgggattctggtcccctgagtcacccgtgtgccctgacgagtgcccctggcacccaggaaagaccctgctcaccagggctcaaggctggcaacgctgtcatcgatctg

SEQ ID NO: 24848 - DNA, 331 bp, Homo sapiens
  source 1..331: mol_type = other DNA
tgtggaagcaaatcccagagatcttttttctgtaaatatttttttttcagtttgcgtttgtaaaaaacgatgactcttttttttttttttgagacggagtgcagtggctgcctcagcctcctgagtcgctgggattacaggcacgcgcgctggccaggctggtctcgaacctgacctcaggtgatccacccgcctcggcctcccgaagtgctgggatcttggccccagtccccctgttccggacttcaaagtcttggccaggcaacccctcggacttgcgactcagccactggtaatcgctgccgcaggtaccgccaatggcttttggcgg

SEQ ID NO: 24849 - DNA, 510 bp, Homo sapiens
  source 1..510: mol_type = other DNA
caccttgcggggccccgaacccaggaggtggaacggggtaggggatcctgcatctcccccccaggaagcatccggccagcagctcttggggtggtcgcgccccgaccccgcccaggctctgacccctcctggctcggctcaacgggtccccgcccgggaatgacggggtccaccccttcggggtagggggggggagccaagcggcggttcgacccgacccgagtaggcctcggttgctatggtgacgcggccttctgggccccccaggtccagagcggcaaggcgcatgcgcaaagtgcctgggagcccgcaagggggattcgtctccctccttgggtgctgacgtcacgagagagggcggtcccccatttgatgaagttaaccgcgttatatacctgagtctaaaaagggaccgcggtggaccttttgaggtgacgcactgaggtggccacagtcgcgccatcgcgacgcggagggtttcgcttccgggttaggcggccgcagaagcgt

SEQ ID NO: 24850 - DNA, 370 bp, Homo sapiens
  source 1..370: mol_type = other DNA
acgtctgagccctcagagccaccttgcggggccccgaacccaggaggtggaacggggtaggggatcctgcatctcccccccaggaagcatccggccagcagctcttggggtggtcgcgccccgaccccgcccaggctctgacccctcctggctcggctcaacgggtccccgcccgggaatgacggggtccaccccttcggggtagggggggggagccaagcggcggttcgacccgacccgagtaggcctcggttgctatggtgacgcggccttctgggccccccaggtccagagcggcaaggcgcatgcgcaaagtgcctgggagcccgcaagggggattcgtctccctccttgggtgctgacgtcacga

SEQ ID NO: 24851 - DNA, 392 bp, Homo sapiens
  source 1..392: mol_type = other DNA
aagaaggcccgggggatcccgagtttcctgctttccggcctccggaagcgctcgatctctaaggcttcaagcgggccacgtgccgccggtgagctaacccagacatcaggcctgagttcgggcagccgattgccaccgcccacgtcggctgactccgccccaatgcagcggcgcttcagccattggctaattggattaattggctgcccggccttacacgtgactcttcagaaccgtcacagcacgggcagctcgcagctattgcctctgagagctgtcagtcactctgatcgcgattggtgtccggggtgcggcggctgcctcccattggcccgccggagtcgtccgtcacgtcggcggcgggaggggcgactctctcccccctcgtcgtc

SEQ ID NO: 24852 - DNA, 185 bp, Homo sapiens
  source 1..185: mol_type = other DNA
gactgcgtcctcccatggcagacagagagagagaaatgagttcatctgaggacctcggccggaatccgtctcaaaaaaaacgataataataataattttgacaggacacaattcaatttataacgataacatatttattggtttaagggggccatcacgctgcccaccacaccggtcacaggggc

SEQ ID NO: 24853 - DNA, 466 bp, Homo sapiens
  source 1..466: mol_type = other DNA
ggaacctgctcctgaggggacgcatgtcaccttatgccttaggaacccagagcccccagcgccttgaggaaggggatagaagacgtcaccccacttctccctcagccaccacaggtctgtgcggtgggaagtcaccagttcaaggtcacagaaccaggaaatgtccacatgggggacccaggggttccctttggaggaagcccgccttggtttttcccatttgggacagctgcgggtgaccgcagacaggattgggtccctggctggggcagcccgggacagtgagccaggcccgtgaacggcccatgaaagggcaggccagctgcaggccagggccccgggcagtgggcaggaaagcgcccccatctcttcccaggcagacgccccctgccccgcagcagggggatcgggtgttggccgctggggcctcggcgtccctgtcttgagcgatcccgttaggccaaac

SEQ ID NO: 24854 - DNA, 497 bp, Homo sapiens
  source 1..497: mol_type = other DNA
ccccctaatggtcaggtgcagcgagtgcgacaggctggggccctgcctccagcgctcgaccactgggatcctcaaccccgcgcccgggtcactgagccaccccctccccacgccgctcagcgtctgattgcggccgcggcccctttaagatctcctggcaggcggtgggactgcgggctggaggcagtcgggggtctgcggggaggccccgcctaggggcgggcgggctcagcccaggaggcgctgaccaataggaaaccgactttgcagccgcgccgcgcgttgattttctgtttcccagtcagagtgggagggattatgaaacccaatccccagcgctctaccttgcccccttgggcaaagggggaaagggaccactgagctccctagccttcccagaaggaactctggtgttcctcggctgctcggtcccctccccccaatgcaggtcgggggaggagacgcaagttctggcgcgggcggcgacggctagccgt

SEQ ID NO: 24855 - DNA, 611 bp, Homo sapiens
  source 1..611: mol_type = other DNA
gccggggtctgggttgcccccgcccagcctggccagcccctggcgcaactcgtgcacgtcggcgaccccagcgctgccgccgctccgcgtcgcccgggctcccccgcatggcgcccgcccgggggggaggggaggcccggcagcggcggcctcagtgggggcttcgcggctccccctccccccccgggaccccgcagggtcagctcccgcggccgccggctccgcagcctccgcgcagtccgctcggctctggcacttgcgggaggtggtgacggctagccgtcgccgcccgcgccagaacttgcgtctcctcccccgacctgcattggggggaggggaccgagcagccgaggaacaccagagttccttctgggaaggctagggagctcagtggtccctttccccctttgcccaagggggcaaggtagagcgctggggattgggtttcataatccctcccactctgactgggaaacagaaaatcaacgcgcggcgcggctgcaaagtcggtttcctattggtcagcgcctcctgggctgagcccgcccgcccctaggcggggcctccccgcagacccccgactgcctccagcccgcagtcccaccgcctgc

SEQ ID NO: 24856 - DNA, 332 bp, Homo sapiens
  source 1..332: mol_type = other DNA
tgaacacctgtgcagttgtcttctgtacaggttccacacaggtgtttttaaaatttttttagagacagggtctcactttgtcacccaggctgggcctcccaagtagctggggctacaggtgcgtctcggactccaagtctgccctaggcaggagtgcctagtgcacgggtacatacaaccccgtgcgtctccacacctgtgcccccgcatccccattaagggactggggtcccgttacaggtgcgcccacagcgcggccccgccccacccctctcagcgaggctcaggtgcacaagccggaagtgcgctctcccaggtgagtgactaaactt

SEQ ID NO: 24857 - DNA, 354 bp, Homo sapiens
  source 1..354: mol_type = other DNA
gcctcccaagtagctggggctacaggtgcgtctcggactccaagtctgccctaggcaggagtgcctagtgcacgggtacatacaaccccgtgcgtctccacacctgtgcccccgcatccccattaagggactggggtcccgttacaggtgcgcccacagcgcggccccgccccacccctctcagcgaggctcaggtgcacaagccggaagtgcgctctcccaggtgagtgactaaacttggggtcggacccacagaacgaccgacggaccgagggttcgagggagggacacggaccaggaacctgaggtaggaaggcaggacgcaccgctaggcctgccccctcgcccgcggga

SEQ ID NO: 24858 - DNA, 230 bp, Homo sapiens
  source 1..230: mol_type = other DNA
gagacagggggctggagtacagtagtgcaatctttccccaggctcaggcgatcctcctgactcagcctcctgggtaagctgggactatagggcctgtgcccggcctcctctggtggtccaccagtgaccgtccagtaatctgacacagtccagcctggcggggacggagctgggggtctgccttcccaggctggggtgggggcagggcctctgtccggggacgtcacccg

SEQ ID NO: 24859 - DNA, 451 bp, Homo sapiens
  source 1..451: mol_type = other DNA
gaaactttgtctctactaaaaatcccagctactcggttgggccattgcactccagcctgggcgccaagagcgaggcagccctggggactcactgtccccttaggccaggctgggggtgaccccacctgggacgagctcatctgcacccaatcatgggaggaaaatcgtggttttactggatcgccgctccggagcccccagcccactgggagggctcgcggtttggccaagcctggctgggactgcactggtggctccctaaggggcctcacccccaaggcaggggtcggagcacgtggcgtcccggacttctctgggaggccccctggggagggaggtccctgcaccacctccccccaccccagccccctccatcatcccggggcgggaccaaggggcggagcgggagggtgaccggccgtgacgcgtgccccgcccgctcatatagcgg

SEQ ID NO: 24860 - DNA, 106 bp, Homo sapiens
  source 1..106: mol_type = other DNA
agagagagaaagatctctttccacccactgctggccgcgggcggaggggcgtggccgcgggcggaggggcgtggcctccttttgtagccaagcagctataaaaagc

SEQ ID NO: 24861 - DNA, 472 bp, Homo sapiens
  source 1..472: mol_type = other DNA
tcccagctacttgccgagatggcgccactgcactccagcctgggcgacagagcgagactcaaaataaaataaaaataaaaaataaaaatattaacttaatttaactttaaacaaaaaagcaggagataactgaccgggtgcagtgtctcatccagcactttggaaggccaaggcgggtggatcacccaaggcgcatgttactcccagctactcgcgaggctcagacaggagaatcgcatggcgccactgcactccagcctgggtgacagagggagacctccggggtacacgaatatttggggagcacccccaattcttggatgtcaaatgtgcagtggagggttgggggcaggcaactctgaggctcacccggggccactgcctgcgcagcggttggagggaatttcccctcgccaattgctcaagtccctcccctcgaccggccggacatccccagagaggggcaggctgg

SEQ ID NO: 24862 - DNA, 409 bp, Homo sapiens
  source 1..409: mol_type = other DNA
tgcatgcatgtacatggaccacatgcacatgcacacagatgaccatacacatatgcatgcacctgcccacatatgcacgcacatttacatgccagcacatgtatgatacacaggcatgcgcctgcacatgtgtacatgatacacacttgcatgcacacaactgaatacacacattcacatgcacacactgcacacatatatgcatgcagaccaacaaggcgtggtggcacgcgcctgtaatcccgaacaaaaaaacccacaacgtattattttcttgtttaccaccagaagaggagcagggacccttcttgctgttggccccaaagggaaagctgggggctccccactgcacttgtcacattttcagaagcctctggaaagtgtgaggtggggctgaaccccagctcta

SEQ ID NO: 24863 - DNA, 368 bp, Homo sapiens
  source 1..368: mol_type = other DNA
atgaaaaaaaaatttttttaaaggaaaatacacatttgtaccttttagatgttgatcaatatgaatatattatacacacagaaatatcctaagaggatattgacataaatgaggactttcctcagtgatgacttttttcaccaccaaagtcactcaggaagcagagttctatttcactggggaaaacattttccctgccctgcacatgagctagaaaacctctggaagtggggctctgactcccagcctttcaccaggtggccctgaccctgggagagtccagggcagggtgcagctgcattcatgctgctggggaacatgccctcaggttactcaccccatggacatgttggccccagggacaagcc

SEQ ID NO: 24864 - DNA, 464 bp, Homo sapiens
  source 1..464: mol_type = other DNA
agtggcagtgaacctggccaagctgaagctgttccggcattactatgtcagcgggtttggggggattaccggcctgctgcacgcccaccccaggcagtctagccgcccctacagtcctggccccacgcctgctcgcgcccctgcaggtcacccgcatcatcgccatcctgctgcaggtggctgtgcccttcagtggcagtggctgtaccaggtgagcccgaggcccaggtgggacgggggcggccacggtgggggtgggggtgcgcctgacgcccccactccgccccgtcccccagctcttggtggagggctccacgtacctgcagctgccccaggaggacgaggaggatccatgggcagggccggcagctgtgcaggtggccggacagctggagtacctaaggccaggctgagctaggggtcgctagggagacacccagggccgctctgggggcgggggtggg

SEQ ID NO: 24865 - DNA, 447 bp, Homo sapiens
  source 1..447: mol_type = other DNA
caaatgggggctcagcctagcaaagttctgagttcacctctgctcagagactcaaactggaattggggttcagtccagatctggagtcagggctagtccagatcggtggcctaaaccagagattaagcctcaggggtcagagttcagcccggagtccggtctagcctggaatctgggaataaaaggcttagcctaaggctggggtctcagcctggggtcataggtcatcctagggtcaaactttaacctgaggccagctttaggcctctaggcctgaacagatgcgtgtgtttaccaaaagcctcagctctggctgggagccacatccctggctcaagggccggatatcagatttagataactcattaaatcacaccattcggaagtgacgaactccgaaaggccgggccccgccgtgcggcgattggctcatcggtgggcgggctt

SEQ ID NO: 24866 - DNA, 368 bp, Homo sapiens
  source 1..368: mol_type = other DNA
aggggaacgtatacccaagggcccccctcccagccttgtctgagggagaatgggagtgggaatccccagtgcctcctctcctccttctccagggcccagatggcccagatgtctgggggagcctggggaaaggcctgggcctggcgccccaaggacggcctgtcttcagtttcccagcggagactctgggggacatccgccctgtggccggagggacagacgcctggagccgggccggctcgcaagaacggggtgacctcaggttttaaaagggggcggagcgtccgttgggccccgcccccgaatcgcagtgcttgggctccgcgcgggtgggggggtgggcggggccgggcggggcggggcggggc

SEQ ID NO: 24867 - DNA, 233 bp, Homo sapiens
  source 1..233: mol_type = other DNA
gttaacttgggcaaatggtttagttgccctgtgcctcagtttctccatctggaaaatggaagtgatgaaaatactacctaccacccttacagggtggtctgtttgaaaattaagaggccgtctggcggaggttgcagtgagctgagactgctgccactgcactccagtctgggcaacgagagcagaacagcccttgtgtacagtaagtgctcaataaatgttagctgctgcta

SEQ ID NO: 24868 - DNA, 243 bp, Homo sapiens
  source 1..243: mol_type = other DNA
cagcgtgctgttccacaaaacccgccacctaaatggggcttctttccggaaaaagggcggtctggaggaagcgtacccctccttacgtcacagctgccgcagctaccccagcctggcgtaagaggttgccctgccctgacccggagccttggcggggaggggagagaggcaccccactccaccccgccctggtcccaaagggccatgggtgcttggggccgcccccgcacgggggtgacagca

SEQ ID NO: 24869 - DNA, 193 bp, Homo sapiens
  source 1..193: mol_type = other DNA
gagactcaaaaatcagatttgttggcgcccgtgcaaaggccctggggcagggccgtatgttcctctcacaggcaacctctggtggtggctggccgtctgcatatggaggaagctcactccccatgcccaggcctgtgtcgagtggcgtggggtggggctgggctgcaggtgctcccccagctcccccccgccc

SEQ ID NO: 24870 - DNA, 243 bp, Homo sapiens
  source 1..243: mol_type = other DNA
ggaggttaagttccactttctcaccatgtctcttgactctggaatcagagggtcctgggttcaaatctcaagtctgagagatcttggacaagttataactcaaggttaacatgataatgaaattacactttgttgccaatgtgcctcctttattgggtgcaatgaaaatatacattaggcagattaacttctctttattgtgaagaaagggggtagttgcagcaagtcagcaattggaaaacc

SEQ ID NO: 24871 - DNA, 227 bp, Homo sapiens
  source 1..227: mol_type = other DNA
cactctgtcgcccaggctagagcgcggtatattgtgattgccacaatgtgattaaatagtcactcccgggtagctgggatcgaactcctgacctcaggtgatcagaatgctttcaaagatgtttgatatttgtgttggtaacaccatattggtttctgtataaagatttagaaatgcttcaaatccctatggattatccactgattgcaatcactccctaaaagagg

SEQ ID NO: 24872 - DNA, 568 bp, Homo sapiens
  source 1..568: mol_type = other DNA
aaagtaattaattgtatcagagtatatgatttaattattagcataactacacagatttgtatggctgtaactagcaagttcatggagataacaataaaataataaacatatttaattcaaagatgattgaaacaatttcaaatttactggtaattatattaaatgtaaatgcacgaaatagaacttttttttttttttttttttggctgagctgcagtggtgcgatctcggctcaccgcactgcctcagcctcccgagtagctgggacctcttctttgcaacaactgtgtgatatattctataggattgtgaataaaagttttgggctttcttttcttaaagaacatttaaatggtctttagttgttgttattaaatcaaatattacgtgaacatttatgtacatagacaattccattcctatttctatagaaagtattcaaagatgtttggaaaacttgatattaaacactctgtgtaggtaacaccacattggtttctgtataaagatttaggttccctgtggattatccactgattgcattatcactcgctttctctataaaaag

SEQ ID NO: 24873 - DNA, 227 bp, Homo sapiens; identical to SEQ ID NO: 24871
  source 1..227: mol_type = other DNA

SEQ ID NO: 24874 - DNA, 568 bp, Homo sapiens; identical to SEQ ID NO: 24872
  source 1..568: mol_type = other DNA

SEQ ID NO: 24875 - DNA, 298 bp, Homo sapiens
  source 1..298: mol_type = other DNA
cccatttttgaaagaaaatcacacaaaaaggctgggtgtggtgtgatgagttctagagagctcaggaggtcgaggctgcagtgagctatgattgcaccactgcactccagcctgggccacagagtgagaccctgacacacacacacacacgccctaaatgtgtggctatatcaaatgactgaagaaaactttaaagagttcattttgcatcctgctacctgaacagttttaaacaggcctggtacgccccgctccagagttggtccccgcccccggaactggtccgcctccaggcctg

SEQ ID NO: 24876 - DNA, 365 bp, Homo sapiens
  source 1..365: mol_type = other DNA
gagctcaggaggtcgaggctgcagtgagctatgattgcaccactgcactccagcctgggccacagagtgagaccctgacacacacacacacacgccctaaatgtgtggctatatcaaatgactgaagaaaactttaaagagttcattttgcatcctgctacctgaacagttttaaacaggcctggtacgccccgctccagagttggtccccgcccccggaactggtccgcctccaggcctggcgccaggacgaccctgcctccgcggctgtccctagccagggcccaacctggcagccggaggctggggtgcgcggctgctgcacctgcagcctgaacccgggggtcctgacacgccgcaccagc

SEQ ID NO: 24877 - DNA, 527 bp, Homo sapiens
  source 1..527: mol_type = other DNA
ctggcccagccacacaggagtgaggggtggaggaaccctcctcccattgaaagccccttcctctcctgcagtaaggtaggtgtgaaaatcagagatgtccacctgcgccgaggtctccggccttgaacacagggagcgcactgggcacgcgggcacgtggctgtccccaggggcctggcttgggtctcgcccctgggccggggcgcactcgcgggcgggacatctgggggcgcccacgcgctctgggacgagtgtcgctggccaggcccggactgaggaaaggcgaaaaataaacattttaatgcagtattttttaaaaaatcaacaggccgctgcgtcgggcctgtggggcgcctccgggggtctgaaactggaagcggggctgtagggcgcgcggatctggggcgcgccctcggtcccggcgcgcccagggcctcccgcgcggggcccggcacagggaggcggggaggcgggcggggcggggcggggccgggcggcacctccctcccctgcaagctctcccgggc

SEQ ID NO: 24878 - DNA, 285 bp, Homo sapiens
  source 1..285: mol_type = other DNA
agcctctgtggcttcctctattagaacaggtgcagcagctccagcctttgtctcaaggctgcagtgagttctgatggcaggactgcgctccgctctgggtgaacctgaggtccaccaatcccagctactgcactcacgagacactggggacacctgcgtttagagtacaggccctgtctgcatggcctccagttctgcaggggcccagggtggcatccgggagggctctgctgggctggtcctgtcccagagcgcttcttccaggcctggaacctccagtgctgg

SEQ ID NO: 24879 - DNA, 360 bp, Homo sapiens
  source 1..360: mol_type = other DNA
gctcaagtcatcctcccacctcagcctctggaggagttgggaccacaggcaggcgcctccatgccctgctcattttaaaaaatgttttgtagagatgctgggatgaaggactccccaccactgggagtgcccccggtccctcggggtccccccttggggtcccccgccctactgacagccaggctcgcattccgcgcccctctcaaggccgagccgacgccccctcaccacggctcggggagcagcagccccaggtccccgggagcgccccgccctcgagggcacgcctccttccgggtcacgccctctgccccgcctccgaggcgggatcgcgcatgcgctgctctcctcgcgcggctt

SEQ ID NO: 24880 - DNA, 213 bp, Homo sapiens
  source 1..213: mol_type = other DNA
gggaaagggagtaaattatcattttcctctctggtagacaggatcccaggggccccaagtgggctccagtggtctgtagtagctgggattacaggcacctgaccttttggcctcccaaagtctgggattctcccaatttttaaaaatgatctgtagacaaaacttttctaaaacaattgtttttattgtttgcactcagaccaatcacaattc

SEQ ID NO: 24881 - DNA, 524 bp, Homo sapiens
  source 1..524: mol_type = other DNA
actatgctcagtactcaaataaaagttgaaatttaaaaacgctccctgccagggagggctgtctgctccggggtgtgagggttctcccgggagctggtcctgccccgggcgctcctgaacgaggagcagaggctggggcccaagtgacccctcctctcctctcctggaggagagtaagccgtagcaccccaggactggctggggctcggacggagcgggcgggcatcgtctgcacctctgcaccaatcgccgcctagagcctccatgcattgaaggagcgttcgcctgcctggagaagtcccccaggagccggcgggaggcccgaggcagccccgggggtcccgcgccccaggccaccccctgaagagaccgagggccccctgggaccgccccgccgccgtcctcacctcggcccgatcgcccgcaggccgcgatccacagtagctagcagctgggagccggaagcgggaagccgcgcgaggagagcagcgcatgcgcgatcccgcctcggaggcggggcagag

SEQ ID NO: 24882 - DNA, 40 bp, Homo sapiens
  source 1..40: mol_type = other DNA
gagatgttaatgcaagatcttgctttccgcaggaacaaaa

SEQ ID NO: 24883 - DNA, 474 bp, Homo sapiens
  source 1..474: mol_type = other DNA
ggcacagtggtgcacagctgtgatcccagctacttgggaagctgaggcacgagaatcgcggacagagcgtacctttaggtcctgctttgaggcaaatcagggaagaacagagagcttttccggtatcagcttcattgatctcagctcaaaatagagcatatgctttgggggtgataaaaataccacatgtgcatgtactaatgtcgtgcatttttattttttatttatgtattctagaacaattcttaacgtccaaagataacgtctttccttaacgtcgaaagatgccttgttgtgatattacagcagtcattcctgctagaaatatatttttttgtgtggccaaacgatgatccagggtctgcaggcctggagagcacacacgtgtcggccccacctaaaggcctgcggccgcgcctgcgcgcaagcctttggggcgctcccggtaccccggcctggccccgccccctggcg

SEQ ID NO: 24884 - DNA, 289 bp, Homo sapiens
  source 1..289: mol_type = other DNA
ggcatggtagtatgcacctgtcatcccagctactcagaaggctgaggcgggagaaccgcttgaacctgggtggcagaggttgcagtgcgctaccgcaatgaaaccacagtttttccagagtagctgggactgtagtgttggccagcctggtctcgaatgctgggattacaggcatgagcagtacatcagggacgaggacagtcaatgagttttagaaaattcacttagctacagaccaccaagggtggtcaagcttcctttgtgtaatgatactgtcacaatgaccact

SEQ ID NO: 24885 - DNA, 298 bp, Homo sapiens
  source 1..298: mol_type = other DNA
cccagctactcgggagcctgaggcaggagaatgtgccactgcaccccatagtgccctatgacctgatgaataataagcttgaatgtgttcaatcacagtgaccggcccctttaaaggcacacacctgtggacccacccacttgggaggctgaggcgagaggatcgcttgagcccaggacttcaagtccacaattacttgcctgggttcctggagctctaaggaggcagtattcgcaccaagcctgcctgctaattttcctagtggtcattgtgacagtatcattacacaaaggaagct

SEQ ID NO: 24886 - DNA, 393 bp, Homo sapiens
  source 1..393: mol_type = other DNA
ccaggctggagtgcagtggtgtgatcatagctcactgcagcctccgagtagctgggattgccggtgcatgccaccgcccactgcgctcagcttggagttgaagtcactccagggtccaaattcttaaccattacgctccagggcaaaagtatgcaaaggctctggggctatagaaagatgatccaggccaggaatgttggaagacataattaggacacaagcctggcaccggattcggggcatggccgggagccagggcagagctcgtcgttgccaaactcagaggcgtcggcgctaggacctagcgactgccttcgacccagagggcgccggcagaggcacgcatgcgcgctgtgcgggaccagaggcggtcacgtgaggggctctgggcta

SEQ ID NO: 24887 - DNA, 403 bp, Homo sapiens
  source 1..403: mol_type = other DNA
gaagccttggctgggaccctgccacatccaatgtcaccggctgcccctggctctaggtctgtaggtgctggacctacagcagaagggacttcaagggccttggaggttgggagccactttcaggctgagcctcccggcttctctccccagcatcccggcggcgcaggcgcagaggagagcgagctgcaggcctacatcgcacagtgccaggacagccccacctccggcaagttccgccgcgggagcggctcggcctgcagccttctctgctgctgcggaaggttcgagtcccgggagccagagaaaactgacgcccctcttccctgcttccttcctccagggacccctcggaggagcgtaggccctggactgcaggtcgcgcccgaggagggcctggaccttt

SEQ ID NO: 24888 - DNA, 466 bp, Homo sapiens
  source 1..466: mol_type = other DNA
ccctggctctaggtctgtaggtgctggacctacagcagaagggacttcaagggccttggaggttgggagccactttcaggctgagcctcccggcttctctccccagcatcccggcggcgcaggcgcagaggagagcgagctgcaggcctacatcgcacagtgccaggacagccccacctccggcaagttccgccgcgggagcggctcggcctgcagccttctctgctgctgcggaaggttcgagtcccgggagccagagaaaactgacgcccctcttccctgcttccttcctccagggacccctcggaggagcgtaggccctggactgcaggtcgcgcccgaggagggcctggaccttttaaaagggaaaataaatgtgtcgttttcatttttagcggtgtgaggccctttaaggcgcggccacactcagcatggcggcctcagtcggccttccaagcatggcgcg

SEQ ID NO: 24889 - DNA, 357 bp, Homo sapiens
  source 1..357: mol_type = other DNA
gtaggccctggactgcaggtcgcgcccgaggagggcctggaccttttaaaagggaaaataaatgtgtcgttttcatttttagcggtgtgaggccctttaaggcgcggccacactcagcatggcggcctcagtcggccttccaagcatggcgcggcggagtggaccccggctgcggcccctgggtgagaggggtgtcccttcgagggtcgttagcgagccttctcggcaggtgtttccacaccggtagccagctgtgcttccaagaacgactcggagtctccgggattctagaaaaatcccagtaatattccactcctggttttcccagcagtagtattgtaatcctcagaatctcag

SEQ ID NO: 24890 - DNA, 526 bp, Homo sapiens
  source 1..526: mol_type = other DNA
agaaaaatcccagtaatattccactcctggttttcccagcagtagtattgtaatcctcagaatctcagatggcgccaccatcggtcccggagtcccagtgatgctctgtgccatagagcccggactcttctgaaacgtgggtatcagacgccttccgcggatgccccggcagtactcccgtgcctcccagctcctgggtcttccccggggcaggcttgcgtcgggagccgagtatctaggtgcccactcccggaccccacggtttgcgggcccgttgtcaggcttgatcaaccctgcagagggcacaccaggtgcagaggaccgtgccctgtggggacctgcctgcaggctgctgacagtgggtaccaggtcggcctgggcgtctggtaggccctacgcgtaggcgaagggagcaggaagccggggacccgcctcatctcctggccagggccgagaggtcgcccctggcagctggagacgcttcccccgccaccccagagggcagggcttgagctgggggcagggc

SEQ ID NO: 24891 - DNA, 603 bp, Homo sapiens
  source 1..603: mol_type = other DNA
atggcgccaccatcggtcccggagtcccagtgatgctctgtgccatagagcccggactcttctgaaacgtgggtatcagacgccttccgcggatgccccggcagtactcccgtgcctcccagctcctgggtcttccccggggcaggcttgcgtcgggagccgagtatctaggtgcccactcccggaccccacggtttgcgggcccgttgtcaggcttgatcaaccctgcagagggcacaccaggtgcagaggaccgtgccctgtggggacctgcctgcaggctgctgacagtgggtaccaggtcggcctgggcgtctggtaggccctacgcgtaggcgaagggagcaggaagccggggacccgcctcatctcctggccagggccgagaggtcgcccctggcagctggagacgcttcccccgccaccccagagggcagggcttgagctgggggcagggctcgactccttgatttcccaggactccgggctaccagatcggccgtccagctggaacggcgtggggcgccaagaggactacaactcccggcgtgctcagcgcgcattacgtggtctggcgataacgcgctgcgtccgctcgggcgg

SEQ ID NO: 24892 - DNA, 407 bp, Homo sapiens
  source 1..407: mol_type = other DNA
gggcacggtggctgccgcctgttcacctgcccagctactcggggctgaggcaggaatcgcttgcagtgagtcgagacgccactgtccagcctggacagagtgagtgagaccctgtctccaggatacagacatctatataatacatatccttggcctgagggccggcgtttattgcaagcacttgcaggagctcctacgcctaagggtagacactggggctggcacacaggcgcgcgcgcacacactcacacacgcgcgcgcgcacagccccgcccctgctgctccgtgcacactgcagtgaggggcccgggcggggcgcaggggcgcgccagggtccgggtccgggttcgggggcggggcgcacctgggctcctccccggggcgggcccgacgcagcgtcgccagcg

SEQ ID NO: 24893 - DNA, 158 bp, Homo sapiens
  source 1..158: mol_type = other DNA
gtgcagaggctcctcagagcctgggggaccccaggaggcctcattcctgaaagttccctctgagctggagtcttcctctcaaacacagacgaagtctaggaatatcttaagagcgattggccaatgtgggtcgctggcgtcgtcgaaaagaagtcaga

SEQ ID NO: 24894 - DNA, 176 bp, Homo sapiens
  source 1..176: mol_type = other DNA
tgccccagaaattaaaagctaggcctttatctcacagggcctggccatgctgcagtccaggcctagcctggcagtttcggcctaaatctccttgccgacggtccggccgctcgggccgcgagagtcgcgccatctgacttcttttcgacgacgccagcgacccacattggccaatc

SEQ ID NO: 24895 - DNA, 423 bp, Homo sapiens
  source 1..423: mol_type = other DNA
aagggaaggggatggggacctcccagtggtatcccctgcttgggcactgagggaaagccacagtggctcgggggaaaaggcagggacgtcctctccccgcctgcctcgtctcgcctcctgttcccacctggggctagggtcccagagtggctggccccttgacttgctggggagggaaggggcctttgactccaacctcctttttctgaccgactgcaggtggcagctgccctttcaggagccaggtggctgggtggggacacctgcaagtcctccctttgtgacatcacacctgagagtccctgggggctgggcacagcgaggtccaagctcaggtcgccctgccccctacagcatcgttgtgggcaaacagatttggggatggggggaatccacacccccacgtcctggacgtttaaaagg

SEQ ID NO: 24896 - DNA, 386 bp, Homo sapiens
  source 1..386: mol_type = other DNA
aaatttgttaaaaaaaaattttacctcatctctatataaaaatatataacaaaagtcaacttatgtgttttaagccataagggaaggggatggggacctcccagtggtatcccctgcttgggcactgagggaaagccacagtggctcgggggaaaaggcagggacgtcctctccccgcctgcctcgtctcgcctcctgttcccacctggggctagggtcccagagtggctggccccttgacttgctggggagggaaggggcctttgactccaacctcctttttctgaccgactgcaggtggcagctgccctttcaggagccaggtggctgggtggggacacctgcaagtcctccctttgtgacatcacacctgagagtccctgggg

SEQ ID NO: 24897 - DNA, 525 bp, Homo sapiens
  source 1..525: mol_type = other DNA
cctatgtcccatgtaagtggcagggggcttggtaccttcatgctgctggggctgtgccttccaagcgacaggacacacagcagaagcagcttctgaaattccgagtgtgccccctggggacaggctcctggcttgaacccagcagggatcccggcctcggtttcctcgtcggcaccgcagtccaggtatgtccaggtgcctgcacacaagaggtctccaggcctcctgaatccagacggctgctgctgctgctgctgcctctcagacagtggcggcccggtggcatcgagtgggtgccgtgtatcgcaggcacagaacctcccggggaagatggagggattattgccctgcgatcctgcttcgcacgcaagccaggagcgacttcgtgctcggcagcgcggacgcacctgcccgtcctccccgccagggactcaacttcctgggcctgggcgagggccaggtgcgcagggggcggggacagggcccgcggggcggggtccacgtgggtgacgcgcggggccacgc

SEQ ID NO: 24898 - DNA, 586 bp, Homo sapiens
  source 1..586: mol_type = other DNA
aaaatggaataacggggtggccccgcccagccacgtccactgtctccccggggtggaggaagaggcgccctccacccttcccccaagaaccggggccggtgaggcctggacgcctgcgtcctccagctgcaaggcgctcctggaaatggggccacccctgtggggcctggacacgtcccctgagcgctcacagcacctagggtcgctgaccagagccctaggaggctcctcccccggcaggcaccctaggaggcccaggagtccgggccccagcctccgcccggagtccggcccccccaccggagagcaggggcgtccagctgggaacccgtccccgcccgccccctcgagggtcaggtgctcggacgcccagcccggcccccaacccaggatcccagagcccgtgcgtcccccacaccggacgccagagcccggccccggagaggcacgccccgagggcgccatcttccccgaggggcgccgccgccgcttccgggtgtgtcccaaggtgggggcgtggccccgcgcgtcacccacgtggaccccgccccgcgggccctgtccccgccccctgcgcacctggccc

SEQ ID NO: 24899 - DNA, 359 bp, Homo sapiens
  source 1..359: mol_type = other DNA
tcatgggtggtccattggaccttggcccagatgccattgatggaataaaccatgatttttcttagctagtcatccaggatggagtgcaggggcacgatctcagtgcactgcaacaagtagctgggagggattacagccataaaccgttctattgctcatgggcattgggtatgaatgtggtatgtcattctcacccagagacataattattattactattttagaccagactggagtgcagtgctgtgatcataagtgctcatgtttgaagaggccctgttggaagtgggaaggctcccttcctcctccacctcttggccccggatgtggggggttgggggcccagggacttattagcc

SEQ ID NO: 24900 - DNA, 423 bp, Homo sapiens
  source 1..423: mol_type = other DNA
agtagctgggagggattacagccataaaccgttctattgctcatgggcattgggtatgaatgtggtatgtcattctcacccagagacataattattattactattttagaccagactggagtgcagtgctgtgatcataagtgctcatgtttgaagaggccctgttggaagtgggaaggctcccttcctcctccacctcttggccccggatgtggggggttgggggcccagggacttattagccaagccagaagtgcaggaattcgtgtcagctgctcctgcgcttgccatggcaccagcggggaggctggggtcaaggctgagcctccatccctgtcccccacatggggggacaggggtccaggtccaggggcagatcctactccctccatgggccggatcttccccacagggcagggctga

SEQ ID NO: 24901 - DNA, 299 bp, Homo sapiens
  source 1..299: mol_type = other DNA
gggaaccccaaatccatgggctctgctgtaccccagggtgtgtttgaggctccagggtggggcttcagatttagccccagctcctctcccaggggcgggatctgcctcactgtggggtggcagccaaagccacaacttggaagatggggctgcacctgctgtacacctgcgtggactgagagtcacagtgaatgtggcatgcatgcctgtgtcatgtgacatatgtggcacctccagcagatgtcactctgagtgtgggtgttggtgacatgctgtgtaaacatactagagtatactgc

SEQ ID NO: 24902 - DNA, 407 bp, Homo sapiens
  source 1..407: mol_type = other DNA
gtgacaatgaccccggggcaccagggtgggcgagactgagaatgagtaactcagaccacggatatatatgtacccacgtgtgtacatgaccctaagggggtctcgctctatcacccaaggcgatcctcttgcctttttttaaagaagtggaaaagcaggtgtgtccatgtgcaagggtatacattggcccattgtcatacgtgcgccctgagcaggtgactaggcctgcaagcgtcccctccagcgtgggccacccagagccagcgagaccctggccacgcgcggagcagccatcacggccgtgggccacgtccctgggtccggctccgcggactcgcgcgcccccctgcggccgctctcaggcaccgctgcgcgcgccccgcccacacgcctggcccgtcgagcgc

SEQ ID NO: 24903 - DNA, 103 bp, Homo sapiens
  source 1..103: mol_type = other DNA
gctcaagtgatccaagctgggatcccaggctcctcccacctcagcatcaagcagggccctctgttctcacccaattctcttacctgagaaatgaaaatagaag

SEQ ID NO: 24904 - DNA, 425 bp, Homo sapiens
  source 1..425: mol_type = other DNA
agatcaatgcccatcaatgtttgttgaaagaatgcatgaacactgagttttttattttttcaatttttgttttcatatatatatatatatatatatttttttttttttttcagaaaagccagcaagactgtcttgtttctttatcatagcatctttgtgagagaggcccttctgtttgttcccttctggtacagagggactggatcaaggtcaggttcaaacccagcctctgcaggcacctgcaggggagttgagaagggacctggtgtgtccctcgcgggatctccagcaccagcctggggatggagctgcagtggccagaaccaggaggctggaaccgcccggcctcactccagcccagcccagcccagccttgaaagggcccaatcctgtgattggggttcccgttgccaggaattaaggcc

SEQ ID NO: 24905 - DNA, 254 bp, Homo sapiens
  source 1..254: mol_type = other DNA
aaattcacacaaaatcaaatcttacagtgtgtactcactctgtttattaaatgtactagtactttgctttttcattgctgtatagtattccaatctttgaatatgccaagctgtgtgaccttgggccagttagctaaatcatatgatctactgaaacattaaatgaatgaacctgcctacccttgccctagtggagggggttctcttacaatttatcagatttcattaaaagcatcagccatccatgagtggat

SEQ ID NO: 24906 - DNA, 356 bp, Homo sapiens
  source 1..356: mol_type = other DNA
tcttgaaattcatgtaaactcaaaatcttacagaatgtattcattctgtttgggttttcatccaaattgttgggttgggatagtctaactaaagttactataaatctttctagattcgaatctcagcgttttataaagctgttggaaatgtgcctatcataggtatgaaataaacaactatcgttggaaattcccatgcatggtggttccaggaactaggcggtactgcctgcccacccctgccctacgtagggagtcgctttccattagaatgaattgaattttattaaaagcatcccatcgctcaaccatgtcatgagtggaggagtctccctgaaattcctgcaaggtcagct

SEQ ID NO: 24907 - DNA, 362 bp, Homo sapiens
  source 1..362: mol_type = other DNA
gcctaggccctgcatcccgactccccgaggatctatcagcctgggaggatggggaatgggagggcctatccctccccacgatcacggcgcgaaccgagctttgatggaggagggcctgaatcttttatgggacccgcccctgggctcctagacgacacggtgccatcacgtccccagtgagtcagagagcccccagcatgccagggcagaaagcccggctctgggcggggcttagtgccaaacgcttggccgcgtctgcctggtgttcctcagggccgcagaggcggcaaccttctgaacgtagccagggcccccgtcactcctggctggtgggcggggccagggcgcctgggggcggcgaa

SEQ ID NO: 24908 - DNA, 488 bp, Homo sapiens
  source 1..488: mol_type = other DNA
agaagctgggccccccaggacttcggagctgcttgtgccccactccccacctggagggcagaccacagtgttgggcagggacagacaggagggcatccccactcagttcccgcccatggccagagcttgaagggagaagccgtcccctccccgtcctccagtcacctgtgccttggctgggctttaaggccaggtgactggcagtggcatgatcgtagctcgctgcagcctctcaactcctggctaatttttaaaattttgtttttgtaggttttaaaattgcccaagggcctccacattttctcgacagggtccgtaagactgggagttcagcgtccctgccagggtccagccagactgcaaagttgcaaagttctaaaagacggctgtcttccgcgcggcgcctggagtagggtcgacctgggcgcgcctgcggcgaggcggggccgagtcgtccgggggcggggcggggcggctccgggtctcct

SEQ ID NO: 24909 - DNA, 532 bp, Homo sapiens
  source 1..532: mol_type = other DNA
gcacttggcagagtctgcctggccctggccacctcccgggtatctaagagcagagggaagccgctcttggggggatccctgggtaaggagtggtttaggctgccgggggcccaagcactggcaccctctggccttgaccttggccccgtcgccgagggcaggggtcacaccgctgggttcccatggccgtcccctcccccctggcttcggccaactctgagcctgctggggctgggcctaattacggtgaggaggcggcaccccgctgccagcaggaggcaggctgcaccgccgtggagaccagggatcgactccttccaggaatgcgcatgcgcaaaagccacgcgggcgaacacggcttcgcctcgcttcgcagcgcctctctcaggagcgcacgttgcctgcctcgagctctaggtggcgtcatccttcgggctgagccgaagcacgcacgcgcggaggttcgcacgcggagaagggcgggtgcgcgccgcgggcatgcgcggtgcggggcgagacggcggctcgacgg

SEQ ID NO: 24910 - DNA, 423 bp, Homo sapiens
  source 1..423: mol_type = other DNA
tcccagcacttaagagaggctgagtgagaggatcgcttactgcactccatgacagagggagactagcacctgaaggcagacatcagcgctgcctcagcctgtgcccaggagagcctcttgggagggtatcctcagcacctatctccccttagaaaggggagccgcctgtcctgctgcgtccccaagagcagccctggggaaggtgggggagctctgacttcacccagccggaccccaccatcagggagggcttcgccagcttcggaggcttctctaggggcgcatggctctgcaaccggctcagttgctgggctgtgcgagtcccaggggtcgccaggggccatgggtgaatcggccgccgcaaccgcatcccttttccaaaggcggcggcgggggcgactcccccgttccccgcggcgcccg

SEQ ID NO: 24911 - DNA, 235 bp, Homo sapiens
  source 1..235: mol_type = other DNA
gcgccattgcactgagtttaaaataagactatcagccccagtctacagaggaggaaactgaggctcggcaaggcgcctgtctgaccccagagcccaggctcttgaccgactggatcttcggacttcgtctccacttcatgaatgagataaagtgcaggctggggcggcaaacgcgaagccacgcccccacgcgcgtccgcctccgcgcggtacctcggcggcccccgtagctccg

SEQ ID NO: 24912 - DNA, 354 bp, Homo sapiens
  source 1..354: mol_type = other DNA
tcgtctccacttcatgaatgagataaagtgcaggctggggcggcaaacgcgaagccacgcccccacgcgcgtccgcctccgcgcggtacctcggcggcccccgtagctccgcccatcggagaagcctctttctgagcggcatgaagccacctcccaggcggcgagcggccccggcgcgctatctgggcgaggtgaccggtcccgcgacctggagcgctcgcgagaagcggcagctagtgcgactcctgcaggcgcggcagggccagccggagccggacgccaccgagctggcccgggagctgcggggccggagcgaggccggttctcgggaccggagccaggctggaggcgggg

SEQ ID NO: 24913 - DNA, 261 bp, Homo sapiens
  source 1..261: mol_type = other DNA
tcccagtgactcagaggctgaggcaggattggaggctgcagtgagctagattacgacactgcactctagcctggacagagcaagccaccgccacctggtggcggcattttcttcagatcagagtgtcagttcacactgaattatcaattgtggtcggtggatccacgtgcctgtaccacctgccaccagcgcccggcgcgttctgaggagtctcctggaggcttgcgcggctctaggccgaagcggcggatgacgcaaccg

SEQ ID NO: 24914 - DNA, 656 bp, Homo sapiens
  source 1..656: mol_type = other DNA
tgggaacaagactgcgggctctgcccccagctctgccaggacggctgcaagaccagctggcccgggaggggacaacgggctgttgcgggtgcgcggcagctggagacactcccccgcagggccaacccctgccctgttgctctgccctgcaggggtcccggcgcctggtcacctggggtgcacacaggtcacacagtgccaagaggccccagggcccagggactccccccacagcagggtgggacccgggacccgcggctcagtggcccgctagccacgtcgtcttctctgagccgcagtgggtggacgccttgcccagggctggaccctgagttggggacttactcatcccagtgacctgcctgagctctctgagaattgaggtccccagggccgggggagcttgagtgcccatatgagtgttttagggccactgaggtccccccacaaagccaggggaggtgggagtggcagctgcccactccccggcgaggtcgtgggtgctcgcgggtcctcggggctggggttccgtcctcccgcaggcccgggcggggtcgctggctcgcgcgccgctccctgcgcagcctccgccccctgcagccccgccccccgcggcggccccgcccccgtcgccataggaacagccgcggcggccc

SEQ ID NO: 24915 - DNA, 635 bp, Homo sapiens
  source 1..635: mol_type = other DNA
ttgcagtgagcggataaataaataaaaataaaaagactattattttcagatcataaaaaaaaaaaagaaaggcatgccacataaaaaaaaattaaacatgtagcttgcatgtatttctactagtctaggccagcgctgtgctcactgcccatacagtgattgacacacagtaggcgctcaatgacattttaatgaatgaaatttgctcaaagagccacatgccccgcctcctcagcgcaccagggtgacgtcagctcctgcccaacggcacgtagtgcggaaacgtcggggccgggattcgaacccaggttctgtacccgtaaccccggcgcgctgacctttcctaccttaccgggcggcggcaggacagacaggtgagcgctcaaccagaggcgccgctcctcagccaccgccttccgtcagcctccgagggccggaacccagttcgccccctccgcggccatcgctggctgcccgcgtctccgccggccgcggagcacttcgcaggcggcgccgaccggaagtcccgcctctcccgcgcgccccggagcgccgcgacagctacgccggccaatgagcagcgcgccgtggcggacgtcggccaatgggctcgcgcgcggggggggcgtgtccgg

SEQ ID NO: 24916 - DNA, 279 bp, Homo sapiens
  source 1..279: mol_type = other DNA
aaaaagacatgccttctcggtgaatgttgctttccaaaaacaaaacatttcttccattttttctttttctccaggctggaatgcagtggctcctgagtagctggaactctgttgcccaggctggagtgcagtggcatgatcacagctcactgcagcctcagcctcctgagtggctggaggctaattttttaaaaaatttttgtagtgacgggtcttgagctcctgggctcaagcaatctgactatattcatagagttatgtaaccatcactcctgtgat

SEQ ID NO: 24917 - DNA, 279 bp, Homo sapiens
  source 1..279: mol_type = other DNA
ctctgttgcccaggctggagtgcagtggcatgatcacagctcactgcagcctcagcctcctgagtggctggaggctaattttttaaaaaatttttgtagtgacgggtcttgagctcctgggctcaagcaatctgactatattcatagagttatgtaaccatcactcctgtgatcacaaccagaggatttctgtgacatgctaagttacctaaccatggcagtctgagccttgttcgcaggcagccagtgtccaccaggctctgtctataaagagtgaag

SEQ ID NO: 24918 - DNA, 520 bp, Homo sapiens
  source 1..520: mol_type = other DNA
tgcccagagtgcggtgggccagcgactatgaaaacccctggggctgtcctctgttcagggatcgcccaggctccctgcccctgcgcggggacccagcccccactgctgcggtgccctcaccgcctcggttggcccccgcgcgcgcctcgggcgaacccctggactggccctccaacagggccccagactcggggtacccagggtggccgctgaggcctggagaaatctgggcctcccctgtgcaccatccaactgcgcgccccagaggctcagggcgccccgggagtgtgggggtggctaggctggacccgggccaggcgcgccgcggggcagagatggggaggggggcaagcgcctggaggacccggcgcccgctccaggccctgcccctccaagtcccgccccgcgccaggccccgcctctccagggccccagccccgcgccaggccccaccgttccggggcgcgtgccccgcccaggccccgcccccacggccccgccccgggctttttttcccctg

SEQ ID NO: 24919 - DNA, 296 bp, Homo sapiens
  source 1..296: mol_type = other DNA
ccaggctggtttagaacgagccagcgcgccggccaacttttcaacaaatggggtctcactgtcacccacgctggagtgcagccccaagtgagtagctgggactacaatttattattaaatttaattaattaattgatttcctttcgacgtttcatttattcatttactcaccaaatgtttactaagagcctagaacgggaaataatgccggtacgcgtagccgcgggcgccgcagaactcaggggcttgggccccgccccaaccccgcgcgtgcgcgtgcgcagggataagagagc

SEQ ID NO: 24920 - DNA, 304 bp, Homo sapiens
  source 1..304: mol_type = other DNA
actccgggcttctcgctctgactccaaaagggtgagcacgtcgccctcgcgcccacgcgcacctacgggtccccaccggagtggagctcccggattccgggtttaggtcgccggcagtcggccaaatgcccccacccgatgtcctgcccaggaccttggggaggaaagaagctgggttcagacccggcccgtttaccctggccagcttgataggctgcacacggctggtgtccatgatggcggcgcggcggcggtctggcggataggacgttctagcacgcgccagcagccccagcggtggaga

SEQ ID NO: 24921 - DNA, 480 bp, Homo sapiens
  source 1..480: mol_type = other DNA
gactaacatggccacgctgagcactgcaaatctagcctgattgccagtcagaatgcagcggcctcgctgtttcaggagggctgtcctccggagtcctctgcctccacagcctggcaggggactggtggcaggatgtcagccctccgtctgggcagcgagcggggcctgctcaccgcttggagatctcctggtagcgtagctgcagcttcccctgcaggtcatgctgtgagaaggtcggggactggggaaatcccaggcctgagtggttcccaggccaggagagggtcccggagcgggtcccggacacacggagcccgaagccccccatgggccctgtccgccccgcgcaccccggacgcccagttccgcagccgctggatgagacgggtggcggacgccatcttccgtccgcgatactgaagggcgcagccggtgacgtctccaccgctggggctgctggcgcgtgctagaacgtcctat

SEQ ID NO: 24922 - DNA, 257 bp, Homo sapiens
  source 1..257: mol_type = other DNA
taataacagagtctgcttttttttttttttccagatagtaaaagtagctattaggttaatacaaatattagtcccagctactcggattgcagtgagtgtcactgcactccagcgaagatccgggacctgatacttcacccgtgccagttatagaaatcccaccgcaagctccttggcccggcgctgggcagagacttggccagccagcgctcggcgacccccaccccaccgtcccactgggcggcttggagagcctc

SEQ ID NO: 24923 - DNA, 362 bp, Homo sapiens
  source 1..362: mol_type = other DNA
aggccctgatggaaggaacatgcgagcccagaaaagtctctcctggtcttggggtcacacgaagcctccgcaaggcaaggacttttggtgagttccgggctccgctgaactcactctgtcgcccaggctggagcgcaatggcgccatctcggcgcagattctactgcctcagcctcccgagtagctgggactacaagtcttgacctcaagcgtgcgccctctccgccactgggtaaggcgggggcggaatgggaaagaagagtcacgtctcccacggttcgtagaggaaggcctgcctgagcctggagcgggggcgggagagccacagtttggcatccccagggcatccccccagaggacag

SEQ ID NO: 24924 - DNA, 316 bp, Homo sapiens
  source 1..316: mol_type = other DNA
gcctgtaatcccagcactttgggacagctattcgggaggctgaggcatgagaatcgcttgcaaaaaaaaaaaaaaaaactgtcataattattatttcactgggtacatgtgtatcaaaacacacatactgtattgtcaggtagtgataaatcctatatttattttctatattacctatttttatattttacctatgtggcaaaatataggacaagtatccagtaaggatttaaaagtatttatttaacaaagaagttcctgacctcgtaagtcctggaattacaggcgtgaggcctagtttacagaggaggaaact

SEQ ID NO: 24925 - DNA, 307 bp, Homo sapiens
  source 1..307: mol_type = other DNA
ttttatattttacctatgtggcaaaatataggacaagtatccagtaaggatttaaaagtatttatttaacaaagaagttcctgacctcgtaagtcctggaattacaggcgtgaggcctagtttacagaggaggaaactccccagcgctgaggtccccggaaatggggggggcgaccagggcagcgcgcgctgacctatgacgtcatcgggacgtccgcctttctccaggacaccgagggcgaggagggtggtaccaagcggcgcccaccctcgccgctgataggccattcaaccgccgctctgcgcg

SEQ ID NO: 24926 - DNA, 294 bp, Homo sapiens
  source 1..294: mol_type = other DNA
cacccaggctggagtgcagtggcgtgatctcagctcactgcaaccaagtagctgggattctgacttcaagaaagaatttcactcaggctggagtgcaatggtgcgatctcggctcactgcaacctcgcagcctcccgagtagctgggattcttgaactcctgacctcaggtgatctgcccacctggaggaaaggactcgcctctgcctgccttcccgtaaagcccagccggagcagcaggcaccctgtgtcaggcccggccactggcctgcagaggcctgactatgatgctcac

SEQ ID NO: 24927 - DNA, 375 bp, Homo sapiens
  source 1..375: mol_type = other DNA
aagcccagtactcaatactgatgagcggtgcagtggcgtgatctcggctcactgcaacctccgagagctgggtggtctgacctcaggtgtttgcaattataatgcgaattacggataatactctgatattagtttacgaatcgtgtacaagcttcatcagctctggttacagaaagctgagctcctctatcggactcagaggacgcgcgtgcctaacgcgagtgtatctcgagagagaagcgatcaacagctgccggtctgcgcctgcgcgcggcgggggcgtggcccggggcgagtggggccaaggaggcagccgggagcggcgggcgcaggtgttactggttgcgtcgggtcacgtgggcgcgcaggcgcagc

SEQ ID NO: 24928 - DNA, 264 bp, Homo sapiens
  source 1..264: mol_type = other DNA
gagatctccccatcctgtggctctctagcccaggaggtcaccagggcctggcatggagtcctccctggagtccagagatgggccggcagtggtggcacatgcatgtaattccagctactcaggagactgagaggacaatcgcttggttgcagtgcgggcaaccagtgccccaagcttgggaccgagatggcaccatggcactccagcaggatctggagacggactggagcctccccacctccttccccaccctgtgtgctgacc

SEQ ID NO: 24929 - DNA, 382 bp, Homo sapiens
  source 1..382: mol_type = other DNA
gcaggagtgcagtggtgccatcacgctcactgcagcctcgacgtccctggctcgagcgatatggctcacgcctgcaatcctaacatttggagcctgtccagtaatcccagctactcgggaggctgagatgggaggatcgcctgaacccaggaggtcaaggctgtagcgagctatgatcgcatcactgcactccagggatcacctgaggtcaggaggtgacgaccagcccagaagaactgctgtttatcgcctgtccagggctgatcttgggaggtcatcccggatctccgtgcacggagtctgctgaagtgcgcgctgaccgacctgagctccagggtgactctgccctcaggccccgccccctctccgagcgccctgcgca

SEQ ID NO: 24930 - DNA, 367 bp, Homo sapiens
  source 1..367: mol_type = other DNA
gaggatcacctgaggtcaggagttcaaggccggcctggccaacaatcccagctactcagtaagctgagattgcaccactgcattctagcctgggtgaaataataataatgcagacacagctgaagaaggcacccttccctgttagtggcgcaatcagggctcactgaggcctccacctcccactcccacctcagccctctgagtagctgggactgcatatagcccaggctggtctcaaccttggccccccaaagtattgggattacaggcgggccccttccttggttttaaaaagagacccgggaaccagctgacccaaatgttcctgcagcagccctgtccccaaggagttggggaagaggcctct

SEQ ID NO: 24931 - DNA, 422 bp, Homo sapiens
  source 1..422: mol_type = other DNA
cctgattctggaattttgtatatgcagactcctcctgctaaaataatatatattatatataatatatattccataatatatataacatacatacatatattattttagcatatattatataatatacggtaataatacacataatacataattataataaatatgatataatatatattccattgtataaaacatataatatatataacggaatattattcaaccttgaaatagaaggaggtcctgacatttatattgcatgacgtcacttacatgaggaactttttttaatcaagagagagtgtcattcagaggcacgtggtctccatctgaccctcactggtgatattgatttgatcacctggtccagatgttgtccaattgtcccccagttgtgtcatgtagatgacaattttccaccg

SEQ ID NO: 24932 - DNA, 409 bp, Homo sapiens
  source 1..409: mol_type = other DNA
tcaaagcaagtttgtcagtgcagggccatactagggttaacaggaactggaatagccagtttatctacttcattacactctcaaaagatttttcaaacagtttgcaagaaataacctcctcactgctgagaaaggaggactgtacattcttaagggaagagtgttgcttttacactaaccagtaagggatagtatgagatgccgcttatcgtttacaggaaaaggcttctgaaatcagacaacgcctttcaccaagttgtcaaatttggacccactggccctttcactggcctagagagttcccctctggaggacactcccttctatccggcaggaagtagcagagcggtcatcacccagttcccaacagctgttgggtgacacaagcggattgtaaaatgcaccaatc

SEQ ID NO: 24933 - DNA, 277 bp, Homo sapiens
  source 1..277: mol_type = other DNA
cgtgctaatttttgaacaaattccaataggagcattctagtctctgagtgaggccgacttcaaaggaccagaggctactccctttgaccttttctgctggcagataggaaattggctgtctgcaacaaatcagactgctggttggctgctttctgcaaccaatcagactgaacgcgggctaccgcttcatccgcagcagctgatgggcccgggaacccgaggccccgccccctaggtggtcctagcctttgcgcgtgcgcggcgtgtctgcgtgggc

SEQ ID NO: 24934 - DNA, 298 bp, Homo sapiens
  source 1..298: mol_type = other DNA
tgctaatttttgaacaaattccaataggagcattctagtctctgagtgaggccgacttcaaaggaccagaggctactccctttgaccttttctgctggcagataggaaattggctgtctgcaacaaatcagactgctggttggctgctttctgcaaccaatcagactgaacgcgggctaccgcttcatccgcagcagctgatgggcccgggaacccgaggccccgccccctaggtggtcctagcctttgcgcgtgcgcggcgtgtctgcgtgggcgcatgcgcataacggccgccatc

SEQ ID NO: 24935 - DNA, 325 bp, Homo sapiens
  source 1..325: mol_type = other DNA
ccgcagcagctgatgggcccgggaacccgaggccccgccccctaggtggtcctagcctttgcgcgtgcgcggcgtgtctgcgtgggcgcatgcgcataacggccgccatcccagtgaaatggagcctgtcccgcggcccctcctctgagagccacagtcaggtctgtcctcaggggtcgaggcggctgcgctggggcctcggcccgggaggaggcggggggcacggcctttccattttccctgctcccctctgcagaagcctcatagggcccggcgcggcggctcacgcctgcgttgtgccttttctctataaggaacagcatct

SEQ ID NO: 24936 - DNA, 530 bp, Homo sapiens
  source 1..530: mol_type = other DNA
ggtcaggagttcaagaccagcctgggaggcggaggttgcactgagcccacagtgcgccactgcctcaatctcaaaacaataatttttaaagtaatgattatcttaaccattcttaaatagcggctattgagatttttttaaagcctggatttgggatgtctgaacagtgaataactccaaagccatttaaaaatcatcttttccaatcatatagatgtgagtcaaaccctgttgggccaaacaggatctcctttgttggttttttaaatacctggacttaattgtttaaacccgggtcttcctttggtcaggaagaggggagggagcaattggacccctttccctctgcggctgcagagtccaattttcctctggggacatttgctttttcccttggggaagatacttagctttgagacccaagcaagttaattggcttgtgcctcttattttactctaatgcaatgaataaatgtgcgagctgggcagcccacccctttcagctgctggccggaagcggaagtgggcgt

SEQ ID NO: 24937 - DNA, 160 bp, Homo sapiens
  source 1..160: mol_type = other DNA
ttcttgcccccagaaaagcagtacttgcccccacgtggtcagacacctctgaaatgtgggtgaataatcaggcaggcgtccccgcatgattaaacaccaagtctcctccacttacctgatttaaaattggatggctagagtgcagggctcactgcaaagt

SEQ ID NO: 24938 - DNA, 297 bp, Homo sapiens
  source 1..297: mol_type = other DNA
tttccagggaagagaagttttccttatctgtaaaataagactacccagtctgccttcgctgactgtctgacaaattgttatcaggtatgcaggaagtatatccttctccaaaatatcctccttcaaggactgagtccctagtcgaattccatcccagtatttcaatattgattaattagcatgaaagtatcctttgagataatctttccattcgggaaatcaagccgtgtcactggaggggactgacagtgagtttgcagtgaacactggtagacatgttttgtggctcaagccagc

SEQ ID NO: 24939 - DNA, 324 bp, Homo sapiens
  source 1..324: mol_type = other DNA
ttctggagaaactagaatcactcctgcagaagtgaatgcctgatatcagtgctattttaccggtattttacaacgaggccctggaactcactgtaagatctcatatattaattgggccccctgcgcctgtagacccagctaaggcgggatgatggcgtgagcccatgagtttcgccccacagcgcacatgggggagcccccaagccccgtccgcagggctggtgccccttttggcctccatccctcaaggtgagcagactccaaggcctccaaggcgtctccgtagccactgggggaggctggaggcggaagtgacgtcacgct

SEQ ID NO: 24940 - DNA, 312 bp, Homo sapiens
  source 1..312: mol_type = other DNA
tcataaagtagtacaggaggctttgaatcatttgataagatttgagaaatagtaagcatggtgcatgatcacgcgcccaggagttccagaccagcctgggctctacaaaataataataatgatgataataataataatacaaaaattagccggccggtcccagctactcggggagactgcagtgagccgtgttcctaccactgcgcaatatttacagaaagtatcgataaatgattatccgaagccaccggctgggtctggtcccacctccagccccgcccccgggcatgggccccgcccacagccaaacgg

SEQ ID NO: 24941 - DNA, 305 bp, Homo sapiens
  source 1..305: mol_type = other DNA
ggccatctggatgtatacgtgcagggaggcctgacaagtagttcaagaccagcctggccagcatggcaatagcagggtgtggcatgcacctgtaattccagtgaggctccactagattttgtctcaaaaaaaaagaaaagatgttttaagcagaaaacctagaaattatttttaaaaacaattcttttagctgcatagaaaatgttttttacatcaaatgttgaaatagtaacagagcaaaagacgtagttacctattttctacatacaggccgtagaatttttctgcctcgaggaggtattacc

SEQ ID NO: 24942 - DNA, 352 bp, Homo sapiens
  source 1..352: mol_type = other DNA
aaaatcaagatttacagaaaatattattatattgaaacacttgaacccggggggcagaggttacagtgagccgaggtcatgccactgcactcgccattcactggcagctttattgagatgtatacaaacaagctttatatatatgtatacacacatatatattttaataaaggatgtaggccttagccactgtgcccacctgggaaaagctctgcaggagcatcccctggggtgcgtcccatcacgcccgcccttccagcaggtccggccacctgaaccgccggctagccgggtaaactcgaacccaggagccccgcccggcccgaggctcggagcggaagtgacgtcagcg

SEQ ID NO: 24943 - DNA, 302 bp, Homo sapiens
  source 1..302: mol_type = other DNA
tcttgccaaattttctcaaagacctgtggtaatattgttaaattctgccagccgtaataaagaaatcaatagactctgtttttagtggcatgcctgaactggtccaagcaactattaggtcatggcctatttgtggcaagactgccagccagtggcacccattctgccaaagctttggaggagcatcccccggggatgcgtcccatccgcccgaccggccacctgaaccaccggctaggccggtttctgtgttccacgagcctcgcccggcaagcggaagtgacgtcagcgcaccaccgcca

SEQ ID NO: 24944 - DNA, 369 bp, Homo sapiens
  source 1..369: mol_type = other DNA
cacacacacacacacatatatatatattttttctttttgagagtgcagtggcgcaacctgagtagctgggattacaagcgcggctgcctcccaaagtgcagggattacaggcgtgtggcgcttggccttatatatatattttaatagagacagggtcaaagacacacggtcttgctatgcccaggataagctttggaggagcatcctctgggggtctgggcacctgaaacgcgggctaggccgggtcccaccttgggccccagagcccccaggcaacccaggaggaaactagaatttctttgtcctacgtgcctgaaactcaagccctggagccccacccggccggaggctcggagcggaagtgacgtc

SEQ ID NO: 24945 - DNA, 316 bp, Homo sapiens
  source 1..316: mol_type = other DNA
aaatatgtttatatccctgcctgaaagaatttccctccagggttccagctaagagagaccctgtgcacacacctgtggtccaagctgcttgggacatcctccgtccctccagcctaggcgaggtgacgcctccacgcgtgtccccgcctccaacccggcccttggcgctgggattgatctggatcctggtccacctcgaagggggctcggcccctacacttaatgccgtgcgcaaccggaagcggaagtgccagccggcgcgctagctgggttttcacctcagccagcgctcatgctcaacctaggcagggcgggg

SEQ ID NO: 24946 - DNA, 466 bp, Homo sapiens
  source 1..466: mol_type = other DNA
cttgtactggtccaggcaagccctcttttaaaaagttataagttgctagaggaagtaaaaatggccttgctgagtaaattaaatttatgttcaagtgctaatttctttatgaacaagcattttgaacatgtatatttatatattttttatatatttatatatttatatgtatttatacatatatgtttatatatatatatatagagagagagagagagagagagacagggtcttgctactttgcccctggtctcaaactcttggacttgtagaaaatgaaataaatacaggttcctcttcaaaagtctgattgaaataaatagtaatccctcttagaagccaaattttctcaaagacctgtggtaatattgttaaattctgccagccgtaataaagaaatcaatagactctgtttttagtggcatgcctgaactggtccaagcaactattaggtcatggcctattt

SEQ ID NO: 24947 - DNA, 168 bp, Homo sapiens
  source 1..168: mol_type = other DNA
acaattatgttgtctgtaaataatggcagaaaagaaatgtagataatgtttcttccaatttctttgctggagtgcaatgtctatagacatgcatcaccatgcctggctaatttttgtattttttaaaattgagacagggttttgccagtagaacagttttcttatcta

SEQ ID NO: 24948 - DNA, 332 bp, Homo sapiens
  source 1..332: mol_type = other DNA
tggtcctgctgcagcctggtttccgtccagaccacgacctctcggctaggtcctcgtcgtcaaacgcctccaaggcgtggttctcgtctgcagccccacctaggcctcgccccgctccagccgcgcctttgagcctcgcccaactccagcgacgccttccgggcttgggcctcgcctctagccccgtccccgggtctgacttggtcctctggtccccatccgcggctggtccggccctgggaccgaatcacttcccagcgagactcgaccggctacgggaaggtcgcggccgccgccctgtcagccgcctcggcgcccccaggacccctcgg

SEQ ID NO: 24949 - DNA, 397 bp, Homo sapiens
  source 1..397: mol_type = other DNA
aagctgctgtgtgcagccattgcacacacacatttttatagtttcttggtggacttgccaattcagaaaatatctgtagtatcaatgaaagtgaaaaaatacaaatttatccttgtgcatagacatcaagaagcatcattaagtaaaaaaatagagttctctttcgctcggggccagacccacaggcctctggtcctgctgcagcctggtttccgtccagaccacgacctctcggctaggtcctcgtcgtcaaacgcctccaaggcgtggttctcgtctgcagccccacctaggcctcgccccgctccagccgcgcctttgagcctcgcccaactccagcgacgccttccgggcttgggcctcgcctctagccccgtccccgggtctgacttggtcc

SEQ ID NO: 24950 - DNA, 249 bp, Homo sapiens
  source 1..249: mol_type = other DNA
aatcttgttccaacgggtaccagtttgggctgcaatcagcttcggtccccgatggtatcatccgtgctgggcgcagagcagcttcaggcgtctcccaggccaggccccaagtcccctgtcccagggccgcgaaccccggggagccgcgcctccgccccttctcgccgccccaccgaccccagaccctgggtggctgggtcgcgaggtcgaggccggaagccctgcccctagccagggggtgtggtcaac

SEQ ID NO: 24951 - DNA, 416 bp, Homo sapiens
  source 1..416: mol_type = other DNA
gcgcctaatcccagctggaggttgcggtgagccggcaccgcgccattgcactccaagctggggctgatcttatctcgcagaggtcagtccgctctccccactccgagagtggacaagagcctggaactgtccggcaccatgcggcagcagctgttgggcagcgtagagtctactctaggatcaagcttcgcctactgactggagtccgtatcccgggggaacgcgatggccagaagggggtcagaagggatgactgcagaactcgtcccccacccagaggcttcgggctcaggatcaggagcttacccctactcccgggacccggcgccggcgcctgacccgcgcctaccacaggcgcgacacctgtcaagccgttgaccacaccccctggctaggggcagggcttccggcctcga

SEQ ID NO: 24952 - DNA, 416 bp, Homo sapiens; identical to SEQ ID NO: 24951
  source 1..416: mol_type = other DNA

SEQ ID NO: 24953 - DNA, 434 bp, Homo sapiens
  source 1..434: mol_type = other DNA
taagttggctaaaactgaaaggcctttgggtcccattgcaccagccagactcttccgcatgggagggctgggggcttgcggacctccgggaacagctcaggcaggcgggagttgctgcggcattagccaatccccgcctgggtgggctctgcggcgacgcgcgccaagaagggcgttgagaagggcgggcccgcgtcgcttcggaccactcaggagccgaggagagcgagtgggcggggccaggctgaggctggccgggggcgggataacgtgggagggtccgcccagcctttcttctacccaatagaaggccagaaagccaatccggaccgttagggagcccaatgggcgtcgccgccaggccccgttgcagagcgcgtctagccaataggcagcggcggcgggcgggcgcgggcgacaggcggcgcagctga

SEQ ID NO: 24954 - DNA, 574 bp, Homo sapiens
  source 1..574: mol_type = other DNA
aaggcctttgggtcccattgcaccagccagactcttccgcatgggagggctgggggcttgcggacctccgggaacagctcaggcaggcgggagttgctgcggcattagccaatccccgcctgggtgggctctgcggcgacgcgcgccaagaagggcgttgagaagggcgggcccgcgtcgcttcggaccactcaggagccgaggagagcgagtgggcggggccaggctgaggctggccgggggcgggataacgtgggagggtccgcccagcctttcttctacccaatagaaggccagaaagccaatccggaccgttagggagcccaatgggcgtcgccgccaggccccgttgcagagcgcgtctagccaataggcagcggcggcgggcgggcgcgggcgacaggcggcgcagctgaggcggagcaggcgctgcggcaggagaagctgccgcccggctgggagaagcgcatgagccgcagctcaggtgccgcgggggtcggggctggggcgggactgcgcgggcccgcgtaagcagggctcgagctcgccccttgggcgcggcggcagcgctgcc

SEQ ID NO: 24955 - DNA, 349 bp, Homo sapiens
  source 1..349: mol_type = other DNA
agacgcccctttttgggccaagcccacccacgtggccatttccatcacctgcaacgtgggaaatgcccccggagggtgaaatttactcccccacctccgcgacccgctcccggaatggcctgggggttggggggcgctgccaagtcctgtcctcaggtcccctcgccgacccgaccctgctcgagctgctcccgaagaggagctgggggcggggcggggggcggagcccgcagggggcgggggtggggcggaatcccggccgccggcgaggcgggggaggcggcggcgcagggtcgccccggccgggcgggcggggtcgcgcctggtggcggtccccgcgccgaggcgc

SEQ ID NO: 24956 - DNA, 258 bp, Homo sapiens
  source 1..258: mol_type = other DNA
ggaccccagttgggggcctgagtgaggcgccaggggcggtggctcacctctacaaaatatacatattttaaaattagctggtgattgcagcactcctaattctagggcctggatggaggctgaagtctccctcgaactctagggctgggtgggagtgacccttctcctccacagtggggtggggcaggaacaacccagctcctggcgctgggctccaccccaagccccgcctggccaggcgctggagcgcagggcgag

SEQ ID NO: 24957 - DNA, 251 bp, Homo sapiens
  source 1..251: mol_type = other DNA
aggctggtcttgaactcctgagacgcccctttttgggccaagcccacccacgtggccatttccatcacctgcaacgtgggaaatgcccccggagggtgaaatttactcccccacctccgcgacccgctcccggaatggcctgggggttggggggcgctgccaagtcctgtcctcaggtcccctcgccgacccgaccctgctcgagctgctcccgaagaggagctgggggcggggcggggggcggagcccgc

SEQ ID NO: 24958 - DNA, 527 bp, Homo sapiens
  source 1..527: mol_type = other DNA
ccaaaaaccccagacttagtcttgctttgggggctaggctgggccagagccccaccacctaagggctccctctggatccctgagacagccggattctaccgggctactagagaccagtgcacacagcaggtggcccagtgactagttgaacgccctccactccatggtgtagacaccaggattctccccatttcacagaggggtaaactgagcaggaaaagggcccaggtcctcatgagcgccagattcccgcgcgctgggtgggggggcgcggggcctcgccgcggccttctgatgcggccccgcccccacgagggacgtgaagacgcggaccccgcgcagcgtggggacatgtgaccgactgcagaggccgcgccgcctcccccgtccgaggtctgcgcgctccgccgcagggtgcagacccggggcgcccgcctgggtttggggcgcaagagcagaggcggagccagggcggagccagcgcgccgggtcccccctgaatcgaacaggggccggggaggaagggc

SEQ ID NO: 24959 - DNA, 399 bp, Homo sapiens
  source 1..399: mol_type = other DNA
ttttttattttaattaattaattcctcactttattattatttatttattatttatttatttatttatttatttatttttgagcatgcgcgtagctgggatttggcgcatgcagcacccagactttcatatgtgtgtgacagctggccgcaggcaagttgcttaccctctctgagcctcagttttccctgctgtaaaatgagggtacaagccaagccctacacacggtaagtgatcacgcctggctgccccagggcctgcagcctcccacgctctgggctctgcagtggagggtgtgacactgaccttcgggaaatgctaaatatttatagtttgggctcctgggcccagcatcccagctccactcccaggctctgggggctggggagtggttaccaagc

SEQ ID NO: 24960 - DNA, 440 bp, Homo sapiens
  source 1..440: mol_type = other DNA
cagccttacatttttatttctaattataaaatccagattaatccaaaaaacataaatcacatgtaactgaggtagggttttcactttaagaatatattgtttctatcacaatttaaaaatttacagctgtgtcttttatatttattttttattttaattaattaattcctcactttattattatttatttattatttatttatttatttatttatttatttttgagcatgcgcgtagctgggatttggcgcatgcagcacccagactttcatatgtgtgtgacagctggccgcaggcaagttgcttaccctctctgagcctcagttttccctgctgtaaaatgagggtacaagccaagccctacacacggtaagtgatcacgcctggctgccccagggcctgcagcctcccacgctctgggctctgcagtggagggtgtg

SEQ ID NO: 24961 - DNA, 352 bp, Homo sapiens
  source 1..352: mol_type = other DNA
cggttcgaatcccgcttcggcccatttcctccatgttgggcgctctggcgccaagtggccagctgtcctccccgggtacccctgtctgcagacaggctgacagggcaaggcgggcgtttcgtgaataactcgccccccctcagtcttggcctcaggcctctggcttcttctgcagtgggggaaagggacaccccctcttgtctctttcatcatttataactgaagatggaaactaaagaagtttcctttctcccctctctactgccaatggggaagccagagggggctgagggtggggggccgaggggcccagtgtgggggccccaacccaggcccagagcccagcctggca

SEQ ID NO: 24962 - DNA, 395 bp, Homo sapiens
  source 1..395: mol_type = other DNA
gagaaaggaaacttctttagtttccatcttcagttataaatgatgaaagagacaagagggggtgtccctttcccccactgcagaagaagccagaggcctgaggccaagactgagggggggcgagttattcacgaaacgcccgccttgccctgtcagcctgtctgcagacaggggtacccggggaggacagctggccacttggcgccagagcgcccaacatggaggaaatgggccgaagcgggattcgaaccggcggattcgtttctctgcagcccggagccgcgtagccccgccccggtctccctagaaacaggcacccgtgtctggccacctagtgcgcaggcccgcctgatgtcgtcccacgccgtgccggctctcaggcgccggaagtgagc

SEQ ID NO: 24963 - DNA, 521 bp, Homo sapiens
  source 1..521: mol_type = other DNA
gagggggtgtccctttcccccactgcagaagaagccagaggcctgaggccaagactgagggggggcgagttattcacgaaacgcccgccttgccctgtcagcctgtctgcagacaggggtacccggggaggacagctggccacttggcgccagagcgcccaacatggaggaaatgggccgaagcgggattcgaaccggcggattcgtttctctgcagcccggagccgcgtagccccgccccggtctccctagaaacaggcacccgtgtctggccacctagtgcgcaggcccgcctgatgtcgtcccacgccgtgccggctctcaggcgccggaagtgagctgcgcagcgccggaagcggcggacgcaggaggcctcgcaggtggggtcccggccgaggtcgcggcgctgacgtcgccgcagtcccggcaccagaagcgcgcccgcgcccaggcgcagctccgcaacctcgaggcctatgccgcgaacccgcactcgttcgtgttcacgcgaggctgcacgg

SEQ ID NO: 24964 - DNA, 251 bp, Homo sapiens
  source 1..251: mol_type = other DNA
cgagatgctaagtttagattccatgtcactagtgactctcagatgggacttataaattatatataagatatcagtcatcgcctcccgagtagctgggaatttcacccccgcagcctccgcttcccgagtacatggagactcgccgtgtgaactcctgggctcaggcagtcccaccacttcagcctctggagtagctaaaactgcaggtgctgactgacccaggagctggacttccgccactagtgagtgtc

SEQ ID NO: 24965 - DNA, 433 bp, Homo sapiens
  source 1..433: mol_type = other DNA
ctgcggctgaaggcgcagaggcaggcccagcaggcccagaatgtgcagcgcaagcaggagcagggtccctgggatgggcggctatgttgacccccacgccctcctccagagcagcagggcacccagagcctgtccttgtctctgggggccctgacactgtctctccccacagacctgttccccgaggccaagcagaaacggcttgccaagtgtcccagggagcccaggccaggcgggggcccagaggggcttcccgggatggtgggcgaggccggggccggggccgcccagggaagagagtggcctgagcccaagccgcaccggagcagcggctgaacgccccagattggggcccgagatgtggcagcccttccactccagtaaagaactgaattggccttggtggcagcagcagccatgagtggcccctccc

SEQ ID NO: 24966 - DNA, 359 bp, Homo sapiens
  source 1..359: mol_type = other DNA
gcagcagggcacccagagcctgtccttgtctctgggggccctgacactgtctctccccacagacctgttccccgaggccaagcagaaacggcttgccaagtgtcccagggagcccaggccaggcgggggcccagaggggcttcccgggatggtgggcgaggccggggccggggccgcccagggaagagagtggcctgagcccaagccgcaccggagcagcggctgaacgccccagattggggcccgagatgtggcagcccttccactccagtaaagaactgaattggccttggtggcagcagcagccatgagtggcccctcccgcacgctggcctgctctgctggctgggccagtaact

SEQ ID NO: 24967 - DNA, 540 bp, Homo sapiens
  source 1..540: mol_type = other DNA
aagcaaaaggattgttttcccgcttgtccccacgccttggtctcccaaagtgcgggattacaggcagagtctggtacaataagcactcaataagtgagctttatgattattattatttattttaattttacttattttggagtctcactctgcagccccaggctggagtgcagtggtgcgatcctctcagcctcccgagtagctgggattacgggctggagtgcagtggcgcgatctcggctcactgcagcgattctcctgcctcagcctcccgagtagctggaactgcaggcacgcagccacgttggccaagctggtctcgaactccttacctcaggtgatccgcccgcctcgacctcccaaagtgcgaggattactggcctattttaattttaaaggttaataggaccagctggccctactctggtaccagcagcgcccagcatacacagccgcgtgcgcctccacctccgtccgcaggtgtcgctgtgggtgccgcggctgggcccctctaggcggcgacggcggcaccggaagtct

SEQ ID NO: 24968 - DNA, 426 bp, Homo sapiens
  source 1..426: mol_type = other DNA
tggctgggctgacccagctctgcctccgcaatttggccaggctgggtacacaaaagtagcactttttcaaacctctgttgaaaaaagttgggccacggtggttgcagtgagctgagatcacatcactgcactcattttgagacctgagcggcagggccctggcagcccctgtgtgcagtcagctgtccacggtcactgactgacgctgatcgcacatgcagacatgaggctggattcccatcaggcacggaaagatggggtattgatggtgttcctgaagaccttgagtcctggagtaatgccctctgggcttcctgcagtgaagacaggagaggcagcctgtcctctgaactgttggccccggtgcagggccccccccgagctggcctgtgtgtgtgttgtcttctgtgacagaacacccaaaca

SEQ ID NO: 24969 - DNA, 531 bp, Homo sapiens
  source 1..531: mol_type = other DNA
cccagctaatttttaaatattttttgtaaagatgggaggctggtcttgaactctggggctcaaagcaatccacttgcctcggcctccactgtgcctggccgacactttacagaagcacagtattattcttataaaccatgattttcaccactttggagacaggagtgaattccctgaacacatttcttgcctgccattcactcattgtgatgtgatcaggcagctcaataatttgtgtattagtccactagtgaatagctttatatccttcccttaggaatgtgtgaaggagaaattgaatctcttgcacgaatttctgcaaacagaaataaagaatcagttatgtgacttggaaaccaaattacgtaaagaagaattatccgaggtaagtcagttctcagcatcctagcctctagaaaaatgtctcctcctagtaacttgtctgtgaccagggaggcagcaagatccccagctgtcctcattgcctgatgatgatgatgatgatgatgatgatgaaggaaacaagttaaa

SEQ ID NO: 24970 - DNA, 272 bp, Homo sapiens
  source 1..272: mol_type = other DNA
ctggaatgtagtggtacaatcatgccacaacgactagccctggcctcccaaagtgctgggagttggtactagctacaaattctgtgtatactcaagattttctagagtaggtcccagcaaaccgtggagcttggacgagcccactgctccgcgtggggggggtgtgtgcccgccttgcgcatgcgtctgggcacctcccccacgcccggactggggtggtagacgccgcctccgctcatcgcccctccccatcggtttccgcgcgaaaagcc

SEQ ID NO: 24971 - DNA, 394 bp, Homo sapiens
  source 1..394: mol_type = other DNA
ggagtgtccccagtcccccaagggaaacagggcagcacctggtcaggcacagtggctcgcttcaggaggctgaggctccctggaagaaaaaaaaaaagagatcaattttgtctttgggaacacagtaggcacttaatgcctatttgctgcgttgacacctagtaggtacgtcccaggggtaagcccagaggtaacctggggtgaggccacctggccaggagtactgtgacgtcaccaggctgcgtgacgtttcgcgccggccggttctcaggcggacaaagggccctccgtgcagctcctgtcggcccccgcgtgcgccccggccagccggccggtcacatctggaattcattgcagccgccgccgggcggggcgagcggggggcagaggcggc

SEQ ID NO: 24972 - DNA, 372 bp, Homo sapiens
  source 1..372: mol_type = other DNA
gtgacagagcgagactctatccgcaggtaggaacagacaggcagtggttaccagcttggtcaacagtgagatgtggaatgttctccataatccaggagaagggacgccgtggcatgagacgcaggcaggaggaactgcctgggaagtgtctgagatggatcctcgccccagcgctgggggaaggggccccaggctacagagaagcttcccagatgctgatcttggcaggcatcagggaactgcggcagcctcatctcctccatgggacggggtggggaggctcccactggaggccagcctctgccacatctgcaccagaagcagtctctcttcccgcagctgacatgtgtataagcagtgttttacaaatat

SEQ ID NO: 24973 - DNA, 308 bp, Homo sapiens
  source 1..308: mol_type = other DNA
ccatgatcttgcccattgcactccagcctgggcactccaggatctgtggactccccactttgttctgtccttggagagccctggaaggggacatggccctgccctggggaatctaaactggggcatggtctggcaggcccaatcctgaaggctttctataaggccctgcctttagtggtggcgggcgcctgcagtcccagctactcgggaggctgaggcgcgccactgcactcagaactgcccacttatgctgaattgggccagagaggtctcattggctgaattcctgcaccggctcgtcggaggcg

SEQ ID NO: 24974 - DNA, 349 bp, Homo sapiens
  source 1..349: mol_type = other DNA
ggacatggccctgccctggggaatctaaactggggcatggtctggcaggcccaatcctgaaggctttctataaggccctgcctttagtggtggcgggcgcctgcagtcccagctactcgggaggctgaggcgcgccactgcactcagaactgcccacttatgctgaattgggccagagaggtctcattggctgaattcctgcaccggctcgtcggaggcgggacccaaagtaggctaggcctacggaaggtggaggtctgggcacgccgggtcggaccccctcccacaccccgctttccagcgcggagtcgcggcgggtagggcggcgtcgcgtgcgtgacgtcatcca

SEQ ID NO: 24975 - DNA, 608 bp, Homo sapiens
  source 1..608: mol_type = other DNA
tgccggagcctcgcgcgtagggcaggggttcgagcgccccttctccctgcctcgcctctgcgcctgggggctgctgcctcagtttcccagcgacaggcagggatttccccgcggagcctgggacgccagcggaggggctcggcgcgcccggacgtggtgagaccgcgcttcgtcactcccacggttagcggtcgccgggaggtgcctggctctgctctggccgcttctcgagaaggaggggcatccctcagtggagggagcccggggaggattcctgggcccccacccaggcagggggctcatccacggacacaataacagtctccactctccggggaagttggcagtatttaaaagtacttaataaaccgcttagcgcggtgtagaccgtgattcaagcttagcctcgtggaggccgggagcagcccccggggtcatcgccctgccaccgccgcccgattgcttggaaattccggagctgaagcggccagcgagggaggatgaccctctcggcccgggcaccctgtcagtccggaaataactgcagcattgggaaggcgcgaggtttccgggaaagcagcaccgccccttggcccccaggtggctag

SEQ ID NO: 24976 - DNA, 466 bp, Homo sapiens
  source 1..466: mol_type = other DNA
tatcagcggtcatgtctggacatgagtgcccagggaatatgcccaagctatgccttgtcctcctccagtttcctgcagtgatcagggtcctgcaagcagtggggaagggggccaaggtattggaggactccctcccagctttggaaggcgtgtgtgtgtgtgtgtatgtgtagacaagctctcgctctgtcacccaggctggagtgcagtggtgcaatcatggttcactgcagtcttgaccttttgggctcaagtgatcctcccacctcagcctcctgagtagctgggaccataggctcacaacaccacaaatttgagaaagctttctcaactgctgtgggttgatggcaccctgaggttctgggggtctctagtgaaaactaaagactcctctccagaaaaaaacatttggtttctaatgaggcctggaatccctccccttcctctccagggtggagtcgaggag

SEQ ID NO: 24977 - DNA, 375 bp, Homo sapiens
  source 1..375: mol_type = other DNA
ccagcttgggcactgaggctaaatgaggtcaccaggtacagttgtacaggttgtacacttatcagcggtcatgtctggacatgagtgcccagggaatatgcccaagctatgccttgtcctcctccagtttcctgcagtgatcagggtcctgcaagcagtggggaagggggccaaggtattggaggactccctcccagctttggaaggcgtgtgtgtgtgtgtgtatgtgtagacaagctctcgctctgtcacccaggctggagtgcagtggtgcaatcatggttcactgcagtcttgaccttttgggctcaagtgatcctcccacctcagcctcctgagtagctgggaccataggctcacaacaccacaaatttg

SEQ ID NO: 24978 - DNA, 300 bp, Homo sapiens
  source 1..300: mol_type = other DNA
cgtgccactgcactccagcctgggggacagagcacaatcaataaaggcttccttatgagggcacctgaggtttcctcactcagggcccacctggggtcccgaagccccagactctgtgtatccccagcgggtgtcacacagcgcgggccggggagagccagattggcgccgccgccaccacgcggcagctcccaagcttggggcccggaagcgtggatgtcagggcccccacccaccgagcaggcgctccagggtggctcgagctcagtgcccgctgcacccgggtaaatacagacccgg

SEQ ID NO: 24979 - DNA, 401 bp, Homo sapiens
  source 1..401: mol_type = other DNA
cccaagcttggggcccggaagcgtggatgtcagggcccccacccaccgagcaggcgctccagggtggctcgagctcagtgcccgctgcacccgggtaaatacagacccggagccgagcggattcatttagacgcccgcgaacgctgcgcgcacgcacacgtgtcctcggctcgcttcccgccccctccgtcgcgtgcgggagctgacccggaggggtgatggctccgcgccccgccctaaggggcgcagcgggggaaggcaacccagcatcccccgatcccagagtcgcggccggggatgacgcgagagagcgtggtcgcccccagaaggccctgggccatcatgccggcctccacgtagaccccagaccaaggccaggagcttagcgcacgccccgccgc

SEQ ID NO: 24980 - DNA, 464 bp, Homo sapiens
  source 1..464: mol_type = other DNA
ccacccagagccctggcaaccgggtccctcagctgcccggcattctgccaggaccctgagtggcccagagacaccctcgaggtttagactctgggagtgcgggaggcctgggcaggacgcgggacgcctgggttctaacccttgactcgacataggggcgctaagatgtcagggagttggctccccaggctcagcccgcgtttccctgggcagcggtctcgcaggagcccttctgggcggacctgcagcctcgcgtggcgttcgtggagcgcgggggctcgctgtggctgaattgcagcaccaactgccctcggccggagcgcggtggcctggagacctcgctgcgccgaaacgggacccagagggggagccggagactcagcccgtctgcttcttccgctgcgcgcggcgcacactacaggcgcgtgggcaggccccgccccctgggtcccagggtcctgagc

SEQ ID NO: 24981 - DNA, 404 bp, Homo sapiens
  source 1..404: mol_type = other DNA
ctctttttaaaaatcaataaatcaaattttcaaagaaaaaaaaactgttgtattgggaagcccatttccctgtgcttactatttttcaaataataataataataattaggtcggagaccagcctgtagtcccagctgcttgggaggctgaggctcaagaattgctggttgtagtgagctgagatgacaccactacactccctgcaaaaataataataataataataataatattactaatgagaggcagccattcagatattagtcctcacccctgcagatgctgttgggggccctgcagcccacccaggaggcaccgaggcccactcagcaggcagcgaggccctgggtgagtagagccctcagggaggagtcgcagcacccccctccacttgggctgagtca

SEQ ID NO: 24982 - DNA, 466 bp, Homo sapiens
  source 1..466: mol_type = other DNA
gcccagagacaagaggccatgcaattccatgtctccaataataatgaaaatgataaaaatcgtaatcatattatggtggcgcgtgcctgtaagtcccagctactcgggaggcccaggagttctaggctgcactgagtcctgatcacgcccctgcactccaggcgggggtacagagaaaaaaagtaacctttttctcgatcctgcagccagaggcttgatatcctgcctcggtcacctagggcggtccctctgccggcccaagttggagtggagaggctgggtcagtcccctgcccaggacaccccggtcctggggccttgctgggacccgatggctctggggactcagggccgcctgctgctggacagggaaaagggccgccgtctgcagcccccggggactccctcggccccaccccagagaaggccccggaaacagctgaacccctgccggggcaccgagagag

SEQ ID NO: 24983 - DNA, 589 bp, Homo sapiens
  source 1..589: mol_type = other DNA
gtcccagctagatcacttgagccatttaggctgcagtggagcggtgatcaggccattccactccagcctgggtgacagagtgaggccctgtctttccctctgggatctaagatgccgctggggatccaaggcagaggcctgggagcccccccgagggggagggctagcgtggaaggccccgccccggcagctgcggagggagggtccaggccgcccttgccacgcaggggtgcggccgaggctggtcgctctcagctggggctctcccgcccctcccaggtgggtttcatcgggtgggcccagcgggacaggctgggctggggcgcaatggaggccgagccaatcccggactcccccaaagcttctggcgccgccctgtctgaacctggagcggctgggaggatccccctcccaggagaagccgaggaccccaggatgctgcaggcacttcaccacctggctcagtgatcaaggggtcatgaccttggcaattttataatagttactgaaacttacaaaaggttctggtgcccagagacaagaggccatgcaattccatgtctccaataataatgaaaatgataaaaat

SEQ ID NO: 24984 - DNA, 459 bp, Homo sapiens
  source 1..459: mol_type = other DNA
tcacagactgcggggagcctgcctggcctttcccctctcagctacctggcagccaaggcctgctagggagtccctgggaaatggggcctcccagtgcctggtacacacagtgggtggtggaagagaggtctactcctctacgccattcgcaccctaggggcctgtgaagcctccctggcctgtctcctgcctcctcccgaggagaggtgagtgggtcagccctgtctagctggcagcttcaccctggagcattcagcagccccccacttccagttcctggaatgggagctgcctggcccccctcctccaggagaactcgcggctgggctgccagggatggccatgtcatgaacacctggaccattccacattgccatggccccagggcccagattgaggcaggtgccagccctgcccagagtgcggacaggcccggagtcccatgtccaggctctggtg

SEQ ID NO: 24985 - DNA, 487 bp, Homo sapiens
  source 1..487: mol_type = other DNA
tcaaggcccggcctgtccgggccacattccacaccttgcggtttgaaacagctgtttttccctgcaggcatggctggcctataccccagccgtggggcccggggtccctgccgcagccccctcccctaaaagctgggccccaggccctgctggccagagccacagatgccaagctctgggagcgggccaccctacccaggatctccaccctggggacagtagagcagagatgggctttctctgccagtcccctgctgtctgtctgtgggagtcggacattgtgcccatctccccggccagatccctggagctggcctccttccagcccagtgcccaccagcaggacctgtcgacctgaggtgaccctgggcctgcccccagccaactgggccacccttgactctgggggtccacatccactccaaggggcgcgggtttaccgccctaagcaaacatctgcgcgcctccctggcgcggcgcatgctca

SEQ ID NO: 24986 - DNA, 121 bp, Homo sapiens
  source 1..121: mol_type = other DNA
ccgtaccccgagctgcggctccagccgggaggcctatctgcccctcacgtctatgcagccgacagaagcaatgagtagcgtcgctgcgacggaagggggccatcgacgggcgcgccctcgt

SEQ ID NO: 24987 - DNA, 551 bp, Homo sapiens
  source 1..551: mol_type = other DNA
acctagcactgccagcattccgggctaatggagcaattggccctaggtcttatagctaaaactgttcgctttccctcagggctggggggcaaggggggcggggtgggtgcttcctctggcccccagggagtttccccgctggggtccggagaagggctcctgggcctcagccccgggcctaatggtcacagccacctgctgaaggtacgggcagggggtggggacatgcagggctgggaagccccggccccccagcggcccctgacccgccccgccctgccctctgtctccagaccccactgggcggccagaaacgcagctttgcccacctgctgccctcgcccgagcccagcccagaaggcagcggcctcggcggccactgagataactcaagggccaccaaatcattttctctctttcggtaatagaaaaatctctgaaagactagccggagccccaggagcccaaggggtgtgggggagtctggaggccctccccacgctgaaaccctgcagccttaagagagaggggccccggcctgctctccctcc

SEQ ID NO: 24988 - DNA, 231 bp, Homo sapiens
  source 1..231: mol_type = other DNA
aggcttcctaggacccattcagcgagcccaccgcccatgaggggtccacagtgaccgtgatggctggggctcgagtccaggtcacgctggacggagttccggccgcggccccggggcagccagctcaactttcttctgcagtgccactctcgaaggaaccgtaccccgagctgcggctccagccgggaggcctatctgcccctcacgtctatgcagccgacagaagcaatg

SEQ ID NO: 24989 - DNA, 343 bp, Homo sapiens
  source 1..343: mol_type = other DNA
aagtttgagaccagcttggccaacatggtgaaaaggctgcagtgagccgagatcccgccactgcactgggtgacagagtgagactctgtctcaggcttccccaaatcacctaccttagctctttgtgcaggggatgggggatccccaagatcttcaaagatagggcaacatagcaagactctgcttctgtttaaccagtttagttagcatttcctgtgaattcaaatgcaactgggaccgggagactcagcagtgctggccactttgcagagccccgtctgggtcccccaccctggcccccaagggacaggcctgggcaaggtgcagtccgggacccttcggg

SEQ ID NO: 24990 - DNA, 290 bp, Homo sapiens
  source 1..290: mol_type = other DNA
gccaaggtgggcagatcacctgaggtcaggaccagcctggccaacatggcgaaacctcgtctccgggaatcccagcaactcaggccaagatcgtgtcactgctctcaaaaaaaaaaagttttacttaaaatcaagctgtcacaagaagccttcatcatacctcgggtggtgatttccaggcttggagctccatcctagctgcaagggaggctgtgtgaggccacagcatgggcaacatacgcactgtcctctgcccaggggcaacgtggactgattgcaacccagctgtt

SEQ ID NO: 24991 - DNA, 170 bp, Homo sapiens
  source 1..170: mol_type = other DNA
gctaagacttggctgtgaaatggggataataagagccgccatacagggaattgctgctaggatcattagtggggatttgaattcacgtcttttgaacaccgacatgcagctgtgtcctagggtcaggaccgtacagtctgggtgccgactcagccaatcgcggctgagtg

SEQ ID NO: 24992 - DNA, 562 bp, Homo sapiens
  source 1..562: mol_type = other DNA
ggctatgcgtggccccagactgtgacgaagcgcggggccgcgacacccagcggccagcggggtggggagccgagagtgtgtgtgtgtgtgtgcgcgcgcgcgctcgcgcgagtcctcgctgcgaatgaggcggggaaaccccagctccgtctcccctccacgtttaaccctgcaaggggagggccataccacccccgatttagacacccccagggcaggtccagtcctcctcgggctgagaaagtccgaggagtcatcaggcgcccctctccagcgcaggcttaggtccccgtttacgaagggcagggggagggccttcccgccgtgtccctaccccttgcagacgtcactgcggcgtggctgaggggacagtcctctgccaccccaaacgcccaccgtggagcggcgggagatgaggggggctcggagcgcgcactcatatgcccccaggagacctagcggagccccagcgcccgatgacgcggagtctctgcgggaactccagggcgtagctagtgccgctgccgcgggcggggtttcccgcgctcggcggaagcggaag

SEQ ID NO: 24993 - DNA, 463 bp, Homo sapiens
  source 1..463: mol_type = other DNA
gcgctggagaggggcgcctgatgactcctcggactttctcagcccgaggaggactggacctgccctgggggtgtctaaatcgggggtggtatggccctccccttgcagggttaaacgtggaggggagacggagctggggtttccccgcctcattcgcagcgaggactcgcgcgagcgcgcgcgcgcacacacacacacacactctcggctccccaccccgctggccgctgggtgtcgcggccccgcgcttcgtcacagtctggggccacgcatagccggctggataggaggagctccagccactccggtgaggggcgcctcttcctagtctcccctggagccgacgttggaggcagtgattccccttccccctcgcgcttcattcaaacccgcgagtgggcgggcaggggcgggggagtccccatctcctacccctccctcatcagtggccgtcacggcccgg

SEQ ID NO: 24994 - DNA, 832 bp, Homo sapiens
  source 1..832: mol_type = other DNA
ctagcgccccctgcggccggcagctcgagttgcctcctcctgcgcgcccatccgttccgcgcgcatccgccgcggggagtcttaccgcctgctgctgcctccgcccgcgccgccgctgccggtgccagtgccatggaaggacgagggccaggacatgcgggtcgtgcgcaggccgggccggtcgctggtgtccatggcatcggcgcgctctatgggccggtgcggctgccgctcccgctcggcgcgctccgcgctgtcggagtagccgcgcccgaggctgccgccacaggtgctgcgggggaggcttcagggtggcctggccctcccggggcccgggcagtgacagagacaggctcctttccgaggggacggtcgggggttccatggcgccggcccccacttgcgccccagggggccctggcccaccccgctcagctgcgcgcaagccagcgagcccagggccccgcgggtgcgcccggccgcggtagggccatggcgccccggggacagacccgggggcgctgcgggccaatcgcccccgggccgggctctgcagcttcctttcggcgcctggagctctgctcagtgcccggcggcgctctccgcgctccgcgctccgcgttccgcggcccgctcggcgccagccccggctcccccgccccccgcccgccgcggctgtcagcgccgcccccctcctcctccgtccgggccagcggggggcagctacctaaggaggggggcccttcccgcccacgcagatccccgctccgggctgggagggggcgctgagcaccctgcttggccgcggcgcgcacaggcacgaaggagtacc

SEQ ID NO: 24995 - DNA, 482 bp, Homo sapiens
  source 1..482: mol_type = other DNA
atctcagagatgctgtacctgggctctcagagcaccactggcagggagtttgtgggagtgcccccagagatttgggggcatccctggcatttgtggatgcaccctgggattctcagggcactcctggggcttgtggcatgtcccagaaacagtgagaatactttatgagggtgtctcagaacacctctaagttgtgctgagaagccccgggatttgggggggtacccctggacgacaatgcttgtggggcctgtcaacaccacggggagtttgcaggagtgtccccacagatttgggggtgtccctgccaacgcgggcggctttggggtctgcgggagagtccccaccagagccgtgcgggcgccccagacccgccccgccctgggggcggctccagcgcgaagccggaagggccgaggcgacagggcggggtggggcccgcgggcccggggctgggcaggcggcctgcgtgggcctggcgg

SEQ ID NO: 24996 - DNA, 518 bp, Homo sapiens
  source 1..518: mol_type = other DNA
taggtagcacatgtgcgcacacataagaggccacgtgcgcgcacatcccgccccgggcccgcccgccgcccgctgcaggtaccgcgccggtggccccgccaggggtagcggcgaggacagatggaccgactgactgacactctggcaaccagtccggtactccttcgtgcctgtgcgcgccgcggccaagcagggtgctcagcgccccctcccagcccggagcggggatctgcgtgggcgggaagggcccccctccttaggtagctgccccccgctggcccggacggaggaggaggggggcggcgctgacagccgcggcgggcggggggcgggggagccggggctggcgccgagcgggccgcggaacgcggagcgcggagcgcggagagcgccgccgggcactgagcagagctccaggcgccgaaaggaagctgcagagcccggcccgggggcgattggcccgcagcgcccccgggtctgtccccggggcgccatggccctaccgcggccgggcgcac

SEQ ID NO: 24997 - DNA, 516 bp, Homo sapiens
  source 1..516: mol_type = other DNA
tgtcactcccacagagggcaatggaagttccctttctggccaggggcttgaagtctgggagtgacaggccccgaggccacatccccggagttgggcactggctggccctgggggcttctccgggtccacgtgcaattacggcggggcaggaccgggcccagcgactggccccagggcctttgggagccccgcgtggggtccgcagggagtcccgtttccccgggggcgcacggcgatcagcgatcagagacctcgagcgggcccagctcgacgtcagggcggggaggagggcgggcccggagccgggaaaccggagccccggggcaccccagaggcctggggggggggggggaagtgtgcgtccgactccgcaggacccctgcagggggaggcagacagagcgcccgtgcgctcccctcccccgtgcagacccgggaacgctcgaccgcccggggctgtccctgggggggtcaccagaggcgcggtgccggcagtggaggccgcagacaccttggg

SEQ ID NO: 24998 - DNA, 71 bp, Homo sapiens
  source 1..71: mol_type = other DNA
ggagttcgagcagtcgtcccaactactctggtgcactccagcctgtggggacagccctgcagcctgccagt

SEQ ID NO: 24999 - DNA, 722 bp, Homo sapiens
  source 1..722: mol_type = other DNA
acctagcgaggtagataattttccctagatcctgcggccgccggaccacgaggccggcgcgcagccccgagaaggggggcctggctgtgcgcccccgcccgatgccccactcctcgccgacgggcgccgggcacctgcgggaagggcgggagaatcgccgctcctttcccgccgcgcggcgtcccgagggccacgcagccctggagccgaggccccccgacggcggaggcgcccgcgggtcccctacagccaatctcctggactgggtcgcggtcccccggcttcccggaagcgcagtgcgcgggtggcatcactgtgcccggagcccctgcgcgccccggccatccccaccccgagggaccccctacggaggcgacctgggggctgagcagcagcgacggggaggggtgtccaccccacccctggtgcgggccggggcgcgcaggcctggaactcggggttcagactccccgcgactcggaccacgcggctaagcgcgctcagggtcgcgtgcccccgccccgccgccatgctgggcgccgtggtggccgcgcagctgggcgacagcaggcgtgggcgggggtggggagcggcccctcagcggtccctaccgcctgaggccagggcccggggacttttattgtgacacggcgggcgcccggctctgcttagtcatggtgacctgcgcgcgctccgcgcctcccccacgcgcagcgatggag

SEQ ID NO: 25000 - DNA, 232 bp, Homo sapiens
  source 1..232: mol_type = other DNA
cgcgcccggccccgcattttcttaatgataatctggtaggtaggtgctattatattattactttttatagagacgggcactgattgaaccccccaaagacgggtgccacacgcccctgtaatcccaacactttggccaacatggtggcgcctgaatcccagagtgagagactctgtctcttaaacccaggtgttcaagaccagcctcgcttgaggccaggagctcaaggctg

SEQ ID NO: 25001 - DNA, 590 bp, Homo sapiens
  source 1..590: mol_type = other DNA
agtgagggagacactcattcattatgagactgcagtgactgccactgcactccactctgggccaagaaaaaagaaattcttacattgctggggtttactgtctgctaacacagcccagaaacaccattaatgagtaaatacgggcccgccccacccccactcgccctgagccgggggcgggagcgggaaattgggaggctgtgcccgggagcagcgggcgggaagacccctccgaatcatcgacggggcgtccttggggtgcagcccaggaagcatgggagggcgcagtgcccggacacccaggacagaggagacccctccgctggggagaagaggctcaggctgcgaccgccctgctgcagacccaccgcgatggagcgtccctgggaggacagcccaggcccggagggggcagctgagggctcgcctgtgccagtcgccgccggggcgcgctccggtgccgcggcgagtggcacaggctggcagccatgggctgagtgcccgggacccaaggggagggggcaactgctggcgaccgccggccctttgcgtcgctggcccgccccctcgcctgccagctccagccccgc

SEQ ID NO: 25002 - DNA, 403 bp, Homo sapiens
  source 1..403: mol_type = other DNA
ggttctgcccaccgaggggatccccaaggggctacatgggggcctgacccggcctgagtgccccctgagtggggggcgccctcaccccacccgcggccagcagggcctgaagcatcaggggacccagcctcccttcctgaatctgagggtggaagagcgggcaggcgagagactctgagatcctccttacagaggaagtgagggagacactcattcattatgagactgcagtgactgccactgcactccactctgggccaagaaaaaagaaattcttacattgctggggtttactgtctgctaacacagcccagaaacaccattaatgagtaaatacgggcccgccccacccccactcgccctgagccgggggcgggagcgggaaattgggaggctgtgcccg

SEQ ID NO: 25003 - DNA, 441 bp, Homo sapiens
  source 1..441: mol_type = other DNA
tcagccttattgaggtataatagacatatacaaaaccatgcaaattttaagcgtacaatctgatgagttttcacatgtgaaaaaatttaaaaaagctatgaaagcgccactgcactccagtctggacaacagagccagatgctgtctcgacacataattctcatgtgcccctcacactagtcgatttggtcccaggccagggcgggttctgggtcggcagcccgcgcaggtgcactcgggaggcggggcgggcgctgcaggtgcgcagtcagtctcacctgggcgcctgccaggaggtcagtcctgggccctggggggcaggactaggggcggggccaggggcaggggttccccagctctgctgcctccgatgaggtccccgcctggcgacccgggatcggggcaggaaaggagagggcggggcggggcgtctggcttggc

SEQ ID NO: 25004 - DNA, 437 bp, Homo sapiens
  source 1..437: mol_type = other DNA
agaggggaagaaacactttctcttcttgtttctcctgcccactgctgcagtagggaaggccacagccacctaaacggttcagtttcttctgcgcctcaggctgctggggcctcagacgagacctccagggagcctagaagctggtggccttgtagaatgagttatgagttattcatattccagtctcttgtacagcgttttaaaagaaatggattctatttattatgctttattggaaaaaatgttgtaataatttaatgtttttacccattaaattaacacatcccccccagatgtcagctgggtgcccggagcacagggggtggggcgggtgggcggtggccgcggccttccccgcaggggcgtagccgtgggcggtgactgcggtggatgcgggcgggactgagggcggccccgccccgtccagggcttcctca

SEQ ID NO: 25005 - DNA, 486 bp, Homo sapiens
  source 1..486: mol_type = other DNA
ctgcagtgagctgtgatcgcgccactgcacgccggcccgggtactcaaaaataaatacatatataaataaaaattaactattgtctctggccccagaccataggtgtccctgcagcaggggccgactggcggctctccactcgggcccctctaggagtgcgatggctcagtctgagcccggcagggtgatctaatattatttccctgcacacgtggaacctcggattgggtggctccagccctgcctcccttccctcaggaggcgccgaggtcccagagcagcccgcgcgaccaccccgccattgccggcggtccaccggcgacgcgtttcacgccgagcccgaagtttccccggcgacgcgcagccactggttatgcaggccctgtgggcggaacgccgtaaggtcgcgcgccgggcaacgcggtgccgctacacagggcgtggccgggagcacgttggctccgccccctggcggctgcctcagc

SEQ ID NO: 25006 - DNA, 640 bp, Homo sapiens
  source 1..640: mol_type = other DNA
aaaataaattttttatttgaaatgaataagagtaaatttgtaagaataataaaagcaagtacatttgtcctgctcggaattatatccacagttcctgttactgagtgaatgaatatttcaaattcagtcagtaaaattcaccagtgaaaattattatatgaatgagtgaatgaatgaattgggcaaattttgagcacccagtgctgagcactagaatggatagatgggtggatgaatggatagatgaataaattaatgaatgcaagaatggatggatggatggattgatgaatggatagatgaataaattaatgatgcaagaatggatgaacggatggatggatggatggatagatgaataaattgatgaatgttagaatggatgaatggatggatgaatggaaagatgaataaatgaatgaatgcaagaagggatgaatgaatggatgaataaatggatggatgaatgatggatcaatgaatcgatggaagatggattaatgaatggctaaatgagtggatgcgtggatggattaatgaatgcaagaatgaatggatggatggacgaatggatacccgtcattactccgggggcagcagacccatctggttggccgacagcgctgccctgggctctcac

SEQ ID NO: 25007 - DNA, 626 bp, Homo sapiens
  source 1..626: mol_type = other DNA
ccatttcaaaaaacaaaaaaaaataaattttttatttgaaatgaataagagtaaatttgtaagaataataaaagcaagtacatttgtcctgctcggaattatatccacagttcctgttactgagtgaatgaatatttcaaattcagtcagtaaaattcaccagtgaaaattattatatgaatgagtgaatgaatgaattgggcaaattttgagcacccagtgctgagcactagaatggatagatgggtggatgaatggatagatgaataaattaatgaatgcaagaatggatggatggatggattgatgaatggatagatgaataaattaatgatgcaagaatggatgaacggatggatggatggatggatagatgaataaattgatgaatgttagaatggatgaatggatggatgaatggaaagatgaataaatgaatgaatgcaagaagggatgaatgaatggatgaataaatggatggatgaatgatggatcaatgaatcgatggaagatggattaatgaatggctaaatgagtggatgcgtggatggattaatgaatgcaagaatgaatggatggatggacgaatggatacccgtcattactccgggggcagcagacccatc

SEQ ID NO: 25008 - DNA, 493 bp, Homo sapiens
  source 1..493: mol_type = other DNA
atgttattaaactctaaaattcttaccaatctgatgaatgaaaatggcatcttgtgatcaatatttacctatcaattatttatctatccatcagacggagtgtcgctctgtcgcccaggctggagtgcagtgacacggtctcggctcacccgagtagctgagattacaggtgcccgtgttagccaggatcccggcctattattattattaattcttattattattttgagacaggctcccgagtagctgaattacaagtgtgcctcacgctaattttttaaatttggcccaagctatcctcccgcctcagcctccggagtggctgggattacaggcccgcggatgaaatgcatagatgaatgaatgaatgaatgacaaggttggggccccacccctcccgggccaggccccgcccccggtccccgccctcgccctctcgaggctcccattggaggaggcgcgcgggggctggcccggcgggaggggcggggcc

SEQ ID NO: 25009 - DNA, 380 bp, Homo sapiens
  source 1..380: mol_type = other DNA
ctgcacctggcctatgctcattttgcagttgaggaaactgaggcttaaggaagataagccctttgttaagtatcctctagttcagaggactgtatgcggtgccccgcccaaggcctaatcccagcactttggggggccaagagcacctgtagtcccagctactcaggaggctgtgattgcaccactgcactccagcacatgaagccacggaaacgccccggcatcgcccggtggcagggtgttcccagggtgaaccggccggtgagtggcgggagcagctgcagccccgcccgcgccctcccgggtcccttgggcagctgcccagctcgggccggtctgaccggtttgggccgccccgcctggcgctgtgctgggaggag

SEQ ID NO: 25010 - DNA, 484 bp, Homo sapiens
  source 1..484: mol_type = other DNA
ctttcggagctccgcgctgctgctggacgagcgtcagtcccagccccaatttttccaggaaatggcggtgaagtttctccatctgtcaatgggggaaggggaaggcgggctagaggaccccgaccaggtcggctgcagccttcggaagctacggcccagggcccgggcgcgcattggcgccggtcccgggctcaaggggcagcaacgaggagacgctggacctggccgttcctctctcaagggagatggggtgagcatagccacctccactggacgacgggcgtaagatggcggccgcgcaggcgcaaaatgtcgcagccgtagggaggctccgcctctgcctcgtcacgtgatggaggactcccaaattcgccattcacgtgatgggttgggcctgcgtcgaggcgcaacgcggcgtcaaagggggcggggcttcagccggtcacgtgttcccgcacctccccggcgcgcgcctgcccgcccg

SEQ ID NO: 25011 - DNA, 264 bp, Homo sapiens
  source 1..264: mol_type = other DNA
ctgagaccgaaatagtaattatgcctgatatttcaaattttgatgtgagtgcagtggtgtgatctctgctcactgcagcccctgggctcaagcgatacttgtgcctcagcctcccgagtagccgggactacaggtgctgggagagctgttaatattttcatacttgtaaaaatgggcatatttatgtaaagcctgaagtcagttctggcttctagaaatgaggcagcacacaaatgaatcctataaattatatgaaactaaaaa

SEQ ID NO: 25012 - DNA, 335 bp, Homo sapiens
  source 1..335: mol_type = other DNA
tcacaacctgttaattttttaatttttaaaacttttttttctcaggctggggtgcaatggcatatcctgcctcagccttcggatctgtcacccaggctggagtgcagtggcacgactcctgcctcggcctccggagtagctgggactacaggtgcctgccaggaacaaagtctttatgccgaggtaattcgccacattttatccaagagaaaattatggctaagagagttccgcccccagccaggaccaggggttcaaatccgttgccatggtgctccagaacggatcgcgtggtcacgtgacagcggccaacatggcgccgcccactgtgtggt

SEQ ID NO: 25013 - DNA, 345 bp, Homo sapiens
  source 1..345: mol_type = other DNA
agccaagatcgcgctactgcactccagcctgggagagcgcattgggaccctgctcccagagctggtttgcagtctgggaactacttgtagttttccccagtgcttcagaaggctgttgcagatccagtttttctgattgacagatatggttctcaatgatagtcaagatggtggaacttcgccaatgggcagagccaacgtgcctttttcggaaacacaacagtgacggtaagacggtccccagggggaaggtttactcaaccataggcccgtgccggtgcagcaggccagtcgcgtgcggcgcgagtgctttgggcgcagcccccggggccggggcgggaggtc

SEQ ID NO: 25014 - DNA, 224 bp, Homo sapiens
  source 1..224: mol_type = other DNA
cctgtgatgtcccacgcactgcctattatccccattttgcagaagaggaaactgaggctaccaggcaacgtggggtgcatggtggggccacgcccctccactgcgagccctacgggtcgcgtacagggccacgcctacaaaggttgtcacgcgcggcgcactaaatattcccagacggcggggggagctccgccgagtagcaccggggcagggctagcgcttaa

SEQ ID NO: 25015 - DNA, 328 bp, Homo sapiens
  source 1..328: mol_type = other DNA
ctccgcctccgaaagaggataggcccagcctttttccttagtctaaaaggcctgtgtgggcaccagcccgcgaccctctacctggtattcggtctcgaggccggcgcggactggtagaaacactgcttcctccccgccggcaacaccgtcctggattggcgggggccccgcccctcccacctccactggtggcattagtagccacaaggccagggctagggccgcgccggccgccatcatccgggtgcaaaggggtcgcggctcctttaagcgctagccctgccccggtgctactcggcggagctccccccgccgtctgggaatattt

SEQ ID NO: 25016 - DNA, 175 bp, Homo sapiens
  source 1..175: mol_type = other DNA
agctgggtcctgacctcaggtgatctgcccaccattctgcagagcagtatactcctgaggtcatagtcccagctactcaggagggctgcagtgagccgagatcgctccactgcactccagcctgggcaacagagcaagcagagaggtgaggggagagagtccctttcagtgccca

SEQ ID NO: 25017 - DNA, 655 bp, Homo sapiens
  source 1..655: mol_type = other DNA
tcactgggtcgcccaaaagagatggggggagaggggccctgcgccgggccaggctggactcaccgggctcaggttgctcctggaggccagggcggaagggttgggggcgaggcccgggcgctggccacgccctttcccccgcccattccccagagggcgcgggcaggcacgggggcggggcctcgtcgcggctgggccacgcctccctgagggctgcctcacaaagccgggcgggcccgggggggtggggcccagtctcaggggggcagggaagccgcatcacgacgcgcggctgcttgtgtggggcggggtacagggcgtgtccacgcggccgagcaccgcccccgccgtccccgcaccgctaatgaggcgccggcctgggggcggggcccaggcctccgaggggcgtgcccgcgcgcccgagcaccgcccccgacgtaccctcccgccccgcagttcccgggcggtggagccacctcacaaagcggcgaccgttctcgcggggcggggcgtagccggtcccgccccacggggtgccctctcgttcgctcgctagctccccgcgcccaggacggccggcagagggcgctgcgccacggggccgggccgcggcgacggtggcggcggcggcggcgaggcggcgcgtggccggcag

SEQ ID NO: 25018 - DNA, 676 bp, Homo sapiens
  source 1..676: mol_type = other DNA
cctgatcgtcggtgagcacgacaggcttgtacttctcatcgaagagccgctcgtaatgcagctgctggggcccgaccacccgcaaatgcgccggcaggtgcaggaattcgtcgtcgttgatgtcgcagtcgcgcatccaggcgcccacgtccaggacccggccggggaagtcggtccagcggggctgcaggtagcggcaacgcgcctggtagaggctggcctgggcgtcgaagggcgcctcgtacaccagcgaggttgacgtagcgcaggcggccacggccccgcagccagagcagcctctgcacgaaggcttcggactcgcggttgcgggtggccggcgccagcagcaggagggtccccgacgcctccagcagcgcctcctcgaaggcaccctcgctgggcgccagcgtgaagcaggccgccgcgccgcccagcagacccacatacacagcggcgcgccccggccgggccctagcctccgccgaagcgtccctgcaggcctcggcgtagtcccggagcagcgcgcgggcccaggaccctgaggggagtgatccggccgcggcggccacccaccctgtcgcggcggccacccaccgcccgcctctgcgcggcgccgggaccaaaatctcctcagagccgccgcggcggccttgctccgggaagaaactcctgatcc

SEQ ID NO: 25019 - DNA, 863 bp, Homo sapiens
  source 1..863: mol_type = other DNA
ctcaggttgctcctggaggccagggggaagggttgggggcgaggcccgggcgctggccacgccctttcccccgcccattccccagagggcgcgggcaggcacgggggcggggcctcgtcgcggctgggccacgcctccctgagggctgcctcacaaagccgggcgggcccgggggggtggggcccagtctcaggggggcagggaagccgcatcacgacgcgcggctgcttgtgtggggcggggtacagggcgtgtccacgcggccgagcaccgcccccgccgtccccgcaccgctaatgaggcgccggcctgggggcggggcccaggcctccgaggggcgtgcccgcgcgcccgagcaccgcccccgacgtaccctcccgccccgcagttcccgggcggtggagccacctcacaaagcggcgaccgttctcgcggggcggggcgtagccggtcccgccccacggggtgccctctcgttcgctcgctagctccccgcgcccaggacggccggcagagggcgctgcgccacggggccgggccgcggcgacggtggcggcggcggcggcgaggcggcgcgtggccggcaggcggcgctgcccggctcggcctcggcctgcacggcggctgcggcggcggtagcggcagcggcggcggcggcggcggcggcggcggcggcggcggcggcggcggcggcagcggcggcggcctgggcccgggcgcagcggcggcggcggcggggcctggagccggatctaagatggcagcggcggcggcggcggtggggccgggcgcgggcggcgcggggtcggcggtcccgggcggcgcggggccctgcgctaccgtgtcggtgttccccggcgccc

SEQ ID NO: 25020 - DNA, 439 bp, Homo sapiens
  source 1..439: mol_type = other DNA
acctgagcccacggccacagccacgtgcccttgtgcagccagaagattagtggcctcctcgaattctgcgatgctcatctgggggcggaggctctgctgagccattgatctcccccaaggtggggcccaacttcctcagtttggaggcatccggaggacatctgttcccttcctcctaaagtggaactgcaacttagggttgtcactcctcacagccgcctaggcttcggggcccggggcgggagtgggagatccggccacgtcggggccgcactcaccatggaaggtcagctcgtcggccgatgccatggtccggtctccgcatccctcgctgaggacagagaccaggcaggtgcgctccgccccccctcacctgaggccacctgggccggcgtggctggggctctctgcgcctgcgcgtctcggatcaggagtttct

SEQ ID NO: 25021 - DNA, 426 bp, Homo sapiens
  source 1..426: mol_type = other DNA
acctgagcccacggccacagccacgtgcccttgtgcagccagaagattagtggcctcctcgaattctgcgatgctcatctgggggcggaggctctgctgagccattgatctcccccaaggtggggcccaacttcctcagtttggaggcatccggaggacatctgttcccttcctcctaaagtggaactgcaacttagggttgtcactcctcacagccgcctaggcttcggggcccggggcgggagtgggagatccggccacgtcggggccgcactcaccatggaaggtcagctcgtcggccgatgccatggtccggtctccgcatccctcgctgaggacagagaccaggcaggtgcgctccgccccccctcacctgaggccacctgggccggcgtggctggggctctctgcgcctgcgcgtctcgg

SEQ ID NO: 25022 - DNA, 474 bp, Homo sapiens
  source 1..474: mol_type = other DNA
gctttcaccgtgggtgatccggccgcctcggcccaaagtgctggattacagagccaccaaggggacacagtagcagatcaataaatatttgctaagctaattaatgggcagagaaggcggccacggtcgggccccgccttgcctccccaccaggtcagggatcaaagcggttcccaggcgcgcccttggcccgcgggaaaccactgcccggtcttggtccaggcggcccgtccacggccaccgggatcccccatcgtcaccgcggccgccgccaccgccgccgcagtggcgtccgctctgcgcatgctccggggcgtcaagacgcgaggcgtgcagaaggcgaagcgtgcgcaggcgcggggccatcgcggcccgagtggggcggtgcatcggacgcgcgtgcttcctccgggccacgcccacccccgtccgcccagggacgggcgcgcacgcgcgccgggagcggaagggcgg

SEQ ID NO: 25023 - DNA, 573 bp, Homo sapiens
  source 1..573: mol_type = other DNA
tttcaccgtgggtgatccggccgcctcggcccaaagtgctggattacagagccaccaaggggacacagtagcagatcaataaatatttgctaagctaattaatgggcagagaaggcggccacggtcgggccccgccttgcctccccaccaggtcagggatcaaagcggttcccaggcgcgcccttggcccgcgggaaaccactgcccggtcttggtccaggcggcccgtccacggccaccgggatcccccatcgtcaccgcggccgccgccaccgccgccgcagtggcgtccgctctgcgcatgctccggggcgtcaagacgcgaggcgtgcagaaggcgaagcgtgcgcaggcgcggggccatcgcggcccgagtggggcggtgcatcggacgcgcgtgcttcctccgggccacgcccacccccgtccgcccagggacgggcgcgcacgcgcgccgggagcggaagggcgggctggcgcgcgcacgaggccgggcaggcggcggaagctggagaggccgccgcggggagccggcgagcgcgcgcgcagcgggggcgcgggtggcgcgcgtgt

SEQ ID NO: 25024 - DNA, 426 bp, Homo sapiens
  source 1..426: mol_type = other DNA
gaaatccagcttattcctgggggaaccgccaagactgcccagccctgtcaggcaagttctcacatgtgcctttttggcaagaggcctctggcaacaaggggagaaagggatcccacaaaacaaaaaatatttttttggctgtacttttgtgaagattttatttaaattcctgattgatcagtgtctattaggtgatttggaataacaatgtaaaaatagaaagtggcggaagttcccaacatttttagtgtcaatggcattaggctattggaaaggctgttgttatccttctgtggacaacaacagcaaaatgttaacagttaaacatcgagaaatttcaggaggatctttcagaagatgcgtttggccgatgtccatcggccgttcgaaactcccttgcagtgaggtgaagacatttgaaaatca

SEQ ID NO: 25025 - DNA, 509 bp, Homo sapiens
  source 1..509: mol_type = other DNA
ttgctcctcgccgcggcggggactgcaggtaaggcttagagggagcccccggggggcccttgggaatttatttttttgggtacaaataatcccttcccattaagggaaacggggcaccgctgtcccccaagtctccagagacggagtctagctctgtcactagcgagtctcctctctcagcctcccgaatagctgaccgcgcccggccgggaccctctcttctaactggagctgggtgtggggacctccagtcctaaaacaagggatcactcccacccccgccttaagtccttctgggggcgagggcgactggagacccggatgtccagcctggaggtcaccgcgggctcaggggtcccgatccgctttgcgcgaccccagggcgccactgccatcctgagttgggtgcagtcccgggattccgccgcgtgctccgggacgggggccaccccctcccgcccctgcccccgttgggtgtagtccaacaggagccactccccttgtccaat

SEQ ID NO: 25026 - DNA, 330 bp, Homo sapiens
  source 1..330: mol_type = other DNA
gattctatgtatgtttcattaaacaactatatagcacctaccactgcacttcagcctgggtgacagagcaataccttgtatgaccctcattttactaaggaggaaagtactggctgcagacgagcacacactgtaaggagaagctgctcgctgcgagcatcgacctatggagaaataaacagccgctttctctcccgcgcaggcgcatcgggaaggataacggagcctcccccttcctgcgccgattggtcatcaccgatgactgacggaccagaccaaaggcggcttagcccagtctggaagagggcgggccccgcggacagtcaaatt

SEQ ID NO: 25027 - DNA, 517 bp, Homo sapiens
  source 1..517: mol_type = other DNA
gcctggcctaattttttttcacttaaaaatttttttgcatagacattaataatatttattaaagggcctccttcctgattagccctgctcctatcaggtagctaacatgatcatctccattttacagatgaataaactgtggctggcgccggcgcccaggactctgcagcctcccttctcgcgcggcggtcacgccaccgtgtgccaggactgcgctgggccgcttccagccctgggccgcctgggggaggggtgacctcccgctgccgcgcccgccccgcgcgccctccccgagctgggccccggccagctccaccccctcccgccgccgagccgttccgccccccgcagcggcccagggacagcaggcggtgggggggaggccccctgccgtccatccccaccccccaccgcggccggggcgcccgggcggctggagggggcggtgccggctgggggggcgggaccagccggagggggcgtggtgcgggcggagccacctccgagggccgggcgc

SEQ ID NO: 25028 - DNA, 451 bp, Homo sapiens
  source 1..451: mol_type = other DNA
tgagacccttctctcgccatgggacccctggggaagcgcagggaaggggcgcgggtctccccaacccaccacccaagaccggcctgcacatcgcggaggtcggtggtggtggtgggggggggtcttcccgccccaaactcggggtggggggaggcgagaaggaccccgccccgtgcagagagggggcggggcctgtgggtgccgctccccacgccggcccagccgccaagcccaggcccagcccggccggacgcccggccgccttcccgccgtctggggcatggccgcggaggagggcgagctcgttgagacgtgtggagggggtgcacactcgatccccgaaccagactcggccgcctgggtcccgccgcccgagcgtcttcgcgcgcgccgcagcctgggcgcccggccctcggaggtggctccgcccgcaccacgccccctccggctg

SEQ ID NO: 25029 - DNA, 356 bp, Homo sapiens
  source 1..356: mol_type = other DNA
tcatacctcagcctcccgagtagctgggattacagactggtcttctcggactcccaagcctggcctaattttttttcacttaaaaatttttttgcatagacattaataatatttattaaagggcctccttcctgattagccctgctcctatcaggtagctaacatgatcatctccattttacagatgaataaactgtggctggcgccggcgcccaggactctgcagcctcccttctcgcgcggcggtcacgccaccgtgtgccaggactgcgctgggccgcttccagccctgggccgcctgggggaggggtgacctcccgctgccgcgcccgccccgcgcgccctccccgagctgg

SEQ ID NO: 25030 - DNA, 440 bp, Homo sapiens
  source 1..440: mol_type = other DNA
tcaggtggccagtggtcaagcctaagccccacccaagggcctgaccctgtttctcaggtggggaaactgaggccagagtccgagtcctgcctccttcccccaggggctttgtaatgatactgatgatgataaataacaacaatgacaataattctaagcactcaacatgaaataactcatttacttctcacaagtagctcatgatttacaagcagggaaactgaggtatcaatgcttataaaatctttactgttattaccatcatcattgcgatgcctattcatagatggagaaacaggctcagcatggtgagtctcaggaactcccagcagggtctggggcccgtcctctcctggccctgagccccaggaagcgtgccggcgtggcctagccggacattcgcctgatgcaactatcgcaccactgccaggcccttgtgc

SEQ ID NO: 25031 - DNA, 417 bp, Homo sapiens
  source 1..417: mol_type = other DNA
ggaaggctccctcctccaggacgtgcaccagggtgaagaatttgccacccctgcctgagcctgaggccagctggcaggcaagaggggagcagggcgggactcttggttcccggcccaccccgtacctgggggtgcacagaggacacggctgtgagctccacactgccagcgcatgcccggaagcgccacctgtgggagggaggcaccaggtgggcactggtcagccctccctgactgatcaggtcacccagcggccccagccattgcgacactgcagcgtgagtgtagcccggtctgggggtgcagccaagcaccctgcccccagccctggtcccagtagactgagagggtccactgggcaggctgtgaatgaatattcattacgggggccctggaggcaccctccagggcacatac

SEQ ID NO: 25032 - DNA, 467 bp, Homo sapiens
  source 1..467: mol_type = other DNA
catctgtaaaaggaggaaaacaataatttcttctgcagactttttgagacagggtctcgctctgtcacccaggctggattgtcactgcagccttgaagtgctgggattacaggattatacttacaggtatgattattagatacatgaacatgccccccaaaccccggaaatctggggcctacccagcctggctgctcctggggtggtaagaccaccccactaaaccccgggagcctggggtccacctagcccgggtctcagctcccagggtggaaagagcgcccccgccagctcgggagtctggggcacccccagtctgggtcccagcgtccccccagcccgggagtctggggcccgcccagcctggatcccggggcctccccaggactccaggcgacccctccggcctgcaggggcagcacggagcggcccgggccacccggaagggccccgcccccgcgccggcc

SEQ ID NO: 25033 - DNA, 331 bp, Homo sapiens
  source 1..331: mol_type = other DNA
gtcgtggctgcagtaaggtccaggactctcttggcctcaggcagttcccttggcctctctgaggtactgcagttttgagacagagtctcactccgtcaaccaaagtagctgggattataggcgtgtctgacctcaagccactgcgcctggcaggggtcacagctgttactaggagatgtcaactagtggttagctctgggcactatgcccacagggtcctggtggcatctggagggtaccagggtagcataccatgcctttccctgatgaggagccaacagggggcactccagaacccaattgtgatgtgataaaaggctggcagctgctg

SEQ ID NO: 25034 - DNA, 286 bp, Homo sapiens
  source 1..286: mol_type = other DNA
acctcaggtgatggcttggcctcccaaagtactgggattacaggcataagccgccgctgtggtgcaatcaaggctcactgcagcctcgatgtctccccaagtagctggggttacaggtagagatgaggtctcctgcctggcctagcctactttaaggccggcacctggagctgggactcgaaccaggcccaagactctatgcttttaacagccgtgcgtatagtagaagctctttacaagcagctgggaagctctagacgcttggtgcagcttccagcccctctcc

SEQ ID NO: 25035 - DNA, 224 bp, Homo sapiens
  source 1..224: mol_type = other DNA
gaggggacgcggccgaggagggtcgctgtccacccgggggtctgttctcggaatccgggtgctgcggattgaggtcccggttcctatcacctaatatccggtattattttacctctgccctgtccccgagcgggctcacagggtctgagagccacccggtgcctccttcccagtgcctggggcatgcaaatgtgggtgaccttccgggaagtgccctcacccct

SEQ ID NO: 25036 - DNA, 281 bp, Homo sapiens
  source 1..281: mol_type = other DNA
agtttgatcccgcgggttccgcccctgccggagtagccgaaggcctcattggcgccttcacgcttcagctgcgcttagtagccgcggcggggatcccaggggggtttcgaggggacgcggccgaggagggtcgctgtccacccgggggtctgttctcggaatccgggtgctgcggattgaggtcccggttcctatcacctaatatccggtattattttacctctgccctgtccccgagcgggctcacagggtctgagagccacccggtgcctccttcccag

SEQ ID NO: 25037 - DNA, 329 bp, Homo sapiens
  source 1..329: mol_type = other DNA
gcccctccgagagtcactgcctcagggaggtcctcacttgcagggaaactctccagctagatggcctgggtgtcataatagtcttactgggatgttgtgattagataaattaatccatgccagtgcctggtatcttccgtgtccctcccgggagaattatttagggagggggcggggtcatcatcctggctccgccccctgggttgtgaaatctacacccgagtttgatcccgcgggttccgcccctgccggagtagccgaaggcctcattggcgccttcacgcttcagctgcgcttagtagccgcggcggggatcccaggggggtttc

SEQ ID NO: 25038 - DNA, 329 bp, Homo sapiens; identical to SEQ ID NO: 25037
  source 1..329: mol_type = other DNA

SEQ ID NO: 25039 - DNA, 340 bp, Homo sapiens
  source 1..340: mol_type = other DNA
gagggtcacattcagggaacctgtccctcctgcaggccacaaggggcaccagtgcgagcggcagaccctcagaacaggcccagatcctgatctgggcatgcggtccctgacctgcagccccggagtcccctggacctggccaggccctgacccacttgagcagccgggactgctctccctgaagacccctccagacatctgaagccagatttaatattctgtcagacagacccacagagccttcctttctggggggccctggcgaaccagggacatactctgaagccatcacggaggccccgccccacggggctatgcaaatgagacgcccggaggcccc

SEQ ID NO: 25040 - DNA, 205 bp, Homo sapiens
  source 1..205: mol_type = other DNA
aggcaacgacaaggttgccagggcaacacagaacctacaaatgtgctaggtgctattctcggtactggagaacagaagtgaacacatctcacagcctgtgtccccaggatgactcataagccccattttacagcagggcaaactgaggctaggagcctttaaataatatttatatttgtctgattagctgacaataatagtattc

SEQ ID NO: 25041 - DNA, 414 bp, Homo sapiens
  source 1..414: mol_type = other DNA
ttctggggcccagcccgcctggctccaggcaggctcggaggccgtgctctcctggacctggtgcatctggctgcagccagcactgggcagccgctggagcagtgccaggtgcaggacgtccccactacctgcttcctcctgggtctggagggccaccatgagcccacaatcccggccaggcccaagccggtggggggctggccccggggcctcatgggcagagcacagaagccagactccttaaaagtaaccctgcctcctcagagctgttaaattttccagcactcatcactgccgagtattagtccaaatctctagcgcaatttttccacggaaaaccaggaaccaactcaggtccagaatggacccaagcttagccccgccccttgatgggccggacttcatgggctctcg

SEQ ID NO: 25042 - DNA, 366 bp, Homo sapiens
  source 1..366: mol_type = other DNA
tgttgctcccttccctgggcgcatagggatgagccatggaagctgtgtcgcctgcaccaggctcccacggctcgtggtgcggtgcgcttctggtgttcgctgccacccgacatggtcggaggagagggtctcagtcctcgcccacctctcctagacgcccccgtggggctggtggcggctggctcccgccgcctgagacacccatgacgtctcacatccgctacgaggtggacgtctcggccggcaacggcgcagggagcgtacagagggtgaggccagcccctacggcccaggccacgcctctcgaggtcgcgcccggtgccgctttcagggccggtccgataaattgcccgggtccccagagac

SEQ ID NO: 25043 - DNA, 250 bp, Homo sapiens
  source 1..250: mol_type = other DNA
cgataggcgtgagataaaaatgtgggtggtaaaaatttttttcccaaaaattcgtaaatgaaaatctcacgatttcaagaccagattttaaaaattagggaagattgcttcagtccagaggctgcagtgagctatgattgtgccactgcactccagcctgggtgaagagagagagaaaataatttttatttatttccaggctgggaagccagaacgggagctgttgcggcccaactccctcccctgcccc

SEQ ID NO: 25044 - DNA, 337 bp, Homo sapiens
  source 1..337: mol_type = other DNA
cgataggcgtgagataaaaatgtgggtggtaaaaatttttttcccaaaaattcgtaaatgaaaatctcacgatttcaagaccagattttaaaaattagggaagattgcttcagtccagaggctgcagtgagctatgattgtgccactgcactccagcctgggtgaagagagagagaaaataatttttatttatttccaggctgggaagccagaacgggagctgttgcggcccaactccctcccctgcccccaagcggcctctgggctcgggaagggcccctgcctcctcccgccagagtgctggccccgccccctcggggatctgccacttagaggc

SEQ ID NO: 25045 - DNA, 361 bp, Homo sapiens
  source 1..361: mol_type = other DNA
cccaggggttccagactagcctgggcaacatggtgaaaaccagtttttaccactgcactgaagaatcctttcatctcaaaataataataataaaaagtggaaacttgatccactggaggactctggtctggggacacacacatgcccccacacaggagctccccccttggggacagatatgtcctttcttctggggcacccagcggaagagccaggacctctcctgggctggcgctgggtccggctggaggcacccagaggctgggtccggcctgccctgccccgccccgccccagcagctcggccgctccgcccctctggcctcagcgcccggccactgcccgccgcccgccacccgcca

SEQ ID NO: 25046 - DNA, 336 bp, Homo sapiens
  source 1..336: mol_type = other DNA
gagatgcgctgtgtcttcacgctgcaggaagaaagcggatcccggtcagtgggagagggctacttccagccaattggattcctccatcgcttccaggcaatgaggcatgggggcgaggggcagcgatctccccaatcctggcggatctcaagatctcccctcttgtccagcagccgcggttcctgctgcagaaagaaagcggaaatttctggaccgtcacttccggtcgtacgttccgcaccgggaacggagactcagcggtgccagagccgagacggccatctgtccagaccctccgtcctgcggcgcggctctacccgagcgcaaccacctagc

SEQ ID NO: 25047 - DNA, 364 bp, Homo sapiens
  source 1..364: mol_type = other DNA
caagagattgagaccaccctggccacccagctactcaagagtccactgccggttctgaactgagtttttgcccagaaacggtttacctagactcatgctggagaaatagtaactcagccacctgagagtgcacagagggcttccctgcacctctgtggaaggatcctcccttggaacggcctggggtccacgcctgggctgtgcccttgcctcggaagcctccctgcccttgaccctggaagagggcgtcgaagcctggtctgaggaggcagggcgttggcggaggccgccctgcacggatccgtcagctcggattcctagggctctgaaaaatgcactttccgaccgctaggtggttgcgctc

SEQ ID NO: 25048 - DNA, 396 bp, Homo sapiens
  source 1..396: mol_type = other DNA
gaaacggtttacctagactcatgctggagaaatagtaactcagccacctgagagtgcacagagggcttccctgcacctctgtggaaggatcctcccttggaacggcctggggtccacgcctgggctgtgcccttgcctcggaagcctccctgcccttgaccctggaagagggcgtcgaagcctggtctgaggaggcagggcgttggcggaggccgccctgcacggatccgtcagctcggattcctagggctctgaaaaatgcactttccgaccgctaggtggttgcgctcgggtagagccgcgccgcaggacggagggtctggacagatggccgtctcggctctggcaccgctgagtctccgttcccggtgcggaacgtacgaccggaagtgacgg

SEQ ID NO: 25049 - DNA, 325 bp, Homo sapiens
  source 1..325: mol_type = other DNA
ggatccgtcagctcggattcctagggctctgaaaaatgcactttccgaccgctaggtggttgcgctcgggtagagccgcgccgcaggacggagggtctggacagatggccgtctcggctctggcaccgctgagtctccgttcccggtgcggaacgtacgaccggaagtgacggtccagaaatttccgctttctttctgcagcaggaaccgcggctgctggacaagaggggagatcttgagatccgccaggattggggagatcgctgcccctcgcccccatgcctcattgcctggaagcgatggaggaatccaattggctggaagt

SEQ ID NO: 25050 - DNA, 499 bp, Homo sapiens
  source 1..499: mol_type = other DNA
ccttggcctctcccttggagggcctggccctctgctgccccctcctggccgcagtgcctcactggcgtggccctggcctggtcatcagggcccggggcccagccctcccgtgcctggcaccgcagcccgggtgccggggtggccgagatgggggacacgtggtggcctagatcttgacaccacctggggaggccatcagggacaagtaccggtgaggagaagggaggggacttggtcctcccaccacactgccctggcacctggccaccctggccagctgggtggccccagcaccccccaccgagaccccccgaccccagctgtcggtcctccctgcaggccccgcaggaggggcagagacaccgaggctgccccttgggctgtggtgtgagcctgagggtgtgggtggaccctgagtccacaacaccgacctgcccctgacttgacggagcccaaggaggagcagccgccagtgccctcgtcgcccacagaggaggag

SEQ ID NO: 25051 - DNA, 212 bp, Homo sapiens
  source 1..212: mol_type = other DNA
gtgggacccagggcagatggcctcacccctctaatcccaacactttgggaggccgaggtggttgagaccaggatggccaactgttgcagtgtgggcggatcacctgaggtcagtcccagctacttgagatatctcagtgtacaatgagcagtggctctagccactgttatgggtcagacaggcccagcgctggtcccccgttcaccctctct

SEQ ID NO: 25052 - DNA, 387 bp, Homo sapiens
  source 1..387: mol_type = other DNA
cttctcaagactgagaatggagtcccaccagagtcccaggccagagaccggtgagggggcggggctgcccccccagggcctggttagttacaaggcctggaggtggggccagtcccaggattgggccgccagagttctagcgggcggggccaagcgctcagaaggcgggggtgcaccctggcggggccacgagccaggcgcgtcccggccaggcagtacgagacccaggccgccggcccggctcctgggcggggtccgcaggtgccgggggctggccctagggcggggtaaagcccggcggggtctgggggcgtctcctccctccctccctcggggccaggccccctcacccgtggcggccgctccgctggccgcgctccagagaga

SEQ ID NO: 25053 - DNA, 438 bp, Homo sapiens
  source 1..438: mol_type = other DNA
aaatttaaacggcgtggtgctgtgcacctgtaatcccagctcctcgggaggccgaggcaggagaacagtgagccgagatctcgccactgcactccagcctgggtgacacagcgagacccgctgcagccctccaacagtggaggaaggccctgtcttcgccatgtgcatggcgggtgctcatgaccaggcgtccagggcctgcaggagaccaacccaaccctggcccagatccccgtggtcttccgcctcgccgggtccacccgggagctccagacatcctctgcagggctggaggagccgcccctgcccgcgagctagtctgagccggcgcgagggcacgggctgtggcccggcatcccctccccaggatctcgggctgccagcgatgggcaggcgagactccagaatctgcaggcgcctctggttggcgccctgggg

SEQ ID NO: 25054 - DNA, 313 bp, Homo sapiens
  source 1..313: mol_type = other DNA
tctcgtgcctcagcctcccgagtagctgggatcacaggagatcctggctcactgcaaagctggtctcgaactcctgacctcaggtgatccgcaggcctcggcctcccaaagtgttgggatatttattattactatttttagaaacagggtctcactctgttgcccaggctggagtgcaggggtgcaatcatggctcgctgctcgactcatgcccagttaatttttaaattttttgtagataagcgctggggcctgcgactggattcatagacttagaggctgggcctggctcgttatgaggcgggtcccagat

SEQ ID NO: 25055 - DNA, 333 bp, Homo sapiens
  source 1..333: mol_type = other DNA
agcctcccgagtagctgggattacaggcatgtaggtcccctgaagttgaggagaggcatggctttcctacaatgactgtcgggatcagccctgcctctacccccgcagtccccgaaagggctgccccctgggggtacccggggctgccccgttggggggcacgccaagagctcccccaccccgcccccgtcgtgcctgggccgtgacttcagagtccgtggccaagaggccgcgggccggggggcggggccgagtgagtcatcgcgtgacgtcaccgccgcctggacctcgccaggtcccgcccccgcccctcccgggccgccagggggcgcc

SEQ ID NO: 25056 - DNA, 328 bp, Homo sapiens
  source 1..328: mol_type = other DNA
gatctcttctcccccaggtccttatgaggggctggaggaccctcagcgcgagcctgggaggtcaaggctgcagtgagctgtgattgtgccactgcactccagccgaggggacagagttgtgccgggcactgtgctgggcatgtaacaggcatatgctatactgttggtatctggagataaacccgggatggtcagccagaggcccaatggacagtgggaggggtgggtggtctctgtctgaccaaggttgtggggggaggtgccccgccccttggcaggcccctacagccaatggaacggccctggaagagacccgggtcgcctccgg

SEQ ID NO: 25057 - DNA, 347 bp, Homo sapiens
  source 1..347: mol_type = other DNA
ttaaaggcagatcacctgagatcgggaccagcctggacagctacaccgcggtggcggcgcccgtagtcccagctactcgggggtgcgccgagatcgcgccactgcagtccggcctgggtgaaagagcgagactctgtcttggccccagggctgaaaccccacccagtgctgtggttctgcggctgtgggcccatgggtgcccccaaagggtcccaggccccctggccaccccttctagcccagctgcagctgcagtccgtgggtctgagccgacccggagcctacagccgggaggcgtggcggctctgggcggtgcagggttccggggcggggaggccgaggcgccc

SEQ ID NO: 25058 - DNA, 323 bp, Homo sapiens
  source 1..323: mol_type = other DNA
tccgcgggacgtgtcgcggcggcgcccagcacggaggtcagaccggccgcaggtgcagggcctcctgccctcccaggctgcggtcccgtggagggcctgcagacagctgctgaccagctgcctggttcctcctgcaggaaggggacacacgcggagtcccccggcctcgcaggctcagcatacatgacaggcccctgcaggtccacccggaggctgtgtgggccgaggctgctgcacacgtgtgcccaggctccagggaagtccagggctcacatgacccaaggggagggctcccgggacagccctcggctaatgatccactt

SEQ ID NO: 25059 - DNA, 285 bp, Homo sapiens
  source 1..285: mol_type = other DNA
gcaaatctttgtaatcccagcacctggggaggcctaggcaggaggatcggctggagtgagccgagatcatgccactgcagtccagccgtaattcagctactcgggaggctgaggcacgagaatcgcttagagattgcagtgagctgagatcgcgccactgcactcccgcagtggctagaaccagtcaacactgctacgcctcaggccttagggggcggggggcgctggggcggggccctgccaactgtccattcagatgggcccgggagaggagggcagggcctg

SEQ ID NO: 25060 - DNA, 361 bp, Homo sapiens
  source 1..361: mol_type = other DNA
tatttttacttcataaacatatggagaaaggctaatgttttcaaattcaaagtgtgatgtcttggctttttttaattcattaacatttaatggcatgagacctcagagtaaaattcttttatcttctgggctgaaaatgaggaggacatcaggccctccctcctgctgcagggtggcctgtgtgccccgggctcccctcctgctccgaggtccgggaatccactggacagggagcctggaattccctgcacacacttgtctccgttgggaggaagcccgccttgccaagggtcgtgcctggaacctgtatcaggcacgctgcagggaggagggtgcgacgttcaaagagcccgcggagtct

SEQ ID NO: 25061 - DNA, 431 bp, Homo sapiens
  source 1..431: mol_type = other DNA
gcctaaggccagtgacaccctgctgaggccagtctggaaagggagctcccctgggtgtttcccgggcagcctgccctctactgcaggtggcctccagctgctcagaacagctgcggaaggaatgtggatccggctgtacctagagcctaatttgtacatacaaagataatctgtgaagatcaggctcagtaagatttgtctgacatgtcacctgcttaaactgaccccaggtgagaacttctacggggggagtgtgaggaagtctcatccccaattcccgcccgcagtcttgcctggcctggcctggcctggatttccttaaggaatcttagcaggattaatcagccgggctctgcagggctccgttacccagggcttaccctgtcactcagggctgaggggcggagcctggaaccccatccaatcagggg

SEQ ID NO: 25062 - DNA, 357 bp, Homo sapiens
  source 1..357: mol_type = other DNA
aggctggtcttcataatttctatgacagaatttctcatttacagcttgctgggttatatgtgagataaaagtgccatgctatatcatgttccctctgtcaatgcaccagggatagatatacatagtactgagagcctctaaatctttaatggccatgcccccttggcgctcgcttagagaggctgttcgcttagagaggctgctcgcttagagaggctgctcgctcagagacgctgtcatgatctgcaggacccggttacccagggcggaggaggcggggcctggcgccccatccaatcaggggtgctggggcggggccctgtcaactgtccatccggggaagggggaagggacagt

SEQ ID NO: 25063 - DNA, 327 bp, Homo sapiens
  source 1..327: mol_type = other DNA
ccagtgactccacgctgaggccagtctggagcctgaaaggagcttttcctgggggcttcctgggcagcccgccctcccctacaggtggcctccagctgctcagagcagctctatttgtatatataaagaaaatgtggtgtgagcaagtcttggccatgcctcatccccaattccagagacgctagtgttctcttctaacaatagcagtaagcttagagaagctgttgctagaatctgtcagtctggctccgcagggcctgatacccagggcttcccaatcagaggcactggctcggggccctgcccactgtgcatccaggcacggag

SEQ ID NO: 25064 - DNA, 325 bp, Homo sapiens
  source 1..325: mol_type = other DNA
ggaaaggagcttttcctgggggcttcctgggcagcccgccctcccctacaggtggcctccagctgctcagagcagctctatttgtatatataaagaaaatgtggtgtgagcaagtcttggccatgcctcatccccaattccagagacgctagtgttctcttctaacaatagcagtaagcttagagaagctgttgctagaatctgtcagtctggctccgcagggcctgatacccagggcttcccaatcagaggcactggctcggggccctgcccactgtgcatccaggcacggaggatggcattcctgccgtcacctttgtcgctg

SEQ ID NO: 25065 - DNA, 280 bp, Homo sapiens
  source 1..280: mol_type = other DNA
acagagatattcatatatataaagaagcgggtggatcacttgaggtcaggagttcaagaccagtctggtgcagtgagtggagattgcaccactgcactccagccttatttaggtcaaaagcttaacttaacccctggagagagtttcctgctggtgacttagccatgcctcatccccggcccgctccaagacatatgcctggcgcatggctctgcagggcccgatacccagggcttccgcagggggcggggcattgtggcgggtccctgcccactgttcc

SEQ ID NO: 25066 - DNA, 217 bp, Homo sapiens
  source 1..217: mol_type = other DNA
cctcacgtcccagccttttcccagctactccggaggccgaggtaagagagatcgcaccactgcactccagcctgggctagctggtgggtgtgtgagcaaggcttggccacgcctcatccccaatggtgcagtcctggcctggggttcccctgctgctctgaggccagcagctggctctgcggggcctgatacccagggcttcagtggcactgcccgg

SEQ ID NO: 25067 - DNA, 357 bp, Homo sapiens
  source 1..357: mol_type = other DNA
agcagagccccaggccagtgactccactccctggggtcttcccgggcagcccgccctccccagtggcctccagccgctcagagcagctccagaaggcagtgtatatataaagagaagttaaattaaccccaggtgagagtttcctgctggtgaaaatgaagatcgagcaaggcttggccatgcctcattcccaattccggcccgctcaaggacatgtgcctctcctgatgcagtcgtgcctgcctgctgctctgaggccagcagatgaagtcagtctggctctgccgggcctgacactcagaagtgaggggcggggcctcaatcagaggtgccggggcagggccctgcccattgttt

SEQ ID NO: 25068 - DNA, 258 bp, Homo sapiens
  source 1..258: mol_type = other DNA
caatgtcatcaaagattacactttggataggactctattacgacaggtgctacagacaagaggcagcccaggcagttcagtgaatgcacacaacccactgtgcatgcctgtggtctcagctactcagattgtgccactgcactccagcctgggctcacctgagatcaggaggtcatcccagctactcgggaggctgaggcaggagaatcgcttgaatcatgagcaacaagttgttgttttgaaaatccatctcaaaac

SEQ ID NO: 25069 - DNA, 437 bp, Homo sapiens
  source 1..437: mol_type = other DNA
acctgtgttcaggttttaaagacgtaacggagattctccgcagatgcgcattttcctcccaaaggcacctttgcaagacaggagtaaccgggcgcgggcttgagctcaagagttcgagaccagcctggctgaaacccctgagccaggatagcgccactgcactccagcttgggtgacaaagtgagacccagaaaaaaagtcaaatatattttggagtaaaaaaatttaatttccttcacctacatttgttgagtgaaaaagacaacagtgtcccttatagcagttaggagcaagtttggaacctgcggctggaatagcagcgaccggctctgcagcgccctgttacccggggcttctgctgtcactcagggctgagggggcggggtccctatccaatcgggggcggggccctgccaactgtttaatccgccggaagg

SEQ ID NO: 25070 - DNA, 494 bp, Homo sapiens
  source 1..494: mol_type = other DNA
taagattaatatttcaatgtatatatatgcctagcatattttcattatgcatgcagatcaatggaaggttcagttttcaattttttcaaatttaatataactagacccaaaagtgggatacaggaaaatacagtaattttatttttttaggcactactgtactgttttcctttaaacagagcacaaggagtcccttttccctttgttgatggtgtcatctcatgcacaaaagtggtttgctggagtgcagtggcatgatctcagctcactgcaaccatgttggccaggctggtcaccaactcgttacaggcatgagccaccagcctggccacaaaagtttttaaaagtttgataaatgtttgcctgcctcagcctcctgggtagctgggactcactctgttgcccaggctgcagtgcagtggcatgagctcatgagtgtagagctcatgagtttttgttttagttatttatgactcatcatttagattgataag

SEQ ID NO: 25071 - DNA, 365 bp, Homo sapiens
  source 1..365: mol_type = other DNA
ttttaggagacagaattgaataaaaataaaactcttctctttcatttagccgggacagggtctcactctgacatccaggctgggcttaagttcctaggctcaagcaatctgcctgcgtggtggggttacaggcatgagctacccccacccccccggtccatgggtccgcacagcaggaggtgagcggctggcgggcgagccagcgggcattatcgccagggtggaagtttcattccgaaactctggaaactgtcttccacgaaaccggttctggtgatccggtcaaacccgctgagggggcggggcccggcgcttcgtccaatcaggggcgctgggcggggcctgccgagtgtccatcggggagg

SEQ ID NO: 25072 - DNA, 426 bp, Homo sapiens
  source 1..426: mol_type = other DNA
cgggcggatcacctgagcagctatcgcttgtgcagtgagccaagatctcgtgccactgtgctccagaaagaaagacagggatctcgctgtgttgatgttcagattttaaaggtgtcaaactctcaatagattctctacaaatgtaaatttccccctcaaaagacagttttgcaaggccaccttttgtttgctggccaagcaaagaaatatattttggcagggcaatatcttggggcaaaatattttaatgtctttcacattttgtggacactgattccctgcacgagcaagtttggccgaaggtcgcttcggctctgcagcgcccagttacccggggcttctgcagggaagggggcggagtctagacccctatccaatcaggggcgctagggcggggccctgccactgtcctccagggaaggggag

SEQ ID NO: 25073 - DNA, 246 bp, Homo sapiens
  source 1..246: mol_type = other DNA
gtactggtgcaatcacagctcactgcagccctcccactgggaaattacaggcgtgagccgccgcgcccggctttccagacttttaaaagtgtcagactctcaatttctcccggatcaggattcgaaattgccaaataaatatattttggaataaaatattttaattgctttcacctctattagcagggggcggggcctggcgctccacccaatcagagtcgccggggtggggcccggccaactgtt

SEQ ID NO: 25074 - DNA, 288 bp, Homo sapiens
  source 1..288: mol_type = other DNA
ctgggtgcttcctgggcagccgccctcccctgcaggtggcttgcagctgctcagagcagagccctggaaagcaggagacccacgtgcaggtgcacttcaggaatccgtaaagatcaagttcagggaaataactgtttgggacctctcctggagaaggggctttgtgaaagccttggccatgtctcatccctaattctgaaggacaacttcctgctctgaggtcagggcggggccttgtaccttgtccaatcagaagcgccggggcggagcccggccaacggtccgtcc

SEQ ID NO: 25075 - DNA, 353 bp, Homo sapiens
  source 1..353: mol_type = other DNA
acccggccgtaaagatttttaaataataaaaacatggcgcatgtatacatatgtaacaaacctgcacattgtgcgcatgtccctagaacttaaagtttaataaataaaaattaaaaaaaaaaaacaacaaaacaggggtattcttgtgttgaccaacaaagtgctaggattacaggcgtgaaccaccgcaccctgcctgtgttcatcaatggagattctctgcagatgcaatttcaaaatctgtcaaataaatatattttggcgtaaaatattttaatttcctttgagtctggaatttcctgtgcaagattcggagcaaatttggctgggaccgatgggacgggggtccatcc

SEQ ID NO: 25076 - DNA, 250 bp, Homo sapiens
  source 1..250: mol_type = other DNA
ttctttacagattacggaaatagaacttgtttttccatgtatttaataattttattcacttggctaggagtttgatcatgccattgcactctaaataaataaataaagtaataaataagtaaataaagtaataaataagtaaataaagtaagccttgggcacgcttccctaggaagtatctcccgggacgtgagggctggggccaagacccctgatcggtccaatcaggcgcgccgtcggggacgcagct

SEQ ID NO: 25077 - DNA, 265 bp, Homo sapiens
  source 1..265: mol_type = other DNA
gaggggtggtctcctcccttatagtatagagacggagtttcactctatgtccaggctgggtattgggattacttattaaggcttccccgctgctacagtgtggcctgtgtggcctcggctgccctcctgctctgaggccaagggatggctccactgggaaattccgctttaaggcaaacgtttcccgggacgggtcgggtcacaacgcagggaggaagcccgccctgccaggggccgggtctggaacctgttcatccggctgcac

SEQ ID NO: 25078 - DNA, 391 bp, Homo sapiens
  source 1..391: mol_type = other DNA
gcccttaaactaactttacatgaaactttcctgttggtgaaaatgcacatcttgacggtgggggcatttccacactctgcagagggcacagggaagtatgtgaaggcttaaccttgccgctgatgcccggtggacatcaggccaccctcctgctgcagtgtggcctgtgtggccttgggctcccctctgctctgaggccaggggaatggctccactggactgtgcacttgtgactccttctccaggaggaaaaggcagtatcaggacagcacagggaggaagcctgccctgtcaagggctgtcagtgcccagggggcgggacctggagccctcaggcgcacggctggcagtagggtgccaggttcaaagagcccgcggcgtcttcacgccc

SEQ ID NO: 25079 - DNA, 394 bp, Homo sapiens
  source 1..394: mol_type = other DNA
agaggtaacatctatgcagtttatctcgaagttattatcttgaaaaggtttaaaacgtggtttgagactcagctgctaagctgctggttacacactctgggactcaacttcaggagtcagaatctgccttctaagcttgaaaatatgtttaacctcctgaaaggaagattactgccatataattccagattttccatgcatttaacaattttatttcattgctggaggacaccaggccttgtgtggcctgggcctcccctaccgctctgaggccaggggatggctccactgggcagtgcacacacttggcaaatgtcccctgggaggggtcaggtcacagcgaagggaggaacccacgggaggagggtggagctttctacacccctctgagctc

SEQ ID NO: 25080 - DNA, 445 bp, Homo sapiens
  source 1..445: mol_type = other DNA
aaaatcagtaacatttttatagtgagccatgatggccccactgcactccagcctataataggtataaaaaatagttacaaagaatgaataagacctagtatttgctagcacaacagagtgactatagtaaaaaataatttaattgtacattgaaatattttgaaaaatttcattgaaaaagagtatcgagaccagcctggccgaggaggcgggtcgcagtgagcctcgcaccattgcactctagcctgagccacggagcaagactccctctctctctctctctctctctctctctctcggaaaaaaaaaaaaaaaaaaaaaaaaaagtataattgttttgtcagtcagtaaattccgcttaagtgcaaatatccctcggaagcccgccctgccaagggctgtgtcaggaacttgctcatctggctccactcaggcacctgacgcc

SEQ ID NO: 25081 - DNA, 425 bp, Homo sapiens
  source 1..425: mol_type = other DNA
ttgtctaatacatgaaacatgtaaacaatgtgggaaagccttcagtgtttccggtttgggaaagcgtttgtgggaaagcattatctcatcgctcaagctttcgaagtcatatgatataaatgcaaggtatgtgggaaagcctttgtttatcccagtgtatttcaaagacatgaaatattctgtattgatttctgttcctttcaaaatcacaaaacaactcagtgtaaggaatgtgggaaagcattcagtcgtttcagatacctttctcgacataaaaggactcacagccttcggtcattatgataacttaaaggtacatgaaagaattcactcacttgctttctacatgaaagaattcacatgagagagaacaatgtggtaaagccttcactcattcccgttttcttcaaggacatgaaaaaact

SEQ ID NO: 25082 - DNA, 417 bp, Homo sapiens
  source 1..417: mol_type = other DNA
gagccatgatggccccactgcactccataataggtataaaaaatagttacaaagaatgaataagacctagtatttgctagcacaacagagtgactatagtaaaaaataatttaattgtacattgaaaaatcttgaaaaatttcattgaaaattgagaccagcctggccaagctactcgggaggctgaattgggaggcgaaggttgcagtgagcctcgcaccattgcactctagcctgggcgacagagcaagaaaaaaaaaaaaaaaagatataattagtttgtcagtggaagccccccctgccaagggctgtgtcaggaacttgctcatccggctccaccctcagggggcgggacctgacgccctatcccactgccgtgtgtggttgaaaaagcccgcggcgtctgctccacccacc

SEQ ID NO: 25083 - DNA, 259 bp, Homo sapiens
  source 1..259: mol_type = other DNA
tgggaaagcattcatttctcttccaagtgggaaagcctttgattgtcctagttcttttcaattcctttcgaatgcatgaaagaactcaagttgttccagttctgttcgaatacatgaaaggactctttcgaatgcatttccattcgaatacatgaaaggactcacactggagagaaaccttacactatgtaaacaatgtgacaaagccttcagtttcgatatataagcaatatggcaaagttttcagttgtcctatttc

SEQ ID NO: 25084 - DNA, 184 bp, Homo sapiens
  source 1..184: mol_type = other DNA
gtgttcagttttactgaacacagaccctgcattgtcaaagattaaaacgtagtcactcgagcgtctgacccttccgttctagggacaaagagcctttttctggaagaccccgggtaatccgtggcaggggaacagattcctgaccccggggcgccgccgggaaggcgggcggaggggcgctgcg

SEQ ID NO: 25085 - DNA, 184 bp, Homo sapiens
  source 1..184: mol_type = other DNA
cgattctcgtacctcagcttcccgagttgctgggattacaggcacctgcccgcgcccggcgtgtcataaaaactccagttctatacatttaatacaagctggcctggcctgggcgcgcctcctactccgaggccaggggatggctccactggacgccgagtctgtcattccctgtgcctttctg

SEQ ID NO: 25086 - DNA, 184 bp, Homo sapiens; identical to SEQ ID NO: 25085
  source 1..184: mol_type = other DNA

SEQ ID NO: 25087 - DNA, 428 bp, Homo sapiens
  source 1..428: mol_type = other DNA
gttccaagtgaataatttttctgatttttctctgatgtaaaatatccacaaacaagaaataaatcgtttaaaagaggcatctattggaaaaaagattattaaaatactgcgtgtgttccggattctccccaggaccctcccgtggtccctgcacgatctgggaaagacgcggggctgcgggcgcggagttgtccagagagggctccggggctgggaccgcagtcgccgcgcagggacgggacaggacgcttggagttccagctgccagcccagccccacactgcggccggaggtgaccgtggggaggcccgggtcccgcgatcacggccggttccacctgacgcgcgcagcgtagccgtaccctcctttccggcgccgcccctgattggtcgcttccgccggtgggacggaactggtgccctccgtgg

SEQ ID NO: 25088 - DNA, 407 bp, Homo sapiens
  source 1..407: mol_type = other DNA
aaggagttcccataggaagttccaagtgaataatttttctgatttttctctgatgtaaaatatccacaaacaagaaataaatcgtttaaaagaggcatctattggaaaaaagattattaaaatactgcgtgtgttccggattctccccaggaccctcccgtggtccctgcacgatctgggaaagacgcggggctgcgggcgcggagttgtccagagagggctccggggctgggaccgcagtcgccgcgcagggacgggacaggacgcttggagttccagctgccagcccagccccacactgcggccggaggtgaccgtggggaggcccgggtcccgcgatcacggccggttccacctgacgcgcgcagcgtagccgtaccctcctttccggcgccgcccctgattgg

SEQ ID NO: 25089 - DNA, 280 bp, Homo sapiens
  source 1..280: mol_type = other DNA
tgcatttgtaaccataaatctactttcacccgagttctggccatgttgcccagactgaactcagtagctgggactacgggcacactttttattacacatgatggggtaaccgtctgtttataaacaagggaagcccctggtacctggaggacgacttgctcctcgaggggtcgctcggacttccgtgtccggagatccggccacggagggcaccagttccgtcccaccggcggaagcgaccaatcaggggcggcgccggaaaggagggtacggctacgct

SEQ ID NO: 25090 - DNA, 397 bp, Homo sapiens
  source 1..397: mol_type = other DNA
actgggaccacaaatgcgtgctacctggagggcaatggcatgatcttgatctcggctggttttgtatttttacattttgtgtaaaattacaaattttgtgttttcaaacccgaggcccaagtgattcaccagcctggccctcccaaagtgctgggattgcaggttcttatcagagaatgatgaaagactcggggtccttccccaccaggctggatcccatccctggtactccaggggtattttccaggaccctagcgctgaaggtccatgggacggacacaggcattccgtcttggaattccggcattaagaggaggggcccagggctacactcccgtgagcctccagaccgcgccctggccccgccccccaccccgattggcccggccgggtctgg

SEQ ID NO: 25091 - DNA, 355 bp, Homo sapiens
  source 1..355: mol_type = other DNA
agaagtgcctgatctcgcctatgtgcagaggaggccaggccctcccaggcagcatttgccgacagcagacggccaccgtgggaggtggggtgatgttatccccagcagatgaaggcactgaggcttagagaggataggtgacttgcccaacgtcacacactgctggaatttcaggcagactccacgcagggcgcgggacatggtccaggggcctgctgagtccaggcagccgcgagcgcagacccccgaagcccgcgcgtaggcgcccatggctcagcagcttcctcctggggttccccggccctggaaaggccgggcaaacgccccgcccccagacccggccgggccaatcggg

SEQ ID NO: 25092 - DNA, 327 bp, Homo sapiens
  source 1..327: mol_type = other DNA
accccagccctgggaagcgcctgtctatcccgggggcaggacctgagcgcccctgaccctcgagcctgtcgcaggtacaagcccccgcccatgaacctgctgggcatgatcttcagcatgtgcggcctcatgcttgagtctctcttggtcctgagagacgcaggccagagtggggcaaggtcccagctgcatcagatggatagctgaagtggtgtgtcggaggacacgaagcaaatgatgagtagcttcatgtgagacttgccctacagaacaagtgactcttgagtaaggggtggggggaccccagcctggccatcctagactgac

SEQ ID NO: 25093 - DNA, 276 bp, Homo sapiens
  source 1..276: mol_type = other DNA
cctcggcctcagcttgcacgccggaagctgcgattcctgcagcggaagaggcggacccacaccccagccctgggaagcgcctgtctatcccgggggcaggacctgagcgcccctgaccctcgagcctgtcgcaggtacaagcccccgcccatgaacctgctgggcatgatcttcagcatgtgcggcctcatgcttgagtctctcttggtcctgagagacgcaggccagagtggggcaaggtcccagctgcatcagatggatagctgaagtggtgtg

SEQ ID NO: 25094 - DNA, 399 bp, Homo sapiens
  source 1..399: mol_type = other DNA
gggggtggccgtgtcaccacctatgcgctaatacgggtcccctccacgttgtccccgccgccggagcagagactacgaggaggaggatcagcatcgacctcggatcccagcctcagcgctccctcccagcctggtccccggctcacccggccgcgtagccgtggccgctgtacgtccgcagcagcgtcccccgaagcgggactgccgcacgtcaggcagtaattgccatccactggggaacaccaggcgggggttacgcgtcttcaaccgtttctgcggcagctctggaggccgcggctttggctcagggaaagccatgctcccaggactccttccttgcagcggaaaggaagcctcggcctcagcttgcacgccggaagctgcgattcctgcagcgga

SEQ ID NO: 25095 - DNA, 237 bp, Homo sapiens
  source 1..237: mol_type = other DNA
tctggcctgcgtctctcaggaccaagagagactcaagcatgaggccgcacatgctgaagatcatgcccagcaggttcatgggcgggggcttgtacctgcgacaggctcgagggtcaggggcgctcaggtcctgcccccgggatagacaggcgcttcccagggctggggtgtgggtccgcctcttccgctgcaggaatcgcagcttccggcgtgcaagctgaggccgaggcttccttt

SEQ ID NO: 25096 - DNA, 452 bp, Homo sapiens
  source 1..452: mol_type = other DNA
ggttgcagccagccgagatcgcgccactgcacaccagcctgggtgacagagtgagactccgtctcggcttgagctcaggagttccagaccagcctggacagctacctggagccaagcactccgcttggaggactgaactgctgtctggagaggtagttctgaggccccagttcctaactgatgcctctgcagtgtaactgcatagaggcaagagttccaatctctactccttgaactcggaaaggggcctttgggtttctaagctcagtgtcacatataacagatgccttcgttaaagcagtgtttattttatgtctaatttaaagagacagggtctcacccactgcagtctgaactcctggactcaagggcaggcgcgcgccaccccgcctggtcggtatcggctagtttaaaaagcgcagaaacaggaacctgcattttccagccttgac

SEQ ID NO: 25097 - DNA, 252 bp, Homo sapiens
  source 1..252: mol_type = other DNA
atcccagcaactcgggaggctgaggcaggagaatcgctaggttgcaatgagtcaagattgcatgtaactcttgtctcaaaaataaattaaataaataaataataaaaataaaaaagaatcttcattcatgcctgtaatcccagctactcgggaggcgccgggcgcggtggagaccagtcccagctactcgggaggctgagtgagctgagatcgcgccactgcactccagcctgggtgacagagcgagactct

SEQ ID NO: 25098 - DNA, 427 bp, Homo sapiens
  source 1..427: mol_type = other DNA
tcaaaaatttttcatctccttgtaaaaactatcaaacagtactggaaaggggttcctggatccatcttggtcacgtgaccggaccttgtctcagcccgggtttcccaagtgccagggcacgtgtgaaggttgaaccttccgattggctcggcgggaccatttgaacggagtacgggagccgcggcggctcacctacggccgccgcgagtctctggagaagccgcagcgcgagttgccgccgctgctgcccggggccgggtaagtgggcctcactcagagcccgaccctcttggccccggcttgcgtcgacccccgccgggcaccgagcctgcgccgcgcgcggcccgggcgtcggggccgcgcccgaccgggaaaggccgggaagccggttgggcccgatcctcctggcagctagaacgggccgggc

SEQ ID NO: 25099 - DNA, 331 bp, Homo sapiens
  source 1..331: mol_type = other DNA
tcttatacccatttgacaagtggggaaactgaggcttcaagtggcagccatctgctcctctctcaagagaaggaaaaacggctactgtcttcagacgtcgcaaggatcaagaagatttctttcttcatgtcaaaaatttttcatctccttgtaaaaactatcaaacagtactggaaaggggttcctggatccatcttggtcacgtgaccggaccttgtctcagcccgggtttcccaagtgccagggcacgtgtgaaggttgaaccttccgattggctcggcgggaccatttgaacggagtacgggagccgcggcggctcacctacggccgc

SEQ ID NO: 25100 - DNA, 386 bp, Homo sapiens
  source 1..386: mol_type = other DNA
gaggcagggctcctccaaatataaataaataaataaatgaataaataaaattagccaggggaggatcgcctcagccctgagaggtcgaggctgaagtgagcccagcctcggagacggagtgtgactctgagcctgggcaatatagccaggcgcccgtctctaatttttaaaaaacaaggccaggcgcggcggatcacctgaggtcgggagattacccagctactcgggactgggtgagccgagatcgcgccactgcacgcgagacgggggctcctccccctagccccgccattcgccccgcccccgctgcgggcgctggagggcctgaccgctcttcccggcatgcattgttcgggacgaggcgagtcgggcgccaagcgcggggc

SEQ ID NO: 25101 - DNA, 197 bp, Homo sapiens
  source 1..197: mol_type = other DNA
tcaagaaatcaagaccatcctgtcccagctactcgggaggctgacacagccttgtaacagagcgagactccgtcgtggaccacacattactttgttctgccccaaggcttgcgtgaaaatattatatgaagggggtgaaccttaacaaattttgagtctcagccaaaaccccaaagcgcggcgaccctggcgcatgg

SEQ ID NO: 25102 - DNA, 207 bp, Homo sapiens
  source 1..207: mol_type = other DNA
gccacttatagggcctggaacccagcttctgtcttctcttgaaatacaaggagacttttaggaattccaaccgagtcaattcgtctatgattggtttgggctcaacctgaggcttaaattatagaccagaggttgacaaagaatagtgaaaatataatttatatttctcctaaaaggcaagtaatgaggaaattaacttcgctagga

SEQ ID NO: 25103 - DNA, 148 bp, Homo sapiens
  source 1..148: mol_type = other DNA
aggaccaggaaaggtcaacacaggagccggcaggaatgcatccggagtcctcccggggcggggagtgggtggtgggggacggcagttaccagagcccacggccagggtgccacgatgaccgtcacctacacagcccgagtggcgaacg

SEQ ID NO: 25104 - DNA, 304 bp, Homo sapiens
  source 1..304: mol_type = other DNA
tgttggccaggctggtctcgaacacctgggtaatttttaaattttttgaagagaggctggtctccaacttctcccagctactcgggagctgcagtgagccgagattgcgccactgcactccagcctgacagggtggagcacctccgtctcaaaagtcagggcgaggatgggaggtgggaccaccctcggatgcacaaggctgggccaggctgacccctagcggcagggcgggcgcccgaacggtgcccggcgttccgaggcggagcctgggcttgggggcggggcggggcctgcgcctaggggg

SEQ ID NO: 25105 - DNA, 258 bp, Homo sapiens
  source 1..258: mol_type = other DNA
ggaagatccagcagtcctggtgcgcgggaccctcaaggccccctcctggagagcctcagactctggactcagctcccatgagctccaatgggtgctgcgtaccaggtcctggaccagagccccgccgagccacccggcccgtggccgctgtttacaaggacacgcgcttcctgacagtgacgcgagccgcctcctccccttccccacgctcgaggaggggggcgcgggggcccggctccggcgacggccaatcggagc

SEQ ID NO: 25106 - DNA, 473 bp, Homo sapiens
  source 1..473: mol_type = other DNA
ctttaaagcagtatctatttcaatatatccaagttgcagcccgccgaggaaggtccctttgcagccggggagcctttgggcatcgtcatccccgccgcctgaggttaccctttagatgctgcagcctcagctgctcccagctgcctggtagaccagggcaggggtcgccagctgcaggagtagcagaggcgccagcagcagcgcccccggggtccgcgccatgctggactccaacggcccccaacgcgctcccaggcggagtcgtgcgcggagtctgcggcgggcgcattacccacgcgggcaggtgcagtggtcccggccgaaggcaacgcgtctccccccgccgcccgcaggcgcatggacccggccgcacgctcccccgcacctgcgggcgcagtggacccgaccgctccgctcgtccgctccctcccccgcgccgtgcacgtcttggttcgggccgggcataaaaggct

SEQ ID NO: 25107 - DNA, 236 bp, Homo sapiens
  source 1..236: mol_type = other DNA
cctgcaatcccaacactttgggaggccgaggcgggcggatggcgccattgctccaccgaggtctgtgatctccttggggactccaaatccaaaagcctgggtttatggtccaggggaccaccgggccacgcaggcggggccccagagaccgtgcccttcgggagggcgcacggcagcgacgtcggcgtcggctgcgtaagcgtccacggcggcgggagcgccaggggcgtgttctg

SEQ ID NO: 25108 - DNA, 313 bp, Homo sapiens
  source 1..313: mol_type = other DNA
gataatgtcactgcactggtgtttacacctgtaatcccaggatcacctgacagctacttaccattgcactacagcctggttcaaaaaataagtaaataaaataaaaatgtttaatgacttgttcttggaggtcaaggagatgtctcagaggcagtctccctgcactgcccttttagcagctcttggccaggtaaaggtcctgtggcaagaaggtgcttgtcccagctacttgggaggcatgagctgagatcgcgccactgcactccagcctggctaagatggtgcaacttggactgtcaccattccagtttgt

SEQ ID NO: 25109 - DNA, 345 bp, Homo sapiens
  source 1..345: mol_type = other DNA
cataatgtgtgcacacaaacacatcctgctcagcacatgacatttctttgttggtcaaccttcatggtcaaaaatggccccaagtcggccagcctttggtcagctggagtgtggggggaggtcccgcccctcagcagccagtttcctggactggatcctgaggtgtcttagcggcctctagaccccaatccagccaacaggcgggaaggggacagtcttgtctccacagaccgctagctgtccctgcctcggggctttgggccccagtgacagaacctgagccctgccacaccagccttggtcccaaaggtccagctctgggtggcccctaagccgattgtgggc

SEQ ID NO: 25110 - DNA, 162 bp, Homo sapiens
  source 1..162: mol_type = other DNA
agcctggtaggtgctcaataaatgtttgttgcataatgtgtgcacacaaacacatcctgctcagcacatgacatttctttgttggtcaaccttcatggtcaaaaatggccccaagtcggccagcctttggtcagctggagtgtggggggaggtcccgcccct

SEQ ID NO: 25111 - DNA, 391 bp, Homo sapiens
  source 1..391: mol_type = other DNA
gccaagactgggagttcggagggctcggacactctcctctccaactttggcggcgagggagctgaaaagcgctttaactgcccccctctcgtctcctgtgaagacgggtctcctcagtgaaaatgtgagatctctccccgggggatggcttttgagaggaaagtcacctctcagggagggcgtccctgtggaaactatctccccctgggaatgtgtctcaccaagggggcccctgagggcagcttggctcccatgggggcaccaggaggctccgcccccccgcccgccccttccccccgccagcgcgggcagcggtggctgagcccgggctcgggcgcccagacgcagtgacggcgccgggcccgccccacttcgctccgcccccgcctcc

SEQ ID NO: 25112 - DNA, 403 bp, Homo sapiens
  source 1..403: mol_type = other DNA
tgacgccggcctggagggcggggacacaccgtgcaggccccgcctctttcctccaggcctaggctccggagatcgggccatctgggctctgaaagcaaattagttttccaactcatgtctggttacccagacgcctggaaccaagattcaggctggggatggagcctgagtctgggcccattctcggctttatctaaactccagattaccaagcctggggctgagccccaaggaggctcagaagggccagaccccaggcagggccttggggcccctgaacttctccccaccttggaggtaggagctcctgtcccactccgtgcagtggacgcacggctcctgcgcctgcgcagcctcgagaccagcatcccgcccacccacaagctgggctggacttgaggat

SEQ ID NO: 25113 - DNA, 385 bp, Homo sapiens
  source 1..385: mol_type = other DNA
atcaagacctggattttctggccacagagcccagggtgtccagatccgggtaaccggccttggagggtaagcccctggagggcttttaagcaagttcgggtctttggcgtcactgcagagccgctcggccaagtggatcaggatgctgtgtaattccagcgctttgggcgggtggatcacctgaggtgttcaagaccaggctggccacatgttggcatgagcctgtaatcccagctactagcgaaatctcttttgcagtgagccgagattgcgtcactgcactccagcctgatgcaccaacgtatgtgggtgtatccatcgccggacccagagcaagcctgggtgacgccggcctggagggcggggacacaccgtgcaggccccg

SEQ ID NO: 25114 - DNA, 292 bp, Homo sapiens
  source 1..292: mol_type = other DNA
tgcctgtacttgagctcaggagttcagcctgagccacatggtgaaaccgtgtttgcccgtgatcccagctactcgggaggctgaggtgagaggatcggtggatcacgaggtcaggagttcgagaccagcctagcgcctgtaatcccagctactccgtgccattgcactccagcctgggcgccaggctccaggagacgctggagcgccgggcccgtcgtgggcgtggtctgggcagactcagcgttgccttttgcctctccaaaacgcactcgggggaggagtctgtaccctc

SEQ ID NO: 25115 - DNA, 440 bp, Homo sapiens
  source 1..440: mol_type = other DNA
gccctgtctgacaatgtggtttaatttattcataagactaattattgtctaaaatgatttcgttcacttcaaaaggccagaaacttttttttttttctccttgagacaagtgccagtaggtgctcaagacatatttttcaaataatgattcctatttcctgaagaggggcctgtcttaccctgcttggcagcaacggcaggtccacgctgaccttcattttgcccctgccccggaaaagcagcaggtgagcctggggagagacgtggcgggggctggccgccccttctcccgccggggtgggggcgccaggcgagtgcgcgggcggggcctggctcgccggcacgcagcagcgccccctcccggccggctgcagccgcagggccctccccctgcccgctgcggcggctgcagcctccgccccgcgcgcttgctccccgcg

SEQ ID NO: 25116 - DNA, 454 bp, Homo sapiens
  source 1..454: mol_type = other DNA
tccccttccgggcaccagagttcagatcctctagccaggcccagagccagggcactggtctcctgcaggtcaggtactgcctgtggcttgatccaacggtcctatcccacccaggaggagagagggtcacttttcccttgtggcactgaaccagcctccatgcagtcccatgcagtgccacccaagggtccccagtagacaatggtgggccctcctgctgcagggctgagaccctgggaggtcccaactcaccggaggacagagctctagctggcctgggcccccacctgatagcagcctccaacgtctggggtgccaagtcccgccatcagcaagggggacagggggtcccacagcttcttcccagaataccctttctgccttttccaggaaagttaactgagggttggacacagggttagtctttaaccccatcagaggctgcagccaatca

SEQ ID NO: 25117 - DNA, 351 bp, Homo sapiens
  source 1..351: mol_type = other DNA
ctccggccccgcaggcacagcgcactcactgcctcggattctgggacagagtccacctgcggcagacagacagctttctcccgcctttctctgcaagcacagaacactgaccggtctgcgccgccgacgagacccacgtgcgaaggacgtgcaggccgggtccgcggctcagcagccgcacggagacgcctctcagggccatgctctctcagagcgagcggaggggggtgtcagagcggagctcctctcacccacggctggggacagtgcaactgacgatgccttttaaaagggctaaggtagccttgcctgtggaaaagataggctagcaaaccgattggccagctgggt

SEQ ID NO: 25118 - DNA, 178 bp, Homo sapiens
  source 1..178: mol_type = other DNA
tctattaaatataagaaagagccaagattgcgctactgcactccagccttcacaagtatctacatgtgcttcctgggacagctgtcctgggttcaggaggacgccaacccagctggccaatcggtttgctagcctatcttttccacaggcaaggctaccttagcccttttaaaaggca

SEQ ID NO: 25119 - DNA, 571 bp, Homo sapiens
  source 1..571: mol_type = other DNA
ttgagcccaggagttggggatcagcctgggctcagcacagtgagatctcatttctacaggaaaaaaaaatataattatgtgtgtgtgtgtgtgtgtgtgtgtgtgtatatatacatacaatcttttttttttgctggagtgcagtggcatgatctcagctcactgccccagcctcccgagtagctgggactataggcgcgaactcatgacctcaggtgatccacccgcctagaaaaatatttttaaattagaagggcctggtgaatgacactgctactcgtgagctgttctcaaaaaaaaaaaaaaattgttatggagtatattttctctgagatccgtataacctgggcgccccgtggaacccaggagcctcacaggggcacacaagcgcacccagagcgcgccgtcctgctcccaaggggcgccgactgcgcgcgcagcccgcggaccgcgaaactgctgcttaacggtcggccccgcccagttggccgcgcaagttctcaaagagggcggggccgggacaacacactcgtccgcgggagcgcagctggccaggggcggggtcggcgca

SEQ ID NO: 25120 - DNA, 364 bp, Homo sapiens
  source 1..364: mol_type = other DNA
ggcgcgcacctgcagttccagctactcaggagcctaaggttggaggatccttagagcctgggaagtcaaggctgcagtaagccataattgcaccactgcactccagcgatgttttgcactgtgtttctataggacagtgctgtatctacatcataaagtgaagtactcagttctgggctaagtactaccacatacgaggtagtccacgtgaattccttttccctctataaaaagggacggtacctacccagccttcctttgaaattttaaaagtagctctctggtcaaccagacgccattgatggagccaaagatgacgacacattgggttccggttccggtggctcagctccccccgcccacc

SEQ ID NO: 25121 - DNA, 292 bp, Homo sapiens
  source 1..292: mol_type = other DNA
gagtgcagtggcttgatctcggctcactgcagcctctcatcctctcgagcagctggaattacaggcatgcggttgcccaggctggagtgcaatgatgcaatctcggcggctcaccacaacctctgcatcccagattcaagcgattctgagtctcactctgtcacccaggctggagtgcagtggcacgatcttggcgccagggtggtctcgatctcctgacctcgtgatccgcccaccttggcctctgggcgaggattacaggcgtgatccattctctgcagatgcaggcagc

SEQ ID NO: 25122 - DNA, 396 bp, Homo sapiens
  source 1..396: mol_type = other DNA
aaaagccaggccgtttacccccttcatggagggtagggtaataaccctttaaaaacagagatgccccggtcacagggcagaaggaggagagggctggcattcttcccaccggcccgcgtgactgtagcaccggggtgcagcgaagcgagctctctcccatcccaggcaggggtgggggagcagcaggaaagccttgcccagcccctccacctagagggaatgggagggaggggtcccggtcccgcgtagacagctgcgctcccgccgcgcgccggggttgggttcaggtctggtcacatgacctggcctgaggtgctcgcggcccccaccccaccagtgggcgtcccccccacgcgtggtcgaccatcattggtcggtggaacccagcgttccgag

SEQ ID NO: 25123 - DNA, 449 bp, Homo sapiens
  source 1..449: mol_type = other DNA
ctgggatgcctccaggactggatgtagtgaggctttgaaagttaacatctttaaaaccttcaggatacccagaccagaataaagtggatcacctgaggtagctgcagtgagccgagatcgcgccactgcactccagcctgcagagactgtttgaaagaaaaaattctcatttggaagaggcaaaatgaggtttttacagaagaaatacaaatgtctgtaaccagtacaggtacataaaaactttgttaaaaattccagagtcactttgcagccccgtgacgtcaccgataacgggcgtgtgcgggccgagcaagaagccccgcccacagcgcggagtttagtctgcgcgtgcctcgctcgagaacgcgctcgtgcgcatgcccacaaaggccaaggagggagtgcgcaggtcacgtgcgccggtggtcagcgcgcgcattgcctgcccc

SEQ ID NO: 25124 - DNA, 513 bp, Homo sapiens
  source 1..513: mol_type = other DNA
ttggttggggacacagagccaaaccatatcagtggccctgcctgttcattcaacatgaactgtgtgcacagaagacacatataaaacagtatggtttctgatatgcaaaaaacaaaaatacaatttttaccttagaaaaaaatacacaaatatatatttgtagccaggtgagcgtatatatatatgtatatgtgtgtgtgtgtgtatgcatgtatgtatttatttttatttatctggaatgcaatgtcctgcctcagcctcccgcggagctgggactacaggttctcctctcctcccggaaggcggaggttagcctgggcgacagagcgagactctgtctccgacaaaaatatgtatttttaagtgtcagaaaaaaagtgaaaattaaaaatgactttaatcagtaactgcttaactaaaatttaaagttatacttggaaacgtataaaggacccctcgccctgccctggcccacaccgggcctcgcgctcaggcaccgggcatggacagccc

SEQ ID NO: 25125 - DNA, 295 bp, Homo sapiens
  source 1..295: mol_type = other DNA
tggccaggctggtcttgagacagagtcttgctctgtcatccaggctggatcactgcaacctctgcctcccaggttgaagcaattctcctgcctcagcctccggagtaactgggtggccaggctggtcttgaatcgctctgtcacccagactggagtgcagtggtgcaatctcagctcgctgggtaaagtagcatagaatcaaattaccagattgtttctagtaattactgtcacaagagccatgctcaacagggaagtcttgactcaggtgctcacaggcgccctctggccgctg

SEQ ID NO: 25126 - DNA, 220 bp, Homo sapiens
  source 1..220: mol_type = other DNA
tcctgacctcaggtgatctgcccgcctgagcctgcccacctggagtgcagtgtagcagtggcgtgatctccgctcactgcaagcctcccgagtagctgggactacgggaccaggctggtcttgaattcctgacgtcaggtgatcctccagccactgagcctcacccaaatcccaggactggaaatgcagctgcccagggtcttcagacattgtgtgtctc

SEQ ID NO: 25127 - DNA, 385 bp, Homo sapiens
  source 1..385: mol_type = other DNA
agtggcgtgatctccgctcactgcaagcctcccgagtagctgggactacgggaccaggctggtcttgaattcctgacgtcaggtgatcctccagccactgagcctcacccaaatcccaggactggaaatgcagctgcccagggtcttcagacattgtgtgtctcggcccctggccccagccatgtctctcagcaagttgggaggaggtgtgggaacccagctggtccttggcctcccggcttttggccagtgcctgcttagcggggccctgcctacaggctcagggaggcctgaaccccagtctcctcgacctcagtcctgggctgcagccaatcagacctgggctctgggcccaggggccctgcccccactggtgccagcttct

SEQ ID NO: 25128 - DNA, 258 bp, Homo sapiens
  source 1..258: mol_type = other DNA
gccattggcacccctttttactggcttggcacaagcaaatggatgcgggaatctgcgagctcaaagccgaaagcctttttttttttttttaaactggaagaggatgcacaggggaagaaattgaaaaaaaaattttgttggcttttgtttacgcagccggctcgctttgctccttttcaaaaaaaatattaatttcccccttctgtgcaatgggggggaggagggggaagggtttgagaatccacccaagcccggccc

SEQ ID NO: 25129 - DNA, 388 bp, Homo sapiens
  source 1..388: mol_type = other DNA
taattatttaattttttccagttttatttttgtaaacagaaatcaattattatttaaacttcaaacacaagcaccttatttgtgctaacaagaagtgttttgttcattattactgtgattaacattagtattggtgtcgataacaaagctgaaatcacatatttaggatttaggtctgattggagagggaagcctgatctgtttcctcatgggggcggccaaaaacgaccggtgtcggggaccagaggcggccccgcacgcccccgcgtgtgcgtccacgggcgtctgtgcagacggacactgtgccgggggtgcctctgtctgaaccacacgagggaggaggaggagaaggcggttttccttgtgcccccccttccccgcatgctcc

SEQ ID NO: 25130 - DNA, 560 bp, Homo sapiens
  source 1..560: mol_type = other DNA
gctgtgcccagagcctctccctgtgggaggctccagtagggtcttgagctgccccccatgaaggggccgggtgctcactgttggggcttgggacacctgcccaggctggacacccaaggccagactgttcccctttgggtgccccactcccgggtaggggtggtggaggtgggggcccagggtcacgcggccccaacgggccggaaagggctctccctcacggaggcagcttccctgcccgtgcatccaggcacctccctccccggctgccctggggcccgggtccccagaggcccggggtccctacagtggccctgaggggtggcggaccgagtcctgccagcgccggctgggggcggggccgggaggcccgcgctgctaggtccccgcccgctggggggtcagccaggctccttatcaggcgcggccaggcagcctggcccttatctgcactgggccagcatcctccggccgctgcgccgccaggggtgagagggaaccgggccgccgggggcggggagaaggcgggccggcccgggagccgctcactttccctgggg

SEQ ID NO: 25131 - DNA, 524 bp, Homo sapiens
  source 1..524: mol_type = other DNA
gggctccaccccattcctgggcgggggggggggggggttctgcctgcctgggggctcttgcagttgcccagatacaagtctggtagctgctgctgcctggctgtgcccagagcctctccctgtgggaggctccagtagggtcttgagctgccccccatgaaggggccgggtgctcactgttggggcttgggacacctgcccaggctggacacccaaggccagactgttcccctttgggtgccccactcccgggtaggggtggtggaggtgggggcccagggtcacgcggccccaacgggccggaaagggctctccctcacggaggcagcttccctgcccgtgcatccaggcacctccctccccggctgccctggggcccgggtccccagaggcccggggtccctacagtggccctgaggggtggcggaccgagtcctgccagcgccggctgggggcggggccgggaggcccgcgctgctaggtccccgcccgctggggggtcagccaggctccttatcaggcgc

SEQ ID NO: 25132 - DNA, 366 bp, Homo sapiens
  source 1..366: mol_type = other DNA
caccacaaccagctaattttatgatgagccaccaagcccggcctttatggggtcctgggctccaccccattcctgggcgggggggggggggggttctgcctgcctgggggctcttgcagttgcccagatacaagtctggtagctgctgctgcctggctgtgcccagagcctctccctgtgggaggctccagtagggtcttgagctgccccccatgaaggggccgggtgctcactgttggggcttgggacacctgcccaggctggacacccaaggccagactgttcccctttgggtgccccactcccgggtaggggtggtggaggtgggggcccagggtcacgcggccccaacgggccggaaagggc

SEQ ID NO: 25133 - DNA, 371 bp, Homo sapiens
  source 1..371: mol_type = other DNA
atgcgcttgtaatcccagctactcggcagaagaatcgcttgcacccgggcggtggttgcagtgagccgagatcatgccactgcactccagttctgaacaaatggtaaaaaaaagttctgcccattttgcaaaagcggtaacttagtttcgcagggcgagctgagactggaacccaggtagccgggaccacttcgcttatctgagaaaccacgattctcatttaataggtaagaaatgatgggactgagattcaaacccggtaaatccaactctgagtcattcctgcagggtgctctgaaatagaagaggaccaataagtgttgggtttcttgtgaaatgggactagggacgtgtcctctcccaggggatcc

SEQ ID NO: 25134 - DNA, 222 bp, Homo sapiens
  source 1..222: mol_type = other DNA
gcctgctatgtggcccccctggacttcacgtggacgtcggcagccctggaggctggcgcctccgcccgccaagcctggttcggggggcgggggagggctcagagagccgcattccgggcccggggatgtcctacatatctaccctcgtgcaggcccgccccgagtcggtgcacgtttcccgaattaggacctgggcgccgccatgttggcacagtgggtggc

SEQ ID NO: 25135 - DNA, 370 bp, Homo sapiens
  source 1..370: mol_type = other DNA
cggcagccctggaggctggcgcctccgcccgccaagcctggttcggggggcgggggagggctcagagagccgcattccgggcccggggatgtcctacatatctaccctcgtgcaggcccgccccgagtcggtgcacgtttcccgaattaggacctgggcgccgccatgttggcacagtgggtggcggatcccctgggagaggacacgtccctagtcccatttcacaagaaacccaacacttattggtcctcttctatttcagagcaccctgcaggaatgactcagagttggatttaccgggtttgaatctcagtcccatcatttcttacctattaaatgagaatcgtggtttctcagataagcgaagtgg

SEQ ID NO: 25136 - DNA, 382 bp, Homo sapiens
  source 1..382: mol_type = other DNA
taagttaccgcttttgcaaaatgggcagaacttttttttaccatttgttcagaactggagtgcagtggcatgatctcggctcactgcaaccaccgcccgggtgcaagcgattcttctgccgagtagctgggattacaagcgcatccacccacctcgggtagcagttctcactaaaaaatgttactgtgtagtttaaacgagccacaataaacagcagtcattattgtttttgttttacaggaaactaaagtgaaggggcgcgctcggagctcggctggcctcgcctggagggcggggcccgagggcggtgcgcgggcggggccggggccgctcctccctggcctggctgcggcggcagcgcggcttgcgctcgctcggcgct

SEQ ID NO: 25137 - DNA, 373 bp, Homo sapiens
  source 1..373: mol_type = other DNA
ggcgaccctccgagggggagggcgaccctgagtccgccaaggcgacctcgggagaatgcggcagaactccccggaggagcaggcccgctcctcaccgcgcccccgcagggagaagggaggaccacctctcccccgggaccctgggatgggacgatctcccaggtgccagctcagggagtccatgaaaagcttcaatttacattgcccgtgcctggaagggaaactgaagtttccgacaccgccccctacggtgcggcacgagagggctaaggggcgggggcatgtgcaccggaagctgcctctgcccacaaccaagatggctgaggagagggcggaagtgtccgcacgtcgggcctccgaggcttctctttct

SEQ ID NO: 25138 - DNA, 520 bp, Homo sapiens
  source 1..520: mol_type = other DNA
ccccggctgggacgtccctaggggtccagccctacccgaaggtgggctgccaccgcaatgggcgatatcgatggtctcttccaggtcctcgaggtcccactccgaccgccgcgctttcctgcaggagctcgcaccagcgctggtacagcccgcgggccgtgttcaccgccttctgcacctcgctgcgggcaggggcacggcgggcgcggctgggggcaggcggtcctcccgcctgcctctgcccccgaccaaacgcatgggggactccggagacccctatataccccaccccgacggccttgcccagcccgccgggcacgctggggccggcacccgggcactggctggcttgggtaccaggccgaacccccctcccggcctgggttcgcgggctggttccctcccaaccgaggagaacgcgccgccggaccggggagaaagagaagcctcggaggcccgacgtgcggacacttccgccctctcctcagccatcttggttgtgggcagaggcagcttccgg

SEQ ID NO: 25139 - DNA, 388 bp, Homo sapiens
  source 1..388: mol_type = other DNA
gcctccccgaacgcggagacggaactcggcccccttgtttggggggcggcagccacgtgcgtgcgcgccgggttcgcagccgtgcgagctctgaacccaccctggtacgaatcacgggaacccgtagcccggggcgggtcaccgcctacaagcattagtaaaatcctccggttgtaagcgctgttagcatgattgaaccagggtcttcccctgtgtgaagggaaactgctgcccacgacccactggggcctccagacgggagcatgtgggtaggccgtgagctccacccccggcccccctcccttgggccaaggcgctgatgcatcggcggggagcccacccagaaagctcagcgtggagtcgggggacgctcctcctcgccagggtt

SEQ ID NO: 25140 - DNA, 326 bp, Homo sapiens
  source 1..326: mol_type = other DNA
cctccacgagcctccacgattggtcgcgggccctcatgtgtcctgctgcaatttaaccccgagcgaatgtgcgccttcctccgggagcagaagagggttggtgattcaggaagaaaaaaaatttttttttttttttttaaacctgggaagactccttaggaaccctcagatctttcagcatttttaagagaactccagcaaaacagaagggcacttaattttttttttttttttttttctttatttttaaatatatatatatttttttattttttattttttatccggacctcggaggaatttgaagcttccactgcgtcccgggg

SEQ ID NO: 25141 - DNA, 423 bp, Homo sapiens
  source 1..423: mol_type = other DNA
cagggcacaacctgcacaatcgtacacagtggccctgactatgtctggggcccttgaagtcccagctactcgggaagtgagccgagatcgcaccactgcactccagcctagaaaagaggatccggtatccaaatgtgttttatataaaatgaatcgttttcagtgcactgaggaagttttctatttaaagaaatcctgctgtgaactcttttgtgaagaatgctttcctaatggaattagtcaccactgagtcatttctgcaaacttcaggataaattatagatgtcgctaataaattacaagcttctgtccatcgcttggccacgttctggccccgccccaccccggtcgccctgacaacagcgccggcgtctgggctgagcttcggactcgcagccagcctcccacaggccaccgcgcgcg

SEQ ID NO: 25142 - DNA, 471 bp, Homo sapiens
  source 1..471: mol_type = other DNA
gaaagtctgtcttgttaagcaaatggtttcactcttccctagttaataagatcgtaggaaagcattcctctttctgtctttaggcagataagagaaattcagagaaaacctcgttccaatgaaattttatttacgtacgctgaaatttgaatgttttattttcataagtcgtaaaatagtttttcccccacctaactatttaaaaattgcctgtgcaaataatttttgcagtggcgcgagcaattcttttgcctcagcctcccaagtagctgggactcgctgaccggctgcagcgcgcaggacagcacgcctgggagggcggtgccaggaggcgggcctttgggcggggcattcctggattggcccactccggcgtcgcagaacgcttggcgtatcgtccttcagccaatcagcgtggagctgctgcctcgccccgcctcacgccggcgtcctgggggcgcggagagggcg

SEQ ID NO: 25143 - DNA, 448 bp, Homo sapiens
  source 1..448: mol_type = other DNA
gccagatgcagcaggggctggagcacacaggtgtgagctttttattatacccagcccaggggtggcccatggaaaagccccccgagtcttgctctgtcacccaggctggagtgcagtggcgcgatctcggctcactggcagctggccaggctggtctcgacgactcggccaaaatgctgggattccaggcgtgatttaacaaattctttcccataatgctgccacgccacgtggaatccgcgtcctgggaacccgtggaatccgcgtcctgggaacccgtggaatccgcctcctgggaacccgtggaatccgcctcctgggaacccgtggaatccgcctcctgggaacccgtggaatccgcctcctgggaacccgtggaatccgcctcctgggaacccgtggtccgggggaggctccgcccacggccccgccccgctcccaagtgcgc

SEQ ID NO: 25144 - DNA, 416 bp, Homo sapiens
  source 1..416: mol_type = other DNA
cacacctctagccccagctactcaggctgaggagttcaaggatgcagtgtgctttgattgcactactgcacttcaaatccatgatgaacaaaacaagtatttgtttgagacggggtcggctggagtacagtggtggcctcagcctcccgagtagctgggattacaggagcctggtgacctcgggtgatccgcgccccgcggcctccgaaaactttatttacaaaattatgctgccggtctgcaggatgtagtttaacaatttgattattttggatattaaaatattttttaagtcttgaaaatattgtttactattaccaaagtttttgaaccttcttaaattcaacctagtctgagtttttatgtgtaaagatcataaaacgttgtaagttttctaaaacacataagctctcaaa

SEQ ID NO: 25145 - DNA, 460 bp, Homo sapiens
  source 1..460: mol_type = other DNA
gcctgtgtgaagcccctccctccagactggggtatctgggggcccttccaaggacacttgaggactctccaggggcctctggagaccagcctggccatgagccgagatcgctctactgcactccagcctgggcgacagagcgagtcgtgccactttaaaggggacagctgggtccttggaggggaaagagctgccataggccggtttctcccagccttggggccctctgtccttatcagaaacgagctctgccatcagttgggaataagtcgcttgaattatccgcgttactctttttggaaaaaataaatggccaaagagggtgggcgctgtagaccccgctcccggtgaccgcccacgtgaagccggagcccgtcggtgactgacagacgctctgtttcccgcgccccgcgaggtcccgccccgcgcatgagcgaccagccaggcgcctgcgcgccca

SEQ ID NO: 25146 - DNA, 303 bp, Homo sapiens
  source 1..303: mol_type = other DNA
ggaggttgcagtgagccgagatcacgccactgccctccagcctaggcgacagagtgacagagtgagactctgtctcaatgtcacccccatccacgggtgccaaagccctgggatatgccaggcactgttactgtgggggagtgtggggtggtgagccaaccattacccccccaggtaccaggctgatgcctggatatatgtaattccagtgccgggcagcagacctggtcaggagctcccaggctggcatctgggctgccaggctaagctcaggcctcccggcccaggctggctgaggtgggg

SEQ ID NO: 25147 - DNA, 377 bp, Homo sapiens
  source 1..377: mol_type = other DNA
gcgggcggatcacctgaggtcatggcgcacgcctgtagttgaggtgagaggatcatctgagcccggggtcgaggctgcagtgaaccgtgatcacgccactgcactccagcctgggtgagactctgtctcaacaattatttttattgctatgatctgcataattggcacaacagggccctgccatgattgatgctatcattatcaccaaggcctttgcccacctggaccgggcgcgggcagcccggggctgaggattctcgagccttggtggaccacaggctcccgtcgccccgcccaagggcctggaccgcctgtggcccgcccatagcgcgagtgcgggctttcgcccaaccggcgggccgctgtcccgaaaaagg

SEQ ID NO: 25148 - DNA, 459 bp, Homo sapiens
  source 1..459: mol_type = other DNA
ggggagagctgtccgctgatctggggaaggggtggccagggcacttcaggcaccatctgcagcccccagccccctcacccacggcagagaggcagagcggctctcaccgggtccagaccggccctgagcccagaggaggctgggacagagtcctgacctgcacccggggctcctcctccccggggcagctctggcctctgctgggggccagtcgagtcctccccaaaacttcaccgcggaaggatctgcggggactctgatgggaagagtcctgtctgggaagctccctgtctgatgggagacagccctgtccacatggaggtctcagtctgacggaggaaacagcctggccagccaggcccaggccgacaggggagacacagtccctgcccaaggagcttccaagctaagggcagggagctcccaggctaagggcggagactgtcccagcccagggag

SEQ ID NO: 25149 - DNA, 493 bp, Homo sapiens
  source 1..493: mol_type = other DNA
gtccggccttcgccgctgtcgtcacagaggggctgcgctgcgtcactgcattcctcccctggaagtctggagcggagtcttcctttctcgcctttttaatttggtaagacatgtaggccttgcgtgccgagcatgcgcacggcctccagccagagaaggccggttttacatcggcttccctgccggagtgacgggcccggggaactaatagtttagctgcaaggcctggcgcccaccccgggccccgcccccgcgcgtgacgtaactagggggtaacagttgccccgggggaaacggaggcgccatagccacggtagtcgtggcgaccccccaggcccggcccggggaccccagcacgctccgaaaagcgtttccgcagggtaaccagggcggccccggggtggctggccgggccggggtgggcggcggggccggggcggcggcgactgtctggaccgtgggggagggggccggggcccggctggaacgacac

SEQ ID NO: 25150 - DNA, 554 bp, Homo sapiens
  source 1..554: mol_type = other DNA
gcggaccaagctccctgcagagacctttcccaaggcggccgcaccgcctgcggggcagagatagccgcggtcaccccggcagcggtgaccttttccggctggaggggaccgggaggcgggagaaggcgcggcggccgcgctgtctggccggcttgggcggaggaggatgtcaccccagcgggtgggagctgggatcgaaccccgccgcggcctcccgcttccacccaaccccgacggggccatgggcagtggggaagggggacgcgcgcccagtgacgtcatcgaatcccgagtccggccttcgccgctgtcgtcacagaggggctgcgctgcgtcactgcattcctcccctggaagtctggagcggagtcttcctttctcgcctttttaatttggtaagacatgtaggccttgcgtgccgagcatgcgcacggcctccagccagagaaggccggttttacatcggcttccctgccggagtgacgggcccggggaactaatagtttagctgcaaggcctggcgcccaccccgggccccgcccccgcgcgtgacg

SEQ ID NO: 25151 - DNA, 258 bp, Homo sapiens
  source 1..258: mol_type = other DNA
gattacaggctaaaatgctttgagcagctgagggctgtaccagcctggccagtgcaccattgggactgtacctctagcctgggtgacagagcgagagggcgttcactgctattatgatcttcgaagaggtccaggaccctaacgttgtgatgttgacaataagctgggccatcaccctgtccctagcgaaaggttatcacttcggggccgtgcctgtctcccctctgctggagaagataagggaggcactcagctttc

SEQ ID NO: 25152 - DNA, 433 bp, Homo sapiens
  source 1..433: mol_type = other DNA
acccagctggcaaggaacccctggggttcttcggggcagccgagatgtcctggctggcctttccagcagctgctgcaagtggggcagccgtgggcaccaggaccaatgccccagtcctgccatccactcaactagtgtctggctgggtcacagaggcactgtggggtgcccctgcctggtcaagtggggacccccccactgccagagttccaaggctgtggaccccagagaaggtggcaggtggcccccctaggagagctctggacattcgaatcttcccaaactccaataataaaaattcgaagactttggcagttcggggatgcgcggtacgcggtaccacccctcggaggcagcagccccagccggggactttccgtcgcggggaaggggcgggggaggcggcctgccggggtggttcggcttcccgttg

SEQ ID NO: 25153 - DNA, 721 bp, Homo sapiens
  source 1..721: mol_type = other DNA
caccccacgtccctaggggagggtggcccgcgcaagggcatcgatcctgcccttgaaccgcatgatcctctgggcctccccaggcgcccgggcccaaggtgaccgccttaagctgcgcccacggcgcactgtgtccgggagtgcccttggcagcggacacctcccggatttttccgggaggagaggggaagccgcttctcggccgcggctgggaacctcgctgagcccaagcgggagaccccagcggccagtaaggcggctcctggcgccccctcgggccggagctgtgcgctgcaggagggcccaggggcctgaggagtcgctgcctgccggctggcacgaccaagcgggactgcccgggtcccgaaaatacggcttcgggggacagcggctagtggttcagaaccccagtccgacgcgctgctgggcccagtctccgggacgatgacggggacatggctctgaaaaagtgccaggacccagcacccagaatggccccccagagagcggggccgggtctagggaagccctcttccaagaagtcccgtgccctgaggtgactgggcgcgctagttgatgaaactgagtgccccaccgaggcgcccctgtcccgagggcggggccagggcggggcgggagtcctcctggcaggtgccgggggcggtgcccggccctgcccccgggggccgttcctggaggccagaggcgggtcagagaagcc

SEQ ID NO: 25154 - DNA, 687 bp, Homo sapiens
  source 1..687: mol_type = other DNA
ccggcactccttcggccccgcaggagaaacgagcgtcaaactgccctttgaccccagattcggggtccccaaatctgcggcgcgccccctcggcgtccagcccgggaccgagagggcgctctagggaggcgctggggctggcgcgccaggaggccgagcggcggcgggggcggccctggcagggggagtagaagggggagagggtgcgcgccccccttcccgcatcctcagcgccgggccaggcgcgcctgagggacgcgggggcggcggcagcaggagggtccccgcagcaccctgcgagcgcggcagccccggcccgcgggcggcgagttcccggtaagtgcggtcccgagagcggagcgcgctgggggctgggcgccggggacgtctgggtcccgcgcccaatggctggagggcggccgagcgccgcccgcccgccctgcccgccccctctcccgcccccgccccgggccaactccgcggcgcctccttaaaaagcgcgcgggagttgtgggggcgggcggggggcccgggctccaccttaaaagcgggcgcgagtgtcccgggcgcagggcgcgcgtgcggcggcggcggcggcggggaggggccggccgcgccgcgctcccctcctccccctcgcatccccggccccgcgcgcgcccagcagaagcgggtctgtgtgtgcgt

SEQ ID NO: 25155 - DNA, 613 bp, Homo sapiens
  source 1..613: mol_type = other DNA
ccgaactggaactcccattcttgaaacctcccaagagccctcaagggggcgagagagggatccaaacccctcgggggcgagagcgggatccgaacccctcgggggcgagagcgggatccgaacccctcgggggcgagagcgggatccgaacccctcgggggcgaaagcgggatccgaacccggccggattcccgaggtctgagcgcgcctcgtgaccgccactccgaacgttcgcaacgttcacaacggactcccgcgccgctggacctcaagggtcaggagccccgcggtggcgctcgagcttctctccagcgaatccccagcgagcgccgcgcgccaccgctcggcgggtggcggcgctgcgcgctgcgggatgcatctcccggaaaagcgaggcgaggggcgggccacgccggtgcgggaaccctcaggattggccagaaggaggccggcgctccttgacatccaagtcggagacgctggggtcgccctcctcacacgctgcggagagggagctccgctgattggtccgaggagtctgggcgcgcgccgatcggcgctccaggactggctgagggggtgcgcgcgccgccagggagcgttggcgcggcgc

SEQ ID NO: 25156 - DNA, 567 bp, Homo sapiens
  source 1..567: mol_type = other DNA
tcgagatcgcgccattgcactccagcctagtggcttccaaaaaatgttaattttacacctaattttggtgggcagcactgatcgcccgtgggggcagagactctgagacctggagtctcccaggccgggggcgacggcccagacgcatgaatcacacggcccccgttgaatggggaggcgctgcctcgggcgctgagtagcagagcccggactctgaacactggtctgcccccgaactggaactcccattcttgaaacctcccaagagccctcaagggggcgagagagggatccaaacccctcgggggcgagagcgggatccgaacccctcgggggcgagagcgggatccgaacccctcgggggcgagagcgggatccgaacccctcgggggcgaaagcgggatccgaacccggccggattcccgaggtctgagcgcgcctcgtgaccgccactccgaacgttcgcaacgttcacaacggactcccgcgccgctggacctcaagggtcaggagccccgcggtggcgctcgagcttctctccagcgaatccccagcgagcgccgcgcg

SEQ ID NO: 25157 - DNA, 768 bp, Homo sapiens
  source 1..768: mol_type = other DNA
gatcacccacccacacacccccagggggttggaaagggaatttcggaccccagcgtgcaggccgatcaggtcctggcttgaagtccttgtaaccagggtttagctgaaattccggcactccttcggccccgcaggagaaacgagcgtcaaactgccctttgaccccagattcggggtccccaaatctgcggcgcgccccctcggcgtccagcccgggaccgagagggcgctctagggaggcgctggggctggcgcgccaggaggccgagcggcggcgggggcggccctggcagggggagtagaagggggagagggtgcgcgccccccttcccgcatcctcagcgccgggccaggcgcgcctgagggacgcgggggcggcggcagcaggagggtccccgcagcaccctgcgagcgcggcagccccggcccgcgggcggcgagttcccggtaagtgcggtcccgagagcggagcgcgctgggggctgggcgccggggacgtctgggtcccgcgcccaatggctggagggcggccgagcgccgcccgcccgccctgcccgccccctctcccgcccccgccccgggccaactccgcggcgcctccttaaaaagcgcgcgggagttgtgggggcgggcggggggcccgggctccaccttaaaagcgggcgcgagtgtcccgggcgcagggcgcgcgtgcggcggcggcggcggcggggaggggccggccgcgccgcgctcccctcctccccctcgcatccccggccccgcgcg

SEQ ID NO: 25158 - DNA, 728 bp, Homo sapiens
  source 1..728: mol_type = other DNA
ggaaggggcaggttcccttcgcattgccccagggaatctgcctggctgtaccccagattcctcatctgtgctgggtgccagctcttactactggcaggagcccagggctagggcccagcaaaggggtggacactgagcgccccttcccagccgcccggcattcctgagtgcggctgggaaaacccaggaggccccgcggcctggcccccaagcaggcctggcctcggccgcccagcgccaggccttatgaatgacgccggcggcggccgggcgacctctgacccgcgcgccggccgcgcccctcccccgctggcaggtggacagcggctgcgccgggcaggccgcggcgccaactccggctggccgacagccgctgccgcactgagcgggggcgggggactgcggcgcgcgcggggccggccgggcgcccgccggggccgcctcctgagcctcggagcgctgcgcggccgccagccagcctccgccgccccgccccgccggcccgggcccgcagactgcgtctccgccccgccctctcacccccggattgactctgctggggggcttggcggacccggcacctccgccaatcggcggcctcgcagggcggaccccgggcccagtccagcgtctcggccaatcggacgcgtctgcccgcccagctgcggcctcgcgagcgagtgaatggcccggcgctgagccgtcagtcagggcggcctaggccaatg

SEQ ID NO: 25159 - DNA, 782 bp, Homo sapiens
  source 1..782: mol_type = other DNA
gctttccctctccctgcttttccagggaggaggcgagaggaggcgaacagcccgggttttcgggccggctcctggggcgctcaagcgggttgcggcggccagtcccgggcggcgactccgggccgggttttgcgcgcgcccaccgcccccctcccggagcgggtgcgccggggagcggggcgagcaggcggcttgtcattgctggtgcccggcgccggctcggtccgcgcgtcctgcggtgcccacgggcccggcccggcgccccccctccggccgcaccgggggcgcgacgccgcggcacccgcctccagccgcgccgcccccctccgccagctccgcgccgcccgcccccaacccgagctccccgcggccactgcggggagcccgagccgtcggcgcgggagctgtcggcgctgcggtgcccccgccccgccgtctgccgaggaggccccggctgatggggccgcgcgggccccggagcggcgccgccgggcggcgggggcctgcaggggcgccccggctgccccgttaacccctcgtccaccgccggcgtcggagggggctgggaagtcgcctgggcgcacacgtgccgcctccgtcggggccgcggagctgcgggggagatgcgggccgctgccggcgccgcctcggggcgctccgcctcgccccagcccccggcgctctgacgccgcccccgccccaccgcctccctccccgggaggggcgcagacccgatcgcccccagtcccgagcctccgccgccgcgagggggccgcctttgg

SEQ ID NO: 25160 - DNA, 387 bp, Homo sapiens
  source 1..387: mol_type = other DNA
gtgtcaggctgagtctcgaactcccgacctcaggtgatccacccataaaaaattatgaggtagctcaagagacaagctaatcatgtgatatcagattctctgttgatttctgaaattccttctcttcttggcacctgcctggcatcggaagagggccccttctccctcccccagctcgggtgattctccccgcctcagcctcctgagtagtagtagctgggactacagaacaacaggctggtgtcaaactccgatcacaggtgcgatgcccgacctgcagctgggacgcaggctctgccaactctggcatgccaaagctctgggcacactttgcgcctgcccagggaagagccaagtggccccaggcaagaccgccccgcccggctg

SEQ ID NO: 25161 - DNA, 329 bp, Homo sapiens
  source 1..329: mol_type = other DNA
tatattggctacattatagtatagccacacgcctggccactctctacaaattagccaggtgtggtggcgggcgccagcagtcccagctactcaggaggctgaggcagggtggtgagcagagatcgcgccactgcactccagcctaggtgacagagccagactccgtctcaaaaaaacagctttgcactgtgctggtttcagccagcgcagacgccactcgatcacgagaccgcgcgctgtcggagccagtctgtcggctcactggggcgcgccaacgcgaggcgtaaggcacgcgcctctcttgaatgaaaaggcagcggcccagtcag

SEQ ID NO: 25162 - DNA, 602 bp, Homo sapiens
  source 1..602: mol_type = other DNA
gtcccggcgctgggggtaagaccctgagttcagggatgtggcggcagcaaccccctacttctcatcttaggacgtgtgtcacaggtgtcactcagcccatcactggggagagtccccaggtcgccaggcctcctggttcccctcgctgtggccctagccggggcttaagcccctgtataaataggcggatcccctggccaggctgggcctgacccaagctggtctacccgaggcccccaccccgacatccacgaaggctttggcagggcagggggggcattgctggccccacaagcctctctagctccaaagccccagggaggggggcagtggcaccccctgcagctgccccagcccgcccctttattaatgaggcaagaggcccgatcctgggggggaagggggctgctcccgccctgctgggaggagggggtcacatggggccagaccaactccagggagcctcactcctcgtggagggagccgctggggcccagagtggcccccgcccattgccaggagcagagaggggggtctctgccactccaggcccccagcgggcgtgcgcggggtggagcggcccctggaggccagcaagggcg

SEQ ID NO: 25163 - DNA, 330 bp, Homo sapiens
  source 1..330: mol_type = other DNA
tccttctcttcttggcacctgcctggcatcggaagagggccccttctccctcccccagctcgggtgattctccccgcctcagcctcctgagtagtagtagctgggactacagaacaacaggctggtgtcaaactccgatcacaggtgcgatgcccgacctgcagctgggacgcaggctctgccaactctggcatgccaaagctctgggcacactttgcgcctgcccagggaagagccaagtggccccaggcaagaccgccccgcccggctgcagctgcaccgccagttccggggagggccctgggccagcggctgtccgccccccctcct

SEQ ID NO: 25164 - DNA, 397 bp, Homo sapiens
  source 1..397: mol_type = other DNA
ttaataaaggcctgtgtaccgaggcgggcggatcacctgagatcaggagttcgaggccagcctgtaatcccagctactcagtgacagcagctaacacttataatgcagatccgcccagagcttgtctccaggtaacggggtcccgggaggcccaaaggcctccgccgctctcggcttgaacgcgtggaaccgttctcctcgggttcccgcgcgctccaatgggggacccctcggcagcgtgcggtcgtctcgggacccgctcgggagaccgagggggcggacgggcgggaccccgcagccccgggggcctctgggaacccgtcccccctcggccccgccccctccccgggcgccgacctccggggtcacgtgaccaggcccggcggccgctggggcc

SEQ ID NO: 25165 - DNA, 171 bp, Homo sapiens
  source 1..171: mol_type = other DNA
ccgagtagctgggcctcgtgatccacccgccttggactcccaaagtgctgggattacaggcagtgcaatggcactgtctcagctcacctcaaggccaggctggtcttgtactgtaagttctggagaactaatccgggctcttgagagcaagcactcattgcttccagagct

SEQ ID NO: 25166 - DNA, 341 bp, Homo sapiens
  source 1..341: mol_type = other DNA
atattgcagtatcctaaagcgtgctgtcattaaatatttgatgagtgagtgaacgaatgaatgaatgaatgcctttgtccattgtacggggactgccattgacccccacccgggggcgattggccggggcccagctgcagctcccccccctcctcagccctccggtggtacagccagccgcggcttaggcggggcggaacggtccactgcttcgcggcgagcgaggcggagggatccctctggaatgtttccgtcgggtccacccgaagcggagcaccgagaggcagccgctgattggccggccgcgggcgtcggccccgccccccaggcgccgctgcggg

SEQ ID NO: 25167 - DNA, 468 bp, Homo sapiens
  source 1..468: mol_type = other DNA
aggctggagtgcaacggccgtgagtagcgctgggatggcctgtttgttaatcttaaatagaaacggagtctccttatgttgcctaaggctcaagagatcctcctgtcttggcctcaggatcgtccggcgtcaccgggcgggagcccaccgcaggccccacgacccggggaaaggactgggtagtcccaggccccaccccttcctggaacatgtgggtcccgacctactgacccaggcggagggcgggacgcagaaaggtgggcggggcctcctccgacctgtgcgcgcgcgccgcggggaggtgttgccgagggcggagcgggagggggcgtggccccgcgcgggcggccgttgacggcgaggccccgccccggatgtcgcgtgtcgctgaaagggcggcggcgattggccggcgccgcgggggcgggcggggcggctggcgggctctggaagcttccgccggacggg

SEQ ID NO: 25168 - DNA, 214 bp, Homo sapiens
  source 1..214: mol_type = other DNA
ggctccagcaagccaccccagaatggggctgggcgggttcccaaatggggctgctgttcccggtgtaccccgggggccgcccacctcagaagattggtcaatcccctggtgctagtcctagtcttggttcggaccggccccaaggagcaggggcgaacgtgggcgcctcgtgccctgattggccgacggggcgcgcgcggcctggaggggcggg

SEQ ID NO: 25169 - DNA, 575 bp, Homo sapiens
  source 1..575: mol_type = other DNA
agggcccatcctggccctgccttgtagtccctgggggaccccaggcatgtcacctctctctaggcctcagaagggggcaggtaggaagcagactacctcccaggactgtgacggtcccccatggggtacactaggtgacccctgacagatgggaggcaccccatgggataggaggcaccccactcccctgctggcctggcagtcaccacagcatgggggcctatttccccagccatgacacactcgcccccacttcctggacaggagggtgggaatgggcccagcagccaggaaatcctggcccacggggcctcctgagtccctgctgtcaactccaggcactgcctggccttgtggcctctaggggaagcagcagggccctgggcgggcacggggcctgccctgtggctgcaggtataatagttcctgggccccaggcaggcagtgcccacatgcttccaagcccgtgtggcctgtaggaaggcagcctagcgtccacagggatctccctgtccagccagctgctagtgggaggggtgaaatcgtaccctgctccccccaacctgggccagggc

SEQ ID NO: 25170 - DNA, 553 bp, Homo sapiens
  source 1..553: mol_type = other DNA
gggtgggtcagatccccgggggctgcctccctccagcctggcctgggggctcagggagggctgggccagactcctacctcaggggctggcacaggcctggctcttggacgcaggaagcgccgggctttaggctgactcagtggaaagcctgccccaggggagacctcatcagcccaagctggaggcggttgcctagtctcgcggattctcaaaatagctgggatttctccaagcccagtgaactccctaggcctgagctgcgggctggggcctgcacggcccgctggcctctcactctcctctagccactggctctgtgcagggcgggggctggggaggtgaccactcaaaagctgctttcagggcagcctggctccccggggagactcccaagcccccctcagagaaggtctgtggcatggctcactcgggttacatctggcacagaagtcggcagtgccagggccggcacgggctcctttccagcgcttgcccggcccagggctgcttcccgtggggaggtcggtggtgggggctgacggccggcagctgg

SEQ ID NO: 25171 - DNA, 485 bp, Homo sapiens
  source 1..485: mol_type = other DNA
agatattaatatattttaaaattgtataaagattgcatatatatatataatttatttgaaatttcagctttaaataattgttttgatccctggagcccaagagttcaaggttgctgtgccactgtgctccagcctgggcgtatctcaaaaaataataatataataataactgtatttatgaataacttttatttaaattaaatttatcaaaatctttcttctgtaatcccagcaattcttaaagtgactttatgcaaaattacatacattaacgatataatagatatcgtgccttttttaagagaaatttgaatgttttcaaagaaaaaactttttggaaaatgatatgaaaaataattttaatatgtgctttgagggaggcctcagtccaggctcagggaagtcccctctcggcacctgtcccgcctccgcctgtccgcgaggtgacgccaggcggaccggagcgatcctctggcaggacccgg

SEQ ID NO: 25172 - DNA, 337 bp, Homo sapiens
  source 1..337: mol_type = other DNA
ctcgctctgtcacccaggctggagtgcagtggtgcgatctcggctccgagtagctgggaccacaatgcctggcctgtaaagccatttaaggcccacctaggtcaagacccttaattaattaattaatatttaatgttttttaaaaaattaatttatttatttattgagacagagtctcactctgtcactcaggctggagtggcgatcagcctcctgagtagctgggattacaggcgcctgccactgctcaccatgttggccaacctcacaccaggccagttgtcattattccttctgtgcgtgaataaaatgaatttgcatgtatttgactttgaaa

SEQ ID NO: 25173 - DNA, 380 bp, Homo sapiens
  source 1..380: mol_type = other DNA
acaacaacactgcttcagtaggaagtctggtgttttaagtaatgaagagcttcagaagagttttaaggtggctcacagcccagaaattcaagacaagcctgggctacaaagcgaggccctgtctctctagtcctaacgattcagaggactgaggttgtgccacggcactccagccccacataaataaataaataaatatttgctggaggaagggtagatttactaatgtattaccttctatgagactttgggactcttaacttcttatggctcagcaatcataaccagtaaagatttattttggccccaaaggcacaaatctttaggcttttctgatagcaatttcatgagtcagctgacctaagatacatacttcaatt

SEQ ID NO: 25174 - DNA, 412 bp, Homo sapiens
  source 1..412: mol_type = other DNA
cctcagcctactcagggtgaagctgacgatgaagacgtttatttatgatctttacgatcacttccacgtaacgaagagtaaatatattttctcttcttcatgtcttttctctgagcttagtttattttaagaatatggcatataatatacaaaatatgtgttaactaactttatgttattggtaaagcttctggttaacagtagtctattaaaaatatacaaaaacaatcttaagtatgggtatatttttgtaggggattggggtcgggtgtgcgggtgtgccccgggacccccccgggtaagaatactagaatttctccttggaggctaaagaagagtccgccgcctaaggctaccctggccacaacagcctgagccacagccacttccgttcccggcggccccgagaccg

SEQ ID NO: 25175 - DNA, 405 bp, Homo sapiens
  source 1..405: mol_type = other DNA
ctttggatgaacatggcacatgtatctagaacttaaagtctaaaaaatttaattaattaattaattaattaatttaaaaagaaagaaagaaaccggctagtgctgggatcacaggcgtgagcctcctcagtttcctcatctgagcaggggaagatactgccagctgggacgcaggctctgccaactctggcatgccaaagctctgggcacagggtgagccctagtgggagcccagagctacaaggcccctgcgtgcctgcccagggaagagccaagtggccccaggcgagaccgccccgcccggctgccacaccttatggtggaaactccagcagagggattcagctgcaccgccagttccggggagggccctgggccagcggctgtccgccccccctccttgtc

SEQ ID NO: 25176 - DNA, 565 bp, Homo sapiens
  source 1..565: mol_type = other DNA
attattcccaggacaatagttctcgacttcagtcacacttctgcatcttgaatttactcatgtaacaaggtccttgaattctggctggatacagacacctgctaagcctcagggtcacggaggcgctaaagacatgttgcccagtggagactttcccctgggctcatcgcagggactccagggctgggctgccggcctgtggatctgagtctcagctgggtgagtcacttgtgcctcagtgggaatgacaacatcattgcagatgttttaaggagtaaatgagttaatatagattaaaaactggtacaaattaagtgctccataaataatagcattttcttggcaggatagcgagatctcgtcttcccagctcctcaggaggctgaggcaggaggccttgagccctgaagtttgaggctgcagtgagctgtgatggtgaccctgcactccagcctgggtgacagagtaagatctcttaaaaatatatatagcgttttaaaaaatgattacgtacctctaatcatatgattaacagtgcccaggggcctctgaaatataagtttcc

SEQ ID NO: 25177 - DNA, 312 bp, Homo sapiens
  source 1..312: mol_type = other DNA
ttgtgaaaagcctccaggctggacactagcctccggttgtacaaaggcccactggggcagcccccattctcaggaatgattctggagacttgactgccaagacctgtcctttgctctgtcactcaggctggagtgcagtggtgcagtcacagctcactgcagcccaagcgtcctcagatcatagatcactgtaaccttgaactcttgggctcaagtgatttctgagagtcctcaggaagcgctcaaccatgagcagccatggcaacagcctgttcctgcgggagagcggccagcggctgggccgggtgggct

SEQ ID NO: 25178 - DNA, 462 bp, Homo sapiens
  source 1..462: mol_type = other DNA
tcacatttcaagtcaaacattttttaaaactagtattattattaattgacaatcatgatggtatatacttataagtgctgagaaaaattgatagtaagacattctcacactgtagcattttacagttggcaactcgtgcctggctaatttttaatttttaaaaaagagacagggtctggctatgttgcccaggctggccatgaactcctgggctcccaaagtgttgggattgcaggcatgagccactgcgtctggcccacagatgctaagtcaaatggcccaagagtaaacattttgagctttgtggcaacattgtagcttgaaagcagctccaataaaactttatttacaaaaacaattgtcaataccgtattatgtcttgaaccggacaaaactctagcctcgggagttttcctgactgttcagatctataatatcccagagggattccctgtgtagtct

SEQ ID NO: 25179 - DNA, 537 bp, Homo sapiens
  source 1..537: mol_type = other DNA
caggctggagagcagtggtgcgatctcggctcactggacctgatgctcagatctgaagaaaagtcgagtgcacctttaataatattaatttcgcgctggcacggagcattggcccaagggcacacagcagccaagtggccggagaagggggcagcggagccctctccctggctgccgcgccttccccaggcctccgccgaggctgctggagcgggtcccgcggtgccagggcctgttccccgcgctccgccagggatgctggggcctccgagggctccggaggcggtttagggggcgggggcgcggaggcgcggctccgagcagggggcgggggctggatgccggagaggccactcacccccgcccacccccccttctcccacacggctgcggagcctgggctgggcgcgggggaggcggagggcatcgcggaggggatcccgccccctcccccggccgctcggtgcccccacacccacgtgagcgcagggccggcccggatccctcccgcagcatagcgcgtcccggctccgcgcc

SEQ ID NO: 25180 - DNA, 457 bp, Homo sapiens
  source 1..457: mol_type = other DNA
tgatatatactttataggagtgtgtagattaaatataagtattaataaacaataataaaaaacattgaacgtgcactgactttttttttttttttttctgtcacccaggctggagagcagtggtgcgatctcggctcactggacctgatgctcagatctgaagaaaagtcgagtgcacctttaataatattaatttcgcgctggcacggagcattggcccaagggcacacagcagccaagtggccggagaagggggcagcggagccctctccctggctgccgcgccttccccaggcctccgccgaggctgctggagcgggtcccgcggtgccagggcctgttccccgcgctccgccagggatgctggggcctccgagggctccggaggcggtttagggggcgggggcgcggaggcgcggctccgagcagggggcgggggctggatgccggagaggcc

SEQ ID NO: 25181 - DNA, 179 bp, Homo sapiens
  source 1..179: mol_type = other DNA
cccaaatccataaaaataaattttttttaaaggctcttaattctgccaggcgtggtggctcacgcctggaccagtgatctctgaggtgaagattgcagtgagcccagctcgcaccactgcactccagcccagacggcttcggacaccctgaacctggtgagaagcctggcccttcttcc

SEQ ID NO: 25182 - DNA, 440 bp, Homo sapiens
  source 1..440: mol_type = other DNA
cagtgctgggctcaggaccgctcctagaagttccacttagagtgcaggctcttgagtctggaatgaaaattccagtttgtgaccctgggcaagctgcacagcctctctgtggctcaggtgccttgaggatatactatgcagccaccatactatagggctttgctggagtgcagtggcttgatctcagctcactgcaacctccctcagcctccctagtagctgggattacaggtgcccgggattacaggcctacaaccaccatttgaagtgggtgctgctggaatttaaatcccagccatctggcacccaaatccacatacagtaggtgcctaatacatgataattattgttatttttaattataattctcctggggctgtgtctgctctccgaggtcccagccagcatccaatcagctggctggggcgggggacgctggg

SEQ ID NO: 25183 - DNA, 249 bp, Homo sapiens
  source 1..249: mol_type = other DNA
tagtggcgcttttaagatcaactataagcctttggtttcactattaacataagaaataaaatgaaaatcatcatgatgcatcagttgctgcagcctatgccatcatttttattattattattattttagtgacaggtctagactcttgaagactcgatgactgcctaggccacctttgccagagggagtcccctcagacaccacagctgtgtgctgtcagaggtttcttgagtgacagaaaactcaccg

SEQ ID NO: 25184 - DNA, 239 bp, Homo sapiens
  source 1..239: mol_type = other DNA
ggattacaggaaatgacactacggtcctggatgccatcacccagagtcccatccagggagggtgcgggcctgcgccacgatcgtcacgtcccatcgaagctggagcggatccgggcacccggagcccccattctcgcccgctcgggccgcgggacaagcattcccggaatgtcttcctggcgcggggcggggggcgggcggggaggcccgggcggggcggggagggcgcggggcggcgc

SEQ ID NO: 25185 - DNA, 516 bp, Homo sapiens
  source 1..516: mol_type = other DNA
ttgattcctggatccagtccagggtactatattgaatttagttgtcagtagaatgtgactcagtaatttcctttgcttactactatacctattatacaaaaaatatacacatatatatatatacatgcacaaatatttatttatagtgtggaaaatatacataacataaaatttaccattttttaagtattattattattttgtggtgggcccccaaaggtctgggctcctgaagccgcagaggcaaggctctttcgggtggccccggagcggggctccgactgtgcgcatgcgcatcgggccggactacggggcgccgctgagccaagtgggccacccgggcacggccacgctcccgggtcacgtgacacggaggggcagcgccatatcctggaacatcctgatgcgatgtgacctcgacccagcctggcccggggtcggggatcaggctcgggcccgtgcgcgtggagggtcgcgcccgctaacccgggggcgtgacctcgtgcctcttggtga

SEQ ID NO: 25186 - DNA, 521 bp, Homo sapiens
  source 1..521: mol_type = other DNA
agaaagaatttacattttttttttcttttttagctttacagaaaagctgcaaagatagcaagataatttttgtctactcttatataaccataatacatttactgaaacaaaaagattaaggttcattctaacaccaaactatttgtcctttttttgattcctggatccagtccagggtactatattgaatttagttgtcagtagaatgtgactcagtaatttcctttgcttactactatacctattatacaaaaaatatacacatatatatatatacatgcacaaatatttatttatagtgtggaaaatatacataacataaaatttaccattttttaagtattattattattttgtggtgggcccccaaaggtctgggctcctgaagccgcagaggcaaggctctttcgggtggccccggagcggggctccgactgtgcgcatgcgcatcgggccggactacggggcgccgctgagccaagtgggccacccgggcacggccacgctcccgggtcacgtga

SEQ ID NO: 25187 - DNA, 250 bp, Homo sapiens
  source 1..250: mol_type = other DNA
ccgaagggagggtcgcgcgcccctgggtgggtagcaccaggcggcggccgtcggccgggcctcccgaagcctcctccagccctgaagatcctggagtacagtggcgcgatctcagctcactgcaccaagtagctgggatggtctcgagctcttgatctcaggtgatccgcccgggattaggcgtgagccaccgcacccggcccggatcctgggccccgccccggccctaagccccgcacaggacctgcta

SEQ ID NO: 25188 - DNA, 282 bp, Homo sapiens
  source 1..282: mol_type = other DNA
ccaagaagagtttgtgtgtgcatgtgtgaacacacacacatgcatgtgactcctagtacgtgtctgaggtctgaggctgcagcgcagtggtattggccaggctggtctccaccgctccatgagcctctcaggacggttgggtgtgcccgccactccctgggtttccgagggtccgcgcgtcccaggctgtgcggggtgggcagggaccccgggaggccgggcggggggcgggggcgcgctgggccggccccggggcggggcgagccttcgagggctgggggc

SEQ ID NO: 25189 - DNA, 388 bp, Homo sapiens
  source 1..388: mol_type = other DNA
gctggggatggtctcgatctcctgacctcgtgatcgcgcctggccagaagctggcttcttgcagggccgcaaggctctgtgactctaggccccgggtcctcctcgggggaaccaggcctgccccctaggaatcagggcccccgctctcggagcctgggcctcaactcagattggctcccgggccaggacctgtcgcttgaacatcagtggccgccgccgtccaatcacagacgtacaggggcgggctggcgggcctgttgggccagcaggaggacggcgccgggccgaggccgctggacccgccgttccgaagggagggtcgcgcgcccctgggtgggtagcaccaggcggcggccgtcggccgggcctcccgaagcctcctccagcc

SEQ ID NO: 25190 - DNA, 411 bp, Homo sapiens
  source 1..411: mol_type = other DNA
gaaggggaggtgtagccacagatcgctgccttaagatgtatgaaatgacttcatcctcgaatttcaggttcatgatctccctaaaatgttcaagggcaaaataggaggaagaagctggctgcttttttttttttgtagctgggactacaggcatggtctcgatctcctgacctcgtgatcgcgcctggccagaagctggcttcttgcagggccgcaaggctctgtgactctaggccccgggtcctcctcgggggaaccaggcctgccccctaggaatcagggcccccgctctcggagcctgggcctcaactcagattggctcccgggccaggacctgtcgcttgaacatcagtggccgccgccgtccaatcacagacgtacaggggcgggctggcgggcctgttgggccag

SEQ ID NO: 25191 - DNA, 207 bp, Homo sapiens
  source 1..207: mol_type = other DNA
ctactgggccagctgcagtgagctatgactgcactactgcactccagcctggggtgtccctttttttaaaaaggtggggaaaggtgctacctccctgcccaggggcagccaaggaggatccgcctcggccttgctcgcagagctcgttcgcgctgggcgcgggggcggggcgcgcacaccgggcggcggcggcgcggggccgcgcgc

SEQ ID NO: 25192 - DNA, 661 bp, Homo sapiens
  source 1..661: mol_type = other DNA
cagagctcgttcgcgctgggcgcgggggcggggcgcgcacaccgggcggcggcggcgcggggccgcgcgcgcagcgtgcgcggtgacgtcagtgcgctggcggcggcggcggcggcggcggcggcggctgggctgtttgttctggtctcccgcagccgaggagccgaagcagtggcggcggcagcggctgcggcggctgccggcggtgcccgcgggcgagcgcggcctgtgagctcggcagagcggcgggcgggccccggcgccgcgcaggcagctcggggagggggcggcggcagcgggcggacggccggcgggggcggcgtgcggcctagcgtcggggcggcggacgacactgggcggctggcggaggctcgcggcgcggtccgcgtaacctgcattgcgtaatggggccggggcgccgccacctacgccatccgcgcggcgcgggggcggggaggccggggctacgcgggctcgggcctgcgggcctcccgcgccgttcgttccgggccggggcggcctgcgccgttggtgtcggggcggcggggtcgctcgcggctccgtcggacccgggcttgggctggccggcggggcgcgggtggggggcgcgggcgccgcggcggggccggcggtcgggggcgggcggggggcgggccgaggc

SEQ ID NO: 25193 - DNA, 546 bp, Homo sapiens
  source 1..546: mol_type = other DNA
gctggggggcactcagagcagcctctccagctccttctgccctgcccgcagctcatgatggagcagtccaagaagtcctccctcatgggctcatcagcaagaagctggagcgctacctgaaggtgaggcactggtccgggcctgccctgtccccagctttcggagggcgcagagggcgtgccggcgcagcctcccgtgcccccagagccagcccccggggccgtgtcgccgccaccgccgccgcccccagaggaggaggaggagggcgccgtgcccttgctgggaggggcgctgcaacgccagatccgcggcatcccgggcctcgacgtggaggacgacgaggagggcggcgggggcgccccgtgacccgagctcggggcgggcggagcccgcgtggccgaagtactgtgccgcgcgggcggggcggggtgggcagaggggcggggtgcgcatgcgcgcgggccgggccgtcgggcaccgcggtgggaccgatcgtagcagcccgaaaggccagctgggacggcgagggcgggccctcgtgaacgc

SEQ ID NO: 25194 - DNA, 911 bp, Homo sapiens
  source 1..911: mol_type = other DNA
cccctttctccgcagcactccggggaccgccgggaaggtgaagagatgggggtgggggcgcgctgccccggcccaggcaaaaaaggagagcgcgccggccccggcccacgtgagcgccgcggccgagcccgcctagaggaccgcggaccgggacagctgcgctcgcggcccccgcgccaggccgggacttacccgggccgggcgcgccgcggaccccgcggcggccgcttcctcctcctcctcctcctcctcacttaacaaaatggcggcggcaggaagtgccgggcgcctcggcccgccccccgcccgcccccgaccgccggccccgccgcggcgcccgcgccccccacccgcgccccgccggccagcccaagcccgggtccgacggagccgcgagcgaccccgccgccccgacaccaacggcgcaggccgccccggcccggaacgaacggcgcgggaggcccgcaggcccgagcccgcgtagccccggcctccccgcccccgcgccgcgcggatggcgtaggtggcggcgccccggccccattacgcaatgcaggttacgcggaccgcgccgcgagcctccgccagccgcccagtgtcgtccgccgccccgacgctaggccgcacgccgcccccgccggccgtccgcccgctgccgccgccccctccccgagctgcctgcgcggcgccggggcccgcccgccgctctgccgagctcacaggccgcgctcgcccgcgggcaccgccggcagccgccgcagccgctgccgccgccactgcttcggctcctcggctgcgggagaccagaacaaacagcccagccgccgccgccgccgccgccgccgccgccagcgcactgacgtcaccgcgcacgctgcgcgcgcggccccgcgccgccgccgcccggtgtg

SEQ ID NO: 25195 - DNA, 371 bp, Homo sapiens
  source 1..371: mol_type = other DNA
cccggctgcactattgcaggtctcttaatcatgagttccaagcttcagttttaagtgaggattaaaagctttttgcggtttgaaggagcattcgaatattacacatataagcatatgccatataaatatattatcgttttgttacgattaatcacatttattcagtgcactggcaccagaatatttctttacacacactttgtcacgtaatgttgaaactaggtcccctacccagcacctcggtggcggagttggcatcccagccctgccctgagccgtagacccgactccctctggcgggtctccagggtacgggcgctcctccagcccgaccatgcttgggcccacgagattgccagcagcttccagcc

SEQ ID NO: 25196 - DNA, 371 bp, Homo sapiens; identical to SEQ ID NO: 25195
  source 1..371: mol_type = other DNA

SEQ ID NO: 25197 - DNA, 398 bp, Homo sapiens
  source 1..398: mol_type = other DNA
agaggacacctgaggaggccccaggggtggcccccaggggaatcccaggcctggctcaggctggacattcccaggcctgccctggctgagtctccagctggtgggtctcctggaaactccccgggctggtttttctgatgccggggagatgggtccaggccagctcctggaacaatcttgaaatcaagggctgggtgacagcccctggtccccatgggctcagagcaggccaggcagtgcagcccccgcaccgatgctgaaaaaagcagaaggcagtgccaacttcaggcctggcggcagctgagagtcccctctggtggccagcagcggctacagagccgtcactggtctccaggcccctctggggatgggccccttgacccagggtacgctgccct

SEQ ID NO: 25198 - DNA, 303 bp, Homo sapiens
  source 1..303: mol_type = other DNA
cccagctactcgggcagtgagtactgcgacagagcagaaggagactccactcagggtcccctggctctagcaggtctcagcctaggtcctgggctgctgggaggcaggacttgaattcctgccaggctggcagtgtggcacagcattctcctggccctgggagaaggcttggcctcacccagctctcccctggtcttggaaaggcagggtggactgagtggccatgctcggtcaccctgggctgccctggcacaaaggaggcatccaggctgtgaggattggctagtccagccccgcccagcc

SEQ ID NO: 25199 - DNA, 350 bp, Homo sapiens
  source 1..350: mol_type = other DNA
gtactagagtagagactggacacagcagctcaagcccagatgggaagactgcacccaggaggggcagtactgaccagaatctgacctacagggccctggactgcctggaggcaagacttgaactccatccagcagcagggggatagaggctacaggagatgatctggaacaaggcttggcctggcctggctcgcttgaagtaggtgctctttaagagcaggtgtcacactatgtgggaggtgctgagaccgaggtctcccacacccaggttttggccagctgcccagacatgggagcggcacccaggctgtggggattggctggcccagcccagcccagcctagcctccc

SEQ ID NO: 25200 - DNA, 342 bp, Homo sapiens
  source 1..342: mol_type = other DNA
ctacagggccctggactgcctggaggcaagacttgaactccatccagcagcagggggatagaggctacaggagatgatctggaacaaggcttggcctggcctggctcgcttgaagtaggtgctctttaagagcaggtgtcacactatgtgggaggtgctgagaccgaggtctcccacacccaggttttggccagctgcccagacatgggagcggcacccaggctgtggggattggctggcccagcccagcccagcctagcctcccgcacacataggggagccccaccaggcagctcctggtggctccaagaatgattcaggctgggccttaccgggtaactg

SEQ ID NO: 25201 - DNA, 512 bp, Homo sapiens
  source 1..512: mol_type = other DNA
tctgacatcccatttcccagatgggaagcctgagcccaggatggccacactgcccactctgagcccagcttggggctggattctttcttcctgcttcaagcagtcaggcctcaactcaggccctgggctgccaggaggcaggacttgaactcttgccaggctgtgaagccagagatgagaggcttctgtctctgtcctccccgcccatgtttggagaggagcccagatgatctgggacaagggttggcctggcccagctcagctggctgccaactgtcatgataagtattgcttttatctgaacacccttgtcttggaagggcagggtggaggtaaacttggggttcagagtcccctctaacctgagaattcagtgctcgtgctggggcaccctgagctgcacccagtgggcccaaccccaggttttggctggctgcccaggcacggaagacacacccaggctgtggggattggctgcctcagcccagcccagcccagcccctagatcaggg

SEQ ID NO: 25202 - DNA, 569 bp, Homo sapiens
  source 1..569: mol_type = other DNA
tggggctggattctttcttcctgcttcaagcagtcaggcctcaactcaggccctgggctgccaggaggcaggacttgaactcttgccaggctgtgaagccagagatgagaggcttctgtctctgtcctccccgcccatgtttggagaggagcccagatgatctgggacaagggttggcctggcccagctcagctggctgccaactgtcatgataagtattgcttttatctgaacacccttgtcttggaagggcagggtggaggtaaacttggggttcagagtcccctctaacctgagaattcagtgctcgtgctggggcaccctgagctgcacccagtgggcccaaccccaggttttggctggctgcccaggcacggaagacacacccaggctgtggggattggctgcctcagcccagcccagcccagcccctagatcaggggccgggacaagctgctcccgacagaaggtaccaggctgggggtggcagggctggaaggtcctggttcctggtaactggactcctagcaaactcccaaggattcaggtggggcccttctggactctaa

SEQ ID NO: 25203 - DNA, 440 bp, Homo sapiens
  source 1..440: mol_type = other DNA
aacataaattataatttaacctagaataggaaatgtagagatactaatctcttctcccttatcccttggattaatttctccccaggacaatgggaaaaatcatttaatccttggagtttttttttttttttgtttctgatggtcatgttcctcagcatcatactgagtaagtcactggccgtgatccaagatccctatcccatgtcacaaatgaggatcccacatatctgggacagagatggaattctcatctatatatatatttgcatctatgtatctatctatcatctattaatagctatctatccatctgtctaatatatccattatctatatctactttatctatctacctaatgcagctggccgccaccccaggctcaggagacacatccaggctgcagggattggttggcccagcccaacccagccagccctcc

SEQ ID NO: 25204 - DNA, 395 bp, Homo sapiens
  source 1..395: mol_type = other DNA
tcatgtctcgacccaggccctgggttgcctggaggcaggacttgaactcctgccagactgtgaagccagaggccaggagcttctgtctctgatgaactcctggaccacatgtggagaggagctcagaacatgatctgcatgccacactcttgccttggaagggcaaggtggctgtaaactttggggctcagagtcaccttctcaggtgtgagatgaccctgagctggctcctctgcacccagctggccccaggttttggttggttgcccaggcttggaagacacacccagtccatggggattggctcgaccagcccagcccagcctcgcctcccacagccttagccaggctggcagtggcaggggtaactggacccctggcaacctcccagtgat

SEQ ID NO: 25205 - DNA, 450 bp, Homo sapiens
  source 1..450: mol_type = other DNA
agtaaaagaactttgcatattgtcttttgcaaagagaagtgctagctgcctgacatcccatttcccagatgggaagcctgagggcagaataaggactccactcagggtcccctcatgtctcgacccaggccctgggttgcctggaggcaggacttgaactcctgccagactgtgaagccagaggccaggagcttctgtctctgatgaactcctggaccacatgtggagaggagctcagaacatgatctgcatgccacactcttgccttggaagggcaaggtggctgtaaactttggggctcagagtcaccttctcaggtgtgagatgaccctgagctggctcctctgcacccagctggccccaggttttggttggttgcccaggcttggaagacacacccagtccatggggattggctcgaccagcccagcccagcctcgcctcccacag

SEQ ID NO: 25206 - DNA, 492 bp, Homo sapiens
  source 1..492: mol_type = other DNA
gtaggggacatttttattaaaatgaacatggcctatatgcaaaaattttaaagatttaacccgcctgtaggggcgagtctcttctagccaagctcccatgagggactaggtctgagcccttcagcccttcagagtattttggtaagacagtctaagaaccactgccttgggccatagtagaaagtttctctgaccccgtgttggggtcagatggaaaacatttggagtcttcagtttcccaaaagctgccattgatctccctagagtactggggaccccaacatggatggcgtggtgcatgctatcgtgggggggaccgcccctgcacctcggggacgtgaccccccccccaggctgctgtcgtccccaggtggaggaggagctgacgcacctccacagggatgcgggagcccgcggcggggccaggccggagccccggggccgggaaggcgggggaggaggagaaggcggcgcctcccagcgctttctcca

SEQ ID NO: 25207 - DNA, 512 bp, Homo sapiens
  source 1..512: mol_type = other DNA
aagacagtctaagaaccactgccttgggccatagtagaaagtttctctgaccccgtgttggggtcagatggaaaacatttggagtcttcagtttcccaaaagctgccattgatctccctagagtactggggaccccaacatggatggcgtggtgcatgctatcgtgggggggaccgcccctgcacctcggggacgtgaccccccccccaggctgctgtcgtccccaggtggaggaggagctgacgcacctccacagggatgcgggagcccgcggcggggccaggccggagccccggggccgggaaggcgggggaggaggagaaggcggcgcctcccagcgctttctccaagaaaaggggcactttccagcagctgtggccagcggtgccgacgtcaggccctcccccagcggtgctgacgtcggcggtccggccgggtgacctcatcgccccgacggcagccggcccggggggcggggagaggcgggggcggcccccgcgcaggcaaaggct

SEQ ID NO: 25208 - DNA, 527 bp, Homo sapiens
  source 1..527: mol_type = other DNA
cagtttttttgagagcccccgggctggcccggacaacccctaaggtggccgagggcgggccctgaggaggccggcgcgcgcttccgggcacagcaggccttgggtatcttgcagtgcaatggcgcgatcgagtggctgggattacaggcgcccgccactggccaggctggtcttgaactcctgacctcgtgatccacgcgcctcggcttcccaaagtgtgggcagacaaggctgagagcgctaccttgctttcccgcgctcgcctcggtgcctactgcgcctgcgcgagctgtgagggcgggacccagagacacccgccccaactactggcgtgcgccctctgctgtcgcctaacggaactccgggcgcgcgtgcgcacgcaccccaagccacgccccgccaggctgccggcgcgcgagcggttggcgccgctccctgccttccctctcctacagtggggcggggccgggccgcccgagtcgggggtggaaggcgggggccacataatgccacgcccccgcctcgtc

SEQ ID NO: 25209 - DNA, 569 bp, Homo sapiens
  source 1..569: mol_type = other DNA
tgcagtgcaatggcgcgatcgagtggctgggattacaggcgcccgccactggccaggctggtcttgaactcctgacctcgtgatccacgcgcctcggcttcccaaagtgtgggcagacaaggctgagagcgctaccttgctttcccgcgctcgcctcggtgcctactgcgcctgcgcgagctgtgagggcgggacccagagacacccgccccaactactggcgtgcgccctctgctgtcgcctaacggaactccgggcgcgcgtgcgcacgcaccccaagccacgccccgccaggctgccggcgcgcgagcggttggcgccgctccctgccttccctctcctacagtggggcggggccgggccgcccgagtcgggggtggaaggcgggggccacataatgccacgcccccgcctcgtcccctagtgccggccaatgggaggtgcgctcgggctgcttccggctccgcgctccgctcgccccctcccaaggtctccccgcgactggcgggacgcaggggcgggcgtcggccgcggtgacgcgcagcgggcctggagcagtggagaggcgc

SEQ ID NO: 25210 - DNA, 356 bp, Homo sapiens
  source 1..356: mol_type = other DNA
acagaatttccctctgtcatccaggctaaagtgcagtggcgtgatctcggctcactgcagcctctgcccctggtccaagcgattctcttgcatcataccatgttggccagcctggtctcaagcaattcttgtgcctcagcctcctgagtagctgggattacaggcgtgcgccgccacacccggctgatgatgccaggagtcagggggcctgcacctgtctccgtgtcacccctcagcaggcacacagtagtaacaacttgctgggggcaagacaggagcaagctgtctctgcacctgtggcaccagagggctcacctgcttgaggaaacaggaactgcctcggggcagccagcccc

SEQ ID NO: 25211 - DNA, 206 bp, Homo sapiens
  source 1..206: mol_type = other DNA
aatgcagtgatgcaatcatggctcactgcacctgagtagctgggaagctgatcttgaacgctgaccaatctcagatcctgagaatgaccctatgaggtaggtataatgtaattttcatctcatgatcaggtgacttgcccagggccacacagctaggctgggagctgcagtgtgcccatagccccttgtggtggcagatgtggctg

SEQ ID NO: 25212 - DNA, 363 bp, Homo sapiens
  source 1..363: mol_type = other DNA
tgtcagcctcccgagtagctgagacggtttcaccgtggttttcccaaagtgctgggattacgatttttattcacatgatattgtcatttacctaaagctgaaaaattaatgaatactgattaggtttacaaaattaggttcagctaggctcaggcctgtgatccctgcgctttggaaggccgaagagttcaaaaatttaaatgaaaatattagccgcgctcagtggcgcccgtctgcagtctgctactgggaggatctcttgagcccaagggttcaaggctgcagtgagccacgatcggggttggtttccagcaccctaattcggatacccggaagtgtggcccgggtccagaacctgctcac

SEQ ID NO: 25213 - DNA, 359 bp, Homo sapiens
  source 1..359: mol_type = other DNA
gacaagagctaggtgtggtggcacatgcctgtaatcccagccacttgagaggctgacacacaagcattgcactcctgacagagtgagacctctcttggctgcttgctctgtgccttgagcaagaatccttccagcccaggagtcacttagcagtcttcaaacattctagtttgcttcctttcctaagcaaaacacgagttgcaaaaatcatcttttgggtaaatcactctggtattgcagggttgggatccccagggtacttgactcaatggatgttcagtgattcattgataaatgttgacaatgacaggtggtgataaggtttgattgccattcagctccatagggctgggccccag

SEQ ID NO: 25214 - DNA, 374 bp, Homo sapiens
  source 1..374: mol_type = other DNA
ctctcttggctgcttgctctgtgccttgagcaagaatccttccagcccaggagtcacttagcagtcttcaaacattctagtttgcttcctttcctaagcaaaacacgagttgcaaaaatcatcttttgggtaaatcactctggtattgcagggttgggatccccagggtacttgactcaatggatgttcagtgattcattgataaatgttgacaatgacaggtggtgataaggtttgattgccattcagctccatagggctgggccccaggtcggtttccctggcagcggccactgggtgcctcggccccgccccaccttctggcgggagcaagacgcctgcgcacagtccgtcctgcgcctgcgcattcggtc

SEQ ID NO: 25215 - DNA, 613 bp, Homo sapiens
  source 1..613: mol_type = other DNA
agatttaatgtgtcttgatgttaccacacaaaagttttgttttgtagcgcaccaggtctagtgcacacggtgggtccctctgggtggtcccacaacagatgaggggcccagcctcacccatccatgaatcctggagactccagacttcccatccatccagggttctgcagccctctctgaggctggagccaatctccccttccgtcaagggatccggggagaccgccaagcccggtgctcccctgagagtctctgagaggccccgacaccgcccccgctccaggtccccgggatgctcgcgcaggcgggagcccggggcgcccgggggatccctgagcgtcacgccgctgttgagcgcgtgttgacaacgtcgccggggagacgggcgggggcggggcccgggagagggggaggcgcggccctggcggcgcgcgaggggccgggctgtcagcgcaaggcccaggccgccgcagtggccacggccgctgccgcccgccggcttatataccgcggctaaatttaggctgcgcccggagctcgtccccatccgggacgcgtttccgccgccgccgctttggcccggcccccgcgcgcgccgcgcctataaggcttg

SEQ ID NO: 25216 - DNA, 490 bp, Homo sapiens
  source 1..490: mol_type = other DNA
cccaggctggagtgcagtggtgcaatcttggctcacgattctctggcctcagcctcctgagtagcgatgttcaccatactggccaggctggtggattacaggtgaatcagtctcctgagtagcttggatttcaggtgcccgccaccacagccaggaggacgccttgcggggcagggtgaggggggcagggtgcgggtcccccaaattagcgcgcgcgctttgcggggcagggtgagggtcccgaccctccgcggggtgggcgaccgcctccccaggcgcactggcagggggacggcatccctaacagagaaccaggcctcggcatgggctcctcaggcccagcccctccaggctgcgtgtgggcggccccgcccctgcccccgcccctcccggcctcatgcgtggccctgtctacggccccgccctctcccgggacaggcggcctgcgcaccgccctcccgtcgtcccagtgcgcacgcgtggctgcagc

SEQ ID NO: 25217 - DNA, 290 bp, Homo sapiens
  source 1..290: mol_type = other DNA
gggttcaagtgatcccctcacctcagcctcacaggtccctgggactacagggacgccaggctggtctcaaactaaagtgctgggattagcaggccactttgaatatttaaataagcttcagaacacactattgtcctatgtgaccgtacatgcctgtaatcacagccaccactgcactccagcctgggcgacagagtgagactctgtctcaaataaataaataaatatcttagtgtgaatatctgattatattttgagaccagcctggccactgctccagcctgggtgac

SEQ ID NO: 25218 - DNA, 302 bp, Homo sapiens
  source 1..302: mol_type = other DNA
cagtggcatgatcacagctcacagccaggttgcccaggctggtctggatctcctggccgggattccaggcgtgaatcaccgcgcccggcctgacgcgcttcacaactttgtagatttactaaaaataacggagtcgtcagctcgggaccatccgcagcggaggcagccgccacattcacgcctgaaggagcggttgccctgggcaacgccccgaatcacaatcgcggggtgtcatgggagcggtagttccggggcgggcccaacgtgccccgcgccgcagcgaccaatgggaccctcaggtc

SEQ ID NO: 25219 - DNA, 390 bp, Homo sapiens
  source 1..390: mol_type = other DNA
cactgcactccagcctgcagaggaaaggagccccttaagttctacctttgccttggctgtgccacaactacctgaaatgtaacattaggctcaatttggtcctgattccatcggtttctcctcgaggattcgagggttcgctgccgtggaccccgtggcgactctggccagcagggggcggagatgggggagcttacacctccgccaccacgggcgtggccccatatggcccagagctggaccaaagcccgggccatgggggtgtgcactgcgcttccggtcgccgcgacctgagggtcccattggtcgctgcggcgcggggcacgttgggcccgccccggaactaccgctcccatgacaccccgcgattgtgattcggggcgttgccca

SEQ ID NO: 25220 - DNA, 662 bp, Homo sapiens
  source 1..662: mol_type = other DNA
ctgctcgcccagcccaggcccttgctcccctgagccccctgcggcaagctgagggctgaggggcttccagctgctcccctctccccaggggcagccatctccctgcgcagcggcaggggcctcccaggccaggtatgcacagtgtcctgtgcagcactgcacagcagccctgagaggacatgggcccggcgcctccccccgctgggcatccggtcactctgtgttctaggttcctgagggactgggcaccctccctctccaagaggcctggcctgggccgaggtagtaggcaggggctcccgccggcccatatcccaaaaggccttgctcagaacggccccaggccagagcccaggcaccagcacaggtctcgtgggagcccagccatcgccctgaccgggttggggacccgattcccgagaaggcccgcgatggtaacgggcgcgtggccgggtcccgccccagggccctgacgcgcggaaagtctctccctcacagccagcgcaagcaggcccgggagctgctggccgccctgcagaaggtcgtggtgcccatctactgcaccagcttcttggccgtggaggaagacaagcagcagaagatcgcccgggtgcgtgggccccgggccgggggttgggcaagaccgggacacacaggccttt

SEQ ID NO: 25221 - DNA, 393 bp, Homo sapiens
  source 1..393: mol_type = other DNA
ggtgaggggccttggtccctccctgaggcagggcctgtcgtagccaatctgggctaagggctcctggagctcctgaggctgtgggaccctgtgccccccacgctcatggtcagggatgcagtgggtgcctgggggagccgcggccctgctcactgccgggaagaactggatgttcagcaatgccaagtccccgccgcacttgagctgatggcctgatggggcacacttcgagctgcggctgcacctcatctacctgatcatgacgtgctgcaccactggtgagcgccgccccgagactagggggcacttgtccggggaccccgggtggggggtctctgtgagccaccaggcttctgtctccaggactgcgaggtctaggtgtcctgtgcgggg

SEQ ID NO: 25222 - DNA, 733 bp, Homo sapiens
  source 1..733: mol_type = other DNA
gtccacagcagaaatttgctgcttctggctatcttttccccacaattagcaagggttagcttcattattttagaggcaacccaactgcagcttccctccagcaatttgagggcatgggttggggggtaccccgccccagtcttcctgaccaaagaacctaaatacgtccagctgccggtctggccggggagaatgtgacagtcgccgcagcccgggaactgtgcccgcgaaaggaaagagaccctggcccaggcacgaagtccccaggcccctggtcgcccggaggaaccagccagcccatcgggctgcgacgccgaccaaggggcacgccccgcgccccccgggccgttccagcctttccgcggcgccgcgcgacggggacccactctgcgagacttctgcgcgtgcgcgtcgctagcccctcccgcgcgccaggcatcgcgcgacttccggagtttcccagcgacggccgtaagtggcgggcggaagcggccctagaagcccgccgtaaacggctccctcgcgccacttccggccggcttccgcagacggcgctggtggtcgatcgtgtggcgccggaggacgttccccgcggccggagccatggagatgccgctgccccccgatccggccgagagaccgtttctctctccccggctattggccggccccgcctcccggagtccccgggtctgggagggggcggggctcggcctcgcggcttcgcctgcgg

SEQ ID NO: 25223 - DNA, 307 bp, Homo sapiens
  source 1..307: mol_type = other DNA
ctggccgtttcagcgagctgagatcacaccactgcactccagccttggtgacagagtgagactctgtctcaaaaccctgagtgctcaggtccgagctgtgaaaggaccgtgccctcacggaggggaccttaccttttatctcccgaagtaacatcactaattctgtatttaagatgttatgtcagctgacagaggtgactggccccccaccctgtttggcggtgagtttccgcactttggtcccaagctgagacaaaggcagtcaagtctgtggatttttctcactggtgaatgacaagaaacaggg

SEQ ID NO: 25224 - DNA, 595 bp, Homo sapiens
  source 1..595: mol_type = other DNA
gcacaggagttcagggctagtgagctatgatcatgacactgcactccagcgtggtatcggacgtccacagcagaaatttgctgcttctggctatcttttccccacaattagcaagggttagcttcattattttagaggcaacccaactgcagcttccctccagcaatttgagggcatgggttggggggtaccccgccccagtcttcctgaccaaagaacctaaatacgtccagctgccggtctggccggggagaatgtgacagtcgccgcagcccgggaactgtgcccgcgaaaggaaagagaccctggcccaggcacgaagtccccaggcccctggtcgcccggaggaaccagccagcccatcgggctgcgacgccgaccaaggggcacgccccgcgccccccgggccgttccagcctttccgcggcgccgcgcgacggggacccactctgcgagacttctgcgcgtgcgcgtcgctagcccctcccgcgcgccaggcatcgcgcgacttccggagtttcccagcgacggccgtaagtggcgggcggaagcggccctagaagcccgccgtaaacggctccctcgcgccacttcc

SEQ ID NO: 25225 - DNA, 316 bp, Homo sapiens
  source 1..316: mol_type = other DNA
cctgtagtcccagctcctcaggctgctgaggcaggcgttgtgcactccagccttcgaagcttcgagagaagcttcaaaattgtcacaattgctgaaaacagaatgaatcgtgaacattatctcaatattttgtataatagacaagaccacataagatttggtttgccaaatcagattctttggtcaagctggccgtttcagcgagctgagatcacaccactgcactccagccttggtgacagagtgagactctgtctcaaaaccctgagtgctcaggtccgagctgtgaaaggaccgtgccctcacggaggggacc

SEQ ID NO: 25226 - DNA, 618 bp, Homo sapiens
  source 1..618: mol_type = other DNA
gttctagggccacgcccgagaactgcgcacgtcgcggtgttttcacaaatggtttctttccctaaaaggccttttacctttggtgtcagccgccgccagccatcaggaatcagatgtttggcccacgcacagacgccgacgctgcgaagccctccgcgcttctgtccggctcccggtcactgggaccgcccacgtctcaggtggcacagcttggacgcaggtctgcggcctcggctccgccggaagcgcatctacagtggactgggcctgcactcgagacgtggtggctggcgcgtcggccggcgcggaacggcgtagaccggggcgcctgcccccccgcccagccccgcccccgcccggcgtcgggccgtcggacgggctggaaggggcggccgctcgggcaggatggcggcggccgcggtgggcgcgggccacggcgcggggggcccgggcgcagcgagcagcagtggtggggcgcgcgagggcgcgcgggtggcggcgctgtgcctgctgtggtacgcgctgagcgcgggcggcaacgtggtcaacaaggtgatcctgagcgccttcccgttcccggtgaccgtgtcgctgtgccacatgctctgtgcgctgggc

SEQ ID NO: 25227 - DNA, 556 bp, Homo sapiens
  source 1..556: mol_type = other DNA
cagccggttgctgcttctaatttgacaagtaaaaacactgtcaccctttcccaattatagcccttgaattagtataagatcatcttatcctggggctggtccatcccggctggtccttggacatcagccgtcagggcccggcacctcccccttctgcagagccttggagacaggtgtccaaggacgctaccatgaccacggtccccagtgtggccattctagggccacgcccgagaactgcgcacgtcgcggtgttttcacaaatggtttctttccctaaaaggccttttacctttggtgtcagccgccgccagccatcaggaatcagatgtttggcccacgcacagacgccgacgctgcgaagccctccgcgcttctgtccggctcccggtcactgggaccgcccacgtctcaggtggcacagcttggacgcaggtctgcggcctcggctccgccggaagcgcatctacagtggactgggcctgcactcgagacgtggtggctggcgcgtcggccggcgcggaacggcgtagaccggggcgcctgcccccccgcc

SEQ ID NO: 25228 - DNA, 635 bp, Homo sapiens
  source 1..635: mol_type = other DNA
ggcttaaccccgaagtctaggtgaccgtgggggggcggggggactgtgcccccacaaggccagagatgccgccgggggaccccgcgtagacgcagatttgcaacctccggctttcccagctacggcgggcggcttctgccagaggcgcgatcggggtcgcgcgtggcggtgcagacccccgccctgccaccacacccattcccacaccctctgaggggcgggggggccgcggcgacacccccggactccgatgacccttctgcgcgcatcagcctgcgactcccgtcccccagtcacgcgccgggaaggctctcccagaggaaggattttcccgccgccctccccgccccgaggtagccgctgcgagcgtccgggttcaaggactctttgcgcgcgcgcttccgtcagaaagccccgccccgtgacctggacgggggccgttgccccgcccaacctcctcccaacggctgcctaggccgggcggctgggcggggcgtcacgggcggacgagtgcgcctgcgcgcgcttgcgcggaggcgcggggcgtggcacacgggcagccccgcccaggcctggcgtctccgcccctcctcagcgtggcgccgacgctgcgtgcggcgcggactacccagagt

SEQ ID NO: 25229 - DNA, 344 bp, Homo sapiens
  source 1..344: mol_type = other DNA
aaatgctgtctactgaaagggtttcagggtgatgaaattgcattccccatagataaaagaaaaatcatttctatccagagatctgagctgacagcctctgggcccggccaggggccctgttaaccccaacagggtctgcttggccactcagtgcagctgcgattaaccctaaaggctttaaggaaataaaatgactttgggagccattcattcattgggaccatgttctaaaaccttggaaatacagcattttccagaagcttctttgaaagggaatcctggtttttgtttgtttataccaataagaatgagcctgaatgggactgagtagccttgaaaataaa

SEQ ID NO: 25230 - DNA, 668 bp, Homo sapiens
  source 1..668: mol_type = other DNA
gcccccgcagctgggcccgcccccgcccgccaggcgccaccccaggcccggcccccgcgggagaggaggggcgacggcccaccccgggacaggtggtggggacgcccagcaccacggacgcagctggacggtcgggcgtcccaggcgttgaccctcctgccatcgctaccccgttccgcccagcgaggcggggtgcggggcacccgtgcaaggcgctgcctctgggggcccgtccctcacggagcccacccacgcgggacgcccgttcccagggggccggatcggccaggcccgtgggctcaattaggaccccgatcttcggtggagcccagtgaggcgttccccgtggagataggttaggacctcggtcctctgctgggggcagctcagtgggaacccccgttccccatggggcccaggaggatctcatttgggaccccactgcgtcaggaccccgcaccctgtgcagctcaggagtcaaaggattccttttgtccagaagcccaatttgggaccccagaaagtgagtaggaattgctgcccacgcatgcgcggcacgcttcgaacgcgtgaattctggctctcggggcctccccagcgaggtggggcgctcgcgctcccctaagggggtctggcctgcagagggcgggaccctcccagccttgacc

SEQ ID NO: 25231 - DNA, 648 bp, Homo sapiens
  source 1..648: mol_type = other DNA
ggtcaaggctgggagggtcccgccctctgcaggccagacccccttaggggagcgcgagcgccccacctcgctggggaggccccgagagccagaattcacgcgttcgaagcgtgccgcgcatgcgtgggcagcaattcctactcactttctggggtcccaaattgggcttctggacaaaaggaatcctttgactcctgagctgcacagggtgcggggtcctgacgcagtggggtcccaaatgagatcctcctgggccccatggggaacgggggttcccactgagctgcccccagcagaggaccgaggtcctaacctatctccacggggaacgcctcactgggctccaccgaagatcggggtcctaattgagcccacgggcctggccgatccggccccctgggaacgggcgtcccgcgtgggtgggctccgtgagggacgggcccccagaggcagcgccttgcacgggtgccccgcaccccgcctcgctgggcggaacggggtagcgatggcaggagggtcaacgcctgggacgcccgaccgtccagctgcgtccgtggtgctgggcgtccccaccacctgtcccggggtgggccgtcgcccctcctctcccgcgggggccgggcctggggtggcgcctggcgggcgggg

SEQ ID NO: 25232 - DNA, 324 bp, Homo sapiens
  source 1..324: mol_type = other DNA
acaaagtcttgctctgtcgcccaggctgcagtgcagtggttcaaacaattcttgtgttttctatttttagtagagatagattggccagtctggtcttgaatgcctgacctcaggtgaacatctcacgggcccttcctgtgatgtaggtgtagtgttagtctcactctctatataaatgcttttctcaccaacacaggaagttagtgagtgtgaaacaggatcatagttaaccactaagtctgggctgaatgcccggctaagctggcgctttcattatcccagttgctgggggcttgtcttccgggtggcgccgaggccaggaaa

SEQ ID NO: 25233 - DNA, 326 bp, Homo sapiens
  source 1..326: mol_type = other DNA
tcccagctactatcgcgccactgcactccagcagagcgagactcctaaactgcctatattagggcgctgggggccaatcgtaaatacttcagggtctgcagatctgtaggatctttagcaactacctaaaaactttattcagggaccctcaaatgtgaatttcacaaacccggctatgtaaacatgtaaaaatagcggcgggtcttggctcgcctacccctgctatataaatcattaattatgataccaatcttaaggagaaggtcttcagaagagtccctcaaagaccccgcctccaaaggcggaggctgcgcatgcgcggcagg

SEQ ID NO: 25234 - DNA, 299 bp, Homo sapiens
  source 1..299: mol_type = other DNA
tcccccagggcacgacgggttgaggcctctctgaggcagaggggtacccccccgagcccccatccaatggtacccaggagtggggagggaggccccctggaggctggcttggggacccttcaacctggccacctcactcagggtcagaggtccctgggcagcactcatacaggggtgccaggggctctcgaggttcagccagagtccctgacgctggccaggctggagtgcagtggcaagatctcggcctgagtagctgggaccacgtgcctggcctagcagggctcttcccagagccc

SEQ ID NO: 25235 - DNA, 363 bp, Homo sapiens
  source 1..363: mol_type = other DNA
cccccatccaatggtacccaggagtggggagggaggccccctggaggctggcttggggacccttcaacctggccacctcactcagggtcagaggtccctgggcagcactcatacaggggtgccaggggctctcgaggttcagccagagtccctgacgctggccaggctggagtgcagtggcaagatctcggcctgagtagctgggaccacgtgcctggcctagcagggctcttcccagagcccccgctgcttcctgggctggtcagggaccgggggtgctggctgcagctgggacccccccccctgcatcttgctggcctggcacctgggtccctgggaggcgccacactggatatagccacg

SEQ ID NO: 25236 - DNA, 412 bp, Homo sapiens
  source 1..412: mol_type = other DNA
gatgtgccgcctgccagtgggacctaggacagcaggacctaggtggccaggaggggacaccctgctcttggagagaaagggggtgcccatccacccctgctgtatgaagggtcctctgctccttgggctgtacgcactgcactgggcactagatacaggccagggcttagggcacggcggcgcctgtgggatcggggttgcaggcggcgtccagacccaggggcccctggtgaggggcgggcccggggagggggccgggcagggcccgggtgggtccggacgatccccggaagggatcgggggctccgaatgggcggagcaggcgtcccgggagggtgcgcccaggagcggggcgagcggggcgagcggggcggtcccggagacgaggcgggtccggggagggggctggccc

SEQ ID NO: 25237 - DNA, 330 bp, Homo sapiens
  source 1..330: mol_type = other DNA
aggagtctgaagctgcagtgagctgtgactgcaccagatgtgccgcctgccagtgggacctaggacagcaggacctaggtggccaggaggggacaccctgctcttggagagaaagggggtgcccatccacccctgctgtatgaagggtcctctgctccttgggctgtacgcactgcactgggcactagatacaggccagggcttagggcacggcggcgcctgtgggatcggggttgcaggcggcgtccagacccaggggcccctggtgaggggcgggcccggggagggggccgggcagggcccgggtgggtccggacgatccccggaagg

SEQ ID NO: 25238 - DNA, 528 bp, Homo sapiens
  source 1..528: mol_type = other DNA
aaaggcaggcttcgagctcgagtcgccaacccgaggctgcctggtactcacctggcctcggccgccgcgcgccgccggtcccgggccgggtccccggccggacgaccgcctgccagcccgccgctgctcgagccgctccgccccgccgcgcccgccgctcccccgcgcgctcccgcttccgggttccggagaggcggggacgggggcgtgacgccagcgctcctaggggcggggcatcgcgaaaagccccgccccgcccctacccactaccgccgatggtgggcgagaccaaggcgaagcgcgcgtctggggccgcgctctccacacttagccggcgctgcctcacgccccgacccgcaagcaagggggcgggtccggctttgaaaagccggcggtgagttcgggttcgaccccgccaggaactgcgcgggcccctgaagaccccgatggcgtgctgcctctgcgcatgctccggagcgctgacacccgaccggccctgagttccgcgtcctcggctgggacgctggg

SEQ ID NO: 25239 - DNA, 419 bp, Homo sapiens
  source 1..419: mol_type = other DNA
tactgagcgcccactgggggccaggcgccaaaggcaggcttcgagctcgagtcgccaacccgaggctgcctggtactcacctggcctcggccgccgcgcgccgccggtcccgggccgggtccccggccggacgaccgcctgccagcccgccgctgctcgagccgctccgccccgccgcgcccgccgctcccccgcgcgctcccgcttccgggttccggagaggcggggacgggggcgtgacgccagcgctcctaggggcggggcatcgcgaaaagccccgccccgcccctacccactaccgccgatggtgggcgagaccaaggcgaagcgcgcgtctggggccgcgctctccacacttagccggcgctgcctcacgccccgacccgcaagcaagggggcgggtccggctttgaaaagcc

SEQ ID NO: 25240 - DNA, 450 bp, Homo sapiens
  source 1..450: mol_type = other DNA
cctaggcaagtcacacgcgacgcctacgaggttgagctgcgtcatcggccccatttcgtagctgggcggtcaggccgcttgccggaggtcgcccagcgtcccagccgaggacgcggaactcagggccggtcgggtgtcagcgctccggagcatgcgcagaggcagcacgccatcggggtcttcaggggcccgcgcagttcctggcggggtcgaacccgaactcaccgccggcttttcaaagccggacccgcccccttgcttgcgggtcggggcgtgaggcagcgccggctaagtgtggagagcgcggccccagacgcgcgcttcgccttggtctcgcccaccatcggcggtagtgggtaggggcggggcggggcttttcgcgatgccccgcccctaggagcgctggcgtcacgcccccgtccccgcctctccggaacccggaagcgggag

SEQ ID NO: 25241 - DNA, 593 bp, Homo sapiens
  source 1..593: mol_type = other DNA
actcccagggagggatgtcccttctagggctacccccttccctgcagccctggctgctcagcagccctggcctgggggcggggcacgcatctgccagtcctgtgaccgtcccctgccccatctctgagagtgggctgcccttctgccccgcacaccaggggcccagagctgcagaagcccccacaggctttgttcccagcagggctcagagggctcctggtgctccatcagcagtccctggaggacagagccgtcccctcagtgggtggcagaggctgccgggagcagaagaaagagcccatccttgggttctcctgcgctcagagctgctctctgctgtgagttttgcgtcgcctacatccaggccgccagctgggagctgcaggcctcgctgtgtgcacatacacaggtgtacgcatgtatgtaggcatgaacatgtgggtggacatgtgcatgcaagtgttttgtgtacaagcatatacgtgtggctgggcacatgtgtgtgcatggagaccagcctggccaacatggcaaagcccttcccagctacatgggtgcagtgagctgagatcgcaccgctgcattccagcctg

SEQ ID NO: 25242 - DNA, 196 bp, Homo sapiens
  source 1..196: mol_type = other DNA
tgcctcagcctcccgagtagctgggattacaggcacgcacaaccaagcccagctaatgttgggccaggctggtctcagggcatgccaggcgtctgggcgttaggggggacccagccccaccttgctcactctcaggcagagctgtctcatgtgccccttgaggcaggtactgtcacactgtccatttcccggccca

SEQ ID NO: 25243 - DNA, 267 bp, Homo sapiens
  source 1..267: mol_type = other DNA
gcatgccaggcgtctgggcgttaggggggacccagccccaccttgctcactctcaggcagagctgtctcatgtgccccttgaggcaggtactgtcacactgtccatttcccggcccagcctgctgaggtgggggaagccttggattcctgaatcccaggcagaccccggtcaagtaagaatggggtggcgcctctcctatttttttaaaatagagatagagtagcgctatagccaccgcgcccggcccagcgccccttccgccctct

SEQ ID NO: 25244 - DNA, 448 bp, Homo sapiens
  source 1..448: mol_type = other DNA
tcgaggccacagtgagccatgatcatgccctccagccttctctctctctctctctctatatatatatatataaaaggccgatttgtctgctctgccaggaacagtactgttcagtaaagacggtggctcacgcctgtaacccagcactttgggaggccgaggcaagcggattgcttgagtcccggaagctgttcaagaccagcctggcaactccgggcgggcgtcccagctactcgggagccggaggcaggagaaccgcttggctgcagtgagccgagatcacgccacagactcttgttaaaaaatttttttcatataattgctgaaaaaaataaataagtttaaatttgcaaaaccatcccgttttttcagacaaacttgagggtcgaggtcgggtcgaccaaggtgtgtggccacgcccagccaggtcagccccgcccccaggccg

SEQ ID NO: 25245 - DNA, 583 bp, Homo sapiens
  source 1..583: mol_type = other DNA
tcccagctactcgggagccggaggcaggagaaccgcttggctgcagtgagccgagatcacgccacagactcttgttaaaaaatttttttcatataattgctgaaaaaaataaataagtttaaatttgcaaaaccatcccgttttttcagacaaacttgagggtcgaggtcgggtcgaccaaggtgtgtggccacgcccagccaggtcagccccgcccccaggccgctgagcgaccccgccagtcgggtccatcctgcagtaaatgcacaacccggacggaagtgcctctccgacagcagatccaggctcggagctccagacgctgggacaggtgacccggggcggcgagccggacggccttgcaggtggggcggaggtcccgaggagctcctcgggcgcggtcgtctgtgggctctgcgcgccctggaggtcgaggctccggcagcgcgggggttaactcgagccggtcccaggctgcgcgggggcggggtctggacgtcgctgctgctcccgcggggtgagagttggccgctcttcggccgagctgcccgcgcgtaggcgtgtcctctccgcgtgtccaccc

SEQ ID NO: 25246 - DNA, 237 bp, Homo sapiens
  source 1..237: mol_type = other DNA
attaattagtctgctggcaaccagcccacaggcaggcagacgtgcccaagccagcagcagcccgcttcatatgggaccctgtagcctctgcagggacccagaccggccctcaggggtcttggggaccaagctggccagggtccccaagtcctccatggcccactgggaacccactatctgttaggaggctccaaaaggtgctcctccttgtccccaggagccgcctcccgcagcggt

SEQ ID NO: 25247 - DNA, 828 bp, Homo sapiens
  source 1..828: mol_type = other DNA
tggccccccatcattgctttgccaggaactgtggggtggggaggggcgcctcgagagggcaggcgcggctgaggctcccgccgcggcccggcaggggttaaggcccgagctgggcgagggcggaggcgggggagggtcaggccccgcggcccagcgctcggcccccgtccctcccgccggcccgttcgcccggcgccgcgcgcggccacccatgcccttataagggcggccgtcgccggggcaacgagcgcccgcccccagcccgcggcgcgcgcccctgcccccgcccccgccccccgcccgccccgcggcgctggtcaaaccggccgcagcgcgaggccggcgcgcggggtcggtggcggtggcggcggcgagagcgaggcttgggcccaggcgcaggcccaggccaggcaggagcggccgcagcgggggcggcagctccagaggcgccggcccagcggccctgcaggcccggagcggcagccgcgggcgccgggggacccagggggcgcggcgatcagccccggcgcgcacccgccgcccctccccccccgccacgggcggccgcgcaacttgcggccaaactttccccccggcctcccgcgctcggatggcggcccgctgagttggccgcagcccccgggcgagcggcggccaggccagaggacgccccctgcgcggctcgggccgggccatggcccgcgcgcccccgccggggccccagggcggcgggacgcgagtcctctgggcccccggcccgcgcctctagcgtgcccctcccggccccgggcccggccccgcgcacgcgtgggaaagttggcctggaac

SEQ ID NO: 25248 - DNA, 610 bp, Homo sapiens
  source 1..610: mol_type = other DNA
tcgggcgggccccagccccggtactgggggatggcggcagctgcgaggctccagggcgcctggaagagacatctgcagtccagccggccgccaggccaggcccccagacagggcatgcctgtcgcctccagccgcgcggggcgggtgggcgccctgcccccggaggccagaatctgcagaggggccccctgacctcgcggccccggccagccggtctgagcaaacacaatctagggtgtgtgtgtgttgtctcgcgcgcgcgtgtgtcttgcgcaggggcgtaccccccccccgggtgccactggccccccatcattgctttgccaggaactgtggggtggggaggggcgcctcgagagggcaggcgcggctgaggctcccgccgcggcccggcaggggttaaggcccgagctgggcgagggcggaggcgggggagggtcaggccccgcggcccagcgctcggcccccgtccctcccgccggcccgttcgcccggcgccgcgcgcggccacccatgcccttataagggcggccgtcgccggggcaacgagcgcccgcccccagcccgcggcgcgcgcccctgcccccgcccccgccccccgcccgccccg

SEQ ID NO: 25249 - DNA, 213 bp, Homo sapiens
  source 1..213: mol_type = other DNA
gagaccagcctggtcagcacagcgccactgcactctagcctaggcgacagagcaaggtgcagtgacgtgaccacggctcactgcgagtagctgggactacaagcgtacgccactactgcttcccagagtgctattctagctcttgagaaataaagtcacgtgaccaggggagggggtttcctgtttcccagcccctcccaggccaggcttggc

SEQ ID NO: 25250 - DNA, 200 bp, Homo sapiens
  source 1..200: mol_type = other DNA
tgagccactgcactccagcctgataaatacttagcgatcgcttggctgtagtgactagccagacccaataagaccagagtaagtattttttgattcatgcaaatatatgtaaaataaggaacactgactattgtagtctgattcggccaaaaacaaaaattcactaatttttttaatccaatcaccagcccgctgaacta

SEQ ID NO: 25251 - DNA, 289 bp, Homo sapiens
  source 1..289: mol_type = other DNA
atcctagcactttgggaggccgaggcgggcggatcacctgagatcaggagctcaagaccagagagtggtggcacatgcctgtaatcccagctacttggggcccagattgcgccactgcactccagcctgagagttttgctctgttgcccaggctggagtgcagtggtgtgatcagctcgtagctgggacctgcctgggcctcccgaggggggcccggcctaagcctctcataaggccgtgctccctgccagaggccactgacctggggcaaatgagatagtggcacacc

SEQ ID NO: 25252 - DNA, 406 bp, Homo sapiens
  source 1..406: mol_type = other DNA
cccagattgcgccactgcactccagcctgagagttttgctctgttgcccaggctggagtgcagtggtgtgatcagctcgtagctgggacctgcctgggcctcccgaggggggcccggcctaagcctctcataaggccgtgctccctgccagaggccactgacctggggcaaatgagatagtggcacacccggtggcatcctcccacccgggctcttatcggcggtccccttgagcgcctccgggtgtcaagggcccctgaggacactaaagctctcgaaccccgatgtggacccccgtgcggcgcggggcagcctggctgggaaccctgctcggccctggagaggggccccccgagccgaggggaggagcggcgcatgcccacaagccccccgcgggaagtaggaa

SEQ ID NO: 25253 - DNA, 435 bp, Homo sapiens
  source 1..435: mol_type = other DNA
agtagctgggactgtgctgggattacaggcgtgaaaccgcgcctggcctgaccacgtccggccggggtcacctcttgataagttgcctcctgcccactgtccaaggagcctcagccttctgaggtacgaggcagcctgagcccagtctgcagactgccctgtggtcacccagcacaatgtgcaggttcggtggcgccagcccccccatccccccccctagctcccagcgccgaggaatggggcctcgagggtccctgtggggctcgtgggtcccaggatcacaaggtcatcttccgtgagggtcccggctgcggccccaaaacgccgatgggccccgcgggacggaagcggagagcggaatgtccgctgggctccctcggatgccacgccccgcccaggcagcctgggggcgtctccctgacctggccccgccca

SEQ ID NO: 25254 - DNA, 429 bp, Homo sapiens
  source 1..429: mol_type = other DNA
attaatttcataagacctgagctctcctgagggctggccccgccggtaccacagagctgggatgcctgcctggttaaatcggctgattatgaaattcaaactcccttgaaagctttagagaagcccgatggctcacgccagtgatctcagcccttgagaccagtctgggcaagatagcgagaccttcccagggtttggaatcacacagccttgggttcccggagattggaatctctgcttctgcagagagagggccccggccgcacactccccccaacctcggtgaacccccaaaaggggcggggccgttgctcccagagcccgcctccagggctcctaactaggccaggtcagtccgcagctgcgataggccgaagtgcccgcccgtcggcacgtggctccgcctactcgggggaggaacttaaaggg

SEQ ID NO: 25255 - DNA, 595 bp, Homo sapiens
  source 1..595: mol_type = other DNA
accccgatgtggacccccgtgcggcgcggggcagcctggctgggaaccctgctcggccctggagaggggccccccgagccgaggggaggagcggcgcatgcccacaagccccccgcgggaagtaggaaatcgaccgaccaggcggtgcgcttcggacccagccagggcatgtgctcggaggcccgcctggctcgcaggtagggcagtagaggagctgctgcgctgcggcgcggaccctaatttggtggacggcgcagcggctgtgcacttggcggccggagcccggcacccgcgcggcctgcgttgcctcggggccctactgcgccaaggcggggaccccaacgctcggtaagatagagcctgggtccggggcggggtctccccaagccgaagtctgggaatccgggaaggggcgccccatcatcccgggccaggcctcggggctcgagggtgggggggtcccagaccgaaggctccaggtccccagagcggagatcggggttcctgccgggaggctgagtccgcaatgacccctcttgcgctgccgccccagatctgtcgaggcactgacgccgctgcatgtggccgccgcgtg

SEQ ID NO: 25256 - DNA, 414 bp, Homo sapiens
  source 1..414: mol_type = other DNA
ggcaggctgccccagaaaattttttttttttttggttctaacaacagaggagaattcttctagggcccaaaataagcttgcaatccctgagtttacaacacgcagcgagcttgaactcaggcctcctcggcttcctgccaagaggcggagacttggctgcagccaggacaagctgccagccagctgtgtgccatctgcccagctcccgctgggggcgggaagaccaaccagccgcttcctgcagctgccaccagctgcgcccggccaccgcggggcaccctctgccggcagctgccagctgaccgcggtgcgcacgcgcttagaaggcgccgcatccctgtgccccgcggatatagactggcgcgcctctgttgcgcaggcgcagaactacagggctggagcggctctgggctc

SEQ ID NO: 25257 - DNA, 227 bp, Homo sapiens
  source 1..227: mol_type = other DNA
tctccctctgtccgccaggctggagtgcagtggcgcgatctcagctcacttccggagtagctgggacttgacctcgtgatccacccgccaggctggaggctctagagagcctcgcggagctgtaaactacagctcccaagagacttcgcggccgaggcctccgctccaagtaccgggacaaccaatgggcgcatgagttagctggatgcggccaatggaagcgtgca

SEQ ID NO: 25258 - DNA, 372 bp, Homo sapiens
  source 1..372: mol_type = other DNA
tcagtctaacagactgagctactcagaataaatgtgaatttcaaataaacaatgaataattttttagtactagtatgtcccatgtagacataggacatagaaacatttatgtatgtatgtatatatatgtatttgagacacagggtgtgatctcagctcactgctgggattacaggtgcgccccgcccagctaacatttattcttttatctgaaatttacatttaactagacggactgtattttattagggcttgctgtaattatgtatcacagccctactggggtggtgtctccagggtccggagtttgcagatggggaaactctcgcggggacgagaagcagcgctcgggcgagcgaggaccgaggccgg

SEQ ID NO: 25259 - DNA, 367 bp, Homo sapiens
  source 1..367: mol_type = other DNA
attctgtcagacagatttttcttcgcccgctctgagccggagaccccgcgccagtgcctggaggctcccctttctggctttcggggagccagagactgcaggtgcagacctgttccaggaagacttcctggaggaggggatcttgcggaaaaagcaagtaggactctttccagaagttcgggcaagattttccccgagatgctctgagtttccggtctgaacctgaacgtaaagaggtgtagtccctcctttcgctgcggagtgactaaaaatttggtctcatgttgcccggggaacaacatcaccagccaatggaagcgagcccaatggtggtcgagaatagttgagcactttactagtcaagccg

SEQ ID NO: 25260 - DNA, 394 bp, Homo sapiens
  source 1..394: mol_type = other DNA
agagcttggggagccagcgccaccgccatccatggctcagccctcctctataccccaggctggagtgcaatgcacggtgaccgggttggtctcaaacttctgacctgccaccgtgcctggcacatttcccgtggcacttaatcagcaccgccctggtgaagtggagccagcctgtcttgaggtaagtcaagttcgctgaactaactgtgcctcagtttcctcccacagcaggtactgaggccaggaatgcctgaccagccagccagcgccccagaggggtccagccggtgccctggctctgggcccccagccccacccccgccttctcacagccagagtgggagtgttgtgataacccgcagcccccgtttcctccgggccaggaaaagcactc

SEQ ID NO: 25261 - DNA, 464 bp, Homo sapiens
  source 1..464: mol_type = other DNA
ggaccccctcctccaggttgtcatcctcgccgaaatcgatataggcctccacgtggaggtggtgtgtgcacccagaaacccacccaggggccagaatggcgctttcacgcagggaatgaatgcgggctcggcccagccacggcagaggtggcccagctctccgtccagctgcctgagggcctgccgccgctgcgccgctggtgaactcgcctgcctccgccggtcgaagccctggcacgctgcctgcaggaaggtcccagtctgacaccccctggtccccacccaggcccattgggtgccgggcctccatgcacgtggaactccacaggctcggaacctggggaccctcacctgggaaccagagcaccagtgcgcggtccagaggctccccggagcggggatcgctgagcaggcgcaggctggcggcgtggccgctggcggggccgctggtccggatcactgcg

SEQ ID NO: 25262 - DNA, 330 bp, Homo sapiens
  source 1..330: mol_type = other DNA
gggagttccccaggccttctgggaggcctgggctctggacgataatgggcctgatttcctgaagccctccacatggacagtgtctgaggctggccctgttattcgaaacatacctggtatcctggagtcccaggaccgacattgttgtggggagtccctggggtcagacccaggccccgcccccagacccaggccctgcgtgcaacctcagtttccccaggtggagaccggacaggcagccacagttggctggcacccagctgggaagggcccaagggcttttaaagcgcctcatgcaagagctgctggtcagagcacttcctggaactt

SEQ ID NO: 25263 - DNA, 480 bp, Homo sapiens
  source 1..480: mol_type = other DNA
tagggatgaagtgaaaatttcaaaagccccctttttcagggtggtgaggtcccccttcaaccctgaatagggatagtttcaaggcccccgacaccagtgccctggaaagaatttataaattcacctaagtcccagggccctgcccctacaccagtgccctggactgggttaggggcccacaaaccctggtaggggaacctaggtcccttgatgtgggggcccaggagcagtttcaggacctcccctgcatctccctggagacccaccctgggtcagaagtgtggttgcaggtggcggcctgggcctccacatcctgaaagcccttccactccatcactgcccgaaggccgtcccggcaggcctcgctgttggccttgatggtgaagataatcaagggcacccccagaatcacgatgatcccagatctcccctttagagaagttccaggaagtgctctgaccagcagctcttgcatgaggc

SEQ ID NO: 25264 - DNA, 452 bp, Homo sapiens
  source 1..452: mol_type = other DNA
aaaattccttctcttaaaagaaaatctccattttgtgtagatgggttgttggctgagcctgcgtgtctggagtcccaccctgcagctagcattcctctcccttcctgtacccaggggaagaaacaataaaacgttatgctttttactgttgagaaggggcagttagagtgagagcctctccttctccattccacaaagtggggaggtaaaataaattcttttatacgtcgctttttaaacgtttgggatgatttcccagaactggaattgcagattcttcacaatgcatttttagtagaccgggattacaggcatttccggcggaagttgctgggcgcggaaagccggcaagacctttttttccgccatcatcgctcacgcgcgcaaccctggcgacgcgtggtggcgaggctccgcctccccacgccattggccagcagcctcgggcacgc

SEQ ID NO: 25265 - DNA, 158 bp, Homo sapiens
  source 1..158: mol_type = other DNA
aggtatccacccaccttgacctcccaaagctttggggctcaagtgatccttccatctcagctgagtagctgggacgctggagtgcagtttcaccatgttggccaggctgtcccaagtgctgggatcacaggctctctcctgagaagggccacacagag

SEQ ID NO: 25266 - DNA, 316 bp, Homo sapiens
  source 1..316: mol_type = other DNA
cggccggcctcggctctgcgggctgccgagccaaagcctgagggcggggcccgtggccaggatagaacctgagcctgggaacttggcctgtgggctgggctagaaggcggacccagggtccgggggcggagcctggccaggacctggccaatcccaggcctggggccctggtctggttatgcctggcctgaggagttgaccaatcccaggcctgggggcggagtctgactcggagcgcgttcccggactcgcggggggcgcagagccgaggcctgggggcgcggctcgctgggtcgtggggcggggctggagcggc

SEQ ID NO: 25267 - DNA, 419 bp, Homo sapiens
  source 1..419: mol_type = other DNA
acgtgtcctgcagccttggggcgtggctcgcaagatatcaggacccgagccctaccacacccacggcccgcgcgggctgtattcgccccaaagcctctttcggtcttaaaaacacgttccagggcccgggggagtgcttggggcctccgccgcggtaagccttgtcggttaagtctcaaggccctttacttgcaccccggggtcctagatgctcccccaggcgctgccagcgctggcctgggggcacgcaagctgcaagccgtgccttcagtctcccagaagctcaggcaggaggccgttctccttaggaggcggcccgggcctgattccaatgcatttggaggacagggctgggcaggcactcaccccctacgctgccattggtccctgcgggcagcagggtggctgggacaggccca

SEQ ID NO: 25268 - DNA, 289 bp, Homo sapiens
  source 1..289: mol_type = other DNA
acatttatgaatgaatgaatctcaattccaagtaagcatgacagtgacgcgatctcggctcactgcctccggagtagctgggatgctgggattacaggcgtgagtcacagttactggtcattgctgactcttccaggcccagaaagcagcaggccagtggctggctctgggcctgtcccagccaccctgctgcccgcagggaccaatggcagcgtagggggtgagtgcctgcccagccctgtcctccaaatgcattggaatcaggcccgggccgcctcctaaggagaac

SEQ ID NO: 25269 - DNA, 310 bp, Homo sapiens
  source 1..310: mol_type = other DNA
ctgtccaggcaagaactcgattggaggcctttctgggcaaaaaaaaaaaattcaacaagcatattttcatcccctacttttttttgagatggagcctcgctctgtcgcccaagctggggtgcagtggcacgacactcaagcgattctcctgcctcagcctcccgagtagctgggactacaggcgcccgccaccgcgcccggcggtgcaggaattttaaacactggcttcccgaactcctgggtagggccggaccgactgcccgaccttcgcggcggcagggccggcccttgcgcaggcgtactagcgacg

SEQ ID NO: 25270 - DNA, 219 bp, Homo sapiens
  source 1..219: mol_type = other DNA
acgcccagctaattttatatttttaggattacagctgcgagctccagagcagaccagggcccctggggcgcctctcagtgggatagggctgcagctccttgatccaaccagggcatctactgtgcgctagccacaggtgctgggcctgggcaagcctggcccccactccctgtagtggggcaggtgcaggcggcccaggcagccggagaaggttaccct

SEQ ID NO: 25271 - DNA, 347 bp, Homo sapiens
  source 1..347: mol_type = other DNA
aaacaaaaaaacaaatgtattctgtcttagctatagactagtctgtcacccagactggagtgcagtggtgcaatcacagctcacttggtgctacagatatgcaccaccacgcctgcctacttgtacaaatttcccaggttggtctccaacccctgagaagataagttccaaataaatgcttatttggaataagtattccgaatatctgctgagctccagctgcactgacagggcgaagcactgcattcagccatgctgcgtgcttctccatgtgctgggctcctgcacatttttctaggccccagggacgactgggtgcatgggggctgcccagccacgtgcaagtt

SEQ ID NO: 25272 - DNA, 378 bp, Homo sapiens
  source 1..378: mol_type = other DNA
tctgggcgacagtgcgagagatatgccaggtgtaatcctaacattccgtgtgggtcacttgagcacaggagttccaggctgcagtgagccatgatcgtgccactgcactccgaagcttcatgccccagcactgacctcagggacagtctgggagtgcctgtccagctctgtctccccagcctggggactcctaggagctgggccagggctgtatcctctctggggtccagcctcaccgggcacagggtaggcacgtgggggggtgtggcaccaggaactagatgccgcatcccttgctggccggtcctgccagatgtctgccctaccactggctctgggcgggccccaggcaggggcggggcctctgaacccactgtg

SEQ ID NO: 25273 - DNA, 417 bp, Homo sapiens
  source 1..417: mol_type = other DNA
tgcagtgagccgagatcgcgccactgtactctaaaaaaagaaaataataataataataataataatgttcagatgtattttttaaagtttttattgtttttaaaaatagaggcacggtcttgctatgttgcaccactgcaccaatttacagcgtttccatgaaaacatggcccttgtctctggaagagcttggggtctctatgatctcattttatatcatctgaggctaaggtctcttgggtcccaacacagcccgggttttatacatgccacgcgctccgagcgctatgtgcctttaagagtcactccgggccttggctcggagagcgtctggaggcggggcctggacttcacgcccggcgcgctcctcccctttaaggcgcgcggccgggcggggcccctatgacccctttaagg

SEQ ID NO: 25274 - DNA, 302 bp, Homo sapiens
  source 1..302: mol_type = other DNA
acccttgcacaggctggatctagagtaagacccacttgggttcaaactttgtgcttgtatgtaatgagctaatgcaataatccaggcaggcccagagtacaagatagattgttcaagcgagctgggagcatccataggcaccgggttctggagggcaggagttctgacctacatgcagcaggcacgcaatcaaagcttgttcaatggagaggcggctcccaagcggacacccaggagtcggccacgacctcaaagggcctgtaagtggtcgaccccttccggtgcggcccctttaagaggcg

SEQ ID NO: 25275 - DNA, 253 bp, Homo sapiens
  source 1..253: mol_type = other DNA
acatatatatatatatatatatacacacacacctgagacggagtcttcctctgttgcccagagctggagtgccaagtagctgggattacaggggtcaggcatttcattcattcattcattcattcattcatttatttgctctgatacccaggctggagtgcagtggtaggatctcagctcaacacacttttttttttttttaaatataaaagccctctattggaaatttaaggtccatagacaatccctatgg

SEQ ID NO: 25276 - DNA, 285 bp, Homo sapiens
  source 1..285: mol_type = other DNA
aggcatgctggcgggtgcctgtagtcccagctactcgggaggctgagtgtagcgagcggagatcacaccactgtactctagcactacaaatctgtctgattgttgacttccagaacccttccaaatgccagcaggtggcatctggatgtattttcaatatagagatggaatctcacttcaggccaacgctgaccgggctctgtgccaggaacccgcaaggcgctgcttgttcatctcccagcgggccagacccaaggtggggtcgtgagcctcgcctgggccact

SEQ ID NO: 25277 - DNA, 350 bp, Homo sapiens
  source 1..350: mol_type = other DNA
tcccagctactcatcccagagtgagccgagatcgcatcactgcactccagcagcaagactttgtctcaataataataataaaaataataatagtccaggcactgtaatcccagccagcctggccaacattgcgcacctgtaatcccagctactcagggaatcgcttgaacccgggtgtcagaagttgcagtgagccgagatcaagtcactgcactcaagagccctctgggagaagtacatccaaggccctggccctgggagaaaggctctggcttcctgggcggtcctgaagaatgttctgtcccttctccaaggcccccagctgggacggcccaggcgcctataaaggg

SEQ ID NO: 25278 - DNA, 259 bp, Homo sapiens
  source 1..259: mol_type = other DNA
acctgtaatcccagctactggggtggctgaggcacgagaatctctgccactgcactccagcctgggtgacagcgcgagtcaatttgagtcccacccctggccccacccagctgagggccctgagtgctgaggtttctcctggaagcagggggccagtttcctcctgggcccatcgagtctgactctccaggctggagtgcagtggtacaatcttggctcactgcaacctctgcccgagttgctgggattacaggaacgg

SEQ ID NO: 25279 - DNA, 369 bp, Homo sapiens
  source 1..369: mol_type = other DNA
caagaggccaggccggatccacctggttttttagggctgggcccagggcaccacaggcagaaatggggatgacaggcgtgagccactgcgcccagcgtctcccgagaaatacctcaaagaagaacttgaccttcctctggggcaacttcaatccagccaggtttccttccctgggtgcatgctacagatgggtaaactgagggccgggccagagccccacttaacaagtgggtctagagtcggctgagcccctggtgtgatccagcagcctgtctgaacggggcggctgatgcagaggcttccggaactttcccgcagggccctgactttcggtaaatgacagtaggaaggagccgagtgggactttcc

SEQ ID NO: 25280 - DNA, 367 bp, Homo sapiens
  source 1..367: mol_type = other DNA
agacagagtctcactctgtcgcccaggctggagtacagaagtgggcggctggatcttgatccaactggaggcatattcaatattcatcgctaggagaaaaatatattatttgtattcccattttacagataccctcaggtatctggtggagacctccgtaacacacctccccggaggatgaggccccgagtgtgaagcatcgggatctcacggtaaacaccgcagccacccgaggtagcttaggttcaatgcttaggcatcctgcaggcggcgcgcgccgccgcccctagttgcagccgggactggcggagtgcctacaactcccgacgtgccgcgcgcgcagacgctccgttaaacgaagtctcgc

SEQ ID NO: 25281 - DNA, 376 bp, Homo sapiens
  source 1..376: mol_type = other DNA
ccccagagaagggccctgagatgctcatctatatgatagggacaagccagcagtgagccatttatgcctggcacagggccaactctcagaataaatgaatgaggcacttgggtgcccaccccctaaggctctagagtatgggtcccctgaacaaggtattcaagcacaatacggctttgagtgctgaagcaggctgtgcaggcttggatagtgacacctgtcaacagcagacagtgacagctgtgatcatggaggggcatttgggagccctccccgataccaccctagcctgtcctggcctgtctgtcccagtccagggctgaaagggtgcgggtcctgcccgcccctaggtctggaggcggagtcgcggtgaccc

SEQ ID NO: 25282 - DNA, 319 bp, Homo sapiens
  source 1..319: mol_type = other DNA
ccctttttactgttgagaaacctaatttctaaataaaattaataaataatattgcagaagtggccccagcgtcaccagtgggacgcagaagcacttttaaagcgttaagggattgcgaggtccacctcccctcatggaccgcgggcgcgctctggcggccgggccgctccaggctgaagccgccggaccacggcagaagtgtcctctttttgaagagacaccctggcttgggtccgaggcccagccatctttttctttaccaaaatggcggcggtactgaggcgcaatgagtgcgcgccgccaggagctcagcgcgcag

SEQ ID NO: 25283 - DNA, 337 bp, Homo sapiens
  source 1..337: mol_type = other DNA
gtggcacatgccaacatcctgtatttgtgccactgcattccagcctggtccatgcagtggaggacaggcctgtaatccatcacttgagcccaggagttcaaggccagcctgggcaacatgtagtcccagctacttaggaggctcaggtgggaggatcacttgagcccaggaggtcaaggctgccactccagcctgggcgacagagtgagaccctgtcttaaatgtactctcacactgtgtgagtggcacaatcatagctcactgtggcctcagcctcctacgctcaggcgatccttccacctcagcctcctaagtagctggaactacaggccactgt

SEQ ID NO: 25284 - DNA, 357 bp, Homo sapiens
  source 1..357: mol_type = other DNA
gatgcaaaggctctgaggctgaaccggaccgcgctcctcttggttcaacagggacgtgacctgtcacacgggtgaggactgaagtctgtggggaatcccctagccttccccaacaggggcgggaagtcccccccggggagggtgttgggtggcacccctctctgcctccacagtgcagtgagcgcatctcacacacaatgggggtggggggtgcgctcccagtttcggcgtccccgagccccgcccgcgccacggaatcccggcctccagaccccgcccgggaagctcgttacctttccagagaggctccccgccggggggctggggaggggaggtttgtagaagcctccctgcttc

SEQ ID NO: 25285 - DNA, 278 bp, Homo sapiens
  source 1..278: mol_type = other DNA
gttcctgacctgggccaaagctctgggctctgctggctccaggaagcccccaggctggtgggggacagagctgaacacagtcaccccaagcctggtgggaacagggtgaactttgaatgacacagttttggggacccccagccctggtgatcccaaactccctggggctctggcaccaaggtccttccccagccgcatgccggggggttgcggggtcgtcgaaggcggtgccaacccgggctcggccaatcggcggcggctcccgcgtcgcaccgccc

SEQ ID NO: 25286 - DNA, 450 bp, Homo sapiens
  source 1..450: mol_type = other DNA
tcccgctggagaaactccatgcgacttttctttgggccgtcccgtggccacaccgcagctgtggacctgggggtgcccgagcgtcccctgcattcccgctcctgggcgaatgcgccgaggcgcgacgaggctcttggaggagtccagctggggctgcacgagcaggcaccagtgtggagggcggtcccacccacctcctccacttctgctctctggccctcaactggggcgagagtcccccgccccaaatcgggctggacatgcctctgacctcaggcctgggcccacccccggggtccgcgagagaccagctctggcagcctaagggcttcagtttctccccggggtccgcgagggaagggggcagccggcgcgctattggtggagtcccttcccggggcggggaagagacggtgaccccacccccccccgccctgccgtataaaagcg

SEQ ID NO: 25287 - DNA, 339 bp, Homo sapiens
  source 1..339: mol_type = other DNA
gctgcaagctctttgtaacaatttgttggaaggatgaaattagctcttgagtctcagattcagaagctggcgagatggcccggtgcggtggctcacgcctgtgatcccagaattttggtaggccaattgcaccactgcactacagcctgtcatcccagcactagcctggccagcaggcagttgcctgtaattccagctactcgggtgagtgccaacactcgcggccaagtgcatggaaccacaggtggcccatgggcccatggggctgaggtctggggccagcagggcagaaccccctacctgacttgctccaaagtcagacttgctccagagtctgtg

SEQ ID NO: 25288 - DNA, 419 bp, Homo sapiens
  source 1..419: mol_type = other DNA
aattaaaaaaaaaaaaaaaaagttttggtgttttggccatatgcgtgacacctgtaatcccaactaaaaataaaataaaaaataaaagttttgatgttttgttcatcataaatgttttcattaattttatgtttttaaaatattatttctactcgccagacagagtctcgctctgtcgcccagtctggagtgcagcggcgctagtagctgggattacaggcgcgcgtcaccaccccgccactgcgcccggccaatgcgctgggcatatttgcaaaatgggctggaggggcggggccagctcgcccagtgggggcggggccctgtggtcgggctccccgggaggggcggggccaggccgtgtcagctgaccggcctggccaatggcacctggcggcggggcctggcaggccggggcgggg

SEQ ID NO: 25289 - DNA, 296 bp, Homo sapiens
  source 1..296: mol_type = other DNA
cccagctgctcggggccctagagcaatccgttacttccggggcgctccggctccgagtgcgttcggctatttccggaaaccgtcggcatctaggctcaagtccgctaaattctagtgcccgtagggtctaaactcccaaggcctccattgggcactgagcacattcggttatttccggccgtagagagtgttcggccatttccgaaagcgctcgggcgtctctaagcccagccgagcccagtctcggacgtgtctcgggggcacccgtcatccgcccggctcgaatgcgctcgggc

SEQ ID NO: 25290 - DNA, 358 bp, Homo sapiens
  source 1..358: mol_type = other DNA
cctggaagcattaagtcctggccatcagctctagtgctaagaaataggttcaagttcttgtttccccatataaacaggtaagaaaggctacatgcctctgggcctttgcacgtgctgtggcctctgcccggaatgccctcattcagtcggggaatccgtgctcatccctccaccttcgtggagggacgccttgactctcggaggcgctggggctggaggcgggactgcccccccaccaacacccacccccgcgcggccagagaccgggtgtctctgatctgagttcgcagtcccgcagctaccggtgcggctccaggttggagacccgccggctgcaccccagggctcccagcaatga

SEQ ID NO: 25291 - DNA, 331 bp, Homo sapiens
  source 1..331: mol_type = other DNA
tggctgctgccccctcatgtccaactgggccaagtcggcagatcttgtaacaggggtgatgaagaaggcagaggcaggaggactgcttcagcccagcgttgcagtgagctgagatcacaccactgcactccagcctggtagagcaaggctgtcagtatacccagaattccaaatcaggatttgggcccatctccgtgtgagttggcctggctaacgctgccctatccctgtctccctaggtcggcgtcctcagctggccgagcatggtggcagcctgcacccttggctcccttgtctggtgcagccagcagagccgccagccttgggcgcc

SEQ ID NO: 25292 - DNA, 382 bp, Homo sapiens
  source 1..382: mol_type = other DNA
cgttgcagtgagctgagatcacaccactgcactccagcctggtagagcaaggctgtcagtatacccagaattccaaatcaggatttgggcccatctccgtgtgagttggcctggctaacgctgccctatccctgtctccctaggtcggcgtcctcagctggccgagcatggtggcagcctgcacccttggctcccttgtctggtgcagccagcagagccgccagccttgggcgcccatggccctccgtgtgagggcgtgagcggcctgccccagcctcacctgctgatggaggactcaatggccagcggcccctgtggtcgcctgtgactgctggagatagaggtcccagcaccccaacaaccaatggggccagtggggctc

SEQ ID NO: 25293 - DNA, 421 bp, Homo sapiens
  source 1..421: mol_type = other DNA
agctaatttttctgtttagtagagacagcacccacctcggtaagtgctgggattccaggcttgagccgccatcctggccgcaccctaatgccaggctggaagacctatttccaaataaggtcacaggtcacctagtctgtgaagttgtgtgaactcctcagcatgggagggtgccaagcacttgcctgagctgggccctgcctcaaactgccccagctgaggttcagccagcaaagagaggggctgggctccttccaggaaccccacccccacctgatgtggctccccctcttcctggctgctcatgctgcacggaaacaggctgagcctggatgccctgggcctctatgttgaatagggacatgaccaggccactgcatgtgctgtgccatgcccttatctctgggcagcaaagggagac

SEQ ID NO: 25294 - DNA, 321 bp, Homo sapiens
  source 1..321: mol_type = other DNA
gcgctgctggtggagaagctgcttcaggaacacttggaagagcagggggccgtaaatactgatccctgagtgctgccggcatcagcaggctggttgcagtgggaggcagccacagtatacagtcggtggcctccacagtcctggccaatggagggagcccaccctccctgcaggatgctgagttccgggacactcccgatggcaccttcctagtccgagatgcttctagcaagatccagggctggggcctgtccctgcaggaacctcgcaccactgcactgcagcctggagtgcggggtcccactgggtgccgacacccct

SEQ ID NO: 25295 - DNA, 686 bp, Homo sapiens
  source 1..686: mol_type = other DNA
ccccacctgatgtggctccccctcttcctggctgctcatgctgcacggaaacaggctgagcctggatgccctgggcctctatgttgaatagggacatgaccaggccactgcatgtgctgtgccatgcccttatctctgggcagcaaagggagactgcaggggggttgagcggccagtccaggcctcacgaggtcggggcagcatttgagagctgcccccagggctggacagtaccgcccggagctgcccgcaccgcgtacaggtggggggccccagtacacatgagttggacgtgtgcccccctgcacccgcagactggtccctgagcgacgtggatcagtgggacacggcagccctggctgacggcattaagagcttcctgctggcactgcccgcgccgctcgtgacccccgaggcctcggccgaggcgcgccgggccctgcggggtgagcctggcgggtagcccgtagcgggtgggagggcccaggcctggctcaccctgccctggccatctgtccgcagaggccgcggggcccgtggggccggcgctggagccaccgacgctgccgctgcaccgcgcgctcacgctgcgcttcctgctccagcacctgggccgcgtggccagccgcgccccggccctgggtcccgcggtccgggccctgggcgccacctttgggccgctgctg

SEQ ID NO: 25296 - DNA, 324 bp, Homo sapiens
  source 1..324: mol_type = other DNA
gggcccaggtcagcctcagcttagtcagaggtgtgtgcaatgggagtgtcactcctatcccattccattttgtggaaagttggaagccttccacaagaccagcctttcagcctgggcctaccatgctgggtggctgcggcagccctgtccctcttgggcctcagggagggcactgtcgcgtgccaggtgctgtgctaagcaccgtgctcgacagaaccgacagctgccctgtgcaaaggccagcagtgctggaggttccccagcagagctgggcgagccaccctgggttcaggctgccctgagccaggtcagctctgccctctt

SEQ ID NO: 25297 - DNA, 582 bp, Homo sapiens
  source 1..582: mol_type = other DNA
gtggtgttccttctcaggtggctcacccagaaaggcgcgtccaggcagctggggagcctcggaggctggcaggtgagtgaccagggccctccccgccaccgccccccaccgcactcatggaggacgaggacgatctcccgcaccactggcaagcgggatggcaccttcctcatccgcgagagcagccagcggggctgctacgcctgctccgtggcgcagcggtggggattcccgcgtccctcccagagctctcattgaatgcctgccgcgtgccaggccttgggaaggagtccctggtggggtcatccgggacaggggagcacgcggccctggaacggggaaagcttggcggggaggccagccttccgactccccctctcgtctgcccccacagagtggacggcgacaccaagttcggcttcgcggagccctacaacctgtacgggtcgctgaaggagctggtgctgcactaccagcacgcctcgctggtgcagcacaacgacgcgctcaccgtcaccctggcgcacccagtgcgcgccccgggccccggcccgccgcctgccgcccgctgagcaccgagga

SEQ ID NO: 25298 - DNA, 611 bp, Homo sapiens
  source 1..611: mol_type = other DNA
cgcactcatggaggacgaggacgatctcccgcaccactggcaagcgggatggcaccttcctcatccgcgagagcagccagcggggctgctacgcctgctccgtggcgcagcggtggggattcccgcgtccctcccagagctctcattgaatgcctgccgcgtgccaggccttgggaaggagtccctggtggggtcatccgggacaggggagcacgcggccctggaacggggaaagcttggcggggaggccagccttccgactccccctctcgtctgcccccacagagtggacggcgacaccaagttcggcttcgcggagccctacaacctgtacgggtcgctgaaggagctggtgctgcactaccagcacgcctcgctggtgcagcacaacgacgcgctcaccgtcaccctggcgcacccagtgcgcgccccgggccccggcccgccgcctgccgcccgctgagcaccgaggacccgccccaagcagagccgcccctgggcccgtctgcgccggaggctgcggcggcgggagccacggaccagaccagccacatccccctgcccaccgcaggtcccccggggtcccggaagccccttctggctgcacctgc

SEQ ID NO: 25299 - DNA, 373 bp, Homo sapiens
  source 1..373: mol_type = other DNA
tgggcccatgggcgtcccttgaaggctcaccccaagccagaagtggggctgggtggtggctgtggtcaagcctgagtcagtcccacgggaccgacctggccacacaggccttgcccactctcgggggcctgaacaggcccactctgagagtgggtctcgggcctcaagtcccctagccgcccctagaaggtctaggggtgcgtggagacaccaccattcacgccagggctcacgtgcctgggcagggctgattgccaaggggcccaatggcctcgtgactggggacccagcacctggcaggggtggtggcccgggacccgaggggcgtgggcatcgggaggcgggcccgggttaggggcgggaccgccgcctg

SEQ ID NO: 25300 - DNA, 344 bp, Homo sapiens
  source 1..344: mol_type = other DNA
tgcatagggatttccattgaaaatcattttttaagcagcaccttgggaggccaaggcgggtggatctcttgaggtcaggagttcgagacgggagaggttgcggtgagccgagatcgcgccaccgcactccagcctggaaaaaataattgttccctacgggaacggtataattaggatatgtcactgatttgccagcgtgacgccggtctgcgactggccagtgccgtcctgggcgtgtcggatcggcatgcgggacgtaacgcaattcgaggctgcctgcgggtgaacgcgtcgcggctcggggcggacctggcgggcaatttgggatcgacagtgactcgcga

SEQ ID NO: 25301 - DNA, 552 bp, Homo sapiens
  source 1..552: mol_type = other DNA
caggatggagggagggggtctcccagcccccgggtctttgaatccgagctttgaagagctggaggcttcggctcgtgccctccctgaggggagggggttcccagagagtccatcagccccttcctccttttctgggaatggtggggaggggaggctctcttgacctctacttcttgaaacgggggaggggtggagtctttactagcccctccctcagtgggggggtcttacgcctgggacattattttgaaccccatatatgtgagggtataaaacatctctgcctgtcccctacctggggtgggtgcgggcgggtaagggaaccgcccctcgaagaccggggctcagccaaggcctcagcctctcggctctctgattggctacttcgcccgtcgctcgagagcttaagccagtgacgctgaggggccccgcctccccgaggcggacaggaggcggacgagaggcggagtcggcccccgcgccgctcccgcccctactggagccgtgcgtcaatgggccacatctctacgcgcggctccgccccggatggcg

SEQ ID NO: 25302 - DNA, 212 bp, Homo sapiens
  source 1..212: mol_type = other DNA
cgagccctggtttggccctggctggctagccagggagtgtgggcttccagtctgggttgctcacccactgtgggagacttgggctgacctggtccacccagatgcacaggacctgaaccccgagcgggagggcctggtttgaactgaggggtagggccagccccagactttccaggaagaggctccatgtggctcctgcttccctgaccctg

SEQ ID NO: 25303 - DNA, 374 bp, Homo sapiens
  source 1..374: mol_type = other DNA
gctgcactccagcttgtaatcccaggctgtgattgcaccattacctgtaatcccagcactttgagaggctgagatgggtggttgagctcaggagtttgagaccagcctgggcgggaggatcatttgagcctgggaggcagaggttgcagtgagccaagatcttgccactgcactcaaaaaaaaatcggagagggcctccatttttgcaattctttcatttatgaagtgctttgaagaaatggcaagagtcacatgcctgtgccttaaccatttggaggtgccaggtctaggtgtggctgggccccgccagtgccctcccaagcccagaacctggtgccgctgcccctgtaccgccagtggacggaccgcatcat

SEQ ID NO: 25304 - DNA, 305 bp, Homo sapiens
  source 1..305: mol_type = other DNA
gcttcccccactgcactccagcatggataactgcactccagtgcaggcacctggtctctacaaaaaattttaaaattagccgagtagtctcagctactcagagctgcagtgaggtaggatcacaccactgcactggtcagtacctgtccatggccacatagccactttgagagatctggaactgaggtcctggagtccagtgtagcctgactgccaacaaggtggccacgacccggcacccagttgtcatggtgtgggaggagggccctggaccctcagtccagccctggcctgggccggattat

SEQ ID NO: 25305 - DNA, 430 bp, Homo sapiens
  source 1..430: mol_type = other DNA
gagtcccaggctgagcgcgcgcctgcgcccggcagctgcttgcgctgtcctgcgcttggtccgcgccgaattcggggaggtccctctccaaggtcagaaggtataccgtggttcctggtggttccgacagcgcagggacgtcgagggcgcgtcgcgggtgatgaacgagggccggccccgcgcaggccagacccgaacccaagtccgagcctcccctggccaatgggcagccgcgccgttcccacagccggggggctctacccccgcaccgcccgcgcagcctgaccccgccgctcccggctaagtcttccctccgcgcccgggatccggatttgcctgtggaggggtagggggtcgcgatccgcatgcctccccctcgaggggcagatctggggggccagggaagggttaagaagccccgccccttcgg

SEQ ID NO: 25306 - DNA, 294 bp, Homo sapiens
  source 1..294: mol_type = other DNA
tttgggtctcgctttctgcaacaaagacccatgcccctcagtttctccatctggaaaatgggcagatgccctcaaaatggaaggcaagacagctgatccaggctctgagatcttagggggcctggcgcaacagctacttgggaggctgcaatgagctaggactgtgccactgcactcctgcctcccccgtttgtcccgggggtcgtcagggagccgccggcctcgaggcggggccgatgcgccctttgccccctccccgctgggccccgcccccgcagctgtccagaaaaggtc

SEQ ID NO: 25307 - DNA, 465 bp, Homo sapiens
  source 1..465: mol_type = other DNA
atccctgcctggcatgggtgggggttttagggctccaaagagaccccttctggggctgaaccgcggagcctaccttcctgggcttggcagaaagactgctaggcggatgacgccctggtctgggggtgcacctgaaccccggtctcgcggacagctcttcgtgcgagggacaccgtctcggccccgggggtctcctgagaccctgtttgggggggggtctcttcagcccctagcttcaacaccccccggtgtcggccccaccgcggacagctcctcgctgtcgcctccactcccggccctgggccggacccgggagcagacgctcctcggcgcccgctcacggggacgagtccagaacctggcggcggcagcaggttgagtcgctctcgcggccgccacagcatgagcacctgtggcggcaaccccggcgccccatccgcatccaacagcgcttctattcggatc

SEQ ID NO: 25308 - DNA, 398 bp, Homo sapiens
  source 1..398: mol_type = other DNA
ctttaaaagcacgagagtctcagagatactagtcctcccccaactcagctgcagcatggctttggggtggggtgtttcttagatggagctctggccagaggtagcctctgtgtgcccatcccagacatgggagcccatccctgcctggcatgggtgggggttttagggctccaaagagaccccttctggggctgaaccgcggagcctaccttcctgggcttggcagaaagactgctaggcggatgacgccctggtctgggggtgcacctgaaccccggtctcgcggacagctcttcgtgcgagggacaccgtctcggccccgggggtctcctgagaccctgtttgggggggggtctcttcagcccctagcttcaacaccccccggtgtcggccccacc

SEQ ID NO: 25309 - DNA, 322 bp, Homo sapiens
  source 1..322: mol_type = other DNA
gtgctgggatgacaggtgtgagccaccatgcctggcctcccagacagggtctcagccaggcaccgtggcttacacttgtcatcccagctacttgggagactgaggcacaagaatcacttgaacctgggaagaggttgcagtgagccgagattgtgacgctgcactccagcctgggcaaaagggtgggactctgttttaaaaacaaaaaagagataggctggtctggaactcctggccagtacaatggcacgatcactgaaatcgatattcttggtgatccaccctcctcggcctcccagagtgctggaattacaggcgtgag

SEQ ID NO: 25310 - DNA, 234 bp, Homo sapiens
  source 1..234: mol_type = other DNA
ctgggtaacacagtgagactccgtccttttagtccttgcaatgatgccaagagttggagacaccattattattcctcttttccagaatattttaaaaaaagactttgggaggggaagtgacagagccagccagtgaccatgtccctcaccagctcacagcttgaattcagtctgtctgacatcctggccctgatgcagcaagaggaaccatgatggaaaaggactttaaaagca

SEQ ID NO: 25311 - DNA, 234 bp, Homo sapiens
  source 1..234: mol_type = other DNA
agaaaatcacgttctgttgttttaaacctgacccagaaaactaatagattctgtgagcagaaacaggcacagagtaggtaataagtacttaatatgtgccagaaaggcaccccgcgccggcgcgcgttgctccgcctccttttgcattacaagccgcgggttcctccggcgggaacacggcccgccccgccctttcgcccagcgggccccgccctactcgcttagtggcgcgcg

SEQ ID NO: 25312 - DNA, 286 bp, Homo sapiens
  source 1..286: mol_type = other DNA
gaggctgcagtgagaccagattgcaccaccgcactcctcacctgaggtcaggagttcaagaccagcctcgccgatcccagctactgagctgagatcgcaccattgtactccagcctgggtgacagagcgagactctgtctcatgcggctgtagtcccagctacttgtgaagatggtgccactgcactccaggcatcaacatggcgatgaaggtagcagcaaaccgcatgctgggtgttccccatccccctggctacagggattggttaatgattctcccctgggaa

SEQ ID NO: 25313 - DNA, 440 bp, Homo sapiens
  source 1..440: mol_type = other DNA
tcaaagttacagagctatgattttgccactgcactccagcctgggtaacagagtgagaccctgaaaaaaagagagagaaaggaaattatttctgagctttattgctatcatttcccctcggaggagcgcaggtacctgcggggtgtgttccggcagagggaacttagcctcctaggaccatgggggcctgcagagcaccacacaaatatggttgttaattctgcgcagtatgcatgcatagggcaggccctcaatgaacccttgcagcgtgcaagcggctacacactactgttcccattttgcagggcctagccgacgggggcggggcgcagggcgcgcacgctgcgtctcgggcccgggggcgcgcacgccgagcggctgaccgggggcgaggccgggggcttgacaggggcgtggcctcgcgcggccgagaggctgca

SEQ ID NO: 25314 - DNA, 149 bp, Homo sapiens
  source 1..149: mol_type = other DNA
atgcctggcccccagaattatgaatcctgtgaacatcatggtgaggaaacaggcaggcatgacacatcaaggttcctgggaatttttcacatagtaacaatgtctttttttcctccaaaaagacttttactaggagcgccccccagctg

SEQ ID NO: 25315 - DNA, 247 bp, Homo sapiens
  source 1..247: mol_type = other DNA
ttgacagctgtggacatggtgtcacacgcagttaaggtggcagctggcataggttgtacctggtccacctgacaccaggttcaggtgaggcctgagggacttcttgagccagtcccctccagcatagaggtgccactgtgcaagaactcctccaggaagccttccatagctccttgaggacctggtcagggctgaggcctcttgggggcccagggaagcgggactctggtccacccctctgcaaggg

SEQ ID NO: 25316 - DNA, 464 bp, Homo sapiens
  source 1..464: mol_type = other DNA
tgtttcccggtcaaggccacacagtgaacagctaggttcaaacccaggcccagagcctctatctgtgagtttccgggcggggtaaaggagtgaggctgtctatttttgtgttgcatttagaaaattacccataaggtctcctagcgcagacccggctcccagctgtggccgcctcccacgcacgcacggctggggaggggttgcagggggcgccagccccagtcctggcccctcccagggccccccactttaatgaggaggagggagggaggccgtttccgccactctgcaggaatggggagtactcgtgggcccccccactgctgtgtcctcaaggagacaggacccatgccaagtccaactagggactgtgcggaaacagtcttaggaagaggaggagttggcctcctcccccaggaggaccaaggaggaacccttggccaaaggaggagcctcgccagggt

SEQ ID NO: 25317 - DNA, 420 bp, Homo sapiens
  source 1..420: mol_type = other DNA
caggaagtgggaagggctggcgtcccccctcccgcgccgaggcccctcggggaggaggcggggctggggccggtcctgcccttcccttcctctccgcgggtctggagccccggcggctcccgacttcccgccggccagaaggcttggggtgggggcggggctgtgcacattcggcacacacttgtgccgactcggcccgaccagtcgccgagacagcgtggggatgcacacgtgcactcacacgggagccgcgtgtttgcacacacgcgggcttgcctccactggtacccgggcatccctgccctgcgggggtccctgactcagtatccgcccccaccctctctgaacacccctggtggggggatgaagggcttgtcaccgggtgttacttcggggtggtgccaggtggctcccacagcc

SEQ ID NO: 25318 - DNA, 435 bp, Homo sapiens
  source 1..435: mol_type = other DNA
cacccctggtggggggatgaagggttgtcaccgggtgttacttcggggtggtgccaggtggctcccacagccccgcaggccctgtgtccacggctgttggaagctgtggcacggccttgcataagcgcgcgcctgcgtgaggctgtgagtgtgggtagctctgcggggtgagacacccaatgtcactgcctgaggcagcgggacactttgaacgtgtgtgtgcacgcgcgcgtgtgcagccgcgatcagctgtgcgtccctgggtggccgtccgggatcctgacccgcgagtgtgtagccgcgcccccaccccccgcggcgggcactgcgcgtgcgcgctccggcggcgggacccacccgcgcgcccgccatcgcccctttaagagctgcgcccgcgggcggcgtagaggcagcgggcgggggcgcgcgcggcgg

SEQ ID NO: 25319 - DNA, 522 bp, Homo sapiens
  source 1..522: mol_type = other DNA
ccctgcctgtgagttcccacccactggggcgggggtgtcccagtcactccctcagactggggccccttcagggtgaggcctggacccagagtcttaagccctcatcctccaaggtcaggccagttcctgggggagctgccccggcctgcccgctgggttcccacgctcccttatcagcgcgcatgaggggggcgccctgcagtgcaggcctcattcctcccccctgctgcaggtgatccttgtgagccccgtggggacagagtgactttgtcccccgagcccagctccaccccctggcttgtaggggggataggcagccatgagcccctgggggctgcggagcgagcgaggtgaacctatacgcgccgcgctcgtggacgcctggccacttccgccaggcggggacccgatggccacggtggctctgggttgtcgggcctcgaaccgggtctccagacgttgggcccctccctcccagcgcgggagaggcggggaagggggcggggcgggcttttctccgga

SEQ ID NO: 25320 - DNA, 510 bp, Homo sapiens
  source 1..510: mol_type = other DNA
agcggcagctgcaggcttggccctagccgccctccccgatggcggggatctgggaggatttatttaaaaaaataaacccggctcatctgagccagcaccgccggctttcagggcagcccctgcagacgtctggccctggcgggtggctgcaagcccacctcggcctcctgagcagtccctgcttatgatgggctccccaggaagcccactgcctcctccctggctgcagcctccggggttcagccccagaagactcctaggaagacttgagtctatttttgtacaaaagagaagcaaaatcttttttctaaacctgtgcctccacccagggtctatgggcagggtctctgctccagcaagcaaacagggtggcccaggtggctattttgagaactccagctggtgcccccagacagctgctcagagccaagggggcagagggctttcagcgcccccaggcctgccctgctatttcaggccctcagctggagactcggccgcagcggcgtc

SEQ ID NO: 25321 - DNA, 389 bp, Homo sapiens
  source 1..389: mol_type = other DNA
atgtgcagtgagccatgatggcgccattgcactccagcctggattttatcctattaaaagtactcatctcataagaaaaatccctgggtggaagtcccatccaccccgcctaagggagcgcggcccaccctcccggcccgcggcggggcctacccacccacgtgtttcgagccggctccgaaataatgcatcacgtcagcggcttttgatggccacccctagggcctgaagaggcggggccataagtgccttatgaatatgcaacagggccttgtggggccctcatggggcgtggccaggcgcgggggcgtggccagccgcgtctcatgaataatgcagcgcgtcagcgggcggcggggcggggcgtggccggcgtggcggcgctggag

SEQ ID NO: 25322 - DNA, 351 bp, Homo sapiens
  source 1..351: mol_type = other DNA
actcatccatccatccatccatccatccatccatccatccatattctatagatgccaggccaagataattctggaagggaggaactcctcccagtggccctgctggctcagtcgcctgcgccctagacctcctcaggccctcaggttcaaggcttcaggatgggtcattcgtcaagcttgaactctttaaggaaataacattgtgacccgtgttggggtccagcccagggtcccccgcccccgccccaccccagccccagcagccgggaggcttcggcccgcgggcgcccgggacggacgtctgcatgagccaacgggtgcggcagtcgcggcagcggcggccaatgggca

SEQ ID NO: 25323 - DNA, 221 bp, Homo sapiens
  source 1..221: mol_type = other DNA
tgcctctactcccagctacttggaaggctgaggcaggagaatcgctcttgggcaacaagagtacgttcatcaactctgggaactccaaccttgactcatccatccatccatccatccatccatccatccatccatattctatagatgccaggccaagataattctggaagggaggaactcctcccagtggccctgctggctcagtcgcctgcgccctagac

SEQ ID NO: 25324 - DNA, 177 bp, Homo sapiens
  source 1..177: mol_type = other DNA
tagagacaaatctcgtgatccgtaaaaatatcacctgaggtcgggagatcgggaccatggtgcatgcctgttcacgccactaattccctgcttggtttcctgtcgtgacttaacgcacgcaagcggctccagggtacgtccccgccacgcgcgctcgcaggatcggtgcgtggtgac

SEQ ID NO: 25325 - DNA, 297 bp, Homo sapiens
  source 1..297: mol_type = other DNA
cgacctcaggtgatccgcacatgtgagtcaccggacccaggtcccgccctgactgcagtgggatgcggtagtaccggaaatccattcaggcacagctattcgctgagggcccgccaaccgccagcggttgtcagtggcctagaggcgcgggcggggcccacaaccggaagcgggtgggcgaccttcacccacgtgcgctgcggcttcgttcgccagcatccaagatggcggcagggcggggcccaaggcgcggcgcgaattgtgacgcaggcgtccggcgtgctccgtgcgcaagcg

SEQ ID NO: 25326 - DNA, 212 bp, Homo sapiens
  source 1..212: mol_type = other DNA
cgagtagctgggattataggcgccaggctcatcttgaggggatggcttcccatccaggctggcagcaggagcagcctgtgcagatcaggacctggctgccgtgggtgggaccgccttcagggaagatggatctagcaagatgatgccgtctgtgttcctgaaggccagctggggcaggaccagttggacttgtgctactcaggcatgcattg

SEQ ID NO: 25327 - DNA, 275 bp, Homo sapiens
  source 1..275: mol_type = other DNA
atcttcctgctcctccggctgggcccctggaggaggaagctttccaggttcaactcggtgggctgttgacacggagttccagcgaggcagactcactgtggctccggctggagcacctcagcctcccgagtagctgggactggaggcgggaggcttcaagtggaagtcggtgtgggcggcccgctcttccttctggctggccggccgcagggtagggggtccgtggacctcccggcctgtagggggcgtcgggcgcagcggaagggcctgctccg

SEQ ID NO: 25328 - DNA, 472 bp, Homo sapiens
  source 1..472: mol_type = other DNA
gggcagccggcgttacctggagtcggcgggcggtggccgccgaagcgattactcaccgcgtggcgcaccccacccgcgggccgctgagtggataggtcccggggaaagagcttcttaccgctctcgtgcgggacccagttcccgcgcaggcctgggtcccggctcccacaggggaccgtctgcccacgcaggagctccctcccgaggcccccggggcgcccagagctcccgcgcgcgaaggagggcgaaggcgagggactccgtgccttcctcctggaacccgcgcgccgagggcgtggggctgggggtgccgggtcccagactggggggcgcgcgcggtgggcggaggcgggacgggcggggcgcgcggtgcccgcgggcgggcgggcggcggggaggccggtgcggggcccgccgcccccccggggccgggccgggccgggggcggggccgggcggggccagcggcgcat

SEQ ID NO: 25329 - DNA, 602 bp, Homo sapiens
  source 1..602: mol_type = other DNA
ctctggacagtggactgcggcgccgtgtgccccgcaggtgagggcgccccgagggctgcgccgggggcgccttcctttgttccccggccgtccaggtggcgcccgcgccccctccccccgcggctgcccccggggcgcccgccctctgctctggcaggggggaaggagtggggcgccgggtactcacgggctcctgatccggctcgcggcgccccgaggacgcagagcagcagcagcaggggcagcaacggcggcggccgccgcgcggattgggcggcggggccccggcggccggcgggcatggggccggcgctgccgggggcgcgcggcgggctgcggctcggcggcggtggcgcagggcgcgggacgcaggccgggcgcgggagggcgcgggccaggccgcccgcacgtcgctgggcgcggacgcggaggccggatgcgccgctggccccgcccggccccgcccccggcccggcccggccccgggggggcggcgggccccgcaccggcctccccgccgcccgcccgcccgcgggcaccgcgcgccccgcccgtcccgcctccgcccaccgcgcgcgccccccagtctgggacccggcacc

SEQ ID NO: 25330 - DNA, 455 bp, Homo sapiens
  source 1..455: mol_type = other DNA
ctgcgaggctgccgccccgtctgcgggggcggagcgtaggtgggggacctgcgggctgctgcgcggcgctgcaggcacctgcgccaggcatgccagcgaaagcgggggcatcttagaggggcgtccccactcccttatctggcggagaggaagctgggggtaccctctaaccgagaccgccctaagccccagcccaggggtctccagccttggggagacagggccagattccctaggtcacggaggaggcaaactgcgcgcaagttgtctcctttctaggactcagctgccgggtcctgcggggtggccccaagcgccagcagagatcccccgcccgtgggcaccagggaggtgtcctgggacccccgcgatgggatagacggtgggggccgcgatgcacctgccccgcccgacccgcacgcctcgggtgccgcagcgcagctaccccgccaggc

SEQ ID NO: 25331 - DNA, 124 bp, Homo sapiens
  source 1..124: mol_type = other DNA
ggttctcagagcttagagacccatttccggggcacgcctgccagcgccccagggcgggcggtcccggccccgcccctccgcagacctggccccgccccgccccccgcgtctcggtttcccgggc

SEQ ID NO: 25332 - DNA, 433 bp, Homo sapiens
  source 1..433: mol_type = other DNA
cctagctacgcaccactgcattccagtctggtaagggcagggacctggcacatagtaggtgctcagtaaatattccttgaatgaatgaatgcatgagtccaaacccaggttcaacttggggtgccaccaatccttgcgggggggggtgcctggccccacccttgtgaattgggaggatctggccagccgtccgcggtccttgtccaacagcccagaggccgctgtccagcgggccaggaggcggcactcgcgctccaccgcccttcccgcgggccccgagcgcgcgcctgggcgcgcgcatgcgccttcgcccccgcgccgcgcgccgctcctgtgcgcctgcgccgcgctcacgaccgccggcgcgcctgcgcactgctcgccgcccgtgggcccagccggcgcttgcgcggtggcacgggcgagtgggggg

SEQ ID NO: 25333 - DNA, 528 bp, Homo sapiens
  source 1..528: mol_type = other DNA
ccgctgtactccagcctgggccactcaggctgtggccttgctgctccaactgtgttcccacacacacagtttccaggggcagtggcaacaccccagggctggcagctcctgctacacagcaggtgatctcctgttcccctgggacccagtgcctggaggtgggcagcagctcccacattttacccagccccggcctctgggagaatcggtcaggggatgctgggcatgcatcccttacccctatggcgaggcgtccgggcagaaaatcctcccccacaacgggctctttgctgggcccttggaggagcaaagtcaggggcagaagcatgccccagggctgggcagaggcctgagggctcttgtccctgtggcatcagcccctcctggcattggggatgccatccctcttgatccagggcagtgacaaggggaccccccggggagcgggggatcctgagcatggcactggatcgaggcgcacgccagctcctgcaggcctcgttttgaagccgaggtctcaactgcagg

SEQ ID NO: 25334 - DNA, 357 bp, Homo sapiens
  source 1..357: mol_type = other DNA
aattgagagtcccaggtctcaactgctttccattcatcatcataatcatcattactattaatcattaattaataattattaacttattacctccattgtgcaagggaggaattaccaaagtgctgggattacaggcagtctaatcaatcaatcaatcaatgagctgaatgctgtttgagactactagcctgccagctcacacagtgaatgaaagtgggggcagtaccccctgactccctgcatgtcggattcagccgcgggcgacttcgcggggcattccgggcggggacttgaacgcaggggccagcgccggtgggccgtccctggggccggccgtgccttggggataaataggcc

SEQ ID NO: 25335 - DNA, 369 bp, Homo sapiens
  source 1..369: mol_type = other DNA
tccctagtagctgggactacaggtcagagtctcactctgttgcccaggctggtgtgcagtggcacaatcttggagtagctgggactgagatggagtctcactcttctgagtgttgggattacaggtgtgaccaccgcgccgagtgccaggagtgggagcgcaccgtccctgcccagtctctccacagccgcccgggcgtccccaattagcagttggggcgggaccaagtcctcgagctgccgccgcagcggcggttgaaagccccaccccctgcgcgtgcgcggtgcgcgtcccgtcttcctgctgggcaccaggcgcccgcgaagagcgcgcgcgcttccgccggcgtcgggctcgcgcacgcgcacg

SEQ ID NO: 25336 - DNA, 850 bp, Homo sapiens
  source 1..850: mol_type = other DNA
gtcccaagactgtgccaaggcgtgccaggcctcgggtccttgagaaggagcgaggtcgccagtcgaggggactgcctgctagtgtcccccgtgccccccgtcacgggcacggcgcggtggggtgggggagcggggggcgcgcggggcgcgacacggcggtgcgcggggtctctcggggtccaggtccaacgggcccccagctccggcccccgcgcctgggtttctctgctgggaaacgggcaggggcgcgggcccgcctccagggcgccccgcgtccccgctggccgccccccagccgcgcccccagcggggcggagcttgcgccggtcccgcccctccgccctccgctctcccgcccgcgcgcccccggcccagctgcggcgcgtgacgcggggcgcgcggctccgtcggctaccgcgggcgggcgcaggcgacgggcacggcgggcgagcgggcggtatggcggcggcggggcccgcggcggggccgacggggcccgagcccatgccgagctacgcgcagctagtgcagcgcggctggggcagcgcgctggcggcggcgcggggctgcacggactgcggctgggggctggcgcgtcgcggcctggctgagcacgcgcacctggcgccgcccgagctgctgctgctggcgctcggcgcgctgggctggaccgccctgcgctccgcggccactgcgcgcctctttcgggtcagtgtggccgggggccgggacgaggggaccccggactgggggaagccgggaccggggacctggggccgccggcgcgttcctttcttccagcgctggctgctgcggatgaagggggggcctcgggctggagaggcccagg

SEQ ID NO: 25337 - DNA, 786 bp, Homo sapiens
  source 1..786: mol_type = other DNA
gtgcccagggtacccgcgtccaagctggaaccccattgccaagcgtgtagggcagagagctgcgtctccactaggtgcgcctcccaacgccctggcgtgggccgtgtccttttgaagaatgagaatgtttcattgagcctacgcctcctgaatgcgggagggccacgggatggtcccaagactgtgccaaggcgtgccaggcctcgggtccttgagaaggagcgaggtcgccagtcgaggggactgcctgctagtgtcccccgtgccccccgtcacgggcacggcgcggtggggtgggggagcggggggcgcgcggggcgcgacacggcggtgcgcggggtctctcggggtccaggtccaacgggcccccagctccggcccccgcgcctgggtttctctgctgggaaacgggcaggggcgcgggcccgcctccagggcgccccgcgtccccgctggccgccccccagccgcgcccccagcggggcggagcttgcgccggtcccgcccctccgccctccgctctcccgcccgcgcgcccccggcccagctgcggcgcgtgacgcggggcgcgcggctccgtcggctaccgcgggcgggcgcaggcgacgggcacggcgggcgagcgggcggtatggcggcggcggggcccgcggcggggccgacggggcccgagcccatgccgagctacgcgcagctagtgcagcgcggctggggcagcgcgctggcggcggcgcggggctgcacggactgcggctgggggctggcgcgtcgcggcctggctgagca

SEQ ID NO: 25338 - DNA, 642 bp, Homo sapiens
  source 1..642: mol_type = other DNA
cacagggccttgtcaatgaacagtgcattggaaagtcacttatgtccagattgggagtccctcccacgttacctgatgttggggagccccccccccgggttccccagggtcacgtgcccagggtacccgcgtccaagctggaaccccattgccaagcgtgtagggcagagagctgcgtctccactaggtgcgcctcccaacgccctggcgtgggccgtgtccttttgaagaatgagaatgtttcattgagcctacgcctcctgaatgcgggagggccacgggatggtcccaagactgtgccaaggcgtgccaggcctcgggtccttgagaaggagcgaggtcgccagtcgaggggactgcctgctagtgtcccccgtgccccccgtcacgggcacggcgcggtggggtgggggagcggggggcgcgcggggcgcgacacggcggtgcgcggggtctctcggggtccaggtccaacgggcccccagctccggcccccgcgcctgggtttctctgctgggaaacgggcaggggcgcgggcccgcctccagggcgccccgcgtccccgctggccgccccccagccgcgcccccagcggggcggagcttgcgccggtcccgcccctccgccctccgctctcccgcc

SEQ ID NO: 25339 - DNA, 720 bp, Homo sapiens
  source 1..720: mol_type = other DNA
ggagtccctcccacgacctgatgttggggagccccccccccgggttccccagggtcacgtgcccagggtacccgcgtccaagctggaaccccattgccaagcgtgtagggcagagagctgcgtctccactaggtgcgcctcccaacgccctggcgtgggccgtgtccttttgaagaatgagaatgtttcattgagcctacgcctcctgaatgcgggagggccacgggatggtcccaagactgtgccaaggcgtgccaggcctcgggtccttgagaaggagcgaggtcgccagtcgaggggactgcctgctagtgtcccccgtgccccccgtcacgggcacggcgcggtggggtgggggagcggggggcgcgcggggcgcgacacggcggtgcgcggggtctctcggggtccaggtccaacgggcccccagctccggcccccgcgcctgggtttctctgctgggaaacgggcaggggcgcgggcccgcctccagggcgccccgcgtccccgctggccgccccccagccgcgcccccagcggggcggagcttgcgccggtcccgcccctccgccctccgctctcccgcccgcgcgcccccggcccagctgcggcgcgtgacgcggggcgcgcggctccgtcggctaccgcgggcgggcgcaggcgacgggcacggcgggcgagcgggcggtatggcggcggcggggcccgcggcggggccga

SEQ ID NO: 25340 - DNA, 288 bp, Homo sapiens
  source 1..288: mol_type = other DNA
ccttctcacctctgtggggtgaggccagtgtgttcacctgtgcccctgaagttcaggtgcaggtgttcgggagccagcgcggctgctgcaggactcatccctgcatcctgcaccttgaaggccaggcacagggccttgtcaatgaacagtgcattggaaagtcacttatgtccagattgggagtccctcccacgttacctgatgttggggagccccccccccgggttccccagggtcacgtgcccagggtacccgcgtccaagctggaaccccattgccaagcgtgta

SEQ ID NO: 25341 - DNA, 299 bp, Homo sapiens
  source 1..299: mol_type = other DNA
taaaaactcttagtctgtaaaagagtgttacttctcaggtttgttttctctaaaataaacctgtcttgactggcaagccatctcggttcactgcaacctcggcctcccggtagctgagattacggcgaactcctgggcgcatgcgatctgcccgcctcggcctcccaaagcgccagaatctgaactttagggttctcatccgtaaaatgaggataagcaacagtctccgtacgagtgagcagtaccgtaaactgttactgctctgggttctgtcacgggacagtgactactcctcactg

SEQ ID NO: 25342 - DNA, 295 bp, Homo sapiens
  source 1..295: mol_type = other DNA
agaccttctcctactctcaacttctatttgtaaaataaagatagcagtacaatttcagagattcctcttggggaaggccctgggccatactcaccctccaggatggcggggatgcagccgagctgcacgggcgtgggctgcttcaaacccagctgccgacattgttccccacgatgacagcccgagctccgcgaagcctgccatccttgtggccgcttgtaggggccccttgtaggggcccgtgtgatccgcgcttccggcgcgcgccgacgacgtcacgatcggaaaaagtaaa

SEQ ID NO: 25343 - DNA, 338 bp, Homo sapiens
  source 1..338: mol_type = other DNA
tctgaactttagggttctcatccgtaaaatgaggataagcaacagtctccgtacgagtgagcagtaccgtaaactgttactgctctgggttctgtcacgggacagtgactactcctcactggcagaacgcggctcgcggccaccaagcgtccccgcgcccctgcgcggccgcaccttcacccgctgcgcctcgatgcactgctggtgctgccgatgtagaaggcgttctttacgtcgaacagctcgtctacctccccggagccgccggaggccgggccgggggccggaggcgcctttactttttccgatcgtgacgtcgtcggcgcgcgccggaagcg

SEQ ID NO: 25344 - DNA, 237 bp, Homo sapiens
  source 1..237: mol_type = other DNA
ggagtgcagtggcgccccgagtagctggaactacaggtctcactctgtcacccagctggagtgcagtggcgcgatctgtaagccatcactgggcgttgaattgtagtgagccgagatcacgccattgcactccaggatttgttggggcccccaaccctgcccaccctttcctggcaggacctggagacccgcaatgcggagttggagcaccagctgcgggcgatggagcgcagcctg

SEQ ID NO: 25345 - DNA, 470 bp, Homo sapiens
  source 1..470: mol_type = other DNA
tctctgcagctccgtgggcgaggtacagtgggatgcccctgcgagaggccaacgccgccgcagcccagtggaggcagcagctggaggctcagcgtgcagaggccgagcggctgcggcagcgggtgagggcacccctccctccgagagacccccacctggcccgggcaactgtggagaccgcgcctcggcagttcccatctgccctgggcatggactagctgtgtgacctcagcaggtcactgacccagcctcagtttcttgctctgttggcaccaacgcgtggccagagggctgctattcctgccctacaggtggctgagctggaggctcaggcaaaggaggggctgggccagggccagtcgctggaacagctggggtgagtgctgggcctcgccttccctggagattcagaccctgaagagtcagactggggggccccgcgaggccctggaggctgccgagcgtgagga

SEQ ID NO: 25346 - DNA, 804 bp, Homo sapiens
  source 1..804: mol_type = other DNA
cagcggggcggccttggcggcccggggaggcggggcgggcggcggccgcgtcgggaccggccgcgatgggaccggaggcggcgcgggcggcggcggcgcagacaaaggcacgggcggcgtggagggcggcgcggagggcgcgggcccgggagccagggagcgagcggggcgcccggcagcgcggagtcagcgccgcgggggccgcacccgactcgcgcctggacactcgcggggcgccgacctggcagggtgagcccggcctgccgagcctgcgctgggagcgcgggggcctcgaagtcccagggccaaggggagacccgggactgggagcggcgcgaggggtccccaagttccagggctggagggagcgcgggggtcccgaagttctgtcccaaagttctggacccggcgttggaggaggctgcgaagaggtccccaaagctgcggacctggggtggggtactggggtgggaggggtccggacgtcccggacccagggactggaggggggtcctcgaagtttaggagtctaggacaacgcggaggaccggggtcccggacccagctggacccagagacagggggcgtcgcgggaatctcggaagttccagggtcagagcccgcgtcccggagttggggcgtgcactgtggggatgggatcctgaattaatattaacccccccgtcccccgcactcgggtgcatgggatggggcctcatccaccggccagattggggatcccgggcaccgggcggtgtcggacccccctccgggagccccgtggccggcggcatccgaggcgca

SEQ ID NO: 25347 - DNA, 328 bp, Homo sapiens
  source 1..328: mol_type = other DNA
agtgtgggaagggggtgctccctgtgaccagaggtgacatttcctcagcctttaaagattccaaccattgtgggaacagaggcttctctctctactgtatcctcactgggccacccatgtcagcccgggagggacctgacctccctcacaggcccaaagttatgacctcaggtagtggggacagaggcagctgtctcctgagaaggtgacaggagggtgaggtcacatgtgcaaaaagccggcagggggcgcagcggggcggccttggcggcccggggaggcggggcgggcggcggccgcgtcgggaccggccgcgatgggaccggag

SEQ ID NO: 25348 - DNA, 409 bp, Homo sapiens
  source 1..409: mol_type = other DNA
ctgcctaggacggggccccaagggtcgcgccagcccgaccctgcggcaccccccgcgcgggacaggcctcggcagccgcagcgtctcacccggtcttcgcggccacgtggggaaaggtggggcgcgcggttgtcacccagggagccgcctctagccccttccggccgccgtacgcgcgcaggcgctgtggcgcccctaggcttggcctcccagagactcgcggacgctcacgcaacgaggccacctcgtgcgcgacggaggcgtctttgccgccccttccgggacgctcacggtggtcgccgcccccagcagggcagcgcgcttgcgcaagagagccgggccgcggcggcccgcgcctgcgcaccaggactcggcggcggcttgcgcctgcgcggcgcggcgctgcgga

SEQ ID NO: 25349 - DNA, 532 bp, Homo sapiens
  source 1..532: mol_type = other DNA
attttggggggcgcccccttgttctctgctggcaaagggcagggttcccgggtcaggtgacccaggttcaaatcacacgggcagctctaaagagggcaagggcccgatgcagcgctgggcgccgttatctcctcccgagcgggggccgctccgagttcttgtggacgcggcccgccgtctcccggcctctgcgggcgaggaaatgggggcgccgggcccgggaggccgcagccggccacccaggccaacccggcggggacgcggccgccgccgcagccagagggccgagcctgcgacgccatcacggagcccggggcgggcccccaaggccgagcccgagcttcccaccccgggagccacccaccgacgacgccagggcccgggcctcaccccgagaccaccgcgcgcggagccacccccgccgccgcctcaggctcctcacccgccgccgccgccgcgcgaggcggggacatgacggtctccgcagcgccgcgccgcgcaggcgcaagccgccgccgagtcctggtgcgca

SEQ ID NO: 25350 - DNA, 745 bp, Homo sapiens
  source 1..745: mol_type = other DNA
gggcgcccccttgttctctgctggcaaagggcagggttcccgggtcaggtgacccaggttcaaatcacacgggcagctctaaagagggcaagggcccgatgcagcgctgggcgccgttatctcctcccgagcgggggccgctccgagttcttgtggacgcggcccgccgtctcccggcctctgcgggcgaggaaatgggggcgccgggcccgggaggccgcagccggccacccaggccaacccggcggggacgcggccgccgccgcagccagagggccgagcctgcgacgccatcacggagcccggggcgggcccccaaggccgagcccgagcttcccaccccgggagccacccaccgacgacgccagggcccgggcctcaccccgagaccaccgcgcgcggagccacccccgccgccgcctcaggctcctcacccgccgccgccgccgcgcgaggcggggacatgacggtctccgcagcgccgcgccgcgcaggcgcaagccgccgccgagtcctggtgcgcaggcgcgggccgccgcggcccggctctcttgcgcaagcgcgctgccctgctgggggcggcgaccaccgtgagcgtcccggaaggggcggcaaagacgcctccgtcgcgcacgaggtggcctcgttgcgtgagcgtccgcgagtctctgggaggccaagcctaggggcgccacagcgcctgcgcgcgtacggcggccggaaggggctagaggcggctccctgg

SEQ ID NO: 25351 - DNA, 206 bp, Homo sapiens
  source 1..206: mol_type = other DNA
gctactcgggaggctgaggcacaagaatgcaccatcgtgggacataccacacagacggtgggggtcacttgcattcagcatgaaggtgcgtatgcctgacacagcctcagcctgtagactctgtgcatatggctccgcagagcatgtacgcagcgagcatgtacgcagcaagcatgcagcaagcacctgcctgagtcagcccaggg

SEQ ID NO: 25352 - DNA, 382 bp, Homo sapiens
  source 1..382: mol_type = other DNA
ctctggtttagcaaccagagaatgctgtgtaaccttgggcaaggagcttgacctctctgtcggtttctgtaaaaggagccagcacgccaccacctcgagatggagagggcagttcagagtagagcctcaggggaccctgcgccaggcgtccgaggccacgtcgggttgccgcgctccgggtcggactgcaccttgaacgctccagccctcccctgggggcgtaccgcccacggccgctgcgactggccgcggggcctgccagtcttcggctttgcggccaataggcagcgcctagcaccctgagggaccactcaggcacctcgcttccagcgctgactggccagggagcagccaatcggggcgtggcgtggacccctcccgt

SEQ ID NO: 25353 - DNA, 261 bp, Homo sapiens
  source 1..261: mol_type = other DNA
catcagatccctgattggattttctgtcacatgagccaaaaattttccttttttgcttaaaagattgaggcattcttgaggcattcttgaaggcattgcaagatttaccaagttgtactatagggtgcacaatagtgctagcaaggcagaagggtctgaattcagtctgagtacttagcctacttagtacttaggagtactaagtacttcgtctactaagcgcaggccggacgggatgctcgtcagaccagagtcgggctc

SEQ ID NO: 25354 - DNA, 282 bp, Homo sapiens
  source 1..282: mol_type = other DNA
atctcaatggataaagaacattttcggctggagtgcagtggcgccgagtagctgggaggcggcttgcccaggctggtctcaacctcctgggctcaagcttcaaaacattagatgtttcagtggcagagaatgtgctgtgttgcacagatgtgagtccttcgggaagcccgcagaatcactgaggtacccaccgagccctggtggtgacctcaagtgctggcctgcaggtccggagcgctgaccaggcctgtcctcccgtttcagcgccgtgaagaacctggt

SEQ ID NO: 25355 - DNA, 394 bp, Homo sapiens
  source 1..394: mol_type = other DNA
ctcaaaacttgggggcccaaactggagaccggaccctcagcgatctggcttcctctcttgcgcacccccgccccccaaaagtgaggaagggcccgggcagtagggcagttgcgcctgcgccttcttttcccctcctcaccgactcggagggaatgggcggggcctaaagggctctgagaatgtctggaacttaaaggggcagcgtaccttggccgtcccgatgcgtggaggactcccccaactcgtcgttcagaaagggagagagttcttccccctctcctgccgggagcccctttcttgtccgcaaagactgaggagcggggagggcgggccctctgacaccggaacaggagccgtgcggcgtccggtttcagcagggagggcgtcccaacct

SEQ ID NO: 25356 - DNA, 320 bp, Homo sapiens
  source 1..320: mol_type = other DNA
atccccccacggcactccagcctgggtgacagagcccagctactggagaagctgaggcgaggttcgcgccaccgcaccccagcctgggcgacagtgtgatacggacccaggctgggggtgcagtggcacgaccgtagcccactgcagtgcagccttgacctcccaccttagccgcccaagtagctgggaccacaggcgtgcgcctaggctggcagaggacggcagttccgcgcccggcctttgtcaggcccccggaggttgggacgccctccctgctgaaaccggacgccgcacggctcctgttccggtgtcagagggcc

SEQ ID NO: 25357 - DNA, 336 bp, Homo sapiens
  source 1..336: mol_type = other DNA
cagaggacggcagttccgcgcccggcctttgtcaggcccccggaggttgggacgccctccctgctgaaaccggacgccgcacggctcctgttccggtgtcagagggcccgccctccccgctcctcagtctttgcggacaagaaaggggctcccggcaggagagggggaagaactctctccctttctgaacgacgagttgggggagtcctccacgcatcgggacggccaaggtacgctgcccctttaagttccagacattctcagagccctttaggccccgcccattccctccgagtcggtgaggaggggaaaagaaggcgcaggcgcaactgccct

SEQ ID NO: 25358 - DNA, 294 bp, Homo sapiens
  source 1..294: mol_type = other DNA
caccactgcactgtagctggggcgacagagcaagactcacgtgacttaacctttgagaattatgtctgtacatagcttatcgggggatctgctaagtgggaggggctccccagctcaaaacttgggggcccaaactggagaccggaccctcagcgatctggcttcctctcttgcgcacccccgccccccaaaagtgaggaagggcccgggcagtagggcagttgcgcctgcgccttcttttcccctcctcaccgactcggagggaatgggcggggcctaaagggctctgagaat

SEQ ID NO: 25359 - DNA, 377 bp, Homo sapiens
  source 1..377: mol_type = other DNA
ggacggcagttccgcgcccggcctttgtcaggcccccggaggttgggacgccctccctgctgaaaccggacgccgcacggctcctgttccggtgtcagagggcccgccctccccgctcctcagtctttgcggacaagaaaggggctcccggcaggagagggggaagaactctctccctttctgaacgacgagttgggggagtcctccacgcatcgggacggccaaggtacgctgcccctttaagttccagacattctcagagccctttaggccccgcccattccctccgagtcggtgaggaggggaaaagaaggcgcaggcgcaactgccctactgcccgggcccttcctcacttttggggggcgggggtgcgcaag

SEQ ID NO: 25360 - DNA, 291 bp, Homo sapiens
  source 1..291: mol_type = other DNA
tgggcggatcacttgagcccgcctactagttccaactattcgggggaggcagaggtcgcagagagccgcgatcccaccattgtacccgggtccagcccggcggctggatcacgaggtcaggcccgtcactgcactccagcttcggattccttcgggcgccgagggacagcgccccgtgcgcgcagccagcctcccgggccctttgagcatgaaggggcggggtcgaaccaaaccccacctctggagcgtccgcggtcggcgcccacgcatgcgccaagcccacgcggttcc

SEQ ID NO: 25361 - DNA, 309 bp, Homo sapiens
  source 1..309: mol_type = other DNA
tcccaggcaggtgcctgtaatcccagctattccagtgagacatcgtgccactgtactccagcctggatgacggaggcagggacatgcctatgcctctgcataaagcaaaattattcatgtgaatgaatgaatgatacaatctggctggaaacagctcgggggtgtcacacacctggacaaccagtaataaagggcgaggttcgaatcccagctctttaggcaggggagccccctccctcgcgcagccagaggcctcgggctggcgggggcgcatgcgcagagagccctcgcggcccctttataagcact

SEQ ID NO: 25362 - DNA, 476 bp, Homo sapiens
  source 1..476: mol_type = other DNA
ctggagtaagtcagggaccttgaccgcctcagccccctgagtagctgggattacaggcaggagatctactgtatgtctagctactggatcttcaccaaagagtcagcagcaggctcagagaggccaactgtctcctccaaggtctcacagccagtgaggggcagacttgaattggggcctgtggctccagtccacagcagagtgtgactatcgtgaggcccccaccctgcacagggagcgcctttggggtgctggagaccaggactccactatgactacccaatggacaggtggcctgcaggccaacatttcgaaactgaggctcagttcttccctggcctaagttcagctagcagggtgagggaactagctctgcactccaagtccagcgcccgcgctccagccactgctccaggggagcgtgggcccccgcggcccctttagccctccccttgcaggcagacgccgggattgcg

SEQ ID NO: 25363 - DNA, 278 bp, Homo sapiens
  source 1..278: mol_type = other DNA
cagctcctcgggaggctggtttgaaaccagtctgggcaaaaaagtgacctgtagtcccaactacttgggaccactgcactccagtctgggcgaaacacgtttacatttgtggcctggaggttgctccatccgtgcgcacagggaagggggcacgccaggacctccagggcgcaccccttggctgccagggggagggccggggaggggccttggaggctccctgggaacacgcagggcggtcacggcggcctgcccagggcgcagcggggtcgaccttt

SEQ ID NO: 25364 - DNA, 488 bp, Homo sapiens
  source 1..488: mol_type = other DNA
acgatttgcggatccttcgtacggtgacggggctcctggagccctgtcaccagaaaggtcctgcggctttgacggaggtcgcgcccccaggtcgccgaggagcggccccccacccgccgcggtcgcgacccgtcaagcccgcgactcctccctcgcggcccggcccgcgctcaccgccttctccaggtggctgcgcgcctgggagcccagctgcaggtgtgtacgggcctcgatgcgctgcggcggcttgaaggggaacacggcctgcaggcagtgcacgcacaggcggattttgggcgggctgtaccacgagtcggccgcctcggcctgcgcagcctgggccgccgccgcctgggccgctgccgccgcctgagccgccatttgccgccgccacagggaggcggaagcaggcgcgcgagacggggccgggctctcctcgcggcttccgcgagaagggcgagtctgaccgaggcggactataacagggc

SEQ ID NO: 25365 - DNA, 352 bp, Homo sapiens
  source 1..352: mol_type = other DNA
agggccctgtttcggtcaccgctgcatgcgtagcgcccagcacactgcttggcacacagtgagcacgcttttccagcagggccgagccgggtggcggcctctacggagatccggacgctgtgggctgccccggggctgaagcgagggatccacgggtcgcagcaggacggacccgaggagtcaggggagacacctagccccagggacccaggcggccgcctgagaggaggcgggggctgttacctccggcgccccttaaggggccctgttatagtccgcctcggtcagactcgcccttctcgcggaagccgcgaggagagcccggccccgtctcgcgcgcctgcttccgcct

SEQ ID NO: 25366 - DNA, 380 bp, Homo sapiens
  source 1..380: mol_type = other DNA
cccagctggcagtgagccgagatcatgccactgcactccagcctcagactgagactttgcacactgtggaaggcttatcagagtggccacctggctctcagtgagaggtagttggctccagccagcttgcacctccccactgctggtcttatcctaggaccactgcagggagacctcagggagctcctagccagctgactaggctggggtccatcctgataacatgagagagagaagatgtctgtatctctggtgtgtcttaagggttaagaaccggcctcagtctgggagacgccatctcagtccccatgtcttggagttttaaatgaaagctgtagggcaaccctgggaatcacatgcttcatgagtctaatttacag

SEQ ID NO: 25367 - DNA, 644 bp, Homo sapiens
  source 1..644: mol_type = other DNA
gcgccggggcaggccggcgatgtccggaagggcatgcacccggtgaccatgacgtagagcacgacgcccatggggtcgtaggggatgcccaggagcacctcgggtgacgcgtaggcggctgagccgcagtgccatgggcctggcggccgaagccttgacgcggcgctcgtccgggctcagcagcactgcacctgatgacgtgcaggtagcgcacggcgccggcgatctgcgcaaagaggtcgcgcgcctgaactccggggatgcgcccgttgcgctgcacggcttgcagcaggtcggtggcggccgcttccatcacgattgcacacctcgatgaactcgaagacgtgcacgatgtgcgggtgtcgcacgccccgcaggatggaccggcaggaacttgttgacgaagtccgggggcgctcgccgccggtccaccaccttgatggccacggtacccttgtacttcttggatgtggccaccttcaccttggagtagctgccctctccaattggcggcccagcttataaccgaggcctagggcgcacggggggcaggaggcggctgctgtcggggggcggccggactcgtcactccgccttagggtgggggtccgggaccccgccccggggccaccctagcctccatg

SEQ ID NO: 25368 - DNA, 533 bp, Homo sapiens
  source 1..533: mol_type = other DNA
caggaacttgttgacgaagtccgggggcgctcgccgccggtccaccaccttgatggccacggtacccttgtacttcttggatgtggccaccttcaccttggagtagctgccctctccaattggcggcccagcttataaccgaggcctagggcgcacggggggcaggaggcggctgctgtcggggggcggccggactcgtcactccgccttagggtgggggtccgggaccccgccccggggccaccctagcctccatgatccgatgagataagggatacccatcacacagggagcagaatccgttccagggattggggtgagtccgacttcgagcagcagctgccccccaacatcatgtacccagcccgtgactacgtggagccctgggcttcgcgtagagtccctagagccttaactggggcacctggctcctttagtcacgccctgtctgggcaaaagaggagtcccctcagctgcagcccggcagcaagtgcttccgccacactcatcatggcggtggcagtaagtcactt

SEQ ID NO: 25369 - DNA, 521 bp, Homo sapiens
  source 1..521: mol_type = other DNA
gctgcagcaccctggcccctgaggtctgtgctgcctgtgcaatcgaggacttcgaggctcgcatcgcgctgttgccggaaggccccaggctgcagggcctgacctgcatccccgaaggtggccagaatgcacgtgggggccatcgccctgtgccgtcagctgccggaaggcttcctggagggtgctactaggggccctaggcaggggcccctcagggcactgaggccccaccccccacaggaccttgcagatgcttcgggagaacctggaggaggaggccatcatcatgaaggacgtgcccgactggaaggtgggtcccggctgggagggcagaggtgccagccacggcagagacactggggttggggagctcccacagctaaccccaggacctggtgggtgccaggtcccacaagggaaggctgtagcgcctgccacgcacaggggccactgatcctgggggatgggcataccccactgtccccacaggtgggggagtctgtgttccacacaacccgctg

SEQ ID NO: 25370 - DNA, 497 bp, Homo sapiens
  source 1..497: mol_type = other DNA
cctccaatggtgacgcgcagcgccttcgcggcgcttcctgattggcgggcatgcagggtgggcgggagggaggagaagagggggcgtcccctccctccacggatgcgcttaaaaggcggtggcggtggcggcagcgcccggcgcccgggctcacctcggccatgagcagcgcagccggcccagacccgtcggaggcgcccgaagagcggtcctcaggtcggttcccatggggccaggagcagcccgtaggacatgaccacggtggggagacgggcctgggaatcccgggaatccgagaccctcctggcattggagacactaagctgcgttgctggggaaactgcctccggggcagcccgcccctcatgaatgattcatcagcagcgctggtccagggccttggagctgcagcccccacttgccgacatgggaagagcggagcttagctcaaatgctaccacctcccttgtccagaggaggaaacaggcctgggtgtt

SEQ ID NO: 25371 - DNA, 458 bp, Homo sapiens
  source 1..458: mol_type = other DNA
cactgatcctgggggcataccccactgtccccacaggtgggggagtctgtgttccacacaacccgctgggtgccccccttgatcggggagctgtacgggctgcgcaccaggagggtggtacacgtaggccctgtgccctccggccacctgctgcagacctggcctgcctgttttcctggggacacctaggggctgcccctggatccactggcgaccttctccacggaggtgatacaagtgatcctcccgcctcagcctcccgtgtcactgcgaccttgtgcagccctgccaattgtaggcatggcggggctcctcgctccctgagagggaagctcagagcctccaatggtgacgcgcagcgccttcgcggcgcttcctgattggcgggcatgcagggtgggcgggagggaggagaagagggggcgtcccctccctccacggatgcgcttaaaaggcgg

SEQ ID NO: 25372 - DNA, 205 bp, Homo sapiens
  source 1..205: mol_type = other DNA
tgggctctgaggcttggagcttaaagtacagctggggctcaagagacacccagagtgcctgtcaggcggtggcactgtcacacggagagtctgctcccctactccacagcctccaggaggggctgaccgcactccgggcgacgggcagtggctggatgcacgtttttcctgcaccgacctggcagagcctgagaccgggcctctg

SEQ ID NO: 25373 - DNA, 487 bp, Homo sapiens
  source 1..487: mol_type = other DNA
ctcccctactccacagcctccaggaggggctgaccgcactccgggcgacgggcagtggctggatgcacgtttttcctgcaccgacctggcagagcctgagaccgggcctctgcatctccagcgggcgctctctcccggaagcagaggacggtgctggtcgtgtgtggcccggagcagaacggggcagtggggctggtctgtgcccggcacctgcgggtgtttgtaagtagcaaggaccccttcgacctggccaggttatagaatatgcccagtgcttgtcccaggcagggtctggtgctggtgaccaggtcaggggagtctgaccccctcttctggacctgctgcatcgggacctgaccacccagtgcgagcatccccttcctgagctacctgcccactgaggtcagcgctgggtggcaagcaagggggacatggtgtgcagtggccctgggccaccctgaccctgcctgccttccccaggtgcagc

SEQ ID NO: 25374 - DNA, 510 bp, Homo sapiens
  source 1..510: mol_type = other DNA
ctccctcaggctgggacgcagagaccggcagcgattcggaggacgggctgcggcctgacgtgctggtctcgcggcgcccaagcgctgcgctggccgcttctccgggcgccaccacttcgtggccggcaggttcgtgcccgatgacgtgcgccggccgggatacacgggcaccgactgcgtcgcggcactgtgaccgccacccgcggcgcctccgcctcctttgtgcaccgggcccgctgcgggggtgggcacactcgaagagggacttcacacggtccctgggtgatccaaagcagcctgtgggactcccagactgtttggggtggcctaaagcctataggaaagcgggtccgagcagcttgaggctggattcccttccctcaggcagcttgggaagttccagcaggccacggggaacccaggaccgacccagaggggttgctcgagcgccgtcacccagggccagggggcgtggcctgaatggggcgtggccagggcgggatctgcggt

SEQ ID NO: 25375 - DNA, 288 bp, Homo sapiens
  source 1..288: mol_type = other DNA
gctgcagtgcagtggtgcaatcatggctcactgcagacttcagcctctcaagctgggaccacaggcgtgcaccacgcctgtaatctgcgaagatgaagcgaggtcactcttcagctggaccttggagaaaagcgctgcgtgcgccccgccttagccaggtgaacggagccaggggccccagtggcccacctgatggggcctctggctggagcggagccagcgctgccctctctcaaggggaaggagggcgcttatgagaagtgccgttgcctcggcaaccccaaaccc

SEQ ID NO: 25376 - DNA, 256 bp, Homo sapiens
  source 1..256: mol_type = other DNA
cctgtaatctgcgaagatgaagcgaggtcactcttcagctggaccttggagaaaagcgctgcgtgcgccccgccttagccaggtgaacggagccaggggccccagtggcccacctgatggggcctctggctggagcggagccagcgctgccctctctcaaggggaaggagggcgcttatgagaagtgccgttgcctcggcaaccccaaacccagttggcttaggcgcgagcgagagcgggcgcggcgctcaggcag

SEQ ID NO: 25377 - DNA, 587 bp, Homo sapiens
  source 1..587: mol_type = other DNA
atctgatctcgtgaattacaggcgtgagccactgcgcccggcctcaaggcctctgcagcacctacgtaaaggcagttggagctgggtcgcagcacccggctgagtcacgccagcccggccctcccggagctctgctatacaaagtaccgataaccgggggggctgtgtgctccggaccgtgggagcccggggccgccgcagggaggccgagcacagggcagggcagggcagggccgggctttgcagggggcagcgctgtcccaggccctagcgtgcgcccgatgatcagctggggccgcagaggtgggcctcgcacaggaggccgcggctcgctgatactgtgggggtccggagcgggggcgcggacccaagaccacctggagctccgcccgggcagcgcggggtcacggcgggaattttcgggtcgccgagtgactcagccccgcaggctcgaaactgcgggctcccgcgccggggggggctgcggttccgggcgacaccgcccccgacgcggccgtggaggcggggctcccccaggtggcggggcggggcagggctcccccaggtggtgggggcggggcgccggg

SEQ ID NO: 25378 - DNA, 398 bp, Homo sapiens
  source 1..398: mol_type = other DNA
ccatgtcacagtcagggagctctggctgagcatcagcagagaatccttgcctccttaaaaagcctttggacacaaagttataaacatactttaaagtctatttccacacggaaggggcgtcccccaggccaggggttctccagcccgacctccaccagggggcgccatggctccagcgaggcccaggtggtttcagggctccgagagacaacctgggcaaggggatcaccagggtcgcggtgggagctcctgggagaggccccccgggacaggtggacagatctgagagggaacctatggcccagatgaagtcttaggatgcccaggtcaggggcactgcagcctcgagtggtcgctcagggggccctggcccgacccagtttcgcgggggcgtggcc

SEQ ID NO: 25379 - DNA, 363 bp, Homo sapiens
  source 1..363: mol_type = other DNA
tggccaggctgaagtgcagtggagcaatcttagctgggattacagtcttgaactcctgatctcaggtgatccatgtggttgtgttccggggcggtccccgaccccgcccctcacaagccccgccaccgggccccgcctgaactccgaagctcccgaccccgcctccgcagggtccaggcttcgcccctggtgacaggttggcgcccaagcccgccttgccggccttgtcttttccggtctcagtccggcgtggcagcggaggcaggcaccgtgtcatggcggcacccgaagtagtccctgccggggccagcctgttctgttgccaggctgccatggcgaaacttcggaagtgaggcgttcctc

SEQ ID NO: 25380 - DNA, 254 bp, Homo sapiens
  source 1..254: mol_type = other DNA
tataatttcaagtaaacaccagtttttcattttttatgttaaagtggtaagagtctcgctctgtcgcccaggctggactccggagtagctgggactacgtggccaggctgaagtgcagtggagcaatcttagctgggattacagtcttgaactcctgatctcaggtgatccatgtggttgtgttccggggcggtccccgaccccgcccctcacaagccccgccaccgggccccgcctgaactccgaagctcccg

SEQ ID NO: 25381 - DNA, 307 bp, Homo sapiens
  source 1..307: mol_type = other DNA
atgcctgtagttccagctactcggactcgggaggctgaggcaagagaatctcttgaacgttgcaatcactgcactccagccagagccaaaaaaaaagaaaaaaaaagtggtttactccagtttttccctgcatttaataaggcactcataaattcctgatctctggaggacatcagggcctgacctgggagtctctccagctccaaggtggagggatggcttcactgaacacggagtctggaattccgtgcacactcatgtgaccggtgttccggcggatcacgagatcaggtcgcagctacccggg

SEQ ID NO: 25382 - DNA, 247 bp, Homo sapiens
  source 1..247: mol_type = other DNA
cggatcacgagatcatcgcagctacccgggcctgctgtcagtcaagtaagttttattaacctgctgggctgctcccccacagttagaggaggcagccccgctctgccggttcagctgaagtcttttgaacaaacagttactgcccagcgaggggctgtgggtagcacctgtcagtcacaccccacacagcctcctgtcgctcaagccccaggggcgggacctggggcaccagccagtcggcgctgtg

SEQ ID NO: 25383 - DNA, 278 bp, Homo sapiens
  source 1..278: mol_type = other DNA
ctacccggcctgctgtcagtcaagtaagttttattaacctgctgggctgctcccccacagttagaggaggcagccccgctctgccggttcagctgaagtcttttgaacaaacagttactgcccagcgaggggctgtgggtagcacctgtcagtcacaccccacacagcctcctgtcgctcaagccccaggggcgggacctggggcaccagccagtcggcgctgtgcccgccggccccccattcgggtccgggtcctcggggagccctgttctggctgc

SEQ ID NO: 25384 - DNA, 363 bp, Homo sapiens
  source 1..363: mol_type = other DNA
aattaaaattaaaattaagcttgcttgaatccaggagttgaagcctgcagtgagcaatgatcacaccactgcacttcagtgtaatcccaacgctttgggaggccgaggccggcagatcacgaggtcaggagatccagctactcgtgaggctgacgagatgcgccactgcactccagcctagagcgccacagtcaaattcacgagatttcagtgttgcaagatgaaaacaattctggaaattggcttcacaatgtgaatgtatttaacagtactgattcggtttaaacggacaagccggactgaagccaggccagtgctccgctgtcactcagtgataaagaggcggggccattgggagcggcg

SEQ ID NO: 25385 - DNA, 524 bp, Homo sapiens
  source 1..524: mol_type = other DNA
aagtgctgggattttctaccccctatagcagtttgaaattacttaaaggttgtttcaaatggatataaaaagttaaaaaacttacaagagattacaaaatatatatgtaaatctggagtgttcaaaatgacaaatttatttctaaggttttattaaaattagctttaattgataatacactattaccaaagtaaaagttgattttctcttgaacaaaaattttacgtattattaatatgacagcagaatacttccgttcaccttttgaatatattcaaaaagagagatgctctggggtgggcctggctcagctcagggagggccaggcttggtggctcaagcttgtcaggctgcaggcgcctgtaatctcagatacccggactgagtcaagatgacgccattgcaatccagcccgtctcaaaaaaataaataaataaaatttttttaaaaaaagaaaaggctgcagcttagactgtctctctttctttcacgtcttctgtaactcaggacctgagggggcgggg

SEQ ID NO: 25386 - DNA, 452 bp, Homo sapiens
  source 1..452: mol_type = other DNA
gtcacgttcaattgagttcaaatttaatatttaacttttcctgtctaggcaaagggcaaggtgaaccccttgggccttacagtagtagctgggaccacaggtgtgcttcctatagcagtttgaaattacttaaaggttgtttcaaattgaaaaaataaaaggaatgtagatataagtaaaatataaatagtttaaaaattacaagagattacaaaatatatatgcaaatctcgaaaggtcaaaaatgacaaatttgatttgtttataaggttttattaaaattagctttagtattgataatacactattaccaaagtaaaagttgattttctcttgaacaaaaattttacgtattattaatataacagcaaagtcatgctctggggtgggcctggctcagctctgggagaaagccctgcctgaaaaagatgcagcttaggctgtgctgaagg

SEQ ID NO: 25387 - DNA, 289 bp, Homo sapiens
  source 1..289: mol_type = other DNA
ttacaaggtcttattaaaattagctttagtattgataatacactattaccaaagtaaaagttgactttctcttgaacaaacatttcatgtattattaatatgacagcaaagtacttctgttcaccttttgaatacattcaaaaagagagagaatatgagatagaattttcccatgctctgggatgggctcagctcacgggcggatcacctgagatcgggagctcgagaaaaggctgcagcctaggctgtcactacactcagcagcgaaccacatggtctcgctgcagcg

SEQ ID NO: 25388 - DNA, 406 bp, Homo sapiens
  source 1..406: mol_type = other DNA
tactcccagctactcgggaggctgaggcaggagaatagagcaaaaactccatctcaaaaaaaaaggtttttttttaattataaaaattaaaagggggaaattgtaaaatacaataaaattcctcttcaaaggttttggaaaaatatttacaaatagccccgaccctagcccagactttacgttaaaaataaattaatgcaaacaaaaaccttttgcagaagtaaattgccttactaaaaaaacttttgctattattaatatgacaacgaaatacttctgttcaccttttcaatacattcaaaaagagagagtaaaaagctcagagaggaagccctggctgaaaaggctgcagcttaggcttcaggtcctgagggggcgggaagcagccggaccgaacagggcggct

SEQ ID NO: 25389 - DNA, 362 bp, Homo sapiens
  source 1..362: mol_type = other DNA
gaaaacataaaattagaagatgacttcaagacatactcagctcagaaagagaaaatgccttcttcagagatcttttttttttaccccggctgtagtgcaatggtgtgatcgtgcacgtagctaggactgcaggcgtgcaccaccagacaatcttttttaaaatgtggctactagaaaatgtaaaattcatatgtgcttcacagtttattatgatgaaatctgagattttaaaataattgtcattatattgtttccatttgtgaataacatatgtatactattcacaaataaagataactttatatacaaagttaaatgcaaagggttcaggaatgtatctcctgtcactcatgacctgaggg

SEQ ID NO: 25390 - DNA, 617 bp, Homo sapiens
  source 1..617: mol_type = other DNA
cacaaccaggacttggtgaccattgtttgtgtccacgttcaattgagttcaaattaaatatttaacttttcacaaattcccctgtcttgatgaattggttttgtctgggcaaaggtaaaccggttacacagttcaagagatttcaaagtgctggaattacaggcgaatttcctttctgtctcctataacagtttgaaattacttaaaagttgtttcaaattgaaaaaataaaaagaatgtagataaataaaatataaaaagttaaaaaaattacattagattacaaaatatatatgatgtatatgtaagtctcgagaggtcaaaaatgacaaatttgatttacttacaaggttttattaaaattagctttcgtattgataatacactattaccaaagtaaaagttttctcttgaacaaaaattttttgtattattaatatgacagccaaatacttctgttcaccttttgaatacattcaaaaagagaaagagtaaaaaagaattttcccatgctctccggtgggcctggctcagctcaaggaggaagcccggcctgaaaggctgcagcacatcttctgtcactcagggacagggacgctgggttggaaaccgtccaa

SEQ ID NO: 25391 - DNA, 591 bp, Homo sapiens
  source 1..591: mol_type = other DNA
acaaccggttctgagacttggttgttcaatttatttcaaaattaatatttaacttttcctccacaagatgaatgggctctgtctaggcaaaaggcctgtctttatgaatcagctctgtctagacaaacgattctcttgcctcagcctccggagtagctgggactacatttctatttcctgtaacaatttgaaattacttaaaggttgtttcaaattgaaaaaaagaatgtagataaaatataaaaagttaaaaaaattacaagtgattatgaaatatatgtgtaaatctcgagaggtcaaaagtgacaaatctgatttatatataaggttttattaaaattagctttagtattgataatacactattaccaaagtaaaagttgattttctaacaaaaattttatgtattattaatatgacagcaaaatacttctgttcaccttttgaatacatgcaaaaagagagagagtaaaaaaattttcccttgctctagggtgggcctggctcagctcagggaggaagccctgcctgaaaaggctgcagcttaggctgtgatcacatcctctgtcactcagggactgagtgggcggg

SEQ ID NO: 25392 - DNA, 552 bp, Homo sapiens
  source 1..552: mol_type = other DNA
ggctcacataacctgttccaggacttggtgaccattgtttgtgtccatgttcaactgagttcaaatttaatatttaacttttccttcccctgcttcagccgccgtagcacctgggactacaggtgagatgaaacatggctggtcttgaacttctcttgtaacagtttgaaattacttaaaggttgtttcaaattgaaaaaataaaaagaatgtgataaaaataaaatataaaaagttaaaaaattacattagattacaaaatatgtatgtaaatctcgagaggtcaaaaatgacaaatttgattttttataaggttttatcaaaattacctttagtattgataatacattattgccaaagtaaaagttgattttctcttgaacaaaaattttatgtattattaatatgagagcaaaatacttctgttcaccttttgaatacattcactctggggtgggcctggctcagctcaggaaggaagccctgcctgaaaaggctgcagcttaggctgtagggcctcagggggatggtgggctggaaaccatccaatca

SEQ ID NO: 25393 - DNA, 548 bp, Homo sapiens
  source 1..548: mol_type = other DNA
gatgaacacctcaggggctcacaaccaggacctgttctgggacttggtgaccattgtgtccacgttcaattgagttcaaatttaacatttaacttttctaggcaaagggcaaaatgaaccccttgggctgttacattctcctgcctcagcctccggagtagctgggaccacagactcttatagcagtttgaaattacttaaaggttgtttcaagttgaaaaataaatagataaaaaaattacagggattacaaaatatatatgtaaatctggagtggtcaaaaatgacaaatttgatttatttataaggttttattaaaattagctttaatcgttaatacactattaccaaagtaaaagctgattttctcttgaacaaaaattttatgtattattaatatgacagcaaaatacttctgttcacctttgtggcatggaccaggctcagctctgggaggaagccctgcctgaaaaggctgcagcttaggctgtcactctcaatttctgtcactcagtgtctgagggggcggggaatgaacaggacggctt

SEQ ID NO: 25394 - DNA, 611 bp, Homo sapiens
  source 1..611: mol_type = other DNA
ctttaatctattttcttcctatgtaaacattaaaggtcaagactgtgaacagatctgaagacatagtttctttgctcactgtctgatctctgaaagaaagatgggcaacaggtggtaagcagtggtttacctgtgatttcaccctcggaactgaaaagggcagaaaaggggtgttcaggccctccacccccaaaaatacagaattagtttcaaagattttgtttcaaatgtatttatatttcattaataattacatattgctcacatattaaaatgaaaatattttgaatatattgggttaaataaattgctacaatcaattccacttgtttcttctttctttttaaagtttggctactagaaaatttaaaattcacctgtgactcacattttatttcggaaggtcataaaatctaaaattttagaacaattgttgttatactttgttcatttgtgaatagccatataatatattatttttgaatgcatataaattgatacacaaggtagagcctggctcagctcaggaaggaagccctgtctgaaaaggctgcagcctaggctgtcactatctgatcacatcttctgtcactcagggcctgaaaagaagg

SEQ ID NO: 25395 - DNA, 597 bp, Homo sapiens
  source 1..597: mol_type = other DNA
ataaatatataaatatatataaatatataaatatatataaatatatataaatatataaatatatataagtatataaatataaatatatataaatatataaatatatatataaatatatataaatatataaatatatataattatataaatataaatatatataaatatatataaatgtatataaatacataaataaatatataaatatatataaatatatatataaataaatatatacaaatatatataaataaatatatataaatatatataaataaatatatataaatatatataaataaatatataaatatataaatatataaataaatacatatataaatatataaaatatatataaataaatatataaaaatatatataaataaatatatataaataaatatatatatatatatatatatatatattttagacagagtattttttataaagatccatatattatttataaatgcatatgaccttacacacaaggttaaatgcaaataacctctggggtgggcctggctcagctcagggaggaagccctgtcagagaaggatgcagctcttccgtcaatcatggcctgagggg

SEQ ID NO: 25396 - DNA, 443 bp, Homo sapiens
  source 1..443: mol_type = other DNA
tgaggtcaggaggctcttcctttagtttcaaagatttagttccaaatatttatatactttattaataattacatatttctcacacattaaaatgaaaatttttttgatatattgggttaattaaattgttacaatcaattcaacctgttcctttttcaagtttggctactagaaaacttaaaattcacatatggctcacattttatttcagtctgcaggtcataaaatctgaaattttaaaataattgttattataaaattatattttttcctttgtgaagagccatatattatttataaatgcatatgactttacacacaagtttaaaggcaaattcctctggggtgggcctggctcagctctgggaggaagccctgcctgagaaggctgcagcctaggctgtcacccgtccaatcaggcctgcagctggagcggacaggac

SEQ ID NO: 25397 - DNA, 571 bp, Homo sapiens
  source 1..571: mol_type = other DNA
ataaatatatataaatatatataaatatataaatatatataagtatataaatataaatatatataaatatataaatatatatataaatatatataaatatataaatatatataattatataaatataaatatatataaatatatataaatgtatataaatacataaataaatatataaatatatataaatatatatataaataaatatatacaaatatatataaataaatatatataaatatatataaataaatatatataaatatatataaataaatatataaatatataaatatataaataaatacatatataaatatataaaatatatataaataaatatataaaaatatatataaataaatatatataaataaatatatatatatatatatatatatatattttagacagagtattttttataaagatccatatattatttataaatgcatatgaccttacacacaaggttaaatgcaaataacctctggggtgggcctggctcagctcagggaggaagccctgtcagagaaggatgcagctcttccgtcaatcatggcctgagggg

SEQ ID NO: 25398 - DNA, 431 bp, Homo sapiens
  source 1..431: mol_type = other DNA
tcccaattcaagccccacaagagggttcttgatttcgtaagaaagtaaaggaataaaataatggcttattgattatatgctaaacaaggggtggattatttatgccccccaattttagaccagtactgttacgacactggtaagagtgtagcagtccagaggtcactctggtctttaaaacttggaggatgaagattcattttctggcctaactagtcagagtcttcttgaccctgatcagtgacattttatgcaaagtcaaaaaatataacttcagtcttctattagtgaacatttcagttctccatgaatactgaaagttttttctgtattctaatgtcacaatttctaaagttacaacaaaagaatctgtcaaagtcttaagttaactataaatcatcttttgaagaggatcaacacaacttgattgt

SEQ ID NO: 25399 - DNA, 545 bp, Homo sapiens
  source 1..545: mol_type = other DNA
atctaaacatttgaggtcaagagtgtggacagatctgaagacacagagttttattatcctgtggccggcgaactgaagggagatggtagggagaggcttttccttcacctctgtgcacttcaatgtttagtttcaaagatttagtttcaaatatttatatactttattaataatcacatatttctcacacattaaaatgaaaattttttgatatattgggttaattaaattgttacaatcaattcaacctgttactttttttttttaagtttggttactagaaaatttaaaatttacatatggctcacattttatttcagaaaattacctccgttctaaaatttcagacggccataaaatccgaaattttaaaataattgttattatattcttttcatttgtgaataggcatacagtatgttatttataaatgcatgtgactttacacacaaggttaaatacaaattgcctgaaaagacggcagcctaatcttctgtcactcagggcctgagaaggtgggcagctggagcggacaggacggcttc

SEQ ID NO: 25400 - DNA, 384 bp, Homo sapiens
  source 1..384: mol_type = other DNA
tccatactggagtgcagtggcgtgatctcgtccagcctcccaagtagctgggattacaggcgcctgccaccctttttaaaatctcaggcaaaatataaaattttagaacagttgggcgcatgcctgtaatctcagctacgcgggaggctgaggcaattgcactgaaactcaatctcaaaaaaaaaattttttttagaacaattgggttattatattcttttcatttgtgaatagccatatagcatattatttataagggcatatgaccttatacacaagattaaagtctcgggtgggcctggctcagctcagggaggaagccttgcctgaaaaggctgcagcataggctgtcacattccgtccctcagggcctgaaggggcggg

SEQ ID NO: 25401 - DNA, 392 bp, Homo sapiens
  source 1..392: mol_type = other DNA
tgcagtggggcgatctcgggcctcagcctcccgagtagctgggataacaaggctggtgacctcaggcgatccaccctctttatttttaaagtctggctactagaaaatttaaaattcacatgtggctcacatcttatttcataagattggctccttttaaaaatctcaggctgctagttcaaaggactaggtcataaaagctgaaattttaaaataattatttttttaaatttgtgaatagccatatattatttataagtgcttatgaccttatacacaaggttaagggaaaataccctctaaggtgtgcctggctcagctcagggaggaagccctgcctgaaaaggctgcagcctaggctactcagggcctgaaggggcgggcccttaaac

SEQ ID NO: 25402 - DNA, 396 bp, Homo sapiens
  source 1..396: mol_type = other DNA
gcctggctaaacttgatctcgtgatccaccagctggagtgcagtggcgcgatcgctggtgtactcctaaagtcctaggattacaggcgtgagccaccatgcctggcattttctagtttggctaccagaaaattcaaaattcacgtgtttttaaaatcaggctgcctgaaagtaaaaaaaccctgaaattttaaaacatttgttattatatccttttcatttatgtatagccatatgatatagtatttacaaatgcatatgaccttatacgcaaggttgaatgcaaataccctttggggtgggcctatctcagctcaaggaggaagccctgcctgaaaaggctgcagcctaggcggttctgtcagtcagggcctgagagggtggggtacgcagcttg

SEQ ID NO: 25403 - DNA, 605 bp, Homo sapiens
  source 1..605: mol_type = other DNA
tcttataccattctcttctctcagagttagagaatacattagagaatatttctgtgttgaaaattgttggataatttcagtcattcctgtaagtcagaacgaattttctttactttctcatttgaccttaattcaaatgataaattttgctggcaatgcctggacactgttttcatagaataatttttggtaatttatgctttgcataagtgacctgttttaaagaaatcttgaagaactgtccgtgtggaaaaaaatttcttcaggatgttttatctcactctacagtagtggtaatttcagaaatttagtagtataaaatattgttgtccatatgttaaaatctatatgccaccactaattttttatccatgaatactgggtggcaaaattaagcacctacaaatttaaaatattttctaaatgttaagaactttctgtcattaaatagtattttgggataaattttctagaatattctattacatcctctttactaagcatggtactaggtaggtaattagagaatatgagcaagattcatgttatttatttttaataaagcaggtattgctgtctctaagccagatctggtcacctgtctg

SEQ ID NO: 25404 - DNA, 493 bp, Homo sapiens
  source 1..493: mol_type = other DNA
tacaaataattagttgggtgtggctgtggtaatcccagctactgggaatcactattattaatcttaaaaaattattattattattttttttttgagatggagcaggagtgcagtggtgccatctctgctcactgcgcctaataaaaatttttttatttctattgtatccaatagcttgttttaagtgtgtagaacaataacttacacttttatgttaattttatattttgttaatttactgactgtattattagtttagacaaatttcaatgtactgtggttttttatgtgtaagattatatgttcctcaaacagcaactcagtttcaatggctttaaaaagaattcttttttcattattctgccacatgcttccagtgctatgttaaaatagaaacattgacaaagggcacaatagagtttactattggtgtctgtatggcaaacaactccttaagtttttataagctgatttcaggaggtaaagatcttct

SEQ ID NO: 25405 - DNA, 549 bp, Homo sapiens
  source 1..549: mol_type = other DNA
gcaatttgctagaaaagatttagttccaaaaatatatatagtgccttaataattacatattgctgtgaccccagaaaatctgagacatcagttaatttaagtcttgaggacacctgcccaaggtggtcaggacatcaatcaatatatgtaagaagtacattggtttttgggggcccaagatatttcacattgctcacatattaaaattataatactttaaacatattgggttagttacattattacaatctttctttttaaagtttggctactggaaaattaaaaattcacatgtggctcacattttatttcagaggactgcctcctttttaaaatctcagataaaagctaaaatttaaaagtaattgttattatattcttttcatttgtgactagccatatagtatatttataaatgcatatgaccttacacacaaggtaccctctagggtgggcctggctcagctcggaggaaagcctgcctgaaaaggctgcagctaggctgtcacgctatcaccctctgtcactcagggcctgagagggcgggtc

SEQ ID NO: 25406 - DNA, 597 bp, Homo sapiens
  source 1..597: mol_type = other DNA
ctaaatactggagttcaagtgtgtggacagaactgaagacatagttgttttttctctaaaagaaaggtgggcaacaggtggccagcagttgtttattacctgtagggagagtctcttctttcactctcgcagaaagattcaaagatttagttccaaatatttatatattttatcaataattacatatttctcacacattaaaatgataatattttgaatataatgggtgaattacattgttaacaatcagttcaacttgtttctttttaaagtttggctactagaaaatttcaaatccacatgtggctgacattcattttagatgattaggtcataaaagctgaaattttaaaataattgttatattcttttcacttgtgtatagctatataatgtattatttatttatacatatgaccttatacacaaatttaaaggcagatgggcctagctcagctgagggaggaagccctgtcagaagagggggcagtctaggctgtctgtcactcaaagcctgacagggcgtttaatccaaccagggacgctgggctggaaaccgtccaatcaggcatgcagctggagcggactggacggctt

SEQ ID NO: 25407 - DNA, 687 bp, Homo sapiens
  source 1..687: mol_type = other DNA
atgttttacatcagtttctaaaacctggaaattatcttgttttgaatttcttatgaaaatggaatactatccactaagaatattccattagcatactgcaacttaaagtcaggagatctaaactttttctggtaacattacctatatttagttttttaaaaaatgttctctttttgtatatgctttttaatttgcttttaaaacatgtgcataacatttccttgaattctattaatggacctcaatgctttaaaaaaattttttgataaaataattcagtctgaatgtgcattgagcccaagagtttgagaccattctgggctatctagtaggcttcatctctagggccacatgccagtggtcccagctactcagaaggctgagacagtaaattgctcaagcctagattgctgaggctgcagtgagctgcagtcatgaccctgcactccagccagaggataaataataaaatattcaatgtttgtaatacttcctaaaaagctgaaattcaaaaacaattgttttcattttttagtatccatatagtatattacttataagtgaagatgaccttatacacaaggttaaaggcaaataccctctgggttgggcctgctctgctcagggaggaagccctgcctgaaaaggcggcagcctaggctgtcattgagaggacagggcggcttc

SEQ ID NO: 25408 - DNA, 308 bp, Homo sapiens
  source 1..308: mol_type = other DNA
ctatcactgttaaatataatgggtattgagaaaactgttagatattattaaggaatttctatatatcctccagaggacaattggcgattttccaatagaaagtgaaataaccccgttaatgagagtaatgcagttattttaaaaaaagacagggcacaattaccctgataataggtttagatgtttttctaaaatgagcaaatttaggcaacataatacagcagtgtggtacagcacggtgagcattgtcaacataattaaaaagttgttaaaagggtatccaaaccttcagtagctactctgggcat

SEQ ID NO: 25409 - DNA, 308 bp, Homo sapiens; identical to SEQ ID NO: 25408
  source 1..308: mol_type = other DNA

SEQ ID NO: 25410 - DNA, 447 bp, Homo sapiens
  source 1..447: mol_type = other DNA
gcagtgagctgagatcatgccattgcacgagcaagaacaacaacaaccataataataataataataataatttaaggttgtttcaagttaaaaaaatctattaaaataaaatagaaaaagttaaaaaaatgtgagattataaaatatatatgaaaatgtagacaaatttgatggatttatttataaggttttactaaaataagtttaatttttttgttttgttggcgtaagccatcgcgcccggcctttagtatacactatgactaaagtaaaaattaatttactctggaacaaaagttttatgtattattaacatggcagtaaaatatattcgttcacatttcgaatacatttaaactggggtgggcctggctcagctcagggaggaagccctgcctgaaaggttgcagcctacgctggctctgtcactcagggcctgaaagggac

SEQ ID NO: 25411 - DNA, 420 bp, Homo sapiens
  source 1..420: mol_type = other DNA
gaaattgttacaatcagtttgacctttctttttaaagtttggctactagaaaatttaaaattcacatttggctcacatctggagttcaaagcgatctcagtagctgggagacctcaggtgatccgccggccctcaggctgcctgatcaaaaaaccaagctgaaattttaaaatagttgttattagattatttttgtttgtgaataacaatatagtgtatttttttcttgagacagagtctcactctgtggcccaggctggagactcctgcctcagcctccggagtagctgggactacgccatattatgtattatgtataaacgcatatgaccttacacacaaggttaaatgcaaatacctttgggttgggcctggctcagctcagggaggaaaacctgcctgaaaaggcaggggaaaccg

SEQ ID NO: 25412 - DNA, 347 bp, Homo sapiens
  source 1..347: mol_type = other DNA
cggatcacctgggagttcagcctggccaactgtaattccagctactcgggaaaatcactggaacccgggaggcagctgtaatctggtggcgcgcgcctgtaatttcagctactcgggaggcgagcgtgccactgcactcaaaaaaaaaaaagcagaaatttaaaaataattgttattctattctttccatgtgtatagtatattatttacaaatacatgagaccttatatacaaggtttaaggcaaacaccctctgggtgggcttagctcacctcagggaggaagccctgcctgaaaagggggcgtcactcagggcgtgaaacgttaacaagtcagagacgctggcc

SEQ ID NO: 25413 - DNA, 441 bp, Homo sapiens
  source 1..441: mol_type = other DNA
gcccgctgggtgtattctcagctactggagaggctgagacaccagaatctcttgaagccccactgcaacttcaagatgtactcaaatattttgctaaattgcagcagaatcctgaggtcaggagttcaagaccagccgtggcaggcgcctgtaatcccagctactcgggaggctggggcaggagaatcgcttgaacccgggggcggaggtcgcagcgagctgagatcgcgccactgcgctccagcctgggcgacagagtgagactctgtctcacacacaaaaaagcctaaatttaaaaataattattctattcttttcatgtgtgagccatatagtatattatttacaaatatatgagacccttctgcggtgtgcttggctcagctcaggcaggaagccctgcctgaaaaggctgcaccttctgtcactcagggcctgagg

SEQ ID NO: 25414 - DNA, 496 bp, Homo sapiens
  source 1..496: mol_type = other DNA
tgccgctggacttcagcctgggcaattaaaaaattataagagatcataaaatatgtataaaaatctagagaggtcaaaaaaattttaatgtatttttatttttattttttgctaactcactacaagttcaggcgattctcctgcctcagcctccggagtagctgggatttttcatttttttgaaatggaatttcactaagacctcaggagatttacaggtgtgagccacggcgcccggctgagagacttacaatgttttatcaaattagctttattattgataatacacaataaagtaaaagttgattttctctggaacaaaaattttatgtattattaatatacatcaaatatttttgttcacattttgaatacattgaaagagaggtgggcctggctgagctgaggaagccctgcctgaaaaggctgcagcctacgctgatcacatcttctgtcactcagggcctgagaaggcgggagcggacagggcggcttc

SEQ ID NO: 25415 - DNA, 443 bp, Homo sapiens
  source 1..443: mol_type = other DNA
ataaaataaaataaaggttgtttcaagttaaaaaaaaaagtctaataaaatcgaaagagttaaaaaattataagcgtttataaggccgggcgccgtggctcaagcctgtaatcccagcactttgggaagccaaggtgggcggattgcctgtcagtagtttcagaccagcctggcctcaacgtggtggcctgtaatcccagctaagagattataaaatatatatgaaaatctagagcgttcaaaaatgacaaatttgatggatttatttataagattttactaaaattagaggctggagtgcaatggggagaggtcgaccaggctagtctgggattaaaggcgtaagccatcacgcccggcctttgcggcagactgggctggcaccgtcactcagggcctgaaggggcgggcgtccaacacgcagctggagcggacagggcggc

SEQ ID NO: 25416 - DNA, 217 bp, Homo sapiens
  source 1..217: mol_type = other DNA
cattttcaaatttgtgctacacacttcacacagaatgattgagaagtctttctaaaataaacaaatttgggtaacataatttttgcttaacagcattatcaaaatcattaaaaagttgttaaaatatgttcaaatgggcacctgtaatcccagtcccagctactcgaacaaaaataatccaaatgttcttttcttacccttaagtagcaaataagat

SEQ ID NO: 25417 - DNA, 573 bp, Homo sapiens
  source 1..573: mol_type = other DNA
ggcagcagtagttaataaaataaccagaggtaaccacaggtcgacctgtggagatgttggtagagagaggctgtcccctcacctctggcaatgtggcagctattggccacgtgtaaatagagttattttcaaagatttcatgtgtgtgtgtgtgtgtgtgtgtgtgtatacacatatatacatatatatgtgtatttcatcaataatttcatattgctctcatactaaaatgatagtactttggatatattgggttagattgttacaatcaattccacttgtttttttctttttaaagtttgactactagaaaatttaaaattcacatgtggctcacattttatttgaggatttttttaaacataaagtctgaaattctaaaataattattattatattatttttctttgtgagtagccatatatcatttataaatgtatatgaccttatacacaaggttaaatacaaataccctagggatgggcctggctcaggctgcagcgcaggctatcagtcagtgtctgatcacatcttctgtcactcagggcctgaagggtcaggaccttaaacgtt

SEQ ID NO: 25418 - DNA, 353 bp, Homo sapiens
  source 1..353: mol_type = other DNA
tgtttatttatggttttaaaaacctgatatataagaccagcctagtcccagctcctcgggaggctgaggcaagagaatcacttagctggaggtgccgaggctcagtgtctaggtgtaaggtggctcctaccctggatgggcatcaagcccatccaggaagatttgaatgccatcataaaagatgaaatattaaaataattgttattatatatatttttatttttgaatagctatctagtatattatttgaaatgcatgtgaccttacacagaaggttaaaggcaaatacccgcttagctcagggagggagccctgtctgaatctgatcacatcttctgtcactcaggacctga

SEQ ID NO: 25419 - DNA, 192 bp, Homo sapiens
  source 1..192: mol_type = other DNA
cctaccgtgcccggcccggtaacctttcccgcattatgaaaatgattaaaaaatgtccaaatgggcagtggcatgcgcctgtaatcccagctccactgcactaaaaaaaaaaaaaaaagtccaaatgttctttcttacccttaagtagcaaataagatgcaaaagagcaagtgcatttcatgtaccgcccag

SEQ ID NO: 25420 - DNA, 373 bp, Homo sapiens
  source 1..373: mol_type = other DNA
aggaatattatcgcccctaatcagcctgaaaaagttacagaagacgaatctttgtctctaggcattcctagcctctagatatttatggttaaggaaatgaattaataatgtttactaagcagtccagatattccaacatctggggaataaaggtattcctaattttgctttaaagataatagatctcctgaggtccctgtagtcccagctactatggaggctatcgcgccattgcactccgaaactttgtctaaaaaaaaaattattcacatatttaatacgttgaaaaaaaggaagagagaaaatttttccgtgttctgagatgggcctcgttcagctccgggaggaagccccgcctgaaaaggctgagcta

SEQ ID NO: 25421 - DNA, 534 bp, Homo sapiens
  source 1..534: mol_type = other DNA
taagagatcataaaatatgtataaaaatctagaatggtcaaaaagacaaatttgatggactttatttttgttattttatttttagacaaagtctcgctctgtcgcccaggctagggtgcagtggcaggatcttgactcactgcaacctcagccccccgggttcaaggaattctgctgcctcagccacccgagaagctggggttatttcaagcagttctcctgcctcagcctcccgagaagctggtattatcaaattagctttagtgctgataatacattattactaaagtaaaagttgattttctcttgaacaaaaattatatgtattattaatatacataaaatatgtttgttcacattttgaatacattgaaaaagagagagagcaaaaaagatatagaattttcccatgctctggggtgggcctggctcagctcagggaggaagccctgcccgataaggctgcagcttaggctgtcactctttcttcagcctagggtgtgatcacatcttctatcactcagggtctgagta

SEQ ID NO: 25422 - DNA, 520 bp, Homo sapiens
  source 1..520: mol_type = other DNA
atctctacttttttttttttttaattaaagatgtattagcaccaaactgagactttctcattggtgcaatcagggagcgagctggctatccagttcctggaaaagtaatagctctgacttcattgaatacttaataaacataatccattagcatttttttgttgttgttgttgttagatgaagataataaaaatcatcatagtaaacacatagcgattactatgtgctggacttcgtcgtagttgagatatattaccatcctaagttaaactataatcgtttattgttatctctaggtcttcctagatgaaatttttaccctaaaggatcgtaaagtcggcccaccggacgtcagtggggtcccctgttcagccctctcgaggtggcaccgggacctacaggtgggccgcaagccccgcccccagcgacggcttgtagccccgcagcccgccctgcaggactgcagaatttccggcggcgcgctgtcgtcacgcgtcccgcgcctcctcgcgcctgcgcc

SEQ ID NO: 25423 - DNA, 433 bp, Homo sapiens
  source 1..433: mol_type = other DNA
tattcatttatttatttatatggaatttatttatttattttggagacagggtctcactctgtcacccaggctggagtgcagtagcgcaatccaggttcactgcagccctaaacacctcagatacccgagtagttgggactacaccacgcctggataattttttttaaatgttttgtagagattggtctcgaactcctgggctcaagcttattgctatgatttttttattgataaaaactaataaatattctgagtctcaagaaagctttctgaaactatcatcactacctgtgaggccgaccccactcacagcactgcggaactagaacctaagcctgctgtcccagcttcggtggaagctgccaggcgcatgcgcccccgaggtgggcgagcgccggtgatgtcacgcatagcgccatctccgagctccgag

SEQ ID NO: 25424 - DNA, 530 bp, Homo sapiens
  source 1..530: mol_type = other DNA
ggagggccaggaaggcctccgggcactgaggcctgggaatttccttctgagccgcacaggaggctcaggtgcgggttggacctgggtgacgggcaccagggtcccctggaccttcagtttgaaattttccactataaaaagcttaaaatataataggctgcagtgagccgtgaccgcttataaagtgctgctgcattttcatattacgactgtgctgtgaggcccgccggaggcaccagaaggcacaagccggtctcgcagtcgcgggcgcccccaccccacccctgcccaaggccagggtcgcagtcccaccgggtgacggcagtcgcgctccgcgtggggcagcggcgagcgggggccagggggtcaaacacgggcgacagtcccgcccagccccggacctgcagcgcgcacaagctcgggcgccctccgagcgccgcgcccaagccccgcccctcccgcttcccgggctccgattggccgagccaccgcgggggcgtgtccggcggagctggccgggacccgggcgg

SEQ ID NO: 25425 - DNA, 353 bp, Homo sapiens
  source 1..353: mol_type = other DNA
ctgcagtgagttgtgatcatgccactgcactccaataagcaatagaatctatccataacttcctcagttgaattgctgtagcacctgtttcaatatttccacctagaatagccttgggctcagccagagctctgaggaggattgtgctaaaggtatattgcaaagcctgggaatgatttcatttaagaacagttgcttaagatcctgggtcgggagcctgcaggcttccagacttacgccggggcactgtctgagagtccagcctgtagggactggcgaccctctgctcagggcccactgcaggtcagtgcccgtgtggtcacagggtcccagggcattccccgggccagtgc

SEQ ID NO: 25426 - DNA, 350 bp, Homo sapiens
  source 1..350: mol_type = other DNA
gagatgctgggatcagacccagaggctccagagcaggctctggaacagaggtctcttctgtgcccaggctgcggggagagaggggtcctcccaaagggagggaggtctccgggaggtccccgcggtcctggaggcaggtgcgcggggcccgggcagggctgggcctgcgggagcgcggccttgcggtacccgcaacccaagccagggccccggtgacagcggcggggtgggccaggaccggggagggggtgcccagcagcgacccccggctccccctaaggccgggcgcagctcggagccaggagctggcccggcgcgtggcttcccggaaggcccggcgcagccggaag

SEQ ID NO: 25427 - DNA, 689 bp, Homo sapiens
  source 1..689: mol_type = other DNA
gttacccaggctggtctcgaacgcccggcctcaaactcacagattccttgaatgaatgaatgaacgacccgatagcagccggcccccagggagccccagaccccgcggcctgaagccttggttctaggccaaggcacaggcgcggtgaccttggggatgtccccgcccaggactcagggcccggaactcggcgtctcgggggcggggagggcgtgcctggcgggacagcgcgcgcggaggaacggcgggcggtgctcctcgggtaggccccccacacatctcagccctgccggggcccgaacccgcgccgcccgccgtcacgcggctttttgccgctccagcgccgctcggccccgcccccggcgcccgcggcccgcccctcgccgccgcgcgccagacttctcccgcgtcccgcccgccgccccgccccgcgtcccgcgccccgcgccccgcgcccggccctcggcgcgcaggccctgtcacttggccccgcccgccggccccgcccctgattccccgtccctgcgcctcgcgggccggcgccgtggaggggcgggtccgggggcggggcgagggacggggcgggacgggctctgggtcccgcgcggccgctgaggggctgggagccgcggcggggcggtgcgagggcgggccggggccggttccgcgcgcagggattttaaatgtcc

SEQ ID NO: 25428 - DNA, 943 bp, Homo sapiens
  source 1..943: mol_type = other DNA
ctcgccgccgcgcgccagacttctcccgcgtcccgcccgccgccccgccccgcgtcccgcgccccgcgccccgcgcccggccctcggcgcgcaggccctgtcacttggccccgcccgccggccccgcccctgattccccgtccctgcgcctcgcgggccggcgccgtggaggggcgggtccgggggcggggcgagggacggggcgggacgggctctgggtcccgcgcggccgctgaggggctgggagccgcggcggggcggtgcgagggcgggccggggccggttccgcgcgcagggattttaaatgtcccgctctgagccgggcgcaggagcagccggcgcggccgccagcgcggtgtagggggcaggcgcggatcccgccaccgccgcgcgctcggcccgccgactcccggcgccgccgccgccactgccgtcgccgccgccgcctgccgggactggagcgcgccgtccgccgcggacaagaccctggtgagtctactgccgcgggctgcggacagggactcctggggcccagaccgcgccggggagctgggtgggggcggggtgcggccgggtcgcgggtccccgggcggcgtcgcggggcgcccgggagggtgctgagagcgcgcactgaggcagcccgggccccgggaggcgacgggccggtgagggcggcgggggcggcgggaccccgggtcgggggtcggcgggtgcccgggtcgcgggtgacaggccaccccgccatcggccatcttcctggctcgcccggccgcccgcgcgcaaagggggaaggggtactgggcccgcggcctgaccccgccgccgcctcaccccgcgccgccccgcaggcctcaggccggagcagccccatcatgccgagggagcgcagggagcggtgagtgcccgcgccgcggggccggacgggacgggacgggacgggacg

SEQ ID NO: 25429 - DNA, 279 bp, Homo sapiens
  source 1..279: mol_type = other DNA
cccttgcaacctggcatggatcaagctggcttcctctttgcagtgccctgtcaatgtgactctgggctggccatgatctctaagataagactcatgaaaaataagacattattgttttttttcagccgctgcgtatttgttgcacagcaatagctaactgagggatcaatggcgttgccactgatattgccgagggcaaatggaacctcttttgctcagtccgaggtgtattccagccccagggtgctgggtgaggcctctatgtcacagatgggaatt

SEQ ID NO: 25430 - DNA, 484 bp, Homo sapiens
  source 1..484: mol_type = other DNA
gtgtggtagctcacacctgtaatcctagcacttcttaatgtcaagaccagggccagtggtcccagctactcctctactgcactcaaagttatccttggaaaatttcttagtattaaaattagtacagtagcttaatttatataagagaaaatacaatgtgtacagtaattaatgaacatgcaaaatataattgtatatttcaactcactaagagttgaatttgctaaaattaaatgtgcttatgaaacagctctagtacatgaattagcgacacgcggctcttgttgccatagaatgtaagctttttttttttaaggttccaaagcctatatttagtgctttcatatacgtaatctcaaaaaaaaaaaaacagccacgcggttcgcatcaagcgcactcccctgggggcggggcctgcgcgagctgggcgtgtcgggggcggggcctgcgcgcttgcttccggcgtgccgcgagaggcggggcg

SEQ ID NO: 25431 - DNA, 282 bp, Homo sapiens
  source 1..282: mol_type = other DNA
acgtgattaattaaaatcatattttcataatcatttggcactagtattgttttagaattatcataataaagtcgcctctaatggcagtttttttttttttttttttttcctcccagaaaagaaacagactttaaatggagcaggtaagaattaaaaaaattctttactgacacaccattctttgtagattattagacctatctagttgctgtgaattaaaaatcgagcccgccctgccccggctgggctgggaacagttcgcagggctctgccgagtgggcg

SEQ ID NO: 25432 - DNA, 475 bp, Homo sapiens
  source 1..475: mol_type = other DNA
cggcggctgcggccgggcaacttcggcggcgagcgggacctgcgcctgggccgccgcctccccgcccgcggtcccgggaccgttacttaaaggagtcccgaggcctggcgcccggcgcgcgatcgggaccccgcgtccagctccggggacccggccggcgccccccacccgcgagcggcccgcgagccactctcaggccccgggaaactttcaagagggtctggggggctcactgcggggttccggcccctccgcccgtggagagaccttttttttttttcaattaaagttagctgatgatcggcctcctgtgccccgggagcctggccaggctgaggccggagatttcagggctgaggtgccagggtccgaacccgcgaccccaggaaaggccgtggcgcctgcaagcgcaggcggcgcccgcagcacctgccccagccgggcctcggcctgggggcccagccgggggccaaag

SEQ ID NO: 25433 - DNA, 502 bp, Homo sapiens
  source 1..502: mol_type = other DNA
gagaacatgtccaccgtagcagggcggggtctcagccccgcgtgcgggtggcagcggcggccgtttcaccagaaaggcagctgcgaggtgtcccggcctgcggggctcgggcacccggtgcgtcctgggggctgggtcgtgtgcgcgggtgggagccggcggccggcggggccggggcgaggggcggggaggggcggagtgagcgagcgcgcggtacggccctccggttcctcctgcgccttctcccggcagccgccgccgccgccgccgccgctgtgcaatttagcagaaatccgacaggggccgcgtttgctgagcgcatccggcggccgggcagcccgagcgggccgccgggcctggtcggccggtgtagaggcgcggagggggccgcgggagcacgcctgaccagagcacgcgccgttccccaaccctggtgtccccggcgagttgggcagccccgcgcgccctgaccttgacgccccagtctccacagtttgatact

SEQ ID NO: 25434 - DNA, 491 bp, Homo sapiens
  source 1..491: mol_type = other DNA
aatctgtattggtgtacagtacagctgtgaacacacggcatatgcgtttgggccaaaagcaaaatgtcatttgtctttcctgctgtatttttgcaggaaaagagtcaaattagaaaataaattatttctttttgcattatatgtttaaatgcatatatagagaatatatatatatatatgcatatatatgtgtgtgtgtatatatataaagagagaatatatatacattgaagaatctatgcatttaatatctgccacgtcatgaaactagaatccgctgcttgttttcgtaaggtaaaaaaaagaatcagagtaaaatttacccttatttatcatttctatttagaggtccaaagatgggccctaattgcagggcctttctggcctctgtacagaagtagctgggagcagtgactccagccttcagaggcaggactcagaaaggcctctcttacgtggcctgctgggagccgcccctggtactgccggga

SEQ ID NO: 25435 - DNA, 697 bp, Homo sapiens
  source 1..697: mol_type = other DNA
gccccggcccgcgcccgcctcctccctggagggggcctgcccgtgggctctggcttccccgggggacgccagccccggcccggggaccacgctgggggctccggagtcggcgggaacgagcgccccgggacgggctcggcggggctggcgccgcgcccccgcgtgtgcgcacggggcggaggcggaggggcggcacccctttcgctggcggggcgggggtcccacgcgggcctggggccgggggcgggggcgcggcgcccccgcgggcgggcgattgacacgctgttgccgacgccgccgctccagccgcgccacgggcagaagactggaccgccgagccccgggccgcggcggcggctgcgcgtccccccggatgccgtgacccccggcctaggggcgggggccggggcagtaccggtccgggccgctcccgcgctcctcccccccagccccgaaccccgcgcacctcgtctggggacggggcgggggggggcagggccgccgctcctccccgccccctcctcctctccgcacgttcggggttcgcggcggagcgcggcgcgggggggacgcggagagcctgggcgcagcagcatcctgcgggcggccgctctccgggggggaggctgagagcaggcccgcctcgcccccccgcgggcccgccgccccctccctccctgtcctcagcccggcagcg

SEQ ID NO: 25436 - DNA, 731 bp, Homo sapiens
  source 1..731: mol_type = other DNA
gcccctggcgggggatgggcaggggagcccggtttccttctcccgcccccgtcccgccctaggatcggcccgcgccgtggatggggggcgcggcccggctcccgggggcgaggggcggggtggagggacccccgggacgggcccaggaaagtttgtccggggaaaaggagctgggtggcgcggggtctgagggctgcccccacccgccccggcccgcgcccgcctcctccctggagggggcctgcccgtgggctctggcttccccgggggacgccagccccggcccggggaccacgctgggggctccggagtcggcgggaacgagcgccccgggacgggctcggcggggctggcgccgcgcccccgcgtgtgcgcacggggcggaggcggaggggcggcacccctttcgctggcggggcgggggtcccacgcgggcctggggccgggggcgggggcgcggcgcccccgcgggcgggcgattgacacgctgttgccgacgccgccgctccagccgcgccacgggcagaagactggaccgccgagccccgggccgcggcggcggctgcgcgtccccccggatgccgtgacccccggcctaggggcgggggccggggcagtaccggtccgggccgctcccgcgctcctcccccccagccccgaaccccgcgcacctcgtctggggacggggcgggggggggcagggccgccgctcctccccgccccctcctcct

SEQ ID NO: 25437 - DNA, 431 bp, Homo sapiens
  source 1..431: mol_type = other DNA
cctaacccccaaattcagatgaatttgaattctgaaatacagtaacaggaattatcagcctgtctgattctaaaaggaccgtggacagcccagccagctgtaaaatggccacaagcaccatgctgcgtagttcctaatacggcaaaactatccagcatttttggtgaaattggcagcttgtgttactgggtctgagagattccccagggccagctctggcccttaacaggcacccctatacacggtgacttctaaatctagacgtctggaagggtgggcccgaaccccgcccgggagccagggtttgcaaggggctaaaccggctggggagcctccctctcgcgggtccagcctcggcggcccgggacgccggtaggcggggcctgagcctcgccccgcccccgctgcccgccattcgggtcacctgaccc

SEQ ID NO: 25438 - DNA, 686 bp, Homo sapiens
  source 1..686: mol_type = other DNA
gtcccagctactccggaggctgaggcgggaggatcgcttaggttgcagtgagccgtgatagcaccactgcactccagcccacctgtaaaaaataattttaaaaaaggttccacctagtgttttattagtttggagaacacagaggagcctgttttcggaagaggggcgtctttggagacgcaaaatcctctccgcgggacgctgacgggcagtcggtaaaggacttccaagcactggtcagtgacaatcgggcgctggggctttgccaaggcccggaggcggcgcgccaaaccgggcaatgcgggaagcggggcaggcccgagtggccctactgctgccgtaggccctcaggggctcccaggcccgcacccctctcaagccccggggaccaccgcggagccgctgctccgggccgtgcggctcgaggcgaacctgcctcagagccgccgggccctcctatcccgagccgtatctctagctccggcctgaggtggccggcgactgcgtgcgcaaacacaagactgcagctccgcggccgcgctcagagtctccgggaccaggcaagcggaagtgtgccgcttccttccggccagcgcagcacgaggggccttgacgaacagctcccggggcctatgggcgcgggggcagccgcccggcctctccggcgcgccccctccccggggctg

SEQ ID NO: 25439 - DNA, 463 bp, Homo sapiens
  source 1..463: mol_type = other DNA
ccatctgtatttttttaatgtaaaaaataaaataacacacacacagacaaacaaacagaatctgtatgagtcatcctcccaggaaaagcccttttgggtctggctgtgtctcccaggccaaggctcactgcagcctcgactcctgagtagctgggactagttttttaaaattttagtagagaaccgcctcccgaagcgtcgggaccacaggcggcgagccaccggccggcctctgtgtgcaccgaggagccgggcagccaccgcataattattatacttgttgacccaagtccctgcacgcagaggcgccgatcacgggtgggaggtggatcccggaggccccgccccaggccccgcccctccgtgcgcccaagctcgaccgcctgaaatcggggaatcgggcctctgccggcgccctggcagcggcgcggggcgtggctccgggctggattggtggcgcctg

SEQ ID NO: 25440 - DNA, 784 bp, Homo sapiens
  source 1..784: mol_type = other DNA
actggtcagtgacaatcgggcgctggggctttgccaaggcccggaggcggcgcgccaaaccgggcaatgcgggaagcggggcaggcccgagtggccctactgctgccgtaggccctcaggggctcccaggcccgcacccctctcaagccccggggaccaccgcggagccgctgctccgggccgtgcggctcgaggcgaacctgcctcagagccgccgggccctcctatcccgagccgtatctctagctccggcctgaggtggccggcgactgcgtgcgcaaacacaagactgcagctccgcggccgcgctcagagtctccgggaccaggcaagcggaagtgtgccgcttccttccggccagcgcagcacgaggggccttgacgaacagctcccggggcctatgggcgcgggggcagccgcccggcctctccggcgcgccccctccccggggctgttgacgccccccgcggcggttctgccctccttgtacccgcggcgcgctgcggcccgtggcgcggccccgttcccgcctagccccgcggcctccttcccctcccggagccgcgcgtgaggacggctgaggccgcaggtctgtggcggcgcgccgggacgcgcgggcgagggtctaccgagagggcgggcgggcgccggcggaaccctcggctacagccccgagcccctggggccgcccctccccgccgcgtggcgcagtcggggggcgcggccgcggcgtcggggcgtcgggaggggcggagcgcgggagtgtctgccgggacgcgggccg

SEQ ID NO: 25441 - DNA, 713 bp, Homo sapiens
  source 1..713: mol_type = other DNA
cgctaccgccaacgtccacggagcccgcccgggaccctcgacgtgcgcctctgcggacggggcgcgcagagggagccccgttagcggtcccccgctcccgagtcacacgtcgtgtctctgcaccgccctggcctccacggtggctccctgcgaagctgagggtgcggtccccatcctccgtgggtgccaactccggggcaagcaggctgcagagccgcgcgctccgccttaggcgctgccaagggcggccgggtagggtttcctaggacccgcccaccccgctcgtcccggccggagctgccaccccctggatcagtggtaggcggggctccacgcggggaggtcacgtgtgggtggcccatccctccctcccctttgttagcgctcgggagatccaaccaaagcgggccaggctcccgcggagttttactcccggaccctgtcggcgacaggacgtcgggtgccccgcaggactgggcacctccgtgccccaagcagtgactggcaatccgaggggctgggcgccgccggggtcaggtgtccctgccgcgcagccccgcccctcacgttctgggcacgcgcagttgcgggcgtggggcgggagggagccgcctgagccccgcccccggctgggctggactccacgtcactctgggaaacgacggtttctcattgggtcagctgtggcgcggctccgccccacggcggagtaa

SEQ ID NO: 25442 - DNA, 434 bp, Homo sapiens
  source 1..434: mol_type = other DNA
tttcctttcatcactcaatgaaaaagtacctggccagacccctgaaatcccagccctttgggaggcggtggaatcccgtctttataaaaaatattgtaaaaatttaaaaagtacaaagaaaaagtactgataaatacattccacaatattttcattttttaattttttatatatatattttttgaaacagaatctcgcaggctggagtgcagtggcatgatcttggctcactgcagcctctgcgtagctgcaggctgggatccagttaaatatttctttttacttttgaaaaaaaatgaagttgacacaggcacgtgggccaggaggctcccggggcctgtctggggcagctgagctttggagagcagcggggagctgtgttgactttgactctggggcccagcgcatgagccctgagggactggcagcggccc

SEQ ID NO: 25443 - DNA, 392 bp, Homo sapiens
  source 1..392: mol_type = other DNA
tttcaataaaagacagagtctcactctgtcgcccaggctggggtgcagtggcctgatctcagctcactgaaacctctgcctcccgggttcaagcgattctcctgtctcagcctcccaagtagctgggattagaggaggctcccaaagcgctgggattacagtttcagagtcaaaccatggactgaattccttcccaaggaatttcctcagttacaattttgcaaaggtggtcggcccctctgtccctccgggggacaggcgagtgtccctggggcctgcagggcagtcctgctgctagccgggcctcccagggcctccgcgcgtcagtcctcctggccaccgcgtggcgctgtgccttacgggtggaccacgtggtctccgacgcctcaagg

SEQ ID NO: 25444 - DNA, 575 bp, Homo sapiens
  source 1..575: mol_type = other DNA
tctgggatgcagttaagtttggcccaaggcaaagctaccagagttttgggcagtcctgaggctgccgcctgagcctaggtccaatcgcagtgcgggagaacctctgctccctcccagagagatccaccctggcagccctggatgcggaccggagcttcctgcccctccgtttccccgaaggggaagagccaggacatggctttggccgcagctgcagggaggacacgaggccctgcattgcctcaggcctgcttggaagccccatcactggtaaagaggagtgggacgggctcagccgctctcacctgctcagccagaggcaggcccttggcttgggggaaccaacagctgagttacgcacacacagcggcctattaaggcaattatctcgattcccaaagataaaagaaggcataatttattttatctttaggtaaaaagatttgggaccatctggttttaaaaaaataatctgacaaaacggttttggagcttttttgtgtggcgtatctaagcttcattgcaaaaaaaaaaaaaaaggtgtttaataattacccttattgacctctcctggg

SEQ ID NO: 25445 - DNA, 238 bp, Homo sapiens
  source 1..238: mol_type = other DNA
cgagatcgcgccactgcactccagctggcattggattccaataaggccagaggcacgatcagatttaagttttaaacattgggcaaggctgaggcgtgaggtgccaattatttgtggcgaaataaattctctaagaagcccgccctccgcctcccgcagcgccggataggctgtgagggcggacgtttccgccctggcgctgattggtcgagggccgagctgagccaatggccgacgt

SEQ ID NO: 25446 - DNA, 370 bp, Homo sapiens
  source 1..370: mol_type = other DNA
cgtccaggagttaactccgggcacgggcctgtccaactgtggccgaccctggggcagaagagggcacagaagggcgcgccttctcagctcctccaggagttcgaggcagtgagctatgacacctgtttcttaaaaaaaaaaggcttcctcaactgaaaaccactttccagagccccacgcgcggcgggcgagcatctcctgcggcctctccgaaatcccaggagcatccttgcagcgcgaggagaatggaccggggcctggactcatcacgtcggccattggctcagctcggccctcgaccaatcagcgccagggcggaaacgtccgccctcacagcctatccggcgctgcgggaggcggagggcgggct

SEQ ID NO: 25447 - DNA, 734 bp, Homo sapiens
  source 1..734: mol_type = other DNA
cgagatcgcgccattgcactccagcctgggcgacagggcgaccgggcgcgttggcccgcgcctgcagcccctgctacttgggaggctgaggctggagcatcgcttgatcctgggaggtcgaggctgcaaagagtcgagatcgcaacactgctctccagcctgggccagagcgaggtcccatctcttaaaaaaaagaactgtgctgggcatccgcgagcccagcggatcccaggaatcggctgagttgatcccatgccaacaagcccgacgggcaaggcgctcggcggggcagtcaacgctccctccgccatgggctcccctcttgggaaaagcttttccaaaccgccgggcccagggcccagagctcccgccgcgccctcgacgtggcgtcgagtctggccccttcccccgcggcgcacgggcttcacccaggagggacgcgcctggatccacgccttcctcactgactccccgggctccagggcagggtgcaggtccacagccagggcttcgctgcggcccctgagaccccagtgcctttcctgcgctctcgcggcactcgaccccgaggcgccgcgcccagggcgcagctctccgggtgacgagcgcctcaaggggcgcgggttcggggcccgcgacggggcggggcgcgtctccagggctccagtgctcggcctcaggcggggctagaaggcgggcggggacaggggcggggccgcacgtcctctcgggcc

SEQ ID NO: 25448 - DNA, 377 bp, Homo sapiens
  source 1..377: mol_type = other DNA
tggtaggttgcagtgagctgagatcgcggccactgcactccagcctgggacagagcgagacacctattgggtactatgcttattacctggggaggaaataatctgtatgcaatttacctatgagctcagccatttccctggggcagtgactgctgccaaggcagggggggagtctcctcctcacccgcacatcgcggggctaggatgggatgtcgtggctgccaaatcctccgaggcaactcctgcctgggacggcctaccacaggatgggcctgagaatccggagcgcaggctcgggccgctaggacaccttcccccgcccgcggacccagccttccagcatcaccggggttcgcggaggcctgccaaggccgccg

SEQ ID NO: 25449 - DNA, 360 bp, Homo sapiens
  source 1..360: mol_type = other DNA
gcatacacctgtaatcccaaaattgcgctactgcaatccagcctgggtgaaaaaaaaaaagaaggaagaaaatcacttttagttttatcatccaaagatgacacccttcttcaatattttgaataacagatatttccctcatctattataaatgttgcaggcagaggacatgaccctgtgttaagtaagccgggattacaggcgtgagccaccgcgcccggctgcaaagcccactataggtaacctgtgctgcgcggggtggcactagttttcacccagcgggcgaggaggcagcgaagtcgcgggcccagcgtagcgcgcgcctccgaagggcttggtgcgggcgcgggcgcgggcgcg

SEQ ID NO: 25450 - DNA, 749 bp, Homo sapiens
  source 1..749: mol_type = other DNA
ggtgggcagctctccagagggcacccccagcctaagaagcaggcctcctcccaagtccccagcctcacgaggatagtgggtaacagggtgggctcagggggccctgggagatctccagaggcctctggtgtgttcaccaatgtcccctgacaggtctgacctacagccggctccaggagggatcaattcgtgggcccgggaggaggccaggcgagcaccggctgcctggagcactgggctggagcgcggggagcgcggcggggggcgcgggcggggcggggctggtgcgcagagctgtccagcaccccgaggcggggcgtgcgcccccggcccgccccagccgcctccgcccgcccagccagcgccactgcggctcggcgggcgcgtcacgtggctggcgcagcgcggcctccaggctccgggcgcgggcgaggggccgggcgggaggactgacagacccacggacgctctaccggcggcacccggccgggcgggctgggcgcagcgcggggcggcccggggacgccggggccgggcgggctgcgcgccgcggggcatgggcgcgccgggggtccccgggcccaggccggccgcggcggggctcccggggcgcgggggcagcggcgggcgggggtcttccctggcggccgccgctgagcccccgcagggcccgtgacgccgcggccgatgtggccgcgcgcgccctacgggcctgcaccgccaccgcctcgggagccgccgcctgcacc

SEQ ID NO: 25451 - DNA, 486 bp, Homo sapiens
  source 1..486: mol_type = other DNA
gcgccactgcactccagcctgggatcattttaagaaattacatggatttcacccatgtgacatcaatgctaatcctatgtgtgaaacatctgggttcattcgattttttaaaaattagtaactagattataggcgggagccaccgcgtcgacaaagcccgcccgcctgcggggcgttccgttcgcagaaactctgtgagggacgccgcgggggcttccaagggcgactcgaacttgagtcgtccacagcactaggccgccgccagcccgggcgagctgcctagggaccgcggacgccgcagcaagcagctccctgctcccgccacacccgccgagccagccgcgcggaaccccaccgtgggcccgcctcccgccgccagcctgcccacgattggtcgactgggctgcccgtcgcgagagaaggcggtgcctccggcaggccggcgctcccattggccgggatggcggcggcggcgcgcgcggcccc

SEQ ID NO: 25452 - DNA, 468 bp, Homo sapiens
  source 1..468: mol_type = other DNA
ccggcctcggctgcacagtccggacggcttccgggaggaggcagcctccctcggatcattccaggtcgcctggccttcttgagccgggctggatcgcgcgggacctgcaccagagacccgagttctagtccgctcaggccagaggtggcccagagcctggtagggtgggcgagccgtgtccaggactcgtcacaggtcttgggtccccgtgatgaggatgagagcccccgggatcttcacctcgaccctcaggcctttgatccagggtgcataggagaggagttgggagcctcaggaggcgctcgagagcaggggtcttgtctcggagctctgctcgtcctctccttccttcccaggccgggactgggggagggggggaggtgggggagggggctgtgggccggccctccttccgcccctcccgggcccccgccgcccggggcccccagtcccgggcccggagccagc

SEQ ID NO: 25453 - DNA, 354 bp, Homo sapiens
  source 1..354: mol_type = other DNA
tcctcagggtggcttcatgagctcagcctctgtgtgagcctatgagctcacatgtgcaacgcatttgggccgtgcttgtaagtctgctgcagggtccctacaccttctctgcaggactctgcacccagtaccagtgcccagtggggcagaggagtaagccttctggcagactctccctggccccacagtggaggccccgcagggtctggcccttctgcgacctactgtctgcagccggcagcccgccgagctcttgggcccccaatctccgggagccccgccccatcggggctccgcctctggaggaggtgggtcaaggactccatgccccgccccccccatgcattggcaccc

SEQ ID NO: 25454 - DNA, 639 bp, Homo sapiens
  source 1..639: mol_type = other DNA
tactgaacaggtgactgtgtgcacagtttcctcctgcttgtcccctgcaggctggggctgcctcttcttaggaagaacaaggacccgaatccagggccccgtgttcctgtcaggctggtgacccgacacaaacttggcctgaggcagctcgcggccttgatatcccagaatcttcctcaggatcaccggccctgcgcccccgcagcatcgggtcctgggcgcgcgcccctgccccgctgtggtcaaggcccgccccggtgacgcctggtccttttcccgggttggcgccgcgtgcgacccaccgaggcagtggcagcactggccgcggtctggagcctagcgtcaggccggagtccggctctcctgaaccgggagaccggcgcagccccagccacgaccgctcccacccccgcggccgccggaccgcgcccagcagcgactctttctgagagcgctgccagaggggccgcgggagccgcagagcgcgcgtgggcgcggcgcccgcgagcccccgggagggccgagtgcatcgctggagcgatccccgcccggcccggccaccgccgtagccgccaccacggcggggcggggcacgggccgggggcggggcgccgggcgggcgcggcgctatttccagcc

SEQ ID NO: 25455 - DNA, 352 bp, Homo sapiens
  source 1..352: mol_type = other DNA
actccatctcaatataataataataataatttttgccccccatctctataaaaatttttgaaaattagctgggtgttatagcatgtacctgtggtcccagctactcaggagcgagccatgatcatacccaggtttccaaataggaagatctgaaggtcttgatgtcatttgaaacataatttttattatgaaagtgtcgaaatgagctgcttcaaacagctgctcactagagaccaatttgtcttcattcctctttagagcaatcacataagaagtcaggagcaaccccttgtgtgatcagccctgcccctgcctggcagacagatgccagactcccttggatgttgttcaa

SEQ ID NO: 25456 - DNA, 437 bp, Homo sapiens
  source 1..437: mol_type = other DNA
agatgacctttttaaaattccaggttcatggagcgtgcagcagaggctattgatcaccttccctgtgccggggactgtgcgcaggtggcaaatgcttttcccacagtgagggaagggctgtcaccgcggaaccaaggttcacactgagtcagctcggggactcagtttctttacatgcagaatgatgggcgttgacgtggcctgtcagtctttggccacgccctcagactccaactggacgccctttctccccgctgcagagcatggggctgggggggagtggcagattgccttccccgggagtagcgtgccgcccggcaggggcctgggtgtgccaaggcccggctctggggatttcaggacccaggccagcgctccccagcagcagggcaggaggcagcctgagagtcggcagccccgccttggagtctgagcac

SEQ ID NO: 25457 - DNA, 646 bp, Homo sapiens
  source 1..646: mol_type = other DNA
gccgcgagcggtcggcccggtgccccagcgcgtccctcccccgcggcggccgaccgcgtgtccgcagacgtcacgggagagggggcggccagggagcgggggaggggcggcctggcccccggctccgctccagccccgaccgacaagtcccgcccccagccccgggcgccgcggcggcggctgctctcctctttaatattcctctcccccgccccctccccgagcccggaggaggcccgggcgccgcgtggccggccggcggggggcggggggctgggccgcggagggcgctggggcctgggcgcaccgctcccgggagggtcctggccgcggccccggcgggaaggcgcgggcttcgggagaggcgcgcgtttttgtcgccaggcgcgggcgcgcggagctaattgcgactctaatcctctgccccgcggcgcagccgagccccgagccaggagtcgccgcgcgcgcccgttcgcgctgggtctgccctttacgtccgggctgggccgcggcgaggcgctggctaggggcttctccagcaatcgagggaggaggcggcggcggcggaggcggcggccgcgaggagggtggggaggggaggccccggcgcgccgcgccgcgaggggccgcgtgaagcgggggccgg

SEQ ID NO: 25458 - DNA, 539 bp, Homo sapiens
  source 1..539: mol_type = other DNA
atattgtgtatacataacttttagtctgagcagctgagtaaaaatggtacccctgatccaagctacgttacaatggcgttgcaagccatgaaactggttcagaccggctgaatgagcggggccccagctccaggggcagcctcgggggaagctccccgggcgatgactgcggtaatggagccgtaggagctccacgaggtgcaggttcagcgtcttagaaggatgagcagcggctcgccacagctcggaggcgggtgggcagcgctccaggccgagggccccgcgtcggcaaagccaaggcggccacggcctgagtcaaaaggaaggccgcgcgcctcctctccagcccgcagcaagcgggtgccacgaggcactagcgctgccgggactcccgaggccacgaatgagccgggagcctagccggccaagtctcgcgagagcgcggcctcgccctcccagcatgccccgcgccgccgccgctgccgccgccgccgccgccgccgcgccgcggcttgagggcgggaggctgggggagggta

SEQ ID NO: 25459 - DNA, 659 bp, Homo sapiens
  source 1..659: mol_type = other DNA
gtgtatacatttttagtctgagcagctgagtaaaaatggtacccctgatccaagctacgttacaatggcgttgcaagccatgaaactggttcagaccggctgaatgagcggggccccagctccaggggcagcctcgggggaagctccccgggcgatgactgcggtaatggagccgtaggagctccacgaggtgcaggttcagcgtcttagaaggatgagcagcggctcgccacagctcggaggcgggtgggcagcgctccaggccgagggccccgcgtcggcaaagccaaggcggccacggcctgagtcaaaaggaaggccgcgcgcctcctctccagcccgcagcaagcgggtgccacgaggcactagcgctgccgggactcccgaggccacgaatgagccgggagcctagccggccaagtctcgcgagagcgcggcctcgccctcccagcatgccccgcgccgccgccgctgccgccgccgccgccgccgccgcgccgcggcttgagggcgggaggctgggggagggtagcggagccggcgccgccgccatgttgggtctgaagcggctgctgtaggcgccgacggagcgagcgggcgtgcggagcgggcgacagtggcgtgggatctgcctctctgcgagcagctgggagcggcgg

SEQ ID NO: 25460 - DNA, 372 bp, Homo sapiens
  source 1..372: mol_type = other DNA
caaaactgggccatgctccgtggctcaagcacttacccttgctatttaccactaaggaataaaagcactacccgttcctgcagtgcccgtcggggcctggcatcgccagtaatcgatttcagtcaatttcagtcccgacccctcccgcccgggggccaagccatggtgggggatctgggtggacctccggctctggccgccagtcctcaacctccgccccggccgtcccgcttgggggcccagggtcccaggagaggaggctccggggcgccccctcccctctaatgcgagaggagagtccgctctaggcgcgggatccgcaacctccccgcgtccgcccgaggcgggggcggggccggaccggagacgtat

SEQ ID NO: 25461 - DNA, 287 bp, Homo sapiens
  source 1..287: mol_type = other DNA
agggaaaataacacaaagggactttttccatgttgtgtgtcccagccagcctgaggcaggcattggacgtgtcatgtgatgacatgtcaggctagaatgcagtggcatgatctcagctcactgctgagtagctgggacgtgcccgcttggcatatatgagacaatgatatgatttgtaaatggtgacatctttgactcagtgtttcaaattggcagtgtagagcaagatattacctgaaaaaaaatctgattttcttactaaaaatgattttgggattaagtactag

SEQ ID NO: 25462 - DNA, 268 bp, Homo sapiens
  source 1..268: mol_type = other DNA
cttggcatatatgagacaatgatatgatttgtaaatggtgacatctttgactcagtgtttcaaattggcagtgtagagcaagatattacctgaaaaaaaatctgattttcttactaaaaatgattttgggattaagtactagcaggcgagggcttggctcccagacttgggtgccgcaggctctggtgaccttcctctcaccagccacaaggacctgtgctgctcctgggtgtcaggaaatgggaggagccatgacctctttcccctc

SEQ ID NO: 25463 - DNA, 369 bp, Homo sapiens
  source 1..369: mol_type = other DNA
ttgcagtgagctgggatcacgccagtgcactcccgggcgccgggcgtggtggtgggcgtctgtaaccccagctactgggtggggctgcagtgagatggcgccactgcacttcagcctgttttggtgtgtttctctaaaaattaaaaactttaactttttaaaaaactttattgttcttgttaatgactgataataccattatcccacctaaaatttttattttccggaaaaaagaaagttagctttttggcaaaactacttccattaaggggcacataatgcctgggactccgggatttcgagcccctgacgccagcggcgcctctgtggctctgggacctgagcgcacgcgccttaaagccacgcctc

SEQ ID NO: 25464 - DNA, 348 bp, Homo sapiens
  source 1..348: mol_type = other DNA
agtctcactctgccacccaggctggagtacagtggctcactgcctgggaatacaggcacgtgtcaccatggccagtctggtctggaactcctgtgttgtacttgcttatttggcacatatgtatccacgcgatggtagctctctgcagcctccaacacctgggctccagtgatccccgggccactgccacttccgggcagaggccagctgaggccccagatcagcggccgcgggcaaggtcgctcagcgggcacccggcctgggtatcggggcgcgggtcgggggcggggccggggctcaggggtggggccgggccgggccgggccgggcgcctgcgccataaaggcc

SEQ ID NO: 25465 - DNA, 269 bp, Homo sapiens
  source 1..269: mol_type = other DNA
cagtggtgcaacctccctcctgagtagctggggctacaggcttgtgccaccaagtggcgcgagtagctgggatgaaaatcttaccattttctctttacgtatagggattcggctgggagttgaaaccccaggctacagctggaggtcgccagccctttgcaagagcctgccggtccccgcgggctgcagcacaccccggcgcgatgtgccctgcctgtgtctgccggaggtgcgcaggagcggaaaccaggccgcccttcccccacccg

SEQ ID NO: 25466 - DNA, 660 bp, Homo sapiens
  source 1..660: mol_type = other DNA
cacttcccctaccctggtggggcaggggctggaacccccagcgggtgctcagtggtgttgaggccacactgccctgggcggtctggccgggacagttcccgtgcgggctccctgcgcgctgagccactgtaggcgcctctctgagcaggaaaacagcctcacccaccaccctggatgcaggtgctggaaaagggaggagtccccatatttcacggggactgcctgtgatggccacaggggaggctcgccgcccaccggctctgagcctgaggcctgcttctagcctggccttgggggcctgggcgaagcgacccagcgcgaggaccagagttctgggcgccttccccagcagtcagatgggggcttcagaggccggtgcgcggccacatggccccgggccaggcagggggtcgtggggacgcatctgcgctaggcgcacagtattcctgggcgcgggacgggcgaagcgccgtgggttccaagctgagctgggtcggccctgcagcgccggagagcaaggcactgcttggatctctccggcccggatggcgccagctgcctccagctcagcctgcggaaatccgagctcttcccagcggcccgacggcccgggcgccccgcagaccctgggctctccccgcggtgcctccgccgcccgcc

SEQ ID NO: 25467 - DNA, 406 bp, Homo sapiens
  source 1..406: mol_type = other DNA
cttaataagtacaaaaaagtctatagcgacactatttataattttaaaaatgattgaagtcaattaacatttaagtgttaaaaagacgggaggagtgactcctcccaggatgagggtctccatcctcgtcccttgcatttccaggaaatgcccttggttgtatcgtcttgggcaaatgagtgccaaaggagcccctttgctagcaacggcgagcacttgcgcggtaccagcaagggctgccccccaggacaatttgcgcatggtccgacggccccaggcggttaagctacttacaaagccgtgaccggtttgcccgcggcgcaccaggtccgcgcagccgcagagacccttgggaagtgtggtcttcgggtgccggcggttcgcggcttccgggacatttgtaccg

SEQ ID NO: 25468 - DNA, 651 bp, Homo sapiens
  source 1..651: mol_type = other DNA
gaaaacagcctcacccaccaccctggatgcaggtgctggaaaagggaggagtccccatatttcacggggactgcctgtgatggccacaggggaggctcgccgcccaccggctctgagcctgaggcctgcttctagcctggccttgggggcctgggcgaagcgacccagcgcgaggaccagagttctgggcgccttccccagcagtcagatgggggcttcagaggccggtgcgcggccacatggccccgggccaggcagggggtcgtggggacgcatctgcgctaggcgcacagtattcctgggcgcgggacgggcgaagcgccgtgggttccaagctgagctgggtcggccctgcagcgccggagagcaaggcactgcttggatctctccggcccggatggcgccagctgcctccagctcagcctgcggaaatccgagctcttcccagcggcccgacggcccgggcgccccgcagaccctgggctctccccgcggtgcctccgccgcccgcccctgcgtcctggcccggcctccacgcccctccgaggtcccggcgcagcgcggccgccgccactccccccacattccagaggccgcagcgccgaggagtccctccgccccgcgcgaggccgcggcgaggagggggcgcgg

SEQ ID NO: 25469 - DNA, 484 bp, Homo sapiens
  source 1..484: mol_type = other DNA
atctctccctgtctctctcagaggtagaggcagcattaaattaaaatttaattaaaatattaaaaataaagtaaaaaattcaaatatacaacagtagactgtctggcttgcatacaaagaaggccattgcccctttgggtgaggtctaagaacgcctctggtgagaagcggggaggagtgactcctcccaggatgagggtctgtgtacgtgagaactgccatttctgtcacagatacgtggccgcatgcatttccaggaaatgtccttggttcgcgaaagcccagggcgttctgtgagctgagagaggagctcttttgctagcaaaggcgagagctcgcctggtacaaggtctgcccgtagagggggcccccgaggtgtatctttcctaactgccgggctctgggacgacagccccaggcggtagatctgtttgcccgcggcgccccaggtccgcgcggccgcagagactcctgggaagggcgg

SEQ ID NO: 25470 - DNA, 510 bp, Homo sapiens
  source 1..510: mol_type = other DNA
atgcatttccaggaaatgtccttggttcgcgaaagcccagggcgttctgtgagctgagagaggagctcttttgctagcaaaggcgagagctcgcctggtacaaggtctgcccgtagagggggcccccgaggtgtatctttcctaactgccgggctctgggacgacagccccaggcggtagatctgtttgcccgcggcgccccaggtccgcgcggccgcagagactcctgggaagggcggcgcactgggtccgccccgctgtagcctcaggcctgacggcgactcccaggctccgggacgattctgggcagtgtcgtccccagaggtcggcggccgttgcccgctcaccagcgacgcggggcgcctgcggggacggtgaggccctgctgaggactccggccagtatgagtcccgggggcggcggcggggctcaggccctgggtctgccccgcggtgtgaccccggccggtggcggggtgatgacggcgccgacctcttggcgctgtcgcca

SEQ ID NO: 25471 - DNA, 514 bp, Homo sapiens
  source 1..514: mol_type = other DNA
tctcagtgatcctaagtggtctacctgtatattaggaaaccctcctgcatataccgttttaaaaagatgcatacgccaaatgctgcaacgtattattatgtaaaatttaaacagtattcatgaggctcctgttgaatcagtcaacgtatttgttttgacaaatatcagagtctgcaaagaagtgatgatgttgccaataatacagaatattaataatgacagcaatagctcttatgttcttataagcaatttatttactggaatttaaagagtctggacttttcctggacaagttaagcagagggctgggtcccaccccccagagtacctgattcagtgggtgaaatttaatgctgatgtcatctgaaaattactgataggggaaattttaatattatcatattaaataattatcttcattttccttaggaatctccatctcaaggctcagagagattctgtgtgcctctcctttaagaagaggtgaaggaagggggcgttcccgtagcggcgt

SEQ ID NO: 25472 - DNA, 507 bp, Homo sapiens
  source 1..507: mol_type = other DNA
cgccccagagggagaccctctgacagtcaaggtgaatttcacgtttgcctgtattcagttttagcattacataaaccaaaagataaatgcctattacatatagttaatatctgtttgattagccttccttttaaaaggtcttacatttagcatcttagatagaacccacaaaatttaaatatttaatagaaacttaaaattcctgtatcagaggacagaaatatatttttctcacacgtgattagtctaattgccactattaatcctattaatattctgttaaataatagcatttctgtagcgaaaagcaaacagtacggaaagataatttcaaacacctagttttcatatttttgtgttaaagtaataacatattttggtatagattatcattttttgaagctggccacctacttcgggcctcaggtgtcagacgccccagcttcgaggaactcgagcgcctgcgcctgcgcattctcagccggacgggagcgcccagaagtctcc

SEQ ID NO: 25473 - DNA, 373 bp, Homo sapiens
  source 1..373: mol_type = other DNA
cctgctgtaaagttggagccagcattggcctgccctggctcacaaaaaattttaaaattaagccactgcactccaagatttaagtccagaacctgcattttcagctgtttgggtacacacgcgcaggaagagcactggggctctcctcctggacctcggagcgcgggcggctgcaggctcgggagcggcccctttaaggggaaggcccgagggctgcaggcggcggcggtggagacccgacgagatccgctctccttcccctcagcctgacgagaggctgggcagaaactcgcgatccccaggccctgcctgtgcaccagcggctggcgccaggccaatgaagagggcaactctcccggccgccacggtgggg

SEQ ID NO: 25474 - DNA, 339 bp, Homo sapiens
  source 1..339: mol_type = other DNA
catgaaatcttcacaatttatgttcagagattgcaagaaattataaaagtattaatttggggaactaataaatgtccatgaaatcttcacaattaatgttcctgctgtaaagttggagccagcattggcctgccctggctcacaaaaaattttaaaattaagccactgcactccaagatttaagtccagaacctgcattttcagctgtttgggtacacacgcgcaggaagagcactggggctctcctcctggacctcggagcgcgggcggctgcaggctcgggagcggcccctttaaggggaaggcccgagggctgcaggcggcggcggtggagacccg

SEQ ID NO: 25475 - DNA, 253 bp, Homo sapiens
  source 1..253: mol_type = other DNA
tctatctttttaatgaaactttccaaacacagaaaagtcgaaaaactatgcagcaaatagctgtatacattgagttgcagacacttttgtttctgcctagcaggaagcatttccagtttccaggaacgagcaggcagcatcctgcctggccccagacatcaatggcagcaagtgccatttgtgttccaaacaggtgactgctggtttgcccatcacaacgagcctcttgtgccttgtaggcttagtctaagat

SEQ ID NO: 25476 - DNA, 290 bp, Homo sapiens
  source 1..290: mol_type = other DNA
ggtgatgcatggctgaagccaaagaattgcttgaattgcagtgaactgagatcgtgacattgcactccagttcttgtgcccctacgatgcttgcagcagctaaggactccagacctgcagagtctgtcctgagacaggtcagacctcggtctagagacagttggaggtgctacactgtggctggccacagaccattagcctttccttcctgtgcagccaagaacggaaggatgagagggctcccaggagcagctggccggagagtcggacatggtcatgactatttcagc

SEQ ID NO: 25477 - DNA, 426 bp, Homo sapiens
  source 1..426: mol_type = other DNA
agcgctggggagccacagccccggagctgtgaggtgggactttcctgcgctgtccccgggaaaagcccttaccaccgagttagtgggactcccagcactggggtgatgagcgtctcagcacagaagccagggaggcttccctagaaacggaggcaccggacctcctgggaccaggaacccgggctcagagactgggagagggaaggaggaggcggccaaccggccccaccccttcccgccctccctgggaggtccaggagcttctggccactagggacccttttctaggtactaggggagggggctccccaacctgcgggcaggcagctgcctccacgggcccctccccgccttccctcccgggctgggggcggcgccgtgacgcggcggggcgggggaaggaagggggtgtcgctgacgccgcgg

SEQ ID NO: 25478 - DNA, 436 bp, Homo sapiens
  source 1..436: mol_type = other DNA
cactgcactccagcctccaaggccctgaggcaggaacgggttccctgtgttgggatcacgaaggggtcctcctcctgaaacagcacctccagattcccggggctgcttctctccggagtagctgtagtcctatgagcacattgacccccaggcctggatatcagggctcaggggagataacttggaggttcgccctctggaactcctgaggatgacctccatcatttgaactgggggtgacctttccagactccctgggaaggtgggggggggggggtggtcctcagagccccagcggggtcggagacacacagaccaagtcgcggtccctgcgccacccggagaggccggtgcagcgggcgcctcccgggccgctgcggcaaaggctgggcggccgcgccttccccccgcggtgactccctaggccgccgccgcc

SEQ ID NO: 25479 - DNA, 683 bp, Homo sapiens
  source 1..683: mol_type = other DNA
ccaaggccctgaggcaggaacgggttccctgtgttgggatcacgaaggggtcctcctcctgaaacagcacctccagattcccggggctgcttctctccggagtagctgtagtcctatgagcacattgacccccaggcctggatatcagggctcaggggagataacttggaggttcgccctctggaactcctgaggatgacctccatcatttgaactgggggtgacctttccagactccctgggaaggtgggggggggggggtggtcctcagagccccagcggggtcggagacacacagaccaagtcgcggtccctgcgccacccggagaggccggtgcagcgggcgcctcccgggccgctgcggcaaaggctgggcggccgcgccttccccccgcggtgactccctaggccgccgccgccgccgccgccgccgccgctgcagtgcgcaggagaccgcggtccgcgcccgagcgcgcccgagccggagcgggaccggggtcggtgcacctagcggatgtgcccggctgcgcgcgccagcgcagcagcccgagcagcggccgccgcccgcgcggcggggatgcccggacgccgggccccggggctgggcccccggcggtaaccggagcgggggggccgcgccccccctcctcccccctcgccggtcccagagccgcagctgctgc

SEQ ID NO: 25480 - DNA, 292 bp, Homo sapiens
  source 1..292: mol_type = other DNA
ggcaagcagccgaggccgactggtgggagcacgggcaggtgctgactgggccgcgcctggcggggcctgggcctctgcccctggctccagaggtcaccgcggccgggcggaggctgccaagccccgtagtggcgggcacagccaggacctggggcttggggccctccatctccaggcctgtcgacaggcacacctgggtccccctggaggtccaaggcaagccccgtagctgggcccgcctggtccagcccccacaagcccggccccaatggccctcctcctcaggtgaggc

SEQ ID NO: 25481 - DNA, 275 bp, Homo sapiens
  source 1..275: mol_type = other DNA
ttctctccccgttccggtgaagggcagagcaacccttgtctaggacctgggtgtagcgctgggcgaacattgccctccccgatccctcagcgatgacaacagccctcctccccgcccccacggtggtgttggggtcgcctggagtccagctggtgtccagggcagagctaccccaaaagtccctctgtctaagaaggcggaattgaggggagggggcacccccaactgggaccatgggggagcctgcacagaccccatccggaaggaatgcgact

SEQ ID NO: 25482 - DNA, 338 bp, Homo sapiens
  source 1..338: mol_type = other DNA
acccttgtctaggacctgggtgtagcgctgggcgaacattgccctccccgatccctcagcgatgacaacagccctcctccccgcccccacggtggtgttggggtcgcctggagtccagctggtgtccagggcagagctaccccaaaagtccctctgtctaagaaggcggaattgaggggagggggcacccccaactgggaccatgggggagcctgcacagaccccatccggaaggaatgcgactaggaggcagccgcccccaccgtctgctaggaaactgcagcctggtgcctggcagacagttctcattctccccagggcagggagcagcaggactg

SEQ ID NO: 25483 - DNA, 434 bp, Homo sapiens
  source 1..434: mol_type = other DNA
caaaagtccctctgtctaagaaggcggaattgaggggagggggcacccccaactgggaccatgggggagcctgcacagaccccatccggaaggaatgcgactaggaggcagccgcccccaccgtctgctaggaaactgcagcctggtgcctggcagacagttctcattctccccagggcagggagcagcaggactgacgctagcatcttctgctgatcctgaaattgtaccagcggcaggggactttaagttctccacctggaggctctgccgtttaaagaaggtcctctcctgggcacaggagattggagaaagctcctcccttaattccaggggccgactgtggtcctggtgaccccagggagcaacctgccgcccatggctggggagggggtgaagctcaggaatggagcccctgggcctcagggcatctg

SEQ ID NO: 25484 - DNA, 476 bp, Homo sapiens
  source 1..476: mol_type = other DNA
gtggacagaatctatccaaatgactaaaatttagtccagattactgggtttgaatcccggctgtgccctcagctgggtaacctagagttcaggttccctggtgatgatgacagcactaacagtagacgctgaagaaggggtggcatcatcatcatcatcttcaccatcatcatcatcttcatcatcatcatgtccagtggggtcctgccgatgaccaccagagggagcagctggacgtgatctggccccactgacagcgcccaacacaccctcctgtagccaggggagggggctggcagagagtggccaggacgggatgtccccagcccccccagggcctccctgctcccccaatagggttgagtggggaacgggagtggtggggcggctccagcccttggtggcccctccccctcctgtgggtgtgccgggtgtccagcgaacccctttcccaaaccttcggggagaagggaggt

SEQ ID NO: 25485 - DNA, 322 bp, Homo sapiens
  source 1..322: mol_type = other DNA
gcctggggacgagactggcctcagttttcccatctgtcaaacggggacaatcgtggcacccgcttcccagtttggggttcagcacaaggtgggcatcccacagtggtcggcaagcttgggggtgggctccggatccagctcctagaggagcagaccccagcagcttgtaggggcacagagggatctgaacccactctcatagggtgccaggcacggtggctcatttctgtaatcccacattttggccagctactcaggaagctgaggtggaaaccattgcacttcagcctgggtgacagagcaagacccatgtgaaaatgag

SEQ ID NO: 25486 - DNA, 410 bp, Homo sapiens
  source 1..410: mol_type = other DNA
cgccttggcctcccaaagtgctgggagtacctggccatgtttggccatgcatggtcttcacataaacatgcatttttgtggtgtgtctgcttctatggatgtacatacatacatggtttatgcgcgctaaaacagccctgttaaggacctcacggagcactgggatcgggggtcagtgggctcctgggcagtcaggctgggtgaccttcggccctggctggacccagttcccagggggcagccgcctcagcccaaagcctgcctgctggctgcctgctgctgctctctctgaactgagagagttaaccaagcgggccagggcagtctgggctgggggccgccccctggcccccctccagccccagctccagtttcagctgctggttggggaggctgggggcggcgcgtcc

SEQ ID NO: 25487 - DNA, 491 bp, Homo sapiens
  source 1..491: mol_type = other DNA
ggatgtgggtgactcctccctgccctgctggtgcgtgtgcaccctggcagggtgtggacacgggggcaccggaggccggtgtttacaccccacgtcctgctccaaccagcagtttggggagactgggctgctcatgtcacttgcctgacatccgattgtgaccttttctcgttgctgcccagggaggagacggggtgacctttcccacaggggcagcctgtggcgatgtggcagctgggcctcaccccggcagggctgtgcgtgaccccctgagtgggggaaggcaggctgttgcattcctcccccggggtcaggccgcgagcgggcgggcgggcagcgcctcctctgccctgccagggtaggtctgggaatcgggggcctgctgcgggaggtggaggcccaagggaggccccccggggactgtgtgtctcaggtgacactgtgtccccacgaagctggggatacccgtttctctagcttggagccaccaa

SEQ ID NO: 25488 - DNA, 111 bp, Homo sapiens
  source 1..111: mol_type = other DNA
aaggaacacgacccgttcacttacggagactaccagtccctgcagtcccccaagccccgcccctcgcgagggcgagctggagctacagcgccgcttggcgcccgccgggag

SEQ ID NO: 25489 - DNA, 470 bp, Homo sapiens
  source 1..470: mol_type = other DNA
aggaggagcgccctccccaaacgacgctcaccctttgtgggggtctgggtcggggtcgccatgctgggccggagcagggggctgctggatgctttggcggcgaaggcgcgctgcagcagctgccctggcgtgggggggcctgcagccaatgggggcccggggagcccgcccccgtgcaggccacccccgcccccgccccgtcgtccccgccccttcctctagggtggggcgccccctgctggggcccagtggcgctggcgtttcgcgcggtgagaggcgaggggggacgtccagccccacccctcgccgccctagctgcagcacctctccaggtgtttctaccgcctgcgggtggacagggagaggcatccccagctcctgggcaggtggggcccgcggcggggcaactccccgccctccgccccttccctctacgcagccagggagggccgggaaaagcggtccttgga

SEQ ID NO: 25490 - DNA, 525 bp, Homo sapiens
  source 1..525: mol_type = other DNA
ccccctgccagcacataagctgctcctgggtgctcctcatttctggcggacctcgtccatatctgggcctagttagaagggcagcctctccctctgtcttcccaggactggggaacccgatgaagaggagggaactttccgcagctccatccgccgtgagtctggggagactgcgagtccaaggaccgcttttcccggccctccctggctgcgtagagggaaggggcggagggcggggagttgccccgccgcgggccccacctgcccaggagctggggatgcctctccctgtccacccgcaggcggtagaaacacctggagaggtgctgcagctagggcggcgaggggtggggctggacgtcccccctcgcctctcaccgcgcgaaacgccagcgccactgggccccagcagggggcgccccaccctagaggaaggggcggggacgacggggcgggggcgggggtggcctgcacgggggcgggctccccgggcccccattggctgcaggcccccccacgccaggg

SEQ ID NO: 25491 - DNA, 352 bp, Homo sapiens
  source 1..352: mol_type = other DNA
cggtctggcttccatgggagggaggcagtttccacctttctagtggctcacgcaccccctctctccccagcccctggtggcggcggcgtgttccgctgccgaccctgcctgagcgcgggagcctgaggaccgggtggaggcggtggggacccagccgcgcgccgggagcgctccccggaatgagccgccccacccaccccaaggctggagccgctgcaccctgctgcctctccaggccttggcaccccagacccagggcctcaggcctccagctcctgggatccgggagtccatcccggcccagaacctggggtagctctcccctgtgagcccgtctgggtccccgcccgct

SEQ ID NO: 25492 - DNA, 474 bp, Homo sapiens
  source 1..474: mol_type = other DNA
ctgtccaaggctgagatgttgccaactctttggactaaccccagctcaacggggactctgggagcctaggtttcctggctgacaggccctggccagactcactggccacccgggtcgccccgccatagggatccccacttcctggtgccggctcagcgggagggtgacagggcagggggccaaccacccaccccgcagcacacgtggggctggcctggctgggggctccttacctctggtgcatctcagccatgatgtcagtgagaccgacctccggcagcccccggggatcctgcagccaccccctgccaggggctgacggctggcctcaggggaaaggggagggtcttaggtggggataccaaaccgtcaccctgcttcttccagcagctgcaagggccggcgggcactcctgaagcccttccgccaggcgcttatccctcactgggactgacgcagaggagtagataggag

SEQ ID NO: 25493 - DNA, 205 bp, Homo sapiens
  source 1..205: mol_type = other DNA
aacctggggtagctctcccctgtgagcccgtctgggtccccgcccgctcgcgctccgcagcagccaccgccgccatccgctgcccctctgcccacgggccgggctcaggtgggtaggggtttgaccccttccgctcctcccctcctcgccgactcccgggctctgggcccctgggggagggaagaggcctcctatctactcctct

SEQ ID NO: 25494 - DNA, 383 bp, Homo sapiens
  source 1..383: mol_type = other DNA
acccaggctggagtgcagcggtgcgatctcggctcactgcaactgagtagctgggattacagatggtcttgaactcctgacctcaggtgatccgtgctaagaagtgtgcccagaacatagtaagagttcaggaaatatgtgttgagtgttcacatgtgacaccttcatgctcttatttcatccctgggaatgaaattaagtttgctcctttcccagcatcccaacactttgggaggccaaggttttaaactagctgggcatggttagcatgcacctgaagtcccagctactcaacgagctgtgattgcagcactgccttccagccactgcccagggctgaggccagagttcatgggtgacctctcggggtggcaccagcccac

SEQ ID NO: 25495 - DNA, 566 bp, Homo sapiens
  source 1..566: mol_type = other DNA
cgaaaccagccactggccagttggcaacctgggggagtctaacgcgaggaagcgcccagggttcccccaggatgcgctttccctcgccgccacctggagacagcagagtcacgcccagcgctgcgcaggctgatcgccgcgccgcgcccccgccctcggtcgcaggtggctcgttccggccggtcccaagccccgcgccttcgctcggcccggctgacccgggggctagggatgcccaggggccgaaccttccgaagtggaattccaacttttcctggccctgattccccttgggcatccctgagggggcagagcttcccttccacaggaggcccgaagcgccccccctccacccggtccggaggaaccttagactcgctcctcccggcagggcgcacctaggcgggtccatcgcgcggcgggacccgcccgggggccggaagggacctgtggtccgcaggcgccctcccagcgggccagtcacttggttcgggccctgggggacggagcgcacctgggtcagcccacttccggggagggaggcagaggaacccctccccgccgct

SEQ ID NO: 25496 - DNA, 491 bp, Homo sapiens
  source 1..491: mol_type = other DNA
cggtcccaagccccgcgccttcgctcggcccggctgacccgggggctagggatgcccaggggccgaaccttccgaagtggaattccaacttttcctggccctgattccccttgggcatccctgagggggcagagcttcccttccacaggaggcccgaagcgccccccctccacccggtccggaggaaccttagactcgctcctcccggcagggcgcacctaggcgggtccatcgcgcggcgggacccgcccgggggccggaagggacctgtggtccgcaggcgccctcccagcgggccagtcacttggttcgggccctgggggacggagcgcacctgggtcagcccacttccggggagggaggcagaggaacccctccccgccgctcgaacccggagcgtggctcggaggaccgcggcgggtcaagcacctggaaggggaggagcgtgcacccctcctggccttggtgcgcgccgcgccccctaaggtact

SEQ ID NO: 25497 - DNA, 604 bp, Homo sapiens
  source 1..604: mol_type = other DNA
cctcgggacaacggctccaggtccggggacctcccctatgatgggaggaggaggaagaggcctactacccgcccgcgccgcccccgtactcggagaccgactcgcaggcgctcaagaaggtgagggccgccctccctggcgtccagaccgtccctgggcccccagccggtttttaatttgaaaactagagatttgttcggccgcgcggggcgggggaccggggctgctcccgtatgcgtctgtaaagcgccgcgtcccgggggcaccggagtccggggccgggaggaagagacccagcctggcccggcccgcgcccgcgccgccggccggagaacgtgccccgcgcagccgccgcccgcctgcgtgcgcgccccggccccgcccaggcgtgcgcatgcgccccggccctccgccttcgcgcaccgcaggctggccgtccgggacgcgcgcgcgctcctctcccctgacccgcgtttcaccagggcggcgcgcggcgacctcgcgccccgcggagccccgggctcgcgcgcgcccgcccgcccccggagacagaccagcgcgcgcgccccgggccgcctccccccagcgcgcgtccgccccgggg

SEQ ID NO: 25498 - DNA, 742 bp, Homo sapiens
  source 1..742: mol_type = other DNA
cgccgccggccggagaacgtgccccgcgcagccgccgcccgcctgcgtgcgcgccccggccccgcccaggcgtgcgcatgcgccccggccctccgccttcgcgcaccgcaggctggccgtccgggacgcgcgcgcgctcctctcccctgacccgcgtttcaccagggcggcgcgcggcgacctcgcgccccgcggagccccgggctcgcgcgcgcccgcccgcccccggagacagaccagcgcgcgcgccccgggccgcctccccccagcgcgcgtccgccccggggctcgcgccgccgccgccgccgccgccgcgcgcgcgcagctccggcggcggctgcagcagcgatccgccgccggactgggccaagccgggcggcggccgcgcgagccggcgatccagggcactggcggcggccagccagggcgggccgtcgcggcggcggcggctgctcagggaaggaggcctgagggccgcgtgcagcgggcgggcagctgggtgggctgggggcggccgcgcggcgtcccggagcctcgggccgcccggagccggcgggcgggcggaggcggaggcggcggcggctgcagcggctgcaggagcggcggcggctgcggcggcggcggcggcatctcctcctcacatgtgatcagcgcgagcggctcccgtatctcctccgtcccctcctgccgcgcggcgtgagcgccgggctcggggcccccccggccgcccgccccctcccct

SEQ ID NO: 25499 - DNA, 767 bp, Homo sapiens
  source 1..767: mol_type = other DNA
ttcggccgcgcggggcgggggaccggggctgctcccgtatgcgtctgtaaagcgccgcgtcccgggggcaccggagtccggggccgggaggaagagacccagcctggcccggcccgcgcccgcgccgccggccggagaacgtgccccgcgcagccgccgcccgcctgcgtgcgcgccccggccccgcccaggcgtgcgcatgcgccccggccctccgccttcgcgcaccgcaggctggccgtccgggacgcgcgcgcgctcctctcccctgacccgcgtttcaccagggcggcgcgcggcgacctcgcgccccgcggagccccgggctcgcgcgcgcccgcccgcccccggagacagaccagcgcgcgcgccccgggccgcctccccccagcgcgcgtccgccccggggctcgcgccgccgccgccgccgccgccgcgcgcgcgcagctccggcggcggctgcagcagcgatccgccgccggactgggccaagccgggcggcggccgcgcgagccggcgatccagggcactggcggcggccagccagggcgggccgtcgcggcggcggcggctgctcagggaaggaggcctgagggccgcgtgcagcgggcgggcagctgggtgggctgggggcggccgcgcggcgtcccggagcctcgggccgcccggagccggcgggcgggcggaggcggaggcggcggcggctgcagcggctgcaggagcggcggcggctgcggcggcggcggcggcatctcctcctcacatgt

SEQ ID NO: 25500 - DNA, 404 bp, Homo sapiens
  source 1..404: mol_type = other DNA
ggagcccaggcctctgggcagtaagtgctgctgggggcagcacaggctgagttggtggatgttagctattatagacagggtctcactctgtcacccaggctggagtgcagtcacacaatcatagcggcttactaaatttgtttaaaattttttttgtagagatggggccatattactgctgtcatttatggccaaaagtttgctcaaacattttccagttaccaaagggtctgacactgggaacatgccagacactcctgaggagcctggcggctgctggccatgccccgattctgctcatcaaacagcaaaattttttcccgatcagcagcatcgtgatggggaaagggcgctggtgagcagtgtgtgtctgtctgccccaccccctgaacacacctctgccg

SEQ ID NO: 25501 - DNA, 398 bp, Homo sapiens
  source 1..398: mol_type = other DNA
gatgttagctattatagacagggtctcactctgtcacccaggctggagtgcagtcacacaatcatagcggcttactaaatttgtttaaaattttttttgtagagatggggccatattactgctgtcatttatggccaaaagtttgctcaaacattttccagttaccaaagggtctgacactgggaacatgccagacactcctgaggagcctggcggctgctggccatgccccgattctgctcatcaaacagcaaaattttttcccgatcagcagcatcgtgatggggaaagggcgctggtgagcagtgtgtgtctgtctgccccaccccctgaacacacctctgccggctgagggtgacacaaaggggagggggctcagaccaccgcctcccctggcg

SEQ ID NO: 25502 - DNA, 415 bp, Homo sapiens
  source 1..415: mol_type = other DNA
tccttgcccaacttggtcagcacagtcctatgtgcaccaagcactgccccggggacagaaggggcccctgcctctgagagctcctgggttagtgggaggcagaggcgggcagagggtgcacacgggccagccggaaagcttcccagggaagcggcacccaggctgctgagcctacaggatggagtctgaaggtgccctggggctctaggacctgtctcctcctgcgcctaatgttgccaccccccacccccgggacccagaatcagggtgtacaggagaacccaggcgtcaggctgcccagtccgagccccgtggtgacaagggcccctttgtgcccccctcccccgggggtagggaggagctgggccctggaggcaggcggcccctggcacccagggggaggggaggggctggc

SEQ ID NO: 25503 - DNA, 287 bp, Homo sapiens
  source 1..287: mol_type = other DNA
gtgcaaatgagctatagtactgccactgcacttcagcctgggcgacagggccagaccctgtctctaaacgataaaaaataaaggatttgtattttaggggagaaacggcccgtccctgtgacataagctgaggctagagtcgcctcccaacacgtccgcccagggcgcaaagtgctaggatcagtgcctgggaatgttcaaggccccaggcgtccacactggccttgccttgagccaaggagtctccggggccgggcctcgcgttggctccgggccaccctcagacc

SEQ ID NO: 25504 - DNA, 459 bp, Homo sapiens
  source 1..459: mol_type = other DNA
cagtgcctgggaatgttcaaggccccaggcgtccacactggccttgccttgagccaaggagtctccggggccgggcctcgcgttggctccgggccaccctcagaccgcagtcgcccgtgctcctcctggagtcccactgcgcggcagcccgagacacggtgcagtgcctgtgccatcgcgcaatgtgaccgtgaacgagagcgagcgggagttcgtgtactcggagcgcagcggcctcgtgctcaccagcatcctcacgctgcgggggcaggcccaggccccgccccgcgtcatctggagctgcccttccagggagcccgtgggctaaggtcaaattctccctttccggttgagggccctctagcatgaaagggattgccctggcacgaggaggctccgtgccaatcagtcagtgcaaggatgccccggctgtgtgactatcgtcaccaccacccatag

SEQ ID NO: 25505 - DNA, 379 bp, Homo sapiens
  source 1..379: mol_type = other DNA
accagctgatgggctaacatttccactgttggtgaccaacactgctgtgaacatttaggactgagtctttaaagtttccacttctcttaagtaaatatttaactttttaagcaactgccacctgctttaatcatatctcatactaatagatcttgggtttgaaccctagtggtgacatttcacaagctgtatcacctggagcaagtcactggcagctgctgtcatcatcgccaccaccattattattgttattattattacattgtcaccccagagataatagcagctggcatccgctgccaatctttatcgacggagaacatggagaatttaagtcatttcccccagacctcacggagctcgctctctgtcatttgcc

SEQ ID NO: 25506 - DNA, 171 bp, Homo sapiens
  source 1..171: mol_type = other DNA
tcttgacctgagctcaggcattgagacagagtctcactctgtcacccaggctggactgcagtggtgtgatcctcactgcactgagtagctgggactacaggcgcctgccaaaacacttagctaattttagtcagattccccaccatttatgcctatgatgaaaagagtgga

SEQ ID NO: 25507 - DNA, 287 bp, Homo sapiens
  source 1..287: mol_type = other DNA
tctctgtgaagctgcgttacagttgatgtcagaattcgcatgctcacttgacagcaaactagacttcaggatttgccaggaccagcctgtttcagctcacgcctgtaatcgcagcacgtgcctgtcatcccagggatgagctgagatggcgccactgcactccagcctagactttctgagagaagtaaaaaaagaaaaatgcctgggaattttttttttaaatcaggaattaaggacagaaaaatctgaatttggaagtcattctctagggtgctagtataaatgct

SEQ ID NO: 25508 - DNA, 175 bp, Homo sapiens
  source 1..175: mol_type = other DNA
ggaagcttcatccaagcttagtcccagctactggaggtcaaggctgcagtgagctgtgatcacaccactgcactccagtgccaatcccttggagggacaggtccaacctgtctctgcctccccctcccagagccccgggggtgggcgacaagatgtggggtggggaccccatttc

SEQ ID NO: 25509 - DNA, 201 bp, Homo sapiens
  source 1..201: mol_type = other DNA
ggggcctggccctttgagacagagtctcgctctatcacccaggctgaagtacagtggtcccgagtagctgggactacaggcgcctgtataccatgttagccaggatagtctcaatcccaccccgtggtttcctcaactggaaagcaattattgaggacacagggttcggggccctgggcgagccgctgacccaggtgtctg

SEQ ID NO: 25510 - DNA, 417 bp, Homo sapiens
  source 1..417: mol_type = other DNA
ctgccgggagagggctccaagtttctctgaaagctgccgctgcccgaggatgggcggcctcgctgatagtcgtcaccctgaggctccctctgatgcgcgcactttgtctgggaagctcccaggcacatggggcccctgcacgatgggtgtgagggcaggaaggggcgctgtgaccccgcagctgccaccccagggccccgggcctcactgactccagagccggcagtctctccagcctcctggtcgtgtcttggagtcgagctggagagggagccacatctggagctacggccgctcccaggtgagggctctagggtcccttccacttgctgccccctggtggcaggatcgcggctactgcgcggccgggctccaggggttcccacccccggcctgcggtgggcagcagctcaggtt

SEQ ID NO: 25511 - DNA, 311 bp, Homo sapiens
  source 1..311: mol_type = other DNA
agtccccacaggcagaggggctggggcctctgcaggaaccaacaagcctcctggcctgcaccaggtctcgggcataatcccagtcgcgagctgagattgcaccactgcactccagcctgggagatagagtgagactccgtctcaataaattaaaataaagaaagagagtgggaaccaggattccataggagcctctaatgagaacagtcagcagcccctcctccctccctggctcccaggggcaccagggcctgggaggtctctgcaggtctgcccgcccggggagctgtccaaacagacaccgggaaggg

SEQ ID NO: 25512 - DNA, 281 bp, Homo sapiens
  source 1..281: mol_type = other DNA
gggactctatgctgccctggcgacccaggcgcctgtgagacccagactcgggctcggagtctctccatttgtccagtcaataaatatttactgaaccccaggcagtgtttttacattgctagtaggagacaggcaataaaaaataaaggtaatttcagattttttttttctgtgaaaacaaaagggtgatactacagagtataaaacgaggtctgatgactccttcatcctcattctagcccctcactgcctggggagctggaggcttagatgaaatagca

SEQ ID NO: 25513 - DNA, 493 bp, Homo sapiens
  source 1..493: mol_type = other DNA
actggggagagggccgtggctctcacggatggctattgctgccctggcccctggcctgggggatgggtggggtgagctggcccagtcccgcccctcataggggtgcctgggtcagcggccctgggggtggctggcgcgcctggctgccctgctccgcgcccagctttctcagccgggagcagcctgaacgctgagacaccctgctgcaccgagggtccccccgggggctctccccagaatctcagaaactgacacgcagccccgtgtttgccagtcaggccaggccgaggacgggcaatgcctgtcactctggagcccctgagccaggctggctgagcctgggtgggtcccccacccagctccccgaatgcctggggttgggaaatgggagcacttttgcatcactctctgtttcgacagagactctcagactcacaagccctgagtcactgcggggagggacctcaggttgcccagccctgtcaccttctcc

SEQ ID NO: 25514 - DNA, 328 bp, Homo sapiens
  source 1..328: mol_type = other DNA
aatgggatacagaagtgacatagatgacgtccctgtcctctcagagcttacagtctgggcagccaagggaagccctgggtgggccttccaggcatacggctgtaatcccagcgtgagaccctctcggtggctgcacatgtagtcccagctacatcgcttgagcccaggagttcaaggctgcagtgagccatgattgcaccactgcactccagctctcaaaataaataaacaaatgataattttaaaaagtgggaacgtcccatgcctcctggcttgggcgccgcccctcggcgacgtcactgggtactgtgacgtcactgggtgctgt

SEQ ID NO: 25515 - DNA, 506 bp, Homo sapiens
  source 1..506: mol_type = other DNA
tttggccagaccctgacacagtgccttggtcatacccttaccctccagtccagagactggattcagctcctggaccggcattgcgctcaatgacaatttcgtgaagctcatttcaaggggtggtcggaaggaacccccttgaacctcccgtcctttctttccttcccaggggccggggccggaacatgtgcctcccgttccagcatctggctgcccgggggaggaaggacacccggggcgggcgccccacgccgatgggtcggtcagggcgggttctgatccgggtttgaggcccgccccacccttactcgatcgcctgcgcccacgggcgaggggtcgcgctcgactccaagccgggttccacttcaggagaccgggaccgcgatggcagcggtagaggccccccccaaagcgctgggccggcagcggtgggacccagggccggccacgggctctctgacgtcactgggcgcgacgccccgcgccgggactactgctcccagaag

SEQ ID NO: 25516 - DNA, 346 bp, Homo sapiens
  source 1..346: mol_type = other DNA
aatcttctgcaaagttcccagcactttgccaaggcgggtggatcacctgaggtcagggttcgagaccagcctgagtcccagctactcaagagctggttgcagcgagctgagattgcaccactgcactccaacctgggtgtcagagtgacactctgtgggagcaccctcctcttccagttgatcaggtctcactccaagcctgtgatggagccataggagaatgactcagcataatgagggctccctgatctcagggcagccaatgcctgaggtgcccaggcctagaggtcaccccaaggcagctgtggtcgggcggttctgctccaccccaccgccctcccgactg

SEQ ID NO: 25517 - DNA, 387 bp, Homo sapiens
  source 1..387: mol_type = other DNA
ggtactttgtaacattctgaatgttgttgctcacacaacttcacacggacgcgcgtgtactattccccttaatgtgcatgtttgaaaatactcagaatacaagcccacggacgtgctcctctgagttgctcctccaggaagccgggtcaggcgcttcctcccgggcgtctccggtcttcctggaaaccacaggtcgggtgggataggggccccgaggggccagccaggcctcccagccttgcccaaccctggggttgacacggacgggctctgcggtggcacaggagggtcctcgatctcagggtcctccaggaaagcggggccgcctctccgctgtgcctgagggtgtggccaaatctcattggctctcgcgcccgaatgtatgac

SEQ ID NO: 25518 - DNA, 369 bp, Homo sapiens
  source 1..369: mol_type = other DNA
aacagttttggggactgctggtctagccaatagggaccagggctgttgtggtcaccatggtgtccccagcatcacccagatgagacacctgtttctgaaatcaaagagcagtaagtccaggatctcatcattttgtcaagaaaataaagggggtgagcgtctcacgcctgtaatcccaacattttggcgcttgagcccaggagttcaagagcccagaagtcccatctctattaaaataaaagtgtttagttaaaagaacgagggaaggcgggcggggctgcagtctctccacgccctttcctgaccgcgcgcccgagcccgctgtctgcccggcaaccgatgacgtcactgttggcgcgcccgtgacgt

SEQ ID NO: 25519 - DNA, 369 bp, Homo sapiens
  source 1..369: mol_type = other DNA
tacgtgaacaattttatagtttaggtatgtcctaaatatttcatgtatgtatgtatatgttacatgtatagagtagctggggacattataacatttcatctctgagttcattttctaaatgatatctttcctcctgaataccattatcaaatctaagaaaagaattctatgatatttcatatttgggaggatgcctgccttaccttcccccacaatgagccctcatttaatgttggctattgttattgttgaaattgttgatgtcaatattgctatgattggcactcctgggaagcagccccaggacgccctccctactgggcctggtggaggattgggtgggccttcactcctgctccacgcctcagc

SEQ ID NO: 25520 - DNA, 494 bp, Homo sapiens
  source 1..494: mol_type = other DNA
acccctgagaactcccagtccctgacaagtagagactagagagtgggttcccggactggggtcccgaggcaccggggctatcaagacctggatccgggtcagccgggccccaagtgccagggttgagagggggcacctgggctcccccagagcccgactctcaggctcttccgtggtccggggactggacagacatggcgtgcacagcctgggactcttggagcggcgcctcgcagaccctgggccccgcccctctcggcccgggccccatccccgccgccggctccgaaggcgccgcgggccagaactgcgtccccgtggcgggagaggccacctcgtggtcgcgcgcccaggccgccgggagcaacaccagctgggactgtggggcccgacggtactggggcagtggcctgggcggggagccgcgcacggactgtaccatttcgtggggcgggcccgcgggcccggactgtaccacctcctggaacccgggg

SEQ ID NO: 25521 - DNA, 287 bp, Homo sapiens
  source 1..287: mol_type = other DNA
ggcttgtaatcgcaccccagcctgggcgacagagtgagactccgtctctctctctatatatatattttaagggtaggcctctctaaaaatgcatatatatatccaggagtagcggtgcgcatctgtaatcccagctactcgggaggatgagccctgtctcgcgttcaataaatatttcttgcatgaataaaagtactttcgctggggagatcgggtaacccacgggcgcccgagccccagccgcgcaagctcacgattgggcctcctcctgggagggagctgaagcc

SEQ ID NO: 25522 - DNA, 382 bp, Homo sapiens
  source 1..382: mol_type = other DNA
ttctgggattcaggacccacctgtgggtcccagggcctggctctgtcactcaagctggagtgcaatggcacgatctgaggcatgagcctggctatagaaacggatcttgctcctattcccaggaagggacaccaggtggtgcgcacgcccctccgggacccagaggccatgggaagctgttcatccagcctggtctgccggctcagcgggagactagcccaaggagggggcagtgccaagttcaggccagtgactgccccaccggagcccgggtgtcctcttgtgcaaaatgcctccccaccagggctgtgggtacatcagtaccagcctgggccccgcagagagctggagcaacccctcgaagccagggtgtggctcagag

SEQ ID NO: 25523 - DNA, 261 bp, Homo sapiens
  source 1..261: mol_type = other DNA
aaacatgtcatcaaaatttgttggataaatgaaaattttgctatattaaagagttctgaagtgtgaaaagagggggggaccttgacccctttcagagaaatgtcatttgtcatcagcccaagaaaaggagatttttctcttcgaagagcttgatgggaggatctgagtcactcacacacccaccccccagggagagggaggaggccagcttctggctcctccaccctttcgcggggctagctccagggggggccccaggag

SEQ ID NO: 25524 - DNA, 828 bp, Homo sapiens
  source 1..828: mol_type = other DNA
tgtagcggcccctggtggccctgcgtccgctgtccagcgggatggacacttcttccacccccgaggcgccccgtcctccccaggaggcagccggccccgaggactcggtgtccgggcacaccttgcggcatgccggtcctggactggtgggggctgtgcgaccgcaagtcactcgccccttccactgcaatccacggcgcgcggagtctgatctgggaacgctcggcccgggagagagaggaacgcgtgctccgaccctgctttcggccacccgcctcctctccgggagcacacggaccccgagaccgcggcctctccggcgtcttccctccacaccgtgccaagccgccgccaggtcgcgcctggaacgctcctgcagccgcgaactgcatttcccagggcctcgggggtcccggggcccgagcccgcggcaccctgggagtggtagtccacgcgggccgccggcctagccaagagcctggggctaggaccacacctcccggagacccggcaacccgctttccgggtcctggccgggaaccccgccgtcccggccctcgcgccctggctgccggcggaagaagcgaggcgtccggactacatttcccggaggcccccgcggttcgcccctctgcggccgcgacgcgggggtctgtgctccccaggtgcggtccgagggcgccggccggccgcggactccctctcccgtggtgccctgcgcgtggccggcccggcccccggtctcccgcggcggcgctggttgttgtcgtgcgccgcggccgccccgccccgcccccgctccggccctgcgcacgggccgcccccccc

SEQ ID NO: 25525 - DNA, 461 bp, Homo sapiens
  source 1..461: mol_type = other DNA
agcctggagctgcccatggccatgcgttttcgtcaccttaagaagacgtccaaagaagctgtgccctgcagatcagccatccacggggagatggtcatcattgtcatccgctcggtgttgactgacaagcgggagatccgcggggacagagcacctgatctccccacctcatccctgcagggcatcgggtgcgcatggcaatgcatccacgtggagggccagaaattcgccctgcgccgcatcctgcgtggtgaggagctcactgtggcgccaagcgctgccgtcggttccttaactgaggccgtggctgcccctgggggctccctcacccccaccctcatgttcagggtggatgtgggcatgcaggtgacaagggccctgcctccacccctccctttctgccctgggggcccaggatgtagatattgtacaaaggtttctaaatcccttcttttttattt

SEQ ID NO: 25526 - DNA, 526 bp, Homo sapiens
  source 1..526: mol_type = other DNA
gcaaccccgacggcgcggagctatgtagcccctgcggcggcggagccgtgacccctactcccgccgcgggcgggggcagaaccccgtggcgctgcagagaggtgcgggactcccggcagggtagggagccggcgtagccccacgtaaggggggcccaactaccttatcagataccgtatcagatgggatgtggccccgagtggagtgtggcctccagctttactccaacagaggccggtccctgccaaggggcactgccccctcacacctggaaacccaggcgcccctagctcccaggagcgcagctcaccagtcagcaggcctggccgactgctggcccaaggagaaagtctgtcctccccaggcgccctggagacaggggacacatggaaggaggcctcactacttccactcctgagcaggggttagtcctgggagccccggggcagggaaggtggactggacgcccgctcttccgcacctaacccctgtctcgcctcctggatgagctggaggtgctggaccc

SEQ ID NO: 25527 - DNA, 313 bp, Homo sapiens
  source 1..313: mol_type = other DNA
cccggaaaagaggcgtcccgctatcacggccccccagatggggcctggacgatgcctcctgacggccttgttgcttctggccctggcgccaccgccggaagcctcccagtactgcggccgccacccagacaacaagtgctgcagcagctgcctgcaacgcttcgggccgcccccctgcccgggtgagaatccgagaccgagccttgctgggcgttgcccgcgcaggggcgggctaggcggccgcactggagcgcagctttcccgctaggttccgggaaaactgcggactcaatgaccacggcgatttcgtaac

SEQ ID NO: 25528 - DNA, 210 bp, Homo sapiens
  source 1..210: mol_type = other DNA
aggtggtctccagccagtatggggctgactcctccgtgcctgcacacaaacactgagtttacgcctcccaagtagctaatagagacaggcaggtgatccacccacctgggcctcccaaagtgttgggctaccttggcctccctagtagcagggactacagacgtgagccactgcacttggcaaagttcccaaagtgttgggattacaggc

SEQ ID NO: 25529 - DNA, 270 bp, Homo sapiens
  source 1..270: mol_type = other DNA
gcctcccaagtagctaatagagacaggcaggtgatccacccacctgggcctcccaaagtgttgggctaccttggcctccctagtagcagggactacagacgtgagccactgcacttggcaaagttcccaaagtgttgggattacaggccccggaaaagaggcgtcccgctatcacggccccccagatggggcctggacgatgcctcctgacggccttgttgcttctggccctggcgccaccgccggaagcctcccagtactgcggccgcc

SEQ ID NO: 25530 - DNA, 233 bp, Homo sapiens
  source 1..233: mol_type = other DNA
ggagtgcaaaggcgcagtcttggctcaccaagtagctgggattgtgtggggattacaggcaagagtagttctgagctccatctggagaccagcccagagcagagaggcaggcctgcaggatctctgcaccactcctcagggtaggaaccatcggtgttcccctgatcactggcatggccgcttctgaggccctggcccccagatgttcctggccattgagcccacacatgtga

SEQ ID NO: 25531 - DNA, 313 bp, Homo sapiens
  source 1..313: mol_type = other DNA
acactgcacgcatgcgctgttaggggagtctatggggagggcgcgcgcctcccacgcgcaagcgccctggggcgtttccgagcgcttggtaagcgcctggagagggcaacgaactacacttcccagtgctcctaagcaatatttagcctggggtgcccagcttccccggggggtctgccggcacggggaccggtgctcccggcttcacaacaagccgacattcagccaggtgagacccggcacggagcctcgggggttaacggcggtcgcccccatgatgcttaggctggggtgtaaggttccacccccaacc

SEQ ID NO: 25532 - DNA, 334 bp, Homo sapiens
  source 1..334: mol_type = other DNA
gccgggtcgtcccaagggtctgcggggcaagacccaagccttgcaggagagctcacttcctccggctgggacactgcacgcatgcgctgttaggggagtctatggggagggcgcgcgcctcccacgcgcaagcgccctggggcgtttccgagcgcttggtaagcgcctggagagggcaacgaactacacttcccagtgctcctaagcaatatttagcctggggtgcccagcttccccggggggtctgccggcacggggaccggtgctcccggcttcacaacaagccgacattcagccaggtgagacccggcacggagcctcgggggttaacggc

SEQ ID NO: 25533 - DNA, 191 bp, Homo sapiens
  source 1..191: mol_type = other DNA
gaaccagcggttactgagttggcagagatcttctcagatttagtgatgaaattcaacctccacttctgggccctaagtggggggcagcaagcaccttgacatagacgttgcccacgaggtggtccccaaggtcagctgagctggttgggggtggaaccttacaccccagcctaagcatcatgggggcgacc

SEQ ID NO: 25534 - DNA, 386 bp, Homo sapiens
  source 1..386: mol_type = other DNA
gaagatcttctccaactcccgagatctatttggaagaaactctcaatctggctcctttgggatccaggaatctgattccttgggatccagaaattgaggccccagcttcctcattcctcaggacaggtccttcatctcttagacttaagaatccaggccccgaggccctcttccctggggccgggtcgtcccaagggtctgcggggcaagacccaagccttgcaggagagctcacttcctccggctgggacactgcacgcatgcgctgttaggggagtctatggggagggcgcgcgcctcccacgcgcaagcgccctggggcgtttccgagcgcttggtaagcgcctggagagggcaacgaactacacttcccagtgctcctaagc

SEQ ID NO: 25535 - DNA, 313 bp, Homo sapiens
  source 1..313: mol_type = other DNA
ggttgggggtggaaccttacaccccagcctaagcatcatgggggcgaccgccgttaacccccgaggctccgtgccgggtctcacctggctgaatgtcggcttgttgtgaagccgggagcaccggtccccgtgccggcagaccccccggggaagctgggcaccccaggctaaatattgcttaggagcactgggaagtgtagttcgttgccctctccaggcgcttaccaagcgctcggaaacgccccagggcgcttgcgcgtgggaggcgcgcgccctccccatagactcccctaacagcgcatgcgtgcagtgt

SEQ ID NO: 25536 - DNA, 313 bp, Homo sapiens; identical to SEQ ID NO: 25535
  source 1..313: mol_type = other DNA

SEQ ID NO: 25537 - DNA, 365 bp, Homo sapiens
  source 1..365: mol_type = other DNA
gggttcgttgccctctccaggcgcttaccaagcgctcggaaacgccccagggcgcttgcgcgtgggaggcgcgcgccctccccatagactcccctaacagcgcatgcgtgcagtgtcccagccggaggaagtgagctctcctgcaaggcttgggtcttgccccgcagacccttgggacgacccggccccagggaagagggcctcggggcctggattcttaagtctaagagatgaaggacctgtcctgaggaatgaggaagctggggcctcaatttctggatcccaaggaatcagattcctggatcccaaaggagccagattgagagtttcttccaaatagatctcgggagttggagaagatcttc

SEQ ID NO: 25538 - DNA, 324 bp, Homo sapiens
  source 1..324: mol_type = other DNA
gagagtttcttccaaatagatctcgggagttggagaagatcttcaagtctggagagcagccggaggccaaccctctggggtgccctggacaggctccttaaagcagaggagcctgtcctgggagccccttctgaggcataaatgattattaatatttaaaaacatctgttgagagctttgtacgaggcttagtatttagacatgatgtacattttttacagtgcatactactcataatcttctgaactaggaactttcctgctcaggaaactattagatgagaaactaagaaaggaatagtgcttccatttctttttctttttt

SEQ ID NO: 25539 - DNA, 307 bp, Homo sapiens
  source 1..307: mol_type = other DNA
ccaggctggagtgcagaggtccgatctcggctcactgcaacgggatggcgcaccatgttggccaggctggtctcgaactcctggtcacaggtgatctgcctgcctaggttcacttaaaatttactaaaagataagatgcctagaagagtgcccgacacactaataaatatttgcaaaatgaatgaagttgtacatacctggcaccagtgaacaccgtgccccgcgcggcgcaggcgctgttactcagggtgagtctgggaagctggaactacacctcccaggatgcagccactgccgaaggggcccg

SEQ ID NO: 25540 - DNA, 404 bp, Homo sapiens
  source 1..404: mol_type = other DNA
aaaagtcccgctttttaagcgggttggggggggggcgcgctctgccctctctctaaagcagcttgcatcagttgccaggtctgggcctggccgaggtagcgtttccagccccagcgcgcggcccccggggggccagcctgaactgttcatgctcgcgccccctggcctctgcgcaccagaggctgagtcagaggcacagaattaggcccggcctgccgggggactgggcccaaggtccatcctcagagctgccaggggggaggcagtgggcctcttgggtcctgggccccaatcaccatgccaggcatccagcaggcgcttaataaatggccaagtcattgtttgggttggccacggtcccagtgtccctgggcagccctccgaggggccggcacagggcgcac

SEQ ID NO: 25541 - DNA, 352 bp, Homo sapiens
  source 1..352: mol_type = other DNA
tggtgattggggcccaggacccaagaggcccactgcctcccccctggcagctctgaggatggaccttgggcccagtcccccggcaggccgggcctaattctgtgcctctgactcagcctctggtgcgcagaggccagggggcgcgagcatgaacagttcaggctggccccccgggggccgcgcgctggggctggaaacgctacctcggccaggcccagacctggcaactgatgcaagctgctttagagagagggcagagcgcgccccccccccaacccgcttaaaaagcgggacttttgtcgggcaggcacttggaggccgctcgcctccggcgcgggcacagagaggggcg

SEQ ID NO: 25542 - DNA, 234 bp, Homo sapiens
  source 1..234: mol_type = other DNA
tgcccagctctatgctggggagctcagtctggggccctccttctgggaggccggtcaccagtgccatctcagagtgatcagagctgtgaagggatttggactcttagaagttcaagagctctgagctcgattatcagaccagagaattcagacttcgtttcgaccagcatgctctccaatgctcagggcggtgtgtggagcgcccggggctctggacccgcgctgccagataac

SEQ ID NO: 25543 - DNA, 606 bp, Homo sapiens
  source 1..606: mol_type = other DNA
gactccagggagggggtcactcagttccactccccactgctttgccctaggggggtggtgctgatgagagtgcttctccttatcagaaaaaggctttgtttgggctggcggcaccaacccagtgggggttggtggaagcggcagggctgcctgcgaaccccagtcactcccggcccgtaggactcgcgcaccgtgaccgagtcgcggctgccgcaggagtcgcggcgcgtgcatctcgcaccttctcccgagagctggtgctggtcacagggccgtcggacaaccaggccaagttcacgtgcaaggctggacagctcagcgcgtccacgcagctggcggtgcagtgtgagggctcgcactgctgaggcccgggggcggggccaggtggggcagggacccagcgaaccctggacccggggaaagcgggcctggggtgcaggcggggtggacgcagaccaggccgccccccggtcaacttgtcctgggacaaggaaggggagaggtgggagtgcgagggatccctcccctctctggtctctggctccgctcgcagccctggcttggttccacaggctggagggcgtggccgccccaccccggagagcc

SEQ ID NO: 25544 - DNA, 363 bp, Homo sapiens
  source 1..363: mol_type = other DNA
ttccaggctccccgcaagatagaggtgcgatgccccctccctcctcgttctagaggaaaagggcctggggcagagctgcatcccctcccgactttctggactgcctgaatgccgcagtcttcagtccatcccagggatgacatcttttctggggcccttagaagggtactggtcaggaacatgtcaggtgctggcttcgcgtgcccagctacccaggtgaccatggtgcctgcctctggggtcagcaggagcagcttgaagcccagactcatgggtcctgggcgtctctcacccatacccaggatagacacgagctcgggccccatctcagagcggccgacctggcgtggattcacctgcagg

SEQ ID NO: 25545 - DNA, 715 bp, Homo sapiens
  source 1..715: mol_type = other DNA
gagaatctgaatgtggaccctccagttcttacaggtccaggagccccccagccctccttcaggctgctcggggtccctcccacctgctcggccagctgcgcagcgtgggaacgccccagctgggctgcatggagccgtcaggacaagctgcgcggttcccagcctccctgcctgccccggcccggcaccgccgcctcccagccgtcgccgggcaaccaggccgaggggcccggccggccgagtggggaggggccgagggcctggattcctgggtcttaggacgtgcgtcccaactgtcccccaggtatcggtgtgccctcttcccgacacgcaggcccgggggagccccggaccccgcatcccccagggcgcggaaactggcgaggccccaggagctcccactgagcgcagtcctaggacctgggcgccccggcagggcgcaggtgtccaacccagccgggaccccctccctcctcgaacccaggtgttccggctcccagaccccaattgagctgggggcgcccacccgccgggggatcccgccctgcgtcccccacgtctcagccgcgggagagggcggagctcccggggggcggacccgggcggggcgagcgggatcgggccctcttggggtctcccagagacccaggccgcggaacggcaggcgtttcagagcgtcagaggctgcggatgagcagacttggaggactccagg

SEQ ID NO: 25546 - DNA, 475 bp, Homo sapiens
  source 1..475: mol_type = other DNA
ataggcatgtatgcacagacacacgcatagatgtccacacagttgcacacaagtgacagggctgccccaggggtcctggtaggaaaatggcaatcccctggtccttacatccagggtgctgcatccggatgatccttaaagaaaggtcctgggggctttggttcatggatccttgagctaggagttaaaggtccaggcccctgggacccttgtctctggtcctgagagagaaggtgccgtctcaactgctgcctatcagcccatagccggactcctggctgggcccttcatggggcgggacgcctggaatctcgaggggcgggggcctggcgcaggctcccgcccggggttcccgagctgctccactctgcgcgaagccgccacgctattgtcctgaccaggaaggcggggccggcgcggggcggggctggcggcgccggcgcagcccgggggcggcgggaggaggaggtggcgg

SEQ ID NO: 25547 - DNA, 630 bp, Homo sapiens
  source 1..630: mol_type = other DNA
tttagggacacggagtctgtggagaatctgaatgtggaccctccagttcttacaggtccaggagccccccagccctccttcaggctgctcggggtccctcccacctgctcggccagctgcgcagcgtgggaacgccccagctgggctgcatggagccgtcaggacaagctgcgcggttcccagcctccctgcctgccccggcccggcaccgccgcctcccagccgtcgccgggcaaccaggccgaggggcccggccggccgagtggggaggggccgagggcctggattcctgggtcttaggacgtgcgtcccaactgtcccccaggtatcggtgtgccctcttcccgacacgcaggcccgggggagccccggaccccgcatcccccagggcgcggaaactggcgaggccccaggagctcccactgagcgcagtcctaggacctgggcgccccggcagggcgcaggtgtccaacccagccgggaccccctccctcctcgaacccaggtgttccggctcccagaccccaattgagctgggggcgcccacccgccgggggatcccgccctgcgtcccccacgtctcagccgcgggagagggcggagctcccggggggcggacccgggcggggc

SEQ ID NO: 25548 - DNA, 562 bp, Homo sapiens
  source 1..562: mol_type = other DNA
ctgagcctgggccctggggctccgtaggactatgtccgtttctacaaaaatttaaaaaattagccaagcaaggtggcctgtggtcccagctacttggccactgcactccagtgccagggcaacagagtctcccaggtgtcccaaagttctgagagctgcgatgtctgagtcccagtcacagcctcataacccaggtgactttatctggcagattcctccgggtctgtctcggatctataagacatcggtcaggacctctcatcagccccgagggcccggcaagccgctgagtccctacgggacagcacggggcctccggagagctgtggctccctggcctcacctgcaccccgccagcgtcgggctgctgctgctggcggcgcctctgctcttccagaagcttcttcacggctgcgctcacccctgctcactgtgcgggagaggagaggggggtccttaagtcacctaaatgccgcgggggtggcgcgcggggagtgggtttgggcaccctcctcgccctcccgcgcctcctccaaagccattagaagatttggggtggggc

SEQ ID NO: 25549 - DNA, 422 bp, Homo sapiens
  source 1..422: mol_type = other DNA
gggtggcgcgcggggagtgggtttgggcaccctcctcgccctcccgcgcctcctccaaagccattagaagatttggggtggggcttccaccaccgtcgcggaaagtgaggaagggggaggagggcacccctctgcagcaaccacccccccagatatccaagttttgaagtcagcgggttggtggggggccggcgccaggcgtcactcctcaaaggcctcaccccgggccgggagcggtggctcacgcctggggcggatcacctgaggtcaggtggccaaggcccatccatacagtctctttttctctaggacctgggagccccagttcctcacccttccgagcctgggttccggcggaggaagggggtggctcggaaacagccccgacgcggcgcgctgacgccacggcgctcacgcaaggg

SEQ ID NO: 25550 - DNA, 383 bp, Homo sapiens
  source 1..383: mol_type = other DNA
agtggcctcccactggaatgccagctccagggctgggaattcctgctgctgcaataaattattttaaatgatgaatgagtaaaagagggagaaattgagccacaccctattgggagtctagatgggcaggccaggcaccatggctccttgtcagctactcgggaggctgatccaggccccccggtttctccctcctcttggagcccggtgccctaggccagagcaaagatctggaccccagctccctccttcccggggggactgagtagtccgcctcccaagtccgccgcgcccattcagggactgcgttcgccggagcgcgacccggggactcccaggcctgtgggcgggccctgcccaggactgggcggtgccataactcg

SEQ ID NO: 25551 - DNA, 295 bp, Homo sapiens
  source 1..295: mol_type = other DNA
ttactcattcatcatttaaaataatttattgcagcagcaggaattcccagccctggagctggcattccagtgggaggccacttacattgttagagaggtgagatctctcccaagtagctgggattacaggagcctgacatgaactcctgatctcaggtgatcccccaccttagcagtgtgtgttgtgataggggcagaattgtggctttaagtaccatctaaatgcagtgaggttattcagcatctccacagggaccagaaggcttggctgtctaggatccgcaaattttcttgg

SEQ ID NO: 25552 - DNA, 646 bp, Homo sapiens
  source 1..646: mol_type = other DNA
ggacctgggagccccagtcctcacccttccgagcctgggttccggcggaggaagggggtggctcggaaacagccccgacgcggcgcgctgacgccacggcgctcacgcaaggggccccaggtgtcctgctccgaggcggggcgcgcggccgatcgtggcgctcgtggaatccccgcgcaaggggaattcctgctcagccccgcacgggtggccatccggaaatcccagggcggggcagaggcagggtcaccgccagcgtagaccctgaggccaggctccggacccttctagtccctgcttctaggggtaggagtctcggttgccagcaacccctagcacccaagcctcccagcccttgcaccctcggggccctgcgatcctggatccccaggcccctgcacccccaggacccagaagtctgggatcccagcaaaggactgacgcttcagctccgtccctcagggcctcgggagtgaacgcgtcctgcccgcgcccattacctcggggattccgtggcgtggattgcgggcccccagggccgcggcctcggcgctgcgccagcctcgctgtttcccccgcggagccgccgccgggtccccgatcttgggtccggtacccgcgagttatggcaccgcccagtcctggg

SEQ ID NO: 25553 - DNA, 213 bp, Homo sapiens
  source 1..213: mol_type = other DNA
tacattgttagagaggtgagatctctcccaagtagctgggattacaggagcctgacatgaactcctgatctcaggtgatcccccaccttagcagtgtgtgttgtgataggggcagaattgtggctttaagtaccatctaaatgcagtgaggttattcagcatctccacagggaccagaaggcttggctgtctaggatccgcaaattttcttgg

SEQ ID NO: 25554 - DNA, 255 bp, Homo sapiens
  source 1..255: mol_type = other DNA
gtcaaaaacctgattttgggcatgtcattagtgcccacatgctgctggctcttttaatatcctttaaacagcacaagtttctgatgattaaataatcatcatcatagctgatgcttttaaaaagctgaccagacctgcaaggtgggtggatcacctgaggtcaggagtttgagaccagctggccaacggctggtggcaggcgcctataatcccagcttggtcatgacactgctgggggcctgtggcatggcccct

SEQ ID NO: 25555 - DNA, 812 bp, Homo sapiens
  source 1..812: mol_type = other DNA
gggattcagcagcgccagtgcgactccatgggaggtggggccggggcgcgtctttgagagaaggggcgggtgcctacgcctttaagcgcgggtgcgcgcggagcctgcgcctttaagcgccggtgcgcgcgctgccctgggttgccggcgaggaggccgcgggagcgcctggacccggcccgcccagcccggcccccgcccggcccccgcctcggccccggcgggggaggggtctctgagcgcggcccctcccccctgcgcccccgcctgcgctgcggtgcccaggcctcgccccacccggccctggggctgcccggtcgcccccctccccacgtcagcctccgccgcagcccaggaagccagccgggacgccgccgccccggaccccgcgccctaacctccacctcgggggcctgcacccccagattgaatcgggaattccggaaacccgagcctggaaccctgatctgggaccagcaccccgagatccggccgtggaaccccaagatctggagcctgaaccccagtatatggggctaatatttggagccggaaccccacaatttggaacacagaccccaatatttggagcagaaccccaagatttgacatctaaaacctcaagcctggagctgaactctgaattctgggcctgggaccttgaaatctgggactggatttccagtactgtaccctggaacccactcttggggacctgaaccctgggattcaggcctcaaattccaagatctggactgtgggattccaaggggcctgaacccgagtttgggcctgaagtccttgctgcagac

SEQ ID NO: 25556 - DNA, 725 bp, Homo sapiens
  source 1..725: mol_type = other DNA
aggtggtgggggacccacagtcagctccacagcagctgtggcctcgccagctgcattggccgcaatgcaggtgaagatgccagccggccctggggtgacacccaacgcacacggggctctgggtcccccactgcccggcagcgcagggcagccggccgacctgcgggcacagccagaggtggtgagcggtgagtcaccacgggcggctcgcagacaaactcctcctcgcccaccggccgccagagcaggtggggacgcgcaggcctcgaggtcgtcctcccgcgccaggcgacgcagccacaccagctcgcagttgcagtgcagggggttcccgccaaaggccagcaccagggcagaggcgggcgagccccggggcctggcgagcaggggctggaggtcatgtccagccgggccagcttgtgcaggcgggaaaaagcgccggcgggcacagaagccagcaggttgtggtcgaggcccaacgtgttgacgttgcccaggcggcccagggcctcccagggcagctgctcgaggtacaatcatccagggcgccggccgccagcgctgccagctggttggttgaccaggccgcgcagctggccctcgcccagtgaggtcagccggttgccatccaggtgcagggcacgcagggcccgcaggtcggcgaaggcgccggcagccacgtggcggatggtcatgttggccaggtcgcggcggcgcacggaggc

SEQ ID NO: 25557 - DNA, 452 bp, Homo sapiens
  source 1..452: mol_type = other DNA
ggaatcaatttgaaacccaatcatgaggtccttgtgcctgcagtcaggatatgcattccaggcttcccatccctggaaactggagaatttcaatgccccgagtccatgggtttcaagacggaaggccccaaggccctgaggggatctcaaatcctggaaccccgatttcacctgaaggcccagggggtccagggcggacctggggccccgaccaccaaggaggaaaggaagtgcttccttcagtctcacctccctgcggcgtgggcaggtgatggcgctggccgcgggaagtccttctagcagcctcgcggctgtcacggctgccgcccctgggccagtgccagacgacgatgccccgcccacgccctcctgccaatggctcagaggccaggaggcgcggcctatccttaggaaggcgggcccttgaagcctctgggagctcccattggcct

SEQ ID NO: 25558 - DNA, 539 bp, Homo sapiens
  source 1..539: mol_type = other DNA
ccctggggactagctgatctcgctactgctggaaccgcgcagcctgctggtgctccgcggccccgcgtcttctccacggcatcgccgccgcccgcgtagacgcgctggacgccgcctcctcgccgcccaatgcggcagcctgcccgtcggcgcggccgggagcctgcctggtgcgcggcacccgggtctcgctgaccatccgccgcgtgccccgcgtgctgcgcgccggcctcctgctgggcaagtgaccgccagggccgggacccctcggattcccaggttcctgcccctttggggctgctgtgactccgcgacctaggaaccgtgggcaaagggggctcccctgggttatttattttcccaataattttgtgtgagctacagaagaccccataccaaataaacaaaaaaatctttccttggttttatatttttattttttagggaggaaggagttaagtgactcttctgtcacctggccgggtccaggttcctcttggaaggggcggagccagacctgtcctgggcctctcctgcag

SEQ ID NO: 25559 - DNA, 195 bp, Homo sapiens
  source 1..195: mol_type = other DNA
agcggatctttagctctgaggctactccgagccttttaggactccaagctctgagcctcctcggactcctaggccaatgggagctcccagaggcttcaagggcccgccttcctaaggataggccgcgcctcctggcctctgagccattggcaggagggcgtgggcggggcatcgtcgtctggcactggcccaggg

SEQ ID NO: 25560 - DNA, 369 bp, Homo sapiens
  source 1..369: mol_type = other DNA
ggagccaggaccctgggctggcttcaggaggcctccgtttcccagacactgctacagcatgagttcaagaccaccctgtctcgcagtgaaaaatcagactttacagactgtctggtttccaagctgcttaacctctgggccccagtgtgtgagcctcgcattatgatggtaaggatgagatgatcatgataggcctctgaggcacccattatgaatggtgaggggtccggtctagggtcctagagagagggtcccctagagggtccccatctgccctcaccggcctggtttgcaggcgtgggggaaggggatggagatctgtgtccctggtccctcctcccccgccgccggtaggggggcagcaggcgc

SEQ ID NO: 25561 - DNA, 509 bp, Homo sapiens
  source 1..509: mol_type = other DNA
ggggctgatgtcggggccacagttctcagatggcgagcagcttctcacccggttctgcaccgtctcctcggaggccgtcgagagtcgcgtccgccgccgtaggcagattggtggggcggggggcggggaggactggcccctccgcgccggaactcccgccatgacagagggcagcttctcccctgcatcgttccgcgcatagcctccggaccctacggccgccatcgtcacgccggaggcgggcgaccgttaccgccgctcgggaaagccggcgccaccgcctattggacgcgacgggcccggcctagccaatcgcagggatgccgggcggcgcttagaaccaacatacacgaggctaaggccacggccgcctccgccccaacggttgacgccgtgacgccgcccttccccccaacacgtgatgaaagtcggggtgacgaagggccggctttgcgcacctccccggtacgtgacgagactccacggacgtcacgtgaggcaggcggcga

SEQ ID NO: 25562 - DNA, 459 bp, Homo sapiens
  source 1..459: mol_type = other DNA
ttctgtacgccctcctccccaggcagcactgcagagattttataaataacttctcacgtctttctcatagttttgagtgacaatatggacgggaccttaatgactcagcgggggccagggggctgatgtcggggccacagttctcagatggcgagcagcttctcacccggttctgcaccgtctcctcggaggccgtcgagagtcgcgtccgccgccgtaggcagattggtggggcggggggcggggaggactggcccctccgcgccggaactcccgccatgacagagggcagcttctcccctgcatcgttccgcgcatagcctccggaccctacggccgccatcgtcacgccggaggcgggcgaccgttaccgccgctcgggaaagccggcgccaccgcctattggacgcgacgggcccggcctagccaatcgcagggatgccgggcggcgcttagaac

SEQ ID NO: 25563 - DNA, 450 bp, Homo sapiens
  source 1..450: mol_type = other DNA
gcaatggacactgcagcactaatgctcgggcgccccgcgctgcgctcacttgtagaagctcacagggcggttgtctgcacccaggcggcccgcagtgttggagcagttcggcgccctgcagtacttgggcatggctatccagcccccgctgagttttgccgggtcagcggctgcagttctcgcggagcgccgcctaacccctcgccgcctgcctcacgtgacgtccgtggagtctcgtcacgtaccggggaggtgcgcaaagccggcccttcgtcaccccgactttcatcacgtgttggggggaagggcggcgtcacggcgtcaaccgttggggcggaggcggccgtggccttagcctcgtgtatgttggttctaagcgccgcccggcatccctgcgattggctaggccgggcccgtcgcgtccaataggcggtggcgccggctttcccg

SEQ ID NO: 25564 - DNA, 520 bp, Homo sapiens
  source 1..520: mol_type = other DNA
cgccccgcgctgcgctcacttgtagaagctcacagggcggttgtctgcacccaggcggcccgcagtgttggagcagttcggcgccctgcagtacttgggcatggctatccagcccccgctgagttttgccgggtcagcggctgcagttctcgcggagcgccgcctaacccctcgccgcctgcctcacgtgacgtccgtggagtctcgtcacgtaccggggaggtgcgcaaagccggcccttcgtcaccccgactttcatcacgtgttggggggaagggcggcgtcacggcgtcaaccgttggggcggaggcggccgtggccttagcctcgtgtatgttggttctaagcgccgcccggcatccctgcgattggctaggccgggcccgtcgcgtccaataggcggtggcgccggctttcccgagcggcggtaacggtcgcccgcctccggcgtgacgatggcggccgtagggtccggaggctatgcgcggaacgatgcaggggagaagctgccctctgtcat

SEQ ID NO: 25565 - DNA, 370 bp, Homo sapiens
  source 1..370: mol_type = other DNA
cgcgcactgtgtgacgcttgtggccgagggtaggggctcggtcaccggaggcttcacatccctcctcccttcgcccagtgaggagacgagcctcatggcacgggtggtcctgtccgcggcctgggacactgctggtaatcacagttccggcactcggggccacgctgggaacaggtggacctgccggggaagaccccggcgctcaccgcgtagagcagaatgcggttctccttgtccaggggttagttctggagccattcctcgccggctcgtaagtcccgtcgggctccatggcgacgcgcagcccgcgcagccctcccagccttccgcgcttgctccgccgcgctacaggtcgcgggaggggccaggc

SEQ ID NO: 25566 - DNA, 408 bp, Homo sapiens
  source 1..408: mol_type = other DNA
cggggccacgctgggaacaggtggacctgccggggaagaccccggcgctcaccgcgtagagcagaatgcggttctccttgtccaggggttagttctggagccattcctcgccggctcgtaagtcccgtcgggctccatggcgacgcgcagcccgcgcagccctcccagccttccgcgcttgctccgccgcgctacaggtcgcgggaggggccaggcagagggcggagctgcgcacacgtgctggctccccgccgcctcgggctcggccatggatctggtgccagatgcaggacagaagccaaggcgcttggcttggttgaaggcgctggcccaagagtaaggagagccctcttcctggcggtggggacggcgattggcggacgctcctggcaggacggagcaggaggc

SEQ ID NO: 25567 - DNA, 346 bp, Homo sapiens
  source 1..346: mol_type = other DNA
agcctggtcgctcactgtgacctatccaggaagccctctctgattctcccaggtggagtcaggcacctcttcttggggctccagtcccctgggatttcctgatcccagcccagaccactctaggctgtccctgtcaggctgcactggaggctccacgaaggcaggaccaagtgtctgtctacagggtaggagccagcgcatcctcttatccttccatgcaggaagcagggctaggaggccacggaggccccgccccttgcatcaacggggccgcaatcggacccgccccgccgcgaccgggtccccagcctccgcagcctgggatcacctccgggcccgcccagtc

SEQ ID NO: 25568 - DNA, 442 bp, Homo sapiens
  source 1..442: mol_type = other DNA
ggctcgtaagtcccgtcgggctccatggcgacgcgcagcccgcgcagccctcccagccttccgcgcttgctccgccgcgctacaggtcgcgggaggggccaggcagagggcggagctgcgcacacgtgctggctccccgccgcctcgggctcggccatggatctggtgccagatgcaggacagaagccaaggcgcttggcttggttgaaggcgctggcccaagagtaaggagagccctcttcctggcggtggggacggcgattggcggacgctcctggcaggacggagcaggaggcggggctgatagcccagcagcagcagcggcggcggcggctgcggagcgggtgtgaggcggctggaccgcgctgcaggcatccgcagggcgcgggaggtgacgggggtgtcggcacccacggtgacccagcctcaccgactgggcggg

SEQ ID NO: 25569 - DNA, 403 bp, Homo sapiens
  source 1..403: mol_type = other DNA
tttaataatcagtattgctgcagatacattttacagatgagaaaatcgctgctcaggaacagccagtcaactcaagcctagccagcctgcagggtaggggataagagccagccagcctgcctgggggccagatttagctccccccgatgagtgtactggactccagcctgcccagctactcggctgcagtgagctgagatggcgccactgcaccccagcctggtatgtaaaaatattattgtaaaaaattaaattaaatcaaaaacctcacagtactttgggaggctgaggcgaggccctctctattatgtaaaaacaataatattttttaagtaaataaagaaacctggccaaaggaatcttcctgtgtctgggtccccctgactggaggttcgcctgggag

SEQ ID NO: 25570 - DNA, 508 bp, Homo sapiens
  source 1..508: mol_type = other DNA
caaacaaacattgtctgctggctaggccggcaaatttcttgagctcaggccagccactcaggagcgaggctgcagtgagctatgaccgcacctgtagactaggccaggatctttcctggttaaatagatatgatgtgtttcttagggtaacataaaataccgttttactcccaaagactttagcttgtgtttcctaaaaacaaggtcatttaatgtctcaacaaatctctgagaaacgatagtgcaatctctggctgtgtagacagaacagggagttggaacacggccttatagagatccggggaggagttgcacttgcccccggcggaaatcgtaccgctttgggctccggtgggaccaagcgaaattccgagaccgaaacggatgcgcgctgcggcccagggtgcgggtctggaccgcctcctccgtggtggacgaatccgaggagcaggactcccagccccgccgcgtccccagctgtcacgctgcgcgcagcgggtggggcctg

SEQ ID NO: 25571 - DNA, 611 bp, Homo sapiens
  source 1..611: mol_type = other DNA
tatgtaaaaatattattgtaaaaaattaaattaaatcaaaaacctcacagtactttgggaggctgaggcgaggccctctctattatgtaaaaacaataatattttttaagtaaataaagaaacctggccaaaggaatcttcctgtgtctgggtccccctgactggaggttcgcctgggaggcggcgcaggcgctgcctgcggtttgactgccatccgggctgctgcaggcactgggacagacacgggcgactgtcccccagcgtgtgagtcaaacccaggcctccaggaggtgtttgtcgcgacaacacctgcagagggattcacactacgacactcggggggtgggtcccctccgagttctcgtccgcgggtgcctccacccagacctgaggggtgtcgggaagacccccgcctaccgagtcagggcgggattaagacctccggcgctggaaacgcgtagggcggggcccagacctggatccagctagcccgcatgcgcaatgtccgcttcggctctaggaccgcgcgggcgacagcagggccgcggtgcagtgtccgacccgagagttgcggcctgagtcaccggccccgccctccggagccggacgct

SEQ ID NO: 25572 - DNA, 266 bp, Homo sapiens
  source 1..266: mol_type = other DNA
ggcacagtggcacgcgcctatggtcccagctattctttaaaaattattgatacttttattaagtatgataatgatattctgattattatgtgtttttctaagagaagttgttgataatcaaacagggtacaccttgttaactgtacttttgtgcatcttgaaaattttcataataaatgaaaaaagtttcttaatgtacactaatctcttccgcccggccagcaatagctgtagctacttccagagctcctgggggagggagagag

SEQ ID NO: 25573 - DNA, 327 bp, Homo sapiens
  source 1..327: mol_type = other DNA
gatttgcatgccactccaattaaaaagaaatgcttttatataaaaactcgttttaaaattattcacggtccgaccgacccgttcgcgccacgtggacccaggggccgtactgacccgcggccactcggtgcgctgcgcttgcgcactcggagagcgaggaagcactcccagaagtctccgcgacgcggcccgcctcggtcaccgcggccaggcccaggctggtactgaacagcaattctgtgacgatggagctcttgaggtaagtagtcctttagcgtcagatgacttcaagcttgctggattggcagcggcctgacgttacgtcgt

SEQ ID NO: 25574 - DNA, 340 bp, Homo sapiens
  source 1..340: mol_type = other DNA
tctagggctttgcttaacagccctatttaagtaccccaaagatggggacactctcgtttaattaaaaaaaaaagtcacggtgatttgcatgccactccaattaaaaagaaatgcttttatataaaaactcgttttaaaattattcacggtccgaccgacccgttcgcgccacgtggacccaggggccgtactgacccgcggccactcggtgcgctgcgcttgcgcactcggagagcgaggaagcactcccagaagtctccgcgacgcggcccgcctcggtcaccgcggccaggcccaggctggtactgaacagcaattctgtgacgatggagctcttgag

SEQ ID NO: 25575 - DNA, 270 bp, Homo sapiens
  source 1..270: mol_type = other DNA
gctcccgcctgcgcgcacagattcgaggctccggacacgccccggccccgcccaggactccggtcgcgtccgggtccttgcggagctaactagctcgccacgacgtcaagaacgacgtaacgtcaggccgctgccaatccagcaagcttgaagtcatctgacgctaaaggactacttacctcaagagctccatcgtcacagaattgctgttcagtaccagcctgggcctggccgcggtgaccgaggcgggccgcgtcgcggagacttctg

SEQ ID NO: 25576 - DNA, 424 bp, Homo sapiens
  source 1..424: mol_type = other DNA
gtcattgacatagttttaaattacaaaaagttaaataaagtaattgggtaccaagttaatatctataaataaatagccttctaatttacaaatatcagttagaatacatagttgaagaaaactaatatttacaatagaaacttaaaggttcagaactattaggaaagaactttaaaatactgtgacattaagaagtgtgcgcaaacttaagtgaatgtattaatttactgtcccagatctcgccactgcactccagcctggacaataatagtaataatgtgatcctaataaaagtatggacaggcttttctcttttctacacacattttaaatataaagcctcaggccgggcttggtggctcacatctcccgtagtcctagctgcttggggctgaggtgggaggatcacttgagcctaggaggt

SEQ ID NO: 25577 - DNA, 375 bp, Homo sapiens
  source 1..375: mol_type = other DNA
caagctggggtgcaatggcgcaggcgcgcgcgaccacgcccggctaattttttgtatttttagtagaacaatacattcactgtgtgcccacacctactggtaggtgtttagtacacatattaggcatctgctcggctgagcctggcgcgcgcgcctgcagtcccagctactctggaggctcgggtgggagggtcgcttgcccgggaggtcgcggctgcagtgagctctaatcacgccactgcactccagcctagcccgagctcgcctcagccccacgcagcgcggagggccttcccgccccgagcgcacccggggctccggcccccgcgcatgcgcactccgcgcagcccgttggggctggaaccagtccctccc

SEQ ID NO: 25578 - DNA, 534 bp, Homo sapiens
  source 1..534: mol_type = other DNA
ccaccactgcactccaaagcttatgcattcatcggttgactaaaatgtgcttacaggaaactaaccctgccctagaagcagtggaatggtattcagaccataactactgtgaatagtgagctatgttccaataaaacttttatttatggacactgaaatttgacatgtatgattttcatatttcacaaaatattgttctccttttcattgtttttaccatttaaaaatacagaaatggaaaatataggaaccccgaatctccggaggagcgcgccagggacagactcgcagcgccgtcctcgctcacagggctccctagttggcactatagagaggcggtcgcgggcgcccctctttaacgcctccaggccctgccgcgccgtccccaggcgctaagggactcgaagcgcagcctcgctgggacggacctagctccggctccgggttcacgcagagcaggggctgcaccagcgagcggacccttgagactggccgcgcctgcgcactccgtgagcgcgcccggccctcccagca

SEQ ID NO: 25579 - DNA, 192 bp, Homo sapiens
  source 1..192: mol_type = other DNA
tatccttattattaaactatgcatgactgtgtatacaatacctttatttgcagaaggagaaagtgaaactcctcttacttcctttgcgcctgcgcactctgggcgcacagtatgggggccaaggcccgagcctgaggcgggactccatgaggcctctggggcgtcgggaaccatcttgtccggccttgatac

SEQ ID NO: 25580 - DNA, 305 bp, Homo sapiens
  source 1..305: mol_type = other DNA
cgcgccactgcactccagcctgggcaccattgagcactgagtgaacaagactccgtctgcaatcccggcacctcgggaggccgaggctggcggaccactcgcggttaggagctggagaccagcccgacagcgaaaccctgtgtttggtgcgtggcggcgcgcgcctgcaatcgcaggcactcggcaggctgagtatccttattattaaactatgcatgactgtgtatacaatacctttatttgcagaaggagaaagtgaaactcctcttacttcctttgcgcctgcgcactctgggcgcacagta

SEQ ID NO: 25581 - DNA, 392 bp, Homo sapiens
  source 1..392: mol_type = other DNA
ccaatctcctgtgatatcaagggaagattattattataggacacttactatatttaacttctcctagttaatctaagtaaaatattagtcctctaaattttttagagctctgacctataaataccatcagaataatttcctgtatttttttccatcagacttatgagaaaagttgtgacttcactcaggagcaaggtcacaagtgacacctagtttctctgtgtaacctaaattctgaaaataaggtcccttctgtttctcatttttgtgattctcttgcctcctgagtagctgggactacaggcatgtacaaatactgtttttccatttgctcacatgtaggtcaaagccaaagaatcatcattactttgttctttcacaggagctgcaaa

SEQ ID NO: 25582 - DNA, 312 bp, Homo sapiens
  source 1..312: mol_type = other DNA
gcctgaacagacttaatactcagagtctccgagccgacccgctcagaggccagcacctgggtcgcgtgcagctctcccccgagccgcgggagtcgcgaggggaggggccgagggcgcggcgccttctgggaaatgtagttcagcgccacgcccgcgatgagtctgagagtcttaaagtcagcacagcgtgtttaagctgatgttacaacccctgccccggccagggagacagtcccacaagcttccgtccggttctgagtcggggcctggcccagcccaggagacctctgggagcgctgcccgcggaaggag

SEQ ID NO: 25583 - DNA, 287 bp, Homo sapiens
  source 1..287: mol_type = other DNA
gcctgaacagacttaatactcagagtctccgagccgacccgctcagaggccagcacctgggtcgcgtgcagctctcccccgagccgcgggagtcgcgaggggaggggccgagggcgcggcgccttctgggaaatgtagttcagcgccacgcccgcgatgagtctgagagtcttaaagtcagcacagcgtgtttaagctgatgttacaacccctgccccggccagggagacagtcccacaagcttccgtccggttctgagtcggggcctggcccagcccaggagacct

SEQ ID NO: 25584 - DNA, 190 bp, Homo sapiens
  source 1..190: mol_type = other DNA
ttgcagtgagccgagatcgcgccactgcacaccagcccggaaggcaccttaaacatggcttttagatttcccctcccccgccatgggagggctatcagctgctctcacatatgactatgtgtgacatttggtcaaagacacacaagcctgaacagacttaatactcagagtctccgagccgacccgctca

SEQ ID NO: 25585 - DNA, 288 bp, Homo sapiens
  source 1..288: mol_type = other DNA
gcagtttatctatctatctattatctatcatttatctatcttctatatatcatctatgtaatctatctatatcacaacagtgctgtcacacgatcacgtcaccgtagaccagggtctacagaggcctcaggctcccggctccacgtggaccgacctcgcccggcagcgcggggccacctcaccgcgagctcctcccgcagcccggcccgggttcatccgcggccctgaggcctgtgggaaagctcaagcggagcccgctggccgcaggggccgcaccacgccccagac

SEQ ID NO: 25586 - DNA, 489 bp, Homo sapiens
  source 1..489: mol_type = other DNA
tggaaggccagccaccttccagctgtccccaatgtacattttacatgtatttgattggtgtcaccctgggcacaggttctcaagatctcctgagggctgggccaccggccattggtcactcatatttagctcagaataagtctcttcaaatactttagagtctgagtcttttgggtcaccctcaggtttacgaccacgggtcacatcctgaggccccgcctaaaggctgtacccgcttcaggccggtccgggtttcctcctcggctgagcagccgggtccgcgagcccggtgaggcaggggccacctagaattccgcggccccccacctccagccgcctcttccgcgcctaggggacgcgcagcggcagcctctgctgatggcaagggtctgcgcacccggaaactccagggtctggggcgtggtgcggcccctgcggccagcgggctccgcttgagctttcccacaggcctcagggccgcggatgaac

SEQ ID NO: 25587 - DNA, 182 bp, Homo sapiens
  source 1..182: mol_type = other DNA
cccacagagcttccaaaagggatcttttggctaggcagggcatgcatgctcccagctacacacagccttgtccatgtgaaacacaaggctgtgctttttcagttggaaacttcattctggatctcaaatatccaactttcgttatgcattacgtattcctgagcccagcgccggcccccact

SEQ ID NO: 25588 - DNA, 282 bp, Homo sapiens
  source 1..282: mol_type = other DNA
atgtgaaacacaaggctgtgctttttcagttggaaacttcattctggatctcaaatatccaactttcgttatgcattacgtattcctgagcccagcgccggcccccactcagtcccgcgggcccaatcggggacagtcagggctgtcccgggctgtgcacctgctgtgcacacacaccccctgctgtgcacaccggccgtgggtgcaaacggaggggagcgccggcagctagcaccgcgcggcgactaacgggccgccccggagactcctgggagctcaggc

SEQ ID NO: 25589 - DNA, 371 bp, Homo sapiens
  source 1..371: mol_type = other DNA
aatgctaaattgctacttagttacagtttgttcctcaatcattcaaatatttagggcaggttgggcgcaggaggccacccctattcagcgcgcgcccgcgcgcgcgaacacacagcgcccgctccgcgcggggacccgccgccagcgatggcgcttccgcgggatcagaacgggcaaaatcccccttcgcggagctcgctccgggtcaccctcaaggtcacgcccatggaccacgcccgaggcccggctcgataccgcggcccggttccgcgtccttagacagctctcccggaacggagctcccagctcacccccggcccagggtgagtcgtctgcgcctgcgcactcgcgcgtgggcctgagctcccagg

SEQ ID NO: 25590 - DNA, 481 bp, Homo sapiens
  source 1..481: mol_type = other DNA
gtcccagctactcgggaggctagattgcgccactgcactccagcctgaaaaaaaaagttgagtgaaatatatgacgtacagttttttgttgcccgggcaacaaagactctgtctctaaataaataaataaatggagtcaaatatatgacatacagttttgtttgtccaggctggagtgcaatggcgcaagcgattctcctgcctcagtcccgagtagctgggggtctcggtgatccgcccgccttggcgtgagccaccgcgcccggccaaaaaaaaaatttttttttaaatcgtttcacagcccgccgaaaattatcttcagccacagcccgcggaggccgccttgaggggttcggggcagccactgtgcctattccgaaatccgtcctcagcggaacccgaagtccagaatcgtcactccagcctcgggtgaaactgcgcaagtgcatcccggagcccggcggaacacgcatttcccaga

SEQ ID NO: 25591 - DNA, 191 bp, Homo sapiens
  source 1..191: mol_type = other DNA
cagggcatccacccgcttcgggctcccaaaatgctgggattacagggggcaccgatgtgctttttctttcacgtaaataaatgagatttacacaaagattcggattccgaggctcctaccggaagtagctgtggacagcagtgtcctctgggaaatgcgtgttccgccgggctccgggatgcacttgcgca

SEQ ID NO: 25592 - DNA, 294 bp, Homo sapiens
  source 1..294: mol_type = other DNA
catactaagtcacacagtgtgccacaaccaaatacttttaaaattaggcatattcatagaactgactcgcatctaatttaaattaaaacttaagaacacacacacggagcgcctgttgtgtgccaggccgtgctccaggagccaggggggggagctcaccccccgcctcgggcaaccggttccctccgcgcgggtcggttgccggccgggcgtctgcgcatgcgcactcccacgcggacgatgcctcccaggtgtctccgcggcgcgttcctgacgccacaggcgcccgggcgg

SEQ ID NO: 25593 - DNA, 298 bp, Homo sapiens
  source 1..298: mol_type = other DNA
aaaagcctcgttccgaaaacaggtctgtcctttttctctggggacaggtgtgccctgagaagacaacgcgggccatgcttcattgcaagatgactctgcttaacataggcatggcagcactgtcatgatggaaggtctcaaaccctacagtgtcaccacaggcccgagctacggccctgcacaccctgtctgcgtcccgggagctcggggcttcctcaccgtgagcgccgccctcatccccgcccgggcgcctgtggcgtcaggaacgcgccgcggagacacctgggaggcatcgtcc

SEQ ID NO: 25594 - DNA, 387 bp, Homo sapiens
  source 1..387: mol_type = other DNA
tttgtataaaaaaaatctttcttgctttaaaagccatgttggatttgcattctagaccgtaataaatataactactttaacataaaaatctatttatgttgtttatcagatattacgtcggccacgatccgctccaggaccaggcttggagccaagaatcctttttctaccgttcggggctacttccgccgagaaccggaagcacgttttcctgtgtcttaccccagataacagagctgccagggataatcaggcctgaccactctagcgggcgagccggccccatagcgagccgctcggcatgagggcgggaagcccgcagtcgggctctggactacatttcccagaggatcccgcaggccgacgccacgtctcgcgagattttgg

SEQ ID NO: 25595 - DNA, 263 bp, Homo sapiens
  source 1..263: mol_type = other DNA
gcatgactgggagtgccgagctgcccgccggggcacagttagtctggtcactgcggccagactgccgcctcaggacccagaggggcccatctatccccggcgaggcttggactacgtttcccaggagaccctgtctcccgaggaggggcggaagcccgggagccgccctctgaggctggaagactattgcaatagtcaacttccaatacaacagcagctggagatttatcctgactaaagcttggtccagaagcctctaggcc

SEQ ID NO: 25596 - DNA, 349 bp, Homo sapiens
  source 1..349: mol_type = other DNA
ttttatatttgttttcaaatgagtcctcacattgattttaaaaatttaacaagagtatagtgaaaaggaagttccccttttcataactgattttgtactctagttcagaagaaatgtctgaatgttaaatgtttacataaaaaatgctattttattatatcagtaatcttgttatcaaatgaggcatgactgggagtgccgagctgcccgccggggcacagttagtctggtcactgcggccagactgccgcctcaggacccagaggggcccatctatccccggcgaggcttggactacgtttcccaggagaccctgtctcccgaggaggggcggaagcccgggagccgc

SEQ ID NO: 25597 - DNA, 278 bp, Homo sapiens
  source 1..278: mol_type = other DNA
aaacaaataagtgtttttcaagccgttcgctactcgggacactctgggccttagaggatccgtgtccgccgccccctgctgcggggactcggcagcgtcaccgtctgtgacagacgcctaaagcgcacatccctccgcgccagcgacgtttccccgggaggctcatctccattgcgcagcgctacggcgacccgcaactccgaggctcggctggatgttgggtgggcccaggcgaggagctgacaggatcggcgtgggtcccgctctggagagggcct

SEQ ID NO: 25598 - DNA, 191 bp, Homo sapiens
  source 1..191: mol_type = other DNA
caaatgtccttagacataattattatcatggcaatagctaaaacaaataagtgtttttcaagccgttcgctactcgggacactctgggccttagaggatccgtgtccgccgccccctgctgcggggactcggcagcgtcaccgtctgtgacagacgcctaaagcgcacatccctccgcgccagcgacgttt

SEQ ID NO: 25599 - DNA, 311 bp, Homo sapiens
  source 1..311: mol_type = other DNA
acaacctcctggggtgggggggacagagtcttgccctgtcgccaggctggagtgcagtggtgcgatctcggctcactgcacatgttggccaggatggtctcgataggccgctccgcccgcaggggcccaaggcgccagctcccgatgggaacttgcagacctgagccagttctcctggggaccaaggccctctccagagcgggacccacgccgatcctgtcagctcctcgcctgggcccacccaacatccagccgagcctcggagttgcgggtcgccgtagcgctgcgcaatggagatgagcctcccgggg

SEQ ID NO: 25600 - DNA, 545 bp, Homo sapiens
  source 1..545: mol_type = other DNA
ttagtaacacaaaagtgcttttattttagtagcacttttagtaacacaaaagtgctactaaaattggtttattttagtggcactctaaagtatttctcgaacaaaataatgagttgcagcccctccaggccagcctgtggcccggcccgaggactggggcatgaattcccagcccaaaccaggtcagtgaagccccaggtccgggccgactgtggcgtggccgggagtcgccctctcctgatccaccccagagcgcggctccctgtggagggtaccctgggtggtccgctcccacttgtgagaggcctttgggcacacacacaaaccccactccctgatggggcgagggcggctgcagccggctctggaagccctggcggcgggcccggccgccccttcccgggtttgcccagttcctgggagggtgctcgggtgcagctgggcagtctggcctcggcttcactggagtgagcgccagtgaccgtggtgcggtccaggccccgggtggcgcacccacctctggactacatttcccagggggcccc

SEQ ID NO: 25601 - DNA, 600 bp, Homo sapiens
  source 1..600: mol_type = other DNA
ctggttttgaaataatctttctaaaaacaaagaaaaaactacgttaattttggattcttcccgataacacatatatttgatccaatagaaaaatgatgtctaaattacttgtcagataaattgattatcttttccagattattacattactatttaaggaagaaataacttggccatagtatagagatctgtgtaaaatcgtcttactctgttagacgattctacacagttataaacaagggcctgggagggcacacacagggtcctctgcaaatccgaggttccggcgggtccccgcaccggccccagctcctcccccgcacctgcctggccggcgggtcccaccctctctcctgccaggggtagaccctgggaccactcagctcgctctcgcaggccctgagcgtctgacgcctgcgcactgagcgcgggcgggcgggcactcccagaaacctccggggcgctgcaggcgggacaagcaggttccacaggccgagcccacgagcccctcgaggggtgagcggcccgggcctcctggcgttctggccggctagccaagcgctcccagaggcacggcgtccggagcgctggacctcccgg

SEQ ID NO: 25602 - DNA, 436 bp, Homo sapiens
  source 1..436: mol_type = other DNA
cgggatcctccatatgctgaacgcgggtgtggaggggcaacccaccccttcaatgggttttttggccaggctggcccacctcggcctcccaaagtgctgggatgacaggtgtgagcatgtcgcatgcagctgcaagatggtggatcatataccatagggaatttgccgcaaacatgtaagtacataaaagtacatttaaggtgttacatggtagattagcatcgcccggcggagacccaagcctgcgccttgaagctccttctccaccggtagaagtcgactcaaggaggtcgtgaggacaggactcctgggggtcccgctctggggcacccgtagcccggactcccgctgtagccaccgccgtgactgcagcaagtgcacaaccccgaggccgccgcgccgccaccgttgagcagagcgctggacggacaagcca

SEQ ID NO: 25603 - DNA, 197 bp, Homo sapiens
  source 1..197: mol_type = other DNA
tggtatctcccaggagaggattgtattaatactattggactgactgtattcagaaaggtaacttagcttttctaaatataatagtgcgcggccatgttctctgccggacagcgccacattacggaacctgtgcgctgtgtctgcgccctgttgactgttcgaggaaactggcttccaagtttattcagagtccaata

SEQ ID NO: 25604 - DNA, 365 bp, Homo sapiens
  source 1..365: mol_type = other DNA
gcgattgttattaattatattttaacttcaaggtaaataaaaacagtcttctttaggtgcttttagtaacacgttggccatactaaagactattagtgttgttattattgctgcctactaggtaatgggtgattcaaatctctattcaccttagaaggggacgtccctcctctggtggtatctcccaggagaggattgtattaatactattggactgactgtattcagaaaggtaacttagcttttctaaatataatagtgcgcggccatgttctctgccggacagcgccacattacggaacctgtgcgctgtgtctgcgccctgttgactgttcgaggaaactggcttccaagtttattcagag

SEQ ID NO: 25605 - DNA, 388 bp, Homo sapiens
  source 1..388: mol_type = other DNA
cctacatttgttctgaatgtgggaagctttcgcacaaccctacaagtgtggcatctgtgggaaacccccctgagggttgggtctgattgtacactgtgcatgcagcagaaaaatatgtatattattgtaaatagaacacaagggcctctgagctgaatgaggcgagggacccttcctacattgcattattcatactgacaaggaaccgagtcaatttggtgaataggaaaagccttctcatgaaaactacaatagaatactgttaccaaattcttcataagaaagatcatattatgggaatgataatcctataatatatatgattgttccagaacacactgtctaatccaattccccattgagtatttctctgtgtattcagacacag

SEQ ID NO: 25606 - DNA, 241 bp, Homo sapiens
  source 1..241: mol_type = other DNA
cctagtggtttcacccaggagtgaactcagatcccagtccacaatcccagctactcggttcagaggttgcagtgagccgagatggcgccactgcactccagcctgcagatcctatcttcaggaacttggtcacactggttacagtcttgcattgaggcggactcctccattatattctctgcccgtgagcgccgattaaaattggcttccaagttaatttagagcatgcgcaatatcaaca

SEQ ID NO: 25607 - DNA, 374 bp, Homo sapiens
  source 1..374: mol_type = other DNA
ccagctagagatctcgccactgcagtccagcctgggtgacagctcacaaaaatttaactaaaatgcttaaaaattttttaattttaaaaaatattctatatcctgattttaccgaacagttcacttaaaatgagtgcattttattgtatctaaattattcttcagtaaagttgatttttaaaaaacatgcacacaaatataatttacaaactataacattagctcgtttatggtgtaccattcagtcacttttagtgtattcagagttgtgcaaacatcattatctaattcaagaagctttgcaccgtagatttgactattttaaatatttcctataaatgcagtcatacagtattagtcagtcaacatctggc

SEQ ID NO: 25608 - DNA, 332 bp, Homo sapiens
  source 1..332: mol_type = other DNA
caacaattgtccttgatgccctagaagccaggccctcacttctgtaaatgctggggactgtggatacagaatttaaagggtcaccaaaaaaactcagtaatcaagataaacaatattttaatgtaatatctttaaaaataaaatcaatgcaaaaagattctaggggacaaagggccggtgtcgcctccaaactggtccctgagccgcgtctgtcccgacctggcacctgctcagggaagggcgcagtgagctcagctcacccgcaccttgaaggtcagcgcacactggccttcgcggtcagcgtgtggtgggcaaagccgacttctccgcct

SEQ ID NO: 25609 - DNA, 314 bp, Homo sapiens
  source 1..314: mol_type = other DNA
tccaactgtgaacccatagattgagattttcatatgaaatcttccaacatttaattgatataaacacaagttttaaagcagtatatgggtcaaattaaacccctctatggacgtgctagatttccagcaccgaacttccatgccaaggacggtttcctccaaagtacagctttctaggtagcagaggttcgtttgaaactttgttgcttgtctaataataataaatcatttttggttatttaaaaatatttgactgctaaagtcagaaaatagaaatgaatataatgtattatcttagagttaaggcaacaccg

SEQ ID NO: 25610 - DNA, 367 bp, Homo sapiens
  source 1..367: mol_type = other DNA
ggaaggaaaaagtgtggccttttgtatgtttaataatattaaaatgttaaatatattattttgaccaattgagaaataataataataataaaataccccagcacttgggtgcctgtaatcccagctcctcaggaggctgaggcaagagaatcgcttagaccccgcccatggcaggagatggcgaaacggtcacatgtgggacgtgatttgcgcgcagcctggcctctccggtacctgcccccgtggcgcaggcgcgcagtggagggggccgcacggccgtggcgcaaagctggggctcgtggttcgcggggtccatgcagatctcgcagagctcagagtcctgcatgcctcagtcctcgcctcgctc

SEQ ID NO: 25611 - DNA, 232 bp, Homo sapiens
  source 1..232: mol_type = other DNA
ccaccccactccactccccaaatggggtggagtagggaaggaaaaataaaattaaaaataaataaatattaaagtgttggggatatcgatgtttcatataaaacaccttcccagctactcgggagaatcgcgccattgccctccagcagcgaatgtctggcaaatgacagtcaggcgtcctcctccaaagattggggcaccaggaccgcgggcccccactccgctcagagct

SEQ ID NO: 25612 - DNA, 339 bp, Homo sapiens
  source 1..339: mol_type = other DNA
ctccagcctgggcaaagtgagtttagaagtcaggcggtctggccacactacttttgtctctctcgccctggaaacccttaaggctccctccagccgactgtaagaaggagaacgattcgattcttcagagctgggctcgcgggaggccgctcgtgcaaaacctaggctgagctcccctgcgcggagctgtgagccctggaacaccgtggtctgcttctcaggacgcgcaaacagtgaagccagtcccgcccgggtgagccgcgggggcctctgggaagcgtcgcccctggtgtaacggaccgagacttgtggcgctctcagccaccgacagcgccggcc

SEQ ID NO: 25613 - DNA, 192 bp, Homo sapiens
  source 1..192: mol_type = other DNA
ggctcatgcctgtgagctcaggagttcgaggggagttcgaggctgcagtgagccaacatcgcgccgctgcactctccagcctgggcaacaaagtgagggtttagaagtcaggcggtctggccacactacttttgtctctctcgccctggaaacccttaaggctccctccagccgactgtaagaaggagaacg

SEQ ID NO: 25614 - DNA, 383 bp, Homo sapiens
  source 1..383: mol_type = other DNA
atcgcgccattgccctccagcagcgaatgtctggcaaatgacagtcaggcgtcctcctccaaagattggggcaccaggaccgcgggcccccactccgctcagagcttgccaaagtggcagagccggcgcgggctgggacagaggcggcactgaggccggcgctgtcggtggctgagagcgccacaagtctcggtccgttacaccaggggcgacgcttcccagaggcccccgcggctcacccgggcgggactggcttcactgtttgcgcgtcctgagaagcagaccacggtgttccagggctcacagctccgcgcaggggagctcagcctaggttttgcacgagcggcctcccgcgagcccagctctgaagaatcgaatcgttc

SEQ ID NO: 25615 - DNA, 286 bp, Homo sapiens
  source 1..286: mol_type = other DNA
cctcactttgttgcccaggctggagagtgcagcggcgcgatgttggctcactgcagcctcgaactcccctcgaactcctgagctcacaggcatgagcccggggccggtcttaatacctttaataaagagataataggccgctgtgatcccagtggcgcgatctcgcagccctgagtagctgggacttaaggcgccacctgtgtagtgcgcttgcgcagtttacgcacaattctaggaactccccgccctggttgctaagggaggcgcgcagagcgcttgtgcctgc

SEQ ID NO: 25616 - DNA, 204 bp, Homo sapiens
  source 1..204: mol_type = other DNA
ccatttattatatttaatctcagcagtgacatctatctcacagtccaaccctggtacaatgtgggagtggaattaggatttttttaaaaagccattttcataagacaaggcaatcttttctagagaaggcctgtagtgaagaaaacttggaagtggtgactgagccctcattgatccagagctaatctgctcacctatgcactg

SEQ ID NO: 25617 - DNA, 237 bp, Homo sapiens
  source 1..237: mol_type = other DNA
gaaaacttggaagtggtgactgagccctcattgatccagagctaatctgctcacctatgcactgctgtctccctaagagcgagtaggggagctcctaggagcgcggccatcttaccaggctgccggagacaaagaaagctcagctttgatgtctgggcgccaccatgttggagatagcaaagggcgtcgccatcactggaaggttgccgggtggcggctgacagcctcaaagtcgca

SEQ ID NO: 25618 - DNA, 297 bp, Homo sapiens
  source 1..297: mol_type = other DNA
ctgtctccctaagagcgagtaggggagctcctaggagcgcggccatcttaccaggctgccggagacaaagaaagctcagctttgatgtctgggcgccaccatgttggagatagcaaagggcgtcgccatcactggaaggttgccgggtggcggctgacagcctcaaagtcgcaattgagtctgcgcaccggccattcaggatgggacgaccttataccgcggtgaggcggcgtggcaggacgctgccgactacggtggccgactgggtcagctatgggtgcccgtgagggtcaatga

SEQ ID NO: 25619 - DNA, 319 bp, Homo sapiens
  source 1..319: mol_type = other DNA
tcctctggcaggaatccctggaggaggcttggactccggcacacagaaggccttttctggacagcaatgctgagaagccgaaggccctggtcttggagaccaggacagggccctgggaggcccaggtcgaaagggggccgggcgagggaatgtcctgctcacaccctccactggggtcaggactgtcagggtcctgcgctgctggtctcacgcagccttcttccccgggccgcaggggccctgagagccctgacgttgcggcagcgccagccgggcacgcgaatgcgcatgcgccaggcgcgcgtcaccaggcgcgacg

SEQ ID NO: 25620 - DNA, 326 bp, Homo sapiens
  source 1..326: mol_type = other DNA
tagccatatgtagctagtggctactatattggagacagatataaaaaatggaactcagttttgcagaaattcctattaaaaagcattgttccaaagcgtcagaatcattcactacatttatataatttcatgggaatctattttaaattcatgaccatgcaaagaaaaatcaatttcttacaggttataagatactcagtcgcaggctgaatctgattaaacagccgttgagcagcaacccggtatcgtggccactgcgtcacggaccatttctgttctggagcgccggacccgatcttagctgctgggcctgcgcagacaggccc

SEQ ID NO: 25621 - DNA, 274 bp, Homo sapiens
  source 1..274: mol_type = other DNA
caagactttcagaagtgcgatattcttttcctctgggtgcctctcttggaaagggattagtggtcttcttctgcggcccgggccaagcgctaggagcattaacaggcggcaggtgagcccaccccgcggccgcacaagccggcaggggctccaggcaccgtcccgttcctgtcagcaccgagccccagcaagaactactttttcgatgaagtgaggccgcccactcacctggccggcgcaggtgtacgacgttgcgcagcgacgcgggggcctg

SEQ ID NO: 25622 - DNA, 528 bp, Homo sapiens
  source 1..528: mol_type = other DNA
aatgtcaacatcctggttgtcatattatactacagtcctgcaagatgttaagataacacacaatgtctctattatttcttacaacctcatatgaatctacaatcatctcaaatttaaaaaaaaatttaaggaagttttaagaatttcattttcaaatatttgctagatgaattaagtttttaccccttcaaatcttgaagaatgctccaggttgtactgttcaataggaagactattagccatatatagctgtttacatttagatttattaaaattgaacacaatttaaaaaattcgttctcaatagccatatgtagctagtggctactatattggagacagatataaaaaatggaactcagttttgcagaaattcctattaaaaagcattgttccaaagcgtcagaatcattcactacatttatataatttcatgggaatctattttaaattcatgaccatgcaaagaaaaatcaatttcttacaggttataagatactcagtcgcaggctgaatctgattaaacag

SEQ ID NO: 25623 - DNA, 416 bp, Homo sapiens
  source 1..416: mol_type = other DNA
acgctggatgaggcagagccacagtcaacgcagcagccccgtgcacggcagcggccaggcactcggtccaggtacgcgggggcgcggcggccggcagcacgcgccgcgccttggtccaggctcgcgatactggtgcggccgaagggccccagcgttcgccccccgcgcgcttgcgcactcgaggcgtcgctgggggcggggcggggctcgcagcctccgcctgtctccgagccaaatgaaaaataaaaaggcggaatattgtttttttaaattttggaccgcctgaggcgagggacactgcggcccctctggctccgtctccccggcccgactatccccgccgagacccggccccacgcgcccctcccggcccggagcagctgcgggacttgcctccgcccccccgcgcgctagcg

SEQ ID NO: 25624 - DNA, 426 bp, Homo sapiens
  source 1..426: mol_type = other DNA
acgctggatgaggcagagccacagtcaacgcagcagccccgtgcacggcagcggccaggcactcggtccaggtacgcgggggcgcggcggccggcagcacgcgccgcgccttggtccaggctcgcgatactggtgcggccgaagggccccagcgttcgccccccgcgcgcttgcgcactcgaggcgtcgctgggggcggggcggggctcgcagcctccgcctgtctccgagccaaatgaaaaataaaaaggcggaatattgtttttttaaattttggaccgcctgaggcgagggacactgcggcccctctggctccgtctccccggcccgactatccccgccgagacccggccccacgcgcccctcccggcccggagcagctgcgggacttgcctccgcccccccgcgcgctagcgcattcgcgac

SEQ ID NO: 25625 - DNA, 489 bp, Homo sapiens
  source 1..489: mol_type = other DNA
aaattttaggacaactgtacagtccaattgagaatggaagagagattctactccgatgtttgaaccactgaaaaaataatcgatgaacatttaacatatctgttggaacatttctaaaaaatagcaacaactcatgtaagaaatgtacttggttttaaagagaaaataattgacgtaattagtacatatactccacatattcacttaaccaaaacttgagatatctggaagagaagaaagttttaaatattttaaatgaagtattacaatgaacatttttattactaaaggtatttttagctacgaaaatgaggctgatctttcaactaaagatcaaagaaacttactatccaagaatgcttggagacattgaatttatccaatcaaatctcatttgttagaatattccaagaccaggtatggaagaaatacaattccatcatttggaagtaatagcaacctacgctggatgaggcagagccacagtca

SEQ ID NO: 25626 - DNA, 440 bp, Homo sapiens
  source 1..440: mol_type = other DNA
tggctctgggactaagcccctcgggcagccctgagcctcccagggctgagcacctcgctttgagcagctccgctaccgcgtcctccagtcgggaggcggctgcgttcctgcgcgaagcacgtcggccgcgaaggcctctggccgggctaccagcccacaaacgcggcggaaccggttgcggggaggttgcttgaattctctcagctgcgccccctgaagctgcgccttatcttcccttcttcgactgtaaaatggtgaaaataattactcgaaaatttggaaaaggctaaataattgatctgataaatactataaaacaggatttctgtgtaaaagataaatttattattgtatagaataccaaatcagtgtgacttttaaatacaagaagaaatattttaaaggaacttattttgtttctgttgtttagggaacacaac

SEQ ID NO: 25627 - DNA, 541 bp, Homo sapiens
  source 1..541: mol_type = other DNA
atggctgaaggactgctctgtgtcctcacagatgactgaggtcatgctgggagttccctctgcagggaatggcctgattgacatgcagttccacaaatgcacgtttgtctcattaattaaagtattaataagacagagtctcactctgtcgccccggcgagtgcagtggtgcgatctcggctcaccacaacagcgattctcctgcctcagcctcccgagtagctgggactacaggcgcatgcccagcctgagctcgggcaatccgcctgcctctttaaattcacaaaaagattgaatatgaagaaaataaaagcctgtgtatttaaatataataaaatggcagctttaaatctatcagtggctatattaaatgtaaataaattaaatactccagttaaaatggctctgggactaagcccctcgggcagccctgagcctcccagggctgagcacctcgctttgagcagctccgctaccgcgtcctccagtcgggaggcggctgcgttcctgcgcgaagcacgtcggccgcgaaggcctctgg

SEQ ID NO: 25628 - DNA, 513 bp, Homo sapiens
  source 1..513: mol_type = other DNA
tttcaaaaaataataataagtaaatagatttttaaaaaataaataaaaaataaaaattaccaaataccacataagtggtatttgtggaatctaaaaaagtctaactcttaagtataaactttgttaatcgatgaatagcaactacataaataatgtgttgcatgtttcaaaattgctaaaagtagattttaaatgttttcaccacaaaaaagtgaggtgatggatttaattagcttgatttaatcatttcgcattgtaaacatagatcaaaacagcatattgtaccctatcagtatataaaacatacaattattatttgtccatttttaaaaagttacttttctcataccttataacagagtccccgccctcgggagcccgaggcttcgggcagcttctggggtcactgaaaccctcagaactccgaggacaagtcggacacgccttcgcctcaccgggagccagcgtccggcggtgcctgtcatggagctttaggcttaaactacatttccc

SEQ ID NO: 25629 - DNA, 439 bp, Homo sapiens
  source 1..439: mol_type = other DNA
caaatcatgtctataaaggacttatgtgctgaatatacaagcacatgaaaatggctcaatataattatcattagggtaatgctaatcaaaaccacaagttttcacaccaactaggatggctagagccaaaatgatgggcaatattgtaaaatggtgtagccattttggaaaacaatttggcagttactcaaaaaaatatatacatagagttaggtatatactcaaatactaatatatgttcacataattacttgtgcatacatgttctgtccatcaactgataattggctaatggtatattactctgtcatagaaaggaatgaagtactgataatcccatttatatgaaatgttcagagtaagcagtttattttggagatgataaaaattttctaagctaattacacacttttaaagggtaaatttcattcattgacgt

SEQ ID NO: 25630 - DNA, 600 bp, Homo sapiens
  source 1..600: mol_type = other DNA
ctaggcagcccctgggtcttgtggctcccgtcgaaggcagagctctggagccgcctacgccggggacaggcgactacacctggggcccctcaccctcgggcctcctgcacgtggcagggaaggcagggtcaggagctcctagagctaggggcagcaactacttggcccccaaccccgcagccggcggacttcccgaggccaggggtctgaacgcgcgtgcgcatgggcgcgcgcccggcgcgagaacgcgcgcgcgctctcgaagcggggtcccgcggcaatttaggccggggtctgccgacgaccgcgcgtgcgcgggcgtgcatctacgccctcctccaccgccccctccgctgggggtctagcgcactgctccgcttcccccgtttcccccgggctagcgtcctaggggtaagtgacccggcggggcgaagagcgcggctctcgagctgtagtctgcaggagacacacctccctccctcacgcccctcggggctgcggaagtgctctaccctaggaggcagcgcggcggtgcgcctacggctcccggcagcccccgcgcgccacggttcccaggaggactcgcgcgaagcggcttgg

SEQ ID NO: 25631 - DNA, 198 bp, Homo sapiens
  source 1..198: mol_type = other DNA
cttgctctgtggcccaggccagagtgcaactcttgggcagatcatgaggtcaggagttcgagaccaggattgcattgagccgagatcatgccactgcaggctgctagtgctgctgtgctccagcctggggtcccagctactcaggaggctgagatcgcgcgccattgcgcgagggggcgctgaggcctcacgtccaca

SEQ ID NO: 25632 - DNA, 499 bp, Homo sapiens
  source 1..499: mol_type = other DNA
cagggtctcgctctgtcacccaggctggaatgcagtggtacaatctcggctcactgctcaagtgatcctcccacctcagcttcctgagtagctgggactatagaatgtcagctccccagtgcctagaagagttcctggaacacagcaggcactcagtaaatgaacaaaggcactgattaacccctgtgcttgttcacaggctgtccctagggtcatccacataccctggggacatctagaagctagggaccacctgcttccgcgcccgcggtgcctggagggtggagatcggaaagatgctctggggggagccccgcccctccctgtatccccagcagccaatgggagcgcggtcctcctgacgccccctgggacgtgtagtccgggcaggggcgccctcgggcgccgccgcgcgcccctagactccacgtcccgtcgtgcgctgggaggcgcggggattggctgagccccgcccccggcccgccccgctccgctcgcg

SEQ ID NO: 25633 - DNA, 410 bp, Homo sapiens
  source 1..410: mol_type = other DNA
caggtcctggcctgcgaggcatcatcctctttttacagatgaggaaactggtcacatggccaccaagtggcagagctaggatttgaaccctggaggtgacctgcactgctgctgtcaggcctgcagaaggcgttggggagagacagccccgggtggggtctctggaggtaaactgccatgcgtgggcgtgggcgggtgagtgacggtgcgtgccccgggcccctcctccgcgccgtcccgtccccgcggggtcccgggggccccctggcctgggactaccactcccagcatggcccgggcgggcccgccccgtcgccgcgattggccgtggccctcgtgctcccgccccccgggaatgaatggatgggcggcctcagcgcccgcccgaccgctgggaggaccgacccggc

SEQ ID NO: 25634 - DNA, 671 bp, Homo sapiens
  source 1..671: mol_type = other DNA
tcggccagccccaggcccttggcatcaggctgtggccctggcagagactcacacacctgtgtccttgctgaagccagccctgaagccccaggcctgaagccgacagccggactttgggttggggaggaaaggattcataaccccaaggctctacagctggggacagctgggtcctattcccagcaggggtactgagccagcctgcgcttgggccactgcctgtagaggccacactcagcgccccgctcttagcagctgagttgagccatgactcatccggggcctcggtggctgggggctggcccatcccttcctgtcccctgggggaaggggccgccccagctggctgctggctgccagcctctcctgaaagggcagtcccgaatcccagaatctgacattccaggactaggcctgttttctgggaactagagccaaggcgagagacccgtgccagccccgaggctcccggggcccatgggcccaggcatcgggctggtacagggccccggggctctctcagccgtcttggcagtgctgtcccggactgccacattaatgctccagaacccgccagctgggccctggggccggtggggctcctgcagagccctggacaaaggcgagggagggagggaaggggatcctaagcacccctccctccctggccc

SEQ ID NO: 25635 - DNA, 360 bp, Homo sapiens
  source 1..360: mol_type = other DNA
cacttatatgataataaactgtataataccgtacttactgtgtaagcagtgtctggtatagagtggataaggagttcgaggccagcctggccaacatggccttctacagcgacagcggcgcaggcgctcccgcaccaacagcccaccccgccaccgccagagggcgcagacaggccgggtcccgagtgtctgtcccaggcccccgccccacaggatcccggcccgggagcccccgatgcagggacccgcccgggactctgggtccccgcctgaggcctgaggcggccggggtggggcagacctcccggcgagcccgagcccccgcccccggctagccccgccctggcccgtaagaagcac

SEQ ID NO: 25636 - DNA, 342 bp, Homo sapiens
  source 1..342: mol_type = other DNA
aggctggtctcctcccaaagttctgggattacaggacatttaaattttagagtataattattgctgcttataattagaagtgagaagactgcacttatatgataataaactgtataataccgtacttactgtgtaagcagtgtctggtatagagtggataaggagttcgaggccagcctggccaacatggccttctacagcgacagcggcgcaggcgctcccgcaccaacagcccaccccgccaccgccagagggcgcagacaggccgggtcccgagtgtctgtcccaggcccccgccccacaggatcccggcccgggagcccccgatgcagggacccgccc

SEQ ID NO: 25637 - DNA, 387 bp, Homo sapiens
  source 1..387: mol_type = other DNA
acttgggaggatcccttgagcccaggaggtcaaggctgcagtgagccaagatcactcttaaaaagaaataatctaaaagtgttttcaataataatgcatttatgttgattagaaccttggagccagggctcgggctccaggaagccctccttggcaggctggatgggaaagctgtctgggctcccatcatgccctcctgtttggtgactcagggaccagtctggggccaccgctgggtccccagcattaagccctggaaattgcttccaagaaacgcgtgttcctccgacgtcgagggaagggtggcaggtgctcagcgggcagacgccccgccccgccccgccaggttctgttgggggcgaggcccgcgcaagccccgcctcttcc

SEQ ID NO: 25638 - DNA, 464 bp, Homo sapiens
  source 1..464: mol_type = other DNA
aaaaagaaataatctaaaagtgttttcaataataatgcatttatgttgattagaaccttggagccagggctcgggctccaggaagccctccttggcaggctggatgggaaagctgtctgggctcccatcatgccctcctgtttggtgactcagggaccagtctggggccaccgctgggtccccagcattaagccctggaaattgcttccaagaaacgcgtgttcctccgacgtcgagggaagggtggcaggtgctcagcgggcagacgccccgccccgccccgccaggttctgttgggggcgaggcccgcgcaagccccgcctcttccccggcaccaggggcgggcccaggtgcgcccagggccggggagcggccgcgcaggtgcctgccctttgcgcctgcgcccagctcgccctgcctagccaggtgcgccccgccccctgcctgcccggccaccttcggga

SEQ ID NO: 25639 - DNA, 398 bp, Homo sapiens
  source 1..398: mol_type = other DNA
tgttggccaggctggtctcccggagtctcactgtgtcgcccggctcaccgaaacctctgcctcccaggttcaagtgattctcgtgcctcagcctccggagcagctgtaccttttattttttaaaaaaccaacacatgggtagctgttatttacaaccttgctgctaagtgacacagctggcatctagtgcagcaggctcagacgctgctcaccaagccggaggggctgtgggcacgggacgcccctggcagcagcgccctgcgtgttaaagcggaaggcaggggcagcacctccctcttcaagaacctgtagctccccgaatgccatcgagcccccctcagtcggcctcccctgaggcacaaggctggcggggtgccctctgcagggcccaggcgccc

SEQ ID NO: 25640 - DNA, 662 bp, Homo sapiens
  source 1..662: mol_type = other DNA
ctccaggaagccctccttggcaggctggatgggaaagctgtctgggctcccatcatgccctcctgtttggtgactcagggaccagtctggggccaccgctgggtccccagcattaagccctggaaattgcttccaagaaacgcgtgttcctccgacgtcgagggaagggtggcaggtgctcagcgggcagacgccccgccccgccccgccaggttctgttgggggcgaggcccgcgcaagccccgcctcttccccggcaccaggggcgggcccaggtgcgcccagggccggggagcggccgcgcaggtgcctgccctttgcgcctgcgcccagctcgccctgcctagccaggtgcgccccgccccctgcctgcccggccaccttcgggagccgcttccaataggcgttcgccattggctctggcgacctccgcgcgttgggaggtgtagcgcggctctgaacgcgctgagggccgttgagtgtcgcaggcggcgcatcgcgcgccgagaaggccgggcgtccccacactgaaggtccggaaaggcgacttccgggggctttggcacctggcggaccctcccggagcgtcggcacctgaacgcgaggcgctccattgcgcgtgcgcgttgaggggcttcccgcacctgatcgcgagaccccaa

SEQ ID NO: 25641 - DNA, 488 bp, Homo sapiens
  source 1..488: mol_type = other DNA
ccttgctgctaagtgacacagctggcatctagtgcagcaggctcagacgctgctcaccaagccggaggggctgtgggcacgggacgcccctggcagcagcgccctgcgtgttaaagcggaaggcaggggcagcacctccctcttcaagaacctgtagctccccgaatgccatcgagcccccctcagtcggcctcccctgaggcacaaggctggcggggtgccctctgcagggcccaggcgcccttggccttaggaccctaccgccatggagttcgacctgggagcaggtgagcgccggactcaagcccacctggagcccacctcccagaagcccggtgtgggggcgggccacgggggagatcccagtcgcctcatcaccggctgcggaggggcgggaaggctggggttgcccctgaccccagggtcctgccttaggcctccaacttcagggggctgggtaaggggcgccgcctcactgccgcacctcc

SEQ ID NO: 25642 - DNA, 480 bp, Homo sapiens
  source 1..480: mol_type = other DNA
ccgccatggagttcgacctgggagcaggtgagcgccggactcaagcccacctggagcccacctcccagaagcccggtgtgggggcgggccacgggggagatcccagtcgcctcatcaccggctgcggaggggcgggaaggctggggttgcccctgaccccagggtcctgccttaggcctccaacttcagggggctgggtaaggggcgccgcctcactgccgcacctcctaaggggctctcgccagcgtccccaagcacgtgccctgcaccccagagaggcgtccccgcactggggctggcggggagggtgcggggagtggtccccctgtctcgctgaagggccctggacagggctcatctctggcccgtccccagctccctgccccctgcccagcgctgggcccgcccattcgtgcgcgaggccaaggagaggctgtccacacagcggccacgccctggggcggtggcctgtgcagctgg

SEQ ID NO: 25643 - DNA, 234 bp, Homo sapiens
  source 1..234: mol_type = other DNA
ggaagccaatgaactaatgaacttgctttttttttttttttaagtagctggaatagagacagggtttcgccaaagtgctgggattacaggcgtgaacttggcagtacttgctttattaattaaatatatatacataaggcaggcaggtggatcacctgaggtcaccgtgcgatggcacacgcctgtaatctcagttgcagtgagccgagatcgcatcactgcactccagcctgg

SEQ ID NO: 25644 - DNA, 289 bp, Homo sapiens
  source 1..289: mol_type = other DNA
tcctgttttgacaaaaaatttaaaaagggtccgaggcactcaaaataaataaatatttactttaatacctaagggatgtcaaaaattgtataacagagaactcgatatttacattttaaaaaatgttttgtagcgatggagggtctcgaactcgcctgctggagttaggggcgtgagccccgccgcccagtcgtccaggcctccgtgaaggggggggctggggggggggggtgggggcgaggccttccctcaatcctccggcggggcgtgggtacgggagccgggcggg

SEQ ID NO: 25645 - DNA, 443 bp, Homo sapiens
  source 1..443: mol_type = other DNA
aagaaaaatttcctcttaaatagaggcgtgtatttgtcaggaagctctcttgacctccctaggcaggggtggttggactcccagggccctctagggctccctgaagagatagggtctcactctctcccagtttgtgtcagtctcccagttagactgggagccccatgaatgcaactctgtccacacgggcacaggggacacctgactctgtggtgtccgctgtggagcgagaattggattttgcgccctgatgcagtgcacaaccttagctgctgtgcgcgatggggggcgactcctcggcctgcgagcagagaggaaggaatgaggggaagagaggactacctccaccctttccatctgggagcactgggctccaccctctccgaacgaacacggttgggcgtgcctcagtttcccggaggcggggcattcctccgtcgccg

SEQ ID NO: 25646 - DNA, 438 bp, Homo sapiens
  source 1..438: mol_type = other DNA
aaaattaacttaatgaatattttacttgccacaacagtataggatggctgtccttgtcctgttttgtagaggacggtgctaagcagaccacacttttttaaggagtagaattttggggtagggccgggcgcagtggctcacgcctgtaattgaggtcagggacctcccagctactcgggaggctgaggcaggagaatcgcttgacgcggaggtttcagtgagccgaaatcgcgccacttcacctccgtctcaaaaaaatatatatatatatatatttgggtaggaagcacaagtagggaccgtgcttgctgccagaatccttgaaggccttcctggcgccctcagtgctgagacagcctccagccctcggtgccttaggggttgcgcgtcaccctgcaaaggcagttgaccggttttaaccaagtgactggtaccacg

SEQ ID NO: 25647 - DNA, 256 bp, Homo sapiens
  source 1..256: mol_type = other DNA
gaggtttcagtgagccgaaatcgcgccacttcacctccgtctcaaaaaaatatatatatatatatatttgggtaggaagcacaagtagggaccgtgcttgctgccagaatccttgaaggccttcctggcgccctcagtgctgagacagcctccagccctcggtgccttaggggttgcgcgtcaccctgcaaaggcagttgaccggttttaaccaagtgactggtaccacggggacggggcgacgggcccgcgcggg

SEQ ID NO: 25648 - DNA, 352 bp, Homo sapiens
  source 1..352: mol_type = other DNA
gcctgtaatcccagcatttcgggaggccagggcccagggaatcgcctgagttcaggagttgtcccagctacttgggaagctggggcacagtgagccaagattgctccattgcactccagcatgagttttgtaactagttagtcttggagacgctgccccgaaggcggaacctccaggacagacgacagaggcggagctccaactgacatgttcattaagggcagggctccgagggcgccacctcgagagcgacggcgggctacccggggcgggctgaggcaggttgtagccccgccccgggccttgggctccacctctcggccccacttccgccgggcaagcgtttgtaggc

SEQ ID NO: 25649 - DNA, 364 bp, Homo sapiens
  source 1..364: mol_type = other DNA
ggctgccgcgcagtttggggggtccccactctctagtcctcctagccggggccttgggggcgcctgggtgggcagaaggcgcagcgcggtcacggccgccccctcatcggggcaggcagtctgtcagcccccgccccctcgcccccctcggcacctgcctgcgaggctccggccgggctccgagcggcggcgacgcggcctcctcctcgctccctggctggctccggcggcgctggagacgggcaccgggagccggggcgagttgcctgctgggtcctagagcccggcactagctccagagtgcgtgcgtcacgaaggggcgggcccacggtggatgggccttctcggcgcccggggggaagga

SEQ ID NO: 25650 - DNA, 303 bp, Homo sapiens
  source 1..303: mol_type = other DNA
cggcacctgcctgcgaggctccggccgggctccgagcggcggcgacgcggcctcctcctcgctccctggctggctccggcggcgctggagacgggcaccgggagccggggcgagttgcctgctgggtcctagagcccggcactagctccagagtgcgtgcgtcacgaaggggcgggcccacggtggatgggccttctcggcgcccggggggaaggaaggggccgggctcccgcgggctcgcaggagggcggggcctcgagctccgggggcggggcctacatctcggggtccgccctagttgtc

SEQ ID NO: 25651 - DNA, 507 bp, Homo sapiens
  source 1..507: mol_type = other DNA
agcagtcacgtgacgctgcttcctttccgcccgcctcccccgacaacaggtgaagccccagggcctaggaatggggcactggcatttcagggtggcctacgctccccacacatcctgtgtcccccggggggagtggtcctcagcgttcctcaacggtgagggtccaggacgggtgaatggggcatcctcggagaaagtccggctgccgcgcagtttggggggtccccactctctagtcctcctagccggggccttgggggcgcctgggtgggcagaaggcgcagcgcggtcacggccgccccctcatcggggcaggcagtctgtcagcccccgccccctcgcccccctcggcacctgcctgcgaggctccggccgggctccgagcggcggcgacgcggcctcctcctcgctccctggctggctccggcggcgctggagacgggcaccgggagccggggcgagttgcctgctgggtcctagagcccggcactagctccagagtgcgtg

SEQ ID NO: 25652 - DNA, 288 bp, Homo sapiens
  source 1..288: mol_type = other DNA
tcactgcagtctggtctcgaactaggtgtaagccaccaaggctgactgatttttaaaaatttagcagactgcagtgagccgcgatggcgccactgcagtccagcctgagttgtttttatgtcgccgcaacagtgacacccccgacaggttagccgaggggcggggcgggcgggccccggggcgggttcggcgtcctcctgcgccaatgggagcacccaagcccctccgccggacgctgcggggagctcgtgcgcgcggcgcttttggggcggagcctgccaccggccg

SEQ ID NO: 25653 - DNA, 389 bp, Homo sapiens
  source 1..389: mol_type = other DNA
gtgcaatggcgcgatccagcctgccgagccacctcggtaagctggtctcaaactctgctggatgacaggcgtgagcccctgttgaggattaaatgagttaatatttttaaagtccttacagcatgttttccagggtacaaatggtatcacttaaactatgaagaaatatacaaaatactatgtcttgtgagtttccattcaaaccttcatgaattatatatatgaatatgtccttctagacagacagacttatctttttgagtgagtgtgtgtgtttttacataaatatcagtcatgctttaaaaagaaaagccccttcttttattgaagtgtgggggaggggggccttcggtctctccccagcctcttccttccccctggcctgaggg

SEQ ID NO: 25654 - DNA, 274 bp, Homo sapiens
  source 1..274: mol_type = other DNA
taaataaataaataaataaataataataatagcaacacttacattaactgttttaagttttatctcatttaattaattatctcatttaactgtcggtactattaatattccccttgtggcttatcctccagatggagtgcagtggctcaatctcggctcactgcagcttctgcctcccgaatcaggctggcctcgcgcaggtacctcctagatacgccaagatttggggagtggccggggagtcctggtccaatggggcccgggggcggggact

SEQ ID NO: 25655 - DNA, 551 bp, Homo sapiens
  source 1..551: mol_type = other DNA
gtgccggtagcgcgggagcgtgcgcgcgcgaactcaccgggaagcacccggagctctggcggcgtgcgcgcgcgttgtattgcgcgcggccatgaggccacggagctctgcgccctcttgccacaggcctgggcgcctggtgcaggatcctgacaggagtggggtgaggtcctggacttcgccggatcgcgccccgtctatgaattatatattatgtataggttttgtacactgcaggcctacaaaatgcagtggtatatgtcctgggtacatccacgtgtgtactgtgcacacaggtatccaggcagatgcacgtctacacgcctgcgcagtgcagaggaggtagtgacaggtgaacaggcatgtacactgcatagccatcctttgcagacctgcgccttcgggttgtggccaaaccttcaagggagacgggggcgggggttctaaggcacccccctccaacccagggccttggaggttgagggtggtcccttgggtcccaagacaagctgcccctcagaggctctcagagcccaggggacggcccgcgg

SEQ ID NO: 25656 - DNA, 641 bp, Homo sapiens
  source 1..641: mol_type = other DNA
gggttggaggggggtgccttagaacccccgcccccgtctcccttgaaggtttggccacaacccgaaggcgcaggtctgcaaaggatggctatgcagtgtacatgcctgttcacctgtcactacctcctctgcactgcgcaggcgtgtagacgtgcatctgcctggatacctgtgtgcacagtacacacgtggatgtacccaggacatataccactgcattttgtaggcctgcagtgtacaaaacctatacataatatataattcatagacggggcgcgatccggcgaagtccaggacctcaccccactcctgtcaggatcctgcaccaggcgcccaggcctgtggcaagagggcgcagagctccgtggcctcatggccgcgcgcaatacaacgcgcgcgcacgccgccagagctccgggtgcttcccggtgagttcgcgcgcgcacgctcccgcgctaccggcactgtctgtgaggcccgggaaaagcttagccccgccccctcgccacgagaggcgcctgcgcacttccagcttgagtggcgcgaatgcgcacgcgccaattgcgcctgcgaggaagaagtcacgtggcagccggaaagcgtggcggctgctgagctggagcgacaacaacgacgtcgtt

SEQ ID NO: 25657 - DNA, 546 bp, Homo sapiens
  source 1..546: mol_type = other DNA
gcacatgcctgtgatcccagctactcgggaggctactccgtctcaaaaaaaaaaatttgtgtgttggttgggcgcttgagctcaaggttcaagaccagcttcccagctactcgggaggctgacgagatcgcgccactgcactccagccaaataataaaaataaaagtagatttgtgtgtatgtggcttcctttactagaaggtagtttcgtaaaacatagtctggcacagaataggtgttcaataaatatttgtgcagtgcgctggttcaggtccgcggggcctgcccttatgaatcattcatgatctggccccgcccatacgcgaacgacgcgcgcgttcacgccggagagggggcgcggctcgcccccgggctgagtcgggcggccaggaagcgggactctgcgcaggcgccaagctccggagcgcggccttgggtttggcaggcgcgcgcgcgcgggagggcggcaacctcggcgctgtgcgcaggcgcggcgggcagtgcgcaggcgcgggcggagggcgggctgaagcagctgaagcggcg

SEQ ID NO: 25658 - DNA, 402 bp, Homo sapiens
  source 1..402: mol_type = other DNA
gcagggaggagaccctgagcggcggccacctctcccctgccccaaccggccctggggcttggtcaacctgccctggggcttggtcaacctgccctggggcttggtcaaactgccctgggggggccgggggtgagcctggtccgtggtcatgccgccccgtccccagctgctgggcctctgggattccccgcgcagccatgcgctcctgccccggctgctgcgcgccgaccgctcgcccctcagcgcccgccgcgacgtgacccgccgctgctgcctgcgtccaggccactacctggtggtgccgagcaccgcccacgccggcgacgaggctgccgccacacggccgtgtgagccggccccgagacccccgagacccccgagacccccgagacccccgagacc

SEQ ID NO: 25659 - DNA, 165 bp, Homo sapiens
  source 1..165: mol_type = other DNA
agctctctgggagctgctgaagcaggtctctactttaaaaaaaattttttttaattaacaaaacctgagtggcctgacagcggcagccggtcctccctcagcgaccccactggggctccaatggaagagaggccccgcccccgtgactcaggaggttaaagggcc

SEQ ID NO: 25660 - DNA, 361 bp, Homo sapiens
  source 1..361: mol_type = other DNA
ctgtacaatgggggtgacccatactcctggaatgatggctcctgggcagccgaggggccgggcacactccaggacccaggggtgcagcgctgaggggatcaggcaggccccctgtgaaccctcagctggagagaagggtctggagttcccacccagattggcctcccaggacctaatatgtctgtgtataaaataagagaaattactatcagctcctaggagaggggcagtgcacccgggccctgggtgatggggggatcagggcccccaagaagaggtgccactcccgcttcgccgggcttgccccagggccagggtccgtgccagggggtggggtgagtcatcagggccagccccgccc

SEQ ID NO: 25661 - DNA, 301 bp, Homo sapiens
  source 1..301: mol_type = other DNA
ggtgatggaatgctaggccacccaccaccctgtacaatgggggtgacccatgcttctcatatcctgggcagcccaagggcctgggagcacactccaggacccaggggtgcagcactgagccaaccaggccgcctccatctcctgtgtgatcagctcctaggagaggggcagtgcacccgggctctgggtgatggggggatcagggcccccaagaagaggcgccactcccacttcgccaggcttgccccagggccagggtccgtgccaggggtggggtgagtcatcagggccagccccgccc

SEQ ID NO: 25662 - DNA, 291 bp, Homo sapiens
  source 1..291: mol_type = other DNA
tactggatcacaaattcatttttaaaatattttgatagctattcaatacttgagctggagtgcagtggcgtgaccttggctcactgcactaggcgggattaccccattttacagatgagcacatgggcaaattgaatacaacatacgtggtaaagatgtgtgggagaggcaggaatttgcagtctgccaacagaagtctgggcagggttttatgggctctgataaggccctggcagggccgaagttcatgagcacttcctcttcctttgggtcctggctggtcaccaggga

SEQ ID NO: 25663 - DNA, 405 bp, Homo sapiens
  source 1..405: mol_type = other DNA
tcgctcggtcgccaggctggagagcaatggcgcgccaggttcccactggggcaaagggtccatctgtcaggttgcggcatcggtgccctcgctcaacatggcggccttctgtgcacgcagtagacgaaggcggcggcgatggcggcggggatagtggcttctcgcagactccgcgacctactgacccggcgtgagtcacctccgaagggcccgagtcccctaaattcaggggtgcgtgtgctcccttgaaggactccctaatctgcacaagaggaggcttccggagtagccctgttctgcatgtccagctcaacgcaacaagaggaacaaggtcttctggaggtctgacctgcagatcctggaggcctgcctgcggggggaggcggggcagggtattcccgcccc

SEQ ID NO: 25664 - DNA, 284 bp, Homo sapiens
  source 1..284: mol_type = other DNA
actcctgacctcaggcatatagtaggaaatagtacgacctcctggtgggagttcatattatacagtctgagtaaactcacagtactgcaagttttcttttatttttagttaacatgatatatacatgcatgattacaagctctgctgcaattatgtcctgaaacagctgttcgctcggtcgccaggctggagagcaatggcgcgccaggttcccactggggcaaagggtccatctgtcaggttgcggcatcggtgccctcgctcaacatggcggccttctgtgc

SEQ ID NO: 25665 - DNA, 320 bp, Homo sapiens
  source 1..320: mol_type = other DNA
aaaggctcccctttcgcagtgtctccaagcagccagccatcatgcctggtcagtcatacgggttggaagacgggtcttgccccagcaacgtgctgcacttcttcaacgccccgctggaggtgaccgaggagaacgcgcaggcagtcgggtccttgccacggccgcctggccctgggttgagtgctagggcttcgggtgccatcaccctgataccatcagaacttgcattcagcaaacagtgttcagcaaacagccgggtgcagatatccatctcaggcaacttaataataaacttcaagtactgagtcatgcagggcctg

SEQ ID NO: 25666 - DNA, 379 bp, Homo sapiens
  source 1..379: mol_type = other DNA
tttctcacattaacacatagtgaagcaggactcagagccagactgcctggctccagagccggcactgctctcacagccatccatagatcacacacgtctgtgtgtaacagacaaaatgtacagttttctgtcatgcttcactaaatgatttactggtgggttatgtcccacagttaaaaacatggcccagaggtgctgactgcagctactctcggccgccaacgctgtagaccccattacccacctcaacaacaacttcatgtttgggcagaagctgaggtgtgttcccagacgtgtctctgacaccacaggagaaagtgagtcagccttgcctcctcaaaggctcccctttcgcagtgtctccaagcagccagccatc

SEQ ID NO: 25667 - DNA, 436 bp, Homo sapiens
  source 1..436: mol_type = other DNA
tgagctcaggcagcctgcttgcagtgtttttgaattaccaatgtttaaaaaaaagattttatcacataaaagtactaataccagtacatgaacatagagatttataaaacataaaaatgaatccattatagtgaaacaccatcgtttaaggatttcctcctgaaaactttcccaagtgttgttagttaccaggcactgttaaagatgctttacatgtatgtaatttctcacattaacacatagtgaagcaggactcagagccagactgcctggctccagagccggcactgctctcacagccatccatagatcacacacgtctgtgtgtaacagacaaaatgtacagttttctgtcatgcttcactaaatgatttactggtgggttatgtcccacagttaaaaacatggcccagaggtgctgactgcagctactctc

SEQ ID NO: 25668 - DNA, 476 bp, Homo sapiens
  source 1..476: mol_type = other DNA
gctacagtcagtccctcttgggctggcgggactgggaatcagcttctgtagcagctgcacattccccagagggcctgggagctgggctttctcccagggccagggtaggtgagagcacagaatctggccttgtccttcacagaacaaggccagccctttcaccagctttgaggctcgggcttcatgcccgccgtgccctctgagtgagactccagccccctctcctgggagatcaccccgcagaatatggtgagggcagggggttcccctccgtggactcccgtggctcatgtgcccctgcccgccgccccaccccccaggagggccccacggtgggtaccacagccattaccatgatgagggctacgggccccccccacctcactacgaagggggtccagtggggggtcaccgtcggggcccaagtcgctacggcccccagcctcacgccgacagccctgtgctcatggtctatg

SEQ ID NO: 25669 - DNA, 412 bp, Homo sapiens
  source 1..412: mol_type = other DNA
ttaagcgctaagctacagtcagtccctcttgggctggcgggactgggaatcagcttctgtagcagctgcacattccccagagggcctgggagctgggctttctcccagggccagggtaggtgagagcacagaatctggccttgtccttcacagaacaaggccagccctttcaccagctttgaggctcgggcttcatgcccgccgtgccctctgagtgagactccagccccctctcctgggagatcaccccgcagaatatggtgagggcagggggttcccctccgtggactcccgtggctcatgtgcccctgcccgccgccccaccccccaggagggccccacggtgggtaccacagccattaccatgatgagggctacgggccccccccacctcactacgaagggggtccag

SEQ ID NO: 25670 - DNA, 379 bp, Homo sapiens
  source 1..379: mol_type = other DNA
ctcctgcaggaggggtagtggaccagtcggttttctactgtttaacaattcctccagagataccctgggagttcctcacacacagcggtcgctccataagggggccccgcctctgggcggtgcctgaaagcgtatttgcgcatgcgttcgagcgcctaccctggggcggggctccccgagcgtatcaacagtcctaccatctggtgagagggtgcgctccactctccattgaccaatcagtggagaaagggcggggcttccttgtctccttgatcaaattggatttgcgcgcaaggcgtgtggcggcctaccctccccccgcggcgggaccagtggctccccctatcgggtgggggcggcgggtgacgggcgtgtccct

SEQ ID NO: 25671 - DNA, 369 bp, Homo sapiens
  source 1..369: mol_type = other DNA
cccgctggtcttgaactcctgggctcaaggggaaaaggttggagtgcaatagtgcgatcatagctcactgcgggtcagcaggggtccctcagcatcctctggttgcctatcaggtacccatagcaatgttctttgcagcgagggaccttagcaaccaaggtgcgagaaacacgcgatcattggcaacttggcaagtgccccaccgcggccacccttgggccccggggcctgcagcattcagccaggccccggcgcggcccgaccctccggctgtcaccgaccgctctgtcccgtcaccaaccactgtgtcccgtcaccgactgctctgtcctgtcaccgactgctctgtcccgtgacggcaccagaaat

SEQ ID NO: 25672 - DNA, 269 bp, Homo sapiens
  source 1..269: mol_type = other DNA
tggtcaaggctaagttactttcctaaggccagggaaccccggtagggtggctccctgcaagtgcagtggtgatgcgtctgctccggcgtcagaccagccccgccatgccacttgcaagctgtcaaacacttgcctcagccaagacacttgcctgaggacgcggagcccgaacaccgcggctccaagcccccgcggggcgaccctcggtctcctgccaatttttcttccccccacggggctgaaaaaaggtcgtggtccctttaaggccc

SEQ ID NO: 25673 - DNA, 385 bp, Homo sapiens
  source 1..385: mol_type = other DNA
gttgcagtgagccgagatcgcgccactgctctccagcctgggcaacagagccagtgaagagccggtggaccctgccacgtgccttctgggacattgaggcctggatgccaggccgatggggacggggtgggcaggaggacaggcctgccccccatccctgatcccgcctccacatcatgttccagaccgaggctggggagctgcagcacggtgaggcccgcacagcctctgcccgcgtgccctcgcccgcagacccaccttggctcctccccgggctcagcttggggtgggcgccagttccgagcatggctgtctcacaggtgaacgccaccgcctgtgctgtcccccgccttctcatcgcgctcctggagagtaaccagcagaa

SEQ ID NO: 25674 - DNA, 262 bp, Homo sapiens
  source 1..262: mol_type = other DNA
gctgtggtcccagctacttggggatcactactgcagtgagctgtgatcacaccgctgcacttcagccgtttccctcggggctccgacggaggcacacaagttagggacgtgttgaggccatggagaaggccagaccaggacatcctgccacctgggccgtccctgtgtggttggaggaccccaggattccaccgacctcacaggacaaggtgaggtcgctctgcctcgcgtcactgaagaggcgggacacagacgagcgacg

SEQ ID NO: 25675 - DNA, 328 bp, Homo sapiens
  source 1..328: mol_type = other DNA
gggtcagcaggggtccctcagcatcctctggttgcctatcaggtacccatagcaatgttctttgcagcgagggaccttagcaaccaaggtgcgagaaacacgcgatcattggcaacttggcaagtgccccaccgcggccacccttgggccccggggcctgcagcattcagccaggccccggcgcggcccgaccctccggctgtcaccgaccgctctgtcccgtcaccaaccactgtgtcccgtcaccgactgctctgtcctgtcaccgactgctctgtcccgtgacggcaccagaaatgggagtggctttcccgaggtggggaatttc

SEQ ID NO: 25676 - DNA, 422 bp, Homo sapiens
  source 1..422: mol_type = other DNA
cagtttaatagaaccattcattaatggattcattcattcattcattaactctatgggtgtccaggacacagacaggttcgccccctgccggagggcatctgtctgcgccccccggccggcgcaggcgcactcacgatcgcgggcaggtccgccgagcgcagctcccccttgcggagctccagggcgtgtctcttctgggcatgcgcagaaccgctctatgtccagctgagggagtgcgctgtagccctcgcgcgcatacctgtagtgaaacttctccttggactatcgttggagatgcagcctccccggggccggaacccccgaccgcgccatggacgcagccatcttggaccgggaacaaggcggcacttcgtcccgccgtcgctcgtctgtgtcccgcctcttcagtgacgcgaggcaga

SEQ ID NO: 25677 - DNA, 343 bp, Homo sapiens
  source 1..343: mol_type = other DNA
tcaaaaataaataaataaataaaaagtttgttttacgaaaattttatctcaacttttttaaattggaaaaaaaaaaaaagccaaagtcctcctgtggcccacaaggccatgatctgcccatcagggcctttgcgcgggccgttcctgggggccccctgctagaatggcactgacaccagggcggggagtggaggaagagaaggggcccgcaggccctcaccctctcactcctggggcactatggcgcccttgtgacccactccagtgtgagtcagctgcctgacgttgtcagtcaagaccagccttctccacaaataatttttaaaaaattagccaggcccca

SEQ ID NO: 25678 - DNA, 308 bp, Homo sapiens
  source 1..308: mol_type = other DNA
aaatttacctgaggtcagtcccagctactcgggaggctgagacaggagaatcgctttcaaaaataaataaataaataaaaagtttgttttacgaaaattttatctcaacttttttaaattggaaaaaaaaaaaaagccaaagtcctcctgtggcccacaaggccatgatctgcccatcagggcctttgcgcgggccgttcctgggggccccctgctagaatggcactgacaccagggcggggagtggaggaagagaaggggcccgcaggccctcaccctctcactcctggggcactatggcgcccttg

SEQ ID NO: 25679 - DNA, 380 bp, Homo sapiens
  source 1..380: mol_type = other DNA
ctaccaataatacagtaattttacaaaaatgctttcaaaggcggttgttacaaataatgtaatagtagttggctctgagtccagcactgtgctccgcgctgcacacgcagtctcacgccgtcctcacgatggcgctgtggggcccctggcttccagaactagctctgggtgtctgagatcagtcaccttgaggtccctggtgcaatctagggccatcagaagctccggattaattcagccccgggcttctaatccctgtggccagggactttgatccaagtgtttcgaatcaggccctgggtcgggctcacagctaagcggtttaccaaccgtggacctgtggggagctaggaccagtccccccgcgggggcgtcttggg

SEQ ID NO: 25680 - DNA, 424 bp, Homo sapiens
  source 1..424: mol_type = other DNA
gctggattcaaatccctactagctggtgatcaagacaagccacttgtttttcacctgtgaagtaaagggcataacagcgggttgccaccctggctggcagtaaaacctggtgttaccggagcctgttttctcctgtgaaatgaagataaggtgatggaaattttttaacacgttaacgacaatggttgctcagagccagacgtctcattgctactacggctggaggggacggctgtgagcagcaggccttggctcctggctgcacctggccccgtcgcgggaagcagggctagggcatcccggcgaggagcgccgccaggccccggggtaggactgagcatacacacagaccgcggggtctccgggatatcggggctagggcaggcagaggctgcgcgccgcggaggctgctggtccctgacgc

SEQ ID NO: 25681 - DNA, 465 bp, Homo sapiens
  source 1..465: mol_type = other DNA
cctggcttccagaactagctctgggtgtctgagatcagtcaccttgaggtccctggtgcaatctagggccatcagaagctccggattaattcagccccgggcttctaatccctgtggccagggactttgatccaagtgtttcgaatcaggccctgggtcgggctcacagctaagcggtttaccaaccgtggacctgtggggagctaggaccagtccccccgcgggggcgtcttggggatgtggaactcgcacacccagaggaggtggctctcccaggggtgggccccggatcctaggggcgcggggctggccccgctccccgctggcctcgcggcaactgggcctccccgcccgcccgccctcgctcccgctgggccccgcagccggaggaggggcggcctcccgcccccgcccgctggatctcagagtcgccgcccccggcgccgggctgcagccgccacgccc

SEQ ID NO: 25682 - DNA, 380 bp, Homo sapiens
  source 1..380: mol_type = other DNA
cacatgatcagtctcactcgctggagtgcagtggtgcaatctctgctaattagctgggattacaggcgcgtgctaccacgcccccaggctgggctggattcaaatccctactagctggtgatcaagacaagccacttgtttttcacctgtgaagtaaagggcataacagcgggttgccaccctggctggcagtaaaacctggtgttaccggagcctgttttctcctgtgaaatgaagataaggtgatggaaattttttaacacgttaacgacaatggttgctcagagccagacgtctcattgctactacggctggaggggacggctgtgagcagcaggccttggctcctggctgcacctggccccgtcgcgggaagcagg

SEQ ID NO: 25683 - DNA, 397 bp, Homo sapiens
  source 1..397: mol_type = other DNA
aaaactagtcttagagtcacggcaggtttcaacaggcagttttaacagccaggcttgcagagaatcatatgacaagaaggatccaattcacatgatcaagtctcactcgctggagtgcagtggtgcaatctctgctaattagctgggattacaggcgcgtgctaccacgcccccaggctgggctggattcaaatccctactagctggtgatcaagacaagccacttgtttttcacctgtgaagtaaagggcataacagcgggttgccaccctggctggcagtaaaacctggtgttaccggagcctgttttctcctgtgaaatgaagataaggtgatggaaattttttaacacgttaacgacaatggttgctcagagccagacgtctcattgctacta

SEQ ID NO: 25684 - DNA, 597 bp, Homo sapiens
  source 1..597: mol_type = other DNA
ctctgagcctcactcacagtgtgccactcacgacattgctatgaagtggtggctgtgagcattgtcatccccatatcagcagctgagtgattcagctgcacagctacaggatttgaacccaggagggcaaccagagctcactctcagtgctgggggtctgggagcggggtggaggctgtgtaggaggttgcattccgcagccccatcccccagctccgtctccagctgccaggatggagccgggtcgggaccatccgggaaaggggacgccctcccggaccccggctcaccctcgggggcgccggctgcccgcacgcgcctctcccgccaccagcgccgccccggtatttatgagttcgcgggtgccgaggcctcttgccgcctacagccgtcccagccccggaagagccggtcgcctcggggtgacagcctccctagacagccagggccccgggtcccacaggtccggccggtcctgcctgggcgccccacacccacccgcccaccccaccagggcgtggcgcgggaagggggacccgtctccggcgcgccacctctgagccggccaccaggtgagagcccaggcaggtaaccctg

SEQ ID NO: 25685 - DNA, 271 bp, Homo sapiens
  source 1..271: mol_type = other DNA
cctctgatgggggaggcttctgcagccccccaccccagtcccaggcaggggtgcaggcccccagaacacccagttgggaaaggaagtggcagaggcaggaccttccctttgcaccatccatccactccccctctgcagagtggggagggggaggaggggggctgggtcctcagctggccctgggcctggactcctggatctggactcctcctggactcctgggtctgagggaggagggtccgagggacaagatcctcccccgacacgcccc

SEQ ID NO: 25686 - DNA, 408 bp, Homo sapiens
  source 1..408: mol_type = other DNA
tttaaaaatagatagatcacctgaggtcaggagttcgacctggccaattccagctactcaggaggctgaggcaggagaatctcttgaggttgcagtgagctgagatcgcgccattgcactccaataaataagtaaaaataaaatttaaaaaaatttttaaagaagatgtctgctgtttgttttcaatattttgaccaattacttcgtaaaaacttatttaaaaattgaagataaaatgggtattaatgatattataccacagggttgtatatgtaagtgcttaagacctaactccttctgggggggaagttagaccaatcggaggctggagcgggccctgagaggcgcccgactccgcccccgcactggccctgcccactgcccggtcagcctcgttgctatggggac

SEQ ID NO: 25687 - DNA, 449 bp, Homo sapiens
  source 1..449: mol_type = other DNA
atattatagcttgcaatgctatgcttttgaaatgttgcaaacaagcctttgtacactgtcttgcaaaaggtttttaacgtgttatgcaaatacacagattctggattgccagccttggttgggaagattgcccagtcttgggggtggggggtggggcgttgggctcctccccatctccttaggtcctgcctcccagggagggagcctgcccagccaggaggccccagcctcccactaggctggagtgcagtgaaacgatctcggctcactgcagcctagactggtctcaaactcctgggcccaagccaaatgttgttggtcacctaacatcttaaggtgctaagttgtatacacagcgtccaccttgttccgacctaggttaggcaggtctcccggctcctgagggaggggcgccctccccttccctcgagggtcgggcgcataaaagc

SEQ ID NO: 25688 - DNA, 321 bp, Homo sapiens
  source 1..321: mol_type = other DNA
gcagaagctccttcttggccaggagcagtggctcatgcctgagttgcagtgagccaagattgcaccattgcactccagataataataacaataaaataaaaaacaagcttttttttttttgaaacaggcaggctggagtgcagtggcacgatcttggctcactgtgattctcatgcctcggcctcctgagtagctgagaaaaaagaagcttcctcttcactccgtcagggactccctgaggccagttggctgaaagctgcccagggaagtcaaagtggaaattctcatttccaattaccttttcaccgtggctaaaagcag

SEQ ID NO: 25689 - DNA, 338 bp, Homo sapiens
  source 1..338: mol_type = other DNA
ttaggcccgtttgggtccccaaagggagtcaggcaccatctgattggctgacaccctgtggtcctgggtggccctagaacatcgcctgggttctcaaaagaggtgaggcctgatccgaggttctccggggaggccgtcgggggcgggcccgcggcggctcggcagtggagaggggtctgcggcgggttcggggcggggatcccgggtgtgcgaccgccccgcccggccgcccccaccagtcggcgccccctccccccttgcggcggcggtggcggcgggcggcgcggagggcggagctcggctgcgagggcgggaggcgggagggaggcggccccgcg

SEQ ID NO: 25690 - DNA, 368 bp, Homo sapiens
  source 1..368: mol_type = other DNA
ttatatcctcaccaagttacttaggtcacacagcaaggaagctttggaaccctggtctgagcgatttcctgacaggtcctggcctctgtgacagttgtcccagctgtggacagaacaatcatggtcaggggccaggcggctggaagaacagagagacagtggctctgggtttaggctcaggatccttgagtgtcccccaagagtccccgtggagaaggcgggaacccagcctctgctccgccccccaagctgagtgccctggtgaggggtctgtgggaagggtgccttttctcaatgttcacaaaggcatccagtctgactccctggtggccatggatcagggggagtgtctaatccctgtgtgccac

SEQ ID NO: 25691 - DNA, 342 bp, Homo sapiens
  source 1..342: mol_type = other DNA
ggttgcagtgagctgagatcgcaccactgcactccagcctgggcgacagagtgagaccctgtctcaccggtctgacgggatcaggcactgtggggttgcccctctggtccattttgccattgacataatgggcgtcagtctgaccagcaatgatgtgatcttggctcactgcaacctgctcggattcaagcaattcttgtgcctcagactcccgagtagctgggatcgatgtgagctatttatatcctcaccaagttacttaggtcacacagcaaggaagctttggaaccctggtctgagcgatttcctgacaggtcctggcctctgtgacagttgtcccag

SEQ ID NO: 25692 - DNA, 343 bp, Homo sapiens
  source 1..343: mol_type = other DNA
gggttgcagtgagctgagatcgcaccactgcactccagcctgggcgacagagtgagaccctgtctcaccggtctgacgggatcaggcactgtggggttgcccctctggtccattttgccattgacataatgggcgtcagtctgaccagcaatgatgtgatcttggctcactgcaacctgctcggattcaagcaattcttgtgcctcagactcccgagtagctgggatcgatgtgagctatttatatcctcaccaagttacttaggtcacacagcaaggaagctttggaaccctggtctgagcgatttcctgacaggtcctggcctctgtgacagttgtcccag

SEQ ID NO: 25693 - DNA, 385 bp, Homo sapiens
  source 1..385: mol_type = other DNA
ccagatctctgtcaccgagagccttctgaacacaggtccctctatctcgcctcgccattcccatcggagctgaggacagccttgggtgaggcgggccacccaaggggcagctggggtggacgcgcgcgagcctgccccctgcgggcctggaggcccaacctcagactccgccgggcccgttgccctgggcaacgccccgcgcgccccgccccgcctggccgcccgtcacccccacgtccgaccaatcccgccgaggagggggcgggcctcttgggccccgttccacttcgggctgccctcgccgcccgttggctggcgcgccgttcgtcacccgggcgtgagctaatgccggcgcgcggcggcccccgtcggggcggggccaggg

SEQ ID NO: 25694 - DNA, 486 bp, Homo sapiens
  source 1..486: mol_type = other DNA
gccctgcttcccagaggcggagcttctctggggaggaactcagaatgaagtgtcccccatggcagagtctgaaagctggctccccagtgggataacaattgagcagctactactatgtgctagggtaggtactgtgctaggccctgccagtacttgactcggcaccactccaggaacattagtggctcaaaagtgggcccccgctgccccacggcttccccaacctttcaaaaggtaggaggctttgccaagtgctcaatcccttttgcaggagatggcttcaagtgctttaataaagaaccatgtactcaatcgtcttcggaagaggggtctccaaacggttgactggagggatcccttctggagggagtctccaaaagccatccctgcagaaggaacccgcccccttcgtcaaaggtgagcgcttcatgacgtcacgggcagacctgggggctggtgacgttgttcagcagaaaccctctcccg

SEQ ID NO: 25695 - DNA, 362 bp, Homo sapiens
  source 1..362: mol_type = other DNA
cagaaaacaacagttttatttatttatttatttatttttttctggagtgcaatggcacgcttcccgagtagctgtaattacaggcgcgcgctgtagactctccttcagctgcgggatgagcatcttataacgctgctgcaggaggccgctctgggcagggcccaccagttgtgctggcggttgcggctgctgctggggacccgggccgccagccgaactaggacccgatacaccagcagctgaggaagccgctgaagcttgctgctgggatgcagccatcttcctcgcgccaatggaggggaaggaggtgccaacgttacgtcacgagcccgaaggcgtcgcggcctgaggagacccgttgg

SEQ ID NO: 25696 - DNA, 523 bp, Homo sapiens
  source 1..523: mol_type = other DNA
gctttgccaagtgctcaatcccttttgcaggagatggcttcaagtgctttaataaagaaccatgtactcaatcgtcttcggaagaggggtctccaaacggttgactggagggatcccttctggagggagtctccaaaagccatccctgcagaaggaacccgcccccttcgtcaaaggtgagcgcttcatgacgtcacgggcagacctgggggctggtgacgttgttcagcagaaaccctctcccgatcccgctgcaacagaaaagcgtggctgtggccatcctcccgctgggcctgggtctggatggtgggcgccatagcgacgaggcgacggcagcccggacggggtccgccgacttcaggggacgcctgatccgaggaaggcccagcttggcgccgctccccgcggaaagccggggacggactcgaagctccggttccgctgaggacccaacgggtctcctcaggccgcgacgccttcgggctcgtgacgtaacgttggcacctccttcccctccattggc

SEQ ID NO: 25697 - DNA, 248 bp, Homo sapiens
  source 1..248: mol_type = other DNA
atttttttaaatagtattggcacacctgtaattccagatcacaggtgtgagccactgcgctcagcctggggcccagtctccagctttgaaaactggggtccaccggccaagctcaggcgcgtcctggcccagggccgggcggaagggaaccagtccagggccagccaggctgcgccgggggcgcgcgtccgggaagcgcccctcctgccccgcccccggccccggccccggccccgccccgtgcttgc

SEQ ID NO: 25698 - DNA, 484 bp, Homo sapiens
  source 1..484: mol_type = other DNA
gcgaaggctgggcggcagggccgagccgcaggcgctgacgcagggcggcttccgggcgcggggccccggggttggtcccgacgacgctggccttgtctgaagacgcggctcccccggggcccctcctagacgcgcggcccctacccacacgccctggcctcgcggggccgaccctggtcggtgtgcgaagcctcggacttccaaggttcggaaatgccaagacccggtaattcccgggctccagggtcccgggtggccagaaatctgcaactccgagccaccaggggtctagagtctaaagcgctaggggatgcaacctgtgactcccaaatgttgagatgcgaagccccggaacctctagtcccgaaacgggttccgctaccccaggctgccccgccccgcgcccgcccccgctcgctctgggcgcgcgccccagccccggcccctcccgcctcccgcggccccgtggggacggaaacatccc

SEQ ID NO: 25699 - DNA, 200 bp, Homo sapiens
  source 1..200: mol_type = other DNA
tctctgagagaatttgccgggaaagggggatttgccggattctggaagtccttaatctgagaatccagccagatttcttgcagtagattccaaagcacttccgcctcacagggcccgcccgctctgagcgcctaagggccttcccgccgctgaccagacgcccccgactcaaggcgcctgcgcagaccctgaaaagcggc

SEQ ID NO: 25700 - DNA, 154 bp, Homo sapiens
  source 1..154: mol_type = other DNA
ttggagaaattggatacatggggtctcaatttgttgccggatctccgagtttcagcctggtcgccgagccggcgggtagaaaagacctggaagtgcgtcgcccgtgccagccccggaaatctcgtgttaggcgaggtcaacgggtaggttctcg

SEQ ID NO: 25701 - DNA, 323 bp, Homo sapiens
  source 1..323: mol_type = other DNA
ctgtatttctgacaatgtggggaaaagaatagaaagaagtagacataggagactccattttgttctgtactaagaaaaattcttctgccttgatgttaatctataaccataccctgttatagatgacggggttctctataacttaaagcttgaaggcagcatgctccttaagagccccatgtgatagtctgaaatatggcctcatgggaagggaaagatctgaccgtcccccagcccgacaccctgagacaagaggaaggcatctgtctcctgcccactgagatgtttatatgtatgcatatctaaagtacagcatttaattc

SEQ ID NO: 25702 - DNA, 375 bp, Homo sapiens
  source 1..375: mol_type = other DNA
agatctgaccgtcccccagcccgacaccctgagacaagaggaaggcatctgtctcctgcccactgagatgtttatatgtatgcatatctaaagtacagcatttaattcaggctggagggatcctccgtatgcggggcaacccatcccttcagacaattgggaggtgagggccgaagcggcctttttggacaaatcaggcagccactgactcccttcattatggcctcatgcgtcctttgcaggggcggtggcgctctgcaaggcccaagggggcgttgaatcccagttgtcgcccccagggtgcctgcggcaatccgcccgatgcctttttggctgtagctccggcccggggcgggcgaagagggagcgagtggg

SEQ ID NO: 25703 - DNA, 204 bp, Homo sapiens
  source 1..204: mol_type = other DNA
acgggcagcccagctgcggcccgaagggggaggggctcggccgcccggcagatggcggcattacagctgggagccccctcttgaggccgagctcctcgccctggcgtctggtgcgcttcacacgcggctgcatatgtgtcaatcacacccccccgccccgcccttggtcccttggggccgggtagctgcctgaaggggcggggc

SEQ ID NO: 25704 - DNA, 407 bp, Homo sapiens
  source 1..407: mol_type = other DNA
cccaggatgctggagcctgacgggttgagtttgaatcccagctctgccatttaactagctgtggtggcgttccagccagtgagctgagatcatgccactgcactccagcctgggccagagtgagactgttgccgtggtgctcatcattgcagcaggctgactgaacctattctgggatcccacagctccccctacgacagggagcctggtgagggcagggaccagggctttcctgatgcctgctctgtccaagtgtgcacgcagcaggcactcagtacacatatgctgaacacctgagtgtcaccgacagctgcggaggcactggggcgcgaggtcgggaggtcgcgcggtggaacccgggggccaggtggaactcggtgtaacagagcccccagtggtcgcgccgc

SEQ ID NO: 25705 - DNA, 315 bp, Homo sapiens
  source 1..315: mol_type = other DNA
atgttctcacttatcagcgtgaactaaatgaggaggctcatgcctccttgaggcttttgagtactacacttagtaaccaggtgtctgcaggagaaacagtgtctctgaaacttttatttacatggactgacagtcaggtgagagtggcccttacctggcagagcctgaggatcaacttttcagccgttgtacaaattgggaaaatgtacactttctgggtatattctgaaaggctgggcttacagatacagacctgcaaatagctatggttgtgactgagtttcttcctaacaactaaacgggtcatttaaatgc

SEQ ID NO: 25706 - DNA, 480 bp, Homo sapiens
  source 1..480: mol_type = other DNA
tggataacatggcacatgtatacctgtgtaacaaacctgcacattgtgcacatgtaccctggaacttaaagtataataataattttttttaaatctcaccttttctccctcaaactttgatttacatggacaccaacagagggtgtagctagagcccaagtgtgtgacagtctgaaagtggcccttacctagcaaagccaagtggcttagtgtggggcaggttcatgcaagaaatttctctgatcctcctcaggatcaaggtcagtgctctcccagaacatttaaaggcagagagaagaattaccttttagggctaacttgtttccctttttttcttgtttagccattgtacaaaattgggaaaatgtacaccttctgggtagattctgcattcaacagacacagacttgcaaataggttgtgactgagtttcctttctcatgctgcaaggaaagcttgctggaggggtcatttaagtgc

SEQ ID NO: 25707 - DNA, 377 bp, Homo sapiens
  source 1..377: mol_type = other DNA
ttgctgcctatgaagacactgagagtagatacagagtgtcttgctccctggttgctttaggaaagtagaaacctatagagacgagcagggctgagtgggaactgcgctctctacactgaaacagagtagggacctcatgggggctcccttcccctatttggactccaaggagggaaattctatgctctctgccctcagttcaggaatgggggatgaaccatcccatttctggaaatgttgagacccagacttagcaaaggctcatagatgaccatgcccttctaccatcctcctttctgacttagaatgggaagagtgtggaggctgaagtgcacaacttccgctgcagcacagtcacaggcctgaaaactgaaact

SEQ ID NO: 25708 - DNA, 481 bp, Homo sapiens
  source 1..481: mol_type = other DNA
aatgttcattgacactgtgcaaatgagttcatgtcttttgcaggatgttctcacttataattgtgaactaaatgatgagactgggtactacgcttagtacccaggtgaagaaatcatatgtacacctcatgacatgactttatctgcatatgaagaaaaaaaatctcatctttctcccagaatctgcaggagaaacaatatctctgaaactttgttttacatggactccaagacaaagcagtatgtgacagacagatgagagtgaccctcacctggcagatcgtgaggcaggttcatagatcctcctgaggatcaaggtcaaaaggatctgacccttaaaggccctcccagaacctttaaaggcaaagagaagaattaccttctaggtcctttttccaaaattcccaattttttatttttagtcattgtacaaattgaggaaatgtacaccttctggctagattcaggctgggctttacaa

SEQ ID NO: 25709 - DNA, 520 bp, Homo sapiens
  source 1..520: mol_type = other DNA
tgttctcacttataattgtgaactaaatgatgagactgggtactacgcttagtacccaggtgaagaaatcatatgtacacctcatgacatgactttatctgcatatgaagaaaaaaaatctcatctttctcccagaatctgcaggagaaacaatatctctgaaactttgttttacatggactccaagacaaagcagtatgtgacagacagatgagagtgaccctcacctggcagatcgtgaggcaggttcatagatcctcctgaggatcaaggtcaaaaggatctgacccttaaaggccctcccagaacctttaaaggcaaagagaagaattaccttctaggtcctttttccaaaattcccaattttttatttttagtcattgtacaaattgaggaaatgtacaccttctggctagattcaggctgggctttacaatacagacacagacctgcaaacatctatggttgtgacagagtttctttctgccaaagggcatctctgagttgcagcatttaaatg

SEQ ID NO: 25710 - DNA, 368 bp, Homo sapiens
  source 1..368: mol_type = other DNA
cataagagtcaaaccaaggaatgcagtgggatgacattacaaattaatcttaaggaaatacgttatatctgattaagcacaactaatattaatgctaatgcatcctcgctcccacttatgagtgagaaatctcacctttaatctgcaggagaacctcagattttgattcacatgtctgagagacagagtgggagtggctctcacctggcagagccaaggggtgggtaaagaagacacaagtgttttctctacttctgtccccaggtcctagccaaggcacaggttagggaagcatggaggctacaggcacaggctccaaacaggtgtggttgtgactgagtctgtttctgacaccccaccctaaattc

SEQ ID NO: 25711 - DNA, 342 bp, Homo sapiens
  source 1..342: mol_type = other DNA
tcatccattggcagatgataatagcattactctattcaggaaggcagaggcctcatgacctgaatcaaagggttacgtttagttttacttgaattaataatgaaaacatctgccaaagccctgttgtagacattagttccacagcctcagccgaggccgtgtttgcctccggtgccatgatcctgggaggtgaagaactgaagttcagcgctgacgtgtgtttttctattaaaagactcatgctgacacagggagcacgcacccttggtcaatttttcacagagcgcatgctccgttcgcactgcgcatgcgtgcaggtaagcggccatctcgcgcaggcgg

SEQ ID NO: 25712 - DNA, 245 bp, Homo sapiens
  source 1..245: mol_type = other DNA
cagccagagggacttatcgctttcaaacattcaacatgtttggtgtctatttcctccattaaaaagatgaactccaggagagtggagattagaacagcacctggtacacacgaggcacagcccgtgcgaaggctatgagccctcgtgtcgacaggctcgagaatccaggctcactgcgcgtgcgccgagctccgggcggggaaggggcccgggggcgggactacggggtggcgtcacgcagcgca

SEQ ID NO: 25713 - DNA, 384 bp, Homo sapiens
  source 1..384: mol_type = other DNA
ctcttctctttatttaacttcaataaaaggtttacttaacaaaaattgtagctagtgtttccctggggccaagatataaatgaggaaacataatacttgatgatgcctgtaaagcttaagcgatctgtacctgggatacagaactaaggtcttcaatcccggggtaaactcggatcttcccacgcccgcgcggcgcacaatctttggatctctgcgatccgttgaaagagcaacggggctgcgccacctcccggagagaacccccagccctccacggcagggcgagatggcgccaccgcgtgatcccgccctcgcgcctgcgggtacggacagcgcatgagcttatgttgagggcggagcccagaccagccctgacttccgttg

SEQ ID NO: 25714 - DNA, 550 bp, Homo sapiens
  source 1..550: mol_type = other DNA
gtgccacattttcttaacagtctatcattgatgcacatgggtctgactttttaaaaaatccaatctgacaatctttttaaattaaggtgtttagaccatttacatttaatgtgattattgatatggttgagttaatcatcttatttgttttctgtcacaattctggaatgaaaagacgtttattattacatgtttcctccttatgtagcataggaaactagaaaaatgattttgaaagttaaatattgttagactacaacagtgaaattcttcctaggaaaagcaagcccttttttgcatttgtttatactattttaacaaagtgttaattattcatccttcaagataaggcaagtaattatctggaatccaggacatttgattctgaaatctccaatgtgagcaggtctacatgttgacataattttactttaaattcctgctcatttgcattctccatggagagaaaaagtaaattatactgacgctccgagagggaaactcacatggggactcccttaggggtcagcccccatagtatgctgggaaa

SEQ ID NO: 25715 - DNA, 449 bp, Homo sapiens
  source 1..449: mol_type = other DNA
tgtaatcccatctacttgggactgcactctatttgaaagcgtttgtgtttcatagagaatgcttttctttttgatgtaagtctatttcttaacacattagaaagaaagagagtttcattgtcaggaaatgctgcatttcaagtggtttcacagctagcataacgttgtaaaagcaaaaatatattcaaatttatttgacattgcatgctgatcaatcctaatttaaaataaggttcccctgaagaaacgcagatctctaatttattaggtattgattcatataataaaaatcttccttttaaaaaacaaagtactacatttctttgttaaaaaaaaaaaaaaaaccccaggaagttcttataggagttcctgaaattcagcgaaacacacaaattgtgttattttaaggcaagccctagcccaggcgcccaggccctcagcctgacttt

SEQ ID NO: 25716 - DNA, 409 bp, Homo sapiens
  source 1..409: mol_type = other DNA
caaattgatctgccaaagacccattgccaaagatccataagagtggaaggaaattcttaatattttttgaaagttactattattttcatttttctctttgtaaaaaattcatttaattcaatataaaaagacaaaaatctttggcacatgtttaaataataggcctatggtgatgtagagcctgtcgtcccattgaccaaagtcacaaaaatcacagccccgggtatttactgtggtttttattaagcgcctattatgtactacaggcggagctatcgcccagtcccgcacgcactcggcctcagggtcacactcggcggtcccacgctcaagtggcccggccagtggcccagaggcgtctgtgagtcgaacccgccggatgcgcgcgcgcctgcgcctccgcccaaaa

SEQ ID NO: 25717 - DNA, 737 bp, Homo sapiens
  source 1..737: mol_type = other DNA
cacgtggctgtgacatccaccacccgccgacgcccgcagcccgctgtttgggggccgccccctgcagcgccaggtccccgcgcggactacagttcccagcgtacatctcggtcggggggtccgaggggccgtcctgcctcaggcccatcctgggccgcggcccccacagggtctgtgaggagcgcttccccccgccccgggcgcccgctacgccgcgtccgaaggaggggccgaggccgggctcatctccccgggaggactccttcggcttcttgcggcccgaggctggccgcggggctctgctggagggcgctgagagccgggccccgaggccgcacggccggagactacaactcccaggaggcaccgcggcggcggcgcccacacgtcactcgggccccgccggtggcccggggaagcagcacgggcggggggcaggggctggggccgaccgggaggccggtgccaaggatgggggccgcccggctgccccgcgcgtgaggaggccgaggggcgcgccaccccggcccggggcggccgccccaggggccccgccacccccgcccggcccggcagtcgtggcccgggatgcggagccgggggccgccggtggagctgcgcggggtgagcggcgcggggaacggggactgcctgccgccctcgccctcgtcccccaccggcggaccccggcgggcattcgagagccgcgcggccaggccctcttagccctctgccgt

SEQ ID NO: 25718 - DNA, 354 bp, Homo sapiens
  source 1..354: mol_type = other DNA
aaagatgaatcccaaaggtggtattatttttacccaggctggagtgcagtggcacactcactgcaaccaagtgattctcctgcctcagtctcccgagtagctgggactacctaatttttgtgtatatatacaaaaattttgtatatattgtatattagtagagaagctgtctaagtcataccactagttccaaactcattcgatatgccaaatggccagtgggctgagagccagctttccgtgaggggaagtctcgaggggtttccctagacccatagggggcagccggagtcggctgccccagccccgcggggggcgatgcggtagctgcagcggcggcggcaggagtttccc

SEQ ID NO: 25719 - DNA, 241 bp, Homo sapiens
  source 1..241: mol_type = other DNA
ccgcgcccggccgcagggtgattttaaggcctttatgggcccaagttgcattataaaatgttatatcccagattcactggtgaactaattggtaaaaaccgttttgtttacattaaaatggttcaattgtgtggcttcagagcctgagctcaaactacggctaggccctagggaaagcagacgtcggagtcctagtgcgcctgcgtagccccgtgcgcaggcgccctgctgtgagcccgcc

SEQ ID NO: 25720 - DNA, 126 bp, Homo sapiens
  source 1..126: mol_type = other DNA
gatgagccactggccctaagtgccttacacatagtaggttctgctggtcttgaactcctggctccaacttggccagaagtccctgggccttgtctcaggcacactgggcggtgagcccctagccca

SEQ ID NO: 25721 - DNA, 313 bp, Homo sapiens
  source 1..313: mol_type = other DNA
aaattatagcgtggaagacaacgctataattatatatattatattccatatattatattccatataatatatattatattccatgcattatagcgtggaaggagggtagccgaggcgccgcgcccccagacctcctagccgcgcgcaggcgcactacggctagactgcaggccggcgggggccaggcatgcgcctggccgcgccgcttgctagcttcgggcggaggggagcgccgggccgacggtgggcggtcacgtggagcggccgcggacgagtcagttcagcttccggcaggatgcttccggggcgggca

SEQ ID NO: 25722 - DNA, 292 bp, Homo sapiens
  source 1..292: mol_type = other DNA
cacaccccaggtaatgggctgcagtaccccgtataaattatagcgtggaagacaacgctataattatatatattatattccatatattatattccatataatatatattatattccatgcattatagcgtggaaggagggtagccgaggcgccgcgcccccagacctcctagccgcgcgcaggcgcactacggctagactgcaggccggcgggggccaggcatgcgcctggccgcgccgcttgctagcttcgggcggaggggagcgccgggccgacggtgggcggtcacgtg

SEQ ID NO: 25723 - DNA, 215 bp, Homo sapiens
  source 1..215: mol_type = other DNA
cacaccccaggtaatgggctgcagtaccccgtataaattatagcgtggaagacaacgctataattatatatattatattccatatattatattccatataatatatattatattccatgcattatagcgtggaaggagggtagccgaggcgccgcgcccccagacctcctagccgcgcgcaggcgcactacggctagactgcaggccggcggggg

SEQ ID NO: 25724 - DNA, 432 bp, Homo sapiens
  source 1..432: mol_type = other DNA
ggaattcccagctacaccaatgactctcagaatcattatcattatagtaggccccactgccgcacagtggagcgggacttgaacattcgacggccaattttgctcaaacatcaatactaataataatagtatagtaactttataaagccggtgatacagtcggattctaacccgcccgcgcctcacctggcccaccgggcccgcgcccactcgcgccgcccgcctcccggcggcgccaactgtcagacactcctcccccggcccgggctgcccgccccggaagcatcctgccggaagctgaactgactcgtccgcggccgctccacgtgaccgcccaccgtcggcccggcgctcccctccgcccgaagctagcaagcggcgcggccaggcgcatgcctggcccccgccggcctgcagtctagccgtagtgcg

SEQ ID NO: 25725 - DNA, 438 bp, Homo sapiens
  source 1..438: mol_type = other DNA
tatgatcatgctgctgcactccagccttgtccctgtctcattgagagaggtgccaccctgccgtgaaaagaggtgccaccctctgtgggccttaaatccctcttgggagatggggtggatcggaaaataaatttttttaaatccctaccaaaatatcagctggctttttttaaaaaatcaaataccaaaattattaatttcatttatgtatttatttttgactaggtaatgcatgtccatggtacacaaattcacaaggtttgtaaatgagaaaagacgtgaggttccttttgttctttggccccccaacccggccaggctggagcgaccgtgtctggggagccgagccccgcttctcgctgcggtgagcccggactggggcacgcactgcgcagactccccgctgcagtgggcggagctcccacaggccccgccccc

SEQ ID NO: 25726 - DNA, 143 bp, Homo sapiens
  source 1..143: mol_type = other DNA
aataaaaatgaacacttttttttttttttcacccaggctggagtgcagtggtgcaatctcggcgatggtctcgaaaaaataaatacattttctaatactgggcgggggagggggcccagcctggtaccccacccccactccag

SEQ ID NO: 25727 - DNA, 342 bp, Homo sapiens
  source 1..342: mol_type = other DNA
catgatcacaccactgcactccattttacacccttgattcaaaagcagggcttcagcactagaactgggggtcccctgaatttgtgtgaaaaataataccaaatacttattagtaaccctcattatagcaggtcacccagcgaggaagtggtcgcgctgcttggccaggcccgggtcctggagccaggagctgagctcatggcagagatctcggcccaggcaagagagaggcggctggtggctgtcccgtggcccccaccccttgggagctggaggagggggatgtttgtttctccaccacccaccctctggtgacgtcacacccccgcagccaatggctcc

SEQ ID NO: 25728 - DNA, 411 bp, Homo sapiens
  source 1..411: mol_type = other DNA
ttgagacagagtctcgctctgtcacccaggctggagtgcaatggcgcaatcttgcctcagcctcccgagtagctgggatcacaggtgcccgccaccacgccaaattgtgagtgtttgttgaatgaagtgagggtctcctcaggcccatcgggagccccgaccaatcccttctacccctcctgggaggagggctctggctggcttctggccacaccccaatgcttggttgctgccaggcctggaaggcatttcccagagctcagcacattcctgccttccagaagggagggaggcccccagcattccgggatcctgccatcctggcctggtggccacccaggctggtcagaagctgctgacatgcgctttgggggtaatcccccagcctcagcccagcccaggcctggggcc

SEQ ID NO: 25729 - DNA, 329 bp, Homo sapiens
  source 1..329: mol_type = other DNA
cccagctactcagtcgtgcccctgcactccagctctgtctcaaataaataaataaataaataaatctgaagatttttcatgaattaatttaatccttaaaaacaatcctgtaaactaggcgctattttctctcattttaaaggagaaacagaccagaagcccgggatgtgattccgttggtatcgcactcccatccagcattgcttgagtgtggtattgtgttcttatagatacgatcctacttaaagtatcctgtaatccggagtgcagctgcccgggcatgcgccgcccatcaccatgcagggccaatccctggggcggagggcggc

SEQ ID NO: 25730 - DNA, 449 bp, Homo sapiens
  source 1..449: mol_type = other DNA
aaaataatattaataataaagatccagaggccttttattgtcataacaaacagagaaaatcctttcgttttcctgatttccattgaggctacgatcgcctaggcaacgcgggccgcgccacgcgccccagcgtcctccctcggaaccccgggggcgcggcctcctccggttgctcggccccgcccgcctgcacagcgacttggggaggggcatgccagcccctctggctccacggtggagtccagaagcggttctgttggaccggccgccctccaccccggagtcgctgccccgccccctgccagttgcacttctttaaatggcccggggcgcaggggtgggcggatccggcgtctcggggcacgggcggatggctccgcccagccaatcgacgccccgcggcgggcgggactccagccaatcgcggctcgcggctcggctccggggcg

SEQ ID NO: 25731 - DNA, 498 bp, Homo sapiens
  source 1..498: mol_type = other DNA
cggtgtcacacatccttacacgagacatgtggtgtcacacactgtcacagtcgctgacgcagtgtcacccacggtgtcacacacgtggtgtcacgtgtagtcacactgtaacacgggatcacactcagaggatgacacaaggtgtcacccacagtcctgcttgccctccgggtcactgagtcacacagggtcgacacagtgggaggccctggggcttagagtgcgccccagatccgctccaggctccgggagagggggcgtgagctacgagaggccgtgggtgaggctcgcctggccccgcccctctccgggaggtggagcgcggaggcagggcgctgagtgacaagttatcttgtggccccgccttccagtctaagtggcgcgcagagaggggcccatccgcgttaggccccgccccttgacctgagccgcgggcggagagtctgaggcgtggcccttcgagccagctccgccccgttgttcctggcttgaggggca

SEQ ID NO: 25732 - DNA, 479 bp, Homo sapiens
  source 1..479: mol_type = other DNA
actgtgtcgaccctgtgtgactcagtgacccggagggcaagcaggactgtgggtgacaccttgtgtcatcctctgagtgtgatcccgtgttacagtgtgactacacgtgacaccacgtgtgtgacaccgtgggtgacactgcgtcagcgactgtgacagtgtgtgacaccacatgtctcgtgtaaggatgtgtgacaccgcgtgtgacggcgtgagggtgtgaccccgtgagaccccacaggaggcgcgcaagcgcgtggatgcggggcgccgaggcccccgcgagtatgcgagcgtgaccccgtgggagtgtgcagcgcgtgacgccgccgtgccctcgcgagtgcagccgtgcaccccacgccgcggccgggtgtgactgcgcgtgggcctcgggcggcggggcgcggggaccgcgggcgggagggggtcccgggggcgcgctgagcgcggcggcggcgcgagagagggaggcgcgg

SEQ ID NO: 25733 - DNA, 478 bp, Homo sapiens
  source 1..478: mol_type = other DNA
atccacacattagggacgatctcccctaatccgagatggtccaggcccccttccttattagtgacggttcaggaggaaacgattctagactttggccacattagagatggcctagtaaacggcctggccctggttcagtgttgaacacccatgggagattgttccctcccccataactggggtaggccgggacttgagccactggaggaaccccctgttcccccggagattgtgagatgttccaggtcgccctcccatatcccctgtccacatgtggtggccaggagccattagatttggtccaggagaagccccccacccgaagccttggggcgagtggtggttcctcctgcacccccacctggggccccgcaaagaggcgggcagggaggcaggcagggggcgcacgcgggcgggcgcgcggccgccgcgcgggggcgagggagggggcgcgcggccgccggagcctcagccttcg

SEQ ID NO: 25734 - DNA, 565 bp, Homo sapiens
  source 1..565: mol_type = other DNA
aaacgattctagactttggccacattagagatggcctagtaaacggcctggccctggttcagtgttgaacacccatgggagattgttccctcccccataactggggtaggccgggacttgagccactggaggaaccccctgttcccccggagattgtgagatgttccaggtcgccctcccatatcccctgtccacatgtggtggccaggagccattagatttggtccaggagaagccccccacccgaagccttggggcgagtggtggttcctcctgcacccccacctggggccccgcaaagaggcgggcagggaggcaggcagggggcgcacgcgggcgggcgcgcggccgccgcgcgggggcgagggagggggcgcgcggccgccggagcctcagccttcgccgccgctgccgctgccgtcgcagttgaggggcgagcacccgcccgcccgctgcagggacgccccgccaacgccactgccgcttcaggtctcgggggcgcccaggggagggggttggcgcgcaccccgcggacgcagacaggggagggggctcgggcgcgtgc

SEQ ID NO: 25735 - DNA, 462 bp, Homo sapiens
  source 1..462: mol_type = other DNA
agctggggtggtgggggcagtaattcctgcccccctctctgccctagggatgggcacgggggcgctggtgaggtcccctggaccatccagggtgctagggggcagggaggggacaccccctccccgcctttacctgggaggggggagtgaaggggccctagccccctgcactccgccgccggaggggcgtcaaagctcaaaactgttttcctctctcctcccccctccagttgtaaatgccacttcatgaggggaggggcgaggggaagcccacccctgcatgcttctggctggagcacctccctgggggtgggcagtccccatggccgcctggagaagccgctggggcccgggggtgtacttcaggaaaggcggacccctttaaggaaatcgctagtgactcctggagtctctggcccaatgagcagctatggaggcggggtccgggtgcacacccggaag

SEQ ID NO: 25736 - DNA, 352 bp, Homo sapiens
  source 1..352: mol_type = other DNA
gggattacaggcccgcgccagggcacctagccggaaccctggaatccctgaagcccagggtcttgagaagagatcaattctttgagaagatccaatgtgaacttgggaccctcaagggcttccagcttctactctgaccgaattctcccagaactgggagcagagagctgccagatggagtccagcttaggggaccctgcccccaaccctccccccaccgcgtggggaactcgaggtcccccgcgcccctaggattggccgcgcggcgagcgctggcggcgccgggctgtgattgcggcctcgggcgggggcgggggcgggggcaggggcggggccggggctagcctgaccc

SEQ ID NO: 25737 - DNA, 530 bp, Homo sapiens
  source 1..530: mol_type = other DNA
cactgacccgcgggggtggggccgggaagccaggcgtccgggctccccgcggccgaagagggagggcgctggcccgtccgaaccagcccagacaacaaaagcgattgtgcgggttggcgcctgcctgggcaccaaatgctcaagattgtggggcggctgggggccaaaggcctcctcctgttgagcctcgggccagatggcgttctggccagatgtggctacatcttcacatgtatctggctgtccagatgtaccatgatagctctgtgccccgggcagaagatctggggggaaacccgcccgccctacaggcccggtccacttgttggtgcgcggatggggacagagggggcgccccgctcacccctgcgagtctagcgcccagcctgcgagcctctggctaagcgcccagccccacgcgcccccgcgcggccgccggggagggagtggtgaggagggggggcctgagcgggggcgcgggcgacctcccccgcgggcgggcgggcgggtgcggccgggcccctcgggcg

SEQ ID NO: 25738 - DNA, 390 bp, Homo sapiens
  source 1..390: mol_type = other DNA
cctccccttcccccagctcttttctctgcgctagggttggggggagagggggaggagctcgccagcggcctccaggtgcagatggccagcccccctgcagggctgtggcagctgaggcctcccacacacacagtgctgctttgccaaacccacaggattggcgtagggggcggcgggggcgccgtagcggccagaaccgcgccctggtcccaccccggcgccaccgctcctgcccgcccccgccgggctggggaaccatgggcgcctctagaagcgctcagctcgggactggccaatgggcgtggcggggcggtggccgcgccggggcatatacggcaggcggcgggccaatgggcggggtcggggcggggagccgaggccgagggacgc

SEQ ID NO: 25739 - DNA, 270 bp, Homo sapiens
  source 1..270: mol_type = other DNA
ggggaagcatcggcatccctccctctcccagtggtgggaaagatgccctgagtcagcctgttgtggggagagcaggctttccaacgcgcgcgcgcaccaggaagcagagggctcccagtcgcaccattccgcgtcgcgtacaaggtggaagggcagacagggcacgcttgcgctcccgcgatgccgaaactccgtgccagtcagcgagttgctgccgcgccattggttggctggccgaagggggcgggcatacagaggctcccggaagca

SEQ ID NO: 25740 - DNA, 328 bp, Homo sapiens
  source 1..328: mol_type = other DNA
cggggtgtcttcctgggacgggcctcccgtgccctgcgcaggcccatcctggtaaaacttttgggcccaagaacgaggacatgggatcacctggccctgacctgctccctagcctcttacccagcggtggggcccaggccccagggccccacaaggcttcagccacattgcctggagggcctggcttcttggccaggccttgctagggagcctccgagtccgcaacctgctggggccctcctgtgcttccgggagcctctgtatgcccgcccccttcggccagccaaccaatggcgcggcagcaactcgctgactggcacggagtttc

SEQ ID NO: 25741 - DNA, 647 bp, Homo sapiens
  source 1..647: mol_type = other DNA
gccttcaatatcctgttgtgtcctggagccatcagtatacaattctttccaggagccatgtccagaggttatcagcccaggacttgaccctctctggctgagtcgctgtccagggcccatgaacccctggctgtgtccaggggctggcctcctcgggctgaaactggaggtcggacctgtgcggatcagtcctctagatgcgtccggaggctggacctgtctctgtccccggcgcaggcccgaggccggccctctcaggctcgctgtggaggctggacccctctgtccgggcccagggcccgcccccctccggccgccccgccggggcccctgcgccgggcccaggtcgctgctgtcccggctgccgccgccgccctcctcgcggcgcctccagtcccatgcgggccgccgcgggcagcgccccggcctccgcctcgttcaggctcccacggcacgggcagcgcctcatgcccgctccttcggttcgggcttcggccgacccggcccctcctatccctttaaatcccgcgaggggtgtggctggggagccccgactcccgggttccggcccgcggagctccagcccgccccgccgcgcaagggttaaccgatactcccctgagacggagccttgtccgactccgcct

SEQ ID NO: 25742 - DNA, 655 bp, Homo sapiens
  source 1..655: mol_type = other DNA
tatggctctgtccagggaccttcaatatcctgttgtgtcctggagccatcagtatacaattctttccaggagccatgtccagaggttatcagcccaggacttgaccctctctggctgagtcgctgtccagggcccatgaacccctggctgtgtccaggggctggcctcctcgggctgaaactggaggtcggacctgtgcggatcagtcctctagatgcgtccggaggctggacctgtctctgtccccggcgcaggcccgaggccggccctctcaggctcgctgtggaggctggacccctctgtccgggcccagggcccgcccccctccggccgccccgccggggcccctgcgccgggcccaggtcgctgctgtcccggctgccgccgccgccctcctcgcggcgcctccagtcccatgcgggccgccgcgggcagcgccccggcctccgcctcgttcaggctcccacggcacgggcagcgcctcatgcccgctccttcggttcgggcttcggccgacccggcccctcctatccctttaaatcccgcgaggggtgtggctggggagccccgactcccgggttccggcccgcggagctccagcccgccccgccgcgcaagggttaaccgatactcccctgagacggagccttgtccg

SEQ ID NO: 25743 - DNA, 315 bp, Homo sapiens
  source 1..315: mol_type = other DNA
ctcccccttcagaggtgaacggctgactcaggagctgggtgcctactggtgccaggcccggggcccatacatgagatcattagaggccggcagatctctgagcctctgttctcactgaatcgtgtcagggtctgatacagaacaagtactctatacatgacagagatttcttacccctgcgtgaagaatgggcgcgcggtggagggagggggcccactggcgcgccaccaggaccccggtgccctagatgcgcttcggatgctcagaggcaaaccccctccccttgggaggcggagtcggacaaggctccgtctc

SEQ ID NO: 25744 - DNA, 337 bp, Homo sapiens
  source 1..337: mol_type = other DNA
aagcggggctcagggcagactccagccaggggcccccctcagcaggcaagctggcaagctgatggactccggactcggctcccagccccacggctcccagccccacgtgaggctaacctgcccggccggtcctcctgattcaccaggggagagccacacccaagctgggggaccaggtgggctcccggctaggccaaggatcctttggaaggtttgtgacccttgtggggtaatttcaggggttcctgggccccataaagtcggtcagtggccctccattgtagacccccaggatgggtcccactcaccccagacctgtcctcgggatcgctggcac

SEQ ID NO: 25745 - DNA, 422 bp, Homo sapiens
  source 1..422: mol_type = other DNA
ctcccccttcagaggtgaacggctgactcaggagctgggtgcctactggtgccaggcccggggcccatacatgagatcattagaggccggcagatctctgagcctctgttctcactgaatcgtgtcagggtctgatacagaacaagtactctatacatgacagagatttcttacccctgcgtgaagaatgggcgcgcggtggagggagggggcccactggcgcgccaccaggaccccggtgccctagatgcgcttcggatgctcagaggcaaaccccctccccttgggaggcggagtcggacaaggctccgtctcaggggagtatcggttaacccttgcgcggcggggcgggctggagctccgcgggccggaacccgggagtcggggctccccagccacacccctcgcgggatttaaaggga

SEQ ID NO: 25746 - DNA, 184 bp, Homo sapiens
  source 1..184: mol_type = other DNA
ttgacctctgactcaaaggtcagctcaaaggttccgatgagttaccggtaccacagatccggttccggatttaaggaccccaccctgttaaccgtcaggtgcctagattctggaactcagctcttaaacctttaaaagtcatgtcttcggcctggagaagagccagctcctgaaggaggccttt

SEQ ID NO: 25747 - DNA, 133 bp, Homo sapiens
  source 1..133: mol_type = other DNA
aagagctgagttccagaattaggcacctgacggttaacagggtggggtccttaaatccggaaccggatctgtggtaccggtaactcatcggaacctttgagctgacctttgagtcagaggtcaacgcggcgac

SEQ ID NO: 25748 - DNA, 141 bp, Homo sapiens
  source 1..141: mol_type = other DNA
tcggaacctttgagctgacctttgagtcagaggtcaacgcggcgacatcggcggcaggcgagcggtacgcttggcgtccgggccttcctgggcccgctcgaggccaggctggtgctccgcccaccgggtcgcgtagagcat

SEQ ID NO: 25749 - DNA, 218 bp, Homo sapiens
  source 1..218: mol_type = other DNA
cagtgagctatgatcacatcactgtacttcagcctaccatacctcaaaataattatttaaaaaaatggattaattgggcggatggcaccattgcactccacctgggcaacagggtgagaccaggggttataatcactcctcctgacaatccatttgagttcataacataaatatgtacttggttgcctagcctaaggttcagcataagcacaggaaat

SEQ ID NO: 25750 - DNA, 295 bp, Homo sapiens
  source 1..295: mol_type = other DNA
gtcttgctctgtcacccaggctggagtgcaatggcccatattggccaggctggtcttgaactcccccggagtgctgggattacagttaggacctgatatggtcccacgttctgttctagacaccaagatacaacaacaaatgatcctttttattctaatggagggaaaatttaaaattaacttaataataataataaaagcaaatatgcgctgctgtgtaggccttcagcaggcacaagctccaggttcagggagattactatggagatctggctgctcgcctgggctatttccc

SEQ ID NO: 25751 - DNA, 269 bp, Homo sapiens
  source 1..269: mol_type = other DNA
accatacctcaaaataattatttaaaaaaatggattaattgggcggatggcaccattgcactccacctgggcaacagggtgagaccaggggttataatcactcctcctgacaatccatttgagttcataacataaatatgtacttggttgcctagcctaaggttcagcataagcacaggaaattccgcttctgtggccagaggggacagcggaggaggatggaattgaatatttcaaccaccttgaccaagaacaggaggaaattggag

SEQ ID NO: 25752 - DNA, 249 bp, Homo sapiens
  source 1..249: mol_type = other DNA
cacttgtgtggccagacctgggccctgcagctgctggctttatgcaaatcaatcagcccagtgcaaacgagcgctcctaagcttaggtttcggacacaagcaaaggcagtaaaggttttcttggaagattatctggaataacctgcgcctatctgcccagagctaagcagctctgcagtccctcccacttgctcagccaatcgctgggctcggccccgccccttggtatccagctgccggagcgggtcg

SEQ ID NO: 25753 - DNA, 120 bp, Homo sapiens
  source 1..120: mol_type = other DNA
agtggggagagccccagagggtcagggccagccctaagtcggtacctgactcagcccaggaagtcagggaggactgtgagctgagctctactggggccctgacctcagagtgtgtgcccc

SEQ ID NO: 25754 - DNA, 443 bp, Homo sapiens
  source 1..443: mol_type = other DNA
ccgccctacgccctcaggtggcctgcaggggactggtgcagccccgaggacactccccttcaccgacccggcgggagccttgagtcccagctctccagagcaatgggagcgggtcttgaaaataccattttataaaagatacttatgtaaattactgacgtgcgaatttacatactctcacctccgttcctggacggcgagaaggagacgcgcaccgcgctgccgaactcggtgccccgcgctgggcggggggcgggtaggcctgtcaaatcacatcatttgcgtgccccgccactgcgttccccctcccgcgcaaagggggcggggcggaggatgttcctcgccccgctccgccccgccccgcgcggctcgggcctgcgcaggcgccgtcccctccgcggggcgcggtcacgtgcccaccgggcgaggcggggcggggcgtc

SEQ ID NO: 25755 - DNA, 554 bp, Homo sapiens
  source 1..554: mol_type = other DNA
gagcgggtcttgaaaataccattttataaaagatacttatgtaaattactgacgtgcgaatttacatactctcacctccgttcctggacggcgagaaggagacgcgcaccgcgctgccgaactcggtgccccgcgctgggcggggggcgggtaggcctgtcaaatcacatcatttgcgtgccccgccactgcgttccccctcccgcgcaaagggggcggggcggaggatgttcctcgccccgctccgccccgccccgcgcggctcgggcctgcgcaggcgccgtcccctccgcggggcgcggtcacgtgcccaccgggcgaggcggggcggggcgtcgcgcgcggtgggggcggggtatggcgcgctgtgcggcgcagggcggctggcacaaacggcggcgccggggccggagaagccggagccggggcgccggcgcgaaccgggcggggtgtgggggcgcgcgccggggcctgccggggcgaccccgggaagggggcggggagcgcgcgccgggcggaggcggaggggagggggtccgagcggcccttaggcc

SEQ ID NO: 25756 - DNA, 493 bp, Homo sapiens
  source 1..493: mol_type = other DNA
ccctgaagggtcccttcccaagcccttagggaccgcagagggcacgagaagagctcttgctgtctgccctgcctcaccctgccccacgccaggcccggtggcccccagctgcatcaagtggaggcggaggaggagggtggcaccatgggcccgggcggtgccctccatgcccgggggatgaagacactgctgccatggacagcccgtgccagccgcagcccctaagtcaggctctccctcagttaccagggtcttcgtcagagcccttggagcctgagcctggccgggccaggatgggagtggagagttacctgtccaggagtgcctagtgaggcctcggcagggagtgggacccccactgccagccctcttcacggtgcggccgctgcagagtgaaggcgctgcagcgctggtcaccaaggggtgccagcgattggcagcccagggcgcacggcctgaggcccccagggccccttcacccagcggccctggg

SEQ ID NO: 25757 - DNA, 374 bp, Homo sapiens
  source 1..374: mol_type = other DNA
tccatcctgtctccaaggcaggagactgcccgctgggccgagtgcttggccctggaccaggtggagctcagaacaatctgggtctttttgagaatctgtcagaggccacagatcctctcttaagacaaatgctcatttgcttggagtttcccctcatggcctccagctgcctgttcaggaacctggggtcaggagcccagcacaggacagtggtccatagggcctttccgggctgctgggcctggccttgagtccaaggcttggtgtcctttggacaaggccctgtggggagtgcccactgctcaacacagtgatgccgatgtcctctgtggagctggctcagggaccagggctcccccggggccaaggcctgt

SEQ ID NO: 25758 - DNA, 443 bp, Homo sapiens
  source 1..443: mol_type = other DNA
ctgagccagagccggcccctccctgggcttggctcctgtgcgggcgggatcagtggccggctgtcgtcctcgtcagggggagaccaaagctgagtggcccagatgggacactgctctgagcctcaatttgctgatccacggaatacaaaggggacagggcccggtgaccttgattgtcctagggaagtaaggacaggccaggctggactgagaacataggggaggagccctcccctccccagtgggccccatctggactctctcctgtactccagagtaaggctgtggggtgctcaggtgcccctggttggggacataggtgggagagagttgactcccactggcagcaagggctaccagaggggaccccagggagagtcacagtcacaggcttctggtcccacctgtccctcccctaggtgggaggggtggagagcaagctg

SEQ ID NO: 25759 - DNA, 308 bp, Homo sapiens
  source 1..308: mol_type = other DNA
agaattcctggtctagggctgtgaggtgagccctagctgggtgccaggccccatcttttggggagcttggaacccttgacccaaggagtcatggggaaatccctgccaggccatggtggcgtgttacccaggcaacgggctcgggtacgacaatccccacggcgatggacacacagcgggcagtgcgatctgccggctcttcctgggaaatgggtgggaactcccctctttccgggaatggtgctgtctgcccaatggcgctgcgcctcctagtgggctcccggggcaccgtgggaggcagcggctcc

SEQ ID NO: 25760 - DNA, 288 bp, Homo sapiens
  source 1..288: mol_type = other DNA
agatctttatataaaatgagaaacataaacaacaatcataatattaatagggatgatacaatgggttggaaaccagcggacaacctctccaggtgtggggaaagttcccctgccccttcccaatcagagatgggcagtggaggttctatggcacccatcctggcctcactagcccctggacccagtgctgggctgctgggctttctgggagaagggtcttcctagccccgagactttcaagtctggggtaccacagcccaagctagggaggtaattatgtaatcagcc

SEQ ID NO: 25761 - DNA, 269 bp, Homo sapiens
  source 1..269: mol_type = other DNA
cagatttgattgaattgaacaattccttcttttcatagagtattgctctgtcacccaggctagtgtgcagtggcataatcctggctcactgcagccaggttcaagtgactctcttgcctcagcctcccgagtagctggaaccaccttagggaaaatgtaaatgcactttcatatatgaaactgtataaatacaaggtatatagtgtgcatgctcacctgtgcttacaccactgtatccctgccaacatctagagagtgaatgctccttg

SEQ ID NO: 25762 - DNA, 284 bp, Homo sapiens
  source 1..284: mol_type = other DNA
ggccaaatttgattgaattgaataattccttatttcaggctggagtgcagtggtgtaatcttggctcactgcagcaagtgattctcttgcctcagcctcccgagtagctgggattaaaagtacacaaatgtaaatgcactttcgtatataaaactgtataaatacaaggaagacatacagggatgcaagcaggcatggacaaatgcatgcaagccctatgcttcaatatctacagagtgggacaactttttctaagctaatgctcctggatgatgatgaaaaag

SEQ ID NO: 25763 - DNA, 212 bp, Homo sapiens
  source 1..212: mol_type = other DNA
taaataacaatcatagtattaatagggatgataggttggaaaccatacaaccccacgtgtggggaaagttcccagccagagatgggcagcggaggttctatggcacccatcctggcctcacgtcagtccctgggcccagtgctgggctgggtcttcctagccccaagactttcaagtccatatgcctggaggattcgtgattatataatcaa

SEQ ID NO: 25764 - DNA, 92 bp, Homo sapiens
  source 1..92: mol_type = other DNA
cactgcgcctggcctactagggccccaggagggcccccaggcgcagccccctcccacggcacctttccagctggctgtgagccctagggccg

SEQ ID NO: 25765 - DNA, 412 bp, Homo sapiens
  source 1..412: mol_type = other DNA
actgtatgtttgaaattttaatatttttataataaaatacgaaatcaaaatgcttccgtttgcaatagaaataaaatgcagtcttttccaagaccttgcaagatggacttcatgaatcttatctcctacattcaatctttgaaaatataacaaatatttattgagtgccactttgggatacagcagtgaaccaaacctacaataattcatgcacaaatggttctaaccatctcatcttcatctgcatgtggatatgagctcaggaaggccagagcccttaataacagttagttgcagaaatattagctaacatctatttagtgctttacatgcgaatgaatgaatgactcaatcattctaactggcccaagtcaaaatattaactctgccactcagccaagttgacctgggg

SEQ ID NO: 25766 - DNA, 446 bp, Homo sapiens
  source 1..446: mol_type = other DNA
catctcatcttcatctgcatgtggatatgagctcaggaaggccagagcccttaataacagttagttgcagaaatattagctaacatctatttagtgctttacatgcgaatgaatgaatgactcaatcattctaactggcccaagtcaaaatattaactctgccactcagccaagttgacctgggggggtcaccgccagatgcggggtgtggcaacctccaggcggccaaagtctctgggggcccaaggcgctgtctccgccgcccaagccccgcgtaaacctgggtgacctcgggttcccgacatcaggcggcggcggtggtccgggagaaacccggcggcggggagataagcctgcccaggaggcagggggctgggctagctgccccgccccgcgcctgacttcgttggggagggagacgcccggctcccgcccctaactagccc

SEQ ID NO: 25767 - DNA, 144 bp, Homo sapiens
  source 1..144: mol_type = other DNA
cgatactcagggctcactaagttttaatttttaaactagtgattacatacagatggacaaactgaggctcaggaggccagtcacttgcctgtagcccacagtagtggcactgggattccaacttgggtccccttcggccccgcc

SEQ ID NO: 25768 - DNA, 259 bp, Homo sapiens
  source 1..259: mol_type = other DNA
aagttttaatttttaaactagtgattacatacagatggacaaactgaggctcaggaggccagtcacttgcctgtagcccacagtagtggcactgggattccaacttgggtccccttcggccccgcccccggatagagagacacggcctcactggctcaggacagggggcacagccaccagggtccccttcccaaagagctgatcctctcctctcttgccaggtggcccctgggctctggccctggtgggcggaggcaaa

SEQ ID NO: 25769 - DNA, 254 bp, Homo sapiens
  source 1..254: mol_type = other DNA
tgggggtggtgcaatgcattagggatgcctcctttcccgcaggggatggacgatctcccactcaccttctgagtacagagtgtggactctggtgcctccagaggggctcaggtcacataaaactttgtatgcccaccgtgtctggcacgcactcgcgagcgggcgttcgcgggtgtggccggcagcaaatggagaaacccttggcagcgcccggacgccctccagtggcggctccaaacttttttagaacaaat

SEQ ID NO: 25770 - DNA, 193 bp, Homo sapiens
  source 1..193: mol_type = other DNA
tcaccttctgagtacagagtgtggactctggtgcctccagaggggctcaggtcacataaaactttgtatgcccaccgtgtctggcacgcactcgcgagcgggcgttcgcgggtgtggccggcagcaaatggagaaacccttggcagcgcccggacgccctccagtggcggctccaaacttttttagaacaaat

SEQ ID NO: 25771 - DNA, 332 bp, Homo sapiens
  source 1..332: mol_type = other DNA
ggtcgcgtgcagagcgcccgttccaaggcggccgcggactacccaagggaaggggaggccgtgtcctttacaacttgcctcccgttgttacaaaattttgcttttcctaaaggcaactgggttctgtcaacggcaaggggcgggctcctgaattcatctctttccggtttcttaaaggcaacaggaaggaggggtttctgccgactccaggaatgtgtgttacagagacacttagtccgcgcttcgacgtaggcctaggtttccgggcccgcgcccgttgccccacgcaggtggcggcggccattttgagccgctgccgccattggagtggg

SEQ ID NO: 25772 - DNA, 270 bp, Homo sapiens
  source 1..270: mol_type = other DNA
gagggtaccctcccagaaagaaggcttccttgaccctccagcctggggtggacagctccctcagccggatctcccaggctggtggctcacgcgcgtaatcccagcacctggctctacaaaaaaattttaaaaattagccgggcgcagtaatattcctgaattcctgaaggagtcggctccggggagcccctttccttcctggctgcggagggcggagcccgagagaggcgccttaggcccggaacttcggtgcctgggcgcagcggtgca

SEQ ID NO: 25773 - DNA, 344 bp, Homo sapiens
  source 1..344: mol_type = other DNA
cttgacctgggtcatctaatttcccactataatactggaatggagagtcactctacacctggctcagagagaggaatgttattgctgtttttcaaagaataacaggaaactgacatgcagaggcactatctgagtccaaagcctgtgcctttgatccagggctgtggatcacgaggtcaggagatcgagaccatcctggccaatagtcccagctgctcgggaggctcggtgacagagcgaaaaaaaattcatttaaataaataaataaataaataaataaataaataaataaataaaagctgtcagctccaaaactcctagagttgggagcaccagcctgctag

SEQ ID NO: 25774 - DNA, 332 bp, Homo sapiens
  source 1..332: mol_type = other DNA
acaaccttatactattattatacccgtttaatagaaatttgccccaaggtcacatagctgcagactgggatcaaactcaagctgtctcgagacagggtctcactctgtccggcaggctggaactcctgggctcaagggatcctcacgcctcagcctcccactcccttccccagctggttagggaaagtgaagagaaaaggaattaaggtgttttcttttctttttttgtagctgggatggcgccgcgttggccaggctggtctccaactgacctcaggtggtccacccaccttggcctcccaaagtgctgggtgcttccagcctcccatagt

SEQ ID NO: 25775 - DNA, 269 bp, Homo sapiens
  source 1..269: mol_type = other DNA
gagacagggtctcactctgtccggcaggctggaactcctgggctcaagggatcctcacgcctcagcctcccactcccttccccagctggttagggaaagtgaagagaaaaggaattaaggtgttttcttttctttttttgtagctgggatggcgccgcgttggccaggctggtctccaactgacctcaggtggtccacccaccttggcctcccaaagtgctgggtgcttccagcctcccatagttggcccggaggttaccaaaggaaag

SEQ ID NO: 25776 - DNA, 360 bp, Homo sapiens
  source 1..360: mol_type = other DNA
tggcccggaggttaccaaaggaaagcctgagggatcttccccaaggctctgaaccacgcgggacgcctgggtcctcgcatggatgccgacggggccggctgagtgggagccccgcccgtagctggggggcgggaggcgccgcagccaggagggcggggaccagacctgccccgtctcgccccgggctccgcgagcgatccccgcctccgccgggggcatgggaaggtgaggccgccggacgctggggtttccccagccacccggggtccagactgccagcgtttagcgcagcggggtcctcctgccccttggtggaagcgcaggctcctccccccgcgcgtggcacccacgtggggcttt

SEQ ID NO: 25777 - DNA, 331 bp, Homo sapiens
  source 1..331: mol_type = other DNA
tggaagttcaacgcgtcctggaagagggagccttctaccctccccgggtggtagggggccgtggccccggcactccggcgccccctgggggcccccctcccggctcccagcacgcgggtgaccctctccccggccacccggtcgcgggtgctgttgtacagggcgagcacggcctcgggcagcgggccgggcggcacctccccctggctcggggggctggcgagccgcagcttggacaggatctggccgcggatggcctcgatgcgcttccgcttcaccagctccatgtcgatagtcttgcaggtggatagtcccgcggccggccggccag

SEQ ID NO: 25778 - DNA, 652 bp, Homo sapiens
  source 1..652: mol_type = other DNA
ccacagcgcatctggatcacccgctttggtggcgcttggccgccaggaggcagcaccctgtttgcggggcggagccggggtgcccgccccctttcccccagggctgaagggacccccctcggagcccgcccacgcgagatgaggacggtggcccagcccccccatgccctccccctgggggccgcccccgctcccgccccgtgcgcttcctgggtggggccgggggcggcttcaaaaccccctgccgacccagccggtccccgccgccgccgcccttcgcgccctggctccctccgcggagcagccagacagcgagggccccggccgggggcaggggggacgccccgtccggggcacccccccggctctgagccgcccgcggggccggcctcggcccggagcggaggaaggaggcagcctgaggccccagagtctgagacgagccgccgccgcccccgccactgcggggaggagggggaggaggagcaagaggaaaaaaacttttgagacttttccgttgccgctgggagccggaggcgcggggacctcttggcgcgacgctgccccgcgaggaggcaggacttggggaccccagaccgcctcccttggcgcccccatcctcgggagtcgccgacccggcctcccgcaaaga

SEQ ID NO: 25779 - DNA, 560 bp, Homo sapiens
  source 1..560: mol_type = other DNA
acccaccagctggcctgccccacgtggcggcccctgggcagttggcgagagccgcagctgctgcatggggacaccatgggccgaccgctatcgcctgcacacagctgctggtggcaccgtgcacctggagatcggccgctccgcatacggcgtggagtgctgagggactctgcctccaacgtcaccaccatccacaccccggacacccagtgatggggggcacagactctagagactgtcagagctgaccccagctaaggcatgtctaggacctcggggtccctctgggcccagtttccctatctgtaaattggggacccacagcgcatctggatcacccgctttggtggcgcttggccgccaggaggcagcaccctgtttgcggggcggagccggggtgcccgccccctttcccccagggctgaagggacccccctcggagcccgcccacgcgagatgaggacggtggcccagcccccccatgccctccccctgggggccgcccccgctcccgccccgtgcgcttcctgggtggggccgggggcggcttcaaaaccccc

SEQ ID NO: 25780 - DNA, 307 bp, Homo sapiens
  source 1..307: mol_type = other DNA
agcttctcaggaggctgaggcgggaggatcactagagccgagagttcgaggctgcactgagctatgatcacaccaccttactccagcccgggcgcagagagagaccctgtctgtatcccacccctctgcccgatcacgtgcacctcagccatggccctgggaggggaaaaatataatcacaaccctgtgaggtaagtgaaagggtagtactaggattccaagctagctgtcggcggaaagccccgcccgaaggggctatggctccgcccggcgcatgcgttatgagttcaggtccgacttaaccccg

SEQ ID NO: 25781 - DNA, 679 bp, Homo sapiens
  source 1..679: mol_type = other DNA
tcagtatcccacggaagagagatccgtctcctggaggagcgcccgaggtctggggaaaagtctttgcgggaggccgggtcggcgactcccgaggatgggggcgccaagggaggcggtctggggtccccaagtcctgcctcctcgcggggcagcgtcgcgccaagaggtccccgcgcctccggctcccagcggcaacggaaaagtctcaaaagtttttttcctcttgctcctcctccccctcctccccgcagtggcgggggcggcggcggctcgtctcagactctggggcctcaggctgcctccttcctccgctccgggccgaggccggccccgcgggcggctcagagccgggggggtgccccggacggggcgtcccccctgcccccggccggggccctcgctgtctggctgctccgcggagggagccagggcgcgaagggcggcggcggcggggaccggctgggtcggcagggggttttgaagccgcccccggccccacccaggaagcgcacggggcgggagcgggggcggcccccagggggagggcatgggggggctgggccaccgtcctcatctcgcgtgggcgggctccgaggggggtcccttcagccctgggggaaagggggcgggcaccccggctccgccccgcaaacagggtgctgcctcctggcggccaagc

SEQ ID NO: 25782 - DNA, 329 bp, Homo sapiens
  source 1..329: mol_type = other DNA
gctacatggactggtaggaggatcccttgaacccaggagccagcctgggtgacagagtgagacccttttaaggagccttgatgggacctcttgatgtgggaaatgatggcatctaggatggcatccacatctccatttcttgattgataaatcaatcaataggaaagaggattttctgcaaataagggaatcttagttcctgagaaggaagttggacttatccaacttccttcgtcctggaaggaattcccaatctctgatttgtgatcccggaccacagagagctcttcggtggggtaggttggagcggaggaggaaaatgtccatca

SEQ ID NO: 25783 - DNA, 329 bp, Homo sapiens
  source 1..329: mol_type = other DNA
gcgcccggcccgtgagcgctgcagtgaacccaggagtctgaggctgaagcgagcaatgattgcgcctcttttaaaaaataataataaaaaaacctgaggtcagatcccagctactcgggaggctgaggcagggttgcggtgagccgagatcactccactgcactctagcctgggcgacagagcaagactgggtacagtctgccctcaatgccagtttcctcccgcgtgaaacaggacaataacatgtgtatgtaagtttatttgcaaagcacttagaacagggcgcacggtccttgttgctgttaagccaggaaggccctggagaatcc

SEQ ID NO: 25784 - DNA, 459 bp, Homo sapiens
  source 1..459: mol_type = other DNA
tcttttaaaaaataataataaaaaaacctgaggtcagatcccagctactcgggaggctgaggcagggttgcggtgagccgagatcactccactgcactctagcctgggcgacagagcaagactgggtacagtctgccctcaatgccagtttcctcccgcgtgaaacaggacaataacatgtgtatgtaagtttatttgcaaagcacttagaacagggcgcacggtccttgttgctgttaagccaggaaggccctggagaatccggggtgccccctcctccggcagagcttgggcctgggctcacgaggaaggggctctccaaggattcccgcctgctcccagacccccgggagtcgtaggaacccggacgctgacgtcggctttcagggatccctcgccggacgccgcggagggacagagcctgggaagccgtcgccccgccccgtccccgcccccgcg

SEQ ID NO: 25785 - DNA, 236 bp, Homo sapiens
  source 1..236: mol_type = other DNA
actagagcaggtgcgagaaatgcccatcccagcactttgggaggccaaggctggtggatcccctaaggtcaggagttcgggaccagcctggttaacacagtgaaaccctatctttactaagctgcagtgtgctgagatcatgccactgcactctagcggatctgcagtggtggatcgaggaccactgcactaactagtctctgcctgagtctctgaagtgagacttttacaactct

SEQ ID NO: 25786 - DNA, 195 bp, Homo sapiens
  source 1..195: mol_type = other DNA
gttggccaggctggtctcccacccccacgcccggccatgcggggcttctctggagacctgatccaaatcacctgaggtgtgcctgtaatcccagctactcgggtgccattgtaccccagcctgggtgacagagccatttcctgtccgtaggacatgtcatccagtgacagtgactcggactgggatggaggctgc

SEQ ID NO: 25787 - DNA, 434 bp, Homo sapiens
  source 1..434: mol_type = other DNA
cttcttgaagagggatctttgcccagaagaaagtccctcccttacaattcccctgttcctccaaggagcctcccctgaataccagttcctctcctaaagaagtggaagttcttttcgtctcctaaggaagtggcagatcggggcccagggtccccgagccccaggctgccgcagcagcaggagggcagcctggctcaaaccacggtttagccgccagaccctcgctgcagcgatcgcaggctagattcggggctgcctccatcttcttcccgttctgtggtagcacagagatttggagaaaaaaaaatctatctacccaaaattttctcagggcctcagggatttagggcccgggggcccagagcgtgcggacgcccaggaggatggcccagcccggcgcgtgcgcactggttacgcagcctgtttgcggcgcg

SEQ ID NO: 25788 - DNA, 496 bp, Homo sapiens
  source 1..496: mol_type = other DNA
accctggcgaggtgattttaattcttgggcggacagtctgcccctcctctcattctcagagatagttacaaagatggaactatcttctcctttctatttagtatgggcactcgtgcacagtacacggtagtccctctccaaaagaaagacctgggtgaagttcttaccttgcaggaaggaagcagagccatctggccgcgacagcaggttctgttcgcaggcaaagtgccggaggctgcagccaggaccccgagggctggaccccgtgcggctgcagttgtcacttccgcctggcagcgcgcgccgcaaacaggctgcgtaaccagtgcgcacgcgccgggctgggccatcctcctgggcgtccgcacgctctgggcccccgggccctaaatccctgaggccctgagaaaattttgggtagatagatttttttttctccaaatctctgtgctaccacagaacgggaagaagatggaggcagccccgaatctagcct

SEQ ID NO: 25789 - DNA, 182 bp, Homo sapiens
  source 1..182: mol_type = other DNA
attcccacgctgctgggcaggcagcccgggtgccgggggatcagcttagctcccggggttccccgtgggccccaccccgttcctggccatgggtgcagccgggcgccagcccctgcctcgccctggtcactctaacacggcccctggggcccctccccgcccctctggactggctgggcagg

SEQ ID NO: 25790 - DNA, 336 bp, Homo sapiens
  source 1..336: mol_type = other DNA
cctgagagagggggtctgtcctgctcaccatggtaacctcggcctaaatattcttggaactaatgaatgaataattctatccatttcaactccaaactggtcttgagatctctttttaaaaatgacgcgggaagaacaccccatcttctcctagggaaaggagacagcgtctcgctctgtcacccaggctggagtgcagtggcgcaatcacagctcgtgatcccccgcctcagcctcgtgagtagctgggacataaagcaagcgatgcgcccgacctgtaagctcagggagagggcgctgtgagcaatccctaaaccctttaagagtaaaaagtgg

SEQ ID NO: 25791 - DNA, 453 bp, Homo sapiens
  source 1..453: mol_type = other DNA
aagtatgaagtttccatttggtataatgaagattttctggtaaaaaattatggtgatggttgtacaacattgtgaatagaattagtatcatttaattctacacttaaaattgctaattcagtacatttatcttatgtattataccatatctaaagagatctccttcctgaccttctgtaaaaagggctgcagatccacaaaatatatgtatttgcaacctaggagctggggatcctcccgagacctccaggcctgggtctctgtccctgggtcagaggccaggctggtgaggtgggtccttcccagcttctgccttcctggagcactggagagcatgagggttttgtgtgtcacaaagggaaagacagttatgaggaccccatcagcgttgcttctcaaagttttgcctagggaagcagagccccgcccttgcccataaacgggaagtgctcc

SEQ ID NO: 25792 - DNA, 371 bp, Homo sapiens
  source 1..371: mol_type = other DNA
tccaggggcaacatccgaagcctggtttccatccttcctggagcctctgaggatcctgctcttcatgcatggggaaggtacaggatctccctgatgcaggacacctccctccacatccaggagctggggatcctcctgagacccccaggcctggatctctgtccctgggtcagaggcaaggctggtgacactggagagagaggactggtcccccccatgaggagacctgggggcccagctgggtctctgtgtcacaaaaggaaacagttccccaagggtgacaagtcaccctctctggggacaggggagtgtgggcagaggggtgacctgggaagagccccgcctctgcccctggccctgggaagtgcttc

SEQ ID NO: 25793 - DNA, 418 bp, Homo sapiens
  source 1..418: mol_type = other DNA
caaaaaaacatcgacatgtaagtggacctgtgtgttcaaattaaggtcagctgtaattcccctggacatgaacttggccttgctaggcctttgaagaccccgctctgccaggggtttctgtgcagctccccattccctcctggcaccacccatggggaaggcggggtgaccacaggactgtcagccattccttgaagccttccaggagctgtagctcctcctgagacccctgggccttggtttctgtgcctgggtcactggagacagagggctggtccctcccatcatcccagcagaaacccaaggcccagctgggtttctctgtcacaagggaaataatccccctggtgtgacagacccagaggactcctgagcagagaccccacccctggaccatgtgatcttggaaagtgctcct

SEQ ID NO: 25794 - DNA, 461 bp, Homo sapiens
  source 1..461: mol_type = other DNA
cagacaaggccggaggtctcctcttgccctccagggggttcccctgcaggaacctggctttgctaaggaagtggaggtggagcctggtttccggtcctatgaggaccctgttctgccaggggtccctgtgcaactccagactccctcctggtaccaccatggggaaggtggggtgatcacaggacaggccctgagcgagggtccccctggagccttccctccacatgcaggatctggggactcctgagacctctgggcctgggtctccatccctgggtactggagacagagggctggtccctccccagccacccttcccagagccctggagagcatggggagacccgggaccctgctgggtttctctgtcacaaaggaaaataatccccctggtgtgacagaccctcagcctggggaagacaggttgtcctcccaggggatgggggtccatccaccttgcc

SEQ ID NO: 25795 - DNA, 288 bp, Homo sapiens
  source 1..288: mol_type = other DNA
cagacagcagagaccatggagtctccctcggcccctccccacagatggtgcatcccctggcagaggctcctgctcacaggtgaaggattgattctattttcctagttaattgtcactggccactacgtttttaaaaatcataataactgcatcagatgacactttaaatacctaccgcggaggctgtggagggccctaggcactggtcatgaagctcatgctctcatggggaggtgccctgatgtgagcaagggctgggggatgaagagacctgctcaggacccagga

SEQ ID NO: 25796 - DNA, 295 bp, Homo sapiens
  source 1..295: mol_type = other DNA
agatccatttctaggatgtccttgcaaagggaaaccacagatgttccaggtgaagaggccaggagctgtgacctcccctcgcagtctctgagatctcagatcatcgtgcatctgtcttgtgacacatgcacccaccgtgggtttttaagggctcaggtgggctgtgcctgtgaggaatcaaaggtgccacacagggcaatctgatgctgtggccttcacctgtgaagaccagtcccaggctgcagctgtccaatggcaaagtgccaggcgcagtgattcagtcatcctgaatgtc

SEQ ID NO: 25797 - DNA, 206 bp, Homo sapiens
  source 1..206: mol_type = other DNA
gattcacccatggggactcatatatatagacttgggtagagctgcccacctgtggcccacagcaaacaccccacggttgggtggtgtgggaccgtgcagctgaacggaagggctgtgactcccagtcctgggtctgttgagagatcatcgccacacagggcaatcttcgatgctgtggccttcacctgtgaacctgaggctcagaa

SEQ ID NO: 25798 - DNA, 192 bp, Homo sapiens
  source 1..192: mol_type = other DNA
cccctggacacccaggctggccataacttcctgtcccaggaaaatttgggcaacctcagcctggaccaagaataggaggggagaggctgctcctgtcctaggaggctcagagtccactggactgcagtggtgtgatgattcagagggacactgtggccctttcttggcgtatcaatgggataccgcagcaac

SEQ ID NO: 25799 - DNA, 589 bp, Homo sapiens
  source 1..589: mol_type = other DNA
gtgacttgtccaagtcaacatagttcaggtctatatctggatataaattccatgcttatgccactatataagcatttcccaaaactgattttaggtgaaacataaataaacttttaagtttaactgtgtttattttaacgcatgacaggaaaaaaaattaagaaatctctgatttcatggacaatattgcataagacaaaaatattttgtcttcagttcctggcctcaagccatcctctcacctcaacctcttgagtagctgagatcacaggtgaaggatgttttgtaaactaaatttaattacaaaaaaagtatgaagtaaataattaatactacagcaccatgcagcttcattctcagttactcccaggaaattagagaatcttagacccgggctttagccctggatgtgtccactcctaggaccccaaacatctctgtgacctccttgctggaggggtttctctgtcacagagaaaataacaccaggtttgaggaccccagggactctctgtgtggtgctgacagacccagaacaggggtccaaacaagcttgcttctcagagcatcttctggggggatgcttcta

SEQ ID NO: 25800 - DNA, 237 bp, Homo sapiens
  source 1..237: mol_type = other DNA
atcaattgatcatgttttccaagttaatcatcatttgtcattaccatttgaaaaaaaagaaaaatgaatcaattttagtcaattctcagtcatcacagagcttatgctgaatgccctgatgtgacccctggggaagagcattccacacagcacactgctgactttgactcaggggtgaagagacctgctcaggacccagggccctgttcgcagaggggaaggaggttcttctactcg

SEQ ID NO: 25801 - DNA, 483 bp, Homo sapiens
  source 1..483: mol_type = other DNA
tccccaggtacatctggacataaagttcatgtttatgccactgtgtcagcatttccaaaaactgattttaggcgaaacgtaagtaagctttttaaaaactttaatacttatgcgtttattttaatatacattgagaaaacatttaagcacacatcaaatctgtaatttcatggacaatattgcataagacaaggatgtttcgagtagctgggatcacagatctgagccaccgatccctgatgttttgtaaactaaatttatttagaaaaaaggatgaaatatataataatatctcagttactcccaggaaattaagaatcttagatccgggctttagccctagatatatccatttgtaggaccccagacataccccagggactctgcatggtgctgaccggatctaagccttgcttctcagagtgacctgggcagagcttcacccatgaccctggaaagtgctcctgccctgggaggaggctc

SEQ ID NO: 25802 - DNA, 235 bp, Homo sapiens
  source 1..235: mol_type = other DNA
gcccctgtcatgtgctaggccctgatctgggcctattcaggtttttgtgtaaactccccctccccccttcccgtgccccagggagcgagtggggaaccgggaacgcgccatggagtcagatctctcagccgaggcagagcgccaatggggcttggaccgaggctggccccgccccccaggaacggcccgcctggccccgcccctggggcgttgaccaagcccggtctgtgcacgg

SEQ ID NO: 25803 - DNA, 214 bp, Homo sapiens
  source 1..214: mol_type = other DNA
ggccaggctggtcttgaactccgcccctgtcatgtgctaggccctgatctgggcctattcaggtttttgtgtaaactccccctccccccttcccgtgccccagggagcgagtggggaaccgggaacgcgccatggagtcagatctctcagccgaggcagagcgccaatggggcttggaccgaggctggccccgccccccaggaacggcccgcct

SEQ ID NO: 25804 - DNA, 121 bp, Homo sapiens
  source 1..121: mol_type = other DNA
gtccccccgtgcacagaccgggcttggtcaacgccccaggggcggggccaggcgggccgttcctggggggcggggccagcctcggtccaagccccattggcgctctgcctcggctgagaga

SEQ ID NO: 25805 - DNA, 500 bp, Homo sapiens
  source 1..500: mol_type = other DNA
tgagatcatgcatgtaacactacagtaacagccacatgataaatgtccaaataatatttacctgtgcctggcacagagcaggcactcaaaaaatattttttagagcatgtgacgcttaaatggacaaacggggatctcatttttttttttttcctgagaagcggcagagctgaactaacttctgctaaggtcccggccgtgctgaagcaacttccgccctgagaagggtggggcttccgtctcccgctctcgcgactcctggcggtgaaggacggaagatgatagccacatttcttcctcgggaacagccacttccacccggaaaaggggttgttccgccgtggggcgccagctgtggcccacccatccgaggaaacccaggcctcccctcccctctaggcggggacgaactttcgccctgagagaggcggagcctcagcgtctaccctcgctctcgcgagctttcggaactctcgcgagaccctacgcccgacttgtgc

SEQ ID NO: 25806 - DNA, 455 bp, Homo sapiens
  source 1..455: mol_type = other DNA
taaaaaaaaaaaagaagaaaaatatatgttgttgttgttattattgttattatggctggagtgcaatggtgtgatctcagctcactgctcagcctcctgagtagctggaataataggcatgtgccacaacatctggctccatgttggccaggcagccaccatagctggcctgtttttttaaaaaaagaattccagtaaagagctgatcatggttctcactccttgaataccaggaacaccatctcgtatcacataatgagacagggagacattctggtcctcatctcacagatgaaaaatgtcaagctgccttatttattcttcatgagtatttatagtgactaacattaagtccttgtttctaatcccaagaagcggtcaccatcacctgcccatgacacatgcccaggactcagaaggctcagcagtgaaggggaattgtggccaccacaggt

SEQ ID NO: 25807 - DNA, 469 bp, Homo sapiens
  source 1..469: mol_type = other DNA
ggctggagtgcaatggtgtgatctcagctcactgctcagcctcctgagtagctggaataataggcatgtgccacaacatctggctccatgttggccaggcagccaccatagctggcctgtttttttaaaaaaagaattccagtaaagagctgatcatggttctcactccttgaataccaggaacaccatctcgtatcacataatgagacagggagacattctggtcctcatctcacagatgaaaaatgtcaagctgccttatttattcttcatgagtatttatagtgactaacattaagtccttgtttctaatcccaagaagcggtcaccatcacctgcccatgacacatgcccaggactcagaaggctcagcagtgaaggggaattgtggccaccacaggtgcagggaccggcaggggctgtcccggcccagtagcgagggccactggagcccatctccggggggctg

SEQ ID NO: 25808 - DNA, 253 bp, Homo sapiens
  source 1..253: mol_type = other DNA
acagaattcagactgcaggatagcaggccagggcgcacggggagcagggcttgccccccagcacctccggggaggtgaccccagccgggagatgcgagtcccgcggagcccgcgcccggcggacggaccgatggccggggagagctcgggcgcggccggggcgggggccggtgcccgcagggacccgggcgcagcggggacgggcgggcgcggggcgcgggcgggcggcggggcgggggcctccggaaaaacg

SEQ ID NO: 25809 - DNA, 390 bp, Homo sapiens
  source 1..390: mol_type = other DNA
cggtgcgaggccggggccaaggcctcccacctgctggtcgctgtgaagctgaaagttgcagagtgcatttgaaagagttttcggaaagctcttttcttcgactgaggtctacagagaagtcattactttttgcataggacggggagccccagtccgccgtccgagtgctcagcgctggggtgactaggagatctccgatcgaactcgggaggagttggacccatctgcacctccgggcgcggggcggggcccggggagtgacggggggccctccaagacaggccagagcggccctatctggcctgcgtggcgcagtacagcgctagagcggccggcgggagagtcgtcggggccggagcccggcaggagccgggctagagcggctctcag

SEQ ID NO: 25810 - DNA, 364 bp, Homo sapiens
  source 1..364: mol_type = other DNA
ctcccgccattgcactccagcactcccttctctccaaaggtgtgtgtggcggggtcggaggtgtccctagccccaactcattcatctttgggactccacaaggtggggcagggggcaacctcagataccccatgtagtccatggaccaggggcaaattatgggctccaccccagacttgctgaatgaaaacatctgggctagggccagaaggacagctctgcacggtccccattgtgccttccctgggagatttctgggattatatctccaaggtgttttgcgagtcagacccccagctgctccggggctgcgccacgtcgactccgctgggtggggccggcgtcgggcggggccggcggggtc

SEQ ID NO: 25811 - DNA, 258 bp, Homo sapiens
  source 1..258: mol_type = other DNA
tgcctccccctgtctctgcggggtggcaggtgcagggtgggtgctctctgggcccagccctgcccttctgtgcctccaggaacaagatcctgatcttcgggctgtttgaggagacggcccgccccggcatggacgtggccctgcgcatgtaccctctcaagtgagtgcccgcactcagcctgaacctcagggcaggcccagctggtggtgggggcagcagggtctcaggcagctggtcccaggctcccctcgccctgc

SEQ ID NO: 25812 - DNA, 204 bp, Homo sapiens
  source 1..204: mol_type = other DNA
acggcccgccccggcatggacgtggccctgcgcatgtaccctctcaagtgagtgcccgcactcagcctgaacctcagggcaggcccagctggtggtgggggcagcagggtctcaggcagctggtcccaggctcccctcgccctgctgtctctccaggttgggtggagaaggaaacctccccccaattttgtattctggggggag

SEQ ID NO: 25813 - DNA, 313 bp, Homo sapiens
  source 1..313: mol_type = other DNA
tggagtgcagtgtcaccactgcaaccaagtagctgggatgacaggagtgtaccatcatgccctgaggccctcaggattctctgggggctgggcagctgggctgtggcccgggacgctgaccgccaagcgcatggcccggaagaactgcctggtgaagaacctggaggctgtagaaaccctgggctccacgtccaccatctgcgataagacagggaccctcgcccacatgtggtttgacaaccaatccggctgaccgcaggccccgggtgaggaccatgggggcctggctccaggagtccctggccctcacaca

SEQ ID NO: 25814 - DNA, 340 bp, Homo sapiens
  source 1..340: mol_type = other DNA
tgggggggcacccacagtgagggaatctcagggctcctcccgcgggtccctggtgccacactgcagtgatcttctcggtgatggcacacccccacaatgagaggatttccgggggccctactccatattgagggggtctccaagtcccctattgcggaggtctctgggaatccccccacccccgcagcgctcccccttcgcggccgcgccgccactttgcggagcccaaggggaggacagctgcagtaccaggggcggggccgcgggccgtccgtcagcacggcggcgcccctgattggccagcgccgcccccctcccgcggacgcgggcatatgaggag

SEQ ID NO: 25815 - DNA, 219 bp, Homo sapiens
  source 1..219: mol_type = other DNA
ggagactttataaaacaatcttaagtttccaaattctcttaaaatagcagcctcactgcactccagcctgggtgacagagcaagaaccatcttaacccattagtggctcatgagcccatagttacttaaaatgtatcttttactgtgaattgtactatctccctgcaatctgctaggaactggcagtacccatggagcatttgtaagtgagaaatgtgt

SEQ ID NO: 25816 - DNA, 168 bp, Homo sapiens
  source 1..168: mol_type = other DNA
atggggttgcctagcaaccaccgccggctgcctgcccagagacaggggcgggcctaccgagcacctggtagtgcgtgctcagtattgccagcttctaaacagagcagggctctgcagagctgtgaactgcttgcctggggggttccctgcaggtggcgagtgggggcc

SEQ ID NO: 25817 - DNA, 331 bp, Homo sapiens
  source 1..331: mol_type = other DNA
actccctcccaaggccctgaggggcgcaggaacgagttggacacatggggccccaatctcaggaggtggagtggagtccgcccgttaccggctcacggggaaaccaccggcgtccccaaaatggcgcccgcggccgcgctccgccgcctaacgtcatcgcgccgccctccgctcagagttcccctctggagccgtcggaggcggaggctgcggggaatctcgacgctcctcactattggcccaagcctcagagacatgaacgtcgatggccgaacggcagggcccgagcgggcaatgattggttgcgtccggccgtccgtgcggcggccga

SEQ ID NO: 25818 - DNA, 489 bp, Homo sapiens
  source 1..489: mol_type = other DNA
ggactcgggcgcgcctttgtctgagctgcggtgcgccgggagtcctgcgcccctcgcaggtggggaggggagcggagggaggggctcccttctccgcagccggccccgccctccggcccattggctgggcgctgccgccctctggcgggcacggagggaagcgccgccgcagcgcgaagagccagccggcagcccggggacctggtgctcccctccactggagccgcctcgggcgcccgcatttggccggcgacttattgtagccccaggcctgcagataggcgcagccctcagtcttttcatctgtaaaattaagagtgaccaccacattggagatggcacctgtccatgggggcgacagaagtcggggggcaactgttgcaggcacccaccccccagcacacacacatgatttggggtgggccgggctgcagggggcggaccggccctcctccctgagtgacttccggcagggagggctcggccccc

SEQ ID NO: 25819 - DNA, 342 bp, Homo sapiens
  source 1..342: mol_type = other DNA
ggacttgtctcaagtacatgcaggtcctgaccttgagtcacctaagtggggggcgtggcgaccgtcacacccaaggccccaccctctctagttgttgcaagaccctggttgtcactagtgagtagttacaactactcgtgacgtggcgctacatggccccggtggcttgagaagtagggacctggaaccgggtaccagatacagcccaagaggcggcgtgctctcgctctgcgcaagcgcagcactcgcgaaccaagatgcttcggttgggcccaggaagggcggggcttggaggcctcgttctgcgcatgcgccgaaggggcgtggcggtcgcacctgcgc

SEQ ID NO: 25820 - DNA, 371 bp, Homo sapiens
  source 1..371: mol_type = other DNA
tcactgctacagctcaggcagagccagtactgggccagtgctaggcaggacccagatctcccgacggacttgtctcaagtacatgcaggtcctgaccttgagtcacctaagtggggggcgtggcgaccgtcacacccaaggccccaccctctctagttgttgcaagaccctggttgtcactagtgagtagttacaactactcgtgacgtggcgctacatggccccggtggcttgagaagtagggacctggaaccgggtaccagatacagcccaagaggcggcgtgctctcgctctgcgcaagcgcagcactcgcgaaccaagatgcttcggttgggcccaggaagggcggggcttggaggcctcgttctgc

SEQ ID NO: 25821 - DNA, 346 bp, Homo sapiens
  source 1..346: mol_type = other DNA
catactccttgagtaaattattcactaaaggagccctggaagtaggcaaccaggggcccgagagttccatgggcgaggcccagtgcctgctgcaaagcttgcgaggtggcccgggagacttgaaatttgccctttcctacttagggaaagaatgggggtgagagctcgtgggcgccagcgtaggctcccgcacccaggagtgctctccttccagcccgcgccgcccgccctagcgcaggccccaaggctcattgggcggtgccctcagggcacgcgaccttgcgcctgcgtgttgccacacaggcgggcgcacacatcttcgccctgtgggcggggctcagggcga

SEQ ID NO: 25822 - DNA, 291 bp, Homo sapiens
  source 1..291: mol_type = other DNA
ggattcccaactagtgccactgcactccagtctgggcgacagagtgagactccgtctcaaacacctacttgtgaaacaaatggatggcgaagcatagtcctgggctaaactagctgtactctcagaaatgctcctacagaacttgccgacgcttagcccgggagcgacccagagaaatgcgcaggcgcatctcctcgccctgagccccgcccacagggcgaagatgtgtgcgcccgcctgtgtggcaacacgcaggcgcaaggtcgcgtgccctgagggcaccgcccaatg

SEQ ID NO: 25823 - DNA, 302 bp, Homo sapiens
  source 1..302: mol_type = other DNA
ctggagtgcagtggcgcgatctcagctcactgcaagcctcccgagtagctgggaacagggtttcaccgtgttaaccaggatggaggcccacgcctggccctggcctatcctttttaaaactttattttggagaaaaaaatcagaaggtgccatttggcttttacatgtcagcaataagttgaaaaaaaatttttttttaagtggggtggctgggcgcggtgcctcacgccacaaggtcaggagatcgagattgagccactgcatgccagccttgacacagggagtagctgagctgcagatca

SEQ ID NO: 25824 - DNA, 396 bp, Homo sapiens
  source 1..396: mol_type = other DNA
gagtcgtcgtgccactgcactccagcaaaaacaaaaaaatggatttggttcatcagttctaagaatggcaccaaggtttgccaccatttgaataatgggctttccttcaaaggaggaatagctccttgataataaaggtcaggttcatcattatcataatttggtgcttgtccattagggaccacccacataccactttttttctaacctcaataccaaaaagtgagggtaaagttactatcctctaggctgtgagagaggttagtgctttcctaaagtaggagtacctcagggagtagatggagtcaacatctgatgtctcccagtaccaagatggaccaatcctcctatgaaggtcccagcatccacctttcctcaaagaggaggaggggacaa

SEQ ID NO: 25825 - DNA, 699 bp, Homo sapiens
  source 1..699: mol_type = other DNA
ctcgctgtggcaactgcactgaggccttggtgctgactacacttcccggcagggactgcggcccagcgtacctggaaagaggagcgcgtaaacctactccatttcctcgggcttaaaaaccacctggcaatgcggtgagggcgtggcgacgactccatttcccggcttgcctcacggcccgagacccgcaggttcacgcgggccgactcaatttcccagagcgcaccgagctctgggaggcatgactgagtgagtggactccgttcaggggtacagtcggctgacagattaccctggactggcgtgccacgcggctctctgtgcgggccgagggcggtgacggcggcgcggacgacagccggactgcatctcccggcgtgccccgcggcgggcgctgggccggagccggagcccaagccagagcggcgcggcctggaagaggccagggcccgggggaggcggcggcagcggcggcggctggggcagcccgggcagcccgagccccgcagcctgggcctgtgctcggcgccatgagcggcggcgggccttcgggaggcggccctgggggctcgggcagggcgcggactagctcgttcgcggagcccggcggcggaggcggaggaggcggcggcggccccggaggctcggcctccggcccaggcggcaccggcggcggaaaggcatctgtcgggggggcgt

SEQ ID NO: 25826 - DNA, 489 bp, Homo sapiens
  source 1..489: mol_type = other DNA
tcacctggaacttaaaggtgcctcggctctttcttaaagaagggcaagcctccgcagactggcctcacccgccccctcagtcaatggggaggatactcgctgtggcaactgcactgaggccttggtgctgactacacttcccggcagggactgcggcccagcgtacctggaaagaggagcgcgtaaacctactccatttcctcgggcttaaaaaccacctggcaatgcggtgagggcgtggcgacgactccatttcccggcttgcctcacggcccgagacccgcaggttcacgcgggccgactcaatttcccagagcgcaccgagctctgggaggcatgactgagtgagtggactccgttcaggggtacagtcggctgacagattaccctggactggcgtgccacgcggctctctgtgcgggccgagggcggtgacggcggcgcggacgacagccggactgcatctcccggcgtgccccgcggcgggcg

SEQ ID NO: 25827 - DNA, 502 bp, Homo sapiens
  source 1..502: mol_type = other DNA
tgcactaccctgggctggtggtgccccagccccagcgccctgacaagtgcccgctgccgcccatggcacccgagaccccaccggtccagccgcccccactcggacgccggcagcgggcagctggggagaaggccggccgcaggcgggctggctgagggggcaggggcgctagccccaccgcccccgccaccgacggggaggtgttcaagacgccccgtgccccacctgcaccccctaagcctgagcccggcgaggcacccggggcatcccagtgcatgcccctcaagctacgctttaagcggccccgaggggcctggggaggctggggggcccctcaccccaaggcgggtgagctctgacctccagcatgccacggcccagctctccctggagcaccgagactcctgagggctgtgggcaggggacctgtgtgccccgcacccccccattttgtataaaactttaatttcttttttttaaaaatggcagggctaggggctcc

SEQ ID NO: 25828 - DNA, 423 bp, Homo sapiens
  source 1..423: mol_type = other DNA
agccccttgcctgtgggaacaagcattgggtctgacccctggctttgccaaattcctgaggagagattacagtcaccagtggatcctctagtcctgccttagggagagagctggtacccaccctgtgtctagacagctattaccacctacaagttcaatttcaacaaactggtgctggtcaattacccattcattggggccttgacactgtctctctgccagggggtgcagtgccccagagtgccccgccagtgccgtcgggtgggtggcccgccgcctgggccgaggctcagtcagtgactgaggaaccgctgggagaggatccccgcgcccgaccacccggccctccggatctgggtgccttccgagggcccccgctggcccgcctgctatccccggcctcggggtggccctgaacccctc

SEQ ID NO: 25829 - DNA, 714 bp, Homo sapiens
  source 1..714: mol_type = other DNA
gcccgagtgatccccagttctgggggacccctcaagcactggactgcctgggacccccgattcctggctccgggcgcgggtcttggtcctgtatccctaccgggaccccgcaggccgggctctcccccactcccgggatcacgggggtggcggggtccttcccctccgctcttggacgtgtgcggggcgggggggctcgtccaccgggcccgctatccctggttctgcgctgcgcggtcctgctggtgaccttcacggcggcgcgtgccctgcaccaggttatgagtggggagcccgggactcggggtcctggctgcgccgcccctcccccgcccgcgaacgttcgaaaaaggaactttttgtttccgaccttagaacgcgcggctttaaggtggctccggggagacctgggtaccctcctcccgcgccaccggtggcccggggttgaggagggtggggaaggtggggggagacgcagaggctcccccctcgccccccctcccggccaaggttcccctccccctcggtcggcgggcggggggcagcgggattaactccccctcccactcgccctcccctcccccgccgcccccgggctcgcgcgggctggactttgcgcccgagcgcgcagggggaggggtcccagccgccccctgcccgtctaccccgtcggaatccggcccggggcggggacgggggagggggaagggggcc

SEQ ID NO: 25830 - DNA, 512 bp, Homo sapiens
  source 1..512: mol_type = other DNA
catccttccctcccggctgaggcagagaacggagacttagcctccggaacccccggtcctagtagtggacgtggggggacctccggcgccagccctatccccgggacagctgcagcctggggacggtggcctccccagctggacgggggttatcagggaagccgccccatccccacaggagcggagggcacagccgcctccccatttccgatgctgccacccctggacagctgcccccattcaggctcagggttggggggtcatcatcttctaaggtcctgaccgcagagaagtctggagccccgaagacttaagttagctgcagactcggagcctctgactagggtcatgacccgcgggaccccgcgcggcccctttaagcccagagccggccggtcctcagtggctgcgcgccgacgagcggcgggcgcagtgtctccatggcgacgcggcggtgacgtcgccggccggggggcgtgggcgtcccggccccggagtgcgatattaacccg

SEQ ID NO: 25831 - DNA, 357 bp, Homo sapiens
  source 1..357: mol_type = other DNA
tgaatatccttcaatatttcttctatgctatgaactatgcctcacaagtggtgtgaattccatgtggacattagcctcggaccagggcgaatacaaagtggagcattgcagacaggttcaccatctggttgtacctctgtcaggggcgtaacccacaaagtgtagctctccacgtaatgcagtgcgaagcagaagcgctgcatttcgaggaggtgacctgtcccccgggccccaggccgcgcgcgttgcctatactgcagcgcgcgtcccggtggcaacagggctttccgcggggccgcggtcattgcaccgccccggccgctgctgattggctgcggggctcgcgggtggctcccc

SEQ ID NO: 25832 - DNA, 409 bp, Homo sapiens
  source 1..409: mol_type = other DNA
ggactgcttgagcccaggagttagtgaacagagatcataccactgcacgccagcctgggtgacagagcaacatgcattgaatcaatggcattacagttgaaacttattttgatgaaacccacctcactttaggcaagcctatggcaggaaagcctcattttaggtcttagtacattatacacaaatctttctcaatgaatgttgcaccttacaccaagattctcagagcctcgggctgcctgaggccactggcctgggttctggtccagatgtgtcagcggcagggggagagggactgccctcacctcgcactggtgagctggaccaaggagtccccgatgaagacgacttcgggttcctagcgcgcgagagggagtcaatggcatgcacgctccagggcccgccccgc

SEQ ID NO: 25833 - DNA, 311 bp, Homo sapiens
  source 1..311: mol_type = other DNA
tatgcgcttgaatgcaaagatatgtactttagatttcaacaccttagagtggctccttagaagggactagacagagggccccgtgaccggtgggtggtttctccctcctccccgcctcgggagctggatggtctcgcctctccctccccccaccccgtgccgggtgcgcggcctgggagtcagcggcccgagcgggaagcgccgggcgagcccactgtgcggccgtcgtaagtgaaggcttccgtccctggagaggaggcggcgccctgtatgagtgggcgtggcggagccagctccgttcggaacactcc

SEQ ID NO: 25834 - DNA, 458 bp, Homo sapiens
  source 1..458: mol_type = other DNA
catgcattgaatcaatggcattacagttgaaacttattttgatgaaacccacctcactttaggcaagcctatggcaggaaagcctcattttaggtcttagtacattatacacaaatctttctcaatgaatgttgcaccttacaccaagattctcagagcctcgggctgcctgaggccactggcctgggttctggtccagatgtgtcagcggcagggggagagggactgccctcacctcgcactggtgagctggaccaaggagtccccgatgaagacgacttcgggttcctagcgcgcgagagggagtcaatggcatgcacgctccagggcccgccccgcagtgagagtggcacgaagcgcccgtcgccctgtaccttggcgccgcagctcctgcaggatgagcgagtcgggtcggcccgggagtgttccgaacggagctggctccgccacgcccactc

SEQ ID NO: 25835 - DNA, 237 bp, Homo sapiens
  source 1..237: mol_type = other DNA
cagagggagatctgagacactgaggtctgaggtttcagagctcagacatacccagttggctgcagatctgcaagatgatctgccggagggacgccagactgtatgcgcttgaatgcaaagatatgtactttagatttcaacaccttagagtggctccttagaagggactagacagagggccccgtgaccggtgggtggtttctccctcctccccgcctcgggagctggatggtctcg

SEQ ID NO: 25836 - DNA, 479 bp, Homo sapiens
  source 1..479: mol_type = other DNA
cgcgcccaggttgggtacgctgcgtcccgcccccctcccctctgtgccaaacggtcccgcgggagccgctctccccgtctccctcagcccctgccccgagcggcgccggattctgggctcccgctgttccgtgacctccggcccctccggaacacccgtggtgaccgccgggaccctgcctgtgactctccaggactctgcgaccccgggatggatattttcttgccaaaataaaaaaggattcgtttttatctataacatggcttcttttagcggcggggctgagccagaactatgtcaggctcgggatttatgttgccccagaatgtgggaacattgaagatgatcaaacatctagcaggctgaaccacaggcacccagagtttgggttacgcggggatttccccggaagtctccagggttggggttgggcgctccgcagtcctcccagggccgctctgaccggccgccgcggccgc

SEQ ID NO: 25837 - DNA, 301 bp, Homo sapiens
  source 1..301: mol_type = other DNA
tggggaggacactgtccccctctcccaggaaagtggggatatcactgagagagatgagcgagaccctgaaaggggagtcccacacagcactctcaagtagctgggactacaggcacaaagcgatcctctcacctcaggcgattacagggttgggattacaggcgagagccaccatgcctgcggctgtggcctcttttccctgggtcctgggagctgaggcagggggtcgatcagaccggcttggctccctgggcacctctgtcagagccccgcccagggctgcgtggccgcccatataagt

SEQ ID NO: 25838 - DNA, 474 bp, Homo sapiens
  source 1..474: mol_type = other DNA
ctgctctccccagtgctgaggatagaaagctgtttctccaggcctgcccgccccacaccaccgcggcgggcgaggttgcctttcgctcttgggccggcccgcggcctgaagctagtgcgcaggcgcctcccccaccctcattatcgggagcatggattaggggggagggaaagcggggctccctcctccgctggcgccccgcctcgtctttgagttggcagaggacctggcccgcccccaccccaggcagaggctcagaggcgccccactttcccccttcaaaaggcgggccgggccgcgtgctagggcatccctccctgggaacatgggaggcttcccagcacgtgggaagatcgggacttccctgctggggtgctccccgcggggctccgcactagtcctgcccgaaggacgcttttcgccacccccggggtggattggccctccgggcagggcctcgcggctggaattggc

SEQ ID NO: 25839 - DNA, 310 bp, Homo sapiens
  source 1..310: mol_type = other DNA
cggtcttattaaagataatataggtttaaaaaaaaaacttggcagttttggtatttatgactactatcatcaccattaccaccatcattatcagtcattgtcatcagtggtcactgtcttctgtgatggcatggagtatctcaaatgccattcagtttttaacatgagagttaaatgatcagaatgacaatataagccgccagtcccagctacttgctatctggcttctgtcatcccagatgacacggaggcctaaatgggacatttatgacacaagagagcaagcccctcccttcttgtaagagagtgc

SEQ ID NO: 25840 - DNA, 277 bp, Homo sapiens
  source 1..277: mol_type = other DNA
gaggcttccaaaaaaagggctcccttgttagccttctaagcaaataaatgtcaagtttagggttccaaacaagggctggagccaggcgccccagcagctgggcaaacctctgagacctaaagctctgggggtcaggaggcctggtgtcacccactgctccaggggcggtctcggcaggggagctgcctcttgtcccggatcctgctctgctgccatcttatgtggctgcagaattggtactattgccgatacagaccttgtcaaagtctcttctacc

SEQ ID NO: 25841 - DNA, 391 bp, Homo sapiens
  source 1..391: mol_type = other DNA
cctggtatgttgctaaggaggtgaaggtagagtgggtcctctgaggaccctgttctgtgaggggtccctgtgcagctccccattccctcctggcaccacctgtggggaaggtgcggtgaccacaggtgactccatatccgggagctgcagctccacctgagacccctggacttgggtctctgtccctgggttagaggccaggctggtgacactagagacagagggctggtccctccgacctggcagctcactgtgttgcaaagtaattaccacatttgggggttctctgtgtgctgctgacagacccatagccaggacagtgctggagaggggggatcctcctcccctgatggggacagaggtctcatcagccttgattctcaaagttggg

SEQ ID NO: 25842 - DNA, 384 bp, Homo sapiens
  source 1..384: mol_type = other DNA
cttaggacagaccccaggggatatcagcatggggagggctgagcccatcctggctgcgacgatctcagagagccccacttcctgctgcaccaaccatagggaaggtggggtgctgggatatccagggcattgaatgtccatccttggaagtgagagagggggaggatccctctcaccagtgagcacacacctccccaaagctcagtggtggtgtccctgtgacaggacctcctgaccccgacctggagtaggctgcaggatgctgagggcacagggctgtgctcacccagtctccagtgaaggagtcagagacctcagcaattcccaacagagaggtgtcctgggcacagaccccgcccatgagcctgagaagtgctcctgccc

SEQ ID NO: 25843 - DNA, 391 bp, Homo sapiens
  source 1..391: mol_type = other DNA
acccctgggtatgtcggcacatggatggctgagcccatcatggccacagagtaagttgggatgaatgagccatgtcccccggggttcctgggtaactccccacttcctcctgcaccaccacggggaaggtgtggagagtgaccgagaactgtccctttgactatgggactaggcctctcctcacaagaggcatgagagattcatcctgcacctccaggaaggtggcagcacaatggggtgtcactgtgacagggacctggttcagctccagcctcctgcactgaaggggacatggggacagcaggaggctgaggcccaggactctgcttgcccaacctcagagaggtgtcctgggcctgaccccgcccatgaacctgagaagtgctcctgc

SEQ ID NO: 25844 - DNA, 318 bp, Homo sapiens
  source 1..318: mol_type = other DNA
tcatggccatgactccccacttcctcctgcaccaccacggggaaggtgtggtgacagaccccacggagtcacagagtgaccgagaactgtccctttgactatgggactcctcccaagagctgggacacccaggtcctgagtgtccatccttggaagccacaatggggtgtcactgtgacagggacctggtgcagctccagcctcctgcactgaagcatggggacagcaggaggctgaggcccaggactctgcttgcccaacctgccagagaggtgtcctgggcctgaccccgcccatgaacctgagaggtgctcctgc

SEQ ID NO: 25845 - DNA, 338 bp, Homo sapiens
  source 1..338: mol_type = other DNA
agggctgagcccatcatggccacggagtaagttgggatgaatgagccatgtcccgcagggttcctgggtaacaccaccacagggaaggtgtggtgaggagccatagactgacagagaactgtccctttgactatgggactaggcctctcctcccaagaggcatgagagaaggacagtttcctctgggacacccaagcacaatggggcatcattctgacagggacctggtacagctccagcctcctgcactgaagggatggggacaccaggaggctgaggcccaggactgttcttgcccaacgggcctgaccctgcccatgagcttgagaattgctcct

SEQ ID NO: 25846 - DNA, 213 bp, Homo sapiens
  source 1..213: mol_type = other DNA
gacccctgggtatgtcagttggtcggggctgtggtgaccattgactatggggcctctcctcccaagaggcatgagagacactgtgaaagggacctggtgcagctccagcctcctgcactgaagtggggacagcaggaggctgaggcccaggactgtcctcgcccacagagaggtgtcctgggcctgaccccgcccatgagcctgagaagtgct

SEQ ID NO: 25847 - DNA, 263 bp, Homo sapiens
  source 1..263: mol_type = other DNA
gctgagcccatcatggccacggagtaggtgtggtgacccctgagctccagctcagccagggagccaaagagtgaccgagaactctctctttgactatggcaggcctctcctcccaagaggcatgagagattggcatcactgtgacagggacctggtgcagcttcagcctcctgcactgcaggggagggaggctgaggcccaggactgcgcttgcccaacctgctcctgggcctgaccccacccatgagcttgagaagtgctcc

SEQ ID NO: 25848 - DNA, 286 bp, Homo sapiens
  source 1..286: mol_type = other DNA
cctgggtatctcagcacatggagggctgagcccatcatggccacggagtggcccgcgggattcctgggtaactccccacttcctcctgcaccaccacggggaaggtgtggtgggagtcacaggtcttgactatgtcctcccaggaggctccaggaaggacagtttcctctgggaagggtgtcactctgacagggacctggtgcagctccagcctcctgcactgcaggaggctgaggcccaggactctgcttgcccaacctgtcctcaccctgcccaagtgctcctt

SEQ ID NO: 25849 - DNA, 311 bp, Homo sapiens
  source 1..311: mol_type = other DNA
ccctgggtatgtcagcacatggagggctgagcccatcatggccacggagtgggcggggttcctgggtaactccccacttcctcctgcaccaccacggggaaggtgtggtgacctctcctaccaagaggcatgagacctctaggacacccaggtcctgaatgcaatgggacatcactgtgacagggacctggtgcagctccagcctcctgcactgaaggacccagggccatggggacagcaggaggctgaggcccaggactgtccttgcccaaccagaggtgtcctgggcctgaccccacccatgagctgct

SEQ ID NO: 25850 - DNA, 374 bp, Homo sapiens
  source 1..374: mol_type = other DNA
gacagacccctgggtatgtcagcacatggagggctgagcccatcatggccacggagtggcatgtcccgcggggttcctgggtaactccccacttcctcctgcaccacaacggggaaggtgtggtgaccctgagctccagctcagctgcctctgggactaggcctctcctcccaagaggcatgagagattcacaggtcctgaaggtccagcacaatggggtgtcactgtgacagggacccgttgcagcttcagcctcctgcactgaaggggccgacccagagccatggggacagcaggaggctgaggcccaggactctgcttgcccaagaggtgtcctgggcctgaccccacccatgagcctgagaagtgctcct

SEQ ID NO: 25851 - DNA, 358 bp, Homo sapiens
  source 1..358: mol_type = other DNA
ctcaggacagacccctgggtatgtcagcacagggagggctgagcccatcatggccacggaggggcggggttcctgggtaactccccacttcctcctgcaccaccacggggaaggtgtggtgaaccctgagctccgggagacacagagtgaccgagaactgtccctttgactctgggattcacaggcctctcctcccaagaggcctgagagattcaccctgcacacctccaggatggacgtcactgtcaccctaccccagagccatggggacagcaggaggctgaggcccaggactctgcttgcctaactgcacaaaggtgtcctgggcctgaccccgcccacgagcttgagaaatgct

SEQ ID NO: 25852 - DNA, 340 bp, Homo sapiens
  source 1..340: mol_type = other DNA
gggagacactgacttcagagaccccagggcccaggtgcccccagttccacagtccaggaccaaggagccctgagaaccctcggtgaacctcctaggattctgcatgcaaattcagtctctaaagaggttttggatcattcatttcttcattcaagcctctccttgatcctctcatgacagtgacatggacaccaggatttcaccagactaatcagctgaccatttgctctcactcctctgaggtttggatgcctaagaagtggggtccttggaacccagtaagccctcaataaactaaatggcaaatggactgtgtgttaaatgattcacagtcacctaa

SEQ ID NO: 25853 - DNA, 368 bp, Homo sapiens
  source 1..368: mol_type = other DNA
acccctgggtgtgtcagcacatggagggctgagcccatcatggccacggagtggcccgcggggttcctgggtaactccccacttcctcctgcaccaccacggggaaggtgtggtgatgagccctcagccgagaccccagggagccatagactgacagagaactgtccctttgactatgggacttctcctcctaagaggcccttggaagctgcagtcaagcttgacacgacaatggggtgtcactgtgacagggacctggtgcatctccagcctcctgcactgaaggggagggacagcaggaggctgaggcccaggactgtgcttgcccaacctgcagactgaccccgcccatgagcttgagaagtgct

SEQ ID NO: 25854 - DNA, 205 bp, Homo sapiens
  source 1..205: mol_type = other DNA
gaaaggcctttacttattcagtgaaagtgtctatttagactaagaggtattttagtttcctgactcgggcatgttgagtaaagctaataagttattttcttgaggatagatttccacgttgtgattttcagggcctctaaaagtattaaagcagcggcagccgctggtaagaattctgaccacactaaccatgcctaggaaggaa

SEQ ID NO: 25855 - DNA, 275 bp, Homo sapiens
  source 1..275: mol_type = other DNA
atcacgtcactgcactccagcctgggggatagagagaggctctgtctctgcctgtaatcccagctacctgggaggctgttgtgggttcgatctgacagcagcctgtgccatcatagctactgctcatgcatgcattcggggtgcctgggctgcacaggggccactgccgaggccatctggcaacgcatgcgtgcctctggctgcaaaaacaggcaggatcttccggccggtttggcatgcgcaccctccgagattgccgtgctgtgtggccaggc

SEQ ID NO: 25856 - DNA, 403 bp, Homo sapiens
  source 1..403: mol_type = other DNA
cccactgcacaacgtcctcacaggtagttgggccatttccccatctggggtacagaggtggccgaccgggggaacctcgggtcaagatgccacgggcctgggggcctggactcctgggtctgagggaggagggcctgggggtctggactcctgggtcggagggaggagggcctcggggcctggactcctgggtctgagagagggaggcctggggcctggactcctgggtcccggtctgagggaggaggcactgggggcctggactcctgggtctgagggaggagggactgggggcctggactcctgggtctgaggggctgggggtcctggaccctccatctgagggaggaggggcccattgagacttggggtggggcccaagcctccattttgcaataagggc

SEQ ID NO: 25857 - DNA, 316 bp, Homo sapiens
  source 1..316: mol_type = other DNA
gatcatattaggaagcaaatctttagaccctcttaaaggttctctactgatgccctgagtgtctgacttctgagctcaggagcactgctctcgctctagctggctacatcctgcatgcccttgaggttgcatctcaagtgctcatttaacagttaccgaacactgaatgtggcaacttcacagggcagggaccgctctcccttggatgacgcgcctaggggcggggccccgccccacagccgacgctgagttggcccggttgggcaaggctggggttgcctggggcgaggttactcatcctgggctcaggtaagag

SEQ ID NO: 25858 - DNA, 510 bp, Homo sapiens
  source 1..510: mol_type = other DNA
cagggcccttctgaagggctcattagaggggagacgtccctctggaattcctccaggtggggccgggccggggccggtggggccgggatggccggatgccgaggccacgggtggggcaagcccgtggctccctcctccctcgggatcccccctccacttccgggctgctggggagggggaccgggcggcctctctcctccctcttcccctgccacctgtctcataggcagaagcggccgtgcccagcgcgcagagcggagcgcgccgaagcctgagctcggcagttggacttcggaatctcaaggactccgactcctggcttagagccccgactcctggatccctgggtgaggcggcgtgggcacggttgccctgcacagggggcgtgctacgacccggactcaaattccggtcccgtctgcgtgtgccccgcctccttgggggggggtctccgcgccccggagcagacgcgagcggcgctcagccgtcctaggccccgcccccggagct

SEQ ID NO: 25859 - DNA, 445 bp, Homo sapiens
  source 1..445: mol_type = other DNA
ctgggattacaggcctgatgcccaagatcagcctggatcactttctcgcaatgactgggtataaagtgtttcacacaggcccagagaggaaagggtctggctgagacctttaacctctgccctccaccccatagcaaagttgtgggggggtggcggtacacttccctcagtctctgggcaggtgtctgactcacttgtccagctccccaaaccggtcagggcccttctgaagggctcattagaggggagacgtccctctggaattcctccaggtggggccgggccggggccggtggggccgggatggccggatgccgaggccacgggtggggcaagcccgtggctccctcctccctcgggatcccccctccacttccgggctgctggggagggggaccgggcggcctctctcctccctcttcccctgccacctgtctcataggca

SEQ ID NO: 25860 - DNA, 359 bp, Homo sapiens
  source 1..359: mol_type = other DNA
aaatgcttatgcaatttctggatgaactttaatgatagtgttgttctggtacctgtgagacagagtctccctctgtcgcccaggctggagtgcagtggcgtcatacgggactccgtctctgcaaaaaacaaattttatatacatgtatgtgtgtgtgtgtgtgtatatatatatatgtatataaatatatatatagatataaatatatatatataaaatgtcgggtatagtcccagctactcgggaggctgacactcaagcctgcgtgacagagcgagactctgtctcgcggggccccgcgtgctccgcccccgccccgcccttcccggggtcagtgccgtagcgcccggctcctgcag

SEQ ID NO: 25861 - DNA, 433 bp, Homo sapiens
  source 1..433: mol_type = other DNA
acacctgcagtcccagctactcaggaggctgaggtgggcagagtgagactctgtctcaacagaaaaagattgactgtcaggcaaattgtataacttctttgggcctcagtttccatctgtaaaagtggggataacagaataatgccagctctcattattattatctggagtgcagtggctgggattgcaggtgcacaccaccatactcagctaatctataaaattttggtagagatgactacctggctattattctttaaaaaaaattatttattttaataaaaatagagacagggtcttggtctggaactcctgagctcaagcaatcctcccatctcaggctctgaaatgctgggtttacccggccagtttccccaccttccagccctgagcccactggctgcaggaggcagagtatgattcattttgttcc

SEQ ID NO: 25862 - DNA, 354 bp, Homo sapiens
  source 1..354: mol_type = other DNA
gagaaagcaaatctttttgctgtattattatttattttattttttaaaaattttttgttgagagcaacccctgtctcctgggggggtgctggtcttgccatgttgcccagactggtctgtagtttcgtagggaacctggattctacgcacacacacgcacatatacatacatacgcgcgcgcgcacgcgcgaaaaaaattagcagatctctttcagccttatgcctgaggccaaaagagaaaagcctcagtttcccaatatgtggactgtgggcatgacccaagggtgcagccctgggtggccgcacccgcaggaccagcctggacatgctgggtgctccaaggtggggcccta

SEQ ID NO: 25863 - DNA, 378 bp, Homo sapiens
  source 1..378: mol_type = other DNA
tctcttttggcctcaggcataaggctgaaagagatctgctaatttttttcgcgcgtgcgcgcgcgcgtatgtatgtatatgtgcgtgtgtgtgcgtagaatccaggttccctacgaaactacagaccagtctgggcaacatggcaagaccagcacccccccaggagacaggggttgctctcaacaaaaaatttttaaaaaataaaataaataataatacagcaaaaagatttgctttctccgctcgttgctaaggaacgcagcgctcttcccgctctggagaggcgcgactgggcttgcgcagtgtcgacgccggcgccggcgcgccggggtttgaaaggcccgagcctcgcgcgcttgcgcactttagccagcgcag

SEQ ID NO: 25864 - DNA, 206 bp, Homo sapiens
  source 1..206: mol_type = other DNA
actgttgcctggcagcagaaggagctggttaccatgtggtccttgggaggcagggacagtgctggctgaccactccctgtgcgatcacagcagcgctgggattacaggcgggagccactgcgccagcccggccggggcggtctctttcaagccccctagagccatgcggccaaatctgtctggtgcaagcctgctggatgtggtcc

SEQ ID NO: 25865 - DNA, 103 bp, Homo sapiens
  source 1..103: mol_type = other DNA
acatgcctgtagtcccagccacttgcgaggctgcagcgagctaagtgcacaccgctgcactccagcctggaatcacccagccagcgttggtgggttaagcctc

SEQ ID NO: 25866 - DNA, 389 bp, Homo sapiens
  source 1..389: mol_type = other DNA
ccgtccaataatcaagactccattattgcggatcattaggaaagctctgcccttgctcctgccaccggcgcaggatggcctgctgtcgtgggtgcgctcaggcctggagcgcctgggcagcgcacggctagacctggccgtggctggcaaggctgacgtgggccggattggatcctggcgacccaggcgctgcgcctgcttcggtccccagagcgcccgaatgtggtgctctggaccgtgcctctgggccacacgggcactgtcctcgtcacccctggggcccccactgagaaggactgggcccaggtccaggccttgctgctaccagatgcgcctcttgtctgcgtgcgcacagacggcgagggcggagcgggccgctgcgttaagcc

SEQ ID NO: 25867 - DNA, 441 bp, Homo sapiens
  source 1..441: mol_type = other DNA
gagggcaccctaagtctatgacctttgacatcgccagaatctccttgaactctaattgatggagttcttgctaagaagcttcaaacctcccaaaggactggagacaccagcctctcaagtgttggggcgcttgcaggcagagggctgcctttcgctgcgcctgtcagccgctggctacagcgccgcactcagtctcagggcccccgtgcagatgagcctctcggagccgagatcccggatttgccatcggcttagctagctacatgcgcaggcgcgtcatgttctaggccctgaggccgccaaagaggggcgtgcacacttcggccgttctgcgcaggcgcggcgaagggctgggtctctgctgtcggccttccaagacacacccccttgggagagggagtgacgtcaggttaaagctaccgggacgggtcccggcatctc

SEQ ID NO: 25868 - DNA, 369 bp, Homo sapiens
  source 1..369: mol_type = other DNA
gagtgtcactctccaggagaaatcaggtgcctgtaatcccagtgcactctctggtagagtctccgtctcgttcccaggggctgcagtgggccgtgatcacaccaccgcactccagggtcagcagctgagaagcccggcccctgggccgcggcggacggaggccgaagaggccaggggagatgccgggacccgtcccggtagctttaacctgacgtcactccctctcccaagggggtgtgtcttggaaggccgacagcagagacccagcccttcgccgcgcctgcgcagaacggccgaagtgtgcacgcccctctttggcggcctcagggcctagaacatgacgcgcctgcgcatgtagctagctaagcc

SEQ ID NO: 25869 - DNA, 436 bp, Homo sapiens
  source 1..436: mol_type = other DNA
actctctggtagagtctccgtctcgttcccaggggctgcagtgggccgtgatcacaccaccgcactccagggtcagcagctgagaagcccggcccctgggccgcggcggacggaggccgaagaggccaggggagatgccgggacccgtcccggtagctttaacctgacgtcactccctctcccaagggggtgtgtcttggaaggccgacagcagagacccagcccttcgccgcgcctgcgcagaacggccgaagtgtgcacgcccctctttggcggcctcagggcctagaacatgacgcgcctgcgcatgtagctagctaagccgatggcaaatccgggatctcggctccgagaggctcatctgcacgggggccctgagactgagtgcggcgctgtagccagcggctgacaggcgcagcgaaaggcagccctctgc

SEQ ID NO: 25870 - DNA, 414 bp, Homo sapiens
  source 1..414: mol_type = other DNA
gggctgcagtgggccgtgatcacaccaccgcactccagggtcagcagctgagaagcccggcccctgggccgcggcggacggaggccgaagaggccaggggagatgccgggacccgtcccggtagctttaacctgacgtcactccctctcccaagggggtgtgtcttggaaggccgacagcagagacccagcccttcgccgcgcctgcgcagaacggccgaagtgtgcacgcccctctttggcggcctcagggcctagaacatgacgcgcctgcgcatgtagctagctaagccgatggcaaatccgggatctcggctccgagaggctcatctgcacgggggccctgagactgagtgcggcgctgtagccagcggctgacaggcgcagcgaaaggcagccctctgcctgcaagcgc

SEQ ID NO: 25871 - DNA, 331 bp, Homo sapiens
  source 1..331: mol_type = other DNA
aatcaaaacatgcgccacctcctggaagtctttctagaaccagaggccggggcaagcgcctcttaggctcccacagcgaggggtcccatgcgcccttccagtgcgggaggcctttcattgtcccgcgctggcctcgggcccaggatccagggcgcgttcctgccccgcacacgcactcctttgggccgcgggctgtaccaagtaaacccaggcagcgaggggcaaagcacggcgccccccgcgcgggtctcgtcgacggcccgacgcgcatagccctacaggactagtccgtctcgccgcgcaagcgccctaggctcttcgcgcgttgcga

SEQ ID NO: 25872 - DNA, 225 bp, Homo sapiens
  source 1..225: mol_type = other DNA
cctaatgggtccctaagccagaatgtgacaaagtcacttacaggaagtggaatgtagccatagttgaactctaacaatcaaaacatgcgccacctcctggaagtctttctagaaccagaggccggggcaagcgcctcttaggctcccacagcgaggggtcccatgcgcccttccagtgcgggaggcctttcattgtcccgcgctggcctcgggcccaggatccag

SEQ ID NO: 25873 - DNA, 314 bp, Homo sapiens
  source 1..314: mol_type = other DNA
cagatagaaatgttctattgtatgtggtcagtgagcacttgaaatgtgaactgaattttaagattcgatttaatattaatttatttaaatgtaaacaaccacatgtggccagtggctaccagattactccgtctcaaaaaaaattttttagtaataataatagtaataacttgtaagttctggcctgtactccgcagattgcttttagtgagctacaattgcgccactgcaaaaaataaataaataagttgtaacttttgtgagagcaaggacagtttcacacccagcacggtgcctggccagctccatgacat

SEQ ID NO: 25874 - DNA, 262 bp, Homo sapiens
  source 1..262: mol_type = other DNA
cacgagcctctccctcctgggacccaggattcaggcttccttccagttagttcactttcagggggcccctcccggagaatgacgcggaaacaagagagggagggagggaactgaccccaccccactcctgctgggagtccggacctccagctgctcgcgcgcagcacctgggcccgccctccccggccccgccccggcctcggcgccccgcccccgggcgggcagggggcggggcgcggggggcggggcgggcggcgcgggc

SEQ ID NO: 25875 - DNA, 236 bp, Homo sapiens
  source 1..236: mol_type = other DNA
ctcactgcaaaaggacctacttcgtgctgggcactggtccaggagctgggggcagagatgcatatttcaggatgcatctctagataaggacattttccaaaattctggggacagagctgtgatcacaactccagagtcagggccgagccagccccttcaccaccagccggccgcgccccgggaagggaagtgagggggaggcgcccacgcatctgggtccctggggccacaaaact

SEQ ID NO: 25876 - DNA, 198 bp, Homo sapiens
  source 1..198: mol_type = other DNA
acctgaggtcaggaggtcagtgagccaagattgtgtcactgcactccagcctgggtaaatcaatgactaaattattgggcatgcactctctctgtgaccccatgagcagctggggcttggggtccctgctccacctccgggccccacaccaggtctggaataagctgctgcttgctatgataatgggtcctagcaacg

SEQ ID NO: 25877 - DNA, 490 bp, Homo sapiens
  source 1..490: mol_type = other DNA
actggagacccttcagggtctgaccgcagctccacaggccggggtgtcttccccagtcatgtgttcttggcacgcgcgcacgcgcattgagtcagagccgcggcgtcctcccgcctcccgctccggaacccgcatgcgtgctgaagccgaccgcctccatccacgcacgctcagcccggcgagcgcattcagttctcgagctccagccctcagcgcatgcgcaggacgagtcgcctgagggaactgatctcagctcgggcccctgcaacccggacgccgaggccggtttcggagtggggagctggcccccagacgccatttgcaggcgggtggcttgggtcagcctccccgcccccacccgactcccgtcacgggagagcgcagcagccgcgttaggtaagggggccgcgagcccgcgcgaggctagcgcaccggcggcgggcggggcgctccggcaggccccgcccccgccttggccattgaaaggtcg

SEQ ID NO: 25878 - DNA, 346 bp, Homo sapiens
  source 1..346: mol_type = other DNA
gacggcagtgatccgagatctcgccactgcacgccagcctgggtgacagggcgagaataaaaataaataaaatttcctggggaactgccgacccttccgaatgcgcatgcgcgtgtgtttaaattttcgatcagatgacactggagacccttcagggtctgaccgcagctccacaggccggggtgtcttccccagtcatgtgttcttggcacgcgcgcacgcgcattgagtcagagccgcggcgtcctcccgcctcccgctccggaacccgcatgcgtgctgaagccgaccgcctccatccacgcacgctcagcccggcgagcgcattcagttctcgagctccagc

SEQ ID NO: 25879 - DNA, 180 bp, Homo sapiens
  source 1..180: mol_type = other DNA
cagtgcgtgttttgaatcatcactgcgagcacagaaaacacacacctgtgtcacaaagtacagaccattgtgtgtgacaaaggcccctccttattctcaaaagggggagctggggagcctccccctaccctggggcctccccggccgtcaccactccccagagggcacagggctctgctg

SEQ ID NO: 25880 - DNA, 278 bp, Homo sapiens
  source 1..278: mol_type = other DNA
tttgaattgtgtatgtacatgtaatacctgttcaaatataattttaaaaaacttttttttagaccaggacggcagtgatccgagatctcgccactgcacgccagcctgggtgacagggcgagaataaaaataaataaaatttcctggggaactgccgacccttccgaatgcgcatgcgcgtgtgtttaaattttcgatcagatgacactggagacccttcagggtctgaccgcagctccacaggccggggtgtcttccccagtcatgtgttcttggca

SEQ ID NO: 25881 - DNA, 122 bp, Homo sapiens
  source 1..122: mol_type = other DNA
ctgcacccagccccagatcatcctggatgttgtcctgtgtggccagaatataccagaatcatcttgcttcaggcatcagtgcgtgttttgaatcatcactgcgagcacagaaaacacacacc

SEQ ID NO: 25882 - DNA, 138 bp, Homo sapiens
  source 1..138: mol_type = other DNA
ataagccctggagcttccaggctccaaggtttcctgctgggccccgaggcacctgggttctttccaggcccggaagactctggaatcattcagactcaggagtccagaccccaggagtccaggccccaggagtcgccc

SEQ ID NO: 25883 - DNA, 245 bp, Homo sapiens
  source 1..245: mol_type = other DNA
gtgctagcctggggtctctgcctcagcaccaaccacctgctggggcctcctctggacctcctcacctgctgagtgtctgagcatccacatgtgtctgcctgtgtcctcgggggacagtgacccatttcattcatttaataaatgtttctgaaacacgtgactacacagtcacatctgttcacagcaggctggacattcctggaggcccccgagacccagaagtgtagatctccagcaggctgggt

SEQ ID NO: 25884 - DNA, 279 bp, Homo sapiens
  source 1..279: mol_type = other DNA
ctcctagaggcccctcttctaggaataggtcttgacaagatcctgtcccgcggacacttccagatctaattggtgggacacgccccgtccctgccacgccgtctgagacacaccgcgtgcacacaggcttgaggatccggacacgacacgctctgtccgtgctgccggttccagtcgggccccagtaaagcctgtgcaggctgggagaggagcttctggcaggcaagctcgccccgcccccccggagacttctgggaaatgtagtccacagcggcagag

SEQ ID NO: 25885 - DNA, 228 bp, Homo sapiens
  source 1..228: mol_type = other DNA
tttcttgagctttagaaatgctatggttacaaacagagctcgcttccaagggggaaatatccaggagggatgcctctgcagaagcctggagtcacagtgacaattcacacaggtacacaacactgttcatttgtctaacgccagatgactccagggatgacacgccccgttcacgcctccgctgatttctgtggagacgatctactcaccacgtaggggctacagctc

SEQ ID NO: 25886 - DNA, 412 bp, Homo sapiens
  source 1..412: mol_type = other DNA
gggtggatatcaagaccatccgagatcatgccactgcactccagcctgggaaaaaagaaattttcaagaaaaaagaattattttacaaatgtataaacaatatttgaaaaatgaaaaggtttgaacaatttaccaataataataataataataataatcatggcctttgaaaatatgaaaagatgttctatttcatttacaatacaggaaatgtaaattaaaattacatcggcatactatcagttttagcctcacatcatcaggttatgcagtaattccagtaatacttctgtaataattggggatatttcaatcaggaaatcattgtttatgtaatatttttgcttgaagttgcaacacttccccctggagggtaaaactgtgaacgtttactccttgtcccaacggtcgg

SEQ ID NO: 25887 - DNA, 461 bp, Homo sapiens
  source 1..461: mol_type = other DNA
aatgatataattgtttatctgaattaatttctaatcaaagtgttgaagttgcttgaatcatcttgactacccgtagaataattattaattaaaagggaaacagaactaaaatttttaaaagtttacagcctatctactttggaaaaaaaattaagcaactaactaattcatgaatttagtatggattggccatgtcaactagagtgcaaggacctgggggacagaaagggcctttgatgccagatataccctaatatattaggcacagtttcctgcctactaactgtaactggtttagaaatagcagtcactcaattttcagagaagtgtcctcatacttcactttatctaaagaaaaccatgaaaagtattcttttttagtttagaaaaattgatatagaacatgagactccatttttttaaaataaaaatataggttgatgagtctaattgcccggtcg

SEQ ID NO: 25888 - DNA, 259 bp, Homo sapiens
  source 1..259: mol_type = other DNA
agctcaagggaacgtcctgccctggcctcccaaagggtttataagacatgctcctttacaatctcaatgtaagattgataccgtctgaggtactgagcaattcacaaatttgatgtttctacatctaaggagaaataaccagtggtcccacagcttctggagtagggtcctgtctgggcactgcggtgtgtgtagtcaaggaccaccgcggagtccaactgtagtccatcaacttcatggaatggcggaccctttggtc

SEQ ID NO: 25889 - DNA, 418 bp, Homo sapiens
  source 1..418: mol_type = other DNA
tgccactgcactccagcttgggcgacagagtgagactctgtcttaaatggagatatatccattattaatggattgggcgacttgatattgcaaggctgtcaatacctatatctatagattcaatgcaatccttaatcacagtaacatttttctcagaaatgaaaaaatccacctgagattcatgtgaaatatcaagggacactcattttctagcaaatattcctccataataatttgcagagcatgctagcatttcttgtcaggagaggacagctctgaaaatttctagctagatgaaggcagagaaagaaaatatttgatttcttaggctttagcacgcaccagtcggtaaaggacatttactgaaatgctatctccaactccacttcaggaaagcttgctgcagagtagtccacac

SEQ ID NO: 25890 - DNA, 291 bp, Homo sapiens
  source 1..291: mol_type = other DNA
ctcccttccattggagagatgtaagagagagcgcaatcggccagaaggccctctcggtaaaaccagtggtacaacagtgtctggttgtaccaggggctggtgcttaagctcttagatttagcctcatactattagcgtctagtatcatcatgggaggcgtgtagacttcaggaattcctgtctattcaatattttctctcgaggacgcagggagaaacgtctcctttgagattcaaggaaattctgggaaatgtagttcacacgctgcgcggggtaggggcacttccgctc

SEQ ID NO: 25891 - DNA, 312 bp, Homo sapiens
  source 1..312: mol_type = other DNA
ccagtggtccaaccgttacaatttttccacggacgaaatgaaactgttccacctttagattctcataaggagcgcctgacgcgctcctatgagaggaggtggagctcaggccataaaccggtacagtgacggcggagacatttagacttcataaattctttctattcaatattggaaggacaactgtcagggtaacagtcaccaacctggggcaacacttgagcctaaagggtgaggccacaacgatagtccagacactctgcggagtcccgggccctttggctcaggggggcgggtccgggccagacactc

SEQ ID NO: 25892 - DNA, 461 bp, Homo sapiens
  source 1..461: mol_type = other DNA
cactttttttgagattccgtctcaaaaaaaaaaaaaagaaggttccataatgtataattccatttatatgaaatgtccacaataggtaattcatgtttcctaactttttatttgtactacatatatcctaaaatggtgaatttcacgttttgtgcattacacctcaatagagatgttttaaataataaaatacattaaaatgttttgcatagataaaacaataaaaaaaaacgtttttgttgagaaaatatttgcgagataaaatgttaatatcatgaatataagaaccatctggacaatttacaaaaaatgtaataatgacacctgaaaatatgcaagaatatgccatctttacaagagttataaattaaaactacatgccatttcttaccactggaggacgactctcagggtagaagtccatggagtcaacacttcccttagtgtaatgctgcaggagt

SEQ ID NO: 25893 - DNA, 325 bp, Homo sapiens
  source 1..325: mol_type = other DNA
attaaaatgttttgcatagataaaacaataaaaaaaaacgtttttgttgagaaaatatttgcgagataaaatgttaatatcatgaatataagaaccatctggacaatttacaaaaaatgtaataatgacacctgaaaatatgcaagaatatgccatctttacaagagttataaattaaaactacatgccatttcttaccactggaggacgactctcagggtagaagtccatggagtcaacacttcccttagtgtaatgctgcaggagttcggtggagtcgcggacacttccgcttctgaatttcctggacctacgcattggatcc

SEQ ID NO: 25894 - DNA, 398 bp, Homo sapiens
  source 1..398: mol_type = other DNA
acactgtattcgtactagatgccattgccattgaattatgtgccttaaaataattttgttttgtgaattacacctcaaaaatattttttaaataataaaacgaccacgttaaaaacgttttgcagaaaaacaagtcaaaggaaaaaagctttttggttgagcaatatttgatacaatgttaatatgagtatgtaaataatactaaactatttgaccaattcagttccactttatttacaaaagaacaaatacaaattaaaactacatttagaaaccatttcttaccattagattagcaaaacttaactcctcgtcctgttatcattggtttctgtcctggaagagagagaattcccagtgggcacctcggagtggcgtccagacactcagtggagtag

SEQ ID NO: 25895 - DNA, 357 bp, Homo sapiens
  source 1..357: mol_type = other DNA
attctattatttatttgtatcaaccaatgtaagccagattccaaattgctaactataatgacgatattttaaccaaaaaatataaaggaagaaaataaaatatgttccttcacgtataggatcctccttaatgctactgcattaaataaatcataggcattgggtgtctgacatcaatgccaagctgtttttacctcttcagtagacataataccatgaaaagtgtaaaaccagtggtacggcctcatattatcagtttatagtaatcaatcacgactctcagggtcgcgtaggcaaggagcaccgcggagtcccagattctgaacgtttttccctcagcattctgagtgtaatcca

SEQ ID NO: 25896 - DNA, 312 bp, Homo sapiens
  source 1..312: mol_type = other DNA
tttgatataaatggaatcataccatatatggtatcttgtgtctggctataatgtcttcagagttcatctatgttataacatgaatcaatattttgttcattcacattactaaataatattgcattatatggctagaccacattttgtttatccactcatcagctgatggatgaacttttttagaacaagtttccccagatcgggtgccagcagattctaaagattaagagagcattaatcctattcatgagggcattgccctcttgatctgaccggaagtgtctgcggaatcctgggaactgtaggtccagc

SEQ ID NO: 25897 - DNA, 330 bp, Homo sapiens
  source 1..330: mol_type = other DNA
attatatgactgtgctattaagaaaagtggaaatccataatatattctgttaaagatttttctattagtcgatcctgttaaatgtaaaaacttaaagggtttcctctgcccttttttttttgacagagtctcactctgtcgcccaggctggagtgcagtggcacgatcttggctcactgcacccgcctcccaagtagctgggacggcgcgcccggccaagctggtctggaacttatttgctgttactttttgttaataagaaaaacctaaattcgggagctccgagaattttctgggaaacgtattccagaactctgtccggaaacaatt

SEQ ID NO: 25898 - DNA, 498 bp, Homo sapiens
  source 1..498: mol_type = other DNA
aaaagaagcttatttcataataaagtgttgaatatcatataatttattgaataggtgaatgtgtgttgctttcacaccatcatgaagtcgaaaaatcttaagtgaaccattgttaactccaggacctgtattctaatcatgtattaaaagtctttataaagtttgctttacattatgtaaggctgttatagttgatagaaaattttcattactatgaagtgtttctttgtatatcttaaaatgttcttttcttcaaggactattgtactttgtccaatattaatatattttaaaattagagaaagaatatgaggcctaggacgatagtctctttctccaaatatttttgtttatgtcaggtacctgcaaacactaacagaaaaggtttactttaatctattttcatttactcctgtagtacttccactctaaaattgcaaatcttggctaagatttgctctggctttctaggatacccggaagctcaggttactcgga

SEQ ID NO: 25899 - DNA, 557 bp, Homo sapiens
  source 1..557: mol_type = other DNA
ggggttggagccctacaacctgcccgtgtgcatgctccctcacatgccctgggagagggagaagtgaacttttcccgtttcgagattcctgcccaagcaaactgtttaattgttcattatgggaacttccacagagtcaaattttcaatctcttccaaagaaagtgtcaatagattgcaatttaagattctttgcttcaaaaatccttgctatatccaccaatcctggactgtagtatcatgatcattatgcaatactaataagctctgtgaaggtgccaacgctccgtcgaagtgttgttctccattactgcaatcaacaataaattctgttttttgtcttatcaacaggttgagttgataacgttcagcgaaaaattttggtttctaacttattttaataatacaagctgcacttttcatttttatatgtcatcactttaaaaattttacaattattttctcatgagcttttaaaaatgaataaaacaaatcaaacccaaccggcttgagtcaaaacaaagcccagctggtgggaagcctctgtgggaagtggag

SEQ ID NO: 25900 - DNA, 212 bp, Homo sapiens
  source 1..212: mol_type = other DNA
cagaggaaacttgtggatcttgcaacaaacacattatggtgtttgtgtcgcgtttgaagaaaaataaattcaaacctgcaagaaattccgggaattgtccaaggcgcctttcatgcacacagagaaatatatatacgagctctctgtctttccacccggtacttgcgtcctaggcaggaggccgtctccctgatcccgtcgggaattctggg

SEQ ID NO: 25901 - DNA, 421 bp, Homo sapiens
  source 1..421: mol_type = other DNA
aggaacacccaaaagcttttgctgcttctgctttattatcatggaatgaatagcatatatcagataaaaagtaggtttctctactaatgcatttgttttgtcacatgtgaaagaaaaaaaatgatagaatgattcggactgaacctagttatcagtgtcaaaaacacttctgttcctggaaaggttaagtataaattagaatcttgtttttggagacatttggttcaaagaggacagtgctgagtttgcattctactctagaactgtgtgacatacattccaaattcaaagggtaccgccagagaaaggcaacgacattgccaattctttgcgaggagccgggcttccgctagggttataatccaggaattgtgggtaactacagtcacttccgctccatgaaagtgaggtcatcattcct

SEQ ID NO: 25902 - DNA, 458 bp, Homo sapiens
  source 1..458: mol_type = other DNA
tagttggatattattcagtctaggcctactctgccagcagccaggtcttaccccatttagggtacccaaatttttctttaatagaaatcttaaatcttaaatgcaataacaaattttcaaaaagaatctgaaaacttcccgcgttttctttccttctgcttcttctgagactaggaaataaattacagggctatgttatatcgcatgtagattatcgttaattgaaaagtttcgtggttttaacgttaaaagacatgcctataaaataagaacttataaaagtcttcactaaaacggtaaagtgcccatttccaagtagtaaaatattgaaacttcttttcatcgttgatagtgatttatttaacatttcattattttatcgttattatggacaaaggccaccttcaccagggtagccttgcgaatggccactgctgcgcgcggggcgccataggcct

SEQ ID NO: 25903 - DNA, 707 bp, Homo sapiens
  source 1..707: mol_type = other DNA
ttgtctttttggtcatactggagaaaaaaaaggaaaagactgatataccttgtcagatgaagttttttgtttttttttctaaactactttataaatgttgaaactgggggagcaattcatcacttagaagcgatatcattcatacacagagagtgtatgacaataaaagatgacaatgaaatgcaatcggtaataagcatatttactctgtcaaattgggaaaataagacaggatatttagtccatcaaattgggaaaatattaaagaaagtgattgtgtgtagttttgatatcataaaattagaagtgtaagtaagaatgctaggcaagtattgcaaataatttgtgttttttctctatgtatctctacgtcttttgtgacatacagaactcaagaaatgattacaaaatattatgatgccatttgggaaatgggattcttaagaattcatatttactcacataaaccagggattaagtaagaattttttttaaaccattctttacatgtaatatgaactacttttgaaataaatatttagttggcttttacaccagaaaatcaataatgctttatatccctgggaatatgttagtactgagtaaagacattcttttcaccgcctcccgccgcctcgcagtgggcgtgactcgaggtggacgcggctgcggagggttctgggaaaggtagtcccacacctcgagtc

SEQ ID NO: 25904 - DNA, 707 bp, Homo sapiens; identical to SEQ ID NO: 25903
  source 1..707: mol_type = other DNA

SEQ ID NO: 25905 - DNA, 707 bp, Homo sapiens; identical to SEQ ID NO: 25903
  source 1..707: mol_type = other DNA

SEQ ID NO: 25906 - DNA, 350 bp, Homo sapiens
  source 1..350: mol_type = other DNA
ccgtaatcccagattcatcgcgctattgccctccagcctgggcaagaactcaaaatttaaaaataaaatgattatattttagtattattaaatgtaaaaacatagattcccgctccctccactgcgcgtctgacaggcagggggcacccagaaagggtagagcgacccccatgcgtcgctgcactggcctcggcctcccggcgccgcggctggtcttagtgctccccctagacctgcacatgcacaggtgtggcgcccccccgggccccggacgaggacgccctcttagctggcccggtcgcctactgaccgtccgcgccgcggaggcttctggctctccgagcccaagt

SEQ ID NO: 25907 - DNA, 367 bp, Homo sapiens
  source 1..367: mol_type = other DNA
gtcagaattcaggactgggcgcgacggctcacgtctgtaatcccagcagaggcgggcggattgcttgagcctgtagttgcagctactatgccactgcactccagcttcaggaagtatttgttaaattaatggatggatacatggattaatgagtctaggtctatacactgtcaaagaccaccagcttgtcttgtcatagagatttttttttaagtaacttttatatatggaacctttactactggaggtgagcttttgtttatgaccaggatctatatcacaagcatgattccggctcatttaatatttatttattatcattgctattgactatcgtaatcgcagggttcctggacttctcaaagtt

SEQ ID NO: 25908 - DNA, 266 bp, Homo sapiens
  source 1..266: mol_type = other DNA
cctcctggatctgatattcaagtcgttgattaagaaaggcctttttgctgttacaatagtaggtgttcaataaacaccagctattagtttgagtaatataattattaatttgagaggaaaaagtagctagtgtagcttatccttctagaatctaaaattcaggatatagtggacatcctagacaccaaattataattagcattgacttcatagtgactgtctgactctggggcaggcactattattaacgcctccattttacagag

SEQ ID NO: 25909 - DNA, 411 bp, Homo sapiens
  source 1..411: mol_type = other DNA
atttagtacaaactatatccccgaaattgagctaggcagtttcttgtttaagttgagacagagtctcactctgtcgcccaggctggagtgcagaggcccgatcttggctcactgcaacctggaacaggcatgtgccaccatgccggcctggaattcaggcatgagccctggtcttgtctgaccccaaagcccatgggatctgtcccatcacgagtcactcggcaaccgcgagccgttagtaagtcacctggaatgtgggcgacctcacacaggaagccgcctcttctagtgggcaccgacggagcgagcgcgcgtctgcagcgggactgagcgccgggagagacctgcgcaggcgcaggcgcgcggggagggccagcctgggtggcccaccccgcgcctggcgggactggc

SEQ ID NO: 25910 - DNA, 437 bp, Homo sapiens
  source 1..437: mol_type = other DNA
tgagacagagtctcactctgtcgcccaggctggagtgcagaggcccgatcttggctcactgcaacctggaacaggcatgtgccaccatgccggcctggaattcaggcatgagccctggtcttgtctgaccccaaagcccatgggatctgtcccatcacgagtcactcggcaaccgcgagccgttagtaagtcacctggaatgtgggcgacctcacacaggaagccgcctcttctagtgggcaccgacggagcgagcgcgcgtctgcagcgggactgagcgccgggagagacctgcgcaggcgcaggcgcgcggggagggccagcctgggtggcccaccccgcgcctggcgggactggccgccaactcccctccgctccagtcacttgtctggagtgggtcccaggcactggaggagcggccccccggggattccagg

SEQ ID NO: 25911 - DNA, 251 bp, Homo sapiens
  source 1..251: mol_type = other DNA
acatgtgacagacagtggctctgtagactagagtacagtggtgagatcacagttcattgcagccttgacttctcaacgtgcccaaggttaagcctttacacaagaaacagccactgaccctggtcaccagaggctgcaattcaggccgcaagcagctgcctgggggtgaagaaggttgtcagctgcagccactttctgccagcatctgcagccactttctgccagcatctgcagccagcaagctgggactg

SEQ ID NO: 25912 - DNA, 283 bp, Homo sapiens
  source 1..283: mol_type = other DNA
cctaggcagtaaactccactgtactccagcctgggtgaactacaaaatattcttgcaattataggtgacatatttaaatgaaggtgggcagatcacctgaggtcagggtggtggcgcatgcctgcatttccagctactccctgaggtgggaggatcgctattgcgccattgcactccagaaaaaaaaagaaaaacacgaggctaagagcttttttttttttttgaggctggaatgcagtggcgcgatctcggctccctgcaaccaccatgttggccaggctgg

SEQ ID NO: 25913 - DNA, 397 bp, Homo sapiens
  source 1..397: mol_type = other DNA
aaggtgggcagatcacctgaggtcagggtggtggcgcatgcctgcatttccagctactccctgaggtgggaggatcgctattgcgccattgcactccagaaaaaaaaagaaaaacacgaggctaagagcttttttttttttttgaggctggaatgcagtggcgcgatctcggctccctgcaaccaccatgttggccaggctggatgctgggatctgcctcagagccttcaagtgagtcagccacaggtgaaatcccacctctgtctgtgcgtgtgtgtttgaacaaacccaggggaattgttcaaacagaggctgttatgactattgctacagtgactgctgttgtagtcacgctaggggaggagtcctgggaagttccccagtcaccctgacccag

SEQ ID NO: 25914 - DNA, 288 bp, Homo sapiens
  source 1..288: mol_type = other DNA
ttgagaacagcttggccaacatggtgaaacagtgagccgagatcatggcactgcactccagccagggctcaaaactatgtctctgctattgaaaacacaggatatttgatgaggacaataataatatataatgttatattattattattattattattattattattattattataaaactaatagcagctaatggacccaggccgcccaggagttcgagaacaccctgggcaacacagtgagaccccctgagtcggagttcaaggctacagtgagctatgatctcac

SEQ ID NO: 25915 - DNA, 409 bp, Homo sapiens
  source 1..409: mol_type = other DNA
ggctgccccgcccccagggaaatccgggaaagccccggaccttcggggccccaccccggggcggggagagggagaggaggggaggagacggggaagagtcccgcctccctcctccctccctccccacccatcaacccctcctcgaggtgggaggggaagtcggggggaagccaaactgctccccgctcctgcagcaccggcctcggtcgcgctgactctggtccgagcacccaccccggtgccccgcgggccccggctgggggcagggcccccaacgagtgcagagacgtggagccccacagctgatgaggcaggaatcgttcctggccgcctgccgagtgccagtccctgccccgggtgcgtccccttggcagcaggggtggggacacccccccaccccccgaccccg

SEQ ID NO: 25916 - DNA, 425 bp, Homo sapiens
  source 1..425: mol_type = other DNA
cagcaccggcctcggtcgcgctgactctggtccgagcacccaccccggtgccccgcgggccccggctgggggcagggcccccaacgagtgcagagacgtggagccccacagctgatgaggcaggaatcgttcctggccgcctgccgagtgccagtccctgccccgggtgcgtccccttggcagcaggggtggggacacccccccaccccccgaccccgcctcccccgccgaggcctggctgccccaggcgccgcgggccgggagggggcaagcggggcgcggcgcgggcggggcgcagggcaggctgcacctcagagcggcgggagcagcggcgggtccaggaaacccctggggcgtacgggtggccccgggggggccgggggcggggaggcgggcggccggcaccgccccggccgacaaaagtc

SEQ ID NO: 25917 - DNA, 218 bp, Homo sapiens
  source 1..218: mol_type = other DNA
tggcaggagctcagaagttcaagaccagcctgggcgcgcctgtgaccccagctactcaggagggtgggaggagcagtgagctaagatctcaccactgcactccagaatcaaactcaaaccgcaacattttattttatttttaaaaattttttagagatagggccctcaggtgatccttccacctccttggtacctgcgggcgaggccgcccctaccag

SEQ ID NO: 25918 - DNA, 428 bp, Homo sapiens
  source 1..428: mol_type = other DNA
gggccgcacgctcctcccttccccacaaggttgggagggaatgctgggattccccccagccccatcatccggccgagattaaaccggttgattccaggagcagcgactgggagaggccagtgcaggccactcggagccatcgcaggccacaggttgcagtggggtcctctggagcccaagtggggacgagtccccaaggccccctggtcgatcaggccccccgctgcaggcgctggtcagtaagcccggacagctctaggcttgggggcggacgagccccgagcctggccccgtgcactgggaggtccgctccgggcagtgggaggtcctggccccgcgcccgggcatcgggggacgaggggggcctggagggcggggcggggcggggctgccgggggcggggcctctggctcccagccccgcagcgg

SEQ ID NO: 25919 - DNA, 175 bp, Homo sapiens
  source 1..175: mol_type = other DNA
gccgggcttggtggtgtaatcccagcatcttgggaggccgagccgggaggatcgcttcccgtctcttttattgaaataaagaaacagtgcgatgggctcgacctgcggggaggtcgcacaaccgggacgtgctcagccccacgtgcctcaggcaactcagaccttggaattcttt

SEQ ID NO: 25920 - DNA, 214 bp, Homo sapiens
  source 1..214: mol_type = other DNA
tcggctactccgaaccagaggtggggtgggggcccggctgccgcggtgcctggtgggacgcgaggcctgaccttgctgcctagcgtcgaccccgtacacgctggaggcaccggaacccgcggcgacgcgagccaataggcgcaggcgctggggaagggtgggaggggcgccgtggctaccctcctcagggcacactaaaccaatgggctaggtg

SEQ ID NO: 25921 - DNA, 288 bp, Homo sapiens
  source 1..288: mol_type = other DNA
cgatgggctcgacctgcggggaggtcgcacaaccgggacgtgctcagccccacgtgcctcaggcaactcagaccttggaattctttggatcctgtgacgtcagcgggttcgaaccgccggagctgagcgagaggccgggggtgccgagccgggcgggcgcagcgggaaccggcccggagccggagccggagccccacaggcacccagccgatcggcccccacagagtggcccgcgggcctccggccgggcccagtcccctcccgggccctccatggcccgggccgctg

SEQ ID NO: 25922 - DNA, 382 bp, Homo sapiens
  source 1..382: mol_type = other DNA
ctgggattacaggcacgtgccacccatcctgaggcttgaaaaggcggtcaccagccagcctgtggcagggctgggattcgaacccaggctgtgcagcctctcagcagcagagtggctcagagcctgacacattttgtgagcatgagtgagtgacttaccctgtaagcttctataagtggtggtgaccccctctgtaagtccacatgggcttgtgtcgaccagatgaggtcgtcatagcagggcctgggacgctgacctcagcggtagggaacccctcctgagagcaagcccaagcctccagccggggtgagcctagagggcttcctggaggtggagtctagcctggcactcagggtgggtggaaacttcatttgtcacgcct

SEQ ID NO: 25923 - DNA, 359 bp, Homo sapiens
  source 1..359: mol_type = other DNA
tgctgagcactgctggggccacagcggtgaccagccctgtcttcacgggactcagtgagaggaacagattctccggccaggaatctgcatggatatggtgggaagctggcacgcctctcacctcagccgtgggtgccacgctggagaccacagaggggagacctgagcccccctcccttccctccccccttgggggtcgggggggacattggaaaggagggaccccgccaccccagcagctgaggaggggattctagcatgcccagtgggcctggggtcccgggagggatagaggcggccagacaacctcagggaggagtgtcctggcgtccccatcctccaaagggcctgggcccgcc

SEQ ID NO: 25924 - DNA, 364 bp, Homo sapiens
  source 1..364: mol_type = other DNA
cttcaagcccctggaaaccacaatacctgtggcagccagacatgtggggagggggctcccctgtgctcaaggggaagctgtgattaaaacccagtttgcgagatctcggctcactgtctgggattacaggcgtgagctaccgcctgggatccaggagtccagggaggactctgggcggcagcctccacattccccttccacgcgcccccagaatggaggtgtggggggtggtcaaaagacctctatgccccacctccttcctccctctgccctgctgtgcctggggcagggggagaacagcccacctcgtgactgggggctggcccagcccgccctatccctgggggagggggcgggacagggg

SEQ ID NO: 25925 - DNA, 188 bp, Homo sapiens
  source 1..188: mol_type = other DNA
tcccaccaggctggagtgcagtggcacaatcaccaccatgcctggctaaagcccagagaatatcacggtggtccatgggcctggtggtcctaatccgttaggttatctatagattacagacattgtatagaaaagcactgtgaaaatccctatctgcacccacttagagttgtgagcccttaaaagga

SEQ ID NO: 25926 - DNA, 250 bp, Homo sapiens
  source 1..250: mol_type = other DNA
catgggcctggtggtcctaatccgttaggttatctatagattacagacattgtatagaaaagcactgtgaaaatccctatctgcacccacttagagttgtgagcccttaaaaggaacaggctcggagctcggctcttgagacttggggctaagggaagtgcccgggaccccacctgaccccaacgcgctcaggaggagggagatcaacatcaacctgccccgccccctccccagcctgataaaggtcctg

SEQ ID NO: 25927 - DNA, 358 bp, Homo sapiens
  source 1..358: mol_type = other DNA
gcccaggctggactgcagtggcgcgatctcggagcctcccgagtagctaggaccaccgtgttagccaagatggtcagacagagtcttgctctgtcacccaggctggagtgcagtggtgtgatcgcggctcactgcagccttcaagtagctgggatatttgttcaagtaatatactgaaatatgttccactttattgaacctgcctcacaggaggctcaagagccgaggcatgacctctgattgccactgtcacctgggccctgctctctgaagtctctgccaagcggggaggtggccgggggagggccctgctctgtgcagcctcccctcccccggcccgcagagttgagcacagagg

SEQ ID NO: 25928 - DNA, 305 bp, Homo sapiens
  source 1..305: mol_type = other DNA
ggagagctggggcctccactgtgatgtcctctctcctgtaggagcccgagcaccttccggggcttcatgcagaagggacctgggtccgctcaccaaggcctggttcctagcctgtgccccaggcttgtctgtgcccatgatggccctcactgacagcctctgtcggaggcgaattctcagagtgagggttccctgtcacttgagagaaggttccctgtgacgtgaccttgggggacgtcattctgttggccaggactttggcctagacaaatggagcggaagtgggtctcaaccactataatcct

SEQ ID NO: 25929 - DNA, 314 bp, Homo sapiens
  source 1..314: mol_type = other DNA
atcatccccagggcagtgctggagatacagcagtgaccacaacagtcccaggtcagcctgcccagttggggagcacccatccctgacagtgagataataaaatgataattatatattcagaatatcccaatgcaaagcttactctttttccaggtaatatataaggttcataagggattatatccctggtttataaaaggggagccgagatcgcgccactgcactccagcctgggtgacagagcgagacttcccagctactccgagatcgcgccattgcactccagcctgggggagagtgagactctgagagtc

SEQ ID NO: 25930 - DNA, 154 bp, Homo sapiens
  source 1..154: mol_type = other DNA
actctgagagtcccacggatgcgaggtttgggcgcatgcgtgctggccttcctgagaggcgtggctgcggcactcttgccggatagggtggcccggcggggctaggaaagcgtgaaatctcgcgcgattgcgctgcgaagtcggggacggggcg

SEQ ID NO: 25931 - DNA, 366 bp, Homo sapiens
  source 1..366: mol_type = other DNA
ctgtgtgcctcagttgctagaattcagggaccctagagatcccctccctttcaagggtggtgaaaccaaggtgcccatgattctccttgatgtgaaggcttttaattccctcccaagagaaggaacccgggtgtccagcacccgggagctcgctcaaccaggggattcccagcacgcggggctgggagattccatcaccgagggaagccagaagagagacaggagggggtggcaacctccccattccagctggcctcacctggccagttactggggctggccacaccctgtaggcggccctccccactggtccctgccctaggacgggcaggccctggccacgcctaggctgcacccgatggggag

SEQ ID NO: 25932 - DNA, 431 bp, Homo sapiens
  source 1..431: mol_type = other DNA
aataaataaaacatccatgcattcatccaataaacttttttttttttggctggagtgcagtggcacgatcctcagcctccggagtagctgtcggtcaggctggtctcgaaatcctgacctcggttgggggctagctttaaacgttccttaaatatcttcatcctcaatttacggttgaggaaactgaggttcgatcctgaagctccccttccagcctgagaaacggcaggttctgggagaccaaagcggggagcggctcagtttgccggcttgcatgggccggccggccccgcccccgcgatcacgtgacgcgtgggggttttcccgttccccaggcgtgacgtcacggcggggtgcagaccaatgggcgcgcaggccggcggcgccggggaattccgccgccccgcccccgcccgccgcccgcccggccc

SEQ ID NO: 25933 - DNA, 290 bp, Homo sapiens
  source 1..290: mol_type = other DNA
gggaggagggggcagattcctggccctccctccccagacttgaaggtggggggtaggtgcctccaggctgggggctcaggcctgtcatcccagcactttgggaggccaaatgagaccagcctgggcaatgacgagcgcctgtaatcccagctactctagaggctgagggcttgggcgacagcgcgaggctgtcccagctactcgtgcagtgagcctagatcgcgccactgccttctagcctggattaaattcgtcggcggaagtgcgctgcgcggccctccaccatgctc

SEQ ID NO: 25934 - DNA, 326 bp, Homo sapiens
  source 1..326: mol_type = other DNA
gatgtgtatgattacagtcctcctcttcccatcataggggagaaatcatgaagggcaaacaaagattatcttctgtttatacagagcacaggaggcactcagtgaatgcttgcaaaatgaatttttattgtaatgcatttaatgaaatagcccagattactatcaggcacctaataagaaacgtgaccccgtgtctcaatcaggacgggacactgcctagattgagttaggccgccgtcagggccccagcagggcggctcggtcccctcccatgagccccgccctggtaggcggagccacgggcccggccagcacgtgtaagagtt

SEQ ID NO: 25935 - DNA, 518 bp, Homo sapiens
  source 1..518: mol_type = other DNA
aggctggtctccccccactagaacgtaggttctaggaggcaggatgggagtctgtcttgttcataaatacaaccctaagtcaacaaatatttattgcgcacctactatgtgtctgatgatattctttcaacagatatttgcagagcaccaaattgtgtacctggcactaggccttggtgatctagtggaggcctggaatagggaggttcatattcccccccctttgtaaaatgggactagctggaggacaaaatgaccgcctctgatccagcccagctactcggcatctgaaaccatgatctccaggtttcctgtagaggagaccgagctccccagcagggaggaagtcttcccctctctgaaccgagtgccccgcaaagccgcgggccaggtggcgacccgggctgtgctggcttccaagcctgcgagccagcccgcgaccacgtggggcagtggcggcggcgcgggcggaacccaggctccgcggcttgcggcctgcccgggcctctgcagcgggg

SEQ ID NO: 25936 - DNA, 510 bp, Homo sapiens
  source 1..510: mol_type = other DNA
cccggggcggggcctctgggcttccatccggaggctgggagcagaaccagccttggggtgggtcactgtgtccccaggtggcaggcccagaccccactctactgagcacctgccaagggccatggctgtcggcccctgggctcagctcggagggagacacagggctctgcccgtctagagtcacatttgagcaaagatcagaagcatctgaggctgtcatccaggcacccaggcccaggggtcacagatgtgtgcccaggggtgccaggccgaggcagggctgcagggcaaggcctgggactgcggggcctccatggaggtcctgcaggggggttctgcagccccaggaagcacccggaccccagacagggctctgactgccggcctcctccaggtctggcctacatctgcgagggcctcaaggagcaggaaggggctggtgaccctggtgctgtggaacaaccagctcacgcacacaggcatggccttcctgggcatgacactggtagg

SEQ ID NO: 25937 - DNA, 296 bp, Homo sapiens
  source 1..296: mol_type = other DNA
agtagctgggacccaggatggtcgcaatctgaccttgtgatcaggccggtctttgtggtgcttaaagcaagccactcagctcaaaccccgggatgccctccttgggggcttcagggcgctcaaggtccaggccctggccaggggcccaggctgtgggggggggacttcaggccaggcctgcggcagggcaggacggcgccggtgttcacgcaggcgcgcgaaagaaaaggagcgcccgggcctggctctcttcccactcagagcctggagacgtgggccacaaccccatcgggaac

SEQ ID NO: 25938 - DNA, 370 bp, Homo sapiens
  source 1..370: mol_type = other DNA
gactggaccccaggctcttcaacaaggatctggggcccgagttcccggagtcccaagccgaggtctgaatttgcctcctagtagaggcccggaagcacacgggcccgtgagctgctcgggaccagcgccagacccggcagctgacgctcggagcttgcgagatccgctgcattagcggccaagtcacgtggataacagctgggccggctcttccaggttgtgtctggagtggaccaatagggattttaaaagccgatgtggccagagaaggcgtaggcccgccccctagtgtcccaggctcacgcgcacaccacctgagtccggggcggggaggcgcgccatgacgcaagaggcgtggcttaccaagcct

SEQ ID NO: 25939 - DNA, 196 bp, Homo sapiens
  source 1..196: mol_type = other DNA
cagccaagccacacgttggacagtgaagggggtgggcattgaccacatagatctcatttgggaatgtatgtcagatatcacactccgtgaagccttgcatgtcagatcttcaagcctggacttgacccaccatccatcagggagctgactcagagagcaggagggtgtggggaaggttccaactgcccagccccac

SEQ ID NO: 25940 - DNA, 663 bp, Homo sapiens
  source 1..663: mol_type = other DNA
gggacagggtttccgtgtccagcccgggccggggccacaaggtgtttgtggtgacccgggtggagagcccgcccgagagggcagagccccctgcgtcccccggccattgacacccgggacacagggtcctctgagcctcagccaccaccggagccgcctcggtcagccctggcactgccccctgagccgcccccggggcctgaggtcaaggggggcagctgcggcctggagcacggtgagaggggccctagggcaggtgttgaggggccctgggtgctgtatgtgaccccaggcaagccccaaagtggggcttagttctcatctccatgagcctgaccatctcagcggtctctgggcactctgcaggccctgagggtctggctggggccgggctgggcaggttgtatttgccccacccgcctgacgggggtgctggcccgtcctcccaactgagctgctccaagaacgagaaggagctcgaggagctgcttctggaagccagtcaggaatccgggcagagacactgtgacactttaggtgaggccaggcccggggcccacagcactcgggaggagctgagagagcctctggctctgacagtctctcccccaagagctgaggccagagccatgagaatctgctcaccttccccccagccttcct

SEQ ID NO: 25941 - DNA, 402 bp, Homo sapiens
  source 1..402: mol_type = other DNA
cgctgtgtggcctccgagccctgcaggcgaatacctgcacagggttccttcgcacctttcactttacaaactgggaaagtgacggcaagtgcttgccccgggtcatcaccccagctgggggatgctgcagccccaacctggcctgggaggtcactgagccctcagcacccttaggcctccgaggggagagcttcccccgctcccccccgccaactggggagagaatgggccagggggagtctcgtctcgggcgagaacacgctccccgccggcgtgcccagacccgcctccgcccccggagcccccggagcccccggcgccccgaccagcccgggcctgcgcctttaagggccggcggcggggggcggggtcccggcgccccgccctgcccgcccctccccc

SEQ ID NO: 25942 - DNA, 563 bp, Homo sapiens
  source 1..563: mol_type = other DNA
ctggcgcccgcgctctgaacggcgtcgctgcccagcccccttccccgggaggtgggagcggccacccagggccccgtggctgcccttgtaaggaggcgaggcccccccatacccagcgcctcgggtctcggcctttgcggcagacgagaccctccctgtcccccgcacagcggaaatctcccagtggcaccgagggagggttaagtgggggggagggtgaccaccgcctcccacccttgccctgagaccactcagtccctaggaggaaggggcgcccatcctcctggagccacaccttggttccccgaggtgccgctgggactcgggtagggggcccagggggcacaggacggtggcttctacgtgcttgggacgttcccagccaccttcccggcggggggccagctgtccccaccgccagcccaactcagcacttggtcagggtatcagcttggtgggggggcgtgagcccagcccctggggcggctcagcccatacaaggccatggagggaggtgagaggctcagctgccctccagaactcctcccccctatataaggcca

SEQ ID NO: 25943 - DNA, 434 bp, Homo sapiens
  source 1..434: mol_type = other DNA
tcaattctcaaagccttagactatttatattttattgactatcaaatttgaaccctgagcccaattcttagatatcacattcccttgccaataacataatatataacataacataatgatgtgatatatgttatataaaataactttagtaatcccagaactttagaccagcctggccgacatggcgaaaccccgtctctaccgcagctactcgcgctactgcactccagcctgggtgacggagcgagactccctctcaaggtaattttaggccctgaaaagttttgtgaacaaaaaagtttccaaagttttagcttggccaacgaagttctgccattcccgcggggctggagccccgaggctgaacttcccacgggcggtgggcgtggccggctcacctgcgggggcgtggctcccggctgccccgcccctcg

SEQ ID NO: 25944 - DNA, 285 bp, Homo sapiens
  source 1..285: mol_type = other DNA
acagagaaagaccctgtctcaaggaaaaaaatctgttctttctttctgttcccaggggccagcacaggatcagccacatagctatttgttgaagaaacaaacaaaagctagcatttatgttttatttattagttattattattaatatttgaaatggcgggcgagctgcttgagccaccgcgctctcgaattccgtgcgcacgcgcagtatcccgattggctctgccctagcggattgcctcgaggatgtccacgacccggcctctcgctgaatattcatgaggg

SEQ ID NO: 25945 - DNA, 434 bp, Homo sapiens
  source 1..434: mol_type = other DNA
agatccagggctcaggagtcagtctccagccacagcgaggcaggcgtgaatccaaatggctacgtcctgtccctccgggactacaagtcccaaggtgctcgaggcgaccttggctccgctccccaagccggagcccgagctggaggaagcccccaggtgccaggatctgcccggatccgtgagtttcacctcctggccctgggggactcggacgccaggtcccagggcgtggggcgcgccctgttttactggagggaaggaaagcgggttcggatgcctgaattcttggaatggagggattctaccccttcatcccggggagacgagctggaattcctgagtccctcgaactggggggctctaggaaggaatccccgagggtggaatgggtgaccaccctgccagcctcagagcaggacaggtacccggggtcc

SEQ ID NO: 25946 - DNA, 409 bp, Homo sapiens
  source 1..409: mol_type = other DNA
cctcgatgactttcaggaagggtcctccctgccccagggagcacccacttcccttcccactggggccgccccgcgttgggcggcggttggagccgcgagacggtggctagacagggtctactccagaattggggcaccccttctccccaggtgggagaggctttccagagcggggaaggggaaatgtttcccctatccaggatctccttcgcgtgggcgagagagacaccggggtgcagcccctgcgggctccaggactcccaaactaagattttgaactcttgctgggacatagatccagggctcaggagtcagtctccagccacagcgaggcaggcgtgaatccaaatggctacgtcctgtccctccgggactacaagtcccaaggtgctcgaggcgaccttggctc

SEQ ID NO: 25947 - DNA, 438 bp, Homo sapiens
  source 1..438: mol_type = other DNA
ggacttgtagtcccggagggacaggacgtagccatttggattcacgcctgcctcgctgtggctggagactgactcctgagccctggatctatgtcccagcaagagttcaaaatcttagtttgggagtcctggagcccgcaggggctgcaccccggtgtctctctcgcccacgcgaaggagatcctggataggggaaacatttccccttccccgctctggaaagcctctcccacctggggagaaggggtgccccaattctggagtagaccctgtctagccaccgtctcgcggctccaaccgccgcccaacgcggggcggccccagtgggaagggaagtgggtgctccctggggcagggaggacccttcctgaaagtcatcgaggagcaccactccacgcgtgtggggctcctgggtccgaggctccgccctcgagaacc

SEQ ID NO: 25948 - DNA, 271 bp, Homo sapiens
  source 1..271: mol_type = other DNA
gtgacaaattcaagaacccgctcttggggtctggaccgggaccctgcaggggcctgaaacccctgggggcgccttgctctccacggggggggggacccacacctcaggcaaccctgtagcccgggctgctcgcaccaggttgcagaccacgtggatccatccgggagcgcccaactggtgcgggagcgcgggaggaagaagtctttttccgaaaaatgtattcccgaaagccgctgagtcagaggcccgtcgggtcccgatgggtcgcccc

SEQ ID NO: 25949 - DNA, 440 bp, Homo sapiens
  source 1..440: mol_type = other DNA
gctctggaaagcctctcccacctggggagaaggggtgccccaattctggagtagaccctgtctagccaccgtctcgcggctccaaccgccgcccaacgcggggcggccccagtgggaagggaagtgggtgctccctggggcagggaggacccttcctgaaagtcatcgaggagcaccactccacgcgtgtggggctcctgggtccgaggctccgccctcgagaaccctggctggaacttcacgccctccggatctgaacttgtgaggcatctgggcctcccctctctttaaggcttaggaagagcagtgtggctgcccctttaaggagggggcgacccatcgggacccgacgggcctctgactcagcggctttcgggaatacatttttcggaaaaagacttcttcctcccgcgctcccgcaccagttgggcgctcccgga

SEQ ID NO: 25950 - DNA, 495 bp, Homo sapiens
  source 1..495: mol_type = other DNA
ccttcctccaggaagcccttccggactccggggctgagtcaggcgctccccctgaccccccgggatctcccatcccagacctgcccattctgggtcagcactgggaacgtgccttactgaaccgtaagctccgggaggacaacacggggctgtcgttggtcactgctgtgtcaccagcacaagtcaatgtctgagttggattcaaacttaagtctctccttactgagaggagggaccaagttggatttctccactgagccctgccaggattctgggcacacagaagcgttgggagccagagagttgtacagagatcgccctgctctatgctctactctcctggggagcggggccagagaggccggaagtgctgcgagccctgggccacgctggccgtgctggcagtgggccgaggctccaagaccagcaggtgaggcctcgcggcgctgaaaccgtgaggcccggaccacaggtgcggtccagatgctagcctcg

SEQ ID NO: 25951 - DNA, 399 bp, Homo sapiens
  source 1..399: mol_type = other DNA
caaataacttctgtctttccttagtaatcagaagtgtgatactatccccttcctccaggaagcccttccggactccggggctgagtcaggcgctccccctgaccccccgggatctcccatcccagacctgcccattctgggtcagcactgggaacgtgccttactgaaccgtaagctccgggaggacaacacggggctgtcgttggtcactgctgtgtcaccagcacaagtcaatgtctgagttggattcaaacttaagtctctccttactgagaggagggaccaagttggatttctccactgagccctgccaggattctgggcacacagaagcgttgggagccagagagttgtacagagatcgccctgctctatgctctactctcctggggagcgggg

SEQ ID NO: 25952 - DNA, 302 bp, Homo sapiens
  source 1..302: mol_type = other DNA
tccctcactgaactgtaagctctggggcttttatcttttacgtagataaaagaaatgatagaatatatcattatagccgtactttgggaggtcacaaagtgacctcaggatcagctgaggtcagtttgagaccagcctggccgcagtgaactgagatcgcgccattgcactccattatgaccctgggttcaaataacttctgtctttccttagtaatcagaagtgtgatactatccccttcctccaggaagcccttccggactccggggctgagtcaggcgctccccctgaccccccgggat

SEQ ID NO: 25953 - DNA, 502 bp, Homo sapiens
  source 1..502: mol_type = other DNA
aagtgccaaatacaaggcattaattattattattagaattaataataatatcccctccctctacacattctttgtctccgggtggattaaaagggaagagaggcttctctggagatctgctcttcttctcgaatgggggcgctgcaccatcggtagaacaggggacctgcaggctggggtcttccccgcccgggtcagcggggtccctgcggggctagtctaagcgcctattattaccagcccccggggcggcgttgcactgcgcaggcgcgggcggggcgcgggcgcgcgcgcgagcgagcgagggattccctctgacgtcattgctaggataccaaacaaacactccgccgcgccggccgagctccttataaggaactccgggaaggcggggccgggatcccctcccgccgagtggcccggaacgcaacccccgagacccccagggccccgagggtcatgcaagtgaccagatcgagtctagaacagacctcttgctgga

SEQ ID NO: 25954 - DNA, 498 bp, Homo sapiens
  source 1..498: mol_type = other DNA
aactttgagccggccccgggactgccccctgctcgggtcccagacctgaagctagcggtgccgggtcgccctccacccatcgggaagaggggcctcgaaccctcagccgcgctgcctccgcctcctgcgcggagacgtaacgggggacccgtgcgtaacggctgacgcgctggaatcctccgtctgacgcggggcacgcacggcgcgcggcgcccccttcgtccgccccgcccctgacgtcccgggagcgttctattttggaacgccggggccacgttgctaagggagggggcagcccggcgtttcgattggccgccggggcgcacgccttggcctctagaggcagagggaggggatccctgtcgtgacaagagcgccaatggatctgcgaggcccttgcgatacggtggctgtcaccctggcaaccagccaggtggtctccaggagctccgccccctctgggttcccaggactctgattggtcggcgagccagtccc

SEQ ID NO: 25955 - DNA, 451 bp, Homo sapiens
  source 1..451: mol_type = other DNA
atgtgtgcagcaagacatctgttactctgaaatggaagtcatgggagagtttcatgcaggagaatggtattgtcaaagaatcactgacttagaatattgaataatttttcgtgatcaacatatgcatgtagtacctcctaaatatgtaaaaatttaagaaaaaagaatcaccttttttgtaataaaaattgtaacacaagttcgatttccgtttctgacgagacagttcctgggactcagtagacgctcaataaacgtttggcggagctccgcaccagccctatagccgcctgctcagagcctttggggccagggtgaatcagactctagaattcggaattttccgagaaggcgcttctgaatgccgaatcatgaatctctcctcttaaaaagctgacttttcattttggaaaaaggggggggccctttaacagcttgccaggtgctcaaa

SEQ ID NO: 25956 - DNA, 257 bp, Homo sapiens
  source 1..257: mol_type = other DNA
tgctgcattggtgatatcacatctggctcagtgacgccactgcactccagcctgacagagcgaaatcccttatttagatgtggccgtagaatatttataagtaaactctgtgccttttaaaaactgggagactcgatctctatttgaaaaaacaaacaaaaaccctttaaagacatcattgcttttggctggacggttccaattttggaattgtccccacctctgtggacagccattggctgggtccaaaggggccc

SEQ ID NO: 25957 - DNA, 419 bp, Homo sapiens
  source 1..419: mol_type = other DNA
caggcatgggaagtggctgccaaggcttggctaaccctggaaaagcgactctcatgcctcagcctcccgagtagctgtgattacaggcgtgagccactgcgcccggcctccccgcagagggagctccttctccagagatggggaaggttctcctggagtgtcacttaagtgcctttcagtgcagaaaggtgaacaactggagggttctggaagcacaagaggcctcgggttttccacagctcaggcctcccctgggccccatgcaaagccccggcgttggggctagtagcatccccaacgcctcacggcgcctccagcggcgggtccggaagtgcagggtggtgccctgtctaggcaactacaagtcccagcaggccccgcggccaaggtgcctcgtctttcctggactcctggagcag

SEQ ID NO: 25958 - DNA, 208 bp, Homo sapiens
  source 1..208: mol_type = other DNA
acctgtgatcccagctactcaggaggcttaggtgggaggatcacctgagcccgggggtcgaggctgcagtgagccgtgatcgtatcactgcactccagcctgtctcaaaaagatatatatatatatatatatatatatatatatatatatatatacatattttttttttctttacctggaatcgcctggacccacccaaaagtttctg

SEQ ID NO: 25959 - DNA, 442 bp, Homo sapiens
  source 1..442: mol_type = other DNA
atatgtatatatatatatatatatatatatatatatatatatatatatctttttgagacaggctggagtgcagtgatacgatcacggctcactgcagcctcgacccccgggctcaggtgatcctcccacctaagcctcctgagtagctgggatcacaggtgtgttgagaacacagattctagaattagtttccccttcttccatatgtaaactggagatgatgatgtataacagtgtgtgacacattagtactatgtaatagtttgccactggtacagtatgagccttcctgatcccagggctgaaggatggcggtcctggcccgccagctgcagcgtctggcggggcgcagggcccccgaagggcctcggtctctgttgacagcgccgcgccgcgcccagcggccgcacgggggtgccgaggcgtctgggggcctgcgctt

SEQ ID NO: 25960 - DNA, 535 bp, Homo sapiens
  source 1..535: mol_type = other DNA
ggctgggccttgtttgccgtcctcgacggccacggtggggctcgagctgcccgccaggccatgtgctccaggagctgggcccggagcctagcgagcccgagggcgtgcgcgaggcgctgcgccgagccttcttgagcgccgacgagcgcctgcgctccctctggccccgcgtggaaacgggcggctgcacggccgtggtgttgctgcgcactgcggtgactcccgcgcggtgctgagccgcgctggcgccgtggccttcagcacagaggaccaccggccccttcgaccccgggaacgcgagcgcatccacgccgctggcggcaccatccgccgccgccgcgtcgagggctctctggccgtgtcgcgaacaaggaggctccggggaggccccccgagctacagctcgtttctgcggagccagaggtggccgcactggcacgccaggctgaggacgagttcatgctcctggcctctgatggggactggtggcttcacgcctccgcttgggcctggccccagagcttctctgcgcgca

SEQ ID NO: 25961 - DNA, 560 bp, Homo sapiens
  source 1..560: mol_type = other DNA
ccagggctcgggcgcctcacccgggccaggtggcgctctacccaaggggcgcgaccagtcactcggggcggggccggcaagacacgctgcggaagcctcagagggtgtctgggctcagcccggagccggcgtgtgggggcgggggctcccgggagggtctcctcacctccgggccctcctgagggctgggatgatcctgtcctccgcaggcgaagccggcgcctcctgcccaccccgggcgaatgccgggccccccgctgtgagtcagcgaccgcccacttcctcctcaccttcccggggcgggcggggtggggtgagaggggttgggccctactcccccgacttccactcccgtgcgggtgggggtctcgccccctcctcgacccccaaaattgaattcccacagtgggagcgaactaggaagcaagggaggtccccttccccttcaccaacttgcccctcaggtgggggtgattcccagggtgcacccctgggctacaacagcgccctccaccccctcgcctggaggcgcacgcggcccctttaaggcgcggggcatt

SEQ ID NO: 25962 - DNA, 248 bp, Homo sapiens
  source 1..248: mol_type = other DNA
acttgagcctggaaggttgaggccgcagggagccatgcgcctgtaatcccaacactttcccagctactcgggactggccaagattgtgccactgcactccagtctgggcaacagagcattccaccttgattcagcaaccccagagctccttctaggggtggccctggaaggtcagtagcgggggcctcctcttcccataggggcgggcctggccggggcggggcctcggctggcggctctggcccggg

SEQ ID NO: 25963 - DNA, 403 bp, Homo sapiens
  source 1..403: mol_type = other DNA
ctgggacatgtccttaaatttatttctgaactagctccctggggaacctacctcctaatgaaggaagttgggcaagatggtgaaatgcaccctcaggctggatttagcattaataatgcaatcatgacctgtatagtaagaagggctatttactgagcgcttaacggcaactgctattaggattcccatttggtagactggcagagctgggatcccagccaaagtctcccaatgagagccctagcttgcagaggaggactaattaggactgccaaggcgggcgtgggaatccacacgccgaacggacgtcgctacgccagcgtcgacggggtgacgtcaggatgcgcctctgaagtttccctcgagcgtacgtacatacgtactgacgcacgcatggccacga

SEQ ID NO: 25964 - DNA, 244 bp, Homo sapiens
  source 1..244: mol_type = other DNA
tgggaggctgcggcaggaggctcactgttgtgtaggagtgcaatgacatggtcttgactcctgacctcaggtgatccaccgcgcccggccgggtactcttatttgcgcgcggagtccacagcccgggatgtgtgacccggtgggaccctccggctccaggggtggctgtggagggcggggcaggggcgcggcggcccgggcgcctcccagggccggaagcggcagagccggtcccggctccacc

SEQ ID NO: 25965 - DNA, 402 bp, Homo sapiens
  source 1..402: mol_type = other DNA
gaaggcggtccaatattcttgaaagggctagtccaagcctcacaactgggcctgtgccaaagcccggaggctctaagggcggagctaagggcctggggccgcagagctctgagcacccgcaagattctgggggtggctctaaggtcgggccctggcctaatccaggttttggggatagtggagtgtcttcctccacaccatcctcctcccggagctcggggctgcgcttcaggctgaaagcaggactattggtgaagggccctgcgcggcagccaatcctggccctaggattgtgttggggggcttggcaggcggtgtcccgacccccctttctggcatcctggggatgaccccagcgccgggcccggcgccggccgcctgatgccaggcgagctgagctgc

SEQ ID NO: 25966 - DNA, 304 bp, Homo sapiens
  source 1..304: mol_type = other DNA
tgagatcatgcttctgtactccagcctcagcaacagaggaagactctgtctcaaaaaaaaaaaattctatgtctgcgaggggacccagtggtgacccagatgtcctggctctaccctcctgggccacacaggctagcagggcaacatgagacactgtactgtgtgtcacagtggatgactgtccacctgtgagtgagagactgtactgtgtgagtaacagcttgtgaggttctgtgactgtgcctttccatggctcagcctatgggattgtgtgtgacactggtgaaggggtcctcagggctgc

SEQ ID NO: 25967 - DNA, 499 bp, Homo sapiens
  source 1..499: mol_type = other DNA
ccccgcggtgcccgggtccccgcccagcctcacccgcagctcccggcccagcggcagctcctcagtcctgcggtgccagccgcttggtgtagaacgccgagcccacggccagcgccagcaacagaggcaagagccgaacccgcggtagcaggcggcgcttcggcggcaagagtggctccatgaggccacgttcccccagccgcaggcggggtcgcccgcggcccccggaacgcatgtggggcaacagctgcggctgcaccaggcaggtccatgccccttccggatgtaggcgtcccagagggaagaggggcggtgcctgtctccgaagcgaggagcggattggcttcacggaggccgcgcccccgaagtcacggccggcgggcatttggaacttcaagaaacggtttgaatcaaccgttggtggggaatgctgtggcaacaggccacgcctccacttactggttggctttgcgcaggcgccaacggaagtgggtcgcag

SEQ ID NO: 25968 - DNA, 434 bp, Homo sapiens
  source 1..434: mol_type = other DNA
ttttattttaagaggcagcagggtcgcccaggctgaactgcatggagggcggtggtgtaacactagctcactgcctcgaactcctgggctcaggcttaattttctcatttgtaaatcaggaggtaagaaaggaggggacgggccgggcgcggtggctcacgcctgaccatttctcctgtaatcccagctactcaggaggctctgcagtgagccgaaattgcgccactgcactccagcctctattgtgttgatcggcacaaatgaatcaataaatttcccaagggcctcgggcaaaaatggagccctcctggctagactccatctcccagcgcgcccagcggggaagcaccctgcgcttgcgctgcctccccggggggatgtagtccgtggctgcccggacttcaattcccagcgggcttcgggacgagaacccg

SEQ ID NO: 25969 - DNA, 353 bp, Homo sapiens
  source 1..353: mol_type = other DNA
tgcataatgaagatcatatttatgcctagcacacagtacagcctggtggtttgttaccagcatggagtctagagtttcccattccctggagggctagggggtcagggactggagatttcccgggctgcccggggttcgcacaaccagcagggggcgctgtggatcccaccaccctccgcagccgggctgaatgagagcaacccccccattcaaccctaccccgggcgccgtcacccgcgaggagccccgggttaggataaatccaaggctttcctcttaaaaggaagctaagcggggagggaatgagggtccccgcggtgcccgggtccccgcccagcctcacccgcagctcc

SEQ ID NO: 25970 - DNA, 451 bp, Homo sapiens
  source 1..451: mol_type = other DNA
tctggactccactgggccggaggctccgcagcgggccaatccggaggcgtgcggggcggggctttggcgtccggccaataggagggcgagcgggccacccggaggcaccgcccccgcccagctgtggcccagctgtgccaccgagcgtcgagaagagggggctgggctggcagcgcgcgcggccatcctccttccactgcgcctgcgcacgccacgcgcatccgctcctgggacgcaagctcgagaaaagttgctgcaaactttctagcccgttccccccggccagacccgccccccctgcggagccgggaattccgaggggcggagcgctgcacccgcgtgcagaagctcagtctcggggcggaggcttcgcgcccttagtccctgcgttgtcccgatggggaaactgagagtggagagctggatctcgccttcccggcgtggggcgcag

SEQ ID NO: 25971 - DNA, 502 bp, Homo sapiens
  source 1..502: mol_type = other DNA
tgctgctgctgctgctgctgctgctgctgctgctgctgctgctggggggaaactgcaggcctgggaaggcagcaagccgggccgtccgtgttccatcctgcatgacgccctgctctggggagcgttttgccaaacgctctcggagccccagccggctccgcccgcttcggcggtctggactccactgggccggaggctccgcagcgggccaatccggaggcgtgcggggcggggctttggcgtccggccaataggagggcgagcgggccacccggaggcaccgcccccgcccagctgtggcccagctgtgccaccgagcgtcgagaagagggggctgggctggcagcgcgcgcggccatcctccttccactgcgcctgcgcacgccacgcgcatccgctcctgggacgcaagctcgagaaaagttgctgcaaactttctagcccgttccccccggccagacccgccccccctgcggagccgggaattccgaggggcggagcg

SEQ ID NO: 25972 - DNA, 366 bp, Homo sapiens
  source 1..366: mol_type = other DNA
tcataggaccttgacttctgagaggcctgattgtcatctgtaaatctaagcactcctcctgaaagtgtggttcaagaaccacctgcatctgaatctagaggtactggataacgtggggtggggccctggctgcacctgaactgtcacctggagtcagggtggaaggtggaagaactgggtcttatttccttcgggccaatgccctgtcccgcaaagggcggtgtttgggagacagacagagggtggggctttcccccttgtcccacccccccagcggagcccatcgtggtgaggcttaaggaggtccgactgcagagggacgacttcgagattctgaaggtgccgaccgagccttagaacctaggg

SEQ ID NO: 25973 - DNA, 351 bp, Homo sapiens
  source 1..351: mol_type = other DNA
ctgcccaggaccacgtttcccaggccctgcccagctgggactccgtttctcaggcctggccctctcaaggcccaggcaccccaggccggttggaggccccgacttccactctggagaaccgtccacccgagctcagattcctcttggctctcggagccgcagggagtgtgtcttcccgcgccaccagcctgggcaggaatgtggctccccggccaggggccaaggaggctcccccatcaggctctgagggtgccccctgagtcggccccctagcccccagttctggagcttgtcgggagcaagggggtgctactgggtcactcagcctcaattggccctgttgaagggccc

SEQ ID NO: 25974 - DNA, 417 bp, Homo sapiens
  source 1..417: mol_type = other DNA
gggtctgggactcaggatctgagcctcctgctgaaggcacaggctgggaatcccaggcctgggttccagtcccactcccgactcagttgcccagggtcctggagtggaatcgtagagtcctgagtccctgagtctggttgagtcctaaaagagacccctctgtctccgtagttcacagacgaggagtaggactgtcccagggtccctcccaagttagaagggagctccagtttcgctgactgccaggacaggaagctagctaagatgcaagttcccagcctggcctctggggcggccagggtggcagcagctttggggactctgggctggctccctccccgacactggctgaagcccaggccaggcaactccccgagtggcacagtggtgtgaagccatggatatcgggccccccca

SEQ ID NO: 25975 - DNA, 710 bp, Homo sapiens
  source 1..710: mol_type = other DNA
gggctcatgaaggcgaagatgacctggtcaccgtgtggtccttcaccgagggccgcgtggtggctcgaggccatggccacaagtcctgggtcaacgctgtggcctttgacccctacaccacaagggcagaggaggcggcgacagcagccggtgctgaggagcccgaggctgcgggcacaggctcggccgggggcgccccgctctctccactgccttggctcggcgggccaggacacgcagttctgcctgtgggacctcatggcaccacgccaccggccgccagcagctcgaggggtggcgagcctggcccaggccccctgcctcgctcgccaacagtctcccgcacccagctggcgggggcaaggcgggcggcccgggtgtggcggcagagcctggcacaccattcagcattggccgcttcgccacgctcacactgcaggagcggcgggaccgcgctaccacagcctgggcaacatcagccggggtggcagtggcggcagtggcagtggtggggagaagcccagcggccctgttccccgcagccgcctggaccccgccaaggtgctgggcactgcgctgtgcccgcgcatccacgaggtgcccctgctggagccccttgtgtgcaagaagatcgcccaggagcggctcacagtcctcctgttcctggaggactgcaacactgcctgccaggagggcctcatctgcacctg

SEQ ID NO: 25976 - DNA, 401 bp, Homo sapiens
  source 1..401: mol_type = other DNA
caaacgttcccagggcgcggttgctctccgccccctacccgagcgaccgcggggattcgtcccgcctccggatctgggtgccaatcgaagaggcgttgcccgggcgacgaccccaccttttccggcgcgggccagcggcttccgggagggggcccggctgcgggcggcagtccggcagtggcggggcccggggggcgcccaagatggcggcgggcggcgcggagggcggctcgggccccggcgccgccatgggggactgcgcggatcgcaattccgcacgcgcgagggtttctacaagctactcccgggcgacggcgccgctcgcaggtcgggtccggcttccgcccagactccggtgccgcctcagccaccgcagcccccgcccggccctgcctccgcct

SEQ ID NO: 25977 - DNA, 193 bp, Homo sapiens
  source 1..193: mol_type = other DNA
tcctcccacctcagcctcccaaagtgctgggattctcggattccaggccaaacgttcccagggcgcggttgctctccgccccctacccgagcgaccgcggggattcgtcccgcctccggatctgggtgccaatcgaagaggcgttgcccgggcgacgaccccaccttttccggcgcgggccagcggcttccgg

SEQ ID NO: 25978 - DNA, 532 bp, Homo sapiens
  source 1..532: mol_type = other DNA
tgggggtctgggggacaactgccccttcctccccatgctcttggtgaagaactcaaagaccacctcagggtggtttgatctggagcccctgaccttggccccggccccagcaccccggccccctcaggacctcatcggcctgcgactggcccaggagaaggccttgaagccgggaggagtgggagccccctcctcttcctccccctctccctctccgtcggcccggccaggcccgcccccgtctgaggaagccatggatttccgggaggggccgcgagaccccgggcatcttcatcagcatggatgacgactcggggctggactctagtctcgagggccccctacccaaggtagggagagcagcctccgctgcgaaaggggagcgtggaggtgaccgcgccctccacccggctgccctttccttccccggtcaccaggagacggcagcgggcgggctgggagcccggctgccgaggacgccaggggcctggggcgcgggtgccgtctcgagtctggcgcgacgtccaccgtg

SEQ ID NO: 25979 - DNA, 269 bp, Homo sapiens
  source 1..269: mol_type = other DNA
ctgcccgcagcgacgctgcagataccaagggccccgaggtcagaactctggagcctttctacctcaggggcttcatcatctcggcaggagaacgcctgtaattccagcactgcaggaggctagctaggcgtgatatcccagctattcggtcgcgccactgcagtccagccttcggggcctctccgcagacccggcagaatgccgctcgcacgggacgaggcgcggggtcgggctgtgctctggactccatttcccggcggccctggggc

SEQ ID NO: 25980 - DNA, 351 bp, Homo sapiens
  source 1..351: mol_type = other DNA
gggtctgcggagaggccccgaaggctggactgcagtggcgcgaccgaatagctgggatatcacgcctagctagcctcctgcagtgctggaattacaggcgttctcctgccgagatgatgaagcccctgaggtagaaaggctccagagttctgacctcggggcccttggtatctgcagcgtcgctgcgggcagctccccagctgtcgcgtcctggggctgcggcccccggcgcctgaggtctgtctcctggcgatcccgcagggggcgccccagtccgagcgcgccgccctcggggaggcgggaggggagcccggggcgggcgagggcgggggtgtcccggctataaagcgt

SEQ ID NO: 25981 - DNA, 575 bp, Homo sapiens
  source 1..575: mol_type = other DNA
ttgtaccaggaactgtgtaagtgctcatgtatatttattgagtcgatgaatgaagcaagccggactgagctccataccagccaggaagcgctcctcgaggtaaaggtgcgcacagaggggcccccaaggcgtgactggaagggcccggggcgggacatccccaggacgcccagcctctaggggtgcgaggtgggaagctctggagcggcccagcgcaggggcgggcaagccaggaggcaaagcggtttccagacaaagcgcttcccttcagcgctgtctccctcccctttggttgggtactggcgcgctcccagcagcctgcgccgagacccggtaccgggtacaacccgaggcacgcgcatgcgcgcgatggagtttttgcgcgtgcgccgttgtggccccaggaagctggggtacccgcgcggcgctaacgttgcggctgcgcagttgcggcctgctggtggggctcggcggagcgcagttctgcgcctgcgctgtgctgggtaagggcattggggccgactggccctgggcgcgcctgcgccttggcatgcggggcggccggaggcggggcc

SEQ ID NO: 25982 - DNA, 496 bp, Homo sapiens
  source 1..496: mol_type = other DNA
attcttccgcctcggcatgagaaatttcttgtcttgaccaagtgaagtcaattcctcatctgtaaaatagggataaacgtgcttgcttcacacaggcttggaggagcccggggtcctcccagcagcctgggggagtcgggtccagctctctgccgccgggaggggcgtggccaacccagagggacgtggtccaggcttcaaggctggaccaatgggggcgccgaagggcgtggccctacccggcatgggcgtgacctcgttgggtgagcctccgggaagaagatgctcgggccagcagccaccgccagccccgtcgccgccgccgcccgcgcccgccgccccccgggcccccactagcggccgcctccggctcctccggccccccaccccgagcagggtctggggggctcggccctcttgccccagggagccaagaagaagcggggagtcccgtccccccagtggcgcgtccagtccgctctccaggctctgtcag

SEQ ID NO: 25983 - DNA, 398 bp, Homo sapiens
  source 1..398: mol_type = other DNA
ttgttctaaattataatgaatttttaaaaagttccatcaaccacgctagaggaaagataacttacttttctctttgtagacaaggataataaaaacattacgttatcctttgggattttttaaatatgtaatttgttattatttcatattctaagtaaactttcatgtcagccttccagttcatgactgatcggtttaaaatatgggtcgttcaaaagccgtggaaccataataactttgcagggctgttataaagtttaaataagccaagtcctgcaaaatgcttagtgcaggtttggaatgcaccaagcgatgacaaatcttccccaccacgtgggcgcggcctaccctcccgcagggggtaaaggtgcctcccccaacccaccgccggatcctgg

SEQ ID NO: 25984 - DNA, 449 bp, Homo sapiens
  source 1..449: mol_type = other DNA
ggcaggtggctcacctgaggtcaggagttcgcagctactctgcccggaaaatattatttataaaatagaaaattaaaaaaaaaattttaaatacacatttttaaaaaccactcacactgcatatccaggattcacatgcaggcagcctggctctagacgcggggctccagtgcctccggtgtctgagtttgctgcaagcgtcaatgccccgggccaagcaggaccgggatcccggccccgggtcttccagaaacggcggggcgaagcgcccaggggcctgtgcgtccctccctgctgagcgagggggcctgtcattgccgtgggcgtgacccagaccccaaccacagtgcatcccgccctggcccagccagagaaggaagctgagtctggggtctgctgggccagcaggaagtcccagcagggtgctttccgggccactcctggaggcg

SEQ ID NO: 25985 - DNA, 301 bp, Homo sapiens
  source 1..301: mol_type = other DNA
caggcagaaagcctgtagccaaaccctggcttcatcacctcatttctgaaaagtgctacagatgcctggtgcacaattcagtaacaggcaggtggctcacctgaggtcaggagttcgcagctactctgcccggaaaatattatttataaaatagaaaattaaaaaaaaaattttaaatacacatttttaaaaaccactcacactgcatatccaggattcacatgcaggcagcctggctctagacgcggggctccagtgcctccggtgtctgagtttgctgcaagcgtcaatgccccgggcc

SEQ ID NO: 25986 - DNA, 431 bp, Homo sapiens
  source 1..431: mol_type = other DNA
tattggccatttatgtattttatttagagaaatgtctattcaaaggagttatttatatattctggatattaatctcttatcagaaatacgatttttaaacattcatgtgatttaatcacagtgtcaaaggcatccccgagcggcggattccgcagtggagcgctcccgcaggcgctcccgcgggcgcctccagcagagctcgcgcaggggcgcacgggggcggcaactggctattgcgactaccagacgctctggacacttggaaaatggatacctggttttgcagcctgggcaggtcacaggtgcattccacgggggactgagattccaagtcacacccaggttttggccgcctctgctcccagctggcacctgagtatgcaggtcgcagcccgcgattaccggcaccagctttcgctgcaccgacgtct

SEQ ID NO: 25987 - DNA, 283 bp, Homo sapiens
  source 1..283: mol_type = other DNA
gtacaggctggatgaacttaagtcagcaactcttccctatgcttggaaagtctggccaatccttagacattttctgattgaatcatcacaccctagctggcacttgcctggcaggcctcagtttgcactcctaagtactacatcacttatcattggccactaatataatatgattatgaaaaccttgacatttccagagacatcgtgcttggggaatatagaacctacactcattcttaaagaaactaatgaatgtgcttggtggcatgatcagcagccccat

SEQ ID NO: 25988 - DNA, 368 bp, Homo sapiens
  source 1..368: mol_type = other DNA
catttccaaaagtacctcagataggctgaggcccacaaactatggaaccagagtttagtctagaatgaaagtttactagccagcaaaatagctcactttatctatcagcttgcctgggctttgattgcaatgtattataggctgcaatcttgcaagaccatcattaaaagtccttcagggtggatgaatatgaagtttcatcaccagctagataagtgagagccaaggaatctctttcaagtctctttgccgtgggcagagttcaaagaatgctcacggctttgaaaggttctagggaagcctttactctgagatttcgagaggtctgagaagtggaacaggtccaggaacatcttactaagctgttg

SEQ ID NO: 25989 - DNA, 434 bp, Homo sapiens
  source 1..434: mol_type = other DNA
acagaactgacccaaaacagctcgaatctcagggggggatgtggaatttctccaccagaacttcaccaaaatcaggagttttattctcctgaacgtcacgaagacactgacttgggacatgtaggctcccaagtggacctgtcctgggtaaagtgttgagtcccaggggtcccgcctgaaagtcaggtgcctgagtcacacagtctctcccacctgaatgccatgagctgcaggtgacaatgggaccctttgaaatgatgtcatgggttagcaatgtcccaaggaaactgaggaaagtcatagctcagtccgcttctctcctggtgagatcaaagctacaatgacacgtaccctgcctggcacctctcctgccccagcctgtctctgcaggacttgcaggagggcaggaaatgccatgacatcaccaaaaagga

SEQ ID NO: 25990 - DNA, 334 bp, Homo sapiens
  source 1..334: mol_type = other DNA
actatttatttatttatttatttatttagagacagagtcttactctgtcactcaggctggagtccgagtagctgggattacaagggtgcctgacctcaggtttgaaagctgatttctctatcaagattcttttgggtgcaagtatctaaaatccattcaaacgaataaaaaaaaaaaaagcccattgtgggtttcatttgaaaaatccaagaattaaactggagttcaggtatggctggatccaggcactcaagtgctggtgtcaactgctccatctgcccaacatgccttccctgaaccaatcactgtggccagggaagcagactcaactgat

SEQ ID NO: 25991 - DNA, 189 bp, Homo sapiens
  source 1..189: mol_type = other DNA
gtcgactagttaaaaaaaaatacatttctttttgaagtaggtgtgattgagttaaaacatatttacttgacataagcttaattattctgccgaggaagtccgcggggggtgtgtattacacgaatcagagcctcaggcctggcgtggcacagccaaccgcgcggcgtggggaggggctcgcaaggccgg

SEQ ID NO: 25992 - DNA, 188 bp, Homo sapiens
  source 1..188: mol_type = other DNA
gcacctgtggtcccagctacataagaggctgaggctggaggatggctttagcctaggatacttctggacataaatccaggcccatagaaataattttatatttcggcctgggaggctgtaggcctctcctgggccctctggcccctggccagctcagccagccccctcccagcaggggccctccctgc

SEQ ID NO: 25993 - DNA, 340 bp, Homo sapiens
  source 1..340: mol_type = other DNA
tgagcctagatggcgccactgcactccagcctgacagaggggtgcatgcaatcaatgctgtgatctcagacaagagaatctgttaagccttgctcaggacttgaaatccaaactcaaacactgaccctcaaggttggaccctttttggccgacgcccgggtccggctccgcgtagggcatggcgctgccttgcaaaacaccccgcgcgctctgtggcgaaagggacctgcgcaggcgcgtgaagggcgccttcagggcccgcgctttacgacacttgtgcggcagcggcggcggccacccggcgctccttcgcgacggttcggccgggtgccgctggcgg

SEQ ID NO: 25994 - DNA, 341 bp, Homo sapiens
  source 1..341: mol_type = other DNA
cgcctagtcagggcttacaaaatactaagaaatttctagaagtttctggaaattcctggaagaacccagcaacaggaactgcacctgctgttggaggaacccaagaagattaaagcctcgttttcctcctagagggcctccgtggaggcgccaccggagtgtatccagacccgcttgctctgcgacctgaacaggccaacccggctccctaggtccaattgcagcgccggcgcgccggccgggctcagccctagcaacccacgcccggttgccatggagacgtcggcacctgcgcagcccaagacccccgagcggcggtgcgggagccagtgcgcaggcgc

SEQ ID NO: 25995 - DNA, 271 bp, Homo sapiens
  source 1..271: mol_type = other DNA
actcaggtatactgcagacacctgtggaagtgggtaaccagcctaatgccagagcccactgctgcttataggccgcctagtcagggcttacaaaatactaagaaatttctagaagtttctggaaattcctggaagaacccagcaacaggaactgcacctgctgttggaggaacccaagaagattaaagcctcgttttcctcctagagggcctccgtggaggcgccaccggagtgtatccagacccgcttgctctgcgacctgaacaggcca

SEQ ID NO: 25996 - DNA, 557 bp, Homo sapiens
  source 1..557: mol_type = other DNA
ggctggttggggagtatggtctccccagcccagccaagctgcatacagcaggcgcctaattgatgggcccaggggtcccgcccaccggctgagtgcgtcagcgttaggtggcaccttggagaccccgccacctccaaaggcccagttaggggcggttttggattgaaccatcgtccgtcggtgtcgacagaaacgacgtatttgcttctctaacggcgacgccgtttccccggggaaggtcggaccaatgggcgccaagctctcatttccgccatgggccaggcccaatagtgacgcggctcacagagggacgcgtcacgcaccgccgagctgtgcccctccgccggggcgcgcggcagtccggcgacgggagcgagcgcgcgcgcgcccggcggcaaacccgcggagggatccgtgggagccgcagtgcggcggcgcgcgggccgggtggggcggggccgagcgaggcggggcgcgcgcggcggccgttgagggaccgttggggcgggaggcggcggcggcggcggcgcgcgctgcgggcagtgagtgtggaggcg

SEQ ID NO: 25997 - DNA, 379 bp, Homo sapiens
  source 1..379: mol_type = other DNA
acactggcccgaggctgcatggacagcttcctgtgatcaaaatatgattccaaggtcaccagagcttggcctggggcctaggggctgtgcgagaagtcggacggtggcccagtgctacctttccatcatgggccatgggtgcccagggacaggctcgagggactggcatgtctctctccagctttctggaaggagtgaattgtgtccagggaccagaactctcagtggtgtctggaaaacactaagaggaatttcctggtcatttctcaatccctgggcaatgtcctcagccccggggcctggagcccagatagaggccccctactaccccgggaggctccaagcctaagtgatggtgactcaggaattccccacccag

SEQ ID NO: 25998 - DNA, 256 bp, Homo sapiens
  source 1..256: mol_type = other DNA
acagaaagtgtgagactgatggcatgcaaggccaggcgcggtggctcacgcctgtaatcccagtggatgacctgaggtcaggagttcaagaccagcacctgatatgcaaatgtgtgtgacatttggagacattatgtgtgacactgtggtacatttgctgagtgagcggctctgtgggacctggctccgggaggaggcgggtccgtaggggctgcgccccaggggagggggcggggcgggccggagggacccagac

SEQ ID NO: 25999 - DNA, 203 bp, Homo sapiens
  source 1..203: mol_type = other DNA
tctgtgagacacttgacacctatgaaatactataaaacagtgtgtacacagaaagtgtgagactgatggcatgcaaggccaggcgcggtggctcacgcctgtaatcccagtggatgacctgaggtcaggagttcaagaccagcacctgatatgcaaatgtgtgtgacatttggagacattatgtgtgacactgtggtacattt

SEQ ID NO: 26000 - DNA, 290 bp, Homo sapiens
  source 1..290: mol_type = other DNA
ttcaacaaacaaatgataccttgatgtatacttttattttattctggagtgcagtggcgtgatctcggctcactgcaacgctcccaaggtgctggggcctggcctgatgtataattttaaatcaagaggtcattactgatatgctgcacaattcagctgcttttttgagttccgctcaaagatgacttcactgtgagcatctcaatatacccctcaaataaacaggcccgggggagccggccagtctttctgccctaaataggcagggttgggtgcctgccctcccaaac

SEQ ID NO: 26001 - DNA, 513 bp, Homo sapiens
  source 1..513: mol_type = other DNA
gctggggccgggggacgctctgcagcacccccttccctgggctgggacgcggcggggagggcaggagcgggccgggacctgataccgatttcccacccgtcccctgccatgggcgccggacgcctgccggagagggctcccctccttaaagggccagtggcctccaagcccgacgcctgcgaccggcggtgggtgatagtgtttcccctccctgtccagccgagggaaaagttaatcccggaccctggaggcggaggtccagcccccaactcggaggccccgggcccaccctcccccgccccggcccctcggcaggctccgcccctctctgacgtcgccgaggcccgcgccgattggtcgcttcctcctgggccgccgccgccgccgccgacttaaactgagggggagagctactggcgcctggcgaccctcggtgaattcccccgggcgtgggcactggatcctgggattttctcaatccctcctctagggaaggggcctttgaatcgcggg

SEQ ID NO: 26002 - DNA, 232 bp, Homo sapiens
  source 1..232: mol_type = other DNA
ctgcactgtgcgcgggtcccacctccaacctgcacctggctagggccatggtcggggtcggggtcgggagtccctcggcgcccggcaaagggctcgagtcgcctctctcaggagccccgcggccagcgctcgggccgtcccggtcccgtcccaccccggagtgccctcaggacacccctcggacggcccctcactcgccctccgggaccgtcgcggtcccctcccgcccccc

SEQ ID NO: 26003 - DNA, 506 bp, Homo sapiens
  source 1..506: mol_type = other DNA
cttccggaggaaggtccaggccctgtaacaagagcatctcctctaaataaaaacctggtcttaggttaccttagcaaccttctcctggtgcagagtcctaagaggtttggggctccataaccacaaaggtggaagcgaggggaaggctgctccccaccacctcgcccccaccgctggggaagggtgcaatcagagaggatggggccactgctggtcgccctttctctcagagtaaaagtaattggaggggggcagaaagcggccccttcctcagtctcactccagcgagggggaccgtcgcgcggggcctgggtctccctcgccctcctcggggcgcgatctcccacccgccggcccccgcgcgggcacgctacccttcggtgtagacccgggtgggcgaggctcgcgctcgccgccggccccccttcctactgtcccccgccgggcgcgcgcgcggtggttgcggcgggggaggggggggggtgttggcgcggccgcgcaggcgc

SEQ ID NO: 26004 - DNA, 337 bp, Homo sapiens
  source 1..337: mol_type = other DNA
gtggagtaaggaatcataattcattgttaacctcccaaacagctgggattacaggcacgtgccaatgttggccaggctggtctcgacctcctgaaagtgatccgcccgcttcacctccgggatttaaataaatacatcaattttatttaaatcttacagcaatcatatgagacaaaagcttttaacacctgcactttatattcgaggaattaaagttctcagcccctgtggtttaagggctcctggccccgccccgtcgtctctgggcccggctcctggagatgggggggacctggcccatctcgggtgccaatcggcgcccgagggtcggtccccg

SEQ ID NO: 26005 - DNA, 481 bp, Homo sapiens
  source 1..481: mol_type = other DNA
aattacatttcaattttataaaaagttaggaactaagtttataaactttttttttaacctttaaaaaaaccctggctgactgggcgtggtggcccatgcctataaccccacacgtttgagaccagcctggccaacatggtgaagaatcgcttgttgcagtgagccgagattgcgccatcgcactccagcctgggtgacagaatgagacactgtctgaaaatttaaaactggtgagatgaatcttcttgggagaagtggctcacacctgtgatcccagcagtttggccaggagtttgagccagcgcctgggactcggggccctggagctgactccagagtttccacagtgtggccaggccggcctggcttgggtctggggagcagccgagacccctggaagtcaggcagcagggaggccctgagccctatctcccctctgggtggatgggtggggccgttgggcagcacccaacccgccctc

SEQ ID NO: 26006 - DNA, 256 bp, Homo sapiens
  source 1..256: mol_type = other DNA
accttaggtgatcctcccgagtagctgggacctagtcggactcccaaagtgctgggattacaggagcgccgggccggacacaaaacacagctgagttcgagatcaaccttctagacccctgtctctatttttaaaaaaattaaagaaatcacgaatggaaagacattttctatctccccaggacagttttttaaaatttaaaactagcccttctcccctgggtggggggaggggaccttgtccacaaatcccagca

SEQ ID NO: 26007 - DNA, 484 bp, Homo sapiens
  source 1..484: mol_type = other DNA
ttacagagcgcttactatgtatgcaatgcatgatttcaagagctttgcaaaatataatctatttaattttcacaagcctttcttctcttcatctgtacttccggaggagtcccagaggaacacctcctcagttcagaggagtcaagggttacagcggtgcccgcagattttctgccaggagaaagagcacgcgctctccagccccgcctcttcttccgggacgacgaattgcggggctcggattgggctgaggcgggccacgcctcctccggcggctgcggctcgcgcggcaaaccggctggtcaggtcccgcgcgagcgggatcgcgcccttcgcccccttcggctttctccaggagccagcgcgaggcagtagatcggctgcttgagacgcgcgcgcagctcctgcggaccactccctccgccctgcgccagcagctgcgccggctggcagccccccgcgcacgcgcgctcgcccatcccgc

SEQ ID NO: 26008 - DNA, 594 bp, Homo sapiens
  source 1..594: mol_type = other DNA
gatctcaaaagtagggcaggagggccccacgggccgggccgacgcgcgaagcgacggggacggcggggcccggggggctggggggggggccgctcctcccctccccctccagctctcgcgggctccgggccccgccgtccccgcctccccctggaccccgcagcggggcggcgcccggcctcgccgcccggggcccgtgagctcgcgcactcaccagctgggcgccctcagcgcggccccggcctccaaaatcccggcagcaacgacgggggccccggcgccatgttcccctgctcctagtccagcggcggctgaggcggcggcggcggctccggcggcggggggccgggcggaccctccctcgcgggttccctcctccctcctcctgccgccgcgccgcggctctccctcggggcggggggcggggaggggaaggggggaggggcggcaaccagggggagggcggaccagcctcgctcactccctccctccctccctccctcgcaatggcggcagcggcggcacctccttcctgcgacggccgctcccgcgcgcgcgccccctcgctactgcgcgtgcgcggcgcgtggaccg

SEQ ID NO: 26009 - DNA, 530 bp, Homo sapiens
  source 1..530: mol_type = other DNA
ggctggccttgtgacctcgggtgatccaaccgccctggccccaaggtgctgggcatgtagaggcttttaagtgcctggagacccccatgccagggaggaccctgagacctggcttggacgcctgggttcccgtcagttcccatttatgatctaatggggtccctgcggggaggagagacgccaggatcctggtctctggagctccttagagagctggatcctggtccctgacgagggaggtgttgtccccctgaagtcccagccctgtggagagtgtgctctggggcactaactgcctcctgaaggggtgtagacagtgcccggactccgctgttccccttttggagtggggtagctccgatccgaggtgctacattctgacccccgacgttaccgtggggcaagggaactcggaccccagggtagcttggccccctaccagggaaaggcgagcagggcgggtccgggggcggagacgcggcgggcggggctccggcagaccccgcccccgcccgcagcgctggtcgcgc

SEQ ID NO: 26010 - DNA, 740 bp, Homo sapiens
  source 1..740: mol_type = other DNA
caggagaaagagcacgcgctctccagccccgcctcttcttccgggacgacgaattgcggggctcggattgggctgaggcgggccacgcctcctccggcggctgcggctcgcgcggcaaaccggctggtcaggtcccgcgcgagcgggatcgcgcccttcgcccccttcggctttctccaggagccagcgcgaggcagtagatcggctgcttgagacgcgcgcgcagctcctgcggaccactccctccgccctgcgccagcagctgcgccggctggcagccccccgcgcacgcgcgctcgcccatcccgcgcgctcagtcgcgacggcggccgccgcaatagcggcattttcgggggcgcacgcgcactgcaccgtccgcggccgttcctaacctcaggcagcggctgtggcagtaagcccctcgggtgcgcacgcgctcccttcgcggcgcgcgcccaggggccgttatacccctgcaacggtccacgcgccgcgcacgcgcagtagcgagggggcgcgcgcgcgggagcggccgtcgcaggaaggaggtgccgccgctgccgccattgcgagggagggagggagggagggagtgagcgaggctggtccgccctccccctggttgccgcccctccccccttcccctccccgccccccgccccgagggagagccgcggcgcggcggcaggaggagggaggagggaacccgcgagggagggtccgcccggccccccgccgcc

SEQ ID NO: 26011 - DNA, 582 bp, Homo sapiens
  source 1..582: mol_type = other DNA
gcgtctccaagtctgcgaggccgaggtgggcgccgagagctgggcgccacagcccgcgcgtcccgctgcgccccgcgcgccccggggtctatggagctgcccctccgcgccgcccggccggccccacgccgcgcccggagcctgctctgcggccagtcccagaggaatggggggctggaactccagtgggatcaggagaccaggacacctgggccccgagtgtcgggtcaatcgtcctggggcagaggctgcggcggctgcgtccggggctggggctcgcgcgccgggggcgccatcccgagaggctggggggatccctgggcaggacacaggatgggggtccctgccctctgccccctgcctccttagcccagccgggaaacagggtgagtcagacaccgggctcggggcagagggctccgggggctggggcgtgcgtgcctggcccgggaggcgcccgccccccgcccggcttgggcatgcttggcacgcagcgcgcgggccggttcgatccgtatgcgcgccgcgtgcgcccattggtatgcgggagccggcccggcgcgggcgtgaggcgggcgcgct

SEQ ID NO: 26012 - DNA, 314 bp, Homo sapiens
  source 1..314: mol_type = other DNA
tggactgcactgcatagcctgcaggcttgcaatgaatgtgaagctttaaatgggattaagtgcaaattgaaaatattccagacacatttttcacattcctgtcttaaagagacagacctggccgggcaccgagaccagcctagcgcaccactgcactccagcctgggcgacagagcaagactcggtcatgacagaggagggaatcactgccattccgaccaatggacagttcaccggacctgagtggcgagcgcatagccaatgggtaagccattcatcctgagggttgcaacctaccggaggccggtggggcg

SEQ ID NO: 26013 - DNA, 189 bp, Homo sapiens
  source 1..189: mol_type = other DNA
tcccagctactcgggaactgtgccactgcactccagcctggggagtgcagtgcagtgattgcaacctcagcctcccaggttcaaattgtcaggcctctgagcccaagcctgagaagcctgcctgcagccaggtgaaataaacagcactgccgtgactcggatcgggggaccgacctcccttgggagatc

SEQ ID NO: 26014 - DNA, 66 bp, Homo sapiens
  source 1..66: mol_type = other DNA
ctcttaaaaaaaaaatctttttttagaaccaggtccggggcgcctcagcctctaggctggttcggg

SEQ ID NO: 26015 - DNA, 239 bp, Homo sapiens
  source 1..239: mol_type = other DNA
cctgaaataaggtatttctttagagggagtgcagtgcagcctcgcgtcccgggatcgggcgacctgaaataaggtatttcttcttctttcggttaagttccatgaagacagaaactgttcccatgctccagatccctggattcgaggttacagtgagacagcactgcagtctgggcgacagagcaagactctgtctcttaaaaaaaaaatcttgctgtgctttttagaaccaggtccgg

SEQ ID NO: 26016 - DNA, 213 bp, Homo sapiens
  source 1..213: mol_type = other DNA
gactgcctctaaggccggcacaaagtaaactccatgaggacaggcactccttaaatatttgcagaatttaagtgccacataagtgaccacgtgggcaacgccctcggggccttaagccgacgtgactccgcggacgaggtactgcgcaggcgtgggagggtctgcgcatgcgcagaagcactccgggcgtgctgccggcggcggtaggtggcg

SEQ ID NO: 26017 - DNA, 892 bp, Homo sapiens
  source 1..892: mol_type = other DNA
ccgtcgggagtgtgtgtgtccgactgtcccggtgtctgggcgatctccccacaccccgccgcacagcgcctgggtcctccttgccttgggctaggccctgccccgtcccccgctgcagggaaacccccggcgcggaggtaggggggggcgcggcgcgcgcctgcaagtcctgacttgtccgcggcgggcgggcggggccgtagcgtcacgcgggggcggggcgtgggacccgccgggcgggggcggggcggggcggggcggggcggctttggagcgggcccgggatccgccgggcggcctgagacgcggcgcgagccacatgcgagcgggcgcctggcggcggcggcggcggcaccagcgatcccagcagcggccacgacgcggacgcgcctgcggcccggggagcagcagcagccacagccacagcagccgccactgcagttagagcggcagcagcagcgacagccacagcagcagccgccgcggagagcggcgctcggcgggcgcgccctcctgaaggaagccgcccgccccccaccgccgccccctccggcgtgttcatgcccccggggtgagtgtgcgcgccccgaatcctctccggcggcgatcggccaggccgggtggactccctggagagtgcaggcggagagcagtgtgggcgccctgcctccccacaccgcgcctctccaaaccccgcgagggaccctgggccagggtcgccgggtgagaggcggctcggcgttggggcgccggtctgggcgcacaggtgcctcggcggtcaaacaatggggtgcgggctcggcagcgccccctggcggccagtgcggccccggggaagagggtcgaccccaggggtgccccagcccccaaagtccgggaggggcgggggggc

SEQ ID NO: 26018 - DNA, 328 bp, Homo sapiens
  source 1..328: mol_type = other DNA
ttcctgacctcaggcagtccacgcaccttggcctcccaaaacgcccgtcggtcgggagtgtgtgtgtccgactgtcccggtgtctgggcgatctccccacaccccgccgcacagcgcctgggtcctccttgccttgggctaggccctgccccgtcccccgctgcagggaaacccccggcgcggaggtaggggggggcgcggcgcgcgcctgcaagtcctgacttgtccgcggcgggcgggcggggccgtagcgtcacgcgggggcggggcgtgggacccgccgggcgggggcggggcggggcggggcggggcggctttggagcgggcc

SEQ ID NO: 26019 - DNA, 248 bp, Homo sapiens
  source 1..248: mol_type = other DNA
gacagagtgaatcttttatctaaaaaaaaaaaaggctgggccaggtggctcacgccatatcggacctccctgctactgccactgcactccagtctgggcaacagagtgacacctgtaatcagaccagcctggcagtcccagctactagggagtgtaagtgatgtcatatgtcataatccatggtttactcaggagttcccaatgttgcaaatggggagatttcacgtgagatataaggtgagtcactc

SEQ ID NO: 26020 - DNA, 202 bp, Homo sapiens
  source 1..202: mol_type = other DNA
gtcaagaccacgacagagtgaatcttttatctaaaaaaaaaaaaggctgggccaggtggctcacgccatatcggacctccctgctactgccactgcactccagtctgggcaacagagtgacacctgtaatcagaccagcctggcagtcccagctactagggagtgtaagtgatgtcatatgtcataatccatggtttactca

SEQ ID NO: 26021 - DNA, 379 bp, Homo sapiens
  source 1..379: mol_type = other DNA
tggccaggctggagatgtccgcgcccggctgtggtctgccacagaccagagtatgcctacaactgcaccagtgcctggcacaggggagactctggatcacgaggtcaagagatcgacaccatcctgttggcaggcgcttgtagttccagctactgaggttgcagtgagccgagatcgcgccactgcactccagcgcgagactccgcctcaaaatatatatatgtatagtccagcttccgccttctgccgctcgggggcagcaggcgtccggcggattcgcccgcgcggccgggccgggaaaggtgagctcatcccgcccgggcgcctccggaagccacggggccgcccggcctccgcctggcccgagcgataaagctct

SEQ ID NO: 26022 - DNA, 284 bp, Homo sapiens
  source 1..284: mol_type = other DNA
ggctagagtgcagtggagcgatctcggctcactgtctccggagtagctcggacaggccggctattagtgcggtactggcgcgccctcaggtaggggttggcgagggggctcgaaccacgccaggcttccaggcgtcagtgcccagtgcttggcatctgtctccttttcctggaaaacacccggggggccagtcggccccgctcccgcatccatcgcggaggcgcggcccctttaaggctcccggaaacggtcccacaggaccggaagtgaccctctttatttcc

SEQ ID NO: 26023 - DNA, 457 bp, Homo sapiens
  source 1..457: mol_type = other DNA
tcacgtggtgcaggcaggaagtgacgcgcctggcccgggagctgcggtcgcagaggccgacggagccggagtcgcggacgccgcggggtctccgggacaggtgacctgggggagggggccgggagcgcgcccagagaaggcggggcctgaagccccacgtggcggggagtgcgaacaggcccgggcggggtcggagttctctgcggggggcggggacagggtcggggcggggcgtggccagagcctgggccggcggctgggctcggacgccgggcggaagctctgtgggcggggccagaaagttttgccttactggaagtgggtccagattcttggccgggacgttgggggcggacccagaggctgacgcaagtctgagccacgggcgcggccagagcgttggccttggccaggccaatcggaggcggggccagatggcccgaaagttttttcccga

SEQ ID NO: 26024 - DNA, 362 bp, Homo sapiens
  source 1..362: mol_type = other DNA
ccaagtagctgggattacaggcacctgccagggtttcaccatgttggccagactcgtcttgaagatttaacagtaaaatatacttaaatgctggtagctcagcctctttgggtctcaaatcagcctggccgggaggaggggtaagcccagaaggctggcgtctccagcctggccaacacacacgtgtaatcccagctactcagaggggccgagcctgcacaggagcttcctcggttttagcgccggccccccttctctgcctgggaggaggtggttgtgccccgcagagggagctctggcctcagtgcccagtgtgcagaccaatgagagcccgaagacggtcccttggggctttaaaaacc

SEQ ID NO: 26025 - DNA, 247 bp, Homo sapiens
  source 1..247: mol_type = other DNA
acatcctgaggttcagaggggctgaggccctgaacaggtaagagaaaattttaaaaaattagccagtgggaggatcacttgagcctgcaatggaaaattgaggaggcgttgggccctgcgctcagctgctgtggccaggctgtcttcctcagagccgaggaggaggaaaccgcatgcaggtctggcttccaggatggggacttgggatcagccctccacccttttgggttctgtgagtcacgggaag

SEQ ID NO: 26026 - DNA, 263 bp, Homo sapiens
  source 1..263: mol_type = other DNA
ctggagtgcagtggcattggctcactgcaacctctgcctcccgggttccagcgattctcttgcctcaggagtagctggctagggggggttcagttttcttagaaaaggttgacagaattctgcacaccttttactctagggataaaaataatacgaaagtgtggactcttcactgctacctggcatgggggaggggagtgccccactctccctcaacaccagctggagtgctgagctcagggccaggtcactctgacattgtg

SEQ ID NO: 26027 - DNA, 515 bp, Homo sapiens
  source 1..515: mol_type = other DNA
ccggccttgaggaaaggcaaggcctccagacccttcccctcgccacgggggcagagcccgccggcatggggacccccagactcagccaagaccctgagtcctggcagcgcactgcccatcctgcagagggggaatcggattcccacgtgacccctggagatggccagggaggaccccagccctgggtaggagaggaggggcctgggggcaccagggccgcggtctcttcctctccgggaacggggagcgcggctgccagcacccctgagccgccgccggaccctccgtcgccccgggccgccccccgccccctgcggtccccggtgtgtccgtctcgggacggttcgattccctccagagccggggaagggacggggggggcccagaggagggggcctcgggcgccccgcctgcgcctgctgcccccgccccggcggcgatgcgctcctggccgtgacccccgctgggggcgggggccggggtccatgcgcggagtccccacccggcccggcgcc

SEQ ID NO: 26028 - DNA, 233 bp, Homo sapiens
  source 1..233: mol_type = other DNA
cctgtagtcccagctactcaggaggctgaggcaggaggattgtgccactgcactccagcctgggtgacagagtgagaccctgtctcaaataaggcacagtatgtgaatttggatggggggcgggggctgcttctgaaacacacaggagcgccctccggtgctgtcccctgcctctggtgctgaacccggaggctggggaggaggctcgggctccctgctcccccaggcccctc

SEQ ID NO: 26029 - DNA, 231 bp, Homo sapiens
  source 1..231: mol_type = other DNA
tagaatctggagccatatttaccaccgtctgtaagtgaagctcataatagcatttacctaaatttataaaaaacattagaaccctgtagtcccagctactcaggaggctgaggcaggaggattgtgccactgcactccagcctgggtgacagagtgagaccctgtctcaaataaggcacagtatgtgaatttggatggggggcgggggctgcttctgaaacacacaggagc

SEQ ID NO: 26030 - DNA, 367 bp, Homo sapiens
  source 1..367: mol_type = other DNA
gatcatttttccttgggggcaagaagaatgtattaattattttaaaggtgatactgttaagattatgaactatagggcggatcacctgaggtcaggaggtccagaccagcctgggccagtgagccgagatcgcaccactgcacaaaaaaaaaatagtgaactgtggagttaccttgtttggtaaaatggatttaagtacctctgcgaatttttaataaagtattagatgggatgatgatagaggccgtggccaccacctcccatctcagtcgcctgggaggcccgagcaggcgacctggccgccatcttgggagagggcaacgccggcagctgtcatcagcccgcgcaacggccgggcacccggcgg

SEQ ID NO: 26031 - DNA, 413 bp, Homo sapiens
  source 1..413: mol_type = other DNA
accagagttagagaacctctctagtactggcagagggagcaagaaaaagcagaacggtttccttttcccacggggcgggactaagttctgcgcagaactgtcaaacccgggcgtgggccccgagctgtcacgtgagtgtctgcggtcagctgactgtgcgttccgcggggagggcgagtgggggaccccccgccccagcgcgagccgagggctcctgctgattggtggaggaggatccagcagcaacaccgtggggcggggcctcggcggggggtactgccattgccttccacagggtcacgcgtgcggcggctggtgggggcgtgtccggcggagcgggcgcggcgttacgaggccgctggttggccagcgctagtcacgtggttcctggccgcaagcgacgcgcgccggtg

SEQ ID NO: 26032 - DNA, 843 bp, Homo sapiens
  source 1..843: mol_type = other DNA
gacccgacaccaccgcggcgtcctggggcttctgggaatcccatcagcgcggccagagcggccggggacaggctccgaggcaggcccgacccgcctccccggcgccgccgtggctcgacggagaccagctagggtgagtgcgagccacgcctggggtcccggcctgtcaccccgaccctgtcaggctgggctccggcgcggtcccacctccggggggaactccccggcgctccccctggacgcgtcctcccgccggacgaccgtcctccgcctcaggggacgcgcccaggacgcacggcgccccctccccagccggaccggcggtctgggagcgcggatcccttcagctcccccgcgccccagcatccggatcagggctcgaggcagtcacccgagctcgagcaggcgcgcccctgaacccccgggactggggctgggggcgggggcggcgccggcgcggagggcccagtccccggacgtccgcagcctcccattggctccgggtcccgccgctcggcctggcggggccggggctggtccgcccggacgcggggcggggattcctgaagcccctcctccggcgagggcggagggaagaggaggagaacacaaaacctgagaggtttttttttttttttttccgtttgcatttaattaaaaaaaattttttttttttttgcatacccgaggggcgctccccggaacgggcgcgggcccggggcgcgcgggcctgggcgcggggcggcggcgggggcccggcagcggctgccgagcggccgccatgcgatcaggcagtgcgctgaccggcccggccggccggccccttctgggtcctccctttgc

SEQ ID NO: 26033 - DNA, 369 bp, Homo sapiens
  source 1..369: mol_type = other DNA
tcctgggttccagtgattctggaacttgggagcctcagcctcccaagttggagtgcagtggcgcaatcactgaggctggtcttgaactcctgacctcaagctggagtgcagtggcacactgcagccttgacagctttccaagttgctgggatcacaggtgtgcacccctgtgcctggctaaattattttattatttattattatttttaatagacaaaagtgttagggttacagggcgcccaattcgaaccccaggctggacgctggagctctcgcccgccgtgctaaggcgtctccccacaagggggcgccagaggccgggcgcccggttttgaggggggcgcctcgtcccgcccctccctccccccg

SEQ ID NO: 26034 - DNA, 291 bp, Homo sapiens
  source 1..291: mol_type = other DNA
tgattctgagtctgcacttagggtcctaaaagtgtatgtttctaacattccgtccaactttgatattccgaaagttacttgatttctaagatcctaggattggaacatttgagaggacaaaacttctgagacctttgtctcttaaaaaaaaacacacacacatccccagcgctggctccataatcccccactgcactccagtgttcgcttaagggcgaaagctaagaacctgcaggagccatttatcctttaccaagatggcagcctcctggcattatctgcgcgcacgct

SEQ ID NO: 26035 - DNA, 440 bp, Homo sapiens
  source 1..440: mol_type = other DNA
cccaggctggagtgcattggcctgatcttggctcactgcaacctttcaaccgagtagctgggacgttgggattaatgtattattattattatatgttgcccaggctggtcttgaattcctgcaagcgctggggttacaggcgtgagccaccgcgccctgcggctgcaggtctttatctcgccccctcgccctctccaggggaggtgagggactcaagaatcgcgccctgcttctgtcccaggctgattccgggtccagctgggagcggccagccgtaaatcaccgcccccgtgggccgtaccattctggccggggggacctgggaggggacgcgcggagggcttcccccggggactgcctgtatcgagactctctccagcccaacaggagcgcccaccgcccctccctggcattggttggcgccaggggaagccgaggct

SEQ ID NO: 26036 - DNA, 363 bp, Homo sapiens
  source 1..363: mol_type = other DNA
cccttgagcacaggaggtcaaggctgcagtgagctgtgatcatgccactgcactccagcctgggcgacagagtgagaccctgtctaaacaccctttctaataagtctgcctattttcagtgctggaagcagcccctgccacctgagagggatcccgaaagctccgtgcctctcttgggatactagctgaagctggagagacaccagttagacctaaggaaggacttccctgaggagtactcccttccccatcagccctaattgccaagatgtcatggggggaagaggaggggattaagcagacgggtgcccctcccccggccgcgagtccaggccatatcactcccggaggcttaaaatctcc

SEQ ID NO: 26037 - DNA, 694 bp, Homo sapiens
  source 1..694: mol_type = other DNA
aacacttaaggttgggtgctgccaattctttgtgaaaatccaaatattattaaggaaacagggagatgccatacctcttgattttccatctaaaaacatacatgtttatgcaaacaaatctttccatattcatagtgacttttcaagtatttgagtctaaagattttcatctcacatttttataccgtttaaattgttcacaattattacaatcaactaaagttgtactttaaaaatttactacaatatatacactgctaatatttgtacttactctttttttctctagagtggaggtataattgtgtgatacttcagaaatacagataaatgattcaaaaagtctcagggagaataatgtttctttgatcgtgaataactgattagtaattcttgcctatattttcctgagagcatatgacaaatgtttctaaggtaacaagaatttggagagacatattttaatttttaaatgcagttacaaattataatgtattcatatttgtactttctgctttgttcttgtttttaagtttgcactcaaaccttaagaaataaattcacccatattatcaaaaaaaatatttgtcctcgtgtttgttataagttcatgattgctcaacatcttcaatcttttgagtaaactttacaacaaacatgtgacatgctgggacaaggttaaagatcgttttat

SEQ ID NO: 26038 - DNA, 200 bp, Homo sapiens
  source 1..200: mol_type = other DNA
cctgacctcaggtcaggagccactgtgcctggcaaacatcttttacagatcttgattatattctacaacatactattattattgatactttatgaagaccaagtgtgctaagacattgttgtggtcccagctacttgggccattgcactccagaaaagaaaatagtagggctttttcattgttcagctgaaacctctcca

SEQ ID NO: 26039 - DNA, 358 bp, Homo sapiens
  source 1..358: mol_type = other DNA
gtgtggagtcgcaaaacccctttgggctttgacactttttccctctaaatcattcaggaaagacagaaggaaagaagagcaaatgccatgctcttagtctgaggccaggggtgctgagctctccatctcactgcccagaggccagtgttggagtaacattgaataaatgatgccggtctcactatgtcagccaggctggagtacaatggtgcaatcgtagttcactgcagcctggagtgcaatggtacaatcatagctcactgcagccttgaacagcagaatccccatttataaaatgcactttccagatggggaggcagggacagctctggtccctccccaacccgggtagagacag

SEQ ID NO: 26040 - DNA, 315 bp, Homo sapiens
  source 1..315: mol_type = other DNA
ccagatgtgcgccacatgcagctgtagctggggcttccctgagaccaggtgtgtgccccacttgtggcttggtcccctcctcctcagatgcggcccccagtccagctgtgggcccgccccgcgcccaggcctggcccggcccttgctcccgggatgccccgcgcggtctcccgcccccgccgtgcctcgcgggctcatccagggcgagggaaagcgcgggcattttcccagtgtgctctgcgggagggctacgactcccagtgtcctccgcgcgacggcggcggtgcggacggtgcccaggtcccgcccctaggc

SEQ ID NO: 26041 - DNA, 207 bp, Homo sapiens
  source 1..207: mol_type = other DNA
tcccagctactcggatgacgcttagtgtttctaggagccactcttggaagcggtgctccccacagatgaggtgctgggaaatgtggtaccctgttgggaggccacttctccatatgaagattggccagatgatattatatatgatgatctgttttgaggaatacttatctccaatatagttatataacgacaacattctttttttga

SEQ ID NO: 26042 - DNA, 373 bp, Homo sapiens
  source 1..373: mol_type = other DNA
gatagccccgccccctcggggggccttccgaggcggcccgcagcccgcgctccgaagctgccccaagttgcgttggtcccgcgcgccgctgcccgggcaacacactcagatccgccaggcgcgcctctgcagtcccaagttcgcgccacggcattcgcgcgcagacgtctgcgggcgggggcggggcagagcctaggggcgggacctgggcaccgtccgcaccgccgccgtcgcgcggaggacactgggagtcgtagccctcccgcagagcacactgggaaaatgcccgcgctttccctcgccctggatgagcccgcgaggcacggcgggggcgggagaccgcgcggggcatcccgggagcaagggccgggcc

SEQ ID NO: 26043 - DNA, 380 bp, Homo sapiens
  source 1..380: mol_type = other DNA
agttgtcgtcattgcaaccttaaacaaaaaatatttctgcaattatcttcctgaatatatacatagtttaatatggcatatctattcccaattgcaatgctctattcccaaataaacactgtttcctttaggaagctttcatatgtttgttatttaggttaacacttgtaataattaaaggattacagttacaatgtaaaattattagtattaacaacacaaacattggtataaaaattattattacagaaattaaaacaacttgaagtcattgaagtcataaatttaagctatgactaacaggatgcaaagcttcctgagggttttgcttctcgagaatcgttctcaacttcttttgaaataatgttcatagagaaggc

SEQ ID NO: 26044 - DNA, 368 bp, Homo sapiens
  source 1..368: mol_type = other DNA
aattattttacagaatgtttatcaatgatacttcaaaatagtatttagaaaccaaggctctcgaggtcaagagacggagaccatcagctactcgggaggctgaggcaagagaatcgcttgaacctaagtaatattgattaaaaatcaaattgcatgagaataacttttaaatattacagaaaatgatatttaaaatacaaaccaaataattccagagaaatttcatatattgcttcaattttatttaaaatatactattacctatgtcttagatattttattttaaataatgaacaaggatattataaactctgcagatgcccacagccatcatggcgaccggaagtcctgagagcttacttccctca

SEQ ID NO: 26045 - DNA, 230 bp, Homo sapiens
  source 1..230: mol_type = other DNA
tctcaaaataaataaataaataaattatttaattgaccagataccttccttcctggggagctccaggagctggttttgttcagctgatttgcatcaggggcacctgaagatcaagcgactgggaaactgagtctgggctggagtgcaatggcgcctcaggtgatctgcccacctcagcgcccagtgtcaggcctctgagccgaaacagccagttcctgccttaactgatt

SEQ ID NO: 26046 - DNA, 198 bp, Homo sapiens
  source 1..198: mol_type = other DNA
ggatcgcgccactgcactccagccttaactggagactccccaacctgtctgtttccgcccttttacagtactgaggggaaaaaaaagccttctttccttgggaaatgcaggaagccagcaagcggccggagtctccggagcccgcaaggaggcgcgttggctgcgcagagagcgcgcttcccagctggagagcctagg

SEQ ID NO: 26047 - DNA, 408 bp, Homo sapiens
  source 1..408: mol_type = other DNA
atgagaatcaaatcttaattacagaatgattgatcaataatgcttttagagaaagttcttgatcacaaggatctagttgtcgtcattgcaaccttaaacaaaaaatatttctgcaattatcttcctgaatatatacatagtttaatatggcatatctattcccaattgcaatgctctattcccaaataaacactgtttcctttaggaagctttcatatgtttgttatttaggttaacacttgtaataattaaaggattacagttacaatgtaaaattattagtattaacaacacaaacattggtataaaaattattattacagaaattaaaacaacttgaagtcattgaagtcataaatttaagctatgactaacaggatgcaaagcttcctgagggttttgcttctc

SEQ ID NO: 26048 - DNA, 305 bp, Homo sapiens
  source 1..305: mol_type = other DNA
cctccaagaggggttggagggggacctctctcaggcctctcccacacgacaggcctcctgggctctcaggatatctgaggccagggcagggtcgggggagtcctgggccctacctgccgacaggccaggcgcgtggctcacgcctgcaatcccagcatttcgaggcgggccttgaggtcacgagatcccagctacttggggcaggagaatcgctggttgcagtgagccgagatcccgccactgcactccagcctgggacagagcgatgctgcggagccctgagaggtgcacggctgtgaggcctg

SEQ ID NO: 26049 - DNA, 426 bp, Homo sapiens
  source 1..426: mol_type = other DNA
actcaaaatccttactcaatggctgtgtaatttttggcaagttactaataacttctctatgcctcagtctcttcatctgaaaaatagagataatagtaaatctgggggaccctgattcaggatctcggaacttaagtgcctgagagacaaaactggggtaggtgggtaccctggggatattaggggggtccccgcctccccagcgtacgcaggccgcttcctcccacaggaaaccgcaggcttcgggcacacccagcctgcagggagaggcgcccactgcccgcccgcccggggaggcccacgtgggcagcagccgccgccgcggagggggcgtgcctcggtatggagtgcccgaggtctcacccacttccgccctccagcgcgcggacgtggtaggcggccaagcgtttttggctgcttcccggg

SEQ ID NO: 26050 - DNA, 224 bp, Homo sapiens
  source 1..224: mol_type = other DNA
cttattcattcagcataagtatcagaattattattatcagtattagtattttgtcagcattattatactctcaacatagactaaaaggcagtggtgcaaactgtttccaccatgttggccaggctggtctccctcaaaactcaagggtcctgagaatcgggccctcgaaccggagtgcctgggccctcccactggcagccgacctcagctgggtgcggtgaggg

SEQ ID NO: 26051 - DNA, 139 bp, Homo sapiens
  source 1..139: mol_type = other DNA
aggcagtggtgcaaactgtttccaccatgttggccaggctggtctccctcaaaactcaagggtcctgagaatcgggccctcgaaccggagtgcctgggccctcccactggcagccgacctcagctgggtgcggtgaggg

SEQ ID NO: 26052 - DNA, 267 bp, Homo sapiens
  source 1..267: mol_type = other DNA
gacccaggagctgaagggcctgcagagggactgggtccttcgagcccctgggaggtctgaaaccgaataatccctttcaggtttcccagaataagggcctccctttcgaattcagctccattttcacggaagtgcacctcctcacctcagaatgaggccacgccccggcactgggccctttaaggagggtgacggcacctgagaaggggccgccccttctctggagggccaatctgcgtcacctgagggccctcaggagctgacacg

SEQ ID NO: 26053 - DNA, 436 bp, Homo sapiens
  source 1..436: mol_type = other DNA
tgccagcgatgagagggcccgggggggcccgaggagcgcgggcaacagtggccatactcggaccctggacccccagaccctctagaggaaaagcgccctctccacccaggcagggcgcagagcccatccgctcgcctcagttggcctgggtcccagacagggctggggcgtttttcaggcccagagaccctgtagtggtacaacgtttctttggggttacctagggggtgcagggccgccctccctggccatgcagagcctcctgcgcatgtgcaggagggcgtcctgggctcccgagccaccgccggcctcgtttgggcgcgacgcatgcgccgcaggagtgtctccggcggggtagggctcccgcgcgcagtccgccaacggcgcgcagtccaacgttcgccgaggccacgccccggctcgtgtcagctcctga

SEQ ID NO: 26054 - DNA, 396 bp, Homo sapiens
  source 1..396: mol_type = other DNA
gacccaggagctgaagggcctgcagagggactgggtccttcgagcccctgggaggtctgaaaccgaataatccctttcaggtttcccagaataagggcctccctttcgaattcagctccattttcacggaagtgcacctcctcacctcagaatgaggccacgccccggcactgggccctttaaggagggtgacggcacctgagaaggggccgccccttctctggagggccaatctgcgtcacctgagggccctcaggagctgacacgagccggggcgtggcctcggcgaacgttggactgcgcgccgttggcggactgcgcgcgggagccctaccccgccggagacactcctgcggcgcatgcgtcgcgcccaaacgaggccggcggtggctcggg

SEQ ID NO: 26055 - DNA, 411 bp, Homo sapiens
  source 1..411: mol_type = other DNA
tctagaggaaaagcgccctctccacccaggcagggcgcagagcccatccgctcgcctcagttggcctgggtcccagacagggctggggcgtttttcaggcccagagaccctgtagtggtacaacgtttctttggggttacctagggggtgcagggccgccctccctggccatgcagagcctcctgcgcatgtgcaggagggcgtcctgggctcccgagccaccgccggcctcgtttgggcgcgacgcatgcgccgcaggagtgtctccggcggggtagggctcccgcgcgcagtccgccaacggcgcgcagtccaacgttcgccgaggccacgccccggctcgtgtcagctcctgagggccctcaggtgacgcagattggccctccagagaaggggcggccccttctcagg

SEQ ID NO: 26056 - DNA, 522 bp, Homo sapiens
  source 1..522: mol_type = other DNA
agggctggggccctgaactcctgggtctgagggaggaggggctggggccctggacccctgggtctgagggaggaggggctggggccctggacccctgggtctgagggaggaggggctggggccctggacccctgggtctgagggaggaggggcggcctggactcctggagggcctggagtcctgggtctgagggaggaggctgggggcctggactcctgggtctgagggaggaggctgggggcctggactcctgggtctgagcgaggaggagctgggcctggactcctggatccctggggacccagacttcaaaagctagcagctgagcctccgggtccctgcaggcgtctcttccagagacacagactgcctcggtgctggatttggcactttccgaaccctgcgaccctcccaagttcctatggggcagctttgggggtgcgtttagcgccgccacggcgggcgatagggggcgccggggatccaggccccgccctcgggggcggagcctctcctcccgg

SEQ ID NO: 26057 - DNA, 464 bp, Homo sapiens
  source 1..464: mol_type = other DNA
ctggcagagccccacgggtggctttataaaagtgccgggcccagccctctagcaggaggggaaggacccccggggaacagcctgttcgcttcccttccggatgatggggtacccacaatggactgagtccttaaaagagactccgacttggaggcggtccccaaattcctgggtcccagtagagaaggggactcctgggggaccagggtcgagacctggttttcaggcctggccttctggggcaataaaagccacagcttgggtcttagtgtggcgaacactgaagtcaaggcagggcgggggcagagggcagcaacccccagccctggagtctagctctgaagctggtgtctccataccgggttcctcccttgtcccaggaggaaggcagggctggtagctaggggtggggggcggccccctccccaagcctggcaggagaaggggtccccagggaggccagg

SEQ ID NO: 26058 - DNA, 238 bp, Homo sapiens
  source 1..238: mol_type = other DNA
ctctgcccagatctccagccgggtctggggctgggttgcggaggggagggtctgggagtccacacttctccaccgaataaacacatattaagatcaaaggtatggttttatttcctatggctataggtaccatgtctgacatatcccagccaatccgcattatcttgaatgctgttaatctcaccaatgagaatggactttctcgctgaccagagctgaaagtctggttaggcaattg

SEQ ID NO: 26059 - DNA, 236 bp, Homo sapiens
  source 1..236: mol_type = other DNA
acatattaagatcaaaggtatggttttatttcctatggctataggtaccatgtctgacatatcccagccaatccgcattatcttgaatgctgttaatctcaccaatgagaatggactttctcgctgaccagagctgaaagtctggttaggcaattgaatatccatcctgtctacaagaaagcatttttgaaaaaatttgcatatatgaataattaattaatgtctgcgaaacccgg

SEQ ID NO: 26060 - DNA, 165 bp, Homo sapiens
  source 1..165: mol_type = other DNA
gcaaggcaccgctgagcctttcagagaaaccctctcagtctgtctgtctctgtcctgtccagcccccaccagtaggtggggagtggtggggaaagttgaagcaccttaagccctgtatctcctttataaagctgtccctcccgccctgcttttgctaggggaggg

SEQ ID NO: 26061 - DNA, 159 bp, Homo sapiens
  source 1..159: mol_type = other DNA
aaggccgagcctgcagcacttggtgggcggttcgagaccagcttggccagggcaagagaaaaaacgaagaagtcttttgtttcaccagctcccggttgcatggcaacctttgcggtcagaagccagcatggcctgctaggaggtgtggcttacggtcgg

SEQ ID NO: 26062 - DNA, 327 bp, Homo sapiens
  source 1..327: mol_type = other DNA
cagcacttggtgggcggttcgagaccagcttggccagggcaagagaaaaaacgaagaagtcttttgtttcaccagctcccggttgcatggcaacctttgcggtcagaagccagcatggcctgctaggaggtgtggcttacggtcggaggcggggctcggtttacctagactccaagtgtccagggcctttgagcaggcgcagaggtggctgtaccgcgtggctccgcctccgcgcgacggaggcggggcctgctgccctgcctgcactccgattggccccgcgggccgtctacctctggccggacatacctacaccggagacagtgt

SEQ ID NO: 26063 - DNA, 288 bp, Homo sapiens
  source 1..288: mol_type = other DNA
ccgggcagcacctgcctcagtttctccaatgagacaccctgagggcagcccctccctgagccccccgatgaggacggctgcgctctgcggggagtgtgcactgcccggccggtgtgcgccacggctgcgcgtagccctgggcccctgggctgcgtcttgggtgcgcagctccggcccagcctcacccaggggaacgcctcgcaggtgctccgcgcccaatggaccgggtcagatacctgtccataagaataaatacattaaataaactatgatcatgtatcttttgta

SEQ ID NO: 26064 - DNA, 414 bp, Homo sapiens
  source 1..414: mol_type = other DNA
tcccggccccacagctgggaggcactggacccttccccagcggtggcctagtgcttggaacagcgcctggtaaatatttctcaaatgaataaaggaatgaatgagtgaatgaatgaatgaatgaatgaactcgctgagatgggcgagatcagcgccatttcctgggctccaggtgggtgcccacaggcccagaactgccagcccggaaggttctggcgtgggcttggcactgaccccctggactctgcccccagctgagcaccagacgccaggacgtgcccatcactgctcctccccgccctcagagcagggtggctccctctggcctctccccgctgttggaggcgtgggtagcagctgggagaaccggctgggtgctgcccctccccttgggccgggcacggagtaggcacc

SEQ ID NO: 26065 - DNA, 366 bp, Homo sapiens
  source 1..366: mol_type = other DNA
ctgactcagtggtgcccggcagtgctaagtcctgatgtgcaaccagaaggtgagggaaccctgctgcagccccagcttctggcccagcgcccgttcgttgagtccagagtcaggactgcagccccgcctgtccaggcagcgcctcggcccgggcagcacctgcctcagtttctccaatgagacaccctgagggcagcccctccctgagccccccgatgaggacggctgcgctctgcggggagtgtgcactgcccggccggtgtgcgccacggctgcgcgtagccctgggcccctgggctgcgtcttgggtgcgcagctccggcccagcctcacccaggggaacgcctcgcaggtgctccgcgccca

SEQ ID NO: 26066 - DNA, 485 bp, Homo sapiens
  source 1..485: mol_type = other DNA
ggctactggcagccttcaccctcctggatctgggaggccagaagctgggcgccagatccctgtctcatccccttccctaggtcctcgcaagggccgagaggtgtaccggcatttcggcaaggcccctctccccagactcagcctgcagggccaggcctggccacacttgggctgcaggccttctggaagggcctgagcaggcatctcctggggagcatgcagttcaccggcctttgccagcccaggctgggaccctccaggtggtggggcaggtgcttccatagcccctcctgttggcctcctttaagagggccccagaccctacgtccgctccaagggccggaagttcgagcgtgccagaggccgacggtcttattaaaaagatttttgccttcccaacagccaggtggcaggtgttcccacaccggcttccttgggtcagccacgcccgccccggtcctgtgcccctccctggtgctgggatg

SEQ ID NO: 26067 - DNA, 391 bp, Homo sapiens
  source 1..391: mol_type = other DNA
tttattaactttcataatcctgaaaaacaccccgttgtcatcccctttttgtccataaggagagtaaggcccaaagatggttatagccttgcaagattgaggtgcagcaagatcatctccaagcagcggctgcgcctacgaagtgtggggtcggaaatttccagatgccacactgggcccgccgggtcctccgggagccactgagaggccgtcggcgtcgggccagagcgtcaccgcgcgacgcatcgtgctagctacacgcatctcgctcccagatccctttcttccggaaagctatcgggcgggtagggccagagaggcccccgacgtgctggccctagtcagtcgagcgccgcgtcgcacccatgtgacgtcacggcggcgccactcg

SEQ ID NO: 26068 - DNA, 429 bp, Homo sapiens
  source 1..429: mol_type = other DNA
caaatagtgtctttttaaaacatcgtttttaaagtggagacagggtacaatattggccaggctggtctttaagtttttcagactgtgttgacaattacaagaactatttaatagctccacttatgcagcactaaattcacaaacttgtcagatgagggggcctgagactcagagacctgcctggtgctgcgggtccagccacctgggtcggaatcctggctctgccactggctttgtacatctactaagtgggggcggtaggctatccctgctttcctggcccccagagtaggtccccagtatcgggaattgctccctccgggcagccgcagaccccctgccgccctccaggctcaccatgatggcgcctcctgctcggccaggtccgagtggcgccgccgtgacgtcacatgggtgcgacgcggcgct

SEQ ID NO: 26069 - DNA, 457 bp, Homo sapiens
  source 1..457: mol_type = other DNA
aagaactatttaatagctccacttatgcagcactaaattcacaaacttgtcagatgagggggcctgagactcagagacctgcctggtgctgcgggtccagccacctgggtcggaatcctggctctgccactggctttgtacatctactaagtgggggcggtaggctatccctgctttcctggcccccagagtaggtccccagtatcgggaattgctccctccgggcagccgcagaccccctgccgccctccaggctcaccatgatggcgcctcctgctcggccaggtccgagtggcgccgccgtgacgtcacatgggtgcgacgcggcgctcgactgactagggccagcacgtcgggggcctctctggccctacccgcccgatagctttccggaagaaagggatctgggagcgagatgcgtgtagctagcacgatgcgtcgcgcggtgacgctctgg

SEQ ID NO: 26070 - DNA, 477 bp, Homo sapiens
  source 1..477: mol_type = other DNA
ggggcctgagactcagagacctgcctggtgctgcgggtccagccacctgggtcggaatcctggctctgccactggctttgtacatctactaagtgggggcggtaggctatccctgctttcctggcccccagagtaggtccccagtatcgggaattgctccctccgggcagccgcagaccccctgccgccctccaggctcaccatgatggcgcctcctgctcggccaggtccgagtggcgccgccgtgacgtcacatgggtgcgacgcggcgctcgactgactagggccagcacgtcgggggcctctctggccctacccgcccgatagctttccggaagaaagggatctgggagcgagatgcgtgtagctagcacgatgcgtcgcgcggtgacgctctggcccgacgccgacggcctctcagtggctcccggaggacccggcgggcccagtgtggcatctggaaatttccgaccccac

SEQ ID NO: 26071 - DNA, 401 bp, Homo sapiens
  source 1..401: mol_type = other DNA
ggcatctggaaatttccgaccccacacttcgtaggcgcagccgctgcttggagatgatcttgctgcacctcaatcttgcaaggctataaccatctttgggccttactctccttatggacaaaaaggggatgacaacggggtgtttttcaggattatgaaagttaataaaactgctgaggtcaatattttgcacataataagtgctcaataaaaattagccttcactcctattatagcatacatattgtgctggggcagtgattaaaatgacttatctactcttccccccacccgccagggaggcccctgcctcttggttctcaggcacattgagcctggaagggcccctctcctccacagagctgaaggtcaggccaggacagtgagacctgactcccagg

SEQ ID NO: 26072 - DNA, 493 bp, Homo sapiens
  source 1..493: mol_type = other DNA
ttagagtctctgtctttgcaatgagacagagatggcgacaacggcgctgtctatggggccgcgacgtcgtctccgctgcgcgtcggccctcacccacgatggcggccagtctcccgaagcgcgaggccccgcccagctctcggcctctcccgcggccggtccctgcaccaagctcgcgagctgactggctccaccccccgcgccctcgtattggtgcggcccaggccggctgcacggccattggctgagcggatgcacaccctccccccacccctaggtctgatgggggctgttggtgagactcaggcccgggactgggcctgggccaggactgaacccagccaggcctgggactgggtgggggcccagggccagacacgcaggcctatggattggggaccaatggatggagacccaggtccaggtctcggggacccagggacagagacccaggcccaagacttgaacctgatttgaggttcccataatgggg

SEQ ID NO: 26073 - DNA, 477 bp, Homo sapiens
  source 1..477: mol_type = other DNA
atgagacagagatggcgacaacggcgctgtctatggggccgcgacgtcgtctccgctgcgcgtcggccctcacccacgatggcggccagtctcccgaagcgcgaggccccgcccagctctcggcctctcccgcggccggtccctgcaccaagctcgcgagctgactggctccaccccccgcgccctcgtattggtgcggcccaggccggctgcacggccattggctgagcggatgcacaccctccccccacccctaggtctgatgggggctgttggtgagactcaggcccgggactgggcctgggccaggactgaacccagccaggcctgggactgggtgggggcccagggccagacacgcaggcctatggattggggaccaatggatggagacccaggtccaggtctcggggacccagggacagagacccaggcccaagacttgaacctgatttgaggttcccataatgggggagg

SEQ ID NO: 26074 - DNA, 332 bp, Homo sapiens
  source 1..332: mol_type = other DNA
ccgacggtagggcccagcgcggcgcagcccacgccccctgatggtgtcccccatggtcgctgagactccccttcgattaaagaacagacttcttccggaaaccgcggcccctttaagcggcgccatggcccaaactgggtcacggtcccgaccgcctcccattgggcaaatgtaggtcagtgctgagcccctcacgcgccctcctgggccctggcggacccagaggccccattggctgtgcatgcccatagaggctggcggggctggacgcgccgggcggggacccggaggaggggcgcgcgctccgcgaaagaacaaggcggccgcctcct

SEQ ID NO: 26075 - DNA, 269 bp, Homo sapiens
  source 1..269: mol_type = other DNA
tgcacttcaggctcctaggggatcccccggccccgttaaggcagccccaggcagagacccagtggagccctggggcggggaaggggggctgcgggcgctggggcggctccaacctgggtcccagcgagcagggggaccctgcatccgccaaggccggcggcccccagcatggagactcggaggatggaaacagcctgctcccggccccaggtgtcccggccacccccgcccgcgtggccccagcgcggctgggagccgaggaccagccc

SEQ ID NO: 26076 - DNA, 241 bp, Homo sapiens
  source 1..241: mol_type = other DNA
gctgggctcatagactgaactcaagtaggtaagagggtcagaccaccttgggggtgggtggggctgagaacagaccccgcccacctgctcccaggggcggggtttcctgcagactcctgagccagacagccggcccctgcagcccttggcccacagggcactgaggggcaacagggacccccggcaccccgagaggcgctgccgaggccccgaatttccaaaatggtacaatttggatcct

SEQ ID NO: 26077 - DNA, 197 bp, Homo sapiens
  source 1..197: mol_type = other DNA
tgcacttcaggctcctaggggatcccccggccccgttaaggcagccccaggcagagacccagtggagccctggggcggggaaggggggctgcgggcgctggggcggctccaacctgggtcccagcgagcagggggaccctgcatccgccaaggccggcggcccccagcatggagactcggaggatggaaacagcctg

SEQ ID NO: 26078 - DNA, 451 bp, Homo sapiens
  source 1..451: mol_type = other DNA
caggcagggtcagcggagggacctgcgcctggcctgggcccccagctctgacatgccccctctgatggggggcgtctcagccccggtacctaagggtccagagtcgagggtcgcctttgctgtgccctcgcaccccctgggggcgggcctggggcagtgggtcccaagcctgtcaggattgggcccacgctaggggccacccagggcagcaggtgccgcgccccaacagaaaacattatttttctagtcaacccggacaccagcggcactggggaggtgcttttgagcttggtcccccgcaccccgggggtccccgccttctccctctgccgcatgagaaacactggggcccaggtgttactgaccttaaggctcggtgaaacgcagccagaggcaggggcccctgcccgatcgcgatggcggccaccacaaggcggggcgggacccccga

SEQ ID NO: 26079 - DNA, 455 bp, Homo sapiens
  source 1..455: mol_type = other DNA
taatctcagtttactgcaaccaagtagctgggattacaggtgcacatgttggccagactggtctcggtgggccatggctggcccatttgtatttaaaaatttttttgaaataggcgttgcagtgagctgagatcacgccattgcactccagctctctcaaaaagtaatactactaataattaattaataaataaatataagactctgaggggactcagagtcagcgagagcctggcctagcaggactctgtccccgcctccatgctgccttcctggaggccttcctggctgcctggaggagcggtgggggcccctttctgttggggcatcacaacagttccccaaggaagaccctcggggacccggatgggggcccccacccgccaggcttggggggagggaggaggggctacgggctcacctccctcccgcagcccaggaaagccctgtagctc

SEQ ID NO: 26080 - DNA, 360 bp, Homo sapiens
  source 1..360: mol_type = other DNA
caaaaaataataataataataattagccggcccagctacgtgacattgtcctcaagcctgggtgacagagagttcaaggctgcagtgagctatgatcacacccctgcactccagcctgggttacagagtgagtgggcacacgcttgccatggagggggcaggtggagccgggggcagggctgcctccagcctgcacgctggctggctcgtagccccagaatggcgctggcccgcggcgctgcgctggcagggagcaggcgggaggcccgaggaagggagcctgctgcccgcccacccgcctgcacaggctgtgtaagggggctgggcacgcatatcccgccctgccaggccaggctcctg

SEQ ID NO: 26081 - DNA, 279 bp, Homo sapiens
  source 1..279: mol_type = other DNA
cctctagtcccagctactggggaggctggttgcagtgagctgagatcgcaccactgcactccagcctgggtgacagagctactctgtctcaaaaaataataataataataattagccggcccagctacgtgacattgtcctcaagcctgggtgacagagagttcaaggctgcagtgagctatgatcacacccctgcactccagcctgggttacagagtgagtgggcacacgcttgccatggagggggcaggtggagccgggggcagggctgcctccagc

SEQ ID NO: 26082 - DNA, 349 bp, Homo sapiens
  source 1..349: mol_type = other DNA
cagggcccttgtctgggcccctgccgagtctgaggaggtatttatagccacggccttggctgaataacttgactccagttgctgcgtcagggaagtaggcgacaggtggcacctgccggtagggccaggacacgaccacctgccgctgctgctcacccggcgcccacaaccccaggacgtgcaggaggagcgagccggggaaccctgacgtccccgctctcacggccctcccagcgggtgctcccaccccttctcagggtccccggcggggctcccgtcacaccccaggaaggtgggttggaggcggtcccaggctggtggggcggagcctgtggtgtccagcctcggc

SEQ ID NO: 26083 - DNA, 281 bp, Homo sapiens
  source 1..281: mol_type = other DNA
gcttgtctttgccagggcaggaactccacgccctgccaggactgtaacagtgttgcccaaaatgatcaagacagcctctgcagcccgagaaaatgctggcaagccgccttctggggctgctgatctgcggctccctagcactgggcggggcttccaggaacccaacacagaagctggtctgggggttggccttggcagtggagcggccggcaacaataaagatttatcttgttcactccccgggacgggactgattgggacccttgggtcctggaggggaa

SEQ ID NO: 26084 - DNA, 194 bp, Homo sapiens
  source 1..194: mol_type = other DNA
ttttacccctgggaaaattagcgtaggtggtgggctcctttttctaagcggaagggtgcgccctgcaaattgggagggccccctagggacttggaaaattccacagtttgggatttgattcagtgagaaccctaaattttgggtcccctggattggatcctcttttcgaggtttgcggaccccatggataggcg

SEQ ID NO: 26085 - DNA, 385 bp, Homo sapiens
  source 1..385: mol_type = other DNA
atggacagtatcaatcattagtgtaaacattattaatcattagctattacttttattctttgttgtataactaatataaccaggaaacaacaccggcataagggcctcttgagggagaccacgaaagggaatctccttctccaccacggtagaagaaatagtgaaagccttttttttttttttttggctggagtgcagtggcgtgatctcggctcactgcatgtagccaggatggccaaatagtgaaagtcttaaagtctttgatctttcttataagtgcagagaagaaaacgctgacatatgctgccttctctttctgcttcggctgcctaaaagggaagggccccctgtcccatgatcacgtgacttgctgtatacaataaac

SEQ ID NO: 26086 - DNA, 328 bp, Homo sapiens
  source 1..328: mol_type = other DNA
tggggtgtgcctggcaggctcccagcagaagaccagccagcagctcgaacccggtctcgtccgagtccatcctcaggtgagtagactcaggtggcctgagtgcctgctgacagaacagacccaggtgaaaggggctgggggcccacattcctgagtctcagagagaaggatctggggtctgaaatttctgcgccccatctgaatttctaagtttggggggactcagcaaggcggcaattgctgtatgaaagaagcgaccgcatcctcagatgctcagaccctggatcaccagagaagccatcccaggcccaggcaggtgctcctgtga

SEQ ID NO: 26087 - DNA, 427 bp, Homo sapiens
  source 1..427: mol_type = other DNA
gttgtttcctggttatattagttatacaacaaagaataaaagtaatagctaatgattaataatgtttacactaatgattgatactgtccatgatcatctctatatctaatttgtatgataactattcttattctaactattttctttattatactgaaacagcaatgtcaaagactcaggagtttgatcagacttaggagtccaggctcccggcccctcctcagacccaggagtcctcctcagacccaggagtccaggatcagatccaggagtacaggcccagaccctcctccctcagacccaggagtccaggccccagacccaggagtccagagccttaggggccactccagggcctggcttggctgccaactccagtcacaggagcacctgcctgggcctgggatggcttctctggtgatccagg

SEQ ID NO: 26088 - DNA, 330 bp, Homo sapiens
  source 1..330: mol_type = other DNA
tcagatccaggagtacaggcccagaccctcctccctcagacccaggagtccaggccccagacccaggagtccagagccttaggggccactccagggcctggcttggctgccaactccagtcacaggagcacctgcctgggcctgggatggcttctctggtgatccagggtctgagcatctgaggatgcggtcgcttctttcatacagcaattgccgccttgctgagtccccccaaacttagaaattcagatggggcgcagaaatttcagaccccagatccttctctctgagactcaggaatgtgggcccccagcccctttcacctgggtc

SEQ ID NO: 26089 - DNA, 276 bp, Homo sapiens
  source 1..276: mol_type = other DNA
agacggagtctcaccctgtcacccaggctggaggtctggctggcctcaggtgatccacccgccttggccccaaagtgctgggagtctcactctctggagtgcagtggcatagctaagatgcctggcagggaccgtatttcaagtcctgcgcctgcgccccgcagcagtgtccggctccctgccgacgccctggagctgggacggcctggggcgctggtcggccgccttcccccagaaggaggcgtgagcggggcgtggccggaacgtctctcttcg

SEQ ID NO: 26090 - DNA, 401 bp, Homo sapiens
  source 1..401: mol_type = other DNA
cccagatctcccccggtggcctcgccgagggagtgggcgtggaggaggtcccaccccctgggggcccgcgtgggatgccgggatcgcccctccggtcctgccacaagacgagggggcatggccaccactcagggcatcagggggcgtggtctggtccccattgcgggcccgggaggggaatggttctatggccaaagtttggttttctcaacactgtctaaatttggattaaaactttgaacttttagtcacctcgggaccctgactcctgggtctgagggggactgggaggcggactcccgggtctgagggaggaggggctgggaccctgactcctgggtctgagggcgggaggctggactcccggaggctggactcccgaggggcctggactcccgacg

SEQ ID NO: 26091 - DNA, 491 bp, Homo sapiens
  source 1..491: mol_type = other DNA
tccggagtcctggggctgggaatccggggtcctagctggaaatttggactcccagggagaccctcttcccggtgccacgcgccaggagacccccccagatctcccccggtggcctcgccgagggagtgggcgtggaggaggtcccaccccctgggggcccgcgtgggatgccgggatcgcccctccggtcctgccacaagacgagggggcatggccaccactcagggcatcagggggcgtggtctggtccccattgcgggcccgggaggggaatggttctatggccaaagtttggttttctcaacactgtctaaatttggattaaaactttgaacttttagtcacctcgggaccctgactcctgggtctgagggggactgggaggcggactcccgggtctgagggaggaggggctgggaccctgactcctgggtctgagggcgggaggctggactcccggaggctggactcccgaggggcctggactcccg

SEQ ID NO: 26092 - DNA, 360 bp, Homo sapiens
  source 1..360: mol_type = other DNA
gtatccatcccctttcaaggatttactttgatgtataaacaatctagttacaccctttaatttatttaaaaatgtacaattaaattattattgactatagtcattctgttgccgacttccgaaggtcaccgggagcggtctcccaagccctggctactgaggcgtcgcagtggagacctggaatcccaggtctccagactcctggatctggggcctggactcctgggtctgagggggcctggactcctgggaatccggagtcctggggctgggaatccggggtcctagctggaaatttggactcccagggagaccctcttcccggtgccacgcgccaggagacccccccagatctccccc

SEQ ID NO: 26093 - DNA, 386 bp, Homo sapiens
  source 1..386: mol_type = other DNA
ctgggattacaggcgtgagccattgcacccagccagggctcactgcttttggctgcaacagacagtgcctgcacacaggtgtcatctgcttcagacttaggcagtagctcgcccccacaagccgtggaatcatgtctctctcctgagggagttgtcctcagtctagaagagaattctcacctggatctgaggtggaggtttgaggggcgactcaggagtcctgatcctagctcagaccttctcgggcacccaggagtctggatcctccagggctttggaaattgtggcccacgggggccctggagtgcaggcctcaagtccaactctggtgacctgggaattggggggcccaagcccctcccttcagctatgggggcagctgagcc

SEQ ID NO: 26094 - DNA, 361 bp, Homo sapiens
  source 1..361: mol_type = other DNA
gagatcacgccattgcactccagcctcggtgacagagcgagagctcacgcctgcaatcccagcacttttaaataatgaataaataaataaataattgggaggccaaggcgggaggatcccctgacgtcgggactgcaatcccgccaaggcgggaggatcccctgacgtcgggacacatgcctgcaatcccagatactcgggatgctgaggcaggagaatcgccccaaataactaactaaataaataaataaattggggtgagctgagagagaactgctcactcgcgcatgctcgttgcggtctcgaaaccccgcctctcttcgtgacgtcagcacgccgggcgcggtaggctataaaagcc

SEQ ID NO: 26095 - DNA, 383 bp, Homo sapiens
  source 1..383: mol_type = other DNA
actcgcgcatgctcgttgcggtctcgaaaccccgcctctcttcgtgacgtcagcacgccgggcgcggtaggctataaaagcctagtggaggcagccggagatactctgagttactcggagcccgacgcctgagggtgagatgaacgcgctggcctccctatctggcagaccgaaccggcgctcctgcccccggggtgacgcgcagctcccagccggtgagtaaggggtcggaacgcctgggtccccacggggctgggggcccgggaggagggatctggaagccagattcttgggtcccccgagcaagtaaagacttttgttcttggttctacccttggatctaaggcagaactaggggctcagactccttgctatttacaata

SEQ ID NO: 26096 - DNA, 269 bp, Homo sapiens
  source 1..269: mol_type = other DNA
cctgaggtcaagggtttgagaccagcctaggttgcagtgagccgatcgcgccactgctctgtgttgctggctgaggccgcgaggtctctggtctccggcgcgatctcagctcactgcgagctctcccgagtagctgggttttttgtgtatatatatatatttttttttagtagagcaagccaggatggtctagatctccaccgcgccgggccggtctctggtctctttaaggaacccccacacggcattcgtgttgaaccccagcaggg

SEQ ID NO: 26097 - DNA, 229 bp, Homo sapiens
  source 1..229: mol_type = other DNA
ggagaccagagacctcgcggcctcagccagcaacacagagcagtggcgcgatcggctcactgcaacctaggctggtctcaaacccttgacctcaggaaaaggctaaaaaagaattaaagatttaaatatttgtattaaaaatttaaaaaatatacattagcctaccgcgctataacttccaggcacttccgatgcccgcggaagttatttttcccccggccggcaggga

SEQ ID NO: 26098 - DNA, 260 bp, Homo sapiens
  source 1..260: mol_type = other DNA
gcagtggcgcgatcggctcactgcaacctaggctggtctcaaacccttgacctcaggaaaaggctaaaaaagaattaaagatttaaatatttgtattaaaaatttaaaaaatatacattagcctaccgcgctataacttccaggcacttccgatgcccgcggaagttatttttcccccggccggcagggattcgaaagcgagcggcttcggcaaggggcggggccgctggacgcgtaccaatcagacctctttggaacgc

SEQ ID NO: 26099 - DNA, 369 bp, Homo sapiens
  source 1..369: mol_type = other DNA
ctaattccttgagctaaggctatatcaataataattataataatacagtatattttacataatagaccatagagctcaattgtaggtagatgttatcatgatctctgctttccagaatagaaaagtgaggaccagagaggctaagcagcctggtttctaaaactatagcttctggaagcgtttccccctttgtgaactggggacaatagaagctacttcaggagctggtctacaggtgctctatacatattagtaataattattaagtttgctggctttgggcaaagttttgccacaaagacattattccctctggcggaggatggggacccgcccccggggtgggcggggcgtcaggtacttaattcg

SEQ ID NO: 26100 - DNA, 359 bp, Homo sapiens
  source 1..359: mol_type = other DNA
atttggggcacccggggagtgtctcttgtggcccctttacacaaacacaaacattcgagtcatgactgggtggggtggctcaagctgtaatctcagaaaaagttttaaaaattatcaggaggctgaggtgggaggcttcagcccgggaattccagactgcagtgagccatgattgggctcacaagttaatattgctagatccaggtctctgcaaaaaacaaaaaagcacgtgacgggaccaaacctcccgagggagcgaggcaggtgcggtcacgtgacccggcggcgctgcggggcagcggccattttgcggggcggccacgtgaaggacgcacgttcagcggggctctcacgtgacc

SEQ ID NO: 26101 - DNA, 195 bp, Homo sapiens
  source 1..195: mol_type = other DNA
acactgttcagggccacggagaattctcgaagtctgtgagttgtctcctgggtgaaggggagggctccaaaatacggagacaaccccagaatcttactttcccgaggcaccccaggaccccagggtcatcagttcacgcgctacaggcgcgtgactctagccctccccgagcgccctgcctccgagggccggcgc

SEQ ID NO: 26102 - DNA, 393 bp, Homo sapiens
  source 1..393: mol_type = other DNA
tggcgccaaggactgcggaaccggccgttggggccagacccgagattctgggatcccagcccagcttcctcctctttcagacccaggagtctgaaccccaggagtcagggcctaggagcgagatgttctggctcctctaggctagctggttcataaatatgtaaatattgtgggggcgtggcgggactttatgccccgccctcccaccgaggctgcgctggaagacgggcgtccggaactcctgggtccattagctccgccccctggaggtctcacggccgaggcggggccgggacacagcgactccagcggaaatccccgcccccgggcgtgggccaatggcgctggctggggggggcggccaccgcctcctggcggctgcgaggtttcact

SEQ ID NO: 26103 - DNA, 473 bp, Homo sapiens
  source 1..473: mol_type = other DNA
ctgttagggtcataggtctgaaaccccggcagcttcccaggtttcggaagcctgcctccaggacctaggaggtcgtcaagggccccgacgcccttcgaagagcactgcgttctccaggtcgaattcatcctcccagtcctccagtcctggcagtgaggacatggctccggggatctccaggtagggaccccggaggtgtctagaccaggcggggccgagtagctggtgcccgacgggaagcttgcaagacgctcggcttcctatctgccccgaagcgttgggacctaggcagaaggaggccgcagcgtcactgagcccactggcgcccctgcagtgaaacctcgcagccgccaggaggcggtggccgccccccccagccagcgccattggcccacgcccgggggcggggatttccgctggagtcgctgtgtcccggccccgcctcggccgtgagacctccagggggcggagct

SEQ ID NO: 26104 - DNA, 541 bp, Homo sapiens
  source 1..541: mol_type = other DNA
gtcgtcaagggccccgacgcccttcgaagagcactgcgttctccaggtcgaattcatcctcccagtcctccagtcctggcagtgaggacatggctccggggatctccaggtagggaccccggaggtgtctagaccaggcggggccgagtagctggtgcccgacgggaagcttgcaagacgctcggcttcctatctgccccgaagcgttgggacctaggcagaaggaggccgcagcgtcactgagcccactggcgcccctgcagtgaaacctcgcagccgccaggaggcggtggccgccccccccagccagcgccattggcccacgcccgggggcggggatttccgctggagtcgctgtgtcccggccccgcctcggccgtgagacctccagggggcggagctaatggacccaggagttccggacgcccgtcttccagcgcagcctcggtgggagggcggggcataaagtcccgccacgcccccacaatatttacatatttatgaaccagctagcctagaggagccagaacatctcgctcct

SEQ ID NO: 26105 - DNA, 609 bp, Homo sapiens
  source 1..609: mol_type = other DNA
gctggaggcgccctggggcggcccgcactggaagcccctgcggggcatctaactccagctatggcagcttgaagccggcgctggtgtgagccgtcagggccagccccaccccagacccgcccccagggccgcgctgccgagcggagctcgggacctccgctcactaggaagggttccggacccagcctgagtcgcactcacgtgggggcgggactagcccagacacccactcagccaggctgtggccccgggggcaagacacgcaccctgcgggcgtccggggacgctccgggcatcctggcttgagggtaggctcgggcttaatccctccttgggggcgtcaagtggcttccctggcagcacagtcacggggagaccctctctcactgggccgaagcagcgcccctcctgttaggttggactgtggtcaggaaagcctcaagtggagggttgaggcttcagtccagcaccctctggcgctagaccactgaggggagagggctggggcgctctgctgagccactcctgcgcctccctggccatgtgcacctctcgcccccggggggattagtgtccaggttatcacctcctggtggaccccgaggtata

SEQ ID NO: 26106 - DNA, 319 bp, Homo sapiens
  source 1..319: mol_type = other DNA
ggaacttgagggtaatcatgatgatgatgatgatgatgataataataatagccactatttactgagtgtttactctcggatcaactctcatggatttgatcattggtgacctttggtgttaagttgctgactgctcagtcacagaggacaccgggaccttgaggacatggtctacagaaggcctgagttcagccctgggcggggagctcaagtcaggtttcttccgaggcttcggccccatgggcaggacccgggcagcttccctggcagcacagtcacggggaggccgcccctcctgggaggttggcctcaagtagag

SEQ ID NO: 26107 - DNA, 228 bp, Homo sapiens
  source 1..228: mol_type = other DNA
tagcttggaatccgcccgcctgggcctcccaaagtggtgggattacaggaaccacaggtgtgagcctgacctgtagttgttgaatatttattattaatctacaagtctggcaggcaggcctcccctggggttcccaacttctgacctcactgaataggggtgccgctgccgggccccctctgggagactggggcctttgggagtcagcaggcacccggggccgtgtgc

SEQ ID NO: 26108 - DNA, 346 bp, Homo sapiens
  source 1..346: mol_type = other DNA
gagttcagccctgggcggggagctcaagtcaggtttcttgtcctctgaggctgaggcctcgggggcaggacaccgccctcgtcgcgcccctcctgggcgaggaggttccaccacaggtgacgaccgccatggctgacaggcagggaggtcccccgaggaccgagcaagcttgaagtaatttaaaaacacttaggaagatgtcatttcttcctatttatgttttgttattatatagggaacgataaaaaaatttttttctcaaccactcccctccctgagggcccgagggcacgcgcaaccggtcggagccacaataatcaggagaggctcacccctgacgtcaccc

SEQ ID NO: 26109 - DNA, 407 bp, Homo sapiens
  source 1..407: mol_type = other DNA
tgtcctctgaggctgaggcctcgggggcaggacaccgccctcgtcgcgcccctcctgggcgaggaggttccaccacaggtgacgaccgccatggctgacaggcagggaggtcccccgaggaccgagcaagcttgaagtaatttaaaaacacttaggaagatgtcatttcttcctatttatgttttgttattatatagggaacgataaaaaaatttttttctcaaccactcccctccctgagggcccgagggcacgcgcaaccggtcggagccacaataatcaggagaggctcacccctgacgtcacccagtccccagggccagtgagggccctgcgttccgtggcgccccctggagggaggaaagagagagcagccattgggtccgctgactccggccgggttcccg

SEQ ID NO: 26110 - DNA, 373 bp, Homo sapiens
  source 1..373: mol_type = other DNA
cctccgaggctgcggcctcgggggcaggacacaaccgctccgggcccctcgtcgcgcccctcctgggcgaggaggttccaccacaggtgacgaccgccatggctgacaggcagggaggtcccccgttgaagtaatttaaaaacacttaggaagatgtcatttcttccatgttttgttgttatatagggaacgataaaaaaattttttttttttttcctaccaatcctagccttgagagcccgagggcaggctcaatcggccggagccacaatggctccggttgtcgggccctgacgtcacccagtccccagggccagtgagggccctgcgttccgtggcgccccctggagggagggggtccgctgactctggc

SEQ ID NO: 26111 - DNA, 333 bp, Homo sapiens
  source 1..333: mol_type = other DNA
tgcagtggcgtgatctctgctcacttagcttggagatccgcccgcctgggcctcccaaagtggtgggattactggagcgctgacctgtagttgttgaatatttattattaatctacaagtttggagtcccccaaactagcaagggcttcccctggcaggcaggcctcccctggggttcccaacttctgatctgagagatgctctgagagatgctcctgtaggggtgccgctgccgggccccctctggtcttcctgctggagactggagcctttcgggagtcagcaggcgcccgggccaaccgcagccagcgtgcgatgcagtcactgtctggg

SEQ ID NO: 26112 - DNA, 361 bp, Homo sapiens
  source 1..361: mol_type = other DNA
ttctcctgggggaacttgaggataatcatgatgatgatgataataataataggcactatttactgagtgtttactctttctttcggatcaactctcatggatttgatcattggtgacctgtgttaagttgctgactgctcagtcacagaggacaccaccttcctcatcctggggagtgggagggggaccttgagaacatggtctacagaaggccggtggggagctcaagtcaggttttaagttgtcctctgaggcttcggccccgtgggcagccgctccgggcacaagtggcttccctggcagcacagtcacggggaggcccgaagccgcgcccctcctgggaggttggcctcaagtagag

SEQ ID NO: 26113 - DNA, 458 bp, Homo sapiens
  source 1..458: mol_type = other DNA
ccagaggcgccatctgttgctattgagtaatagtagttgactattatgtatttttattagagtctggccctgtcacccaggctggagtgcagtggtgcgctcttggctcactgcatctctgctagcgattccctcctgagtagctgggagtacaggtgcccacaggctggtctcacatgtggggcctgacctgtagttgttgaatatttactattaatctacaagttgggtgctatatatggagtcccccaaacagggcttcccctggcaggcaggcctcccctggggttcccaacttctgaccccactgctgagaggtgctctgagagatgctcccgtcaatggggtggtcctgcctaggggtgccgctgccgggccccctctggtcttcctgctggagactggggcctttcgggagtcagcaggcgcccgggccaaccgcagccagggccgtgtgt

SEQ ID NO: 26114 - DNA, 316 bp, Homo sapiens
  source 1..316: mol_type = other DNA
aattgagagtaatcatgatgatgatgatgataataatagccactatttactgagtgtttaaactcctcagatcaactctcatggatttgatcattggtgacctttggtgttaagttgctgactgctcagtcacagaggacaccgggaccttgaggacatggtctacagaaggcctagcgcatgtcctccgaggcttcggccccgtgggcaggacagaggtggggctcgggctgaatccctccttgggggtccctggcagcacagtcacggggagaccgaagccgcgcccctcctgggaggttggcctcaagtagag

SEQ ID NO: 26115 - DNA, 169 bp, Homo sapiens
  source 1..169: mol_type = other DNA
tgcacatgctgccagagtgaccctaggatgggacagccaccgggactgtggcaacagtcctctagagaccccaaggggcgactccaggccgggcgccgtggctcacgcaccctgtaattccagctactagggacgagaatcgcgccgagatcgcgccactgcactccag

SEQ ID NO: 26116 - DNA, 315 bp, Homo sapiens
  source 1..315: mol_type = other DNA
ctgatccacccactggggtctcagtgacacgatctgcctcagcctcccgagtagctgagactgacctgtagttgttgaatatttattattaatctacaagtttggagtcccccaaactagcaagggcttcccctggcaggcaggcctcccctggggtttccaaagaggtgctctgagagatgctcccgctcccccgtcaatggggtaggggtgccgctgccgggccccctctggtcttcctgctgcagactggggccttttgggagtcagcaggcgcccgggccaaccgcagccagcgtgaggcagcgatgcttc

SEQ ID NO: 26117 - DNA, 282 bp, Homo sapiens
  source 1..282: mol_type = other DNA
agtcgctctgtcgcccaggctggagtgcaatggcacgacctcgtaaccgggtacaggcgcgcacggccacgcccggcaggggattacagatgaatagttattgattgaatagattagacatcaacgcaacggcttggggcaagcgcgcgcgcgcagtgcagaagccagccccccgcggctgaggtactcggcggggtagtgacctcgcgcgtgcgctgtgcccgcggcagcgccgggaccgcacggcgcgtgcgcagtgaggacggcggagggatttgcggc

SEQ ID NO: 26118 - DNA, 344 bp, Homo sapiens
  source 1..344: mol_type = other DNA
cagtctccacagtggctacagtgataccgtgcccggccccagtgatctaatttgaggcccaacctgggcgacagagcgaggctccgtctcaaaaataataataataataatataataataatacaaatttgagtgtcatatttttctcttaggagttggggtgacccacctgctcaccacggtgtccatgacttcaggaccgactggccggggcggagggcagggcgcggctggcgcgcggcaggtggtcggagcagtcgggcgagggagagctgggcgctctccaggctgcgcctccgcagggggcgcccgtggcccggggcgtggcctcgcgcagccccgcc

SEQ ID NO: 26119 - DNA, 453 bp, Homo sapiens
  source 1..453: mol_type = other DNA
ggatcttccagccctgggatcctgacccttgacccttggcccaggctctcaccccaggctagtttggccaaatccccccaagatacggaacctactgtggctgggatctccttggagtctcgaggttgaaaccacagatctggacgtctcactgagtgtctgttgagaagccttttccagagtctgagaacagaggttaagacctctccctaggtctgggcagggacccagtctgggtctgagtgctgctccagagtcctgaaacgcagccggagccagtgggcggcctctgtgtgggcggggcggagcgaaccattagcctcgtccgccgggggaaccctgcaggccgcactactgtgccgcgtgcagttcccgaggcgggcgcagggtgcagaatgaggtgccctcgcccaccgggcgctgcgcgtctttccggaagcagcccccgccttg

SEQ ID NO: 26120 - DNA, 554 bp, Homo sapiens
  source 1..554: mol_type = other DNA
ccttggagtctcgaggttgaaaccacagatctggacgtctcactgagtgtctgttgagaagccttttccagagtctgagaacagaggttaagacctctccctaggtctgggcagggacccagtctgggtctgagtgctgctccagagtcctgaaacgcagccggagccagtgggcggcctctgtgtgggcggggcggagcgaaccattagcctcgtccgccgggggaaccctgcaggccgcactactgtgccgcgtgcagttcccgaggcgggcgcagggtgcagaatgaggtgccctcgcccaccgggcgctgcgcgtctttccggaagcagcccccgccttgtgcccgcccagccctcgtgtcccgtgcggcgcgagggctagtgcgcgccactgccgggagccggggtcgcgactcgcgttccacgccgcgcgctactcgctccaggcagccgcctcacgccgcgtgccggtcgacgcgctctccgcccgcgcgacccctcccggccggtgtggaggcggggtctagtcgccggccggcgccgacgctctc

SEQ ID NO: 26121 - DNA, 637 bp, Homo sapiens
  source 1..637: mol_type = other DNA
ctccagagtcctgaaacgcagccggagccagtgggcggcctctgtgtgggcggggcggagcgaaccattagcctcgtccgccgggggaaccctgcaggccgcactactgtgccgcgtgcagttcccgaggcgggcgcagggtgcagaatgaggtgccctcgcccaccgggcgctgcgcgtctttccggaagcagcccccgccttgtgcccgcccagccctcgtgtcccgtgcggcgcgagggctagtgcgcgccactgccgggagccggggtcgcgactcgcgttccacgccgcgcgctactcgctccaggcagccgcctcacgccgcgtgccggtcgacgcgctctccgcccgcgcgacccctcccggccggtgtggaggcggggtctagtcgccggccggcgccgacgctctccctgttaaaggggccacgaccgcccgggagccgtggggggggcacccctggatctggcggctgcggcctcgcggggggaggtgagggggaggggggtccccagcgcccaagccggagccagagacgcggagcccgcgcgagcgtcggagacagggctccagggctccgaagcgacagagccgggccccggccgctgccaggggccccgcccggcccccccac

SEQ ID NO: 26122 - DNA, 483 bp, Homo sapiens
  source 1..483: mol_type = other DNA
tgcagtgagccgagatcgcatcactgcactccagcctggtagtcgcagctactcaggaggctgagttgggaggactgctcgagtctgggtcgttcaggctgcagtgggccgtgatcgcgccacttaataataatagtggtggccaatcctgtgtgccccgcaggcccgcaccgccgccatgatgtgcgaggtgatgcccaccatcagcgaggatggccggcggggctcggcgctgggcccggacgaggcgggcggggagctggagcgcctcatggtcacgatgctcacggagcgcgagcgcctgctggagacgctgcgcgaggcacgttggctacagcgcagctgcggctgcgcgagctcggccacgagaaggactcgctgcagcgccagctcagcatcgcgctgccccaggtctgggcgggacaggggcggggggggccgggcttggcgcctggaagggagtctgggcgaggcttgccgtta

SEQ ID NO: 26123 - DNA, 561 bp, Homo sapiens
  source 1..561: mol_type = other DNA
gggaggggcacggctgagggtcccttccgtccccagaccctcacggagagcggggtacacggggcactgctcgccctggacgagaccttcgactagcagaatgcacaggtgagctgccgctgggcccggagcatgctgggcgtccccacctcgcagactgcacgccaggcccggcagcttctggagaaggaaaacagctcagagggctctgctcccagcggctcctcgagaggctgagctgagggggaatggtgacaaggcaggagtccctcaccggctgtccggctcctgctccccatcctggcggaagatgttccgggagaaggacctccgaggcgtaactcccgactcagctgagatgttccccttcggctgcagcgggagccctgggctctccggggctccctctccgcaagctgcagccagaaggtggggggctcccaaatgcgacagcccttcctcgcttccctagggtggggcatggaccacctcagtagtccgggttctggaatggcctagtcctttctcgcccacccctgaaaatcccactcccccttccca

SEQ ID NO: 26124 - DNA, 558 bp, Homo sapiens
  source 1..558: mol_type = other DNA
cctcacggagagcggggtacacggggcactgctcgccctggacgagaccttcgactagcagaatgcacaggtgagctgccgctgggcccggagcatgctgggcgtccccacctcgcagactgcacgccaggcccggcagcttctggagaaggaaaacagctcagagggctctgctcccagcggctcctcgagaggctgagctgagggggaatggtgacaaggcaggagtccctcaccggctgtccggctcctgctccccatcctggcggaagatgttccgggagaaggacctccgaggcgtaactcccgactcagctgagatgttccccttcggctgcagcgggagccctgggctctccggggctccctctccgcaagctgcagccagaaggtggggggctcccaaatgcgacagcccttcctcgcttccctagggtggggcatggaccacctcagtagtccgggttctggaatggcctagtcctttctcgcccacccctgaaaatcccactcccccttcccagggcgggagtgaactcgcccaatgcgagtttgagt

SEQ ID NO: 26125 - DNA, 232 bp, Homo sapiens
  source 1..232: mol_type = other DNA
ctgtgatggggacagctgtggcctggcctagcccagtccctgcccccagatctgagttccagggacaggaggtcatgggcacgtgtgttgggggccatgttcctttccccccaagtctagcctttgtctttgcagctgccaaacgtgagcctcctggccagggagagacccctcactggtcccctccccagctgggaggaggaggagcaggaggggtcagggggctccggag

SEQ ID NO: 26126 - DNA, 325 bp, Homo sapiens
  source 1..325: mol_type = other DNA
catggcctcggtgcctgtgggcctggtgtccataggcatcatggcctcggtgtccatgcctgaggatatgatggtgatgctcactggacacaacttcatcctctgtgcccacgggccgtgggagtaggtgcctgaatcctcggagaggcccatcccctctgagctgctgggtcatggccggggggaggagcaggctggccaccccagcccagaggacagaagcgtgcagccatggcctatggtggcccatggggacggacaggcagcactggctccagctgcctctgcggcaatgctgaggctgtctccggagccccctgacccc

SEQ ID NO: 26127 - DNA, 36 bp, Homo sapiens
  source 1..36: mol_type = other DNA
cagacctcgccccgccccaggctaggctggaaagtg

SEQ ID NO: 26128 - DNA, 341 bp, Homo sapiens
  source 1..341: mol_type = other DNA
ccaaaatttcttttggagtagaaattatagttattttaaataaaaatgttattttgacacataatgaatttttaaacaatgactattttagaaatttattttaatattgatagatacaactcacataaacataatataaatgtaactcataaattattggagtccttaataattcttaagagaccggaaagtaaagtaggcttctgagtctcttaagctagtagttctcccacttcctaccctcttcttccttacatgaagtggaagcaaagtgcatgtgagaaaggccttgttgtgcacacgtgcgtgcggcgcggcggcgcatgcgcagagaatcggcg

SEQ ID NO: 26129 - DNA, 360 bp, Homo sapiens
  source 1..360: mol_type = other DNA
ggctcacgcctgtaatcccttgggaccaacagaccagcctccctatctctgtttttttttaattaaatataaaaaatacaacactcctgtaatcccagctactcaggagcccaggctacagtgagctgtctccagcctgggtgtgaggtcagctgctgtccagggtcagccctgaggtccccatgcccagtccagtagatcaggggtccctttagatcccccagcgcctgagacatggagacctgggagggactgccccatgagtccttggtgcccacaaattccaaggcccctcaggtaccagagcatgtgtcccagtggagcagggggagtgggtggagccccacccctggaacttcc

SEQ ID NO: 26130 - DNA, 450 bp, Homo sapiens
  source 1..450: mol_type = other DNA
agtcttttcttgatatatatatgtatatgtatatatcgtataggtatatgtatatacatatacacatatacacatatatgtataagtatatgtatatacatatacacatatacacatatgtatatgtatatgtatttatatgtatatacaaatatatatatatacacacacacatatatgaaggacatacagcaggttcatctcattgtacaaatgtaagtttctcaaaaaattttttaggccatttgatattgtctcacagtcactaataagttcactgatttattaaaatctgccagtaatcttcagtgaaattttcatttcaggtatctctagaagttctatttgatgtttaaaatatatcatggctaggcatctgtaatcccatggtagctggatcacatgagatcaatcagtgtgggcaacagagtgagactctgtctcaaaaga

SEQ ID NO: 26131 - DNA, 358 bp, Homo sapiens
  source 1..358: mol_type = other DNA
gaggcataggagatgatatctggctggagtgcagtgatgtgatctcggctcactgcaaccagtagctgcggcccctagggtcgacacatgaggacatgtgttcaacccagtcctaaatatgagcgtttagggttatatttcattattatttagggtcatacttcattattattttcctattattaattatgacatccatcaaggggcttcccctctctaggtttgtgggggcatctgaccagccacaagaagcctccggtgagtgggagcctgtagcctgcctgctctccctgagacaagggagaccccaggaagttgcttgggttgggggaggccctcccacctgccccagcccccc

SEQ ID NO: 26132 - DNA, 233 bp, Homo sapiens
  source 1..233: mol_type = other DNA
cagggaggttgacctcagaggcctaagcaactggggccatcccccccattagaggggcccccaaaacttggtatcacaaagacattttttttttttttaatataacgagatatttataagttgtgttctgacagaggataaagctattttaccaaaaagccccaggtcccgtgggcacgcagccacgtgggtccccaggggaaagggaagtgcccagcgcacgtgacgggggc

SEQ ID NO: 26133 - DNA, 372 bp, Homo sapiens
  source 1..372: mol_type = other DNA
cgctgtccgccggccgggcccgcccccccctcagcgccccgcccgcccgcggctccccagccccaggccgggaggtaggaaggcgccggcgcgtctcgctcccgtgaccgagcctcagtgaggagtgggaactctggccggagttagggtgcctgcgggcgtgcgcgcaggagcgggtgcgggccaagggtccttcttaccctttcttacccggctccaccgtcctggccacatttggcctacgggggtcctgaacgccgcagcgccactgaagttttccctgttcccggcctccggaaagtggggcggggcccggtgccggaggggagtcgccctggccggcaagcccctcccctgatgggggttgtggga

SEQ ID NO: 26134 - DNA, 123 bp, Homo sapiens
  source 1..123: mol_type = other DNA
ctgggggacaggggcgccctcttcccacaacccccatcaggggaggggcttgccggccagggcgactcccctccggcaccgggccccgccccactttccggaggccgggaacagggaaaactt

SEQ ID NO: 26135 - DNA, 262 bp, Homo sapiens
  source 1..262: mol_type = other DNA
caggtggctcatttgtcagcctttaaatttagcaaaacatccccatctgagcttttgttggcaaggtcttccaccagggtatcctccgtgggaacttttccttggtgaattgggaattcattggccttccaaagccatggcttggtatccttccaggatatcttccatgtgaacacttgcctgtcagatggctacctgccagggtgcacatgaggatgacacctgattcgccatggacagtggagtctcctgaaacctgagt

SEQ ID NO: 26136 - DNA, 326 bp, Homo sapiens
  source 1..326: mol_type = other DNA
ctcatctacaggcgctagtggactggagacggctggcggctgtcccgggacggggaatggtgcctgagggaagatggcttagggcccggtcccttaagggtccggacctgaggtcctcagggtcggtccagtgcaggggcgtggcccagtgcaggggcgtggctttcagccaaggggcgtggccattgcgattgggcgggccgccaggacttccaggacttggtctccaggaccaagggcgtggtcatggagtagaggcccgggctcctggtggctacggctcgcggagcgcaaccaacgctctagaccagacctgggctcgagac

SEQ ID NO: 26137 - DNA, 270 bp, Homo sapiens
  source 1..270: mol_type = other DNA
cgaccctgaggacctcaggtccggacccttaagggaccgggccctaagccatcttccctcaggcaccattccccgtcccgggacagccgccagccgtctccagtccactagcgcctgtagatgagagggcttaacagtaaagactctttgtatgccgggattccaggcgcctagccccgtccaggagtcccagcccccagacccaggagtcccagcccccagcctcgacttggagtcccgctgtccgccggccgggcccgcccccccctc

SEQ ID NO: 26138 - DNA, 364 bp, Homo sapiens
  source 1..364: mol_type = other DNA
aaaaagacaatattatgaactttatgcaaattatttgaaattttagataaaatggaaaaattccttgaacagaaataaaatagaacatctgaatagttgtatttttataaaagaaatagaatttgtaatttaaagtctttccacaaagatagccttgttaacaaaccggcctcccagctactcactgcactccagcctgggggacggacaaggagtctctcagttcaattcccccttccggcgggcgcccgccagcgcgcatgcgtgacacgcgtcggccgccggtttgcacctgcgtcttaagaggagtccgggcggggaggggcggggctcagacgctgcgcacgcgcactcgcgacccctc

SEQ ID NO: 26139 - DNA, 167 bp, Homo sapiens
  source 1..167: mol_type = other DNA
tacaggcatgagccacagcacccggctgaggcccctcttaagagtcagtgtggactgggtgtgctcgcctgtaatcccaacacatcccagctactcggccattgcactccacacacacacaaaaagagtcagtgtgaggaggactgccttagggcagctcaggagcc

SEQ ID NO: 26140 - DNA, 93 bp, Homo sapiens
  source 1..93: mol_type = other DNA
tgaatttccctgagttcagaacccacagggggaggggcctggtggggccggggcggggcctcccgcgccccgcccccggcgctgagtcctgtg

SEQ ID NO: 26141 - DNA, 254 bp, Homo sapiens
  source 1..254: mol_type = other DNA
tcgcgccactgcactccagctccctctgtcgcccagggctggagtgcagtggtcaaatatattgactagaggtctagatctagatctagacctggcgggtctagatctggacgtattaggattaaaaagggtaccttttagaaggtttggaaaatgcaaccttcactgcaaagtaagggggcctgggactaccggtaggagccacagcgcccagtactcggaagtgtggcatactccagtcctgtgtttaccga

SEQ ID NO: 26142 - DNA, 222 bp, Homo sapiens
  source 1..222: mol_type = other DNA
aaaaggtaccctttttaatcctaatacgtccagatctagacccgccaggtctagatctagatctagacctctagtcaatatatttgaccactgcactccagccctgggcgacagagggagctggagtgcagtggcgcgatctcggctcactggagtagctgagattacaggcgcgcagctcggctaaccaaggtgatccgcccgctccccgtgggggacgta

SEQ ID NO: 26143 - DNA, 356 bp, Homo sapiens
  source 1..356: mol_type = other DNA
acccccaggggatcatgggaccctcacgaggacttcaggggttcctgaatcatagtaattacaggaagtcctgatgtatcccacattagctgagagtggtggcgcgcgtctctggtcccagttacttggggcgccagtgcacttcagtttgggcgacagagtgagaccctggctcaagttccgatgaggtcacatgaaccccacgagtattgaggggtcctatgggatcacgggggctccatggaagttctccctcagggtgctctggaggcccatggaagccataggagcctcacaggaatcctaaggggtctggtgggtggcgtcaggttctgaggggaccctgaggaccgcag

SEQ ID NO: 26144 - DNA, 568 bp, Homo sapiens
  source 1..568: mol_type = other DNA
gactcctgggtctgagggctgggcctggactcctgggtctggggcccggattcctgggtctgagggaggaggggctggggcccggattcctgggtctggggtccagactcctgggtctgagaggaggggctggcggcctggactcctgggtctgagggaggagaggctgggggtccagactcctgggtctgagggggctgggggcctggactcctgggtctgagggagcctggactcctgctcctgggggcctggactcctgggtctgagggaagaggctgggggtccagactcctgggtctgagggggctgggggcctggactcctgggtctgagggagcctggactcctgactcctgggtcgggtccagactcctgggtctgaggctgggggcctggactcctgggtctgagggaagaggctgggggtccagactcctgggtctgagggggctgggggcctggactcctgggtctgagggaggaggggctggggtcctgcagtcctcggtctcagcaggaagggaccagaagtcgacttctagcccccagcctccccatgtgccca

SEQ ID NO: 26145 - DNA, 255 bp, Homo sapiens
  source 1..255: mol_type = other DNA
gagtctcgctctgtcgcccaggctggagtgcagtggcgcaatctcggctcctgccccagccttccgagtggctgggactacaggtgcccacgatggtctcgatctcctgacctcgtgatccgcccaccttggcgtgctgggatcatatttatttttaacaaaagaaaatagaccagatcgcaccactgcactctagccagggcgacagagtgagtgcggtttgggccaacaccaagtgttgcgggcggggctccc

SEQ ID NO: 26146 - DNA, 355 bp, Homo sapiens
  source 1..355: mol_type = other DNA
gagacagagtctcactctgtcgcccaggctggaatacagtggcacgatcttggctcactagtgattggccaggctggtctcccaaccaatttttactttttaaatggagacggggtctcgcaacttgttgacaagagagggagaggaaattccctaaccactgggtccagtgcttttccctaccatgaatgggaggagctgggcattgtagctgcagagcctgggtccagccttcatcgcggaggaagcaggtgctcagcaagcgagcaggggctgcccgcgggcctgggaccaggaggccgagggggcaggcccagagctggggctgcgagtggcgcggaccaaggccctgtgg

SEQ ID NO: 26147 - DNA, 292 bp, Homo sapiens
  source 1..292: mol_type = other DNA
ggccaggctggtctcccaaccaatttttactttttaaatggagacggggtctcgcaacttgttgacaagagagggagaggaaattccctaaccactgggtccagtgcttttccctaccatgaatgggaggagctgggcattgtagctgcagagcctgggtccagccttcatcgcggaggaagcaggtgctcagcaagcgagcaggggctgcccgcgggcctgggaccaggaggccgagggggcaggcccagagctggggctgcgagtggcgcggaccaaggccctgtgggaa

SEQ ID NO: 26148 - DNA, 432 bp, Homo sapiens
  source 1..432: mol_type = other DNA
agaagtgacacctgtcacctccaccctcatgtgactggccaaagtgagtgtggccatgtccgagttccccaggatgggacctcgaatcctcctgctgggtctgccaccctgtaatccggctgatcacctgaggtcaggagcgcacctgcaattccagctacttgggagcctgaggcacaagaattgcttaagccactgcactccagcgtttggagttggagaagcgccaagctatcctgagtcctgtgtgccaagccttggcggggcaaagttggggcccggtgcgagttgccccagctcaccatgcactgggcgtgccacccagggagtcagccccactgcagcccccgctgcggggcgtccggagaacgcgccatctgcggcgtgagcggccgcctctcaccaccagggggcgcgctccgcctgggccca

SEQ ID NO: 26149 - DNA, 438 bp, Homo sapiens
  source 1..438: mol_type = other DNA
cacctgcaattccagctacttgggagcctgaggcacaagaattgcttaagccactgcactccagcgtttggagttggagaagcgccaagctatcctgagtcctgtgtgccaagccttggcggggcaaagttggggcccggtgcgagttgccccagctcaccatgcactgggcgtgccacccagggagtcagccccactgcagcccccgctgcggggcgtccggagaacgcgccatctgcggcgtgagcggccgcctctcaccaccagggggcgcgctccgcctgggcccattccacacccaactggggcaagcctggtgcgtgaggagacttggactctaggtccccaaggggcggagccagggtccccactcctggggcagggggagcagagggtggggggctgggttcccgggtccctaacctggggagggttctg

SEQ ID NO: 26150 - DNA, 351 bp, Homo sapiens
  source 1..351: mol_type = other DNA
tttctactaaaaaatataaataaataaataaataaataaatagtcccacactttgggaggccgaggcggggcgcctgtagtcccaactaccgtgggcagatcacctgtggtggtgggcacctatagtcccaacggaggcagaggttgcatttcaccactccagcctgagactctatctcaaaaaaaaattaattaattaaataaataaactctgagagccagagctcactgggccctgttgctgggcatcgccagcagggaagggcctgtggggggatgacgtggtggtgacgtctccctcccctgctcctcccgcctcctgcaggagacctccgagcagctggtggcgct

SEQ ID NO: 26151 - DNA, 265 bp, Homo sapiens
  source 1..265: mol_type = other DNA
ccaggctggagtgcaggggtgcccagcagctgggactacaggcgcggatggtgatcaggctggagtgcagtggcggccttccgagtacctgggattacagatgcgctggtcttgaaccagcctattcactcatttaatttgtgacagtctgatgtacaatgattatcctatcacacagccagtggcagccaggcctcccccatggagtccccggcccctggaggccacagccccgacagctgctgcccgtgggcctcctgctgct

SEQ ID NO: 26152 - DNA, 500 bp, Homo sapiens
  source 1..500: mol_type = other DNA
cgctcagtggattggtgcagccaggcaactagaagcctctgttttacagatggataaactgaggcccagataagtttcggctccggggctcacgccggtaatcccagcacttggccacaacaaaatatatatatatatatatattagccaggcatggtggcgcgcccctgtagtccaagttactcgagaggctggtgagccatgatcgccccacagcactctggtgtggacaacacagcgctgagtgcggaaaggcgggcctggcgggtctggtctccccatgcgggccaccagaggccctgcagccttcagtcgcttgaaggggtaatggcgctgccgccgaggctggacggccgtgccccagcagcaccgcctccgcgccccacgtgatctctcgccgggcacagcgctgaccgcggaggtccaaccggaagaatgtccggattggacattcggaagagggcccgccttccctggggaatctctgcgcacgcgcagaa

SEQ ID NO: 26153 - DNA, 240 bp, Homo sapiens
  source 1..240: mol_type = other DNA
gcccaggctgtctgtcggccaggctggagtgccatggcgcgatctcagctcactgcagctgggaaggctggtgttgaacccctgacctcaggtgacggggagagtaactttcactgcacctctaagatggcagccgccaagactctcgcgagacaccgtctgcccgctggtttagtgcagcctgtcaatcagagcagctctcgaggccccgcccaaggccgtgaaggaaacccggacgct

SEQ ID NO: 26154 - DNA, 218 bp, Homo sapiens
  source 1..218: mol_type = other DNA
tagctccttagtgagccatgatcgctccacgaaagacttcatattatatgattcaatttctttgaaatgtgcagaatgacacagttgcacagcactgtaaatgtgttaaatgacagtaagggtaaatattttgaatattttaccacaatgagtctggagtgcagtggtgcaatctcggcccgagtagctgggacgccaggctggtctcgaagctggga

SEQ ID NO: 26155 - DNA, 334 bp, Homo sapiens
  source 1..334: mol_type = other DNA
cacctgcaggaattttttaagagacctccaagttgtggactccggaggcatcggctgggcctagggcctggggttcttggagtcagggagcagcagcctcccacaaactggggtctccagtcacgggagccaggagccggccagggccgcagaccctggggggccgggggggcctggactcctgggtccgagggaggaggggttgggggcccggactcctgggtccgagggtagagcggttgggggcccggactcctgggtccgagggtagagcggttgggggcccggactcctgggtccgagggaagagggcctcggggccgggactcttaat

SEQ ID NO: 26156 - DNA, 317 bp, Homo sapiens
  source 1..317: mol_type = other DNA
gaggtcatgtatttttaattcataacttttacaaatatttactggatgactgccatgccaggcatgcccgcagtgttggaacgtacacctctttctaagggaaagggaaaaatacatttcccgtgaagagtgccgcgacgactgccaggagttgtagttctccccggccgcgtcactttccccgggcaggccgcggtggacgtggcgaggagtgcccgcggcaccccgtgcactcattggccccgccccgtgagacgctcgtgcgagctcattgggcggggggcggggctctgcgctgccagaggcggggcctgact

SEQ ID NO: 26157 - DNA, 438 bp, Homo sapiens
  source 1..438: mol_type = other DNA
acacctggtctgaaaccactttaaaagggttaattttatggtatgtgaattgtgtctcaataaagtcatggttttgtatgtgtttgaaaacttacagaataaaaaaagctttgctttttgaattttacctgcagtgggagtggaggtagctcttcccctagacacaggatccagtcgctagtggactggcaggcagcgattgggtcaagccttagctaagtgtcaagccttagctaagtgcccagccttgagccaatcactgggctggtccacgccttggcctcagtcagagcacaatagtggcccccttggttgaagtagtggctagatacctccaaacaaagagttttgttgttaaaggtgctattttcacatataaatggaaggaggacttcctggaggaggcctggcgaccacatgccctccgggggcagatca

SEQ ID NO: 26158 - DNA, 445 bp, Homo sapiens
  source 1..445: mol_type = other DNA
ggcggggagccaggatgcctgggtccccaagccaggctctcagcggataaggaggaggggcgccccactcccggtaaccaggcctgatccccgtttctggcaggtgggcggaacttgccattacctgccctgggcgggactgacttaaaggccagagctccatgaggaagccaaggtgtcgaataccatgggatacctgggggattagattcgactccgagctagaaaaattaatatctaggtctctaggtatctagaaactacagctgggcagtgccgcagtgttttaatctccctgggaaatgcctcgtacatagtaagcgttccccatattccagtttcaatatccggaactttcgattaggcacttccgcaactaggggcagctctacttccggtgccttctgctgggcggaagtgggcggagcggagggggaaaatagtg

SEQ ID NO: 26159 - DNA, 531 bp, Homo sapiens
  source 1..531: mol_type = other DNA
agccagtgccctcgctcggatccagaatcctgggtccccagcctctccaattcctggacctaagagtctacgaaggaacctgtctactaaggacccaggagtctgggccctctgcttccttctccttcaagacccagaaatcctggccccaggctcttcatgacccaggcatccctacttgggcgagctggctcttccgcttggctgggacagcgggaaccggaagcctgggtcccttagcgggcggagactctagcttctaacccagacgccggggtcgaaagcttggctaggatcccaggagggaggtggagctactcctcaaaacctgctgcttcctcggagcgccctatatacggccgcgcgcgcgagtcgacgagctccgcctctaaggcctcggagacgatgccccaagcagcagtgtcacaggggtcctttccacagaccgccctcccgctgagagcgcgtggcgccgctcagggcaaagcacaggtctctcattagtagcccgcccccccgggtcccgcccgg

SEQ ID NO: 26160 - DNA, 207 bp, Homo sapiens
  source 1..207: mol_type = other DNA
tcctgtcacccaggctggaatgcaatggtgcactgagtagctgggattacaggtgggcaccactggtcttgaactcctgacctcaggtgatccgtcctccttcaaaagcctttgaaacctccgccttggccttgcaaagtagtctaagccaggcttccaagtccaacttgttaggaacctcagatttggggctccaggcctcaccgg

SEQ ID NO: 26161 - DNA, 452 bp, Homo sapiens
  source 1..452: mol_type = other DNA
tctgggggcctagactcttgagtcctcaggtcctggacttctgagtcttagagaaaaaggaactggagccccagacccttaggtctccccttaaagcatcgggaactacaggtttcaggcccccgcgcttcttcgccgcgcagcctgctgtgaggtgtaggaccctggacccttggacagagaagcgggactggggtgcccaccactggatcccggccctggtggctgcgcactgggccgggtcgataaccggcccagcgtacggcgggaacagcccagcgggccgtcccatcggcttttgggtcttggttttatttcaagaagtcgatcaaaaaaagccccagcgctctagagctcagctgagggtgcgcagcctcgagtttgagagctacccggagctccaagacaggggtgggttccagctgcccgcacgccccgaccttccatcgtag

SEQ ID NO: 26162 - DNA, 329 bp, Homo sapiens
  source 1..329: mol_type = other DNA
gcccctgggggagaagggccactcctcttacctaggggcttggggaccaggacttgtgagtcccaatctgggggcctagactcttgagtcctcaggtcctggacttctgagtcttagagaaaaaggaactggagccccagacccttaggtctccccttaaagcatcgggaactacaggtttcaggcccccgcgcttcttcgccgcgcagcctgctgtgaggtgtaggaccctggacccttggacagagaagcgggactggggtgcccaccactggatcccggccctggtggctgcgcactgggccgggtcgataaccggcccagcgtac

SEQ ID NO: 26163 - DNA, 248 bp, Homo sapiens
  source 1..248: mol_type = other DNA
agcgtcggccactgcgcgttacctacgatggaaggtcggggcgtgcgggcagctggaacccacccctgtcttggagctccgggtagctctcaaactcgaggctgcgcaccctcagctgagctctagagcgctggggctttttttgatcgacttcttgaaataaaaccaagacccaaaagccgatgggacggcccgctgggctgttcccgccgtacgctgggccggttatcgacccggcccagtgcgca

SEQ ID NO: 26164 - DNA, 186 bp, Homo sapiens
  source 1..186: mol_type = other DNA
gaactttttctgcaaatcaaggaaagcttcccggaggattttaaaaaacttggaactccccccgggttgggaggatccacggccggccgcttgctttagcgcggggctccccgggaagctttgacgacttgagggggcgggattctggacgccagagttcgccaatggcgggccgtggaccctctg

SEQ ID NO: 26165 - DNA, 405 bp, Homo sapiens
  source 1..405: mol_type = other DNA
cgatgtatgaattttaaaactgttagaagggttcatggtggggtccccaggctctagcccccgggggaggtgaggtgaggggcaggcctcccgggggctgacgtggccacccttgtccgcccgcagtggtgaccgagctcccagtggagaaggtggacatcatcatcagcgagtggatgggcgcctaggccccagcgggacgggtgcagctcgcgcggcgcaatagcccaggtccttaggccccagcaggcctccccgggagaggtgaggagggcaggtgtgcccttgctgcgtttcctctcagagcagctagggagggtctgaggatccccagaacctccaagggccgggagctgactggggtgcccctgggtgccctctggcggccgttggagtagtgttgcc

SEQ ID NO: 26166 - DNA, 382 bp, Homo sapiens
  source 1..382: mol_type = other DNA
ggcggttcgctgtctccaccaaggagccctcggggaaggccagccacgagccccaggacccctacagctatgggcgccgccggtggcgcgaggcggaagcccggctcggttcccaggattccggcctgcagcgagggggctagcgcagtgcccagctcgctgggtgacctcgggcacggctccccgggctgcgactaggttggacctaagttccgtgtttcagtaccttccgtgggtggttttggcgggccgtcctgacccccaaacatccctcctccctccctggcgtgaaagggctgagattccctacaatgcacctggggtgggctgcgacctcccagctgagccttgttcctcgccaggaacccgggttccgaacacc

SEQ ID NO: 26167 - DNA, 369 bp, Homo sapiens
  source 1..369: mol_type = other DNA
gggcagctgcgagatgggcaggaagctggagcccggctcatcgtcgcatacacctcctggtgggtcgacctggacttcaagggccagctgtgcgagctgtcctgctccctaccggatgcgctgaggcccggctctcccgccctgcacgagcccaggggctgagcgtctctccctccctcccgcagaagggggttttaggggcatgtttttatatggttgcatttacgccaataaatcctcacgcaggtactgcagtgccagcctcagcagtggggggaccggccttggcacctgctggtggcggtacccgtgtcctgcctagtaggggatgggggtggcgcccaactgtgcccagccctctgcagctgg

SEQ ID NO: 26168 - DNA, 208 bp, Homo sapiens
  source 1..208: mol_type = other DNA
ggcaggtacctgtagtcccagctactcaccagcctgggtgtcagagcgagagaccaacttggccaacattggccagcgcctgtagtcccagctactggggaggctccatgacagagagagactctgtctcaagagggggataccaccctccccacgcttagtctcagggagtcccaagaatccgtgggccgacccattgttaagttac

SEQ ID NO: 26169 - DNA, 364 bp, Homo sapiens
  source 1..364: mol_type = other DNA
aaagtaagccaagatacggtttacgtttatgagattctcctgacaactcaagtcccgacacgttggctgcagagaccccttctctgcagcagggaattgcaggcgtccgccccacagccgcccaatggagggctgaagtaggacagatctcgccaatccgcgacgcctgcggggcaggtctacccgtgtgtttgacctggccgcgcggagggggcgggcccatgatacgcaatcgaaccccgcccgactgggccaatcgtagcgtcgttgagcggcaggagctcaagccagtgggcggctcagagctccggaccgcgggcggaggggaggggcagggggcggtgccacggcctgccagcccgcc

SEQ ID NO: 26170 - DNA, 609 bp, Homo sapiens
  source 1..609: mol_type = other DNA
cctgtgtaaaataataaaaatattcataagggcattttaaaaagtcagtaaaatgtacatcaatacagaattggtcaaatcaatttgtcacatccataaaatagattataaaaatacattattaagatgaaatagacatactttttcatggcaaaaaagaaagtgtgatattgatcatctttgtgaaaacgtatgaatagtctacgttaaactgtattttaggaaaaaaattggggaagggatttttcacattttacatggtatgctatcatgtataaattcattacagaaatgatattatttttattattctggaaaataaaggatttccttgttttcttttttctaataacaaaaacaaccttttttttagtggttactaactcaaccaccctcgaaggttgtaggggagatgggtgctcggacttcgacgtgccgccatctttgagcagggcacagctgtttacagcctcttggcaacgccacattgtttactactatatacttggttttccgtttagaatgtaaataaagcctacaggatggtggctaggcaacgccttggcgcacctcctcggagaaactagaaagctttgcaaattcaatttg

SEQ ID NO: 26171 - DNA, 449 bp, Homo sapiens
  source 1..449: mol_type = other DNA
ccttggctcccaaagacaagcggccctggtcaggtttctttctattaaaacaaatataaagtggcctacaaaaaatttaaaaattagctggaggtcccagctgctccacaggctgaagagtggctccagtgcgagtagaggctgccgtgagccaagattgaaataaaaattaaaattaaaagataatagtaatgaagtgtttctatttttctatattgttattcatcagtgaaagagtatatttttcaacttggtttatacagtcttttgggaaaaattaatgaagactacgttttctaactttgctgtagtgctaagaaactccatggcagtcattaagaatttttaatccacctggaatgtatttacgttctaatcaggtgttgcttagcaacccgcacgggggggaaaacaactgccctccctaagttgaggacgaccttaaagcg

SEQ ID NO: 26172 - DNA, 398 bp, Homo sapiens
  source 1..398: mol_type = other DNA
atttttaatccacctggaatgtatttacgttctaatcaggtgttgcttagcaacccgcacgggggggaaaacaactgccctccctaagttgaggacgaccttaaagcggggcagcgggcccggcgcggtggctcacgcctgggttgcgggcacctgtaatcccagctactcgggaggctgaggcaggagaatcgcttgggttgtagtgagccgagatcgcgccactgcactccagcctgggcgacagggcgagaggtctcctgcccctccctttgagacaagaggcggacctggacgccccgctcaagctgactgagccgcccctagaagggctaactatgccctttctgagtcttccacgcggtgggggtaaaccgcccgacgcgagcgcgcgcgcg

SEQ ID NO: 26173 - DNA, 486 bp, Homo sapiens
  source 1..486: mol_type = other DNA
ccccagtgggacgtggtctgattcggtcgtcgccgagcacagaactgaacagatttttgttgttgtttttaaagaaaagctaacatttgagtatacaactactagtaagtagtcattccattttcgccagggacggcgggcggagcctgggcgccggggctaatgggcggagcctccagggacagctggccccgcccaggccgcgcggggcccgctgggagttggagtcccttgcccacccgcctggctctgcgggcccagggctccggatgaggtctcccgccgtcccgacccccgcaaggggccagcttgagttgtggctcgcgcgtcttcccaggactcccccgcgccggagaggcccgcaggaccgccgagcccacactccgctcccgcccgggccccgctcccccgcgccgccttggtacgctccggccacgccccctcggacgcgcttggtacgcgccgggctcccccgctcgcctcagt

SEQ ID NO: 26174 - DNA, 387 bp, Homo sapiens
  source 1..387: mol_type = other DNA
cccagctaccaggtgagccgagatcgcgccactgcactccagcaggaacccattttttaaaagaaacgattatccttttccatcagatgggaaaaaaatcttcctccctgggatgaaaattggcgagcaggggcgtggctgctgtgggaggaggccaggccccgccccccacccacgaggggacgagtcatttccgtccgccgaggaaccgaccgccgccggccgggttgcaggcggggcacctcgggcaggacctccctggtcggaagggccgtgagcccaagccgcggtcccgggtgagtacggggcggggccacgcgtcgtcgcctgggaaacgggtcgacccgcggaaggcgaggcgggacttcctgcagcaaattggggctg

SEQ ID NO: 26175 - DNA, 300 bp, Homo sapiens
  source 1..300: mol_type = other DNA
tataaaaggactggagcaactgggcttggtgcctcacgcctataagcccaacatcgtccgaaattaggactagggtgggcggatcacgagatcaggagatcgagaccgtccccagctaccaggtgagccgagatcgcgccactgcactccagcaggaacccattttttaaaagaaacgattatccttttccatcagatgggaaaaaaatcttcctccctgggatgaaaattggcgagcaggggcgtggctgctgtgggaggaggccaggccccgccccccacccacgaggggacgagtca

SEQ ID NO: 26176 - DNA, 288 bp, Homo sapiens
  source 1..288: mol_type = other DNA
agaaacagggttcatcatgttggtcaggatggtcttgaactcccaaagtgctgggattacaggcgtgagccacggcgcctggctttgtgccggagtcttctattataaaaggactggagcaactgggcttggtgcctcacgcctataagcccaacatcgtccgaaattaggactagggtgggcggatcacgagatcaggagatcgagaccgtccccagctaccaggtgagccgagatcgcgccactgcactccagcaggaacccattttttaaaagaaacgattatcc

SEQ ID NO: 26177 - DNA, 454 bp, Homo sapiens
  source 1..454: mol_type = other DNA
gttccctcggccactcagacagtgtgggaccccctatggagcagactggctggatctatgggcgagggaaagtttcttccaccctaggatgagtcagggaccacgttttctgaaggcctcgggcctcagaggctctggaaggccgtgagctggggatggccagaacacctagagcctccagggcctgccctgaggcagctccgggtgctgaaggaaccccctgggccttgtgcaggattctaaattttctagttaaaagagtaaaaaaagcagatgaaattcctttttttttttttttttgccctgcctcggcctcccaaagtgctggggttgcaggcctgagccaccaggcctctgctaggactcatgtggctggcggctcccacagaggccaggtgccatccaggggacgggcgggcactctgagtgggtggcgatgatgtaggccgccaag

SEQ ID NO: 26178 - DNA, 231 bp, Homo sapiens
  source 1..231: mol_type = other DNA
ccatttttcaagggggttaggtggatccggctacggagagtgcgcaggcgcagtgttcgccctctcgccgagggcatggcctaagccggtcagctaaggcctgtcccatctctctgcggggcgcgacagctggaagggctgagcccctttggccgccatcttgatctcgggcggccccgataagcaactgcgcggacgtgacgcaaggcgccgccatgtcttttgagggcg

SEQ ID NO: 26179 - DNA, 440 bp, Homo sapiens
  source 1..440: mol_type = other DNA
cgcctgcatcccgctcggagcgggtccgagccctgctccctcccagtgagagagtctcccccacctgagttggggggaaccagcgagggctggggcccaagcgaggggaccagcctggacgggcccagggaggagccaccctcagggggcggggccgggagggccattgccccgggaccaaggcggggagaatggtccagcccgcgttcggatgagtcgcctgagccgggggggcggggccatgggaggtcgagagccaaggcctgagtgtagccggctcccatagtcgccgccgaagccggagaaaacagttcccctccgggccggacagtggtagcggcccgacccgttctagagaaggagcgggtgaaaccatttttcaagggggttaggtggatccggctacggagagtgcgcaggcgcagtgttcgccctctcgc

SEQ ID NO: 26180 - DNA, 251 bp, Homo sapiens
  source 1..251: mol_type = other DNA
cgtgcccgtagccagcatggccggcccggcgccgtcaccgccctcaaaagacatggcggcgccttgcgtcacgtccgcgcagttgcttatcggggccgcccgagatcaagatggcggccaaaggggctcagcccttccagctgtcgcgccccgcagagagatgggacaggccttagctgaccggcttaggccatgccctcggcgagagggcgaacactgcgcctgcgcactctccgtagccggatccacct

SEQ ID NO: 26181 - DNA, 250 bp, Homo sapiens
  source 1..250: mol_type = other DNA
gggccgcccgagatcaagatggcggccaaggggctcagcccttccagctgtcgcgccccgcagagagatgggacaggccttagctgaccggcttaggccatgccctcggcgagagggcgaacactgcgcctgcgcactctccgtagccggatccacctaacccccttgaaaaatggtttcacccgctccttctctagaacgggtcgggccgctaccactgtccggcccggaggggaactgttttctccgg

SEQ ID NO: 26182 - DNA, 398 bp, Homo sapiens
  source 1..398: mol_type = other DNA
ggtcagccgtccccctctgcccatttcacttgggtggaatctccagcctcctctacaggagcccagtgcaggaggacgtcattgtcctggtaaggagggaggcggggttagaggcgctccccaaaccacattgcaaatttccaaactttcgcctgcatcccgctcggagcgggtccgagccctgctccctcccagtgagagagtctcccccacctgagttggggggaaccagcgagggctggggcccaagcgaggggaccagcctggacgggcccagggaggagccaccctcagggggcggggccgggagggccattgccccgggaccaaggcggggagaatggtccagcccgcgttcggatgagtcgcctgagccgggggggcggggccatgggagg

SEQ ID NO: 26183 - DNA, 241 bp, Homo sapiens
  source 1..241: mol_type = other DNA
gtttctcaaaaagtgagtaagggtttgcccaggacggggtccagccatgggaagttgtcctctggcaccagaggaaatgccatttcccttggggtcagccgtccccctctgcccatttcacttgggtggaatctccagcctcctctacaggagcccagtgcaggaggacgtcattgtcctggtaaggagggaggcggggttagaggcgctccccaaaccacattgcaaatttccaaacttt

SEQ ID NO: 26184 - DNA, 355 bp, Homo sapiens
  source 1..355: mol_type = other DNA
ccctgccctgagcactgagggggatgggtgaagcctgggcgcttccctgagtgcccctgcggccacagcagctggcatttcccaggttccggccacagaagacgtctgtagacgtcatttgacagctgtaggagggcgggctcagagcccacgtcctgaccccgggaccacggctgccagccccactgctacacccatgtaacggagggggaccctgcaggggaaagttggcctggcccagggacctgtagcccctctgtccccgtgggaatcaaggaggcaggggcaaaccgaaggggattccccgttgttggcgcaaaaggaagtgaatagactgattaacttctccaggaaa

SEQ ID NO: 26185 - DNA, 408 bp, Homo sapiens
  source 1..408: mol_type = other DNA
acttcatctcaaaaaaaaaattttaagttctgcattttgcccaaagccatgtgagaaatggtcccaacaggcctcctgggggagtctaggagggatcccgagatcgcagcagcacagcaaccgactgggtgccaccgcgggtgatgtccaggaagaaaatacacagatgtgattaattcatatgaagacaacacatttggtgactaaatttggaatctttaaacagctcttactgctttgctttcccctgtttaggccgacagatcacatgaaccgcagtgatactgcactccagctataatatgtagtcaaaccatgagggaatgatgactttttattcttttttagtaaaaactaatcatcaatacaatttattttttagtaatgagtggcttgcaaagcaaaaac

SEQ ID NO: 26186 - DNA, 287 bp, Homo sapiens
  source 1..287: mol_type = other DNA
tcttgcctgtaggtgaaaacccacaggtatccctgtcccttcctccctcagaggggagctcttccatgtcacagatttgattcccagctccactgcactggatgacagagtgagactctgtctcagaaaaaggaaagcagaccctctccatggctttgggtttttgtttgttttagacagagtctcgctctgtcacccaggctggagtgcagtagtgcgatctctgcctcgagtagctgggagacctcaggtaatccagagtactgggccaatggggttggccatac

SEQ ID NO: 26187 - DNA, 305 bp, Homo sapiens
  source 1..305: mol_type = other DNA
tcccagctactcgggaggctatcgcgccactgcactccagcctgggcgacagagacggagagactgtatgagttgagctctgtgcataaggtgagtctcataaacccaccaggcgagttgatttttcttattttacagatagggaaatgaagtaagagaacttaagttatttgcccgatctaaccctttctggtcccggaccgatcccctgatccccaggaggaggggacccggctgcctcccggttggggccgcgcgagggcggggcgcggaaggatccgggagggccgtgctccgccacccag

SEQ ID NO: 26188 - DNA, 275 bp, Homo sapiens
  source 1..275: mol_type = other DNA
aaaagggacattttcttgttcccaggggaactgccccaggccgcagcccttccctcaactaacggttggttagggcagcaggtgcctggtttggggcacgcggagaacggctacccgaacgccacccgtccacacgcggctctgcgccgagggccaaggcgcatgctacgtcgcccgagcggtccgcatgtgtgggctactgcgcaggacgcgggcttctcccacccggccccgggcccagtgcgcatgcgcagccgcgcgccttcggcccaccg

SEQ ID NO: 26189 - DNA, 301 bp, Homo sapiens
  source 1..301: mol_type = other DNA
tcccaggggaattaccttaggcccctaaaagggacattttcttgttcccaggggaactgccccaggccgcagcccttccctcaactaacggttggttagggcagcaggtgcctggtttggggcacgcggagaacggctacccgaacgccacccgtccacacgcggctctgcgccgagggccaaggcgcatgctacgtcgcccgagcggtccgcatgtgtgggctactgcgcaggacgcgggcttctcccacccggccccgggcccagtgcgcatgcgcagccgcgcgccttcggcccaccg

SEQ ID NO: 26190 - DNA, 218 bp, Homo sapiens
  source 1..218: mol_type = other DNA
tagctgggagcagggccctgtccagctccagccccagggtcggcaggagaggctgcaccagcagctggcacgaatgaagggaatttctttaggtcctaaatcccaggggaattaccttaggcccctaaaagggacattttcttgttcccaggggaactgccccaggccgcagcccttccctcaactaacggttggttagggcagcaggtgcctggttt

SEQ ID NO: 26191 - DNA, 218 bp, Homo sapiens
  source 1..218: mol_type = other DNA
aagcataagccactgcacccggccgagaggtagcagctacgggtcctctggctccgggccttgtaaacctcgatgagcaggtccttgacgtactggatctcgcgctccacgtcgcgccagcccctggcactcgccaggcggtaccgggggctgctgtggcgggggcagaggcggcatccccacttcctcctgcccggcctcgtgcggcagtagatggc

SEQ ID NO: 26192 - DNA, 389 bp, Homo sapiens
  source 1..389: mol_type = other DNA
aggggagagctgatttctcctccaggctgaagttcacccagtggcacctggggtcacaggtctcctgaggcccggggctccagcccccagaggcaaaggaggcagtaaacctaccgtctctggtcccttctttaggataggtgacataatttatagtatagcataacttgtacagacatttgtaaaacatagttatgcttagaaaggagtaacagtaaaggaatttgtttttctttcttgtttttttaaacagtattatcttataactgtccgctaagcagaggaaaagttgttctttttttatgaatgcatatttatttttaaatttctcagggccaggagggcaccaccccaaaccctgctcccatgcagggaagctggagcatggc

SEQ ID NO: 26193 - DNA, 545 bp, Homo sapiens
  source 1..545: mol_type = other DNA
gggctgggctcagggtcccagagctgagggggtcttgaaccccaggcctcggggactgaccttgactcagtgggtcaggatagttccctttacccagagggaagcccctggtctgtctagagccggcggagccagggcctctcagtgccaaactgggggcccaggagtctggagggtccccacacaggagggtccctgagggaacggcaccctcccggtcctggagggccaaagcctgcgcctggtctgtgtcacccacagcagccccccagccaggctgagctggacccggtggggacagaccgtgggcccctcccagccctcagaccccggggtcctggagctctcagcctctccgtgcactgtgagtgggggaaaggggacacctgggtcccaggaaggggcccctgctgagtcctgtcccacagctgctgggcccctcctgctcctgggaggctgagggtctgcactgcagctgctcctcccaggccagcccggccccctctctgcgctggtggcttggggctccttcgaggtcaccccca

SEQ ID NO: 26194 - DNA, 331 bp, Homo sapiens
  source 1..331: mol_type = other DNA
tcccagcactttggcaaggtgtgagctgagatcccaccactgcactgtagcctggtaataataataaaataagtgggattccagttgtcctttcccagtgaagtcatacagaaagcgcttaatgcttgaagaagctcacctgagtaataccataaatcactgtgttcttgtagactcttccagtgtctcatggccccctggagaatgaatgaatgaatgagactctcccacctccgaggctggccagggtggcgcttcccctgtgaaaggagaagttgggaagcgtcactgcccctccaccaggcttcctgctggaggagtttccttccca

SEQ ID NO: 26195 - DNA, 456 bp, Homo sapiens
  source 1..456: mol_type = other DNA
atttatttgacttattcaacaaatgtttagggaacagcgtatagtgttcctcctagaaagccacctcagcgcaggtggggcgattgcctaggcgacgacagagcctccggaggagctgtcgaacttcccacaagttccgcccatctcgccttagccatgcccaacacggagcccaaggtggcctgacgtcacggacgccccggccgagctgcggctagggggtcgggggacgtcccctcgttcgcctcgcttcccctggtggccagcgaaaacttccgctgggcggagagcgctgcgcgcgcatcctgaatctgaggcgcccgcgcaggcgccgctgacttcctgacggcccctgggcttcgcctgcctgggaactccgtttcccagatgcctccgcggcaggagacggaatggggattattccctcatcagacaacccgtcacaacgcgtttcca

SEQ ID NO: 26196 - DNA, 420 bp, Homo sapiens
  source 1..420: mol_type = other DNA
cggttttcataacagactgtgaaagacggttcacaccttcgccgcccaaggcgacgcaccctttgccgaagtaaccccagcctcaagggagcgggagattcaactccccgcacacgcgcctcctcgcagcgacttcctgtgcgcgagaagcttctctgagcggctgcacccaggatcctccgcggcagcgcctcttcagccttagcactgtgggagtttttaccttgttaaagaatcatctaattagcttcttgcctttggaaacgcgttgtgacgggttgtctgatgagggaataatccccattccgtctcctgccgcggaggcatctgggaaacggagttcccaggcaggcgaagcccaggggccgtcaggaagtcagcggcgcctgcgcgggcgcctcagattcaggatgcgcgcgc

SEQ ID NO: 26197 - DNA, 404 bp, Homo sapiens
  source 1..404: mol_type = other DNA
gttccgcccatctcgccttagccatgcccaacacggagcccaaggtggcctgacgtcacggacgccccggccgagctgcggctagggggtcgggggacgtcccctcgttcgcctcgcttcccctggtggccagcgaaaacttccgctgggcggagagcgctgcgcgcgcatcctgaatctgaggcgcccgcgcaggcgccgctgacttcctgacggcccctgggcttcgcctgcctgggaactccgtttcccagatgcctccgcggcaggagacggaatggggattattccctcatcagacaacccgtcacaacgcgtttccaaaggcaagaagctaattagatgattctttaacaaggtaaaaactcccacagtgctaaggctgaagaggcgctgccgcggag

SEQ ID NO: 26198 - DNA, 502 bp, Homo sapiens
  source 1..502: mol_type = other DNA
gcctgtgacacagagtgagactccatctctctctctctctctctctctctctctctctctctctctatatatatatatatatatatatatatatatatatatatataaattatctgggtgaaccccagctactcggttggctttgccgtgacccgggatcgcctcactgcactccagcctgggtgacagagggttgcagttaaccgagatcacaccactgcacgccagcctggataaataaataaaataaaacaatatgtgttgaatgaataaatttaattctagaaccatgcctggcacatagcaggtgctcagcgaacacgtgcctgtaaccctgggcctcctgaccgcgccctcgcctgggaggcggggcgggccgggttctctctgtgacgtcacaaaggccccgccatctcgggcttgggcgcccccggaggctggggctgcctgcagtgcgaccccttggtgctggaggccctgggtcacctgcgctccgccctcc

SEQ ID NO: 26199 - DNA, 336 bp, Homo sapiens
  source 1..336: mol_type = other DNA
ttgaggctgcagtgaactgtgattgcattttacctcataggtatacacatataaattatatatgtatctatattatgtaaaactgtgtgcaaatatgagaccagcctggctagtcccagctactcggcagaagaatctcttgtggtgagccgagattgcagcactgcactccagcctgggcgacaaaaattgtgcaaatatacacaaaaattataaatttgtacatatatttaataagcctgactttaaaaagacaaccaaggaaaggacccttcccaggctcagattcaggacaggggtggcccctgggccaggagcccggagtgcagcccagcc

SEQ ID NO: 26200 - DNA, 547 bp, Homo sapiens
  source 1..547: mol_type = other DNA
gcccaggctggtcttgacctcctgggctcaagaccctggcctcccaaagtgttgggattacaggtgtgagtcctgagcctcagttttcccatctgtaaattgtaaatggggaatcattagcttggggttacctcatctagaagatgaagatcttaatagcaggcgcttatgataaacgatcattcacacctccccggtgggtgagagcctgggattcgacaaaagtgaattctgtctcctgtctctcctgcccgccgggtcccgggggacccaggcattccggccttcggtcggcccccccacgccggcccttacaaaggcccccatgcgcacaaagcggcccattcaccctggccccttgggcctcccgcccccggccgccccccgcgcctcgctattggtggcgccccgtgcccccgaccgcgccgcctagctccgcgcccgggccgcgttttggcggctcccgtcccccaggggcggggccgtagcttgccgcagcgggcgccgattggcctctgctgggggcggggctgtcctggcggacacg

SEQ ID NO: 26201 - DNA, 467 bp, Homo sapiens
  source 1..467: mol_type = other DNA
ccaggattacgtcatccaggtaggtgtccgtcataatgacgccacagtgatgtaatcccagcacggactcccagggaaatggtggttcctgcggcctgggtgaccgtcttcgaccgcagcggcgcacgagtgggactggcgcgcgctcgccctcgcggagcggacctgggaaggcgcgagaccgcgcaggcgcagtaccgcgggtgccgcccaggtgatgcgcatgcgcaccgggtagcagagctagcgctactcagtaatttccattgaacgaacctgcctaggttgcttcttttcagagcgtactttttgaagagaaagcttagagggaggcgaagggtatcaccccttttctccacggcgcacccttgtgatgggccttgtactacgagtcccatgaaggccctcaaaggctcctggctccgtggagcatcacggtcgttgtagtccacgccgtggtcacgccc

SEQ ID NO: 26202 - DNA, 465 bp, Homo sapiens
  source 1..465: mol_type = other DNA
gccggaaagaagaactcgtcggcgcccgggtcgtagtcgaagcgtgccgccgcctcgggctccgtcaggccggccagccgcgtccccggcagggtgcgcagcgtcgagcggtacgtctcatggcgcacgccgccgctgtcgccaccgccgccgccgtgccgccccatggccgccgccggcagcccggggcatggctcggcgcgccggtccccgggcccgcggggtgccggggggcccgccggggacgcggcggggccgggctgcgcaggctgctgctgctgcggcggcagcggtggcggcggcggggactcgggcggctgcggcggtggcgccggctgctgcttgctggccccctggcgcccgcggaaggacgagacgcatctaacgcgacccagctggacgtcggctcggttactactaattgtgttcgctggcctggaggggcggggccaccatgagagaggc

SEQ ID NO: 26203 - DNA, 264 bp, Homo sapiens
  source 1..264: mol_type = other DNA
atatgtgacctttccgacagagaatttaaaatagctgttttgaggaaactcaaagaatccatcacataaatttaacaaagagattgaaaggtcgttctagaccaatcccagcctgcctgaaatgcgggcccacttcatatgtgagggggttaataagtctcagaaaagttatgtgaaagttgggaggtggtgacggtggaggagaccccaccaccactgccacccagtgaggagcaccaggagcacaggatgctacttctacct

SEQ ID NO: 26204 - DNA, 358 bp, Homo sapiens
  source 1..358: mol_type = other DNA
tacctacccattcgccagttaatggacaggtgggatacgctgctatgaacattcatgtacaagtttttgcagtgtctcactctgagtggggtggcgtagtcacagctcactgcagccacgacctcctgggctaagtgatcctgccactacaagcatgcgctagcaagcccaggtctcccacctcagcctgccaacgtgctgggatgacaccaacactttggggttgcagtgagccgagatcacagccagcgaacttgaggccttgtggggtctgatgtggcccacagtgcctgagagtcacccaaagggtcccccactcttggacacacttccgggtcgtccttgcagccaggagcaa

SEQ ID NO: 26205 - DNA, 241 bp, Homo sapiens
  source 1..241: mol_type = other DNA
catttttgcaaaattttaacaatgagaaaattctgacatctcatagctgagatcgcggcactgcactccaggaggctggagtgagctgagatcacaccactgcactccagtctggctaaagccacaaagcgcggggctggaggtttgggaactcttctgccaagtcccagtagatctacccggtaaacttccggtgaggggcagcagcttcggctggtcctaagcggaccggaagttccac

SEQ ID NO: 26206 - DNA, 187 bp, Homo sapiens
  source 1..187: mol_type = other DNA
gcccctcttccggacgtgacgcaagggcggggggagacgcaggaggagccccgaacccggggcttctcggcgctccccgcgtagtttccagggcaacaggagtagttcactccgcgagaggccgtccacgagacccccgcgcgcagccatgagccccgccccccgctgttgcttggagaggggcggg

SEQ ID NO: 26207 - DNA, 361 bp, Homo sapiens
  source 1..361: mol_type = other DNA
tacagttaggcacaattctaggctgggcctccaagttgaggttcggagcgaagcgacgaagttcctccaatccttcctgcccctgtgccagccctgaaggagtttacgtatgggcgtcaggtcaccagctggctgctgggcagcgacggggcagcgctccctacacggccccgggcgagaggcgggcggggggacgcggaggatgcgcgcgcaacacccgcgcacgaggtcgtgaaggtagccgcgcggaggggcgtggctgggcggggcctgccctgcagtcgaacaagcggggcgtggccttgcccgcacttgggcaggcgggggcgtggcccgtctctgagcgccgcggctctgggct

SEQ ID NO: 26208 - DNA, 660 bp, Homo sapiens
  source 1..660: mol_type = other DNA
cccgacgcccacgaccgcatggactgcaagggcctggaggccgtgcgcagggacaactgccccctcgtggccaacctcataccggtgtgtggggcctcctccctcagactcagggggctgggccccaaacccctcctccctcagacccaggagtctaggccccagccgacccacgggtccaggcccccagccccctcctcctcagatcccggggtcagggcccccagcccctcagtcaggccctgcctctgccagccttaggaagggcccctctctgccctgagcctcagccctaagagctcatcctggtctccagccctgagacccgtggaggcaccagcctggccctcagtgccttttggtgacgctgtgcggcccgctctcctacagagaccctgagggcgcggtggctcacgcacaggacgtcatctcggacctgctgtgcaaccgcatcgatatctcccagctggtcatcaccaaggagctgaccatgccggcaagcaggcccacgtggagctggccgagaggtcctgcgcggggcgggtggcctggccagaaataaccccctccacgcaggatgaggaagcgggaccccgggagtgcgcccagcctgggcgaccgcgtcccctacgtgatcatcagtgccgccaagggtgtggc

SEQ ID NO: 26209 - DNA, 663 bp, Homo sapiens
  source 1..663: mol_type = other DNA
gtccaggcccccagccccctcctcctcagatcccggggtcagggcccccagcccctcagtcaggccctgcctctgccagccttaggaagggcccctctctgccctgagcctcagccctaagagctcatcctggtctccagccctgagacccgtggaggcaccagcctggccctcagtgccttttggtgacgctgtgcggcccgctctcctacagagaccctgagggcgcggtggctcacgcacaggacgtcatctcggacctgctgtgcaaccgcatcgatatctcccagctggtcatcaccaaggagctgaccatgccggcaagcaggcccacgtggagctggccgagaggtcctgcgcggggcgggtggcctggccagaaataaccccctccacgcaggatgaggaagcgggaccccgggagtgcgcccagcctgggcgaccgcgtcccctacgtgatcatcagtgccgccaagggtgtggccgcctacatgaagtcggaggtcaggcccacctggctgcctgctccttccgagatgggcgggcctgcgggaagggtggggcctcccgtgccctgtggggccctgagaaccgccccccatggcagcctgggtgtggcctcggccccctctggcttgcttccctatggaaggggccccagtc

SEQ ID NO: 26210 - DNA, 358 bp, Homo sapiens
  source 1..358: mol_type = other DNA
ggccttggctgggaccctcctgaggcccgatgtgggcgtctctggccctgaaggaagggcccccaggtgtctggccccggcccagccctccctggtgatgaccctggggaccctggtggctgccccgccctccaggtgctgacctgtttcctccaggccctggggcagccccaggcgcaccggggcttccactcctcagcccggccaaggggacccccccatcacgatgtttccacgtcggggatcccccggggagagtctggggcccctcccctgaccccctccctgaggggatttttgaggagggccgagcttgtggccagcgggcaccctcctccccccggcaggggctgggcca

SEQ ID NO: 26211 - DNA, 388 bp, Homo sapiens
  source 1..388: mol_type = other DNA
agtcccaggtactcgggaggctgaggcagcagaattgcgccattgcactccagcctgggccgctaggagcccaggagtcaggtgccctggcctctcccgggaccctgtcccgctttgggctgagaggctccaggagctggagagatagccaggccaatgcaactgcctccagatctgttcgctaagcggcgctgtcacagattcaaatatggaatattacgtgctggccgcagggctgacagcttcgggcagggggagtggcttgcccccccccccccccgtggtgaggggcgcagagccaggtgtatgtaacagccacttccctcaccccacttttcagatccaggagatggaggccgggggaaggcggggccttagggacccctca

SEQ ID NO: 26212 - DNA, 575 bp, Homo sapiens
  source 1..575: mol_type = other DNA
agtcccaggtactcgggaggctgaggcagcagaattgcgccattgcactccagcctgggccgctaggagcccaggagtcaggtgccctggcctctcccgggaccctgtcccgctttgggctgagaggctccaggagctggagagatagccaggccaatgcaactgcctccagatctgttcgctaagcggcgctgtcacagattcaaatatggaatattacgtgctggccgcagggctgacagcttcgggcagggggagtggcttgcccccccccccccccgtggtgaggggcgcagagccaggtgtatgtaacagccacttccctcaccccacttttcagatccaggagatggaggccgggggaaggcggggccttagggacccctcacctaacgcgtgcccccgaccccaccgcagggactcgcaagaagctgcgcctgtaccagttcctgctggggctactgacgtgggtggagccaggcgccggcgtcttccagttctaactcctggcgcgccgctggggccagcagaaggggaaccgcaagcgcatgacctaccagaagctggcgcgcgcc

SEQ ID NO: 26213 - DNA, 452 bp, Homo sapiens
  source 1..452: mol_type = other DNA
ctgcgttactagggtccccctgccgggaagggcgccaacgtccgggcagccctccagggccttcccagccggggacgcccaccccctacccgcgtccggtgcctgccgtgcccgctccgggaagagtcgcggggagcggtcccaggaggggcggcggccagtccggggtcccagatggccggggccccagctctttgggtttgcccacgcccggggcgcgaaactccggagtcccagagccgcggcgccctccccggaggcgcagggacctcctccccccgccgcccaggctagggaacccaagaatctgggaccccagttgcttctgctcccagactcaggggtccaagcacccaggtgtccgagccccagcccctcctccctggggacctggctctcagccatctgatgtctcccggagccttctgggagtctcaggactcattaaaagg

SEQ ID NO: 26214 - DNA, 471 bp, Homo sapiens
  source 1..471: mol_type = other DNA
gatatcttgaaattaaaggaatcccttggagccgtctgggacggcccgtgggagaggctgcaaccaggtggggtcgatcctgggaggctgtgcctggcttcccaactgagagggcccggcacagccccgcggagaggacggggtatcagatgcccccgaattgccggccccagctccacccagggccggcttagggccgcgatcccgcctcattgcaatgtccccgtccgacgggagcggacggaggagcactgtgacgtcatgatgcggagcgggctttatgacgtcacacaagagcgggctcctgatttgtgatgacgtccctggagggggcggctcctggagatcaggccaaaggggcggccccatcctgctgacgtcaggccccaggtgcggacgggtgccagtgcgcaggtgccggggcccagcgcaggcgcacgggcgtcaggatgcggcctgttcctcccggcg

SEQ ID NO: 26215 - DNA, 177 bp, Homo sapiens
  source 1..177: mol_type = other DNA
aagttaatgtagcgtgatgtagttggaattacaggcacctgccaccacacaggctggtcttgaactcctgacttcaagtggtccgcccgcctagcccaggctggtcttgaactcctggcctagagcaatcctcccgcctcggcctccctaagcgttgggatgacagatgagctcgga

SEQ ID NO: 26216 - DNA, 501 bp, Homo sapiens
  source 1..501: mol_type = other DNA
ccggctccgccaccgtcacggccttctggcagagcctcctgggtgcggccaggcccctctcccccggccctgggctcctgtgttctgcagagcttgggggtcccgggctctcaccgcctctgatcgagactctctccagcctgctgccagctcccctccaggccggggatccatctctgctgagaagccgacgtcacgctgcgtctgcgcaccgcgcatgacgccatcgccgggggcgagcacccatgagagcgcggcgccaggaagctatcgagcacctactaagtttccaaagaagggcctctgaggcgcacttccgggacctgccgcggagcccgacggaagttgtagtgcggcatttcctaggcccgacggccgacttcagggccacgcggcccgggcgttccgtgtggagcaggagtcccgcggggccccacgggagtcgtagtccggcgcgcggggatcaccgggagctgtagtccgtcccgcctgcccagtcag

SEQ ID NO: 26217 - DNA, 447 bp, Homo sapiens
  source 1..447: mol_type = other DNA
cagcctcacggacatgcacgtggtggatgtagagctgagcggaccccggggccccacgggccgaagctttgctgtgagagaaccctgccgagccaggcgcggtcaccggctccgccaccgtcacggccttctggcagagcctcctgggtgcggccaggcccctctcccccggccctgggctcctgtgttctgcagagcttgggggtcccgggctctcaccgcctctgatcgagactctctccagcctgctgccagctcccctccaggccggggatccatctctgctgagaagccgacgtcacgctgcgtctgcgcaccgcgcatgacgccatcgccgggggcgagcacccatgagagcgcggcgccaggaagctatcgagcacctactaagtttccaaagaagggcctctgaggcgcacttccgggacctgccgcggagcccgacgg

SEQ ID NO: 26218 - DNA, 491 bp, Homo sapiens
  source 1..491: mol_type = other DNA
ctctccactgcagaccccctgccaagcgggaggctgggcctgcggcctctggggcacagcagcggtgggcctggggcggcaggggcaccacagtgccactccagagccctgggagggcagggagcaaaccctgagcgggcctggctttgcaggccctggagggctggggctggccagggctgccatctcacgctgctgggggaggcagagggagggacggagccatgcagggccttccagcttcggggacacagccctgaggacacacaggcctgcgcccagcccccttctcccctcgtagtggcccaggctgtaccccgtacacggccccgagatggcgggaggccccccacttccgtgaggtgcctggcccctgcccgggggctcctggctctggaagccacagcggcagcctttgggtgccacgtcgggcctggttgccatggaaacactgcagcgggtaccaggtggtggctgggggcagggagcct

SEQ ID NO: 26219 - DNA, 400 bp, Homo sapiens
  source 1..400: mol_type = other DNA
aagctcggtcctgcggcagcagctggcatgagtcccatcggggctgtctctgcctggagcacccacagtctcggggcaaaggagggggtgcagctggtggcctctcggcctgtgccgccccccgtcagccatgagtctgactcaagtctctgaagctgctgtgaggcccccacagggcctggacagggtggggaggaggctgggacccacctcccaggtgatcacgcaggtggcaagggagcgaggtcctcgccacctcagtgcagggccaggcgggccaagcttccctctgcctgccccagcctgctgggtgggtctccctgtccctttgttctgggcatggggcagggaggcggcggggctgcctgggtgttggcaagcacccaggccacatgggctc

SEQ ID NO: 26220 - DNA, 115 bp, Homo sapiens
  source 1..115: mol_type = other DNA
tgcctggctccgagcctgccccccgcctgtggagcgcttctcacagacagtctgacagtgaccggaccgggaggtcagggaactccaggaccttgttctctgctggattcgcagc

SEQ ID NO: 26221 - DNA, 437 bp, Homo sapiens
  source 1..437: mol_type = other DNA
gctcaacacaaatttgtaaactttcttaaaacattatgagatttttttgtgattttctttcaaagcacttagcacttcaccacttataggaaatgacaattgccattaactgctattaatataccagaaactgttactcactacttttgagaaatattcattaagtacctagttggtaccaatgttttgctgggattcaaacccaggtccctgctagtacctctattaccaccggccttcagagcggctcaggttggagggcctgaagtcctgggttcctgggaagaggggcctggggtccccggacttctacctctgtgagatagcggggcggagaactgggcccccggaccctggagaagcagcacgtcgtgatcctagatctctgggtccccagtgtggaaacccactgggtctcgacagtggcgaggggagga

SEQ ID NO: 26222 - DNA, 226 bp, Homo sapiens
  source 1..226: mol_type = other DNA
ccgggcggcgcccagcaggaggtcgtcgtggcgcacgatctggtgcgcaagcccgcggggactgagcccggagcgcagcaagcgcgagcgcgtctggagtcgtttacaggccctggtccagcggaccaccctccactggcgactgcaggctgcgctctaccctgctccggggcccgccccgtcgccccgggccccgcccctcccgctcgctccaggccccgccccc

SEQ ID NO: 26223 - DNA, 299 bp, Homo sapiens
  source 1..299: mol_type = other DNA
caacctcttgtggttcccttggggacaccctaggccatccccaaccccaccccccggccctgggatgaggggccaggctggggccaggagggcaggatgcctgtcagtttgtccacctgtctggccgtgcaggccgagggtgtgtccagcctcctcagtgggggtaggctgcccttgaccgcttgaccaccgaatagcgcctgcggcctctgaggggtcccgggctcctagtctgatggccgcccttggcccctgcagccgcctgtgatgctgccgtcccccgtcgccccgtggcccca

SEQ ID NO: 26224 - DNA, 247 bp, Homo sapiens
  source 1..247: mol_type = other DNA
gaatgctcagagctccttgagcacacccccggagctatctggctgctggtctgcaagcagctggagtccccagcatcacccagcccacagcctggcctgcaggaggggcaggaggggccctggagtctcctccattgggagaccctgaggtctgcccctccttaggaatggccaggcagggaagaagggagcagtgctcggtcccagcatcccaccactgccgagatgcaacagaggcagggcctcc

SEQ ID NO: 26225 - DNA, 560 bp, Homo sapiens
  source 1..560: mol_type = other DNA
ctcaaaaataaataaataaataaatatttttaaaaaatcttatgagataaaatctatagcttatttgagacagggtctcactctgtcacccagactggagtatggtggcaccattgctcactgtagcctcaacctcccaggctcaagtgaccagctatttgtttaattaattaattaattaattaatttattggtagagatcaaggcgatctcaaatacctgagctcaagccaaattacagactgcactcagcctttaatttaattgtaattagaagagagttaattttaagtaaaaaattatggacaatagtaagaagctggttctttggaaggagaaatactcttttctctcatgtgtgcacacaggtacacacacacaaaaccaacaataatattcttttacgtttgtgtttgtgtacttttgtgaatgcttcaagaaggcagaagagcacaatgggacacaagttgctttgcctcagtttccaccaatgtaaaatggggataatggcagtagctccctgagagggtccctgtgcttggctccgtgcctggcaccga

SEQ ID NO: 26226 - DNA, 430 bp, Homo sapiens
  source 1..430: mol_type = other DNA
ccaggcgcctcccaaagtgttgggaaaacaggtgtgagccaccggcacctggcctatatttatatatatttaaagagatggggtcgccttgaaactgcacccaaccctatatatatgtgtttgtgtgtgtgtgtgtgtgtgtgtgtgtgtgtgtgtgtgtatacatatacacacacacacatatatttctatctgccacaaataacgcaaatagctacctgagtagcagattgggtagcgatagataggtaaataggtatctcacaaatgtatcatatgtattttattttattctcactcttgcccaggctggagtgcagtggcgtgaccccctgggctcaagtgatcctcccatctggaggaggaaattttgcctgagatatttctacaattcagacaccacatgtggcgggccacaccagggtctgtg

SEQ ID NO: 26227 - DNA, 474 bp, Homo sapiens
  source 1..474: mol_type = other DNA
ttggaagcctatgggtttaccattgaggctgcaggaatctagttcctaattatcttcagagaccacaaaatgtgatgttcaaggtcgctgaatgttgaagtacatgaacctggcaagaagtgggaggctacccctgaaacttcacattcctggatctggaggcactaggaataaattttatgctttggggacctaggtcctgggtctgggagtgcaagaaccagggcattctgaaggccaaggcttgggaactggcagctgagatgctagtatcttgccctaactgctccagagccacaggccctgcctggcttcaaccccagggcgtccagcgtgatccagggcctgcagaacaggtgctggttctccctccccgtctacagctctggggatcggagggggggggggcaattgtccagcccccaggcaacaggggaagggccttggccaacatctgggtgcggcttttaaaag

SEQ ID NO: 26228 - DNA, 398 bp, Homo sapiens
  source 1..398: mol_type = other DNA
gatgaagtgagctgagatcacaccactggactccagcctgctagaaagtgagtttggagtagagaagtttcattttttaattttcaaaataatcatataagtggaaagaatgtataatcctatcaggccttagacagtgggagccccaaaggcctccctcggccccaggagagacccaggggtccaggcaggggggcgctttcccaggacggccccctgtcaatctccacactggccccgcctccagcccagtggctgggacttaatttgggtccggcccttcggcttggcgtctcctcgcttgttcaggaagattctagcggaagcaggacgcctcgggcggagcgcgggctggcgccgaggaccggccttgcgagcggcgcgcactataaaatggc

SEQ ID NO: 26229 - DNA, 150 bp, Homo sapiens
  source 1..150: mol_type = other DNA
cccccatctgtaaaacaggggtcttgaggtcaggagttcaagacgggtgcctgtaatcccagctactcaggagcactcactcagtgccgggcacagaagagggaggagcaattattacccccactttatagttgaggcgctgaggcacag

SEQ ID NO: 26230 - DNA, 387 bp, Homo sapiens
  source 1..387: mol_type = other DNA
ctgggtgacagagtgagactctgtctcaaaaaaaaaaaattttttttttttttttgtagagatatgactgacctgtcgtttaatcttgaggtacataaacgggagggcaggtcagcaggcatctctgttattccacatggatctgtggaccacaagatctttttaagacatctatttcaggagcatgaggaataaaagttctgaatcggggatcgtacccaccccctgttttctccatgagctacagggcctggtgcatccagggtgatctagtaattgcagaacagcaagtgctagctctccctccccttccacagctctgggtgtgggagggggttgtccagcctccagcagcatggggagggccttggtcagcctctgggtgcc

SEQ ID NO: 26231 - DNA, 223 bp, Homo sapiens
  source 1..223: mol_type = other DNA
atccccgctgtacctgtacgttgtacaggcatggagaactgaatgccaacgctatcattctgatatttccaaggctacagggagctgcgatcacgccgctgcactccagcctgggaaacagagtgagactgtctcagaatttttttaaaaaagaatcagtgatcatctcacaccgtgggaatgcctccagactgatctagtatgtgtggaacagcaagtgctg

SEQ ID NO: 26232 - DNA, 261 bp, Homo sapiens
  source 1..261: mol_type = other DNA
actgaatgccaacgctatcattctgatatttccaaggctacagggagctgcgatcacgccgctgcactccagcctgggaaacagagtgagactgtctcagaatttttttaaaaaagaatcagtgatcatctcacaccgtgggaatgcctccagactgatctagtatgtgtggaacagcaagtgctggctctccctccccttccacagctctgggtgtgggagggggttgtccagcctccagcagcatggggtagggctcct

SEQ ID NO: 26233 - DNA, 242 bp, Homo sapiens
  source 1..242: mol_type = other DNA
aggactataaaacggtgttttggtgactctttgagcatcagtctgcgcagacaacctgaccaggctcctgcaccgtgatcaccgcccctgggagccctaggccaggagccctgggtccgccccctgggcccgcccccagccctgactcagccctgggcccgcctcctgagcccgttcccagccctgactccgccccgaggagccctgactgctcaggaaccctgggcccgcctcctggtccc

SEQ ID NO: 26234 - DNA, 302 bp, Homo sapiens
  source 1..302: mol_type = other DNA
cacacctgtaatcccagctatgctggaggctgaggcacgagagtcactggcggaggttgcagtgggccgagatcacatcaccgccctccagcctgggagagcaaacgaacaagcagtttgttgtaccttagttatatctaaaaaaaaaatgctgtgaactctaaggtatatttgacaaatcattcagaactgaggcagggaaggggctggcctggcttccggagacccctccccattctccgggccagggaggtagggagtgacatccgggaatgtgccccagggagcagtcaggcccggtg

SEQ ID NO: 26235 - DNA, 674 bp, Homo sapiens
  source 1..674: mol_type = other DNA
gccctcccgcctgcccgccggaagagaggttgagtggggtgctgggggcggacaaagcccgattgttcctgggccctttccccatcgcgcctgggcctgctccccagcccggggcaggggcgggggccagtgtggtgacacacgctgtgcggctggctcgctctctcctggggacacagaggtcggcaggcagcacacagagggacctacgggcaggtgtgtgagtcaccccaaccgcactgaacctgggcaggctgcttcccagtgccggagggctctagagcccggagtgagggcctgcaggtccctgggtggcacagagagtgctgggggtgcagggaggcctggggcaccatctgcttgccccagaggccggaatttgtcttcagacatcagacccaggagtttaggtcctagcggctcagactcaggagtccaggtcagacccaggagtccaagttctcacctcctccctcagacccaggagtccaggccccaagcccctcctccctcagacgcaagggtccaggcccccagcccctcctccctcagactcaggagtcctcagacccaggagtccaggccctcactgcactcagggaccagtgctcccttccctggaggcctggtcaggggtcaccaagacagtctcctggctcagggacctgagagac

SEQ ID NO: 26236 - DNA, 289 bp, Homo sapiens
  source 1..289: mol_type = other DNA
gggaatcatccccggctacccccggggaagaggccgggcacagtggctcacacctgtaatccagcactttggaggttgcagtgaactgagatcacaccactgcactccgagagagagagatggaagctccctcccctccatggccaggggtgggcagtcagagactgcaaagcgccctcccgcctgcccgccggaagagaggttgagtggggtgctgggggcggacaaagcccgattgttcctgggccctttccccatcgcgcctgggcctgctccccagcccggggca

SEQ ID NO: 26237 - DNA, 452 bp, Homo sapiens
  source 1..452: mol_type = other DNA
gttctattagataatgttaagtacagacatttttgttataaatacataatatacaaagaaatctatgtataacatgattaaaatttttaacttacacctctctgttagagacgactgggatcagcttggacaagttcccccaggcgggcccacccctagaagccgggcgcagtggctcacgcccaatcccaggtactcggggtgagccgagatcgcgccaccgcactccagcctggcgatagcagagcctattctctgagcgcaccgggtccctcccccgagagcagccaggagggactgtgtgtgcgggggcgcaggagctgggcaccgcccgtccttcggagggagggtggagagagagtgattgctctcgctgcgtgcaggcgggggtgtcccagagtcggctccgcctgcaccccagggcgctggggccgggcatggggcggggggtg

SEQ ID NO: 26238 - DNA, 427 bp, Homo sapiens
  source 1..427: mol_type = other DNA
agttaaaaaaagaaaaataaatatttgcttataaattaataaatgaagccctcaaaaatgttctattagataatgttaagtacagacatttttgttataaatacataatatacaaagaaatctatgtataacatgattaaaatttttaacttacacctctctgttagagacgactgggatcagcttggacaagttcccccaggcgggcccacccctagaagccgggcgcagtggctcacgcccaatcccaggtactcggggtgagccgagatcgcgccaccgcactccagcctggcgatagcagagcctattctctgagcgcaccgggtccctcccccgagagcagccaggagggactgtgtgtgcgggggcgcaggagctgggcaccgcccgtccttcggagggagggtggagagagagtgattgc

SEQ ID NO: 26239 - DNA, 196 bp, Homo sapiens
  source 1..196: mol_type = other DNA
ccaggagtcccctcagacccaggagtctgggcccccagcccctcctgatttaggagtccaggcccccagcaggaaccctagcctcaggagtctgagactgggtccgaatcagtaggtaggccccggaccctccttctccagattccaggtggaccccggcggacatgtaggcaaatccagaactgggagctcaggc

SEQ ID NO: 26240 - DNA, 378 bp, Homo sapiens
  source 1..378: mol_type = other DNA
gtgtctttaaacagaatgatttatattcctttgggtacacacctgggtgattaaataatagttaaaaaaagaaaaataaatatttgcttataaattaataaatgaagccctcaaaaatgttctattagataatgttaagtacagacatttttgttataaatacataatatacaaagaaatctatgtataacatgattaaaatttttaacttacacctctctgttagagacgactgggatcagcttggacaagttcccccaggcgggcccacccctagaagccgggcgcagtggctcacgcccaatcccaggtactcggggtgagccgagatcgcgccaccgcactccagcctggcgatagcagagcctattctctgag

SEQ ID NO: 26241 - DNA, 280 bp, Homo sapiens
  source 1..280: mol_type = other DNA
gcagatgagggaaccggtaccgccttgcaagccctattgcagcaagactcctgggttctgcttgggttggtcttgccgcctccaggggaaggggaaaccaggtcacacctgccctcccagatcccggacctctcaggggacagcgggcggggcctgatccaccctctggtgttactggcagcaccaggagtcccctcagacccaggagtctgggcccccagcccctcctgatttaggagtccaggcccccagcaggaaccctagcctcaggagtctgaga

SEQ ID NO: 26242 - DNA, 228 bp, Homo sapiens
  source 1..228: mol_type = other DNA
gaggacacaaaagattctgtatcttgtagcctaagaccccagaggaggtgcccacatcacaggggcggccccacgccgggtgcacgttccaggatccaggtgcccaggggtcatgaagctgggactctggcaggtgaggctcccaggctggctgcaccccagggcatggctgggcagacacccgtgccatcggggccgaggaatgtcgccccaactcccagccttggc

SEQ ID NO: 26243 - DNA, 180 bp, Homo sapiens
  source 1..180: mol_type = other DNA
atagcaaatgttctcataatccagatggaaccagagggccttgtccttgtgggaagaggcccaaatccccagggaggacacaaaagattctgtatcttgtagcctaagaccccagaggaggtgcccacatcacaggggcggccccacgccgggtgcacgttccaggatccaggtgcccag

SEQ ID NO: 26244 - DNA, 193 bp, Homo sapiens
  source 1..193: mol_type = other DNA
ttgagctcagatttcgagatcagcctaacacaaaaaattagctgggtgtcccagctacttggagggcaatataaataagacacatgtttcttcatctggctgaagcatacattgcccttggattctgtctccactgggactcaagaggtgaggagagaccatctccccacatttgctgagccccgtggaccag

SEQ ID NO: 26245 - DNA, 261 bp, Homo sapiens
  source 1..261: mol_type = other DNA
agggcctctgttgtcaagcctctcactcctcacctgagatgagggagttggctgaggtccgattcaggggcctgtgtgtcacctggtggcacacagatggggtatgaggcagagccacagcccactcacggccacagagtggttgctggggacgtgaaccctctccccgcgcctgggaagccttcttggcaccgggacccggagaactgggagaagcctgtattccagggcccctcccagagcaggaatctgggacccagg

SEQ ID NO: 26246 - DNA, 365 bp, Homo sapiens
  source 1..365: mol_type = other DNA
ctcgggttccgcagaggtctcacagcagccagctggactcgggctgcctgggcggcaggccccagaggagccctggggtggagcacagccaagggctctgttccctttcctggggtcctgcccctgtgcctggcagcagcccaccccccctctccttgcaaaggagaagggagcggcctaggggaggccaggggcccacctgggctggggtcagagagactgactgacaggcaggcagccagtgcctcagaggcctccggggagggccctcacacacaccccgccccggggcattaaggcagggcttggaggccagtcatcctgggcccgcccagggccgcccccctgccagcccgcctgcctgg

SEQ ID NO: 26247 - DNA, 156 bp, Homo sapiens
  source 1..156: mol_type = other DNA
ggtggatcacctgaggtcaggaactcgctgctactcttccctttgagctcagatttcgagatcagcctaacacaaaaaattagctgggtgtcccagctacttggagggcaatataaataagacacatgtttcttcatctggctgaagcatacattg

SEQ ID NO: 26248 - DNA, 350 bp, Homo sapiens
  source 1..350: mol_type = other DNA
gtgagcggagatcacagccctgcactccagcctgggtgacagagcgagttttatttaagcaatagaagttcttagcaaagaaaaactttatggaattagattgatccacttcatatgtacatatatgaactcagttcagcccctgcccctcccctgcactgcatggggatgggccccaggtgtccaagctggagtcaaacccagctccctagtcaccttgagtcatcagtcctgagggagtggggctgggtcttcccaccctgggtcctgtaaagctcaattaagtgtgattagctgagttcccttaacccggaaactggatgggccaggacaaaaacatgacaggtggc

SEQ ID NO: 26249 - DNA, 401 bp, Homo sapiens
  source 1..401: mol_type = other DNA
caggagttcaagaccagcctggcccggcacgtgcctgtaatcccagttgcagtgagcggagatcacagccctgcactccagcctgggtgacagagcgagttttatttaagcaatagaagttcttagcaaagaaaaactttatggaattagattgatccacttcatatgtacatatatgaactcagttcagcccctgcccctcccctgcactgcatggggatgggccccaggtgtccaagctggagtcaaacccagctccctagtcaccttgagtcatcagtcctgagggagtggggctgggtcttcccaccctgggtcctgtaaagctcaattaagtgtgattagctgagttcccttaacccggaaactggatgggccaggacaaaaacatgacaggtggc

SEQ ID NO: 26250 - DNA, 341 bp, Homo sapiens
  source 1..341: mol_type = other DNA
ttcaactctgccttgggcggggtcagacctaggtcccagcacgtcctggaagctccgccccaagcagagggccaagcccaggtcgggggtcccgctgtcgtgggcccctcactcaggtagggtctgcctggggccgaccacccagctcgccagagggcaggggaggagggacggcttcctggggtgaggggctgcacgccggagccccaggaggttgcacccacctcgccactgcacccccaccaaggatggaattggaggcggggggcagcggaggttccgggcacgccctcaacacccggagccatgtggcccctggccctagtgcggagggggagggg

SEQ ID NO: 26251 - DNA, 191 bp, Homo sapiens
  source 1..191: mol_type = other DNA
taaaaggccatttctggaaaatgttgcttctttcaaaagaatgcctagggggaaggaaatgggctttccccttaccctttttgcctacagtgggttcaactctgccttgggcggggtcagacctaggtcccagcacgtcctggaagctccgccccaagcagagggccaagcccaggtcgggggtcccgctg

SEQ ID NO: 26252 - DNA, 344 bp, Homo sapiens
  source 1..344: mol_type = other DNA
cgcggagggtgcatgccccggggctggtgcctgttcaccgggacccctgggagcagagcttgcagaagccccagggccaggaaaggagaaatatcttcccttttgaaatctgaagctcctgccgtggacagctcagacgtcaggagcctccccctccgcacagtgaccccttggggacagtgtccagtcgttgtgcagaaagggggtgcccacctcgtgcttgcttgggggggatgagaggctgcctgctcaccccacctgcacctgtctcccgctctggcctcagggacccaggtggatctcccagggctgacccgggcctgacagtgtcttctgaggaggtc

SEQ ID NO: 26253 - DNA, 376 bp, Homo sapiens
  source 1..376: mol_type = other DNA
catcactgaggacccctaggagcagttcctgcaggagcaaagccccagggctccttgtgctcagagagctgtgaggatgggaatcctcctgcaggctgcctaggggactgcctgtgccccccactgaagctcctgtcatggggagctcaaacgtcaggagactcagtgtctccccaccacacagtgactccttggggacagtgcagaaagggggtgcccacctcgtgctgagggagggatgagaggctgcctgttcaccccacccagattttcaccctgcagaaaatctgtctcccgctctggcctcagggacccaggagtgaagcgggtggatctcccagggctgacccagccctgacagtgtctgtggaggtca

SEQ ID NO: 26254 - DNA, 287 bp, Homo sapiens
  source 1..287: mol_type = other DNA
tcagaggcacactctcttacagactaagagtttttaaggattgagaggtgtgtgtctgtacccatacatctttctgcagctacaggcatacccactgaagtctgttttactaattggtgaagtttggcagtaactcaagagactctcccccctctgtcactcactatatctttagtgaatgaatgaataaatgaatggctccaggccagcagtgatcagccctggtgtaaacagttgtgcacagaaatccaggctctggtgctcctggaaggcaagactcagattct

SEQ ID NO: 26255 - DNA, 646 bp, Homo sapiens
  source 1..646: mol_type = other DNA
tgtcggttcagcccaaggctccagagacagaggagggggcggccgagctccggctgcgctgcctggggtgggggccaggtcgcggggagctgagctggagccgggacggacgcgccctggaggcggcggaatcggagggagccgagacgccccggatgcgctcagagggcgaccagctgctcatcgtgcgccctgtgcgcagcgaccacgcccggtacacttgccgcgtccgcagccccttcggccacagggaggctgccgccgacgtcagcgtcttcttggggagaagcgggctggggacccagtctccgggagtcctagcggcgtcccaggtgaccctgacactcgcccggacccgccgaccatcacggtctcctcggaccgcgacgccgcgcctgcccgctttgtcaccgcgggcagtaacgtgaccttgcgctgcgccgccgcctcgcggccgcccgccgacatcacgtggagcctggcggacccggccgaggccgcggtgcccgcggggtcgcgcctcctgctgcccgcggtcggaccgggccacgcaggcacctacgcctgcctggcggcgaacccgcgtaccggccgccgccgccgctcgctgctcaaccttacagtggcgggtgagagcgtggtgggc

SEQ ID NO: 26256 - DNA, 340 bp, Homo sapiens
  source 1..340: mol_type = other DNA
gcaaaacaaaagcttttataagaaactcctttcatcttgtaaagctatctgcataactctccgttatctatgtagttgttttcctgggagcctgtcagtcacgcaaagaacaaaaggcttctgtgcgaggtatttatgtatcagtgtattatgtatttatatacacttggagatacagtaaaatgtacctctcactgtgggttaccataaatactgtaaatttgagaaacactctttcagtcagatgtccctggtacccaggaatggaccccggacaaggccctgcccctttccaggctgtccagcctgggagagggttggcgctgaggcccccaccttc

SEQ ID NO: 26257 - DNA, 299 bp, Homo sapiens
  source 1..299: mol_type = other DNA
ctttactattgtgaatagtgccgcaataaacatatgtgtgcatgtgtctttatagcagcatgatttataatcctttgggtatatacccagtaataggatggctgggtatttctagttctagatcctccacaatggttgaactagtttacagtcccaccaacagtgtaaaagtggcaaaacaaaagcttttataagaaactcctttcatcttgtaaagctatctgcataactctccgttatctatgtagttgttttcctgggagcctgtcagtcacgcaaagaacaaaaggcttctgtgc

SEQ ID NO: 26258 - DNA, 227 bp, Homo sapiens
  source 1..227: mol_type = other DNA
gtccccggggccctcccggccatccgccccagggctgctttctgctggcagacatgatcatgcagagcaccgacctggggcagaataaaggaacggcttttcgctgcgtctcggcgtgggaatactataggaccgggaggatctataaactcattggtcctctgtcggggaggcgggctctgcagcggttgactggctgaccgtgctgcgcgcaggcgcagagaggg

SEQ ID NO: 26259 - DNA, 521 bp, Homo sapiens
  source 1..521: mol_type = other DNA
ccagagtgggggcattctgctcagcctcgtggccaacgtccatgagggccacagtggcctgtggcaggagcccagatgtcagagggcatttcagacccccagggctcgggacacacagctgggcccatggcgagacgcccacccctcgggcagctgtcccttgtcggccgaggccgccacgaaccccgtagcggcagtaaccgcaggtcctgatgtgagagctcggctcctggccacacaccgggttgggggcaggagacgggagagcttccggttgcggccgaacccgtagtgactggggcggcgcccgcgggggctgatgcgcccgctctccccagccacgctggcggtgactgtggcgtgcaagggcgagtcgctgcggggccagaccacgagcgccttcctcttcctcggcggtgagactgcagaccgccccaggcgggcaggcaggggcgggccctgggtgatctgaaggggcgtggcctgggtgcagcccccaccaggcccagctagctcatctt

SEQ ID NO: 26260 - DNA, 565 bp, Homo sapiens
  source 1..565: mol_type = other DNA
gggagggggttctggaacccctggcctcacagagacccagcctccctccccccgtctctctgggctctgtgtctaaggagccctagggcactgggtctgggaagacaggttcctcacagcaaagcctgtggtgaaggtctcagaggcctctcaggggaagtctccaggtccccagaagcagggacctcgaagcgggctcctcagctgggggcctcggggtaggaaaggcctgggcccatcctgcccttgtggcccccggctgcagcctcagtggcatgggggtgaagcggagcctccagagtgggggcattctgctcagcctcgtggccaacgtccatgagggccacagtggcctgtggcaggagcccagatgtcagagggcatttcagacccccagggctcgggacacacagctgggcccatggcgagacgcccacccctcgggcagctgtcccttgtcggccgaggccgccacgaaccccgtagcggcagtaaccgcaggtcctgatgtgagagctcggctcctggccacacaccgggttgggggcaggagacgggagagctt

SEQ ID NO: 26261 - DNA, 281 bp, Homo sapiens
  source 1..281: mol_type = other DNA
gcgatttgggtagggacacaaaccctaacaccgtcaccttatacctgctcgtagatgaggtgttgccagggggctggagaacccggtgataaaggccaccaggctggagcccccaccatgctccaaactggggcccaggattctgagctcctgcccctcaggacctggagttcaggcccccagctcccaagtcccctccttcagtagagaccctagacttggggacttcctctcccagttccaggaagccccgacttggtggtagaatctgtgacagaggc

SEQ ID NO: 26262 - DNA, 146 bp, Homo sapiens
  source 1..146: mol_type = other DNA
gttttcctggggcccagagtgagagtagctcctgtgaggcacttggtgaacctgaccccctgaatcttgcgtgtgtgcgcgcgcccgtgcgtgcttacacagctcggacaaagccagggttgctttgagcaaggctggggagcccc

SEQ ID NO: 26263 - DNA, 264 bp, Homo sapiens
  source 1..264: mol_type = other DNA
gtaatttataaaggaaagaggtttgagcgatttgggtagggacacaaaccctaacaccgtcaccttatacctgctcgtagatgaggtgttgccagggggctggagaacccggtgataaaggccaccaggctggagcccccaccatgctccaaactggggcccaggattctgagctcctgcccctcaggacctggagttcaggcccccagctcccaagtcccctccttcagtagagaccctagacttggggacttcctctcccag

SEQ ID NO: 26264 - DNA, 177 bp, Homo sapiens
  source 1..177: mol_type = other DNA
ccagattctgtgtctactaatacacaagtaatatcacaagattagccccatttctcagatggagagcctggactcccgggtctgaagggagtggctaggaccctagacttccgcgaggggctggggccctagacggggaactagatccaggtcccaaccttcccgggcccccgaagg

SEQ ID NO: 26265 - DNA, 398 bp, Homo sapiens
  source 1..398: mol_type = other DNA
agaaattcaacatgctcagttaaatttgaattttaggcaggagttcacgtgcctgtaagcccagactcaggaggctgaggcaggagaatcacttcagcctgactgcactgcagcctgggtgacagagtgagactctgtctcaaaatataattaattaattaattaatttgaatttcagataaatttattttgctttctggtataagtatatcccatgcagcatttcggacatacttataccaaaaaacataaaataaaatactttatattgtctgtgaaagctttaaccaggcatcgcccagataagggtagcgccaggctgggcccccaggagacccagaggacaactgggtgagctcagcgtctgaagctcatttcatgcatcaggccccagggct

SEQ ID NO: 26266 - DNA, 345 bp, Homo sapiens
  source 1..345: mol_type = other DNA
catatgtgttctaatcccaatgggtgtcccaaagaaattcaacatgctcagttaaatttgaattttaggcaggagttcacgtgcctgtaagcccagactcaggaggctgaggcaggagaatcacttcagcctgactgcactgcagcctgggtgacagagtgagactctgtctcaaaatataattaattaattaattaatttgaatttcagataaatttattttgctttctggtataagtatatcccatgcagcatttcggacatacttataccaaaaaacataaaataaaatactttatattgtctgtgaaagctttaaccaggcatcgcccagataagggtagc

SEQ ID NO: 26267 - DNA, 424 bp, Homo sapiens
  source 1..424: mol_type = other DNA
agggctggtgtcctcgttccatgacacctgttcacctggacccctggaagcagagcctgcaggagcaaagccccagggctgacagaccccgcctgctgtgcacaggcctcctgatgccccccactgaagctcccgtcctggggagctcagacgtcaggagcctccgtgtctcccctctgcacagtgactccttgaggacagtgtcttgctctgtgacctcgttgtgtaaagaggaggtgcccactgctgagagagggaggagaggctgcctgctcacctcacctgcaccccagtctctcatggccctgagttccgacagccccgggggtgattcggaatgccaatttcaccttgcctcaccctctcccaggactgacccggccctgacagtgtctgtgtgtgaagttcctcctctgaggaggtc

SEQ ID NO: 26268 - DNA, 385 bp, Homo sapiens
  source 1..385: mol_type = other DNA
gcgtggacacgccagggctggtgtcctcgctccacgtctcctgttcacctgaaaccctgggagcagagcctgcaggaacaaagggccagcagacccctcatgctcttgtgtatcaacacacggaatcctcctgccatggagagctcagatatcaggagcctcagtgtctccccactacacagtgactctttggggacagtgtctagctctgctgtgttgaactccacctcacggccgctgagggaggaaggagaggttgcctgctcatcccacctgcacccattttcaccttatggaaaatatcacccatggatcttccaggggtgacccggccctgacagtgtctgtgtgtgaagttcctcctgtgaggtcaccgttcagaacc

SEQ ID NO: 26269 - DNA, 391 bp, Homo sapiens
  source 1..391: mol_type = other DNA
atatttcttatatttaccccgagtctaaggaggctccgcctagccacacagtttaaaataatctgttgaggccaggtggtcatgaggtcaggagatccagaccatcctggtcgacaggagaatcgcttgaaccagggagtcagaggttgcagtgagccgggatcgcgccactgcactccagcctggcgtccgtctcaaataataataataataataataataataatcatcatcatcatcatcatcatcatcatcatctgttgaaggtgcacaccccagggctggtgtcctcgttccatgacacctgttcacctggacccctggaagcagagcctgcaggagcaaagccccagggctgacagaccccgcctgctgtgcacaggcctcctga

SEQ ID NO: 26270 - DNA, 324 bp, Homo sapiens
  source 1..324: mol_type = other DNA
aaaaattcagtactcaagtttttttaaaatacctcacctgtaatcccagctactcaggagctactcaggaggcggggaccaggtccctggcatctcagccccactgacacacagatgctcactgtgtgtttggatcctccatcctgcaggactgacttcctcatgactctagatgatgtgactctctgggaccagacctcagggtgggagaaccttagaccctcatgagtgtcccatccccagagatcctagtccaggctctgcagatgagaggaaatataagatctctgctccctggagtctccctctgctctgtgcagaggg

SEQ ID NO: 26271 - DNA, 422 bp, Homo sapiens
  source 1..422: mol_type = other DNA
tgtgccacatttaactgtgagaagcagatttttcacaggaaagaaattgctaatctctatgatgaggatctctccagtccacactgcactgagtggcaacattaattcaaaagaagtttcttctgcactgcagttcataaaatatgtgtcctttttgatttacattgaaatttcaagggtagggaccaggtccctggcatctccatacagatgctcactatgtctttggtgaatgaatgaatgaatgaatgaatgagtgaatgaatgagtgatcctatatcctgcaggactgatgtgactctctggggccaggagtgaccagctcccggtagggccttggggaggccctggtccgggctctgttgctcgcagagggagtggagctccgagggcttgtggcttcgcagttcctcttctgtgaa

SEQ ID NO: 26272 - DNA, 477 bp, Homo sapiens
  source 1..477: mol_type = other DNA
tggtggcaaattctaatacctcataggtattagagatttgccagatgcataagctagacctaaaaattttaattttgtcaggatattctgctcacgttgtccagaaatttgtgccacatttaactgtgagaagcagatttttcacaggaaagaaattgctaatctctatgatgaggatctctccagtccacactgcactgagtggcaacattaattcaaaagaagtttcttctgcactgcagttcataaaatatgtgtcctttttgatttacattgaaatttcaagggtagggaccaggtccctggcatctccatacagatgctcactatgtctttggtgaatgaatgaatgaatgaatgaatgagtgaatgaatgagtgatcctatatcctgcaggactgatgtgactctctggggccaggagtgaccagctcccggtagggccttggggaggccctggtccgggctctgttgctc

SEQ ID NO: 26273 - DNA, 318 bp, Homo sapiens
  source 1..318: mol_type = other DNA
tgtgaacacagtacgaaagcaatatatttaaattactattttttaaaaaagaaggatcatttcagatcttctagaatatatttttgtttatttgattgaacaacctcttcctaaagatacaatttctcagaaagataacattttcaaaagtgctattaaagacagtgagttgttcagcaattcaaaatatagagaaaaagtatttttcagaatacatgtcagtttctcctagaaatatatatacacaagtattgaggcggcctccaatatcataatccgtatgggtgcggccatacgccatgataactgttggcggag

SEQ ID NO: 26274 - DNA, 176 bp, Homo sapiens
  source 1..176: mol_type = other DNA
gggtctgtctctgagcagaggtagagatgtgcaggcacatatgcacacacgcatgtacgttgctcaaagcagtgaacaggagacatgagactcagacacttttgctgagggaaggatagggactgtcagcctccctggccccatctcttccggtcctggagggccaggctctgcgg

SEQ ID NO: 26275 - DNA, 299 bp, Homo sapiens
  source 1..299: mol_type = other DNA
tccaggagggccagtccctgttgctggttccgggagggaaaagccagacctcaatcgaattcacctgccgggttcagcatccgctgtggcccctcgtcctcaccctgatcaggggggctctcatgggggcaggtgagccggactgcctgtctccaggaagctcctgagttccaggtggggctgagctgtcctgccccaggacagctcagccccacctggaattagaactgaagtggctggtctgcaggtgtggaggcccccagcagagcagggctgagaggcctggctgagcccctccc

SEQ ID NO: 26276 - DNA, 238 bp, Homo sapiens
  source 1..238: mol_type = other DNA
cagggggcctggtgcaccataggcgcccatgaagcacagtgctgtcaacatcagggatggggtctgacgttcccaaatccaactggtggtggggaccacatcacccggtcattccctctggaaagaggaaagtccccgaggccctgactcccagggagctttccgagtctagacttcaagcccctctgggggccagtgggggtgggagcagaatggcttcccagccccagcctcaccc

SEQ ID NO: 26277 - DNA, 271 bp, Homo sapiens
  source 1..271: mol_type = other DNA
tattttttaaaaaagaaggatttctagaatatatttttgtttatttgattgaacaacctcttcctaaagatacaatttctcagaaagataacattttcaaaagtgctattaaagacagtgagttgttcagcaattcaaaatatagagaaaaagtatttttcagaatacatgtcagtttctcctagaaatatatatacacaagtattgaggcggcctccaatatcataatccgtatgggtgcggccatacgccatgataactgttggcggag

SEQ ID NO: 26278 - DNA, 238 bp, Homo sapiens; identical to SEQ ID NO: 26276
  source 1..238: mol_type = other DNA

SEQ ID NO: 26279 - DNA, 253 bp, Homo sapiens
  source 1..253: mol_type = other DNA
atctttggatatcatgtaaaaggtatatatgtgcatagatgtataaaattcctctggaaagatacataagaaattagtgaaagcccagcaccatgcctgggccagactcagggaggcccacaggttcctgttctctcctagcccgcaaactgcagggagggggcctcctccccagcctccacaggcccagcctggctgtgccctctgcctggaagggccttagtggaggtcatgccacaaccacggccacagc

SEQ ID NO: 26280 - DNA, 386 bp, Homo sapiens
  source 1..386: mol_type = other DNA
gtccttggattccagtgactccagggtccctgagggcctggactcctgggttccttggggaggaggggccgggggcccggactcctgggtcctggcacccacccgtaggccttcgccgcacacaagctcgtgtctgtgggtccgtgtcgggggctcaccatcgcggctggggcctccccggccctccctccacctgccgcgccccccgggctgaggtaggactcctagctttccccaggctgcgccctgcacgggacggggcccggcggggacccccagccccactcagggacccttagccccactgggctgccccagggaccctgggaggaagagccgggcaggtccctgagaccctttaacctgtgaggacatccagggtcaca

SEQ ID NO: 26281 - DNA, 288 bp, Homo sapiens
  source 1..288: mol_type = other DNA
gggtgacagcactgacagaccccggctggctccccagggtcagctgaccgacaactctcccgagtccctggggatactgaatggacagatgttcactcacagctccggttccaggcagccgtgcctcgggccagcgtacacacaggcacacccacagcacgcacgtgtgtgagtttcgagttgctgagacatgtccctggggggcccaacccagagatgccgggagctgcccggctgggccgtgacctcagagcccctggcccagcttagcctgactgacgtcagcgc

SEQ ID NO: 26282 - DNA, 371 bp, Homo sapiens
  source 1..371: mol_type = other DNA
gagagaagcacgggggaatttctctctgctgctcctggagctggcccgtgccagacaccaaaggtcgttggtagatacagatagtttttttaaaaaattcatggaaagaaggctgaggggctggggttcgggcaccccaggtcccgcatctcgggtgacagcactgacagaccccggctggctccccagggtcagctgaccgacaactctcccgagtccctggggatactgaatggacagatgttcactcacagctccggttccaggcagccgtgcctcgggccagcgtacacacaggcacacccacagcacgcacgtgtgtgagtttcgagttgctgagacatgtccctggggggcccaacccagagatg

SEQ ID NO: 26283 - DNA, 272 bp, Homo sapiens
  source 1..272: mol_type = other DNA
cagggaaggcaaaagatattgttaggtgtaattgtaaattataaattacttagaattaaaaacagcctgtaatcccagcatttggggatcactaaacccaggggtctgagacatgcctgggcttaatgcaacaatgccttggtaataatgcttttagaatcagtgtcgcaggggcccgactgaacctctgcatcccacagagactgaggctgagaaatacagtcaggtacatgagttttggtgtattcttggggccatcaaaaatcagaaga

SEQ ID NO: 26284 - DNA, 237 bp, Homo sapiens
  source 1..237: mol_type = other DNA
atgtgaactccattgagaacaaacgagtaaatgtaggtaatgtgccttcttcttttttcaagcctaccaagtagttgggcttaagttctgtgagccattctaacaaattatcagaacagaggaaggggttataaacatccccccaccccagaagtacaggtggccacctgggactctgcataagtcgagaattgagtttgacttaatcaaattgtttctttcattttcatgaaactc

SEQ ID NO: 26285 - DNA, 254 bp, Homo sapiens
  source 1..254: mol_type = other DNA
ttcaagcctaccaagtagttgggcttaagttctgtgagccattctaacaaattatcagaacagaggaaggggttataaacatccccccaccccagaagtacaggtggccacctgggactctgcataagtcgagaattgagtttgacttaatcaaattgtttctttcattttcatgaaactctgaagaaggaagagaagagtccgctgacaacatacccaaggtgtcttctgaaaattataagaaatcctgagtt

SEQ ID NO: 26286 - DNA, 406 bp, Homo sapiens
  source 1..406: mol_type = other DNA
acaagtagccacctgggacttgcaacagatgtctgatctgatctgagaacagttaatttcttgcattttcctgaatctctgaaaagaaagggcctggactctcagatttcttggcctttgatatttttccaagataaatcgtctgagaacatctccaaggtgtcttctgggaatggtaagaaaccctgagtttgtgtcactggattgattccagctcttggactgacctattgtactaggttcgacaaagcaaacctgtatctgaacttttgagaaataacggccagtttcaagttctgtctgctttcatctttacaaaaaaaaaaaaaaagcaatcttgctgtctctctattcctgctgcacaaaaaaaatgcaacatccagatgaccaatcaggtttttgttct

SEQ ID NO: 26287 - DNA, 344 bp, Homo sapiens
  source 1..344: mol_type = other DNA
tcacaccgctgcagtccagctgggcaacttgaagtgcgaagcagctgttgatagagaaacttgaagagcttcatttaacttttggctgtgtcttggacacaatcccaatgtctgtgtgtgtggatgactcacgcacttcctgcatcagacagcccagtcggtctggcccagacggcactactgccgcttcgtgcagcttagtactgctgtcctcagcagttaacttggagattctccagaaattccagtgacttgaggctccaggctccccagcagctgcaggagggcagacagaaaccctttctgggatcaggcccctgacagggggccactactggagggca

SEQ ID NO: 26288 - DNA, 350 bp, Homo sapiens
  source 1..350: mol_type = other DNA
gaatttccaactgttgtattcccagcacgcacaacagtgtttgactttataaacattcgctggataaatgagtgaatgatcaatccctttaaaggttctctgagttataaaatttcatcagttaattgatcagctgagtttcagtcaactgctgatcaactgtctctgaggctacatctgatgtagatgtaaagatacttcttaggatgcatcctcaggagtaataacccctccgattgagacagatcagggcaggcttgagtggaaaaagggtgaaactgctctacggcagctgctcccagcaagcgtcccctgccgtattccgtgtctccggaaagacgcagtatggc

SEQ ID NO: 26289 - DNA, 450 bp, Homo sapiens
  source 1..450: mol_type = other DNA
gattttcaatgtgaaagactcaagttaaatagtacacatagtgtgaaaacaaagttccccctctgtatactttttttagtatgtcactaacaaatgtatgtcatgcgtgtgtatgtgtgtgtatacatgcgttgtatacatatacatgtatctatgcatgtcaatgcttacatgtatgataagcatttctcatgtttattataaaatatagaatattttactatgactttgcttctttcacagtatatttaaaaaactaggaatacagtttatttgtgaacatgaatttgtactgcaagggacttatatccaaacttgaatcaaaaatatagtattctcaggatgtgaaactcgcttatacagagtaacataacatgagtatgcacaatttcggtatatgtggggcatcctacttcatatttcttccatgtcaataaaagagaaacatat

SEQ ID NO: 26290 - DNA, 429 bp, Homo sapiens
  source 1..429: mol_type = other DNA
agcatttgtttaacaaacacgtctctgtgagaacagggttgggggcagaagaatttttcttagtacggaacaaaatggagtctcttatgtctacttctttctacatagacacagtgtgcactgttgttagtgctccaacctcacagtgcaggggttgacaggaatcagtgccatttcactgtctcctgtgtcaaagcaaaattaaaatgaacataagcaacaattcacttgagtcatttctggtaaatgcatgctattatgtcattagactttccaaggcaaatttaaaaaaatgcatttttataattgtaactaatcaaataatttctttgttttactctttaagcatagaaagagccgtggctcagggcgcggacatgtcctcctcgaagagaagcccgtcctagcgcggcagaattgactcgcgcc

SEQ ID NO: 26291 - DNA, 399 bp, Homo sapiens
  source 1..399: mol_type = other DNA
agcatttgtttaacaaacacgtctctgtgagaacagggttgggggcagaagaatttttcttagtacggaacaaaatggagtctcttatgtctacttctttctacatagacacagtgtgcactgttgttagtgctccaacctcacagtgcaggggttgacaggaatcagtgccatttcactgtctcctgtgtcaaagcaaaattaaaatgaacataagcaacaattcacttgagtcatttctggtaaatgcatgctattatgtcattagactttccaaggcaaatttaaaaaaatgcatttttataattgtaactaatcaaataatttctttgttttactctttaagcatagaaagagccgtggctcagggcgcggacatgtcctcctcgaagagaagcc

SEQ ID NO: 26292 - DNA, 406 bp, Homo sapiens
  source 1..406: mol_type = other DNA
ccctgtgagcatttgtttaacaaacacgtctctgtgagaacagggttgggggcagaagaatttttcttagtacggaacaaaatggagtctcttatgtctacttctttctacatagacacagtgtgcactgttgttagtgctccaacctcacagtgcaggggttgacaggaatcagtgccatttcactgtctcctgtgtcaaagcaaaattaaaatgaacataagcaacaattcacttgagtcatttctggtaaatgcatgctattatgtcattagactttccaaggcaaatttaaaaaaatgcatttttataattgtaactaatcaaataatttctttgttttactctttaagcatagaaagagccgtggctcagggcgcggacatgtcctcctcgaagagaagcc

SEQ ID NO: 26293 - DNA, 313 bp, Homo sapiens
  source 1..313: mol_type = other DNA
aagtctatagatgtatcatgaaggacacgtgaaaactctgttataacatgcaggaatttccttctcattcttccaatggaattgtcttaatttaggttggatcagaattagaatttacgttatgatgactatgtaaataatatttataggtcagtcctgcagcctggaactcctgggggactacacgtgtgcgccatcgcgcccgggcttgcacactacagcagagggaaggcccttcttctctcttaaggccctcaaatgtaaatgagtcctctggagaaagcgttttcacttggacacctaagtgttaaga

SEQ ID NO: 26294 - DNA, 442 bp, Homo sapiens
  source 1..442: mol_type = other DNA
catcccaccagatgagaaatacccacaggtgtggacagtagtattccagggtatgattacactgcaatttcataaaggtgctaagaacattcttgtgaacagtatctaggagtggaattcctgagtcataagattcttgcagtcatatagttctgtaaagcttttcactcttcacagatttgatattttaagtatctatagatgtatcatgaaggacacgtgaaaactctgttataacatgcaggaatttccttctcattcttccaatggaattgtcttaatttaggttggatcagaattagaatttacgttatgatgactatgtaaataatatttataggtcagtcctgcagcctggaactcctgggggactacacgtgtgcgccatcgcgcccgggcttgcacactacagcagagggaaggcccttcttctctcttaagg

SEQ ID NO: 26295 - DNA, 264 bp, Homo sapiens
  source 1..264: mol_type = other DNA
ctgcagcctggaactcctgggggactacacgtgtgcgccatcgcgcccgggcttgcacactacagcagagggaaggcccttcttctctcttaaggccctcaaatgtaaatgagtcctctggagaaagcgttttcacttggacacctaagtgttaagaagccataccatgtttgtcttggtttaggccaaaggtccactttaccttccgaggacgcgaacttctcccagtcgtccgagaccttcctcggccgccgtaggccggct

SEQ ID NO: 26296 - DNA, 347 bp, Homo sapiens
  source 1..347: mol_type = other DNA
ttttttgtaaataataatcattttttcgaggtcaggaggtcgagatcatcttggccaacatggccagctactccgtctcaaaaaaaattataatttttttctttcttcaccaaaaaccgctctttttcaaaacctttttttttaaatttaacaaagtggatggaaaagcgctaaaggcaatttagctttctctgaaaatctgccccctttcgcaagactttaagtgccaggaaacgaggcgatttcagtgacttctcttcaaacatggctgccgtcaggagccacggctatgggcgcggccaaaatgccgtaaatgcgcttcctcggccgccgtaggtggaccataa

SEQ ID NO: 26297 - DNA, 339 bp, Homo sapiens
  source 1..339: mol_type = other DNA
ttttttgtaaataataatcattttttcgaggtcaggaggtcgagatcatcttggccaacatggccagctactccgtctcaaaaaaaattataatttttttctttcttcaccaaaaaccgctctttttcaaaacctttttttttaaatttaacaaagtggatggaaaagcgctaaaggcaatttagctttctctgaaaatctgccccctttcgcaagactttaagtgccaggaaacgaggcgatttcagtgacttctcttcaaacatggctgccgtcaggagccacggctatgggcgcggccaaaatgccgtaaatgcgcttcctcggccgccgtaggtg

SEQ ID NO: 26298 - DNA, 304 bp, Homo sapiens
  source 1..304: mol_type = other DNA
ctggagtgcaatgacgccatcttgtgcctcagcctcccgagtagctgggattgcttcaagctactttgttagaaacctttgtacaaagtgtaaacgtcaactggagcctctgtatatggacccgtatttatgccaggaaatgggacagtttcagtgctcttttcccggccatccccggtcacccccggtcacccccggtcaccagcgccaaaacgcgccctttgccttgtgtacgtcagatactcaaagatggcggcccccatggagccaaggcgacgagggcgcggccatcttgcatctgcgc

SEQ ID NO: 26299 - DNA, 539 bp, Homo sapiens
  source 1..539: mol_type = other DNA
taattccctttttttgtaaattacaaaagttgtggttaatattaagacagatttgcctagatagcttttagaattgctgtgtcaaagaaaacgaaaaaattaaatcttccaaaaatacaatatttacttaaatcttcatctgcaaaaatagaactaatattttttaagtgtgactttttaaaaaatctggaaacattgcaaagtaggatgatcgcattctaataatttcatattccttcctttacttctggaaggaaacatgtagatattactggcagtggttttaatagcaagccccatgtgggtatactttcagtgaccactggttttggcaacgatatgagcatctgccgtacggctgctgccttcctcggcacaaagggcgccgccatcttttttccacagcaggcgaatgccactgcgccgactcttgagtgtcccttgcaacgaacacagccattatggccgctcctgtcagaaacgctgcgatgggcgcagccctgtgacctcatagagcggcgcccgcagtctgaactcgc

SEQ ID NO: 26300 - DNA, 341 bp, Homo sapiens
  source 1..341: mol_type = other DNA
gcaggaaagaaaccatatacatgtgatgtatgtggcaaggtcttttatcagaattcacaacttgtaaacaccttacaaatgtaatgaatgtggcaaggtatgtaatgaatgtggcaaggtcttcacaaatgtaatgacaaagaaccttacaaatgtaatgtgtgtgagatgtcatactggagagaaacctctccattgtaataccttacaaatgtaatgtgtgtggtcagtggaaacctttcgaaacctttccagtgtaacgaatgttcaagcctcactaacccttaccactgtaatgaatttggtgaggcttttatccaaagttcaaaacttgcaagata

SEQ ID NO: 26301 - DNA, 375 bp, Homo sapiens
  source 1..375: mol_type = other DNA
taattaagtttattaatcagctgactttagattattctggattgcccaagtttcaaatatgaaagggatttcacatactataattctagaaaaggattcttttccagagtcaagaacagagccaggtggttcttctcttctaaagctgcagaggtgactttaattttcattgagctgagacgtcacagccatcataaccgctaagaagggatgccgctggaaatcggacagttagaggctgtgccttctgtacgtcacgtactcaaagatggccgcccccagagcggcgaggcgacgccggcgcggacgcgtctcctcctgaggaaaagccggaaggccgcattccgctctccatggaaacgcggctgaccgtct

SEQ ID NO: 26302 - DNA, 302 bp, Homo sapiens
  source 1..302: mol_type = other DNA
cctagtttgttcatgcatgcatggaggtgcagtgatgtgacctcggctcactgtaatgtccgcctcccgggctgaaggcatcctacctcagcctcccgagtagctgaaactaccagtctggtcgcccaccttggccttccacagtgctgggattacaggggtgagcaatcatgcctggctcattaatgaaattctcaaatcatattagagtctacagtatagtgattttgcccctgtataaagctgcattttcaatatgagataaaaaaggtatttagcaaaaagtacattgttttcgagat

SEQ ID NO: 26303 - DNA, 144 bp, Homo sapiens
  source 1..144: mol_type = other DNA
ccatccagatgcaaatatgtttaagttgtactcatgaggatgaaaatcaccaaagttttttctataagccttgtgcattttgtatgtatttgtatcaaaagatatttggaattctctcttcttcccaatgatggagtagagcat

SEQ ID NO: 26304 - DNA, 425 bp, Homo sapiens
  source 1..425: mol_type = other DNA
cccaattctgacctgattggctagcaatgcttgcttggaacaattcaggcatgccagagtatattgatttatctattatggctagcagatatttaagaatattagcacaggtctttgagtaaattttgcttctaagagaggttactatctattctcaattagactgggaggaaagtccctttgaagaggaacctctacacatgtgtctagcacttttctggtaagactggatggagtccaaaatcggttttgacttaaatcagttcaacttgttaagaataaatcatcttagtttccagtataagtggaccacaactttaagattcaaccttaaattctgaaacattaatttaaaatgagaggcggagtggagaacaggccccgcctcggccccgcccacccctcgcgccccgcctaggccccgc

SEQ ID NO: 26305 - DNA, 274 bp, Homo sapiens
  source 1..274: mol_type = other DNA
tcttgagctcaagaagagctgggattacaggccagagccactgctcctgcaaatattacccaaatattatctgaatcacatatgggtgagactcaaagtgtggttcatcctgaggcaaaatttctgtccagtgtgaaactgtgaagccaaagaagctatttgcttccggaatggagtgattttgacttaaatcagttcaacttgacaagaagaaaacatcttaagtggaccacaactttaagctttgaccttaaagtctaaaacattaacttaa

SEQ ID NO: 26306 - DNA, 421 bp, Homo sapiens
  source 1..421: mol_type = other DNA
tcttgagctcaagtgacctgcccacctggagacttaatccatttcagtatcaactctcaaaagtcttattaacatgggtgagaatcaaggtgtgattcatcctgaggcaaaatttctgcccagctgtgaatctgtgaggccagagaagttatctgcttgacgtttgtactttgcacgtgtaaaagcacagtcctggatccagccaggagtccaccaagcttgtaaaaatcggttttgacttagttcaacttgttaagaaatcatcttagtttctaatataagtggaccacaactttaagctttaaccttaaattttgaaacattaacttaaaatgccgcggctccggctccaccctctcagggtccctccccgagtcacccgccccttgctggtcgcggctcgcccaggccccgccccctg

SEQ ID NO: 26307 - DNA, 381 bp, Homo sapiens
  source 1..381: mol_type = other DNA
ttgatttgtgactttatactctaatttaaaatttgtttctttaaattgtactcatgaggatgaaaattaccactcttttctacaaggcttgtgcattttgtatttgtttatatcaaaagatatttggaatcccttgactgactgtcactaacaggctggagtgcggtaaaattatatcgtcactgcatcctcctcagcccctgaaggtgctgggattacactacaggcctacaatgtatgtagttaattcgcttgatttaaattttagtttattcagtttcttctataattactaacttctgaaataagatttgatgtcatcctgtaatcagctgatgtcattaatttcaacttttaccccataatttattagatttttca

SEQ ID NO: 26308 - DNA, 410 bp, Homo sapiens
  source 1..410: mol_type = other DNA
tattgaataccagcccgaggggcttgggtttcatcctccacaaacatttttttaaaaattggccgggcctagcggcgcgcgccgatagtcccagctatttctgcaggctgaggcgagaggatcatttgagctcggggaggagccaagatcctgccactgcactacagtctgggcaacagaaaagagagaagggcaagtcgctcccttctctgggccctcctgccgcgcaacggcgcggagagccagccagccagccagcggaaccacggcagggcaggcttagcctcctctcggtcgttgttagcagcgaccagggcgggtgggcgggacttcacaagtccggcttagccctgggtagcgcggccaatggccgtggagcagcccctgtaaactggctcgggcgcccccac

SEQ ID NO: 26309 - DNA, 182 bp, Homo sapiens
  source 1..182: mol_type = other DNA
ggaggtggacttgcagttctaacgcgccggtaatcgcagctaattatgcactgagccgagatcgcgccactgctccccagccccagcctgggcgagataaatgttcatctgcttagtccccacctttgtcctcttaggacacctaaggccttcgcctcgagcaagtcatgcgcgaggccgcc

SEQ ID NO: 26310 - DNA, 580 bp, Homo sapiens
  source 1..580: mol_type = other DNA
gggttctataaaagaataattagaattactgcagagttattctttagatcaataaatacaattgtcttctgaagactattttaagggctttgttatctacaggggccagtacattgacaaacaagatttaagagattataatttttaaaataaaaagtatgtttacttattactttcagaatgcacctaaagtgaatctgaaattacagtatttttagaaaatattgttataggcgtgtcgaactccccggcctctattgcttttttaaaagcaatagctggtgactggaactctctactccagagtgaatggggaatagaaatggagaggatttctaattacacattctgcacaggttgagtttgcatattgtgcattcctttcacagacaatttaagggattttcaattaaatttctaaattttaattgaattccttaattttaattgtgggaactttcctggatccaagtggagcggctccagcctgactggcaagtgtggcttgcgcaggccccgtccaataagtattcaggccccgcccgccacgtcgctggccacgccccggcccggcctctcc

SEQ ID NO: 26311 - DNA, 411 bp, Homo sapiens
  source 1..411: mol_type = other DNA
tgagtagctgggattacacgcgtatgccaccatgcccaatgcttttttaaaaccaacaattggtgacggagctgagcacagggttacctctgtccaatagaaaaggagaggatttctattctgctttaattgcacattctgcccaggcagggctttgcagttcttaattaaattgctaaatttagttttttatgtatttatttgagagactgagtctctgtcgccctcccgcctcagtcttcggggtagccgggactacaggcttaagattaactttaatagcaggaattttcctggatctaatcattagccgactttgctcagtcccggcaagagtacagttccgagacagccgaggcggagggaagcgcaagccccactccgccccgcccccgcgctcggacccctccg

SEQ ID NO: 26312 - DNA, 457 bp, Homo sapiens
  source 1..457: mol_type = other DNA
ggggacaggacccatcgccgaacgatgctctctagagatgagcactctagagatgactcggcagacccacctcaatttgggtgggcacatgaaattgcacatgctacccaggcagggctttgcatttcacattttaacttgcatcgccagaattccaggccttttaaattaaattgttaaaattagtttttatttacttatttattttaggacagagtctacactgagtatagcactgggtctacactacgcccaggctggagtgcagctgaagcgatcctccagcctcagcctctctagtcgctgggactacaggtgcctgaattgattttaatagcaggaaatttcctggatctaatcctccggcaggatcagtttgcagagggctgagctgctccagcctcactgccagggaggcgtggcctagggaagccccgccccgtcccgcgcgcgcgca

SEQ ID NO: 26313 - DNA, 362 bp, Homo sapiens
  source 1..362: mol_type = other DNA
gttgcagtgagctgagatcaccccactgcactccagcctggtaaaaaaaaaaaataataataatactgtaacacaatttctttttgtacttctagtgttcagtgacatcatttgaaaatattaatgttcacccatcttctttttaagtcacacacagaaagggaattttgttttggtacattaactagaaacttcatatatcataccttttccagctggggcggggatacccactacccatacaattcacacctagcatgtatatttttatattttttgtatgtatatatatttttacatttttttcagagacaaaattttgtgacccagctacaggctgcagtcagtgagctgtctgcact

SEQ ID NO: 26314 - DNA, 416 bp, Homo sapiens
  source 1..416: mol_type = other DNA
cccaacattttgggaggccaacccagctacttcgctgttgcagtgagccgagatcgcgccactacattccgccctggcagggttttgcatttcatattttaatttgcatccccttcataaacaattcaaggactttaaaattccggaaactagtgtttattattcatttatatttatttattttaattatttatttccaatttgttatttatgattatgtattgcgggagtgcagcgcacgacctcggcttacagccgatttaaaattaattttaatagcaggaattttcctggatctaatcatcaaggtctagcctccaaaacgagacgagctgggagcgaggcggagggaagcgcaggctccgcccaatcccacccgggcctggcctcgcctcgcctctcagctgcgcgcgcag

SEQ ID NO: 26315 - DNA, 480 bp, Homo sapiens
  source 1..480: mol_type = other DNA
tgattgcgccactgcatttcagcctcggtggcagagaccctgtcttaaaattttaaaaagtattaaaaaactaacaccagtgagctgagtgcctgccactgtactcccgcctgggggacagagggcaacaacaacaaaaaactacgtcgtttatggctatttttataagttactggctttttttttttaaagaatcaccttcaccgtctagagtgaatggggaagataaatgaaaagtatttatcttctatgggcagaaatagaacattctaccctggcagggttttgcgtgtgtttgaaattcattttaatagaaggaattttcgtggatataatctacaaccgattttgctctgcgcaggtaagatccgttttcaacggaagcgcaggcccggcccaggctttgtcccggcccgccctggtcccagccagtccggcctctaggatgcgcgcgcaatttcgtgcccggaagcggaccgc

SEQ ID NO: 26316 - DNA, 363 bp, Homo sapiens
  source 1..363: mol_type = other DNA
gcctggtgtggtgtgcgcacctgtaatcccagctactcggaacaaacaaacaaacaaaaaaaatgtctttctttcgttctttcttgtctgagtctcactccatcgccaggctggagtgtagtggtacgatttcggctcactgcaaccctgcctggttcaagtgattctccagctcccgagtagctgggcacacccagatggtctcgatcacttaaaatttattgtaataacaggaattctcgtggatagcaagatctgtttacagatctgtttacagaagtgctgagcagatctcgccgctgagtcagactgacagaccgccctgtcccggccctgccctcggccccgggcccggcctgtacg

SEQ ID NO: 26317 - DNA, 469 bp, Homo sapiens
  source 1..469: mol_type = other DNA
tggccctgtgtgttttataagagagactgggactcactctgtttacattcagagtgcgtgtaaatttgaaattcactctacgtatcgaaattattgacattatgatgtcaataaagtttataattcaggtataagggagagctatttatatctattgtttaaaagtttaagagtcatttatatctatcatctaaaagttttagctttcctttttaaaagcaacatttcatgcccaaggcgttgtccctgggaaattgtcaggagctgagatcctcaccctccagagtgtagggggaatagaaaaggagaggatttctactctgttctgtgggaacagcatcaaattgcatgttccgcccaggcagggctttgcattccagggcttttaaattaaaatactaaaattaactttaattgcaggaactatcttaggtccaatcactgtcccgctgcgcgcggtttcctggaa

SEQ ID NO: 26318 - DNA, 548 bp, Homo sapiens
  source 1..548: mol_type = other DNA
acaccatcaaaaattttatttaaaaaagttttttttttttttttaaaaagggaaaaggcccgggcgcctgtctttgggaggccgacgtgggcggatcacctgaggtcgggagttcagcctggctaacatggtgaaaccctgtctctactaaatatgggtcccagctactcgggaggctgaggccggagtatcgagtgagctgggatcactccacggcactccagcctgggcgacggagtgagactctgtgttactttgtcgcccaggctggcttgggaccccaggctcagcacctgagtagctgggacctgaggctcccgcccccgcgccaggtggtgatgtgagctcagactctccctccctagtgaatggagatagaaagggagccgtgggccgtcaccatgacatcgtacatgccgcccaggcagttccagacaattccagggctttggaatcatgcctcagagcgcaagtcccgccccggccccgccccggccccgccctctgccggttctaaagggcaaggtctcagcggcctggcttccgtc

SEQ ID NO: 26319 - DNA, 351 bp, Homo sapiens
  source 1..351: mol_type = other DNA
tgaaaaattttatttaaaaacgggttaaaaaaaaaaagtaatcctagcagctcagcctgggtgacagagcgagacgcgggagggggtgttactttgtcacccaggctggcctggacccccaggccgctgcttcctgagtagctgggacctcaggcttccgccccgtggcatccctgctgtgtttaggcagcaggtggtgacctcactcctccctggcctgagcactccgtcccgcatcccaggcggaggccctaggaccctccccggcagggctttgcattggtgcgaggcggagggatgcacaggtcccgccccggccccgccctcaggccccgccaaactgttcgccgg

SEQ ID NO: 26320 - DNA, 377 bp, Homo sapiens
  source 1..377: mol_type = other DNA
cctgtaatgccagctattccggagctgcagtgagccgagatgtcaccactgcactaagaataatgttgtatccctatctcacacaatcaaaattttattttaaaaattaaaagagacgatgattgtcgcccaggctggcctggacccccaggctcagtgatcctcccgcctctggccctcacactccgtcgcgcatcccaggcggaggccctaggtggactctccctcctgagtgaatggagaatagaaagggagaggatttctgttctgttctgtcaggcagggcgggagcgaggctgagagacgcacaggtcccgccccggccccgccctctgccggttctaaagggcagggcccacccaggcctggctttagtc

SEQ ID NO: 26321 - DNA, 203 bp, Homo sapiens
  source 1..203: mol_type = other DNA
gattttgagggcctctaaaagtattagggcggcagcagctgctgcacgcagacatcaaccacactaactatgcctaggaaggatgcggcagtacagccccaggtaatttgctgagtttggttgataaggtgcagatcctgaactaacctattaagtcttatctggttttaggaggctttaaaaggccaataacaggctttaat

SEQ ID NO: 26322 - DNA, 480 bp, Homo sapiens
  source 1..480: mol_type = other DNA
taccagtaatactgtaatactccggaacgccccttcacgccagcctgggcgacagagggaaagtaatagatttcttccacaaatgtgctcacaccatcaaaaattttatttaaaaaggtttaaaaagctttgtcgcccaggctggcctggaccccaggggagtagctgggacctcaggctcgtggtgcctggcctgagcactccgtcccgcaccccaggcagtggctttagggaagtctctgagcgcacagggcggaccctccctcccttgtgaatggagaatagaaagggagaggagttctgttctgttccgccctggcagggctttgcattccagggcttttgaatcatgcctcagctgggagccaggatgtgagacacacaggtcccgccccggccccgccctctgccggttctgccgccacccggcccaggccccgcccaccacctcgcggggcccgccgaggcctggcttctgtc

SEQ ID NO: 26323 - DNA, 393 bp, Homo sapiens
  source 1..393: mol_type = other DNA
tgggacctcaggctcccgcccccgtcggcctgagcactccgtccggcattccaggcggtggcttcagggaaggtctccttccggatatctatctgttctgtgcagcatgacatggtacataccgcccaggcagggctttgcactcagacaccgagttgtagaagtcagctgcattggcaagcactgcctcctaacatcagcttctaaatcataagttgatttttaactactgggttaggccaggcggatccaggcctggtttcgggcctggcgcacttcctgttgtttttactgactataaaacaatataaaacaatgtcgctgggagcgaggctgagagacgcgcagatcccgccccggccctgccctctgccggtaggcctggcttttgtc

SEQ ID NO: 26324 - DNA, 393 bp, Homo sapiens
  source 1..393: mol_type = other DNA
tgagtagctgggacctcaggctcccgcccccgcgtcggcctgagcactccgtccggcattccaggcggtggcttcagggaaggtctccttccggatatctatctgttctgtgcagcatgacatggtacataccgcccaggcagggctttgcactcagacaccgagttgtagaagtcagctgcattggcaagcactgcctcctaacatcagcttctaaatcataagttgatttttaactactgggttaggccaggcggatccaggcctggtttcgggcctggcgcacttcctgttgtttttactgactataaaacaatataaaacaatgtcgctgggagcgaggctgagagacgcgcagatcccgccccggccctgccctctgccggtaggcct

SEQ ID NO: 26325 - DNA, 321 bp, Homo sapiens
  source 1..321: mol_type = other DNA
gttccagttactcgacaggatggcctggacccccaggttcagggattctcccgccgctgcttcctgagtagctgggacctcaggcttccgcctcccctgctgtgtttaggcagcaggtggtgacctcactcctccctggcctgagctctccgtcccgcatcccaggcggaggccctaggggggtgaccctccctatagaaagggagaggatttctgttctgttctgggcagggctttgcatttttgaatcatgcctcagccttagaagcacaggtcccgccccgggccctccctctgccggttcccgcccaggtccagcca

SEQ ID NO: 26326 - DNA, 331 bp, Homo sapiens
  source 1..331: mol_type = other DNA
gttccagttactcgacaggatggcctggacccccaggttcagggattctcccgccgctgcttcctgagtagctgggacctcaggcttccgcctcccctgctgtgtttaggcagcaggtggtgacctcactcctccctggcctgagctctccgtcccgcatcccaggcggaggccctaggggggtgaccctccctatagaaagggagaggatttctgttctgttctgggcagggctttgcatttttgaatcatgcctcagccttagaagcacaggtcccgccccgggccctccctctgccggttcccgcccaggtccagccaacctgccccg

SEQ ID NO: 26327 - DNA, 420 bp, Homo sapiens
  source 1..420: mol_type = other DNA
atcttgaaaacatgtacttaacgggttgcatagaacaatgaagtttctctaaggcttattcattaatagaatagttcttagttttcagttgtattttctcaacatttaaaaagcaaagtaaagagtatttcctgggccaggcacagtggctcaggcctgtcttgaagtcagtgccagctactccggaggctgaggcagaagaatcgcttcaggctgcagtgagtcaagatctcgccactgcactcaaaggagaaagtaatagatctcttttacaagctcccgggttcaaaagcctgagaactggcctgggaggaggctgagactcacaggtcccgctccggccccgccctctgcgggttctaaagggcaaggtctcgccgcttcgcgccccgccggctccacccaggcctggtttctgtc

SEQ ID NO: 26328 - DNA, 441 bp, Homo sapiens
  source 1..441: mol_type = other DNA
ctatctcacacaagcaaatttagtttgtttatttatttttagagagggagtctggctctgtcgcccaggctggagtgcagtggctcggtctcggcccacgcctaataaaaattttattttaaaaatttaaaaaagagagagactgcggaatgttacattgtcgcgcaggctgtcctggacccccaggctgagcgatcctcccgccgctgcttcctgagtagctgggacctcaggctccccctgagcactccgtctggcatcccaggctgtggccctactccctccgaatagcctgtgtctcgccgccaaaacccggagaacgggttgggaggaggctgagagatgcacaggtcccgctccggccccgccctctgcgggttctaaagggcaaggtctcgccgcttcgcgccccgccggctccacccaggcctggtttctgtc

SEQ ID NO: 26329 - DNA, 410 bp, Homo sapiens
  source 1..410: mol_type = other DNA
aagaatgtgacaaagtttacattcgcaaatgagaaacctcacaagtgtggtgattgtggtaaaaatcttacaaatgtcatcagtgtggcaaggtctttagtctttggagacaattgtttcaagtgaattgacatcagagtcaaatcagcattgacctgagtttgagttgacttaacattgatttcaagcattaatcgacattaaactgtttggtgtctcacacctgaccagctggccagtgcagtgatgtgatctcggttcactgcagtagctgggactagttagctatggcctgttttttgtttctttaacaaaaagttatagaaatttctctgggtattgtgttgaatctacatcacattcagttataatcatttagcaatattattccattcaatatcactttgatc

SEQ ID NO: 26330 - DNA, 429 bp, Homo sapiens
  source 1..429: mol_type = other DNA
cttctacaactcagtgtctgagaagttttgtcactgttacaatgtcaatgctttttttaaaaatcccttttttggcctggacctccgggctcagcggtcttgcggctcctgcttcctgagtagccgggaccccagacttgtttaagcaggaggtggtgacctcactcctccctggcctgaggcctccgctccgcaccccaggcggtggccctgaggaagtcaatggaaaatagaaagggagaggatttgctattctgttctgtggattttggacataaattgctaaaattaatttcaatagcaaggaactttcctctgagctgctccagcctcactggcggctttcgccggccttctagtccaggccccgcctaccttctcgggggtcccgcccaggcctggcctctgtcctgcgctgattggtcacac

SEQ ID NO: 26331 - DNA, 420 bp, Homo sapiens
  source 1..420: mol_type = other DNA
tgtgaacccttaaaaacttctacaactcagtgtctgagaagttttgtcactgttacaatgtcaatgctttttttaaaaatcccttttttggcctggacctccgggctcagcggtcttgcggctcctgcttcctgagtagccgggaccccagacttgtttaagcaggaggtggtgacctcactcctccctggcctgaggcctccgctccgcaccccaggcggtggccctgaggaagtcaatggaaaatagaaagggagaggatttgctattctgttctgtggattttggacataaattgctaaaattaatttcaatagcaaggaactttcctctgagctgctccagcctcactggcggctttcgccggccttctagtccaggccccgcctaccttctcgggggtcccgcccaggcctggcc

SEQ ID NO: 26332 - DNA, 544 bp, Homo sapiens
  source 1..544: mol_type = other DNA
tttgaaaatgtctaagaacaagctgttccccatcaccttggacacatgttctcaggacctcctgagggtcattcatatttagcttagaataaatctcttaagatattttacagtttgattcttttccacgacaaaaataactcattttaagtgcagcatgaaataatcttatatgcactgttacaatgtcagtgctttttttaaattactttgtcgcccaggctggcctggaactccaggctcagcgatcctctcgcccctgcttcctgagtagcggggaccccagactcctgccaccccgccgtcccactccagtgaatggagaattgaaagggagaggatttctattctgttctgtggctttggaattaaattgctaaaataaatttcaatagcaaggaactgacttctcagggaggtactatttccctgactgctgagctgcgcgagatggagaaaagctcaggccccgcccctttcccgcccccgccccggcctcgcccaggccccgcccacctctcggggatctggcccaggtcccgct

SEQ ID NO: 26333 - DNA, 279 bp, Homo sapiens
  source 1..279: mol_type = other DNA
tactcgggaggctgagagcattgcttgccactgtaagtataaaaaaggacaatgcaatttatatctattttttaaaagttactgctaatttcagggcttttaaattacttaattttaatcgcagaaaaaccgcctccattctaagaggaaagcagtttggtttccaaaataacctacacaactgtgcttcttgaaaccgtttgaagggcgctgggctgtgggcatcacacgaaatcgcagacgccggcccctggcccggcggaccccgccccgggccgc

SEQ ID NO: 26334 - DNA, 503 bp, Homo sapiens
  source 1..503: mol_type = other DNA
caaacaaaaaaagtgttgttgctttttgtcaacttgagatagatcttcattaattcagtttctatttttctgtatataattatttccaaagtaactttataatcagctcatggcattttctaaatataatgtgttttcaatttttttagctccaaaattcatcagatatttcttaacaatttcaaaatctttccctttgaaattaattttctgctctttattatataatagaagcattatttgttgactagtaggtaattttagattgtttcaatgtgtacctgataaagatgtcaatgatgtttttaccttaacatggaaacctagtttaactagtctattattcaattttcttcttgtaatttgttaaaatagtaaagaagtttcttttgctcagatatgtgaaaagtcttgctctctcacccaggctggagtacagtggtgcaatctcggcagtgctgggattacaggcacgagccaacatgcctggccagtcctggaat

SEQ ID NO: 26335 - DNA, 417 bp, Homo sapiens
  source 1..417: mol_type = other DNA
gatttttaaaccatgagatctcctgagagctcactatcatgagatttgtggagccaaaccatatcaaatacttttctttcatcgtctgaaggtctttcacagaccaaaagtttttaatttggtaaataccagttgattttttttttctttaatgaataatttttgaacaagcataacatagtttttaaaaattcttcattcaattcccttggtaactttgtcaaaaatccatatgtcttttattgccccaaaaccacatatattggtagtcttgaaatccagtggagtgattccagacaccggattccgctaagctgcaggagactccctagcaggatcggaaaatagttttaacataaaccgttttcaacttggtaagtggaaaacattttggtttccaccataagtggcccacac

SEQ ID NO: 26336 - DNA, 565 bp, Homo sapiens
  source 1..565: mol_type = other DNA
aattacatgatatttagaaattattgatttaagcatattttgatgcaaagaaagattatgtcaaagttgtggttaagtcatttcaagtgtggaataacgaatataagcaaaaataatgcagtttatctctattttttaaaaattcacatggtttaaatcagtagtcgcacagtagttcactcctgtaatccgcagagttggagaccagcctgggccgagactcccatctttacaaaaatatatgttttaaagaacaataaagccattaaattgcatatccgtccaggtaggatgctgcatttcccgataatttccagacattttagttaaattaaatacattttaattgcaggaattgcttgcctcgtggatcctccactaagatcccagttcccagaccgagatcctattttaacataaaccgttttcaacttggtaagaggaaatcatttttaaaactgcttcaaattggaacggtgctcccggggaggcaggctgagggaagcgcagaccccgccccagctccgcccaggccccgcccccagagtgcccgggctcttttccg

SEQ ID NO: 26337 - DNA, 565 bp, Homo sapiens
  source 1..565: mol_type = other DNA
aaattacatgatatttagaaattattgatttaagcatattttgatgcaaagaaagattatgtcaaagttgtggttaagtcatttcaagtgtggaataacgaatataagcaaaaataatgcagtttatctctattttttaaaaattcacatggtttaaatcagtagtcgcacagtagttcactcctgtaatccgcagagttggagaccagcctgggccgagactcccatctttacaaaaatatatgttttaaagaacaataaagccattaaattgcatatccgtccaggtaggatgctgcatttcccgataatttccagacattttagttaaattaaatacattttaattgcaggaattgcttgcctcgtggatcctccactaagatcccagttcccagaccgagatcctattttaacataaaccgttttcaacttggtaagaggaaatcatttttaaaactgcttcaaattggaacggtgctcccggggaggcaggctgagggaagcgcagaccccgccccagctccgcccaggccccgcccccagagtgcccgggctcttttcc

SEQ ID NO: 26338 - DNA, 402 bp, Homo sapiens
  source 1..402: mol_type = other DNA
tctcaaaataataataaaaataataataacgatagtatattagtaattaataacttagacaataaatccagcacttggatttgtaatttatctcaagaaatgtgcattaggataataaaggaaaataaatttagagaactttgcgttcttttagcggaaataaaaattacgttccagtgaaagtcaatataaaattaattaaatacaaattttaatcgtccggatttcagaagttcctggatccaagagtcccgcctcgtcgcaggacgcgctaattttttacttaacgcgccgaggagaggtccggcagtccgacccctaggccccgcccatccccttgcgccgccccagtgcactcgcgtacgcgcaggttcctgccgacccggaagcggatctcgcggg

SEQ ID NO: 26339 - DNA, 379 bp, Homo sapiens
  source 1..379: mol_type = other DNA
ctgtaattgcagatactggcaggggaatcgctgaaacgcagaggctgcagtgagccgagatcccatcacggcactctagcctgagagaaattggatatccacatggaaaagaatactgttagatccatcaaactcttattttaaaacgtttaaaaaaaaaggaaaaaaaagcgggagggggtgttacattgtcgcccaggctggcctggacccccaggctcagcaatcgccgctgcttcctgagtagctgggacctcagctccctcgaatggagactggaaagggaatcgaaaactgaggccctgggagccaggctgagagactcacaggtcccgccacagccccgccccgcgggtcccgcccaggcctggcttctttc

SEQ ID NO: 26340 - DNA, 274 bp, Homo sapiens
  source 1..274: mol_type = other DNA
aaaaacaaaagggacatcaaaagtgcttttgttttcatgtgtaatagatttactttagtatgtgggactacagggccaggctggccttgaactcctgacctcaggtgagagataaatcttagttttcaaaatttcttttttaattcataatcacagagaggcagcatggctgggatcaccaccatcgaggcagtgaagcgcaagatccaggttctgcagcaccaggcagatgatgaggagctggactgtgctcaggagcgcctggccactgccc

SEQ ID NO: 26341 - DNA, 507 bp, Homo sapiens
  source 1..507: mol_type = other DNA
cgcctgtaatggcaggtactggcagaggctgcagtgagcccagttcctgccactgcactccagcctgggcgacagagaaatgcagtaatagatctcttctatctcacacaatcaaaattttattttaacgttaaaaaatggagaaaaacgcccaggctggcctggacccccaggctcagcgatcctctcgccgctgcttcctgagtagctgggaactcaggctcccgcccccgcggtcgcccctggctggcctgagcattccgtcccgcatcccagggggaggccctagggaagctgagcaggggtggactctccctcctgagtgagtggagaatagaaagggagaggatttctgttctgttctgtgggccgaaatcgtacgttccgcccaggcagggccttgcgctgagaggagcaccggtcacgccccggccccgccctctgccggctcgctcgtccaggccccgcccacctccttgcgggtcccgcccaggcctggcttctgct

SEQ ID NO: 26342 - DNA, 343 bp, Homo sapiens
  source 1..343: mol_type = other DNA
gcttattattattattattattattttgagacagtgcagtggtgtgatctcggctcactgcaactgatctcaggtgatataaaggacgcggggacacgccttccctatggaaagttgtaagcaattataactgtaggcccctagatttgaagattctgccagtctggcagctgctctaactcccagaggtctctggggcatggctccatgtgtgcagttgcctgcagggaaacactgatgggctacatttcccagaagccctcaaggcaggacgcccttagggtcgcgtagagttgcatgctgggaaatcctgacagccgacatttcccagaggcctctgggt

SEQ ID NO: 26343 - DNA, 593 bp, Homo sapiens
  source 1..593: mol_type = other DNA
cttggcataaataccaaaaagtgggattttgagtcaaaatgaacattgtttacaatgcagcagcagctccggcagcctgtgctagcggcctgcagtgaggacagccatggctcgcccggcatcaccccactcaagaggccagacggggtcccagctggggtgacacagctcctttcccagtcgggaaggggcgtctgcagggaccaggaagggcttagcttggggctgcccgctccggcaccgacctgggacgcgccctgaggcccctgcctgggaccgtcccggaccatccaggagtacgccgtgctgcatgctggaacacggggcttggggctctggtttccccctcccgaggccccagcgttgggggactggggtgcacgcacacgtgtcagtgtgtccgcgcgtctgcacatgcgtgtcggcatctgtgcgtgcgcacacgcccgtcagggtctgtgtgcccgcacaggcacgtcaacgctcacatacgtgtcggggtctgggtacgtgcacatacgtgtaggggtctgtgtgcatgcgcgctgcggccgctgggtgcgcgtgcgcatgcgcgctggcctccagggggt

SEQ ID NO: 26344 - DNA, 678 bp, Homo sapiens
  source 1..678: mol_type = other DNA
cactcagaggccagacgggctcccagctggggtgacacagcccctctcccagccgggaacgggcgtctgcagggagtggggctgcctgcctggaacgcgccctgaggcccctgcctgggaccggcccagactacgtttcccagaggccccccaggaacttaaggcgctgcatgcgggcctgagtagtcgcttcctaggaggaacccaggggtgcgcgccaagcacgcacgcgtgtgtgtcagcgtctgtgcacgcgcacatgtgtgtcggggtctggtcgcacatgtctggccacacgcatgcgttgggggtctgtgtgcgcgtacacgtgcatggtgtacatgcgtgtcaggatctgtgtgcacgcacatgcgtgtcgggctctgctgctgcctgcgcgctccggccgctgggtgcgggaggcccctcccgagtccggggtgcgcatgcgcgctggcctccatgggtggcgggaccgactgtgtgacgcacttgcgtgggagtgcgaggctgacgcggcggctctatctcccgtaactgtgacacgggtgcacgcacggtgcgcttctgcaccggtgacgcaaccgctgtgtctccgccagtccgcgcaggtgagattggcgcccatggctccaaggggagacgggcacgcagccgggctctccccataactagggc

SEQ ID NO: 26345 - DNA, 509 bp, Homo sapiens
  source 1..509: mol_type = other DNA
cacctcgggcagcctgtgctggcggcctgcagagaataccccactcagaggccagacgggctcccagctggggtgacacagcccctctcccagccgggaacgggcgtctgcagggagtggggctgcctgcctggaacgcgccctgaggcccctgcctgggaccggcccagactacgtttcccagaggccccccaggaacttaaggcgctgcatgcgggcctgagtagtcgcttcctaggaggaacccaggggtgcgcgccaagcacgcacgcgtgtgtgtcagcgtctgtgcacgcgcacatgtgtgtcggggtctggtcgcacatgtctggccacacgcatgcgttgggggtctgtgtgcgcgtacacgtgcatggtgtacatgcgtgtcaggatctgtgtgcacgcacatgcgtgtcgggctctgctgctgcctgcgcgctccggccgctgggtgcgggaggcccctcccgagtccggggtgcgcatgcgcgctggcctccatgggt

SEQ ID NO: 26346 - DNA, 251 bp, Homo sapiens
  source 1..251: mol_type = other DNA
gagctcaggagttcaaggccagcctggtcccagctacttgagaggctgagaggttgcagtgagctgagatcacgccagtgaactctagcctgggtggcagagtgagactctgactcagcgggtggatcacctgaggtcagagctgggtgtggtgtcctgtaatcccagctactcaagggccacagagtaagactctgtctcactccacccagaacagccattggtgagtgagaaagcattatttcagcaaa

SEQ ID NO: 26347 - DNA, 122 bp, Homo sapiens
  source 1..122: mol_type = other DNA
attttgagggcctctaaaagtattaatgcagcggcagaattctgaccacgctaaccatgcctaggaagcagtacagctgcctgaggctttaaaaggtgataacaggctttaatctttttaaa

SEQ ID NO: 26348 - DNA, 165 bp, Homo sapiens
  source 1..165: mol_type = other DNA
gcctgttttacaggatgggtaaccactctgatacaaagacctgaactaagtgcaatggcatgatctcagctcactgcaaagtagctgggatttcacccaggctggagtgcagtggcaactcctgcctcagcctctggagtagctgggattacaggcggcgcctcg

SEQ ID NO: 26349 - DNA, 160 bp, Homo sapiens
  source 1..160: mol_type = other DNA
tcacccaggctggagtgcagtggcaactcctgcctcagcctctggagtagctgggattacaggcggcgcctcggggttctagtcaggggagccttggacaaggacaaggcctgatctgggtgcactgagacctccgggcccagagtgacaaagagggtct

SEQ ID NO: 26350 - DNA, 433 bp, Homo sapiens
  source 1..433: mol_type = other DNA
aatgctgggattcaggcctggccaagaatctgggcctcagcctaggcatcctgtggagcccaggaatccgggcccccaactgctaccgcgctagccctgcggcgcccggtgccagtgggtaccccccattgaactgaggggcctggtcccccaatccgctgcgacccaggaaccctaaacatgcggggtttctatggatccctggcctacccgggagactcctctagggctgtgtcgaggagggcagcccccaggagtctccacgccgcctcagccctccaccctgctcactggggtggggcgggagctccggtctgctcttggccccgcctcggggcggggctgggatagcccagactcggggaagtccctgtccaccgccctagccggagctgcgccccgccccggccccgcccccgtcccgcccgcgctg

SEQ ID NO: 26351 - DNA, 850 bp, Homo sapiens
  source 1..850: mol_type = other DNA
aggaatcccggaggggtgtttcctcaccctccagggtctgggctggaggccctaagggcggggtggacccctcccctcccctcccctcggcgcgctgcgcgcccccctccgcggctagcccaccttccgcgggggacagaatgagtgacgccctcgctcgtcctcctcccctgcttgggacggggcagtagcccgccttctagagcacgggacgctgggccagtcccttccttctccttcgagggtcctggaggggcgtgggggcaggcagtgtctggctccgggtggagcctcccaggtgctcccgcaagccccgaatggcgattagggaggccgtgggaggcgtagctgggcctcgggcctgacgccagcaccgcgtgcagtttccggcctggagcctgagcccctcagaggcccgggtccctgcccactccggtcttagagatgctcttgggggggctctagcccatgtttatagggatccagaaatgcaggcctccaaccctgagagtcggggtccccaccccccggaaatccgggagagggcgggcagccccggaggcgggcgggggtccgggcaccgcctcctggtccctgacacattccagatgcctgggccgactcgaggcgcggagacaccggctctggctgggccgcccgcctccacagccgccgcccacacccccgcccccgcggggttaagatcacacacgcgcccacgccggcccgcggggcgtgcactttcgctgggttccgtccgccgcagcccaaacagttaactgaacggggaggggagggggcggggcttacccggggtcaccgccagggccctgctgggttccacgccacg

SEQ ID NO: 26352 - DNA, 154 bp, Homo sapiens
  source 1..154: mol_type = other DNA
actccggaccccagggcgcccacaggacacacgaggcaccctaggtgggggggagccaggctcagaggatgcccctccctccagccagcccccggagtgggtgtgtgcacgtgtgtccgggaggggagcgcctttaagccgaaaccccgccctc

SEQ ID NO: 26353 - DNA, 159 bp, Homo sapiens
  source 1..159: mol_type = other DNA
gggggctcctggggaggaggcggcggcgcctgcgatcgtggagccccctggggcggaggcggcgcgggctattaatttattaatttattaattatttcatcttatttattaattattattattattattattattattattatttttgagaaagagaag

SEQ ID NO: 26354 - DNA, 355 bp, Homo sapiens
  source 1..355: mol_type = other DNA
gactcaggagcccaggcccccgacccaggagtcgacccaggagtccaggcccccatcagacccaggagtccaggcccccagccccttcagactcaggagcccaggcgcccctcctccctcagactcaggagcccaggacctaggagaccaggttcctctcctctcagatccaagattctgggtacccggggtaccgaggcttcttctcccttagggacccaagactcctggcctcaggccctcctccctgagacccggggccctgcctcccccgtctcctgctgcccgggagactgcggagctgggactctcggcgccgctccctatggcaacaggcgccgggcgacaggacgag

SEQ ID NO: 26355 - DNA, 582 bp, Homo sapiens
  source 1..582: mol_type = other DNA
ctcaggagccgcccctcctccctcagactcaggagcccaggacctaggagaccaggttcctctcctctcagatccaagattctgggtacccggggtaccgaggcttcttctcccttagggacccaagactcctggcctcaggccctcctccctgagacccggggccctgcctcccccgtctcctgctgcccgggagactgcggagctgggactctcggcgccgctccctatggcaacaggcgccgggcgacaggacgaggccgggcgcgggcggaggccaggccggtggcggtggcgggcacagccggacgcttcggaggcagcgcggagctggggtcggcgcggggccgaggcaggagagcgagaggggcccctgctcgggagtcgggggtgggagccccgagggggggccctggcctggggctgagcctggcgcgaacccgaccgggaaggccctgggagcccgggcccgaaggggcgcagcgtctcttggggactcagtcctggttttccgagccgcagtgcggaccacagccccatagtgtgagccccaggagggcccccggtcccatctgccccagc

SEQ ID NO: 26356 - DNA, 321 bp, Homo sapiens
  source 1..321: mol_type = other DNA
gtcacgggaccagctaatcccagctacttgggagtctgaggcaggagaatcggttcggagccgagatcgcgccactgcactccagcctgggtgacagagcaagactccccccgccccccaaaaaaaggttaacattgtggggagctgaagctataaagctataggtatttggagtgcagtctccggagtagctcaggtgacggtattagtgttttaaaataaaaaattacatttacagaaaacgtggggccacaacgaaccgggcagccggagagctgcggccggcccagtcccgctccgcctttgaagggtaaaacccaa

SEQ ID NO: 26357 - DNA, 318 bp, Homo sapiens
  source 1..318: mol_type = other DNA
agtgagccaagattgtgccactgcactccagcctggctgacagagattctgtctgtaattataagtcacgggaccagctaatcccagctacttgggagtctgaggcaggagaatcggttcggagccgagatcgcgccactgcactccagcctgggtgacagagcaagactccccccgccccccaaaaaaaggttaacattgtggggagctgaagctataaagctataggtatttggagtgcagtctccggagtagctcaggtgacggtattagtgttttaaaataaaaaattacatttacagaaaacgtggggccaca

SEQ ID NO: 26358 - DNA, 290 bp, Homo sapiens
  source 1..290: mol_type = other DNA
caattcagaatcggagcactcaccttgtcccaggcattcttgaggaaggcgccgactcctgaaggggtggctggaggagcccagtcccaggaccgcccagaggttcccagaactacccgagccccgtgcgccaccggcacctcgcagccatctttgtctccgcggcggcgacagcggcgaggacgcggagcaccctgggagttgtggtccctatgcgcgagaacccgctcccagggctgcgcgtgcgccctggagcacaagtagtctgtgcgacggcccgctttcggagc

SEQ ID NO: 26359 - DNA, 424 bp, Homo sapiens
  source 1..424: mol_type = other DNA
cgacctcaggccgccttggagcctggcacataataggtgctaattttcaatcgatcaattaatcacagcaagggcctggcacataattggtgttaatttttcaatcaatcacagcaagggcctggcacttaacaggtgctaatttttatctatctatctatctatctatctatctatctatccatccatccatctatctatctgggcctggcacataataggtgcaaatttttatctatctgtcaatcaatgacagcaagagtctggcacataataggttcttatttttaaaacagacagatatctttctatctgtctatctatatttaaagacatggttttgtttctagagttaaataaatgaacacacagtgccatagggctatgacattccgtaaatgaggatctgggtgcgaccaagccc

SEQ ID NO: 26360 - DNA, 414 bp, Homo sapiens
  source 1..414: mol_type = other DNA
ctgtgccatgttggcaggcacagagggaactcagccgttactgctaaagaccaagaccaggtcctggagtgcagtggtgtgatctcggctcactgcaccccagtagctgggactacgggcaggatggtctagatctcctgacctcgtgatccgtgagccaccgcgcctggcccagaccaggtcagtttcttaagtgatctgagctataatggcggtaacagagcactgtgagagcccgcagaaagctcctaattttgttccgccttaggtgggtcgactagtcactccggagcggttctgcgcgagtgcgcacgcgcaggctccgaaagcgggccgtcgcacagactacttgtgctccagggcgcacgcgcagccctgggagcgggttctcgcgcatagggaccacaactccca

SEQ ID NO: 26361 - DNA, 80 bp, Homo sapiens
  source 1..80: mol_type = other DNA
cgccactgcatcacggggactcacgtccggacgtagggccacgtcccgccgtcctcggctgctgagcctgatgggacaag

SEQ ID NO: 26362 - DNA, 345 bp, Homo sapiens
  source 1..345: mol_type = other DNA
gctggcgccgccgccgaccccgggtctccaggatgtggccaccaaataggggaggcaacgctctgagcctggcggcgctgagaactcctcaaagcccacggctgccatggtcctgagaggcagggaaaggctcaggggccctggatcctggacccccagccccttctccgatcctagaatcccctgccaggatgcaagagtccagacctgacttttggtggcagttgcatgacatatggttgcacacaatgcagctgcactgtgcgacctccggaagccccgggcctcagagcttccgcttgtcccatcaggctcagcagccgaggacggcgggacgtggcccta

SEQ ID NO: 26363 - DNA, 81 bp, Homo sapiens
  source 1..81: mol_type = other DNA
aattattttagcgaacaatttttgctccgtcccagctactcgggaggctgaggcaggagaatcgctcgccactgcatcacg

SEQ ID NO: 26364 - DNA, 188 bp, Homo sapiens
  source 1..188: mol_type = other DNA
ctagaatcctgccaggatgcaagagtccagacctgacttttggtggcagttgcatgacatatggttgcacacaatgcagctgcactgtgcgacctccggaagccccgggcctcagagcttccgcttgtcccatcaggctcagcagccgaggacggcgggacgtggccctacgtccggacgtgagtccc

SEQ ID NO: 26365 - DNA, 187 bp, Homo sapiens
  source 1..187: mol_type = other DNA
cagagacttaaagcagtgtctctggtcgctgcttacctggccgggacgcaatattggtccaactagcatgaatctcctcccccagaccaattgttttgcagcctgcgcgggaggccaatcgaacgccgcgccttggagcgatcacccaatccgcgaaagggggcagggcacgagaagagaggagggg

SEQ ID NO: 26366 - DNA, 425 bp, Homo sapiens
  source 1..425: mol_type = other DNA
gggctgggagactgaactccttgagcccagacgaggaggggcttaggcgtccacatccctggcttcgaaggagccagactgtctccttcagcatcgcctcatctctgagctcaaacgtcagagagagcgggtccctgagagggcccctgggggggttggggaagaggattgtctcacctccacctctctttgccccaggaggcgcagaataaagtcttcctggcacggcgcgctgtggcgctgaccttggtgatcttccttgtatcaataaatacagccgaggttgctgagcgcgctttgaaagtcggtgcagacttccgcaaggagacttgtcggtcatgtcggccaatcgacggccgcatctggtagcatcaggggcgggcaacagccgaacgcctagcattacaggccagggggccgtgaag

SEQ ID NO: 26367 - DNA, 319 bp, Homo sapiens
  source 1..319: mol_type = other DNA
cccaagctcagctcggtgtctgggctgaagcagacactgctggcggagtccgaggctctgaccagctacagccaccgggtgttggggacgtccacgtgcggctgcgccagcgcatcaagcagctccttctccaagaaaggcaggctctctaccaaaaaaaaaaaaaaaaagtttgtttttttttaagtaagcacttgatacagctgaactggaacttcaggccaggaacgcagggccacctgggggcggagcctctgatgggcagggctgaccaggggcgggtctgatgctgggcggagcctcaggggcggggcctgcg

SEQ ID NO: 26368 - DNA, 583 bp, Homo sapiens
  source 1..583: mol_type = other DNA
cctggcagccctggggctggggctggctttaggtgggggcagccccagccggcggaaggcagcatcccagcccaccagccttgccccggagaagctccgggaggagtaagctgtcacgacgctccctctgccagctggtcccgggaattctgtgaaccaggctgctgtctcctccccagaaagagtccttaccttggagagggtatgaagcagacccgggggtgtcctccctgccctctgcccagcttctgggtatccagagagcactgcacttccccaaaacggaaggggcccctgggcagtgggttttgggcaaattcccttgcaccaatattgcagacttgggaagcataagcttcccatttcacaaaggggaaactgaggtgcgggtgcgcgggcctggggacggccgtcccatggcttccatctgagcttagtccaaagtcccagggtgaggtacagcccccccgagcccaggaaccaaactgtgaggcccggggcaccacggggacttcagctcccaggagacctgcggccctgctccctccgggccacctgctggccaggtacacacctgcccctg

SEQ ID NO: 26369 - DNA, 488 bp, Homo sapiens
  source 1..488: mol_type = other DNA
tggagccacccactgcgcaccgcgccacgcgcgccgcgggaagtcaggtcccgcccctcgcaggaccgaagccccgccctcctcccgcgggggccaccttggctccgccccactgaggatcgtcatcctggcccggtcccgtaggcgcacgccggccctcggggttccgcccttgtggccccacccacatccggccgagtctgtggccccgcccacgaaacatgtggctccgcccacagtggcctcagctctcccgcttccggagaactcaagctcgaaggacaaagcttttggctccttccgagcccgaaggcccgccccttcacgtactcggagctcggatcccagtgtggacctggactcgaatcccgttgccgacccgcccggggccctgaccgttcttccccggcctgatctgcgcagcccggcgggcgcccagaaggagcaggcggcgcgggggcgcgctgggcgggggaggcgtggccgga

SEQ ID NO: 26370 - DNA, 408 bp, Homo sapiens
  source 1..408: mol_type = other DNA
cgagcgccagcgcaccccagttggggagttcccgccctaccgctcgggcgggctcaccccaattgggagcgctcagtcgaggtggagccacccactgcgcaccgcgccacgcgcgccgcgggaagtcaggtcccgcccctcgcaggaccgaagccccgccctcctcccgcgggggccaccttggctccgccccactgaggatcgtcatcctggcccggtcccgtaggcgcacgccggccctcggggttccgcccttgtggccccacccacatccggccgagtctgtggccccgcccacgaaacatgtggctccgcccacagtggcctcagctctcccgcttccggagaactcaagctcgaaggacaaagcttttggctccttccgagcccgaaggcccgccccttcac

SEQ ID NO: 26371 - DNA, 417 bp, Homo sapiens
  source 1..417: mol_type = other DNA
cagtgagaacccaggaatccaggccccctgcctcctccctcttcgaggatccaggaacccagccttctagaccccgtttgaggatgctccttggaggagacaggctctcctgtccttggagaacccaggaaagtgtggggatctcccgcgaggatccaggaacccagacggatcacccagaggagcccggggaacccggggatcgaaccccaggcccaggcccaggcccagcgcatccccggcagagccacaggcggttgcgccagccccgagttccaacgcgcctccggggccgccccgcacccgccagcccgcagagaccctgccgccgtgtaacctcgcctcgccactgggcgccgccaccctggcccacctgagctgctcgccgggcaggaggcggccgagcagtcccagccc

SEQ ID NO: 26372 - DNA, 515 bp, Homo sapiens
  source 1..515: mol_type = other DNA
cgggcaggaggcggccgagcagtcccagcccgcttgccgccgcagctccggccacgcctcccccgcccagcgcgcccccgcgccgcctgctccttctgggcgcccgccgggctgcgcagatcaggccggggaagaacggtcagggccccgggcgggtcggcaacgggattcgagtccaggtccacactgggatccgagctccgagtacgtgaaggggcgggccttcgggctcggaaggagccaaaagctttgtccttcgagcttgagttctccggaagcgggagagctgaggccactgtgggcggagccacatgtttcgtgggcggggccacagactcggccggatgtgggtggggccacaagggcggaaccccgagggccggcgtgcgcctacgggaccgggccaggatgacgatcctcagtggggcggagccaaggtggcccccgcgggaggagggcggggcttcggtcctgcgaggggcgggacctgacttcccgcggcgcgcgtggcgcgg

SEQ ID NO: 26373 - DNA, 529 bp, Homo sapiens
  source 1..529: mol_type = other DNA
ctccacctcgactgagcgctcccaattggggtgagcccgcccgagcggtagggcgggaactccccaactggggtgcgctggcgctcggagggggcggggccacaggccgcgaggctgccgggagccgatgacgcccgaacgccgaacctattgcgtccgggaggaggcggggctacggattcggccgagccgagaacacccgactgcggattcggtggagccgaggacgcccgaacgccgaacttcctggaagagggtgtggcctcggcggtgccttagcctccagagcttctgaccgctgacgggcccgaagggggacgcccactttgcaagagggtggtgccaaaatggaccttacgggaccctgggtcgggggcttgtctccggcgtctcgtctccggcggccgcgaggcctggtgggatcgcccgggggcggggcctggcgctcgggcccagcaggtggtgaacggcggctgagcgaggccccgccccctgaggcctaggggcggggcttcgccgagaccccgga

SEQ ID NO: 26374 - DNA, 474 bp, Homo sapiens
  source 1..474: mol_type = other DNA
caggcgttggagaccaggagttcaaaaccccgtctctactaaaaatttaaaaattagccgggcatagtcccagcttctcgggaggctgaggcacgagaatcgagtgagcccactgcactccataaaataaattactgataatagtactaataccccttaagtggctattgataataatagtaccaaagtatgtattgaagattgagtaaatacatttaaaattcttagaacagtatgtggcacatagcgttccagaatgccacattattgttagtgacagaaataatccagcactttgggggggccacggcgggaggctctctcgaggccgggagttcaagaccagcctgggtgtaatcccagctactggggggcctcagtgagccgaaatcacgccactgcccgtccaggggcggagaaggaaggttctccctacttctcaggtcacgagacgccggcgttactataagagcg

SEQ ID NO: 26375 - DNA, 319 bp, Homo sapiens
  source 1..319: mol_type = other DNA
aagtatgtattgaagattgagtaaatacatttaaaattcttagaacagtatgtggcacatagcgttccagaatgccacattattgttagtgacagaaataatccagcactttgggggggccacggcgggaggctctctcgaggccgggagttcaagaccagcctgggtgtaatcccagctactggggggcctcagtgagccgaaatcacgccactgcccgtccaggggcggagaaggaaggttctccctacttctcaggtcacgagacgccggcgttactataagagcgcagccgtggcgcttccgcgcctcttcccca

SEQ ID NO: 26376 - DNA, 527 bp, Homo sapiens
  source 1..527: mol_type = other DNA
cccccacagccactgtgatgagtggggttcatgacagcaggctcagaggtgacattcatgtccaagatgataatcaggaattagattatagattacaatgaaacatatatatatatatttctctttatcccctcaggctggaaggccaaggggtgatcatagctccctgaagcctccgccttgagtagctgggacctgtagaaacagggtcacagtctgtttcccaggactgtctgaagctcctggcctcacacgcagctcagcctggactacacagccaggtgtcaggtgcgtctctgctgatctgagtctgcctgcagcatggacctgggtcttccctgaagcatctccagggctggagagacgactagggaggaggagcccacggtcaccctcgcctgcctcagtgggcagacagtggcccgggggcagggagaccccatttctctctgaaatgcctgcagagagcctggtgcctgcccccacttcagccctcttcctgtgggctgaggatgagacaaccccag

SEQ ID NO: 26377 - DNA, 603 bp, Homo sapiens
  source 1..603: mol_type = other DNA
tcatgtccaaagtctcataaaccctagatgataatcaggaattaaagattatagattacaatgaaacatatatatatatatatatatatttctctttatccccgcccaggctggaaggccaaggggtgatcatatctccctgcagcctccgcctcccgggcccaggtggtcctcccacctcagcctcctgagtagctgggaccacagtgtagaaacagggtcacagtctgtttcccaggactgtctgaagctcctggcctcatacacgcagctcagcctggactacacagccaggtgtcaggtgcgtctctgctgatctgagtctgcctgcagcatggacctgggtcttccctgaagcatctccagggctggagagacgctctgagagggaggatgagcccacagtcaccctcgcctcaagctgtgtcctagctctcagtgagataaagataaatcaggcagacagtggcccgggggcagggagaccccatttctctctgaaatgcctgcagagagcctggtgcctgcccccacttcagccctggggaaatcagagccaggggcagttcctcttcctgtgggctgaggatgagacaaccccag

SEQ ID NO: 26378 - DNA, 330 bp, Homo sapiens
  source 1..330: mol_type = other DNA
tatatatatatatatatatatatatgtatgttttgagacagctggagtgcagtgctatgatcatacctcactacagcctggaccaccagccacctcagtgtcccaaatagttgggactgcacagcctccctaaggggcatcaatcatcctcctcctctgagaagctgaggtcttaattgttctgaaaaccttgaacatggagcccttggtgaggagtataggtcaggccgacagggagaccccatttctgtctgaaatgtctgcagagagcctggagctcaccccaaggctcttggggagggcagttccccttgacagtcttgtgacagg

SEQ ID NO: 26379 - DNA, 262 bp, Homo sapiens
  source 1..262: mol_type = other DNA
tttcttcccggaaagaagtcaacttttcttagccagaggcgagatgcttctctgctgatctgagtctgcctgcagcatggacctgggtcttccctgaagcatctccagggctggagggacgactgccatggcccacacaagaagcaccagttctatttgctgctacatcccggctctggctgggggcaggaaagaccccattacagtctgaaatgtctgcagagggcccagtgcctgcctctgagtgtccacacagggtggg

SEQ ID NO: 26380 - DNA, 208 bp, Homo sapiens
  source 1..208: mol_type = other DNA
gtgtttaggcactcccttgagggaattcccctgggctgcttggggtccactccagcctcaggtgtagctagaggacgcagcctcccacggtctggagccctgagcccggggtccactcagtggtggaaacctccaccctaatgagcccttgatggtcccgggacctcttgagtggactcatcaattttcttcccggaaagaagtcaac

SEQ ID NO: 26381 - DNA, 151 bp, Homo sapiens
  source 1..151: mol_type = other DNA
ggattttatcaaatgctttttctgcacctctgtgacataatcatagtagtctagacatcgctgtgatgagtgaggttcatgacaacaggctcgcgaaatagatacataagaatgaaaattttaaaacactaagtaattactccgaaaatgt

SEQ ID NO: 26382 - DNA, 276 bp, Homo sapiens
  source 1..276: mol_type = other DNA
tatatcaattattctatcaatggacatttatgcaagtgctgggatctgtttcttttaaatacagacccagctccttaaaaaaataatatgctttgtaggatatttttaacgtgttaaataccttgtcgggattttagcatagatcacaatattaaaaactccatttgtaatacaaggaaatgtcacggcgtccaagtcaattgaactagtttacggtcatctgcctctaagcgacatttagggtaagcctccctctcgtctcactagtgggaaggg

SEQ ID NO: 26383 - DNA, 345 bp, Homo sapiens
  source 1..345: mol_type = other DNA
cctgtagctgggtatggggtcacacccttataatcccagctactctgcagtgcttaaataaataaatacaatttttaaatgatagcatatatatatatacacacacatatacatacacaccaatctggttacggtaccgatttttttttacatgttctgttaaaaaaatttctttaaattggcctttggaaatttaccagcagtgtgctggtaaagtcttgacatcacagcatggctttgacatgagttttacatttggtaaaagcaaattgtgcctactttgaataaggcactaattaggcttgtctaatattgccttggctctcaagcaaaataaaaaaaaaa

SEQ ID NO: 26384 - DNA, 446 bp, Homo sapiens
  source 1..446: mol_type = other DNA
gagaggccacgtgtgtggtttccagatggcaaagtctcaccctgccctacagcaagaggggacccctggggccaggccaggtcccctcccagggttggcacttccccatctatcggtgtggcatcggcccctatatagatgaccagggtccttatgcaggtagaaggggtccttatgcagcatgaaggcttgctacagtgtccatactggagtagcctctacatctttgtaaaacctttacacaaagtttctccataaggataaagggatcattatgttttaggtcgcagctgtccggatgccgccgacgccagcagcgcggtacctgcgcgggcagcaggtgggagccgcgaccggggtggggcgcggagcgctgggggcctcccgactcccgcagtccccgccgcgaccaccaggggcagcaccgtccccgcccggcccgcgcc

SEQ ID NO: 26385 - DNA, 424 bp, Homo sapiens
  source 1..424: mol_type = other DNA
tggaggctgggcaattaattcctgagtgccaggctcagaactgccctttgacaggggaaagtcagactgatgtgcacagtgagggggtggggacgcatggcctgatgacgccctcccctcaggacttggtgcagccctgcggggcctgtgcgaagacgccctggaaggcctgctctgtctgcaggagcgctggccactgccctctgcagcctgccccgagcctgggccctcttcccacccaggtcaggagcgggggagggtaggggggtggggggtgcagcctcctgatgggtccccatcccgcctgtcctgaactcctgggtctgagggaggaggagctgagggcctggccgcctgggtctgagggaggaggggctggggcccggactcctgggtctgagggaggaggggctggggtcccaca

SEQ ID NO: 26386 - DNA, 231 bp, Homo sapiens
  source 1..231: mol_type = other DNA
gttcagagaaatgcctatgtacggatttggtccaatgcctgctagggaagcccgctgactcagcgagacggagggatcacgaggtcgttcgagaacagcagagatcacgccactgtactctatcgtgggcgacgacagaccacgcttgtctcctcggggccaccgtagcgcacgtggcgttcattggctgtgcagggccgagggaggcggtgcaaggccgccgcgtgacgt

SEQ ID NO: 26387 - DNA, 154 bp, Homo sapiens
  source 1..154: mol_type = other DNA
gactcctgcctggactcctggcctggactcctgggcctggactcctggggcctggactcctgggtctgagggggcctggactcctgacccctgggtcgaaggggctgggggcccctggtggctctacggacccggatgcctggctcctgaatct

SEQ ID NO: 26388 - DNA, 157 bp, Homo sapiens
  source 1..157: mol_type = other DNA
acgcctgcagggcaaactgaaagtggctttcaagctggaacccagctaggggttctcttgtcatcaatagacactggtgcttagacagctgcaatctggaagaaatgcaggggaggggccaggctgggggcgcgccctgtccagccccaccccctct

SEQ ID NO: 26389 - DNA, 296 bp, Homo sapiens
  source 1..296: mol_type = other DNA
tacaaaatttgttttttttgagacagagtctcactctgtcgcccagactggactggttacggtacctagtcatgcttcatcaagcctgatttttttttttacatgttctgttaaaaaaatttctttaaattggcctttggaaatttaccagcagtgtgctggtaaagtcttgacatcacagcatggctttgacatgagttttacatttggtaaaagcaaattgtgcctactttgaataaggcactaattagcttgtctaatattgccttggctctcaagcaaaataaaaaagtaac

SEQ ID NO: 26390 - DNA, 288 bp, Homo sapiens
  source 1..288: mol_type = other DNA
ctgaagtgacatcaaattttcttccttgtttaaggctgaatatatcaattcttctatcaatggacatttagatgtgcagtttaaatatagacccagtcacaggcgtgagccaccgcgcccggcgcactgtaatgcattatataccttgctgagattttagcagagatcacaatattaaaaacttggggaaggatttctatgactcttattttaaatacgaggacatgtcgacttcacatccaagtcagttggtcctccctctcatctcactagtgggaacccacgggc

SEQ ID NO: 26391 - DNA, 572 bp, Homo sapiens
  source 1..572: mol_type = other DNA
aaacgtaaaaatatacgtacattaccagatgatagctatgatatcagagataaaaataacacagaaaagatccaaaattgtatgtgtgtggttttacaaagcatgagttgatactatttttatgaatgctataatcttactaattttttaataaaatgaattggttatatgcacatatgtttgtgttattcagagtttatatatgtatgtaaatatacacatagagagagtagagaaagatagagatctgtgtctgaaaacatcaagaaccaggattttcacgctcgcttctgtgttaataatgcaaaatcagtttttcttggtgttaacttcttgaagcataggagaaaaattgaagaacttgaaaattgttcttaatttgcaagtaattaatttgcaactttgaaaatgacaggataaacatttcagttttactgtacaaccgttttacaacactaaaagatattaagatacaattctacacttttgcacatagaaaaattaaatttgaaatatagacattagttgaaccaagaatacctcctgtgtcacaactggaaccatggttacca

SEQ ID NO: 26392 - DNA, 367 bp, Homo sapiens
  source 1..367: mol_type = other DNA
gggcgggaccgactcagagcctcattcccggggtagaacaaatatgttttattatagttaccttttgagacagggtctcactctgtcactgaggctggaatgctaaggggtgatcagctccctgcagcctccgcctcccaggccgaagtattcctcccacctcagcctcctgagtagctgggacagtgctgggattccagggcagctcaacctgagctacacagccaggtgtcaggtgcgtctctgctgatctgagtctaactgcagtccctgaagcatctccagggctggagggacgagaggaagcctctgctcaccctcatctggaagggcagatctgcgagggggtgcctgcccccacctcagc

SEQ ID NO: 26393 - DNA, 157 bp, Homo sapiens
  source 1..157: mol_type = other DNA
agaaatgctctatgaacatttagtgcggggtccactccagcctcaggtgtagctggaggacgcagcctcccacctctggcgtatttcagaaatgcctcatgtacatttctccattattgttctcaaaacgttgaatttgttcccgaaagaagtcaac

SEQ ID NO: 26394 - DNA, 309 bp, Homo sapiens
  source 1..309: mol_type = other DNA
ttgttctcaaaacgttgaatttgttcccgaaagaagtcaacttttcttgcagctcaacctgagctacacagccagatgcgagatgcttctctgctgatctgagtctgcctgcagcatggaccttggtcttccctgaagcatctccagggctggagggacgactgccatggagggaagcctccgttacgcagaaagcaccagttctatttgctgctacatcccgtctctcagtgagaagaggggctgggggccccatcagtctgaaatgtctgcagatgccccctccgagtgtccacactgggtgggaag

SEQ ID NO: 26395 - DNA, 335 bp, Homo sapiens
  source 1..335: mol_type = other DNA
tacagactgggagaaagtttttgcaaactgtgcatcccagtatctttaaggaacttaaaccaactgattaccatctgatacctgtcagaatggctattattaaatgttctcaggacctcctgagtgctgatcactcactcagaaaaatctcttctaatatattacagagtttgactctttttgtccacaataatttggtgaacacgtgaggccaccagcaggggcccactgaggatcctacttctagttgggagatacattctaaagggaactgaactgttgttttcatagggaaacgagagactgtgtttcctcagcttaaaattttaaaaagg

SEQ ID NO: 26396 - DNA, 289 bp, Homo sapiens
  source 1..289: mol_type = other DNA
ctgattaccatctgatacctgtcagaatggctattattaaatgttctcaggacctcctgagtgctgatcactcactcagaaaaatctcttctaatatattacagagtttgactctttttgtccacaataatttggtgaacacgtgaggccaccagcaggggcccactgaggatcctacttctagttgggagatacattctaaagggaactgaactgttgttttcatagggaaacgagagactgtgtttcctcagcttaaaattttaaaaaggcttgtccaggaagcaca

SEQ ID NO: 26397 - DNA, 252 bp, Homo sapiens
  source 1..252: mol_type = other DNA
acggtttggtgcactcccttgagggaattcccctgggctgcttggggtccactccagcctcaggtgtagctggaggacgcagcctcccaccttggtctggagccctgagcccactcagtggtggaaacctccacccggtcccatctgggtatttcagaaatgcccagatagatggacaaatacacgtccatctatccattagggtacgtagactgtggagtccaactgtcacgagtgtgtgaaagaagtcaa

SEQ ID NO: 26398 - DNA, 297 bp, Homo sapiens
  source 1..297: mol_type = other DNA
actgtcacgagtgtgtgaaagaagtcaacttttctgccacacgcagctcagcctgggcggcacagccagatgcgagatgcgtctctgctgatctgagtctgcctgcagcatggacctgggtcttccctgaagcatctccagggctggagggacgactgccatccttttatttgctgctacatcctggctctggcccattaccatctgaaatgatgcagagggcctccccacctcagccctaatggaatgagagcaagggtcctggggagggcagttccacttcctgtgtggctgcag

SEQ ID NO: 26399 - DNA, 242 bp, Homo sapiens
  source 1..242: mol_type = other DNA
gcatgtgggacagacgcccatgtgtgacaacgctgcagtgaatctgtttcacacacctcagggctgaccatggacctgagtcaccctccctgtctgtgagggcctggggttctcctctgtctcatacagaggcagaaacctcccgcaagtcaccagcagccgctcggctgcatttaagttgctcaccgtgactaaggaaagacaaaagaagagtcagcatttctttatttctcctttttttc

SEQ ID NO: 26400 - DNA, 311 bp, Homo sapiens
  source 1..311: mol_type = other DNA
acctggctgcgtactggcccaccaagcattcgactggcgtgcccagccactctccgtcatcgcagagaagtacctcccagagatgtccacctcctgattctccttggagcctccaggaggacacggctctgatagcgtgacctccgggacggtaagtcaataaacctacattatgtgcaaaaggaagctttatggttcatctgtaccctgaaacagcaggctgggatcagagagaccccatttctgtctgacagccctagctctggggaaatgaaagccaggctggggtcggccacaccctgtgtgtctct

SEQ ID NO: 26401 - DNA, 456 bp, Homo sapiens
  source 1..456: mol_type = other DNA
aattacatgttgataaagttatgtatggactattaaactgcaatccaaaagaataaaatagaactataaaattcaatatgtatatggtgtcataggagaaaaagaaagaaaaatacaaaatttatattttttaaaatttgaaacaactatatatgtggtgtgtgtgtgtgtgtgtataaccatatgtatataaacgcacacatacgcacacatatagaaatccagctacttaggaggctgaggcacgagaattgcgtggctgcaatgagccgaggtctcaccactgcattccaaaagttcaagttgtgagtggcagattgtgacatactgccagctgctagagcttgaactctgaaagtctttaatgtaagccaagcattcagtcatctcctgtatgagagattatagcctgcatacgtcatcctcccatgatgtggtcagcatgtaaactgcatg

SEQ ID NO: 26402 - DNA, 507 bp, Homo sapiens
  source 1..507: mol_type = other DNA
accatggtatataatttttatttgtcaatcttaaaaataaagcataaaaaatttacaacaacaagataaaaaataagaagtgtttttatagtgtgaggataagtttagatttattttttatttgttgagaaaatattctattccgggactgtgtatccacagatgtattttagacacagttttcgcattttatataaacttatagaaccccttaaaatttccaagctggagttcagtggcttgagctcagctcactgcaacctcctcttgtcacaattactctgataatgttaataatacctgttagacattttgcacattacatatgaagaagagtttgaatctcagataaaaacaaaaatacatcaaaaatctttaatgtaagcacagaattcaatcatctcgtgtatgaatgcaaggtagaaagagcctgcgtacgtcaccctcccatgatgtggtcaacatgtaaactgcatgcagcatcctgtgcgctgctgagctgagctg

SEQ ID NO: 26403 - DNA, 585 bp, Homo sapiens
  source 1..585: mol_type = other DNA
aatttagtagccagagctctctaatttgttattataggggctggactgcagtgacgcgattctcatgcctcagcctcttgagtagctggcgttacaggtgcctgccaccaggcacggcggcttcccaacgtgctggggaaacttgattttctatagcattatgttactggatatttctgtaaaatttaaaaaactccagagttgggactctggaatcttgggtcatgagacaaattttagattaaactacaaaactccagaatttacaggtggggtttttactgataaagtacaattctaagattgtaaataattgcataatccttccctgggaatttaaatcattttaactggttctgctgtaatactagaaatacaagcatgaaaaattctaatggtttattagtgacaatgactctgaaaacattaataatacctattagatattttgcatattacacaggaagaagaaaacaatagaaatacatgaaaagtctttcatgttagcacagaatgcaaggtagaaagagcctgcgtacgtcaccctcccatgatgtggtcaacatgtaaactgcatgcatcctg

SEQ ID NO: 26404 - DNA, 515 bp, Homo sapiens
  source 1..515: mol_type = other DNA
tcagggtgatgcacccatccctttttaaaaattatgagttttacaaatttaaaatgcatagtgaaaaagttcttacaaaataagagacatttgtaagaatgacagcacattaaatgtgtagatttcaaccttcagttattgcaatattccagtatcaagttggaggatgttatcagtctgatattttttcctcaaatgagagagagaaagaaatttggactcttgtgtcataagacaaattctagagaaataactatatagtctttttaaatcattttatctgtttctggcttaacaggaaaaatacaaccatggaaaattatgatgatttatttaatacgattgctctatagtgttaataaaacctattaggtattttgcatattacatatcaaggagagtttgaatctcaggtagaaacaagatgtgaagtgacaagtctagtctgcagttttcagaatcatatgacgtagaagaacctatgtccccttcacatgttgtggtcaatgtgtcaa

SEQ ID NO: 26405 - DNA, 519 bp, Homo sapiens
  source 1..519: mol_type = other DNA
cctaaaatttggtagctggagtcctctagttatctggagtgcagtggcaccagcttgaatagctggcattacaagtgcctgctaccaggcatggcttccaaagtgctggggaaattgattttctatagcattatgttactggatatttctgtaaaatttaaaaaaattctagataaatctacaaaaatccagaatttacatgttgtgatttttgctgataaagtacaattctaagattgtaaataattgcataatccttccctgggagtttaaatcatttgaactggttctgctgtaatactagaaatacaatcatgaaaaattctaatggtttattgtcacaattgctctgaaaaccttaataatacctattagatattttgcatattacacaggaagaagagtttataaaaacaataaaaatacatgaaaagtctttcatgttagcacagatatgcaaggtagaaagagcctgcgtacgtcaccctcccatgatgtggtcaacatgtaaactgcatg

SEQ ID NO: 26406 - DNA, 513 bp, Homo sapiens
  source 1..513: mol_type = other DNA
acagtatataatttttatttgtcaatcttaaaaataaagcataaaaagtttacaataagaagtgtctttatagtgtgaggataagtttagatttattttttatttgttgagaaaatattctattccgggactgtgtatccacagatgtattttagacacataaaatttggtaacctgagttctctgatttactctgtcacccaagctggagttcagtggcttgagctcagctcactgcagcctcgcattctcgtgcctcaggtttagtactagaaactcatcaggaaaattagaatggctttttgtcacaattactctgataatgttaataatacctcttagatattttgcacattacacatgaagaaaagtttgaatctcgaaaagtctttaaattcaatcacctcatgtgtgagaggttatgcaaggtagaaagagcctgcgtacgtcaccctcccatgatgtggtcaacatgtaaactgcatgcatcctgtgcgctgctgagctgagctg

SEQ ID NO: 26407 - DNA, 412 bp, Homo sapiens
  source 1..412: mol_type = other DNA
agtaactattaggtaccaagcttattacctaggtgatgaaataatttgttaaaaaaatactcaatgagcaacaatgtacattatttgaggataattatattatccttaaatttatacaaataaacaaaaaagtataataaaatagtagattctttctttagagctctggcattgagatcatctccaggataagggtatactgcatgccttactcagaccatgaatctcagagatgaaacataggttcaatgaatttgaacccattagacactggcttaatgaaaattcacttctcattcgtttctcatctgaaacataaatagaaatatagcccatctctatttaaaaaaatatacatatatatgtcttctcttgggcgaactgttccatagatgtggaaattccctgacga

SEQ ID NO: 26408 - DNA, 372 bp, Homo sapiens
  source 1..372: mol_type = other DNA
cctgagctcaggtgatcctcccacctcagcctcctgaatagctgggattactggagtgcaatggcgtgatcgtgcctcactcaccctccgagtagctgggattacaggcacctgtgaccacgcccagcctatgcatggctaattattaaatatttttgaagagatggcatcttgtccactggcctaggcctctcagcctgctgggaacttagtttttaaagcccaggtaccctgcaaaacccaaaatgtgtcctggcccgggtggttcacctggggagattcagcaagccgtggttgggagccacccaatgttaatctcagtggggcggttccaccctgggcgggaaagctgtctctccacctagcgtacca

SEQ ID NO: 26409 - DNA, 373 bp, Homo sapiens
  source 1..373: mol_type = other DNA
tgccaatttattattattattattatttaggtgcaccggccccagtcagattaagcagttattcaattgagacatgcatcacattattccttacttttcaagaaaaatatgttttacgactagtgaccttgcagccgcacggcaaaaaacaggcagttcatgtttaaaggacgttttcttaaatacaactgagtttttgtttacacattctgtaattatctcactgtgaaactcgggtccacactgggtacgacctccacattgcagaattgagaagttgacccagaaatgcattttgggctgagcagacaattgtcagagttgctggctagaccacagatgtgtcagagggaccacggcctttctgtaagct

SEQ ID NO: 26410 - DNA, 266 bp, Homo sapiens
  source 1..266: mol_type = other DNA
gagtagctgggactacaggtgcccggctatatttacaaaattaatactgccagccaggcttgagaccagcctggccagcatggcaaaagccggcgctgcttgcactccagccattaaaaataaaataataataatactgtgaatgtgaaacatagttgacgtgtcattgatatttcacttgaaatacggttggatttttattaataatatacctgcacagctgaggcttctaagcggtgattctcagtgaaggaccgccggctgcg

SEQ ID NO: 26411 - DNA, 345 bp, Homo sapiens
  source 1..345: mol_type = other DNA
cttaatttctaaaagatttaggctggcacctgcctataatcccagaattttgggagtctctgcaaacagtggtaataataatattattagccagaacagatgtggttcccagctacttcaaaggctgaggcgtgaggactgcttgaacctgagaggtcaagggttcagtgagcgccgaggcggactgagaccagcctggccaacatttgcagtgagccgagatcgcgccaccgcactccagcctgggcgacagagcgagactcccccacacctggccctactcgccggcggagatgagggcagctctaataaggcttctctctcggccgcagccctgtgattggc

SEQ ID NO: 26412 - DNA, 273 bp, Homo sapiens
  source 1..273: mol_type = other DNA
ttgacctctcaggttcaagcagtcctcacgcctcagcctttgaagtagctgggaaccacatctgttctggctaataatattattattaccactgtttgcagagactcccaaaattctgggattataggcaggtgccagcctaaatcttttagaaattaagactaaaatataaaattaggtgggcgttcctagctacccattgctctccagcctgcgcagtttaggatagagctatagagagctccaaaaaaaaacaatatcatataaagaggt

SEQ ID NO: 26413 - DNA, 202 bp, Homo sapiens
  source 1..202: mol_type = other DNA
tgtgtgtatataccacatgttgtttatccatgaataaagctgctatgaacactgtgtacaaatatgttagagactgttttccattaaaaaaaagccactgtagtgggccgagatggcgccactgcactccaggtgtgaagtcatatctcactacggtgcaacgccaggctggccattcatcctcatcacatcctgagcctgt

SEQ ID NO: 26414 - DNA, 392 bp, Homo sapiens
  source 1..392: mol_type = other DNA
ataatctccattatgatataagaagacagttcatctgatgaggaagaaaacttactcctagttagattgggttgaattcttcgtctgctcctggcacctcaggcacagtcaggggtctcttcccagcccctcctcccttggacccaggagtccaggcccccagcccccctcagacccaggagtccaggcccccagccgccttctcctgcaggaccccaggagcttgggtacccacaggctactagatcatggaaattcctccaacacatttccagactggaattgacagtggtgggattcgaacctgacagcgctcaggaccgatgctcataggtcccgtccctagggcgccccgcccctcgcagcccagttccggacgcgggcccagccgc

SEQ ID NO: 26415 - DNA, 308 bp, Homo sapiens
  source 1..308: mol_type = other DNA
ggagtgcagtggcgcgatgctcacagcctcccgagtagctgggaagaccagcctggccagcatggcaaaacgccggcgctgcttgcactccagccattaaaaataaaataataataatactgtgaatgtgaaacatagttgacgtgtcattgatatttcacttgaaatacggttggatttttattaataatatacctgcacagctgaggcttctaagcggtgattctcagccggagtggagatccggaagctcaggtgaaggaccgccaatcacagggctgcggccgagagagaagccttattagagc

SEQ ID NO: 26416 - DNA, 263 bp, Homo sapiens
  source 1..263: mol_type = other DNA
gtggtcctagctgcttggcttgaacctgggaggtcaaggtacagtgagccacgattgcaccactgcactccagcctgggaccttgtctcaaaaaaagtaattaatttatttattcaatacgtagctcacaccagagaaagccctaatccagctttatgcattctaagcattgggaccaaagtgatgtagtagaaatacttaagcacctacagtgtaagcatgtttcatgtgctggaccagcggctttgacctcaatttcagtc

SEQ ID NO: 26417 - DNA, 269 bp, Homo sapiens
  source 1..269: mol_type = other DNA
ctgtgagacgaagaactcccctcacggggctctggggagaaatgatgtggaaagctttgctagtaacctctacagcataaaagcttatcgagctaaatcttagctttagaagacgggctgccactggccctggacagaaggtcagccccgggttcaaatagttcctcccgctgttagaatttcaagggagttttaaagacagagctttcaactctgacctgtgaactctgccagccccgccccggggtcactccagccaggctgtgcca

SEQ ID NO: 26418 - DNA, 339 bp, Homo sapiens
  source 1..339: mol_type = other DNA
agaagacgggctgccactggccctggacagaaggtcagccccgggttcaaatagttcctcccgctgttagaatttcaagggagttttaaagacagagctttcaactctgacctgtgaactctgccagccccgccccggggtcactccagccaggctgtgccatctggactccagggtctcagggtctgaactcccgggtctgagggaggagggcctggggtcctggactcctaggtctgagggaggaggggctgagggcctggactcctgggtctgagggaggaggaggggcctggactcctggactcctggtctgggggcctggactcctgggcctga

SEQ ID NO: 26419 - DNA, 351 bp, Homo sapiens
  source 1..351: mol_type = other DNA
ccttccctgcccgcaaggagcctccaggcacctggaccgtggagcctcctggtagccagggccgagtctgggcacaggagatgctgctgcgagtgtctcccgaccatgtcacgctgctcgacccggcctccaaggtgccggggggcacgtgggaactctggcgagggacccccatcccacccggcaggaggagctggagtcgtacccactgggcgccatcgtgcgctgtgacgcggtgatgccacccggcaggagccgctcgttgctgctgctcgtgtgccaggaacccgagcgcgcgcagcccgacgtgcacttcttccagggcctgcgcctcggggtgagcagatgggc

SEQ ID NO: 26420 - DNA, 597 bp, Homo sapiens
  source 1..597: mol_type = other DNA
ccagctgggcatggtggcttacgctcgtcaaagaccatcatggccaagggcggggtggcgcgcgcctgttatcccagcgatatcgcgccactgaactccagcgtggcgacagagagtcgaattcctaactgccccggggcagtgtggggcacccccattccccggaggaggccctcatctggcgatttccactgggcgcctcggagctgcggacttcccagtgtgcatcggggcacagcgactcctggaagtggccaagggccacttcgacctgcccagcacaccctggggcagcgccgtgacgtcagcacgccgggcggggacggggcggtggggggccagcggcagttcccggcggcccccggggcgggcgggcgggcgggtggtggcggcggttggggctcggcgctcgctcgctcgctgggcgggcgggcggtgcgatgtccggagaggatggcccggcggctggcccgggggcggcggcggcggctgcccgggagcggcgacgggagcagctgcggcagtggggggcgcgggcgggcgccgagcctggccccggagagcgccgcgcccgcaccgtccgcttcgagcgcgccg

SEQ ID NO: 26421 - DNA, 424 bp, Homo sapiens
  source 1..424: mol_type = other DNA
ttcccagcatgccctgcgaggtcacccagggaagcttggaagtacccaaaaatatttgcgatcaggttctctcaggttctgttctaagaaccgaggacccagctgggcatggtggcttacgctcgtcaaagaccatcatggccaagggcggggtggcgcgcgcctgttatcccagcgatatcgcgccactgaactccagcgtggcgacagagagtcgaattcctaactgccccggggcagtgtggggcacccccattccccggaggaggccctcatctggcgatttccactgggcgcctcggagctgcggacttcccagtgtgcatcggggcacagcgactcctggaagtggccaagggccacttcgacctgcccagcacaccctggggcagcgccgtgacgtcagcacgccgggcggggacgg

SEQ ID NO: 26422 - DNA, 288 bp, Homo sapiens
  source 1..288: mol_type = other DNA
gtgaggaagcctgctctccagggctggcttgaacctagaactcaaggtcgggagggagggtaggtttcaccctaattgacaccccaccctccctgcctgttgtcaccaggatggaatcctggcggggaaacattccttatagcccatgtgtcattagtaggtcctccaaggaccgcaggggcggggctcctgggccatgcagcttctggactctgagtgtggagccaggggcagcagggctgtctctgaactcccagctctcccctcggggcgggcccgagcctccag

SEQ ID NO: 26423 - DNA, 257 bp, Homo sapiens
  source 1..257: mol_type = other DNA
cgtggctgggacccccagggccagggtgggcgctgcagtgaggggtctggggcgggaggctgcagccctagcaggggtcttggtggtgatggggtccccactcctcctaacccaggctagggaacctcacggagccgcacgccaaggtgggacggggcttcctggggggtgacagcagcctgcgggcggaactccgttgcccaagttggacgtgggcccaaatcccacgcctggtcaagccccgggtgggctgcgct

SEQ ID NO: 26424 - DNA, 338 bp, Homo sapiens
  source 1..338: mol_type = other DNA
aagcaagttgtcgtctccagggctgggagagagaaaccagattcctggggggtcctggactcctcggtctgggtcctggactccgagggaggggctgggggcctggacccctgggtctgagggaggaggggctgggggcctggactcctgggtctctgggtctgaggaagaggagctgggggcccagacacttgagtctgagggccagggtctcccagggtcctgggactcctgtgcccggaggtggctggtgatccagctggagcagggcccaccccgcccctcacgcgcccccgttatctggcatagtgggcagggggaggaggagtatatttagt

SEQ ID NO: 26425 - DNA, 384 bp, Homo sapiens
  source 1..384: mol_type = other DNA
agagaacaggccccatccccgcgggataggtcccggctgcgggagttctagtcctggaccgaggactcccaggtctggccacgccccttacggccggggagacacaacgtgacggagctgctccgcgacgtggccgcctgggggcgcgcgagagccaccgggggggacctggaggactccagcctccaggtgtttcacactggagtgtaattctgagagcatgcttagaattctgaattccactagcagaattctaaattctcacagggggatcctggctgggcctccttccagtgtctgtctgacagggcatgtcacatgtggtgtacagtgagtctctgcctgccaggctagaggattttttaaaaagctgcaagaggacaa

SEQ ID NO: 26426 - DNA, 605 bp, Homo sapiens
  source 1..605: mol_type = other DNA
ggggcccaggagaggggctgggggcctggacccctgggtctgagggaggaggggctgggggcctcctgagtctgagggaggggcctgaactcctgggtctgagggaggagggcctggggacctggactcctgggtctgagggaggggtgtaggggttccgacgctggcgggacacaggcgtcgcctttccctggcgtccgggctgctgctcggagtcctaggagtcaggggccccaacctctccctccttttccagcgtggggagcgcgtggcagcgcgcgggtactggggggacatcgccacggggcccttcgtggccttcggcatcgaagcggacgacgagagccccagtcaaggtgcgcggcggggctgggggtcggtgggtgcgcaaggccccgcccccacagcaggccccgcccccagctccacgcccgtcgcttggtgggaagagaacaggccccatccccgcgggataggtcccggctgcgggagttctagtcctggaccgaggactcccaggtctggccacgccccttacggccggggagacacaacgtgacggagctgctccgcgacgtggccgcctgggggcgcgcgagagccac

SEQ ID NO: 26427 - DNA, 382 bp, Homo sapiens
  source 1..382: mol_type = other DNA
acagactctcctgcctcagcctccggagtagctgggattagccaccatgttggccagactggtctccaaccccaccttgacctcccaaagtgttgggatcacaggcgtggccaccttattttaatgcagttgatttaactgtacgattacagaatttacctgtaatttttttaggatctagctgtaagtttaaattatggcttcgtgtaaaatcccatctaaagtctagacacttcactttatttgaattgatgaaaattccgttacgtacccgccggcgccgtcgtcatgacaaccgcgtccacacgccctcttctcctaggtgtgggggaaggctggccctcagtgctcccattggccaaaagtagagggcgggcctcgc

SEQ ID NO: 26428 - DNA, 571 bp, Homo sapiens
  source 1..571: mol_type = other DNA
acgcgcgcacacgcacacgggcacacacgcgcgcacgggatcctgctccgctccgcggctcccccgccccggagagctccgcgatcagcacccgggacagcgccaccgcccacgtgcagggggtggggtccgggcggggctggcgcctcggcgtctcccgggagtgtcccgtccagccgccgagcaggtaggagctgctgggacccccgccctcagcccatccgcatccgcatccctagaggaaaggggtgtgcgaagggggctcagcacaggcaccgggcagcccccgacccgccctccagcaattggggagagggaagagggaacctgcgtctcagctcccaggaccaggtgcggagggagcagtcggctgtgggcgctcggaccacaggctgcccgctccccacctcgcgggacctcaggatcccagtcgggctattggggggttcccaggcaccggtgggccccggagcgagcctgccccgccgggactccgcgtctgtgcgtcccgcgtcctggcaacaacccgttgcccgggcaaccagctttgctctcaccccgcagaggagcc

SEQ ID NO: 26429 - DNA, 377 bp, Homo sapiens
  source 1..377: mol_type = other DNA
acatttgcacatgaaaaaatgagtgtccagacgtctgtgtccagggtctgggcagtatggacagggctccagactggagtgcagtggctcactgcagccttgacctcctgggcccaggtgatctcaggctggtctccagctctgcagagtctgggcgggtctcctaggtcctaggactgagtatggcgtcatctggaggcgggaggaggggcggggcagggctttccgcctacccacgcgcgcacacgcacacgggcacacacgcgcgcacgggatcctgctccgctccgcggctcccccgccccggagagctccgcgatcagcacccgggacagcgccaccgcccacgtgcagggggtggggtccgggcggggctg

SEQ ID NO: 26430 - DNA, 406 bp, Homo sapiens
  source 1..406: mol_type = other DNA
ccaaaaataaacatgactaatatttatcaactgtttaaaatgggccaggcattgttccaagactttccacgtagtaactttacaagggtgcccattctttagagatgaggaatctgagtcactgtggatttaagtcatttgctcagggtcacatgcacagggtcctgaccaggctagaaaggccccaggcccggcatgggtcatttccaagaggagcccgctgggctcatgggcatgaggtcaagccccaggctgccagggaggcgagggagtcagctggcctttctctgccccacgtcccgcatccgtgcagcagtggggcgcggcacccggtacctggggtgcggcagggttgggagctgggttccacttcctcctcctcccagcaggtggaaggactaggcct

SEQ ID NO: 26431 - DNA, 560 bp, Homo sapiens
  source 1..560: mol_type = other DNA
tggggagcctgtattatccctgcaccccagaggctgggggtgctgacccagtctgcccccacactgtcctgccagagggagccctgtggctgcagaggccccaggctgggccaggcactggctgtgagggctcctgccaggtctaccccacctgtgggcagggccttgggcagaggcccagtaaccaagcccagcattgaggctgggtactggcgccccaccggtgagcggcgcggagcgtgtggaccgggccatgaggacagcgtcctcactggggtggcagttggcttggaggtcacctgggggctcgctcagctaacacacccattgaagcagtggaggcaagtgaaggacagactcgccttcccatccctcatgatggggtggctgtcaccccatctcttctgattgttggggcccaggacgggcctgtcccagcaggctagggcagagggacccccagtgccaggcgccaggcagggccatccccagggtgaggacaacatctccctgggccctgttatcagtcacagagtccacaggacgctccttgggttaac

SEQ ID NO: 26432 - DNA, 670 bp, Homo sapiens
  source 1..670: mol_type = other DNA
cgactgagggcctctgaggctcggaggcggctaagcgcgagagcgcctggctttggctggagcgaaaaccaggtctggatttcgcaagagcccgacttggaacggagccggtgcgcagctgcggctcactgagctgagaccgttggcaccaacgggcgcaagcgcgtctgcggcggcggagtgggcggtgtcgggagcgcccgggcgcacgcgcactgcaccgcccaggcgtgcaccccgccccccgcacctgcgcaccaacacagccgcgggagggcggggcctcctgcgtcgtcctgcgcagggagccgggcgtcggaggccctgaggccggccgcagagcccggagatcttccgtcggtcgctgctcggctctgcggcccgtttggaccgcggaggaggtcgccttcccctcccgtggggcgctggactgtggaaaccggggcaacttcccccgtcttcccggctgaggcgcctgcgtgggcctcgcgacccggctcgccaacccgcctcggcccgcacgcccacctcgcctgcggaccccggaggtgcctacgcggactagtgacgccccccgcccgtcggcaacctgcaggacccggcgcgcgaggaccccacgacccgcgggcgcctgcgcggaccccgcgagccccggcgcctgcgcgagtcc

SEQ ID NO: 26433 - DNA, 371 bp, Homo sapiens
  source 1..371: mol_type = other DNA
atggagtgcagtggtgcaatccggctcactgcagcctcggctcaagcgattctcctgaactaattttttaaattagcgccgactgagggcctctgaggctcggaggcggctaagcgcgagagcgcctggctttggctggagcgaaaaccaggtctggatttcgcaagagcccgacttggaacggagccggtgcgcagctgcggctcactgagctgagaccgttggcaccaacgggcgcaagcgcgtctgcggcggcggagtgggcggtgtcgggagcgcccgggcgcacgcgcactgcaccgcccaggcgtgcaccccgccccccgcacctgcgcaccaacacagccgcgggagggcggggcctcctgcgt

SEQ ID NO: 26434 - DNA, 275 bp, Homo sapiens
  source 1..275: mol_type = other DNA
tctcctctccacctggcaggacatggggaagcgcagctccacccaaaccttctaaggatactgggccaggggcagggctttgaccagctacttgagcgtgaaggggcggcgcccgcacgaaggggcgtcccagcttggaggcggggcccggatgggaccgcaaccacggcacgaagttgggtgggtacgcctggcacttccggggcgcccagcagagtcaggtgcggacgactttgtccgccttattccggcgcccctcttcggagaggagggag

SEQ ID NO: 26435 - DNA, 263 bp, Homo sapiens
  source 1..263: mol_type = other DNA
agcacaaccttttcctggaggaaaacatcggcccgcacgagcacagaggcctcgggccttctcctctccacctggcaggacatggggaagcgcagctccacccaaaccttctaaggatactgggccaggggcagggctttgaccagctacttgagcgtgaaggggcggcgcccgcacgaaggggcgtcccagcttggaggcggggcccggatgggaccgcaaccacggcacgaagttgggtgggtacgcctggcacttccggg

SEQ ID NO: 26436 - DNA, 222 bp, Homo sapiens
  source 1..222: mol_type = other DNA
tgatgcaatcctgctgacagtttccattttggattaatgtgtgctgttttaagccaccacattcttagtaatttgttaacagcacacacaacctatctgtttggagcacaaccttttcctggaggaaaacatcggcccgcacgagcacagaggcctcgggccttctcctctccacctggcaggacatggggaagcgcagctccacccaaaccttctaaggat

SEQ ID NO: 26437 - DNA, 159 bp, Homo sapiens
  source 1..159: mol_type = other DNA
ggttctggaagcttctctgtaaagagaatccaaaatcacgctggggaaacagacatgaattttgggtcagcaactccaagaattcttgccctcccccctccgaaagggttaactttggggaagggcccgtgggggggcgggggggacctcggcctgcag

SEQ ID NO: 26438 - DNA, 331 bp, Homo sapiens
  source 1..331: mol_type = other DNA
atcccagctcctcaggaggctgaggcaggagaatcacttcagaggttgcagtgagccgaaattgcgccactgcactccaatctgggtgacagagggagactctgtctcaaaagggattctcctgcctcagcctccggagtagctgggattacagatgatctgcccaccttggtctcccaaactgctgggaggattttatgtccattactgggggcctggactcctgcattgttggagcttggactcctgggtccccaagggtggaggctcgtcccccaaaggcagtcctgcagcctggactttgcctctgcaggatgtctgccgagctcac

SEQ ID NO: 26439 - DNA, 458 bp, Homo sapiens
  source 1..458: mol_type = other DNA
gccctcccccctccgaaagggttaactttggggaagggcccgtgggggggcgggggggacctcggcctgcagcatccgccggcccgcacctcagacccccccggcggggggaggcgcaggaagcggggggccggccagaaacgggctggggagggggggccccgcagcccccctgggccatgctgactcccggggcctgacccccccgggccagccccccctcccccagctccgcggcccgccgactggggggggccagcccagccccctggggacccccggagaggtggggggcagccgggggggccgggacggagcggtcgccggcccccaccggagagacggggcgacggccgcagggggggcggccgggggaccggtcgggccgggaccaagggcaccatgtcgtccggggccaaggagggaggtgggggctctcccgcctaccacctccccca

SEQ ID NO: 26440 - DNA, 231 bp, Homo sapiens
  source 1..231: mol_type = other DNA
gagtagctggggccaggctggtctcgaactcatgacctcaggtgatccacccgcccggtcaattcttttagggtcttatgtggataaccccaataaacagaaacagaggtcatctatctctagaggtgtacatcccctccctggggaaggttctgagacctctgtgttcctagacgtctacatcccctctctggggaaacttccaggcagcatctttctcagaggaaaagc

SEQ ID NO: 26441 - DNA, 209 bp, Homo sapiens
  source 1..209: mol_type = other DNA
tcccaattagggggtgccccaggggagcgccccaggagtcagggcttgtctaaccgcaggcctcgcggggcgggaggggagagggatggcggtgcgcgcgcattcaccgcctccctcccgctcggctggcagacccaaaccgagtttcgcccggagagacttgaaccactgacaacagttcgcggcagcctcagtggcctgcggggctg

SEQ ID NO: 26442 - DNA, 303 bp, Homo sapiens
  source 1..303: mol_type = other DNA
caggcccggccctctcctgggcgcggatgagcctcgagcgccgtggtgcggggacgaggctgctttaaaaaaatgtttttgtaaatattccccctcccctggaatccttggagagggagcaggtgctgggatccctcccctgccctccctcccgcctccaggctgcctggggcttcacccggagcctcctgaccactcccgaaggctgccggggaggcagggggccttgagggctagaggtgaagcggctccccacggtgctaagccttttctctgggcccaaagagatgtgtgtgtgacata

SEQ ID NO: 26443 - DNA, 455 bp, Homo sapiens
  source 1..455: mol_type = other DNA
agcttgagcctgagactcagcgagtcgcacctcggtgcctgtgtgcacgcgcaggcccccgagggggcgtcgggggagcaaggggtggggtgggggcgcccctaccagccccgcggtgcacgacggctcccattggctggggctcgggcgtcctagccaatccggccgcggggtgcgtttctcctgacccgggtgggaccgcaccccgcggactcagaagcgagcggggggagacgggtcggagcgagggcgccccctcggccccacggagtccccgtcccgtaaggggaaatggtcgacgccgcccttaccagaacttcctgggtgagacctgctcagccaggttacggcagggaggggcactcccaccctaagtcccgcggagaccgttagggtgggaggccagggcccgagcagtggaggggcgggtcctgtcctggaatgggcgtggcttg

SEQ ID NO: 26444 - DNA, 237 bp, Homo sapiens
  source 1..237: mol_type = other DNA
atcgcgccattgcacggctagtcctggtccagccggacccccacccacagtcgggccccagcgcttgagcctgagtgtctgctccggcccgtggaggtggagggaggggacgccaatgacctcaccagcccctcgtgccctcctccgagcgcggcggcgtgagccctgcaaggcagccgctccgtctgagcagggagggtgagtcaggatgtgtcaggccgccctcccctgccgcct

SEQ ID NO: 26445 - DNA, 445 bp, Homo sapiens
  source 1..445: mol_type = other DNA
ctagagtgcagtggcaccagcctcccgagtagctgggattacaggcaagtaatcaccacgcccagcccagtctggtcacctcaggtgagctggggttataggcgtgagccaccgcgcccagcccccctagacagcaggcctggcagggctgagatgaaaagccttctcaagacccctggaccaggagacccccggacttaggctccgcaatggggctcagtgaggcctctgtgtctcacagctcccctaaggcgaaaaactccctagcaacggggtttcctgaaccttcggcaggtatcagtttccttaggaaagaaactccctcccctcagggcgccccgggtgatatggagcaaagaggccctagaccaggcatggccaggctggtgtgaagcccttccacaatcctggggcctggcgggcaggcgggcggggccggttgctg

SEQ ID NO: 26446 - DNA, 504 bp, Homo sapiens
  source 1..504: mol_type = other DNA
cctgagtcaggcctgagattctcggagccagactctgccccaggcagagacccgccctgggggacgctctctaagccaggcatctgcagctcttaaagccctgtgcagcctgcagcactcccagcactccgagtggccggatgcgggggcggaaactgtccagaggagcccagcgctgcgaggggggcgggggggttcccaggagcccggaccccaccgctgcaccccacaggccccgagggttctgtgcgggggggatttgccccctcgcgggggggggcgggggcgagcccgtggagccgcccaactagcttgagcctgagactcagcgagtcgcacctcggtgcctgtgtgcacgcgcaggcccccgagggggcgtcgggggagcaaggggtggggtgggggcgcccctaccagccccgcggtgcacgacggctcccattggctggggctcgggcgtcctagccaatccggccgcggggtgcgtttctcctgacccgggtg

SEQ ID NO: 26447 - DNA, 282 bp, Homo sapiens
  source 1..282: mol_type = other DNA
caggcccctggggagctgggagctgaagtcatcgtccatgagggaggcccctgcccttcgagaaggggcactgtcagtcactggcactccatgtaggagactgaggggctgtgcccggggattggacagggcgactggcacgctgcccgtggacggcgtcttcttggtccctccgggcatatgcagcacgtcccggcgcttggcccacctgcagggagcggacggctcagcccccgccctccgccggaccctccccctgggggtgcaggcgcccgccctatc

SEQ ID NO: 26448 - DNA, 391 bp, Homo sapiens
  source 1..391: mol_type = other DNA
ctgtcacaccccatcagctccctgggaggttatgatccgttgtcgcctcacccacgcggcatggtgctggggaggcctcagagactcctacgcttcgtctggtccataggactatcctccataggacagtcgtggaaggaaactcagcttccgcggaacccggagtctgatctgcacaggcttcgggaggcggacactgagcagacgccgcggccattgacctccctgggtggcacgggccctaggcacccgtggctgtgcgcctggctaccaccagctcaggcccacgaccagggtaaccccggccgcgccggttcgcgcccagcccggttcaggtgaccaggcgggagcttggcacacctggcgccgtcccctgaccccgccccggacc

SEQ ID NO: 26449 - DNA, 666 bp, Homo sapiens
  source 1..666: mol_type = other DNA
aaggaaactcagcttccgcggaacccggagtctgatctgcacaggcttcgggaggcggacactgagcagacgccgcggccattgacctccctgggtggcacgggccctaggcacccgtggctgtgcgcctggctaccaccagctcaggcccacgaccagggtaaccccggccgcgccggttcgcgcccagcccggttcaggtgaccaggcgggagcttggcacacctggcgccgtcccctgaccccgccccggaccgggccgcaccccggaacgctctctctgggcgccagcggcggcggtgcagggccatggcggcggcgccagcggtgtgcgcctcgcaggggagcccgccgggtgcaccgtccgcgccggcggccgcgccagcacccgcggccggcctgggccgctgccggatggcgctgctgctggccgggcgctgctgaccggcgtgttcgcgcagctgcaggtgcgcggccgcgacttcggggacctgctcatctactcgggcgatacaccggcaacatcgagatctcgcgccaggagctggagcgcgactacggcctgcggccctcggcgctcgcccgcctggcgcgcaagctctcccgccgctggtcggcgcccgccgccgcgggccagcgccccgcgcccggctcccggagagcgcg

SEQ ID NO: 26450 - DNA, 330 bp, Homo sapiens
  source 1..330: mol_type = other DNA
cggctgccggctccacgacagtcttgcggtgaatcagtccgttgtagcggaaggacgccctctgacccagagtcaagagactcaggaccctcctcccgcaggctgcttactcttgatcaggaaactggagcactgagtgacctaaggcggcgggaccgaattcaggcagttggggtccgccaatgacccttgaggcgcaaggcgctcacctcccttcgcagcggcgacctgagacgacgcgcttcctctccgggcgggcacgacaggagttgtcggtccccacctccgaggcggctcgatgatgttcggctgcttccgccgaaaattcgc

SEQ ID NO: 26451 - DNA, 421 bp, Homo sapiens
  source 1..421: mol_type = other DNA
gtaggagtctctgaggcctccccagcaccatgccgcgtgggtgaggcgacaacggatcataacctcccagggagctgatggggtgtgacagcccaggcttaaacagtttaagagttttatttcaagaaaagcgtttccggagggttccgaaaatacccgagcgggcctcggcgccctcattggccatcaccgcgagggcttcattcaccagttcattcataaaacaaatgtttgttgagcgcccatcattatgggtcccaggacctctcgaattggagccactcggaaatccagcggtagagtttcgaaaacttccgaacggttcccggcgaattttcggcggaagcagccgaacatcatcgagccgcctcggaggtggggaccgacaactcctgtcgtgcccgcccggagaggaagcgcg

SEQ ID NO: 26452 - DNA, 383 bp, Homo sapiens
  source 1..383: mol_type = other DNA
aggcataaccatgccgtgcccatttgtcacataaggcaaggctgtccaagccttcaaggtcattctgactgatctagcgcccacctccaccacggctcaaaggagggggcgcgggcggcagcgcacacttcatttgcataatgaccggtctctcagtcattggcccatgcgagtctcgtgacccaccagtcactaaaggaagaccgttagtcgcgtgcgcgacttcctcagcgtcagggcgcgcccgcgcgtatgccgggccgtggcggcgtctcattcaaacggtccccccgcgggcccccattggccggccctcgcttctgaccatagtttgcggggaagggagccgtgcgcgctgacgtccgcggagggcgtggcctgag

SEQ ID NO: 26453 - DNA, 246 bp, Homo sapiens
  source 1..246: mol_type = other DNA
tggaatgctcctttttgtgccaaagaaaaaagggagatatctatatctaattctggacaatgtgcaacaagttgtctagtcaatactatatacaataaagggttgccagcagtgactgcccttggaccacagtgctccctttataaatatttatttaagctgtgtagcgtttgtggtattattccagaaaaagtgttcaaacgccgtgcggttgaagggcccagggtagggccgttgatttcccca

SEQ ID NO: 26454 - DNA, 283 bp, Homo sapiens
  source 1..283: mol_type = other DNA
acctgacaccaggtggtcatcctaggattccaggctgaggcagcacacgtgcaaaggcccttttattccaagacagataggaaattctctctttctctctccgagggccaggtttcgaaccgcagacatgcctctactggcggtctgctctgtgcaatggggccggccgagacgccctctctccagccagagtctgagccttcggagaccaccgcgcgactccgccccgtcggccgcccagccttgccggcaccgccccccctggggcgggagcaaagcagct

SEQ ID NO: 26455 - DNA, 411 bp, Homo sapiens
  source 1..411: mol_type = other DNA
cttgcctcagcctcctgagtagctggggttacaggtgcctgccaccggtctatccatcccaaatggcactagtgcttggagcagctcggtctcccactaaaaccctaggccccacaaggagtctgtggattccgcaggaaccaggtttctgcagcgtctggatgagcgtgcacgaagcacacgcctggaagcgctccaggcctcgttttcccgctggagcgattacaccctgggggcggggcccgcttcaccgtctgagctggccgtccctggccttgggctcaccggggcctcggcccccaagacctgacaacatgccgcgcaccgcctgcgcccgagctcgacgaggcctcgcacagccaatgggagggtccgggggcgggaactcggagtacgtgcgttgtgacgcac

SEQ ID NO: 26456 - DNA, 658 bp, Homo sapiens
  source 1..658: mol_type = other DNA
aacagactcgactctgcgtacaggaggtagaaacacttcctcctgggctgacggagccgcctgccaccggcccaccatccgcagcgccccagccactgagctgctggacagcagcaacactggaggaggcaccgccacgctgcagctcctggccccaccgccgtcaggcccagcctcgggccccgcggggctccccggggctccagcctcccagatggtgcaagtggtccccgcaggagctgggcctggtgttatgtccagctggttgaggagaggcagtgattcccctcccgccccgcacagagaccccgactcactgccagccggggcggggcagggtgccgcaggctgggcttgctaataaagacccgagtctgagggaagggggcaaagtcatggtcctagcccccgcctgggagcgtggagtccctgggtcgcgccccgctgcccccctcgtgtgagaagtagggggatccttcggaagggttctgcgaccccgggcgccccgtgggtggagtggggtccctggggaggagtcgggcgccaggatgctgagcgtggccggctcctcccgcgaaggccccggcacggatgagaatccacgcgctggcgtcgccgcccggcgctcaggttgctcagcaacgagggaacgtggggc

SEQ ID NO: 26457 - DNA, 639 bp, Homo sapiens
  source 1..639: mol_type = other DNA
tggccccaccgccgtcaggcccagcctcgggccccgcggggctccccggggctccagcctcccagatggtgcaagtggtccccgcaggagctgggcctggtgttatgtccagctggttgaggagaggcagtgattcccctcccgccccgcacagagaccccgactcactgccagccggggcggggcagggtgccgcaggctgggcttgctaataaagacccgagtctgagggaagggggcaaagtcatggtcctagcccccgcctgggagcgtggagtccctgggtcgcgccccgctgcccccctcgtgtgagaagtagggggatccttcggaagggttctgcgaccccgggcgccccgtgggtggagtggggtccctggggaggagtcgggcgccaggatgctgagcgtggccggctcctcccgcgaaggccccggcacggatgagaatccacgcgctggcgtcgccgcccggcgctcaggttgctcagcaacgagggaacgtggggcgggagctcgcgctggtccccagcccgccgcccgtctcggagacctccgcaggggctcggttcctcccagcccgccctccggggagcttagcaacggttgctacggcccggagcgggcgccgccccgcccc

SEQ ID NO: 26458 - DNA, 356 bp, Homo sapiens
  source 1..356: mol_type = other DNA
tacaccgtttgttaataaagcctttaacattaattgtaggctgtgagctcaggggcagcccgaggccctgccagcccttagctgcctggtgttgtggagcccctccccttcccagtgaagttcaacctctcctctctcagctggggactgggggcttcacactcagatccaccagtgagtgggaggactggagggccgggctgcaaatcttcttgctgctgcaccaagagaggggagacagcaggtgggcgcccctcccgctcatgctgcgccctgggcacagcactttgctggctggagcctgcctggcgtgtgggtgtctgcagttggacaccctccgcctgctcctcctcggg

SEQ ID NO: 26459 - DNA, 126 bp, Homo sapiens
  source 1..126: mol_type = other DNA
aatagcatttattgccacaattttacttaattcttactattcccattttacagatgaagaatttttattatctgatgttacaggagtaattctggtctccctgcaaggatgacgagagagctgatg

SEQ ID NO: 26460 - DNA, 337 bp, Homo sapiens
  source 1..337: mol_type = other DNA
cctcctcctccaccccgcagcctgaggagcgggcccccccacttgcccagtctgctccaggccccaggccccgagagccggccttttgtgcccctccccctgcccctaaaaggtgcagccctgggcgcccggttggggggcaggtcgggcaggccccggggccaggcgagtccacctcgctcgtacggagcgttggtcctggagacccggggcggccccgggaggccggggaagtccgtcggctcgccgagggcagcgggggcagcgcacccggggggcccccagccctggaggttgaagaagccaggcccgcgccatcttgggtgagggggggcgg

SEQ ID NO: 26461 - DNA, 452 bp, Homo sapiens
  source 1..452: mol_type = other DNA
tgttggaggcgcgctccgggagcgcgcggcccggcctcccctacccccacacctcatttgcatgtcgccggggctcgcgagtgtgcgcgcgcgcgggggcaacggggccggcgcgtgggaaggggagggggtgagggggccctgcccctcggcggcggcgaggcgggggcggcggcgcgcggtgccggccccgcccctcggagaagcgccgggcccctcccttcctgcccttcccgcccgcctgcgcgcccgcgggaaacaaaggggactcgctgggtcctaacgaccggtcgcggccacgcccggaagccgcgcctgcgcaccggcggccctggtgtgtccccagtgggaaataaccgacaggcttcgaagcccatggagtccgccccccctcacccaagatggcgcgggcctggcttcttcaacctccagggctgggggccccccgggtg

SEQ ID NO: 26462 - DNA, 361 bp, Homo sapiens
  source 1..361: mol_type = other DNA
cctcctcctccaccccgcagcctgaggagcgggcccccccacttgcccagtctgctccaggccccaggccccgagagccggccttttgtgcccctccccctgcccctaaaaggtgcagccctgggcgcccggttggggggcaggtcgggcaggccccggggccaggcgagtccacctcgctcgtacggagcgttggtcctggagacccggggcggccccgggaggccggggaagtccgtcggctcgccgagggcagcgggggcagcgcacccggggggcccccagccctggaggttgaagaagccaggcccgcgccatcttgggtgagggggggcggactccatgggcttcgaagcctgtc

SEQ ID NO: 26463 - DNA, 428 bp, Homo sapiens
  source 1..428: mol_type = other DNA
cctgcccctaaaaggtgcagccctgggcgcccggttggggggcaggtcgggcaggccccggggccaggcgagtccacctcgctcgtacggagcgttggtcctggagacccggggcggccccgggaggccggggaagtccgtcggctcgccgagggcagcgggggcagcgcacccggggggcccccagccctggaggttgaagaagccaggcccgcgccatcttgggtgagggggggcggactccatgggcttcgaagcctgtcggttatttcccactggggacacaccagggccgccggtgcgcaggcgcggcttccgggcgtggccgcgaccggtcgttaggacccagcgagtcccctttgtttcccgcgggcgcgcaggcgggcgggaagggcaggaagggaggggcccggcgcttctccgagggg

SEQ ID NO: 26464 - DNA, 239 bp, Homo sapiens
  source 1..239: mol_type = other DNA
ttcagggccgagggccgggggccggggcttagcaggcagccggatgctgcttgacaaccaccgatttaaaagaatgctttagaggttcagtgtgagacccgagccggtaaccggacgcccagagcgtgtcgtaggcgcacctggctcagttcgcccaccggcccggacgccggcgcctcgggaacgggcgcgacttccgcttccgggcgggcgggcaggcgggcggtgcggggctgccg

SEQ ID NO: 26465 - DNA, 339 bp, Homo sapiens
  source 1..339: mol_type = other DNA
gtttatctttattttataccaacatatcacaaaatataatttcatatatatttatgaatgaaatgatcatgcttaggatcatgtttaagtagaaaactatttaaagatgtttccaaactcttgcagttcagagtctctgtcactcaggctgcatgcagtggcgagatcatggctcactgcagcctcgcgtcattacgttgtcatgagcagtgcagaggtaatcacaaaaacgtttaccgtggaaacaaagcaaagcttcttcagttctgctgccccctcgcagccccgcactgcgcctgcgcagtagctcccccaccccctttcagagcgaacattggc

SEQ ID NO: 26466 - DNA, 254 bp, Homo sapiens
  source 1..254: mol_type = other DNA
aacataagccggcacccagctgacttctctcgtctaatcaatttatagaaattggctcaatttttatttcctttatagaacatatcacagtaacttttttagaatgtcctcaattagtctattcgagaagtccagtggctcctgggatcgcgactccggagtcggtgagctccgactctgggcctctgggcgcgcagcggccatcttgtgcccaagccccgcccccaaggccaatgttcgctctgaaagggggt

SEQ ID NO: 26467 - DNA, 384 bp, Homo sapiens
  source 1..384: mol_type = other DNA
ctgaagcaacagcatgaatttggcagccctgagacttttaaaataaaagtcttttgatccagggccaatgactgcccctctatggcctactccattttcttgccatggagcaaatcaagagttagggcctgactgtcttcaactgtctaaatcactagacctttctgatttttgtagaaagactttgtactgtctttcctactctagaaagtcggtcaggagttcaagaccagcctgagggtgtacctgtaatcccagctactcgggacacactgcactccagcctggaaaaaaaaaaaaaaaaaaagaaagaaaagtccttttttttttttttttttgacaaactctccgaatccggaagctgctggagaagtcggagcatcc

SEQ ID NO: 26468 - DNA, 532 bp, Homo sapiens
  source 1..532: mol_type = other DNA
cataactttccaccattgcagaaagttctgatgggtagctgtggcaccccagggtcttggggcactctcagctgcacctgcagatgctgctgctgccgccctcctgcgaggccgtggcgccacgtggctggaggaggagctgcagctgccccgagtgctgccgcgtgtgcagctctccagtgcggctgcagcgccaccgcgcgttgctttcgacgccggagtccttcgcatgcgcagccagcgcccgggcctcaagtgccccaggacctggcgcagcccgcgagcccgcatcaggcttccagtgggccccgtgggcagtgccagcctttcccacctccctggcaaagcctggcctggccctctgtgggcccgccgccctctacctcggtgggtggccacggccgagcaggcagcgacgccttagggcgaagacgggagcggggccgccgggggcgggcgtcttcagtggaccccacgcctccggtcccctccccgcagggcgctccgcagaggcgaggggtgggagcgccgg

SEQ ID NO: 26469 - DNA, 519 bp, Homo sapiens
  source 1..519: mol_type = other DNA
cactctcagctgcacctgcagatgctgctgctgccgccctcctgcgaggccgtggcgccacgtggctggaggaggagctgcagctgccccgagtgctgccgcgtgtgcagctctccagtgcggctgcagcgccaccgcgcgttgctttcgacgccggagtccttcgcatgcgcagccagcgcccgggcctcaagtgccccaggacctggcgcagcccgcgagcccgcatcaggcttccagtgggccccgtgggcagtgccagcctttcccacctccctggcaaagcctggcctggccctctgtgggcccgccgccctctacctcggtgggtggccacggccgagcaggcagcgacgccttagggcgaagacgggagcggggccgccgggggcgggcgtcttcagtggaccccacgcctccggtcccctccccgcagggcgctccgcagaggcgaggggtgggagcgccggctccaggcggcggaacctccgcactgggctcgcgcgcttccggccggcg

SEQ ID NO: 26470 - DNA, 199 bp, Homo sapiens
  source 1..199: mol_type = other DNA
gccggcgctcgccaggggaagcccggggccgcccgggacctcggcccgttcctccggacccgagaggccgccgcacggggtacgggggccgggatggagggaggagcctggccctgggacgacgccggggccaggcaggccccagggcacgcccgggcgctggggttccccggagtcccggagcctggtgtgcataacg

SEQ ID NO: 26471 - DNA, 160 bp, Homo sapiens
  source 1..160: mol_type = other DNA
gtcctcagacctgacctgagtgatgctttccattttaggaaacttttcctaaaaggaagtggcaattcgctcccagctgccgctccagatgctgctgctgccgccgcggccaccccaccctcggtcctcctctccggaggccatggccccaaggcggaag

SEQ ID NO: 26472 - DNA, 550 bp, Homo sapiens
  source 1..550: mol_type = other DNA
gacgccaatggggtcccccggtgcagctggaggaggagccccggggcccgccccagcgcgaggcgcccccaggagagcccggccctcgcaagggctacagctgcccggagtgcgcccgtgtctgccagccctctgcggctgcagagccaccgcgtgtcgcactcggacctcaagcccttcacgtgcggcgcctgcggcaaggccttcaagcgctccagccacctgtcgcggcatcgcgccacgcaccgcgcccgcgccgggccgccgcacacctgcccgctctgcccacgccgcttccaggacgccgcggagctggcgcagcacgtgcgcctccactaacccggcctgtgctgccctgcccgtctcagggccacccaccttccaaagggaggagcatcccctccctgggcctgggaaccagtcggaactgggttccagtccagcttttctgctctctggagcggtgaaccggtgagatgataaagagcacgggcacggtctggttcattccggagccgtttcgcgacggcccgggcgccccgccccaacc

SEQ ID NO: 26473 - DNA, 598 bp, Homo sapiens
  source 1..598: mol_type = other DNA
gatgctttccattttaggaaacttttcctaaaaggaagtggcaattcgctcccagctgccgctccagatgctgctgctgccgccgcggccaccccaccctcggtcctcctctccggaggccatggccccaaggcggaaggcccctccttcctcggcggcggggccccgacccccgcggctgggccgccacctcctcatcgacgccaatggggtcccccggtgcagctggaggaggagccccggggcccgccccagcgcgaggcgcccccaggagagcccggccctcgcaagggctacagctgcccggagtgcgcccgtgtctgccagccctctgcggctgcagagccaccgcgtgtcgcactcggacctcaagcccttcacgtgcggcgcctgcggcaaggccttcaagcgctccagccacctgtcgcggcatcgcgccacgcaccgcgcccgcgccgggccgccgcacacctgcccgctctgcccacgccgcttccaggacgccgcggagctggcgcagcacgtgcgcctccactaacccggcctgtgctgccctgcccgtctcagggccacccaccttccaaagggaggagcatcc

SEQ ID NO: 26474 - DNA, 282 bp, Homo sapiens
  source 1..282: mol_type = other DNA
gctcttataagggctgaggcaggtggagctgagcctgaagcttaataaacatctgcttattgggaggaagaacaaatcttccgttcatctcttcagccctgacgatggccaggtgctgggctgagcttctgtgtgtgaatctagctttgctccaaagccagctgaggggccccgcccccacatccctgagaaagagcgagtagattctccttccggggacccccggagactcgccagctctccaggatgggaatttcgtgatgttccctgcctgagcttcgg

SEQ ID NO: 26475 - DNA, 413 bp, Homo sapiens
  source 1..413: mol_type = other DNA
gagctgagcctgaagcttaataaacatctgcttattgggaggaagaacaaatcttccgttcatctcttcagccctgacgatggccaggtgctgggctgagcttctgtgtgtgaatctagctttgctccaaagccagctgaggggccccgcccccacatccctgagaaagagcgagtagattctccttccggggacccccggagactcgccagctctccaggatgggaatttcgtgatgttccctgcctgagcttcggatcgcgcaagtgcagaccctctgcttctgccgcaaacggcgggcctcaccgaggggcgctagcctggcccgactgggcgagtccccgcgtccctgcccgttccacacgctcccctgccgccccgcctgttcgcgggtgggtgggcgctactttgca

SEQ ID NO: 26476 - DNA, 465 bp, Homo sapiens
  source 1..465: mol_type = other DNA
ggcaggcgggtgcccccccctcgagtgggggactgtacagaccccgtctccgccctggccccgcggaggagctgcccacctaattattcagataatttaaattaaaaaacgacgtgaaaatttcctcagcctcttcctaggagggggacgtgcctgggagggggcggccgtcgccccgaagacggtgacggggttgcgggggctgcgcccgccgggcgcggtgcgcctgtagtcccagctacttggagaatcgcttggcgccactcccgctgggctacccagaccggagcgcggcgcgagaggcgtgagtcgatgacctctagcgagggaggccacctagcggccaggccaagtctggaggatacttccgttgggccgccagggggcagtaacgccagatcatctcccggaagtaatgccagatgatccgtctgccgcgcctgcgcggcgggaagagccggagcg

SEQ ID NO: 26477 - DNA, 374 bp, Homo sapiens
  source 1..374: mol_type = other DNA
cctcagcctcttcctaggagggggacgtgcctgggagggggcggccgtcgccccgaagacggtgacggggttgcgggggctgcgcccgccgggcgcggtgcgcctgtagtcccagctacttggagaatcgcttggcgccactcccgctgggctacccagaccggagcgcggcgcgagaggcgtgagtcgatgacctctagcgagggaggccacctagcggccaggccaagtctggaggatacttccgttgggccgccagggggcagtaacgccagatcatctcccggaagtaatgccagatgatccgtctgccgcgcctgcgcggcgggaagagccggagcgccgcaacccccttcacgggagcagtgggggcg

SEQ ID NO: 26478 - DNA, 357 bp, Homo sapiens
  source 1..357: mol_type = other DNA
gcgccgcggcttccaccctgcgcaggcgcaaaaagccgcgctggcaacctccgcagcggtcgcgcgcagagagccaggtgccgagaactaggacctcgtccccttttccgttcccgaagccggaaggagccccggggggcccgagggcgagatccggaaatctccggaaagagccacggaaacctgggaagtcggcgaaaccctacgttcgggtgttttcggaagcagccgaagcggccgcctgcttcgccttcgtccagtatccggagatagccgaggcgcaagctcgcgggcgggcgggcgggtgggcggagcccgggcggggccgaagcgccggcggcggccggaagtagccga

SEQ ID NO: 26479 - DNA, 510 bp, Homo sapiens
  source 1..510: mol_type = other DNA
gtgcgcaccacagcagggcggggtaggaccccagcccctcccacggtaggaacatagcgtgtttatattttatggccaaactatttcatatttgctaagacgaatttgctcattaaacattactgcgggcccctggctgggacgcccctgctgccggcgccggcagcctcgaggccttccctgcttgcgcggtgcccttctcggggtcggcacaggcacagccccgggggacgtgaggttcccgagtgctctcccaccccgccgacaggagggatggtggccgagcgggccggggcgggcgtggtgccaggagctccgcggttgccgccaagcgagctggagctgactctcggcgttccgtgagcaccgcgcggatcccccgctgcagcgggcggaagtggggcccagcgcgccggaagtgatgccttccaggttggcttggctgcggaagcgactcctgccagggcggggtgcggcacgggagggcggggagcgcggcaatttccgctt

SEQ ID NO: 26480 - DNA, 356 bp, Homo sapiens
  source 1..356: mol_type = other DNA
ggatattcaaattatctccaatattgtcccagtgaacaggtgcacaaagggtgaaggaaattcttttatttcctaacttacaaagatacatctaaaaccatgaatagatatagactcttttatatttcgcgcataggactgagctatcagtcttcactggacgggccccccgggtggaggatctaggctagacagcgggaaaacttctttcccccggcactgcctaagtgttttggaggttcttggtcagatgccccatgatcctaatcagcagaccctgttagaaacacgcaggtgcagcagtatttcccctccagaggagtcagctggctaatcaccgggcaggcaccgccttt

SEQ ID NO: 26481 - DNA, 285 bp, Homo sapiens
  source 1..285: mol_type = other DNA
gagaccagcctgtgtgaccagccttgtggcgggcagacttggttcgagaccagcctggccctgtaatcccagctactcagcaggctgaggcaggagaatctcttccgtatctaataataattaataatttcttcttgcacgacaggtttagttacggcagaaagatgttgtgccacacgaacattcttcaaggagtaactctccaaatgaaccattttggagagactgggggaattctcaatccacaaatggcaagggagcaattcgttggccaatcaaatggca

SEQ ID NO: 26482 - DNA, 523 bp, Homo sapiens
  source 1..523: mol_type = other DNA
acacccagccgcatgtggccgttttcataaggacacccgtcattaagttaggggggccactccttattttgtcaccctataaaggggttttagggttgggacacaattcaacccttaacagtaaaaaccaacttttattgatatagaaagataaatattctttctatatacgtttcatagtctaaacaagttacacctgtaggtaggaataggtgcactataggttgaatatacttaatatcttattatttttcaggggtacatatacactggttatacaggtaaactcgtgtcacaagaataggacatggatatgctcattaccctgatttaatgatacgtatacatgtactaattagtatgagtcactagaagtgtgattttctttttaaatcacattctggaattacagtatcaaagacgtttctgccctaggtcagagagcaagctcacagagggcttgggtcccacctttcatgggaagtccctcctacatgtttgtgtcaacagagatgaagaatct

SEQ ID NO: 26483 - DNA, 392 bp, Homo sapiens
  source 1..392: mol_type = other DNA
agtattgtatactatactatacgatactatagcatactatactatacattgagatggagtctcgctctgtcgccaggctagagtgcagtgtagctgggattacagatgttggccaagatggtctggatctcctgaccttgagatccctttaaaaagaagattccaaatggtccataattcccacatgtgcatgattgtgaggcctccccagccacatggaactgtgggtaaattacccagtcttgggtaaatacaccacacttaagaggtggggagttatgccgcatctccttaaaggggaagaatccatccatctaagctacttggaacagttttagctattggagaggaagtggtcttagaaaccaagagctgatctgcatgagtgtgac

SEQ ID NO: 26484 - DNA, 421 bp, Homo sapiens
  source 1..421: mol_type = other DNA
ttgaagcaatcctaaatccacttttatttttaattgacaataattgtatatatttgcgaggtacaatgcgatgtttagatatatgtatacatggcagaaaaaagctaacatgtccattgccttaatgtttaaaatctacttttagcaattttggagcatatattaatacatcttttcttaaattccatggcaggttaaatacattgctatgaatttaattgttttagaatccacacaattgagatcctactaaatgccagcctcccgagtagctggggttccgctggtctcgaccccctgacctcaggtgatctgcatactcttctgctcaggacgtgcatgctctgtgccagccctgctcacttgttgcttcactgaaacctcacagtaacccttgaagaggcaggtactctgatttcca

SEQ ID NO: 26485 - DNA, 560 bp, Homo sapiens
  source 1..560: mol_type = other DNA
acttaggtggtttggacaattattttaaaatatgtgttttttgcaagaataccaacagtaacagtgcgtccttactagtgtacagtcaagggttaaatacacgaatttagagccaaactccatgggttcgggccgaggcataggacctaccatgaggccctagttaggactaggacctagtgcgtgtgaagcagggaacccggggtctctgtccagtaactaaggcacctggacggaggacccggggtggcacgagcgtccctctccacctctcctcacggcgggcccggggacccggccgcgcaggcgcgaggagcccgggttgtcgggggggcaccgccctagacacccggaagtctccgcctaacgggcccagcccgcacctcctgtccgggaagggggcggggccgaagcccctcggcgcggggcgccatagagcaaggacctgcgtcctagacacttccggaagtggctccctcaggcgcccgccgggcaccacagagctgggggcggtggccgggatagcgggctcgccttcctagagcggcgaggagcgcggg

SEQ ID NO: 26486 - DNA, 481 bp, Homo sapiens
  source 1..481: mol_type = other DNA
aggtaataataaccaccatcaatattaccttgcacttcttatcttttctgactaccagtgaggatgataacaattataagcgatctgccacttaggtgagagtttggacaattattttaaaatatgtgttttttgcaagaataccaacagtaacagtgcgtccttactagtgtacagtcaagggttaaatacacgaatttagagccaaactccatgggttcgggccgaggcataggacctaccatgaggccctagttaggactaggacctagtgcgtgtgaagcagggaacccggggtctctgtccagtaactaaggcacctggacggaggacccggggtggcacgagcgtccctctccacctctcctcacggcgggcccggggacccggccgcgcaggcgcgaggagcccgggttgtcgggggggcaccgccctagacacccggaagtctccgcctaacgggcccagcccgcacctcctg

SEQ ID NO: 26487 - DNA, 389 bp, Homo sapiens
  source 1..389: mol_type = other DNA
gataaaaacttcagctgatctcttaggatgaatccaaatatgcttcttcacagttctgagatgcagaaactgaggcctcaggacggcgctgtcccccaattcaccccaggggaaactgaggctaagccaaaccgaggcccccgcgctggccccctcctgagccactgcccaccccggaacaggagggcagcctgctcacgtcctgagcctgcactctccggaggcccaatgcccggcggtgcccggcctcctctgcgcatgtccagggcccgcgcgcagaccactgggaagcctgtcgcgctcagacagcccgcgacatttgcgccgtcaaggccaaataggctgcagacgacgcccaggcgagggccaattggcagccgcctttgccg

SEQ ID NO: 26488 - DNA, 172 bp, Homo sapiens
  source 1..172: mol_type = other DNA
tagcctgggggcgcctgtcgtcccagctactcgggaggctgaggcaggaagtgagccgagatcacagcactgcactccagcctgggcgactgtcctggggtgaggcctcctgagagcttccggcctagggacgcaccttctattgtctcctcagaaggcataaaagctcagg

SEQ ID NO: 26489 - DNA, 174 bp, Homo sapiens
  source 1..174: mol_type = other DNA
ctccggaggcccaatgcccggcggtgcccggcctcctctgcgcatgtccagggcccgcgcgcagaccactgggaagcctgtcgcgctcagacagcccgcgacatttgcgccgtcaaggccaaataggctgcagacgacgcccaggcgagggccaattggcagccgcctttgccg

SEQ ID NO: 26490 - DNA, 422 bp, Homo sapiens
  source 1..422: mol_type = other DNA
cagaggggcggatcccagctgcaccggggtgagagcctaggccaggagggcacagggtcggctgccagctgcagcggggtccagggcagaggggcggatcccagctgcaccggggtgagagcctaggccaggagggcagaggggcggatcccagctgcaccggggtgagagcctaggccaggagggcagaggggcggatcccagctgcaccggggtgagagcctaggccaggagggcagaggggcggatcccagctgcacgggggtgagagcctaggccagcccctaggccaggagggcaccaagctgcactggggtgagagcctaggccagggggaccaggtcggcctgatccgcacgtccaaactcctcaagatgtgtacattaaatgtgcgccatttttgtatctcgatgatccataaa

SEQ ID NO: 26491 - DNA, 464 bp, Homo sapiens
  source 1..464: mol_type = other DNA
aaaatcagtgtaaaattaacagacgagaaggtttcctctgaaattaaaatgaatgagtcactacttgaatggattagtgtcatccaagttaaggcttttcgtgcttgagagccctaactgatgcagagtggggaccatgtgtaggttggctgatatcaaaccactgatttagtctagttcaaacaaagttcaactccaatattctttttaaaaaataaaaaattatcaccaatattcattatgtatcaacaaagactgtctctttttttcagtaaaaaattatcaccaatattcattatgtatcaacaaagactgtctctttttttcagtaaaggctttgctcaaactagatcaaatcactggtttgatactaatccaccagctcttaacatgttctttaattttctgaggccaggcatgtttagtacattaatcggaaacgcggcctggagtcccgcttctcc

SEQ ID NO: 26492 - DNA, 346 bp, Homo sapiens
  source 1..346: mol_type = other DNA
gcggaaactgagacacagagtgtgtctcttgcccggggccctgaaaagagggtgaaaggtcaccggctcaccctttccgggattctcccctcccgtgggcagctatgaagtcacaggggaactgggaggagaatagggtggaatctgcgagtcgccctcatctcccattttcggcctcggaaatcccgggtgacccaggctcgggaagtcctttaaagaaggccatgtgagggctcggcgactcccagagacttctgggtattgtagtttttagtaaaaagcagcttatcagccctctgagcaagggctgggagttgcgacccccgccccggatccggaagtggtc

SEQ ID NO: 26493 - DNA, 408 bp, Homo sapiens
  source 1..408: mol_type = other DNA
cttctcacatttgaactcctttacatctttataacgtttttattttacatttaactcaccatagatgtaatgtttaaaattagttaccagataaactcttcaaactttaaggttccttcgctccgcgcactgcgcaggcacgcctgcgtccggctcagatccggcttcaaggccgggctgctgcctttagaagacactgcggcgccggccctatcatggcgcagcatcggtgtgctttgtgcgtctgcgccatcttccggctgcgcacggcgaatccaccggtaccgtggtggaagcgcgccctgggctgccgggggcgcggccgcggtggcacttggacccgagaggttccggagctttccaggcgctctggggtccagcaggagctggtgcccgggccggttgggt

SEQ ID NO: 26494 - DNA, 325 bp, Homo sapiens
  source 1..325: mol_type = other DNA
atggttaagggttcacactcttaaccaaaggacaaactgttccacctcggacagggagagtttccgcattctgagacccagcacttctcacatttgaactcctttacatctttataacgtttttattttacatttaactcaccatagatgtaatgtttaaaattagttaccagataaactcttcaaactttaaggttccttcgctccgcgcactgcgcaggcacgcctgcgtccggctcagatccggcttcaaggccgggctgctgcctttagaagacactgcggcgccggccctatcatggcgcagcatcggtgtgctttgtgc

SEQ ID NO: 26495 - DNA, 543 bp, Homo sapiens
  source 1..543: mol_type = other DNA
tcacacacactgtcacacagtcttacacacactgttcacacgtggtctacacataatgacagtttaacactgtcacacattcccagtctcacagtctcactgtcgcacacattctcacacccagtctcatactgtttctcacactgtcacacacggtctcaaattctcacacagtcacacatggtctagattccacactgtcaaacacattgtcacacacggttccttaatgtctcacacattctcacacactgtcacacacggtccacctccttcggcgcggtccttggaggccggggctgggccagggcccgggccagggctcgatcctggccggcggccgcgctcacaaaggcgccgcagccctagggcaggccgcaggggccgctgggaaatggagtccggggccggcgcggcgcgggatgttggccgagggccccgggcggccgcagatcccgccgctcagttgcggaccagctgagcccacccgttccacctgcgcaggcgcagctggttcaggtccccaaaggctgccaggccggg

SEQ ID NO: 26496 - DNA, 491 bp, Homo sapiens
  source 1..491: mol_type = other DNA
tgaccgggcggacaccgccggggtgagcctcaccgacgcagtcagtctcactgccagcccgccggctacagcccccagggcgtgcaggggccgttgggcgggtcagttcatctccgacccggacagagcagaaccagccagcctcgctgcaccccggtggattctggaggtcgcaggatgactgcgtagtgcgcacgcgcgggtgggcggtgtccgcctccgcgggtgaggccggctccaccctcacacccacacgtgatctcctgagaggcgccagtcccctaggagaccggtgtgcgtgccagcctcgggggtgtgcgcaggcgcgggacctcgcgcgtccgcctgcaccaatcgtgcgaacgcgcttgtgcgtgtggcgctgaggggtcggggcctcaggccggggctggtggtactgtccccgagaggcgggtgagcgcacgccgcgtggccttgtttgggggcggggccacgcgcccgcatgcgtg

SEQ ID NO: 26497 - DNA, 597 bp, Homo sapiens
  source 1..597: mol_type = other DNA
ggatgcgcaaacccacgcgcgccttggcaggaacgtccacgcagtggcgggcgcgccgcccacgccctcggtcttcccgggctcagaccccggcggcgaccaccgagacagccgagcagggactcagcgcctgcgcactcccctccgggaccccgggaccgcgcgctgcaccaccacgcatgcgggcgcgtggccccgcccccaaacaaggccacgcggcgtgcgctcacccgcctctcggggacagtaccaccagccccggcctgaggccccgacccctcagcgccacacgcacaagcgcgttcgcacgattggtgcaggcggacgcgcgaggtcccgcgcctgcgcacacccccgaggctggcacgcacaccggtctcctaggggactggcgcctctcaggagatcacgtgtgggtgtgagggtggagccggcctcacccgcggaggcggacaccgcccacccgcgcgtgcgcactacgcagtcatcctgcgacctccagaatccaccggggtgcagcgaggctggctggttctgctctgtccgggtcggagatgaactgacccgcccaacggcccctgcacgccctgggggctg

SEQ ID NO: 26498 - DNA, 288 bp, Homo sapiens
  source 1..288: mol_type = other DNA
acctggctggtgtctgctgcagacaggtttttttgacatgttaagacattataagagacaatagaaaaaatgtatacgatacttacataataagaggagtcccctaaaacggggaccatttcaggggctgaacgcggttcactgaaagaggttattgacatcgcgatcccaggaactagtaactagggacgcttctggtctctaggcgaggagagggggagagcgcaatctttgcgcctgcgcacacctgggccacgcccggctcgcgtaatcacgcactgcgcaggc

SEQ ID NO: 26499 - DNA, 322 bp, Homo sapiens
  source 1..322: mol_type = other DNA
acctggctggtgtctgctgcagacaggtttttttgacatgttaagacattataagagacaatagaaaaaatgtatacgatacttacataataagaggagtcccctaaaacggggaccatttcaggggctgaacgcggttcactgaaagaggttattgacatcgcgatcccaggaactagtaactagggacgcttctggtctctaggcgaggagagggggagagcgcaatctttgcgcctgcgcacacctgggccacgcccggctcgcgtaatcacgcactgcgcaggccccctctcgtccgacccctggagagaggctggcg

SEQ ID NO: 26500 - DNA, 290 bp, Homo sapiens
  source 1..290: mol_type = other DNA
cattagcagtgtctgccacagctattacatggctgaaactaagccttttccttaattccatcactgtgcatctgtgatgactggtgtaacagcatcactgcctgtgagccagcaaggcccttggctcccaagaaaatggtattttcggactccggaggccccttcccggtcggcagtgacgctcccgcaaggagctgacgcccaggcccttacgcaagccccgcctcacccggtctgccgctgcgcctgcgcgactcccagaagcctttggggggtgggtgtgtagtcag

SEQ ID NO: 26501 - DNA, 440 bp, Homo sapiens
  source 1..440: mol_type = other DNA
agaaaatggtattttcggactccggaggccccttcccggtcggcagtgacgctcccgcaaggagctgacgcccaggcccttacgcaagccccgcctcacccggtctgccgctgcgcctgcgcgactcccagaagcctttggggggtgggtgtgtagtcagagcggcctctgcttccggccacacccaggcccagcgttggccaccacttatgcggcggctgcgcagataggcccggggctccgagggccgccgcatccgtccctgcttgggaccttcccagcgggcattgcgccgaggccacgcccggttccggcggcgctgcctgcgcactggaagtgggaagcgccgggcttctcggaggggcggggcgcggccgggggcggggcggctccgcggcgcggcccagtggatgccgggccatgggggagcgcgcgcgggg

SEQ ID NO: 26502 - DNA, 381 bp, Homo sapiens
  source 1..381: mol_type = other DNA
gagctaaaatgagaatattatcattttcatccaactctctaagatgatatttgctgtatgatgtctgacataaattggatccaggagagtccagtctagatgtccagtatctatgatgctgtatcttgaacaaaatatcatagactaagtgacttgactaagagactttatttttcacaattttaataagtgcactgaccccatcataagggtatcacccttatcatattcagcctataacatgttgtgtcatggtgagactggcaatgctagatttcgtgatttcctaaaaaataaaataaaaataaaaaactaagcacctactatgtgctgttttagtcactgagaatatacttcttggaaccctccttccagcaggga

SEQ ID NO: 26503 - DNA, 439 bp, Homo sapiens
  source 1..439: mol_type = other DNA
tttaataagtgcactgaccccatcataagggtatcacccttatcatattcagcctataacatgttgtgtcatggtgagactggcaatgctagatttcgtgatttcctaaaaaataaaataaaaataaaaaactaagcacctactatgtgctgttttagtcactgagaatatacttcttggaaccctccttccagcagggatccagagggtagccgctacgccttgacaggcgctcctgcgagctggaagccagttctctgcgtcctggctggcagctgcatcactcgggcgatggcttccagaaacccctgcgccgtgggtcgcttcagtgaaggggcctgtacttcggcgacccagactccgggctgagaggcctcctaatccaccgccaggcttggagaggagccgctcctggcaaagccagcgcgcctcacttccg

SEQ ID NO: 26504 - DNA, 289 bp, Homo sapiens
  source 1..289: mol_type = other DNA
tctgtatgcttaaaaagtgttctttaaagataagcatgattatcaggtttaaagttgcctgggatggtccctcaggccagtccattggctggactgcagaaatgtctgcagcagatgtgacaccccagcctccttggccgcggagtcctctgtgagatggaggagctcagttggctccgctcggctccactcggctgggctcggctgaaaaaagccggggggaggtggcgcgcgcgggtttctgggaagcgtagtccggcgcagtccgcgcaggcgcactgccgtcggg

SEQ ID NO: 26505 - DNA, 473 bp, Homo sapiens
  source 1..473: mol_type = other DNA
gtttgcccaaatcaactgtaaatgacacttgtgtaacgtatatatagtgtttcatgaggtgtatataaaatagcaaattatgacagaacagtgatcacatatatttggatttatatgatatacagttacagtttactctgcagaggtaccttagaagagagcaacaaatttgattatatttttaagtgtcttagatcctgagaaagatttattgagctgtaggcatgatagataacatggcttttactccttactgtttgaaaagataagtactcctaatactgtgtaaggctttacaatatactcatgcaaaaatattacacatttgtgttctgggttttttttttttttaaccaactcaatatgtgtttgatgatagtgaaaaacccgaagcttttccctgtaaatcttacatctttgcctttggagaggctctcatgctgcagcatcagcttatgctgccacaagtcagt

SEQ ID NO: 26506 - DNA, 499 bp, Homo sapiens
  source 1..499: mol_type = other DNA
agcaccagcacaggtggtgccaatcaagctgatgagaagtacttcaaatgtgacgtcgcatggggtaaaggttagaaaaccttcacctggagacttaaccttagtgtgttacacacctgacttaacatctctaaactcaaatgtgcagattccacagtcttaagcttgtttgcccaaatcaactgtaaatgacacttgtgtaacgtatatatagtgtttcatgaggtgtatataaaatagcaaattatgacagaacagtgatcacatatatttggatttatatgatatacagttacagtttactctgcagaggtaccttagaagagagcaacaaatttgattatatttttaagtgtcttagatcctgagaaagatttattgagctgtaggcatgatagataacatggcttttactccttactgtttgaaaagataagtactcctaatactgtgtaaggctttacaatatactcatgcaaaaatattacacatttgtgtt

SEQ ID NO: 26507 - DNA, 285 bp, Homo sapiens
  source 1..285: mol_type = other DNA
ttttaagagaagtctcatggcgaggagtctcaaggcgagaatacttcaaggctcagacatggaagaccctcagaatgtggcctgggctttgtggatctcacagacctcacagaccatcccatgaacaagattccaggcttagccctcactgagtttcagagaagtcagaccgaagagagactcttatgagccctatgagtacgggtcctcctctatgaatgcaaggattgtggtaagtcctttattcatagcacagtcctcactaaacataaggagcttcatctg

SEQ ID NO: 26508 - DNA, 238 bp, Homo sapiens
  source 1..238: mol_type = other DNA
gggtttctttccaggtctaaaaactatgcctgaagccaaaaaatcaacccaccggcgggggatttgtgaagatgaatcttcccacggagtgatggaaaaattcatctgtgtcacttaggtttaattcaacccttgtttccagaaagagagttcttgaaagaaagaggcgctatcattttgatcaaaaaggctgtcccaggagcgtgagcagcctgagcagcctcagctccccctcctg

SEQ ID NO: 26509 - DNA, 377 bp, Homo sapiens
  source 1..377: mol_type = other DNA
agtctggccctctcacccaggctggagtgtggtggcgtgatcttggctcactgcagctgggaatacggcggatctaatactcctgacctcaggtgatctgcccgcgtgctgggattacaggtgaatagtttttaataagctctttaagtctcataatcatgaaggtggacttggactatgtcctattagtccactgtaaccctaaaatattttacgtgataaagggtactattacctaataataacgataggatagcggtcctacagaaattgacttgaatgcctttgatgacatcccaggggtctcatttgacctgtgccatcatagaagataactgaggaacccagtaactgcaaaataaacttggcgtctcaca

SEQ ID NO: 26510 - DNA, 346 bp, Homo sapiens
  source 1..346: mol_type = other DNA
gccagtgggactggctcagtccccgcatctgggggagccgggttcaccacaaggcgccctgctggcggggctaagggctggggcccgggaccgttcctcgggactgatagggctgagagcactgcagccacagggtggcgcccgaggttgattgcgcaggcgccatcttgagtgacacctgggtcggccccaggggcgggcatgctgacggggtctgcatggccccgcccactctgtggcatcatctttgctggccattaggtggcagccacggtgtactgtgcaggtgccatcctgaatgacagctgggctggctgcaccattactgcgctgtagccgtccccag

SEQ ID NO: 26511 - DNA, 369 bp, Homo sapiens
  source 1..369: mol_type = other DNA
cggcacgttgcccggattggttggcggcagatgcggcggggcaggtggcatgggcgggacggtctgttcaagccccgcccacctgggtgctgtgcttgcttgcggaaagctgtggccagtgggactggctcagtccccgcatctgggggagccgggttcaccacaaggcgccctgctggcggggctaagggctggggcccgggaccgttcctcgggactgatagggctgagagcactgcagccacagggtggcgcccgaggttgattgcgcaggcgccatcttgagtgacacctgggtcggccccaggggcgggcatgctgacggggtctgcatggccccgcccactctgtggcatcatctttgctggc

SEQ ID NO: 26512 - DNA, 318 bp, Homo sapiens
  source 1..318: mol_type = other DNA
ttttacctatatttgggtttatccttaaaaaacaaataaatgagaaaacacttaccagttcgtttctacaaacttcagtaacttgtatatttcactaaatctactgagaattcaatccttaataataatggcaatgcatttattaaggaaacctgcagatttagacagatgtgtacatttctttgggggctgcaccccctggctttggggtccctcacggccactccctgacgtcgccaaactgttgctgtggcaaccgcagcctgattggcacgtcacagggctgtggctagcacagaagccccgcctctgcggagg

SEQ ID NO: 26513 - DNA, 318 bp, Homo sapiens; identical to SEQ ID NO: 26512
  source 1..318: mol_type = other DNA

SEQ ID NO: 26514 - DNA, 483 bp, Homo sapiens
  source 1..483: mol_type = other DNA
ctctggcagccgctcaggccctcagagggagagatagttgctaccgcgcggacccggcccccgaccagccttggcccctcgcgcgccgggacagggccacaaatgactgcacctgggcttcgctggcccaggcagcgcgcccaaagcgaccctctgcgcaaactacccccggggacgacgtcacccgtgaggtcccgcggcgcctcctccgtccgcttccccaagacttggggggctgaggcaaacacgcttgaaggcctaagacttttaagtctcttgcgattcttgcctcagcctcccgagtagctgggctgggatgacaggcgtgagccaccgcgcccggccgggatgactgttattaacaattcccggcgtggtttctcgcccctgggctggtaggccaggaactctatgtgccccggccacgctagagcccgtacctagacccgtaggtcgggaggcctgcgcccggcactgcgcaga

SEQ ID NO: 26515 - DNA, 519 bp, Homo sapiens
  source 1..519: mol_type = other DNA
gttttcttaattcagtattttaaaataatattttgtttttatgttttttaaatatgtttattttaattgtctagtcaaagttgccttttagtaaatgttttccaattccatatcgagaacctttaaaattgtacgcaacacaaagaaaacttgatgagcttttatttccttttagatgtggtctccctgagagagtggggcctgcaacctgctgggcgcaggcgccttgagcgcaggcaagggaaatgcgtccccgggccggggggcgcgagcgggggtccggggccgcgagctggggtccggggagcgcgagcgggggtccggggggcgggggccgcgggccgcgaggggggcgggggccgcgaggggggcgcgcgagggggcggggcgcgcgagggggcggggcgcgcgagggggcggggcgcgcgagggggcggggcgcgcgagggggcggggcgcgcgagggggcggggcgcgcgagggggcggggcgcgcgagggggcggggcgcgcgaggggg

SEQ ID NO: 26516 - DNA, 340 bp, Homo sapiens
  source 1..340: mol_type = other DNA
tcttgctgactggccttctgtgcagcaagcagcaggatctagatgcaaggacctggccttctcactcaatatcatgacttgaaataacagtgtaaggtaaaagtcgaattgcctgtgacagagcccacctcagaagtgggcaaatccactttttgtggctgaggacccagttctgcgcctgtgccctagtgcctttccctgggaggaaaactcgttcctcccgttgttgaacacatgaggaaaactacactacttagaaggctgtgcattatgcggagctgggccaacgacggcctaggacggggacgtttccgacggctcacgccggtgggggcgggac

SEQ ID NO: 26517 - DNA, 391 bp, Homo sapiens
  source 1..391: mol_type = other DNA
ggagtgcagtggcatgaggctcactgccagacgccagattatatttctgcaagatatgttccctgtctaaaagaattcaatttttaatgtttttgaaacttatgtgtttgctaaacaaatacaatattcctggctgtgagcaggcacagccgcaggcttcagggagccccatcgcggtgaccctggagagtggcctgaatcggacgtgaccttgaagcaaggtggttttggggtcgctcacgggctgcacgaggctccagcacgtcaggcatgcacaccccgtgggtgtatgcgttgttcattcccgcccagcccggaccgcagcactccagttccgccccaacccgggaaccctggactgaggctcccggaagtacctctctgagcggtt

SEQ ID NO: 26518 - DNA, 451 bp, Homo sapiens
  source 1..451: mol_type = other DNA
gttgcagtgagtggagactgtgccactgctctccagcagtcacaaatatgtgaaaaagagaatgatgtctttatcaattttcaaaaattactattgccagtgatgaataacagtgttccttgcacactaatttagccaaaaatatttctccaaaaaatttcaatctcaaaattaaatctcttggagagtatatatgtgactttattctctcactttcatagtcatgaaaagaaaaaaaaaaagaagacttcgcataatataatctttgcatagtctaggattgttaaaattcctaacaagactttataaactctatgacttgaagtaacagtttaccaatgttgaatcataggaaatgggagtactgggcttcccggcaagcctgctccactagcagccggtacgggaagtccacacgtggccatcctacgaaggctgggcccggccaaag

SEQ ID NO: 26519 - DNA, 382 bp, Homo sapiens
  source 1..382: mol_type = other DNA
ataatataatctttgcatagtctaggattgttaaaattcctaacaagactttataaactctatgacttgaagtaacagtttaccaatgttgaatcataggaaatgggagtactgggcttcccggcaagcctgctccactagcagccggtacgggaagtccacacgtggccatcctacgaaggctgggcccggccaaagcatttatccttttcttctatgaaaagatccagaaaagagggggcccagcccacagcagggtaagcacctttgttcggggtctgaatcggggcgaatatccccgcctcctggggctttcgaccctccagaaggcactgccccttgcgtcggccgcggactctgggccattgacgacccaggacag

SEQ ID NO: 26520 - DNA, 393 bp, Homo sapiens
  source 1..393: mol_type = other DNA
atatatacatatacatacatatatatacatatatatatcgcattttctttatccaatcatctgtcgatactttgctactgtgaatagtgctacagtaagcatgtaagtacagggtttattttcctttaagtaaatacccaatagtggaattgccagatcaaatggcagttctattttcaaccagtataagatggactacaggtgtacaccattttttgtgttggcatcccaaagcactgagattacatatatgagctacctccctaaaataagggaagtgagccagaagctctgggcccagcccatgatctcaatcggggcgaatatccccgcctaacgtcggccgcggactctaggccaatgacgggccaggacggcggaggtgggacttcc

SEQ ID NO: 26521 - DNA, 311 bp, Homo sapiens
  source 1..311: mol_type = other DNA
ttagcacggccaggcctggtgttaagtactttttacctcacgactttaaaagacctccagttcttgaacttcagctagggtcccatccccagagtttatccctaactacagcagatacgggcaccatgcttcctgtacagccagcagaaaggtagctaattacatctcttttctttatatgttagaaaaattagaaggacattcaatgttttacaataatggcattgtcccaagggtacaaactacgttacccagaaatctgtgcccagctcattgtatgacagcccagaaactgggcgtttcctgcgcag

SEQ ID NO: 26522 - DNA, 435 bp, Homo sapiens
  source 1..435: mol_type = other DNA
aaaatgtcctgtcaggaaatggcatgtattcactctcattttcagacaggattgagacttttaaaataaatgtaaaatatttcagacatgaagtaataagtattattagaataaaagcattgcactcttgcacaatcactgactctacagacagtaatgatgttttcttctggatccagaggcacagcgtcattaataaatagaagtcaaagtttaactgtatgtgtatttgacatttctgtgagtatcctagaccttacttcaagaaaatctggtccgtggagtccggcactctgccatataaggactgaccaacgctcggaaggaacctttgcgtgcgtgcgtgcgtgcgtgcgtccgtcctcgtgctcgcgcatcgtaggagggcgggacttccgctctatgacgtcaccgaagtgacggagcggagtgaca

SEQ ID NO: 26523 - DNA, 430 bp, Homo sapiens
  source 1..430: mol_type = other DNA
ccaaaatgtcctgtcaggaaatggcatgtattcactctcattttcagacaggattgagacttttaaaataaatgtaaaatatttcagacatgaagtaataagtattattagaataaaagcattgcactcttgcacaatcactgactctacagacagtaatgatgttttcttctggatccagaggcacagcgtcattaataaatagaagtcaaagtttaactgtatgtgtatttgacatttctgtgagtatcctagaccttacttcaagaaaatctggtccgtggagtccggcactctgccatataaggactgaccaacgctcggaaggaacctttgcgtgcgtgcgtgcgtgcgtgcgtccgtcctcgtgctcgcgcatcgtaggagggcgggacttccgctctatgacgtcaccgaagtgacggagcgg

SEQ ID NO: 26524 - DNA, 268 bp, Homo sapiens
  source 1..268: mol_type = other DNA
ggccctgcaggtcaggccccttgtctcgaagagaggggcgttcctgtgatgcagcctcagagctcccttcggggatctcaggttcagataacagaagaggccactgcagtggatcccagaggctgcacttcctgccgtatcagatatgtcttgagcaaaaatagaagggtcatttttttttttttgcccgaacatctgaaagatctcaagttgaaatagattcttcccagcgcgcgccatcgcgccattgcactccagcctgggcgac

SEQ ID NO: 26525 - DNA, 169 bp, Homo sapiens
  source 1..169: mol_type = other DNA
tggaggatggctcactgcaacctgcacctcctggattcaagcagttctgccctgacctcaggtatgacactgaaagaagatatttattccttacgtttcgttagtttgtccctgtgttataataagtaaatacagtttgaaaagctgctcatgtattcatctttcccaa

SEQ ID NO: 26526 - DNA, 383 bp, Homo sapiens
  source 1..383: mol_type = other DNA
ctatcttatgtaaaatgtagatttactgggcactaactaaagttcctttttaaggaaaatgtataataaatactaaacaaaaaccagccacagatgcttctgtgacttacatatgatttgtgacttatgcctcaatcaactctcattttcagataggattgtgattcttaaaataaatggaaaatatctcagatatgaagtagtaagtattattagggcagactgccttttaatagagtcttaagtaataagttgctaacatttctgtaaatatccttttggagtcggggactccgtttcccagctcccctgacagtgccactgggcctttatctgccatataaggactgatcaacgctctaagaagtccggaagcgggcgtg

SEQ ID NO: 26527 - DNA, 426 bp, Homo sapiens
  source 1..426: mol_type = other DNA
gctgttattttaatcaaaagatgcacttcttagtattattttaaacattattttttgtgtaaatgtatttccattacatttatcatttttggtttcaaatagttttatatcacacttccataaaagacattttgttgtgtatagacatctatgacatgtcttttcagacacttgtaaaacacttaaaatattgaatacatctctgtatatggagtatgaaatactatcttgaacaagagtattacttaagcaggataaatattttctgaggtaactgtgcctgacagaaaatgctgaggctcgccaaactattctctgcgtaaggaaggctgaaatccttcaagaggaagctgggccttggacgagggacaccatttccacgcgccctgccgtgggaactacattacccaggaggcgtttccgttg

SEQ ID NO: 26528 - DNA, 294 bp, Homo sapiens
  source 1..294: mol_type = other DNA
gctgtgttgaaattgatcatttacacataataaagggttgacatcttttttttatcaatagttgtgtgttgtaaacaacagtctagcattctacccagttaattttaatattgggtgtccttttgtcaaagcccagagaaacctctttggccctgaagatcctcttcaattccttcaaaagaaggaaagattggggctaaaacagcagtttctggatgatatgcccacttcctggaagtttggaggcaaaaaggcgcagcgccgcgaggcggcgatccccacgcaagggcggga

SEQ ID NO: 26529 - DNA, 223 bp, Homo sapiens
  source 1..223: mol_type = other DNA
gaaggtatacgtggctttgcccagtgaaacctctttatggtggccctgaagatcctcttcaagtccttcaaaagaatggagtatcagctgcaggaaactgaaatccaggccacttcctcgaagtttggacactgcccagaaggcgccgcgccgtgagccgcgatgcttggagtgcgacgcgcaatgggcgggacttccggcgtctcccgccctcaagagaact

SEQ ID NO: 26530 - DNA, 542 bp, Homo sapiens
  source 1..542: mol_type = other DNA
tagtcccggctactcgggaggctgaggcaggagaatcgcttgaattgcaccactgtactccagtctgggcgacagagtgagaaagaaaaagaagatataatgtttctgcaatctcatttcagttccacttatgataatagatacattatgtaatttaagtcactaatagtgatcaccttggttggagacccaggttttatcatacagatgaagcctgcaggtagcaagtttcagagaaatagattgtaaatgtttcttatcagacccacctagattttcaggtttgaattttatttttggttatagtttctacattaaaaaaaagaaaaaaattaagggtcgcgtcaattctcaattgtcaacatttttaatgtattgtatgcaatatatgtcaacttttgtgttgagaaatgaagatcaaatcgtattcttttatcctagtcctcacagcgcggcggactgcggcgtggtaggaactacaccacccagaatactgtgttgcccaggaaagggcacctccgtaagtgcgcaatacgccagaa

SEQ ID NO: 26531 - DNA, 367 bp, Homo sapiens
  source 1..367: mol_type = other DNA
atttagtataaaaatggttggcaccccaattctaagaaatcttgggaaaagtacactcttctcaaaaatgtgtactttttcttcccatccggaagcgggcggggactcacggcccctggagaccttcctgagccctgggccatgtcccgggaatggctccacgcgggaagcgggggtccagatccacgccagtcccagggacagtgcctggcgtcagtcactgggtcactcagaggaggcaagcggggaacctcgtggcagggcccccaataggaagttttaaaaatttacaatccagtgtgtacacttgcctggcctggcaggcgaccgcgacacaggggcgggacttccggcctcgctggcgtgg

SEQ ID NO: 26532 - DNA, 216 bp, Homo sapiens
  source 1..216: mol_type = other DNA
ctgagaacaaaatttggaacatgttgttctttaaggaccacattatacttcaagaagcctataaggttaaagggtgtttatactcacagtatttagtataaaaatggttggcaccccaattctaagaaatcttgggaaaagtacactcttctcaaaaatgtgtactttttcttcccatccggaagcgggcggggactcacggcccctggagacctt

SEQ ID NO: 26533 - DNA, 414 bp, Homo sapiens
  source 1..414: mol_type = other DNA
gagacagtttcctgcattggcctcttggccaagggcattccaaagttaatctgaaaaacatgggaagtgagggtcagacttgccctcctccacattaaaacagagattttaagacttcttgtagcaataagacagtgaattccagcctgattgtagtatagaattgaagtattttactctaaactttatttatttgacatattttgaatattttcatggtccaggaaagaattaagagtctggcacctttcaaagtctgataggaaacatttacaatctattccctctgaagcctgtgaaagcttcatctgcttaataagaacccggccagcggcccctttaaggagcagcaagtgaatctcagggagggcaccggaaccctgggcttctgagaactacattctgtctccgttt

SEQ ID NO: 26534 - DNA, 610 bp, Homo sapiens
  source 1..610: mol_type = other DNA
catggacttcccctcggggactaaatcccattcttgggctccaggggtgccctgggaacccgcctacctccctactgccctgagggcggttgggagacgtcttcaacggggtccaaggctcatctggacccagttctcagccgagcccaggaggggactcagggaagcagaggcgctttcctcggcggctctggggccttcccagctcgcccggcccccctggaggagacgtcccccggggtggagctacggagaaccccttcccatgggcagagcaggagcagccgggggcgcggcccccacgtggcctcccgggacacgtgcccacggccccggcacggcctcgaacgccttgaccccgcaagggaggggcacgaggctcctttgctcccgcaggagcgtcgaatacgtatcagcttcctgagcctgaacagccgccaaggcccagccctctcctgcattgtggcgacgccatttccctgcgcccccagcgcggccgcttggcggtgacgctgggcggcagcatccttccctcagccctggggaccagcggggactacagaacccagaggttttgtctccagccgcagggatgctgagccaatccgcg

SEQ ID NO: 26535 - DNA, 499 bp, Homo sapiens
  source 1..499: mol_type = other DNA
ttctctggagaatcctgactaatacaataggtttcagtaattttcatttcacaactgtttttctaagatgatccactgtccctgcagaaagagatgaaagctaggtgctctgactgtgaacactacagacactgttctactttaaaatggcatatgctaagtggctcttctgtttagaaagttgctacaatcctaaaagaagcaagaaatattatatgaatacaacactgttccttgagaggcattttctgtgagacaaaattcctctttcgatctaacggatgtttccttactgagcataatgaaactcacaaagctgactctaacgttctactttacataaatgtgtggagaaagaaactctgactacgctcctcccttgtccaaggaggctggacctccctgaggtccaggagaagggcgacctctgccagccagaggcccgtgagccaggttcttggcgtggagccaatgaggctcaggggagggacatttccgc

SEQ ID NO: 26536 - DNA, 505 bp, Homo sapiens
  source 1..505: mol_type = other DNA
ttttttaaaaccataaataaatcaattctcaattcagacactgtcggtgtaattgcaggtgaaatgagaatcacctctttctgggttttggcatataaaagcatttataatggttcttcttttcagataagaaacatcaccaaaaggaaatagatatatctcaacttttgaaaagaatatttctcctgaccatacaggcaggaaaggtgccttccttgactttttttctgaggaaaccagaggaagagactctgacccactgatctacagtacacatattttttaaatgaaggaaatttgactgaactatgagtggactcagagtaatatatcccaatatttcggggatgacctggttgagggtcctttaaaaggagcgaagccacgccctgacctcagagtctcagggcataagtgcaggggagttagccgtcaccacggccaagtgcacatgcctgtgcgccgcccggcggcggcactcttaggggcgtctccctgcggacgg

SEQ ID NO: 26537 - DNA, 330 bp, Homo sapiens
  source 1..330: mol_type = other DNA
ttctcaaatgtcattaattggaatcatacagtatattgcaccttttttcacgtcttgaagattcatttaccttcaaggctggagtgcagtggcgtgatctcggctcactgcaagacatttttgttgcttccaaagtatgccaattttggataaaactgctatacacacacatgtacaggtttttgtgtggacataaattttccactcatatggataaattctgaaaaatatggttaccgtattgtatggtaaaagtgtgtttagttttgtaagaaaccaccaaactccatttcgtacaactttgcattcccgtcagcaatgagagctcct

SEQ ID NO: 26538 - DNA, 450 bp, Homo sapiens
  source 1..450: mol_type = other DNA
catttgaagagcaataagataacgttttttcgcttcccactaccagtggagatctgcttgaacctctacactagagactattacttttgactcagccttatgaagttgcccggaagccttatgaattacataaactcccagtcattaacacattttgtatgatatatgcatgatatatgcataatatatatgatatatgcattttgtatgatatatgcattatatatattttagtataagaactatacttgtactaaaacagaagggaaaatacatttactaatcattaagtggaagtggatcatcataaaggtcttcatccttgtgttcttcatgctgggcaagagaatgaggacctgtgttgttcaagtgccctggaaggcagcagacgcagcttcctagcgctcccagctgtctgcacacaaggcgccctccgtcgcagcctggggg

SEQ ID NO: 26539 - DNA, 420 bp, Homo sapiens
  source 1..420: mol_type = other DNA
attagacttcatgaaaattaaaactttagtatatcaaacactattaaaatccaaaatgctccaaaatccaaattttttttttctttttttttttctccccctgtcgcccaggctggagtgcaatggcgtgatctcgctgcaacaggctggtctcgagatccacccgcccggcccgatgttggccagcctggtctcgacctcaggtgatcggattacaggcccaaccccctgaaataatattaggataatgtctctaaacacttaagtgatcagttacggaaaacatttaagaaggagtaaatacctccttctcccctagaggccgaagtcgccatttcccacactccgaagagctccgtggagttttggaaactacattatccagagtgcagagcgcaaaacggcggcggagtttccgcg

SEQ ID NO: 26540 - DNA, 421 bp, Homo sapiens
  source 1..421: mol_type = other DNA
attagacttcatgaaaattaaaactttagtatatcaaacactattaaaatccaaaatgctccaaaatccaaattttttttttctttttttttttctccccctgtcgcccaggctggagtgcaatggcgtgatctcgctgcaacaggctggtctcgagatccacccgcccggcccgatgttggccagcctggtctcgacctcaggtgatcggattacaggcccaaccccctgaaataatattaggataatgtctctaaacacttaagtgatcagttacggaaaacatttaagaaggagtaaatacctccttctcccctagaggccgaagtcgccatttcccacactccgaagagctccgtggagttttggaaactacattatccagagtgcagagcgcaaaacggcggcggagtttccgcgc

SEQ ID NO: 26541 - DNA, 448 bp, Homo sapiens
  source 1..448: mol_type = other DNA
tagacttcatgaaaattaaaactttagtatatcaaacactattaaaatccaaaatgctccaaaatccaaattttttttttctttttttttttctccccctgtcgcccaggctggagtgcaatggcgtgatctcgctgcaacaggctggtctcgagatccacccgcccggcccgatgttggccagcctggtctcgacctcaggtgatcggattacaggcccaaccccctgaaataatattaggataatgtctctaaacacttaagtgatcagttacggaaaacatttaagaaggagtaaatacctccttctcccctagaggccgaagtcgccatttcccacactccgaagagctccgtggagttttggaaactacattatccagagtgcagagcgcaaaacggcggcggagtttccgcgcacgcgcagcgcgacgggccggaacttccg

SEQ ID NO: 26542 - DNA, 455 bp, Homo sapiens
  source 1..455: mol_type = other DNA
ctccccctgtcgcccaggctggagtgcaatggcgtgatctcgctgcaacaggctggtctcgagatccacccgcccggcccgatgttggccagcctggtctcgacctcaggtgatcggattacaggcccaaccccctgaaataatattaggataatgtctctaaacacttaagtgatcagttacggaaaacatttaagaaggagtaaatacctccttctcccctagaggccgaagtcgccatttcccacactccgaagagctccgtggagttttggaaactacattatccagagtgcagagcgcaaaacggcggcggagtttccgcgcacgcgcagcgcgacgggccggaacttccggcgtcctcctcgcagcccgccagtttctgcagtggaggtcgcgactaggttctgcgacaccacctcgggtgagctgcgccaggcccgggatagggactg

SEQ ID NO: 26543 - DNA, 307 bp, Homo sapiens
  source 1..307: mol_type = other DNA
cttacaatgacaatgacaggttaaatggtaattgcactgtacatcactgattacccaggcaggaagagttttctgaagaaatctgtccactggtctgaagctcacaaaagttactgtaaagcttgagtgaaaagcaacaaggtaatagttattagcttctagctgtgagttggggaacatctgaaatgtctcaacatttcgtcagccgggcaccatggctcactcctgtcaattagtcagccgagatcgcgccactgcactgcagcctggacagagcgagactctggacggaagtcctgtcagccct

SEQ ID NO: 26544 - DNA, 376 bp, Homo sapiens
  source 1..376: mol_type = other DNA
aaaagatgttttctgttggaatcagacagaattctacctttgtacctatcttctagaagcactagagtgcatacatttgaaggcgcgcctatagtcccagctacttgggatcccagatggcgccgctgcactccagcctgggggctttgtcttaaaaaaaaaaaaaaaggaataaacttatatggtaatgtttattagcttcgtacataaataatattccccaaagaaagccctaggacttggataagccatttctcatcgcccagcgccctggagcttcgcttttactccaagaggttggtgcaaagggtccccggcacccatagaatgcctgcgttgaaccgactttccttgagagtcacaaaaagaaaggacg

SEQ ID NO: 26545 - DNA, 417 bp, Homo sapiens
  source 1..417: mol_type = other DNA
ttcctgtaagattgataaatcttagataaattaatccagaattaattgaatataagttggaattgtgggaatcacagacagagattcagcatgtattcctgcttgagaaactgactctaatgcctcagagtgcattcatgtgaatttataaaacgttatgataatttggataagtttagcagagctcgagttccccaaaatctaaaataatattttttcaaatacttgagtgatcagttacagacactaatctccaaactaaggctaggtgagactatcctctaccctagaaggacatgcactttaaggacaggccgctgggcctttcctgcaagtaagatggtagggtatacctgacagctttccagagtagtgtttattcaccactctgtgcaatcagcctctgagaaggccttc

SEQ ID NO: 26546 - DNA, 428 bp, Homo sapiens
  source 1..428: mol_type = other DNA
tatgaataacatcggcttctaaatcataagttgatttttaactactgggtttaggccaggcgggcctaggcctggtttcgggcctgttgttgtttttactgaatataaaacaatgtgagagggtctctctcttctctcatggctttttgatgttgatatcagatttctagaggaatctgtaggttaaagatatgtaatcgctgtaatcccagctataggctgcagtgagccaagatcacaccactgcacgcgtatggcctcttctaagatgggagaccctcctggagtcgccatttcctagcgcccctcgcagtggagcttgcccctttcttcggaaagtcggaagaaagcacgtggctgagccaatgaagcttcagagaagccgtgccattgccggggcacgtaaagtcaagccaggacttccggcg

SEQ ID NO: 26547 - DNA, 270 bp, Homo sapiens
  source 1..270: mol_type = other DNA
tagtaattttgaggccacaagattttccttcacagattcttttgccttaggcactctaaggcttctgagggccttcaggggagaatcctaaataatagagcgaagtagtatttttccaaattcttgagtgattagttacagacactagtctccagtctaaggctaggtgagacccctcctagtgtgaccgtgagccaccgcgcccggcctcagggcgcgctttaagctctgcgttgaatgaatgccgtcagagccaatgagggctcggaa

SEQ ID NO: 26548 - DNA, 312 bp, Homo sapiens
  source 1..312: mol_type = other DNA
tacatcccccagccggacacccttaaagggtctgggaatggaatgtcatggtgtaaagccaaccattcccattcgttgttctggcagcaatactgctctgttgctctttgctacactgagatgtttgtttaaagtgaaacataaatctggcctatgtgccatcaccggcgccggtgaaggtcctcacatccacctgatgagagatacccataggtatggaggggcaggccttaaggatactcctgaggtggagctgggcttttcctgcagaacttacctagggaaaaggcatttcctgtgtgcacgtgacaa

SEQ ID NO: 26549 - DNA, 355 bp, Homo sapiens
  source 1..355: mol_type = other DNA
atactcttttagttatttttaaatatataattaaattattttgactatagccaccctgttatggtagcaaatattaggagaattttcttttgttcccaacaaaacaatgaaactctaatgattcagtcttgaatttaaagagcaatcaatacttaatgttctcagctctgagtgcacacattgtataagtaaagtttgggagcatctcaaatagtattttatgcttttacaaagaatcaataatagtcatctctgctcccaagctggggtgatgcctgctccacccacagttgatggcagcagccacaaccccactcggaaagaaggcatttccacgtgtgcacgtaacgtaagg

SEQ ID NO: 26550 - DNA, 301 bp, Homo sapiens
  source 1..301: mol_type = other DNA
aatatttttccatacactagggtgagttcgagaggcaggatgatcctctgcctaggagaaagatctgcaagtgtcacccaggctggagtgatcccatgtacaagagattctcctgcctcggccagtcttgaacctcaggtgtaagtgctgggattacgggcgtgagccgcccgcacctggcccttatttttacagcagcttcgaactcctgagctcggatactcccgaggtgaagctgggcttttcctgcagaagcgcctctgggacctctgagggctcagagggtccggacttccggcgc

SEQ ID NO: 26551 - DNA, 323 bp, Homo sapiens
  source 1..323: mol_type = other DNA
tttgccttaggcactctaaggcttctgagggccttcagattttagcctttaggagaatcctaaataatagttttagcttgagcagtatttttccagattcttgagtgattagttacagacactagtctccaggtctaaggctaggtgagacccctcctagcctccagagtagctgtgactgtaggcgcccgccaccacggggtttcaccgtgttaggatgagattacaggcttgagccactgcgcccggccagaagggtgcgctttttaaggagaacccctgacctgatggcgggcgccatggaaagtccacgtgtgcacgta

SEQ ID NO: 26552 - DNA, 378 bp, Homo sapiens
  source 1..378: mol_type = other DNA
gcctcagagtgaggcagcacacaggccacgtcctcactcctgtggtaacaagacagaagtcgtgcaccagtccttcataggattggaggcctttaaagaactcttggggtattataaaattctagaaaccctaaaaaacattgtaatcggggttcttccacttctgtggagtgtactttcccaagagtgcattcatgtgaatgtgtctaaacgattgtataaagtcttgaatttacagaaatgtgaattaatatttttgcaaacacttacctctaaggaggggcgagaccatcctctgccctaaaaggaaccccctgaggtagggctgggacttccctgcagaagcgccttttcagaataaaggcgtttctgtgtgcg

SEQ ID NO: 26553 - DNA, 263 bp, Homo sapiens
  source 1..263: mol_type = other DNA
gtacttatgtcctgctgctgcagggtgcccgtggcgcggagtagctggggactacaggcgcccgccaaccagtggatatattttgtgactgactgactgtatgtaataatatgtgcatctggatatgtgcctctgggaacacatgaaatgacacgtctccaaacaaattacttccggaaggaggtggaggcgaccctcactctcccgccgtgcgcctgtgggaacagcctgcgttgggcgacggcgaccttcagccttccgta

SEQ ID NO: 26554 - DNA, 124 bp, Homo sapiens
  source 1..124: mol_type = other DNA
cagtacatcttgctctgtcgcccaggctggagtgcagtggcatgatctcagctcactgcacaagtagcttgcactgcaggcagggacctggtctcatcatgcctgccatgaaggaactccatta

SEQ ID NO: 26555 - DNA, 405 bp, Homo sapiens
  source 1..405: mol_type = other DNA
gactggtctcggacctcaggcgagtgcagtggcgatcatagctcaccgccacagcttcccgaagtgctgggactacctgacctcagccgtcgagcttaggttccttatcttaaagagaataacagcagtcactttctcatccctcgagagcgctgagaactcgccgagctcctcccgggaaacccggtaccacgaggcgccattttgcggatgggcaaaccgaggcccgcggggccgcgggtggtctgggaccgggacaacaaagtccatcctgccgccggcttcgacgcaggtgccagggtcccaaccccgcccaggcagggcgaggcggcgcggcccaggaacctgtcatggcggcgccgctgcccgacgccggaagtgcccgcctggaactacagctcccag

SEQ ID NO: 26556 - DNA, 435 bp, Homo sapiens
  source 1..435: mol_type = other DNA
ggccaggctggtctggcggacggagtctcgcgtccagtgattctcctgtctcagcctcctgagaaactgggatttgcaaagtgctgggattacaggcgtgtggacatacttgtactaaacatatttatattaaaaacaatgttttaacatactactcttggacactgtataaaacggttgcgcagcagcgtccctgacgctgcgcgacccgttgccaaggcgactggaaccgcggcccgaggtaactggagggcacggcgggggcggggcgctcatcccaggcggcttctgattggcctcggccgcctcgtgcgtcacagccccgcccctgcccgggagtcccgcagcggtgacttgtcaccgacgcccggcgtgatccagcggaccaatggcggccgcccgcggcgcgcagggtgcggggatggggtccgcccg

SEQ ID NO: 26557 - DNA, 599 bp, Homo sapiens
  source 1..599: mol_type = other DNA
ccggggccgcgactgaagtggctgaggccaaccgagggcccaaagcgcccgtggcttcggctttcttaatattttattacatatatatatgcatatatatatttacgcatatatttatgtatgtgtacacatacatgtatatattataaactatatacaaattatacaaaatatatgtaattaaatatacatacatatgtacataattttatttattttggagaccaggctggagtgcagctgcagtcttgacctcctgggctcaggtgatccttccaccgcagcctccggagtagctgggaaaacaggtgggcggtaaccccccccacgaattatttaaagtttttttaagagatcaggcggaggcagaggttgcagtgagccaagatggcaccattgcactccagcctcccataataggtgagatgatggccggtgggtctggcctggtcgtcctggattcggccaagcctggattccactgtagccaacctaggggtccaggacccgctgggctggtgttcggggcggcctggagactacaccagggcggcgccaccgcgggttacgtcatcggctgggcgccgagcccaagcggc

SEQ ID NO: 26558 - DNA, 485 bp, Homo sapiens
  source 1..485: mol_type = other DNA
tatctcttcataattgccatttagggcttatgaaatttaaagtcttaacttgtgtgttaaccagccaaatgttgtttcagtcaaagaaaaaaaaatgggaaaagcacaaggctcagcccttgaacctaggcctagcgcctggcaggctttggtgaatgttcagaaaatgacaattcatttgaatattttgctgctgttcaaatgcacaattttgacaattacctagcaatgtccaaagtcgtcataaataaccatgtaataaatacagtgtgaaggaaagtatgtgttttgaaaaaatcattgctttgtttgcagcagtaaaactcaacacgaaagcccgtgtggtcgcgccgggagctcacggcgttccaagcggcacttacgcgcgccctgtaccaggcgctccagcagcactgagagctcacgaacgccaagggcgagagcgacggccggaaatgcgcgcgcggctctctgggctcgcgccg

SEQ ID NO: 26559 - DNA, 303 bp, Homo sapiens
  source 1..303: mol_type = other DNA
tatgagttaaaattcataaaactgaataccaaaatgtgtggtgtatgtaaatttaaaatatataaactgttcagatatacattttaaaaatcagttaagcagctcctggccctatcctgcctgcttttgaaactaccccagggcgtcttgggcccctgacgcaggcgccggagtgggcgggacgccgggaggccacactcgcgtctgtggccatgcgcactgtcacctgtcacggctcccttgctcgccccggtgcgcggcacagcctcgcggcattgtggccgcggtgaggcccagtgcgca

SEQ ID NO: 26560 - DNA, 371 bp, Homo sapiens
  source 1..371: mol_type = other DNA
acagtggagatttttaaaatgattaaccaagtgaagtggttattgcacctacacaaccacatgaaatggcaatgggtttttggcgtccattggcgcgttccacacccctgtagaggagtgactccaggccccagattctgccgagaccacgcgcgcccagggtggtgcaggctcgcaagcggatatacggctggtcaacctggtccgcagcggctcaaggcagcccacgtgcgctcccggcagcactgcgagcgctcccaggttctggctgccaggcagctgcggccacggccccgccccgggccggccccggccccgccctcgtcgcactaggccccgcccccagcgtccggtgtcaccggaatatcgca

SEQ ID NO: 26561 - DNA, 318 bp, Homo sapiens
  source 1..318: mol_type = other DNA
tttgatatagtaagatgtttcaaatctttttcccagcaaggtcaggagttcaacaccagcctgggctgggtatatccaagctactcaggcagctgaggagttgcagtgagctgagatcatgccactacactccagcctgggtgacagagtgaggcactgaaaaaaaaaaggaagaaaaaagaaattttttttggcttgatgtagtggatcgagaccatcttgcaggcacctgaagtcccagctactcgggaggctgaactgtggtcatggctcctgagcccaggcaatgatcatactactgcattcaagcctgagcat

SEQ ID NO: 26562 - DNA, 467 bp, Homo sapiens
  source 1..467: mol_type = other DNA
tttactacttatgtatcaatctctgtataacatatagattttgtgtcttttgtgcacagtttacttttcaaggctggagtgtgatggtacgatctcagctcactgcaaaggttcaagtgattctcttgcctcagcctcccgaggagctgggattacaggcgcctgccaggctggtctcagttttgaaagaatgaaaatgtgtagttttcattttcaaccggctatgtttacatttcttagatctagtcattttaacaaattaggcctcccaaaatgctgggattaaataattatattgccaatgaataatgagtgtacttattctgaattttaacattattatctcaaaaaaagattatagataaagaaatattttaggaaattatgcatgaataacccggtacccgcggccgccccagcgttgggcgggggaagctcggggactccgcgcacgcgcacatccttgt

SEQ ID NO: 26563 - DNA, 237 bp, Homo sapiens
  source 1..237: mol_type = other DNA
acacagggtcctgagcactgagagagatcattagggccctcaggtcccaagaacctccttgtcctgagctcccaaggaagatgagagcaccctgggcccaaggatgggtggcacacaccaggtcctggacagctgggggacactaggcagaggatcctgctcctcctccccaatgccggtggacacaccctcaccacccagatggacggccagttaggcccgccccctgcacttccg

SEQ ID NO: 26564 - DNA, 311 bp, Homo sapiens
  source 1..311: mol_type = other DNA
gcccaggccggtctagaactccaacaatctcgtgtgattaacttaaccaccaggaggatggtgctaagccattcttgaaggttcaccaggccccaccttcaacctgagatttggtagggtgcaaccctgggcagggttcctagcccaggctggagtgcagtggtgtgatctagctcactgtgcctcccaggtagctgggactacaggtgcccgccaccggccaggctggtctcaatggtactgtcattgattcaaaaactgagtaacgtaaagatgatcagcagcctttggcagatcctctacttaggggt

SEQ ID NO: 26565 - DNA, 304 bp, Homo sapiens
  source 1..304: mol_type = other DNA
ggcagaggatcctgctcctcctccccaaggtggacacaccctcaccacccagatggacggccagttaggcccgccccctgcacttccggtcgccttcgtggcagggcacgactctctcccagctcgggtcgccgcccacattagtgtggggccctgcggcctagcgtccctagaggcctggaccgccgagggacatcgacgagtatcctcgcccctaaccggccagtcaagatggccgccgctgggtgaggcaagctggcgcgccgcgggggcgtctgtagttcgggacggcgggctgacgcac

SEQ ID NO: 26566 - DNA, 352 bp, Homo sapiens
  source 1..352: mol_type = other DNA
tgagggtgcctgagccacagtggttcctggccttcgtaggaaagtttctggtgggtctcagacattgagccccacaacgcactgatgctccaagcagggactcccggggcccaggctgtccctgagtccctgccacaggcgcagatgttggcgggcgcccttgcccctgagctcccggttaacggcggctctctccccagcagggcaaggcgccgggaagggacagcgccgagccccataggcgctagtcccgccctggacgccgaccgccgccaaggagcagcatcccgccgccgcggggccccatgctcccgccggcaagcaacggctaccggcgcgctgttgcgcggag

SEQ ID NO: 26567 - DNA, 624 bp, Homo sapiens
  source 1..624: mol_type = other DNA
ctgtccctgagtccctgccacaggcgcagatgttggcgggcgcccttgcccctgagctcccggttaacggcggctctctccccagcagggcaaggcgccgggaagggacagcgccgagccccataggcgctagtcccgccctggacgccgaccgccgccaaggagcagcatcccgccgccgcggggccccatgctcccgccggcaagcaacggctaccggcgcgctgttgcgcggagcgcgggcacgtccgccggccaccggaagcaccgccattggccggtgcgtgcaggtgagtctggcggccgggtgcggccggagcgcaggaccaggccagagccgccccaagtgatctgggcgtgccggagaaacgagcagggcctgcgggggtccctcatgcggcggcaggggcctgatgggatcgggatctctccggcctcagggacggggaaggccggtccagtcaggtttcccctgcaggagcgcccggctgggtctgagcttgtcgggaggctctcctgctgcagagctgggagggaacttatagtacctcgcaggtacggggccctcccgacagagggtgcctgggtcgagggctggtctggagctctggggctgccgaccca

SEQ ID NO: 26568 - DNA, 422 bp, Homo sapiens
  source 1..422: mol_type = other DNA
attcctaacctctagatgtttacggttaagggaacaatatcccggtatctagagaacaaggcattcctaattttgctttaaaaataatatcgattcttgaaaaatacagtaagaaaattaatcctttttcacaaaatctatttttagcccaaatatacacaagcattgtacctagggtgcatacgttgcagagggtaaagcggcgcagctccgggcctcctcccgcgcaagttcccgagaagagcaggtccggcccgcgcagacgtgcacggtcacgagtgaggcctctggttgcccgcaacctaaggggcatcgcagccccattggccagaggccagcgggtgggggctcccattggccatcggccattggtcgaaggccagaccagcggagactcccattggccgagggctgtggttcgc

SEQ ID NO: 26569 - DNA, 386 bp, Homo sapiens
  source 1..386: mol_type = other DNA
atattcttctccactgggaaatgcagtaaagaaaaagaaaagctaatttcacttaatttcttttcttttctttttctcgctctgtcgcccaggctggagtgcaatggcgtgatctcggccgagtagctggctctgtcgcccaggctggagtgcagtggcaccatgcttcagccctctaagtacggatgacaggtgtgcttactttcactgaatttctgtgatgaaacgggaaaaattaattttgttaaatctcaagtagaactatattgtcattatcacatctaaacagatatcatcaaatacctagtgttcagattttgttttctatttgtttcatagtaatcataatctaaacaagatccacacagtgcatttggttggaattt

SEQ ID NO: 26570 - DNA, 370 bp, Homo sapiens
  source 1..370: mol_type = other DNA
gagctggcctcctttgtggttcatctctagaggttcaacaggaccctgtggcacaataatagttctgtgagttagtaccattttatagataggcaaaatttggcacaggacaaaacatggcttaaacagatgaggctttgttcaaaggctgtcttttcagtggctcagctgtgtcacatcatgaggagactcctatggctccagccattgcatccacagtgcactggccacagatgggtcagggggccggggcttagaaacctcgtatttacctttctaacctctgtgaggcagctagccgtagctgctgcttttctcttcagatggaggcagctagccgtatctgctgcttttctccttcaagcggaga

SEQ ID NO: 26571 - DNA, 280 bp, Homo sapiens
  source 1..280: mol_type = other DNA
cctctcacccaggtacccttgttactggtggagggtgtccaggttcttggcatcttgaacaaataattggactggggtttaaataccctctagaggtttccattggttacttggtatatgccctatgtaaatgaagaggacgaagtaaagttacaaagtgatttactccatgtacgccctgcataaatggagaggatatttccacctcagtcccacaaaggccgggctgggatcgcaggcagcgcctgggtacagcttccggaggacgccgggaattgta

SEQ ID NO: 26572 - DNA, 584 bp, Homo sapiens
  source 1..584: mol_type = other DNA
agcatttcaaaatggatagggaatataacttttaaaatgcgaaagtatattatacatattgcacaagatactcaaactattgaataaaatacacatttaaatcaagcacttacatgtacttcattaatttccctgaaattatcaacagcattaccaaaatcttccaggattttgtaacatttggagtgtcactctgtcacccgggctggagtgcagtggcgcaatcttggctcactgaaacgagtagctgggatgagctcaggcaacggcaccttaaatacacttttaaagttaaacttatggaggtctattgacatagattgtatgtccttccctccatgaaggagtcagagtgaccgaggctggggaccccagaagccccagagcaggcccgaatctgggacttccacggtccgcggatgtccggggtgtgaaggcagcgggcgcagctcggcggcgccggaggagccctctgcgcccgccggggctgaggcgcaggcgcgggcgcggcctggggtgtggcctggggtgtggcctggggcgtggcctggggcgtggcctggcccgaccacccgcccgctccg

SEQ ID NO: 26573 - DNA, 409 bp, Homo sapiens
  source 1..409: mol_type = other DNA
tcctgggccctcccgtagcggagctaggctgggacacccagggtggggaccagacctccccgggtggtctcacccctgtcctgttccatcccaacaggctgtggtgaaagcgggaggcctggcctccaggcagcaggctatagccacgaagagtgagggtgcacctccagaggtgaaccccacctttggtgtcacatgtgctgacagggaggggctcgctgggcttcagccccggcactctccacttgaccagctagaacaggtctgaaatgaggatgaggtggttttaacatcattttatcactcttgatttagtttattaatcatacatgattattgattataattgttgctttgccctgaccccatgggggccctgcccccgccttccgggaaggacaaacacggg

SEQ ID NO: 26574 - DNA, 350 bp, Homo sapiens
  source 1..350: mol_type = other DNA
cagtgtcgcgcgattctcctgcctcagcctcccgagtagctgggactagattacaggcgtgagtcaccgcgcccggcccccgactctattttaaaaaccgcgtggattgtgagacgcagctcagtggcgtcaaacgttggcccgacttgcgtccgcgacccgggcagccccaggcgcctgtgtagctgttccatggcaacgcaggacgcccgagtagcttggctgtggcgccgtccccatgggaaccagaaggcgcgcgcccgcagccgcggcatagttacgcaggcgcagtggggagaaacgcgacgccttgggccgctctgccgaatgcaaccgcgcccccaggagac

SEQ ID NO: 26575 - DNA, 418 bp, Homo sapiens
  source 1..418: mol_type = other DNA
aaaataaataaataaataaataaacatttatcatcgcagcaagactgcagagtatgcactgctccactgcctctccacaggactgcagacctgagtttcctcatgtccgggcagctgaattctgggtgatccaagacgtctcgatccagtgttgggattacaggcgtgagccactgcgcccaggcctccctgcagtggcatgatctcagctcactgcaacatgtagctgggattacaggtatgtaccacacacgacctcaggtgccaataaaaatttttttaaagctaaaattgactctcatgcaaataagataaaatgaacatatgttaaatattttaacttaatgagagaaatagtaagatgttaccagttacttgagcttccagagggagctcagccctgtcaacattgttcagc

SEQ ID NO: 26576 - DNA, 678 bp, Homo sapiens
  source 1..678: mol_type = other DNA
tttctgacccttggagaggtcggccagttcaagaggcacccctgagagccacgtctgcagacacgagggcctcgtgacgtgagccctgagggcagggggctgcaacccctcgcgcgggctccccggccgtggaggacgggtccccgacctgccgaccccctcctcccggacaccgcgcgtagcctgtaggctacctccgcgctccacccagagacgggtcgcgctgctcccgccgccgcaaccccgggccctcgtgccggcggtctcccctcttccacgggcgcccagccagaggctcgggatccggggctcgcgagcgtggtgctcctgggccgggcggtgggggaggggccgcgtgtggcaggcacatgcgcacggcaacctggacctgcggagggcggcggtgaccactgggcctcactccgctaacccaggtccgcatcaggcgcgtgccggtgaggcggctgtggccgcggcgctcccgcggcaggtgggatttaaggtcagcagctgaacaaagaagcgagcgctggccagacttttttcttttctgcgcttttgcaggcgcccacaagccgcttctgcaactgcgcatgcgcttgggctgcacccattccgtctagcaaagggtctatagggacacgatggccttttacgcaagcgtcacccgtgctgact

SEQ ID NO: 26577 - DNA, 325 bp, Homo sapiens
  source 1..325: mol_type = other DNA
gggcctggcgcagtggctcaagcctgtactcccagcactctggcaggagttccagaccagtctgggcaacatattatggtggcgcgcgcccctgttaacagtggtgtcactgattctcgggcccagcccacccgaggggagcctgcgaaccgcaagtcggttccgggttgggaggctatcaatcataatcatgaccagtcacccgctttcacgagaaggaatgggcgggaccctacgtccccgtccagaacgcggcctctgtttctatgatacgcaaagcgggacatgacggccagcagtccccgcgcgggttcccgcctgcgct

SEQ ID NO: 26578 - DNA, 482 bp, Homo sapiens
  source 1..482: mol_type = other DNA
gcttgtgaagccgggtgccagagggcccagcacgtaaatcgacgacaataaataggcggctgaaccaaccgaaccatggttctggtagcactgcctcccgccaccctcagggggccctgctcctccccaccttgcaggagggacgccagggcccggttttcggttccgccgggtcggagaggtccctgcccacgccagacccgtccccggccgtcgcggcaccctcttgtccaagggccaagagcggggcttcgccggacgctgggagcgtcactgtccaactgaggctgaccagctgggcagtcctggaagcgttctcctcttgccccgggcgggccccgcccagaatgcggagaggccttcgaggcacgcctgtgctgcgcgcgcgcgtcgccttagtgccgcagccctattaaggcgcgccagtcagggacccgagggcgatgttgccatgacgaccacgttgcgctggagattgcgac

SEQ ID NO: 26579 - DNA, 449 bp, Homo sapiens
  source 1..449: mol_type = other DNA
taagaactccgttcgtccgggaggacgcaggcccacctgctctaacatgcagcggaggacagggtagggcgacctgttgtggcccatacgtcgcccgcattgtggggcgccgaggtccctcggcccctggtcccagccgctgaagacttgcctgatgacaggcatgtaccatgtttttggctgggttctgagccttgctccgggctccgtaaagcggacacggtgccaggcacaggcgggcttctgcggaggccctggcgaacgcccccgcgcggcgcggtccgatggccccatggggccgcccctccactgtgaggtcaccgactgcggctaggacgcgtacaggtcactgagcggagacacgcagggcccgcccgaacgttcccgttcctgggccgccattggccagtcccgcttcaggagctagcggcgccctcccttatcgccta

SEQ ID NO: 26580 - DNA, 353 bp, Homo sapiens
  source 1..353: mol_type = other DNA
catgagagcctgcctgaacgctcaggtcagggtcaagtccaatgtgaacgctccacactgttcagtggggcccgcagaggacctggggcttttcttggcctcggcctctcccgagagccgcggacacctccgcgcggtgcaacctgagggtcccactgggccgggtttccatgggcccagggagcctgacgacgacggctgccaggctgtgattggccagcgtcttacactccgcccggaagtgcctgtctcctcggctgccaatggccagccctgaggcaccgcgagggtccttgcgttgcctgagcagcgacgcaataaacgccatggcaagtccgagctgtcattgagag

SEQ ID NO: 26581 - DNA, 278 bp, Homo sapiens
  source 1..278: mol_type = other DNA
aattctgtggacagttatagctgacagtagacagatatttaggaagcaacaaagagagaatcgtttattctcttgtgtcaaagacataaacctttaagggaacccggagctccaggcatctgctcctccaggaactgggaatccccacagtgccacggagcccttggaaacccgcggcagctgcgctactccatttccaggcgcccagcgcggcggcgcttagccgttgccatggagactggtaatggccccgcctccgcaagcgtctgcgcgcgtat

SEQ ID NO: 26582 - DNA, 324 bp, Homo sapiens
  source 1..324: mol_type = other DNA
acctgaggtcaggagcctgtggtcccagctactacggaggggggatcacttgaacgaggttgcagtgagccgagattgtgccactgcactccagcgacaagatctagatggtctaaggacaaacggaccttaaacctttacgggacattggcgggaagggaacccggagctccaggcatcggctcctccacctccccgaggccgccgcgcgactccatttcccagcgccccgcgcggcaggggcttggacgttgccgtggccccgcctccacgtacgcaagcgtccgcggcgcgcactgggccaatgagaaccgaagggctgga

SEQ ID NO: 26583 - DNA, 604 bp, Homo sapiens
  source 1..604: mol_type = other DNA
actagtgtcacgcctggagggaaacctccacccccgactttgtaggactgacatctgaagacgtcagagactgcggtcacaaccgtcggtacctccttaggtggccctcgcaccctcctggcgggagaaagcccaggctcagggtggtcttctaccgggtccacttggaagcgagtcccagcgaaccactccagcctcttcggaagtcgaggcaacgctgccctagcgctaggggctggcccggggaatggcgtgggggcggcggggccaagcaagcgccacctgctgctctcagagcggcctaggagcgcctctcaggcgtcagaggctgctgcaaatgcgggtcagcgggtcacggtcgcgcctgtctgtcagcgcggcgtcgccggggcaacacccggctgaggcgccccgcgttgtgcggcgccacatccgggaagcggcctccaagcaaccgctccgggttgaggtgagcgcaggctgccagagtgggcgcagcctttccaccccgtgggagggcttggggtcgccctctggggcctgaacggctcctgctgtcggcgccctggagggcccgcccacttcccgacaggccgcgcgcgtc

SEQ ID NO: 26584 - DNA, 501 bp, Homo sapiens
  source 1..501: mol_type = other DNA
caatcggtgatcaagaccactgctcttcatccagtgactaagtaatggctcggccacttttaagtgtggaagcaaaactggggagaaactagtgtcaccctggcctggagggaaacctccacccccgactttgtaggactgacatctgaagacgtcagagactgcggtcacaaccgtcggtacctccttaggtggccctcgcaccctcctggcgggagaaagcccaggctcagggtggtcttctaccgggtccacttggaagcgagtcccagcgaaccactccagcctcttcggaagtcgaggcaacgctgccctagcgctaggggctggcccggggaatggcgtgggggcggcggggccaagcaagcgccacctgctgctctcagagcggcctaggagcgcctctcaggcgtcagaggctgctgcaaatgcgggtcagcgggtcacggtcgcgcctgtctgtcagcgcggcgtcgccggggcaacacccggctgaggcgc

SEQ ID NO: 26585 - DNA, 381 bp, Homo sapiens
  source 1..381: mol_type = other DNA
gctgactgctgggcggttggggacaccacccctactggccagccagtgtcccaggcccctgcatccagcggagagagcagccactctttgcccctctcctcttcagcacaatagtggctcctagcctaggtgagctggtggagtggggtatggccccaggccataccccagcctgacctgccaggctcctaggccaaagagtcatgatccaagggctgacttcctgggtttgaatccaggcgatgccagagcctggctgagcccctctcctcagggtttcagtgggtgtcacaggaggacctcccaatgaggtccaccagccactgtcagcagtgccagggccaccacccctggggaggagccattgggctactcttgagg

SEQ ID NO: 26586 - DNA, 482 bp, Homo sapiens
  source 1..482: mol_type = other DNA
tagtgtaactattcataggcggagggggccattttcggaattctgtccctacagggtctagctcagggaaggtgccaaggccgagatggggtcctttccccagtcccacccacagcgggcgggcctggagcgtctgcagtagtggtagcttgcttgcacctcctggcggccagggaccgagacctacttcagctctcacccgtgtcacaggaataaggccaccccggttcgcccttcccatgggagcttgcgggcaggcccgccacacccctgatctcctgggcgacgccggaagagtgctctggtccagacattcctcgcgcctagggtttcccctgcgccgccgcgaccgcaggcctccgttccgccggggtaacggcccggaagtgcggcctatgggcatccccctgccgcagggcgggcgaggaggctggggcgtgccaggggaggggcacctgcgctccgctagaagcgcacgctcg

SEQ ID NO: 26587 - DNA, 448 bp, Homo sapiens
  source 1..448: mol_type = other DNA
tctcagattctcagcatgacataatccagaatcatatcctattttaagatcagctaatgagttagtgtaactattcataggcggagggggccattttcggaattctgtccctacagggtctagctcagggaaggtgccaaggccgagatggggtcctttccccagtcccacccacagcgggcgggcctggagcgtctgcagtagtggtagcttgcttgcacctcctggcggccagggaccgagacctacttcagctctcacccgtgtcacaggaataaggccaccccggttcgcccttcccatgggagcttgcgggcaggcccgccacacccctgatctcctgggcgacgccggaagagtgctctggtccagacattcctcgcgcctagggtttcccctgcgccgccgcgaccgcaggcctccgttccgccggggtaacggcccggaa

SEQ ID NO: 26588 - DNA, 451 bp, Homo sapiens
  source 1..451: mol_type = other DNA
agcgattctcgtcagcctcccgagtagctgggattacaggcgccttacaggcgtgagccgccgcgcccggccacattggcgtgcagtggcacaatgcctcatctacatttgattcagtcaagtttctgtgtttctcaagtttaactatagcgtggttaaaataggagcttcctccctcttgggatggagactcacgcagaggctggagacgactctacccatgcgcttgggcgcacagcggcccgccccactggcggattcaattgcggcagtgacgtcacagaggccccgccccgcccccacaagagccccaccgacgtggggttggcggtggtggaagttggcgcgtgcgtactggcggcctctcccgcaccgaccggcctgggccccgcccccgggcgtgaggcgcccaatgcgcgtgcgcggcggcgtcggcgccagttatttctgt

SEQ ID NO: 26589 - DNA, 456 bp, Homo sapiens
  source 1..456: mol_type = other DNA
ctggcatcccctgcaaatatttattgggggccatgggtagggggcggccggtgggggaatcccctgccttggccttgcctctagcccccctgctgggtgcttgttcagcccccactctgggctgtggagtgggtgggcaacgggcctgggtagctgggcccaggcaacccacccctccacggagcaccctacaacaggctgcccagtgcctggggcagcggcttcctggccaagaggccagcaaagtggaagaaacatgcccctttcttgttgggtgggcccaccgaggaggaggagccttctgaggctccttctatctgaggcctcaggcaagcgcccaccccggtactggcttgggtcaacgggagctgttgcgcatgcgctcggacgctggcccgttccggggcacgggcgcacgcgcgctcctggagtttcccaaccttccgggtgcgggcg

SEQ ID NO: 26590 - DNA, 611 bp, Homo sapiens
  source 1..611: mol_type = other DNA
atctacatttgattcagtcaagtttctgtgtttctcaagtttaactatagcgtggttaaaataggagcttcctccctcttgggatggagactcacgcagaggctggagacgactctacccatgcgcttgggcgcacagcggcccgccccactggcggattcaattgcggcagtgacgtcacagaggccccgccccgcccccacaagagccccaccgacgtggggttggcggtggtggaagttggcgcgtgcgtactggcggcctctcccgcaccgaccggcctgggccccgcccccgggcgtgaggcgcccaatgcgcgtgcgcggcggcgtcggcgccagttatttctgtcccgccccccggcctcggctctttctgcgagcgggcgcgcgggcgagcgggcggcggctgaggaagaagcgcgggcggcgccttcgggaggcgagcaggcagcagttggccgtgccgtagcagcgtcccgcgcgcggcgggcagcggcccaggaggcgcgtggcggcgctcggcctcgcggcggcggcggcggcagcggcccagcagttggcggcgagcgcgtctgcgcctgcgcggcgggccccgcgcccctcctcccc

SEQ ID NO: 26591 - DNA, 493 bp, Homo sapiens
  source 1..493: mol_type = other DNA
accctctgggtaacgcatctagtctcactcagggtcttccctgccttgtctgtgacccatagggtgcaggccgggcgggtggcggcagcagcggaggtgaccacccgcgccgcgctctgccgcttcctgcccggccccgcgaaagtcgccggaagtgaaactccatcgctgagcaacgcgggtttgcggcggctgcgcaggcgcacaacgcaggccgtatccgaagcggcggggcgcccgaggccgttgccgacctccgcgctaaagccgctgctgccgcggaagacgatcccccgccgtcaccgcagctgccctagccgcaccccctcgcggagggatcagctgagcggccaaacggcacggtcgggggagccccgagtccgcagctgcagcggggagcggccccgggcagtgggggcggggccgggcgggcccgagaacagccgaatttggccgagcgctgccgagcgagtccgaggcgctgggccaggcc

SEQ ID NO: 26592 - DNA, 509 bp, Homo sapiens
  source 1..509: mol_type = other DNA
cccaaccctccagtgggtgacttgggtgcttggccttggccagaagccactcctgggggagcatctgcagaatcagaggagtggcgcctgggcccctccgcaggcaagtgccacaccatgcgctcggctggcagtttccgtggtgacggccggaagtcgctgaccggcagagttccgttcctcccgccctccgaggcacgctgagctgtgattggatgggaagctgacccccgcctccatccccttttccagatagtgggggaagcgcagaggctgcagtgcgtgtccgctgaccctctgggtaacgcatctagtctcactcagggtcttccctgccttgtctgtgacccatagggtgcaggccgggcgggtggcggcagcagcggaggtgaccacccgcgccgcgctctgccgcttcctgcccggccccgcgaaagtcgccggaagtgaaactccatcgctgagcaacgcgggtttgcggcggctgcgcaggcgcacaacgcaggccg

SEQ ID NO: 26593 - DNA, 534 bp, Homo sapiens
  source 1..534: mol_type = other DNA
cgcgtctccgggttacccaggcgatgtcgagtcgtgtccccaggttaccatggagacgttcagggcccgcccctcgcccatgatcgggaacgtcatcgcgccgcgcgcgcacgtacacacgaagggcctgccggaaagcatcgggccaagccttccccttcctgtagggagttgccatggagacgcggtggggcaccgacggagttctaatgacggccgtgattggtgcaggatcctgctaatctcctgatcattgcgtcgagctggtgcgcggagcatcctgactgcgcgtgctcaggagcgcggagcggcccgctgagcgcagaggtgagggcgggctgcagactcggggattccggctccccagtgagaccggaagcgcggggaacgaatccgggcagtccttgcgggagcgcccagggctagagcgagaggcttgcaatcactactcgttgccacgacgacaggctttgggagccccgcccccggttgcctaggcgtcgtctggacctaccttggcacccggaagttgcc

SEQ ID NO: 26594 - DNA, 282 bp, Homo sapiens
  source 1..282: mol_type = other DNA
cgcgtctccgggttacccaggcgatgtcgagtcgtgtccccaggttaccatggagacgttcagggcccgcccctcgcccatgatcgggaacgtcatcgcgccgcgcgcgcacgtacacacgaagggcctgccggaaagcatcgggccaagccttccccttcctgtagggagttgccatggagacgcggtggggcaccgacggagttctaatgacggccgtgattggtgcaggatcctgctaatctcctgatcattgcgtcgagctggtgcgcggagcatcct

SEQ ID NO: 26595 - DNA, 170 bp, Homo sapiens
  source 1..170: mol_type = other DNA
gtgccactgcctccagtgcttagtgagcgggtacgcgtctccgggttacccaggcgatgtcgagtcgtgtccccaggttaccatggagacgttcagggcccgcccctcgcccatgatcgggaacgtcatcgcgccgcgcgcgcacgtacacacgaagggcctgccggaaa

SEQ ID NO: 26596 - DNA, 245 bp, Homo sapiens
  source 1..245: mol_type = other DNA
cgcgtctccgggttacccaggcgatgtcgagtcgtgtccccaggttaccatggagacgttcagggcccgcccctcgcccatgatcgggaacgtcatcgcgccgcgcgcgcacgtacacacgaagggcctgccggaaagcatcgggccaagccttccccttcctgtagggagttgccatggagacgcggtggggcaccgacggagttctaatgacggccgtgattggtgcaggatcctgctaatct

SEQ ID NO: 26597 - DNA, 435 bp, Homo sapiens
  source 1..435: mol_type = other DNA
tagttctgtttaaaaataattccaagaacagtttgtatattttattttcacactgaaagagcatgttaatgtaaaattaaatgaacatgggcagtgagctgcagttttttttctaaacagtgcagctgtttagaaaatttttttaaaattttcctgatttcctgagataaaatgctgatcaaaagaagagcaccaataaaacctgttttcctgttttcactactcataattgatggaatcttatgaacttattagttaaaaagtgttgtaagctattcattgggtatgtacaaagtgcaaacttcctcttggggctgtttctttccatcagaccttacagttctacgggataatagcttatctcataaggcctcagctttctttaataatttctagaagcagacgtatcacccatgatagaccagtaaaggtgac

SEQ ID NO: 26598 - DNA, 583 bp, Homo sapiens
  source 1..583: mol_type = other DNA
tttaatgtacatcaattatatctcaataatttggaatgaaaaggacctgatagctttcagtcacaaaactttaacacaataaaattctctttgaatcagagaaaacaacttttattagaatgacatgtgatttgcatttttagttcatgcatttacttatatacacataaatatagctttttcacataaattagaatcattgctatgcatgttgttctaaaatgttgctttttcactcaaaaaatgtttagtaagataaaatctgctgcactctttttaacagaagcacagaattaaatcatatggatgcacttcgttttattgtaaaaggctttctaaatttccagatcatcaacaaagcattaatttggtcagttaaaaaacaattgcttatatccttctctgaaaagaatgatgtacagaaaagaattatatatatatatgaataatacatcataagtgttcagaaagaaccagactgctacatgcagtactgctaggagcacccagcagagtttgccctcaattagagttgctagccaatagattgaagctatgttggcacaatatcctaataaagatc

SEQ ID NO: 26599 - DNA, 320 bp, Homo sapiens
  source 1..320: mol_type = other DNA
attcaaaatcctctcttctagccttttaaaagtatacaataaattgtagttaaccatagctcccatatataaataggaacatgtggtaatctcattgtgtgtgtgtgtgtatatatatatatatatattccattgtgtgttatgtatgtatagtattccattgtgtgcatatatatgtatatatgtgtgtacatatatatatacataatatatattcttctgcacatggaaatccagtttctccattttataaaaaatcaggtgacctcagataaacctactagaaattcttattgttagctgcgcagagagtcaaagcc

SEQ ID NO: 26600 - DNA, 276 bp, Homo sapiens
  source 1..276: mol_type = other DNA
gcgcgaagttaaaaaagtttttttttagttgctactttaaaaggatgttttaacaaacgtactgactttgtatgttgatccaataggtgcggtggctcatgcctggaaccccagcactttgggaggccaagcagcctggccgttgcagtgagtcgagatcacgccactgcactccagcgcaaaagagagacacatgcaaagggcttgctctttctttctgaaagggtgttttcaaacagagtcagaaaaaacacaacagcagcatacaaacctgct

SEQ ID NO: 26601 - DNA, 447 bp, Homo sapiens
  source 1..447: mol_type = other DNA
ttctggtaagagtgttcatattaaaattcaaacaataagtagtttttctataaactctctttttttctaatcatgaaagtacacataatcattctctccaaactcagacatagacagatagatacagatagatagatagatagatagatagatagatagatagatagatacacatgcatacatactacatacatatatacctacatatgttggcacatagatgttcctttaccacagattaagttattctagatgcatatcttgtagcctacatttttatacatattttaataactgcatactgctctattatattctgtattttctatattagattagatttatgtacttgttcaattatttgagtaaaaaaataggcacattttaaggcttctgatatatattgccaaattgtgctacagtctagaacgcatagaacagaaaagt

SEQ ID NO: 26602 - DNA, 199 bp, Homo sapiens
  source 1..199: mol_type = other DNA
acctctctaggagttttgctttagctcactgcagactggacctttcgacaatctttttaaatagaagaaatttaaaaatacgttggtaatgccatgaacttgtgggtttactgattcccacaattttcttagtaaaattggaagcaaacatgatatcatattttacgcgtttccttggagaccgagacgctggcgaaag

SEQ ID NO: 26603 - DNA, 832 bp, Homo sapiens
  source 1..832: mol_type = other DNA
gcttgagccgcagccgctccgcctcccgcacgaacgggatcttctccgagtcctgcagcagctgccagcggcggcccaggcgcttggagggccacaccatgaatgcgttcatcggcctcttgatgtggccgctcggggtcttgcaccagccgggctcgcgcgccccctcctcggccggcccgggtcccgggggcggcggcccgccgtcccgcttggccctcgcgccccgctgctgcaccatcgcgcctgggcccggggccgctagacgccgccgggggccgtccgcatcctccgcggctgggggtgggggaggaggcagcggcgacggaggggcggccccgccccgcggctcggcccggcccccgcgaactggggagcgaggagctgggcgctcgggcccaacggacggcggggggagaaggtcagcgcggtctcaggcgggctcggcgcgcccccgccgcctccggcaagttgcgtcctggctcacaacacacattgttttgcgggggccgaggaatcgcaccctccgggcccccgcgggctcttcctgcagcctctggctccgccgcggcccgcgcgcgccgctccccgcccggccgccgacgcctccccgcgcggccccgccggcgcgcgcaccacccctccccctcgccgtctgcgggccgctgcggcgcgcgcggggccgccccgtgtaaacaccgaggtgcccgcttgggctgcggccgggccccgcctcgcgctcgggcgccgcgtcacccgttgctgggcagagtcccaatcgctggccgccggagcggggcggggctcgggctgcggggctgggcggtctcgc

SEQ ID NO: 26604 - DNA, 383 bp, Homo sapiens
  source 1..383: mol_type = other DNA
gccctcccaggccttgggtgtgtacactgttctaagcgtcttacacatattaaattatttaatcctcacaacaactttatgaagtgagcgcaattatgccagctggctctaggggctcttcaccggccgcactgcggggaagctcagcagaccttaggcctcccaagggcgccacggtggttcctttgagcccagagtcagctcgagaatggagattcccgcatgtccacttctcctaaattttataaggcagtgctgggaatgtgctttataaaaaaagtcactgtttgctcttttaagcaccatcctgagaaggaggaatgttcttcccatttcataggggatcgagatcgagacctgtagtcccagctactcgggaggct

SEQ ID NO: 26605 - DNA, 580 bp, Homo sapiens
  source 1..580: mol_type = other DNA
gggaagctcagcagaccttaggcctcccaagggcgccacggtggttcctttgagcccagagtcagctcgagaatggagattcccgcatgtccacttctcctaaattttataaggcagtgctgggaatgtgctttataaaaaaagtcactgtttgctcttttaagcaccatcctgagaaggaggaatgttcttcccatttcataggggatcgagatcgagacctgtagtcccagctactcgggaggctttgcagtgagccgagatcgcgccaccgccctccagcctgggcgacagagcaagctcaaaaaaaaaaaaaaaaagagcaaattttttttccaagtgaccagacgcccctagggggccagcgagggcgggtcccaggtgaggcccgggcgcggcgcgggggatggtgcgatcccgggcccgagggcatcagacggcggctgattagctccggtttgcatcacccggaccgggggattagctccggtttgcatcacccggaccgggggattagctccggtttgcatcacccggaccgggggccgggcgcgcacgagactcgcagcggaagtggagg

SEQ ID NO: 26606 - DNA, 197 bp, Homo sapiens
  source 1..197: mol_type = other DNA
atctcaataaagctgtttataaaaagaacagcagttagattgacaggtgatgatatctcaacctgtgagccatgatcacgccactgcactccagcccagatgaaggtctgaggttcattccttcattcaacatatggagtgtttggaactgttctagaggccttagggcgggagtgtgtctgacttactccaggact

SEQ ID NO: 26607 - DNA, 388 bp, Homo sapiens
  source 1..388: mol_type = other DNA
ggccttagggcgggagtgtgtctgacttactccaggactgagcccgcaggatctgctgaagggcgggttcctgagcctgccaggcctggattcaaacctcggctgttttgcaaacggggccaaggaccgggcctgccccgaggtatgcctgaggcttgggtgagcaggcgccgggctcgcagggcgcgctcctaacccgtccccagcggctcgacgctgtggatcccgccgccctccagccccggctccggcgccgactcctgctcaggctcctgctcctgcccccggccccgcccccggccccggccccggcccccggcccaccccggccccgcccccagcccccggcccccccggccccgcccccggccccgccccggccccgccc

SEQ ID NO: 26608 - DNA, 567 bp, Homo sapiens
  source 1..567: mol_type = other DNA
gagcccgcaggatctgctgaagggcgggttcctgagcctgccaggcctggattcaaacctcggctgttttgcaaacggggccaaggaccgggcctgccccgaggtatgcctgaggcttgggtgagcaggcgccgggctcgcagggcgcgctcctaacccgtccccagcggctcgacgctgtggatcccgccgccctccagccccggctccggcgccgactcctgctcaggctcctgctcctgcccccggccccgcccccggccccggccccggcccccggcccaccccggccccgcccccagcccccggcccccccggccccgcccccggccccgccccggccccgcccaccccgcctgcggcccagctccttcccgcggctctgcgatgcggcccgcagggtgacccgggcgggagtccggggacccgcgatcagccccggaggacggggtggggtcgccccaaacaggagcgccgggaccgctgggaccccgcactcggcgtccgccgccgccgggtagccgggcagtggaggtcccggatgaggcgacaatttttccggccccc

SEQ ID NO: 26609 - DNA, 809 bp, Homo sapiens
  source 1..809: mol_type = other DNA
gttttgcaaacggggccaaggaccgggcctgccccgaggtatgcctgaggcttgggtgagcaggcgccgggctcgcagggcgcgctcctaacccgtccccagcggctcgacgctgtggatcccgccgccctccagccccggctccggcgccgactcctgctcaggctcctgctcctgcccccggccccgcccccggccccggccccggcccccggcccaccccggccccgcccccagcccccggcccccccggccccgcccccggccccgccccggccccgcccaccccgcctgcggcccagctccttcccgcggctctgcgatgcggcccgcagggtgacccgggcgggagtccggggacccgcgatcagccccggaggacggggtggggtcgccccaaacaggagcgccgggaccgctgggaccccgcactcggcgtccgccgccgccgggtagccgggcagtggaggtcccggatgaggcgacaatttttccggcccccccgaagccgctccccttgcgaagaactggggcctcccgggaggagagaggcccgggacgccaggggcgctcccgcaagtgggggtcctccgggacttggaacgccccggctgggtggtgtccggcgcccagtgcggacctgtctcggcgcccgctgccctctcaccgccccacgcaggatcccggcctggtcaccgggcagtgtgatgcttcccgactgccgcggggacagcgaggcacacacagggcttgggccgcgccggaggccacacggcctggctgagttcccgcctctcccaggcgacccg

SEQ ID NO: 26610 - DNA, 460 bp, Homo sapiens
  source 1..460: mol_type = other DNA
tagaaaaacgaattgaatttataaatgcagtttcaaatgttcaaaggattttaattagcttagtttattaatgggaccaaataactgatataatttactagatttatgaatagaactgtacagcatgaaggcacggttcacgtgaacgtctacgtttgtgcagtgcataacctgcggacatccttggtaagcaaaaattggtcataattgtggagtatttactatatgcttggtgatgttctaaacactctcaataaccttgtgagttcaatatttttattatcatcaatactattttacagatgaaagacgctcaagagcgccacactctacaccgtagagtctacagcgcagacgcagagcgctcaccgcgctctttccgcagcctcccccgccgccggccgggcgtagcgcagggtcacgtgccggcgcggggcggggccagcggggcgcctgcgcg

SEQ ID NO: 26611 - DNA, 465 bp, Homo sapiens
  source 1..465: mol_type = other DNA
tgtattgacacatttgaaagcactcatgactcagtattcttataaatgtattacatttacaagaattacacaaggacttgaaaggctttgttagaaacctgtgatacttagaaaaacgaattgaatttataaatgcagtttcaaatgttcaaaggattttaattagcttagtttattaatgggaccaaataactgatataatttactagatttatgaatagaactgtacagcatgaaggcacggttcacgtgaacgtctacgtttgtgcagtgcataacctgcggacatccttggtaagcaaaaattggtcataattgtggagtatttactatatgcttggtgatgttctaaacactctcaataaccttgtgagttcaatatttttattatcatcaatactattttacagatgaaagacgctcaagagcgccacactctacaccgtagagtctacagcgcagacg

SEQ ID NO: 26612 - DNA, 266 bp, Homo sapiens
  source 1..266: mol_type = other DNA
catgatgagctcagaagtttgaatagaaagtgttgctgaaaccctaatttaaaacgaggggtcagagcaactcccagaatgctggctctaacctgggtaccgccatcttaacttgcacttgttaacactattgaaataaaatgcgcttagaactgaatccctaaggttacaataggacatcccagcatggccgcattcagagagattcctctgggggcggagtcggaagctgtctcgccccgcctcctggtaggagggggtttccg

SEQ ID NO: 26613 - DNA, 553 bp, Homo sapiens
  source 1..553: mol_type = other DNA
gacaggctggagctagcgccgccactcccacctgtacgactgaaggccggagctctctgacctgtaactcagggctgccatcctgcagcctcagctgggcgcaatagagtatatagcaccctaaccaaaacgtcagttccgtgagggtgaagaataaaaaaacacaagacactgtcgaatctcatttggaaagattatagcttttctccaagcgttccagaactgctcaatcaccagttcttacgcacgtgaaagctgcagaactctctgcaatctgaacgttccgaacgactcccaggtggtccaggctggcctcccagacctccagcatctgccgggctagccagccgggaacgggggccttcggggtgggccgccggctcccgggccgctttcaacctgggggacggaggcggtgggagcgtcgccattggccagggcgcggcggacgcctccccattggccgggcggacgcctccccattggccgggcggagccctccgcccccggccggggcggccttgccattggcccctccctcgcctataaggcg

SEQ ID NO: 26614 - DNA, 329 bp, Homo sapiens
  source 1..329: mol_type = other DNA
gctaccattgcacctctagctgcaaacaaagcgcaggtcatggctgaatagaccaatcgtgttccatcagaattgtgtaccagttagcttttgctgtggctgggctcaacagggcagttctgctgctcacacctgggatccctcatggagctaaggtcagctgttacctcagctgggcctcacttgcctggcaggtgacaggctgtttcttgaacagttcttttggtcagagcaaatcacaaggctttacctatcacaaataattttggatgggtatttatttggataaaggtatagcactaagacattgtcctggccctcagggtcta

SEQ ID NO: 26615 - DNA, 294 bp, Homo sapiens
  source 1..294: mol_type = other DNA
acatttgcagtggtttaaacaaacagaagattgtttttccacacaacaactgctaccattgcacctctagctgcaaacaaagcgcaggtcatggctgaatagaccaatcgtgttccatcagaattgtgtaccagttagcttttgctgtggctgggctcaacagggcagttctgctgctcacacctgggatccctcatggagctaaggtcagctgttacctcagctgggcctcacttgcctggcaggtgacaggctgtttcttgaacagttcttttggtcagagcaaatcacaag

SEQ ID NO: 26616 - DNA, 458 bp, Homo sapiens
  source 1..458: mol_type = other DNA
ctgataattaacagttgtctctcacagtagtccagtgtgatcaccttataaggagctcagcacaagtggacaaactctgtgccaggaggacccagacagcgtgccccccatcgatgtcctctggatcaaaggggcccagggaggtgattctactcctttgggggctgccaccgctacgcggcctaccagcgggtgtactagcagcctccttggcacctgctgccaccttcaagagcccagaagacacacctggcctccagcaggctgggccatgcagaagggggggtgcattctcgcgagagggtctgactctgggcctacaaggccttggactcactgtacagtgtgggagcccctccaaattcccaaggacaaggatccctctgcatttttgtctatgtaatgtacattttgcagtggtttaaacaaacagaagattgtttttccacacaacaact

SEQ ID NO: 26617 - DNA, 431 bp, Homo sapiens
  source 1..431: mol_type = other DNA
attttggccaggctggtctcaaactcctgacctcaggtgatccacccgcctattgtcattatagcattcttgaagccagggcctgattcatccagcggtctacaacagggccagctgggggagaaatccctgatttgtctgataattaacagttgtctctcacagtagtccagtgtgatcaccttataaggagctcagcacaagtggacaaactctgtgccaggaggacccagacagcgtgccccccatcgatgtcctctggatcaaaggggcccagggaggtgattctactcctttgggggctgccaccgctacgcggcctaccagcgggtgtactagcagcctccttggcacctgctgccaccttcaagagcccagaagacacacctggcctccagcaggctgggccatgcagaagggggggtgcattc

SEQ ID NO: 26618 - DNA, 351 bp, Homo sapiens
  source 1..351: mol_type = other DNA
ctgttaagcagcagagctagatttgctggagtgcaatggtgcgatctcagctcactgcaatgagtaactgtgattacaattttggccaggctggtctcaaactcctgacctcaggtgatccacccgcctattgtcattatagcattcttgaagccagggcctgattcatccagcggtctacaacagggccagctgggggagaaatccctgatttgtctgataattaacagttgtctctcacagtagtccagtgtgatcaccttataaggagctcagcacaagtggacaaactctgtgccaggaggacccagacagcgtgccccccatcgatgtcctctggatcaaaggggc

SEQ ID NO: 26619 - DNA, 731 bp, Homo sapiens
  source 1..731: mol_type = other DNA
gtgacagtcactgtctctggagccagaccgtctggaaccttctgtaaaatgggaataacagtcataccttccttgcagggttgttttgaggttcacacgccgctggctaggaaccccagcagcggggcagcagcgcaccgcgggctttgccgactcaccctggctgggcaggtccgccgcgctctcccccgcccccgcccccgcggcctaagtcggcccggccggtgcgtcacccgcgcccctcccgccccgaaactcaccctgagtcagcccgcccgggcgtttccactccccggacgccgcgcggcgcaggggaggcgagaggcgccccccggtggagagcctgagccccgcgcgagtctggcggcacctggcgagcggagccggagtcgggctggggaccgcggggtcgaggccggaccgcggcggggtcgggggagaaacgcgcgctgccctggcacgggcccccccccccggccgcgcggaatggtatggcccggccggagttaaggccggggggaggcggcgagtcccgcggcggcggcgacgatggggctgcgtgcggaacgctgggcagggccggcgcgggtcggggggcgcccgaggggcccgggccgagcggcggcgcgcagggcggcagcatccactcgggccgcatcgccgcggtgcacaacgtgccgctgagcgtgctcatccggccgctgccgtccgtgttggaccccgccaaggag

SEQ ID NO: 26620 - DNA, 573 bp, Homo sapiens
  source 1..573: mol_type = other DNA
caaaccagacatgcttgtctttcgtgtgacctgactttcatttcagctgaccttgaactgtgacagtcactgtctctggagccagaccgtctggaaccttctgtaaaatgggaataacagtcataccttccttgcagggttgttttgaggttcacacgccgctggctaggaaccccagcagcggggcagcagcgcaccgcgggctttgccgactcaccctggctgggcaggtccgccgcgctctcccccgcccccgcccccgcggcctaagtcggcccggccggtgcgtcacccgcgcccctcccgccccgaaactcaccctgagtcagcccgcccgggcgtttccactccccggacgccgcgcggcgcaggggaggcgagaggcgccccccggtggagagcctgagccccgcgcgagtctggcggcacctggcgagcggagccggagtcgggctggggaccgcggggtcgaggccggaccgcggcggggtcgggggagaaacgcgcgctgccctggcacgggcccccccccccggccgcgcggaatggtatggcccggccggagttaaggcc

SEQ ID NO: 26621 - DNA, 438 bp, Homo sapiens
  source 1..438: mol_type = other DNA
agaaggaagacaagcaaaccagacatgcttgtctttcgtgtgacctgactttcatttcagctgaccttgaactgtgacagtcactgtctctggagccagaccgtctggaaccttctgtaaaatgggaataacagtcataccttccttgcagggttgttttgaggttcacacgccgctggctaggaaccccagcagcggggcagcagcgcaccgcgggctttgccgactcaccctggctgggcaggtccgccgcgctctcccccgcccccgcccccgcggcctaagtcggcccggccggtgcgtcacccgcgcccctcccgccccgaaactcaccctgagtcagcccgcccgggcgtttccactccccggacgccgcgcggcgcaggggaggcgagaggcgccccccggtggagagcctgagccccgcgcgagtctggc

SEQ ID NO: 26622 - DNA, 324 bp, Homo sapiens
  source 1..324: mol_type = other DNA
aaactctaacttattattattattattattattttggagataggagcgcagttacagctcactgcagcctcggccacatgtgtgcacagacaactattctgagacaggaccatgatgattcagtggtgcccagaggccactgaggtctctggcaattgcgtattggatgacccgagcctggaattcctagagtctgattctgggactcttgttccgccaccatggggctttgcccagcaccctctgggcagggggctgagctctcctgcccttggtcctgccaagatatgggggctcccccaggtttgggtcgatccgcaggac

SEQ ID NO: 26623 - DNA, 379 bp, Homo sapiens
  source 1..379: mol_type = other DNA
cttgctcagcttgtaagggttgaagctgggatttgaacccaggcaactggttccagatgttacaaagtgggctaacaaattgttaaaaagtaatatatctgctgtctggcagtggccagtgagttaacaatttacaaatcctaagctaagtcattgagaaaggcccttccaccttcaaatcagtctcaaggtatgtgcctgcatgcacccacacaaggacgcctgagaaggtgaggcagccagaggtctcctggaggacggacaggctgggaggacagcacaggcaaaggtgtgccactgctgtctgggagctggagtgactgcgttacaccccaggagtggctcctccagccctgtgagggaattccgtttcctgggt

SEQ ID NO: 26624 - DNA, 354 bp, Homo sapiens
  source 1..354: mol_type = other DNA
tgctgtgagctgagatcagaaataaataaagtgttaataattaaaagtacttttagagggttatgtcataagccttgacaagacttgttcttcaattaagttagctcctccacaggatggaattatataaccaatccctttcaagaggttgctatgatgaataaggctgagcaatattaatctttgctcacattttaaaattaactcactcatcatcaggccctctaactggagctcttccagctggggtcctagaggaagtcccagagcgggcggagctgctgagcagcgcctctccttcgggcgggggaagctaagcggtcgcctggcaaccctggcggcgcgccgttcgat

SEQ ID NO: 26625 - DNA, 305 bp, Homo sapiens
  source 1..305: mol_type = other DNA
gggcatcaggtcctgacacttgggtgaccacgtagacacttgtgcatccaggtgtatgccctcctcccaggtgagtacccattccatggctgcaggcagatcgagggtctgccggatgcctccatgcaggcacagcagctcgtggatcaccgtgggccatccagttccatgcaggaagctgacggggggcctggcatgtctactcgctgggttaacttaagcaagttgtccatccaaaaaacggggctcccggggcaggagggtggggcctgaggccccgcagctgctgcccttataatagggag

SEQ ID NO: 26626 - DNA, 167 bp, Homo sapiens
  source 1..167: mol_type = other DNA
ggcccagagaggcacagctgcccaccctaggtctcgtggccagctgtcggggagcgagatctagggttagcctcactttcccctggccctgagggagaagaccagctgggtggattcgctgccctcccctccagcagggaagccaggcctcactggataatcagagg

SEQ ID NO: 26627 - DNA, 313 bp, Homo sapiens
  source 1..313: mol_type = other DNA
atatgcctcacaaatgatagctagcatgattgttgttgggttaaacttgaaccagatccccgcagactgcacccccaccctgcaggaggggacgggggaccgtacgggtctccgggtgtccgcgcatctgtacctgcgcgcgcgtgcgtacctgtggctggcggtgggcacgtgcacgtgctcgggggcagtggaactcgagggccccgacccgggtgacccccgccccctccccgcgcgcgctcccgggccccgagctggttaacgcgccgcccccgccgcgccggctcctccccgccagggcagtgccccg

SEQ ID NO: 26628 - DNA, 355 bp, Homo sapiens
  source 1..355: mol_type = other DNA
acctggcaaactaaatttatttgggtaaaaacaataagtggatttcatgaaacttgggcagcagttcatctgcaaaatgtagcacacaataaacacttaataaatgttatcttagaagccagacttcctcatctgtgcaatgaggtaatatcaactagagttgggttgtgaagattaaataagtgttaacgatccccattttgtggatgggaagtctcagcaaggtggcctcttggaggacgctgtgcccgcgtcaggcgatcctgtcgactgccgccaagacccggcttccggctttgaggggccacgctgctgcgctcgcgttgccaacccggcgcgcctcacgcagttgcgc

SEQ ID NO: 26629 - DNA, 401 bp, Homo sapiens
  source 1..401: mol_type = other DNA
tctctatttaaaaaataaaagattagcactaaactgtagacctaaagtgattacgatgatcaattttatgctatgtgtattttaccacaataaaaaacttcaaaaaactaacagagttacaaaaaatatatattttattttatttttttttgagacggagtctcgctctgtcgcccaggctagagtgcagctgctcctgcctcagctgcccgagtagctgggactacaggtgcctgccactagctaggatggtctcgatctcctgaccttgtgatccgcccgcctcccaaggtgctgggaagcctaaaaattatcatttttttaaaaaaaagagatatctgctatgggtgcatggtttccagggaggcagggagcttggaaccaggaactggtggctgcag

SEQ ID NO: 26630 - DNA, 278 bp, Homo sapiens
  source 1..278: mol_type = other DNA
aggattttctagaagtatgttgcttaattttccatatggttggagaacatactttatatgatttcagttattttacaaataccttttaggaagcctggagtcctgtggctcatgcctggaacaggaacctggttcatcctccttgggcccagtggggctgttgccccggagctatcagggccgccgccgccgccgtcgttgcagccaaactgcaagcagttgactcttcatctgcttcctgcaggacctacaagaacagtgcagtgggaaaaggctaa

SEQ ID NO: 26631 - DNA, 618 bp, Homo sapiens
  source 1..618: mol_type = other DNA
cagctccgcgcggcgcgagtaggtacgtgcgcctcggcagtggctccgggccgggccgggaagggggcgggagaccgggagggcgaggcggtggcggccgggcccgcgccctccgggctgcgccgcaggagagagacccccgcaggcgagacccccgcaggcgtacgccggctgcaggaaggcggacgggcaccggagaggacgcaccctcgcccgccggcggccgggcgcccttcgccccagcgtggtgaggcggggagggaggcccggcgcacgcggagaggggaccgctgggggcggcaggaggccgccgggggcggggagtggcggcgaaggacggcgagcctgacctcgcggcccgccgaaggacatgcgaccaggggacccggcctccccgggcctccgcctggtccggttcggccttccgggtcccgcggccggcgggagcgggcgcggtgggcagccggcgtgcagcttcacccacagccgctgtgcgtccctctctccgggtgtcagtgcgcgcctcactcccaggggcactttgtgtgtgtgtgcggggtactcgcgtggcccgaagatccgagggtcacactacgtcctttcaggacctgtctgact

SEQ ID NO: 26632 - DNA, 444 bp, Homo sapiens
  source 1..444: mol_type = other DNA
ccacacgattcagctggtcaccgtgtcttcccggaacctaactccggccctgtaaaggaaagaagtgaaagtcaccccctaggtcttctaggtgatcagatgggtcctgctctccaggagcccacagctggtgtgtttggccattggcaatgcccccaggagaacacccctcttgggcggagcactcggtggcgcccttgagccacggagccgcaagccgacctaaggacctcggagaggacccggggtcctacctgggggctccggtggtggggagggatcttcttcagcagcccccgcccgccccgcccctgcgcccgtggaccgcgggctccaagccccagttccctaagcccaggcgccggcgatccagatctgcctggaggggaggggaggacggtggatcggagcccccgcaccctcgccccagactctccgggcgcc

SEQ ID NO: 26633 - DNA, 329 bp, Homo sapiens
  source 1..329: mol_type = other DNA
tccaggctggaaaatatttgctgtcctcaatgtgaataatctttttaataataacaataataataatagctaatatttgtagagcacttattattgcttgtattattttcactttacagatgagaaaatctgaggttcaagggattaaagaatttctccagtgacctccagcatggggcccaggccccatccctgtcatgcccctgctcaggtgtctcaggtccgagcgccaggacaaagccggagactgcgcactaggaccggtgcgccttgctcacgtacccccagccgccgccgccgccgccgcgcccagtccctcggtcgctggt

SEQ ID NO: 26634 - DNA, 341 bp, Homo sapiens
  source 1..341: mol_type = other DNA
tgagttaacttatctaaggcagaaaatccagttttttgtggtcttcttgttttccctgtgacagatggaagacagagggaaaagagccacaattaacattttaagttgtgattgtttatctacctttttactacttaagaggaaaacatttccattttcagacacttaagattcttagtagcccaagtgcttgtcattcacattaaatacccctaatgttcctaaaggcttttagataaaaattactatttcacaaataccggctggtggagcaagatactaactatctctttaagaaccgcttacgcagctgccggcgagccgccgactggctggtcccc

SEQ ID NO: 26635 - DNA, 275 bp, Homo sapiens
  source 1..275: mol_type = other DNA
ctggactgagcagtggctcagtcttggctctcagccacctgagtagcagggactgcccaggctagtcttgaactcctgggctcaagtgcaccacgcccagcctggtgttgtattttaaatttcagtttacatgtgttcgttgttagtatacagaagtacaattgaatcttgtgtgttaatctagtagataaatagtgttgatgaatttgtatatttttacatttttctcaagacaaaaatccagtgggaaatgagggcatggactttgacgcccc

SEQ ID NO: 26636 - DNA, 334 bp, Homo sapiens
  source 1..334: mol_type = other DNA
tccttcccgtcaggaagggaataaaacatttcttaagaggtcaggacaatgagaaggtgtttagtacttcattgtggccaagattaaaagaactttcaagggggcatcagcctctgcactctgcagggtgttcagccattcaggtaagtcgccaggccccattggcctggattccctgaaggggaccttggggattacccggccacttggagattcccgtaggcctcagggcatgtaggtgtccactgcagggcctgctgggcagagaaccagctctccctccctccaggatgggcgggctccatgctggcataggcattggtctgcttagccc

SEQ ID NO: 26637 - DNA, 188 bp, Homo sapiens
  source 1..188: mol_type = other DNA
agggaggcttgccaatctccatcaacctaacagatttctgacatagcccatgggtggattcagtgagctggactctcaggcctgggcctccctgtctgctgtgggaattgatttgcccggccaagccaagaacccttccctaggcagcagaagcccagtcactcagtcactggtgggtgggcaattga

SEQ ID NO: 26638 - DNA, 203 bp, Homo sapiens
  source 1..203: mol_type = other DNA
ccaggcactgtgctcagcactgagggaggcttgccaatctccatcaacctaacagatttctgacatagcccatgggtggattcagtgagctggactctcaggcctgggcctccctgtctgctgtgggaattgatttgcccggccaagccaagaacccttccctaggcagcagaagcccagtcactcagtcactggtgggtggg

SEQ ID NO: 26639 - DNA, 329 bp, Homo sapiens
  source 1..329: mol_type = other DNA
ttctgttcaaatttatataattatttttggaataagtagtacatttaaacttttcaaaatttaagacaccaaaaatgtaatgctgccattcagagatactcagcattttagcgtatagattcacaatattgatttttcaacatctcaagctctgtgatcttccacagacaatgatacaggatatgactggttcataaccgtctgaacagcagctgtgagggccttaatccagactaaggccaaaggcctcctctgggctggcaacctgccccatcccagtccaaggtgagtcagctgaacaggggacaggcaccccttcccagatcagg

SEQ ID NO: 26640 - DNA, 489 bp, Homo sapiens
  source 1..489: mol_type = other DNA
atgggtggctagccctcctgctgtcctcagcaaggaaacttaaccttagattaaacaaaacacacagatcaatttaaggagaaagtttgtttcacctgggacccagcccaagtctttctggctgtctccagctggaacgttgctggaaactcacagattttctgtccccaacagatctgccatggagggatctggtgcctccagacatgtgcacatgaatccatatggaaactatatgccataaacctcaagttattcattttattaattaagtacatggtcaagtattaacagacaagtggtaggttaaagaatattttattttaattttttggatgaaatttttatctattatatattaaacattcttgctgctgcgctgcaaagccatagcagatttaaattaaaagccctacctaaaactgaggtggggatggggagagcctttgcctccaccattcccacctatctgccctgggccagcaggga

SEQ ID NO: 26641 - DNA, 399 bp, Homo sapiens
  source 1..399: mol_type = other DNA
aactctctgtttgaaccacacacaccttggtaatacaggagggaatccctggcactttacagggcctttgtctgcccagaggtcttcattttcagcttcttgcaagagtctctggagatattttcccagtatactcaacattatgaatgaccagtttattctcagtctggactgcacatgagagtcacctgggaaatttttaagactttcctgatgcccagggttttttaatgggtggctagccctcctgctgtcctcagcaaggaaacttaaccttagattaaacaaaacacacagatcaatttaaggagaaagtttgtttcacctgggacccagcccaagtctttctggctgtctccagctggaacgttgctggaaactcacagattttctgtcccc

SEQ ID NO: 26642 - DNA, 446 bp, Homo sapiens
  source 1..446: mol_type = other DNA
acatacattgtcaaaataaaatatggagatgaatctctaaatgtaatgttttatttgagatctggtggtctttggtatgtccgaaaaacaaagagaaggttttattaagcaggcgctgcgtgctctgattccgttgggcataagaagagtgacccaattcgtattatcaactttcacatgctcaataagaatgtatgcatgtatgagtaactgtgtgcttctaagtggaaacctgatgacagtcacccagtcagtgactggcggaccccccaaacacagctgtatccggaggcctccgggcttccggaggtctcggggcttctgggcttccggtccctcttccggaggcctgggtttccgggacgtcgcgcgccgtgtggggcgcgcacgcagggctgggcgtgagggggcgtgcgcgtgcgcaggcgacgcgccgagggcagagc

SEQ ID NO: 26643 - DNA, 370 bp, Homo sapiens
  source 1..370: mol_type = other DNA
ttaccgtaacttcctctccttgcccatcggtaagggaaagtgagagggaggaactggcccatctctcatgggtcctgcaggcggccatgagacaattaatgaaatgagggctgcgtcaatgaatgggaatctgactcctgcagggagccttcagcccacaggtgtatgtaagacccccacccccgccgttaggctgcggttcgcgccgcggtcgccagagggcgcggagcggcggggcttcccgcacggagggctttgcgtgaggcaccgcgtggggcggggctgcgggcgggctcccagctgctgggccctcatcggctgggcctcgtcgaccggcaagcggaacgcggcagcggggctgggcctgtgc

SEQ ID NO: 26644 - DNA, 276 bp, Homo sapiens
  source 1..276: mol_type = other DNA
tcctggaaccagggcctattgtggctgcatataaacttaaaggatttcttgcacagtgttattttccaggaaagcaactattgtgtcaattgagggaagacttcataacctgattaagaggggttttgactaagcctgggcaccttctcaaggtctccttgagaaagggaattagaaataaaagatttttcagcaaagccaatttacttctgcagttggctggggctggactgcgcaatctaagctaatcccgattggctagttctttaccgtaac

SEQ ID NO: 26645 - DNA, 293 bp, Homo sapiens
  source 1..293: mol_type = other DNA
ccactgtatcatgctgtatcacacaaaatttcagtggcatacaacaatacatatttgtatctctacatgcacatttacatgtggctgggtggttccactcctcatgtctcatgccagagcccagttctagcaagtcacatggctcagtcaagggacaaggaagaatagtcttccacctgtggatgtaccctattacaagcacagttatctttgcttgaaaaacaggcaaaacaattaatggcttcagggccgggcacttgtgtttttactgaatgagtcaactggtgagtaat

SEQ ID NO: 26646 - DNA, 356 bp, Homo sapiens
  source 1..356: mol_type = other DNA
gtacttttccctgagttaattaaaagactgagttaacttttattcctgttttacagatgaggaaacactgtttgaacccagacagtgtggctcttgaggctcctgaggacaaatgtttgcacaatctgagtatgtttcacttggagcagtgctaaaaggaggcccccatggggcttgctttataataaatcctgcacatcatgaataataatggttaatatgtttagcatttacatattatttctcataatcttaccaaaactgttcttgttcctacgcttgaaatctgcccacctccctcccgggcacctaggatggtccttcctattgcaccaacagccttgtgttgctgcaat

SEQ ID NO: 26647 - DNA, 402 bp, Homo sapiens
  source 1..402: mol_type = other DNA
cagccatggcagccagtgcctgcctgtggatgcttgctgagtgtccctgaacacaacatttgtgctttgagagagaaggatgccaacatgctgcttcctccctctctctgagagctggtcccaggtccagccatgcctgattcctctgcaggaagaaacttgttttttacttcttcagctgtgcagctcagacaggcccagatgttgagctcatgcaggagctagacccatacctgcgcatcatgtggatgaggcctttgtctagcctatgtgtctgaggctcctagataggtgggtgtcaagccccccaagcaacttcctagcttgaagcaaccttgtctgttcaattttataatcacaaaggaaaaagacatcacagaggcaagaactgtcttctctgct

SEQ ID NO: 26648 - DNA, 460 bp, Homo sapiens
  source 1..460: mol_type = other DNA
cagccagggtggtgctgggattcactctcaagtcatctgcgagatagcccacatcaccttgcagggggaccctcttcgtgggactgccaacttgtctgaggccacaggctccagagcttgaaaggcctggctaggtgagccggtcacttactatggagctctgggctacagactactaggagccaaatcactatgtgctcggcgacagcagctaacagtccttgggcacctactgtgcgccaggcactgtgcttagtaatttcactcatatgcaacgagtgccctcaagcactgtcctggtgatgccccacaagatcagagcttctgcacccaccttggaggttactcaacagcacctgccaggtgagcaatttctacccccggggactacagctgtcccggacagaaacagcttctcctggtgaacacctgtgcccacagggacgatgtggtgctcacc

SEQ ID NO: 26649 - DNA, 401 bp, Homo sapiens
  source 1..401: mol_type = other DNA
gagaacaattctctcctcatttcccatctgaacacagtggtgaatgaactctgtgcagaacaaaggatattaaagttgatgtgatgacctcagtcctggaagaagttgggaaatgatttcttctgctggattcaggcccatgaaagtaccaaagttcagatcagactgaatttgagctacgttttgccagttatatcattaaaaggtttgaataaggaatcatttcaagagcatacctgtttcctatcaagaggctcctgggtcctgagatgaagagtttaggacacaagcctcagttgaagaggaagcattatttttgctcagccttgatttctaagttacaatctagaagcaagttgctgtcgtccatcatagccacttcctcttgaactgagggaggc

SEQ ID NO: 26650 - DNA, 298 bp, Homo sapiens
  source 1..298: mol_type = other DNA
caggtgacagagctccctcagcatcctcaggactctcagggtctctaagagtcaggactctaagagtctcccaaccccaggagctgatctccagggcagctcttagggctgtacccattctagggctgagccagcagagtcctatctcagggctgcctctccacttgcaacaggcatcccattaaatgatgagcagatgattaaatatggacatgttagagaaggggctggtgagaagcttcctctccatggtcctgagcagaggccatgggatggggctctggggagtgactcatga

SEQ ID NO: 26651 - DNA, 407 bp, Homo sapiens
  source 1..407: mol_type = other DNA
ttttcactaaaacagtgagacttacagttcccatctgaacaaagatctcctggaagaagtcaggaaataattccttctgctgggtgcaggcatatgaaactgatgggctaagttttgccatttatatttataaaagttcggaatagggaaccatttcaagagcagacctgttcctgagcaggtccagtgatccctcatcctgccccaactgagtagcacttggttgaggctgttgtagaatgagaccacaagccaaccacatcctgaggtcttgagatggaaagtttaggaaacatttcatttctgctaagcctcctgaaatggggcatgcataactgcgctgttcctgatttctgtttcacaatccagaagcaggttactgctcttcctcttgaactaagggaggc

SEQ ID NO: 26652 - DNA, 303 bp, Homo sapiens
  source 1..303: mol_type = other DNA
gggtttcaggcatgatttcgggcccagcgacttccccaactccttggcacacactcttggcaggaactcagtgactctcctggaaggagtcaagaaataattccttctgctgggtgcaggcagggctaagtgttgccaattatagcaatttggaatagaaaatcatttcaggagaagatctggttcctctagaacaagatagggtcttgaaataaagactttagaaaacaataggcaggaagcattatttctgctaaccctgctgtgcctgatttgtaagtcacaatctagaagcagggaggc

SEQ ID NO: 26653 - DNA, 308 bp, Homo sapiens
  source 1..308: mol_type = other DNA
aaaaaatttttatttgcaatttggagaacaaaactgagcctaggagggcccagtgacttcctcaaactgtgtgcaaaacaaagactaaggaaagcattcctctcctggaggaagtcaggagatgattccttctgctggatgcagacaagattagactgaatttgggctaagttttgccagttacattgataaaagtttggatagggaacaatttcagaagcacacctggttcctctcaaatattggcagtagaacagttctatcaccaagaagacctgtctgattctcctgagaatggagcatgagta

SEQ ID NO: 26654 - DNA, 272 bp, Homo sapiens
  source 1..272: mol_type = other DNA
tcaatatgtgctaggctctttttaacatgtcttacaaatattaaccctcgtctcagatgaagggggatttgaacccacggagttcagcccttctcaagtgtctgcccccctgcacaacagcagggccatgccttcaccaggaggctcggggaattcaaatcgcggagccctggtgcaggaacggcgttccctccgggaaaaccggggttccccaggccttcagggcacctggccagggggcctccacctccctgggaaggccccgacccttc

SEQ ID NO: 26655 - DNA, 341 bp, Homo sapiens
  source 1..341: mol_type = other DNA
gcggagccctggtgcaggaacggcgttccctccgggaaaaccggggttccccaggccttcagggcacctggccagggggcctccacctccctgggaaggccccgacccttcgcccggctctgaaaggatcgggcccctccggcccgcacccacccccaagaggggccttcagctttggggctcgccgcctccagcctctcgccagtgggaagcggggagcagccgcgcggccggagtccggaggcgaggggaggtcggccgcaacttccccggtccaccttaagaggacgatgtagccagctcgcagcgctgaccaagtggagcggggacccggcctctgg

SEQ ID NO: 26656 - DNA, 301 bp, Homo sapiens
  source 1..301: mol_type = other DNA
caccttcaagctgctgctggtccaggcacccagagtgtgtgcattttgtgttgccgccagagaaaactaaactgcagctcctggctgtcggggaagagctgtgcttctgccagggctagtgtgcctggcaccagctcaggcatgtaccagagccacgcaacagcgggccatgcacgtgcctgctgactcggcagaagactgtctcagcccaggggcctgggggtctgtgctctgactgctctcagccacttccccattggctcccagcagcctgtgctcagcaagggctgagcgacagggg

SEQ ID NO: 26657 - DNA, 546 bp, Homo sapiens
  source 1..546: mol_type = other DNA
aggaacggcgttccctccgggaaaaccggggttccccaggccttcagggcacctggccagggggcctccacctccctgggaaggccccgacccttcgcccggctctgaaaggatcgggcccctccggcccgcacccacccccaagaggggccttcagctttggggctcgccgcctccagcctctcgccagtgggaagcggggagcagccgcgcggccggagtccggaggcgaggggaggtcggccgcaacttccccggtccaccttaagaggacgatgtagccagctcgcagcgctgaccaagtggagcggggacccggcctctgggcagccccggcggcgcttccagtgccttccagccctcgcgggcggcgcaggtccgggcccggcagggacggggaggggcagagcgggaccggtcggggctggggaccagccgcgcgggcttctgaacgggcacgctgtcggagccggaggctcgtctagtcccgagccccagcgggccgcggcggctcgcggggccgccttcccgggacagcagccgggg

SEQ ID NO: 26658 - DNA, 713 bp, Homo sapiens
  source 1..713: mol_type = other DNA
gcgctgaaagtggagcggggacccggcctctgggcagccccggcggcgcttccagtgccttccagccctcgcgggcggcgcaggtccgggcccggcagggacggggaggggcagagcgggaccggtcggggctggggaccagccgcgcgggcttctgaacgggcacgctgtcggagccggaggctcgtctagtcccgagccccagcgggccgcggcggctcgcggggccgccttcccgggacagcagccggggcccgggcgccggcgcgggggaggacgctgccctccccggccgggcgcgcagctcgcagccctcgctccctcccccggggcgcgcaggcgggcgctcgctcgcagagaaggtgccggcggggccggagccccgaagcctccccgggcggcgggaagacgtgccgggagggcgggggcagcggccgggactgcgggccgggagcgagcccagccgcccgcgccgtgtggagcccgggcggggcaggtgggcagcggcgggggcggctccgcgcggccgggctcggccgtgctgcccctcgcccctgctcgcgcggtccctcccgcgcggtctgtcggtctgcgcgccgcctctcctggggggcggggagggggggtctccaaaaaccgcggcggcggcggcggccgctccaggcgcccgttccggagtcggggggaggcccagccgggaggggggaaggggg

SEQ ID NO: 26659 - DNA, 534 bp, Homo sapiens
  source 1..534: mol_type = other DNA
gaaagccacgggagcctaggagcccaggcttccccagcgagcgccgcggcagcagaaggatccgctacacgccgggctcgggccgccacctcccgcgctgctcggtcccggaggcagcccgggcccggagcggaccatccccaggcaggggctccagggtgaaggccagcgccgaggctggagttactgccactgcctccgcgcttggcctcggccagtcgcactccgagaagccgaaacccgtcgccctcggggacttgggggccaaatcgcgtctctaagtcagaagtctttttcctatcgctacatgacaagctaacagagagagctcaatcagcggcggtggcttccgtcttaaaggggccgcggcggccgggggaggaggaggtgggacgccccgcggcctacgctcctggcctccccgccttccggctcctccgcgtcccagggccggacggagggatgaggcagggggggcccgggcagcgccgttgctgctccccccgccgcccgcagccatggaaacggggaagg

SEQ ID NO: 26660 - DNA, 426 bp, Homo sapiens
  source 1..426: mol_type = other DNA
accttgatatttgtaaatatcgataataggaactttgaaaagtcaaggtgggcccagtgtcagtgatagaggctgttcctgctgcctcctggactgaaactgacattcaacgccaagtgtgatctcagtttaccatctcatgtgatcaggggtgggagtgattatccccaaccacaagcaaggcttccgggcttcaagggttggagaacaaatgaactgtgatgtgtctcacttccctgtgcaagtggaagatgctaatacatgtgtatcatgagaaattctttgattcagagagaacttcccaggatcatttcctaaaccctacaatccaggaaatagtccatcattttataaaattataaaagcgaactatttgagtttctttattactacaggaatgaccgcccacttcattagaattctaat

SEQ ID NO: 26661 - DNA, 324 bp, Homo sapiens
  source 1..324: mol_type = other DNA
tgaggtcaggagttcgagacccgagtggcagcctgtattcccagctactcggcagtggtgccactgcactccagccttggtgacagactgagactctgtctcaaatattttgtgctaaagtgttctaggcactacagcaatgagtaatacacaaaaaattcacacccttatggatcttacattctaattttaagcttaaaccttgaaagaggttctggtatacacagagcagctctcacttaaggctctccttcaggccccgcctctgctcggcagaagctccgctccggggccggaactccagggctagtgagctggaccgga

SEQ ID NO: 26662 - DNA, 459 bp, Homo sapiens
  source 1..459: mol_type = other DNA
ccccttcagtaacaagtaaaatttaattcaatttgtatttgccattaagatttaaacagttttaaaaatattattagttttaaaatatatacatttaactccggggttacaggaatcccaggcgcgcgccaccacgcccggctctagtagcccagatctgaaccgggatcttagataagaggccagagagccagactccagcctgagtgaagcttccaccctccagaaactggatgagagtctgtccctaactttgagctgagacgctgggaggcggctttgccctgcctgtgtgtcacaggcaacacgaaggctcacgcaaggtagttcgcgtgctatggagcccccagcttccggaagcgcctgcggaagctgccgcagaggcttgttgtcactgcagtggtcactgtcctggaaaagtaaccgttgcacggcccagaagtggctctgtggcggcca

SEQ ID NO: 26663 - DNA, 463 bp, Homo sapiens
  source 1..463: mol_type = other DNA
aagtgtagtattttcttccatccacagctctgggggttccagggactccagctctgagacctccagagggtcctgtgcctccctgaggacgcctgcagcaggatccacagtgcaggctcccagggcctggcacagactgactgattccaacgcccagtgccactcctgggagtatgcattttatttttaaaaatttattattattatttttctttttcgggctcaaaaacaaacattctagaatttccctggtgctttatagtgggagagggcctgggatgctcctcacacctcctctggctagagtgccagcggcatcattgccaggagataagcctgcagctcctggcccctccagggcccctcatgtataactgatgcctgaaacatgaggccatgctccgggaactcgtcgcctgctgtcaggtctaggaagggaggccagccaccatgagggcagccc

SEQ ID NO: 26664 - DNA, 365 bp, Homo sapiens
  source 1..365: mol_type = other DNA
ggggatcccaagattggtgccgcggagctagctcacacaatctggtgaagggtctgaccgatctgtcagcttgtaaagcacagctggggctgggacacagctattcccgtgccaaagttaagtttaatgtgaaccgggtggacaatatgatcatccagtccattagcctcctggaccagctggataaggacatcaatctctatgcgtgtcctcctggtgcttaccacaggctgtgttcttacactgactgtatagaaagaggaggtagagtaaacctaccccatatacacctcagctcaggccctgtgcctggtcatctttgtcccattcactttccggagctggtgaagatcatcaacgacaat

SEQ ID NO: 26665 - DNA, 589 bp, Homo sapiens
  source 1..589: mol_type = other DNA
tatttttaaaaatccccttcgaatgactctttaaaacataccaggggatacgctacttaagtataactaggttttggatttataacgttaatattaattattaaagcaaaactcatttctagtccctttcagggtctgcgccagagcgcgccaggcaccgctcccgttacgggtgggaggaaaggatgcaccgcccacccggcgccggggaggctcgtccccgagtaggggacgggaacgcctgggtcccggggacgtggggcgcagggtctggggcccgaggccacggacgaagcgggaagccggctaggcagcggtctctgtctgggatggacgccgcgccccacgcggacctccccgtttcgccgcctgcagtgcccgaccgggggccgcgcgtccccggcaaccacgcccgcccgcgcagctgcagaggccggaaaaggcccgctcgcccgcgctcggcaccacccagcccgcgctccgggcgataccaccctgggcggcccctccaaaggccggagatggtgtcgtccccggcctccgattggtcgggggggcgggggcgtggcctctggagcctggttccgcg

SEQ ID NO: 26666 - DNA, 237 bp, Homo sapiens
  source 1..237: mol_type = other DNA
ctcctggtgcttaccacaggctgtgttcttacactgactgtatagaaagaggaggtagagtaaacctaccccatatacacctcagctcaggccctgtgcctggtcatctttgtcccattcactttccggagctggtgaagatcatcaacgacaatgtcgtgtgggtcagccctaattggggaagcggtgcgtgcagggctgtcgtgcaactgggcaggtcagcagttggcaggcatc

SEQ ID NO: 26667 - DNA, 300 bp, Homo sapiens
  source 1..300: mol_type = other DNA
gtgagccgagatcgcaccaccgcactccagcctgggcgacagagcgagactctgtctcaaaaaaaaaaaaaaaaaaatcgtgactgtaattgttttgagacggctggaggcagtggtgctatgattgttactttaaggatcagtctgaaattcggtcctgggcactctcggagactggcggagaaacccgacacacacccatgtctgtactgtattcctcgacctgacatacaggtattcagtgagtactgtaaacatattttgaagtttcgacgtagattaagaagtcggggtacgggg

SEQ ID NO: 26668 - DNA, 314 bp, Homo sapiens
  source 1..314: mol_type = other DNA
gtgcatggtcattaagttttccttcaaagtatgatatgtgggcaaagattaagttctcttaattatgacacattctcaagtcactaaactgagatgtgctgttacagatgatcagtgtaatctgatatactgataatccaagtgactctctaataagggggttactaggtcatagtccagaagcctcaggcagtcccctggcagagctgcctggatcaggcctggcctgttctcagaaatccctgacttcccagctagccccacctaggccaccagctgcttatgaggtcagagcagcagcagcagcagccccc

SEQ ID NO: 26669 - DNA, 474 bp, Homo sapiens
  source 1..474: mol_type = other DNA
aactgtcagttgccaacgagaactctcacccctaagggcaaggacagccaggtatcccttctctagggcttcaggatcccacagaagagctgcctccaccgggaccggcagttccggaaccgcccgggtcagtaggcgcttcagcaagagaggactgagctccctgcggggaactggaccacattagtcacttagtctaaatggttacatttgtcgatattttggtgccttgatgtcagcaaagtttgcacaatgggtcttaacgtgcaccatcctgttggtcgacttgatggccaccaggtgatgtggctttgcagactataaaggcgcagcgcgccaacgaggcgggttggccccggcggtcctgagacttggggcggccccttggaggtcagccccgctcgctcctcccggccctctcctcctctccgaggtccgaggcgggcagcgggctgtgggcgggcaggagggggg

SEQ ID NO: 26670 - DNA, 515 bp, Homo sapiens
  source 1..515: mol_type = other DNA
ctgctccataggtaagtgggcagcagcctggcaggtgggcattgtaggcgggcgggccagtggacaacttccacactctgccacagcgcaaacttctcaccaggggccaggtgaaggtcctggacagcaggaggctctactcctgcaaatgggtacagtctcaggacagcctccaggacgcactgctgctgctgctcatggggctgggcccgctcctgagagcctgtggcatgccctccttcctggctgggcaggtgggatgatacccctttcttcacagtcctataatataggtatcagatacctggatggcagccacctcagagcctgtggattgggggcagccactctggcctcctctgtggctctagagaatgggcttcccatcggggctccgaggctcccctgccagcctggagggtccgtgcagagggacttgggtgggcctcacaccctacagtgactcgctggaccccaccccagcccgggtcacaaaggggctcctctggggaggg

SEQ ID NO: 26671 - DNA, 795 bp, Homo sapiens
  source 1..795: mol_type = other DNA
gcaggggaaggcccggctccctgcccaaaggcggctgtgcgctaagtggcagacgctcggggagagccggcgcggggcggaccccagcgccagtagtgacaggggcgaacgccgccgggagactccagccggcgggcgagcagggtaagccaggccgtgggcgggagggcggggcagctcaccggtggctggtgcagacggcagctgacccacctagagcgggctccaggccggcacttccgcttccgcccgtccgggtcacgtggcgaggccgccgccgcggccatcaccactgtgggcagcctcacttggctgccgccccgagaccccagcccgtacctgggcttcgcgcccgccaagtgggcccagccctggctcctgcgccctgtggcggccaactgggggtcgctcagggctgtgagcgtcgcagcccgaggcgccgaggcctgaggcgccgtcggggccacagcgacgctcgcatggagagcgctgggcgctgggctgtgcaccgacggctaacctggacccacggtctctgcggggcgtggctaggagcccgctgcgggccaggcgcgcggtgcgcaggcatacccgggtcgcgggtgaacaccgcggagccccgggacttggtaattggcgcgagcgggtgcgcgcatgcgcgggacggcggcgggcacgtggcgaggcgcagggcggcgccgcgcgggaagctccccagtgccctggaggcctgctggctggacgaccccctgcctctggtaccaagtgtgaccaaggctggcgccaccatggctc

SEQ ID NO: 26672 - DNA, 521 bp, Homo sapiens
  source 1..521: mol_type = other DNA
ttagtttttcctattagggaagctatgggaaaatcctaatctgggtaacgatgtaacgggtttacactttagggcgggctgccctaacccaggggttccttccgggattcacggaccgcccccctcggagcgcccctgtggtctgacttcagcagcactttccggcaggagactgggcactcgctgtcacccgcgagctgcctccctcctgtgcttgcctcagtccttttctggagcaggggaaggcccggctccctgcccaaaggcggctgtgcgctaagtggcagacgctcggggagagccggcgcggggcggaccccagcgccagtagtgacaggggcgaacgccgccgggagactccagccggcgggcgagcagggtaagccaggccgtgggcgggagggcggggcagctcaccggtggctggtgcagacggcagctgacccacctagagcgggctccaggccggcacttccgcttccgcccgtccgggtcacgtggcgaggccgccgccgcggcca

SEQ ID NO: 26673 - DNA, 758 bp, Homo sapiens
  source 1..758: mol_type = other DNA
gttgtgtagcagctgctggacttccgaggcctggaagtggaccatgtcgcttcgcagcgggcggcgcggctcctcgctcgacagacagccaggctgcagggagaggccactaagcagcgcgatggtggggactctgggcaggtcagcctcagggctagcccctccggggctggagccatggtggcgccagccttggtcacacttggtaccagaggcagggggtcgtccagccagcaggcctccagggcactggggagcttcccgcgcggcgccgccctgcgcctcgccacgtgcccgccgccgtcccgcgcatgcgcgcacccgctcgcgccaattaccaagtcccggggctccgcggtgttcacccgcgacccgggtatgcctgcgcaccgcgcgcctggcccgcagcgggctcctagccacgccccgcagagaccgtgggtccaggttagccgtcggtgcacagcccagcgcccagcgctctccatgcgagcgtcgctgtggccccgacggcgcctcaggcctcggcgcctcgggctgcgacgctcacagccctgagcgacccccagttggccgccacagggcgcaggagccagggctgggcccacttggcgggcgcgaagcccaggtacgggctggggtctcggggcggcagccaagtgaggctgcccacagtggtgatggccgcggcggcggcctcgccacgtgacccggacgggcggaagcggaagtgccggcctggagcccgctctaggtgg

SEQ ID NO: 26674 - DNA, 330 bp, Homo sapiens
  source 1..330: mol_type = other DNA
tatttttaaaaaactttaatgggcaattattacatagcaagcactgttctaaatatgcactccagcctggccaccatgggcctgcagtctcagccactcgggaggctgaggcaggagaatcccttgttgcagtgagccgagtgcccctgcactccagcctgggcatgggcccagtgaggcccacaggattctattgggggttagtttttcctattagggaagctatgggaaaatcctaatctgggtaacgatgtaacgggtttacactttagggcgggctgccctaacccaggggttccttccgggattcacggaccgcccccctcggag

SEQ ID NO: 26675 - DNA, 229 bp, Homo sapiens
  source 1..229: mol_type = other DNA
tccaggtgctgctggagcaggtgcgccttcctgaagtacagggcgtcagcaggatcctggcccactgggcctgctcctgaggtcaggtattcgagactagcctggctaacatggtgatcccagctacccgggaggctggattgcactgctgcactccagcctgggcgacagagcaagaatggcatccagatgtttgtgacaccccgcatcccttgcaggtgcaacagaa

SEQ ID NO: 26676 - DNA, 295 bp, Homo sapiens
  source 1..295: mol_type = other DNA
tgcgccttcctgaagtacagggcgtcagcaggatcctggcccactgggcctgctcctgaggtcaggtattcgagactagcctggctaacatggtgatcccagctacccgggaggctggattgcactgctgcactccagcctgggcgacagagcaagaatggcatccagatgtttgtgacaccccgcatcccttgcaggtgcaacagaaacgcctggtgtctccgcacggagctggccatcaaggtgtgggtgcccagccctccacagacactctgatgtggttgttcagggtgga

SEQ ID NO: 26677 - DNA, 340 bp, Homo sapiens
  source 1..340: mol_type = other DNA
acctggggctggggggcccctgggctaagtgggagcctggctggaattcccactcacggtgttgctgcacctgaagaactgtggccccagttctgtaagcatcaggagctagagacgctgaaggagcttccacatccgagccagctatgctgcagaagatctggtcctcactgtgagggagactctgacgtgagtgcacctagcaggcaaggctgaccctggcgaccctgggcacagggatggaggggcgagtagcagctctgcagacagccgccgatgccttctacaaggccagccaaggtttggccattatccgggtccccaggctaggctgcagcgg

SEQ ID NO: 26678 - DNA, 523 bp, Homo sapiens
  source 1..523: mol_type = other DNA
agccgcagacgctcaggtcctgcagcacccgcggggatccgtgtaggaacctgttcgcgggtgtcacgcaccagacgccgtgccgggagcgccgggaagggggtacgcgccccaaccccggccgggggagggcgcactctggctcaccatgtgttgtgcttctactcagctcggtggcgagcggggccccagcatgcgcactgacttgatataagacgacacccacggagccagatccgttctagggacttggcaggttcttcctgatctgtaaaaggcccaagtcatgaggcctgtgactgtagaatggctgaaggcactggtgcactcgcagccggtccttccggggtccagcttcccgaaggactgggcagccccggggcgaacccctctggagctccgggttcggcgccccagccggcaagtgagcgcccagcggagcgcaagggcggggcccgcgcgggccggagacgcccgttcgctgtcggccaaccagcgcctgtctctgaacgggagcgaggct

SEQ ID NO: 26679 - DNA, 358 bp, Homo sapiens
  source 1..358: mol_type = other DNA
tttggatttgcctattctggacatttcatataaatgaaatcatacaatatgtgaccttttgtattgtatcatgtatcagtacttcattccttcttatggctgaataataatccattatattgatatacgacatttggctaactggttcatcaattgatgaacatttataaatgctgctgtgaacattcatgtataaatttttgtgtagtcataggttttaatttctcttgggtatatatatatacctaggagaaacctcattttaaaatttagttattgctctttttattattaagttacttatatatttttagatataagtcccatatcagatatacgatctgtaaatattttttcc

SEQ ID NO: 26680 - DNA, 388 bp, Homo sapiens
  source 1..388: mol_type = other DNA
ttgctgttcagcccaacaggcctctgacccccagaggctgatgtattctacctacctagggagactgcactggcccaacagctgggccccatctcatgggcccgcttcttcgccaggagagaagccactccggggtaggtactgcccagccctggttcccaggtgtgtggatgttgggagagtggtcacagcctcccctgtacctctgaacagcctgccaggctcttagtccaccagggaaagccctgagctgggagttggggagcccccaggcattgcccctgcccaggacacaattctcttttgggatcagggaaggctctttctaggtctcaagatcaggagcttgaagggcagcagctgccttcccctctgaagacgtcactgg

SEQ ID NO: 26681 - DNA, 511 bp, Homo sapiens
  source 1..511: mol_type = other DNA
agacagtggtggccatgggatcccacaggcatcctgaaagccaatgactgtcttgaggtatgtgcactaggaacatctcagggactgcagagctccccaagaccatagcagggaaatggtttgctactgttttgcaaatcaaacatttacagtgcgggagctggagatccccacactagctggatcctcaggcttctacgggaggcggggggcgtcctgctgtgggaggccacgctcggcggttacgagaccagtgtcctgagacatgacccgctgagacccttccctgcgtgggggctggagggacgcgggtccggccccgcgggcgggagtaactaagggatggccccgggccctggcgggaaggccgggccagagcctgggggcgggatgcggacgtccgcagggtcgccgcttcggttccagaggccacacggccgggcggggcgtgagggacagcccgaggactacaggtcccaaggttccccgcgccgcttccggggcacggtgg

SEQ ID NO: 26682 - DNA, 421 bp, Homo sapiens
  source 1..421: mol_type = other DNA
caagatggcgcccgccattgcactccagcctgggcgacagagcgagactccgtctcaagaaaaaaatatatatatttatattcagatatcaaaatgttaaaacactttttttttttttgagacggagtgcagtggtacgatcacagctcactgccttaagcggtactcctgcctcagcctcccaagcagctgagcccacctcagactcccaaagtattgggattgcagcacattttgatggtgtcaacgtgctaactgtgataattttgaagatataatgaatctaaacagtatatagtgtgacaaagccagattagagacagatgtgatctctgccaagagggtgggcggatcctgccagagcctcctcccacctggagggccccagcccccctcctcgaggtactgggaggctggataa

SEQ ID NO: 26683 - DNA, 320 bp, Homo sapiens
  source 1..320: mol_type = other DNA
agcagctgagcccacctcagactcccaaagtattgggattgcagcacattttgatggtgtcaacgtgctaactgtgataattttgaagatataatgaatctaaacagtatatagtgtgacaaagccagattagagacagatgtgatctctgccaagagggtgggcggatcctgccagagcctcctcccacctggagggccccagcccccctcctcgaggtactgggaggctggataattagtggcccaggccaccccggcctgctcccttccgcaaggcctcaccttctggcggtgaccttgaccccggcccaggccctg

SEQ ID NO: 26684 - DNA, 337 bp, Homo sapiens
  source 1..337: mol_type = other DNA
ccccaggcctgagatgtacctgccctccccaaggcccccagtttcagggcctgagtccccatgccctgctcggggggacgacggcggctgccttgtccacgaggcaggccacagctcctaggccagggcctgtccctgcccctgggtaatagaaagctcagagatggtctcctctccctgaatccagagcgctgcagtcacagtagaggcaattgctggacagccacgtgtgtccccagatgcctgaatcactgctgacggctggggacctggcggccgtgggctcctggggagccactggggagggggtggcggccgcgtctcgcctccacgggaa

SEQ ID NO: 26685 - DNA, 469 bp, Homo sapiens
  source 1..469: mol_type = other DNA
tctcaagtcattaaaacttgtaagagtccgaagtgtgtcatactggaatgtgagcagcaaaaagttaagaacatatgtagcaccttctcttctcctttgaaaacatgcgagttttcctacagctacgtgttcacagctataatgcatctgagacttctcagtgtctgtttcagaaggtgaactaattttgcacaaagtcagagttaatcaaaataatctccgcctgcagagcagcatcctgtcttgctgggcagtaccagctttgctctgctctgccagctgagtgtgaagaagatacagctctttgatacccaagatctgatcaatgttttgaaagcttttgtcccattcaatgctagtatggatcagctccttttaaagtacctaggtttttaatctcagctagttcacttaatttatgttataggtgaaaagcaaaaattggaatcattgatccttaaatatatag

SEQ ID NO: 26686 - DNA, 131 bp, Homo sapiens
  source 1..131: mol_type = other DNA
taggtataactaattaaatcttttttttttttttgaactcgtgctgttagcatagcagtttttataaacttgatatcaaagagatggaaggagagtgaagaaactgcccacgggtaccctgggttgaaaat

SEQ ID NO: 26687 - DNA, 391 bp, Homo sapiens
  source 1..391: mol_type = other DNA
cgaccaatgcattgttaaaattagacaggtgtgaggctgcagtgagccatgattgcaccattgcaccccagcctggactttgtctcaaaaaaaaaaaaaatgtattgtttttctcactgtacaggctctctatgaaaataataataataatataacaagaatgaatttatgtgactctgtgtcccagagctggagtacaggggtgcccagactggagtacagtggcgagatatcggctcacggtttggcgctgggattacacaccgcgccgggactaagctgcttaatgacttccagagcgtcctccagtggaaaatgtccttgggaaacgctgacagagtcttttgagcctcggccgcatccgtcactcgcgcagcaggcggaagtagcg

SEQ ID NO: 26688 - DNA, 208 bp, Homo sapiens
  source 1..208: mol_type = other DNA
tgaggctccagagagagcttcgctcaggacaatggtcctgggaccttgtttccagccccaacctatgctgttgtccttatctcagagaaggtgtactacatgtttgtattgccccttatagtttagtcaacatgatcaccaggtatctggggtttctaccatggttaattttaaaattaaaaaagcccttgaatcttgagtagctggg

SEQ ID NO: 26689 - DNA, 677 bp, Homo sapiens
  source 1..677: mol_type = other DNA
ccaggctcggctaggcttgcctcaggctgaggcctcaatactccctcctcccggcagtcctcccgggccgccctaggctgagtgagcactccccacagtgaacgctgcccgcgcgggcgaggccggcgctccgggtccggtacgcacctcactccctctcaccccgggttacagcgtgtggtctggggccacgcgttacgccaggcgcggggcacagggtgaaagctccgtttggtcacgaacgcctcccgcacgacagcccgtggtcctcgcgcccgggcgggtcgttgctcggccgggcggatccacccgcgacggctcgtcccgacccctccctagcggacttgcaaggtctcagggcgtccgctgggaggccgcgtcccgaagagctggcggaggaatggggctcggggctccgagtcgggagccccttcccccaagcaagaggggctcctcctcctcttcctaggattgttgcagaggaacgactgggcctgagcccaagcccaagggcctgggggtcccacgcgcgggcggggcgcagcgacgaaggggttaaggcgcctcaccccgccccagcccgggcattggctgccctggggggcgtggccggagggcgggctcgcgtttgccgcagccgctggtgggcggggctcgggcggggagcaggaggggcg

SEQ ID NO: 26690 - DNA, 453 bp, Homo sapiens
  source 1..453: mol_type = other DNA
cacctaggatgacagctgcccaggccacccgctgggctcgacgctgggcctgtaggcggctgcccaggtccctccggcgccgaggcctgcctccagctctcggctcctcaggctccaggggcccaggctgggccacccggcctgctcctgccatggcaggaggagcggcagcccggaagcctcacctcctctgcttagcggcctgctgcccacagacaaggccttctcagtctgactggcaaggccttttccaccaggcccacagcttggtcccaggcgggggctcagcccttccctcgggcctggttttatctggctccccagccagagagtacacttcccggcggtggccgagcctcccccgggaagacctgctggatctccggctcctgggagcgcgcaggtgctcagaggtagtgggcccaccctggccaatgacatggccgagtgggc

SEQ ID NO: 26691 - DNA, 298 bp, Homo sapiens
  source 1..298: mol_type = other DNA
catgatcatggctcactgcagaagtacctcagggactgaaataaatctttacttctgttatcatgtatacaaaaagcttaatcctagaggtaatcgcgggattgtttagtgatttttaaaacatacgcctgtaatcccagctactcgggagtctgaggcaggagaatcgcttggaggttgcagtgagccgagatcgcaccaccgcactccagcctgtgcgacagagctccgtctcaaaaaaaaaaaacatacatagatgttttctactggcccccaaactcatgtgacatggctccga

SEQ ID NO: 26692 - DNA, 278 bp, Homo sapiens
  source 1..278: mol_type = other DNA
atctggtagaagcctcattgttccatcccccagcaggtcctgtgactatattcccacaggagtcatctggtggcttacatgagctccctgtgtgtttctgttacttgctagccacaaagtccctgtgaaggactgctcagtgtggaactccgtcccacgccctctctgggtcctgctagccctggcccagcagcgggagttaagagccccgggaaccccggggcgcccccatggtgatcccccggctggtggcggaagtgaacggctcagtttccggc

SEQ ID NO: 26693 - DNA, 306 bp, Homo sapiens
  source 1..306: mol_type = other DNA
cgaggtgggcatatcacgacgtcaggagttcgagaccagcctggccttgtagtcccagctactcagatcaaaaacagatatggtttttaccattaggatttttagaagagaaaacagaatcacacaaatgaatatctatttgcagtgcagaggtatgggttttcctgagctggggcttgagctggctaagatccaagaaaggcatccatgtaaggttggttagtgtttctactaaagaaaacaaaattcaggcgattctcctgaatcctgaattctctgaactgggattaccgggtgatccactcg

SEQ ID NO: 26694 - DNA, 322 bp, Homo sapiens
  source 1..322: mol_type = other DNA
cgggtgatccactcgggctttcccacactttgatgagcatcagaatggcctttgtccatgggcagaagtggctgcaaagagagtatcagcagaggttcagcagacccacctttgacctccagggtcacagggctgcagtcttctcctttcggagaccccattgcggtgggtcactcagtctccaggctcgggaggcccccagcaaatcggacgctgtgggctaggccgccaccgcgagcccactcgcccgatacgcgccttggggtccgggtcggctttccccgggacccctggccggaaactgagccgttcacttccgcca

SEQ ID NO: 26695 - DNA, 613 bp, Homo sapiens
  source 1..613: mol_type = other DNA
gccccggaacccctggagttttgggagtcccgggacccctgaccgtgccctgcgcggccgcagcggttccccttgctctgacacgggagggccagccctgggtccccgccaggacccaggacctgcacgtgggccgccgggacggaagcggagtgtgcaccggcccaaccctcccagaccctcgtcgcccacggcctgggacgcgccccagcgcccccgcccgcagccccggctcccgccatcctgcgccccgacccccggggtctccgagtctggaggcgcagccgggaccatccggggaccggcccagggagggcgcagcctcccccgacccatctggcttccaggcggccgggacgcggtcccaggactggagaccgttgcctgtcggcccccgtgtgacccggggcgcgtgacgggggtcgggggaaggcccccatcccccgccttggcatccgaggagagagggggagaggcccgctcgggcccggtcccttcctctcgctgcagcggggcagggttttctcaggaaaacctctggcccgcctgggcagcccctagcagatgggctaagcaatggggccccctcccctagggtggcgtgggttgcatc

SEQ ID NO: 26696 - DNA, 529 bp, Homo sapiens
  source 1..529: mol_type = other DNA
ggtgtctctccagagtcacccctgcaccccaggatcttccacaaggcctcctggagtcgcgctgggggagggtggggtactcagtctgtcgcagagccccaggccaggagcactccagcgctaggagaactgggccagcgccagaagcccttccttcgcagaggtgggcttgccccggcctgtccccgttcctctaccatggttagggcacagtggccgaggactccgtcccagcgcggctgagccggaaagcgatgctgcatttgccggatcgcataagcgccccgaaaaggcgcgtccccgggcgggtcgcagccggtccaggaaaggggacaaccttgacctcatagacagccgagctcggagagcgccgtctcagcgggcgagggcgtagcccggggaatgcacggaggtccgtctagtcagtcggggcgcgcttcctggaggaggaggggcagccagcgggcgtggccctgcggaggtccccggtcgaaaggaggagacaggggccggccgcgtacttaaagcg

SEQ ID NO: 26697 - DNA, 475 bp, Homo sapiens
  source 1..475: mol_type = other DNA
ggctcagtgccagttcggggcccatagccgactaggggcggcttggtctttcctcagtgggctgaggcgccctccatcccagaggctttcctagctgcccaaggctcccatggcaaggtggcttttcagggatccagcctgcatgccacctatgcagccatgctccgggggacccgggagtcagtgcctggactggagctctagctggagggctgacctggtgtctctccagagtcacccctgcaccccaggatcttccacaaggcctcctggagtcgcgctgggggagggtggggtactcagtctgtcgcagagccccaggccaggagcactccagcgctaggagaactgggccagcgccagaagcccttccttcgcagaggtgggcttgccccggcctgtccccgttcctctaccatggttagggcacagtggccgaggactccgtcccagcgcggctgagccggaaagcgat

SEQ ID NO: 26698 - DNA, 478 bp, Homo sapiens
  source 1..478: mol_type = other DNA
gtcagtctggaggcagcaggcgtgtgggcctcaggggttccctccaggaaggccgagggctcagtgccagttcggggcccatagccgactaggggcggcttggtctttcctcagtgggctgaggcgccctccatcccagaggctttcctagctgcccaaggctcccatggcaaggtggcttttcagggatccagcctgcatgccacctatgcagccatgctccgggggacccgggagtcagtgcctggactggagctctagctggagggctgacctggtgtctctccagagtcacccctgcaccccaggatcttccacaaggcctcctggagtcgcgctgggggagggtggggtactcagtctgtcgcagagccccaggccaggagcactccagcgctaggagaactgggccagcgccagaagcccttccttcgcagaggtgggcttgccccggcctgtccccgttcctctaccatgg

SEQ ID NO: 26699 - DNA, 510 bp, Homo sapiens
  source 1..510: mol_type = other DNA
taactccaaacttttacagaattaaaggtagggctggagtgcagtgctgcgactgcggctcactgcagccttgactccagactcaagcgatcctcctgcctcagcctctggagtagctggggatacaggcgcgacagggatcccagacttgtgttacagaggctcgaatgaagcctggcttctacagtaccgcacccagcacctcgctgcgatgcagcctcctgtaccctttccgtccggcagctggagttagggcagagtgccgggtctctaggcagtcggctcctaggcatccagtggggctgcaaccccgccgccggggacgaaaggcgaagggggaaaactagagctttcgccggccgggacagcgcagccgaagatcgcctccggcgccgcggacgccggagaccactgtctgcgcccccgcacgcacgcacccacgtactcgcgcacgcgcgcgccggccccgcccaccgccccgctgtggcccctttggaccgaccgtccgca

SEQ ID NO: 26700 - DNA, 549 bp, Homo sapiens
  source 1..549: mol_type = other DNA
tagtcccagctactcgggaggctgaggcaggagaatcgcttgaaccagggagccaagatcgcgccgctgcactccagcctggcgagccaccgccagggaagaaacagcggcagccggttgcctgaaccttcctaccttgggggcacccagtgcaggtggatgacccgactcaacctccgccagggcaccctcggggcaggacgggaccacggaagatcgcgctcctggggccaacttcagcagcgagaggcggcctttgcccaccgcctcatcctcctctcaggagtagaggccctctgagaccgacggggagggacggctcgggccggtcatccgaggggccgcacggattccctcctccgcccagctccaccccctcgaggggcggcggtccgggagtggcgacccggctcccccatggcgcgcgccgtcggggcccctggccaggctccgagcggggttggcggggacgaaggcggcggcctgaggctgcaccgggcacgggtcggccgcaatccagcctgggcggagccggagttgcgagccgct

SEQ ID NO: 26701 - DNA, 277 bp, Homo sapiens
  source 1..277: mol_type = other DNA
aaaaaatatgtctgtattgtctgcctatgaaagaaactaatcatataagagcacggagacttttccctatgctgaatgtaggttctaaatagatttactttgcctgtaatcccagctactcgggaggcaatcactccagtctggcaagagagaaacgccgggcgcggtagatgagattgagaccatcctggctagtcccagctactcgggaggctgaggcaggagaatcgcttgaaccagggagccaagatcgcgccgctgcactccagcctggcga

SEQ ID NO: 26702 - DNA, 321 bp, Homo sapiens
  source 1..321: mol_type = other DNA
tctcttagtcactaaggggtttgctgaatatggggcacatatcttcagttctaggtcctgagaaatgggcttggggtagctacaggaacctcaaaggagaagttccagctggaagccaaattcatgctgctccttgaaggttgaataaggtttcagcaggcaaactgcccccagagtgggtctcaggaagaaaccaagctgctgttcatctcgaggcaggccaccaagtgagggcattcctgggcacagcctgagctgggaacgtggccagaggtctttaagagccctgccctcttattgggttggccagcagaggctaaa

SEQ ID NO: 26703 - DNA, 459 bp, Homo sapiens
  source 1..459: mol_type = other DNA
aggatagtggccgggtgcagcggctcacctctgtaatcccagaactttgggaggccgagtgccaccgcactccagcctggacgacagagtgagacgtcctggacattggggccttatgtcccccacaacacgggactgcctcttgggggttcttaagagcggcatcgtgtagtgcatccccaccccaggctgggcgcgcctccctctcaggtgtcagggaggagagctgtgtgcaggaagcccccttccacctcccccagcctccctaaggggctcagagagagtggggtgtgctggtgaatgggagtcccccactccatttctggggaggctccagcgttgcagcggtcccacagtccctggccttgccgagggccttcccctatggattgcgcaaggcctgcagctgcctccctgaccagcctctgggttggagaggaagcagcccctgatacggga

SEQ ID NO: 26704 - DNA, 600 bp, Homo sapiens
  source 1..600: mol_type = other DNA
ggctggccttcggccgcccaggccgttggaagcaaggcgctgcgtgctccggacggcttactgagggtgttcgcgaaccggcgggcggagagcaccggcaagaacccccgcagaccggagggccacgcctctcgctcctccacatcccaccccgcggtgctgagcgaggcgcatctcgctgccatggcgaccgcctccatggagaccgggagcagaggctgcggtccccgggggcgcgtcacaggctctcccagcccccagcttctccaggccgggccaggcacccgggacgcgtctcgggcccgcacgggggcgtcttcgggagctccacgacgcgcccgacagccctcccgagagcgaagggcccaagggaggtggaagaaggagcgggggcggggcctatccgaggccctccttctccctcctggcctagttgggccgcctgcccgtcttcctcgcgagagctcgcccggcaggcgcggactagcagggcgctgcctcggcgaccctggcacgtgacgtaggcggccctcgctcgccccaccctcccagatcaaccaatgggcggaggcgggggcgtgccgacgggagggcggccgc

SEQ ID NO: 26705 - DNA, 515 bp, Homo sapiens
  source 1..515: mol_type = other DNA
taatttttaaaactttttagagagccccctggtgcggagtggtccccttgccgggcatggggcctcagtctgtgagactccgcgcctccgtcacagagctaggcctagcctggggacccgagggcctgcccggaagtggaggggtctagggcgggcccttccccctccgctgttgggccctcgctgaaggggccgaggctgagccccaaggtgggcctgtgggggcggggcgggggagcccctcagcagctggaccgcaggaggccgaccagggtctggaactcctcttcccctccctctcccttctcccaccccctgggctgctaggggagcgggggaggcgcaggaggggctcagggaggggccctggacgcgggaccaggctgggcccctcggcggaggcccgcgcaggcaggccccgccccggcctcgcacatctgggccgggagcgcgggccgacccggcggcgcaggcggcgcggccatccggcctgggggagggggcggcgggcgggg

SEQ ID NO: 26706 - DNA, 478 bp, Homo sapiens
  source 1..478: mol_type = other DNA
ttgtcagatcttctgatatttcaaaagccacgaaaccagattcctgattttttaaacactttgggcccaccgtctgccaactttagactttcaagacaaggtacccaaagtgctgctgaagtttgtgaagcgctactggcagtgtgcagactggagatcagcagacagggcagacttgagggctcctttaaggcagcgaccccggccctgctgaagggaggctggccttcggccgcccaggccgtgttggaagcaaggcgctgcgtgctccggacggcttactgagggtgttcgcgaaccggcgggcggagagcaccggcaagaacccccgcagaccggagggccacgcctctcgctcctccacatcccaccccgcggtgctgagcgaggcgcatctcgctgccatggcgaccgcctccatggagaccgggagcagaggctgcggtccccgggggcgcgtcacaggctctcccagccc

SEQ ID NO: 26707 - DNA, 287 bp, Homo sapiens
  source 1..287: mol_type = other DNA
cctaggctggacctttgactcccgggttcaagcgattctctcagtggctgggattatgttggccaggctggtctcgaactcctgacctcaggtgatctgctgtgccctgcctgaaatgaatttctaatccatggaagaatagctcacctattaaatacccccaatccatttgggtggcagattatcaaccccatggagtgctcccttcacttgggacccaagaagggggatccccaccctaggggtgcagatgcaggaattcaccgccttttcaaagctctttgtag

SEQ ID NO: 26708 - DNA, 299 bp, Homo sapiens
  source 1..299: mol_type = other DNA
catccaatgcaccttgggtctgggtggctgggacagaaggggtactcctgccttgctgagctgcagcccgccccccacccaccggcttttgggtgcagccttcaggcctcttgttccaggaggcctggaaaatcgagaccagcccgtagtctcagctactcgggaggctgaggcagaagaatcgctggaacccggtggccactgcactccagcctaaataatatggtgccattggcaccaagttagccaaatgaagagcccacttgggggccccgctgctcagcgcagccagtcgcgga

SEQ ID NO: 26709 - DNA, 358 bp, Homo sapiens
  source 1..358: mol_type = other DNA
taaataatatggtgccattggcaccaagttagccaaatgaagagcccacttgggggccccgctgctcagcgcagccagtcgcggaggcggggaggctgcgcggtcagaggcgcctggagcgagcgaatcctggccttgagttaatgaacttcacgcctcagcgtccaggtctgtaatacagcccagctgggtttagcaaacttccgggagccagttggagcctctccccatccctagcggtgatcccaggtgacgacatgccgcggggggtcctgcggaggccaccctagggcgtcccgagggtgtgggataaatcttaattcctccggcccccattggtggcgccggcggcgcggcg

SEQ ID NO: 26710 - DNA, 389 bp, Homo sapiens
  source 1..389: mol_type = other DNA
gaagagcccacttgggggccccgctgctcagcgcagccagtcgcggaggcggggaggctgcgcggtcagaggcgcctggagcgagcgaatcctggccttgagttaatgaacttcacgcctcagcgtccaggtctgtaatacagcccagctgggtttagcaaacttccgggagccagttggagcctctccccatccctagcggtgatcccaggtgacgacatgccgcggggggtcctgcggaggccaccctagggcgtcccgagggtgtgggataaatcttaattcctccggcccccattggtggcgccggcggcgcggcgtggaagtggcagctgcaactagaggcttccctggctggtgcctgagcccggcgtccctcgcctccctcg

SEQ ID NO: 26711 - DNA, 637 bp, Homo sapiens
  source 1..637: mol_type = other DNA
gaggcccaggcaggccttgtggggcccccaaacaccaatgggccaagcctccaagttggggcttttacgtaaggctctataggggttagcgccagagtgttcgccctgggcgacactctacaaggttttactggggcccaatgcagaatctgcgcaaaatacacatatttgtatttaaaatccgcgcaaaatataaagtcataatttccgggggtacagcccaggaatgtacatttgagccgcagcccgtagctgcgcggcccggcctaggtccacccgccgcccgtcccggagcctcctaaggccgcaggcgacgcgccccgccctccggggacaactaggccccggccttttccgcagactccgcgctccgagccgcggcgccccctcgcggccgccggggtcggcagcctggggctccgctgatctagggcaacgagcgggggacgcttcgagcccgcagcgagagtgaccagcatggtccctgccggcagctcggggccggagggtaggccagcccacgccggggatatgccgccagcacctggctgctgcagcaccgcgctggacatgagcgctccgcccaacccgacggcgtcagctggcgcgcgcgcccgcgaccgacgtgcgcaggcgc

SEQ ID NO: 26712 - DNA, 364 bp, Homo sapiens
  source 1..364: mol_type = other DNA
tctcagctactcgcgccattgtactccagcctgggcgacagagcatcctctgccccagaactgcgggaggtacctgtcccaggcccttgggcgtaagaggcctctcccaccgccagccaaccttggcgtgcacgtctccaggataggcatccttgccccacccctcaaagttcccagggggaggaggggctgcttgggaagcgtggggatggaattctcagccccccgatgactccgaggccggccacctgcctggtttctggccggacaccggagagcccgtccccgctgcgcagccgcctgcgtcgccagccaaccacgcgcggccgagtagccccgcccctccacatggccaatggccgcg

SEQ ID NO: 26713 - DNA, 413 bp, Homo sapiens
  source 1..413: mol_type = other DNA
acagtccagtgaaatttgacgaggtgaccaatttttctctccaaaagagaaaggaacctccttcgccacaggagggtggcgaaggatttataacccacctgggggaggggctggcggcctcgacggcagctgcgggctaaggtcagccgcggttcaagccctttcgtctgccgacgaccagcggccagacgctgcgggagcactgctgggctggaggagggctcagcggggtgggactcggggtcgccccaggagagttccgcggcccgggggggcaggggggtggatgaggaggctcgggcccttccacccacgcgtccattgggcggcgccgcgggagccgactggacgcgaggcctttgggccgtccccagcctcgggcttcctgcgcgttggcgcaacggaagaggcgg

SEQ ID NO: 26714 - DNA, 341 bp, Homo sapiens
  source 1..341: mol_type = other DNA
ctattcagcaagcacaagcgaagctgcccaaggggcattaggatcactgcccagtgggcattacagtctccccagggaggcacccaagtagctgggatttagcccacagtccagtgaaatttgacggaggtgaccaatttttctctccaaaagagaaaggaacctccttcgccacaggagggtggcgaaggatttataacccacctgggggaggggctggcggcctcgacggcagctgcgggctaaggtcagccgcggttcaagccctttcgtctgccgacgaccagcggccagacgctgcgggagcactgctgggctggaggagggctcagcggggtggg

SEQ ID NO: 26715 - DNA, 648 bp, Homo sapiens
  source 1..648: mol_type = other DNA
gctggcggcctcgacggcagctgcgctaaggtcagccgcggttcaagccctttcgtctgccgacgaccagcggccagacgctgcgggagcactgctgggctggaggagggctcagcggggtgggactcggggtcgccccaggagagttccgcggcccgggggggcaggggggtggatgaggaggctcgggcccttccacccacgcgtccattgggcggcgccgcgggagccgactggacgcgaggcctttgggccgtccccagcctcgggcttcctgcgcgttggcgcaacggaagaggcggccggccgagggcgcgcctctgctctggctggactgccgcggaggaggcgagaagacgctggggggcttgctcgggcggcagcgactgctgctgcggatgggagggggccggctcggcgcgcccatggagcgccacggcagggcttccgccacctccgtctcgtcggctggggagcaggcggccggggaccccgaagggcggcggcaggagccactgcggcgccgggcgagcagcgcgtcggtgcccgcggtcggggcctcggctgagggcacgaggccctcggtctcccggccgcgtaagtgttccgtggggcgccctcccggcccgccctgccccctttttcccg

SEQ ID NO: 26716 - DNA, 461 bp, Homo sapiens
  source 1..461: mol_type = other DNA
gtgagacggagtcttgctctgtcacccaggctggagtgcaatggtgcgatcttggctcactgcaacgagacagagtttactcctgacctcaggtgatccacccgccttggcctcccaaagtgttgggattacaggcgtgagccactgcgcccggccccatgctttcacttttaaaaatgcagtctcgctctttcaggcgattctcctgcctcagcctcccaagtagctgggactctcgatcctcgcccggcctgtctggcgtagttctgagccagcggccagggccgcaccaggcctggccagggagcgccgcgcctgcgcactgcagactctgaagccgccgagccctccgccgaggtgggtggggaaactgcccgggcatccgggtccctcaccccgcccccgctgcatgaatgagaggcgcggcgcccgcccctcccccggcgggcccgcccctcgcg

SEQ ID NO: 26717 - DNA, 442 bp, Homo sapiens
  source 1..442: mol_type = other DNA
gtgcagtgcttggctcactgcgagtagctggggctacaggcgcccgcctcctgacctcaggtgatccacccgcctcgtatttaataaactctttggagtaggtactatttattaaccctgagatataattctgagagctaacaaatattctgctctccttggaaggctttttctgctgagaggaaacctcaccgccctcttggcgccgccctgtgctacacgccggggcctgtcccgctgtgggtcccctgcgggaggggggcccctgctagggagggagtgggcgtgggacccgggtttccgaggcagggatccagcagtctccggcttcaggggcttctagcttcccggctcccggcggggcgggcccggggaggagctcggcgggtccccgcccagaggcggagcggagggccgggccggagcggggtgggtaggggac

SEQ ID NO: 26718 - DNA, 287 bp, Homo sapiens
  source 1..287: mol_type = other DNA
acctattgttggctaaccaatgaaaaactggtagcttaaaatggcagtcagcatttattatgctcacagctggccctgtgggctgctgcaatggtcagcttgggagagaactacctgttgttgcacctgcagcttcacaaccctagcctgggagctccaagcacccctaccaagtaggatagtggggtgaccctctggaatcattctgcagggggatctaccactagtgtgcagactggggattttactgatgaggaaactgaggcttagatcactcatctaataag

SEQ ID NO: 26719 - DNA, 239 bp, Homo sapiens
  source 1..239: mol_type = other DNA
cagcactttgggaggccaaggcgggtagatcacctgaggtcaggagttcaagaccagcctgggcgccattgcactccagcctggagcggagccaccaccactgggggtcccccccacacagtgtgtcactcagttaaacctgaggggccttactggcaggaaggtaaacaccccaacagatggggggaggggacatcccttccctctcactcaaaggcgtgagataaaaatcctttcta

SEQ ID NO: 26720 - DNA, 513 bp, Homo sapiens
  source 1..513: mol_type = other DNA
ggcggagcctggattcagatgcggagccagactgtctcacccttattgggtccgagggctgtagccacagcctgctgctcctgagcccatcgtacccagcctctgcccagcacagggacagaggcctgccctggccagtggcccatgcgggcagtcccaggaggcaacccgcagcggcactgcgccgtccggtccgcagtccgcagatcccaggcgcttgctgctctctggcggccaaagccgggatcccgaagacccgggactcacgccttcacgcccaagggcaccagcgagtgaccgagagactcggggcgtgggtggctgctgcgggacccgagcgcgcgccagcgccgcagccccccggaccccgacgagcgaagggtcccttctaccctggagtgtggcgcccgtctctcggcccgggtcgccctcctcggtcccgccccccgcgccgagttgggagcgccgcagtggccgctgcctgcaccgcccggccccggagccgccgctttg

SEQ ID NO: 26721 - DNA, 326 bp, Homo sapiens
  source 1..326: mol_type = other DNA
gagactagattcactttaaaagtgcccaatttgggtaatagcacctcaaaatttaagagtttatgtgaaaattcataaatattaatctcaatccaggttaagcaaaattttttgctctcctctttagaaatttctggttgccaaagttccagaaatttatgtaacggggagctggagctttgggccgaatttccaattaaagatcgatggcacccgcaggcggtatcaataaacctcggccggccgcccgccgggggcacagagtgtgcgccgggccgcgcggcaattggtccccgcgccgacctccgcccgcgagcgccgccgct

SEQ ID NO: 26722 - DNA, 345 bp, Homo sapiens
  source 1..345: mol_type = other DNA
tgcaaaagaattctgcagtactaactgtaacagggagagtcttggagactcagcccgcaccacctgtccaggggactggctgcgcaggtttgagctgaacctccccacagaggctgtcagcaaagactgctttgctgtccaaggccggcctttaggtacaggtccagcgaggcttgttgaagccacatctgtcatagatattgatgggaaaagcattttccttcgaagccttgctgaacttcatcaagattttcacgtggtttccttagtaaatgatgagaaggtccatccttctcaggatgaaggagggctgccttatttggagacctgcaggaatgccagctg

SEQ ID NO: 26723 - DNA, 290 bp, Homo sapiens
  source 1..290: mol_type = other DNA
caagctggtcttgaactcctgcatgcatgctgggattacaggtgtgaaccatggaacctgacctatatttaaaaaataaaacaaaaaatgtttattttacttctgcaattgcctggcctggcgtgcagcaccactggggagctgaccacagcatggcttgctggctgctggcagctggcccttggggcccagacccatggacactagcttccctgaagctcgagaaggaggatcttggtggagtccatgaggcctcaggaccaggtcacgtgactctattcaggggtcac

SEQ ID NO: 26724 - DNA, 415 bp, Homo sapiens
  source 1..415: mol_type = other DNA
taacattgtttctaagggagacacattccaagatccaaacaatgaatttagtaaagaatgcttggcttccagtgcagccgggctgctcaagggcctctgtgtactgggggcgccaggagtggcctccttggcattgctgtcacgtctggccggcccgccaagtcgaaggggcctggccccctcaaaacctctgcctggggaatccaggccgctggaggtggccgagtggctgtcacagctccgggtgaaccgaggagcttgggccaagtctccatccctcttggagagggcagcagcaaggaggtgaggggagccagctcatcctccccaaccccacccccagcccggaagaatcgctggcggcgggagcctggggaggggagaagctccgcccctagaggggagggagcgagga

SEQ ID NO: 26725 - DNA, 487 bp, Homo sapiens
  source 1..487: mol_type = other DNA
gaactttaacttatttaatttatagtgtttataaagaaagaaccagaagatatatacatattttttctacaaataaagctgattaacattgtttctaagggagacacattccaagatccaaacaatgaatttagtaaagaatgcttggcttccagtgcagccgggctgctcaagggcctctgtgtactgggggcgccaggagtggcctccttggcattgctgtcacgtctggccggcccgccaagtcgaaggggcctggccccctcaaaacctctgcctggggaatccaggccgctggaggtggccgagtggctgtcacagctccgggtgaaccgaggagcttgggccaagtctccatccctcttggagagggcagcagcaaggaggtgaggggagccagctcatcctccccaaccccacccccagcccggaagaatcgctggcggcgggagcctggggaggggagaagctccgcccctagagggga

SEQ ID NO: 26726 - DNA, 343 bp, Homo sapiens
  source 1..343: mol_type = other DNA
gtttctgaggaaccatcttctaagatggcagagggtgcccactgcccaggttcctggtaggccctggcttggagtcaggactgggaagggcaaagtctggccacaggtgtgacttctttctcctgatgtcagactgtcagactcagtaggaatcagtggagacctgcctgctggatgccacgttgaactggaccccagcagtcagctctccaatgtgacagttacttgttggagatctgaaattttttgagctttgaaaacaggaaacttaccaggtagtaaaattaatctccctttttttccttcttagtgtcagcagctgcttggtttctacaatagacta

SEQ ID NO: 26727 - DNA, 472 bp, Homo sapiens
  source 1..472: mol_type = other DNA
aggtgttaagaaagtactaattattagaacatttaaaaaattgtattcagatttcacgccagacctccagccttagcaactctgggggtggggcccagcgtcctcaaagtgaggctgcccagctctaagaccgagggccagggatttacacttggcctcacccgggggcatcacctggggacaatttagaagtgcagacttttgggctgcaccccaggtaagaaggacttcttctccagttaggttaaaaaaactggctacccggtgaaattgttttaaaacatccaaccgaccaggacactcagggaccagcgctctgcttgcccgggatgttccggggagcgctgccgggtgccagggagcagcccctccccggggggaggcccgagggcaggggtcgggggcggggagggaggtgggccccagaccggcgcgggggcgggcggctccgctgcaccccgcccccggcccg

SEQ ID NO: 26728 - DNA, 161 bp, Homo sapiens
  source 1..161: mol_type = other DNA
gtaggtggatcagctcactgagacctccgttgggaggcacacttggccaggtggccttgaactcctgacctcaggtgatgggcttagactcctgggctaattatatgtatcaacctgtctgggctaagagatgcccagatagctggtaaaacattatttct

SEQ ID NO: 26729 - DNA, 561 bp, Homo sapiens
  source 1..561: mol_type = other DNA
ttatcagaacttactaacattagtatcactaaagtaggtatatttggctttagaaaaaacatttttaaaaactgctttatcataatccttttttccaacttggactgagttctagttactggacatgagaattaaccatgtccagtagtaagttcattttcgatatatttccatctagattggtgatggttctagatctatttgtacttgtgtataaatacttcaataaacctaactttttaaaaagcttcatttgccgcaaaatgtcccttgtgggcaggctggacaagccctaaagataagcacaagtttgtgcgcgcccaggactcggcttctgcctccctgggaagccacggcggtctctagcctggcccctgtactgaggaggggagaaaccacgtagccggcttgccctggacctgactgtgacccaggtaggtgaggaccctaggtgctcgcccgccacagcggaggtagccggcggcaggcacaggtcgcggctgcgcattcgggccgtgcagccccggagtcccggtgcctcctgcaggcgcaacttccgac

SEQ ID NO: 26730 - DNA, 379 bp, Homo sapiens
  source 1..379: mol_type = other DNA
cctggtcaacatggtgaaaccccatttccaagatcatgccactgcactccagcaggttatcagaacttactaacattagtatcactaaagtaggtatatttggctttagaaaaaacatttttaaaaactgctttatcataatccttttttccaacttggactgagttctagttactggacatgagaattaaccatgtccagtagtaagttcattttcgatatatttccatctagattggtgatggttctagatctatttgtacttgtgtataaatacttcaataaacctaactttttaaaaagcttcatttgccgcaaaatgtcccttgtgggcaggctggacaagccctaaagataagcacaagtttgtgcgcgccca

SEQ ID NO: 26731 - DNA, 595 bp, Homo sapiens
  source 1..595: mol_type = other DNA
tgaggcaggagactcacttgtgtactccagcctggatgaaagaaaaaatattaaatgtgtacgctctttgttacttcaaggagttgatattttgtagttaaacaacaggagattgataaattatgttatatacatgtgatgctatgttttaatacgtggcataaaattaaatgtactttattaagtacttttccaagtgtttacggaatgagtgcatttttgaaaaaaaaaaagtgtattcgaacttttaaaaaagctttaaaagctttatacaatgaacgattgctaagtttaacagaacaattcacctctcaattctgtaattgaaaaataaagtgcatatttgcagcagctgtcttcaggctgcaaggctggaaactttctacccacgtagtgggaggccggggcttgacgagccgggaccgggacccgatctccacaaaagaggcggggagacctgcgcgacgctgccccgccctgcgcccgcttcctccaatgtatgctctagggggcgggcctcgcggggtcttccccgcaaggccgtgggctggacagcgtggtgacgtcgcaacgcggcgcagggtgagagcgcgcg

SEQ ID NO: 26732 - DNA, 622 bp, Homo sapiens
  source 1..622: mol_type = other DNA
ccctggaacagtgttcctggcactgcggaaaattgattttcccgccaccacccgctttgtgactttggcgcgaaaaagcaggttcgcgcagcagccagcgcgggcttttccgaaccgcgcgctcagctgggccccaccccactgcgtggcaggccaatgagaaggcgcggatggcccacgccagccaatgagggctaggctcgaaagcgctcccgccaagcaccggaggtgcaggcgggccggggccggcttcccggggccgcgaggctcacctggtgaggttcacgcccatggcctaggtgtcgaagccctcagaccgcagggtgagagtccatgctctttgatgaggtccttgagtgcctccaacaccttcttgaggatggagccctggaccaggcgcgcctcgaacatggtggcggagtggcaacaacgccgcacgtcgcgacttaatgccgccgcgtccgcaagcgcgcgctctcaccctgcgccgcgttgcgacgtcaccacgctgtccagcccacggccttgcggggaagaccccgcgaggcccgccccctagagcatacattggaggaagcgggcgcagggcggggcagcgtcgcgcaggtctccccgcctcttt

SEQ ID NO: 26733 - DNA, 657 bp, Homo sapiens
  source 1..657: mol_type = other DNA
ttgcgctcagaggagccgcctccctaagaaggctcttcacggagttgggggagaggggagtccccgcagccagcccagcgaggcaggaggccgtgcgccactcccgagaagctccttcctgcgccccgggggagccacttctgagccgggaccccgacccgccgacccctgacgcgcgcgccgcgaaggccgggcacccgagggcccttcgcgctacccgggcccggggccgccgtcggctgcgacaaagggtctgcgcgcgtcccccgcaggcctcccggatgcgccgctgtcccggccgcgcccaccccgacgctgccgctaccttgtcctcgggtggcgcaaccggctaaaatcggcccgacgtcgccgcgagctagcagcgaagccgccggagcaggcagctcggcgcgggcacgcgcggactcccacggccggccccgccccgcccgggaggcgcgcggctctgagcggctcacagttcccttagcagcccagcgctgtgccgtcaccgccctttcacccgggccgagcggggtcagccttccctagccccgacccgagagctccctctcccgggagcagggctcggagcgagtgcgcacgcgcagcgccatggcgcacaatgggagctcccgcttaaccgcggatggccgg

SEQ ID NO: 26734 - DNA, 466 bp, Homo sapiens
  source 1..466: mol_type = other DNA
atgtgtcacagcacttctgtcccaaaaaaggtctttccgatcacctgaggtcaggagttccaccttggaattgtttgcgcccgggaggcagaggttgcagtgagtcgagatcatgccactgcactccagcctgggatcttaactgtaaaattcaaatcatacccacttccatgtgtggattaaacgagataagccaactaaagcgattactcagctcagtgcctagtatacaattagtgcttaacaagtactagcgaccgcttggcaaagcaaagcagactgaagcgtgggtttcatttctcatcatgtgataagtgataaaatacttgcgtaagggaagagctctggcccaggtcaggctagagcctccgggtggcgcttctcgccctcagtaaccggttacctccagaaccagggcgccagctccggccatccgcggttaagcgggagctcccattgtgcgcca

SEQ ID NO: 26735 - DNA, 556 bp, Homo sapiens
  source 1..556: mol_type = other DNA
gatcacctgaggtcaggagttccaccttggaattgtttgcgcccgggaggcagaggttgcagtgagtcgagatcatgccactgcactccagcctgggatcttaactgtaaaattcaaatcatacccacttccatgtgtggattaaacgagataagccaactaaagcgattactcagctcagtgcctagtatacaattagtgcttaacaagtactagcgaccgcttggcaaagcaaagcagactgaagcgtgggtttcatttctcatcatgtgataagtgataaaatacttgcgtaagggaagagctctggcccaggtcaggctagagcctccgggtggcgcttctcgccctcagtaaccggttacctccagaaccagggcgccagctccggccatccgcggttaagcgggagctcccattgtgcgccatggcgctgcgcgtgcgcactcgctccgagccctgctcccgggagagggagctctcgggtcggggctagggaaggctgaccccgctcggcccgggtgaaagggcggtgacggcacagcgctgggctgct

SEQ ID NO: 26736 - DNA, 340 bp, Homo sapiens
  source 1..340: mol_type = other DNA
agcaggagctggttcccacagaacggggagcagcaggggaattcccctcccccatgtcataaatcactggcccagggtgactcagtctgtccatgtgaaagtgaacttggtgatttccaagtagaaggagtggtgtcctgctttggagagaagaccccgcagcatcctggtgccacaacgttgtgacagctgttccagaagccccaaagaggccctggcccctgggcaaagggcaaaggtgcacattctgctgtccttcctgacagctgggcagccacgggcctccttccaggatccaggacggctcactgaccctgaaagagcagaaggtctggaccct

SEQ ID NO: 26737 - DNA, 604 bp, Homo sapiens
  source 1..604: mol_type = other DNA
aaaatttagtctgagacaggttctctttgaccaaaacaagatttttgctttaacgaacccaaagactatttttaaagttctcgaattccagattctcttgaaaacacctgccaataatccgctggctggggtttaacgatggggaacacctttagaccttcactgggcaccagtcactccagactctccggacagatgggctgagggccgggctttccttgaaagggtcaccttctagtgggcgcggacgctggcactgggcctccggaagacaggactctcccctcctgcgcgcgcgacccgggtgcggtgccacgactggcggcagagggcggtgctcactgttcccaagcgcacggtagaaacccggctactgtgtggtccgattcagacgggatgcgaaggcgctgaaatccgtgcgagaggctgcccccgctgccggggactcgcgtcagcgcggccggagctacggtgcccgcgccctggacgcaccagcccgagagcacgcggtggggtgggggagctgggcatccacccttggcctggactaggaggcaggcggggaccccggggcggagtccagcgcggggcggggcgcacaggt

SEQ ID NO: 26738 - DNA, 397 bp, Homo sapiens
  source 1..397: mol_type = other DNA
gcgagccgggtgcgggggccgggcggccactcacgtggcgggctgagctgtcagggcggcccgggacgcggcgggcctggggcgtcggggccgaggcgcgggcggggtcctcgggccgggccgggccggccactgcccgcaggggaacggcggccgggcgttcgctgcgctaagaggtcctctggggacatcccctgccccacagcggcccccggtgtataattcagttattccaagaaactaaagtgcctttcctaggaaaaggttccaggaatagtcatgatcttcagactgccttgctgaggtaggagagagagcctcaatcactagaggattcttccaccttaaggcagctgttagtctgatgtagttaactaagaaataaatacaaggtatc

SEQ ID NO: 26739 - DNA, 476 bp, Homo sapiens
  source 1..476: mol_type = other DNA
tttttagaaaataaaagagtcagctttcaaaaaagttccttcaaactttaatttgtaaactctccagcttaggtgacttaatagttttcaactaatgatttgagaaagaaagtttctagaaaacatcagtactggtaatttcccccgttttcaaatggggaaaaaaaatacaactctgaattgtagctccaggatccatggagtgcaatggtgcgatctcagctcactgcagagccaccgcgcccggcccacgtgggtctctcccgtgcgggcgccggggtcggctgagaagggcagcggggacacgggggatgcccggccgccctcggccgcgtacgtcagccctttccaggaacgcgcgggcccgcaccccccgcacgcggctgccgattggctgggacggcgccgggcgtgacgtcagggcccgccccaccgccctccggccccgccccgcggggtggcctggcagtttggtg

SEQ ID NO: 26740 - DNA, 269 bp, Homo sapiens
  source 1..269: mol_type = other DNA
gtagagacaaggtctccactgtgttgcccaggtggtcccaaagcagtgggattacaggggcatgccaccaagacattgaattttatttatgagacattttttttaaaaggtgttgcccaggctggactgcagtggcatgcctcgctaattaaaaaaaaattttttttgtagagacagtgtctgccaacatttaaatttttgaatattttttcttttatcgacaagcctcctcaggaaattgcccaaaatagccacatgtggcaagcctc

SEQ ID NO: 26741 - DNA, 321 bp, Homo sapiens
  source 1..321: mol_type = other DNA
gggaacccacatcaaaaatatcctggaagatgctttcgtctttttctcacacatcataacaaaaatactttactgtctcaatttgaaagcaagagaggatccacccctgagactaaggctgtgaaaggaactggttaaatacattctattgtatccattcaatgtaatacatcattcaaaagaagaacctaaattatagttttaacttttaaatcctcagctcaaacacacggttttagatttgatgaggcactcgaagcgggacctcccgcctgcacaccaggcgactggactggcgtaaatttccgcccatttgcgtcg

SEQ ID NO: 26742 - DNA, 329 bp, Homo sapiens
  source 1..329: mol_type = other DNA
ccacccctgagactaaggctgtgaaaggaactggttaaatacattctattgtatccattcaatgtaatacatcattcaaaagaagaacctaaattatagttttaacttttaaatcctcagctcaaacacacggttttagatttgatgaggcactcgaagcgggacctcccgcctgcacaccaggcgactggactggcgtaaatttccgcccatttgcgtcgccgcctgggggtgctgcttcgtgacgtcagggctgagctagggggcgcccgctcctggctgcccgctcctcccggccctgcggcccccgcctgccctttaaaagagcg

SEQ ID NO: 26743 - DNA, 150 bp, Homo sapiens
  source 1..150: mol_type = other DNA
agcaccacgaagtcgccgtcgcggatgcggtggtctccgggatgctgtggttgtgggcccggctgctcccctgagccctccatgacgctcagccggtcgccgtgctccacggcgtcccggacctcaagaccgcttccggaagcctctcgg

SEQ ID NO: 26744 - DNA, 386 bp, Homo sapiens
  source 1..386: mol_type = other DNA
gattcatatcctaagtatacaagtaaataaagatatacctgtacgctgcagtgcaacaaatccttacttaaaaggggtttagttaataaaacaagatagtaactaaaagaaacagttgggtacctgtgcttcttcatgggccggctcatacgcgcagatctgtccggccggattctccctccctccctcccgtagagaagcaccacggggctaagagtctccgggatcttagctcctcaggcgactcctgccaagtccaacggctcgggaaactcagtttccccaccgcagcttccagaaggtgtctggcctcaagcgaaaatcaggtcttcccctaaattcttttttggcgcttccgagaggcttccggaagcggtcttgaggtc

SEQ ID NO: 26745 - DNA, 309 bp, Homo sapiens
  source 1..309: mol_type = other DNA
agcaccacgaagtcgccgtcgcggatgcggtggtctccgggatgctgtggttgtgggcccggctgctcccctgagccctccatgacgctcagccggtcgccgtgctccacggcgtcccggacctcaagaccgcttccggaagcctctcggaagcgccaaaaaagaatttaggggaagacctgattttcgcttgaggccagacaccttctggaagctgcggtggggaaactgagtttcccgagccgttggacttggcaggagtcgcctgaggagctaagatcccggagactcttagccccgtggtgcttc

SEQ ID NO: 26746 - DNA, 723 bp, Homo sapiens
  source 1..723: mol_type = other DNA
actttaaactcaactgtaaggtaattcagttcaacactgaattcaacaagaaaaaattctgtaacattgcaaatattgatgtatcaatatgtttagtatactaatctgaatatattaatcagctaattaatggtgagctgttcataaatattataggcaagtttcttaatctctaaacctaagtttccttatctgtaaaagtaattagcctggttatatagtataattgaaacttttgtactagcaatgtaaaaatttaaaataaaaactatttaaaaagacaattctcataggtaaacattgattctggataatatagtattactgttttcagcaaaacaatcagccattgctattactaacatttactaatgcttatatttttagcatatgcatctttattcaatgctcaaagaggagagaattacagagccaatatttattaatcatttcttctgcactagtagggcgccgcacgcaccttggagggggcccttctgccggccacccgcctcagagggtttcaggccagggcctgaggtggctccggccccctcgcggctacgtcggctgcgcgcccacccccgggccttggctcccggctgcgggccaggagaagagagcgccgctgcgcgcgcctccgctgtgccaggggcgccgggaagcccgacgacgacggtgtcgtaaaagcgtcgcgaaggcgtccgcccttggcggcttcct

SEQ ID NO: 26747 - DNA, 372 bp, Homo sapiens
  source 1..372: mol_type = other DNA
aaactcatcagatcttgtgagacttattcactggagaacagcacacaggaattccaataggtgtaagataaaaatgaatatttttatttaaaaactaaaaaaaaaaaaaaaaaagttcgggagacctggggctggtagtcaggacccatcctcccaggcactgagcgggggcccagagccaccaaacaaactgtcctcggggcctcttgggtctggtttgagcctgctctgccccagacccttccctcctttgggagaattggcttccagccatcccagaaaatgggagccacctggcaggaaggatcttctccagcctgggaaaggtgccaggcctggaaagggccaggggcaggccctagtatctcagtc

SEQ ID NO: 26748 - DNA, 299 bp, Homo sapiens
  source 1..299: mol_type = other DNA
tggtataaggatacatttctataagagaaataatcttgattaaacaaagtcagatgctttctcagaaatatctaaatgtaaatgatggtaagatttagtccctatttattacgattctcctgcctcagcctctggagtagctggctcctgacctcaggtgattaattattttatctttaaatttttttatttgatttaattttttaaatgttttggatacatgtgcagaacatgcaggtgtgttatatacgtatacatgtaccatgggtttccattttcgcacacaatgaatcccaaga

SEQ ID NO: 26749 - DNA, 498 bp, Homo sapiens
  source 1..498: mol_type = other DNA
ataattcctgaatatggtaatgtttaagcgaaaacagattcaacttctaaattttataacttctttattaaaatttaagtgttcacaagccttttaatgcaaagtactatattgcatgaaatccctccgtggaagagcacgcaacagatgaggaaactgtcatttccatttggagaggttgtgtaaactgcccaggtcacccacccttcctccaggtgtggcccagacttccgcatgcagcctgcccttgggtctcctggagtctcccctggtcgggagcctcagccttctggagactccacaagtgctccggggctctttctgaggtctcctgggcctggacgcaccccgggggggctagtccccggcgggcctgggggaagtgcgccccgggttctcgccgccttctctccgccgcgcctcctctccgcgggagcgagacctagcaggcccggggctgggcgtgccctcgcctgccacgctgcgcgctgccctcag

SEQ ID NO: 26750 - DNA, 548 bp, Homo sapiens
  source 1..548: mol_type = other DNA
agccaagatcgtgccactgcgactccatctcaaaaaaatatatgtgtgtgtgtgtgtgtgtgtgtgtgtgtgtgtgtgtttgtgcgcgcgcgcgcgcgcgcactgaccacagtccccttcccatccaaacgctaccaagtgaagacattctgtttcaagtttttaatgattttatttcaattataatatcctatatttgccaacaatgttcaactaacctttttaaattaaatgtactttcaaacccataataattcctgaatatggtaatgtttaagcgaaaacagattcaacttctaaattttataacttctttattaaaatttaagtgttcacaagccttttaatgcaaagtactatattgcatgaaatccctccgtggaagagcacgcaacagatgaggaaactgtcatttccatttggagaggttgtgtaaactgcccaggtcacccacccttcctccaggtgtggcccagacttccgcatgcagcctgcccttgggtctcctggagtctcccctggtcgggagcctcagccttctggagact

SEQ ID NO: 26751 - DNA, 493 bp, Homo sapiens
  source 1..493: mol_type = other DNA
aaggtcaagagatcaagaccatcgtcccagctagccaagatcgtgccactgcgactccatctcaaaaaaatatatgtgtgtgtgtgtgtgtgtgtgtgtgtgtgtgtgtgtttgtgcgcgcgcgcgcgcgcgcactgaccacagtccccttcccatccaaacgctaccaagtgaagacattctgtttcaagtttttaatgattttatttcaattataatatcctatatttgccaacaatgttcaactaacctttttaaattaaatgtactttcaaacccataataattcctgaatatggtaatgtttaagcgaaaacagattcaacttctaaattttataacttctttattaaaatttaagtgttcacaagccttttaatgcaaagtactatattgcatgaaatccctccgtggaagagcacgcaacagatgaggaaactgtcatttccatttggagaggttgtgtaaactgcccaggtcacccacccttcct

SEQ ID NO: 26752 - DNA, 636 bp, Homo sapiens
  source 1..636: mol_type = other DNA
cctgcctctgagctgggtgagataaatatcacaaggcacaaagtgattgtacatctacgttacacacatgtcacgtaaagcaggatgacatccatgtcacatattcggttgcatatattctcatacatgaatatatttatagaaatatatgcacatatttttgtatattggatatatttatgtaactataaatttacatgcgtatggatatgaaaataaatgcatacacatttatgtaaaaaaatttgtacacatgcatttacatatgtaaatacatacatctctatgtattaatgtttaaaaacactcctattccggggaaacagaagcgtgtttgttttgttttgttttttgaaatcgtatattaccgaaaaacttcaaactgtgaccccgcgagggtccggcgcgccagctgatctctcctttgagagcagggagtggaggcgcgagcgccccccttggcggccgcgcgcccccgccctccgccccaccccgccgcggctgcccgggcgcgccgtccacacccctgcgcgcagctcccgcccgctcggggatccccggcgagccgcgccgcgaagggggaggtgttcggccgcggccgggagggagccggcaggcggcgtcccctttaaaagc

SEQ ID NO: 26753 - DNA, 543 bp, Homo sapiens
  source 1..543: mol_type = other DNA
aggcggagctcagtctgtaaagcttgctcaccggctgctcacctcctgctgtgcagcttggttcctaacaggccacggaccagtaccagaggactaaagttaataaaattgtatcatattaggaatttttgttaaataagttgattttagctgttcttgtcatacacacaaaaaagtaattacgggtgagatgatacatatattatattggcctccctatatgtatctcataatatcatgttgtaaacctcaaatatacagaacaatttggccttaatgttccatgttaaagccaaatgtctatgtttgtaatcagctaaattttatattgtgcagaagccctgaatttcacggatgcccatcttgtttacatgatttgtgcatgatccaaatagtggtttcatacaggtattcctcctttggcagatagcctacaaatgaaatttcaaaggctaagcatataatgtttgctcacttgatgtaagcaacagagaactaaatctgaactttggcaaaagtctattaataattgacaaataacag

SEQ ID NO: 26754 - DNA, 428 bp, Homo sapiens
  source 1..428: mol_type = other DNA
ataagggctaggtccacatagtttttagctaatactaattaatgctaaaattatttaagccgagggctcaaagcaccctttgagaaagcttcctcatcctttaaaaagaaatttggaaatcacttaaggctaccctcattttagatctgacaaaactgtagtcaagagaaatgtgaggtccatttttttaagagtttctatgaaattaacattttttgtaaaaaaaatgcaattgcataggctagtttcatcaatatcctaaattagtgatgcttcattaaacatacgtgttggattttaaaattcgcgccaaccctgcccttattggagcctgggcagcagcggtgcatgttctaacttaggcaacgtgctgaggtaaccgacaccccgggcaacggcaagtggaggcgggagggggcgtggcctcg

SEQ ID NO: 26755 - DNA, 327 bp, Homo sapiens
  source 1..327: mol_type = other DNA
gatttatacatgaataatatgcaacattctatggcaatttttaagggtgcatgaagaactttcacagctgtctgttggaaaaaaaccactttatgtgctttttacattaaagagcaattacatataaagtgatctccaaagatacagagaatatttccagacacattaaagcatatgaaactttccaaattttcaacacaagttcaactgtgttttatattaacactttaatgtgcgaacagcacaaataactgctcaggtcattgtttttcacttaatggacattgtctgtccatagtgggcagttctgctgaacttccacagcag

SEQ ID NO: 26756 - DNA, 531 bp, Homo sapiens
  source 1..531: mol_type = other DNA
ctctctctccttaataaaaaaaaaaaaagagttccagttccacatcctttcaagcatttggtattaccagtctttaaaattctttcttgaattgagaaatgtttgtggaaggagtgaagacaaacattcctggacctatgttcctatgagcaagtttctattaatgagaggagcgggagagggcaccctctttcttcctcggaaaataaaacctttgctttctttaggatgggctttctgtctcgaaagcagatcagcgcgctgcaaactctcaggcgcggccagtctgctgataaatgataatccagtttgtggctggcgctggagagctccagctagagccaaaagccaggggtcccagccagttgggatccaaagacgctccggagctcgagcgtaaggctcctggggacccctagcacctctgcaaccagggcacggggcatgctcagagcgaatgcgggctcgggagccaggaggtgccgctgcgtccccgcttcctggcgcctgacccagcgtgcaaagttgggc

SEQ ID NO: 26757 - DNA, 637 bp, Homo sapiens
  source 1..637: mol_type = other DNA
attgttttagggattaaatgaataaaaagcgtttagaacactgcattgggtttataacggctttgggggccccgttctggccagtcctgagcccctccacacggcccacggcgggctgcgggtctcccatccgaggagggtgccccctgggttctgcgcccagcgccatcccgtgcgcccccgacccttgggcatggggcacatgccgcggggagccgccagggagaccccagaggagcgcgccgcgggccggcttccccggatgccccactgcctcggctgctcggcccccggctcgcgaggctgcgcccccgacccagtcggcgcccactcctcgccctgcgggctcgcggcaactgggcggccggcccggcccctgcccacccccagcccagcccggcgcgccgcactgggcatgctccgtagcctgggcaggttggggctgcgaggcgacagctcgggctctggagccggggctggccgctgaggggcggcggggcccggagcgggggacgcgcagggcccggcggtgggcgggcgggtcggcgctgccccgtgggctcgctggggagccacggcggagacccccgccctcaactgaggtaaggaccgcgcggcgcgggtggcgccgcgccgg

SEQ ID NO: 26758 - DNA, 193 bp, Homo sapiens
  source 1..193: mol_type = other DNA
agggagcgattgaaggctccttgatttataatggagagtctcgttattctactagccttgatgctcaaaaaggctatccaaaaatactatgtctgaaggggccgccttcctttttcataagaaggcaatttggtagctgtccaaaaacccagctacttggggtgacagagtgagactctgtctcaagcccctt

SEQ ID NO: 26759 - DNA, 677 bp, Homo sapiens
  source 1..677: mol_type = other DNA
atatagatactttgtggcagatatgtcagaatgtgattatacttaaaacagcattctataaatttgaagaatgtgaattaatgatagagatttcagatttcagattattatttgatattgaatatagatttttatggaagtcaaaatatggagtaaaaatattagataatctcacagagttaaagcatgtgatttttgtattttaattctaactgaccatgtgacatttgggaaggtcatttaatttatttgaggtatgtaaaaccatccttgcctaccctctaagattggggagaatcaaattagataatgcaggtgaaatactttgcaattttccctttaatatgacattgttttataacattatattactgatgcaacatttatttgcattatgaaatatcttctaaggaataaaatatttggacatcactacaattgatgaggactgcatgtgtatttttgaaagctgtattctgatttacagagcaaaaataaaaaatatgtaaatacaggaattagcccagtagtatttacataactatgtgacattacttagggcataattctaaaatttctgtcctaggccccagagttcagagtcctcatgcacccgggagcaactcgttcggggtaatttaactttaaacccatgagctcattgaggaaactgttgc

SEQ ID NO: 26760 - DNA, 477 bp, Homo sapiens
  source 1..477: mol_type = other DNA
tgcctaccctctaagattggggagaatcaaattagataatgcaggtgaaatactttgcaattttccctttaatatgacattgttttataacattatattactgatgcaacatttatttgcattatgaaatatcttctaaggaataaaatatttggacatcactacaattgatgaggactgcatgtgtatttttgaaagctgtattctgatttacagagcaaaaataaaaaatatgtaaatacaggaattagcccagtagtatttacataactatgtgacattacttagggcataattctaaaatttctgtcctaggccccagagttcagagtcctcatgcacccgggagcaactcgttcggggtaatttaactttaaacccatgagctcattgaggaaactgttgccgttttcagaagacatgataaggtatctacaccacttaataactgtacctggtaaggagatttaataacag

SEQ ID NO: 26761 - DNA, 609 bp, Homo sapiens
  source 1..609: mol_type = other DNA
ataaatggtcataaatttaaaagattttttgatagtggttggctaataaagtcaaagtttaacaaacaaaagtgacctttatgcttgaagctaaatgagaatatcaaatcatttggttggaaaaacaggcttttcaatagaagaaacagataaaatgagttatctctatgaaaatgaagcttagaatcctcaaagcgtcatgaatctcaaagttagagaagaaggtgaagatctgttctgctccgaagcctaaaggattagaagacagttctattttattaggaagggtttttatagattgtaataaaacttgtcttcttataaattctacacttgaatcttttagaaaattatgatgaagaagactacactatctttcatttaaagacagagtctcactctattacaggcgagtagctgtgactataggcgcacacagctaatgtaaacatttttttttgtaacagatatttctttagagtagaattttagattataaatctctgtctcacactgtggtatccagaactgaataagtgaatggaaatatcactgatattcaaccacacacacattcttattaatggagctataatcataccatagact

SEQ ID NO: 26762 - DNA, 426 bp, Homo sapiens
  source 1..426: mol_type = other DNA
actggttcagacttgaccggggcttccagcaactggcttactagccagctagcaaaggagaagctgggtggtcacagcctaccaggtaaggctcagcaaccccaggctggaggagtctctgtgcagcagcagcagcatcacctgcgaggttgttaggcttgcagaatcagccaattgaatctgaatctgcattttaattcacaggcacatgaaagtttgagccaggtggtggcaaagaggccagcccactgttctcttgtgcaggagctgcccccgccgggggctccagctcccggctcctggctcctgcaccctgagtgtaccgctacagcctgcctcccgccggctgccacgaaaacccggagcagctgcgtacgctcatggacagtcctccgaggggcgaagccgggcagctgggcatgctca

SEQ ID NO: 26763 - DNA, 565 bp, Homo sapiens
  source 1..565: mol_type = other DNA
tctcatcacttagctctcactcataagtgagaacatgcatgcaaaagacataattttgttcctttatatggttgcatagtattccatggtgtatcttaacatttttaaacagtctctgaaggaattactgtttttaattggaagcaattacatactgcattaaaaagcatatatatatagacacacatatatatgttttacattcacaaaccatatttgcttccatttgtgtataaatattttttaagcatatatgcatcctagagtatggaaagaaaatttctgggaatttattgtgtaatttattgtatttttcatttaattgtactttgtaaactaaatatttattgtatattttacttcattttttaattgccatatgcagctttaattttataactaaattacgttctgaatcctcaagacagcagcattctgcgctccgccctggaacacccagcgcagctaccccatcccgcccaggccggccacctggcgtcgaagccaggcgcgaggggcggagggaggcggaggcggaggcggaggcgagcaccgccccaccgcg

SEQ ID NO: 26764 - DNA, 391 bp, Homo sapiens
  source 1..391: mol_type = other DNA
tggacggttccctcggggcgtctgtgcctccgtggggtacccctaatttttgccagagagcctggctctgacgtagttcgtgcgccagcctcgctgcccggctgaccacgtagcctggccatatatggagctggcgagggtggacggggatgcccctacgggaatatatacacatacacacaaattatacatatattatacatgtattataaaatatacacacacatacatatatacatacacacacatatacacatatgtacacacacgcaggtttgcaggccagcgcactgggaaccgagtcaagcgcgccgcagcccgggccccgcccccgcccccgccgtgccccgccgggcggcgctgctgacgtcaaaacggacggccatctttg

SEQ ID NO: 26765 - DNA, 404 bp, Homo sapiens
  source 1..404: mol_type = other DNA
cggtagatacagattttactgccatttcatttctggctataaggtatcaagagactatcgaaatttctagatacactgtgaactcctcagaattgctattattgccttaacaataatacctactctttataattttaggaatttctgatttctaaatatatgttcagatatagtattagatcacatttagtaagacataaattgatttagaagaatgtgacactcattctaaaagtgtttccttgtggtcagattactattattatttccatttcgcagatgaaataactgcttaaatgtaatcagtctgactccagagattaagctatgaagtgtcatcatccatatttttcatattggccaaataaggcatagagaatgtacatgtcttttttttttttttt

SEQ ID NO: 26766 - DNA, 525 bp, Homo sapiens
  source 1..525: mol_type = other DNA
aatgtgttgtgcagaattattcagctaaatatagactatacattgctatcttgtttttataattatttacaaacatgacttgatataaatgcacttctgttcaaacctaaagtttccaaaccacaattatagataaaaacataatattaaatcttcatgttggagaataaagatatttggtttaagactcagagacttgccaaaaaaaaaaaaagactcagagacctaattctctgttttatatcgtagcatttctcttttctagccatgttgttgtgccttacagaatcactgaaatacaagcactttttcttgtagaggggatttattgaagaataaaggaattttaagtcaaagttggtctacctttcttcctttttctaaaaaggcagcagagcattagaataaattattaaactgcagtctacaaactgcttgggaagtatttctctaaaatgttttttttattatttattaggtaaagaagcagctttgaatctgagcttcatatcgaaagaagagatg

SEQ ID NO: 26767 - DNA, 540 bp, Homo sapiens
  source 1..540: mol_type = other DNA
acattgagcaagatagtctgggactttcaaatcttcagaagagccaaaaggaaaagcctaaattggtaagttacctgttgtttttattgtgacccactggcaaaatactattctgcagttgtttctagaaaagtttgacacttgcctggcagtcaattgaatgcaaaaaaagtccaaatttatacaagattattttcttctattagtgttcttttttttttaacaatacaaaactaattgtattcatttcttaacatcaactattttagcttgaccataatttgttacttttgagagtcactgaaataaagaggatgaagttatataatttaggtctatagtcccttatccataattttgacagcaaaacttgatcttaactgacatgaggcaatttgcagtgcagtctgcagtttcagttacctgcagtcaaccctagtctgaaaatattaaatagaaaattccagaaataaacaattcataaattttaaattatgcacctttctgagtagcatgatgaaatcctgggatattctaaga

SEQ ID NO: 26768 - DNA, 362 bp, Homo sapiens
  source 1..362: mol_type = other DNA
gtcagaatatagaacctaaattcttactaaaattgtgactaaatgtaattttgcatgatcttgacctcaggcaatctgcctgcctagcctgtaattataatttttaaaaaatataatttaaaaaaaggctcttactctattgtggctcagagaacattaatatatttaaagaacactccatgcatgtgtgttttcaaagattcatatacaattgttgccaaaaagtcagtattttcccaaggctgactgctttttgtttattaacattgcaatgtattataatttaaaatgtttaacagtcagcatttgttagagtacagcagctaacattgagcaagatagtctgggactttcaaatcttc

SEQ ID NO: 26769 - DNA, 544 bp, Homo sapiens
  source 1..544: mol_type = other DNA
aacaaaaatggcgccggacgcaggctatttttaatcatggtaactgaccgagagaaaaaaaaacgcttttctgtggtgtgttttcttaacatttttcacggataaattttaataaaaatagccatgtttgaacataacttcctatatgttttttaatgttaaaagagaataaaagttttgtcgaaactccgcacttccctgtaagccctcaggaaggactgagggggagttacgggagagtaaaaatcctgattttccacgacaaatccaagcgctttgtaattggtcatgtcaggacagagagcagagcgcagtggactatttctttctttcattcaataaatcattgcaaaaggcagaagctgtgccattttgatatgttatttaaattttatgcgttcttttaaaatttcagtttcaacaatttgctggaatacgctgaatagttttttccggccgctgttggctggagcttcacggaaaacccggagaagcggagtgggggcggcccggcgtcgaccgcagagctgcgcgtgctccgtgc

SEQ ID NO: 26770 - DNA, 480 bp, Homo sapiens
  source 1..480: mol_type = other DNA
aattgttgaaactgaaattttaaaagaacgcataaaatttaaataacatatcaaaatggcacagcttctgccttttgcaatgatttattgaatgaaagaaagaaatagtccactgcgctctgctctctgtcctgacatgaccaattacaaagcgcttggatttgtcgtggaaaatcaggatttttactctcccgtaactccccctcagtccttcctgagggcttacagggaagtgcggagtttcgacaaaacttttattctcttttaacattaaaaaacatataggaagttatgttcaaacatggctatttttattaaaatttatccgtgaaaaatgttaagaaaacacaccacagaaaagcgtttttttttctctcggtcagttaccatgattaaaaatagcctgcgtccggcgccatttttgttcgctgccatcttaaatcctggctgtggccagcgaagagttcccaaacgcgcgcg

SEQ ID NO: 26771 - DNA, 838 bp, Homo sapiens
  source 1..838: mol_type = other DNA
cggcaagttccgcggctggcggtgctggggacacggtccctcccaggcccatctcttgccacccagagagctgctcggaggccgcctacaggtgcaatcccggcactgcggccggggcgtcgggccggggagggcgtccaagcccaccagcatctccgccggcccttcaagcctgaacagggccccggcgtgcccgccgccttctaccccgcgcctctgccccggcgcggtttggataggaagctgggagccctcccaggctccgcagactcggatttgggagggggtgggacgcggccgaggcttcccctcgaatctgcggcaagcctggctccaggaaagtttttcaaagttcccagcagcgtctgcccaggtcgcctccgcggggcgagcagacggcggcaagcgcgccagcctcgccgccgcctctgccgccagcagagcgctctgggcggctcgctcgcgggaagcgggccgaactcccggcgggcaggcaggccctcctcccggggcgaaagccgcagctgacgcaggcggttcggaaggcggaagctgccccgctccgaccgctcagtcagcgccgcggcgcctacacctggggccccgacgcgcgggcaaaggcgcacggcccggggcgcccgagggggcggtccccgctgggggcctccaggcgtccctgagcccttccctcctggcccgaagctcccgagggcgggggttggtgactaccccctccccagcaacgtgaaggggaggggcgtgcccagggtgagcacgccctctcatgaatattaataagcgcgcatgcgccctgcccggcgtgctgggtagaggtggc

SEQ ID NO: 26772 - DNA, 589 bp, Homo sapiens
  source 1..589: mol_type = other DNA
ccagtatataggatattctgaccatttcataatagtataagtactttaacaaaaatggggccataagaaaaccattgttttaaattctactttatttgtttcacatataatacattactttcacattaacaaatataaataaacatcattttacattcagtaaatgcagactattccactgattggactcattaataaacatttaaattattccttttgtttactagcatgggaacagcaaagagctaattgctgaatcaaacagtatatgtatgtatttttaaatttgatacatactgttgaacatattactaaactgaatttcaatccatatcaacagtagttatttttagtctttttaatcattgataatctgataagtaattttttgcattttttaattgaattgtttaactgaattaaatttactcttgaggcactttagcctcaggaaacagaatatctgattgtgagtcaaaagaccctcattctagaggaatctgaacagacaggtctttctgggtttagatcatactgtttttgtccatctcatgcttccatcatggacaactgatgaagcctccataaa

SEQ ID NO: 26773 - DNA, 587 bp, Homo sapiens
  source 1..587: mol_type = other DNA
ggacaaaaatcaaatggtagcttatattcttctaattcaaagcagagagaacctgtttgcattttaactaggtggaatccgaacatttagttgtggattatattctttaaaattaagacaagactaaatgtagccttaacagttaagttgaattttgagatatctgaaatatttttaacagcctttgaacattgatcatcagatttgtacgggtataatcttaatctaattaacagtattttgtgacctgagacacctgtcaaagaccatgaacacatggcctcagttctcttctttagctgacctcaaaagaggctaagaaaaagaaaaataacgtcctttgcctttaaagtgtaataaatgtgttttgctattaatagcccttttcaggattttgttttaagtatttgaaactaaatgctgctgggaaaaagattttagtagaaatatagatatctgtccctagacataatgtatgtctactgaagagaaatctcaaatatatttcatatgttattatcttgtttaaatatacagtagacaagaaaatgcaactgctgttcctttaatatcagaactatgttgat

SEQ ID NO: 26774 - DNA, 409 bp, Homo sapiens
  source 1..409: mol_type = other DNA
cttgggaagactcaacaggttgtaatgactctccagcaaatcatgtcaccatgccatttgatgatggtaggaaacttgaagattgtgtttcaggctgggcaagctacagcatgatttttgttctacctcagcagatattttatagatggaaaacataggttggttttgaatactgggtttttaaaaatcttttcaaatcatttgtaaattatggaaatgtatacatcacatgaaacttaccattttaatcatttttaagtgcacagtttagtttaagtacattcacaatgctattttatagcaaaaagaaatattaacttttgagcttggtttacaaccaaaaaccacaatactcagttacttagaagactctgtgagtgtgctgtgtgtgtgtgtctttaaaagactc

SEQ ID NO: 26775 - DNA, 432 bp, Homo sapiens
  source 1..432: mol_type = other DNA
ttcagctgggcaagctacagcatgatttttgttctacctcagcagatattttatagatggaaaacataggttggttttgaatactgggtttttaaaaatcttttcaaatcatttgtaaattatggaaatgtatacatcacatgaaacttaccattttaatcatttttaagtgcacagtttagtttaagtacattcacaatgctattttatagcaaaaagaaatattaacttttgagcttggtttacaaccaaaaaccacaatactcagttacttagaagactctgtgagtgtgctgtgtgtgtgtgtctttaaaagactcgggtaaccatttgttttagtttcaacgatctgacaaaaagataggctgttgctcttcttctggaaaagcctgattggtaagattcctttaagggctcagccccaaagagctt

SEQ ID NO: 26776 - DNA, 537 bp, Homo sapiens
  source 1..537: mol_type = other DNA
cccagctactcaggagtctgaggcaggagaatcgcttgccattgcactccagcctggttgacagagtgatgaaatgttaaaaagttatttaaaataacaataataaaccattatgtgttaatataattaagacattttaatgaagaataaatattttccaaaaacaaaaaaatgtggtaagaaaagtgttatcttttgcattaggtaaattcctctatagctggcttaaagaagccagttagattctccctttacattcagttcgacgtgatgttatcagtcatgggtcatcaaaacccatgactgggtttcggtcgcaaggctcagtgctctaaggattgaaagaaagtaactcttaagcgacacctagataaaatgatggtcagtttaatttcatttctcagccccaggtggagttagcgctgcacctctgaggccaggtgagccgctccgaagcggagggcggagtcagagccgcttgtgggaggctgcttccgaccacgtggtaccccgaggggaatgtcagccttcctcacc

SEQ ID NO: 26777 - DNA, 389 bp, Homo sapiens
  source 1..389: mol_type = other DNA
aatcaactcaggtttagctaagaaagtttcctttttaaattcgatcatccttcaaaagtaataaaaagtttaaaaataaaaagtaaatttgagtctccagataatatacatactagaacatatacatatgtgtgtataaattaatattgttcccttgtgaaaagtctccaggaattttgcaaattaaaagggcaatatttcttatttaaaaatcaagtccttttaattacactaactaggaaaaaaatcgatgtaccacctcaaagtactgcatgtattgtaaatgtttagaagcactcattatatgtcagataatccgagagaggggaaggcgaccggacctcactcccgacacgcttcggagaacacagggctggcccctaggggtg

SEQ ID NO: 26778 - DNA, 365 bp, Homo sapiens
  source 1..365: mol_type = other DNA
ataatatacatactagaacatatacatatgtgtgtataaattaatattgttcccttgtgaaaagtctccaggaattttgcaaattaaaagggcaatatttcttatttaaaaatcaagtccttttaattacactaactaggaaaaaaatcgatgtaccacctcaaagtactgcatgtattgtaaatgtttagaagcactcattatatgtcagataatccgagagaggggaaggcgaccggacctcactcccgacacgcttcggagaacacagggctggcccctaggggtggggctcacgcgtgacgcctacttgcacgttccctcgagaagatctttggagtagacacaaaagccgcgctggcgca

SEQ ID NO: 26779 - DNA, 555 bp, Homo sapiens
  source 1..555: mol_type = other DNA
agcgagactctgtcctcttgagctcaggagttcaaagtctcataactaagttagtttttaactcccttagcagattgctaactacgtgattacagcatttagtagatgctcagaagcacttataaaattaaatagtagttaacatacatgtaatgctatactttgtaaaatacattcccaaaacctgtggagtaggtcattcaaatgtttttattattctaaatttatagatatttaaaattctgaagaacagagtttagattctccaaaggactggctgtttgtgcatactattaaacagccagatgaaaaattaaaaattcaatcaatcatccaaatatttttaaatgtaatatacatatgtttgctttcatatagaacaaacagccaggtgattgattgagctatttgcttttgttttggcagtatgattattatataaactctaatagtgacaatcagttttttatagattttctaattttactggattcttccatttatttactatagtcagtcttatttatatcatttatcagcccataaaatgtagta

SEQ ID NO: 26780 - DNA, 337 bp, Homo sapiens
  source 1..337: mol_type = other DNA
taaacaaatttggggggagggtaccaaacttctaaattataggtcacgattttcagaaccttaacattaagcaattggtctaaacttcaccaaattccaatgaaatttgtaattttcactacaattcgtgttgacggccagcggtaagcgcggtccacctccctctcctaggcgtcggcttcacgccgcgcccacgtctcgaggactccagctccctagcgtcgtcggcgtcgagcccgagcctgcgcctgcgcgtgcgccctggggcccaagttggggcgcgccgtggctagtgcagccaatgggaggcggcgctgcctagcggctggtaggcggt

SEQ ID NO: 26781 - DNA, 575 bp, Homo sapiens
  source 1..575: mol_type = other DNA
agcggcagctgcagcctgagcgcccgccgacgggcacctgtccgcgggacacccaggccggcagtgcccaagtcccagctgcggtgcagaggaacttgtgccgcgcccggggctgccgcctgggggtccccgccgcaagcgaggcgaacgcagcaccgcctcgggagaaggtgacgcgtgcgcccacacgtgcgcgagctgcaggtgcccaggggcggcgcgtgcacgccggagtgcgcgcgagtgtgcgcgtgtgtacacacggacaccggagggaggcggcaccggccgggagggcgcgaggcgggagctcgggcggagggcgccgcggcacacacagcctgacccccgcccaagttccccaggaaagaggctctgcgtcctgcgctgctcgccgctcgccgcggctccggctcccacccgcctcagccccgcggacgccaccgcctaccagccgctaggcagcgccgcctcccattggctgcactagccacggcgcgccccaacttgggccccagggcgcacgcgcaggcgcaggctcgggctcgacgccgacgacgctagggagctggagt

SEQ ID NO: 26782 - DNA, 558 bp, Homo sapiens
  source 1..558: mol_type = other DNA
attttaaataatatatacataaaacatactttcattttctaaaacatagagaacagaccatttaataccatttaaaaaaatcttttggcatataactaaatgaatcagtgacacgtgtatatatatacatatattggagatctggagtgcaatggtgcaatcttggctcactgcaacctctgcctcaaagtgccggaattagagggatgtatatatttgaatctgctgtttattcatatgttgaataaacattcacagtacatcttccacaattataacattattttagctagtgaataataaaactaatttgattttggttaacttcttttcaatacagatggtttaaaaataagacaaagcctgtctttttctattgtgatcttaaaaatatctttctaacatgctttttaaaaaaaatacataagtatgctaccactgccttgtagtaaactttagaaaatgttgagattcaaatggcatcctagctttggcaggctgatgcttcatactgaacaagatcttggtgaagctttaaactttgcagtaactggaatg

SEQ ID NO: 26783 - DNA, 313 bp, Homo sapiens
  source 1..313: mol_type = other DNA
tgtggtacatatacaccatgaaggaacgagatcttgtctgttgcaattggatgatctgtgcagcaaaatacctatgtaacaaacctgcatatcctgcatgtgtacccctgaacttaacatacaacaaatgcattatttaattcattaattaataaggaaactagtaagatgttaaaatcagtcttattttacccgagatgttagaataagatttctggtataaaccataatccttgggattataccttccattgaaaagaaataatttacatctctactgattctacctgttccaggttttatgtacttgaaa

SEQ ID NO: 26784 - DNA, 691 bp, Homo sapiens
  source 1..691: mol_type = other DNA
ttgacagcaaaatgtctgcaggtcactttttggttatatgctgaggaaaatatgaagaatttttgcatgatgaaatttccactttaatttacaagttgaaaatgtattttcatcagctgggtttaaaagcatgttagcatggaggtgaaaataaaatggtttcatgaaaatgctttttcttctttttattttaatataatcacaatcttacagaaaagttgcaagaatgctggagagaaggctggtaatatgtttaccagagttaccagttgtcaacattttgaacatttttcccatatatgtatttttcccttgaacaatgacaataagttatgaacatcttgccactttacttttaaataattgagtgtttcctatgtacaagaatattttcttacatgaccccagataaactaccatgctacaaaattatagtgagtaaaatactgttgtttaatccacaattcacctttaaattttgccagttttcctggcaaatgtactggatccattgcatttaattgccatagctctgggatatcatgaagctgctttcaaaaatacagtattttaaaagacaatatggagcagctgttacgtgaccgctgtgtcacaacttgcatcttacagattaccaacaggaagcatttcaaatgcaaatgttcatctgaaaataaatccctagagatct

SEQ ID NO: 26785 - DNA, 223 bp, Homo sapiens
  source 1..223: mol_type = other DNA
tcacttctaccagaggccctaagccttaagaatcccagaatctataccagttgtgttcgcctttaactcttataaaaattactatcggacctccttatgttaagggctgaaaaactggctttggtcacctgaccccgcagatcccggaggctgcttccaggccccgcggccccgcccctctgcaccgcccggccgccgccaaaccgtggcgcatggatcacgc

SEQ ID NO: 26786 - DNA, 396 bp, Homo sapiens
  source 1..396: mol_type = other DNA
acaatgtccaatcactttacatttattttagctcatttaatgcttacaacaactagaaggaggtactattaggatccctattttacagatgaaaattccagttgactcttaacactttacagacatctgatgaatggatggatgaatgaatgcatgcactttgggaactaccctagaaaaatctagaccttttgttggatgggcagacaccagttctgtctgccctgggccctcaaactgagtagcctctgagattcaagcgcctgtaaaattacataggatttgtataggggaaatgattcactccccttcttctcctgcccgcagggcagacgcacgcgcagagagattgccagccctggctgccagagacccggaagcatcgatcggctctcg

SEQ ID NO: 26787 - DNA, 494 bp, Homo sapiens
  source 1..494: mol_type = other DNA
gggcgacttggcccggcgcctgggatggaacgtccccaggtctgagaatgcacctcccgccgtgtccaccccggccgcgtctgaaggcagatcttggaggtgcagccaggactcctagaggagcctcctccagtcaccatcgcgggtggggcgagccgggtctcctgctgggcttcccagccgcttcgctccggacaaggagagcaaacctccccggggatttgcccaaagaggcacagaggccggcgcccctgctcccctcggggcctctgagagcggcacactgggcgcggaaggggcgggggcgcgggctcgctgcgctgcgctgcgctgcgctgcgcccccagaaggcggaggcggccgggccgggccgggccgggggtgggcgggggcgggcccggggcggcccagggcggggcccgccgcttcccccgccctcattggccgctggcgctggtgctctcccccagcccctagggaattggagctgagga

SEQ ID NO: 26788 - DNA, 517 bp, Homo sapiens
  source 1..517: mol_type = other DNA
agcctcccaggtagctgggataccacctattacaggcccatgggtggggctctatttgttttttccattcaagaaagcatgtcaaattataaaaacataaccgtgcatgtaagttaagaaattttgcatccatggttaagaacctctgctatacatgttatgattatgaaaaagaattgcatgcaatggcattgttaaagagttctacaattgagtttgaatgcaagaggagacaaagtgacaagccctgggctcttgagctagtccaagtttaaagagttcgcttggggattccttcacagtccccagtggaaccagtgaaaagagcgtcatggctcccgtgtccccgagctgtatgggccgctaatccgccgcacaaagcgggccgcgcccgggcccagcgtggcgcccaactgctgatcggctctggaacgtcccagcagcgcgccgggggcctccggtgtttatttagcgggctgcgggctgcgccgggggcctcctggagagccggctcggc

SEQ ID NO: 26789 - DNA, 449 bp, Homo sapiens
  source 1..449: mol_type = other DNA
caggatgaaactgttccatctcagatcatctggcatagttcgtgcaacctagattcattgcatgcacagaccaatactggttcatggcccaggggtctagtcttgcctagccctactgttaagtagccataggacctctgcaaggtgcactccttgaactcaagatgttgactaatttgacccttttaactctaaaaggtgactgagtgcctggcacagtcttagcaattcgtgaagtatccgttctagtaatactaacgcagttcttaaattttgatttataaactctaggccttgggctctagacaaaacagggctctagaggacttgtttttgttgttgttgttgttgttgttttttaatggcaaaagcaataaattgctgtagttttctagattgccaactatccctaaattcaggtagtaaaattttccaagtgagtcacttcc

SEQ ID NO: 26790 - DNA, 539 bp, Homo sapiens
  source 1..539: mol_type = other DNA
ccatcttcgccgcggcggtcgcagggacgcgggggagggagccggcgggcagcgagtatgcagaccgtcctcctcacggctgcgggaccgagagacccagcgctgagctgacgcggcggcgcgagcttaccccggggcgggcgcgcctcaggacggaacgcggctgcgcacgtcacgcaccgcctgccgttgctacgcaaccagccggccaggcaacgcccccccggcggctatccagagtctcggaggggagcttccctcatctgctgaaggctgcggggcagggtccgcctcaccagaaagtgtttaggggtggggagaggctagaaggggggaggggtggccttccttcgcctcctcggcggggccacctgacgccccacccactgtgcaggcatggcccgcgcggggaggcagccacctggccaggtgtgcctgccgctggggcggccacgggagcggagtcgcgggccgcggcagcggggacgcctcccgcccagtctggcttgtcctgccctcgcgtgaggggaaaaaagtct

SEQ ID NO: 26791 - DNA, 390 bp, Homo sapiens
  source 1..390: mol_type = other DNA
ttctcggtaacctaaattaatttataaaattctttgttccctattcatctgggccctctgaaaaccgtgtttccgacgcgagcggcggggctggcgccaccgtcccgggacagcgcggcctttcctgtttttgaaattaacggtgactcacagagcactcttgggaaggaggaaaaatgtgcagacttttttcccctcacgcgagggcaggacaagccagactgggcgggaggcgtccccgctgccgcggcccgcgactccgctcccgtggccgccccagcggcaggcacacctggccaggtggctgcctccccgcgcgggccatgcctgcacagtgggtggggcgtcaggtggccccgccgaggaggcgaaggaaggccacccctcccc

SEQ ID NO: 26792 - DNA, 482 bp, Homo sapiens
  source 1..482: mol_type = other DNA
tgtttttgaaattaacggtgactcacagagcactcttgggaaggaggaaaaatgtgcagacttttttcccctcacgcgagggcaggacaagccagactgggcgggaggcgtccccgctgccgcggcccgcgactccgctcccgtggccgccccagcggcaggcacacctggccaggtggctgcctccccgcgcgggccatgcctgcacagtgggtggggcgtcaggtggccccgccgaggaggcgaaggaaggccacccctccccccttctagcctctccccacccctaaacactttctggtgaggcggaccctgccccgcagccttcagcagatgagggaagctcccctccgagactctggatagccgccgggggggcgttgcctggccggctggttgcgtagcaacggcaggcggtgcgtgacgtgcgcagccgcgttccgtcctgaggcgcgcccgccccggggtaagctcgcgccgcc

SEQ ID NO: 26793 - DNA, 380 bp, Homo sapiens
  source 1..380: mol_type = other DNA
ctcccccagacctaatgagtcagaaactttgagctacagtttaagacccactgttttggactctaaaatttagggccacccaacagtttccaaagcgaagccgtttgctctttttttaggcttagtaaatatacattgtaccaagttagcatatatgctatagaggataacctaaaagacacctgtgttgaatttaacttgctggaatttcaagtcccaggctgatgttttctgtacaggaacagcacccagacaggctgatttcttctggagaggcctgaggctcttgctcctgccctgccccctgatgccagcagccactgcgctcacccccgacctgtggtgtgacatcacaatgtagtccattcaggatcttgaga

SEQ ID NO: 26794 - DNA, 581 bp, Homo sapiens
  source 1..581: mol_type = other DNA
ctaaaattattttaatttaaagacttgactaattatgaagacggttagaaccagagtggattgtaattattgctctggggcttactgaaggaaattccttctggtctgattgcaatggctgacccccagcagagcttgtcctcatacccggcggcccgagggggcgctgcttcgggggaaaaataaagcagcttcccggttgcgcaaccctgttcagccaccgccatgtcagcccagcggtatccagaggcgcaggcccggggtcgccgggacccgaaccttctgcttcccgcctaggcagagccggatcctagtcagagactgctgggagcgccgcgggcccagagtgggcggagctggccggagacccccccctcggtgggcggggcgttcctgctccgccccgccccgcgcacggccgagcgccgcgccgctcggccccgcctctcccctctcccattggccgaggtggagaccctcctctctgcccaatggccgccgccgcggctcggccacccgcgtcctgactggccagcgaccggcagagtggcggggtgcggcggcgatcccggcggaggggg

SEQ ID NO: 26795 - DNA, 574 bp, Homo sapiens
  source 1..574: mol_type = other DNA
cagacgacgactaattcctagacaccaggctctctgctaagtattcctcgccggtcagagctggtggcggcgctgaggtcccattactgtgaccgcaaaaagtcgcctcccgctccgccgtgggtgcggacccctggcggggccaggacggcggtggcccctggtaccttggttcgaattaggcacagcctaaggcaaagcaggtccagaatgccccgcggcgctcacgccccacccgaggctttcgtcggcctccggcagggagtacctctccgagcggaagggccggcgtctccgaagcgcgggagcctccaaatcgcgcccttctgctctcacgagatctggtgacgtcagcgctcgctgccatcttggactcgggctgagtagtgtcgcggccctgcggttggcggcctcctcgtggagcggagcaagggtaggccccacgtggcgtctttgcccggctccaaggctctgggggagcacgtggcgccctgctcgcctgctcccggggcagctgggatggtggcggagtccggaggcctcctgccgccgtcgggcagggaggccggcggag

SEQ ID NO: 26796 - DNA, 451 bp, Homo sapiens
  source 1..451: mol_type = other DNA
gaatgatattgcacatcaaaattgtgaactttttcgacatgtttggacagagccctttcttaagacagacgacgactaattcctagacaccaggctctctgctaagtattcctcgccggtcagagctggtggcggcgctgaggtcccattactgtgaccgcaaaaagtcgcctcccgctccgccgtgggtgcggacccctggcggggccaggacggcggtggcccctggtaccttggttcgaattaggcacagcctaaggcaaagcaggtccagaatgccccgcggcgctcacgccccacccgaggctttcgtcggcctccggcagggagtacctctccgagcggaagggccggcgtctccgaagcgcgggagcctccaaatcgcgcccttctgctctcacgagatctggtgacgtcagcgctcgctgccatcttggactcgggctgagta

SEQ ID NO: 26797 - DNA, 729 bp, Homo sapiens
  source 1..729: mol_type = other DNA
gggcaacaaaccaaactgcaatttcacgttcacctactggtcaccacgaaagtttaaaaccggggtctccagagaccgctcggcaccggcgcctgagctggggctaaggtcccgcgtctctggtgaatccgggacatccacagggattccccggggcagccttcagtgaagaccagggagaggggccgcccgggtctcacgggtgcttcccgcgctggggatggcggcgagcagccacggccaccccggagctcgcagggccgcccgcccaggagtctgaggctgggaggacctcaccttgctgcggtcctcctcctgctgctgcagcaactcgggaaccgcggccatggcgacgcgggactcgagcaggggccgcctggcaagaagctgggccgccgccgccgccgcctgggcgcctctcgggggcggccacggccccgcctccgccggcctccctgcccgacggcggcaggaggcctccggactccgccaccatcccagctgccccgggagcaggcgagcagggcgccacgtgctcccccagagccttggagccgggcaaagacgccacgtggggcctacccttgctccgctccacgaggaggccgccaaccgcagggccgcgacactactcagcccgagtccaagatggcagcgagcgctgacgtcaccagatctcgtgagagcagaagggcgcgatttggaggctcccgcgcttcggagacgccg

SEQ ID NO: 26798 - DNA, 757 bp, Homo sapiens
  source 1..757: mol_type = other DNA
cgctcggcaccggcgcctgagctggggctaaggtcccgcgtctctggtgaatccgggacatccacagggattccccggggcagccttcagtgaagaccagggagaggggccgcccgggtctcacgggtgcttcccgcgctggggatggcggcgagcagccacggccaccccggagctcgcagggccgcccgcccaggagtctgaggctgggaggacctcaccttgctgcggtcctcctcctgctgctgcagcaactcgggaaccgcggccatggcgacgcgggactcgagcaggggccgcctggcaagaagctgggccgccgccgccgccgcctgggcgcctctcgggggcggccacggccccgcctccgccggcctccctgcccgacggcggcaggaggcctccggactccgccaccatcccagctgccccgggagcaggcgagcagggcgccacgtgctcccccagagccttggagccgggcaaagacgccacgtggggcctacccttgctccgctccacgaggaggccgccaaccgcagggccgcgacactactcagcccgagtccaagatggcagcgagcgctgacgtcaccagatctcgtgagagcagaagggcgcgatttggaggctcccgcgcttcggagacgccggcccttccgctcggagaggtactccctgccggaggccgacgaaagcctcgggtggggcgtgagcgccgcggggcattctggacctgctttgccttaggctgtgc

SEQ ID NO: 26799 - DNA, 319 bp, Homo sapiens
  source 1..319: mol_type = other DNA
ccaaggtaccaggggccaccgccgtcctggccccgccaggggtccgcacccacggcggagcgggaggcgactttttgcggtcacagtaatgggacctcagcgccgccaccagctctgaccggcgaggaatacttagcagagagcctggtgtctaggaattagtcgtcgtctgtcttaagaaagggctctgtccaaacatgtcgaaaaagttcacaattttgatgtgcaatatcattctgttttctctccaataggaatacaaactctgaatgaagatgaagttatttcagattactcatgtggccggaagaaaccaaga

SEQ ID NO: 26800 - DNA, 430 bp, Homo sapiens
  source 1..430: mol_type = other DNA
ataggaagctttcctacctccccggtaggggcggctagaagatgtatagcttcctggaaaggtatttcccagtctcagaattgcatttgcataatatgaagctgctttttttcttagattgtatgatactagtcagaaaaataacggtctaaagatgccgaatttttaaatttattttgttgtagctgatggaaagcttaagcccctaagcccccaccccccattattaataatcagagggaggggggcaactcgtgggaggccccaactcaccggaggggtgccctgggaggcgaacctggggtttacctcgaagagctcgcctcgaggtgttcttcctttcttaaaaagaggaattcttttgcaaacattcatgcctaaggaagggctggaacaggcagccccggccgccggaaccggtcggacaggt

SEQ ID NO: 26801 - DNA, 516 bp, Homo sapiens
  source 1..516: mol_type = other DNA
ttgcattctcaccaacagtgtataagcatataatagtagtgcaagaaaaggagaattgggttcacttcttatcctgcgataaaagctggttctttgtacatgttaataattttgatagacccctatcgagagaaataaaacacattaaattcctttctcctcaggaagcacccagcaaatatagtaggtgaccatagaataaaaaggttgttatcctgttaaacctataaaggttgcattgctttggaggtttctagccttatacctcatcatcctataatcttttaaaataatacaaatagcactggtttgaaatccagtaaaaaaaaggtgaagttttgaagatttttaaagactgggaataattctgtaacttcatagttgtcccggaagctgccccatcagcctcatagacaagaagccttgttttcttagagaaaagctccttgagggcagacctagaggcgccgcgcaccggtcccgcccgcagccccggcagagctgcgccccggctcc

SEQ ID NO: 26802 - DNA, 419 bp, Homo sapiens
  source 1..419: mol_type = other DNA
aagaatgattgaatgatgaacacgttttcactggttgctctatcagatacttaaacttgccttttttacccgaggaagaagtgaaaatcaggcgcggtggctcacgcctgtaatcctctcgggaggccagagactctgtatcaaaattataataataataataataataatccgagcgaagctgcctaacgaggcggtctcctggtggcgcctgccccgccaaagggccagcacggtatccagaccccgcccggggtgaggttggtactgaactgactgaggggcatggaacccccaccctccaccctggtaaggtgccggggccagtttgggccgggggggcgccgctctatgctcggctctcgattgctcacgcctggcagcggcgagcggcgcacgcgacggctggggctctgcgc

SEQ ID NO: 26803 - DNA, 566 bp, Homo sapiens
  source 1..566: mol_type = other DNA
cggtgagctgcggagtgcagccactgcactccagcctaaaataaataaaaaaaaatttaacatagtgccagttttttttttctgttatttttaaattttctgtactaaatgttcaggaatttcttaaaatatgataagaaatcatttcagtaataacatttagcacactaccaaatttatttgatcgtttattacattttacatttgtacagaaaattaaaatagtaactgggtatttggaatctgaaagttttaagtatattttggtaacactgttataaaaagaaaacattcgtcttttgggagaactcaaaatcatgacttgaatgtgaaatatctgttggacagacaacacgacactgtccttttaaacttgatcaaataaaggacagtgggtcatataagttactgctttcagggtcccttatatctgaataaaggagtgtgggcagacactttttggaagagtctgtctgggtgatcctggtagaagccccatgcattgttactgagaagcactgccgagcttgtgagcctgagtagtctgatcagtcggcatgatgacg

SEQ ID NO: 26804 - DNA, 327 bp, Homo sapiens
  source 1..327: mol_type = other DNA
tttttcttaaaatgggttcaacttcaaatttagtcactgttaacaaattaatagtaacattttcacaggaaatgcagaatttactagttatataggtgtggtacacagtatgtgtcacagagcacctgagggactgaaattgatgcattttatctgggctagaatcaagtccaatgcactgtgagcatggagaaccacgccctcagggaagtgcagtgagggactttgtattcccagttcctagcccagtgcctggtttttttgaaagaatgttgtgacaattgggaaatccagcaatgcttttccttagaagaatagaaatctttc

SEQ ID NO: 26805 - DNA, 452 bp, Homo sapiens
  source 1..452: mol_type = other DNA
actataactaataatagtgtatacttggaaattgctaagacaaagtatgtgaggtgacaaatatgttaattagtttaatttaatcatttcacagtgtatatatacatatatctaaacatcacattgtacaacataaatatatacaattattatttctctattataccttaataaaactagggataaattaaaatgaaatcaaattaaatatccaaataattaggtttcaagcttccaattaaagatttcactctcatcttagaattttagttggggccttaaccaacgtatgtaaaggatgcttctctggaaaatacgccaatttttgttagagaaggatgtataatacacacaaatgtatgtagaatccattgttctacacgatgagaatctattgttgctaacacagagctccttaaggcctttgtaggggaaccaaccttgtgattaga

SEQ ID NO: 26806 - DNA, 412 bp, Homo sapiens
  source 1..412: mol_type = other DNA
tcattttcttggtcttccaagagaatgacaaagtttcagccctctcaagagtgacgtgggccttcccctcgagctccccagatggggcgtcccagatggcaccagcgcaatcttgttctcaaccaggatccgcaggccaagctctggcccgagactgaggcttctgcttctcaggagatgctcggccttttcaaggctttaaatggagctaaagggggcggctggaaacgtcatttccgcgcgccaaggggcggggccggtaccgggtgcggaagtcgctccacctacgtgttttatgcacgtggttaagaaaacattctccggtgaccggagcgtgttactcggatccgtcagaggccaatgggagctgccggccttcagggcgcgcctggtggcgccgagcatcctggga

SEQ ID NO: 26807 - DNA, 281 bp, Homo sapiens
  source 1..281: mol_type = other DNA
aattgtttttaaaatgttttcttacattatacttttaaatattttatctaggaactaattatatgaatattacttatcatataataaaaagttttttttgaatttttaatttatgatctcatatttggggtatatctcatatcccaaaatgtttgtttgaagatatttaatgtagcttaatgttacggaaatttctgtaaacagaactgtcagattctagtgtttttgagatttccctagttcaggaaaatgccagtgtagcaaagtacagtttctttact

SEQ ID NO: 26808 - DNA, 419 bp, Homo sapiens
  source 1..419: mol_type = other DNA
caggctggagtgcagtgaggcgatctcggctcactacatagctgggaccaggctaagtgttggggacacatttttggggaagaggatttatagacctcctcatcttttctacaatgaacatgtttttactcttaataggaataaaataataaaagtaattgttattttattttctattatttactttttaattgacacatagtaattgtacatatttatggggtacatagtgttatttgatacaaataatgtgtagtggtcaaatcagagtaattagcatatccatcataaaggtaattatttaaaaaattgttttacaaaaacaaatcaaactttacccgacctgcctaggttttaaccttacattttatgtgcaagataaaccagaccttttccttgtgcagatgggcttgtgtgca

SEQ ID NO: 26809 - DNA, 419 bp, Homo sapiens
  source 1..419: mol_type = other DNA
caagcttgagttctgctctcccaggatgggaaggaacaagtgggtccccactcccaagggatcccggagaaggggtccagctgccgactgggcgaccttcacctccgccatgagggcgcagttcctgacgcctggggacggagcagcccggtagcaagccggggaacccggggaaccagtggaggatagcgctctgctgaggccgaggggccttcttccggcgggaggtggccaagctgcgcctgctccggcccacttacaggcgccgcggacgcacaagcctggttccttcattctgagttgggaaaccaactttttggcgcgggtaccaggctccctgcggagcggcaggggccggtctagttgctaagaagctgagtctccaccaatcatctgcccagcacccagtgggcggggcg

SEQ ID NO: 26810 - DNA, 438 bp, Homo sapiens
  source 1..438: mol_type = other DNA
gtacctaaatttaagggagttccggatctagggccaagaatatggctggacttgagacttgcccatagtcgcatttccatttaagtgaaaggcagataaaataaaagtaaaaattctaaataagctcgcagcccggatccggaatcccgtttggttgttcccgcggagtaagggaagctctcggggcccgggatcgggaccccccgccgcccgggttaccacagacgcggcgagccgcgccccgcccactgggtgctgggcagatgattggtggagactcagcttcttagcaactagaccggcccctgccgctccgcagggagcctggtacccgcgccaaaaagttggtttcccaactcagaatgaaggaaccaggcttgtgcgtccgcggcgcctgtaagtgggccggagcaggcgcagcttggccacctcccgccg

SEQ ID NO: 26811 - DNA, 620 bp, Homo sapiens
  source 1..620: mol_type = other DNA
ttgggagaaatttcccagggtagctttacctcaaaagttcccactgttccaaaagtgtggagggaccgttctcatccatgaacccaaagcccaaggtcctgaagttttgttgtagtgtgacagtctcttccagaaataaaaagctttctttaccgggggaaaatacactgtagcataataatctactgttataacatcagccagcttttatacaaccagaatgacaaattggaattcaaataacaattgaatgaaatccccttacaaaatgtttaaatgaatgctaagcattggttataaactattttaaacaatttcagtatcagctggtttaatatgaaaatctgacgaagtattttcttggtatttaattaaattagctttatgcaaggaaatttcattcaaagcaatgataaaaactgttttaaactcagaaggaaaaataataaatgggttttctgcatgtttgaaaccaaaaacaaactttcctatagaaataaaagggtgctttgtgttcttggctgccccacgcagccagcggaaggcaggccaaggagggcctctcccaggatgccgcggcgcaggctccctgcgggagcaggctgggctcagctccgctg

SEQ ID NO: 26812 - DNA, 345 bp, Homo sapiens
  source 1..345: mol_type = other DNA
cttgaagggagtccaaggacctgggttccagttctctgagtcttgagtttctcaactattcggtcccggcctggtgcgggacgacatccgcaggggactcccggatctgcgccccgctcacctggccggagccggccagcgccccagcgcgtcatgccacggcgctgtccactggccgcgcttctccgacggactggaggaagcgagagactcagagaagctctgccaccatcttgggttttcagaactgccgcaccgttgcctaagcgcagccagcgctcctcagaggtaatatgacatccgctcgtctcagtgggaagtcccgctgatcgccgcggcggcgct

SEQ ID NO: 26813 - DNA, 422 bp, Homo sapiens
  source 1..422: mol_type = other DNA
tcctgaaaaatgtgaatttgttcaacaaaactgaatcattctcacatttaacagtaattgtttctttgtgccttaaactattaataatttctatgatctgtagataacttaaaacttagtattaaattgagctaattaatggatacttggatgcctagatatgttcgcatttatatgctacagagactacaactctgagtcacagtaatgatgtgtttttgcagcaacatggatgcatctggaggctgagtatctgggtgaccagctcattcgaattcgaaacctaaacgttggaattattttttaaaagaaagttatgttccatgtatttctaagcttactctcctaaaatggttgaatattacagttctcaattatttatctccattgtgcgctagtgccagcctccgagcgccgccgcg

SEQ ID NO: 26814 - DNA, 376 bp, Homo sapiens
  source 1..376: mol_type = other DNA
tgagtatctgggtgaccagctcattcgaattcgaaacctaaacgttggaattattttttaaaagaaagttatgttccatgtatttctaagcttactctcctaaaatggttgaatattacagttctcaattatttatctccattgtgcgctagtgccagcctccgagcgccgccgcggcgatcagcgggacttcccactgagacgagcggatgtcatattacctctgaggagcgctggctgcgcttaggcaacggtgcggcagttctgaaaacccaagatggtggcagagcttctctgagtctctcgcttcctccagtccgtcggagaagcgcggccagtggacagcgccgtggcatgacgcgctggggcgctggcc

SEQ ID NO: 26815 - DNA, 291 bp, Homo sapiens
  source 1..291: mol_type = other DNA
tattctaagaattcaggcttatattaaatagttttagcttttacatttaagtcagcgatccattcagagttaagttttttatcttttcgaaaccaaaaagtacttaacgttaatttatttttaaatgtttttgagacatgggcacgtttgtatgaaggataaaccttttcggataccgaatgagaagcttctacgtggaaagtccggacacctgagcgactttccgggccagaggccccaaggtgcatcgggcggctccttaatggttccggcggcagggaccgcagcgac

SEQ ID NO: 26816 - DNA, 387 bp, Homo sapiens
  source 1..387: mol_type = other DNA
gtttcatcatgattggattcaggttatacattatttggcagaaataccacaagattgatgttgtgtcctatcaggaggcacatgatgtcttgttactggttatgttaactttgacaacgttattaaggcaatttagtattcagtatttaacaaacaagcacactagtttgtagttgagatggaattatttttagcaatgataataatttgttggggtaatagttttgcatctaagcacttttacgtggtttggttcatttaaatctaacaacccagcatttatattacatgagaaattagaattctagaatcacatacctatttattatcatgacatggctaagtcgaattaatagtgagataaataggattcaggctgaatttccc

SEQ ID NO: 26817 - DNA, 388 bp, Homo sapiens
  source 1..388: mol_type = other DNA
tatgttaactttgacaacgttattaaggcaatttagtattcagtatttaacaaacaagcacactagtttgtagttgagatggaattatttttagcaatgataataatttgttggggtaatagttttgcatctaagcacttttacgtggtttggttcatttaaatctaacaacccagcatttatattacatgagaaattagaattctagaatcacatacctatttattatcatgacatggctaagtcgaattaatagtgagataaataggattcaggctgaatttccccctagcagccgaccgagtcggaccggccagttgggcgcgcttccgggtgtcacctccagagggcgccggctgcggagccgccctcagagtcgcgaggccgg

SEQ ID NO: 26818 - DNA, 505 bp, Homo sapiens
  source 1..505: mol_type = other DNA
gccaatatgcaccatgcccggcccataatgatgcatccatacatttggttataaatacatatacaaatcttttttttttcaaatggacaagatgcatgattgaaaaatatttgttaatacataaattgtgatttttatgtattatgtatttgtcctcatagtaagtaggaaaatcatttatgatatgaacattttcctttgatattctgcaaaaggcaggaatctcttttctgagaattaatatagctgagctggcttctctgggggaggaaaacacagttctgtttttatagatgggcaaacttgaccatagaaaattttgggtgtcttacccaaggtaacatagatgtcccattcattccagagataaaatcagaatggatgggaattattatcatctcactgcatttatttcattttcgaatacgtactgactttaaccaaagaagttataagaagtatgtatgatgtttaaaatactcctatggttacttaaaagtgcttt

SEQ ID NO: 26819 - DNA, 243 bp, Homo sapiens
  source 1..243: mol_type = other DNA
ggaaagtcatcattttttgagcaccttctagattaatcttgcttaggacctcagggtgtgaggcctgcccagtgccttccatggagggagatggagggcttcactgcatgcagtgcaaacatggccttccagaatgctgacccggattgatcatatggtttggctgtgccccacccaaatctcactctcacaattcatatgtttttcacgagatctgatggttttaaaaacgggagtttccct

SEQ ID NO: 26820 - DNA, 438 bp, Homo sapiens
  source 1..438: mol_type = other DNA
actcttgactggtgccaaatgagtcctgtctaaagaggtagcagctgaaatctgaattacagtcagttctgcaattttgcatttgcttatgcatgatttcatctgtaaaaacactagctgaactgagctgtttaccacaagtgttatgagacacacctatgcctctagtgacatctatctatttcttatccattcacctgaataaaatactgctaccatttttattagggcatggtgatttttagaaacaggtagcttgtgttatacaacggactgtgcaagatcccgtgaagatcttctcagaggcagaaatgagctccatgtgtgatatggtttggttctgtgtcccaaatctcatcttgaattgtaataagctaagattattaccttgacacggtctgaatgagttctcatgagacatgatggttttataagcat

SEQ ID NO: 26821 - DNA, 567 bp, Homo sapiens
  source 1..567: mol_type = other DNA
cagaagcctcttcaggccgcctctccagggaccgtgacttggtccagctctggggaggcctgttccagatcccgagtcgggcgcacagggggatccccgcaaggaggccagaggctgggcgcgggcagccaagcgcactcgcggcgccccgactccaggtagcacgcggcctctgggaggcagcgtgtgtgcttcccgagagggggccccctgcgccgtccctcttcccctggcacagaagggttgaaggcgccccctccccgccatgccggccagcgccgggctgtgtcccaggcactgccccccgccaaccctggcccgaccagcctcgccgctgcaggctgccgggagctgcgctagctcatgctcccagctcgctcggtgctccctgttcgctccggcccggccccggcccccatcgcgccgaccatggaataggcgggcggccccgcgaggcgctcctgcagccggcgaggccagagccagtccggggtggctttgccaaccggcggagttggccagcggcgggccctcctaccgtcggcgcctcccggccgcccccgccgc

SEQ ID NO: 26822 - DNA, 632 bp, Homo sapiens
  source 1..632: mol_type = other DNA
tctggggaggcctgttccagatcccgagtcgggcgcacagggggatccccgcaaggaggccagaggctgggcgcgggcagccaagcgcactcgcggcgccccgactccaggtagcacgcggcctctgggaggcagcgtgtgtgcttcccgagagggggccccctgcgccgtccctcttcccctggcacagaagggttgaaggcgccccctccccgccatgccggccagcgccgggctgtgtcccaggcactgccccccgccaaccctggcccgaccagcctcgccgctgcaggctgccgggagctgcgctagctcatgctcccagctcgctcggtgctccctgttcgctccggcccggccccggcccccatcgcgccgaccatggaataggcgggcggccccgcgaggcgctcctgcagccggcgaggccagagccagtccggggtggctttgccaaccggcggagttggccagcggcgggccctcctaccgtcggcgcctcccggccgcccccgccgcccccgccgcgccgccgccccaggccgagcgcgggcgcggagcgtgggagccatggcgcgcgaggaggagcgggaccccgagcgccgggaggcggcggcgcgggcgagcgggcc

SEQ ID NO: 26823 - DNA, 352 bp, Homo sapiens
  source 1..352: mol_type = other DNA
gggccccaataatttacttagggatggccatggtcagctcccccaggtgagggagaggcaccagcaggtgttcaattatttatttaatcctctgctactatctgaagtggaacagaacagaaataaggtctgttttctttccgcttcgactctaacactgtcagcaattaattcccaaagcaccagggacccgcctgattccgaaaaggctggatgctggctgggaaccggccccgcagctccggcgtccccgcctgcctgcgcggccttcagctggggttacggagggctcccagcgccgatccaaaccgcgttccaggcggggtgggcgggcccctggccagcgaggccg

SEQ ID NO: 26824 - DNA, 275 bp, Homo sapiens
  source 1..275: mol_type = other DNA
agccagtggctggcaggcggcctctgatagtcatcgctggctctgtgactcccagatggccttgccaacctttctaagccagcatggtgatctaggatgctgtgtgtggctttttggaaatagcccggggccttccttagtccctcagtgccccagactgggtaacttagaaacaataggcatttattcttaacagttctggagtagaagacaccagcaggtttgtctggtgagggcatcttctggaggggccagcagtcataagggcaggtcct

SEQ ID NO: 26825 - DNA, 475 bp, Homo sapiens
  source 1..475: mol_type = other DNA
actctaacactgtcagcaattaattcccaaagcaccagggacccgcctgattccgaaaaggctggatgctggctgggaaccggccccgcagctccggcgtccccgcctgcctgcgcggccttcagctggggttacggagggctcccagcgccgatccaaaccgcgttccaggcggggtgggcgggcccctggccagcgaggccgaaccaagagccgcagccagctcaggcctctcgagtggggcctttccagcccctgcaacagatcccgggattgctctggtcctcgcctggccggggaccgcagaagaggcggaggggccggtccagccaagtttgctccggacctggggtcgcgcaggcgccttggtcgctgcctccgatccgacccccgccccatctcctctgcgagctcaggaaggtggctgggggagggggatggctccctactgccgagggacggcccgaggcaaaca

SEQ ID NO: 26826 - DNA, 413 bp, Homo sapiens
  source 1..413: mol_type = other DNA
gtttacgcctgtaatcccagcactttggccaagagccgtgactgcagcaatgcactccagcctggaaaaacaataattaaaattaaaattaaaacactgttgtttgtcttttcaatggaaagttttcatgaccttcaaacttaaaatttttttttaaaatgactgttgggtgaaaacagtgatccaagacactttaaaaatttctttcaattcacatagttcgaattgtcaagtctgatcctggaataacatttgtctgtccaacttgagtaatacaaagataattatggaaatattcagagaacttcctgacctgtctccctgggagctggagtgagatgcatttcttgattcggacttgacctgacaggtcctttcagtcaatttggctgtaaaataattacaataacgtc

SEQ ID NO: 26827 - DNA, 393 bp, Homo sapiens
  source 1..393: mol_type = other DNA
catatgaggtaatgcatatgttaattagcttcacttagccattctgcaatatgtatacctatatatatcaagatgtcatgttgtataccataaatatatacaatttttactggtcaattaataaaataaaatgaggagggaacaggcctgtccttaatccttctcaattgccaagatctggcctgtggcccaacccagttccattgatcagtgaaatggaaatcggggagtccaggtggcagcctcagctcctggcctcagtggctgtcagccagcctccacatagcaggcaggcagtgcagcctggagcccagccaggggacgcaggaatcctttctgctttttaaggacagactttgctttaccacagcagtcggctcccaaatgtttgca

SEQ ID NO: 26828 - DNA, 297 bp, Homo sapiens
  source 1..297: mol_type = other DNA
tgcaagagacagtctcactacactgggtaaggaagggtttggggttgctcccccaggcccccctcaatgcgtgaaggcctgagccaggtcagctggcagaacagttagaattcagaactgtgttgtgaactgatccctgtaaacagtgacaggattttatccaaatatttctgatttctaagggaaaaatagagcaatttcttcccagtgcccttctgttgaccttgcctgggggagaggccagcagagcttttaggcttcctgaagtcccaaggaccttctacgtcagtggcagag

SEQ ID NO: 26829 - DNA, 516 bp, Homo sapiens
  source 1..516: mol_type = other DNA
aaagaacttatgtttgtatggatcatatctataaatagttgccatcttagaaattaaaatgaaggaatttaataacgcttattttaaaacaataatggacctgttacctgttaatgtaaataacgtttgtatggaaaattactatgttttcaaaaaatagtacagccactgtacacttacagtgcggccctggggcccttctctccacagcagtgcaaagaatagaacaagaaatcattttgatgtcgtcagaaatcaatatgtaagctggatatatcttttaaataaactcatttctataacaaaataatcattgtatgaatttcagtccttcaaagggggttcctttggagggtttcccttgccatagttatattatcttccttattacaatactgaaacctaacaaactgggtgtcatatttccttaggagaattttttcctctggctagaggaaattcacagagccaaatagaaaaagatggtcatctctgttcctatgcgctgtgggcatg

SEQ ID NO: 26830 - DNA, 447 bp, Homo sapiens
  source 1..447: mol_type = other DNA
cccactgcccaagtagctgggattacgaataaaggaatttttaacttttaattttaactactttaaatttaaaaactgatgtttgtttgaaaaatctgctttttaaccatacattgatgaaatctaaatagagaactgctctctcagattgaaatgcactgcaaatgtaaaatacacaccggatttcaaagtctttgcaaaaaagaatgtaacatatcacattcctttttttattgatagggaaaaatatttttcccaaataggaaaaataaatgggtaaaataaagcgtactatcaaaatcaattttacatttcgttttgcttttatttatctgtcgcccaggctggagtgcagtggcgagatctcggctcactgcaccaagtagctgggattagaggcgcgtgccaccttaaacgtggtattgacattttaagatgacatctgca

SEQ ID NO: 26831 - DNA, 473 bp, Homo sapiens
  source 1..473: mol_type = other DNA
gaaatgcactgcaaatgtaaaatacacaccggatttcaaagtctttgcaaaaaagaatgtaacatatcacattcctttttttattgatagggaaaaatatttttcccaaataggaaaaataaatgggtaaaataaagcgtactatcaaaatcaattttacatttcgttttgcttttatttatctgtcgcccaggctggagtgcagtggcgagatctcggctcactgcaccaagtagctgggattagaggcgcgtgccaccttaaacgtggtattgacattttaagatgacatctgcatcgccgcctgctttctgcagccgctgcctgggaggggttccgaggttctgggcagccacagccccggaggccgacctggcaattcccgccgccggccgccagaggaagctgctttgctgcgtcgttgcccagcaactctcgctcggttccgcggcggccacgctccgggagacttc

SEQ ID NO: 26832 - DNA, 523 bp, Homo sapiens
  source 1..523: mol_type = other DNA
tgataatgatgtgtcaatgtaggttcaagattgtaacaagtgtcttccacttaattttgttgtgaacctaaaacttctctaaaaatgtctattaaaaaaaattctcttaacctttgcttttcaggttaagtattataacagctaacatctactaaaagatgttattagccttgttttatagttggacattgaggctaagaaaatttaactagagtaattacagaatttaaacatgtttcttatcacaagactgagttttatttttaattccaagccttagagttaattattaattattatgctcgaggcattgcagcctaaaagggcggcagctcgccccgtcgcatgcgtcctcgcctggtcatcccagttccggaggctgacctggggatgcgccctggacgccctgcaccgcagtccttgcgtcgctgctagtgcagctccaggacgccgcactccacgcgctgccgcaaggaggacgcgcagcctggtcaccatggaaacggtgccgcctccgtcacgg

SEQ ID NO: 26833 - DNA, 448 bp, Homo sapiens
  source 1..448: mol_type = other DNA
cacagtgttttctctatatgcattactcctgcgagtcagacgtaaaggcttcaaagtctgccacatattaagcacttggtaagtattagctatcaaaggaaataccagatagtaagtctactgtttaattaacttatgatactatactaaaggtcatttaaaatctagcaaggtcgtctttatacagaaactcgagtgcagtgcctggctcagtaaacaacgcgggtcgtgctccgcgatgactgagccttctccccggcgggaacactctctcccaacccgggcaccctcagggctgagggatgcccctttcggaatccgctgcttcccggccgcggtggaggccgccatgtctgcagcagtcgacctctggacacctgtccccggcacctctgagagctcaccgaaaccacaaagctttcagaccgtgacggaggcggcaccgttt

SEQ ID NO: 26834 - DNA, 521 bp, Homo sapiens
  source 1..521: mol_type = other DNA
actagcagcgacgcaaggactgcggtgcagggcgtccagggcgcatccccaggtcagcctccggaactgggatgaccaggcgaggacgcatgcgacggggcgagctgccgcccttttaggctgcaatgcctcgagcataataattaataattaactctaaggcttggaattaaaaataaaactcagtcttgtgataagaaacatgtttaaattctgtaattactctagttaaattttcttagcctcaatgtccaactataaaacaaggctaataacatcttttagtagatgttagctgttataatacttaacctgaaaagcaaaggttaagagaattttttttaatagacatttttagagaagttttaggttcacaacaaaattaagtggaagacacttgttacaatcttgaacctacattgacacatcattatcacccaaagttcatagtattagggttcactcttggtgtacattctatgagttggacaaatgtataatgacatgacttggcagctcat

SEQ ID NO: 26835 - DNA, 287 bp, Homo sapiens
  source 1..287: mol_type = other DNA
ctgggcccaaaaactaatcctgtgttaacagcctcccactttacatatcaggcagtctggctcccgggctcctgctagaggatcctacaggacattaggagcattgtcccttagagctgtctgccctgagagaggagagggcaccgagcgcccgcccctccgacgtggtccgccccggcctacgacctcagcggcgccccgcccccacggcgtcttgccccgcctcctgcaggcggcccggcgcggtgtttacccgcggtgcatggtggggcggtctccttcggcaa

SEQ ID NO: 26836 - DNA, 172 bp, Homo sapiens
  source 1..172: mol_type = other DNA
ggctctggccggcccggagcggagctcaaggagagatttcctttccggcttttttaagatgcaatttgttaaaacggccctttcaagtgtatgtaaatactgggtttaaaaaaaaaaaggctcgcccgtctttgcaattactgggagcgcggagctccccaaacgggcaatg

SEQ ID NO: 26837 - DNA, 317 bp, Homo sapiens
  source 1..317: mol_type = other DNA
tgaagctgcagggacctagagctggcctcccgccggtcgcgcttggggacaggagggcgcctattccaagagtggttcctgacaggagccctgcaccgcgctggtgtgatcccacccttccccggccgctgccccgggagtggggaggtagagatattctctatcttattattaatggtggcggaaataaaactaagtactagtactaacaccttccccctcattcccaaagctagaggaggaagggggcggcccagccaactcgcgcgtctccggcgtgactgccgagattgacgtggaggacacgtcaaattgat

SEQ ID NO: 26838 - DNA, 613 bp, Homo sapiens
  source 1..613: mol_type = other DNA
ttagaacaaggatggattaaaaatgacctttgcttgaactgaaacagaagctatgtgcataagtgacttaacaccctcacaaggttataggacaatcccttagtcaatgtcttgaaatgctggaaaatcatattagcaactattttatacccgtaattgtagctggaagattgtattggatgctaaataccggctagattccattcggtaactatcataattatttatttgcataacaatcaaattattggtgcaaagcagccattattactgtaaaatgctttaaaatgctctttgcttcgattctacccggcaaaaaagacttttctcctcccgggcatgcagagcgcagcgattctgtgcccagggagccggagggctggggctgggagatcccggcggagccccggcagagcagtcgcccgtgagcccccgcaactcagacgcgctcggcctcgcgctccggggctgggaccaccgagggcgagctgcagccttcgccacccggtccgccgccggactccgcccggcaaagcctccttcccagcttccccggcggcggcgccgtgacgtcacttccgttctccagcgcgcacgtgggaggaagtgctgg

SEQ ID NO: 26839 - DNA, 571 bp, Homo sapiens
  source 1..571: mol_type = other DNA
ctttgcaaattggaaatccggggcactgaggctggacgcgccctccgacaggcgcaccgggcgcccggcgcgatgagacggggcgggggctggaggccggagccgccccagagggtggtttcctcccaggtccctccttcctcaggggactcgctgtggacccgggaggaaagggggctcgaccagggatcccgcgtgcccgatcgcccgcccagcccgctcccctggcccgcccaggagtgcggggcgccgcggcggtggggcggacggcaggcgctgaggggcaggtgcggagcgccggctgcggctacctctcacctaggctgccccgggtctggggattggaggcccgcgccagcgcgccgcgctatatcagcccccgcgccgcgcgcttcccgccgcctcggggcagctcggcactgccaacctcagccgccacccggcagcccgtgagcgcggcggcggcgggtgctccctaccgcggggcgctggcctgggcctcctccgctcctcgctaccgcctccggcctgcccagggagagagagggttttttaaaagttaaattttaaa

SEQ ID NO: 26840 - DNA, 591 bp, Homo sapiens
  source 1..591: mol_type = other DNA
ctcccaaccgtcggccgctgctagaggggctgcttgcgccaggcgccggccgccccactgcgggtccctggcggccggtgtctgaggagtcggagagccgaggcggccagaccgtgcgccccgcgcttctcccgaggccgttccgggtctgaactgtaacagggaggggccaggacagcgctttgcaaattggcaaatccggggcactgaggctggacgcgccctccgacaggcgcaccgggcgcccggcgcgatgagacggggcgggggctggaggccggagccgccccagagggtggtttcctcccaggtccctccttcctcaggggactcgctgtggacccgggaggaaagggggctcgaccagggatcccgcgtgcccgatcgcccgcccagcccgctcccctggcccgcccaggagtgcggggcgccgcggcggtggggcggacggcaggcgctgaggggcaggtgcggagcgccggctgcggctacctctcacctaggctgccccgggtctggggattggaggcccgcgccagcgcgccgcgctatatcagcccccgcgccgcgcgcttcccgccgcctcggggc

SEQ ID NO: 26841 - DNA, 590 bp, Homo sapiens
  source 1..590: mol_type = other DNA
ttgctggagtttctaatttctattaagcagtccctctcccaaccgtcggccgctgctagaggggctgcttgcgccaggcgccggccgccccactgcgggtccctggcggccggtgtctgaggagtcggagagccgaggcggccagaccgtgcgccccgcgcttctcccgaggccgttccgggtctgaactgtaacagggaggggccaggacagcgctttgcaaattggcaaatccggggcactgaggctggacgcgccctccgacaggcgcaccgggcgcccggcgcgatgagacggggcgggggctggaggccggagccgccccagagggtggtttcctcccaggtccctccttcctcaggggactcgctgtggacccgggaggaaagggggctcgaccagggatcccgcgtgcccgatcgcccgcccagcccgctcccctggcccgcccaggagtgcggggcgccgcggcggtggggcggacggcaggcgctgaggggcaggtgcggagcgccggctgcggctacctctcacctaggctgccccgggtctggggattggaggcccgcgccagcgcgccgcgctatatc

SEQ ID NO: 26842 - DNA, 223 bp, Homo sapiens
  source 1..223: mol_type = other DNA
tcccatccacgcgcggcctggcgcaccgggctggcctgcccctcgtgggagccttcagcactcggcagcagcaaaagatgctgccggcggcttcgggttagggaagtggttcccgcccccaattttggacaggtgggctggatgcccactactggatccccaaggtccagccaggggaaataaaagtattgctggagtttctaatttctattaagcagtccct

SEQ ID NO: 26843 - DNA, 293 bp, Homo sapiens
  source 1..293: mol_type = other DNA
gggtcccctcctgggggatcccacactgtgcgcggtgtcgcgggagggcctgcccgggcttcgattcccgctccctgcccagatttccggcccttgctaggaatcctgagccgggggaagtgagcctgcaagcccaatttcacccaatttggattaacatcagttggctgaaaattataaccatccatggccttgtgtggtggtttgcaaaccaaagtggaattttccatggcatgcctccgaggctcctcatgccacacagtgctgagccagggacccggcagagctgcctg

SEQ ID NO: 26844 - DNA, 508 bp, Homo sapiens
  source 1..508: mol_type = other DNA
attaattattcaggttgtctaaagaaatgaggtttttcttttaatttacaagctatagtcccaaccccagccgggcccgggtttcccggggcccctcaagcctcagggcagtggagagccgccgtcacgcccccgcctcccaagcactccgccacgcggtttccacggggcgcggccggcgttgccctcgccgtggcctcaagcattgcggcgccccacatgttgccagacggaaggcctcggcggggtcaggcagctgctgctggccgtgactcactggtgacgtttcacacgggacgaggggaaagcatctcacccgacccggtgcgggacctaagaggtttggcccaatcagcatcccacctaaccagacgggccggagtctgtggcccggttggtttgccgggatttctgggaaagtgacactcccggaacggagttagccttccggcccgcagtcccactggctgacttcgctgcccgtcacgggaatgcgggagagggcggc

SEQ ID NO: 26845 - DNA, 450 bp, Homo sapiens
  source 1..450: mol_type = other DNA
taattgaataagcattaaactagaatgtgatagctcatctaacctgatatttgggatgatcctctgtgttagccaattggctttatctagaggaaaaagaaacttgtatctttatgatatgagataattttgtaagttaggctcctactcccccattaaaactgggagacaggggcattaactccctaggtcctagaactagtcttcaaaaggatttatatatttcaaagagaggaaaaagtacttacactaattaccaattttctaaaagtaaatgttcgaagaaaatctcatattttcaacaggaagtagtaaaccttattttaaatttgtatttgtcctgacagtccccaaacattacaaactcaacgacctggcaaagctttaccaatgtttcgaggagtcagcgaatcttagtggggaagttctgtagtgaacaaagctttcgaa

SEQ ID NO: 26846 - DNA, 669 bp, Homo sapiens
  source 1..669: mol_type = other DNA
gacctggcaaagctttaccaatgtttcgaggagtcagcgaatcttagtggggaagttctgtagtgaacaaagctttcgaagacggcagggtgcggtcccggctcctggcgcgccgagccccccagcagggcgggggcaccgcggaagaagcgccccagaggagagcgccgcgccgagccccgcctggcgccagttctccagcgcccgtggaggcatctgcgcccctagtagccaaggtgagtaccagctccaagcccggctttccgcgaggtccctcgcgtggccaccgtgccctaagggtgcgctcggcctcggggacgtagccagctgcaggccctgaccgcaggctgctggggcccggaagcgctggcgccttgcggccagaagcccggtcacgtggccccgcccccctgtggcgtgccgcagcgcagacgtcgctgtctcctgcgcaggcgcaggccttggctcgcggcgggtgacgcaatgcggcgggtgacgcaatccggcgtcgccagtcagtcgcgcggccagatcaggtaactgcccgaaccgctccgccgcccgacgtgtggctcagccccttcctcagccccgccaggggcggggccggccgcgggaggggaggggcctgcagcgaccaatcggcggtgcccgcgcagggtgctacgc

SEQ ID NO: 26847 - DNA, 260 bp, Homo sapiens
  source 1..260: mol_type = other DNA
gtacttataagtgaaaatgtagtagcttcatatgtagagagtcacagagtttcttggacacacaatagcatgtgtttctgttctcccagaagcagtgtcttctggaaactgcagcctgtggcaactgcagctgccaggttgcccaccctggtagggcacttttcttccctggacaatgattgccaggttaaactgtcgacagacgcccctctgactggcagcagaggcagtgttgctatttcctaaattatatttaatgg

SEQ ID NO: 26848 - DNA, 479 bp, Homo sapiens
  source 1..479: mol_type = other DNA
tatttattaacagtttgaaactgtcataaatctcacttggcagtgatttgccaagcttgaggcacaggacatctatctatggatacttctcctaggagattagaagtcttcctggcaggcaaacattttgtctaagagttcaatggttcacatccattgaatataattcagtcaacaaaagagtggattatgcatatattgcatatatgcaactcatttatatttggagataaaaatggctcttattgccatgtgatgctttggtggctacaccagattccatttctgcatacatacaaaattaaagttcaccttggcccaggacccctttgggggggtcacgccccctgcgccgacgtcctgggagctagcggtgcgcaagctcggctcacacacaccccgccccggggcctcctgggaactgtagtaggcggctcgcgagaaaggcctcgcgcgtcgcgcctgcgcctgcgtccctg

SEQ ID NO: 26849 - DNA, 352 bp, Homo sapiens
  source 1..352: mol_type = other DNA
cttaagtctggtctgtgaagagtgcattattcagtctgtcttggtcgagaactcagaatctccacccacaaactgtgccgcagagtgctgtgccggctgtggccacaggagggaacccgtgacaacctaatgggtgcacttcaataggggcagcccccctagtaccagcacttggcagcgcgtccctgggctgggaagctgcagagaacagggttgggggctcctgctcttgatccacgacccccaggctggtgcccccctcccgagaccctcgggggagcagacacctgcccatgatactagcatctctggggcgcccagtagagcttaaacaggagatgatttaaccaga

SEQ ID NO: 26850 - DNA, 517 bp, Homo sapiens
  source 1..517: mol_type = other DNA
attaattatatatataatatatatataaattatatatatattaattatatataatatatatataaattatatatatattaattatatataatatatatataaattatatatatattaattatatatataatatatatataaattatatatatattaattatatatatataaaatatatataatttatatatataaaatatatataatttatatatataaattatatataaaatatatataatttatatatataaattatatataaaatatatataatttatatataaaaattatatataaattatatatataaaatatatatataaattgtatatatataaaatatacatataaattatatatatataaaatatacataaattatatatataaataatatgtatataaaagggagtttattaagtattaacttacatgaaggctgtctgccaaatctgagagtctaggaggctacaggcccctgactctgagggcacagcaggaggcatttgcttgc

SEQ ID NO: 26851 - DNA, 95 bp, Homo sapiens
  source 1..95: mol_type = other DNA
ggatactcaggacctctgaagactccggaaggccgagacctctatctttcccttttctgaggaaagggcccagggggccttgacacctctcgcag

SEQ ID NO: 26852 - DNA, 465 bp, Homo sapiens
  source 1..465: mol_type = other DNA
actgtgtaggaaactgtgcagttccacagccaccagccacatgtgccacaggacacttgaaatggggctgtaaaaaatacacagggaatttcgatctcattaataattgttcccgttagctgaaataatattgtggctatattaggttaaataaatattttaaacattactttcacccatttattctcatcttttaaaatgcatctactagaaattttcaaatgcttggtttgtttattgaataatgagttatgaaaacagaagccagtgaccttttccaaaaaggttaattcccttaaatttggcaaagaaattctccatattagggtgtggtcttctggaaccttctgaaataacctctctgttccagagattctcctggactttctgagcaaacaggaagtcacattgctttcacagtcaaaggaccagtgtcacctctgtggagacctgggtgactcaagc

SEQ ID NO: 26853 - DNA, 460 bp, Homo sapiens
  source 1..460: mol_type = other DNA
agaaccagccacatgtgccacaggatacttgaaatggggccagtccaaaattacttctggtctaagtgttaaaaatacacagggaatttcaaaaacgatctcattaataattgttccattaaaatcacattgtggctatataaggttaaataaatattttaaacattactttcacccatttatttttaaaatgcatctactagaaattttcaatttgggcagcagctctgcaatgataggtttgcttattgaataatgaattatgaaaagagaatccagtgaccttttccaaaaaggttaattcccttaaatttggcaaagaaattctccacattaggttctggaactttctgaaataatctccctgttccagagattcagagactgtgaccaagtgctcctgtttctgagcaaacacaaaggaccagtgtcacctctgtggagacctgggtgactcaag

SEQ ID NO: 26854 - DNA, 364 bp, Homo sapiens
  source 1..364: mol_type = other DNA
tacacacactgtgtaggaacggactgtacagtagccacctgccacatgtgccacgggacacttgaaatggggccagtcccacagcgaatttcaaaatctcattaataatagttcctattagctgaaataatattgtggctgtattaggttagataaatattttaaacattactttcacccatttttatcttttaaaatgcaagtttttttattgaataatgagttatgaaaagagaacccagtgaccttttcaaaaaaggttaattcccttgaatttggcaaagaaattctccataataagggtcttctggaaccttctgtcccggcctctgatatctgaagaccccgcaaacaggaggtcaca

SEQ ID NO: 26855 - DNA, 404 bp, Homo sapiens
  source 1..404: mol_type = other DNA
ggctgggctatgcagtaccacagccaccagcagccactcgtggccacagggcacttgaaatggggctagtccacagtggttccttaagaatagtcctgaagtgttgaagtattttggatatattaggttaaagtagaaataccaaaattactttcagctgtatcttttaactttttcaaatggtttattgaataatgaggtaaacgagaacccagtgaactttacccaaaggttaattactttatgtttggctcccggagcttctgaaacagctccctgccccaggaattcccagaccatgaccacgtgctcctggatgccccgacagactttagaagggtggtcaccaggtttcacagcccagggagcggtgtcacctctctggaatccagagtgagccaagc

SEQ ID NO: 26856 - DNA, 180 bp, Homo sapiens
  source 1..180: mol_type = other DNA
gccgtgagccaccgcgcccggtgttgaaactgccttggggaccttggccaggctcatggcatccagagctgccagagggaccctgctctgccctaagcctgcatggcacagagcaaaaggggccccagggcatgcagtgcaaactctagaaatattttttgcatgaaggaatgagtgatt

SEQ ID NO: 26857 - DNA, 385 bp, Homo sapiens
  source 1..385: mol_type = other DNA
agaactctggggacatcaggtgtctgcggaggctccctagaagccaccctgcccctgcccaccaggacacctgggcaagacgtgaccaccagtgtaccagcctgcgggtggcaggacacagatgcttttctaaataacttttgaccccctttctggtaaatctttttttcagagttgattctctatgaaatctacactgcaactggggcgggcccgccatgggccaacaacaggctggctcagggctgagggggtctctggagtctgaactccgcgcccgcttgctcctccagggctggtcaggacttgaaattgggtcatttttaacctcaaaaccgaaccgcctttaggaccgaggggagccatcccttcctctagtcgggca

SEQ ID NO: 26858 - DNA, 446 bp, Homo sapiens
  source 1..446: mol_type = other DNA
cttcaagtaatcttccatggaagagtaatgtctcaaagtgtgttctaatcctgaatctaattttgtaacaagagaatctctcagagcatctagtcaattctaatgctagaaataacagtttgtccattgacttttaatttcactgatgtatttttatttctaaaagtcctaaatctttcatttgtaaagtatcctaagtatggttgttttataatcttcatctgaaagtgttaatacctacattttctgctgttacaacaaaataccacacagtgtaatttatcaataatagaaatttatttcacacagttctggcagattcagtgtctgataaggactcactctcttcttctaagatagcaccaacactgtgtgctcacagcctttagttcccacatattaattgcaaaggaatatatgcatccaaacactaagtgttcaactgt

SEQ ID NO: 26859 - DNA, 321 bp, Homo sapiens
  source 1..321: mol_type = other DNA
taaattagttcaaccattgtgggaatttcattactgggtatatactcaaaaatcattctactataaagacacatgcacacgtatgtttactgcagcactaagatgagttcatgtcctttgcagggacatggatgaagctggacctatgtaacaaacctgcatgttctgcacatgtaaaagaaaaaggaaaatcaagtgattttgcttttgaaaattccaaggatagatctgaaggtgaagagcttctggccaaaatgattcagccccatcccacagtggtttgcagggtggggttccatgctgtggccctggcacctgccc

SEQ ID NO: 26860 - DNA, 514 bp, Homo sapiens
  source 1..514: mol_type = other DNA
ctcaaatgtctattttatgatgatgatctgattaaagtcatctttgcaatactgttgaaagaacaatgcctctctatgctttcttaaacttggactttacttaagggtaatccttaataaactttatcaaaacttaataaactttatcaaaacttaataaactttatcaaatgtctgttgtaatcgagggaaacattttctagcccaagttttccccttaaccggctgagtcggggaaggatagagcagggtcgctgacctgggctagacgagcccgaggttgaaccactcgcgttctgggccccggagtccgagacaggcggggaccccggcagctcccggtgctatctctgagcgggttccgagcctccgggcggtcagaattagcctcagagcgccgagcaacgacgcgccggggacctcccgcccatgaggccggaaggggcggggagaacgctgcggaatggtccctgggcgcaacgtcatttccgcgtacgggggagggcgggcctgg

SEQ ID NO: 26861 - DNA, 493 bp, Homo sapiens
  source 1..493: mol_type = other DNA
aaaaagcatcacatggaattctagtgccatctagcatttaaaaaggtaaaagcctccaagaggaaattatttcttaacactgcattttgaacatggcttttccagagataattcctcgtgccactggtactcaaatgtctattttatgatgatgatctgattaaagtcatctttgcaatactgttgaaagaacaatgcctctctatgctttcttaaacttggactttacttaagggtaatccttaataaactttatcaaaacttaataaactttatcaaaacttaataaactttatcaaatgtctgttgtaatcgagggaaacattttctagcccaagttttccccttaaccggctgagtcggggaaggatagagcagggtcgctgacctgggctagacgagcccgaggttgaaccactcgcgttctgggccccggagtccgagacaggcggggaccccggcagctcccggtgctatctctgagcgggttccg

SEQ ID NO: 26862 - DNA, 549 bp, Homo sapiens
  source 1..549: mol_type = other DNA
agggtagacgcttgacagacattgtccaatgaacttgctcaaggtcacagagtttgaactcaggctacagatgctgcagcaactggccccagcaggacgtgacccccgccaggacggaggccggcagctggggggctggagcatgggacccagaacacggactcaggcttgcgcagcctcctggcttctaggcgggagcctagaaaggcgccagcccctttcgcgtgctgctgcagctcccaccagtgcgcttgggtgcaccagcccccttaacgttggtgccggctccctgggtcccctcgccccaggccctgagcctgcgtcctggggtcctgggccgcacgtgcctctggcagctcgaagaagctgtcggggcttgtgggaccgcagactcaccggagcgcagcgcctgggccagggcctgggaccctgctccgccccgcgctccgcggccccccctctcccgggcagcagaagaaggggtgggacccgggcgggctccgggagggggcccgagcaggggcggggcccgcggagactccacggggc

SEQ ID NO: 26863 - DNA, 378 bp, Homo sapiens
  source 1..378: mol_type = other DNA
cagtagacagactctactcctacaaaaaaaaaaagccctccttttttatctgaaatcacatttcactgagccgacagtgtccctacagttcagcccgtggagtgttgatgaccatggattaaatacacggttttcattcctcagagaaggccttcttacaggaaggccttcgtggcaccggcggcggggagtggggcctccacccagagagtctgggagtcactgttctttcctcccctccctcctagaatgggggtggggtggggtggaggggaggggaactggtggcgtccccatctcgcggggtccggaacggcgacgcgcccgcgcccagctgattggagcccttcaggcctcccgcgcccgaccggcagccca

SEQ ID NO: 26864 - DNA, 404 bp, Homo sapiens
  source 1..404: mol_type = other DNA
ccttggccagacgccatgggccgggaaggggctctggcccttgcggggggcgtgggcagcccccaccgtgggcgtcagccagctactcaggaagctgaggcaacagaatcgcttgaacccagaggttgcagtgagctgagaccacatcactttcatcatgcgcacaggccggtccaggctgtgaggctgccccctaccagggacgacgagggccagctccgccgcgccggggaaccagactgccgagcccccctctctgggccgacgccagcccggctgtggactggagaaaaccggctgagcacccatactccgcccgcgcctgcgcaaacccccacctcctctcccgcctgcgcatgcgcggctgggtgcgcccccccgcccagcctgtgacgccacgtgca

SEQ ID NO: 26865 - DNA, 544 bp, Homo sapiens
  source 1..544: mol_type = other DNA
gtccgagctgctcgcgtgccactgcactccagcctgacatggctgtaacattttactctccctactgtccgtaattttaatattaactcaaactcctgagctcaagtgattctcccacctcagcttcggagtagctggaactacaggtgcatgccaccacacctggctccatggagttttaatgtgcatcaccctgagtgagttttaaaggagcctccaagaatcctcctgccaggccagcctgcaccctgttgcctggcatgctgggactccttcctgaggactcacctgtgagcctggacgtgcaaggcagcgctacgcaggttgtgaacgtaaagagcagccggtaaatatttcaggctttgcaggccatgcagtctctgttttggctgccctctgctgccgaagagagagaagctgtgtcccaacttgatttatggacactgaaattcaaatttcatatcattttaacaccatgattacttggatttttttttcaatcatttaaaaatgtaaaaggtatgggatcagatccagaggctcc

SEQ ID NO: 26866 - DNA, 604 bp, Homo sapiens
  source 1..604: mol_type = other DNA
aggtgacctttacatgaagcagggttcccacaggctgaggccagcaggactgtgttccgcgggaagtctcggttagtggctgagctccccggccagacgggcaaagcggacagcgtctgccaggggggctgcggtccctccgaggcggggtcggctgcctcgcgccctcgggaacgggcgtctccagctcgctggcagctgggagcaaatagctggtattttcagagccgccctgccccggacagagaagaccggccaggtctcggccacagcccgagcccagcgcgctcccgcggggcacctggtgacccggtgcagggcgggagggccggtcccaggaacccgagggccggagggcagggcccccttcccgcaccgtccccgggctggcaggagcggccacgacggcacgctccgaggccccgggtcccttgcccccgggcttgcccaacgagggggcaaacaccacgctcaggtggcgtggcaggtcgctgccgcctcggactcccgccccgccctcccgaggccccgccccgccccccgaggccccgccccggcgcggcgcgcaggcgcggtccatcccgcccgcagagccgcagtgccg

SEQ ID NO: 26867 - DNA, 727 bp, Homo sapiens
  source 1..727: mol_type = other DNA
ccgagatcgcgccactgcactccagcctggactaatataaaaagctgttgaatttctaaacgcatttccaattgacctttatcaattgccaatagttttcaaagtgacaaatgctgaaatttctaacgttactttggaatctctttgttatagatcatctgtaaaactaatgccatattgaagaaagccaaagttataaaactaaatttgtgaaacagccctttatagtactaaatttgataagggcgaatttattcttaattgctttataaaaatctaaaatctaacacaggtttttaaaaagtaaatttttcaagcagttcatttcctgatgttcggcccaaaagtaaacactgagtatatacatttacttcaaattaaaaaagcatacttttaaaggtaatgtccaaagaattaagaatcacgagaacggaactgctatttgctaacgaggagcccagcgctgcggctctgcctcgctgggccacccctttcgggcacgaccgggagcgggtgctcctcacaccgagcgcccgggcgagcacagctgcagcctgcggatggagcccagagccctgccctgcagatgacgcgccgctgcagcttcgcccaccctcccacaaaatggctgcgggtggcgccagggatgctgggcgcgcgctccttggaactagagagagccggcgggagcccggcgctgattggccggcctggctggcgggccccc

SEQ ID NO: 26868 - DNA, 470 bp, Homo sapiens
  source 1..470: mol_type = other DNA
tcccagctactcgggagtgagcctgcaaaaaaaaatccaagattgcttgttagaaattaacattgctttttgaaaaattgcctaataaaacaattctttagcagtgatcatatgcttaagaaatattccataacatctagccaagaaaattcctagtgaattcgtattaatctagggcagatattacaaatatttttaaaagactattttaaaatcaaagggtggtactgtggtgttgaccttgggcaagttacctaacttctaatcccgggtcttaaaactgggaatgaaatacacactgcagtccaagagagtttcattttaatatcaaacagccagctctgctgcccgtagagtcccccggccactggaaaagccgtctctgctcagccgaggggttctgccatctccggggcggggacctcaccttggaaagacccctcccactccggccggcgccaaagcgcgga

SEQ ID NO: 26869 - DNA, 836 bp, Homo sapiens
  source 1..836: mol_type = other DNA
acgcccccgaccctagttaccggggagagccgccgagggcccaaggcgccagtaaggctccgcgcacgcagcccagcccgaggggcgcccgcccgggcgctcggtgtggggcctgatgcagagcaggaggaggaggtccgagtgggccccagcgctctcagggtctggcgccggcccctctgcctcccgcctggcgtccagggagcggggtcatgacttcgggcggcgccaagcccccagcgtaagggtccccccggcttccccgggaaagggtcggggtgcgggtcagcggcagggcagggcgctcccgccgcggtgcctggggaagggagcgggggtggggctgccgcgggccagcgggacacaggcgcggacgggggcggccgcggatcgggcggacggccactctgggaggggctgggaggtaccgcggccccctgcgggacgcacctgcgcaaagtgagggaccggccccccccccccccccgctccgcccgcttcattcccgcgtcggctgcgcagcgcggctcagccgccgccgggcccgtcaggcgtaggttctgcttcaggcggcagtcggcgtccagcgccgcggcggccgagccggaggaggacgagcccgcggcggcgcagcgctcatgctccaaggcgacgggctcggtccgcttcctcatcccgcggccgacagggccagccgccgacggcgcccgctggcctgcgccgcagtgccgccgctcacagccgccgccacccagagcccggagcccggaacccgccgcccagcccaggccgctgcgccggctacgaaccagcggcgggggcccgccagccaggcc

SEQ ID NO: 26870 - DNA, 447 bp, Homo sapiens
  source 1..447: mol_type = other DNA
tgaccagccactctgtacatggtggctgcctgcagtcccagctactgggggttgggacgctgaggatcgccatagccgggaaagtcgaggctgtagtgagccatgaccgcgccactgcatcccaggctgggaaaaagaagtgctccaatgtgcatttcctttcgctcaaaaactttcagattttgaagcatttcggatttcagatttgggatgctcaacccgtattgatttaatatgaacgtgacgacctagcctggccggccagagctgcgaaccgccaagctccgcagcgcgcagggctccgcgaggtcagctccaagggtcaccccaggctccaaactggccagagccgccctgagatttgcggaggccgccttgccccccgccccctgttcgcccactgcgccgggacaccgagggggcggtgcctcgaggccgggaggagtg

SEQ ID NO: 26871 - DNA, 499 bp, Homo sapiens
  source 1..499: mol_type = other DNA
atcaggtaattggcctgtacctgacagtcaatttctggtcactaagttctgccagcactaggggtttaaaaggcggtcgacgtccctcatggcgcgggcccaggcagacagggattccaccccggccgcgaggcgggaaggcgcaggctccaccttcccccgtcccccctgcgcgtacaggcaggaccgcgggcgctcaaggcagacatcaggcccgccgacgtctccgcgccgcccgcccggccacccggagagcctgctgcccagcgcctggcagcgcggacaacctctctcggggaggtgatgacggtccctcgcgccggagggctgagaagtcgccgcatccggcggcgccgacacacgtttccagggctcttgagagaccataccctgggagtctcgcgggatctcacttttctcggcggcgcagggaatgagacagatcgcgggaattccacccgcgccgggagatggtctggtgacggcagtccgccttgcg

SEQ ID NO: 26872 - DNA, 392 bp, Homo sapiens
  source 1..392: mol_type = other DNA
atcaggtaattggcctgtacctgacagtcaatttctggtcactaagttctgccagcactaggggtttaaaaggcggtcgacgtccctcatggcgcgggcccaggcagacagggattccaccccggccgcgaggcgggaaggcgcaggctccaccttcccccgtcccccctgcgcgtacaggcaggaccgcgggcgctcaaggcagacatcaggcccgccgacgtctccgcgccgcccgcccggccacccggagagcctgctgcccagcgcctggcagcgcggacaacctctctcggggaggtgatgacggtccctcgcgccggagggctgagaagtcgccgcatccggcggcgccgacacacgtttccagggctcttgagagaccataccct

SEQ ID NO: 26873 - DNA, 318 bp, Homo sapiens
  source 1..318: mol_type = other DNA
cacagacgatacagaaatgaatgtgtgcgctgtgttctaatgcaactatgggcactaaaatttcttgattttcatgtgtaacaaaacactgttattttgattttttaaatccatttacaaatgtaaaaatcagttcgagaaccagcctggcatcaggtaattggcctgtacctgacagtcaatttctggtcactaagttctgccagcactaggggtttaaaaggcggtcgacgtccctcatggcgcgggcccaggcagacagggattccaccccggccgcgaggcgggaaggcgcaggctccaccttcccccgtcccc

SEQ ID NO: 26874 - DNA, 483 bp, Homo sapiens
  source 1..483: mol_type = other DNA
caaattttggatgctgtgatggaaatgtcacttgattggtcagtgccacacgtcgattggcttccagagccccagggcttttagaagcccggcaggccagtgttctttaaacagtgaaatttcagctgacagcatgccttgagacccatgggatctgctgcagcgaggccctgcctgcctcaccagatgtggtgagcccatcctatctcactcggttgaggggagtcctgagaacacagcaggcgtcctgacccctccctccctcggtggaaggggttggccgtgggacagaagaagacacccgcggtcccctctcccacgccgacccaaactggagcccggatccagccgccgccgcggctgcagcaggagcctccctgccgccgcgctgcggtggcgttacagcctgaccgccaggagcggagcgccagtcgggtgggccaatgcgcatgcgcgaggcgcgagcgccttctcccgtcacag

SEQ ID NO: 26875 - DNA, 574 bp, Homo sapiens
  source 1..574: mol_type = other DNA
ataacatgtaccctataaatatgtacaactaatatttatccagaataattaaaaatttaaagcctgaaatataaagtctacgtggtttggcaagccataatgaaagaattctggcattgatgcataattagataaataacaattagaaattgaaatgcaaatgtaaattgagtatactgaattatgtagctgaaaccttaaattatttggtaaaagactatatttttaataaatttaatgggaaattaataaaatattagaaaattttaaaaataattgtatatttacagtgtgtacctggagaaaaattaaaccattgaagaacagtgggaaaattatttacctatatcatagaaatgggaaaatatgcttaatgtatgtatagggctacctaaataagaggagtccttccgagaagtccttccaaggattccgggtcgcgcagtcccgggtggacctggacgactcccgaggactctggggagtgtagtccaccgaggggatgcgacgcgcagggtcgcatagcctccgggccgcgccgaggatgctgggtagcgtagtcccggccgcgctg

SEQ ID NO: 26876 - DNA, 194 bp, Homo sapiens
  source 1..194: mol_type = other DNA
gacatcgaggttccacaaaaacagagtctcactctgtaggctggagtgcagtggtgcgatctcagctcactgcattctcctgactcagcctcctgagtagcttggattagcagcaagtgacttcttgggcaagtcattttccctgggaagatgtcccagttggatcaaatgctcagcttatgtgccacacacta

SEQ ID NO: 26877 - DNA, 546 bp, Homo sapiens
  source 1..546: mol_type = other DNA
gaaagacattacacatgtgtatccttctgttagaaagctgagacacatgtgtatccttctgttagaaagctgagaataagtaattctcgtttaatttattttttaaaatttttttatttttattttggagtgcaatagcgtgatctcagctcactgcaaccacctccctagtagctgggccaggctggtctttaatttagtttttaagatttaaatatcttttaaacatttataggaaaaaatatattttaaaacagaacataatcatggagaacaatattgtcaccaaacatgacaattaaagcactgaagagctcttgagatatctgactaaataattcaaatacatgtgttgaataaatgttcttactatttatcagagaagtgcaaagtaatttttaagttaaatatttcttgatatgtatttattatgcattaattaattcctttgtgggtctcacaggccaaatggctttaattgacctgtccctttactggcactgataaaagcaaagctcatctctgccgtgctgcagggaaccctat

SEQ ID NO: 26878 - DNA, 199 bp, Homo sapiens
  source 1..199: mol_type = other DNA
gtggaactaaaggaaagagatgccttttcttttcttttctgagacagttgctctcagtcgggagtgcagtggcgcgatctcggctcaccacaccaagtagctttttcaaaacccgagttcagaagaaggattctgctcagatctcacccagcagggggctgtgacagacaggctggtgctcggaggtgcgagccacagg

SEQ ID NO: 26879 - DNA, 398 bp, Homo sapiens
  source 1..398: mol_type = other DNA
cagctccaagacctgtgggggctgagccagtctgttcagctgctgggtctctcaaagagtctggatcctggccccttggaaggcccaggcccagctaagcctcagtttgaatgatgccaaaataagattttcataattcttcaggtcagtgaaccgcctgcatcaggatcacttggggcacttgtttaaaatccgcctctcttggaagtccagacccaggaatccaaccctcacccggtgcgtagggctggcagaagcgggtcagctgagctctgcactttcagaaaagtcactgagcggccagggccttggggcggggaccccggggctgccctaatggggcggggctggatggggcggggtcgcggctcctcccccggccgaggcggcgaggggag

SEQ ID NO: 26880 - DNA, 397 bp, Homo sapiens
  source 1..397: mol_type = other DNA
ggcgcccgcgttagccaggatggtgagtgcaatggctcagttcaggcgattctcctgcctcagcctcccgagtagctgggattacaggtgcgtcgtgacgtcaggtgatccacccgcctcctgggtattgagggacattcaataaatatttaaggagtgaataaacaattggatacccaataaatgcatgtatgaataaacacattcttagttattcggaatagggcattcgggtcgcatgcccaccgcagtggcccagagcccctgtccggaccgctaacaagttgcttagcaacccgccgcccggccctcggccaccgctagagggcgagcgggcggggagacgtgcacgcgcgcgcgcgtgcgtgcaagcgtgtgtgcgcgcgtgcgcggcgcg

SEQ ID NO: 26881 - DNA, 278 bp, Homo sapiens
  source 1..278: mol_type = other DNA
atcacataaactctttttttttgagaccaagtcttgctcagtagctctgtcgcccaggctggagtgcagtggtgcaatcttggagtagctgggaacaggctggtcttgaactcctgaactcaaagcctgccttggcctcccaaaatgctgggatcacaggttgcttttgcatcagccagaaaaaaaaaatactttttagaagaaaacgtacattatcatgagtcatgaggtgagggtgcagctggaggcgccgccccctggtgactgggtactcttcc

SEQ ID NO: 26882 - DNA, 528 bp, Homo sapiens
  source 1..528: mol_type = other DNA
tctccatggcgaccgcccgcgcggcgccagcctgacagtccgtccgcgtcacaggcctggcgtctaacggtctgagccgctggttcagacgctgacacagaccggcccgggaagggaggggggagactgtagctccgcagctgccgcgccgtgggagggagaccctaatcacgaactgttgcaggttcaggaaatttttgcaaggagctgcaaattcaaggtggaatcgaatgcagcctcaccccacccgggagggatctgggtaggccctgtaaaggagcgcccgctttaaatttcggtcctgatatttgtagatcagggtccgagaagcatcttccaagagggtccggaaacccaggctctctgggctatccagagccctgaggtcttttcattataaggcacagaggagcccagtgcggccctcgccgtcgggacctaggagcgcgggtcacgcccccatgccgcccattggctgcttttgaacgttctgagcccgcccctccgggggccgtggcgtgtttataa

SEQ ID NO: 26883 - DNA, 324 bp, Homo sapiens
  source 1..324: mol_type = other DNA
gcagtcggctcactgtctgctgcccaggctagagtgcagtagccggatctcgactcaccgcagctggggggtttcaccatgttggctaagctggcctcaaagcgattgggactactgtctgcagagggtctccagaggcaggaccccggtagggacactgatgcaggaggcgctctgcagtgcctccccccaatctgtgggccggggtgcccccagggacgcaggctgtgcgctcccacgccctgccgaagcaggacgttcccacgctggggcggccccgagaaaggctgtggggcgggccgggggcgggcgcccgcactcagg

SEQ ID NO: 26884 - DNA, 507 bp, Homo sapiens
  source 1..507: mol_type = other DNA
accctgggctccggagaggtgcagcccccggccccggagccctcccgggggcgccagaaagccactttgggcctgtcgtggggccgtcgagcaggcctcgacccctcttcctgacctgaggagaggcccagcgcctcaccctcacccagtctttgtgcagggcgccggcggccattgtgtccgggcggggaatggaggacccggcaatccccaactgccacgttctgggcctttggttgggggtctcctcaacatcacagacaggcctgggggtggccttcccaaagtcagattgcagatctggagagtactcctggctcccagtaggaggcggaggctgggctcccgggtggcaggaggccgcggctgcggagcggccgccctcgatccgggcgatggaggccagcctgccgggtcgcatgatccctccggccggagctggtttgccagccaccgcgaggccggctgagttaccggcatccccgcagcctgagtgactttccgagg

SEQ ID NO: 26885 - DNA, 721 bp, Homo sapiens
  source 1..721: mol_type = other DNA
gccggcagccaggtaggccggcccgggtccgcggcgcggaactcggccgcgaagagctcttgcgtcggaagctaccgggccgatgaagggggatgtggccccccacggctcgcggggctcgcaggtgagagcgccgcctcccctgtgcgtgacagccgttgcgcccaataggagccttcgccgtcccgcttccgtgccggctggggctgcgctggggcggaccgccgggggcgaggcccctcctctcaggaaggtctagggggcgcccccgggggagggcggttgcctagcaacggggcggtggctcggcgggtacccggcctagtgagctcgagaagccgctaggccgcagccggcccaccctgggctccggagaggtgcagcccccggccccggagccctcccgggggcgccagaaagccactttgggcctgtcgtggggccgtcgagcaggcctcgacccctcttcctgacctgaggagaggcccagcgcctcaccctcacccagtctttgtgcagggcgccggcggccattgtgtccgggcggggaatggaggacccggcaatccccaactgccacgttctgggcctttggttgggggtctcctcaacatcacagacaggcctgggggtggccttcccaaagtcagattgcagatctggagagtactcctggctcccagtaggaggcggaggctgggctcccgggtggcaggaggcc

SEQ ID NO: 26886 - DNA, 237 bp, Homo sapiens
  source 1..237: mol_type = other DNA
gctgctgctattttctaattgattaaaaaaaattaagatcgcctctaattaattatcggtgtataaaaagaaactcctgcacgcatgcaggcgactccatgttacgagaataatttttaaaaatagagttttcttccctcccaaatagtttggagcagagcactccggtctttgtaataacgtactcctaaagactacacttcccaggaactccgggccgcgtagcctggaattcgc

SEQ ID NO: 26887 - DNA, 304 bp, Homo sapiens
  source 1..304: mol_type = other DNA
gttcagagctcagttcaaccgcactgggttcttctgaagaccatttgggtggaacttttgcttcctggaagagtatggtttttaccagcttataccaaatttgaatagtagcctgttcaaacagaccaaataaattcttatgtgcataaagtgaaatatatattattcatatattattctcccttttttttttgcacaaatggatagcacactatggcttcccatttgacagagggctgcagtcaggacctgaacctggataacattttatcttactttttaaaatataaagacggggtcttgt

SEQ ID NO: 26888 - DNA, 363 bp, Homo sapiens
  source 1..363: mol_type = other DNA
tcttactttttaaaatataaagacggggtcttgagaaaggctctgggtgatggaaggctccttggatcatagcagagtgccaaaagactctctgccagcccccttcttccatgtgggtcatgggtgaaggggcacagagcactctccatctcccatggctactcagggcagcctccgtgtccccagctagggtcagggagattatccctgggactttgtggctctagccaggttctggggagccccaggagatgtggcacacaggtgggcagaccagggctcagcctgggcatactcttgcccttcagtggggaaagggctgctcccccagccatggtggggccaagagtgacaggtggcggc

SEQ ID NO: 26889 - DNA, 595 bp, Homo sapiens
  source 1..595: mol_type = other DNA
ttccacccccagggcagctggggggcccacagcccctctctgtcccatgaagggtatggacctcagggctcagggagcactctcttcccttttgtgggccctgagtcctctgtgagacgactcactgggagacagcctgggagtgacagccacagcacccgacagccgcggtctcgagtcacagggacacggagatgccgccgcacggagaccggaggcgggcggaccgagctggtcagcgccgggccgcggcggccggggcggggaccggggaggctgcgcggggcccgccccctaccttggtcatgccattgcccatgatcccgggggcggcggtccgggtgcacccccagctcgccgcccgggaagcgatccggtcacagctgccctgacggcccaggcccgacgcctgcagcctggcggggaacggggggcctggcgtccgcggccctgcccagccctgcccagccaccgccaccgcccgccgacccccggcccgggagggaaatggtggtggagccgccgctgccaccgccgccgccgcaggctcctcctaccccttcggtcatgtggggcccccgcctcgggtcgcggc

SEQ ID NO: 26890 - DNA, 461 bp, Homo sapiens
  source 1..461: mol_type = other DNA
gaagaaacagttttatttttctcacaatccccagtcacctactactatagattgaggggtgggggtaaagctggtgcagctgcttctattgggtgtgaacagggcctcaaaccttggtctccagacctgatgtagtcttagtgtgcctggtcccagcagagcttccctggatggcaccatccctcctagggggaggatgtatcggaaggaattacccacttatcccgttgagcagagagccctcggcgccagccccgtcacgtttctgctagaagccgaggcggggtgctttcccccggggcccgcagggacgtccaggcagagccggaatgggccggccggggggctctaggcgacatccccccatccgcccgcgcctgccggtgccagggtggggtaaggcccccgcccccacctccggaggtggcggccccacgcggccccaacaaactgccgttgtc

SEQ ID NO: 26891 - DNA, 575 bp, Homo sapiens
  source 1..575: mol_type = other DNA
tcctctgtgcgactcactgggagacagcctgggagtgacagccacagcacccgacagccgcggtctcgagtcacagggacacggagatgccgccgcacggagaccggaggcgggcggaccgagctggtcagcgccgggccgcggcggccggggcggggaccggggaggctgcgcggggcccgccccctaccttggtcatgccattgcccatgatcccgggggcggcggtccgggtgcacccccagctcgccgcccgggaagcgatccggtcacagctgccctgacggcccaggcccgacgcctgcagcctggcggggaacggggggcctggcgtccgcggccctgcccagccctgcccagccaccgccaccgcccgccgacccccggcccgggagggaaatggtggtggagccgccgctgccaccgccgccgccgcaggctcctcctaccccttcggtcatgtggggcccccgcctcgggtcgcggcggggggccggacaaagccccagtgtgccgggcccacggcccgcgggacaacggcagtttgttggggccgcgtggggccgccacctccg

SEQ ID NO: 26892 - DNA, 442 bp, Homo sapiens
  source 1..442: mol_type = other DNA
ttatatatatctcatatatattatctatagatctaataagatctatgcattcaaataatgaaatgcgtagatcttaagttttcagtttagtcaattttgacaaatgcatatactcatgtaacccacatctttattaagagatggatcagtacttttaaaacttcaatgagctggcagaccagcctgtgtctgccccagatctacgactgaccaactgaccaggtgacttagtgagtaacttcgttaagtaaggaaactcagtacctgacaacttttcaggtggggcagagggagccagcctctgaacgaactgccccagggtcgtcgggggacctaggctgccaggacgcccaatagcctccagaggttctggtggaccagagcctgcgcactccgccgagagcatgcccttggctcatccaatcagagcggcggatccagg

SEQ ID NO: 26893 - DNA, 226 bp, Homo sapiens
  source 1..226: mol_type = other DNA
tttttttaaccaaaggctgaaacaagatttcactgtggggtaggctggtgtgctactgtgggggccacactgcagggagctgcaggcagcctctaggagctgagagcagtccccagcagacagctacaccttgactgtggccttgtgagagctgagccaatgatgcagctaaggattcccatcttttgtggagatggcaggtctgtcccagctgcaaatgtcatcc

SEQ ID NO: 26894 - DNA, 402 bp, Homo sapiens
  source 1..402: mol_type = other DNA
taggccagctactactctggttaaacggaattaaaagtgattactgctgccatcatagctcagggcagcctcgactccccagatgcaggtgctcctcccgcctcagcctcctgagtagctgggaccaacgggcgcgccattcaccccctttttataaattagaaactgaaagtgtcagagattaaacataagtcacactgcttcttagccaggggaagaataatatttcccagatcctaatcagctgcatcctaagcacataaaactgcttggcacataataagtgctcaagaggactgagctctctgagcctgcagagggcgctccagccccgcccccaaagctaggccccgcctctcgcagccggctggcgcactagtgttagagcctgcgcaccctgcg

SEQ ID NO: 26895 - DNA, 298 bp, Homo sapiens
  source 1..298: mol_type = other DNA
cagttctgagatccagacttgctaagactagggcagcaactcagagctgcagctttctcagcttaaagggttactggggggcccgcccaagtcccccaagccccgcgcctccgaggaaggagggagagggtgacctggggtgcgccccgcctcccctgcttccgcattcccgggggctgcccccccttcggccgcagctcaggcgggtgggggcggggcggggcggcgccaggaggaagaggagccgcccgcgcagggtcctccccacgccgcacccccctccgccgcccggaaggct

SEQ ID NO: 26896 - DNA, 255 bp, Homo sapiens
  source 1..255: mol_type = other DNA
ttctccctcatttcaatatagtaagcaagttcattctgttagagcacagaatactaaatagcaattcagataattcctctccacttaactcagtgcagcaggcactggccatctaatctcagattcaagattccaaatcctctccaaaaagtcaagaagtttaggcggaggaaaggacttctgagatctttcctgagcccaggcttaatagggccctgtggtcccgaaggccaggtcagaccggatggcactggg

SEQ ID NO: 26897 - DNA, 301 bp, Homo sapiens
  source 1..301: mol_type = other DNA
cagagtagctgggattacaggcatgtttagtcactatgaggttaaactagtattatgctcattttaaaataaccttcgaattcaagttaatagtaatgattaattttttaaaatcataacttgctagggaggcagtgttgactccccttgccttgccaaggtcacacaatggaacttggaattttctggctagaggccttgagcttcagctgcagggtcccaaggctgtgtcctccacaccccctgccctccccatcagatgggaggggcaggaactccagggctggtggagtttccgacc

SEQ ID NO: 26898 - DNA, 288 bp, Homo sapiens
  source 1..288: mol_type = other DNA
cagcttgggagtcctctgagctgccaggaagccagggtggttccaacctgcctggaagtctcgggccgcggagtaggcctcggtatagacccctgggtattaaaactctgttctaaatcttagggcagggttagaatccactgaagtgagagttcggatccttccactgggcagattagaatcttgagtttaaaaatccttcagggttcgaatccctaggagtcatccttgtggacgcgttagaagcctcctatggagttagcctcgctcagggcgcggctaaggcgc

SEQ ID NO: 26899 - DNA, 355 bp, Homo sapiens
  source 1..355: mol_type = other DNA
cggtatagacccctgggtattaaaactctgttctaaatcttagggcagggttagaatccactgaagtgagagttcggatccttccactgggcagattagaatcttgagtttaaaaatccttcagggttcgaatccctaggagtcatccttgtggacgcgttagaagcctcctatggagttagcctcgctcagggcgcggctaaggcgcccagatggcctgcgggcgccaccacgtccctggtcccagctcgagtttcccggcactggcaccccggaacctcaggggctgccgagctgggggggcgctcaagctgcgaggatccgggctgcccgcgagacgaggagcgggcgccca

SEQ ID NO: 26900 - DNA, 463 bp, Homo sapiens
  source 1..463: mol_type = other DNA
aaacagagtctatctcttgaggagagaaaccgtatgctccaccacagtggtgcccataggtggggattagataaaaagagtctaatgaactgttagcataatgctaagtgctgcagcacacaaaatgctcggcaagtgctgatgattattattaatcattattattcttttaatagcttttttaaaacagtctaagatagcactggtactgtattcagtttaaagtgcaaatgaactttgctctttttcacagatttggaaactgatggagtcacacactaagctagtgcatgatcatttaaaaaataatgtattgatacataaacatatactgacaattatttattgaatacatcctatgtaatactgtgtcactgaatccttcccatttcacagatgggaatgaggataaaatcaaacaaatacttaaatatataattacaaattattcttggagtcgttt

SEQ ID NO: 26901 - DNA, 476 bp, Homo sapiens
  source 1..476: mol_type = other DNA
agtgctgatgattattattaatcattattattcttttaatagcttttttaaaacagtctaagatagcactggtactgtattcagtttaaagtgcaaatgaactttgctctttttcacagatttggaaactgatggagtcacacactaagctagtgcatgatcatttaaaaaataatgtattgatacataaacatatactgacaattatttattgaatacatcctatgtaatactgtgtcactgaatccttcccatttcacagatgggaatgaggataaaatcaaacaaatacttaaatatataattacaaattattcttggagtcgtttcctgccaggcgctgagagcacgagcgcccggaataagggaggctcagtttctgccaggagctaatatggcttccttagcaggagctaagactccttttcccctctgctgaccgccactacaggagcggttgaagccaggtggagtta

SEQ ID NO: 26902 - DNA, 192 bp, Homo sapiens
  source 1..192: mol_type = other DNA
gagtctcaatttaacaggggttggattgctgcaactcatcacaaccccattttcatggggagaaaacgcctcaccttccaaggtgggccacagcctggtcccaggccaacttttagatcaccccactgtggtgtgggaaaggttcaattccccgacaactttcctgggtctctaagggatccccatgaattt

SEQ ID NO: 26903 - DNA, 415 bp, Homo sapiens
  source 1..415: mol_type = other DNA
ttcactgcggtattcccagtacagagaacagggctttgctgaatcactggactttctcatctgtcaaatggaaagttggacacgctgtgcccttgcaactaaggcagagaggagaagagcatgccccgtcccgctctgaggttctctcctggacggtaaccggccgggtcccaggagcccgcaggcatccccgggagcggctcagcggccgtgcccacgcggcggcgcccatgtcggcccgggaacccgagccagccgcggcgcacagtcggggagggaaggagggacgcgagcgcccgccccgctcccagcggtccctgcgcgccgcccgcgcaccgccccggccgctctagcccgcgggcgggcgggaccatagagatcccgcggcaccgccccctccacgacccgagcgccc

SEQ ID NO: 26904 - DNA, 625 bp, Homo sapiens
  source 1..625: mol_type = other DNA
caactttcctgggtctctaagggatccccatgaatttgagggagggagcaggtgcagcttatctgcgtcccccagacccgggtccctggtaaggtcagcagcgccttatctgggtctccagggagcctaggggtcgggaatgggggaccctcaggactgcgctcggaagggaggggaccggtggcttcctcgggtcccccagacacaggtatggggtccagggagatcgtcaccccagggcctatctggggccgggttggcgcagaccgggccccgggtcgggggtgtgggcgaccgcgctgaggggcccgagatgaggcgcgccgccgctccgggtacagggcgcgcggacgcagcgagacggcctcccgcccctctccccgccgtcccctggggccctcgccggcactcaccgcgctcggggccccacgctgcgggccgggccgcgctcgggctccgccaggccccctcaggccccggtagtggcggcggtcgggccatgagccgcgcgagcgggcgctcgggtcgtggagggggcggtgccgcgggatctctatggtcccgcccgcccgcgggctagagcggccggggcggtgcgcgggcggcgcgcagggaccgctgggag

SEQ ID NO: 26905 - DNA, 362 bp, Homo sapiens
  source 1..362: mol_type = other DNA
tatttgattctaagagcaatgagactccattaaatcgagtattaatcagaaagtggcatgatctgttttatttatttatttatttatttatttattttaatctttatatggagtgcagtggtgccatctctctcactgcaacccctgcctcccgggttcaagcgattctcctgcctcagcctcccgagtagctgggattaaataattactctggtgcctataggtgttcgtattgagtcactgggggcaccctacataatggatgtgaaagcttttagaaagttccatttacagatgggatgcgccactctccccgcttaggtgggtgaggagaccgaggtgtgttgggcccccgcttgcta

SEQ ID NO: 26906 - DNA, 529 bp, Homo sapiens
  source 1..529: mol_type = other DNA
cacgtgggccgaggccgcgcgcctggtgaggcggacagccgaggggggctccgtggggcccggggtggggggggctcgccgcgcacccccccactggggggggaggggcaaggccctgcccaccgcgggagggggcggggccatcttcctttaagaacgggacagccccgcaaggcgaggggtggggagcgctccgcccgccccccccgccccgcgcagctaaattccggcggaggggcgagctggcaggccggctcctcccactctgggcagcggggtcccgcgtcccctcccccactatttgggaagggtcggaagctcctccctcgcttggtggtgcctttgactccgggggtggaaaagcgaccccagtggagggaagcaagtgcttactccaggaacgctactcctagggcccttcgtaagacctgctgagcctcagggtctgggatagagcctgagaaacgcagactgggctgtttgcctcactttgcaaagaatgtatgttggacaaagacaaagtatctct

SEQ ID NO: 26907 - DNA, 287 bp, Homo sapiens
  source 1..287: mol_type = other DNA
ttcgaatcctggctgcaagcccagcctgaggcctctctgttgcccaggctggagtgcagtggtgcgatcacagctcactgcagccttgacctgggctctgttgcccagtctgggagccactgtgcctaacgtttaaaaattctggtatgactctgaattgttttcaaagctgttggaaatttctaagaagcgtgcggggcaggagagatcgtccagtgccctcatgcatgcacctcctgcacatgtgtgctatgcaataatagcagcctggggaagctcaggccgca

SEQ ID NO: 26908 - DNA, 582 bp, Homo sapiens
  source 1..582: mol_type = other DNA
ggggcagccggtgggcagcgcgccgaggagctcgagcttgaacttgatcaagcactgggggggtggggcgggggtacggccgagagccggccacgtgcctggctttcccagcccggggtctcgctccggccgcccgggggagccgaaccccgaggcccggcagccccgccccacaagtacccgcgtccctggggacccgaaagacgcatgggggtcgaaggctgcccgaaggggccccgggcgccgagagttcctgagggtgcctgagtcactgcctgaccgcagacagcccgccgggtgccctctccccccagcccccaccggacccagagaccgcagcctccgggagcgatgggtaggcacagatcccagcgccttctttccgggctcagccccgtgcaaggatcttcctcgaagcgcttcccccttaagagcgcgctccccaccgaagcgcacggcggcgcgtccagcgcgcccttggtgcctcccccttcctccgggccgcggcgccgccgccgctgccgccgctgctcgcctgggccctcctcctggccacccccgcccccgggccgggcagtgacg

SEQ ID NO: 26909 - DNA, 409 bp, Homo sapiens
  source 1..409: mol_type = other DNA
aagctgaagctcaggcatcaggatccgggagaagcatccagtccaggcggacgggcctccttccatgaaaggaggctgagcccctgtccaggttcaaattgtgaccctgtgccagggacagctccataaaatgaggataataatacttcattcatgcctttttttacaaacatttgttgtatgtctgctgtgggcccaggtggtcacactgctgagatctaggagacacttactatatgatcattgtcctcctagagtatcatcaggtgaccaaccatcctggtttgtccaaaactgagggttttcctggcacagtcccaggcaaactgggatggtgagtcactgatatagtttgactctgtgttaataattctcatgatagtgagtgagttctcacgagatctgatgg

SEQ ID NO: 26910 - DNA, 731 bp, Homo sapiens
  source 1..731: mol_type = other DNA
gtgggattgggctgaggccacaggcgacttcccagggggcctgggcctgtcccagagcagtggggcaggcttgggggccccgaagggcggcgatgtggggttcccccaggggaacactgctcttctggcttcggctcacgggagaggtcaagtcacttgcgggagcgagggagggggagcctgccctacaccttcccggcctggctaagtggggcggggcggccgggaggtcggcgtctgggctggggtctgcgccctactccccgcgggaccgccgcgtccgggaggagcggggcctgcgaagctccgggcccggcccggccagacggaacgcggttcctgggctgggcactgcgcgcctgtggttcctgccctcccggcggctgcgggcgcggctgcccccgcgcccccaggggccgggccgggcgggggctgggcccggcgggcgggcgcaggggcgggcggcggcgaaggctgcgccgctctaacaggtgggatcccgcggcgtggcgcgcaagctgacagccactgctgccgcccgcgcccaggctcggtctcgctcccagcgctcggggccgctccccgcctcccgcctcccccggccgcccgcggggcggcccgccccctctgcacctccgggcccggagctgcctccatcgctcctgcatcccggccggggggaggaggaggcggagcaggaggcgagccggagccgccgccgccaacgccgc

SEQ ID NO: 26911 - DNA, 273 bp, Homo sapiens
  source 1..273: mol_type = other DNA
gggataaataattgtgttgtacaattaaaaaaaaaatatgtgccagggttgcagtgagccgagatcacgccactgcactccagtccgtctcaaaaaatatatatatattttgagataagtatatatatatatattttttttttttgagactggagtgcagtggcgtgatctcggctcactgcaacctcccgagtagctgggactggcaaaaataaatatattttttaaataaaataaataaattgtaaaatgtactgtctttcttgtttattg

SEQ ID NO: 26912 - DNA, 396 bp, Homo sapiens
  source 1..396: mol_type = other DNA
ctcaaggctggacttaggggctaggtgaagcccttaggcttggcgttcccagtggggattagggtaatattcaccagtgatgatcacggtctcaattggaaatgcaaattctcaggctccaccctggcgaatcagatcctctgggggcggggcccggcaataccaggtgatgcgatgatgataatagcagtttctggaggcttaactcatttaaggagctaccccagccatcattttctcagatggtgaaactgaggttcacgcgtctgccggtgccggcgccgcccctgcccctccccggagcccggcggccgcgcgtgtccgcggccctgcgagggctccccggctccggacagcccagggcggccgggggaggagtgcgctgcgacggccgtg

SEQ ID NO: 26913 - DNA, 272 bp, Homo sapiens
  source 1..272: mol_type = other DNA
ccactcaatatttgttgaatgaatgtatgaatgatataatgaatggcccgggcttttacagaaggagggctggtgaggaaggccagccaaaccccccacctcaaggctggacttaggggctaggtgaagcccttaggcttggcgttcccagtggggattagggtaatattcaccagtgatgatcacggtctcaattggaaatgcaaattctcaggctccaccctggcgaatcagatcctctgggggcggggcccggcaataccaggtgatgc

SEQ ID NO: 26914 - DNA, 479 bp, Homo sapiens
  source 1..479: mol_type = other DNA
tataccttgaaaggggaggctcctataggggcttacaggcgatataaatcattcattcattcaacacatatttattgtttggggagacctgctgagggcggcttctccctcagtcagtccatgcctgcagggtctggaacccaggtagccagagacccctcccttcaagatggctgacaaaggccgggacaggcaggggcaccgcggcgccccggtggcactgcggctggactacagtgggggccctgccctctctgagcccccgcctcaggagtctggttttggacgtctgacccagggcttctgatcccccagggtgatttcactggcccggggccaggggaggctccgagcgatttcaaatttccctcgtccccgcccccccgttccccccgcgcccgggcggggatctgagtggctgcggcgggggcacccccgggcgggggcggggcaagagccgggccggggctacaagggga

SEQ ID NO: 26915 - DNA, 394 bp, Homo sapiens
  source 1..394: mol_type = other DNA
tcaggaggtccttgctcctgtggactttacaggagaggcacaagatgccttcttatggtactatagtcttgctctgtcgcccagactggagtgcagtggtgcagtctcgcctcactgcctgctgggattactattaggtatctttatgattcaataacccattcttacagaaattaattgtaagtgttatcccagcgctttaaaaaaaaaaaaaaattcattgtaaaagcaattttctttttggtttgagtcacaccgggccgaggcgggacctcattggctgcgaccgaccacgtgccgcagtcgccccggcggtcggggccccgcccctcggctaccgttctgtggatcaggggccgagctccgcccccggcgcgcggctgagaccctctct

SEQ ID NO: 26916 - DNA, 327 bp, Homo sapiens
  source 1..327: mol_type = other DNA
acatacaccagggggcaaaagtgaattcattttagctttgctatgcttttattttccccagtaaaaaagtagaactttatttttggacatagagtctcactctgttgcccaggctgggtgcaatggcgcgattagcaattctcaagcctcggcctcccgagtagctgggaaagcaacaacacatgcaatgttattttgtgttatgcacaatgtccaccagtgagaagctcagcatggagcttcacaatttccccatcttaagaaaggaaagtgggtcacaactgggggaggttctagggccaagctggagactagccccatcctgat

SEQ ID NO: 26917 - DNA, 263 bp, Homo sapiens
  source 1..263: mol_type = other DNA
gcttaagtcccagatcagctatgtcaggcagatgatcatggtcaccattttgcaaatgaggaaatgcaggcccaggaaggaccttcaccagggctgggcactgtgccagggacagcagctaatttgcaagaactgtacctgctttgtgggggtgctctgtggggcccagagccccacacaggacaggacccaggtgagaccactttaattaattgtggtatattgggatccaccaaaagccaggccccaggctggctgctgag

SEQ ID NO: 26918 - DNA, 431 bp, Homo sapiens
  source 1..431: mol_type = other DNA
atgtacatgtggtcctgttggattgtgtgaatagacacacaacaccataaaccgtacatgtgactatgcacacacactcacatgcatgtatcacaaccctcatccacacatgtgcatatgcaaattccttcatgcgcctcagcatgtgatcagggtcagagctcagtaactggggtcaggactcagttgtgacagggtcagggctcagtcaatgactgagtgcagccatccccttgcctatgggaggggggatggggtcctcatgggccccatcctcccaggccttggctgggcatgataagataccccaggggcttgtagtggttgggagctgggcctggctactggctacgtggcagccccagcgcacatgtgggatgagacactttggcaaaggccatgtttgcagcattgggagccttataaagtag

SEQ ID NO: 26919 - DNA, 274 bp, Homo sapiens
  source 1..274: mol_type = other DNA
ggctggtcttggaaggggacttaaacgaattctctttaattcttatccagaaagataagatcctgtggcatcagagggtaacactcaatttctgacaaggtcatgcccttaagaaagtcctaacccaattggagagcctggggttagccatcctcactcaaatgtattcattcattggcatccagcctgtgccagggtctgggagaggactcctgttggatgacccaacaatagactctggtgactccctctggagccctggcctcctcccagg

SEQ ID NO: 26920 - DNA, 243 bp, Homo sapiens
  source 1..243: mol_type = other DNA
tgaccctgagctcagctttctcaactggaaaatggagctctgaaaacctgccttacagagttttcataaagactaacagaaaagtgcatctaaagtgccctttagggacactgtcagcacaagcagctgccaggcatctgctgcacctgccgggtgcagacccctgggggcaggacccctgggaggctgtctgactccttgtgggccaaatgtgtccttggatgatcccagaaccaaggcttg

SEQ ID NO: 26921 - DNA, 302 bp, Homo sapiens
  source 1..302: mol_type = other DNA
taaaataaaataaaaattaagtgaaaatttaaaaaaggcatacagcaggagcctctataaaagaggaggagtcacctctccctctcagggttcttgtgaggacagagagctcctgacgacgcaccccagatgagtgtgactcttttgattttaggagaaagaatcctcccaagagatgagactgaggtcccttcctgggctctccaagctaccttgggagcgtgggtccccaaccttgttgaccaaatagcttaactgtctcacctgctaatgtgattggcaaagattgcagaattctcaat

SEQ ID NO: 26922 - DNA, 460 bp, Homo sapiens
  source 1..460: mol_type = other DNA
ggtcatgtgaccttgagcaagtcactcgcgagcctcaggtgctgtaacattaacgctgctgatgcccacctctgggtgactgtgcaggctgcgtgagccaagacctgggcccaggtggtggatgacagcgtcctgctgggctctgacaagcccatgctaagcactgtgtaggcatgcacttcaactcatgctcttaacaacctatgaggaggagctataggattcaaatctattctcctgggtgaattaattgatataaggggtgggtaaggctactccttccttttcccaaattgattatctggattaaacaattgttgtaatccctctacaaaggctcatcctattataagcaataataatattaatggcaacggccctcaggaagctggagtcccaaggctgcctccgggcgggagacctcggcctggtctgaggcctctgcctaaagacaaagccc

SEQ ID NO: 26923 - DNA, 360 bp, Homo sapiens
  source 1..360: mol_type = other DNA
aaatgaccattcagttcctcctagtgcacctggaaggaacctcttaggtgacttaaaatttcccagaaggtgggaggatggcttgcgcctaggtagtttgagaccagcctgggtctctacaaaaaaattaaaaaaattttagcggaagctgcagtgagccaacttaattcaaatatttctacacaaataaaaaaaactaattcaacaaatgtacttatttaatccaatatatcccaacaattattgcagcacataatcaatataaacattatatatatgaactatttgacactatttgaacatttgatttgcacttcaatccgtggctagtggctgccctaaagttcagcaccgccacgg

SEQ ID NO: 26924 - DNA, 403 bp, Homo sapiens
  source 1..403: mol_type = other DNA
gctggaagggcaggggctacagtgagccgagatcgcgtcactgcactccagcctgggaatagcacctacaagcaaaatgctttgcataacgcaatgtagaagcctctctggaggctcgaaattaattctgacaacatcccaaacattttattggctggttacaatgcgttaggcatggtgcaaagcattttccgcgaaaccctgtgaggcaggctgtactgtcaaccccacttcacgggtggcgggcggggttagggtacgaacccctacagcctgacgccaggccccgggatccgcggcccctcctgccccaggcgccagtcaaaagcgggtgcgcagcccaccccggcggccgcgctgctcacctcccgcagcagcaacagtgcccggggtcccgcagcgt

SEQ ID NO: 26925 - DNA, 309 bp, Homo sapiens
  source 1..309: mol_type = other DNA
taggtattattatgatccacattttacagatgaggcccacacctcccccaagccctaagcggtgtcggtagcggtctcctccagggggcggggcctgtcatctttagatctgtcacccaggctggagtgcagtggcgcgatcgcggcttactgcagcctcgattaaactcaagccttggagtccaacgagcccagcccgatgcccagtgcttcgcaccaggatacgtcgggagttacagtcccggccctcgatgggcattccgagcgccgagccccctgcgcgggctcactgggttccgcccccgacgc

SEQ ID NO: 26926 - DNA, 339 bp, Homo sapiens
  source 1..339: mol_type = other DNA
gcccacacctcccccaagccctaagcggtgtcggtagcggtctcctccagggggcggggcctgtcatctttagatctgtcacccaggctggagtgcagtggcgcgatcgcggcttactgcagcctcgattaaactcaagccttggagtccaacgagcccagcccgatgcccagtgcttcgcaccaggatacgtcgggagttacagtcccggccctcgatgggcattccgagcgccgagccccctgcgcgggctcactgggttccgcccccgacgcggtagtcccacacggcggccctcggctcccgggccccgccccggcctcctgcatttgcccgagg

SEQ ID NO: 26927 - DNA, 256 bp, Homo sapiens
  source 1..256: mol_type = other DNA
tcttgatacattgaagaacttcttgcaaattggtttacagtcttatctttccaggtaagaatttcttgaaacagtcaaacttaatcattgaatatgattacatgctatgcttcaatgacaccttgtgcaggaactgccagggctttgcccaggcttaatggtgacctgtgaccctgacaggctggcctgggcagccatgcatcactgggctggagctggagccacctgaccagcttggctagtctagtctgtggct

SEQ ID NO: 26928 - DNA, 414 bp, Homo sapiens
  source 1..414: mol_type = other DNA
agtagctgccagactagctttttatttatttatttttttaatagagacgctagtccaagagctcaagtgactctcctttggcctcccaaagtactattacaggcgtgggccaaaattacgatgatgaaattttaggcatttagaatacttcaggccaaaatgagccagggggctcgctcaaaggcatgcgcaaaagcccggcccccgagcctgggccactgccctggctacaccggggtgggccgtgcgcgtgacgggcgcgcgtgacgccgagggggcgcgccgggattcggcggtcggttcccgcggcttccgcgtgcgttggcctggcggcgagagcgcgcggcgggggcgtgcccggcgggcggggcggggccagccgggggcggggcggggcgcggcctaacggcggcg

SEQ ID NO: 26929 - DNA, 493 bp, Homo sapiens
  source 1..493: mol_type = other DNA
atcttttaactttttattttaaaatgtagattcacaggaagttataatgaaaaatcttcactcaatttgccccagtggtaccattttgtgtaactatagtatggtatttagcagaaattgactgagcagctattatatgctagctctttaatatgacacttatattagcagttattttaatgttaaatattatgttatttctgacatttatatttggatctgagaggcagcttgtgtgaatcatttacatacatttctgtttatattccccaaattaatttgcaactttatatttttcatccaattatatgttcaaaacatatttttaataattgattttaagaaggaatttgttatattaggatttaaaaactggctcaaaaataggactttaaatggtaattgctaaacatttgaatgttcggatttgcacagataggttttgcacaatatccttgctgttattgtcagacacgtatttagttaatgtcac

SEQ ID NO: 26930 - DNA, 420 bp, Homo sapiens
  source 1..420: mol_type = other DNA
caggtgcctgccctctccgaggagactccagccatgacctgcctcagctcagccatcggatgggacctcctgggccaggcttatgaagaggctgggtcttttcattcgaaatcttcccaaaaaattcctttttgggtatttgatagtttctgttgctttcaaccaggcaagaagaatttcatttagtcttttgtttttctgagacagagtctcactgtatcacccaggctggagtgaagcggcatgatcttgaatagctaggtttacaggcctgtgccggaccctgacctcaggtgaatttatgatcattagcccagttttacagctgagaaaccaatgtgggccctggaaggcggtgctcagagcctgcaattggtgaggtcagcccgtgaggtcacagttgccagggcccagggggca

SEQ ID NO: 26931 - DNA, 385 bp, Homo sapiens
  source 1..385: mol_type = other DNA
ttcaccatgttgatcaggctggtctcgagccagctgattacagggattccggtggtgagccagggacttgcaggaaagcccgacgtcccagaggctctgttctgaacctgcgggcggggcggggcctatgttccggtgtccccacgcctccagcaggggacgcccgggctgggggcggggagtcacaccgcgcctggtaccatccggaagcctgcgcgcgccccgccccgccattggccgtaccgccccgcgccgccgccccatcccgcccctcgccgccgggtccggcgcgtttaggaaccgccgccgttgttcccgtcacggccggggcagccaattgtggcggcgctcggcggctcgtggctctttcgcggcaaaaaggatt

SEQ ID NO: 26932 - DNA, 262 bp, Homo sapiens
  source 1..262: mol_type = other DNA
aacatgtaacaaatacagtggcatggaggcgggcgtcgggatgcctgggattcggccgcacccaaaaggtgaagtcctggtgggttttacccacttgtgtcgcccctaggttctgctcccgacaggccgtcgcgggaccggagccctcgggcgcctccccctccgccgtggccgcggaagcgcggaggcccgcggcgctggagtgagggaacccggcgtccgcgggggcggggcgggggcggggcctgagcccgcgcgtcgg

SEQ ID NO: 26933 - DNA, 242 bp, Homo sapiens
  source 1..242: mol_type = other DNA
ccagatcacaggaggtcttctctcttcacctgggtcaggagagcagccttactcaggaggctgaggcaggagaactgcagccgagatcgcgccactgcactccagcctgggtgacagagcgagatccaagcagggccactcctcattcaggaggaaagtgccttctgattggacaaagttgtcccatgagacaaggattggtcttccatgcatgagacgccacgagtcggcggcgctaccga

SEQ ID NO: 26934 - DNA, 259 bp, Homo sapiens
  source 1..259: mol_type = other DNA
agcacctctcattctgacccctcgtaatcccagtgcggtagtccccgctactctggaggctgaggcgggctcccaatccgtgcagcagacctggagactctccacactcggtggcccggtgactgggtagccagggcagcccagagatgctggggtcccgcgagcctaggttgggtttccagggctgggggctcggcggcggctcctgggcgccccctggcggccccgactcaaccgccacggctcccacaatgctcgc

SEQ ID NO: 26935 - DNA, 458 bp, Homo sapiens
  source 1..458: mol_type = other DNA
agcaaaaccagcatgaatttctttttcctcttttgcagacctcagtaagctcagcatacgattttttttcttaagctcagaacttccacatttacatttaaaggaagcactttacagcttcattttggcatatccaaactgccagcattaccatctgataactcctaagctggtaagtaactaacttcattaggccaatggaaattaaaaacttatgaactgtttatttctggaattttctatttaattctgtaaacactgttgaacttcacatgaatatacatgtgaagttcaagcatggcagtatcccatactagcaataaatttttggcagtgttgcacacagcgcctgaagccggaagactatagcttcccggcatgcagcgcgcgttgccctgacgcctgccgggccgggcgtgggggcctgtgggaggtggcgcggccgggcccagctgcgg

SEQ ID NO: 26936 - DNA, 126 bp, Homo sapiens
  source 1..126: mol_type = other DNA
tcaaagccaggactctgaattcaaacaatccatagctgaggacctggatcaagttataaaacatgcgcggcctctccgcccagtcccagattaggcagcgaagacccagagtagccacccccgggg

SEQ ID NO: 26937 - DNA, 163 bp, Homo sapiens
  source 1..163: mol_type = other DNA
aatccatagctgaggacctggatcaagttataaaacatgcgcggcctctccgcccagtcccagattaggcagcgaagacccagagtagccacccccggggaagctctggacctttccaaagccaggctgagagggtggggagagcccatgcgcctgggaagcc

SEQ ID NO: 26938 - DNA, 280 bp, Homo sapiens
  source 1..280: mol_type = other DNA
cctggatcaagttataaaacatgcgcggcctctccgcccagtcccagattaggcagcgaagacccagagtagccacccccggggaagctctggacctttccaaagccaggctgagagggtggggagagcccatgcgcctgggaagccgtgtcaccgtgtccttcccaggagacagagaaggcagggccggagcggcgggcggagccgagctgcggggagccgctccgggtgcccccacccccgcgcgcctcagtggtgccggccgagggcagggctcgcg

SEQ ID NO: 26939 - DNA, 316 bp, Homo sapiens
  source 1..316: mol_type = other DNA
tgcttattagctacaggagtgttctcgatggtctttggctggagagcacagccgcagtgagagctccctaaagtttctcctcaggagatgttatctctcccgggggaagaccgggaagatactttggtttctgacctccctttcttacgaagtacaacaaccgaatgttcttccggctgcagctcgctcagacgccgcgcacaggtcgctgggcgtcccggcatgcctggcgacgcggcgtcgcctggtaactcgcgccacacgaagcgcgctgcgcgcctgcgccttggcgagctctgcgcaggcgcatttccaa

SEQ ID NO: 26940 - DNA, 354 bp, Homo sapiens
  source 1..354: mol_type = other DNA
gtcccagaaatgaacattgcaagcattcttgaagtcaaagaatcacttggtcttatcattacaacctaggatttgaggactctgaaattcattgagcatctaccatgtactatacatatcgtagcttgtttaaagctcacaattgcccgcattttacatcttaggaaagtgaggccaaaagaggttaaataacttctcagaaaattttttggatgctggctctaccagagctttaacacggctaaaagttcagactctgcctgaaattcagttgcaccaaatgcctttagtctccacaatttaatttttgcaccgttgatagctcagaccaccttgctgagttgtcagcaccct

SEQ ID NO: 26941 - DNA, 262 bp, Homo sapiens
  source 1..262: mol_type = other DNA
ccagctactctggaggctgaggcacgagaatctcttgaacctgggaggaggaggttgcagtgagccaagatcgtgccactgcactccagcctagctgacagagcaagactgggcacctgtagccctagctactggggcaggagactgcagtcactctcaacatatataatttattagccttattctgtacatcttaataacaactctgcccaggcctggggtctcctgggggacagcagagaccagtgcaatgcattgcttt

SEQ ID NO: 26942 - DNA, 452 bp, Homo sapiens
  source 1..452: mol_type = other DNA
tttggagtccacaattaaaaaatgaatatactcaagctatatgcatgagtctcataaatataatgctcaaagtataagaaatgtatgcaaacttacttaaattcagggtcagtaggtacctgacaaatggcaacttaactttgttttggtttcctttcgcccaggctcaaggatagctcactgcagcctcgatctagagtagctgggacttgaactcctgggctcaagtggcgattacaggtcaataatctgtgtggcagatgtcatttggcccattttacagatgaggaaatgaactggcggaatttcagttccgctgggttttgacactgaatcaactggctgaaccagcgagaggacggcccggctggctctcaggcctctcccggcgctcccttccggaccggtgagtgagaccgccctgcgcgttgggccccgccccagcgggtagg

SEQ ID NO: 26943 - DNA, 377 bp, Homo sapiens
  source 1..377: mol_type = other DNA
attgtgcgctggagaccagcctgggcaacatggcgacaccgtggccctcaactgctgtcccagctactcagtgaggctgtagtgagctatgactgcaccactgcactccagcctgggtgactaagttataaactaagctatatagcccattggttctcaaattatgatttcactcactagcagtatcactagacagctcttctgatcagaaaattctgatgcacaccatagtttgagaatcacagggtgctgggagccgctcgcgcccatctcacctggagctccagctcttcaagccaggggcgggccggacggctggcgcgcaaggcctgctggggcttgtagtctagaccacttccgcgctcaggcgcctgcgc

SEQ ID NO: 26944 - DNA, 293 bp, Homo sapiens
  source 1..293: mol_type = other DNA
acagatgtgaagtgccttctgcggcggggctgagctcggattctaaagaagcgcattttggccctgggcctctctctggctcagtctgggcgcaaagcgggtctccaggctggggtgcagtggcgcaatctcgtggagtaactggaactacacgagccaagtcgcgcactgctccttagcttttcgctttgccacagtggaaagcagattttccaagatcctggcggagccaagatcggctcgcccgcccccgcctcacgctggctcctgataggcagctagagctgtgcgca

SEQ ID NO: 26945 - DNA, 226 bp, Homo sapiens
  source 1..226: mol_type = other DNA
aaatggcttaatctgagcacccaactctgccaggccttgctagacatgttactggtatttttctcttgagcccaggaagtcccagctacttggcttgagcctggcaggtcaaggctgcattgcgccactgcactccagcctggcccatgagccaactactcgttcaagttccagatggcagctgcccttggcaatttcccaggagtcccatagggcacttcctata

SEQ ID NO: 26946 - DNA, 218 bp, Homo sapiens
  source 1..218: mol_type = other DNA
tgaatgtaaaccacattttcatatctgaaaaggtggcccacaaattaatcattattattcatattgcatattaaatgcttgaactacattctttaaaaattatttcggccaggatcacgaggtcaggagatcgagaccatcctggccaacatgcaggcgcctgtaatcccagctactaatcgcttagaggttgcagtgagctgagatcgcaccactgc

SEQ ID NO: 26947 - DNA, 415 bp, Homo sapiens
  source 1..415: mol_type = other DNA
gcaggcgcctgtaatcccagctactaatcgcttagaggttgcagtgagctgagatcgcaccactgcgccctaagccccgtgaaggcgccgggcctttggctccggctgtttcccacggcgcccagaaccgcgtcagtcctgacacagactcggtgagggcgggaagtggtgccgtggggctgcagcctggcccgcccgctccatcggcctagggcggccccaccgccctccgggccttaccttgagttcgggctgcgggagaagctcccgcgctgcccatgacgtcacgggactgtgacgcgcccagaagccccgcccctcgcgtcccggtccgcggacccaggctctctgcgccgtgacgtcacgggtccgggcgggcgggttgtgcgtcggcccaatgggagcggcgcactgg

SEQ ID NO: 26948 - DNA, 480 bp, Homo sapiens
  source 1..480: mol_type = other DNA
gttggcgtttaacaaacaactgccagaataaattttttaaaaaatacacatttaacactctttaaaaacagtggcgcgcacctgtggtcccagctactctggagcccgggaggtccaggctgcagtgagcactgcactccagcctaatcccagcattttcgaggcgggcggatcacctgaggtcagtcatcccaggccactgcactccagcattttgattgaaaacatacacgcaagagtgaatttaacatctgtttaaaagtcagccccgctatagcggcgcggctatcgtagaaggtttcgccccaccttctgcatacgcagcttgaggcgcccgcttcgctccggcccgcctcgccgcaaggctttctgggagccgtagtccccacgtctggcctctccggcgccagcggcagcgcgcgcccacccgcggaactacagagcgtggcgcacagcgcgcgaggctcctccgcctcgcct

SEQ ID NO: 26949 - DNA, 458 bp, Homo sapiens
  source 1..458: mol_type = other DNA
tctaccttttgggttgttgtgaagataaaaaaacacacacagtaagtgtgccaatacatgaatgcattgttgaacatgagttcacacgctaacagtgagattgtgagactcagctttcccacgtgtaaatcaggactcataatcagaaataaggtatgtaagctccccgggaaccgggggttgtccctcttttctcaagcccgccgagctgaggaaaaatggagatcctcctcgcggagagctcgccgcggcgcagggctcccagctccccgcagctgcccggttccgagaacgtttcccggcccgagcgcccggcccgcaaaccgggaggggaggggagggggcagggggggatccgcagcccgggattggccgccgccccgccagccggtgacgcgaggcgggcgggcccctttgtgacgtcacaatcagctgtttgaacgttccaatttgtgccg

SEQ ID NO: 26950 - DNA, 448 bp, Homo sapiens
  source 1..448: mol_type = other DNA
ttcagaataatattttttaattgtataaaataaagtacattgaattataaggaacaccaattatattaaaatacagtttccaaaatatacaaatctaatatgcatatacttgtttatcagcacgttaagaaatcagatttagtgatggatccgataattataatttcaaagacatgatgcgcataaaggctacttcaagattatatgcaacaattgtagtatgatataaagatatttgagatttctgttgttaaatactagatggtatgttacctacactcatatttgaatagaatggtaattttcagttaaaagttagtaaaagagatttttttctattcagcaaacgtttagcttcagaagtttttaagtgaacaatcatagttcaggatggtcgaagacacgttttctaggaacctggttgtgaaggaccttgctaaggagtttg

SEQ ID NO: 26951 - DNA, 493 bp, Homo sapiens
  source 1..493: mol_type = other DNA
tgcagtgagctgagatcgcgccactgcactccagcacaaaatttacttgtacattttaaaataactagagtataattgggttatttgtaacacaaaggataaatgcttgagttgctagaatgatgtaaatatattcacctactacgtacttacgaaaatttaaaaaatacatcagtgtagttttttgaatccaggcctgtatgacagacatgaagtcactcgttcgatcaataattctatttactgagcattttagcttaaataataatgaaagcttttatctatatcccattaagcttattattagacagtatgtgtcaggcactgacaagtgctttccatatttcagatgggtaaactgaggcttggagttgccatgtccaaggatactcagagcgctcgcattccgaagtgggactcactggcgaggcaccgaagggagctggcgcgcgctccacctcgcgctcccggggacgtctggtcacgtgggcaa

SEQ ID NO: 26952 - DNA, 310 bp, Homo sapiens
  source 1..310: mol_type = other DNA
atgggtactattattctttccatttcacagatggggaaactgatagagagactaattgtcttgcccatcaggaatcatgatctctggagtggaatctggggatccgctttcaaagatcctaacacacactaaagtttgagaatggatctgttgtccaaagaggcgtctgcagtcaaatgcagagccactgaagcgcacctgtgtgccagctgcaggctgatagcgctgagcagacgggggcgagtcagaccgggacacggccgagggctgggagaggcgccccctcccggctgtcgcgaagatcaggccc

SEQ ID NO: 26953 - DNA, 252 bp, Homo sapiens
  source 1..252: mol_type = other DNA
caatgatgatgatgatgatgatgccatttataaatgggtactattattctttccatttcacagatggggaaactgatagagagactaattgtcttgcccatcaggaatcatgatctctggagtggaatctggggatccgctttcaaagatcctaacacacactaaagtttgagaatggatctgttgtccaaagaggcgtctgcagtcaaatgcagagccactgaagcgcacctgtgtgccagctgcaggctg

SEQ ID NO: 26954 - DNA, 107 bp, Homo sapiens
  source 1..107: mol_type = other DNA
ttaaatctggagtcaaagaacctagctttggccctaactattacaaaaaacctgaaggtgtctcctgagaggaggtgctgtcgccagagcatgccctcaaggaggcg

SEQ ID NO: 26955 - DNA, 309 bp, Homo sapiens
  source 1..309: mol_type = other DNA
tatatagtatcagagtcaggggacttggcacgggaacagtttagtactgtattcattcatcacatgaatgaatgaagaatgaccagtgcctggaaaggccccgaggcaacgacacggtcggctgcccaggctggccctggacaaagtttggccctaatcgctccccgttgtcgatctaaaggcagaagatccggaaagtctgtgccggccgccgtggccgccccccggccctcgcgccgctacccaggctcagggggcggggcctcgatgcgacccagtgcgcttgcgctgaccgccccggctaggctt

SEQ ID NO: 26956 - DNA, 294 bp, Homo sapiens
  source 1..294: mol_type = other DNA
ccctgctatgccatcctgccacatatctgatctgacagagaatatgatgtcacaatttactccagtttgagactgcgttcctgcatttcgtgataaaggtggtttggtgtgactcgagggcctgactcctgacctgaagcccaggactggccagctgcttcgccgaaatgctgggcccgggggccagagaaaccggcagtgcaggaactttcggtccctgccacgcggcttgcgcctccgccgacggcccactgggggcgctgcggcgacccctccgccgccccgtagaaatct

SEQ ID NO: 26957 - DNA, 474 bp, Homo sapiens
  source 1..474: mol_type = other DNA
gaattcctagaactgacgggatttcaggaaacctgagttgtgtcttatacaatcaacaagtaactggtttgggaaactcaatatccctaaataagggaatattgtcttatgcccaatttctgcctcaaagaaaatgtcccggcgatgcattccaggcctggtaattaaataaccggttatattatctatagattccagacattgtatggaaaagcattgtgaaaatccctgggacccccttagagttgtaagctcttaaaagggacatgagaagtgagtcaaatggtaaaggctgaacatttctcatgcttaccctgccttcatacttaataaggttgttgaaaaaaatgaatatttgtactagtacacaataagtgctcaatacatgctagctgttattattaaaacattaattaataacagtagtaacaacagccactgactttaagttgccgcgcgcaggcgcagtggcgc

SEQ ID NO: 26958 - DNA, 463 bp, Homo sapiens
  source 1..463: mol_type = other DNA
gccagcagcatgctcggaggagtgactttaaagcttttctacttgcttcctagagtaagggacgcattttacactgcagcaaatatttcatgacataacactttctcttatcctatttcattttttaaaaatggtaaccatgaattgatttcattgtccactaataaattatgacctcagtttcaaaaagattgctttaggtaaccaatatcttctgagatttatacagattgctcataattctctcctattttttaaaaacatgctgcagtgaaaagatcccggattatgtaattgttatttacttaaaattctggtaaaatgtagccattatactggaaaactaaattttaatcttggatctgtcaccaccatgatatataactactcccaggagtgtgctctaagtttagatgcctgttcctggttcctaggaagcagcccaaggagaaaggccggcccc

SEQ ID NO: 26959 - DNA, 193 bp, Homo sapiens
  source 1..193: mol_type = other DNA
tagaaagcgcttgatgaaagatgatcttcccagctggatgagctctttccctctaggggtgagggactgagcagggttccggacccccccagcgccgctccgcggcccctgccccagggctggtcggggagccactgccctcgcaggtcccgcccgggtgctgcccccgcgcccccggccgccccccaccggg

SEQ ID NO: 26960 - DNA, 320 bp, Homo sapiens
  source 1..320: mol_type = other DNA
ggcagagagctcactgggactgaggggctgggcacccaaaggcctctccagttgttccagcattctgggaagatagggtgggggatgtgaggcttcatcctggggcaagaaacactcagtagaaacgaatgttgggatggccttgaaaggcagagagtccgttcccctgagctgggcaagtcccctgtgagagctctgggcggggcagcgggttcccagcgtcctcctggcctgggcgtcttggagtccccttgcgcggggcggggccttgaggcgctggggcgggattggcgggggacggtcgcggagccccgccccga

SEQ ID NO: 26961 - DNA, 286 bp, Homo sapiens
  source 1..286: mol_type = other DNA
tgaaacctgccacagtttgggactgcatcccttggcaggcggggactgggcctggacacaaccagcacagagctgtctgcgggagagcatatctgtacactgctgagcagataagagccagcatattcaaaaaatatttcttgagcatctgctaatgatactagagcagtagctgcttgagcagcttgtcagagctggtcccgggatgagggctgaggcaggcacctcacttgagcttctccacattccgcccaatctgtaccggatgctggcagggaggtggcag

SEQ ID NO: 26962 - DNA, 254 bp, Homo sapiens
  source 1..254: mol_type = other DNA
ttgagagaacccggggcttttgcagattctacaaagggccaagttcatcctgtccaagtgtgcagcagggcccttggcccccatcactatcctggggacagaagttggctgggctccagacatggacttctgtccctcagctaggcgtggggccaggcggggtcgcgcccagaccgctcgcgaccatagagtccgccggaggccggaggctggatgcgtggcggggagcgccgggctctcccggaagtctccct

SEQ ID NO: 26963 - DNA, 284 bp, Homo sapiens
  source 1..284: mol_type = other DNA
cacagctgtagtgagctgtgattgcgccactgcccttctggatgagaattggagggtggggcccggggatctgcatttcatcacctctcaccacccctggggtcagggtgagaacagctccgagccggggtcagctctcagggccttgcaggtctgtgtcagcccagtcgctcacccacctgcagtgtgtgtgcgtgtgcgtgtgggtcccgggaaggggcctggcactgccgcttccctgggcaggcgagtcccaacacaggcagacaggtggggctgacctg

SEQ ID NO: 26964 - DNA, 377 bp, Homo sapiens
  source 1..377: mol_type = other DNA
tacattctcacagcaactctgtgggagggccgcatggccatcaagtgacacagctggcattcgaactctgtgctctggctcccagacatagttcaagaatgctataagtagagcaggtaacttcatctgttttgaagtccaccatcactgatcttggcagaggtggaattaggacttgatctcccttctaactccaagtcagcctctgagctctgagcctggccctctgtgttcccctacttagggagaggctgccttcccccaaggaccagttgccttgccttggtccttggaccaagcaagaaggcacagtcccccgtgccctgtggacagcagggggagcattgctgctatggacagcagggggagcattgctg

SEQ ID NO: 26965 - DNA, 461 bp, Homo sapiens
  source 1..461: mol_type = other DNA
gtggcacacccggagagcaagctctatcccttataataaactgataaaagtaaatggacaagttggacaaaagtgtgagtaacctggggacccactctaactccaggcagttagtttaagaattaagttaaattgtaggacacccagttggtgtctgcaatagaaaaaagagtttttcatctttaccgattaaatcactgggtaccagtgatctctaatccctctcctctcctggaggtggggatgccttgaggagttggggcggggcttattatgagttacagacacccccctcactcagaaattccaagggttttaggagatgaaggccaaatatatatttctaattatattacagtatcacaggtacactcatgtagggaagattattattttctttctttagaggaaccagactagcatttctagtgggttccagtatgcagccgattgatacctgt

SEQ ID NO: 26966 - DNA, 233 bp, Homo sapiens
  source 1..233: mol_type = other DNA
gttgggattacgcaaccagtcctgctctgtcgcccaggctggagtgcagtggcgcgatctcggctcactgcaacctcaggtgatccgccccggtcttctggctctttctaaagattgggatttcctaaagtcctgttcttttcaacctccattgaatgcccgggcacgacagcgtgcgcgtagcgacctctttgcgcctgcgccccccttgccagtctttcgccggcaaaagg

SEQ ID NO: 26967 - DNA, 233 bp, Homo sapiens; identical to SEQ ID NO: 26966
  source 1..233: mol_type = other DNA

SEQ ID NO: 26968 - DNA, 395 bp, Homo sapiens
  source 1..395: mol_type = other DNA
tcctgtaggggccgctgctgccccagactcagccagtcttgtacaccctggacctgccgccatcctatttttcagtctctgggtcaccacaagtttattaaaataaaagaaaatgtgatgcaggagttgaaactgctttaaaactggggcttaagatctttgagctcactgctccatgaagacccctgccctgtggagggggaggccccctaagcctagagtcccgctgcagggctctgtgccaggagcccccgtgagccatggcctcgtgatttttttcacataaatatatcgcacttaaatgagtaattaaataattccgtttccaattcctgagttcaggtttgtaaaagatttttcattttcactggaaaggattacgccattcttccttc

SEQ ID NO: 26969 - DNA, 614 bp, Homo sapiens
  source 1..614: mol_type = other DNA
acttcagcagggtcctgacgaggggcgggggggcggcagagcgcggcgcctcaccctcccagcctgggattgcggctactggacacgagggtcgggaagctctccttcggcgccgactggagcttagcgtgctggcggcagcaagaagctgaggcaagcgggccccgggccctaacgacgcgtcccagcccctctctgggcctcgggttcctcccgggtaacaagaggccgctgcccgaacgggattccctcaggcgccctagacgggcgggtctccgggcctcggacggttaacccgagggctcccgcagacgcccggctagttgctccgcgattgagctgcggcagccgctgctaaggccctgcgggggacgggggcggagcccaccccgaggcagagggccaggccccgcccccccaaactcccgccctttgggaggggcccgcccctccaagtcctgcacctataggcagactgagccggcgcagggcctgggtattattttaagaattataagatcccttcggaagcagaaaagaaaaattgccctcaatcatttcgcttttggcatgtgcaaggtcacctggttctaggtgcgcctgcgcacagctcc

SEQ ID NO: 26970 - DNA, 516 bp, Homo sapiens
  source 1..516: mol_type = other DNA
tcccagctacttaaataaatgggcccttatgtgtaatgcattcccgtacagtaagccatgactattatcatcacgtgctaggccctgggatctagaacttcagcagggtcctgacgaggggcgggggggcggcagagcgcggcgcctcaccctcccagcctgggattgcggctactggacacgagggtcgggaagctctccttcggcgccgactggagcttagcgtgctggcggcagcaagaagctgaggcaagcgggccccgggccctaacgacgcgtcccagcccctctctgggcctcgggttcctcccgggtaacaagaggccgctgcccgaacgggattccctcaggcgccctagacgggcgggtctccgggcctcggacggttaacccgagggctcccgcagacgcccggctagttgctccgcgattgagctgcggcagccgctgctaaggccctgcgggggacgggggcggagcccaccccgaggcagagggccaggccccgccccccca

SEQ ID NO: 26971 - DNA, 416 bp, Homo sapiens
  source 1..416: mol_type = other DNA
agatcgagaccatcctggccaacatggtcccagctactcgggaccaatgcactccagcctggcttctctagaagtcaggcttaagcagaactgcagctccggacaaaaccgagtgttgagtaagtaactcgcctgtaagtgttatgctgcctgaagcttctcggagcgtctgagcagcggagctgtgcgcaggcgcacctagaaccaggtgaccttgcacatgccaaaagcgaaatgattgagggcaatttttcttttctgcttccgaagggatcttataattcttaaaataatacccaggccctgcgccggctcagtctgcctataggtgcaggacttggaggggcgggcccctcccaaagggcgggagtttgggggggcggggcctggccctctgcctcggggtgggctccgcc

SEQ ID NO: 26972 - DNA, 349 bp, Homo sapiens
  source 1..349: mol_type = other DNA
aatcccaacactttgggacctgtaatcccagctacttgcagtgagccgagatcgtgcctctgcactccagctggctccgtctcaaaataataataataataataataataataataataataataataatttaaaaataaagttctggccccaggcccagctacttgggaggctgaggcatgagaatcgcttgaagagccaagatcatgccactgcactccagacccctgtttatttatcccataaatatttattaaatgattctaagtcttgagactaggtcagcccctgtcctcatgaatcttacatccagtggaggctttgtgatgagatctatgatataactggg

SEQ ID NO: 26973 - DNA, 427 bp, Homo sapiens
  source 1..427: mol_type = other DNA
tcaaaattttttggaattcctgtatgaaagccagctgtgggagctgtccctctagagacactggagcttaagctccatatcacttgagtctaaacctgctgtttaggtaaaatcaacccaaaagaccctcccagagtactttgaggtctcttgggcaagttatttaacttctccaggtcacagtttgctctttggaaaacggagataagtcacacctgctttcgaatcaattatttgcatttctaataggtaatcagttgatatgttccaggatattccaagatgttccaagagtcttaaacacctgcggtgctattagcgtttctaactcccgccccggacagcggaggccggggcagtagcttccagacccaattgcccgcgcaagggggcgtggcagcatcgttgggcggggccgccttctgta

SEQ ID NO: 26974 - DNA, 285 bp, Homo sapiens
  source 1..285: mol_type = other DNA
gataacctgaggtcagtgcactactgccctccagcctgggcgacacagcaggactgcatgtctgtaatcccagccactcaggaggctgaggcagtggaccaagatcgcgccattgcactccaagaggccgggcgcggtggctgacgcctgtactcccagcgctttgggaggccgaggcgggaggatcgcttgagcctaggaggaccctgtctgctgccatggctacggctccaggtgacgtcacggccagctccgtgacgcgcggccagggcagcccgcggagac

SEQ ID NO: 26975 - DNA, 194 bp, Homo sapiens
  source 1..194: mol_type = other DNA
tttggatattatctggatcattggtctttgcaaagaccaagattagagtctgggtttggaccccttttcaatctcagccctgcctgggtgatgcctgctggccttcccaagctgggaccagatggcccactgcgtgtgtgaccatctcattgacaaggacatcggctccacccactctgcgtccttttacagga

SEQ ID NO: 26976 - DNA, 400 bp, Homo sapiens
  source 1..400: mol_type = other DNA
tgcactactgccctccagcctgggcgacacagcaggactgcatgtctgtaatcccagccactcaggaggctgaggcagtggaccaagatcgcgccattgcactccaagaggccgggcgcggtggctgacgcctgtactcccagcgctttgggaggccgaggcgggaggatcgcttgagcctaggaggaccctgtctgctgccatggctacggctccaggtgacgtcacggccagctccgtgacgcgcggccagggcagcccgcggagaccgaggctcctctgtgacgtcagcagccggccgggacacagcgggagggcaggtgcggccgcggggcctgccgacttcacgcagggtccgtggggtccccgcggcgcgcagcggctgaaggaggccccaggg

SEQ ID NO: 26977 - DNA, 157 bp, Homo sapiens
  source 1..157: mol_type = other DNA
tgcctcagcctcctgagtagccaggattaggccaggctgtttggatattatctggatcattggtctttgcaaagaccaagattagagtctgggtttggaccccttttcaatctcagccctgcctgggtgatgcctgctggccttcccaagctgggac

SEQ ID NO: 26978 - DNA, 549 bp, Homo sapiens
  source 1..549: mol_type = other DNA
caggtaatcctgcagttccaggaatgcccaatgcgggactgcccggtgtgggactgcccagtgcaggacttcccggtgcaggcctgcccagcacaggactgcctggttcagcaataaccagtgcaggactgcctggtgcgggaatgcccagtgcaggaataccaaaggaagccaataatgggcctccatttaactttccgggccaccaatccctcctccaggattaggaggcggggcctttggtgatgctaggcctggtatacaatttaagtgggccatcgggatttggagggggccctcagaattaagtgcccctgggcatttgggtgggccaccagcttttgggcctggccccggccccggccccggccctggcccaatccatactggctttgcatctagttctggaaaaccaggaccgacagtaattaaagtgcaaaacatgccctagatttcttttatggctatcaagtaatcccagtgtgtttaaacagctgctgtcattgacttaaatgacaggcctataggttcaagaaaagtaaaacttgt

SEQ ID NO: 26979 - DNA, 267 bp, Homo sapiens
  source 1..267: mol_type = other DNA
cccatgtcgggcatgccgcccttgaatccgccacctgtggcacctctacctgctggagaacaataatctgaatcctatgtttcttggtgcaaatgcccttttctgcaatggaaaatgatgttacatttgaagctttgaaacgaaacagaatgctgatgattcaacgctatgcactggtttttgtgtttacttgaaagggctaccatttgaagcagaaaacaaacatgtcattgatttttttaaaaagctggatattgtgttaaggct

SEQ ID NO: 26980 - DNA, 458 bp, Homo sapiens
  source 1..458: mol_type = other DNA
ggaaaataatactttaaaaaattttattaaatagaggatttggttagagttttaattaaaatagtcacagtgaatgggactataaccatatgtcttaaccttgtttataataaataattccatatgtagttttttgtaatgtacaagttgaaaataataaaataatggaaccagttctcatttaagacttgaatctacttttagtcttaagtattatttacaattcattagtattctagtgagactgagctctataaaatcacactcttgataattctatgaaattatcaagtatatagggaagatgctaagccagttttaaatactaacttctatatattctaaaactgtttccaaaattaatcttctggaagttgaaattgtctacgttttacattgtaaatggcacgtaatgttcagtttttagaatatctaaattaaagacattgcctgtgatt

SEQ ID NO: 26981 - DNA, 362 bp, Homo sapiens
  source 1..362: mol_type = other DNA
ggagtgcaatggcgcccaagtagctggccagaccggtctcgaactactcccaaagtgccgcccaggccggagtgcagtggcgccagcctcccgagtagctgggactacaggtgcagacggggttcaccacctcgtgacgcgcccggcccccggtcaggttttggctgttttgtcaggatataataactagccaccacgttgtggtccatttgcggaaactggaagacgtgaagctttgcacagtcttgccactagcccaaggtcggtcctgtgcgccaacagtcgcaagcagggactaacttccgggagatcgcccgagaccgtcagcgcgcttgcgcggccccccttctggaacgcggagc

SEQ ID NO: 26982 - DNA, 359 bp, Homo sapiens
  source 1..359: mol_type = other DNA
gtggagtgcaatggcgccatcaagtagctggccagaccggtctcgaactactcccaaagtgccgcccaggccggagtgcagtggcgccagcctcccgagtagctgggactacaggtgcagacggggttcaccacctcgtgacgcgcccggcccccggtcaggttttggctgttttgtcaggatataataactagccaccacgttgtggtccatttgcggaaactggaagacgtgaagctttgcacagtcttgccactagcccaaggtcggtcctgtgcgccaacagtcgcaagcagggactaacttccgggagatcgcccgagaccgtcagcgcgcttgcgcggccccccttctggaac

SEQ ID NO: 26983 - DNA, 314 bp, Homo sapiens
  source 1..314: mol_type = other DNA
attggtgaaaacttgcattagtcttttaacccgtttaatacttgtccaagttcacacagttactaagttgcttttaactaatactatagagcctgcgctgaagtgatctgaccaaggtcaattgcgtgagtagtaaagccaatgccagtggcctcgaatttaaaggtcgcagcactggccccacctccggggcagcggctgtatctgcgggaaccgcagactgaggtcccttctgaccgaaggtaacggtctgcacgggatgaaggacgcgcctccacggctctgggggcctgtcgcgcagggtgcgaggggtg

SEQ ID NO: 26984 - DNA, 554 bp, Homo sapiens
  source 1..554: mol_type = other DNA
gtgcttaacatagagtaagtgctctgtaaatgataatttacaatctagggatatggcaataacagcctctaaatgtgaaaatgacctttagagtgtaaagtttaactgctttatctctgtatcctgtatccagaatagtaaaacgaacgagtttctttccttatgcgcaattggaaaaaaaaataaaagcaacagtagtaactagttactgagcacttaatatgtgccagatgctattcaactctataagttaattttgactctaaagctcaaattcttaagcacgcttccaacctgactttacagattgaatcaggctccaggccgaatggggcagggccggaaggtctggttgtcctgcccagaaaaggtgccgaagagcgccccggccgccatgcccacggctggctgggactgtccgtagggacccacggccaccggcagcccaggcgctggcccaagccccgcgtcgcccggcgcctacctcacctcgctcgcgggctgggtcgctcagctgaaaacgacggggagggcgctcgcggcccgatgaatcg

SEQ ID NO: 26985 - DNA, 439 bp, Homo sapiens
  source 1..439: mol_type = other DNA
aggtcgcagcactggccccacctccggggcagcggctgtatctgcgggaaccgcagactgaggtcccttctgaccgaaggtaacggtctgcacgggatgaaggacgcgcctccacggctctgggggcctgtcgcgcagggtgcgaggggtgggctccggaatattcagttgcgtcgccgcgcggaggggacaggtccgcgcctcccggagagcgggacccgagcgtaccgcgcaggcgcagcccccgagtgggcgccgcgggcttcggccctggagccgctgtcaccgccactgccgcccgcctccaagcggctcggagcagcatggtcccgctggcagagcccaccttccgaagccgctgcagtcctgggccccaggctcccggaagtgctgcccggcgctccggaagcgattcatcgggccgcgagcgccctccccg

SEQ ID NO: 26986 - DNA, 243 bp, Homo sapiens
  source 1..243: mol_type = other DNA
gtgagaccggggcctgcagtcccagctactcagaaggttgagctgggaccacaggtgtcgaactcctgagctcaagtgatctttctagtcttagttttgaaaagacctcggaaaccatcttcatcttggagagagatggtgtccccggcttcggtgatctcagtgattgggcctgtttcccgcgcgtcagggtagtgggcgtggcctgcgcaggccgttgccacagggggcatacgctgggcg

SEQ ID NO: 26987 - DNA, 376 bp, Homo sapiens
  source 1..376: mol_type = other DNA
ttgctttgaagacttctttccagttttttttcccagtacctggcatctagaagacgtgccaagggaagcaagagtttattttttcggaggccgcgccattggctccaaatggataatctgaatatggccgttttatcctatcgccataaggactaggttgccttatggcgaccttgggggaggtgaccgctgagctccactcagcgaagagctctctgaaagattgacaggcagccgagacccgctctgtctcgcgaatatctgtggcgcaatcattgcgcgagattgggctacggtcgccggagccatacttaggtctcgcgatacgtcaaatttggagctgggcagcttctcgcgagagcccgtgctgagggct

SEQ ID NO: 26988 - DNA, 513 bp, Homo sapiens
  source 1..513: mol_type = other DNA
aatataatgtaaactgcacatgcaatttaaatgtttttagaagctgcatttaaaaagtaaaaacacaggtgaaattaataacatttttatttgacccaatatatgcaaaacattatattccaacatgtaatcagtattaaaaagtattgagataatttttacatcagttttttcgtactaagtcccgtattttacaatatagcacagagtcaactcaggttattaaatgtcgccctcctagtttgaccaagcgagaggactttctccagatgggcccctcccgagagaatggcctgttcgggtcaccaccggccgggcgccactcgaacgagccccggccagcgtccgggactctggcgctcagaggcgccaccattcggaaggaggccacgcgcagctcgccctcccgcaccgcgagggcagcagccgcctcatgcgactcgagaacgctagagggcgccgcttccgggagcccgcaagcggcttccgggtgctcgcgcgccgacctggacg

SEQ ID NO: 26989 - DNA, 523 bp, Homo sapiens
  source 1..523: mol_type = other DNA
gcaaggcaaacccatagtttgtcctctgccttccaggcagagactcctacaggactctgccacctcaggacccagcatagggctgggtgtccggactcatgctgagccttcggaacacatgccaacatgtcaggagttggactgcttgggttctcaccaaaccctttgtgattggtttcctcatctgtaatatagtataaggctcgggtgaaatactgtatataaaccttttattacagggctagcagctggggctccggaagcgtgctgtgcggggcgcggttcgccgaacccactggccgcttctagagagtcggccccagggccaggacctccacttggcaggcgctggggcgcccaggggcagggccagcgcgggaaaggccgcgagtccttcgaccccctggcagtctgggagccggccgcggctgccatggcaacgcccggaagctgccgggaggggaggcaggcccagccgggacgaggccctgcctccagccaacgctccgcccagaacgaagcc

SEQ ID NO: 26990 - DNA, 515 bp, Homo sapiens
  source 1..515: mol_type = other DNA
gcctggccaacatggtgtcgctgggtgacagagtgaaagtctctctcagaagcttgggagtcagcttcccaagtttggatcctagctctgctcagcatgcataatgtgggaataagaataacctctaatgttattgtgagaattaaacgaattaatgcaaataaagatcttagaacaataaatatagtaagtgttcctaaccggtgagttattatcagttcttattgttaatcatacttggaggcccaatataccatggaccacagtgaagaaccagaattgttgggcttcatcttggctctgtggataatcccagctgccacttaagtgagacaagtaggtgaaagctacttagcaggcctttgcatgtcttgacttccagtaaaaccctggcaagtgaagtttcttcctttagcatctaacaaaggaggctcaccgggcacttctggagggcctggccctgccccaggagccctagggcaggaattcctttctttatctatagaaggcagaca

SEQ ID NO: 26991 - DNA, 593 bp, Homo sapiens
  source 1..593: mol_type = other DNA
ccgggcacttctggagggcctggccctgccccaggagccctagggcaggaattcctttctttatctatagaaggcagacaggacctaaaggagcgcctatacgggatcccagagccagggactcagcccttggagaggggggctggaacgcactgggctatcctccgcgagccctggccgcgggaacaatgggaggggccaggtcctggctggaggtagacgaggtcggcgagctgggcgcggggccgcggggttaccccggggcaccgggcacagagccgcgggaacccgggaggacgtgggggccccgggtggggtctgctccgcccggcctctgagcccgccgcagctcaggttgacgccgggcccacgtggggaagccggcggcgggtccccagcgccgggagggttcgcggggctcagccccttcctctgctcccctccccgggaccggcgcgcggccccagctccggcggctccggcggctccggcgctcccctggtgttgccgccgcgcccgcccgctgctgcttggggggccgggatcgccgccgcctcctccgggggagccggccggggcggggcggagcggcg

SEQ ID NO: 26992 - DNA, 561 bp, Homo sapiens
  source 1..561: mol_type = other DNA
gcagccccagctcaggtgcacactcagcctgtgctcagacacatacagcaagtgcgcctgtacacaggcactgttacacttactgtcattgtcaccaaggcgcatgtggacaaatgtacacatagacaccctctggacacactgaggattcccaggagacagttgtaatacctcctcccggtgggggaggacgccgagtcctaggcgggttctgccccggctccggtgggatgggaggcccactgaggctgagtcaccccttctgagtcaggcagctgatgagcccccaagagggcttggcgagcaaggaggcccggggctggctaggaccagggtgggggcagccggggcgctcgagaggccccccagctgcacagtcccgcagtgctgggaactgcccgtgtggggcagggccgcggcgcgctgggaggcaggcgcaagcggcggccgcccctgggctgggctccgaggccggggcgggggcgggggctggccgcgcgtcgggcgccaggcccggggctgtgggcaccgtgcccagcccctggcgcacgccgagccgcc

SEQ ID NO: 26993 - DNA, 379 bp, Homo sapiens
  source 1..379: mol_type = other DNA
ccattgcactccagcctagccaattcttggcaataaatcacttaatattaatagtgcagggttagacccacaaatagttatttattaataccaaattatcatcattattaattaaatgcataatatatgtactcagctgagctgcctggctttgtgctcggttccagggaaacagtgaggaacaagacaggcagattccttccctctgaggtggcgaccgctgctgctgcagcagcggaggctgacgctggttctccccgagggccactgtgagacaggaatagtagccactggtacaagccttggctgtgctttagtgaccatttgagaacctgcaggcacgggccattcttcccgcgacccagggctctgccgctgg

SEQ ID NO: 26994 - DNA, 521 bp, Homo sapiens
  source 1..521: mol_type = other DNA
ggagccttgcagattcagaggcattctctggagatggctgtgtgtgggagccagagaaggcatacccatgatctctttggtttctcacccaagttggggatagagactcgtggtgtccccattttacaggtgccgggagggggcacccattcctagaggcaggagccccaagttctcgggggtgggcgcggtgtgacccgggccagtacggggcggcgatggtcaacacaggttcctgccggcccgccccgtagcctggggttccaggctcccgtgccaccgcggcccgcgctgaagcgctcttccggatcgcgacagagcggtcgcccgctgcggagaccctcccccttcccccgggttgcgggggcgtgggtgggggtggggcgccaggaacggcgcgggcccccccaaggcccccccagccccgcgcccgcggcccgatccgcgcctggttttgggcgcagccgcacggccccctccccctccccgccccctccccgccgctctcggggagccggggc

SEQ ID NO: 26995 - DNA, 368 bp, Homo sapiens
  source 1..368: mol_type = other DNA
tctgtaaaatgtgcctggaggaaagtcaactcctttcccctctgtcacccaggctggagtgcagtggtgtgatctcggctcactgccgagtagctgggactgttgttgttgttattattattattactattatgagtatcatcatccctgtccctcacaaagtgggccatgtgagagagacagctcatcccccctgggggcctgtggggggaggccaccccatttccctgggccttgcacactccaaagatgcctattgagcgtctgctcccagcccttcagggagggccaacttggggtcaggtgcccagccaccgggaggcccatctcgccctcctccagctcaccgatggccttggagggagcag

SEQ ID NO: 26996 - DNA, 700 bp, Homo sapiens
  source 1..700: mol_type = other DNA
cctccagaggcggagccgggattggaacccaatctctagttccccccttacagcgaggtgtcgctggggtgaactggtgggaactcccgcctcggtccacccgcgttccagctggaaccggtttggcgaggcggttcgaggggcggcgaccccacccccacccccccatgctcgggcatgcgcgtgccgacgtgggcgcgcgctcctttcctgggccggccggctgggcgtgggccggacgcggcggcccgcgcgcctgccgaccagcccggctgcgcgcgccgggccacatgccaagcgggctgcgcgcgcccctgcccggcccgggagtccctgacgacgcgcgcgcggctgacgcggggggcggggaggggcggggcaggtgcgggactttaacccggagccccgcccctcgggcgtacaaaaccggagcctcgggccgggctgcgtgagggaggagggtgagtgcccgccgctggccgccgccgccgccgccagtccgtccgtctgtccggtccacgtcgtcgctgccgcctcctcagcccggacgcccggggcccgcccagcgccgcccggagcagccgcggccccgcgaggagacgggggccgccccgcccggcccggcccggccctgccccgcccccgccctcgcgtctgtccgtccgtccgtccgtccgcccgcccgcccgcccgcccgcgc

SEQ ID NO: 26997 - DNA, 506 bp, Homo sapiens
  source 1..506: mol_type = other DNA
tccggatcagcctgcccacatggcctacagggagccacagaggggtccctgctgcttctcctcctgctgccggcgaccccaagcccgggagccctcacggcggggcgcacccctgctctggcgggcgaccgctgatgtggacagcgagtcaccgggcgtaggggtccctgggagcccccccacccaccgcctctgccctccccacgtcgagagccgttgcccgtcaggggaagctgcactcccacggcccatacaagtgggaggcctctggggaagccctctctggaggggaaggggtggcccagagcgaacccccacaccccctctaggccctctgtgcagcccgggctggcacagcaaggaaggggggctcaccccagagcgcccccgcctgccagcccgtgggtcgaggcctaaggccggacggcagccgagggcccccgcaccccgcccgcggccccgccccgcgcaaggcccggccgccacgccccgcccccgcctggagt

SEQ ID NO: 26998 - DNA, 379 bp, Homo sapiens
  source 1..379: mol_type = other DNA
aagctgttttcaaagcgatttccaagctcaagggccctagatatctggacctagccgtgtccgggtacaggctccgggagctcctggactgatcgtttaaggccgggcacaatctgcggctcatgagtaagccagagacctagtccttaactagctgcgggtaagtgcccggactaagtatcgcaccgccggcaggacatcttgtgcggggcgcgaacgccctccacgaggagggccgggccacttcctgcccccgagcgggctctccccggcggaggctcccaccgccgctatgggtaggccatgcagcattcctgagggcggggtgggcgcaggaagaaggtgcccgcggccccgccccctccgggcgcgctgggcg

SEQ ID NO: 26999 - DNA, 711 bp, Homo sapiens
  source 1..711: mol_type = other DNA
ctccctccgggcgggtgggggagatctgacgtcaggccgcgaggtgctttccagccgcgagctgtcaggccgagtgtcaggccgggcaggtacgcggcgcgcgcccccggcgccccccgctccccgccgggacgccccgcgccgagccggaggccgcgtggacccgactcggccggacggggagggggcgtcgtcctggtgagtcccgacggcccccggggggtgtttgtgagtcccgacggcgctgcgctccgggggccggtgggggactgttccagcccccgggaggaagcccgcttggggccctggtggggggcccagcttcataggatcccaccccaggagagggccgatcctgcaccggacctgaggctaaccgccagcagggcccccccgccgccgagccggacagggggcggccgagagtgggggccgcgggaagggcccggagcgggggggccctggggagcccgcgcgagttcccctttcctttggaacaaaggaaagtctgtctccgaggccggctggccaaggaagcggggcgcgtggggccggcgccccggagaaagtttgttcgcgccgggaccctcgggcaggccgaaggtgatccaagcctcccgcgggagaagcgcgtagtctccggggcagggggcgtgggggggggggggcggcgcggaggtgggagcccagccccctcccctcccttcccct

SEQ ID NO: 27000 - DNA, 410 bp, Homo sapiens
  source 1..410: mol_type = other DNA
ctccgggagctcctggactgatcgtttaaggccgggcacaatctgcggctcatgagtaagccagagacctagtccttaactagctgcgggtaagtgcccggactaagtatcgcaccgccggcaggacatcttgtgcggggcgcgaacgccctccacgaggagggccgggccacttcctgcccccgagcgggctctccccggcggaggctcccaccgccgctatgggtaggccatgcagcattcctgagggcggggtgggcgcaggaagaaggtgcccgcggccccgccccctccgggcgcgctgggcggggcgaagcccctcggcgccgacggcccgccccgcggggggtgggcgcagctcgtcgcgctccgcacaatctccctccgggcgggtgggggagatctgacgt

SEQ ID NO: 27001 - DNA, 736 bp, Homo sapiens
  source 1..736: mol_type = other DNA
gccctccacgaggagggccgggccacttcctgcccccgagcgggctctccccggcggaggctcccaccgccgctatgggtaggccatgcagcattcctgagggcggggtgggcgcaggaagaaggtgcccgcggccccgccccctccgggcgcgctgggcggggcgaagcccctcggcgccgacggcccgccccgcggggggtgggcgcagctcgtcgcgctccgcacaatctccctccgggcgggtgggggagatctgacgtcaggccgcgaggtgctttccagccgcgagctgtcaggccgagtgtcaggccgggcaggtacgcggcgcgcgcccccggcgccccccgctccccgccgggacgccccgcgccgagccggaggccgcgtggacccgactcggccggacggggagggggcgtcgtcctggtgagtcccgacggcccccggggggtgtttgtgagtcccgacggcgctgcgctccgggggccggtgggggactgttccagcccccgggaggaagcccgcttggggccctggtggggggcccagcttcataggatcccaccccaggagagggccgatcctgcaccggacctgaggctaaccgccagcagggcccccccgccgccgagccggacagggggcggccgagagtgggggccgcgggaagggcccggagcgggggggccctggggagcccgcgcgagttcccctttcctttggaacaaaggaa

SEQ ID NO: 27002 - DNA, 292 bp, Homo sapiens
  source 1..292: mol_type = other DNA
tgggctcaagcaattctgcctcagtcccataaaatgatgataataatagcttctcccttattggggaattgtaatgattaaatgagataacatgtaaaatgctaggctgaggctgcctggatggtgagccaggcatggtggtgcatgcctgtaatcccagctactcagaggctgaggtgggagggcgccactgcactcgtaatgctgagcgtttacccaaggtccagcctagcccctaggcaccatgtcggacagtgatctaggtgaggacgaaggcctcctctccctggcg

SEQ ID NO: 27003 - DNA, 379 bp, Homo sapiens
  source 1..379: mol_type = other DNA
ctggctgtgtctgtcatgccgcttcactcaggccagggggaaaagccagcagcccctttcccacgtggggagctggagtctcccaagcccctggtgacccctggtagcacactactctgctgaccagggcgacttcagcagcttccagctgctggtggaggtggcgctacgctgctgaggagcttcagaagcagtccccagtaggcatctgccaagaagggtgctgaaggctccagccagctgcagagggttttctatggatcactgccaaacattgggactgtccagaggtcttcaacaggaagatgccagctggcaccactgcactgtgatgggggccctcttccagcctggtttcctgggctgggctcaggaaaaa

SEQ ID NO: 27004 - DNA, 400 bp, Homo sapiens
  source 1..400: mol_type = other DNA
aaattacgtgcagtggtgcgctcagccttggccaggctggtcttggaactccttgacagtgttcaacaatatgccccatctttatatatcctaagaaacactaatcctaggttattgctagccaaaatatttttgtcctgagtagtgtcactgggccaaaagatagtttcaacttccagtactttctgggaagatccctgaagccatcacagaggctccccaacttctgagtcgcccatctgttaggagagggagctttgctctctctaggtgggtctccccgtgtgccccagggggatcagggatcctcaccctcctgaggcccagtggggaagaatgaacatggcttcatccaggttaactgatgcgagcccaggtctggtgcaactgctgcaggatg

SEQ ID NO: 27005 - DNA, 280 bp, Homo sapiens
  source 1..280: mol_type = other DNA
gcacagtgaaacctcatctgtacaaaaaatttaaaattagccaggagtgctggtgcacacctgtagtcctagctagagcctgggtcaaggctgcacgcatgcatacctggaggcatccagattccaggagaccactgtccaagtgtggtccccagactggcaacatgaatcagaaaatttagattcctgggctccctatctggagacttggatttagaaagtttgggagatcccagaaattgctattgctccacgatcatgacaaggcagcagctgctcc

SEQ ID NO: 27006 - DNA, 402 bp, Homo sapiens
  source 1..402: mol_type = other DNA
tccagaagggatgtgccttggtctctggacggcctggcaccacctggagggccaccggaaggagccccatccccaggggttctgagtcagtaggcgtggaatgggggccgagaacctgcgcctctacccagttcccaggaagctcactttgtgaaccactgacgcagggggtctcagggctctcgtgtgccaaaagatagttattacagaagagttaacatcttcattggggcagcttggagctaccctggagcaagaggtagagccgctcctgccccactcgctgctcgaggggcagctgtggccgactgggcgacgctgacgtctagcgcgcttgcgccaaggcgccggccgagtgcgtgagcacgtcggcgggagggcgcgcgacactgcaccgcccct

SEQ ID NO: 27007 - DNA, 226 bp, Homo sapiens
  source 1..226: mol_type = other DNA
ggggaacggaagactggcgcgggcctgccctcgtcctcgttccggcacaatcgagtagacttggcgggcactgggcggacagctgggcttggagctcccgaattcgattcttgtttctttcgaattaagtagcacaaacattaacagtaacagacttctgctgagaatgctttctacgtgccagaataactctgaagtggggtactgtagggagaggcacttcctg

SEQ ID NO: 27008 - DNA, 479 bp, Homo sapiens
  source 1..479: mol_type = other DNA
cctaataatagcctacagtgccagctactcgggaggctgaggcacgcgctagtgcactccagcctggcgaaaaaaacttttagtcagtggtacttaatgtttaatatctgcaacattctgggaaaaaaaattccatctctaatgttgcattcaagaattcctgagtcttggactctagttcttaaattactatgttcattcacattactaagctctttccacgtgccgagcactgtgctaggcgccctgtgaccaagagctcttaggggcttcataaggatgccgctccagacgcagagctcaatggccctgccgcccagtgagattcttctctgaggaaactccgcagatggcgccgccggcctctcctggctcagccaccgaggtggacgggcacagcactcatgcgccgccctggcgtcctcggcgcgcctgcgcggaccgcagcacctcccccgcccctctcgccgccgccgccg

SEQ ID NO: 27009 - DNA, 405 bp, Homo sapiens
  source 1..405: mol_type = other DNA
cccagctactcgggaggctgaggcaggagaatcggggggcggaggttgccgggagccgagatcgcgccactgcactctagcctgggcgacagagcgagactccgcttcccatagcgcctcaaagggcatctgatgcccctgcgaccacttgggggcgctgcgacctcctcccgggtgtgagctcagagctccagtccaccctggggagggcatcagatgccctttgaggcgctgtattcctcggatgggctctggggccgtcgggcgcgggtcccggaaagggactcccgggcggggtgggtgtacgcatgcgcgtcgggcggcggtgtacgcatgtgcatcgccggaggcaggcgttctgcgcgcgcgtgcccgagaaactgacggccgcgcatgcgcccttgg

SEQ ID NO: 27010 - DNA, 340 bp, Homo sapiens
  source 1..340: mol_type = other DNA
gcacattccccaggggattcccatcccaggggcaggcagagagatcttactgtggaagtagcgtcctcatctcatctgagaggaaaccagcaggggccgagcctgccggccctggagcacagcctcattgcagcaggctcaggtgactcaagtagctgggcacctggctaatttttaaaattttttttgggctcaggcgatcctcccacctgagactccccaaatcctaggattacagcagggaatagtcttcatgtgctatccccaccttacccagctggaaccagagtgggcacagggccagggcttgccgccctctggggtctgggtcagaggggcc

SEQ ID NO: 27011 - DNA, 379 bp, Homo sapiens
  source 1..379: mol_type = other DNA
acttaataaagaaactttctgttaactaaaatacatctgtgtttaggatgcaaagtaaaaatagctttttttttttttttttttgagactcactcttgcccaggctggagtgcagtggcatgatctcggctcactggctaggtgatcctccgttccgagtagctgggagcactgggccggcagactgtcagtctcaacatgttacaagaggccccagacctccagcctgggccttaggcatctggccaatggcccacagtcccaaggccaggctgccagtcttggttaatacgtgttaaatgccgagttgctcacagactcacccagcagcagctcgtggagctggctgggtgtgccccaggcctctccctcttccttc

SEQ ID NO: 27012 - DNA, 428 bp, Homo sapiens
  source 1..428: mol_type = other DNA
cacagtaaagctctgtttgcaaataatattttgttaacagtaatagtgatatgtccttttaccaggcaattgcatggaaatgcctgccattttcacatgctgttacaaccaggcagtaaaagtcctcagaagttaaattttaagtaatcagactggccactttccttcccccctcctgtgtggacaccagacaacaggtatcccagggccggggaaggtgctggcagcctgacggtactcattcgaaggagaatacccccaagcccctaattgggggtgcggtgccgcgccctggcggcattgcgcctgcgcagggagcccaaggcaagagccgctaggctgccctgcccgaagggctcaactgtcagtgagcctgcgcaggaggccaataggctgcactccccgccagggccctgctgtcagtgcgc

SEQ ID NO: 27013 - DNA, 385 bp, Homo sapiens
  source 1..385: mol_type = other DNA
cagtctgattggttgtggacagcaaccgttcagaagaaaaggtccaagggaacagcctctggttctttttttagttctaagaagtcatgagatgaggattcgtcttctaatatccgactttggggagagtcccaagaggcccctcttcgtccaggtggcgcccagggacagtgacaaacccagggcccgtggatagaggaggcatctcactacgctgcacgaggccaccggggaggccgcgggcttcatctcccaagagatggactacacctcccagcaggctctgcgcgcgggctgaggatctgtcccgccggctgggccccccgcgaccagccaagggccaaggacatttcagaatctgaggtacactcccccgcagctgcag

SEQ ID NO: 27014 - DNA, 322 bp, Homo sapiens
  source 1..322: mol_type = other DNA
acaatcagtctgagtggttgcagaaagcaacagtctgattggttgtggacagcaaccgttcagaagaaaaggtccaagggaacagcctctggttctttttttagttctaagaagtcatgagatgaggattcgtcttctaatatccgactttggggagagtcccaagaggcccctcttcgtccaggtggcgcccagggacagtgacaaacccagggcccgtggatagaggaggcatctcactacgctgcacgaggccaccggggaggccgcgggcttcatctcccaagagatggactacacctcccagcaggctctgcgcgcg

SEQ ID NO: 27015 - DNA, 342 bp, Homo sapiens
  source 1..342: mol_type = other DNA
tctaccaaaaataattttaaagattagctggcagcagtcccagctactccggaggctgaggcgggactgcaggctgtgatgcaccactgcactccagctccatgttgagactgcattgctctgcaaatcagataggtcagttattaacaaccccactgataatctttggaaaaaactgacataattttctttttcttttttttttctcctgcctcaggctcccgagtagctgggatcaccgtgcggggcctcccaaagttctgggattacaggagcggccccgtctcgggcccaccccgaggcctggcccaaccgcgtcccggtagctcccggaataggagc

SEQ ID NO: 27016 - DNA, 533 bp, Homo sapiens
  source 1..533: mol_type = other DNA
gcagtaacttttctgactaaaagttgagcacttaatatgttaggtatgcccacgctatgctgtgctttgcacacaccaaatttctgcatttcacagatacctctgaaaatcaaacttcaggcaatttgaatccaacaaataatgaaacggtgagccactgactcattcatgtgtcaccctgggcaagtaagttcccttccgtgggattccaacttctcatctgtaatggtagtaacttccaatgcagttaacttagttcttacctagggccatgcactgttctaaactaagcacgaagattatttcacttaataaagcaactcaacgaggcagataacgtgactaatttgactaacttattttacagatgagaaggttacttgcacctagagtgtcacttgagaacttatgctccaggctctttgcccctttcactgaatgggagcgtaggccgcctgggacctaggctaagcgcgtccgcggtccccacggctgagcctcggggcgacccgtagctccgcgctgcacccctc

SEQ ID NO: 27017 - DNA, 432 bp, Homo sapiens
  source 1..432: mol_type = other DNA
ctggccttgacaggtgacgacggatgcccccaggctagctgttgaaatcagcctgtaatgttgtaagtgaaataaaattacaacaaagctaaattatatgaacttttgaaaaggcacatttatcttggagaatcaataaactcttggtgtttcactgttattccaattatttttaacacatattttttctttttttaaaaaatatatattttgagatagagtcgacccaggctggagcctccgcctcccaggctcaggtgacactcttgcctcagccacctgagtagctgggactatacccatgtgccacagcctcccaaagtgctaggatggcaggtgtgcagtatatattacacctttgtactatgtccactgtgccaaagataaaagccaaacctctttcaccaacagggtttgtcagtgtgatatgat

SEQ ID NO: 27018 - DNA, 384 bp, Homo sapiens
  source 1..384: mol_type = other DNA
ctccatgttgagactgcattgctctgcaaatcagataggtcagttattaacaaccccactgataatctttggaaaaaactgacataattttctttttcttttttttttctcctgcctcaggctcccgagtagctgggatcaccgtgcggggcctcccaaagttctgggattacaggagcggccccgtctcgggcccaccccgaggcctggcccaaccgcgtcccggtagctcccggaataggagcgtccgggaggactgggatcccggccgcggctgctggaagcgtcgaagctcagcggggccgcggacactgacctgcccgcagagcctgccgcgagtccctggcgtcccctgtggcgggctcttggagccactttcccgag

SEQ ID NO: 27019 - DNA, 425 bp, Homo sapiens
  source 1..425: mol_type = other DNA
tgctttagcactgtgtcctcagttacaaggacaaagcatagagtacgcgctcagtgaatgctttttgaatgaattataattcctagctcaggacctggcatgctcaccagctaccagttgtgactgtgctctgcagacttagctttgcataggacaaaattctaatctagtttcgcgcagttcttacgaatttgttacatgaataagtaacatctcggctcactgcaacttctgcctcccgggattcaagagattctcttgcctcagctcccaagcagctgggattacaggcgcccgccaccatgttgaccaggctggtctcgaaaagtaatttcttttgttttctttttaattaaacaaaaatgttgctgaaactctagattggaacagagccggttggttgctcagtgcgcgtcacttccggg

SEQ ID NO: 27020 - DNA, 289 bp, Homo sapiens
  source 1..289: mol_type = other DNA
gccagggacaggggctgagccttcctggcaggggacgctcaataatggaaccacctcagccgctgagccaggcccttgaagcctcctctctgataagagcattcacatgtgctgagcgggcatctctgcaggttggcatactgaggcttcaagtggcagagaacctgggtctggtcgaaaagcccagaacaagtaggtaagggccagctccagcgtaaaggcctttaacctgctcctccagctgggggcccgccctgagccctgggaagcttttaagccagccttgcaa

SEQ ID NO: 27021 - DNA, 229 bp, Homo sapiens
  source 1..229: mol_type = other DNA
acacctggtgtttgtgccaagaccccaggctgcctcccaggtcctctgggacagcccctgccttctaccaggtgagatgatggccctgggtggggagatcccagcgaatctgggtgggagctgggaccagccatgagcacctactgtgtgccacaccccatgctaggcactgggagcacgtgcccgggacataggcgtggctcagatactgtccctgccaggagggagg

SEQ ID NO: 27022 - DNA, 312 bp, Homo sapiens
  source 1..312: mol_type = other DNA
actggcggtctaaaagggacccgcctcacttggaaacggggctgcggtagccacaaccctccggtagcggtagcgtaaccccgttcggtgatccagccgcacagcgcaacgggtttttgcgcccaaagcgcagtgctctggctcctacagtaatgaagcagaggacctgggcttaaaactcattcatccatccccaaggtaggctttggagtggcaccgcaggccaactggggagaagggcgccacactaagagacctgcacccccaccaaggcgcgcatgcgcacttaggtggcgggcgggtacttaaggc

SEQ ID NO: 27023 - DNA, 271 bp, Homo sapiens
  source 1..271: mol_type = other DNA
ggggctaccaggagcctcttgtcctacaagaggtgctgtgtccagagcagccagctcttaccatgctgctttttagtgtggaaaaccacagaaactcccagttttgaggcctgccaagtctcagattgcacatccttctcaaaggccctcttcgagagggacatgtccgaaccgggatctgcacctgacgtggcaggaagagagatttatggccctccaactccctcccttggtgttgaggacagtcagctgaccccgtgtagaaagagcc

SEQ ID NO: 27024 - DNA, 323 bp, Homo sapiens
  source 1..323: mol_type = other DNA
atctgggttcccatgatgtgtaattatgtattgattaaagtcactaatatacagtgattatatgactgtctccccattagactggcagtgccttgaggtcagggacacctgcccttagcactgcgcttgggtacagttatgcttaattagctaataaatgactacacggactggctcgctggcccagtgggggagccgaggcctgacccaaggcagtcccaagttctgagcccggacctttcagctcctgagccttttcccggagtccacggacagatctcggggctcccagagtttcccgatcccaggatgggtcctcggcc

SEQ ID NO: 27025 - DNA, 449 bp, Homo sapiens
  source 1..449: mol_type = other DNA
tataaatatgaagggcatataaatataatataatacataaatataattataaatataaagatcttgtttaagatcagatgcactctgaatgagtagcaaggggatcatccgcatagatgagtgttctcagccagtaatagttgtacagccttcactatctgatagaaattaatgggaaccacaaacacatgtgtaatttaaaactttctactaaccacatttaagaagtaaagagaaacaggtaaaattcattttataatatatgaatttgacccagtatatccaaaatatcatttatgtaagtcttagaaatctggtgtgtattttatttacacttatggcacatctcacttcggagtagccatatctcaagcgctcggtagccatatgtggctggcggaggcagcgcgctttacggcggcgcgttccgctcgccgcactttacggca

SEQ ID NO: 27026 - DNA, 566 bp, Homo sapiens
  source 1..566: mol_type = other DNA
taaagtacacattaaaatttagtgtatgatagatgacatttctttaaatctaaaataaagttagatttgtgccctatatcaatacattaaaataaatttcagatagattaaatatttaaatatataaacataaaaatacatcataaaatatatcttcttttagcacagaaaatatcttgctcagttcataaaggcaaagattttgctacttgaactttttaaaacctttatgtcaaaaggaaaaaaaaacctttatgatgtacaaattaaagggcaaacacttttctctgattattttttttgcataggatagagattaatttccttaatatacggtgtttataaatctataaacaaagtgaaaacattagaagaatgttaaccatcttactatcagaaatgcaaaatacaaaatgagttgtcttttctatctcaaattggacttttcggcaaaatatatcaaaatcaacacagtaattaggaatgcatacatcttagtgtcatttgattaatcgccacacccagcctgtgattgattcatggaacactgtgttgagaaggattct

SEQ ID NO: 27027 - DNA, 590 bp, Homo sapiens
  source 1..590: mol_type = other DNA
gaatattgcttgattaggtacaactcttcctctttaagtataaaaccaatatctaaacagacttgtcttttccaagtacagaaattctttgtcatttcaaaaacacagataggtagcaaaggttgctgctgattaataatcattgtttacatgcctgcattttaaggatcataaatcgctcctctctatgcacctttatccagggggcagtgataatggtgagatatttaagtctcactaccggggtgttaaaatattaacacatttttgcatatttaatgtggtagcagataagtttatgatttcaaattaaattttaagcattaaaaaaatccagaaggaactactttgtgataaatacattcagttaatcaagaattgctttcttctctgctcatatattaactaatttatagcctaatttcatgattgtaacttgtgaattaagcttcatggtgagttttaatcttaaaagttcaaaactctcattcatctagttcacatttgggtactatgggctagacatatatataatacctgggcattaagagtgtgagagccattgtttcaatgagagcagaggcagacgt

SEQ ID NO: 27028 - DNA, 476 bp, Homo sapiens
  source 1..476: mol_type = other DNA
ttatatccgtgctataatcagagaagtaagaatgcttccttgtggcctcagtagtcagatgacattcttgggaatccaaggtacatcagttttcaaataaactgtttgttgttcacactgtgagcattttatttcaaaataaactttgattcttgattttttgaaagttctttttaaagaaaagaatctctttcacctgaagcctataatatacccttgaattaccctcttcttccaagagtagaagaatagtatttcaggttgttgaactcagaaagccctgttaactgttttgaagtgcttacagtacagccacctttaaacttgaagcatattgttgtggacaataaaaatcaattaattccagacagaaaaggaattctaacttagttttgattcacttactcaagttcttgtcttattaatcaatacttgaagagaggtaataattactgctctgatctcagcatgttccc

SEQ ID NO: 27029 - DNA, 406 bp, Homo sapiens
  source 1..406: mol_type = other DNA
cctgagtcccagtccggagaaaggctaactttgtctcccatctcagagagaagtgccacacggagacgatgggtcccgcgtgacgctctgctgagagttgctcagctccgagagcttcttctccagcgccgactcagagaagggaggcccggcagggagcggcctgggccgcccagtgcggcgggaagagcgcacgaggccggggccacctcgactgacagactgcagtaacagccgcccgcgccgccgccgacctctcaccctgccgcgagagcgaggtcaaacggccgctctgaacctcgcgcagagcacttcgaaggttccccgggcccccggaaagagctttgaccgctcgagcctgcacaccggcgcagtggatctcgccggaacccttctggcgcgatac

SEQ ID NO: 27030 - DNA, 304 bp, Homo sapiens
  source 1..304: mol_type = other DNA
tgggaatgggaatggtgccctatccccctcccctcacgcatacgcgcgcgcacacgcacacggctcattggtctagggggagcctgaagggggcgatcccacattatgctaagcgctttgggtcgaggtcccctgggtctcagcccaggctcgggaaccgcgtccctggggtggctctctccgccccatcccggccccgcctccgcactcgggcgggggaaagttgcggatccctccgccgcctgctccgagcgggaggagggaggggaggagagggtgcggcggcggcgcggcgtggccttcc

SEQ ID NO: 27031 - DNA, 156 bp, Homo sapiens
  source 1..156: mol_type = other DNA
gcgtagctggaactgcaggtgagcctcaaatagtgtgtctcaacatgagtgtgtcgctgttacagacagggtcccagctgctgggccgccggaagtgacgcgctaagtagcgcgccgtatcgcgccagaagggttccggcgagatccactgcgccg

SEQ ID NO: 27032 - DNA, 224 bp, Homo sapiens
  source 1..224: mol_type = other DNA
ctcaaatagtgtgtctcaacatgagtgtgtcgctgttacagacagggtcccagctgctgggccgccggaagtgacgcgctaagtagcgcgccgtatcgcgccagaagggttccggcgagatccactgcgccggtgtgcaggctcgagcggtcaaagctctttccgggggcccggggaaccttcgaagtgctctgcgcgaggttcagagcggccgtttgacctcg

SEQ ID NO: 27033 - DNA, 210 bp, Homo sapiens
  source 1..210: mol_type = other DNA
ccaggtgcctctggacacctgctcatctgtgtccacagctggtccgctcccccagggggcgccctcgtccggccgccgtccctccctcgggctccggtcccctgggtgagccccagcgctggcggcgtgggcccgggactgggcaatgggtggcctcccaggtcgccgccttcccgcggggccccgcccccggcccgccccaaagcgggc

SEQ ID NO: 27034 - DNA, 283 bp, Homo sapiens
  source 1..283: mol_type = other DNA
cctctatatggaattcttctgcttgtggagatgcatttgctgtgagtgaaaacccacacaaattcaacatgggcagtcacagggttaaagccttgtcttcacagcttttttcaaaatccttacagcgccagatactggcacccatggaagcaccctgacagcaaaagcatcccaagtgcctcctcgccctgcactgcctggctggcctgggaggggactttaacccccacagccctcagcctcagggctgagattcaggctcaggtctatattaaagtttaca

SEQ ID NO: 27035 - DNA, 315 bp, Homo sapiens
  source 1..315: mol_type = other DNA
agctccaacggctataatttattcactattgagtaaatctattgctgtgataataataattaatattagtattaataataatgaggaagctctcaaaggagcccttttttcaccctcttaagagtttatgccataatacaaaattaatacaaattgtacaaaatgtctgattctcttttttttttttttagacagagtctcgctctgtcacccaggctggagtgcagagcagctgggagcgtgggcgctggatggctggcagcggcctcaggtgaccacagaggtgacctcatgttaaacccaggcaagacctgt

SEQ ID NO: 27036 - DNA, 421 bp, Homo sapiens
  source 1..421: mol_type = other DNA
ttaatcatttgctacctattgtttctcgaaaaatcccatattggttaacaaacaaacatggactctctacctatgcttaccaatactttctcaaattttggccaataaacatgggttacttttaaaatcaggataacattaatagctagcatttggatatttattttgcaagtactatgtatttctcttctgcagaagataaaaccatagccaagatactagactctaaaatgtgagcattaaacacgaaagcatctgttttcttaaatgttttactatcaaaaatacaaaagaaatcaaaagtagaaagaaaaatatgaatccttatgtctgtgccacccaccttccgcacgcccgcgcacacacacgcatgcatacatggacatgcgagcctcccaggctgcacttctccctgcctgtg

SEQ ID NO: 27037 - DNA, 562 bp, Homo sapiens
  source 1..562: mol_type = other DNA
aaaaattgtacgtatcaacaagcaaaaacttttttaacacttattgctaaatattttccagattgttgaacatagaagcctattttgaaccccccaaaatagaaccttactctatggtgccatcggaaacggatgcctcatgacatccctttccttgccaagaaatacctttatttaaggggcatgtcataattcatttaaccaatgccctctgtttcccacagcatagcagtggtatcttggagcagtgatttactggcacactgactcaattatgtatttaagggcaagtccctgaaattgaattcctgggtcacagggcatgcaactgtttaaacatttgccaattgccttgagaaacactgttttcccattgggggaaacatttattttttaaataaacgagccaatatattttaaaaaagagagtttggttggtgtcactctcaaccctgccctttcctagccgagctcttaagagatgatcataggagtcaggcttcctcatccactgatctgggcagtgaaaactatgacttcagagccttggctacttaaggga

SEQ ID NO: 27038 - DNA, 283 bp, Homo sapiens
  source 1..283: mol_type = other DNA
catgaagcagggagggaagaaggaagggaaggtctcctttgatacttctgctttgcttttcagcttgagttagccaactacataatttgtcacactgtgtttaattgaatccagtgtcctggacaactgaggtgaggagtcagaatctttctccaatggtattattttcttcgttgaagtgaaagcaaattattgaaagtttacaaaatgttagtatctcttagtattattactactgtatcagattcagctcatgagatggaatagagcactgttcataatt

SEQ ID NO: 27039 - DNA, 295 bp, Homo sapiens
  source 1..295: mol_type = other DNA
aactgaggtgaggagtcagaatctttctccaatggtattattttcttcgttgaagtgaaagcaaattattgaaagtttacaaaatgttagtatctcttagtattattactactgtatcagattcagctcatgagatggaatagagcactgttcataattgtgccgcgatgaggtagctcctccctctccacttgatccggaatgggaggaacgcaatgcgtcccgcgcggcgatctgggatagctgcgcaggcgcagcttccggctgcgcaccgcgcacgcgcagtggcccactt

SEQ ID NO: 27040 - DNA, 463 bp, Homo sapiens
  source 1..463: mol_type = other DNA
gccatattaagtaataatcatttatagtcatttaatctagtaataattagaataatctactatgtgttagattttaaaagttttcagatccgacattttaaacttgggagatttcacagaaatccagactttttgcctgtcttgggagtcctgcacacttagcattggagctgccatcactgcatgcttaggatgcagtaagctgcatccagtttgccgcagtccccagcacccccaccaagtgtggacgtgggcacccacagctggtattacaggacctggggacccagctggctcctgtcagatatatgaactttttctaacttaacagaattatctccatcttacaagaaactggactgagattcaagcccaggcctgcctggaaacctgggcttttctcagccagactgtctgtctcacacactgtgacttctttgttatgtcacagcttagtcaatgg

SEQ ID NO: 27041 - DNA, 591 bp, Homo sapiens
  source 1..591: mol_type = other DNA
agcagggccccagcgcaccgcgagcctctgctgccccgtctgcgcccctctcggcgtgggcattcgcagacccgctaggaggctgacgagaggtgtcctcacaacctttcgcctccattcttttggagagcggctggtggcgagcgatccgcacaatcgcttccctcgcggcgtccctggacgggcggagagaacccgggtgactgagcctgaggctgagcttccttgggagcgatccaccagccacttctaccttcaagggggactcgcggccgggtttacactcagtcctgcgggctttcggggcgcccgccagaggatctggggctgcacagctcccggaccctggagggggtggtccgggggtgggagactgcgagcatcagcccacgccggccccctcccaccctgcggcggcgaggtgggaagggccaggatgcgagcttagcacccccacccccgcaccgcctgattccgaggggcgggagcgcattgggctgcgcacgggtgggggcgccgcgccagcttcgcgtagctgctctgacgccgctgccgccgccgccgccgccgccgccctccgcagcccagctc

SEQ ID NO: 27042 - DNA, 595 bp, Homo sapiens
  source 1..595: mol_type = other DNA
gaggtgtcctcacaacctttcgcctccattcttttggagagcggctggtggcgagcgatccgcacaatcgcttccctcgcggcgtccctggacgggcggagagaacccgggtgactgagcctgaggctgagcttccttgggagcgatccaccagccacttctaccttcaagggggactcgcggccgggtttacactcagtcctgcgggctttcggggcgcccgccagaggatctggggctgcacagctcccggaccctggagggggtggtccgggggtgggagactgcgagcatcagcccacgccggccccctcccaccctgcggcggcgaggtgggaagggccaggatgcgagcttagcacccccacccccgcaccgcctgattccgaggggcgggagcgcattgggctgcgcacgggtgggggcgccgcgccagcttcgcgtagctgctctgacgccgctgccgccgccgccgccgccgccgccctccgcagcccagctcgcgccccgcggcagctccgcagtgcactagccaccaccgccgccgccgccgctccgccagacctgctgccagcttgcccggtccagccctgag

SEQ ID NO: 27043 - DNA, 510 bp, Homo sapiens
  source 1..510: mol_type = other DNA
aaggttgtagtaaaacaactgctctaattcttactgagtgggtcacacacacatctagatcgcagccagacggatggccatcagcagtcttttctcagggtttgagaaaacactgtgtcttagtgagaagacacagtctgtgcgagttagtaaagtgaacagaactgagtagtcagctccctagtcaagaaattgaacagtcggcagagtttgagatttcttaacgtagacagccacgcggaggcggggccgccggcggtcgaaggtgcgcgcccggccgacggtgcgcgcccggccgacggtgcgcgcccggcaatggggcgtggccaggcagagaggcggggctccaccgagcgcggcgctgaagctggcagccagaaaggggcggggcctggcggcgaggctgcggggcttccaaaccgggcgtcccggcgccagaatgggtacgtctcaccaatcgcgcggcgtgacgtcgggggcgcggtttcgcggcgtctgggcggacactgc

SEQ ID NO: 27044 - DNA, 465 bp, Homo sapiens
  source 1..465: mol_type = other DNA
aaggcctttagaaacctattgttctaagcaacttaatgcagaggccttcagccccaaaatcagggcgtcagacgtcagcagaggtacgaccacttcttcacctcccttctttccagaaagaggaaatgatgcggcccccatgtctcggccccagcagctgggggacctggccccacagatctgtccccagcgcaaggccagggccggcccctggacctcctgggaagccttcagactcaggccgcgcaggccttcaagctaggaaccctgagttcctggccctggcttcccgtctgtcaaatgggagcagggataccgaggaaaactattccgaagcctaggggtccccacccgagagcgccgggaccctgtcccgcgctgcctcccaagccggatggggttgagcgcgcccaccccagtcccaggagctcaggccccgccttgggggaggagccgagaggcggc

SEQ ID NO: 27045 - DNA, 357 bp, Homo sapiens
  source 1..357: mol_type = other DNA
ccgagtatctgggattacaggcgtacaccaagacaccgcctgaccttaggcccggcctctgaatttaaaacatgaccagtcagtaagcatggttatcagccctgtagggctgccggggatgagccggtattctttgaatgaatgaataggccatgccaaagcactgagagcctaggagcagcgtggccagagtctccgggagtcggcaccctgactgtccctggccttgcacggccgcgcagcggggcgaccggcagggggcgcgctgggatggccaggagctcggctctccccgctctgcatcagggggcggagccgtagaggcttgcgccccgcctcgctccgctatccaatggg

SEQ ID NO: 27046 - DNA, 488 bp, Homo sapiens
  source 1..488: mol_type = other DNA
gattagtgtaatctttcccaaatttgttaatctgaagaattcaggagcttctcaaaccaagccatgctccaggacatcgattcagaattggatcaaggcctagaatctgtgtttttaacaagcatttactgagttggtggactaccttaattgatctgcactgtgccgcactacctgggcccacaatacaacccacgaggtagttcctattattacccttcaatttgaaattgagaataaaacagaagtcgacaagttgaggtagcttgtgacatcagtatttcgtatttaatccagaaagcactgcttcaacgcccagtgcgtgcaaggaggagcgcgcccttttctccatgggctcgggggcggggccggtgcgctcgccggagcctgggggcgtggccgtcacacggcgcgatccgtctgggcagcggctcttcgggggccacgccctccgggccctgggggcctagcgcgcgacggtggggtgg

SEQ ID NO: 27047 - DNA, 398 bp, Homo sapiens
  source 1..398: mol_type = other DNA
ccaactattgccccgtcctcccagcatgccagggatacaggggcggattggtgacccagggctacatgtgaaaaattaaaataatttttaaaaagctggggaggggactcctcccaccaggcggcctcagggtcggcttaggcgctggggagacctctggggtcccagctgccaaggtactcgccgcgacgccgggctgggtcccgccgcggcctttaaaggcccaccacgtggctgcgcggccagccctggtccggaggcggtgcccgggtggcgcctgcgcactgcctagcagcgcgcacggtccggaggcgggggcgaacagcgagggggcgggccgcaaccctctgcctctttccgcgagcgctgacgtcgccgacgtgttgtttaaaagcggc

SEQ ID NO: 27048 - DNA, 394 bp, Homo sapiens
  source 1..394: mol_type = other DNA
tcatgatttaatttcattttaaagatttaaagcatgataaatccgctgcaaggtttttgaccttccaaaagccaggggaaaggtcaggtcgccttgggatctggcctagcactgagtgcggggtagggtctgagtcggagccccgaatcggactcgagtcctgtccaaaggccctgggagctgcaggtcagaccactggacagcgcggccgcggacctaacgcccctgtaaggggtgctcacgcttggggggaactctccgaaagagagggaacagacagacgtgggtctggccgtcgccagaactgcctgcggaccagccccgcgctgccgggggggcgggacatgtcggctgtccatcagtgcccgcgaccatccgcaggcagccccgcccc

SEQ ID NO: 27049 - DNA, 229 bp, Homo sapiens
  source 1..229: mol_type = other DNA
tgaaatgtctcaggcaaagggcaccttaggcaaagattgctttctccagttcaggtgaaagccacactttataatgaaggtatctatacttgattgtatatcctttctggtataatatattctatgaacagattaatttaactagaaataatcagtgtctcaattttctgaaaggaaaaaaaaatgactaagaatctgaattgcttcaaaagggcttctgaagccttga

SEQ ID NO: 27050 - DNA, 828 bp, Homo sapiens
  source 1..828: mol_type = other DNA
tgcggggtagggtctgagtcggagccccgaatcggactcgagtcctgtccaaaggccctgggagctgcaggtcagaccactggacagcgcggccgcggacctaacgcccctgtaaggggtgctcacgcttggggggaactctccgaaagagagggaacagacagacgtgggtctggccgtcgccagaactgcctgcggaccagccccgcgctgccgggggggcgggacatgtcggctgtccatcagtgcccgcgaccatccgcaggcagccccgcccccgcccctcccgggagagggcgcgcggaggacccgccgccgccggtgtgaggcggcccgtcctggctcccttgtccgggaagcccgcccaggtaactgagtttggccgggcattcccggaggacgcgccatcccctcacgtcccgtcccggtcgctgcatgggcggtgttcgggacgcgggggctgcgtctgtgcgggaccgcggggtagcggccgcccgtgcgagtacgcctgactgacgcgccggccgccgggcctgcggcctgtgggcggggctgccgtgcgtgacagggccgctcgtggccgccgggctgtgtccggggccgcggggtgggtcgaccgggaacggcgcgcgctcccgccgccatcgcgcctccgtccccgcctgcggcctgtctgggggtcgcggggcgcaggcgcggcgggccgacgggcgggggtcctccccacgggtgcgcgggcgcctttgttcccggcgccgaagcggggtggggcctcagggcagccccgccccgccgcgctgaggccccgccccgtgtccgcctgcagga

SEQ ID NO: 27051 - DNA, 460 bp, Homo sapiens
  source 1..460: mol_type = other DNA
tttatatgttcatttaacccttttaaattattaacctgctagattaatgcagatctgggattcaccactttctgagcatatttgctgcagtttgaaagttcaagtacttgaagactcaatgttaaaacagtgatcaagagttagtttttttgttattattcttaagaaaacagaaaatattaaaaattgtcctagtttttgaaagtgtaacctgttctttaagtcccgtcttcttcagcctccacacggtggggcggggaggaggggggaggaggagtgctggcgcatgcgccgggggcaaggtccgctccccgcgacgtcagggggctcgcacccgctcgaaagccccgccccgcggccgccagaggcgacctgggcggactggggggcctgggccacgcccccagccgagtcgagcaaggccgaggggagccgtgcaaggccgagcagagccgagcgc

SEQ ID NO: 27052 - DNA, 391 bp, Homo sapiens
  source 1..391: mol_type = other DNA
gcagcttctttgcaggggccatagggcgtcggaaaggtctttgaaagccgttcccggcccgggccttgcccaaggcacgagagtaaatgccgcgtgcctcggcgcacctgacctgtcccctcccgcagtgcctgcagacagggagggagcgcggctgggccagaaggctgatcaccgcctgccccctgctggccagtgtcagtattgagcccgcagaacgtcccagggaatttaaatgaagagatatacattaatcaaccaggagtttatctgggaggagctaggtccgccccgttccgaaatccacacggggtctggtgggcggggcatgaagtctggccccgcccccgcctccgaggccaaagggcgccctgggcggggatcggagcag

SEQ ID NO: 27053 - DNA, 466 bp, Homo sapiens
  source 1..466: mol_type = other DNA
agacacagacggctgtagccaccggtgacccaactcttgggttccaagagtcaaagtgccttgtaagacctgaggattttctctgaccacgggccaccaggctacgtggcgggaggtggtgctgctgtgcccccagtcacggccatctcggctccagagccctggagagcagttcccgggttcacacggactctgaagacaagcgtatcctgagggtggacgactcctggaaagtccacgcccaggctggcctcaggggtccgcttctctcgccccgtgcccgcaggcgacagagtggctggtgtgctcggggggcctcccagggcgcggcggcctgcgcccctgccacctggggctgctccctttggaacctcctgttcgcaggcggctcctcggccgtccgctcggagctggggcgaggggctggcggcggcgagcggcgcggccccaagccctccgcggcccc

SEQ ID NO: 27054 - DNA, 477 bp, Homo sapiens
  source 1..477: mol_type = other DNA
atttagtgggcactcaaagattacctgctaacgaatgaattcgagagtgtaacaattagttgaatctctgccaaacactgggccctgtccttgaggatgctacaaggatggtaaggcgctgcagggtccccggggctggaaaactcccgggtgcgccgggtggaggctgctccgcgtggcctcggcccctgcggaacccctgtgtcgcgggaccccagcgacgccagccccgggtcttccagagggcgctgaacccccgccggcgcccgagcgcgccaggtccccgccccctgcctgcgatctgcagcgtgcaggaccccgccccgccccctcggcccgcgggaccccggccccgccccgcccccgtggccctgccgctagtcccgggggggcggggccgagcgcagcggcgtctccaaggcggggggcacgaggcagggggcggggcggtctcagcgccggccaatcctgcaagca

SEQ ID NO: 27055 - DNA, 621 bp, Homo sapiens
  source 1..621: mol_type = other DNA
gggggtggggggatgcctcatgccccttctgcgcccccttccgcgtggtggtggggacaattgtgtgtgtgtgcgcgcgcgcgctcttagatgaaattctcatctcagggtgtgcccgagaccctggccagcagccgcctgccccagctttgggcagtcttgagttgcgagggctgctcgctgcagcctgcgcccccacagggcagacgatgcttggctgcgcggcgcggcgcggggcgaagaggcgaggaccctagcggcccgagctggtcggccccggagagggtgcgcgggggagcccgcgtgtgccagccgcgggcgtgtgccaggcgcgggcgtgcgcgtgagggtgtgtgcacggccgaggcggagcgcccgggcgggcggcggcggcggcggcggcggcaacggcggcggcgttaggactcgggggacaccgccccccgccccccgcgtccccgcctcagttcgcgccgcgcctcggcttggaacgcaggagcgccggctccgggagcccgagcggagccagccgcgcgcacagccagcggccgcgccggcgatgcggggccaccccgcgcccgccccagtcccggccccggcccccgcgggaaggggctgagc

SEQ ID NO: 27056 - DNA, 564 bp, Homo sapiens
  source 1..564: mol_type = other DNA
agctgcctcccaggacagcagagagccaggctgtgggccgtgggctgccagggacagctccaaccctgttttaggctttcagccccaaccaggtctttgttaagacgggggtggggggatgcctcatgccccttctgcgcccccttccgcgtggtggtggggacaattgtgtgtgtgtgcgcgcgcgcgctcttagatgaaattctcatctcagggtgtgcccgagaccctggccagcagccgcctgccccagctttgggcagtcttgagttgcgagggctgctcgctgcagcctgcgcccccacagggcagacgatgcttggctgcgcggcgcggcgcggggcgaagaggcgaggaccctagcggcccgagctggtcggccccggagagggtgcgcgggggagcccgcgtgtgccagccgcgggcgtgtgccaggcgcgggcgtgcgcgtgagggtgtgtgcacggccgaggcggagcgcccgggcgggcggcggcggcggcggcggcggcaacggcggcggcgttaggactcgggggacaccgccccccgccccccgcgtcc

SEQ ID NO: 27057 - DNA, 469 bp, Homo sapiens
  source 1..469: mol_type = other DNA
gaatcagctgcctcccaggacagcagagagccaggctgtgggccgtgggctgccagggacagctccaaccctgttttaggctttcagccccaaccaggtctttgttaagacgggggtggggggatgcctcatgccccttctgcgcccccttccgcgtggtggtggggacaattgtgtgtgtgtgcgcgcgcgcgctcttagatgaaattctcatctcagggtgtgcccgagaccctggccagcagccgcctgccccagctttgggcagtcttgagttgcgagggctgctcgctgcagcctgcgcccccacagggcagacgatgcttggctgcgcggcgcggcgcggggcgaagaggcgaggaccctagcggcccgagctggtcggccccggagagggtgcgcgggggagcccgcgtgtgccagccgcgggcgtgtgccaggcgcgggcgtgcgcgtgagggtgtgtgca

SEQ ID NO: 27058 - DNA, 215 bp, Homo sapiens
  source 1..215: mol_type = other DNA
agagtaccccaggcgttggtctacagctttaaataagggcgcctctcgtccacgctccctatgtcggcgggtctgcgcgctcgcaacgcgacctccgcccggtcaggcgtccgagaccgcggcgtcagagcccagggacgacgcgggacggacgtgccgctgcgcgctgacatcacgctccaggccccgccccaccggccgcccatatagcgaaa

SEQ ID NO: 27059 - DNA, 427 bp, Homo sapiens
  source 1..427: mol_type = other DNA
ggccttccacggaggtcaggtggccggagacagccccggttctgccaccctcactagactcacctgtgtcgtggccaccctcggcctgcccagcagtgcccccgggagccaatccatgtgggtgccccggagcaagtggccggctgcgaaccagtttctgccaccgtcctgccgcagcttagcgccgggccggccagctccagcaccagcacagtgcggcttctggaatggacagaggccgcggccccgcccccagggggcggcctgcgggtcagtgtctgtggggattggctaagcctcgtaaaccgcagccatggggcggggcttgcaggcccggaggctggacagttgaagcactcctaggccctggggcactcagactggggcaccctgagtggcttagagtggggcaccctgggactggacc

SEQ ID NO: 27060 - DNA, 383 bp, Homo sapiens
  source 1..383: mol_type = other DNA
ggactgggccagagcccttgaggggccggactgagctagggctccaggttccttcctctgaaacatctgcaggtttttgggaggcgaaggacacaggccccctagccgcacgcatgcgtgcatgcacgcgcgcacacacatacacacaccacacagtcacagatgcacagacatatgctgatgtaaatgtacaaatgtggtcacactgacaacaagccctgagggtctccagggctgccctggggctatctagggtgagatggtgttccccagggaacagaagtctgctctgccggatcccgcgtgacatcagctagccccctcgcggctgccgggagctgtgagctctgtgctggggccaggccggcaccaggcacagacga

SEQ ID NO: 27061 - DNA, 228 bp, Homo sapiens
  source 1..228: mol_type = other DNA
gagcttgcagtgagctgagatcacgccactgcactccagcctgggtgacagagcgagactctgtctcaccagggcctgggaagcccccagtcctgctggttcactaggttccaagcgagtgcggcagttccagtgttgagtcagttgcaggcagggcccatccaggagccccagtggttaattagtaactggaaggccccgaagccagcttccagcaggcagggctgg

SEQ ID NO: 27062 - DNA, 270 bp, Homo sapiens
  source 1..270: mol_type = other DNA
agggatctgctgatcataatcacttctttctttgggaataaaatccagattctctggtctagcattcaagactgtctgggcccatttagcaactccccacacttcaggcccttctgaggggctttgggtaccagaaccctgccttctatgcaggccttctgtgcagtatttgagttcccctggggccagggtgaatcttacaagcgcgacttcctcaaagcactcgcgaggccttgtactgctgttgggaagtccaaagtcacctacagg

SEQ ID NO: 27063 - DNA, 456 bp, Homo sapiens
  source 1..456: mol_type = other DNA
gctgcgcccggccgtctccacttttaaaatttccagtgacagaaattgtggaaagcaacacgagttgtatgtgttttaatatcctagattcgaagacaaacataaagagctctctcaggctgctgcagcgtgcttttgcacaagccaacaggggcgcctttagttttcacatttttgtagaatctattcaagccatgctcgccggcgctcaagcctagtacttaataaaacagaattatacggtttatcattctcaacactgctttgggaatcgaagctggggcgttctccaacccccccgcgctggaagtggagcgaagtttccgttgttattagtctttactcgtaattgatactaaagaacaaaattaaatgggtttatttttggtgaaaagttaaaggctgcctacccctgacgcctgcgacggagaggcgccttccgtgctgtcgtcatca

SEQ ID NO: 27064 - DNA, 357 bp, Homo sapiens
  source 1..357: mol_type = other DNA
gcctcccgagtagctgggactcaggatggcctcgatctcctgacctcgagatccgcccgcgcgtgagccacacgcccggcgcaggggtgtttttaaattcaaacaagtgttccaacttcactcttaaaaatgagactgatttgagtaataatacaactctggtctcccgcaattgccgtcttgaattgctgatgcagtgtgaggggctggtccagagcctctgacccacactgggaagcatggaccgtgcacgccaccgagaagaagcctctggggcgcggggctggttagagccccagagccgtcgcagcccggctccaggtgtacctgcgcacaggcgccccacggtgacgtcag

SEQ ID NO: 27065 - DNA, 305 bp, Homo sapiens
  source 1..305: mol_type = other DNA
ctcctgtaattccaccactgcactccagcctgcactccagcctggcggctctggggattccgccctggcgctttcgggccgccccggactgacacgtgagccaggcctcggtcacatcccggcccgctccacaactccgaagtagcggccgccgcccctgtcctgcagccggccctggagggtctgggcaggtgccgccccgcaggccccgccccgccccgccccctggcactcaggcccctcccccggcgcccgcgcgccaggactgggcggcgccgacgcgcttggcgggagatagaaaagtg

SEQ ID NO: 27066 - DNA, 525 bp, Homo sapiens
  source 1..525: mol_type = other DNA
tgggatcgcgggcagaagtcatcccgacagccacccgtgcgacgacacagtggcccctcactcgcgtccccctgacagcctcgcagtcattcacaagccgtcacagtgacccgcggccaggcactgcccccctggacggtgagcctcagacactcgcgcgtcgaggtttaacttactgcctggcggggcctcggattccgagtaggctgcggccaatcgaggcctgtgtcctcccgggagcggtgagccggcgtccctccaggctggggctgtagtgccggacaccagccaggtcccagctgcgctgcgccgggcgcattcccagtgatggaggcttgcgtgcctggaaccccgaacccgaggcgtcaggtcccactgccgggtctggcccagcctggatgggttgggtgcctctaagcagtccgcgtccccttcggtcgccggagagggaactttcaaacttagttaggaagccagactgtccgcgcgtccgccagtcggtgcgtcggtcccgggccggctgga

SEQ ID NO: 27067 - DNA, 458 bp, Homo sapiens
  source 1..458: mol_type = other DNA
cctcacaggctcctaggaaaattttaaaaaatcatgacccttgagaatttctgagaggacctcattacaacacaaccctgtgttgacaggaaggggactccttccttcagggacgcccagtctgtgtctcaggcagagaggagggcaggctcctctcccttctctttgcccttcaggagaaagagaaagggaatagatgcaccaagttctccccggcttccaggggtggagggggaagcacatgtgaaccccaggtccccttaggtcctcgccctccctgcgcgcagacccaggggactctgagaatggaagggagctctcattcccgggaggaaaagacaccaggttccctgggctgcctgccagccactgcccgggtctgcggcacgggcgcgatttgaaatacccctccttcccgctttgaagaaggctacactgacctttccgtcccagaaggc

SEQ ID NO: 27068 - DNA, 384 bp, Homo sapiens
  source 1..384: mol_type = other DNA
taactcaaggcagagaggttcttatttttttgttttaaattacaaatgtaatacacgcttgtggtaaaatgttcaaacacatacatatacaccgttattgtttttataaaaatggaaccatgtccttgacatgcatccatgcactgagtacaggtatttctgcaggcacacgttgacaggtgctgccaatttgccttctcttccagtgcaacacccctcccaaggcagcgtgtgtgagtggggacgtggagccgcgctgtacttaggggctgcctccccttctgctccccgagacctggcgtggagaccgccaataaaagaggttaaataacaggtttttccatttcacctgctgggcctccagccaaagggcttataaagctt

SEQ ID NO: 27069 - DNA, 456 bp, Homo sapiens
  source 1..456: mol_type = other DNA
gggatttgaagacatatctaactccaaaactactggattcatgaataaatggattcatgaatttttatgttattaaacagtatcttaatttgaaattttaagtggcacaaatatggctcattgcacctggctaattaaaaaaaaaaatttttaattgtagaggcggtcctccagccttggcctcccaaagtgctgggattacaggtgtgagccactataacaagcacttacagtgtttttaaccagagatgaaaatcagattcatctgaggagcttttaaaagaattcgactgcccaagtcttctcccaggacaatgtacagctaccctaggatgtagcaatggctgcctggcataaacatatgattacggtattgaatctgcagctcaaactcccgaactccctgggagaggctgtcagtcagcctggccagggctcaagaggaaacagttgtgc

SEQ ID NO: 27070 - DNA, 341 bp, Homo sapiens
  source 1..341: mol_type = other DNA
agaaccagtcctggtgatggagcgggcagctgttgcacagcattcagaatcagaaaaatgtaaagaatcctaaaattcatctcctctaaatctttttgcaaaatttggtcatttcaattcaattctggaggggtggtgtccgagtcccctcagccggggattgtctgattcctctgcataggtgactccacgtcgcacgtgcttctgaggggggcgggtgcggggcgttggagaggcgcggccgccgccctgcgtctgcgcagtcgtcggctgccgcgctgccgagtcactgggggagtgcgcaggcgcaacgcgactcccgaggcgcgggccgccccctt

SEQ ID NO: 27071 - DNA, 405 bp, Homo sapiens
  source 1..405: mol_type = other DNA
tgtgacttgtatctgttaaagtaatgagtgctatgttaccaaacatactgcctcttcttttttatataaatttatcaataaatttttatttttattttttatgagcccaggctggagtgcagtggcgccatcttggctcactgcaacctctgcagtagctgggcctcaggtgatccacctgccttggtcccaaagtgctgggattacagggcacccagtcgaatttattaatacatttttaaatgagcaaattcacacaaacctctggatttccaggttcgtgaaaacccagaatcgctggcacctgggtttgcatccaggagcggctgtcctgttgagcggaacttgtgctccccagtttgcctacagcttctcgagtcagtgaaccctgatgcaatagatgta

SEQ ID NO: 27072 - DNA, 382 bp, Homo sapiens
  source 1..382: mol_type = other DNA
accacagagcatctgttatctgagccaggcttctgtatttcctcaatggtaaataaattaaaacacagtatttatagtaacggaataaggaactttgctgttggtagaagatgcaaccttgaacaaatgaaaaatgattattttatattcttaccatattatcatgaccttatggctaggagcacagactctggagccagactgcctgtgaccttgggcaaggtcacttagcgtgcctcagtttccttctctgtaaaatgaagctaataggtaaagctcttagaacagtgtacagtaagtgctatgtaagtgtctgttaccttcgaggcccttcaggggactaatttctaaaggaatagctctctagaatttaggtgcctgg

SEQ ID NO: 27073 - DNA, 447 bp, Homo sapiens
  source 1..447: mol_type = other DNA
actttgctgttggtagaagatgcaaccttgaacaaatgaaaaatgattattttatattcttaccatattatcatgaccttatggctaggagcacagactctggagccagactgcctgtgaccttgggcaaggtcacttagcgtgcctcagtttccttctctgtaaaatgaagctaataggtaaagctcttagaacagtgtacagtaagtgctatgtaagtgtctgttaccttcgaggcccttcaggggactaatttctaaaggaatagctctctagaatttaggtgcctggcccaatacactgagctgtttggggggcacgacccacttcctcgggctccttccacccttgcagggagcctgacagggggaggaggagaaaggagctcccgggatcccctcgccccctcccccaactgcccggtgagtaatgacggcgagagagagc

SEQ ID NO: 27074 - DNA, 364 bp, Homo sapiens
  source 1..364: mol_type = other DNA
tcccagctactcgggaggctgaggcaggaaggcctgcagtgagctgagatcgcgccactgcattccagagactatgtctctaaataaattaattatattaattaattaatttaataactgcagagtcccagctactctgccattgcactaactaataaataaataaatacaataattattcctaaggaaacagctcataaactagctttcttgtctctcgcattttacagatgagaaaactaagactcagatgggtgtctcgtcacgcgccagaggcagcagcggccacgagggggagcgcgcgggctccggagcccaagcacgcctcaagctgtgggactcgcgggcagtgcgcatgcgctcg

SEQ ID NO: 27075 - DNA, 264 bp, Homo sapiens
  source 1..264: mol_type = other DNA
tttgttatcactgttgttttagaaaagaaaggacattttaatgcaacccatgcccatctgtaggggctgaaggtccctctatggtattcctataaggaaatgaaataatttactaaaaaacatacagcaagaaaataatagagctggagttttctgattttttgatttcagaatcccacaggtgtctaacatgccagggagctaaaacataatagtatcagtgagactccaggcatgcaatcaaggtttaatttaaataaaacc

SEQ ID NO: 27076 - DNA, 277 bp, Homo sapiens
  source 1..277: mol_type = other DNA
tgatttcagaatcccacaggtgtctaacatgccagggagctaaaacataatagtatcagtgagactccaggcatgcaatcaaggtttaatttaaataaaaccaacccaggttgggcctggctctgggttcccctaaccccagagtgcaggactaggacccgagtggacctcaggtctggccaggtcgccattgccatggagacagcaacagtccccagcggttccctaagtgactggttactctttaacgtatccacccaccttgggtgattagaag

SEQ ID NO: 27077 - DNA, 129 bp, Homo sapiens
  source 1..129: mol_type = other DNA
ttgccaaggtgagtggatcacctgaggtcagaggagtggtggtatcccagctactcggggcgccattgcacttcttgagtaagcaaagtgagaaaataaataaataaataaattactcctttaatcctc

SEQ ID NO: 27078 - DNA, 262 bp, Homo sapiens
  source 1..262: mol_type = other DNA
gatggacgtctaccaggccccacttggtaagttgattgtacattttacagaaaaggaaactgagcatttaattggaggtgaatctggccctcccaaacttccagtccctggggcctggatttaaatcgtgggagaagtcaatgatttgggagcctgataaatgagtgcccgtgagtcatgatgcctgccttgtacaattgaattagcaccccgggtgtcaccaccggcgggggaccgattaaccatacagaggctaggccaa

SEQ ID NO: 27079 - DNA, 405 bp, Homo sapiens
  source 1..405: mol_type = other DNA
gctcttgcccctggggtaggaaaatgaaaagactgttctggaccaccagaggttctgcctcagaggaattattgaatcaggctccagagcaagaatgtcactcagttaatgaagctagtcctgagtccgggtttgaaggtttccctttcctgaaataggggaattgcataaatgttaaacaacaggtacatgttagcatgttcttggaaaatggccgggtttgacaagcggctggtgccccagctcctcccagccactccaggtccgcagctcggagctccggcagccaggtggggactgaacaccaacgccgcggggaggcgtcgcacatgcgcgctcctaggcggagccccgcctcccacgccctggatcgtcacttccggcgcgagaggccgggcaggccgg

SEQ ID NO: 27080 - DNA, 360 bp, Homo sapiens
  source 1..360: mol_type = other DNA
ttacaaaaatgaattaatgaatatatcctttgtgctcaggtttcagcatatctgcagagttattccaagaaagacacaaggaaaaataaattattcctcatattgaaattaaatctggtgatctaattctccagcctgtaatcccaccatgctggtaggcccaggcggatggattcgagaccagcctggtcatcccagctactcgggaggctgaggcatgagaatcgctcaaacgccactgcactccagcctggacagagtgagattctgtctcccctcctctgccccctccgcggctgcggaaggggacgcgaaccgtcctggtcccatccgagccgccgtagcgcgagtgccgcggga

SEQ ID NO: 27081 - DNA, 428 bp, Homo sapiens
  source 1..428: mol_type = other DNA
gagagttttatctatcagggaagattaaaggagaagatattgaagtgtgacaccttgttgtccggcacctaaactattatatgtgtaagtaaaaaatgttttcattttcttctttaagtgaactctcaaatttgacatgtattttgaaaggaatatttacatcactgcttaaatgcattgcattttaaaactgcaggcatggttgcctgtttcatactgcctcaaacaactaaatgcaccttagcatttttcccaaatggggtgcatcccacattttaggatattactttccccttacaataggaggcactaaatacacctttattgaatcattacattggggcacagatcttgacaggcgcccccctctgccgctccggtcgcggacggtgggcggggccacgccgtgacgcatccgtgcgtctgtg

SEQ ID NO: 27082 - DNA, 200 bp, Homo sapiens
  source 1..200: mol_type = other DNA
gatgcccagtataatgcacactgatttttactcattgaatctcagcttgaggtcattcattcagttgaaggcctgaccaagactggaacccagtttcccaggggacagatctccaccctaactagtatattatataccaaagaagtggcctgggatgcagttacagccccctggctcattgtccaaaggaaatggatctc

SEQ ID NO: 27083 - DNA, 439 bp, Homo sapiens
  source 1..439: mol_type = other DNA
gatgcatgtgtctaaacatacatacttttggttttgcttttacacattctaaaagttgcaccagtttctgagaccactcgcccgattcggaatagcgtcctgcaggttctgcaggacgagcgtccgtctatccggtggaaggcacgccgctcgaggcttgcgatgctcccggggtccccgcttctagcttgggcctggcgcacagcagcgcccagactgcaggcgcccagcgaggcggctggagcgcgcgcccacaggtgggtccggtcgggcgccgcggggccgtagttttcgggtcggcgggcgaggacgccgggtccagaattccaggaaatgcgcgatccaggccggcgggcggggcgggggctccggcgagagggcgggccccgggaacggcggcgggcggggcgggaggcggggcccggcccgttaagaagag

SEQ ID NO: 27084 - DNA, 276 bp, Homo sapiens
  source 1..276: mol_type = other DNA
aatgggggccccagaagaaagtgtccctcactcttggtctgagcaagggacctccgaaaccaaatggatttggcttgaccctagcggtgcccagcaagcgctggcacatagtaggtccagcctgcccggactcgcccaccacgggcccccttccagagccgggaggcaggccaagggaggccccttattgccaagagcaaacaggccgcccagggaagttttgctctgggtcacacccacctctgggtggctgccaatctgcctgccagaaaccgc

SEQ ID NO: 27085 - DNA, 409 bp, Homo sapiens
  source 1..409: mol_type = other DNA
agaaagtgtccctcactcttggtctgagcaagggacctccgaaaccaaatggatttggcttgaccctagcggtgcccagcaagcgctggcacatagtaggtccagcctgcccggactcgcccaccacgggcccccttccagagccgggaggcaggccaagggaggccccttattgccaagagcaaacaggccgcccagggaagttttgctctgggtcacacccacctctgggtggctgccaatctgcctgccagaaaccgcaggctgggccgcggctacccagagtcagggccacggagcttaggagaccttgggtcagctctgcaactgcagccccgctggggttcggctaggaccctcttgggctggaaggagctggagaggcctctgcaagctgtcacaggctctt

SEQ ID NO: 27086 - DNA, 493 bp, Homo sapiens
  source 1..493: mol_type = other DNA
agaaagtgtccctcactcttggtctgagcaagggacctccgaaaccaaatggatttggcttgaccctagcggtgcccagcaagcgctggcacatagtaggtccagcctgcccggactcgcccaccacgggcccccttccagagccgggaggcaggccaagggaggccccttattgccaagagcaaacaggccgcccagggaagttttgctctgggtcacacccacctctgggtggctgccaatctgcctgccagaaaccgcaggctgggccgcggctacccagagtcagggccacggagcttaggagaccttgggtcagctctgcaactgcagccccgctggggttcggctaggaccctcttgggctggaaggagctggagaggcctctgcaagctgtcacaggctcttgtgtgtgtgtgtgtgagcgcgcgcgcgcgcgcgcgtgtgtactcgtgcgtgtgcctgtgtgtgcctgcagaacataaagactca

SEQ ID NO: 27087 - DNA, 218 bp, Homo sapiens
  source 1..218: mol_type = other DNA
gtttgtaatacagcctttccatggctttcaataaacccacataagggcttgtaagaccctgctgggttttaagcaccaccttagatggtggggttacaacaggaatgttgtttcaccagtgggaggcggacaggggagcggttcttccggcccccacccgtggcgatgccccgcctcgcccgtcacaaccctgccgcgtggggccggggttggagggg

SEQ ID NO: 27088 - DNA, 514 bp, Homo sapiens
  source 1..514: mol_type = other DNA
cgacacagagtgtgtagggaggccgggcaccagggatgtcctgcctacctccctgagcgacccgcctgggcgggaccctttgagcgcatcccctccgagcgcgccagtgtctctgggagaggcctgtctgggtgagggactggacgccggcctctccgcaagtcggccggctgagggtgggggccgaggcggggtcgggaacagccctcggaccagggcccagacaacctcgcccggcgcctgcctccccgcgcgcacctgccgggcccgggggctgctagaagaggccgcagcccgcgccctccgggctcccacgccccgcagcggcgccccctcccccggcggcacggattggctgcggcgccgctccaagcccgcctcgcgctgccggcggggggcgccgcggaccagagcgcgctgcgccgccaccgccgccgccaccgccgccgccgccgccgccgccagcagcacagcgcgcctcgggctccgcgcgccgccagctcctggcccgccc

SEQ ID NO: 27089 - DNA, 399 bp, Homo sapiens
  source 1..399: mol_type = other DNA
tcttcaactaccttcagaggagtagaatgttggaggggagccatggaggcctgtttccttccctgaacttcctcaacgagggggcatcttaaagaagaaatcatgtacacagatttttgtgggtttttagtgctgagattactacacaggttttttaaaaagacgtttgtcttcagtctaccaaagaaggaacattgagggatgagcaatttctgttctctccgaccagactttcggggtggagggggaactgctaaacctcgaatctccgggactggccctggcgcgtttccagtcccagcagcccctcccgtggggccgtggcaaccccgtgcctcgcttgcccaatgagaacacggtttggggcggggcgcggccaggaccggagcggaagtggcg

SEQ ID NO: 27090 - DNA, 413 bp, Homo sapiens
  source 1..413: mol_type = other DNA
acagccagatgggcattaggagctgttccacctggggcctacctgctctgttggatcagtgagcagattgacaacccacaagtaactcagtgaacctccctggtgtaatatgagccagtaccaagaaaggccttagtgacatcttcaatggagcttgtgtgaaacgcaaaaagcgcggttttttcattcttgtcaggagggaatcattcccattttacagagaagggaacaaaagagctgggggttttgagagctccactcaagtcccagcagccctgctcaaggccaggttgaaggctttttccgcctcccagggcggggtcagaggtgtccccacctgcaagtgctcagggatcccgggggaggggcgtccgagcgcgcccacgattggtgcgcagggacgcgggggcgaa

SEQ ID NO: 27091 - DNA, 599 bp, Homo sapiens
  source 1..599: mol_type = other DNA
tcttgtcatatccaactaagacagaattgtaacattgctccaaaaaagtaattttttgcaagcctggctgctaaaactgcctgctgtaacctaaaaccagttttatctaatagctactgaaacagcctgctacaattccttgaagagcaatatgtaacatttctgttttataaaaatctccaaaccttcttctgacataccaaagacaacctggtctgtgtgtaagccctgaattgcaattcttgattgccaaataaaatatttaaactttagagattcatctctatatgttgactttaatccacctgtgcattaatttattaaataaatatctatagagcactaggtaccaggtactttctagctttccttacagcactaatcacatgaaatgagagtcttcgtttatcagttaattgcctgtggggaccccactaggacataatctcccaactcagggagcccagagcatgctgccgccccgcgtgcaagggagcctaagaaaccgagcacgcgcagagggcgggacgctccgggcctccaggtctcgcaggccccgccccctcgccgcgggttcgctgttgggcggagatattcgc

SEQ ID NO: 27092 - DNA, 500 bp, Homo sapiens
  source 1..500: mol_type = other DNA
gatggtaagagaaaggtctgtttctccaaagaggttacacacccggctgtccagtttgggctagatttatgaagtaggaataataataataccgtctaggttgttaggagtattaaatgaggtaaagcactgaaaacgtttagggactgtgttaaatcattaaataaataaataataatgttgcttatttttatgtctgcaaactgacttaaagggtccaggcgttcctggggcagcgccgcctccccaaaatcacgcaaaatggtttgctaagaattgtcagctcttcaggcttcacgcatctcagtctgtgaaatgggacccaggacccaggtagaggtgcgttctcggcctgggcagcgcaccagcgggcaccgcctggaggcgccttcaccacttggcggttccgggtccgcgcccccccgaaccacgtgatcagggccgtggctccgccccgctcccgcgccgcgcgccgcttccggtaggggcggaaagcggaa

SEQ ID NO: 27093 - DNA, 419 bp, Homo sapiens
  source 1..419: mol_type = other DNA
ctgacagagtgagtgagactctatctcaaaaaatcaaaaataaaataaaataaaattatatatgtggctcacatccatgaccacacctctcaaagcagttcttatctgtgagataggacacttaccccacagataaatagtttccaaggtaagtactcaataaacgttggtaattatcattattattaataacaatatgtgcaaagaggtacatgtgtggggatttcacaacctctacaaaccacttggcagggggctccaagggacataagatcctggctgtcaagtgtgtgccaggtccactcaattaagtaaatcatgattactgttgttcctttgccagagaagcttctgctgaaatccctcccgtaactccggaggatgcccctgcaggtaggcccagtctccagacccgccgc

SEQ ID NO: 27094 - DNA, 294 bp, Homo sapiens
  source 1..294: mol_type = other DNA
tgacctgcttttaaaacccatgggaagtcccagcttagtcaggaattagctgcgtttcctcgtctttcaaatgagaaggctgagagaaacgaaatctaaggtggggagcagtggccacacatctgctgtggagaggccagggctggcctcactcattatgccagcctgggccagccttcttctttgagagccagcaggcaagactggatctgagtcccccacatgcaggatgtgccgcctgcactgagtcctcgggccctcagggggtggggccaagatgaagcaggcacggtg

SEQ ID NO: 27095 - DNA, 291 bp, Homo sapiens
  source 1..291: mol_type = other DNA
tcagaatttcaacaggaaggattttcctccctttagtactcattcaaagaaagtgtcttcttccaaatccaggaatttgggggatatgaagatgatacagtataattattatgctcattgtatgaatctgctttcctccaggccacatgagattggcggggggcagggtgaatgttcaggacagacattttaagcactgccgtgaagaacgagggtcgctccccaagtccctcctcagaaggggccatttccaaatagagctgggaagtgcagcctcccttgccattttga

SEQ ID NO: 27096 - DNA, 297 bp, Homo sapiens
  source 1..297: mol_type = other DNA
cattacaaaataacctagttagacttttaattttatcaacaaataaagtttttgcagagtgtagttcataatgcatttatattttctatgaatctagaaattatcttactgatagcacaatattgtgtgtttcaacttcgatgtggtaccccaaacgcacccatatgtgaacaccgctgggaggggtggggcagccctgcaacaccctgatctcttcctggaggtctccagcccccagagccacagcgccgcctgctggtggagccccttgcaccaagaagctcctctgaggaatcc

SEQ ID NO: 27097 - DNA, 407 bp, Homo sapiens
  source 1..407: mol_type = other DNA
tttcattactcattcaaataaaatatgttaatatcaggggtgttgatggttcaaaaaattcttcacacacacactgtagatgtccaatgtatacatgatacatgttttcttgatgcatctgaaaggccgtctctatgcaataattagtcattatgtattcaaggcaaatttgtcttacagagttttttgcaagcactgtatttcaaaacatgaagaatttcattgtaatgttacctaataagtgagccagcacttctactctgtgagaaagtaatgatgtgatgtaatgtccattagttcttcctgtgaataatcctgagggaaagcccccaggtccctcccagaatggggtggatatttccctaaggaattatctggagccaggccaagctggactgcataaagat

SEQ ID NO: 27098 - DNA, 556 bp, Homo sapiens
  source 1..556: mol_type = other DNA
atacattattcaattcattgatggtggcaaatgctgtttactactgaagtagaaacttctcttaattaaaaagaaaattctgctgtttaggtagatttcatgaaaagaacccaatctagaaaccagcttttacttgaaagcatattaaaattctttcatcctttgacatgaattcagacttcctgagaaggttgcagctgaattgtattcatctctcattaaagttactagcaacaactaagaaaaactttggatacatgtcagtctttattgtgttgaacttgacagacatatttgacattggagtgccccttctatgatttcttaggtaaaatagaagatcatttttaaaacaaaaggaagtatggagttctatctaaaatagagtatttaaattattgcatcatgaagggatataaaggcattctcagaaaccaattgcttttgtagccttgtctataattctgtaaaattaaagtgatctggcatgatgaccagaagaaagaaaatgcctttgacattatgttgctgggttgactttgtcccacactcaaag

SEQ ID NO: 27099 - DNA, 574 bp, Homo sapiens
  source 1..574: mol_type = other DNA
agcagtttattacagaagtatgaaatgcttttatttaaaaaatgtattttggtaaatacatttttgtttaggtaaatatcatcaaataatccaatttggaaactcttacttctttttccaacagttgttcctatcatcataaaaacatgttaaatttttctcatcctttcaaaaaatcttgaaatcagacttcttgagatggtttcagctggatctctcgttaacattactagcagtgagtaacatcagaaagtttttgacacatgttagtcttttttgtgatgaacttcacagatacatttgacattggtatgcctcatcgagtaaaacagaatgtgtctcaggattactttaaaacaagacaaagtatagagttatacctaaaatttagtatttaagttattggattgtataatgcaagcgatctggcatgatgatatacaaagaccgataaaattttgctggggattctgaaagtaaaaaaaattgcctttgatattatgtccccatgctaagtccctggggactttgacattatcccccactgagcagggtgaaagggcagtgctgaaga

SEQ ID NO: 27100 - DNA, 283 bp, Homo sapiens
  source 1..283: mol_type = other DNA
aatggtcgctctctttataattagaagcaacctatgcagactgggtaaattttaggaagcaatcctctaagatctcaaattatctcacagctaaatgtagattacagtgactgagtgggaagggatatcatttcatttcacagctgagacaactgagctccagagagatttgtggagagcggagccttttcctgtgtcaggcacagaacaggaactaagtatcagttggttgaacgtcagcagagtttcacaataaagtctcagcacctgctgctgggagcac

SEQ ID NO: 27101 - DNA, 503 bp, Homo sapiens
  source 1..503: mol_type = other DNA
ccaaagctaggaccctctgggcatcagcgcagggacagagcttcggagcccatgcgaatgcgactcgtggagttccagggccgcacgctgggggcgctcgagagcctgacgctcgcctggaggatctggagaaccagctggccaaccagaagtgagggccacggacggcccagacccgggctggggcgcggcaccacggacggtgccccttgcgcgccatcggtgcgccggggccaggcagaacctgggcccgtccggcttgggctgtcggggcggagcacgtgctagaccggcacgccctcgccgcggttggatttcttgtttgtgttcttaaaaaaataaaaaaaactgattttgctgcgccgcctgggggaggggaagccagacggagcgtgctgtggcggcgcccgggcggcgtctccttggggggtcgggctcgggggcaggagacccggcgctgcttccccctgctcagccgagaacagatggctccttatgcaggc

SEQ ID NO: 27102 - DNA, 406 bp, Homo sapiens
  source 1..406: mol_type = other DNA
tcggctcactgcaaccaagcgattctccggcctcagcctcccgagtagctgggattacagggcctcccagaatgctgggattacaaaataagaatagatacatagatacaaatatgcaaaattgcacagtgttaaatgctcttcacgcatgccaggcgaacctctgcagacagaacaggcttctgtgtggctgtctttgcactgcccaaccgcaggcggcagggaggggctgcgccctgttgcggggcgcgcacgagaacgcgcggcttggcgcctgtttcccgcctgctctcaggagcgaccgccagggggcgcccgagatggcagggggcgtgggaagcccacatctgcccagcaggtgcgcccaccccgagcaaacagggggccggggcccggggccttggag

SEQ ID NO: 27103 - DNA, 414 bp, Homo sapiens
  source 1..414: mol_type = other DNA
gcatcatgcccattggagcccagggccatagggacacgtggctgtgacacaaaagcttccccaccctggggaaggcagggtggaagggagagcctttcctgggctcctggcctggagcgctctctagctctggggccaaagccatacaggagtcaaggcagatgactctcctcactcctggagaggaccgctccaccccttggggctctcctcagggaagtgccttggagtgtggctgccccggtctccccagtctcccgctgtagctgaattccagcctggcccgcagctagccctgtctgcagctccaagcgtggtaggagcagggggtgctgggtttgccccccctcaggaggaaggggggatccctccctgccagtgggaggggttgcagcctgcacttcccctccccac

SEQ ID NO: 27104 - DNA, 464 bp, Homo sapiens
  source 1..464: mol_type = other DNA
tttatttatttatttatttatttatttatttatttcactcggtcacccaggctggagtgcagtgagcgatcatggctcgtgaccacaatgcctggttaatttctttaaaaactttttgtagagatgtttaaatggtcaaaagaataataatatttcgtgacacatgaaaattatattaaattcaaatgtcggtgtctataaataatgttttattaggacccctaaaatatttagccctttacagaacacggttcacatcccattttcagaggggagcacacccggtatgaaggcggtggggttagccggcgggctcgggcagggcgggtcccttggggtttccaactccgcgggcgggcgcagtgccccgcaggcctcgcttccactggggaattccgggcggggtgcgggcggcggggcgggggcgggccggggcggggccggtaggccgcctataagatggg

SEQ ID NO: 27105 - DNA, 289 bp, Homo sapiens
  source 1..289: mol_type = other DNA
caggggctgtcttatatatacattgaggaaacacttgaattttatttatttatttatttatttatttatttatttagagagcaatggcgtgatctcggctcactgcaggctcagcctcccgagtagctaggacaatacttactttgctactaactgtgtcgtaacgtggaggagcttgcaggtccacttcaagtttgaaaataacgatcctttaaaaaaagaattcccctctagagggctgtacctggttcaggaggttcaggcagaggttgcacccactacgcctgcg

SEQ ID NO: 27106 - DNA, 320 bp, Homo sapiens
  source 1..320: mol_type = other DNA
aatacttactttgctactaactgtgtcgtaacgtggaggagcttgcaggtccacttcaagtttgaaaataacgatcctttaaaaaaagaattcccctctagagggctgtacctggttcaggaggttcaggcagaggttgcacccactacgcctgcggcagccgctcctgccgccgtggtcgctggagctttgccgccggtgaggccgggccacgctcagacacttcgccagaggagctcgtgtacgggcgggggccgcgcaggccccctcactctgagaccttggttccagtccctcctcccgggcggggcgacgttgcc

SEQ ID NO: 27107 - DNA, 390 bp, Homo sapiens
  source 1..390: mol_type = other DNA
cactaatagaagttacaataaagagtattataggattctattatttgttgatttctatcagtaaaatttataatacaaacacatatacattttgcttcagagagccaattattaaacatttacactgtttccatgtaagcttgagggcaagaattttctgttattctagcacttagaaaaagcacctggcaaggccaggcgcgctgactcatgccgcctggcgacagagtgagactctgtctcaaagacatgacttgggaatccctggtttcatgggttgactatcagaccttcccactatgatctagctgggctagatctaaccctggcttcctcatttaaaaagaggggataatccagtgatgtcacagctgcaggtggtacagagcc

SEQ ID NO: 27108 - DNA, 233 bp, Homo sapiens
  source 1..233: mol_type = other DNA
tatttatctcacagggttgttttgagatcccaacagggaaacctgaatgtgtcaatgatttgttcacatgaactcatgtcttcaagacttagctcagatatcagcagacttgtgttctgaaatgacagctgacttgggatcgagatcgagatcccagctactcgggttgcagtgagccgagattgcgccattgcagtccgcagtccggcctgggcaacagagcgctcagagct

SEQ ID NO: 27109 - DNA, 336 bp, Homo sapiens
  source 1..336: mol_type = other DNA
ggatcgagatcgagatcccagctactcgggttgcagtgagccgagattgcgccattgcagtccgcagtccggcctgggcaacagagcgctcagagctgccttcggagctctgaccgtaagggggtccaggagctgctagactggacacttctagcactgaaagagggcaaacgtttctccccccgcctggccagcagcgcagcgcccctcttagcaccgtggaggtgctggctccttgccggcgtcggggggcgcggcgtagcggcccacccttccagctctgacccgcccggccggcccggcgcccaccccgcccagtgtgcttggtaggttggg

SEQ ID NO: 27110 - DNA, 441 bp, Homo sapiens
  source 1..441: mol_type = other DNA
tcccagctactcgggttgcagtgagccgagattgcgccattgcagtccgcagtccggcctgggcaacagagcgctcagagctgccttcggagctctgaccgtaagggggtccaggagctgctagactggacacttctagcactgaaagagggcaaacgtttctccccccgcctggccagcagcgcagcgcccctcttagcaccgtggaggtgctggctccttgccggcgtcggggggcgcggcgtagcggcccacccttccagctctgacccgcccggccggcccggcgcccaccccgcccagtgtgcttggtaggttgggcggcggctctgtctagtcccagagccaggaatcaggggcagccgggcgagtcccagggcaggggtcctccgccgccttgcacctgccctgctgggcggcaccgggtcagtgccctgcccc

SEQ ID NO: 27111 - DNA, 521 bp, Homo sapiens
  source 1..521: mol_type = other DNA
ctcagagctgccttcggagctctgaccgtaagggggtccaggagctgctagactggacacttctagcactgaaagagggcaaacgtttctccccccgcctggccagcagcgcagcgcccctcttagcaccgtggaggtgctggctccttgccggcgtcggggggcgcggcgtagcggcccacccttccagctctgacccgcccggccggcccggcgcccaccccgcccagtgtgcttggtaggttgggcggcggctctgtctagtcccagagccaggaatcaggggcagccgggcgagtcccagggcaggggtcctccgccgccttgcacctgccctgctgggcggcaccgggtcagtgccctgccccctgtgggcagaaccggcgcgggcgcccgccgcgggtctgcgcggggcgggggcgcagcaagcgcaccggcgtcggtggcgcagtagccgcgctcgcaggggctgcctccgaccgccgggcgagctgcgagcgagtgagcccgccaccgcccct

SEQ ID NO: 27112 - DNA, 573 bp, Homo sapiens
  source 1..573: mol_type = other DNA
gctctgacgtccaggagctgctagactggacacttctagcactgaaagagggcaaacgtttctccccccgcctggccagcagcgcagcgcccctcttagcaccgtggaggtgctggctccttgccggcgtcggggggcgcggcgtagcggcccacccttccagctctgacccgcccggccggcccggcgcccaccccgcccagtgtgcttggtaggttgggcggcggctctgtctagtcccagagccaggaatcaggggcagccgggcgagtcccagggcaggggtcctccgccgccttgcacctgccctgctgggcggcaccgggtcagtgccctgccccctgtgggcagaaccggcgcgggcgcccgccgcgggtctgcgcggggcgggggcgcagcaagcgcaccggcgtcggtggcgcagtagccgcgctcgcaggggctgcctccgaccgccgggcgagctgcgagcgagtgagcccgccaccgccccttcccggctcccagggcccgtcggtcccccgggagccctggaggcgcagccccaccccggccggcgcggctcgctcccac

SEQ ID NO: 27113 - DNA, 625 bp, Homo sapiens
  source 1..625: mol_type = other DNA
ggcgtcggggggcgcggcgtagcggcccacccttccagctctgacccgcccggccggcccggcgcccaccccgcccagtgtgcttggtaggttgggcggcggctctgtctagtcccagagccaggaatcaggggcagccgggcgagtcccagggcaggggtcctccgccgccttgcacctgccctgctgggcggcaccgggtcagtgccctgccccctgtgggcagaaccggcgcgggcgcccgccgcgggtctgcgcggggcgggggcgcagcaagcgcaccggcgtcggtggcgcagtagccgcgctcgcaggggctgcctccgaccgccgggcgagctgcgagcgagtgagcccgccaccgccccttcccggctcccagggcccgtcggtcccccgggagccctggaggcgcagccccaccccggccggcgcggctcgctcccacgcccccgccgcggcctcgctggagcggacggactgagtcagagggggcgccagcgctgcaggtaggggctccggcggcggtgggcgcaggtgccgcggtggaccgcggaggggaccggagcacgaggggaacggccttgggggagcgccctccccccgtcctccgccgactgagacc

SEQ ID NO: 27114 - DNA, 619 bp, Homo sapiens
  source 1..619: mol_type = other DNA
gcagaaccggcgcgggcgcccgccgcgggtctgcgcggggcgggggcgcagcaagcgcaccggcgtcggtggcgcagtagccgcgctcgcaggggctgcctccgaccgccgggcgagctgcgagcgagtgagcccgccaccgccccttcccggctcccagggcccgtcggtcccccgggagccctggaggcgcagccccaccccggccggcgcggctcgctcccacgcccccgccgcggcctcgctggagcggacggactgagtcagagggggcgccagcgctgcaggtaggggctccggcggcggtgggcgcaggtgccgcggtggaccgcggaggggaccggagcacgaggggaacggccttgggggagcgccctccccccgtcctccgccgactgagaccgagagggagttctccatttcgctggctcctgcccggcccctggcagcctcagctctgggctccgcggccccccgggggacagctccagagagggggtgtcccagagcccctggcccccgtcagctccctgctggagcacaggctccaggggccctgggtattctaagagcctttcccgggaatcggcgtcagcgcctcgctcctccgccgccagcc

SEQ ID NO: 27115 - DNA, 412 bp, Homo sapiens
  source 1..412: mol_type = other DNA
ctccgtggccctgccttggccagtcggggttgggtccctctccacctctgtggcgcccgtggagctggccaggggatgacgtctgatcctcaagctactcccttgcctctggtgatgggctcagagcagaaggctggcccatagcctcagtgctctggcagggtctcagcttctcagccctaggggtcaggaggcctgctctgaaccactgactaatggggagataagtcaccttcacaagcagggtcttgtagcctactggaagtcaggcctgtgacttcagcagcactggaggaagggaaccctccaccctgaaaagggctccaacccctctcaggagggcatgatatggagaatacagagtatctctctgcctggaactggcatcccctttgtgcttagggcaagcccc

SEQ ID NO: 27116 - DNA, 449 bp, Homo sapiens
  source 1..449: mol_type = other DNA
tgtaatttttatatttggcaacttaagtagttttagtcattataatgatattaatatgtattgagtactttagtaggttccaatactgtactaaagtactttacatatattatctcaatccttacaacgtcctgtcagggtaggtgatataatctctattttataagcagtagccagaaggtagataaactggaattcatgtctgtctgactccaaagatatgcttaacttgtaagatagatattcttttaattaaaactgctactatttattgatggcttactaggttttattcccaaaaccctttggggatgaagtgacttgctcaaagccactcagcagcaataagtgggcaaagtcactttggacaagtctctgccccactgagataatctttaagaagggagcctggagcctgcagctagcagtgggcccctgcctacagactg

SEQ ID NO: 27117 - DNA, 482 bp, Homo sapiens
  source 1..482: mol_type = other DNA
ccttacacagtatacatactatatgatttcatttatatttagttctggaacagattaatctatacttgcatttcactgtatgtgaattttacatcaaaatgcaatcgaatactgaactctagttaattatatgcatgcttaactacttaaaggaaagtgtactaatgtctgcaatttactttgaagtgaagtatagtataatgtaaatagtagaatctatttcaattttgtttgaacattttcgtaataaaagaaccacttatttgggggttttgcaggaggttcctcttactttgggaaaaaattaaaaccacaatggttttcccaaaagtaattgatctttttcagtcaatgtttcctcaactatcaaatgggtaatgaaggagcttcatattattaagcatttcctggcatgaactaggtgcgcgcgacctgcgcaggcggtcgctctgataaccgcatcccggtttccgggacgacag

SEQ ID NO: 27118 - DNA, 292 bp, Homo sapiens
  source 1..292: mol_type = other DNA
gtggtggaggtgggagtcagaccccagaccctgtcaccccttggagggcagagcctggcacagtcagccctgatcaggtttgtttattaataataagtgctacctcggagtcttggaatagaaacccaggagccctgagccttggccctcaggccccaggagggaggtcaggagggaggcgtggacaagggtccggccgtagctggtcccgtccttcctggttcccaccggggccaagagtgacatgtggcagcccgcccgcggtccctcccgcgcgcgcggttaaatcccc

SEQ ID NO: 27119 - DNA, 303 bp, Homo sapiens
  source 1..303: mol_type = other DNA
attgtaaattggggactgcctttatacaatttttatttctcaattaaaaataaataataataaatatatgatagaatgcttcttgaatctttcaaaaaaaggtgtgtctctagagaccatgatttgatatttctattaaaatataatgaatctgttcctgggagcacccagatggaggcagcatctaaacagaccggggtctcagtcttttgaatggctgctgtctttttattattgtgaaactctgttcctgaggcagcccagccccattgagctggatgtggggccaggctcctccccttg

SEQ ID NO: 27120 - DNA, 306 bp, Homo sapiens
  source 1..306: mol_type = other DNA
tctaattgtttggtagagttgctataacaaagcaccatgtgggaagaagcatgttccaggacaccagtcatattggtataggggcccaccctattttggtctgcaatatgtcagtggagctgtgctcctgccatgtgataagagaaaaggagcctactccagtttcttctatagcagttgccagggagaataataacaactgtttacactgagttttcaactctggagtctctctgcagatgtatccaaaagaaacggcttattttcttcattgacaagaaagataatactgtctatggtggctgc

SEQ ID NO: 27121 - DNA, 302 bp, Homo sapiens
  source 1..302: mol_type = other DNA
tcgggataacatttactctgtaaagagtgtctctcttcaaaggaaagctgtccaagttccctgctgtgttactgaacttcatcaaggagctggcagtgatgataaaggctccctctaagctctgatatcctctcttgctctcagagcaacaaaactttgagaaacagtattctttggccttagtcaacgaatatgagtgaactggaaagtgggagacacgctttgcccactccctgtggctagagcccccagcccagtgcagcctaggggtgtaaggatttgtgaccttgggaacttagtgt

SEQ ID NO: 27122 - DNA, 507 bp, Homo sapiens
  source 1..507: mol_type = other DNA
gtaataaacttattacatgttgatataaataacatttttatttagaaaatcctagttttttattatactttaagttctgggatacaagaacgttattacatacatgctatgtatacacacagcagctttattcttaacagctgcaaactataaacaactcagtagatgtgtgtaggtggatggaattcattaatataatgttgaactatttaggggaatacatatgatcttgaaaatatgaaaaagaaagtcactaccattagctgcctttaaggagcagaaagtgttggaaattttttacttgattttaatgagttcagtaatagttcgttagactgaacattaatgtttcatgcatatttttatttttgtggtgtttttcacaatacatatttttacaaaaaggaaaagtagctcttccttgttttgtctctttctttactaactgaactagtcagtcctaaagccattagggaagggagccacggctggctcctccccctgggg

SEQ ID NO: 27123 - DNA, 273 bp, Homo sapiens
  source 1..273: mol_type = other DNA
ggcttcatgtcccagttagctacatgtgacccaaccctggatctagccagattctgtaccacactgattaatttccaactctcttgatctaaagatgtcagatcctgaggcccaaaatgggtcccatcagaggactgggactcattatcctaatgatagacagggagaccaaagcagtgcttgggggcctcccactcagaaatgttctccttagcatcaggagatgctgcacatgagcagttcctccccctgggagtactggttcagtgagca

SEQ ID NO: 27124 - DNA, 328 bp, Homo sapiens
  source 1..328: mol_type = other DNA
taggttcaagcttcaatgaaattgatggttggattattggtttcagtgaggtcaaataattgtcatacaaactggaaagttaacttctctacattagcagtaaacaaaaggaattagttgaaaagttatgataacatttacaatttccttttaaaaactctgctgaggagggcagatcacctgaggtcaggagtacgcctgtaatcccagcaactcaggagtctgagacacaagaatagagatcgcaccactgcactccagcctgggtgaataaatataacatgtacaatttccacaggggaaaattataacggtgaaaggctagtca

SEQ ID NO: 27125 - DNA, 411 bp, Homo sapiens
  source 1..411: mol_type = other DNA
tagtctcttcaaagagcaattatgttggcaagtaatgttttaaagcttacatggattgtctattttaacctcactagaggttaattagcttgtctaagatcacttaaggtcacttagctaagaagccaggatttgagcccaggtgtttggctttgagccactctgcactcatgctgggtatttccctcaaagggctcattggttgagtcttccactgtgagtcttttgaaatttcatatgggccttgcaaagcaggaaaaaacaagagtacttattttactcatgagaaaaagtgggattagaaaccatatgtcttgtctggacaattaatcaaaacttcctttgggctggatctccagagcccaagaacacaaaagtgtaggacaaattttgcttttgttggcaacatgc

SEQ ID NO: 27126 - DNA, 489 bp, Homo sapiens
  source 1..489: mol_type = other DNA
caggcatctgtagaagaaaaatattttcaaatattaactagtgaagttttacttttagagatatatatttttctttcaattacttccaccattaatatgcttctgcattccaatgtagagcattgaaagatgtggaatttaattgcaagggctagtctcttcaaagagcaattatgttggcaagtaatgttttaaagcttacatggattgtctattttaacctcactagaggttaattagcttgtctaagatcacttaaggtcacttagctaagaagccaggatttgagcccaggtgtttggctttgagccactctgcactcatgctgggtatttccctcaaagggctcattggttgagtcttccactgtgagtcttttgaaatttcatatgggccttgcaaagcaggaaaaaacaagagtacttattttactcatgagaaaaagtgggattagaaaccatatgtcttgtctggacaattaatcaaaac

SEQ ID NO: 27127 - DNA, 564 bp, Homo sapiens
  source 1..564: mol_type = other DNA
cttttgaataacttgataaactgactaaaatttatatgaaaatacaaaatcctaagataacccacataattaagcaaaattattttgcagttaaatagaagaggaactcattaataaataggtctgggatccttatgttataccttaccaaaaaatcaacatcaggtggttttagggtgtaaacttcaaaacttttaagatgtcctcatgatcttgtctataataaatgagtgaccttgtacatgttttcatccttaaatgatggtaataactgtacttacttcatagggtgtatatgatgataaagtatatacaaattacttaaaaatagcacctggaattaagtagtactctaggttataactaaccctgttactattattatagtgctattgcgtttcttctgtgcataaaaggtcaaaaagagaaaggaagaaatccctttttaattcctcactttcatgattaaatatatgcagaagctctgatccttaagtttctattgcttctagatgagctgggtacccaagcaatgtccagtcctggcccttggggtaggtgagc

SEQ ID NO: 27128 - DNA, 242 bp, Homo sapiens
  source 1..242: mol_type = other DNA
tctctatttacaagagaagagggcccttcttgggttaagaagtgactttctctcagacatagtggcagagggtggggaaccgtcatccccattctaactgaccttacctagcatggcaaagccaggatcgtgagccaggcatggtaactcatgcctgtgtgagaccctgtctcaccattgcggcactgcaccccagcctgggtgacaagtctagcttaagtaggaccattaattccaggtgt

SEQ ID NO: 27129 - DNA, 464 bp, Homo sapiens
  source 1..464: mol_type = other DNA
agatctccatagccttgtgcactggggatcccaaatctgccatgcaagccagtggctgggatataagccccatgcagggccagcctgagcggcggcccctccgctgcacggttctgtggggaccaacggaacaaatgtcagaagtttcctgccttaaaagtcccgaccctgccttctggcacggcaggaggatttatgagaccgcgttctctcgcccgcgggccagggtcccaggagccccgaggccgtgcccggcctgagcccagacctcaccgggggcgccctcaccgtccctctcggccccgctaggtccccgcggctgctcggcgtcgccagtggctcccatggcgcccccggcccccacgtcaccggccggaaagtggcgccgtgacgtcactggagcgcgctgctcgtccgcccggaagcgcgacgctggagctgcggggttaccatgggaaccgaac

SEQ ID NO: 27130 - DNA, 301 bp, Homo sapiens
  source 1..301: mol_type = other DNA
ctataataggatcaaaaagtttggagccaggaagataattaacatttgatgatgacctcatatgtgcctaatatgagagtctccctctgcatttgatgactggagtgcagtggcgtgatctcggctcactgcaaccaagagactctcctgcctcagcctcccgagtagctgggattacagatattaaaatctagttttcaaaaactgaaaggcggtaacttctgggcgaggcgcggcggttcggttcccatggtaaccccgcagctccagcgtcgcgcttccgggcggacgagcagcgcgc

SEQ ID NO: 27131 - DNA, 420 bp, Homo sapiens
  source 1..420: mol_type = other DNA
cagaatcggagtctccttgtagatctccatagccttgtgcactggggatcccaaatctgccatgcaagccagtggctgggatataagccccatgcagggccagcctgagcggcggcccctccgctgcacggttctgtggggaccaacggaacaaatgtcagaagtttcctgccttaaaagtcccgaccctgccttctggcacggcaggaggatttatgagaccgcgttctctcgcccgcgggccagggtcccaggagccccgaggccgtgcccggcctgagcccagacctcaccgggggcgccctcaccgtccctctcggccccgctaggtccccgcggctgctcggcgtcgccagtggctcccatggcgcccccggcccccacgtcaccggccggaaagtggcgccgtgacgtcactgg

SEQ ID NO: 27132 - DNA, 331 bp, Homo sapiens
  source 1..331: mol_type = other DNA
ccgacctgtgtttttatgaaatataatacttatacagaaaagtctatacactttaatgagtaattatagtgaacatcaaacgggctcatcagagtctgttgatgagaacacagttgtctgactccagagccgaacacagagccagacagaatcggagtctccttgtagatctccatagccttgtgcactggggatcccaaatctgccatgcaagccagtggctgggatataagccccatgcagggccagcctgagcggcggcccctccgctgcacggttctgtggggaccaacggaacaaatgtcagaagtttcctgccttaaaagtcccg

SEQ ID NO: 27133 - DNA, 359 bp, Homo sapiens
  source 1..359: mol_type = other DNA
tacccactgggggcccaggctagagtgcagcctctggctcaagcgattctcccgcctcagcctcgccagtagctgggactacaggctcgtcaggattggaggcactccctgccctgggcgtgccgagtgttcccacggtttccaacggccaccaattcgctacggattcgttagttaatggcagcatcatctaccaatcggttgtcagaagcgggattctgccgcccaatagcggtgcgccagtgggtctagcagtggcgcagcaatagagcgctccggagcgtctcattggctggatcaaacccaagcgagccattgattggtcgacgcccccagagggttacaattcaaacgcgggc

SEQ ID NO: 27134 - DNA, 289 bp, Homo sapiens
  source 1..289: mol_type = other DNA
tggtgcacctctagtcccagctactcgggaggctggatcactttataatttacaaagctgcacagtgtgtggcacgtcatggggttcagtaaacagttgtacccagcacaagctttaccatggtctctctgtgagggagaccccacagacaggtcccctcggtcggggggcaggccttcctcaaagaatctaggacgtcaaggcctgccacctgcttggaggcttaaatttctctgcaagggcccttggctaaattaggtaacccggagggtgcccctacaaatcccgg

SEQ ID NO: 27135 - DNA, 350 bp, Homo sapiens
  source 1..350: mol_type = other DNA
tatgcagcaggggacctgggctccaggccccatactcagaaacctttcgagaccagcctgggcacgaacgcctctattcctcagagtgagactcgtgtggttaagccaagtaacaaacaataatcattatgtaagtgatcatttaagagctgcaaaattagttttagcagtattgttcctgttttacatatgagaaaactggccggactgggatgactctgcggcaggcctgggactccctcaggccgacccaggcttcccaagtccctcctggagccaagggcccgggattctcgggcggctcgggcgagcgggcggggcaggaggcggggcggcggcaggaagctgcc

SEQ ID NO: 27136 - DNA, 596 bp, Homo sapiens
  source 1..596: mol_type = other DNA
gccgcgccaggagctgactgccccactgcccatcaggtggggggctccgttctgcgaccagtcatatcaatgggcctagggccagggtcgacatcaaccactgacgtggcctcactcatcctcccagtgtgaggcaggacccaacaccgtgcctggcagaatgcctgcagcaattctgagatgagagtgagttctcccacttgacacaagggaggctcagaggggagccccatccccgaggggcagctggtcagggccacgtcctcgtcctcgtcgtcctcgtcgtcctcggcgctggtgaagctgagggtgccgctgagtcgggaggacaggccctcggcgtcgtcgtcctccagctctgagctctccggaaactgctcggcctctggactggccgccgcctccccggggccgtcgccggccaaggcgtgccgcagccggtgcaggagccgggaggccatggcaccctggggggagcgcgcgacgctgtgtaccggatcccggaggaggggtaccccagcccggcgcaggagggggcggggcccgaaccggagagggaggggcgcggtgaggccccaccccctggcagtccgagg

SEQ ID NO: 27137 - DNA, 416 bp, Homo sapiens
  source 1..416: mol_type = other DNA
caccagttctcttagtctcaaaaccaggttaagaggaaggtccttaatccccacttcagtcagtctcaaggaaactattgtaaacaaggtaaccagcagcccaggggttctagaccctcactcatcgaagagcagggtgttccgggacttcttccagaaatcctgcagctgccgcgccaggagctgactgccccactgcccatcaggtggggggctccgttctgcgaccagtcatatcaatgggcctagggccagggtcgacatcaaccactgacgtggcctcactcatcctcccagtgtgaggcaggacccaacaccgtgcctggcagaatgcctgcagcaattctgagatgagagtgagttctcccacttgacacaagggaggctcagaggggagccccatccccgaggggcag

SEQ ID NO: 27138 - DNA, 232 bp, Homo sapiens
  source 1..232: mol_type = other DNA
tgcagatgggaaaacctgcctgccacagcaatgcagatgtgactcccctcaggcccaaacagatgttctgggtgcgagcccgggcccatggatgggagaaccactctccaaggggtctgggccctctcagccctttgcatggggagaaggtggagataaggcccaatgaatttctcttgtgacctccgtgcaggtcctgagctggaaagcccaggagcccagggctgatggg

SEQ ID NO: 27139 - DNA, 211 bp, Homo sapiens
  source 1..211: mol_type = other DNA
ctgggcccaagtgacccgcccgaacctgccaggtcatggagggctgttcatattcatttatacatttatttaattttatttggagtgcagaagtgcgcccggcccagaggatttttatgcataaggatatttgcctggggaaaggacctatggcttttaccatattctcaaaaggatcttaaaccccaaatttggcccagttaggaagacc

SEQ ID NO: 27140 - DNA, 400 bp, Homo sapiens
  source 1..400: mol_type = other DNA
atttgggttgctgcagctgctcaaaacaatgggaactgcagcaggtgctcaatgagtgcctgttgaatgaatggccacgcagcccaatgcgtgcctatgaggcagccctccggagggccccgcccgcccttacaggatgtcttcgcggatgaatgaaggagcacctgttctccctgaagcactccttgaagtcctcataggtcttgaagcagctgcccagctccatggccgcccccacactaggggctggtcccagcccgggcccaagatcacatataggcaggcgtgggcccagaatgccttaagggtccgccccaactgggtggttctggaattttctccaattgctagagaaagagcccggggtctgcaggagacttccggttactagggcaatctg

SEQ ID NO: 27141 - DNA, 406 bp, Homo sapiens
  source 1..406: mol_type = other DNA
actgcactccagccttggcgtcggttttaaggctgatccatcagctgtctgggctagctcccccgtgaaggcttagggcaggctgccggcaccactatatttgctcagctgtgcagacctcgcagcgcggagagaggacagctctgttgggggcgagttctctcagtcccggagccaggggccccgggcggcggcagctgccggctacctgaagagatcctcgtccagcggctcgaggttgagcacggtcgtgaccaagacgctacggaggtccccagggggatcgccgcggtcgccacagccctgcccatcttctggggcctgcggggactcttccggcagattgccctagtaaccggaagtctcctgcagaccccgggctctttctctagcaattggagaaaat

SEQ ID NO: 27142 - DNA, 239 bp, Homo sapiens
  source 1..239: mol_type = other DNA
ttgcactactgtagtaggaccctaaataagtcatggcatcattctgtagaatactatgggctcctgatccaggagtagaataactcagtttccccatacccagctagcaaaaaagaaaaagaaaaaatatatatataactgctatttattttccttttcattagcctgaagggaagccccggagctccagcttcaaggccacggcccgcccgcgaatcgtcacgctacgatgagtcact

SEQ ID NO: 27143 - DNA, 225 bp, Homo sapiens
  source 1..225: mol_type = other DNA
cacatcccatccctagggattcggttttgtaaaagcttctcaagagattctcatgtacagccagggttgagaagtatgtccctagaaaaaaggttccaactttgtcatatattataatcacttgaggaattttgaaaaatacagcctggccaacatggtgaaacctagtcccagctactaagtgagactctgtcttcaactcctaatgaggtacctagaaccagc

SEQ ID NO: 27144 - DNA, 588 bp, Homo sapiens
  source 1..588: mol_type = other DNA
cccattgagcaaagcaccacagggctgttgggcagggttggcgcagttggaggggccctttccagccctcccggctcccatcctcaggggtcaaagacggctgcttggccagcccggggaggcgctggatctcgtcctggtcgggggctgcctcgcctcgggacgcccaggacactagcagcagcagcagcagcagcagcaggaacagcggcggcggcgcggctcggatgggaggcagcagaggggctgttgactcgctcctcagcgcttccgtgcagcagcccccggggagttgctggcggcgcctccgcgagggaagccccggccccagcgccagctcccacccgcgagcctcctctgccgcgcaccgatcccgggctcggggatcccctccagcccgcgtccttgctctccaggaggcgcccggggactggaagtcatgtgtacgagtcacgtgaactccggccttctttggtccctacggacctggggggcggtggcggtcaatgccgggtcaaggtccgcgggcctcgcagatcgtagcccgggcgcacgcgatcagatgatcctacccccgggcagaggctc

SEQ ID NO: 27145 - DNA, 640 bp, Homo sapiens
  source 1..640: mol_type = other DNA
ccaggcggctacggcgcgcggtcggaggcagcacgttcagctcatagagctggtccaagagatggctgtagagccctggccggctgcggcccaccaggcggtcccggggaatgcggtcggctgggggccgctgcctccgcctccgggcggccctcccggggcacgcggttgtggtggctggcccaggttgaccagatcggggactggcggggtccagcgcggtcagaccgagacgcactctttctcctcgatctcgaccaggaagacctggcccggggccagcggctcgcggctgaagcacacgccgtgggcgaagctctccacgcgtgtggcccgcgtcccagaggggtccacgcggatgttggcaccgtgcacccgatggaagcgggtgggagggggctccgggcgctcgagtccccagagtgcacccgaatccacgggctcggaggcagcagccatctctcggccatagggcaggccagctggcgccgggggctattttgggagcctctgcccgggggtaggatcatctgatcgcgtgcgcccgggctacgatctgcgaggcccgcggaccttgacccggcattgaccgccaccgccccccaggtccgtagggaccaaagaaggccggagttcacgt

SEQ ID NO: 27146 - DNA, 389 bp, Homo sapiens
  source 1..389: mol_type = other DNA
aatccaccagtggaccagcgtgcgcctgtagccccagctgctggggaggctgaggcgcggggcttgcagggagccgagatcgcgccactgcactccagcctgggggacagagcgagatctgatttcagccggtgctgacagcacttgtctagtcttgctttcccaagtgggaaaggtctctgggaccttaaggtccccaggtggtgacagcagggaaagaaaaaatattccttgactttgtgcctgaaactgagggtcagtgacccaagtgaagtgacttgctgttggggctgagtggccgtccagacagcggccgggcttgtcacgggccgccccgtcccctcccagcccccaagggaggaggggagagctggccggctttataaagg

SEQ ID NO: 27147 - DNA, 489 bp, Homo sapiens
  source 1..489: mol_type = other DNA
aggctactcagccggggtacctacagcccctggctccacacaagcgccggtctgacagcaggtggcaacctcttctcaagctagcactggaaggcctgcaggctcctaccaaaaagaatcctgcagggagccggatgaggagcacctcacagctgccagttccctgccaggctacccgctgtagctggtttgagggctcagtgaggcttaatgttggaaaggccctacaatgcatttagttgatttccagtttaagttgcttgccgcgcgggtgccaggacccaggtccttgctacgtccggagcctacgatgcctcccctgggccggcggcagaacccgagacccccgccatccggctcctgcgtgtgtgctcgaggggacgtgccagtgaattcattccttcctcggtgcgagccagccgaccctgccacactcaagatggcggcgcggccgcggcgaggtccctcagaggcggtaccagcgcatgc

SEQ ID NO: 27148 - DNA, 282 bp, Homo sapiens
  source 1..282: mol_type = other DNA
tacagtgttctaaacattttatatgtttgatctcatttaatcctcacatcaacagctgaggaaacacttcaaagtggtacagcctgcggaagacagggggttgccccagtggaattccccagccattccttccgcccccagatgaagcagggagagtcttccaccaagggatgggggatccctccagcttcatccctcccctgagggcctgcggcctgacccctgagtcagcacttgcctgtcaaggaggggtggggtcacaggagcgcctccttaaagccc

SEQ ID NO: 27149 - DNA, 266 bp, Homo sapiens
  source 1..266: mol_type = other DNA
gggcttggcgtcccaaagtggaattacaggagctctattaatgttaacaaatatgtatacaaacctataataagtaatgagtcaggtaaaatgactgacaacatgaattctctttggccaagccatgttgtaggaggggcgcggccaagccaccgggagccacgccccccactgggagccacgccccaagagagcggggcgcgcattcgccgcgcccaaccctgcggcctagggaagggactttgactcgcttccggtcccggggc

SEQ ID NO: 27150 - DNA, 592 bp, Homo sapiens
  source 1..592: mol_type = other DNA
tgtaggaggggcgcggccaagccaccgggagccacgccccccactgggagccacgccccaagagagcggggcgcgcattcgccgcgcccaaccctgcggcctagggaagggactttgactcgcttccggtcccggggcgaggatggcgacctcgtcgatgccggagtcagtagagttaggcggccccaccgtaccctgccgtggagtgaggtcacactgcggggatacccggaggcgaggtcccaggccggcggggctgtccgaacagggccccggggtcccaggccctttagtcgctctcgaacccggcgccaccacaagatggcgtcgggcctggagcacaggcagcgccggggacagccccaaatcgccaggccccgagaccgtcgctgtcagccgcctccgcaggggaaccgggggggagcgaaccactgacccagggggccagcgggctgtaccaccggccctgcaacccggggggacgcgggggccgaagggctgaaccactgggcccggacgctccacgagtgaccaccctcccgggaagggccttagcctgggaagccttctccgtcaagtttttcccgagctc

SEQ ID NO: 27151 - DNA, 344 bp, Homo sapiens
  source 1..344: mol_type = other DNA
ctctagtctggctgtcatcaccccccagcttggggtctgcaggagtgatcctgttaaattataaatgaagtgctgtttctcatcagtgaggtctcagctcaaataccacatcttctaggaggccttctcaggccaaatgatctcatctatgcaccctaacagaggtgcccccgttgtagggacgactctcacctgcagatggcctcctcaggcccttcgggtggcactggggagcccagggcctcccagcgaagcttcgcacagcgggcactaggaccctgcgcggcgccgcgtctcgcggggggcgggcgggcggagggggtcagccactgcgatcccggacc

SEQ ID NO: 27152 - DNA, 478 bp, Homo sapiens
  source 1..478: mol_type = other DNA
ggcggcctcattccgccctctgtccctggccagcctcaggaccggcctgtcctccctagaggctgcaccatccctgatggaaagagagttcctccccacccattttaagacagattgggtcagtcagcccagtgacctgaacgcccctgggggggccctgggctcagggctggcctctccagtcttgcagagaggcttcccaagggccccatgttccatggcgcacctccacggcccccctgggggttaccccagacccccagtcaagcagccgctgcggggccgcctccccgcggccgcgacctagttccctgccgttattttagggcgcgggatggcacctgcccacgtgccgggccccgcccggagagtgggtggggggagctgcgtctgctcaagggaggcgaggccctgtcccccgaagggggtcacgcctcctgcatacgggatgaggtgagcagcgccgctgctgagcgcg

SEQ ID NO: 27153 - DNA, 380 bp, Homo sapiens
  source 1..380: mol_type = other DNA
tataataagtatagggctacatagtaggtatgtaataaacattcagtgaataagaaatctggcttcttgtttttctgattaatatagctatgtccctgtgacaaatgtattctatacatgaaatgaacagtacaacattttaccttcacggtcaacagttacattccgggaaatttttgacgttgaacgaatattccacctatttaaatgtaaatttaaatacaacatttggttacaggactatatatattctccaatacacacgtgtacgggggctgaggcgaccaccgtggggcccatcctcagcctaggacgctgttgctaggcagggccctcattgccaaacgcgcggtcttgcgacagtgccgcgcctgccgcta

SEQ ID NO: 27154 - DNA, 434 bp, Homo sapiens
  source 1..434: mol_type = other DNA
ggagtgcagtggcacattgcaatcgatagtagctgggggattacaggcgtgagccaccgcgcccggccccactcttacgcatggatgcatggatgaatggatgcacacgagggaatttcctttgaaagagaattcgagttgggagggaacttcctcaggcctctccgcagtggagcctctttcggttctgccaggatacctagaggcacgtgagggtccctgtggcaggccccagcacccatgggatctctcccggtcgcaggaagcaggctagctcctagcccgcctcggcttggcctttgtgggacctgggggcaaagaagaagagctgtctctgggaccatgcctcctcccgtacgggggctccgcccccccgataggaagaccccgcccctttcctgggcggggccaaggctggggcaggggagtcagca

SEQ ID NO: 27155 - DNA, 447 bp, Homo sapiens
  source 1..447: mol_type = other DNA
ctgcgcagtggcctacaagtggtagtcactacatcgttatcagtttctagggacagctgaatacacacctcaaagtataaactttggaatccaactctgagcctcagtttcctcatctgcagcgaagggatcacggtgctccctccatcacacggctgctgtgagcacagctgagttgctcagcgcccacggtcagccctgggtgccggcaactcggtggtgagcagcgcggctgctcacagcctctgacacgactgtctccccactgttgagtgtgcggtaagtgcccgctgggcacagggcggagtgccaccagaggcccgccttttccttcactctaggactgcataccaaggaaattaccggggggcggggacggccggcgtttttcccctctaaagccgggcccggcctgtgcggggcggggtcccaagaaggcggggcggg

SEQ ID NO: 27156 - DNA, 288 bp, Homo sapiens
  source 1..288: mol_type = other DNA
tgccagctggcggcggtgacagccgcagtttgcataaattgaagttgagataattcttagaaagtttcatacagaaaatatttcacaaatgtttcgtattacttctggaagaaaaagcccatgagatacttatcttcgtggttctagactggacataagaaaaacaatttgttcagtaaaagtaaacaagttaccattttttggatgctcactgcggctccgcccagcccctgggtagcttccggcggaagttaccgcccgtgccgcggttcggcggcggcatccggc

SEQ ID NO: 27157 - DNA, 387 bp, Homo sapiens
  source 1..387: mol_type = other DNA
ttttagataataatattatatctgtttaagttgataattgtggttatgtttaaacaattttgataattgtagttatgtttaaaaatttttgataattgtggttatgtttttaaaaatatttgtaacttaccctaaatggtttacagatgatccgaatgaatcatccctgaaacttttctgtaagtttaaaatatttcaaaataaaaagtgtaaaagggtagacccaaatcactcattgagattttggggtcccatttcaatatcatctaacattggccatggagtgacactgattgtagtgcatgcaaatctcctacctggtgggttatgaggaactagggagccccggcagggccccgggaaccggtctttggcagccccgtctgc

SEQ ID NO: 27158 - DNA, 515 bp, Homo sapiens
  source 1..515: mol_type = other DNA
tatacaattcatatacagtcatgcataatataagaattgcatatacaactgtggtctcataagattacaatactgtacgtttactcttccctatgtttagatatgtttacatacacaaataccattgtgttaccattgcatatggtatgacatgccacacaggcctgtagcctaggagaaataggctataccatacagcctaggtgtgtagtagactatattgtctgttcacacaaagacaaccatgcaaactattttctatattactcacaatgtatatgagataattcgtggtattaaagtatattaactatattgctaatttaaaaaataacaaattactagacctatatgagttcctctttgtaaaattttctgtctgctggaatattgaaacggatatgaaactttacttttcgtattgatgccgcgacgccttctggggactggtccggaaagccggcggggggcccgggagagccccgggaaaggcggcccgggggcctttctgcgca

SEQ ID NO: 27159 - DNA, 536 bp, Homo sapiens
  source 1..536: mol_type = other DNA
tgttcttttctggaattgaataataatacattataactttgtcagaaactttcatgccttccaatgagtaaagttttataaagttctatttattcaatatgtatacaattcatatacagtcatgcataatataagaattgcatatacaactgtggtctcataagattacaatactgtacgtttactcttccctatgtttagatatgtttacatacacaaataccattgtgttaccattgcatatggtatgacatgccacacaggcctgtagcctaggagaaataggctataccatacagcctaggtgtgtagtagactatattgtctgttcacacaaagacaaccatgcaaactattttctatattactcacaatgtatatgagataattcgtggtattaaagtatattaactatattgctaatttaaaaaataacaaattactagacctatatgagttcctctttgtaaaattttctgtctgctggaatattgaaacggatatgaaactttacttttcgtattgatgccgcgacg

SEQ ID NO: 27160 - DNA, 443 bp, Homo sapiens
  source 1..443: mol_type = other DNA
ttagaaatctgttaatttccacacatttgtaaatgttccaatttttacagtcagtgcctgttcttatgaagcaaacattctataatagtagccccagcatggggcggatggccagggagtgaaaacttcccttcctgggtagttgtgactagtagagaggaaaaataatataattgcctgcttactgcatgccaggcattgggctgggaatttttatattggatctaaaataactcttaagttaggcattatccccattttatagatggagaaactggccccaaggtagcaagaggtacttttacctgccctacagtactataataagtattggcgtataacattaattaatattcccaacatgaatgagatgccaagtcaacaaatccctagttgatagggtttggctgtgttgatagcgagtgagttctcacgagatctga

SEQ ID NO: 27161 - DNA, 227 bp, Homo sapiens
  source 1..227: mol_type = other DNA
taaaatagaaaatgaaaaatcctttacactccatattggtgagccccgtgcctggcacatagtagttgtgtgctaagttcttggcatgcattccacgtgcagacaggaggagacccctgcccacattaggctggcagatggcggcagatggcggcagatggttctcaggctgacttccagactcctgtggcaatccagggacagggacaggctgtgactcaccgtaa

SEQ ID NO: 27162 - DNA, 428 bp, Homo sapiens
  source 1..428: mol_type = other DNA
cagcctgggttactcattgagctctaatcacattacatgtgttatctcatttaaacttcctaacaacctgtgtagactatttttaaaaatttaacttttaagttcaggggtacatgtggctcccgcttataagtgaaaacatgctcccgcaaaaaacatgatgtccttcttttttgtgactgcatagtattccatggtgtactttcaggctcagaggctgttgttgaaggccacgcagtgaacccgggtaataggagtacggccacattgctgggaagccaagaggcaaggccacactgccctgcggctgggcctctttcacccggtcccaggggcgcaggcaccacccttttcctccaggaggagcagggagagggcgggttccccagcgcagtcccctccccgaccctcccccaggctttaagccg

SEQ ID NO: 27163 - DNA, 500 bp, Homo sapiens
  source 1..500: mol_type = other DNA
ggaagagttcattgtctgacccttccgactctgacagcgcgtccgacgtttttctcgacccccgccggctgcgagagtcaccgaagatttccggagagccttcctgcaggtaaccacttacaggccggaagtgtccggggtggacgcattcgggtagccgaagaagtcccaggattgccgaagaagtccaggatttccgtcgcgacagttttcagagacagctgatcggttggagctgttgcgccgagcagtcatggcggcggccagagctactacgccggccgatggcgaggagcccgccccggaggctgaggctctggccgcagcccgggagcggagcagccgcttcttgagcggcctggagctggtgaagcagggtgccgaggcgcgcgtgttccgtggccgcttccagggccgcgcggcggtgatcaagcaccgcttccccaagggctaccggcacccggcgctggaggcgcggcttggcagacggcggacggtgc

SEQ ID NO: 27164 - DNA, 309 bp, Homo sapiens
  source 1..309: mol_type = other DNA
tgatgtcatttacagtgttattataagctttgtaatgaaacaggtagaaactgaaaaagtttaattattcccaattcagtttgttgtctccggaagactttcgttcattgtctgacccttccgactctgacagcgcgtccgacgtttttctcgacccccgccggctgcgagagtcaccgaagatttccggagagccttcctgcaggtaaccacttacaggccggaagtgtccggggtggacgcattcgggtagccgaagaagtcccaggattgccgaagaagtccaggatttccgtcgcgacagttttc

SEQ ID NO: 27165 - DNA, 238 bp, Homo sapiens
  source 1..238: mol_type = other DNA
tgttttcctgagaaacaataaattgtttaggatgatgtcatttacagtgttattataagctttgtaatgaaacaggtagaaactgaaaaagtttaattattcccaattcagtttgttgtctccggaagactttcgttcattgtctgacccttccgactctgacagcgcgtccgacgtttttctcgacccccgccggctgcgagagtcaccgaagatttccggagagccttcctgcagg

SEQ ID NO: 27166 - DNA, 598 bp, Homo sapiens
  source 1..598: mol_type = other DNA
gatccatctcctttttctaatcaagataatgaacaataatgaaatgtgtattcgttatttatcactgtataacaaattattccccaaatttagtggcttaaagaaacaaacatttattatctcatgtcttctaggataaagaatttagcatagctaaattctagctctgagcaagagctcagaatcttgcaaggtactagagtcacctccaggctaggctgagggaagaagctcaccacaagcttgttaagggctttagtccctcactggagcctgggcctctccattgggaagctcaaaacatggcagctcaattgcttcataaaatgacattcttctattcattagacgttgctaagtgatacttctagtgacatctagaagtctcagtgtaatcagactttttatatgaaggctcagggatccagttacacagtgtcactctgcaggctactgattatgttttcaaactgccccagcaaactgtgcaaggatcccctggttcagaggtcttatggatgctgtcatctttgctgagatacacctgtacggtaggggtcgctgtgactttgactggtgagggtacagccactggtgc

SEQ ID NO: 27167 - DNA, 300 bp, Homo sapiens
  source 1..300: mol_type = other DNA
acctgtacggtaggggtcgctgtgactttgactggtgagggtacagccactggtgcacatgcaaaggtgcctatctgtgaacacgtattgaaagttcttacggagcatatatatgtgagcctcccaggtgggaaggctgagtattctggcccttaaccagtccccctgcggggaatgccggatctctgctcagatatcctcttctcagatcagcaagctaaagcagccacctgtgtctgcgtaaactcttcccctcctagaaggtaaacaaaagacctgttctgttttgttcttcggccc

SEQ ID NO: 27168 - DNA, 395 bp, Homo sapiens
  source 1..395: mol_type = other DNA
ggaaggctgagtattctggcccttaaccagtccccctgcggggaatgccggatctctgctcagatatcctcttctcagatcagcaagctaaagcagccacctgtgtctgcgtaaactcttcccctcctagaaggtaaacaaaagacctgttctgttttgttcttcggccccacgcgggaggccagacaagtgtggaccagtgattggggcacctcttccctgtgctggtgtgtcccccccaggggaggactaccaacgaagggggggcccccggagggggtccttgccaggcctggggcggccgggggcggtcctgggctcccctccgtcccgcctccaggcctcggggcctggctggccgacgtggcgttggcggcgctgcgcgcgggagggca

SEQ ID NO: 27169 - DNA, 161 bp, Homo sapiens
  source 1..161: mol_type = other DNA
caaaagaaatactttttaaatataagtacgtacagattgtctctgaaattcaaattacttaagaaatgatcccacggtttaagctcttgagacctcagtttccttagctgtagagaggcagatacatatattatttttctctgcctggggaggaggctggg

SEQ ID NO: 27170 - DNA, 315 bp, Homo sapiens
  source 1..315: mol_type = other DNA
ccacgttaagctcttgagacctcagtttccttagctgtagagaggcagatacatatattatttttctctgcctggggaggaggctgggccctggcctccaggaccggcgagagtgagcgcgctctgctcggctgcaggctcaggaagcggcgcggcggcacgtgctgggccagagccccgcgccctgcgtccagccgccgggtgtgtgcgcccgcgtagcccagcgtcgcgcctcggcgcccccacgcgcccacgcagcggcgcggggacccgggcgggggcagagggagggcccggcccagggaggagaagggg

SEQ ID NO: 27171 - DNA, 265 bp, Homo sapiens
  source 1..265: mol_type = other DNA
attcttgatccaggagggcctcatcccagctggggaggagaaaagggctaaacactgaattcaattgtaaatcagcctgccaggcgagtttggaagcttctgcattattgagtcaagtataaagaaacaattactaaaaatgttaaaaacaacttgcagttggtgcactgcaccggagactttcagctcagccgagctgcccgccgggcgagaccggggctcttcctcctccccctgggagaggccgctgaggatccggaagcag

SEQ ID NO: 27172 - DNA, 444 bp, Homo sapiens
  source 1..444: mol_type = other DNA
gagaggggtcccccttggcatcgtggcagggcgacaggaacccaagcagggcgcgagaggcccacggctccctggcctgccttgcaaggaggcatggggacatactcctcgctcctctgagaagccagggctgctccagaggcctgagccaccctgctggactgttctagaaaaaggctggccttcctccctggacaagggccgtttctctgggggcaggtgagggtgagccgttccagcccaagcccttcccagggacctccgggcctcaggctttcctggagcaggtcaggctggctgccctggctggcccgtgccgggaaatctagccagggtgcaggagaagtgcgtgtgggggcccctttcccaagtctagcttagcctgtctttttctatgtcagccaatccggggcggctttacactccgatttgccggggcagcca

SEQ ID NO: 27173 - DNA, 397 bp, Homo sapiens
  source 1..397: mol_type = other DNA
ggggagactttattgctccggagttatgcctcctggcatatggctgcagcctctaaagatgctgttttaaaaaatcctgttaattaagcaccttgtcatttaaaataaagctggggacattttacggtccttttctaaatccttaggaagcccaggggatttgtctgcccaccgaggagggcccaactcccccaggcacacacatacaagggctgacctacgggggtaggcctcctctggattgaaatggcttctcagcccgagaggcactgcctgtgccctggattcacaaggtacacgcctccctgggaagcaaaggctgagagacagcggctctctctctctctttctgcatctgccgggagagctgcaggcctagtttttcccagccaggccc

SEQ ID NO: 27174 - DNA, 380 bp, Homo sapiens
  source 1..380: mol_type = other DNA
gtttttataaggattcgttttctttgtgggaaccgtgtgggacaagaaagcccacaagtggggagactttattgctccggagttatgcctcctggcatatggctgcagcctctaaagatgctgttttaaaaaatcctgttaattaagcaccttgtcatttaaaataaagctggggacattttacggtccttttctaaatccttaggaagcccaggggatttgtctgcccaccgaggagggcccaactcccccaggcacacacatacaagggctgacctacgggggtaggcctcctctggattgaaatggcttctcagcccgagaggcactgcctgtgccctggattcacaaggtacacgcctccctgggaagcaaaggct

SEQ ID NO: 27175 - DNA, 321 bp, Homo sapiens
  source 1..321: mol_type = other DNA
tggacatctgatctctggcacttcccagctgaaagcactaatttagaagtaactgctgggatactcactgcagtggggcttttgaagcccaggaccagcccttcgtaggcctgccccaggagagcagagctgccagaataagccagcagcttcctgctctttgccccagaaaacatttcaagtgatcaagtgatgcatgggagatctgccaccaaccctccatatgggatggcggtggagggccgctgcccacacagctaggagggtgagcacgctccaggaagagcaggcccctcccttttggtgaggcccaggcctgct

SEQ ID NO: 27176 - DNA, 296 bp, Homo sapiens
  source 1..296: mol_type = other DNA
agactctgtctcaaaaaaaataaaataaaatttgtacctggtgattaaacatgtataaagtattaaattatgattgtagctgggatggtcctgaactcctgacctcaggtgatcaatagcaatagctaactgggtgccagatgctgtgctaagtgagcactttttactacatgaattaatttaatcctgataagttacttacatctatccaggcaaactcactcagtctttgaagctggctggagctcagaccctgagcaatcctacaggccccctagggctcgttgaagaatttc

SEQ ID NO: 27177 - DNA, 221 bp, Homo sapiens
  source 1..221: mol_type = other DNA
aagttcaagtcctgctacaagccagtacatgtactacattctctttctagcatatactgctgtttgagagagtctcactctgtcacccaagctaaactgtagtggcgtgatctcagctcactgcgtggggtgatctcggctcactgacacctccacctcccaggctgagatggctgctggcagtggcatgatcacagcgttgctgggaccacaggtgcacg

SEQ ID NO: 27178 - DNA, 452 bp, Homo sapiens
  source 1..452: mol_type = other DNA
gtcagattattctattttatttacactcaacacatctaatactgactcaatattatctaaaattctttttacataaaaaaatcattttcatgctgtcatattttaaaagactccaggctagatgttgtgtagaatgtcccacattcagaggtagcaatatgctttccctttattggtgggactaaatataccctgaatatactgtcagttcgctcatctgaaaaatgaggatgatcatggttgaggatccgtgcttggcataccagaaacgctccacggactgcattccggttctccggatcccgagggagctccgctgggcgaaagcggccgcacgagcccacgtcgccacgccctccgccgcggaagccagggtgggggtcgctggaaccctaggccggccgcgcaaggccccctgggaccggtagtgctgggcgtggcctcgggactat

SEQ ID NO: 27179 - DNA, 402 bp, Homo sapiens
  source 1..402: mol_type = other DNA
aactgtgtgatagtaacttactgtgtgagattgtcacaagatttaataagttactgcagctgctggtgagacccgcgtcaggccggtccccctccggcctcttctgtggcgcgagggacagcggaaaccacagctgctattttcacttgagccgaagttacgcacaggcccctgcgattgagctgcgggtcgcggccggcgccggcctctccaatggcaaatgtgtgtggctggaggcgagcgcgaggctttcggcaaagtacgaggggagcgcccggccggggctgtcgcactccccgcggagctccctccagctccgaggtttgtgtgttacgcacacacacgtgcagtttcaactctccgccgagggcgagcaggagcccggcgagggtgcgcgctcgg

SEQ ID NO: 27180 - DNA, 592 bp, Homo sapiens
  source 1..592: mol_type = other DNA
aggctttcggcaaatacgaggggagcgcccggccggggctgtcgcactccccgcggagctccctccagctccgaggtttgtgtgttacgcacacacacgtgcagtttcaactctccgccgagggcgagcaggagcccggcgagggtgcgcgctcggcgccgggagcgcggccagccgagtccggaggcatcgggaggtcgagagccgccgggaccccagctctgcgttcactgccccgtccggagctggacttcggggccggggccggggccgtgcgccggggacaggcagggccgggtcgcgggccgcgcgtcccccaggccggaggtaagcgctagcgcgcggagggctcgaggagggcaccgcggctgggccccccgcgccccgggccccagccgtccgcggctcccggcccgacgctccccgccccggagcgcgcccgcctcccctgcgtggaggccggcgggcaggcgagcggggggcggtagcgccgtgccaaggggctggctggggcagcgtggccggccgggctggggcgacggtccgggcggggtgcggagccggactttggctggggcggcgcgcggggcag

SEQ ID NO: 27181 - DNA, 289 bp, Homo sapiens
  source 1..289: mol_type = other DNA
ttacaggcgtgagctactagaaaattctaaatgatatatatgtccttcctgtcccagggcaaagaatgacttggaaaagcaagtagctccaaacccagtcaggagatccgatttgaatttcagatttaaaaatgaatgattttttagtactaacttccctaactgtgtgatagtaacttactgtgtgagattgtcacaagatttaataagttactgcagctgctggtgagacccgcgtcaggccggtccccctccggcctcttctgtggcgcgagggacagcggaaacc

SEQ ID NO: 27182 - DNA, 782 bp, Homo sapiens
  source 1..782: mol_type = other DNA
atgatcaacattgcccagagttcccaaggccttatcccatggggagcaggcagggtacctgccacttgatcaataactcaagagcaggtaataatgagcgagcgcgcgccacgcatgttccttcccaaggtcgtggtagcaccgagggcaccgcgagggcccggcgttcccgggaggggccgtcactgcccagagaggggccgtcactgcccaggcagcggtcgcccctgacttcccggggccgcggaggcgcgcgtggcggggctggcttgcccccgagcggctccgcagcgagctttcccagcggcccgagcagcggccggacctgcaagcaggagcctgcgcgcggcgggtgtcgcgtggcgtagcccgcggtgactgcgggttgggggggcgccacgcgtccgggcgcggagttggtacgctcggttcggcgtgcgcgcggcctcggactcccggctccgcggggcccttccggaggctcccgcccgacccccgagcttccgacggaggcgccgagcgccgcgccgcgtccccaggggccccgtgcacgcgcagagcgcctctgcggccgagcgcggcgtggcacttggcagacggtccctggcgcgggggcggggggccagccgtctgggagccccgagggccgccccctcccgcccctcgcccggcccccgcgcgctgcctccgcccccggcccagccgcccggcccccagtcccgcccgccgcgccgggagcccggcccgccgctgagcccggcccgccggcgcgccccgtccgg

SEQ ID NO: 27183 - DNA, 358 bp, Homo sapiens
  source 1..358: mol_type = other DNA
tgtataaactacagatgatgtatacttataaaacttctaacagcaattcttggcatatagttagcattcaacaagtagtgggatgacactagctagtgtaacaaacttggtaattaagataaagtatttgtaatgcaatatttaccaaaataatgaatacaaaaatccatgacaaacaaaatggctttttttttttttttttttttctggagtgtggtgcaagtagttgagattacaagcatgtgccaccatgcctgtcgccaggctggagtgcagtgctgcgatcttggctcactgcggattacagtgtgatatggtttgactgtgtcccaacccaaatcttcccacgtgttgtggg

SEQ ID NO: 27184 - DNA, 243 bp, Homo sapiens
  source 1..243: mol_type = other DNA
ccaggctggagtgcagtggtgccatcacagctcactgcggcccaacctccgaggctcaagcgatagcagcgccaccaggcccggctgggctcaagcgatgctcccgccttggcctccggaagcgctgggattagaggcgtgagccgccgcgccgggcctccccccttcccccccagccttaggctccgccccgctgggggtcacggggccgacggacgctaggcggccgtagcggcctcgcca

SEQ ID NO: 27185 - DNA, 404 bp, Homo sapiens
  source 1..404: mol_type = other DNA
caatgtgaatttcagataagcaatgcatgatttttaagtataaatatgtcctacacagtatttatactagaaaattataaatttttttctaaaatttacattgactaaatgctctaaagtggaaataagcttggagcagatcccatatggtttgtgggctgtaataagagtaccaaaacttacataccaggccaggcgcggtggctcacgcctggaatcccagcattttgggaggccaaggtgtcgagacctgtctgttctccctagaccagcagccgctcgctgaatctgtgttcctctttggaaaacgaggggccccgattggcccttcgaacttgggtggggccagagcattcctggccccgccccctgcagcgggccgctcgctcatgcgctgcctcagg

SEQ ID NO: 27186 - DNA, 520 bp, Homo sapiens
  source 1..520: mol_type = other DNA
ctttggaaggggccccgattggcccttcgaacttgggtggggccagagcattcctggccccgccccctgcagcgggccgctcgctcatgcgctgcctcaggcggcaggagcgggtagtgccagctacggtccgcggctggggcgtgcacggcctaccagagtggctcttggggcccagcgctcccggtactaacgagcgctaggttccctagggagcgcttgccgcgcctcgcggcatcctaggtctctggcccaggtgcggcgaccccagggcctgtgagggctgagggcaactgaggcgcggcctaacgcgagcctgcggattgcccgcccacggcgctgattggctgcgccgccgcctctccgctcgggaagtgcgacggtggctgctagccgcgcgagctgagtgtgcggcggcgaggcctgcccgggcggggactgcgggcgcgtggagctgcggctgcctcgcgtcgtcccttgccccgggacatagaaatcccctgtaacgcgggttggggga

SEQ ID NO: 27187 - DNA, 463 bp, Homo sapiens
  source 1..463: mol_type = other DNA
agtttatctagtgaaataaatagtaatctggcacttctcgtcttttttcggcgcgatctcagctcactgcaatcagcgattccggtagcccgcaaagtgccgggattagaggcctgagccaacgcgcccgggccattgcaattttatttattgtgtattttacttacacaagaatgtaagcttggagcaatgccttgcatatggcaagcatttaatgaggctgggttctcccagacccgcttcgagtccagcccggcaggccccgggactcaggacgggccgctgcggtccaggcgggacagggcgctcctcccgctgggcccccggcgtgccttgcgagcgcaggctccgccgcagtgccagccggaacttgtggttcggaccggtggggccggggccgggcctggaggcgggcgggggccgggggcgggcgcctgcccctcccccgtcacttcctgccggg

SEQ ID NO: 27188 - DNA, 390 bp, Homo sapiens
  source 1..390: mol_type = other DNA
cctcgtgatccgcccgcctcggcctccgaagtgttggtttaattacatgatggggtcttgtcatgttgcccagggttgtctggaactcctgagcacaagttttcccctacaataaacattaattttaattaaaaagtttcggggctgtgcgcagtggctcacacctgtaatagcccaggagttcgacaccagcctgggcaacatggtgaactccgccgggcgtggtggtggcgcctgtacctccaggagcccgggaagtcggggttgcagtgatccatgatctccactgcacccaatcacagctaactgcttattgtaagcttttttttgtatctaaatatacacatctagagtttataaatgcaactctttaggttttgaggccggaga

SEQ ID NO: 27189 - DNA, 284 bp, Homo sapiens
  source 1..284: mol_type = other DNA
atcccacgttttcctagaaaactaaagcttctcaaagcacgtgttttctacagtagaccttttggaaaaaagtgaagtcatcatttacaccagccaagggcttctcaggcccgtgcagaaggcagtggcttttccagctccagcgcccttaaggcctctctctttcccgcccgctccgcgcgcgtcgctctgggaaatgtagtctcgagcagcacagcccgaggcgctctagtagttgtccccggctctggggccggctgaggcccgcaaaggccttgggcgca

SEQ ID NO: 27190 - DNA, 450 bp, Homo sapiens
  source 1..450: mol_type = other DNA
ggaaaaaagtgaagtcatcatttacaccagccaagggcttctcaggcccgtgcagaaggcagtggcttttccagctccagcgcccttaaggcctctctctttcccgcccgctccgcgcgcgtcgctctgggaaatgtagtctcgagcagcacagcccgaggcgctctagtagttgtccccggctctggggccggctgaggcccgcaaaggccttgggcgcagtcatctcccgccccccgcggtccgctcccctcagccgcgcccgcctgagcccgccggctccgccgccggggggagctgaggtgacgccctcctcgagggcggaggcgccggccgtgcctgggccaggccctcgtgctctccactcctctgggccgcccgcccggctccgcccagggtctgcggggaacggaaccgaaagtgcgcggcgccgggcggggccaccgacct

SEQ ID NO: 27191 - DNA, 278 bp, Homo sapiens
  source 1..278: mol_type = other DNA
agctggggtcacttttttaaatacctgtgctttgttaaatcccacgttttcctagaaaactaaagcttctcaaagcacgtgttttctacagtagaccttttggaaaaaagtgaagtcatcatttacaccagccaagggcttctcaggcccgtgcagaaggcagtggcttttccagctccagcgcccttaaggcctctctctttcccgcccgctccgcgcgcgtcgctctgggaaatgtagtctcgagcagcacagcccgaggcgctctagtagttgtc

SEQ ID NO: 27192 - DNA, 537 bp, Homo sapiens
  source 1..537: mol_type = other DNA
ttcccttccaagcccggggaaaggcgcagaaggacggagcaggcggatcccgaggactctgcccgcccctcctgcggtagggttgggggctcagagggagaggcgagagcgggcttttcctcctcgcggccaatctcaggagatgctccaggacagaggggctgttgtgcacaccccgtctgttgtgttttaagatttggaaaaaagcttcccccacccccaaaatcttgattatctcgagaagggtctctccccatggcggggccaggttcgggactcgatcgggactctaaggggcggacagcgccccgggcggctgggtcgcgcctgggccgcagaagcccagggtggggcctcccgggctccaggggcatctcttggggccctctccccgccccgaggggcggcccctccctccatccatggggtgcggcggacttcagcaccggcgggagggacagcgaccatccgtcctaccccactgagccgcttaagcgcgggggaagtggggggcggggggacagcatgcccagctcc

SEQ ID NO: 27193 - DNA, 415 bp, Homo sapiens
  source 1..415: mol_type = other DNA
ctgtgcccccgctgacacctatttacttatcatgcagtaaatgaatatttgaaagaataaatgaccactggatggggagctccagggggaagactttcccttctgcacataacatgaataaatgaatgaatgaatgaatgaatgaatcactgcatatgtactgatgtttgattcacagctgtatctcagacgcctgtcaccgtgccctgcaccgcggctcgcgcacaggaggcgttcaacgccagctgtgcaggtggcctgggtggagagggatgcacggccacgcgcgtctccttggcccgatcccggagcccgcccccggcctccccggcaggctgggccgggcaggcaggagttaagccgcgctcgcttccgacccgcaggtggcgccgtcctgccttggtgcccggctccg

SEQ ID NO: 27194 - DNA, 411 bp, Homo sapiens
  source 1..411: mol_type = other DNA
ggattgacccccagttctcatcagcaccctggggtggtacattgcagagccgcgggcacagggggctggcaccccaagcaccaggtagcgatgacaatggccaccacatccggaggccctaacgtgcaccaggtagagggtgcatacttcacgggcactatcttgaggggactccctgagacacccagtagttactgaagatactactccaggtccccagcacgcctggggtgggggatgggctcccacattttccatcaggcctgagctggggggagcagggtttctaacagagcgccccggtccgacccctgcggacctcggagggccccatcccccaccccccccaccccgccccaaagcgggctggggtgggcggagtgggaggactttacctgggagtgggccagg

SEQ ID NO: 27195 - DNA, 510 bp, Homo sapiens
  source 1..510: mol_type = other DNA
tttcctcatttgtatgatagtaataataacagcacacatctcacagtctagagacattgacaattgttatcattatgctatttcttcaaaaaagctggcgccactgctcagtgaggccttccttgtattcatatgtgttaccagtacctgatattactagctttttatctctcacataatgtaagtttcaagtagacagaactgtgtctggcattcaataaataaatggtgaattgaatgaatgaatgaatgaatgaatgagtggggccccttggcccccgagatgggggacgagctagcgcggagcacttgggagacattccccgaaagcctgggcggtggccgcactgggagagggtctgtcgccatttggcgagctgtgggcgccgagcgagggtcggcggcgagcgcaagcgcgcgggtcttttgcgacggtgcccggcggcactggccccgcctcccgcgcgtgcgccccgcctccgcccccgccgctgcgcccgctcggggccg

SEQ ID NO: 27196 - DNA, 460 bp, Homo sapiens
  source 1..460: mol_type = other DNA
ttcggaaaaaagcatgatcttgagttttcagcttagaggtcaacttctccaggtagtctctctttttaatttttgagacaggctgtgagtggcgtgatctcggctcactgctgttattttaaaataattaaatctgtctccatcctgggattgctaaataaataaattaattaattaattaaaagcaaagcttaaaaaaatacttgtgtaataatgaatgtaaacaactcaaaaatgtgtaggttagaagtgagagttattttgcccctcctaataaatattagctgaatccatgaataaatgtcatgtctataaatagatgatgaatgaatgattgaataagaaaacagttctgtctcggttcaacaagcaggccagctggtttctctgaaagtctcggccctgggcatggcagcaagtgccctggtgacatagggtcacatcctgttactcgagctcc

SEQ ID NO: 27197 - DNA, 381 bp, Homo sapiens
  source 1..381: mol_type = other DNA
gaggggagatatagagccccatgcccccctcccacacacttcagaggggaaaagggggcaggattgagtcctgtacattccccatagaagcatctactaagcatgtggtgaatcaatgaaccccttaatgaatggtccactcaacacatgtttacagatccacagccgaaggaaactaaggctcgggtggggaagtgtccccctggggtctccctcagggtgagtcacagccaggtggtcatgtggcccaggcccgctttctcccaccctcgggccactgagacggagggacagagggccgccctcgcgcggccgaggccccgcctcccgctcgcccgcccgcgcctccagcggaagccggaagcaaaagcgggtcctgct

SEQ ID NO: 27198 - DNA, 258 bp, Homo sapiens
  source 1..258: mol_type = other DNA
gtgggaggggagatatagagccccatgcccccctcccacacacttcagaggggaaaagggggcaggattgagtcctgtacattccccatagaagcatctactaagcatgtggtgaatcaatgaaccccttaatgaatggtccactcaacacatgtttacagatccacagccgaaggaaactaaggctcgggtggggaagtgtccccctggggtctccctcagggtgagtcacagccaggtggtcatgtggcccaggcc

SEQ ID NO: 27199 - DNA, 318 bp, Homo sapiens
  source 1..318: mol_type = other DNA
acatctgttgtgtgcctcctcatcagacatcagattatatatatatatagtttatccctagctgggactcgcctggctttattatttaatattacaggttagaaagctgagaggttaggtaacttgtccaaggagcaaggctggattccaatcacgcgtgatttcagtgggggcgagggatccgaccgtcagccctggaggccgagttcacgcagtcagcactcacctaggccgagcggcttgacaaagtgcggtgtagtctccgtcggccgcgggcatcgaccgcttcccggagccagcgcgcagccgtggtccacc

SEQ ID NO: 27200 - DNA, 278 bp, Homo sapiens
  source 1..278: mol_type = other DNA
atgctactgtttggacagcagcagattgctggttcacatctgttgtgtgcctcctcatcagacatcagattatatatatatatagtttatccctagctgggactcgcctggctttattatttaatattacaggttagaaagctgagaggttaggtaacttgtccaaggagcaaggctggattccaatcacgcgtgatttcagtgggggcgagggatccgaccgtcagccctggaggccgagttcacgcagtcagcactcacctaggccgagcggcttg

SEQ ID NO: 27201 - DNA, 365 bp, Homo sapiens
  source 1..365: mol_type = other DNA
cttggcccagagtagctgagggccaggctgctctatcctttgtataaataaatgatattgattttcttcttgcagctcaggaattagatctgttattagaatttgcttaaatttaagaaatgctgtaatcccagcacttcgggttgccgaggcaggcggattgcttgcgcttgaaccccggtggtcgaggctgcagggagccatgatcgcgcgcgccactgaaatagattaaataaataaataaataaatttaaggaaaaagagcccgtcccaattctggcagcctttggatttgcctctagctcgcttgcgtcagaggggccccgaggggcggcccacccgctagccccgcccccactcctcat

SEQ ID NO: 27202 - DNA, 615 bp, Homo sapiens
  source 1..615: mol_type = other DNA
ggccctggggcccaagctgctctctaggagttactctgaagcagtttcaggtgagaccagaagctacccttcgggagaggctctgagtgttctgtccggggctgtgccctggccccaggtacagtgccccacacgtgctggctagctgggccaggctgctttgcaaaaaggccgtggcattttctccaggcgccagccgggcggaggaaatttccgccccctcccaagcccgaggcgggggcgggcgtcggaaggtcaggtgtcccggccggcgcgcagcgccagggggcgtcagaagcgctcagaccaccgggcgctgagccggtgggcgcgcggcgtcctgccggggtcccacctcgcagaggcctcgcttcgctcgacgtcccgccccggacagccccagcaccggggacgacccgcgctgcgccagcgaaccccgcctcggaggagtccccgcccgggctctcaccgccacgcggcgcgagcccggccagcagccggcgcacctgctcggggagtggccttcggcggagacgagcctccgatcaaaggggcgtggcagataaggccccgcccctcccaccccccaccacccccccggagtacttaagggag

SEQ ID NO: 27203 - DNA, 285 bp, Homo sapiens
  source 1..285: mol_type = other DNA
ctaattttttgtccatttgaaatatataagttgtgctataacaaatcattccacgtagttgaacttctgggatcaagaaagtctatttaaattgattcccatcataactggtggggcacatctaactcaactgtcaacagccctctagcctggggggcttgttggccagaagccatcaggtaaggttcctgggatgtcatcagctgatgcatgctcaggtttcagacctgccagctctcggagtccttgcttttgcttttaaaaattgaagaagttttaaacagg

SEQ ID NO: 27204 - DNA, 239 bp, Homo sapiens
  source 1..239: mol_type = other DNA
agcagcaggttcagcttaaaaagtaaactccctcctcccattcaaaggaaatttatcttaagatactgtaaatgatactaattttttgtccatttgaaatatataagttgtgctataacaaatcattccacgtagttgaacttctgggatcaagaaagtctatttaaattgattcccatcataactggtggggcacatctaactcaactgtcaacagccctctagcctggggggcttgt

SEQ ID NO: 27205 - DNA, 300 bp, Homo sapiens
  source 1..300: mol_type = other DNA
aagaggacaggtcctgagcccggcagccgccagcccagcagcggcggctggttgagtctcaagcagcaggttcagcttaaaaagtaaactccctcctcccattcaaaggaaatttatcttaagatactgtaaatgatactaattttttgtccatttgaaatatataagttgtgctataacaaatcattccacgtagttgaacttctgggatcaagaaagtctatttaaattgattcccatcataactggtggggcacatctaactcaactgtcaacagccctctagcctggggggcttgt

SEQ ID NO: 27206 - DNA, 384 bp, Homo sapiens
  source 1..384: mol_type = other DNA
ttttttccagagaaaatagtgcatatgcgaaggaaagtccatcgtacctaggttctgttctggaagacacctagaaatggctcaagcctcagcctgaacccggtactgtggcaaaacaattgagaaccagctattcccttttagcttttttgtaagttaaaagagaaactatcacttaaataattgaaaaacaatagaatattttatccttggaagaggataccatttttatttcccatatccatggtgactattctctaaaggttgtttgagagtcatgccaacaaataagcgtatttctaagtttggttatctagccctagtgatagctttataagtagagataatgagcagctagctctaggcttacaagttcatttccga

SEQ ID NO: 27207 - DNA, 459 bp, Homo sapiens
  source 1..459: mol_type = other DNA
ttcttgggtttatttatttgcaaaaatatttcccaagggcctttgcacaagggaggtgtctacgactagaatgtaagtccctgaaagcagggatttgcttctttgtttgtttggttgaatgaatgaatgaacgaatgaatgaatgaatgaatgaatgaattgggtagatggttagcaaatgctttccctgccaccggagccagatcatctgacctggagggtgatgattcaaaaaatttgaacctggaggttaaaattaaaaagccccaagcgaattcggcgcttttgtttgacgatgtgtggggacttgcaggttgctgggccctcgagcacgcagatatttcctttctctaaaagggaaggaaaagagccttccaggccacgggtcgtgcaggtctccggggcgggcgtcagcggcggcgtatgtgcgtgcgcgcgcgcctgcgcatcagggccggg

SEQ ID NO: 27208 - DNA, 459 bp, Homo sapiens; identical to SEQ ID NO: 27207
  source 1..459: mol_type = other DNA

SEQ ID NO: 27209 - DNA, 367 bp, Homo sapiens
  source 1..367: mol_type = other DNA
ccaggttcaagcgattctcgtgcctcagcctcccgggtagctggtattacatgggattacaggcccaaccttctcttcagcttttatgaggggagggaaagtttccaaacacccaccttgccatgtggggccatggcgactgatgctgtaaaagggctccacctccctcatcacgggagagccagcgggtgatctcagttttctcatctcacaaatggaaatggtaacagctactttgcaaggttcattgaggattaggtaataatagcagctaatacttatattgataaaacaagactcttatcccatcagctgagtttatcagctcaagcgcagacaggcgcaggcgccggaaggaatcctgctc

SEQ ID NO: 27210 - DNA, 367 bp, Homo sapiens; identical to SEQ ID NO: 27209
  source 1..367: mol_type = other DNA

SEQ ID NO: 27211 - DNA, 309 bp, Homo sapiens
  source 1..309: mol_type = other DNA
cccatagtggtctcgaacgcctgagctcaagcgatcggcccacctcaccaaaaatatttttcaagctacccacatatatatatgggtatatatatatatatagcaatatatatattgctatataagcaataggtaatgcttgcataggttcatatcaaataatataaacagggctagctggagtgcagtggcacaatcacagctcactgtaacctcagactcctgggctcaagtgggattacaggtgtcagccacgagcattttttaaatggctgtttcctaacacagaaaattcaaattccagtttgt

SEQ ID NO: 27212 - DNA, 466 bp, Homo sapiens
  source 1..466: mol_type = other DNA
gcttcctgataagtgctcaaatataagtaagtgcctggtatatagcctgagtggccccaggcccattggtgggaggcccccactttgggcagcccagtgaactgcaggctggctcaactaccctctggagaagataggcttctggcgacgcctggaggacctcatccagggcctgacgggatgggcccagaagatcaaatatgagctggcccctccagatggagaggacatctcctgggctgggcccaggtaccccagcccaactctgccagcctcccctggtagagaggaggtttcctgccgtccctgccccgctgggcagcccttcagtgtggctggcgttggggccagccccagtggtctggggagcccccaggcacacctaagcgtcgtggagcattgttctgccacagccctgcatactgaccccgggaggctgggcaggtggacagccccagccaccacc

SEQ ID NO: 27213 - DNA, 438 bp, Homo sapiens
  source 1..438: mol_type = other DNA
tgactgctgccgctgctggcccacggtgggctgggagggggccttgggggcagaggccgacccccaggagccttctggggcttatttcattcattgtcttcatgtaaaatcaggaaacctgacatgaagatggaggttccagggtccatgttcccacctggcctcactgggtgggagctgagctgcagccactggaaaatgtctaggctgtgaaaacagggcctgcctatttttagagggactggttggggcccggtcctgttccagcaccgtgggtgctatggcaccctgcccatccccttcggggtgcacccagcccctgcttctgtgagtggtggctgctgacagctcccagcttctccagggatggaggggaggtcccacctgtctccttgggataaggctggagccagtgactgaaacgcctccgacgctagt

SEQ ID NO: 27214 - DNA, 418 bp, Homo sapiens
  source 1..418: mol_type = other DNA
cgaggtcaagagatcgagaccatcctgtcagcgcagtgagccgagatcgccccactgcactccagcctggagagtgagactctgtctcaaataaatagatagataaatgatagatagatagatagatagatagatagatagatagatagatagatagcttcctgataagtgctcaaatataagtaagtgcctggtatatagcctgagtggccccaggcccattggtgggaggcccccactttgggcagcccagtgaactgcaggctggctcaactaccctctggagaagataggcttctggcgacgcctggaggacctcatccagggcctgacgggatgggcccagaagatcaaatatgagctggcccctccagatggagaggacatctcctgggctgggcccaggtaccccagccca

SEQ ID NO: 27215 - DNA, 468 bp, Homo sapiens
  source 1..468: mol_type = other DNA
gctgtgaaaacagggcctgcctatttttagagggactggttggggcccggtcctgttccagcaccgtgggtgctatggcaccctgcccatccccttcggggtgcacccagcccctgcttctgtgagtggtggctgctgacagctcccagcttctccagggatggaggggaggtcccacctgtctccttgggataaggctggagccagtgactgaaacgcctccgacgctagtagaacctgtttcaggctccgcttctagggaacggcatcattcccattttcctgatggggaaattaagcttcttatcggcagagatcggaacccagctccagctgactccggctgcttcctgagcaggaggaaagcctgaagcccagggcagcacctgagcttgcctgcggccctgcagggcctgggtgcttgcccagctcaggagccgcccaggagcaggtgcgagtgacagctgt

SEQ ID NO: 27216 - DNA, 301 bp, Homo sapiens
  source 1..301: mol_type = other DNA
cttttttggttttgacagaaaatctaaactggcaaaagagaactgtccttctccttccaggagaacagcatttcctcccattggcccagattgggtcacgtgctgggccctcaggcagtcactggcttggccaggcctggtcacgtgttctttctcagcccggggcgaggtcagccttgtcagaagagcctggactaaggaggggaggctgcctcctgggtggggaggaagggcggaggttgtctccaagcccccttacagcacctcaagcatcccgggagagcagctgaccaccttaggc

SEQ ID NO: 27217 - DNA, 273 bp, Homo sapiens
  source 1..273: mol_type = other DNA
gagaagaagggacaccttcccctcctaagggatgtccctttatgttgacctaaccatgtcctctgtttccctatctgaaagatgggaaccatcattaaaaatcagaacccctgaatttgggcttttttggttttgacagaaaatctaaactggcaaaagagaactgtccttctccttccaggagaacagcatttcctcccattggcccagattgggtcacgtgctgggccctcaggcagtcactggcttggccaggcctggtcacgtgttctt

SEQ ID NO: 27218 - DNA, 326 bp, Homo sapiens
  source 1..326: mol_type = other DNA
cattcccattttacaagaggaaactgggccagcactggaatttgagtccaaatctactacctgctcaagttccgaacagatatcacggagtctcactctgtccacgctggagtgcagtggtgtgatctcagctcactgcaaccccgagtagttgagactaccaggcagcactggtgcagagcaggctttccttatatgagcctgctcctaatagggaaaggttgagctgatctgagcatgcccagtttatgctctcgagtgttaagcctgaggctccatcttcaggggagaagaagggacaccttcccctcctaagggatgtccct

SEQ ID NO: 27219 - DNA, 309 bp, Homo sapiens
  source 1..309: mol_type = other DNA
tcaggtgatccgcccaccggattacaggtgtgagccacggcgcccagtcgcatcattcccattttacaagaggaaactgggccagcactggaatttgagtccaaatctactacctgctcaagttccgaacagatatcacggagtctcactctgtccacgctggagtgcagtggtgtgatctcagctcactgcaaccccgagtagttgagactaccaggcagcactggtgcagagcaggctttccttatatgagcctgctcctaatagggaaaggttgagctgatctgagcatgcccagtttatgctctc

SEQ ID NO: 27220 - DNA, 351 bp, Homo sapiens
  source 1..351: mol_type = other DNA
atcagaagctaaaaaaagaaaaagaagctcattaaagttcccttaggtgtctccagagagagcccagaggggcccaggagaccagagttctggtcctgtctgtcaaagaattggtctgtcagagaattgggccactctctgaagggccccatcccatccagccctgactgtttgaccttggtgagggcctcagtgacgtcatctggctccaggttcacacctgtaatcccagcactttgggaggccaaggtgcccagctactcgggtgagccgagatggcaccactgcactccagcctgggtgatagagtgagactctgtctcagaactgcaggcaagcgcctccaggagt

SEQ ID NO: 27221 - DNA, 599 bp, Homo sapiens
  source 1..599: mol_type = other DNA
ccttaattcattcatcaagcatttattgagcttctaccatgttccagccccgatcctggcacgggggccctgctgtacctcaggagcttgctctctgataggagagacagtcacaataccattggtgtttaagagtcatcgtctagctcttggtccagcacctgacagatattaagcgctcagcaaatctctcgacgtttctcctctttgggcgcacagcacagagctggcacatcgctagggagcatcgctggcctcggccccagcccggcgccctgccgccggctcaagaaatgcccatttctgggccctgcctcggcccattgcatgggcccgtgaaccgaagcctagctgggcggcgacgcgccgcgagctcccagtgggctggagccgggagccctgccggggctgagctgggaaggcgggcacgcgcctccgccccaagcttccgcgcccagctgcgtccagctgcgtcccagcctccggctcgcggcggttggctgcggctcagcgacgtccgattggcctgcgcggctccggcgcgagccccgattggctgtgacgcgcggccgggcgaggaccccgcccgcgccgccgcc

SEQ ID NO: 27222 - DNA, 599 bp, Homo sapiens; identical to SEQ ID NO: 27221
  source 1..599: mol_type = other DNA

SEQ ID NO: 27223 - DNA, 369 bp, Homo sapiens
  source 1..369: mol_type = other DNA
tgcagtgaactgagatagcgccaccgcctccaaaataataataataataataagtgttggtgatgcgttgaggtcaagagttcaagatcatgttcccagctacttgggtacctgaggaaataaaatttaaaaagtatggcagttcttcaaaattaccatatgatgcagcagttccacttctgggtatatacaagaattgaaagcaagatcttgaagaaatatttgtacacccatattccattagcaacagtgtttacgatatctgactcaagctataaaggcagccgcttttcaaatagccagaggtgactcagcagaggccccaccctcgattcgcatggggagacattccggggcagcctcccgctg

SEQ ID NO: 27224 - DNA, 477 bp, Homo sapiens
  source 1..477: mol_type = other DNA
tttcaagacagggtctctctctgccacccaaggtggagtgcagtggcgccaaaacagctcggtacagatgtaagccaccctgggctcctatgatttttatttaacataatgcaccatggttttcgggaaacactgattctgcgtttcagacagggacactaccctgatactcctgagtttcatggaaatagagcacggtgccctcctcccatactccagcttggattactgaggctggggcccaggccctgcgggccgggtcggggctggaactcaatgccctcccgggcctggagagcccacgcgccgtgggcggggctcccggggtcgcctaggcaacaggcgcgcgccgcgcccgagcccagagccccacgcgcgctattagatatctcgcggtgctggggccacttcccctagcaccgcccccggctcctccccgcggaagtgcttgtcgaacccctggcaggcgtgatgcgt

SEQ ID NO: 27225 - DNA, 328 bp, Homo sapiens
  source 1..328: mol_type = other DNA
acttgtaacaagtgatgaggggaggaaggtaccctaaccactcttctggattcccgggtcccacagggagaccttgggacctgggacccatgacccacagggtctgtgtgaagagagtctgggacacagctcagggaggctgggcctgcaaggagccttcccgacttaaggcgtgcagagtctcagcttctcccccagcaaccgctgcagaggcgggaaaacttgaattttgcaaccagagccccgcagcgcctcggcaaccggacgggcggcgcatccaatcccctggaccgtgcgtgtgactggcgcgcgctaagcggcgcgagcc

SEQ ID NO: 27226 - DNA, 691 bp, Homo sapiens
  source 1..691: mol_type = other DNA
tcagggaggctgggcctgcaaggagccttcccgacttaaggcgtgcagagtctcagcttctcccccagcaaccgctgcagaggcgggaaaacttgaattttgcaaccagagccccgcagcgcctcggcaaccggacgggcggcgcatccaatcccctggaccgtgcgtgtgactggcgcgcgctaagcggcgcgagccccggcggagccgggcaaccaggcgcgcgctcgcgcgtgcgcaaaaggcccacccagccgagcccttcttcaggtgcgctcgcgcttccggccggcctccccgcgtgccttcccggggcggaaactccagcacccgcgcatgcgccttctggctctccggcctgaagcggggcggagggccatggcttcaggtgatcccgcccctccctcgtagcgcaggaccaatcgtgcggtggtaggcggggttttgaggaggcagcccgcccacgcaccgcgcgaggcgtgtatcgattggttggcgccgcgggcatcttcgggggctgcaggtgagcgcgcgcacgcgccgcggctgtggtccgctcgggtgcgcgcgcgcgggctcgcgggggaggcggcagagggagaggttgcggcgcttgtggcctccgctccgccccctcctctcctccagcgctgtcgccgtcgccgccggggcccggagggagggagctgct

SEQ ID NO: 27227 - DNA, 403 bp, Homo sapiens
  source 1..403: mol_type = other DNA
cattaatggctggcttctggacacatctgttatgaagtgtgaataactcaggaagttcccaaagaactgaattttggcccataaagatgtctctatttctgaaatatttttctaacaatcaagcgattctcctgcctcagcctcccgagtagctgggattacaggcacgtgctactaactgttttaaattaagcaagtgataaagaatttgctggttttaagccaccacaaaagatggtttaaaacaatttagcaataaaatttggacaaaaaataattgatttggtcttaatttatatcagaagtgacttctaagtctgtagttggcttcacaatatgcagattattagttttttgaaataatatagaatattttgagacttctaagttagagtaacgtacc

SEQ ID NO: 27228 - DNA, 484 bp, Homo sapiens
  source 1..484: mol_type = other DNA
aaaaattaattaattaaaaataaaaataaaaatcaaaacttcagacttgtcttatacggtgggagatgaggcgcacctcgctctcttcagccttcctggtgaagtttattttaaaatccgcaccgaagaggacgttagaatcacccggggagttttagaactccgaaggattccaacttaatcggcctggtgcgaggcctggcttccgggcttttaaaagcttcccggggatttacggccgggtccggggccgggagcctgtactctaccgggtgccatctgcaagcgagtttgcaacccaggtgctgcgggggcgggcgcagcgcgcgccgctcgccactgggtggcgctgcccgctcggcccggcgctcctggagctgcgagccgcgaccgccgggagcgcacctgccccgcctccgccaggcggtccgcggggcatgcagcggaccgggggcggggctccgaggcccgggcgcaaccacgg

SEQ ID NO: 27229 - DNA, 780 bp, Homo sapiens
  source 1..780: mol_type = other DNA
gcttctcccccagcaaccgctgcagaggcgggaaaacttgaattttgcaaccagagccccgcagcgcctcggcaaccggacgggcggcgcatccaatcccctggaccgtgcgtgtgactggcgcgcgctaagcggcgcgagccccggcggagccgggcaaccaggcgcgcgctcgcgcgtgcgcaaaaggcccacccagccgagcccttcttcaggtgcgctcgcgcttccggccggcctccccgcgtgccttcccggggcggaaactccagcacccgcgcatgcgccttctggctctccggcctgaagcggggcggagggccatggcttcaggtgatcccgcccctccctcgtagcgcaggaccaatcgtgcggtggtaggcggggttttgaggaggcagcccgcccacgcaccgcgcgaggcgtgtatcgattggttggcgccgcgggcatcttcgggggctgcaggtgagcgcgcgcacgcgccgcggctgtggtccgctcgggtgcgcgcgcgcgggctcgcgggggaggcggcagagggagaggttgcggcgcttgtggcctccgctccgccccctcctctcctccagcgctgtcgccgtcgccgccggggcccggagggagggagctgcttccccgcctgccgcgccaccagtccgaccctcggtcccgccgtgtgagcagctggtggagtggagctcagcgcggacgccggagctgcggccgccccctctgcaggtgcctgtgaggaggcgcccgggccgcaaccgctttccg

SEQ ID NO: 27230 - DNA, 557 bp, Homo sapiens
  source 1..557: mol_type = other DNA
cgctgtgtgaagcacgaggccctcacacctcatttaaggcaggaggcgtcaggggcgaccggccaggtgtcccggcgccttcccgccgcttctcagccgtggaagcgcgggcatctgagcacgtggagccgccccaggccgccaggcccagctgggcccgcgcagggatccccagcacggccacctgactgagtgctgggcgtgctgcggcccgctgcttctgcctccgccgccggcgctgcggccagaggaaggcgcccgccgagcacacgggccccgggagcgcactgcggccattatccgcggcgcccgcgagagctcccccctcagtggggattatataatttccctcaagcgggggtgggggtgctgagagcaccctccctcaggcccccctggggaaaagggggttaggggtgctgtccccactgcccccccctactgaggggagacgcgggatcagccccctcccccgcccgttgccgccgccgcctccgccggcccggtctcccctccgccgcccgccgggatccccccctcccgcaggcagcgctaag

SEQ ID NO: 27231 - DNA, 514 bp, Homo sapiens
  source 1..514: mol_type = other DNA
ttatgctacccagattgtgggagcaccaaaagctatgtccctaggccaatgcccctattggcaaaactgtgaccgctgtgtgaagcacgaggccctcacacctcatttaaggcaggaggcgtcaggggcgaccggccaggtgtcccggcgccttcccgccgcttctcagccgtggaagcgcgggcatctgagcacgtggagccgccccaggccgccaggcccagctgggcccgcgcagggatccccagcacggccacctgactgagtgctgggcgtgctgcggcccgctgcttctgcctccgccgccggcgctgcggccagaggaaggcgcccgccgagcacacgggccccgggagcgcactgcggccattatccgcggcgcccgcgagagctcccccctcagtggggattatataatttccctcaagcgggggtgggggtgctgagagcaccctccctcaggcccccctggggaaaagggggttaggggtgctgtccccactgccccccccta

SEQ ID NO: 27232 - DNA, 489 bp, Homo sapiens
  source 1..489: mol_type = other DNA
cgtaagggcctgagtgtacggcacgcattccactgccgaattgaggcggcgcagcgaggcggcggccgaaaaggccttggcctggccagccagtgcctcgccatgcagcacttggcgggccaggttcaaggccaaggcggcccacgccggccgctgccaagtactgcgctagtggacagccgagcccaccgcagcccacgattagcacgcacgcggtccccaggcgcagctgtccgtgcacgcccagctcgggcagcactagctgccggctatagacagagcggccttcggcggcagcggcgacaccggaaccagccgttctggctgcggttcctgctcagccaaaagagccgacgccagctaagccatggcgacctcttccggaagttgtcgtgaaaatttacttcctgaagaaaccttcagattaaacttcaaagatgtataaatccagaatatttctaattgaggtacggtccgcattacgtaatt

SEQ ID NO: 27233 - DNA, 601 bp, Homo sapiens
  source 1..601: mol_type = other DNA
ctggtccaagtgccctgcaccggccaggggagtggacgacgaagtgcggtctgctagcccgggagggctctggggcctcggccccgcgggactggagtacgtactggccctaggaatttggcacagcaagatgctggcagtccctgggtgggcgcgcgatatatggcccccatgcttggagcgttcggctccagggcagagcagtgcacttggacttccaggacttccagggaaaggcaggacccggggcggtgctgctaggggcgcggacccgggaccaccggagcacttgcaccgcggggaaagctgacagggcgcgcgaccctaggaggctgccgcgccgcctggtgcgtgaagctccagggcagcggagcgcggggaccttgaaggctgtcgcgtgcaggcggctcagtcccggacgcgggctcaggaactggccgcgaggagcgcaatccagcaggcgcgccagggcccccggatccaaggtgcggggtcccgattgggcgcctggacgccccgtgacggtggcgccgctgccactgtcccgaagcgaggcgaggccaggcgctgcgctttcggctgcccgcccctcctcggcggc

SEQ ID NO: 27234 - DNA, 383 bp, Homo sapiens
  source 1..383: mol_type = other DNA
tattgcgcccacctttggctggagttcagagagacaggcagggcccagccaggctgcctggcggccatatggaccctaagagatcagcttggctaaactggacagtatttcctctaggatagaggctcactggggtggccacctggggtcccccaaagcaggaagagggcttgtttctggctggcaggcgcttgcaagtgccaggccctgtggtaggtgcttggcagacaatgctgggccacagtgacacgggcccaacactgacggagccaaggagtaaatatttcaggctttagtataggagcaatcactggctgtgttgtcataaaactatttacaaacacaacccatgggccgcatttggcccatgggctacgatacct

SEQ ID NO: 27235 - DNA, 459 bp, Homo sapiens
  source 1..459: mol_type = other DNA
tgctttaaacaagcagccaggcgtgtttgtcacttctctggctctgtgttttggttctcactgccagaaacctcctcagagaggtcctccagtgtctggctccggctgggtgcccagcacctggcacgtggtaggtggcccatgcaggtgtctgccgcccccgtgggcacacggagacgcctggagacacgggtctgcaatagaagggggtggatacccccttccaccccatgcgcgcagcgcgtgtcgcactcacccgtggagggtgggagacagcggccgccccagcgcccagcggtggcccgggacagtgtggtcaggtccgcggacagcctcccggcaccggccagcccaggccgcgcgcccctcccctccggtcccctggtggcggccccgcccccgccggcctggccgccctgtccccgcctcgcctccccgggctgcaacaggtgcctccgg

SEQ ID NO: 27236 - DNA, 423 bp, Homo sapiens
  source 1..423: mol_type = other DNA
gattttctaaatgaatctaaaaataaactctttgaaaaaaaattctagggactgggaagggcccctgggcaaacgtccaggagcttggacaggcagctttctccaagaggcgcccgcttggcaaatggggggcttctgccacgggccagggaaggcggtggctgggcactccttgcaaacagccgcctggaaggagccacggagctggctggccgcggaggaggtcgggatccagtggtttccatgacagtgagggaatcccgttattttactgcattgaaagccgagtaagccggatcgcggagccgcgccgactccgccgagccgggagccgggaggcgcgcagctcccgggtcgctccgaggctcctcggccagggcagccccgcgggcacgcggtagagaagacggcgtcccctcggct

SEQ ID NO: 27237 - DNA, 335 bp, Homo sapiens
  source 1..335: mol_type = other DNA
ggacactgtgcaaagtttattcagagcatgtgtaaacacatgaaaccttggattttctaaatgaatctaaaaataaactctttgaaaaaaaattctagggactgggaagggcccctgggcaaacgtccaggagcttggacaggcagctttctccaagaggcgcccgcttggcaaatggggggcttctgccacgggccagggaaggcggtggctgggcactccttgcaaacagccgcctggaaggagccacggagctggctggccgcggaggaggtcgggatccagtggtttccatgacagtgagggaatcccgttattttactgcattgaaagcc

SEQ ID NO: 27238 - DNA, 330 bp, Homo sapiens
  source 1..330: mol_type = other DNA
aactatgtaaaagtcagctttagattagtttatatggtattattacaatttcaggattgatttttaatcataactttatcaggcctttgaaaagttcatgggtcccagacactgtgtgggtgagaccgtgaatcacagtgacaggtaatgcagggtgactgtctgaggcctgagagtggggcccccctggtgatttctgcacaggactcacatgtgagcagggtgcgcgcacggcgggcgtgggcggggggcgcgtggccgggtgggcgcgcgtggggggcgcgggcgcgggccgggggcggggacactgcagcggtcgcggcggcgcgg

SEQ ID NO: 27239 - DNA, 462 bp, Homo sapiens
  source 1..462: mol_type = other DNA
gtgagaccgtgaatcacagtgacaggtaatgcagggtgactgtctgaggcctgagagtggggcccccctggtgatttctgcacaggactcacatgtgagcagggtgcgcgcacggcgggcgtgggcggggggcgcgtggccgggtgggcgcgcgtggggggcgcgggcgcgggccgggggcggggacactgcagcggtcgcggcggcgcggacacggcccggccgccccccgtggcaggcgcggcgcggcgcggagcgagcgggcgcagcgcggagctcgggcccatggtgcgcccgtgtccgtcggtcgggccgcgcgggcgctccgcgcgtggcccggcgctcgcgagctcgccccctcgctgcgggcccggcccgcccgctgccgccgcctcctcccccggggcggcgcggcgccggcgggcggcggcgcggaggccggaccgggcggcggcccaggcg

SEQ ID NO: 27240 - DNA, 323 bp, Homo sapiens
  source 1..323: mol_type = other DNA
catcccaattatctctatggcatttagcagtctggccaacatcagctacccgggtagctgaggcaggagaattgcttcaaccattgcaccactgcactccaattctgtttcaaaaaactatgtaaaagtcagctttagattagtttatatggtattattacaatttcaggattgatttttaatcataactttatcaggcctttgaaaagttcatgggtcccagacactgtgtgggtgagaccgtgaatcacagtgacaggtaatgcagggtgactgtctgaggcctgagagtggggcccccctggtgatttctgcacaggact

SEQ ID NO: 27241 - DNA, 467 bp, Homo sapiens
  source 1..467: mol_type = other DNA
tacaccttttctgtaataatgtgtgtattgcacaaaaaaattccaatagtgattagtaacaaccagatactgtgacagtgccccattgccattccatgggagatgcaagagcattgtctcagtaataaaatatgatgttatcaggaaaaaaatgcaattgcttgagtcattttgaagttaaaaaaaaatcaaggtttgcattgtaaccacaaaccagtctttgtgaacaggaatcctgctgaaattttggaagttccgagctcacatctcgagactcaacttaaacatttttaatcaaaaagatgggaggggacaaggagcctcagccaatctgagcccggatgctaattagctgcgctcccctgatgaacatttgtacccctccctgatcaatgagggcttatttaaatgatctctgaggtcttggacccaggccaatcagctgtcagggctcatgataaatcgca

SEQ ID NO: 27242 - DNA, 472 bp, Homo sapiens
  source 1..472: mol_type = other DNA
ttaagtatacatgaatttacggtataaatgtgtatacatgtaatatatcatatacacacacaccatgtgtcaatgatacaatcactttgaacgatacaccttttctgtaataatgtgtgtattgcacaaaaaaattccaatagtgattagtaacaaccagatactgtgacagtgccccattgccattccatgggagatgcaagagcattgtctcagtaataaaatatgatgttatcaggaaaaaaatgcaattgcttgagtcattttgaagttaaaaaaaaatcaaggtttgcattgtaaccacaaaccagtctttgtgaacaggaatcctgctgaaattttggaagttccgagctcacatctcgagactcaacttaaacatttttaatcaaaaagatgggaggggacaaggagcctcagccaatctgagcccggatgctaattagctgcgctcccctgatgaacatttgta

SEQ ID NO: 27243 - DNA, 682 bp, Homo sapiens
  source 1..682: mol_type = other DNA
ctcagtatcagaattctaaactgcttctatgtattattaaagtcttacttgctttaaatattatacataaaataaggcaagactttttcagagactcaaaaattgaaggttaatcttccttcaacaagtttttactgatggccacgaatataaaaaagatgatcaagctgatttattttctgccttgggttgtccaaatacccaggtgaacacattgatgagcccagcattcatgagtttacaagctgggaacgtgatgaatagaccaatcaaagacttagcaggttgatgatttcatcattcatttaacatttattgagcatgtacattgtgtaaagcagttagccaaattaagtatacatgaatttacggtataaatgtgtatacatgtaatatatcatatacacacacaccatgtgtcaatgatacaatcactttgaacgatacaccttttctgtaataatgtgtgtattgcacaaaaaaattccaatagtgattagtaacaaccagatactgtgacagtgccccattgccattccatgggagatgcaagagcattgtctcagtaataaaatatgatgttatcaggaaaaaaatgcaattgcttgagtcattttgaagttaaaaaaaaatcaaggtttgcattgtaaccacaaaccagtctttgtgaacaggaatcctg

SEQ ID NO: 27244 - DNA, 266 bp, Homo sapiens
  source 1..266: mol_type = other DNA
caataaatagactctcatcatggatccattgtacttacacaaattcagctacatacatgcattcggtgaacccctcccagctactcgctactgcactccagcctgagagaaaacacacaatcatttggagaactttcaccttttcagaatgtatttggtaaatttctgagtccaaggtctcagacccagaaacattctgcagcccgggagtcatgctccgtgtagtaatagatgtggacagctagaggcctcggaggcacatcctt

SEQ ID NO: 27245 - DNA, 654 bp, Homo sapiens
  source 1..654: mol_type = other DNA
gattagattaggccaagcatggcctccctggtgtgaatttgaatgctgaccttcagaagcaggactcgaggcagcagagaggtcactgtcctcagagtgtggacgccgactgaagcagaaacgctagggtgggcccaacagcgtgtgttctaacaagcctttcaggcggctcctggagcaggggtccctccgcgctacgaccccccctagcggggcaagggacccgcccagcgctttgctgatttgcccagcgctcacgcccaacctgggtttctccggagctcgccgcgccccgcgcacccaccccgcaacggcagccgcacgtgggtctccccgcaaaccacccaggcgtcccgggagcagcgctgctgcacggccgcgctgggggcccaacgcctggggttgcaggtgcaaaaggcgccccgagccggggaggccaatcgcgtccgcggagaacgcagagtgcgggcaggggcgcatccctcgccacccgcggtcgcccagcacgccgggacgcgcgtggccatccagctccccgggggcgttggggggctccgcgggcctgggcctcgggattcgcccgccgcttccccggggagccgctgctgcaaagccaggttggggcgccgggcccggccagcgccctctaggcag

SEQ ID NO: 27246 - DNA, 487 bp, Homo sapiens
  source 1..487: mol_type = other DNA
agttaattcttctccaggagtgaaaattagcttctaaaccttttattaaaaaaatgagagggcccattttctgatgaaactgttgaggattttattttaaatctatacattcacaaaggagacagatttgtttgtatatgaaacaaattttaaattgttttgtatacactggatttaaaatagtttactaaagtgttttaattttttcatcttaattttttgatggcatccacatgtgcattttagtggcatttaaaatgtattcagctgaatttaacaatttctgacctaaaacttgacattttagatttaagtcggtaaagcactgatttaaactggattttaactggatgaaattctgatttaataagtgtactgactggataaaatgccaatgatttaattaattaacaggatgccctatatattagttaaaagtgaagcaattgaattaggtaccttctctgctgcgtggaaaagaccgtat

SEQ ID NO: 27247 - DNA, 325 bp, Homo sapiens
  source 1..325: mol_type = other DNA
agaaaactgtctataacctgtgtgacactcactgatcagctcactgggcctctgtgtctccagaataggcacatagtagatgctcatggagatcctcaccctgctggtcagccaacctggcccgccccttccgcctcccggaggggtgtccccgcgcccggtgggcacgccctcgccccggcggagagggcgcacagaggggcctgggccggcgcgccggggcccccgcccccagcccctctcccctgcggtaggctcccgctgcctggcgctctgcggctggggagtaaatttctccctgtcatcaggtcgcggggagaggagg

SEQ ID NO: 27248 - DNA, 394 bp, Homo sapiens
  source 1..394: mol_type = other DNA
aagtcataggtactaaaaaagaaacttctggtctaggactttgaatcttttgactgttaataatcaagaaagctgtattttctttcgtttaaaaaatagagacgcaatccagctactagactgcagtgagccgagatcatgccactgcactgtagcttctgtccaaagtagaagctgtattttcaagttggttcagtatatacaggcatccataaagtctagaaacaaagaatctacgtcattacaaacatcttcaatttgtaaaaattagaatacatataataggatagagtataatagaataaattaaacaacactgtgtctccagactttatgaaaatctgaactccagctgctaattaaggaatgtggaacccttctttctgagtcagct

SEQ ID NO: 27249 - DNA, 650 bp, Homo sapiens
  source 1..650: mol_type = other DNA
taatttacagctgtaaccctagtgcccagcccagcaacaggtgcagagctgtgctcacagtcatacactgcataatgataccttagtcaatgatggaccacatatacttagtggtcacatgacattataatactatgtatttactggactttcgatatgtttaggtacacaaatacttaggttataccatacagcctaggagtgtagtaggctatacttgttcatacaaccatgaaatcatctaatgatgcatttctcagaacattttctcgcccttaagtgacacatgaccatatgtgctaagtgaaagcatgaatatatacccaagtaagtatataattacaagcgttttaataggggaattaatttagtttgagaatcagaaaaaaatattattatttcaattaccctcattctaaaatcctaatagctgtgactttaactaaaagagaaaaaaatgctatctacactgaatacacttttcatgatgataaatattttcccctagcaatgaaatgcaactgaaaattatgactgcatttaactttaattctgttgaatacatgtcctttctatttcccaaaataaatataagcaatgatatagtttggttgtgtctctacgtaaatagagtctcgcgagatctgatg

SEQ ID NO: 27250 - DNA, 432 bp, Homo sapiens
  source 1..432: mol_type = other DNA
ttatatatatagcctggtgcttgacaagtatgaataaaaccacaataattattggtttctcttcctttcttgcattggctgttaggaagctcaaaaatcaacaagagcatttatttttgatcctgttctaaataatctattgtatatgtccttgtaagacactttaaacaacatccttgcttgaattaaataaattgcatagcctgtcgaatttctggcctgcaaagaaaaacaggttacctgatttctggtgtccaaaccgtgttctgaagtcagcagacagaactacaaaaactggggaaggaaactgcttccccaggtcaacccggcagcctctgggagggcagccccacatcaggaagagaaccgggaggactccacccaggcttgtgtttgccctgctctgtgtattcagccagcaggctctgcaca

SEQ ID NO: 27251 - DNA, 488 bp, Homo sapiens
  source 1..488: mol_type = other DNA
ctgggggtatctggctccccgggaggcgcccgggctccccggggccctggcagacgccggcagcttttctgggcccgcactcggggacctcgcccgcccggcatcgcgattgtgcaagcgccgggcggcaaccacggccgccgctgccggctcctgcccgccgggggagggcggggaggcgcgttcgaagcacacccggtgaactccgggcttcgcatgacttcctgggggttatctccggggtggagtctgccgcccccaccccacccccctgggtcccgcgtccctcggagtctggccagccgggggccactccgccctcctctgcgtgctcattggccacccaggggctctgtctccataaatgcatggtccctgggcataggaacatggagaccctagaggtcagccttgcggaccaacaggaggacctcttccagcccctgcggccagtgcaaggaggtggtgcagcgtcgagcatcctcgcc

SEQ ID NO: 27252 - DNA, 413 bp, Homo sapiens
  source 1..413: mol_type = other DNA
atttttgtcttagaaaatatagttatttttaaagtgtgatttttattaccatggaatggagttttatattattttaaatgaattaataaatacattttaaaaattctgctttaatttctaatacagcaaatatcgataaataaaaagttctttggagtcctcagtaatttccaggagtatagaatatacagtaattgttcagtaatattgctgtaaattaattaataggattgtgtggtccatatacaccatgacaaaatcatgtcctttgcagcaacatggatgcagctggtcacttatgagtaatttaaattaaaaaaaaattacattaaaagatagaggtaggttagctggagaaatcctgccccagctgggccccgccgcgctgagccttgggcgcgccccctgctgcc

SEQ ID NO: 27253 - DNA, 470 bp, Homo sapiens
  source 1..470: mol_type = other DNA
ttcaagcatcgttgaagaagtaacaacagcaactaacttttattgactgttgactatagacaatacgtgcattaattcatttaatctgctcttgcccccacctgggggtatctggctccccgggaggcgcccgggctccccggggccctggcagacgccggcagcttttctgggcccgcactcggggacctcgcccgcccggcatcgcgattgtgcaagcgccgggcggcaaccacggccgccgctgccggctcctgcccgccgggggagggcggggaggcgcgttcgaagcacacccggtgaactccgggcttcgcatgacttcctgggggttatctccggggtggagtctgccgcccccaccccacccccctgggtcccgcgtccctcggagtctggccagccgggggccactccgccctcctctgcgtgctcattggccacccaggggctctgtctccataaatgca

SEQ ID NO: 27254 - DNA, 341 bp, Homo sapiens
  source 1..341: mol_type = other DNA
atacagtaattgttcagtaatattgctgtaaattaattaataggattgtgtggtccatatacaccatgacaaaatcatgtcctttgcagcaacatggatgcagctggtcacttatgagtaatttaaattaaaaaaaaattacattaaaagatagaggtaggttagctggagaaatcctgccccagctgggccccgccgcgctgagccttgggcgcgccccctgctgcccgcggccggagccgttcgccacacctggcatgtcgtcccagccgtttggactcactggccaaaaggccgaccgggagcgagagaacgctcgggggcgaagcgcgccattgcgg

SEQ ID NO: 27255 - DNA, 269 bp, Homo sapiens
  source 1..269: mol_type = other DNA
agcacactggtgctcaatgatctcataatggcaatgagagctctaatgaatgagtcaatccatgcaaaaggcttggagtgcctggcacctaggtggccatcttgaacagtgatgaggccaagtctcagccccctgggaaacacattccggcgggatgccccttctcggggaaatcctggcgggggcacgctccgggtccgccaggaggggggagcgttccagggcggctgctcacgggtggccgcagcccagtgctgggactcgcgcgg

SEQ ID NO: 27256 - DNA, 336 bp, Homo sapiens
  source 1..336: mol_type = other DNA
atctcataatggcaatgagagctctaatgaatgagtcaatccatgcaaaaggcttggagtgcctggcacctaggtggccatcttgaacagtgatgaggccaagtctcagccccctgggaaacacattccggcgggatgccccttctcggggaaatcctggcgggggcacgctccgggtccgccaggaggggggagcgttccagggcggctgctcacgggtggccgcagcccagtgctgggactcgcgcggttcttctcctccttctcggccgggaggaggcagggctggatccctcagccgccgccgctcctcctcctggcaggccggccgcggag

SEQ ID NO: 27257 - DNA, 332 bp, Homo sapiens
  source 1..332: mol_type = other DNA
acagttggcaatgcccggcccttctgaaggaagtcatgagggcgtccttcactcaggaaggaatgggagccgtccatcccattaggaatacgtgtctgccctctggcagctgtggggaaggggcgccatgaccccacagcatcacagaggatgggggtggggaggaccttagttaacgccgcgcccccctctcagagagggttagtgactcggccaagttcacgcagccgggtccaggcagaagaggaagaaggcgcgcccctgcggcttctgaggctcatcttcccggagcggaaggaaggaatcaggcgtccgccccaaggcttccctga

SEQ ID NO: 27258 - DNA, 416 bp, Homo sapiens
  source 1..416: mol_type = other DNA
cctaattgttgactaatatttataagatctctacaaacattggagtgtatgtctaacttttcaagaaactgaggactttttattaaacatgtactaatatcaattctcatatttattttcttctttggagctaacacgtaaacatatctataattttttttcagatttcacccatttctgcagggagaacctgcacccacccccaaaggggcggggctggtgggcggagaggaggcggggcgcgctccttcagccccgcccaccagccctggactccggctcccgaggagcggagctagcgggggggatgtgcacaggcctcctcagtcccgcccagcgcgcgcgcgcggcggcgaagccggcgggcggggccggggagggccctcgccgggtcagctccgcccaccctccccggc

SEQ ID NO: 27259 - DNA, 417 bp, Homo sapiens
  source 1..417: mol_type = other DNA
gtgtacatacacacacacacacacacatatgtgtgtgtatatatatgtatatgtgtgtgtgtgtgtatatatatatatattttaagtggcccaccctgcgccgcgaccatctggatgcaagtaccagctggtccgtaccgctccgagcgcacgttcactgcgcacgctgaaagggcgccaagccgaccgctgcgctatcgatcggggactttatctccaatgcgtcaagcttgacgtcaaggcaccctggggctgggactgccacaggtctggctggccgttagggagcaagtgcgcctgcgcgcggtgtgcgcccttaaacgcgactcaaggcgtcgggtttgttgtcaaccaatcacaaggcagcctcgctcgagcgcaggccaatcggctttctagctagagggtttaactcct

SEQ ID NO: 27260 - DNA, 314 bp, Homo sapiens
  source 1..314: mol_type = other DNA
attcgtcttatgtgaatttaactcttacacccgggtgtacatacacacacacacacacacatatgtgtgtgtatatatatgtatatgtgtgtgtgtgtgtatatatatatatattttaagtggcccaccctgcgccgcgaccatctggatgcaagtaccagctggtccgtaccgctccgagcgcacgttcactgcgcacgctgaaagggcgccaagccgaccgctgcgctatcgatcggggactttatctccaatgcgtcaagcttgacgtcaaggcaccctggggctgggactgccacaggtctggctggccg

SEQ ID NO: 27261 - DNA, 376 bp, Homo sapiens
  source 1..376: mol_type = other DNA
tgaataagaatcatctttgttaatagagattctgatttaccgggctctcggaagggccttcttaggctattctatctaaagcggcccagagaccttctgtgcttttcttacccaggtgatctcgcgcctcggtgcccaggagcggatggcgctgggcccacggaggaaccgacaggggacttgacgctccgccactccttccaagagctcagccgttagaattcaaaggttcttctttttaaataggagttaaaccctctagctagaaagccgattggcctgcgctcgagcgaggctgccttgtgattggttgacaacaaacccgacgccttgagtcgcgtttaagggcgcacaccgcgcgcaggcgcacttgctc

SEQ ID NO: 27262 - DNA, 463 bp, Homo sapiens
  source 1..463: mol_type = other DNA
aagggccttcttaggctattctatctaaagcggcccagagaccttctgtgcttttcttacccaggtgatctcgcgcctcggtgcccaggagcggatggcgctgggcccacggaggaaccgacaggggacttgacgctccgccactccttccaagagctcagccgttagaattcaaaggttcttctttttaaataggagttaaaccctctagctagaaagccgattggcctgcgctcgagcgaggctgccttgtgattggttgacaacaaacccgacgccttgagtcgcgtttaagggcgcacaccgcgcgcaggcgcacttgctccctaacggccagccagacctgtggcagtcccagccccagggtgccttgacgtcaagcttgacgcattggagataaagtccccgatcgatagcgcagcggtcggcttggcgccctttcagcgtgcgcagtgaacgtgcg

SEQ ID NO: 27263 - DNA, 313 bp, Homo sapiens
  source 1..313: mol_type = other DNA
aaatttaaaaataaaaaattaaaaatcggtaagctatcccccacagctggttgggggggcaccattttgtctaaataaaaatgcaggccggggccaggcgttagaccagcctggccaacatggtgaagtcctgtctctcccagctggcagtgagccgcgccactgcgctctcaaaaaaaaaaaaaaatgcagacttattttgctcagctctctagagattggatctggctcagcatagccctcagactgtgtcctttaaggcagcctgtttgactgcttttatcctggctgtcataaggctgaccgctatcag

SEQ ID NO: 27264 - DNA, 320 bp, Homo sapiens
  source 1..320: mol_type = other DNA
agaccagcctggccaacatggtgaagtcctgtctctcccagctggcagtgagccgcgccactgcgctctcaaaaaaaaaaaaaaatgcagacttattttgctcagctctctagagattggatctggctcagcatagccctcagactgtgtcctttaaggcagcctgtttgactgcttttatcctggctgtcataaggctgaccgctatcagtcaaaggacaagaatgctgtgtgttcatacactgagctcttcgaataaagcagaagagtggtgttttttttctcacatagcaaatgagtgacagtctctacttacagac

SEQ ID NO: 27265 - DNA, 317 bp, Homo sapiens
  source 1..317: mol_type = other DNA
gcagtgagccgcgccactgcgctctcaaaaaaaaaaaaaaatgcagacttattttgctcagctctctagagattggatctggctcagcatagccctcagactgtgtcctttaaggcagcctgtttgactgcttttatcctggctgtcataaggctgaccgctatcagtcaaaggacaagaatgctgtgtgttcatacactgagctcttcgaataaagcagaagagtggtgttttttttctcacatagcaaatgagtgacagtctctacttacagaccattgcacaatctgcctctgaagctggagatactagctgca

SEQ ID NO: 27266 - DNA, 525 bp, Homo sapiens
  source 1..525: mol_type = other DNA
cctgaattcctgggctcaggcaatccttcctaccccctcagcctccggagccgctaggactacacatgttgtccaggctgacctggaactcctgggctcgattataggcactttcccataatatttataataattaaaggaacaacaatcatgaatttttagcaagggatttgtgttcttatagataaaatacaatcagtgtatattttataagaactattatatcgtctattaatgatacttgattgttaataaaatttttttagcctgggtatgcaaaatttcacacacatgccatcatgttccaggccttaagggagggtcttacttcctagaatctgttgtaacatcacttcacaagatttgttgtgagtgcttagaaacaggagggcggcccttttcctgcccgctccgcagccacacaagctgaagagcggtggatgcgcacgggccgcccacgccctcgctgccctcccggagcgtgggcgagtgattccgattgtgcagcagaaacccagggtctcg

SEQ ID NO: 27267 - DNA, 586 bp, Homo sapiens
  source 1..586: mol_type = other DNA
catgttgtccaggctgacctggaactcctgggctcgattataggcactttcccataatatttataataattaaaggaacaacaatcatgaatttttagcaagggatttgtgttcttatagataaaatacaatcagtgtatattttataagaactattatatcgtctattaatgatacttgattgttaataaaatttttttagcctgggtatgcaaaatttcacacacatgccatcatgttccaggccttaagggagggtcttacttcctagaatctgttgtaacatcacttcacaagatttgttgtgagtgcttagaaacaggagggcggcccttttcctgcccgctccgcagccacacaagctgaagagcggtggatgcgcacgggccgcccacgccctcgctgccctcccggagcgtgggcgagtgattccgattgtgcagcagaaacccagggtctcggcacttggtaacggcctcgccctgccccgctacgccgcgcctagcgtgccgccccgccccgccccgctacgccacgaccagcgtgctgcgtcacggcggtgcgccggaagtggctgcggatttcg

SEQ ID NO: 27268 - DNA, 269 bp, Homo sapiens
  source 1..269: mol_type = other DNA
gtatactcttaacccagggtgggcacacactgctacgattttaaatccccaatatttaagtactgacaatttttaaaaacaacaggacctaaggtgagctaagatcattgcactccagtccccaaaaaaaaacaaaaacaaattttttgtttgtttagtttgagccacataggtggctccaaatttgtagggaaagagtcccctggcagggaattggcacccccaatggccagagtggcctcagctcagggcctctgtgacatcaccaa

SEQ ID NO: 27269 - DNA, 169 bp, Homo sapiens
  source 1..169: mol_type = other DNA
acaggcgtgagctgccgcgcccggccacgctctagtactgactaataatttttagaaacaacgtgtttggatcaaactggcagggaattggcaccccacaatggccagggtggcctcagctcagggcctctgtgacatcaccaagggcctggcaccaggtgcccagtct

SEQ ID NO: 27270 - DNA, 388 bp, Homo sapiens
  source 1..388: mol_type = other DNA
aaaataaataaataaataaataaataaataaataaataaaataaaccagcaggtgggtggataagttttcaactcacctcgatgagaagcagcttctgtacaagtctgatttcggtagagtcaaccatcagcactttctttaaggcaaattagcatgtaatgtgcaacagctgacatgaaggctgagaattcccagaaatgttaatacttttggtcttagaaactaactaaagtaggctacatttaaaataatttctgactgaattgtcatatacatatgtaaagataatttaaaaccctagggtatacccttttcaaatgcagagtttatagtgggaggagtaaccaggacctttcctgccagtcttctcccgttaattaaataaac

SEQ ID NO: 27271 - DNA, 586 bp, Homo sapiens
  source 1..586: mol_type = other DNA
agtcgagagctctctgggcgagtagaggcttctgagtgaccggcccgccagaggcagctgcagagccggcgttccgcagggcagggcagggccgggccgctgggctggtccagtgcgcgcgggttccccctggcctcagccagccgcgggagatgccacttcgggcgacagcggcgagacgccgctgtccgcaactcctgggcgggtaggaccgtctgctgcctctgcggcccttggggcagactccccaggagtcccttcctctctcctcccgcccgggggccgggaccgcgctgtgcccacggagggaactgggcgtctctggcgcactggggctccagctgcatgatcccagctcagaccttaagcctcagtgggagtcgctccccaaatgcgcagtttcttacccaggcctcgcaggtcttcggcaacgaggcaccgcccactgactccgcgcttcgtccctcacagcgtggggctcggcgctgcgccaggcccgggtgcggggcggagctaggctgggactggctgggggccgccccgcccggcgcctgggcctccgcgccggcccccggggaggagttat

SEQ ID NO: 27272 - DNA, 453 bp, Homo sapiens
  source 1..453: mol_type = other DNA
ggtccgcagcccacccgtcctgctcgggccgccttcctggtccggaccgcgagtgccgagagggcagggccggctccgtcgagcgctctagaagggcaggtgggaggccgccggcgcgggaggggcccctcgaagcccgtcctcctcctcctcggccccagcgcgtaccactctggcgctcccgaggcggcctcttgtgcgatccagggcgcacaaggctgggagagcgccccggggcccctgctatccgcgccggaggggttgccgccgcccgagggcgagagcgccagaggagcgggaagaaggagcgctcgcccgcccgcctgcctcctcgctgctttccaagccctgcggtgcgcccgggcgagtgcggggcgaggggcccggggccagcaccgagcagggggcgggggtccgggcagagcgcggccggccggggaggggccatgtctg

SEQ ID NO: 27273 - DNA, 276 bp, Homo sapiens
  source 1..276: mol_type = other DNA
ctggctccccaggcactgccacgaggagggctgatgggaagccctagtgctcaacgtgactgcgcagctacagtgtggcgggtaccagaggtgcggagaagatcgctgatccgggccccagtgggtccgcagcccacccgtcctgctcgggccgccttcctggtccggaccgcgagtgccgagagggcagggccggctccgtcgagcgctctagaagggcaggtgggaggccgccggcgcgggaggggcccctcgaagcccgtcctcctcctcctc

SEQ ID NO: 27274 - DNA, 513 bp, Homo sapiens
  source 1..513: mol_type = other DNA
aataaatatgtgagacctttcacttaaaaaaaaaaagaactatttttttttttttgagaagggtgctccctagtagctgggactacgggtgagggctacaaaataactttttagtaaaagtatatcccaaactttatacgagacgtagttactctaaaaaaaaaaaaggatttgctgtttatctgaaattctaatttaacgctgggattttaacccaggcctgcctgctctgagctgacctttcctggcacctgcaaaattagcacgttaggaacttcctggggtattgcgttcacctcaatcacagctgaacccggatcttcatcattatgtgttttaatgaaaaatcgctgacagccacgcagggccgatgcctgcgcgacccacactcagggaggcgcccgcctcagggcctcacaggtgggaccgcgcctgagagccctgcgcttgcgcactccacgccgtgcccccgcctctgggtgtgtggcgtgggcacgccggccgctcagaaag

SEQ ID NO: 27275 - DNA, 549 bp, Homo sapiens
  source 1..549: mol_type = other DNA
cagcccaccgctgcactgtgggaccccgtttctgggctggccaaggccgaagcccgctccctcagcttgcagggaggggtggagggagaggcgcgagcgggaaccggggctgcgcgcggcgcttgcgggccagctggagttccgggtgggcgtgggcttggcgggccccgcactcggagcagccggccggccctgctggcccctggcaatgaggggcttggcacccgggccagcggctgcgaagggtgtactgggtcccccagcagtgccagcccaccagcgctgagctgccttcccgcagggcagggctcgggacctgcagcctgccatgcctgagcctctgcccgagcctccccgacgcgagtgccacccccgctccacggcgcccagtcccacggaccacccaagggctgaggagcgcgagcgcacggcctgggactggtgggcagctccacctgcagccccggtgcgggatccactgggtgaagccagctgggctcctactctgcttggagaatctccctgtgtctagctcagggtttctgggct

SEQ ID NO: 27276 - DNA, 326 bp, Homo sapiens
  source 1..326: mol_type = other DNA
taacatttctacagacagttctattagtaagagtagtgaaactgaggcccaaagagccccgaggtgggctcagggtaccccagtgggcaaacagggagaggccagggcgggaaacccgcggccgacctcgccttgttcggttagagcagagcaatcagaatcttttagatgtttatacatgataaatgcaataattaattcacaagtccagactggagtgcaatggcctgaccccaggtgatcagcccgcctcggccgcctggccagtgctacaattcgcaaactgctgcgggaaaaggagcctttttcttcgacgcaggaagtgg

SEQ ID NO: 27277 - DNA, 355 bp, Homo sapiens
  source 1..355: mol_type = other DNA
agcaatcagaatcttttagatgtttatacatgataaatgcaataattaattcacaagtccagactggagtgcaatggcctgaccccaggtgatcagcccgcctcggccgcctggccagtgctacaattcgcaaactgctgcgggaaaaggagcctttttcttcgacgcaggaagtggctccagggcgcacgcgcgttgtttccagagcaggttcgcagctcccggccgccgctttccgccggggcgagacccccaggtaggccccgtgccgcgcgcgtcccgtcgttaaccgccgccatggctcccgcagaggccgagttgcctcccgggagcgcgcttctgcgggatgctgggg

SEQ ID NO: 27278 - DNA, 680 bp, Homo sapiens
  source 1..680: mol_type = other DNA
aggtccgggatcccggggtctgtgcagtcacacggcccttcccttcgctcaggaaagcccggggctgagtttcatgctcaaccgctgccaacttgaaattcctagcgaataggggcccccgctggtgtgaagctcacagagccccactatgcgccgccctgggggccggatgagggacccgggtctgctcttactcgccgggtggagctggaaagagcccacacctgctctcccgcggggcctctgagaccgcccgggacccgctcggcaccggtcctggacgctccgtggggccagggaatatgatctgtgctccgctgcagcctcgcatcttacatataaaacagaaatcatttcccttttttaatatggcattaacaagatgctaaaaaccgtttacgtttttttacgttttttacgccacgagggaaggggcctggcctgcctgcaaccggccgggcccgcgggggcagccaggagagaaaggcgcgcccagcgcccccaggcccggatccgccctcagcccgcgtgcgccctcccccctccccccaatcgccgcgcgcccgggtgcggctgggcggggttagaactacgcttcccggcggtccccgcgcgcccggggcggggcggggccggctgggggcggggctgagctggcgggggcggcaggctacaaagcc

SEQ ID NO: 27279 - DNA, 70 bp, Homo sapiens
  source 1..70: mol_type = other DNA
ccccgcagggctcccagggccccctgcagaccgctcccagcgccccctgcggggcagtgccccctctggg

SEQ ID NO: 27280 - DNA, 462 bp, Homo sapiens
  source 1..462: mol_type = other DNA
gtgcagtgctcacggacacctcagctgaatgaaggccgtgcaggtggctggaccctggcacagtcccgagctgaggcagcctgactttcacactcgggcaggctccactggcagccagcctcctgtgtcccagccgggcttattaagaaaatgattttccatttttggtaacagtagagttttcttttaaaattatttaagtaaatttggggagcaaatgctggatttgatgggaaaccaggatccaattcaatttcccagagaacccgaggcctggcgcaagggaggagcccagggtccggccctcggccccaatcagggaatgcagctgccagaaaatgctggctttcatatgtcagggacaaaagggacccttttttctcccctttttttagcttttataaagacaggctcgctgacttagggggcagtttcccccatactgaagtctcatgagatctg

SEQ ID NO: 27281 - DNA, 350 bp, Homo sapiens
  source 1..350: mol_type = other DNA
gacttgcagggaagcagtggccagtggactgcaggagtaactgcactcagcccagaactccctggaggacacagggaaggttctcctcagccggctgtgagtggctaatcttagaacagtgctcagcatatttccaatctttgccaataagccacatatttgcccaagttagggtgctttgccaaccagcagctcttggtacacaaaatgtgctgctagcaggtgccccggccaaccttgtccttgacccacctgcctgttaagaaaagggtgtaattagtcagttggaagttctggttcagcattcattaacagtgagttggcccctgacgtcagtggcgagcctccct

SEQ ID NO: 27282 - DNA, 381 bp, Homo sapiens
  source 1..381: mol_type = other DNA
cgcataataggtgttcattagtagcacctgtagtccccctacaggaaccagcggggccgggcgtgggggcttgcggctggaatcccagcaccccagctactagtcgaggctgccgtgagccgtgatcacgccactgcactccagcctgggagtgatgccacgccctggcatattttcttcagttctctgatgctgattcagaaaataaaaactcaaaggcctcttcggaggacgctctgtccaagttccactttttttttctttcaaaagacgaacagagaagtttcattttctttttctcctgaaaccgaatctggccggcctggctaggcatctatttccgggctgtaagcagctgacacctgcccagtggaagctggc

SEQ ID NO: 27283 - DNA, 551 bp, Homo sapiens
  source 1..551: mol_type = other DNA
tgtaatattttaatatctttttaaacctgaagaatgtgttcttgtagcactcctgtaattaaaacttaatgaaccagccgcgccccccagccggaggccccttgggcagcagacaatgggtgtggattcgccccaggtcccgccggctggggcggcgacaatacaccagtccccgacagctatttcagtgggccatgatccccgagctgctgccagggacctagccccaagagcctgggtcaaggaccccagggacgggggcgaggggagggcgcaccagcaacccgcccgggtgcggctggcaccgagttcggctccccggccccgggcgtgcgccgggcaggcgttccaagctgaccgccgttggggagagggcacagcgcccctcctccgttgcgcgggtgccgggtctacgtgggccgcctagctctggccccccgccccgtttcccgtcaccccgccccccggctcggggagggggtgcgggggaacctcggcggggattggcgcagcgcgcgccccctccccggcccccgcgcggtgggaaccgg

SEQ ID NO: 27284 - DNA, 449 bp, Homo sapiens
  source 1..449: mol_type = other DNA
caaagagcttggaccagcctgagccacatccctgggcttgacttctccagaacaagcctcctggtctttctgggagagctctggcagcatcactgtgcctgtgcagggagagcgggaacccacttcctgcacactgttacaaacacagtaacaataatttttaaaagctttttttttctctctaattactgaaactccaggcattacaggaatatgggggaggcagctccccagggtcctgggttggcacacaggactgagtcggtgtaatattttaatatctttttaaacctgaagaatgtgttcttgtagcactcctgtaattaaaacttaatgaaccagccgcgccccccagccggaggccccttgggcagcagacaatgggtgtggattcgccccaggtcccgccggctggggcggcgacaatacaccagtccccgacagctatt

SEQ ID NO: 27285 - DNA, 196 bp, Homo sapiens
  source 1..196: mol_type = other DNA
acatcgtgtagatgatccccttgctgttgtctcagagcccccagcgatagagtgattacgaatttcattctccaaagacatgtgcagtaatattttagcagcacttttgtggtggccaaaaagaccctgggggcgagcgttcgtaggtgtgcatacttccactttaaactttctccgagtcctgcgttgcctggca

SEQ ID NO: 27286 - DNA, 442 bp, Homo sapiens
  source 1..442: mol_type = other DNA
tgatttcaaggcttgcctgccacccagggtgccaccagagtcccagtgcctgggttgggggctggagcgcaccctttgggatcccccagcctgtcctcgcttctgagctgccaccctcagctgactcactcagatgagatttgggagggagaacccgcctggtcgggtccgcctccagacagaggccggggtccaggagtagctggaagacctgcccaggactggcggggcttagaggaactccccgccccgcttgcccttccagggaacggcctggctaggggtgcgctttgacgcaaggagcgcatcgctctgccttggccgggaccagagcttgggggaggcctccttgcccactgcgaagactttggggaaggcgacggcaccagggggctgtgcgcgctgcgcgggtgtgcgcgcctcgccgggggctgtctccacc

SEQ ID NO: 27287 - DNA, 584 bp, Homo sapiens
  source 1..584: mol_type = other DNA
gagggaagtcacccacctcccaggtggcggaccccccgcccgcccagggtcgactctccgcccatcccacggcagctgcaggcgcaggaagcccccgagggaagggaagggctcccaccctcagcccgccccgcccagggaggagggaccgccaccagtggggggtcccgctgttctggtcccgacaaggagtgcctcttactcgagaggggacggggtcgggcaggggcccctcggcctcgcggggtggtcacggggcgagagagagaggggcacccctggcatcccccgagcccagccccactcacccgccatcttgggatgggcatggaggcgggaccggcaggggcggggccctgcagacaggggcggggccctgcagacaggggcggggccctgcagacaggggcggggccctgcagacaggggcggggccctgcagacaggggcggggccctgcagacaggggcggggccctgcagacaggggcggggccctgcagacaggggcggggccgtcggcttcgggccccgcccccgatccgcgccggccggccggccccgccctctcagcgaaggtggctg

SEQ ID NO: 27288 - DNA, 665 bp, Homo sapiens
  source 1..665: mol_type = other DNA
agccattgctagcaatttgccacatttgtctcacctatatgggtatgtataggagactattaagaacacctatttaacttccatagtaaacataatataatgaaatacaatttaaacggtaaatttttaattatttaacttacgtgtgtggttatttattcaaaagatgtctcttcactaggctatagtaaaagtctgatcattgtatttctaaatatttgttgcataaacaaatagaatttactagtaaagaattcagtgatacaaaataaataagcaataattggtagtttattatatttataattattatttacaagacgtacattatacttatactaagtactttcactattattcaaagtctctaacagtgcctggcactacataagcaagagaaaagtggaagtttattctaattgttattattgaataaagcacttaacacccagcgggccggtggctgctggactacagaccccgcctcctgagcggcccgaagccccgccccttactgccccgcagtcccgcccccgtggcttgtgccgcgcctgcgcactgtcccggaaggggctctacgcgcgcagctttagtccccgcccctggagccggcggcgcagggcgcagcttcccgccgccagagcgggccagcctgctgcgtgcgt

SEQ ID NO: 27289 - DNA, 225 bp, Homo sapiens
  source 1..225: mol_type = other DNA
cccctgttcccctgtgggatgatcagcccacaactcgtgagtcccgggaaacaggcctggcccagttctccaaatgatttcaaggcttgcctgccacccagggtgccaccagagtcccagtgcctgggttgggggctggagcgcaccctttgggatcccccagcctgtcctcgcttctgagctgccaccctcagctgactcactcagatgagatttgggagggag

SEQ ID NO: 27290 - DNA, 304 bp, Homo sapiens
  source 1..304: mol_type = other DNA
gggacccatcatgatcccccatacagggggagcctgcctagggattcctggtagtaaagtcccagtttttcctggggccacactgaatctgctcttgacaaccaaaagagcataggtcaaaaaacctctgagtggcagcaggagaaagctgaacggttgtttatcattgtcaacccccacttggtgccagctcgactcccagcctctgggtctacaagctcagactgagcagctcagactgtgcaggaagcacagctcagtgactgatcctgaccacaggggccagagccaacgctgtgtgctg

SEQ ID NO: 27291 - DNA, 534 bp, Homo sapiens
  source 1..534: mol_type = other DNA
cgcaggggggttctgccgcagtgtggggacaaactctcccttagggcaaatatttcccggggcgctacgctaagcacgcaagtccctgcagcctccagcccggcccgcgcggcgacccagtccctgcgaagcgtccccgggcgagcgccctgctctccgcgctgcgcggaagccagagccggttgcacaacgaacgcgcgggaacattctccgtgagagaaaaagcacgggtggggggcggttaccggtgcttcccccggtcgcctgggggtcccgcacgcgccccgcgggtgccgctgtctggctggggtccctgggtgagccgcgggcaccggcttcgcgtctccccgggcgcgactccgctttgcaagcgctacacacacgtgtgtaaagtttgttcacgcagaaacaaaggacgcgtgggggccgcttctggggcctcggtcctttgttggaaccccgcaccgcagcccggcccgcagcctcgccccgcaaggggaagccggccctgcacaggcccggggcccggaaggc

SEQ ID NO: 27292 - DNA, 381 bp, Homo sapiens
  source 1..381: mol_type = other DNA
ttggttttgaagtttcttaaataaaaactagtgaaatatgttttgtaatataacacagataaaaggaaaagctttagtgggaactaaaaattttgttttaggttctactttataaatcattttgagaggttttacagtatattatttagtgaattccctccagccacaaggctgtaggcagcacgcgcgtgctcggcaagcgtcgggagctgctccccatgaccggactatgaggggctcctccaggtgggcgggcaggctcacttaggaaacaagcccaccgggagagattgccattctcgccagggctgccccctcctgtgccatagcaaggtctggaagaggcagcgcatgctctccctggacgttccgcggtgaagg

SEQ ID NO: 27293 - DNA, 735 bp, Homo sapiens
  source 1..735: mol_type = other DNA
ctcaagcctcccgggcggctccgggccggacccgggtctccgtcgcgggacgccagcctgtttgtgggtgccgtgctcgggcccgggcggcccctgcccgacgcggccccacggagcccctgcacgaaccccgccgacctggcccggggcggcaagtcgaggtgcttagggcgccctgggcccggccaaccgtggaaaacccggcccggggcacgggggggcgcgggggtcgcagggccagggcccaggcacggggaacttttccacgcagtgccccctacagaaagcggcagctggggagggcgggcgcccccgacgacccccgactgccagcggcggcgcggccaggctgcctggagatctttttccagagtgggaaaaaaagcgccgccgcctgcagtagagcgtgctcggcctgcagaggcagtgcgcccaaaacttcagttcttggggagcccaaatttgcctgccgcgcaactagcgaccaagggccctggcagcggtttgcagcctgggggccacgctccccaggctcaggcctgctcgttggcctgctcctagtgcctggacccagttgggggaggcgcagggcgcccgaggagcaccccgggagagggcggagcactcccgtgccccggggcaggagtgcagggagctcccgcgcccggaacgttgcgagcaaggcttgcgagcgtcgcaggggggcactcgcgagggaccacagcacggaaacgg

SEQ ID NO: 27294 - DNA, 531 bp, Homo sapiens
  source 1..531: mol_type = other DNA
ctcggcctgcagaggcgcgcccaaaacttcagttcttggggagcccaaatttgcctgccgcgcaactagcgaccaagggccctggcagcggtttgcagcctgggggccacgctccccaggctcaggcctgctcgttggcctgctcctagtgcctggacccagttgggggaggcgcagggcgcccgaggagcaccccgggagagggcggagcactcccgtgccccggggcaggagtgcagggagctcccgcgcccggaacgttgcgagcaaggcttgcgagcgtcgcaggggggcactcgcgagggaccacagcacggaaacggtccggggctgagctgcagtcgaaggccggggaggcaggccctgctgtcttcctgcaggccggcagcctgctggcagtggaggaccaggccgtccagtccccagaagggagctgcaggcgccctcgagtccaggccccaagcctggctccggttgtccaaagagggcctaggccaggcctctggtgcggaaactgagtcacagccagac

SEQ ID NO: 27295 - DNA, 438 bp, Homo sapiens
  source 1..438: mol_type = other DNA
ttccgcggtgaaggaactgtgcattcgctccaggaacacggaccgggaacaggcgacccgtgctgcaggggcacttgccacggcctgcaggaggaaaagccgggagaagcaggcccagctgcacccggaagcatgagcttagcagcaccaggatcatggggctcttccactcctggtgattgaattccgtgggattgattggagtcactgtttggggaaaatgacggccttttttccctcctctttttgtaggcagaacagtatcaaaagaagaatcggaagatgcttgtgattttaatattatgggtgtgaggggcttggcctgcgccccgccagctgcccgcagaggtgcagcctcgaggaatctgagggcgtcggggcagcgaacctttgcatccacggactcccattgttgagaatttaaggacctttgatact

SEQ ID NO: 27296 - DNA, 454 bp, Homo sapiens
  source 1..454: mol_type = other DNA
ttcaagctttttaaagtgctgagccttacaaacccctgaaggaaagtgaccctttaagagaggatcatctttttttatatttattttcaccaaatagggtgtttgttccctcaacccatttgggtaaaataacggatctgagacccagacttggttgcagtgagccgagatcacaccactgcactccagcctgggtgacagagcgaggctccgttcaaaaaaaaaaaaaaaaaattgttttagcgctgggtttcccaaggtgggagagacagacccagcctggagctggcccctggccagaaaagaatcatggtacctcagggtttctttccctttactcgctggcagccattgacccaggccagtctcctctgcctgggatgcgccctctgagaggaggcctagcagggcaggctccctctgggcatccctggatgcagcctctggacacatg

SEQ ID NO: 27297 - DNA, 473 bp, Homo sapiens
  source 1..473: mol_type = other DNA
ggtcttgaactcctgacctcaggagatctgcccgtcttggggaacaggcgtgagccaccacgcccggctggtgtccttgtatacaacttactttaaatggtacagggaaaaatatgtgtacatacatacatatacatatacacatatacatatacatatatacatacacacacatacacatatacgcatgtttgtgtatatagaggcatacctcacttatacatgtgtgtatgtgcgtatatattatctgtatatatatgtatgaatcagtttttcatcttttccaaaagttaatgaacttttcaaaaaagtttctagagaaatgtgttttcatggcaacgagttctcttgtctggtgccagttgcaaaaggcaacggaggccctccctgctgtgcaggcactcagccagctgctcagggaggtccttggagctgagcctgcctctgcttcctctgggctcacgagcaggtca

SEQ ID NO: 27298 - DNA, 388 bp, Homo sapiens
  source 1..388: mol_type = other DNA
ataaaaatttatctaaacaaagtgctgcctgtcttatttatgttaaagtctggaaagtactttcctggaatgtaaaaccagaatcaccaatatttgcttttaacattgtgtacactaagtgctcaacaaatgttggttgaattgaatcattttgttcatattcagtctattcttaaatatgaaagaattctaaaagttcagtttgcaaaattctatagagtgagccaggctcccacgtggaaggcgtatttgcaaacagaaaaaagatacacactgttagtaccctttaccaatgtgtgaaaacattcagctgctgtaaaatcttttgaagaaaataagatccaattagcgttgacggtttcaaaggaatgcctttcagtcattcaac

SEQ ID NO: 27299 - DNA, 574 bp, Homo sapiens
  source 1..574: mol_type = other DNA
tttttttttcatttttaggctggttatgaagaagaaactcaaaataagggtgggactaaggcgactgaggtgactcaggtcaccctgccagatgacccttcttgcaaaggggtgggcgggaaggccccccatgcagccaggcagtgcctggatttgtaactggccatcccagcagcagtgccctggatggaaagccacgtccctgtcaccctctcacatccagggcagtgcctggcagagcggggtctctcaggtccaagagtcactgggcccctccggcctaactgatgggtggccaggggtccctggggatcaaaagcagctgctaagggacctcgggggacctgcttggggccagcctgaggcctgaccgggcggaactgcgtcgggtgggcttgggcctacgtcggcccaggccccactggaggccaggcccgtccgggaggcgctgcctggcgggccacgtcgccccgcgtgttgggcagggccgctaggcccaggggcggcgccgctggaggccgggcgcgcgggccctactcggcagggcctgctcggggccggcttcgggcctgcc

SEQ ID NO: 27300 - DNA, 706 bp, Homo sapiens
  source 1..706: mol_type = other DNA
gggtgggactaaggcgactgaggtgactcaggtcaccctgccagatgacccttcttgcaaaggggtgggcgggaaggccccccatgcagccaggcagtgcctggatttgtaactggccatcccagcagcagtgccctggatggaaagccacgtccctgtcaccctctcacatccagggcagtgcctggcagagcggggtctctcaggtccaagagtcactgggcccctccggcctaactgatgggtggccaggggtccctggggatcaaaagcagctgctaagggacctcgggggacctgcttggggccagcctgaggcctgaccgggcggaactgcgtcgggtgggcttgggcctacgtcggcccaggccccactggaggccaggcccgtccgggaggcgctgcctggcgggccacgtcgccccgcgtgttgggcagggccgctaggcccaggggcggcgccgctggaggccgggcgcgcgggccctactcggcagggcctgctcggggccggcttcgggcctgcccggccgggcctgcccgcacccttccgcccggcctggccggcgccccctcgcgccccgggcgggccctgcacgtctcgcgagcagcccggagcggcgggggaggcggggcccgcgggctgccgggcagggccggggcggtgccgaggccgggccggagcggggcgaagggggccgagcgg

SEQ ID NO: 27301 - DNA, 845 bp, Homo sapiens
  source 1..845: mol_type = other DNA
actggccatcccagcagcagtgccctggatggaaagccacgtccctgtcaccctctcacatccagggcagtgcctggcagagcggggtctctcaggtccaagagtcactgggcccctccggcctaactgatgggtggccaggggtccctggggatcaaaagcagctgctaagggacctcgggggacctgcttggggccagcctgaggcctgaccgggcggaactgcgtcgggtgggcttgggcctacgtcggcccaggccccactggaggccaggcccgtccgggaggcgctgcctggcgggccacgtcgccccgcgtgttgggcagggccgctaggcccaggggcggcgccgctggaggccgggcgcgcgggccctactcggcagggcctgctcggggccggcttcgggcctgcccggccgggcctgcccgcacccttccgcccggcctggccggcgccccctcgcgccccgggcgggccctgcacgtctcgcgagcagcccggagcggcgggggaggcggggcccgcgggctgccgggcagggccggggcggtgccgaggccgggccggagcggggcgaagggggccgagcggcgggccgggccgggccgggcagggccggggcgtgggccggcaggagggctgcagttccaggcgagcgcgggggactcggacccacagagccggcccctgctgctgctcgggcagctgcaccacctgcaccgcgtgccctggagccacgtccgcgggaagctgcagccccgggtcaccgaggaggtgagcgggccgccggccgccatgcgacccgcgccgcggaagcccaggcccgggcggcccgcggagg

SEQ ID NO: 27302 - DNA, 698 bp, Homo sapiens
  source 1..698: mol_type = other DNA
gctgcagttccaggcgagcgcgggggactcggacccacagagccggcccctgctgctgctcgggcagctgcaccacctgcaccgcgtgccctggagccacgtccgcgggaagctgcagccccgggtcaccgaggaggtgagcgggccgccggccgccatgcgacccgcgccgcggaagcccaggcccgggcggcccgcggaggccccgcctcgcccgccgcacccccgccgccgccgggccgggcccaacgaggccgggccgcctccctgaagggctcagccgccaggccagtcctcgcccgcggaggcccagccccaggccccgtcgccggtgcggcgcggtggtcctcctgtcagcccagccctgcgccccgcgaggccgcgacacctgcggacggcggggggggagacgtggccgctcccagggccgcgcgtcggccccgcctggcgacaggccctggcttccagagcccccagcctggcccttccaggcttggtggcttcatcccaccagggggatgcgagccagagaggcgacacatctccccgggagctgcgcagtgcccttccaggactgcaggagtggttgtggccgtggctgcagggcagggcctcctggcacgtggccgctcaggctgccctgagaccgtggctgccctgccctgcagggtgagccggcacaacagcccgccgcccac

SEQ ID NO: 27303 - DNA, 586 bp, Homo sapiens
  source 1..586: mol_type = other DNA
ccccagcctggcccttccaggcttggtggcttcatcccaccagggggatgcgagccagagaggcgacacatctccccgggagctgcgcagtgcccttccaggactgcaggagtggttgtggccgtggctgcagggcagggcctcctggcacgtggccgctcaggctgccctgagaccgtggctgccctgccctgcagggtgagccggcacaacagcccgccgcccacttcatcacgcggctggtgcggacctgcctgccgcccggagcgcatcgctgcattgtggtgagtgcttcgagaggaggcagccacggtgctcctagtcgggcagcggtgagctcgggcctggggagctcacagccctgctcagactgcagcgcacgcccagagggctgtggacgttatcatccctgctctgtagacagggaaagggatttgccccagatcagttttggtggcaaatcagagactcaaacctagatttccgaccaatggtggtcccatggttccggagatgtcacctgccagggagcgttcaaagagcagctccctgcactccatgtgccacagatggtctgcgagcagcc

SEQ ID NO: 27304 - DNA, 412 bp, Homo sapiens
  source 1..412: mol_type = other DNA
gcgatgtgcttccgggcaggctcacaacaggctgctggcaggtctcagggcctcacaggccattagctggaggcagcaggtccttgctgtttgagccaccctccgagcaaggtctctactcccataggagtgatatctcatcgtgggggccacaggggccatcctggtggtgtctacctagacaggcacacattgttgctatgattgtttgactcaattattgcaccatatttcttgagaagatgtgtagtccctgagtgctcaaagtttctttctggaaaggatacaatatttttttcccttagtgggttttcttgcttaacaaacaacactttgcatagaatttgtttgcaatctcagacatctcccacactggccaggggcaggagaaggctcaggcaggcggctctcc

SEQ ID NO: 27305 - DNA, 546 bp, Homo sapiens
  source 1..546: mol_type = other DNA
ctccccagccccatgagctggtgcctgagtgggcgcctatctgccgggtgccaggcacagtgtgctgaatgggagagccaaatggctggtctctggctctccagagcagcgggccctttgctccaggcactgcattgctgtagggactgggggccgccttccggcagctccaaatggggtctccccagtttcaaagggatcccgtccctgagcggggatctctaccacaggctggtgctggcagatggcgtgcttgcaaggacctgggggccgacatcatcctggacatggccaccctgaccggggctcaggtgagtgctccctggatccaccccttagctgtagtccagggaaccccaccccactcttgacctcaaggtggggaaggcagcgcgtgggggcgccgtcaagcttggtgtccgaggcccaggctggatgcagagccgggaaccgcctcctgtgtgcttcatggcccgcccagggcattgccacagggaagtaccacgccgcggtgctcaccaacagcgctgagtgggaggccgcctg

SEQ ID NO: 27306 - DNA, 476 bp, Homo sapiens
  source 1..476: mol_type = other DNA
ccgaggcccaggctggatgcagagccgggaaccgcctcctgtgtgcttcatggcccgcccagggcattgccacagggaagtaccacgccgcggtgctcaccaacagcgctgagtgggaggccgcctgtgtggggacctggtgcacccgctggtctactgccccgagctgcacttcagcgagttcacctcagctgtggcggacatgaagggagcctcgaacctggagcctgccacatgggtggagccgggcaggcggagccctgccttcagggtgctggtgcacccagggagctggggccccccagaagcaccagacagcgtgggccactcactggcttcttcccccttggcctatggtgggggcagactccttagctcatgggtggagagggcccggccggagcaacccacaggcactgtgtcctcctggccgagacaacagccccagctcctgtgctggcagtctgggtccacct

SEQ ID NO: 27307 - DNA, 553 bp, Homo sapiens
  source 1..553: mol_type = other DNA
cctatggtgggggcagactccttagctcatgggtggagagggcccggccggagcaacccacaggcactgtgtcctcctggccgagacaacagccccagctcctgtgctggcagtctgggtccacctctcatcctccctgggaacagagtggctgctgtgtgcgcagccagggacccatccccaccctgaggagctcccggggtgaaggcagagcacacagggccttgccccctgcctacgcctggcctgccagccctgaacgtgtccagccagcagcatggaaggctctgggctccggctggtgctcaggatctccttcctgagaaggggactgcacgtggaggggacccaggaggtgaggggtccccaggaacccctcctgtgctgcagcccccagagtctgtgtcctgccctttgcttgcagggtgagcgagccacaggcttcggtgtggccctcctgctggcgctcttcggccgtgcctctgaggaccctctgctgaacctggtgtccccactgggctccaagagacgcaggcttgtgtgagcctcctgc

SEQ ID NO: 27308 - DNA, 506 bp, Homo sapiens
  source 1..506: mol_type = other DNA
agtgacccaagatcacatcagtgcactccagcttgggtgacagagcaagattctgtcgcaggaaagacttcgctcaatcgagctcagggcagtcctcagatgggcttgccaaactactacctcaaccgtgggggcccttgttgaagaaagccaattcagactgtttgagcacgtattgtttggaaacttttctaattacagtcactataacagatctgctaaaggtagtttcatgaagttaccatcctcaaactattaagccattggaaaatgctagaggcttaatactcgtgtatttccccaataactggggaaactggggaggggcacgaccccacgggagcctgcgcccacctgcccaagtactggacctggggctagcttgccgcttgctccttgccacccgccaggctgcgccacaggctcggcgccaccacgcagctcgcggggaggtggcccccacctccttactgcacatgcccggcagaagtccgggcgcgcaactt

SEQ ID NO: 27309 - DNA, 501 bp, Homo sapiens
  source 1..501: mol_type = other DNA
ctcggctcacctgggcacatggtgagccgcggacatttattgaatgaataaccatggtggcagcagatgacctagctatatcctagtgtgcggcgggacacttgagagttttgaaagaaccctcaaacaagttcacggagcccccagggcgcccaggcaaggccgccacctctcccacctgggaggccgctcctcggctcccgtgacaccggcgcgcctgctgcttcgagcagggctgacacctacctcggcgggcgcgcgccgctgggagggcggggtgcacagcaggggtaagcgccgccgtcgcacactggaggcggggttgagcgcccaccgccttgggcgcgcccgcgccccccgccatcgcggcccccgcgcccccggcccacgcccgcgcggtcccggcaccggcctgcacccccagggtgcgcggcggcccatttgggtgcgtcccgctgtcggtcctctgaagaggcgtcatcggggccggttagaagctct

SEQ ID NO: 27310 - DNA, 672 bp, Homo sapiens
  source 1..672: mol_type = other DNA
tggcggcccgggccgctcaaggctggcgcgctgagcgcccacctgcccctcgtgcgcagcccctcgtgggtgctcaacttcctgctgcagaagcgcacggagcagggccgcggctgcggcttcgtgtttacttgggcggccgcgccaagcgcagaggccgcgggcgctccggggccagaggcgccttcggctcgggccatggcgcccggcgccgggggcgcgaggagcggctcatctagtcagaccccccaccccgaccagacaccaccatcgctgtgtagtgtggggggcgcgcgcccctccccttccgcccaccccagcccctcggcggcgcccgcgggagggggaggaggcctcgggggcgccgggcgacgcggtccggtgcgaggggtcgtcactggcgcggagacgccccctctcccccctcggctcagccgggctgctgcccgagcccggggggtggggggcgtctccccggcccgtcccgtccccggccgggcgcgggcggagggaccccctccccgggctcccggggggccgcctccctccgccggctcccgccctcccagccgccgccgccgccgcggccgctcctcggcccgcctccccccgcccgccgcggcgcttttggctcggggcggcggcgggggcccggccgaggcaataagagcg

SEQ ID NO: 27311 - DNA, 428 bp, Homo sapiens
  source 1..428: mol_type = other DNA
ggtgaagcggttctcgtgactcagcctcttgagtagctgagactactggtctcgaactcctgacctcaggtgatccgcccgcctcggccaaagtgttgggattacagctggagtgcaatggtgcgatcttggctcactgcaagcgattctcctgcctcagtcacccgagtacctgggattacaggcgcatattacaggcgtttagtactttttaccaaaactaaaagaaattaaaggaaggctcgcagagccggcgccgcaggggaggggcttctccggagctaagcccctggtccacccgggcatcgctccgggatcgactgggggcggccgagcccgcggccctgccccttcttccaggccccgcctcccgcccgggccgaggcgcgcggccgcgcgtgcgcccgcccgcccgtccccgcctcgcg

SEQ ID NO: 27312 - DNA, 352 bp, Homo sapiens
  source 1..352: mol_type = other DNA
gtaggtgtggaatgcatttaggggtcagccctggcaggcccagtcctcacaccgacttgtgacgtggggatttcatttttcacgtgaaaaaggagatgggcccctgggtggcggagctgccactccgtccctcacaagaatcaaagcaaacagggcttctctctttttcctccttttattaacagaaaatggaggaccccagcagcctggatcctatgccccttgggcccagccccgtggtccctgcagcaaggcggtttgtggccaacaggggctcctttcaggagctgggccacagaaggccacggctgcccgcccgctctgagcatcactgctcttactgaggccctgc

SEQ ID NO: 27313 - DNA, 738 bp, Homo sapiens
  source 1..738: mol_type = other DNA
ggccacctcagcgcttccgggaatggtcatggaagcttctggaagtcaggaggcagccactgtgacttccccttgcccacgtggcacgcttggaatgtggtgagtgccacctgtgggccctgtgccaagggcccccagcaggggcctgtcaggtcgcagcccagaatgccgggccctgttcttacgtgggcccactaagaagagtttcgttagcagaaaaccttttcaaggcgtctttggaagtcacattggataactcctgatgcctgcgccaagtggaatcttcctttggggcattttctagaaggatccctccttccttctctgcaaaagggaaccgtccccccgaaagggcctgggcctttgggaaaaccttctttgggggcggtggccgcatcccaggatcccttcctaggggaggcctgggcccagatgtgaggctgggggcctctccccagggctcagggccccaggaatgcagggccaagggggcccatgagcctgcggccccccacccgccggacagtcccgcgctcagggcggcggccggcggcggggtcaggctggggtctgcccggcgacctcgcgcctggcccgcgagttcaggtgccccggagccagggagggagcggggcgcggagccgggcggggggcaggggtcaccgggcggggcaggagcagcgatgggacagccccgccccgggggagtgtcccggcctggccgccgcagccttaagg

SEQ ID NO: 27314 - DNA, 296 bp, Homo sapiens
  source 1..296: mol_type = other DNA
ctggctccccttccgagaagcttccaccttctgtcctccaggcggtggggaactgccaccctcctgggcaaggatacagaacagctgctttcaagctgctgagtacccagcctgctggctcactacaagccaccacacctgactaatatttgttaaagggaccctggctgggaagggtgctggggcacagcccagccctggcatggatagggcaggggtccaagacctgcaggacacagtgcctgatgcaggccatcccgggacctgggacctgcgaggcccagttgtggagcctc

SEQ ID NO: 27315 - DNA, 225 bp, Homo sapiens
  source 1..225: mol_type = other DNA
gctcactacaagccaccacacctgactaatatttgttaaagggaccctggctgggaagggtgctggggcacagcccagccctggcatggatagggcaggggtccaagacctgcaggacacagtgcctgatgcaggccatcccgggacctgggacctgcgaggcccagttgtggagcctcagcctgcaaacagtgccagcctccaggccctgtgccccgttggcca

SEQ ID NO: 27316 - DNA, 702 bp, Homo sapiens
  source 1..702: mol_type = other DNA
aactataaattttcattttccagtgcagttagttacctttttaaacataaatgcacaacaagcaaatgaatttaactggaataagtgttcataaatgaaacccttggactatttaataaagttgaaatgtgaattaaggaaaacttttgttaataaaaactttcttttaagtgatgtttttcctgattataatttctttttagtaattaaaggtgcaaaggcttttttttctttatgagagaaacactttaattccaaaacgctagggggtcctccactgggtttccaggagtgccctaagagcctttctaaatctcagctctcaggacacgcttgccacagatttaaaaaagccggcgccgtttccctgaagcgggcgcaaagccaggccctcggggcggccgtgcccgcgccgcctcgcgtcctcgcttcccgaaagcacgcggctcagtggtccttagcgagcggggacaccccggccttcttgcccccgtcgtccccgccggggtaatacggaaggtcggccccgggagctcttggagccaataggtgggcgcggccggccggcccgccccgggattggcacccgcagtccagaccgcgcgcgcccattggctcccggcgccggggggcttccgcggcagggcagcaggggccgtgctcaggggcggggccgggattggcaggtccgcacgccccgcc

SEQ ID NO: 27317 - DNA, 554 bp, Homo sapiens
  source 1..554: mol_type = other DNA
acaaatagctattgatttttttcatttttcaataagtagtcattgagttcgattgtgaattttcacaaataaattaacaagaggaagtctctctgggagagacatctcagctcaggcccggccaggaagcttttctacccgacccgagggctgcaagctcctggcgggcaggtgggactggcccagctgatcggctggcaggctgaccgcatgcgtccacacgcctcgaaatgccaggcgaggatgtgctgggccagaaggacaaggagggccaagcgggcgcgcaggcacctcctggacctgagaggtcaaggctcgctacaagcccgccgcgcctgcgcagcacagcgcccgcgccggcccctccagctgccgtcggcggcactgcgccggcgcgatgcgcccggcgctaagaggcggggtttccttgcgccgcgcgcaaggctggggcaaaacccgggccgggatagggcgtggggccgcgcgtctggacgtccctcgcgtcgggcccgacagcgcctgcgcactgcgccgccggctggggtgctgggggc

SEQ ID NO: 27318 - DNA, 196 bp, Homo sapiens
  source 1..196: mol_type = other DNA
cactcaggtcagtggctgctggtacagcagctgtgttcagaggacaggtgtcctgagctaaactgctctggtcacttcagctgcttcttgaactccactctcgaattacagaccatctgttatgaaaggagggtccttttccgtctcagaatctgagctggagcacgcaggctctgaactcctgggagaggtaggg

SEQ ID NO: 27319 - DNA, 305 bp, Homo sapiens
  source 1..305: mol_type = other DNA
ggtacagcagctgtgttcagaggacaggtgtcctgagctaaactgctctggtcacttcagctgcttcttgaactccactctcgaattacagaccatctgttatgaaaggagggtccttttccgtctcagaatctgagctggagcacgcaggctctgaactcctgggagaggtagggccttgagcacagccttttctgctactccggagcggcgaactggcgggcgggggtgcgcctgtgagtgtgagcgcgcgtgtgcgtgtgtgcgcgcgctctcgtggccttccggcagctggcagctgtccc

SEQ ID NO: 27320 - DNA, 383 bp, Homo sapiens
  source 1..383: mol_type = other DNA
ctctcgaattacagaccatctgttatgaaaggagggtccttttccgtctcagaatctgagctggagcacgcaggctctgaactcctgggagaggtagggccttgagcacagccttttctgctactccggagcggcgaactggcgggcgggggtgcgcctgtgagtgtgagcgcgcgtgtgcgtgtgtgcgcgcgctctcgtggccttccggcagctggcagctgtcccggcgccgcccccgcccctcgctgtcctgggtgcgcctcgggccgctgcgctcctggccagctccccccagcgcctgggaggcgacccccagtgcgcccgggttcaaaggcccggcgaggcagttccagcccctctggggggcggggaggcgacgg

SEQ ID NO: 27321 - DNA, 704 bp, Homo sapiens
  source 1..704: mol_type = other DNA
gagggctctgtccccagcaggaggacccttggtgagcgactctccccgcttgcccccaccccttccagcacctgcaaagggggcttagagcggatgggggtgtcctcccccctctgggcaccttccaggaccaggccaggtccttccctgccctggctggggaagcagcggctgcctgcctgtgttcaccccacaccaccgctggggttgtgagaatcgctcccaccctggaggacacctctgtgagtggcagccctggggggtgtcgcctcccttgcctggcccctcaggttcctaagggcgtctgaggaaatccctctcccccgcccccccgccccccggcagggaggagggttcggagcgagggttcggagggtccgggccctagcaggcccaggccagttgcggggaggaagcctcaggtcgctcccctccggtgccggggtgggcgcgtcgggacccactggcctcccagtcccaggagagaccagctgtctgcagctgctggggtctcagggttccctttcctccgggaggggaggaaacgggactaggaagctttcctgtttggtggggtgggcggctcctaacccggggtccagcccctcctcccccaccccggcgcgcggtccaggtatgtgcgaccccccagtggccactgacgtcatgctcctctcgcgcggcatgatgggagaatccaacag

SEQ ID NO: 27322 - DNA, 719 bp, Homo sapiens
  source 1..719: mol_type = other DNA
gaggacacctctgtgagtggcagccctggggggtgtcgcctcccttgcctggcccctcaggttcctaagggcgtctgaggaaatccctctcccccgcccccccgccccccggcagggaggagggttcggagcgagggttcggagggtccgggccctagcaggcccaggccagttgcggggaggaagcctcaggtcgctcccctccggtgccggggtgggcgcgtcgggacccactggcctcccagtcccaggagagaccagctgtctgcagctgctggggtctcagggttccctttcctccgggaggggaggaaacgggactaggaagctttcctgtttggtggggtgggcggctcctaacccggggtccagcccctcctcccccaccccggcgcgcggtccaggtatgtgcgaccccccagtggccactgacgtcatgctcctctcgcgcggcatgatgggagaatccaacagatgctccaagaacagctttcagattaaagcaattgcaagagcaaagattcttccttttcccggggtggggggagggagcgcccccagacattccaggactaaacactgacaagaaaaagtttttatttcctggttcaacttttttttttttccctggaatatagactgaagaagaggccgcgcacgccgggatgcgcctggctgcagccggcgaggctattgtctccccgccctgaagccagccc

SEQ ID NO: 27323 - DNA, 544 bp, Homo sapiens
  source 1..544: mol_type = other DNA
tgctgggctctgcaggcccgtgttgtgtccataatacatacaggcagaggccacgggctcttctgtctctcaattcctcatggtgctccaccagagaccatggtgaccctctgagtgtgcccactcagggctggtctccctcatgcagcccgaggcctcctgccaaagtccacttcaaggggaagccgaatccagaatcctcttaagaaggatttaagaatcttgccaaagtggccacttctccccagaaggaactgctgattttttaatttatcttcagtcatttgctttaacatttattgtgttgaaaattaaagacttgataaaaaatgtttgctttttgtggtgtccttgaaaatcgagtgattttcacccaggattttgggtgtcaggcaccgtggatttactgggtgtcagggaccgtggtacaccacagcatttattaacattgttattgccaggcaccatttacagccactatttgtggcaggtactagtattaagaggttatgtaacttgcccaagtttgaacagttaataagag

SEQ ID NO: 27324 - DNA, 693 bp, Homo sapiens
  source 1..693: mol_type = other DNA
aagcacccgctggctgcataagttaaacggatctcttaaatggaagcgtcttgggtacccagctcagccggcacccgcacccaggagcccaggcggccctgcgccccctgccggcaggagccaggcctcacccaggagtcgtcggcccggcgccctggtcccccggtccagctcgcccctgcagggctggctggagccgcgggtcccagtggctctggggacgcatagcgcggggatcctgctcgcctgtcccgggaccagggccccagtcaaggcagcgagtctcctcgctggcgggggtgactccgctcgcggggcgttcatcaggagagtaacctgagggcctggcctgagccgcgcccacagcgtcccccttggctcaggcctcgggcgaccccggcgagcgttggcgggggtggggcggcgacgccgattggacgcactatcgaccgcacctggcgcggattggacgggcgcttcccgccttccgccgttcgccggaggcgctgcggcggtccctgaggcgcagagttgcgacgctcggcggcatagggggcggctccaccgacactacgcggacgcctcctgccgcaggcaggttgagcagagtgcctgggtgggcttcccccacggcggggcgcggagggagggcctttcaagccggcaggcgagaagcttccgacgccgaggctg

SEQ ID NO: 27325 - DNA, 650 bp, Homo sapiens
  source 1..650: mol_type = other DNA
tcatcagtggaggattgaattcctcggatgaagttaatccacatgattaaataattacgtctcgacgccctctgcgagccaaggggcaaggagaccctttcgcggctgtgcctgtctcagaagggcctgcgattttttacacaagcacccgctggctgcataagttaaacggatctcttaaatggaagcgtcttgggtacccagctcagccggcacccgcacccaggagcccaggcggccctgcgccccctgccggcaggagccaggcctcacccaggagtcgtcggcccggcgccctggtcccccggtccagctcgcccctgcagggctggctggagccgcgggtcccagtggctctggggacgcatagcgcggggatcctgctcgcctgtcccgggaccagggccccagtcaaggcagcgagtctcctcgctggcgggggtgactccgctcgcggggcgttcatcaggagagtaacctgagggcctggcctgagccgcgcccacagcgtcccccttggctcaggcctcgggcgaccccggcgagcgttggcgggggtggggcggcgacgccgattggacgcactatcgaccgcacctggcgcggattggacgggcgcttcccgccttccgccgttcgccggaggcgct

SEQ ID NO: 27326 - DNA, 676 bp, Homo sapiens
  source 1..676: mol_type = other DNA
ataagaaattaaaatgttattaaaatataattttaaattttgatttgaagatacctataaaagtttaactacacatacaattcaacttttaaaaattgatcgacacaaatattaatcatcagtggaggattgaattcctcggatgaagttaatccacatgattaaataattacgtctcgacgccctctgcgagccaaggggcaaggagaccctttcgcggctgtgcctgtctcagaagggcctgcgattttttacacaagcacccgctggctgcataagttaaacggatctcttaaatggaagcgtcttgggtacccagctcagccggcacccgcacccaggagcccaggcggccctgcgccccctgccggcaggagccaggcctcacccaggagtcgtcggcccggcgccctggtcccccggtccagctcgcccctgcagggctggctggagccgcgggtcccagtggctctggggacgcatagcgcggggatcctgctcgcctgtcccgggaccagggccccagtcaaggcagcgagtctcctcgctggcgggggtgactccgctcgcggggcgttcatcaggagagtaacctgagggcctggcctgagccgcgcccacagcgtcccccttggctcaggcctcgggcgaccccggcgagcgttggcgggggtgg

SEQ ID NO: 27327 - DNA, 695 bp, Homo sapiens
  source 1..695: mol_type = other DNA
cgggacgcatcaggcccagctgcgcggaggggctggcggcctcaaccgcaaggagaggccgcgcgcactcccttcttccccagtggcaacaacgaggccgaaggcgaagtccctgctcccaccgccggcacggtgatcccggagacaggcgagcagcggtccccagggctcccgtcgccaccgcttctcccgcacccctcagcctcctcgggccggcgacgcgcgcagccccaggcctgctccccgctcgccaagcgcaccgccccgcgcctcagccaccttgaccgagtcgcccacgcgcgggggcggctccgagcgcccatttcccatccccgaggccgaggctggccaggcaggtgctgatggggagcctcgcgcctgcgcgagccaccctcgccgcgacacagcccacgccctggcccagcctcggcgtcggaagcttctcgcctgccggcttgaaaggccctccctccgcgccccgccgtgggggaagcccacccaggcactctgctcaacctgcctgcggcaggaggcgtccgcgtagtgtcggtggagccgccccctatgccgccgagcgtcgcaactctgcgcctcagggaccgccgcagcgcctccggcgaacggcggaaggcgggaagcgcccgtccaatccgcgccaggtgcggtcgatagtgcgtccaatcggcgtcgccgcc

SEQ ID NO: 27328 - DNA, 726 bp, Homo sapiens
  source 1..726: mol_type = other DNA
gagctgccgctgcaggcgctcgccaaagtcggcggcctcgacgggcggcgaccaggcaatgcagggtgaactccaggtcctggctgctgcagcacagttgcgagccgcgacagcacgtgcagcggcacggacgggtcgtctccttgacctgtgccagctccaagcccagggcgtcggcgaagcgcacgcggagcttctggctgcagcccggccgacacgcagcgcccggcgcgcccgcggccttctggcggcgctcgggggagctgggcagtgagcgcgcccgccgcaggatgatgggccgcaggcgggggtcgcagcccgacggcgctggcgttggcggcggcgcgcggcccgggctcccagggggcctacaggcccgcggctccagggccacgccgccgtccaggtccgacaggcagctgaggctccgggggccgagcttccgggatcccagggcgctaggcaggaccgcggagctcgggcctctggacatggccccgccggccgtcggaagggcaggctccctccgtgctcagaagccgcagagagtccaccgtatctgcaacctgcgggggacctctcgggcccggtgcgccctacggaagctttcagaggcctcccgggagttggaggttcttacaagaaggctgcgttccgggagcggcccctccgcaacttgaccgggtgcaacttgcctccgccccgcccctcgtgacgccgcctgca

SEQ ID NO: 27329 - DNA, 312 bp, Homo sapiens
  source 1..312: mol_type = other DNA
ggagcctgaggctcaggtgaacgtcatgagaagctctgtcactgtaacaactttcagtgtgttctgtgagtctttcgcaggtcaatcagttgaacttttaaccttgagaagtgccacgtggtaattacttggtgccactcttcacagggactttcccagaagcatgcagaagtgggctgtggctcctctccccaggcaataggccaggggtagccatgctggccaggcaagatccctggccagcaaaagcagcttctactcacaatggaatccactggtaaatatagtcaggccctttgtttgtaataacca

SEQ ID NO: 27330 - DNA, 673 bp, Homo sapiens
  source 1..673: mol_type = other DNA
agctggcccagcctgtcggcgcagacactcctgacacaatcctagggtacatccctagcccaggccagggctttgagttttcctaggaggtctgcaaagccccacaggctgaaatccaggtggaaactctcacccctgagctgcccgacctgggttcaagcccgggtcagtgcacactcccaccgcgggcccgggcgggaagtcggactaagaccgcggcgggaccgccccatccagaaagggtgccccgggtgtgggggcggaaaccccagcgctgtcttcagtctccacacccgcgcctttttcccctggaaaacgagcggcctcttcggccgcaaccgggcggctccagacgtccaggagggcagaggctgggctggtgcggcgcggggggcgcgggcgcgggctctgcgcctttaaggcccgcgtcggcagagcgagcgcaggggccgggcggcggggcggggcctcggcggggcggccgcggcttcacctgcagctccgagcgcgcggaacagaggcgcgggcggctgcgaggccggcggacgcaccggcccgagggaacgcgccgccggccggacttggcctggctcccggagccggggcggcgagcgcggcgggcgcagcggggctggaggctccgggcaggcgcgggggagcggcggcggcggcg

SEQ ID NO: 27331 - DNA, 710 bp, Homo sapiens
  source 1..710: mol_type = other DNA
tttactgaagtatttctagagagaaggtgcttgggaacactttaggtaacttactcagcaccctgtctccaaggcagctggagtcagcccgggggcgagaagagccgtgcgcgcaggacccctccccaccgcccgggaccggctgagccagaggcggacccagcttccccgcggcggcttggaggggccgggcgccggtccccgtccccagggcgcgctgcgacagtccccactccagggcctgcgcgccgcccggcggcgccccggcatccccgcgcgctgttccccgggcctcggacgggccctgcgccgccgctgccaccgcgcacggcgcccgcccggcgctcccgtcagcgccgccgcagccaagagcgaggccccgtcgccgccccgcgcccgcctcggcccggcccagcgcaccgttcccgcatcccgcgccccgcccggcggccccctccccgtccgccaccgccccggcgcccgcgcccctgagctccagcccccgcgcttcccgccgctgctgccgcaccccggccgaccgcccgcgccccggcctctagcgctcgcagccattggccgcgccttttaagcgcgcgccgcagccaatcgccgggcgcccgcggtctccgcgcctgcgcagggccgccacccccgctcccccgccccccggccgcgcgcccccgccccccgccggccgcgcgccgcccccc

SEQ ID NO: 27332 - DNA, 744 bp, Homo sapiens
  source 1..744: mol_type = other DNA
cgcgcgccctcggtcactaatcacgcggagtatacgcgaggagggcccgcagctaagcgacggcgggcggccgagcttcctccacggccggggaggtgggcaaggcctccgggccgcagccccgggtacgagcggaggctccgaggcccccggtaggaggctgccacgccggaagcgccgccttcccgggagctgccgccgcgcccgccccccgccggcacctgggcactggggcgggagtcccggggctgcccgggaacacccggcgcccagggcctccgccactccccggtcccccatgagggtgagggctataggcgggcccaagataggggagtcgtccggaccccacttctgtaggagggccaagggggcaaagcccccgtgttcgcggcgcccagggtccggggcggcgccggcacgcgcgcgggcggggcctggcgctcctccccggtcccgcccactgagcgtgcaaaccgcagccgcccgcccacgcgcacgcgcgctcctcccgggcgtgctcccagctccgcgaggggcccgccgggagccggccgagggtggggcggatcgccggggagacccgcccccggccagcggcgccttgctgcgcaggaacgacgcgagggcccgccccccagctggcggcccggccatatttaaaggacggcgggcgcggcgaggtgcgtggcggtgcgtggcggcgcgaggccccggatgtggctgcggcggcccctcctcccc

SEQ ID NO: 27333 - DNA, 853 bp, Homo sapiens
  source 1..853: mol_type = other DNA
ccgccgtcgccaccgaagctggctgcggagcgcgacaagccctcgccgcggctccggccccgaggggtccccgtgcgcccggcatagcccaggacagttcccagcgcgcgccgcggactcgggggacagcgcgctcgggggccggcagcctccagcgtccgcccggcccccaccgcccagtgccccggcccgagggacccgcgcgccccaacaaagttggcgcaggctctccggggaccgccccccacacggccgggtgcccgccggcgcgcaggcgtgggacgcggggaagggcacggggccgccgtcggggctcgcggccgcccggctgcgccccggctttgttcgcgccccgcgcccgccagctgcccgcgccccgtccccgcgcgcgcccgcccgcagacccgccgcccagcgccgccgctccggcccggcccaccttccccctttgcctcttggccgggcagacgcgaaggccacggacatggtggcggcgcggggctcagcccgtggtcatcccggctgcgctgggcggcccgaggcgctcgggggcgggagcgcggggggcgccgcgtcgtgggctcgtccgccccgtcgccgtcgccgcgcctccgggcccgcggcgccgccgctccgccctgcagaacggtctgcggcccagtgccgaacggtggcccccggcgaccccctcgcacccagcgcccggccctcgccggagcaccgcctcccacccccggccaccggtggttcggcctgaccccgccccggcgcgcgccatcacgtccgcccgacgccgcctgacgctgcccgtcgccgcctgacgccgcccgtcgccggcagcgcaggacacggc

SEQ ID NO: 27334 - DNA, 862 bp, Homo sapiens
  source 1..862: mol_type = other DNA
agcgcacggcctaccccccgcgctccgcggcccagagcggccctcgcccggcctctgctcgccggggcggcggcgcgacccacgcgcccggccggggccaggggtgctcaagatggcgtcgtcacggcccccgtgcccggggccccacgcgaggccgggccccaagcgaggcgctgagtggggagaacgagcgctcgcggctcacgccaaacgccgcctctgcaggcactcgtggagaccggcagcggggcccgcgctcagctacagccctgaccgcccgcgccgctgccccgcgcacgcccgcgggcgcccacagcgccgcgcccggccccggccctctctgggctccccagccgcccgcgtccccggccccgcgcaggccccgccgcctcaccgcggtcgagcccttcttgacggcctcctgcgcgtactccacttggaagaggtggccgtagctcatgccggcgggcggcggccgggctccttccgccgcgactcggcccgcgcgcacccgcgactcccggcgccactacgcccgcgccccaccctcggcgccgtgtcctgcgctgccggcgacgggcggcgtcaggcggcgacgggcagcgtcaggcggcgtcgggcggacgtgatggcgcgcgccggggcggggtcaggccgaaccaccggtggccgggggtgggaggcggtgctccggcgagggccgggcgctgggtgcgagggggtcgccgggggccaccgttcggcactgggccgcagaccgttctgcagggcggagcggcggcgccgcgggcccggaggcgcggcgacggcgacggggcggacgagcccacgacgcggcgccccccgcgctcccgcccccgag

SEQ ID NO: 27335 - DNA, 881 bp, Homo sapiens
  source 1..881: mol_type = other DNA
ggcgcgacccacgcgcccggccggggccaggggtgctcaagatggcgtcgtcacggcccccgtgcccggggccccacgcgaggccgggccccaagcgaggcgctgagtggggagaacgagcgctcgcggctcacgccaaacgccgcctctgcaggcactcgtggagaccggcagcggggcccgcgctcagctacagccctgaccgcccgcgccgctgccccgcgcacgcccgcgggcgcccacagcgccgcgcccggccccggccctctctgggctccccagccgcccgcgtccccggccccgcgcaggccccgccgcctcaccgcggtcgagcccttcttgacggcctcctgcgcgtactccacttggaagaggtggccgtagctcatgccggcgggcggcggccgggctccttccgccgcgactcggcccgcgcgcacccgcgactcccggcgccactacgcccgcgccccaccctcggcgccgtgtcctgcgctgccggcgacgggcggcgtcaggcggcgacgggcagcgtcaggcggcgtcgggcggacgtgatggcgcgcgccggggcggggtcaggccgaaccaccggtggccgggggtgggaggcggtgctccggcgagggccgggcgctgggtgcgagggggtcgccgggggccaccgttcggcactgggccgcagaccgttctgcagggcggagcggcggcgccgcgggcccggaggcgcggcgacggcgacggggcggacgagcccacgacgcggcgccccccgcgctcccgcccccgagcgcctcgggccgcccagcgcagccgggatgaccacgggctgagccccgcgccgccaccatgtccgtggccttcgcgtctgcccggccaag

SEQ ID NO: 27336 - DNA, 302 bp, Homo sapiens
  source 1..302: mol_type = other DNA
agttcaaatattttattttgtttgattttttaaaatgcatttttccaagattaaattgtcacagtgaattccgggacagacatgtcgccgggaatgacgtatctagacctccgagtgctgagggccacttcacactcactcccttcgagggatcccacctctgccgaaggagcacagaggcgctggtcacctgcgcccgagggggacggggtgcctggtgggccgggaaaggggttccctgctgtcccaggaggaagcttttcacacccaggcacgtgtggatgaacttgatactcagtagg

SEQ ID NO: 27337 - DNA, 620 bp, Homo sapiens
  source 1..620: mol_type = other DNA
tcagaactcatgccaacagtctttatgagtgaatagggggcaccccttcaaaactgtacaaagaagacgactgttttccatccacttcatttctatttattgaacaggtcaaatttgtcttgttatttgtgagtacagtacatttaaaaaacatccttatcggttatttttttttcagtataaattgttatttggtgtaatctcttaataaactggttcttcaaaaatcatcctataaagtgagttttcatgaagtgttttgcaaatacttattaccgagaccggctcccgggcagagttcgcgtgcgtccgcaccggattccccgcggcggcaaggcgaagccagggtaagggcggtggggacggcgccccggggctgccctgcggtccccactgcctgctctgcgttgccccgtagcctcctcgggcaacggcggtgtcctcgtcagacccgggaggttccgcaaacgccggaggggcggctgtccttgtgctcgggcagcgagggcgccggcgagaagcgcggctgcagctgagcgctccgcatccctcctgccagggacagcgcactgggcaagccttgggcttccggagccaaaaggccccggaagtggtcggcc

SEQ ID NO: 27338 - DNA, 719 bp, Homo sapiens
  source 1..719: mol_type = other DNA
gtgaatagggggcaccccttcaaaactgtacaaagaagacgactgttttccatccacttcatttctatttattgaacaggtcaaatttgtcttgttatttgtgagtacagtacatttaaaaaacatccttatcggttatttttttttcagtataaattgttatttggtgtaatctcttaataaactggttcttcaaaaatcatcctataaagtgagttttcatgaagtgttttgcaaatacttattaccgagaccggctcccgggcagagttcgcgtgcgtccgcaccggattccccgcggcggcaaggcgaagccagggtaagggcggtggggacggcgccccggggctgccctgcggtccccactgcctgctctgcgttgccccgtagcctcctcgggcaacggcggtgtcctcgtcagacccgggaggttccgcaaacgccggaggggcggctgtccttgtgctcgggcagcgagggcgccggcgagaagcgcggctgcagctgagcgctccgcatccctcctgccagggacagcgcactgggcaagccttgggcttccggagccaaaaggccccggaagtggtcggccgcttgcgacgctccggaagtgacgtgctttcccgagccggtgggcctggggggtggtcgcggcccgggcgcaaggaggggcctcggcttgggccgcggggtaccggggcgctgggagcgggagaggc

SEQ ID NO: 27339 - DNA, 661 bp, Homo sapiens
  source 1..661: mol_type = other DNA
ggtggtgggggcgctccctcctgcccacctgcgccctgagcgcagtgacctcgtctgtccgctgcagtggcgactgcccctctgtccacaggggtccgtggctgggctccgagcggcttgctgctccctcctcagcctgaggccgccggagcccaggctagacgcgctcccctccggctgggtccgcccggggtcaccctggaccctgcactgggccctgtccacacggaggctggcacccagggtccgtgcaaacgggaggtggagcggacccctggtctgggcaccggaggaaatgccccgcagggcaagtccccggagcgcgggtgcaggcgtttcccccacccccaccccgggtccccacaggcgccagggctctccatgatgaccgggcaggggtcaccagggccgagggcacggagcaacccagaccccggctccgagtgcgcgggctgactgaccgcaggcgagcccccagacccggtcaagccccggccgggctcccagccagctgctgtgagcgcaggggctgggctccaggcagcctggcgggcacgcggcgctgtccgtggtgctgccggcgccgggcggggcgggggcggggagggggcggggcgagggcggcagccaatggcgggggcgctgcgcggggcgcgcgggg

SEQ ID NO: 27340 - DNA, 373 bp, Homo sapiens
  source 1..373: mol_type = other DNA
aattatttagctacataaaaataacacctgttaacacacattttaaaatgaaaagtggctacattttccatcaatcaatgtttcaaatggaagcattatgacagtcaacgtaagcacacagctgtgcatccactctgagggtgcacggtgaccccgttttattactattattattattattttccaggctggagtgcagtggtgcaatctcggctcactgcttcaggcgattctcgtgcatcagcctcctgggaattacaggcatgtgccagcatacctgttacaggcgtgagccaccgcgcctgagccctctaagagcccccgcctggcttcagcagccggctggggcgccacaaacactcgctttagtttg

SEQ ID NO: 27341 - DNA, 523 bp, Homo sapiens
  source 1..523: mol_type = other DNA
tcacctaacccagctctggagaggtctgtgggcagatgggagagtcatttgacttcagcctcccctccggtctgaactctgaccctacagcaaaagtcccaggactgagcctctttggctagaactgggtcacaggctgacccctaaaccagatgttgacaggggaaccctggtttgcagatgaaactgagtgatcacagactcagagaggttaattaatttgtcgattccagaacttctgggcttaaccctggagccactgggctttggcctcgcaggcccgcactgccgccaggacgcagtgcacctgagggcggagcacccacgccccgggccgccgtcactccgctgcgtgggcggggctctgagggggcacaggtagaggcccttcgcgaagggattagcatagtcccaccccccggcgcgagcctcgggccgggcgctgattgggcaggcagcggccgacgcggcggcgccgggcgcagcgagtggcgggcgcgggctgtcagtcggcgaggcggcg

SEQ ID NO: 27342 - DNA, 522 bp, Homo sapiens
  source 1..522: mol_type = other DNA
tcgctttagtttgtgtcaaagtgactcaaagttacacaacactggcgggcgactgccaggcgtccagagggtgagcccctgccctccaggacccctccctctgggactcaggcggacgcgtggactcctgcgtagccctggtgcccgccgcccacagccggaccgcacctggctcagccacacgagtgacagctctgcccgcccgggcgggcgacgccgaggggtgggctcggccccacctgagcagttccccagcgcccctctgaaacccgcctgtggtccctggcgccgcctctaggggccgccgccgctcccctatgacacagcaggggccgctctggtccaagcgccctgcggcccgcgcttccgccggaaaagagccgccggcgcgggggcggaccgggagtgcgatggacggtcgccctcgccaatcgttggcaggttagagccggctgcgcggcttacggggctcaatcggcggcgagagcggcaggcggggcgggccgaacgcgggtttccggc

SEQ ID NO: 27343 - DNA, 526 bp, Homo sapiens
  source 1..526: mol_type = other DNA
atgcggagcctgggcccggctctcgcagccggccgaccaggctctgaagagacccccacagtgggcagctggggagggctgcagatagcacagacagccccagccgtcgggagcctgcacaccctgcaggaagggcacccacaagaccttgggcggtgaggaccagggctcccaccctgagaggcttggctcacccagtttctgagggacccctgtggttcccagcaagggcacatgtccagggaccagctgtggcctgagaggctgggtgcctgtcctggtccctgttgctggcccaacatgaagccaggatggtccccgctggcccctgctgagcctgccctcaaggctgtggctgctgaagcccaggacaccgccacccgtgtgcagtcccagctgcaggccatgcaggaggcagggccagtacgagggcctgcggggccaggacctgggccaggcagtgcttgacgcaggccactcaggtgcgcccatggccctcgcggtgcccctgatggaggcgggcacg

SEQ ID NO: 27344 - DNA, 837 bp, Homo sapiens
  source 1..837: mol_type = other DNA
gctgcagccccaccccgccgccaccccctcggggcttccctggaggcagatttggccccggagcccaagggcccagggccgcccaggcagacgaagacctgatctcggcctctaggtcctgcgtcctcgagccgccgatcgtggcaggaacgcgtgcgcggctgtgcgccgagagagctggtggagtccaccgggccccggagcacaggtgcttccaggcacccagcaggtgctcagcagctgtgaccagagcccccgacctccttaagagccaatttggcggctgtggggccatgagcaccgcccccgtcctctaaagggggctgcagctgcaggccagtccctcctgccctgctggggcaggcgggagccaggccgagttgaacctgacctggctgccccaggaagcagggggttcccacctaggctgccccgttcctctgcagatggtcattcgcgggtgcagagggcaccttcccgcagccagcaggacggacgctgttgggcacccaagttaggggaacaaagagtgggcccctgggctgggaggagctggtgggcgctctgggggccagggcgtcgtggggagcgctagggtcccacccgggacccggagctacgacctgggctgggggcccggcggcgccgtcgtcccacggcctggcccgaggccagcaggtgccccttccgggaggcggccgggccggggtccgaagggttaaggccgcccggccgcccctccccctcaccccgcctccccggacctctccccggggctcggggctcgggcgctcgggcgggccggggcggggcctgacgtccgcgggcggagcgagc

SEQ ID NO: 27345 - DNA, 588 bp, Homo sapiens
  source 1..588: mol_type = other DNA
gggggcagagtgtgggctctttacccagcccctgggccctgcccgcctgcctgccagttgctcccggggcagctgtctgccgggaagcagtgagcccggggtgctggcagctccggctgacacagcgcattctcagggccggcccccgctcccctcctggccagtgccgggggacagcggaggcctggcagcttggcctgatctggccctccagggatcccaagaagccctcagggtctcaggagtcggctgggcctgtcaagggggagcccagagccagagcacactgcctggggccaagcccccacctggggacccgctactgcccagagtaaagcagctcagagccggactctgcgcctggactgagcttctcctgccaaggggagccgcctcctctcccccctcccccaggtgggagataggaggagggagagagggtcccatcgccctcccgactccgtagagagccaggaaggtgtgcaaggaggtgcaccctccagggacagctgctccgggactgtccaggggaggagccccacagcccatctgggaccatggcccgcccagctggcctggctcagggat

SEQ ID NO: 27346 - DNA, 226 bp, Homo sapiens
  source 1..226: mol_type = other DNA
ttccgcggcacgtacaggtccacgaactcgccggcgtcgttctgcatttcgaggctgggctgcgcctggggagtcaccgcgcggcgccgtgagtacggccggaaccgtgccccggctcccggcgcaaaccggcccctagggtcacggccccagcgccccagccccagccctgagcccgaagcccgcgccgcgcgccacacctgctgcctcggcgggcaaggagggg

SEQ ID NO: 27347 - DNA, 503 bp, Homo sapiens
  source 1..503: mol_type = other DNA
taggatgcaaatgggttttcggggggaaacggtgccccagtttgcattctgcttcccctgccctgcccctggtgaacctgcgggtgtccttcgcccaccggcccgggggagtgagtagcaggcaccaggtgagcaggcctccgctcgcagcggctacgtgcacgggcaggagcaccgccccacgccccaggtggccgcagggtgaggggaccggagggcgggaggcgcacaatggggggcacgcccgtatctctagcccggccggcagcgggcagcgaggctcagtcctcgccccttctcccagctgctattcggggctcccgaggcgctcagaggggtcgggcacgacgccccgcgccccagggccagcaggctggggtccgagaacctccttgccggaagcggaagtgcgtcacggcgacggccggcaagcacgcaccgcgcagactcgctgtggtggcgtgacccggaagcgctcgccgaggcccctccttgcccgccga

SEQ ID NO: 27348 - DNA, 609 bp, Homo sapiens
  source 1..609: mol_type = other DNA
ttcgggggaaacggtgccccagtttgcattctgcttcccctgccctgcccctggtgaacctgcgggtgtccttcgcccaccggcccgggggagtgagtagcaggcaccaggtgagcaggcctccgctcgcagcggctacgtgcacgggcaggagcaccgccccacgccccaggtggccgcagggtgaggggaccggagggcgggaggcgcacaatggggggcacgcccgtatctctagcccggccggcagcgggcagcgaggctcagtcctcgccccttctcccagctgctattcggggctcccgaggcgctcagaggggtcgggcacgacgccccgcgccccagggccagcaggctggggtccgagaacctccttgccggaagcggaagtgcgtcacggcgacggccggcaagcacgcaccgcgcagactcgctgtggtggcgtgacccggaagcgctcgccgaggcccctccttgcccgccgaggcagcaggtgtggcgcgcggcgcgggcttcgggctcagggctggggctggggcgctggggccgtgaccctaggggccggtttgcgccgggagccggggcacggttccggccgtactcacggcg

SEQ ID NO: 27349 - DNA, 763 bp, Homo sapiens
  source 1..763: mol_type = other DNA
agcctgggtccacccggtgtgctccgagcccgccgttccgtttcccgcaacctgcggagctgctccgcggcagcggcgcctccatgcagccctcaccgggagtgcgagcgggacacggttccctgacctgggtcgcctctggcgcctggaggaaactcttcccgagtccccgagagccggctgagagccccaccggggttggggccttcgagcctggcacccagatcgggccttagaggctggaccccactgggaccccgagccttgtggccccgcttgctcagaaaccgaggaaatcgcggggctcccgccagtgcaccccgtcccagtccagcgacccgagccggccgtccctatggaagccggttccctgcaccgagccccgggtgcggccacgcaacgagggggcccacggggttccaccgccgcgtgtccatcggtgagcggggccgggatcaccgactcagccaccagacacggagcccgtctttaggccagccttcggcgggggccggggcagggagaagtctgcgcccgactccccggggcccacgaagccctcggcccgcccgtctagctgcactggtccgggctccgcgctggccgccccgtgtcgtgcgtccttgtcgccaagccccgcgagcagggcctgccagggtcacgtggctctacggccggagccccagcgctgaccctgcggggaagaaggggcgggggcggcgcggcgggggcgggccggggcggcgcggagggggctgcggag

SEQ ID NO: 27350 - DNA, 745 bp, Homo sapiens
  source 1..745: mol_type = other DNA
actttcggaaacttcttttaaattaatttcactgacactaaaagggaggttacctgttaatacttggcaacaattatgagccctggcctggagcaatgtgttccaggacagacggcaggaagccggggtaggaattccaacagggagttccctctgtggaagggaacgtggctggcacctccctgccttccaccctcgattccccggattcccaggctagggcgccggtctcactgtgcgcgcaggtggggcgcgtgccagaacagggcctgggggtcaggccgagaccggcgggcaccttcaccagggccgcccgtggcgttcccccagcccctctgccgcgggccccacgtggccccgaccctgcggcagcctttcggaagggcggagctgaaaaacggccgcttggctccactcggccccacagcgcccaggagcgaatcccgagtccgttcggaaccgcctcgccgcgtggcctggggcggcgtcgccaccgcgcgttctcggcctcccggctgcggcagcgatgccggtccttggagctggagcggggagtccaggaggcggcagcgctccggagagagacgccctggtcccccgccgcgcgttcccgcctctgtgccctgggggggaggagggggcggtcgccgctgccattggccgtggggggtgaggcgggccccgcgcaggaaaccccgcccctccctctgcggcgggggcggccccagcggatgaatgaagcggc

SEQ ID NO: 27351 - DNA, 476 bp, Homo sapiens
  source 1..476: mol_type = other DNA
cacctgggttccccagaaggccttgggcagtaggggggatggcacgtgggcacgttctcctggtaactggggctgccctgttagccacaggctgacccagcagcggccggagcttggcggccgggggtgtttccgggctgtcacgtggcccaggaggctgagaggagctccttcctcaccaaggtggagtccatcagggccacttggctgcaaatggcctgacacagcgagcggggccagggcggggtgacctgggaccccagtgtctgactcggcctctgcgtctcagccctgacgccacaccgctgaagcggcagcttcttttaaaaagggcaggaagtccctgtgagcaagctgggcacagccccccacctttccgcagcggagctgtggctgggagacacagtgcctgggtgtgggcctggccagacgccaccctggacgctgaggccactcccactgcgtggctgaagcct

SEQ ID NO: 27352 - DNA, 587 bp, Homo sapiens
  source 1..587: mol_type = other DNA
gccgcgggcgcccgccacggagctgctgcttcctagggagacggttccatcgttgaaggaacggccagactgtctttcgcagcagcggcgaccgcacgagggtcccgagccctgaccctcgcagcactcgtcaccccggccgcgtggttgtggcggtctcggcggggcagggggtccccacgattgcaatggcgcgatctcggcgcgacccgagtaactgggattacaggcgcccgggcttgtctcgaactcctgacctcaggtgatccgcccgcctcggcccaaagtgctgggatttggaaaaatgtgtatccaaatccttagccgttttatagttagattgtctttttattatcgagttataagaattatttataccttctacaaggaagttcattatcagatataggatttgcaaatattttaagaacccccgcgcggggcggagcagggcggagtccccggcgggaagggacccgagacctcggctgcgcctgcgccgacgccggcgcgtgagcccgagcgcgtacccggcggagcgcgcgcccgcccccgagtgcgcctgcgcggagctcgtggccgcgcct

SEQ ID NO: 27353 - DNA, 521 bp, Homo sapiens
  source 1..521: mol_type = other DNA
cagggtgccagatgcagggccctgagtggggagggtgctgctctgggcaccctgcaggacccagcccctcagctggggggaggcacgcccatgactgccagtggtcctagagccccctgggcacccagcttctggcaccctgtggacacccaggagtgggggtcggcccaaccagctgcgcagccgcccagccctgccagcggggagcttcctccctccccaccccaactgagcgagcccagggttgggggaggtgctggtgcacgatacccgccgcgcccgctcggaatcctggttccctggagcgctcaccccagcccgccctgccccggggagcgcgagggggcgacccgccaggctgcacccgggcggggcggggatggcggcgggggctgcctccctcctccgccgccaccccccactgctgggcgcgccgcgcggccgccggctccgtggagacgcgcagagccgggagggcgcgggcgcggcgggagggaggggagcgcgcccgggcagcagtg

SEQ ID NO: 27354 - DNA, 539 bp, Homo sapiens
  source 1..539: mol_type = other DNA
ctgccaggaaagtgactttgtgttgccccatatctgccaagtccccagggtgaccctcccggtggcccaggcttctggtggctttgaaaagaaaacggccgtgctttgcactgcctatcgccagcagcttccaggagctgagtaaggccgagagaggcccctgtggacacgtggcccctccgggggttatcctccaagggacattcttctgatggggacatcctctggggggatttctcttgggggacagaaatattcctggaagaggggattctctgcggggcaggcatcctccggggagagaatcctgctgggaggacatcgtcgggaagacatccttcctaggtacccggccatcttccggggagaccgtcaggatctcctagggcgggcatccttgcgagcctcccgtgggcgttccgcgaggggcatcctcccgggcggacgttggcgcggggcgggcgtcccggggagggaggggcgttgcgcgcggacgcgggcggggcctgggccgctccgtcccctccccccgcccgccc

SEQ ID NO: 27355 - DNA, 429 bp, Homo sapiens
  source 1..429: mol_type = other DNA
gggtcagatagcagtccttgctgactgcatgctgggcggggctggccacagggtcatcttgccaggtggaactggtagggaggacttatcctgtcccccagaccctgggcttggggtggggctggtgctgggagcccctaaggccccctcaggaggggccagcagtgaagggagaatctccctccactcacttcaccgcgggagagattagagcgacactattattttgagacagggtctcactctctggagtgcaggcttggctcactgcaggctcaagcgatcctcttgcctcagcctcccgtgtagcgtgggcctccctctgtcgccaggctgactgcgcccggccagagtgcggtgctcctgctgtttctcgggaattttcaagattcctgggggaggggctggcatctgcgccttcactgagcc

SEQ ID NO: 27356 - DNA, 776 bp, Homo sapiens
  source 1..776: mol_type = other DNA
tttctcgggaattttcaagattcctgggggaggggctggcatctgcgccttcactgagcctacaggcaactggaagctttgagtcccctagggcagcgactgccctggcagcctgaggcagagcttggccggacctggcgacccctgaatggacatggccagcaccgccttcaggttcctgcccagggcacggttccttcaggccggggatcccggggaggggttcttcccctcggccagggtgacgtggcctgaccacccggcccgtccaggtccacgggtgaggggccgcggtgggggtgctcccagcccagcaggcagcgctggacagtgaccccggagcgggaaccagggctgcgctgggcactgaccgggccctggtaccggggattcaccctccccggggtgttcctgggccttgggtcgcctgggtccgctccggcgcctggggaggggtctgcggcttcggaaactcgcgggtctcccctgcccctccctgaaggcggcccttcagcgccgcgcgcttccgcccccacactcgggttgaggagcaaggagagaaaagagcgtctttctctcttgctcactcgcggccggagagaacgcgccgcccgcccggcgtcttttttgttttcgcccaggcgggctgggcggcggcgcggggcgggtggaagcccccccgcccaggtgggcccggctgaatggggggcttgtgggggcgggaaggggaaggggaaggggccgcccacctcccgccccgcccgcccgcgcgccgc

SEQ ID NO: 27357 - DNA, 497 bp, Homo sapiens
  source 1..497: mol_type = other DNA
aatagcattgcagtgcagtggccggactgtgtgttgacgcacctggggccagtcattcctgaggacccagctggagtcactcttcccaggaaagtaagtttttaaaaagcttcaatcaatcagtgcaatcacagaaatataaaaatcccagcggcctggtcggcgcctgctggcttcctgcccacctctgggcaaccaggcagccctgcagggcactgcccagatccgagcttgctctggtcaaggctgggcaagacggctccgtgccggctgggaaagagcacgtcggggtggctctgggctcctgggctcgcccctgccctgttcctctgcagtctggcagtcgaggggagctgggccccaaaggcacccagggtcccaacggcaccagcggtgttcagggtgtccccgggccccccggtcctctgggcctgcagggcgtcccgggtgttcctggcatcacggggaagccgggagttccggtacgtcgcttttcc

SEQ ID NO: 27358 - DNA, 553 bp, Homo sapiens
  source 1..553: mol_type = other DNA
ctagctactggtcagtagttctgaagctttgggaccacaccgccaaggtccctggggcctagaggtccagcgtacccccacgctcctggtttctggagccgagcttggggtgggctcgcccctcgctgccattcccagccgaggccgtcaggggcctgcggaagagaaaacctgggccttttctcctggcggagtgcagtccctcggggctagcatccacgttccgcctgcgccctgcccgggctgttccgagggatccccgcaagggcactgccccagcagacccgaagggcgcgtccggagtgcaggtatgaaagacgggcgcatgcgcgcagtccggggccgggcttcgcagcccgggctccgctctagccccgcagcgtctcggtggccggtctcgtcctccgcccgccgcgcgggggcgccgctctagccccgcgccatctcggtggccgtccgcccactccgcggcgttcggggaaatggctgcgagaccctagaggcctgcggcctgcggtaagtggcgtcccgggcgccgggtagaagagccggc

SEQ ID NO: 27359 - DNA, 564 bp, Homo sapiens
  source 1..564: mol_type = other DNA
gaattatttcaagattgcaaaaataagtctcttaaaggcggtggaggcgggcccagcgctgggaatgtaccaccaccgtcttgcccaggctggagtgcagtggcaagatctcgactcactgcaaccagcgattctcctgcctcagcctcccgagtagctgggattacaggcacgcattggccaggctggtctcgatccagaacccggccatgcgctgcgcattttacgcggatgaagctgacaacgtcttcattcctgccgctgtaatggggcgcacgtgcacgcacggacgtggcttctccccagggtgtcaccgcgtaggtatcacgctgattccagcgcagccgccctcgccgggcctcagcggggagtggccgggcagcaggggcgtggctgggaaccgggcgtggcctgagctggggcgtggcctagctgtgggggcgtggctgggccgtgggggcgggccctccgcgcaagcatccgccgacgtggggcggggccgggcgtgcgggcggttgggcgggggcggggccggcggcggcgggtaacgggcggggcggggcg

SEQ ID NO: 27360 - DNA, 502 bp, Homo sapiens
  source 1..502: mol_type = other DNA
tgcctcgaggcaacagctgcccctcctcagtatctggggacagacaggtgatagagtgtcactctagttactatttggaactagctactggtcagtagttctgaagctttgggaccacaccgccaaggtccctggggcctagaggtccagcgtacccccacgctcctggtttctggagccgagcttggggtgggctcgcccctcgctgccattcccagccgaggccgtcaggggcctgcggaagagaaaacctgggccttttctcctggcggagtgcagtccctcggggctagcatccacgttccgcctgcgccctgcccgggctgttccgagggatccccgcaagggcactgccccagcagacccgaagggcgcgtccggagtgcaggtatgaaagacgggcgcatgcgcgcagtccggggccgggcttcgcagcccgggctccgctctagccccgcagcgtctcggtggccggtctcgtcctccgcccgccgcgcggggg

SEQ ID NO: 27361 - DNA, 507 bp, Homo sapiens
  source 1..507: mol_type = other DNA
tggccagtgcccatggtgcctcgaggcaacagctgcccctcctcagtatctggggacagacaggtgatagagtgtcactctagttactatttggaactagctactggtcagtagttctgaagctttgggaccacaccgccaaggtccctggggcctagaggtccagcgtacccccacgctcctggtttctggagccgagcttggggtgggctcgcccctcgctgccattcccagccgaggccgtcaggggcctgcggaagagaaaacctgggccttttctcctggcggagtgcagtccctcggggctagcatccacgttccgcctgcgccctgcccgggctgttccgagggatccccgcaagggcactgccccagcagacccgaagggcgcgtccggagtgcaggtatgaaagacgggcgcatgcgcgcagtccggggccgggcttcgcagcccgggctccgctctagccccgcagcgtctcggtggccggtctcgtcctccgcccg

SEQ ID NO: 27362 - DNA, 416 bp, Homo sapiens
  source 1..416: mol_type = other DNA
cctgtaatcccagcactttggcccctgtggtcccagctactcgggaggctgaggcaggagaatcggtgagccgagatggcgccactgcgctccagcctgggcgagagtgagacatagggttatgtagttgcaaatgaaaaaattactggcatgtactgcctctgcatatgaagcataatttttatacctgcagatttagctctttcgattaacggaaaatgtccaaatgttcagctcgcttgtaagcaaacgatgaaatcaggagctcaaatattttaagacccgcgctcctgccgggagggtctccagtcaccgagtaaccccggccctgccccgcgccgccgccgggactccgccccgcaagcaacccgcgcgccctggccgcgtcccgcccttcggcgtagcccatgggaggc

SEQ ID NO: 27363 - DNA, 689 bp, Homo sapiens
  source 1..689: mol_type = other DNA
gagagctccctaggaaaaggcaccttttctctgaactggccagtcctgttagcaggcagcagaagaaaacacccgtgtgctgaagactttctgctttaaagcagcagattttattaaaaagacttcgttacggagacagctaccgccgcccctcaggctggccgggaccgccccagaacaccagcgcctgaggccgcgcgcctggaggctgagccctgactgccccctgggcaccggcgcggggcggccgtccgggcctggactcactgcgcgccccaattccgcacctgccagcgccggcgcttccaaggcccccagagcgggggcggcgcgcaccccggccacatcccgcctgcccgcccggcccggccccgggagacgctcggcccggccgcccgggcccgccgccgccatcttaccgtgcggaacctgcctcccgcgctgcgcggtctgggcggctgcggctccgcagcctctcctgggctggggagaggtggcggccgccggggcgcccgagtgccgcggcgggggggcggggagcgggagggcaggcgcaccggaggccgcccctcagcacctctcgcgacagcaagagagcgcgagagcgcgaggaagcgcccccgcgagggggcggggcggacggcctcccggaagcgcggaacctcagcttccgtgcggcgaccacgcac

SEQ ID NO: 27364 - DNA, 679 bp, Homo sapiens
  source 1..679: mol_type = other DNA
ctgttcagagggccctgggagcaggccctgcagtgtgcaaggccctgccttagacgtgtctccctcgccgtgggggcaacgcctgaggagcaggccctgccgcctcctggggaaaggctgcatggttgaggccttcccctgctggcttcatccttggcatggcagcaggagcacacagagtgggggccccaccccgagcccagaacctggcctgtgatgggtcctcaggacaccttttgtccaggaacccaggggccaatgacaacaagacatgggccagcgctggatttgtccagctctcccaggcttggtccaagggctcaggagtggacccatccctgcccattttaaaaatcataaggcagggactgccatcattccccattttatagacagaggacagacggccccatggctccgtgtcgtgtccaagggatgggctggcacctcttggaccaggcttaccaccagggcccttctctgaagccccagtctgccccacactaacctctgctggggctgagccagggcgcgtcggacagtcagggcgacccagccagggcgaccgttggccccgctcctatggggcagcagggaccgacgtcagcagggtggggcgggcacccgagtggtatgccccgccctgccccgcctgcccgccctggtggccgtctggggg

SEQ ID NO: 27365 - DNA, 588 bp, Homo sapiens
  source 1..588: mol_type = other DNA
atgaaatcaggagctcaaatattttaagacccgcgctcctgccgggagggtctccagtcaccgagtaaccccggccctgccccgcgccgccgccgggactccgccccgcaagcaacccgcgcgccctggccgcgtcccgcccttcggcgtagcccatgggaggcgccctgagggcagggcccttctgattccccacctggcctcgagtgaggacgcgacagctctcgcccagcccggtctcgggtcagccgtctctccctggacctcagggacactagccctggaaggccgccggtcgggaggggactccctccccgtctgaggggcggccgcggacacccggcgcctttcccccgccccaccccgtgcgagacgtcccatcttgccagagggccgacgccttttgactctggcgccaacccgtagtgcgtggtcgccgcacggaagctgaggttccgcgcttccgggaggccgtccgccccgccccctcgcgggggcgcttcctcgcgctctcgcgctctcttgctgtcgcgagaggtgctgaggggcggcctccggtgcgcctgccctcccgctccccgccccccc

SEQ ID NO: 27366 - DNA, 644 bp, Homo sapiens
  source 1..644: mol_type = other DNA
gggggccccagcccagaacctggcctgtgatgggtcctcaggacaccttttgtccaggaacccaggggccaatgacaacaagacatgggccagcgctggatttgtccagctctcccaggcttggtccaagggctcaggagtggacccatccctgcccattttaaaaatcataaggcagggactgccatcattccccattttatagacagaggacagacggccccatggctccgtgtcgtgtccaagggatgggctggcacctcttggaccaggcttaccaccagggcccttctctgaagccccagtctgccccacactaacctctgctggggctgagccagggcgcgtcggacagtcagggcgacccagccagggcgaccgttggccccgctcctatggggcagcagggaccgacgtcagcagggtggggcgggcacccgagtggtatgccccgccctgccccgcctgcccgccctggtggccgtctgggggcgacaagtcctgagagaaccaggggcggtgctgcccgggtgggtcagcctgggctgggaggcagccccgggacacagctgtgcccacgccgtctccccagacgaggcccgcagggacatggccggggacacccagtggctgccacgtggctc

SEQ ID NO: 27367 - DNA, 621 bp, Homo sapiens
  source 1..621: mol_type = other DNA
tagcaggacccagatccgaagatgttacagctgccagagcttggcaggattggatactggctgcagggagcgaaattcaacaccttgaccagggagaactgggctctctttgcacagttgctgctaagaaggggctgtccatcaagtcccctggcccggcctaggctggggcacagagcactgccagctgacctccgggaccgggcccagggctccgctgcggctgaaggccagggccgcaaccgcaggtcccgcggcaagggccgaggcgcgcgacctggaacacgcgggggctcggagctctgggcgggcaggtgtttgcgcgcgggggaagggcagaccgaccccggacagacccgtagcccagctgtcggaggcctcagtgccggtatgtgtgtgggcggctgtacacctggcagcagcccgccagccccttcccgccaggccccgcggcgcctccggacacgccccacgtggcttccccgcccagccggctgcggtccccgccccgccgcacgagactgggacctcgggagcgcgcaggcgcgaagtgtggcggcccggcgcggcgctcccggcctgccccgcgtgcacgctgacgccgcgcagtctcgtcccctg

SEQ ID NO: 27368 - DNA, 402 bp, Homo sapiens
  source 1..402: mol_type = other DNA
gcctgcacgctcccatccaggacggaacacactgtggggtttggcagtgtggcacagtgtgctcccttggctacctggggagttcctggcctgaggacaagagctgctcccagacctgcagaggccccttggggcagagggatgtttcagagaacagccgggtgacctgcctccctgctctgcgtgacgcagccctaggcccctgtgaggctagagtcacccccgcaaggtgggaggtcacggcccctgcctgcacaggcagcaggctgccctgggctcccccacagccctggggcagacaccagcctggggaggggtctccatgcctgcccacgtgcagcatccgcaaccctgccaggggccccgtgacacgcccccgctgcacagagcatgtgaccccag

SEQ ID NO: 27369 - DNA, 773 bp, Homo sapiens
  source 1..773: mol_type = other DNA
gtcagggagcctgccctgccacaagtggcagccctggcccggccacctgccgcctggctgggacccttccctgcctccagcgcaagcttcttccggaagcgcaggctttacggggttcagccccatccagaccccaggacctgccctgggcagctgggtcctgcctccaccgtgcacaaggcctcaggctgtcccaacccgaggctccctaggcccctcccgcgcaggcaggaggccggtccaggcagagcagacctggccttcaggtctcagccttccagcagaggagctccctgtgggaggtgggcgagcccggctcactccctcctcctgagtcctcggcccgcccgcccgtggaggggacctctgagctctggacccgggtccaggacttctccaagccaaggaatctctgagactctcagagaaaacgcctcgcggatgcgggtcgctcagaccccggagggcgcacggcgggagcaggtgctgggcaggtcatcctgcaggagggggcggacgccggtcatccctgccgcgtccagggcgggctcccctcagctgcaggtctgtcctggggccgcggcgccgcccctcgctacccgagaggccgcgccatcgcccggtccccctctccggccggcgcgaagcccccaggggccgcaggcgggggtgggaggggagacgcagcgcagctgttacccggggctggggctggggggtccaggctgcggcgcgtggggagcgggcggagcgggggcgggggccgagcgcgg

SEQ ID NO: 27370 - DNA, 461 bp, Homo sapiens
  source 1..461: mol_type = other DNA
ggctgccctgatggtattctccatcatttcgaaagctcaggtcccaccagggcgcacctgcgctctggggcgtctgcgtggcaggggtggggacccgcagacgctctcaaccccgccgcctcccaccagggcccaaaggctcgggtggtgggagaccccagggcgggagcatgggccccaggacgcaaccctccacccccgcgccggccggtccccggctcccggctgtcccagccccgcagcgttgtcggcccccggtgaacgtccgcggatgaacggacgcttctcccgcccggcccccagctgccgtcctccgcggccactacgaccagctgcggtccggggcccggggtgggagttggactgcgtggctgcgcgtccccatggcgaccgggcgggtgcgcgcgtcaggggctggggcctgaggcggaagtcccgcccttgccggctcccgtgagacc

SEQ ID NO: 27371 - DNA, 449 bp, Homo sapiens
  source 1..449: mol_type = other DNA
gacagctgcctccagtggtcctgaagcacccatgcgaggggaggcagatgcctcggccggatcccagtgaggccgggatgcccacacttgcgtcaccacccagtcattgggcaagggccgctggggtgcattatctcccaggcagtcccggggcagggacagcctgcctaggtgtcacagccagggccagggcaggggcagggccagtgttgggctggtccagttgggagcagcccagggtcccgtcgggtcaggggcctgttttccaggcctgggttaccggcaccagtctggtgggggaccaggtgccactgcagcctgctccccacagtgggcagccagaatcagcacccacacgtggcggctgagcccctccttgcaggatggaccctctgggagtgtgcagcccctgcctcctcactggtgggaccctgccctgctgtgcagtg

SEQ ID NO: 27372 - DNA, 444 bp, Homo sapiens
  source 1..444: mol_type = other DNA
cacctgtctgtcctcacactggccaggccgagggaggccgccttcacccatcgcacacctgggccaggtgtcctggcgtggcctgcacaggcctcgcatccccggggagcagaagctggagccgggcactgagcccctggggtcccctggcacccgcagcaaggccctggttcctggagaatgggggcgtggtggccgccaccttgagggcgcacagcagctcctgctggagatgccactgtccagcctctggggtgctggggtgaggacacggggcttccctgagcccacacagcctcggcctggccttccagggtgagcgcgcacagtcgcaggctcccgtgaccttgtgtgctcctcctcctctgaggcagcagcggtgggtcacccagccagacgaggactgagttctgcactggccggggcagcagcgggggcatctct

SEQ ID NO: 27373 - DNA, 608 bp, Homo sapiens
  source 1..608: mol_type = other DNA
cctgtgctggagagggggttgctgcagggaactcctgacggagccccctcgcccgaccagcagccttgcagccttggagggaggggcgtgaatgcggagggtcaccggacctctccaaccgacgacggaaatctccgttttcgggggctgtgtcccagctgcagagcctgaggctgggccaggggcgcggctacagggatggtccaacgcacctgctgctctgtgggcggccacctcggcacccacctgagggcggggcccctccctggggaccgtgcgcctgggctcccctctggcgcccgtctctgcggaggtaccctaggggtgcccctccttgcgccggctagatgtgccccccacccctgcaggcagggagcgggcgcccaggctggggagggaggtcagactgactccgggaccccccagtcgcactcagtgaccccggggtccccgtccccggctcaggcacgcccccgcccggggcccagcgcagcctccccgtccccctgggcgcgcggcctcccctgctccccctcccagccggctgaggcgggcagggccgggcggggccgcgccacggagcccacagcccggcgctccctgccgcg

SEQ ID NO: 27374 - DNA, 527 bp, Homo sapiens
  source 1..527: mol_type = other DNA
ctccagaggcctgtgctggagagggggttgctgcagggaactcctgacggagccccctcgcccgaccagcagccttgcagccttggagggaggggcgtgaatgcggagggtcaccggacctctccaaccgacgacggaaatctccgttttcgggggctgtgtcccagctgcagagcctgaggctgggccaggggcgcggctacagggatggtccaacgcacctgctgctctgtgggcggccacctcggcacccacctgagggcggggcccctccctggggaccgtgcgcctgggctcccctctggcgcccgtctctgcggaggtaccctaggggtgcccctccttgcgccggctagatgtgccccccacccctgcaggcagggagcgggcgcccaggctggggagggaggtcagactgactccgggaccccccagtcgcactcagtgaccccggggtccccgtccccggctcaggcacgcccccgcccggggcccagcgcagcctccccgtccccctgggcgcgcgg

SEQ ID NO: 27375 - DNA, 510 bp, Homo sapiens
  source 1..510: mol_type = other DNA
gcgacagccggagcttcagtgtggctacagatcgggcggcagggccggcccgggaggggcctcttggtcaaggcgttggggaagcgggaccctgcctccttcatgctcgggaaggtctcctggggccctccaggcaggggctcttctttgcctgccaggaaggcctgggtgtcatcgtacggagagactctgagcagccacctcaagccaggcgcagggagccggctccctcctgcctcgtcccggcacgggggctggggtggaagccggccacccgcccttggagtcttgcaggctggtggggcttggggaagggtccagagccctcagcctacccgggcggctgagtgctgccgtgactggagctagccgtgtctgtgacgccgctcggagagctgcctgcgggtgcgtgcagggacatcggtgtctaaacacacgtgtgcgcaggaagacgggagccgtcgccacgctggggttcctggggcaccgttgtgagaaaacgttccgtgt

SEQ ID NO: 27376 - DNA, 423 bp, Homo sapiens
  source 1..423: mol_type = other DNA
tggcctgtctgctgccctggggccacccccacaggccccttctggggtctgcataaagtccaggccccttggggggcttcaaggccctctaggagtgactttgcagggtgcctccagcctccacagaccctccctgcacacaccctggggtctagggggtcctactgcctgggcaaccctgacaccgagagcatgggctgagccctaacagagtcttggggagagcccctaccccgggcccagctgagaagactccagtcctgctcaggcggctgggcaccgctctgggaccccaggagcgctggggccaccaggcaggtcagtgtgcacatggccgggggattgggcaggctcagcccagagctctggtcccgcgggtggcgtcgcgggggttaacgcggggcggggcgaggcggcgggcgg

SEQ ID NO: 27377 - DNA, 582 bp, Homo sapiens
  source 1..582: mol_type = other DNA
cccacgttggtcattacccgcgtgtgccaggacctcagggtcagctacaaggcgctgaggtgcagcctggcgctgtttcccagcagcagccggaggtcgagcgggcttccggcgttccctgcaccgtgggagaccagcctctcagggggagggtcggggcctgtcatggtgcgcccaggagggcacctgaggcccccgggcctcattagggagagcccctcagagccgggcttcgttggttctggggcgtcccccatgagcagggccggggaggggccggtagacccaggctcgtctcccaggctgcggctccggtcctcggcgtctgccctgtccccggggaccgcttttcgcggctcaagcgtgttcctgccctgagccggctctcgccccgtctcccgggcccgccgcgctctcccccgccccgcccccgcccgcggcgcgtcccgcatcgcctcgcgtccccgtggcgcccgcccgcgcgcgtccgcgccccgccccctcccgcgcggttccgcattggcgtgctgcagggcgcggtgcactgcgccgccaccgtcacccctcccggagataaaaccg

SEQ ID NO: 27378 - DNA, 722 bp, Homo sapiens
  source 1..722: mol_type = other DNA
cgggatttccgtaggggcaggccgatttcccctgcgggaggacgcctttctgcctgggaagggaaaacgcgccccctcctgattggcatggcgggccgtcccccgggccccagggccctgccgggaacgctctgggctccccaaacatggggtctccgagcagtggggcccagcctctgcctccggcgactggagactcttcaccgccccctgcgggcagcaggcgcgtcctggggctgggcaaccggggtgcaggttccggagctgccagagctgtggggactcgggagagatccaggttcctctggctgcgaagtccctggaggccgggccggagggctccgcgcacgtagcactttttggcccgcccggcgcccccgtcgcctccacaagggctgaagaggacgggcgggctggaccaggcggggctccgagacgcgtccgagacgggggcctgggcccgggagaggggcgggggctgggctcccggacccgggcgcggggccttttaacccctgcagacccaggaccggccgggccgccccaagacgaacgccgcagggctgggctcagcccaagccagacggcgagagtcgcaccgaggtggaagctgggggcgcggcctcgccggggccaggaaaggggcggggccgggtggggcccggggaggagcctgtgcgccccgccctccgtgacgcgccgcggcccccgcgcatataagt

SEQ ID NO: 27379 - DNA, 865 bp, Homo sapiens
  source 1..865: mol_type = other DNA
ttcaccgccccctgcgggcagcaggcgcgtcctggggctgggcaaccggggtgcaggttccggagctgccagagctgtggggactcgggagagatccaggttcctctggctgcgaagtccctggaggccgggccggagggctccgcgcacgtagcactttttggcccgcccggcgcccccgtcgcctccacaagggctgaagaggacgggcgggctggaccaggcggggctccgagacgcgtccgagacgggggcctgggcccgggagaggggcgggggctgggctcccggacccgggcgcggggccttttaacccctgcagacccaggaccggccgggccgccccaagacgaacgccgcagggctgggctcagcccaagccagacggcgagagtcgcaccgaggtggaagctgggggcgcggcctcgccggggccaggaaaggggcggggccgggtggggcccggggaggagcctgtgcgccccgccctccgtgacgcgccgcggcccccgcgcatataagtgggcgcgtccgcgcgtgcgcaccccgcgcgcgcctctctgtcgggctccgtggcctagcgcccccgtccccgccacccgtgatcgtgcgccgaggcccgcgaggggtcgccgcccaggtgaggggcgccgcgcgcgggtgggacgagcaggcccgaggggcggggggcgaggggcggggctgggccgggggctcctctcctctccgcctggcgagcgctgggctcggggtccccggcgggctcctctcgggtcgggcgggttgggacggcgcccaccaggttcccgacgtctgggccggggccccgcgcacaaagcgcctttgttccacccgctcggccggt

SEQ ID NO: 27380 - DNA, 662 bp, Homo sapiens
  source 1..662: mol_type = other DNA
ctcagggcggccggctcactcaggcatggccagctggaagggggcaggggtcctgcgggcttgggagggacctgtggccttgggccccagcgccatgggcgcttccaggccgcactcacggtccttgcctgccccctggcgtccgtgtggaggaaggcagtgcccgtttcttcagccgtgggtgcccctggctctgcctccccggggatcccccaaaaccctgggctcttccgggaagtcctccgggcttacccgagggcgggcctgcccatgaggccgctctcaggacgcctgcccacagcagctcctgacattgggccctgtgctcaggggtgccggaagcggggagagaggcggcccccacctgtgcccccgcagctctgagggttgggaaggcagcgcctgcagccctcaccttcctgccctcaggctgcgaggctttggacccccaagaagccccaaccgggaggtcctcccgctcaggccggccctggcggtgcttgcccagtgggttcccatagtgcgggcgctaagtgctcagatgggccccagtgggcctgaggacttgtggggccggctgggccctcaggaggagccggggtgctctggagcgcctgttcatgaggaagtgggacggcccgcctgccacgcccagctctggg

SEQ ID NO: 27381 - DNA, 822 bp, Homo sapiens
  source 1..822: mol_type = other DNA
cggccacccaggtgcggcaggaggagtgagagactgcagatggcctcaccccacccccgtgcctcaggacccagaggggaggtgggaggagtgagagactgcagatggcccccaccccaccccactcaggacccggaggggatgtgggaggagagagagactgcagatggccaccaccccatcctcctgcctcaggaccctgtaccgtgctgctggccccagtcctgccccgatctggggacctacctgagcgggcccagggagagggtgggaggtccccagccagggactcacccgccgcccctgaactggggccaggcgtccgcagcctccacttccccgcagtggcctttgggtatggcctgggcattgactgactcagaagccggtcatcgggcagcatggggcatctgggtgcctggcctgcggccgagctccctgcaatcagcatctcgttttactgcatgaaagccggggtgctgagagccccctcactcgcctgtcctcagaatttactgcagaggccggaggctcggcacctggtgctaatatctggccaacacttaaatagagtgcagctcaggcttggcaaccactgcaggtgctgaacagcagcgcttctccgtggaacccccacttctccgtgggcacgggcggctgttggagtgcccttgggcatgggccaggcctgactgggcagagccattccgcctgcctgggccttgcagagggcgggagagaggctggccctgcccaccccgccctcctcgggcccctcctggagcccgcccccgccccagcccaagctgccctctgccgtcg

SEQ ID NO: 27382 - DNA, 406 bp, Homo sapiens
  source 1..406: mol_type = other DNA
gacacagggtctccctctgtcacccaggctggagtgcagtggcaccatcttggctcactgcagcctcatcctcccaggctcaggtgatcctccggcagctgagccagctaatttttcaaattatttgtagagacagggtgaggttatgggcgcctggccaaaagtttaactttaaaaaattagattagaaatcagaacaggacctgcctggaaagagaaggggaggctgctctgcccccaccccgcttctccgtcagtgggctgcagggccgggggtaaggggtctaactcctactgcttctagctggcatttattgagttccagcccaggcagggagggcagggcgccccccctggggcctccatgcaccaagggaaagctcttcctggtaggggctcaaagacg

SEQ ID NO: 27383 - DNA, 609 bp, Homo sapiens
  source 1..609: mol_type = other DNA
ggccctccccacgaggtgctggccttgggtggtccgttatctactgctgccttaaaacaacacagatgtttattttatttatttatttgttccaggctggagtgcagtggcgcaatcttggcgcactggttcaagcaatgcttcgagtaactgggaattttaaacatagacatctaacagcgtgggctggaggcctcagctcctctatggggcctccccacagggctgctgagggcccagagccagtccagagagccaagagccaggcgtgctgactctgggacccggccagaagggacttggggtcccagcagcaccagggccacgggcaggtcctgcctgtcaggggacccaggcttccaggtcagctgtgcctggatttctccaggggctgatggtggagtcaccagaccatcctgccgtccagggccgggcagggtctcatccgcctggcggcgtggggccctggaggggtgcgggaaaggacccccacccccagccgcctccgccttcgacggcgctggcccttcagggaggggcgtcctctgctcgctggcgcttcccgaggttccctcgcagcgggggccgagctgtcgctggaggccgcga

SEQ ID NO: 27384 - DNA, 712 bp, Homo sapiens
  source 1..712: mol_type = other DNA
gggtgccggccgtgggacagcggttgaggggtgaccgagccctcccggccgctcccggatgcccctcgccctccacgctgggagcgccgtggctggctgagcctctggcatgttccgcgtgagtccgcgcaccttcaggcgtccgccccgcaggggagtcccctcgcgccccagcagcgtccgggcgaggagcgcccgtacctggaggcctgaaggtaccgccctgccgcgcgtgggcactgctccctggcgccgtccgtccactgaccatcgtccctcggcccggccgcccgcgcggggcaggcaacgcccgaccgggggcctcggggaccaggaggaacctgcggcgttaggagctgacagtgtcggtccgcgcacgcgccccggggcccgtcgggccttatttcacggccgtgtccggccctcccagccccgtgcgtgcgcggccccgccgcctgcgtcactaggaagcgcgcgcccgcgccgccgccgccgccgaatccccaacaaggagcgaagcccgcggccgccgccgccgcccgccgccgccgcagctcccgacgccgccgcccccgccgggtgcctaagcaggcccggcgcggccccaggtaagcggcgccggcgagcccgcggcccccccgcggcgaggcctctcgctccgctcacgcgccgccgtccagtcaggggtccctgcggagcgtcaggacgttac

SEQ ID NO: 27385 - DNA, 468 bp, Homo sapiens
  source 1..468: mol_type = other DNA
gggtgccggccgtgggacagcggttgaggggtgaccgagccctcccggccgctcccggatgcccctcgccctccacgctgggagcgccgtggctggctgagcctctggcatgttccgcgtgagtccgcgcaccttcaggcgtccgccccgcaggggagtcccctcgcgccccagcagcgtccgggcgaggagcgcccgtacctggaggcctgaaggtaccgccctgccgcgcgtgggcactgctccctggcgccgtccgtccactgaccatcgtccctcggcccggccgcccgcgcggggcaggcaacgcccgaccgggggcctcggggaccaggaggaacctgcggcgttaggagctgacagtgtcggtccgcgcacgcgccccggggcccgtcgggccttatttcacggccgtgtccggccctcccagccccgtgcgtgcgcggccccgccgcctgcgtcactagg

SEQ ID NO: 27386 - DNA, 421 bp, Homo sapiens
  source 1..421: mol_type = other DNA
agcctcccgagtagctgggactacaggcgcctgccggacacatttgcattttttaaaaagagacagttctggcgcctaaatttgcatttttaagcgactaagtttgagataatttgttatgccagcagaagaaagctaagttatcttggaggtgattgtctcttggagccccagagtgaaggagccccagggctcaccccaggccgacctcggtgggcttgcgctttattgacatttatttccaaaacgtgacgatacagataataaaatagtagcactgacaaaggctcaattttttttttctctgttgcccaggctggtcctggcccccacctttgtctcccaaagtgttgaggtaaaatttttaaaaacaccttctctaattacagcccctccgaagtgcagtggcttgggaacctcc

SEQ ID NO: 27387 - DNA, 415 bp, Homo sapiens
  source 1..415: mol_type = other DNA
ctgcaatggcaaagacgctgaggagagggggaggcaggataggttgccccccactcactaagaaaggcccagcgaggtcagacgcttgcccttggcctgggccacacagtgagtgaaggtctgagcccaggcgggaaaccacctctttcacggcaaagcctgcccatcccctgggctcacaggagatgccccttggaggcctccaggccagcgcccacccctgtggctgtggcatcctctccgatggcaggcacagacctggaccctgttggcgccagcccagcctacagcggccttggcggcgaagagctctgcggccccaccccatgggtgggacctgctcctccggcattgcccctgccccgcctgccctggggaatgggggctcatctccacccccaccgggtagcccccc

SEQ ID NO: 27388 - DNA, 390 bp, Homo sapiens
  source 1..390: mol_type = other DNA
gtctcagataggcagcctggctgggtgccagtgagtgctggggcttctccgagcactatctccgtgggcacgcatggcattcgcatgtgccaagtgctgcctgccggccgtgcgcggtcacgcagcgccaactccctcctgggtccgtgacgctgggctgaccccacagaacggtgcgggcctcgctcttggagtcagccctgctgccagccagtgccgggtgctggggactcagggaggcccgccgggaccactgcgggacactcaggagccgggtcctgggcaaggcgcagccgcagctctccgggggcgggaccccagatttctgcaggttcactggccagcgagagcaggcggaccccctccgcgggggaacagtttccgccggga

SEQ ID NO: 27389 - DNA, 489 bp, Homo sapiens
  source 1..489: mol_type = other DNA
tgcctgccggccgtgcgcggtcacgcagcgccaactccctcctgggtccgtgacgctgggctgaccccacagaacggtgcgggcctcgctcttggagtcagccctgctgccagccagtgccgggtgctggggactcagggaggcccgccgggaccactgcgggacactcaggagccgggtcctgggcaaggcgcagccgcagctctccgggggcgggaccccagatttctgcaggttcactggccagcgagagcaggcggaccccctccgcgggggaacagtttccgccgggatgcagtgggctcagcgccgactgcgcgcctctgcccgcgaaaactctgagctggctgacagctggggacgggtggcggccctcgactggagtcggccgctcgtaggcgcgttgcggtttttcgaaactacagctcccggcaggccccaagccgccctcggggccgcgggtcggcggattggccgccgctcgtggcg

SEQ ID NO: 27390 - DNA, 335 bp, Homo sapiens
  source 1..335: mol_type = other DNA
ttgcacatgaagtaggaggaggccctgctgcttgtcatccatacagctcacgctgcagggccacgctgtgggtgttggagacagctcctcctcgacccacggtgctctctcccaccagtgtgtgtgctgggcttgggtgtccagagccccaggctgcgctccccttgtgccgtaagaagtgtcacagcctgggtttgcccggtggggcggccagtgcggccatgtacctgggctgttagacttctgtgtggaagagctcacacagtggtctgagacagccagccggcaagactgcctctggctggtccctgcacctaacctgctggtgcaaacag

SEQ ID NO: 27391 - DNA, 754 bp, Homo sapiens
  source 1..754: mol_type = other DNA
gagggggaaagggcaggcccttgtcctggtggcaacgcctggcagacgtgtgcagtgggccgaggcctctgatgtgcccagcctgccacaccgcctccaggaagcagagcgtcatgcaggtcttctggccagagccccagtgagtgcccacggaggcccccagcacacccaacgtggcttgatcacctgcctgtccagctctggtgggccaagaacccacccaagaataggccagcccatgccagccggcttggcccgctgcaggcctcaggcaggcggggcccatggttggtccctgcggtgggaccggatctgggcctgcctctgagaagccctgaggtgggtttctgggaaagtgcttccccagaacttccctgtgagtggtgccacaggggcaccccagctgagcccctcaccgggaaggaggagacccccgtgggcacgtgtccacttttaatcaggggacagggctctctgtgcccaggagggagttggcagaggcccctcccagcctgccatgttgggctcagcctgccctcatcctcacagccgcagccaagctgcagttggtaggggatccaccgacacaccaggctgcctgggctggtctctgggttgggagctgccccaggtgctgaggagggcagctccctggctggtgaggcccctcccagaaccacccttggactgagctctggggagggtggggcgtggcgaggctggcccagccctctccccgcccatatatgtaggg

SEQ ID NO: 27392 - DNA, 650 bp, Homo sapiens
  source 1..650: mol_type = other DNA
tggcttccccctcagcaccagggtaccaggtgagccagaggcctgagggggcagcacactgcaggccaggcccacttgtgccctcaccacgtgcatctagcctgaggcatgccagctggctcgtctgccctctcaggggtggctgagaatttggatctgagccagggcacagcctcccctggggagctctgggaaagtgggcagcaatctcctaactgcccgaggggaaggtggctggctcctcttcctaactgcctgagaggaaggtggctgcctcctctgacatggggaaaccgaggcccaatgttggtccatctgcaggtcgatggcccaggagccccaagcccttgcctgggcccccttgcctcttgcagccaaggtccgagtggccgctcctgccccctaggccttgcacggctcactgcacagggatctctctcctgcaaaccccccgagtggggcccagaaagcagggtacctggcagcccccgccacgctgcctccccaccccactgcaggagctgaggagtgtgcatcaagaggctgcagcggctgctgcaggccctcgaggccccggagggctggggtccgacaccaagggcgggccgcgcggccttgcagctgaagctgcgtcggcggctcacggagct

SEQ ID NO: 27393 - DNA, 504 bp, Homo sapiens
  source 1..504: mol_type = other DNA
ccacatccacagtgccgactggggagaggaggaaacaggcaaggctcatgaccttggtcctcgacacacccagtcccagctctcccaggggatggggcccatgctggtgccactcaaatgagacttgagaggggcccgacagggctgtggccacgggccagctggactgtgaatatcacgctactcaggtctgttctttaaaagacagaacaacactctgctcttcaggaggctggtggtgactagtctgggtagtgaacgtgcagctgacagcacgtgcgcgcaagggcgtgggcactcaccgtcttcccagcattgtccaggcccaggatcaggatgcagtactcgtccttctgaaacatgtacttgtacaagcccgacagcagcgtgtacatcctgccctgggcacctctccacggtggtcagtggcgccccacgtccagccgaccgctcaggacgagagcctgggggccattcccgactccttcacagcaatgactgcga

SEQ ID NO: 27394 - DNA, 878 bp, Homo sapiens
  source 1..878: mol_type = other DNA
cggacccacgggccgctgctggtgcctccaccgcctcagtgatggcctcccggaaagcctggtactcagcatcttcctggcggcccgggcgctcttcgtccagcgcggccaacaagctgctcttcctgacagacaccaggctggcctcggtgagctcgatgagctccttcaggtccccctgcagctggcgcaggtcagcctgctcagggcgcccaaggccagctccacctgctgcagctgcgcacggtaccaggctctcctcgtccatgctgagagagggagggctgagccccgcgtctcgggaccgaccccacagcctgagggcgggcacgggcacgggcacgtcccctttccctcggggagaggcacagctcccagcgcagaggtcgcagcccgggtacccccgctcaggctccgcgccgagccgccgtgggctcgccgctagccgggtcccgcgtcactccggagccccttccccgcggggcgccccgccgcctcaccctccgccgagcccacccgccgcgcccgccgccttccaggccggccgcgcccccccgcccggcgtctcttcgctggccagggccgcgtccccgcaaaccgcggccacctggtccccggccgggcacctcctccgcgcggtttcccagccgcagccacagagagcccgccggcctcaccggctagagcggcccggcgcccccttttcgccccagcagccgatcggcacttcctcccgagcgccgccgcttccggaagtgcttggcgcgcgggggcagccgggaagcggagcgcggaggccgctgggacgcggttcagctcattccctgaggccggcccgcgtcccgtcaggcgccgcgcggggttagcgcggggtcagc

SEQ ID NO: 27395 - DNA, 662 bp, Homo sapiens
  source 1..662: mol_type = other DNA
aaacatgtacttgtacaagcccgacagcagcgtgtacatcctgccctgggcacctctccacggtggtcagtggcgccccacgtccagccgaccgctcaggacgagagcctgggggccattcccgactccttcacagcaatgactgcgaagccgggtgttcacagtgagctcagccgcgcgctcccacgcttcacgcgcgcggaacgctgcagccccgcctgggccacggcaccctcgagcgccagccccgcgccccacccgggagcagcgagccaccggcgcgctccccaggagcccctgcaggcgccgggtagggacgccccacacccgggggcgggtgagcagcggcgcggctgctcctggagtgcacctggaggcggcgcgcggctggcggaagaacctgggtcgcggcccccggctacgtccgccccaagccgccgccgccaggtctgaggctcccacctcgagtcctgggccgcccctcgggcctcgcgcctcaccgcacagcctgcggcctacctgcgtccgccgcgccctcggagccgctgctgctgaccccccgctgaccccgcgctaaccccgcgcggcgcctgacgggacgcgggccggcctcagggaatgagctgaaccgcgtcccagcggcctccgcgctccgcttcccg

SEQ ID NO: 27396 - DNA, 185 bp, Homo sapiens
  source 1..185: mol_type = other DNA
tctgttaccatacaattgttcatagtatcttatagttatctgtaagatcagtagtactcactgtgtcacccaggctggagtgcagtggcatgatcttggctcactgcaacagccaccacacccagcttaggcaatctccagaggtgatccgcccaccttggctggtcttgaaatcctgacctcag

SEQ ID NO: 27397 - DNA, 415 bp, Homo sapiens
  source 1..415: mol_type = other DNA
tgcccaggagccgaaggtggggtcaccctgagaggctcctggccggtgagggcaccaacccaccgtgtgggtgcaacagctacagtctcattgcaggaggggcagctcctctgcaacctgggtgcctgggatcctggcagacagagtccagacagcggtgggcagttccagccctgacccaatgaagccccatgtccctggtggcaggtgaggcgctcacagcctcgcgtgcagcaggccgtggggactgccatgcactctgcctggtgtcacatgcccacagcagcctcggtgacgagagcacggagcccatggctctgcccaggatctgagctcattggtcaaagccctggctgggccactgcccgcagtggtggggtcggacgccgtggactctgcacagtcctctgccctc

SEQ ID NO: 27398 - DNA, 507 bp, Homo sapiens
  source 1..507: mol_type = other DNA
ggggttggtggcatggcccaggaccccacgctgactagtgagcccctccgcaggcatagcgtggcgtcagcccagctgcaggagaagctggcaggagcccagcgccagctggggcagctccgggctcaggaagccggcctgcagcaggagcagacccagcacgggctgccctcaggaagaccagtgttgcccgaggaggggccggcctgctggccgagacagagctgcggggtcccatctggacacacctgccagtgtcttgggcatttccttggcaaggacattaaagtgatttcatcacagtgtcattcagtgaggggcctaggaggccggcattctcccttcttacccaggcagatcggaggccagggtgcccgccaggctgcctgacacccacagatgggtggagctcagtgctgctccagcgggcgagacgggagaggactgtggcccaccacgtggggcactcttggtgaggcaggcggactgctgcccagggtgggctca

SEQ ID NO: 27399 - DNA, 605 bp, Homo sapiens
  source 1..605: mol_type = other DNA
aggctcctggggccctagaagccggggcggccccagcggggcgggccctgagcctgcggctcttccagactggaggctctcgcccgcaacgctggccggtacgtgtggggcccagctcagggcaaagggcgacccagggtggccctgcccccgggatacatgctggaggtcacctgacccaaggggttggtggcatggcccaggaccccacgctgactagtgagcccctccgcaggcatagcgtggcgtcagcccagctgcaggagaagctggcaggagcccagcgccagctggggcagctccgggctcaggaagccggcctgcagcaggagcagacccagcacgggctgccctcaggaagaccagtgttgcccgaggaggggccggcctgctggccgagacagagctgcggggtcccatctggacacacctgccagtgtcttgggcatttccttggcaaggacattaaagtgatttcatcacagtgtcattcagtgaggggcctaggaggccggcattctcccttcttacccaggcagatcggaggccagggtgcccgccaggctgcctgacacccacagatgggtggagctcagtgctgctcc

SEQ ID NO: 27400 - DNA, 788 bp, Homo sapiens
  source 1..788: mol_type = other DNA
ctgtggcgcacacccaggggctcccccgaactcctcacggccgtgctgggtgttaccgtggtcacccgcagggacacggaggggccaggcagattcacctcaccgggagcccccgccagaaggtgggcacctctgggagggagggactgccaggccttggggcttcctgtgctgagtcagagctggaacgggagacgcaggagccccgcagccgcgggaggtgcagatttggggctgccaggtggcgccaggtccccttggccagcccccagcgcccctttcttctgtccccagggcctcggcttcacaggatggggctgccagtgtcctgggcccctcctgccctctgggttctagggtgctgcgccctgctcctctcgctgtgggcgctgtgcacagcctgccgcaggtaggtccctcagccgcgttctgtctggggcctcgctgcggctgccattcacagcccagcgcgggaaggggctggaggcaggtccgcgcacccagctcggcacgcgcgcctgcaccgggccttggacccgaggctgacgaccccgcccggaggcagcgggcgaggctgcagggcagtgcgacggcggcggaagcggtgagtgccaggctgtcccggggaccagggtggggtccgcagggcaccgaccagccttcctcgcctgaggcgcagactgcacgagctgcaccggggcccgcgcagcagcaggggtgagcagagggcggggcgggggcggccgggcggggcttactgtgcagcgcgtgccaacccctgggccaga

SEQ ID NO: 27401 - DNA, 701 bp, Homo sapiens
  source 1..701: mol_type = other DNA
gctggaggcaggtccgcgcacccagctcggcacgcgcgcctgcaccgggccttggacccgaggctgacgaccccgcccggaggcagcgggcgaggctgcagggcagtgcgacggcggcggaagcggtgagtgccaggctgtcccggggaccagggtggggtccgcagggcaccgaccagccttcctcgcctgaggcgcagactgcacgagctgcaccggggcccgcgcagcagcaggggtgagcagagggcggggcgggggcggccgggcggggcttactgtgcagcgcgtgccaacccctgggccagacccgctcctgccccctgcccggagtgactgcggcctgccagcatggatctcctgcgcccacactggctggaggtgtccagggacatcaccggaccgcaggcagccccctctgccttcccacaccaggagctgccccgggctctgccggcagctgcagccaccgcagggtgcgctggcctcgaggccacctattccaacgtggggctggcggcccttcccggggtcagcctggcggccagccctgtggtggccgagtatggcgtccagaagcgccccacagcaggggaagactgaggtgaccccggccgctcaggtaacgccggcagatcctcagcagtccaggtggacgtcctgtactccagggagacccgctggaccccaagggccaggga

SEQ ID NO: 27402 - DNA, 804 bp, Homo sapiens
  source 1..804: mol_type = other DNA
agctgggggaccctgctggcaggagcagcacgtgcggggctgggacgccccctgcttccagctgccccagcctagggaggggctggagacccctccctgcctccctgagtgaggcagtcccaggtccccgggctgccagcccgtgaggtccgtgaggtcctggccgctctgacagccgcggcctccccgggctccagagaaggcccgcgtccgcaggatgaaagcggccagcctcgcagcctgctcttcttgaaagctgggcgggtggagctgtcccctctggccttgggggactggctgcccccggggcgcccgggcctagccgaggcggtgctcctgccggccagactctcggtcagtgcgggcacggggtcccagccactcctagggggcagcgcagccggcagggtggccgcccccgggtgggacttggaccctggactccacgggagggctccgccacccagcctggtgttagctgccgggaagcccgccaagcaatcgcggccccttccccggctctggcagctctgcgagcgcgcccgtggggaacgggccctccccggcggggcgcgcgggcgcgcgaggtgggcggaggcctcggagctgtgccgggccgggcctccctccctaggccagcgcgggagcgacccggagggggcgggcccggggcggggcctcgaagcgctggccggcgggagcgcggccggccgggcccgcccgcctgcggtgtggacgccgcgcggccaatgcgcgcgccgggacgggacgggacggggcggggcggggcgggacgagacgggg

SEQ ID NO: 27403 - DNA, 467 bp, Homo sapiens
  source 1..467: mol_type = other DNA
ggcgcagcgctggtcgccctgaggggtgcacacgcgcaggcccgagccgcagggtccacgcccgaggcgaggcggcagcggcgcctgcagggcgaggtcacgcctgtaatcgcgggtggatcacctaaggtcaggagttctagaccagcctggccaaggtggcggacgtgttggcgcgcgcctgtaattccagctactcgggaggctgaggctggatgagctgagatcgcgccatggcactccaggctgacccctaaagtaaggagtttgagccgccgaggcgcgcgagccccagcactcctaggcagctgcatccgccccggaagatcccctggggccctgcgctggctttccacagcgccatgttggacggctggtggagtcaacctggaatggttcccgctcctggttcgcccgcagtttcggcctatcaggttgagtcgggtaaaccacatcgcggattacga

SEQ ID NO: 27404 - DNA, 779 bp, Homo sapiens
  source 1..779: mol_type = other DNA
cgccgtccacaccggccgcagccggttttcgaggcgggcgccgagcggatccgcggcggaggttgagggacccccctcccccggccaccgcctcgccccctccccatccgcagggctcttccgtgggcggcggcttcgcgggcttggagttcgcgcggccgcaggagtcggagccgcgggcctcggacctgggggccccccggacgtggacgggggcggcggcggggccccggactccgtcggcgcacatccccgtcccagcgcagaggtgagcgggaggcccggtgcctcgggactcggtgtgcgcaggggcggtgggtggggtgcggagacaccggccccgacggaggccaggtcagggccccaggccccaagctcttcagccctggaggagctgagcagctcggggctagagctcagaacccggagcgcggtcggcatggggcgactgtccaggaatccctggggctcctccctgccaggccggacacctcggtctggctgccagggcaggggcgggccctggcctggctcgctggggcctggggagctgcccgtgcttccagcccagtctccccctggctgctgccggctgctggccactcccacctcccaggcctggcgtgaggcccacagtgatggggggaggcctgggcctggcccgcccctctgccagggcttcagacccctgcccagcccgcgatgtggagaactcaggcttcaggagaccctggccctgctcctggcggctccgggtcagctctctctgcaacctgagc

SEQ ID NO: 27405 - DNA, 888 bp, Homo sapiens
  source 1..888: mol_type = other DNA
actcctagggggcagcgcagccggcagggtggccgcccccgggtgggacttggaccctggactccacgggagggctccgccacccagcctggtgttagctgccgggaagcccgccaagcaatcgcggccccttccccggctctggcagctctgcgagcgcgcccgtggggaacgggccctccccggcggggcgcgcgggcgcgcgaggtgggcggaggcctcggagctgtgccgggccgggcctccctccctaggccagcgcgggagcgacccggagggggcgggcccggggcggggcctcgaagcgctggccggcgggagcgcggccggccgggcccgcccgcctgcggtgtggacgccgcgcggccaatgcgcgcgccgggacgggacgggacggggcggggcggggcgggacgagacggggcggggcggggcgggccgggcagcctccgggcggcgcggcgcgggcggcggccggatccagggcgggggtcggcggcccggccagcccggcccggcccggggccgcgtcctgagagtcagccctcgccgctgcagcctcggcgcccggccggccggccatggagcgccccccgccccgcgccgccggccgggaccccagtgcgctgcgggccgaggcgccgtggctgcgcgcggagggtccggggccgcgcgccgcgcccgtgacggtgcccacgccgccgcaggtaccgggcgccggtgggcgggggcgccgaccaaggtcagtgctgcccaaacttcgggcccccgggggcggggcagcggggagggcggccgcgtcggtccgcgcgtgtccgtgggtcccgccggggctgcgccgggcggccggggagcccttcccgccgcgccgggctgggggcggggccg

SEQ ID NO: 27406 - DNA, 468 bp, Homo sapiens
  source 1..468: mol_type = other DNA
ggcccgagccgcagggtccacgcccgaggcgaggcggcagcggcgcctgcagggcgaggtcacgcctgtaatcgcgggtggatcacctaaggtcaggagttctagaccagcctggccaaggtggcggacgtgttggcgcgcgcctgtaattccagctactcgggaggctgaggctggatgagctgagatcgcgccatggcactccaggctgacccctaaagtaaggagtttgagccgccgaggcgcgcgagccccagcactcctaggcagctgcatccgccccggaagatcccctggggccctgcgctggctttccacagcgccatgttggacggctggtggagtcaacctggaatggttcccgctcctggttcgcccgcagtttcggcctatcaggttgagtcgggtaaaccacatcgcggattacgaaacgccgcggagctgaggcagttcggcgagcttctcccg

SEQ ID NO: 27407 - DNA, 243 bp, Homo sapiens
  source 1..243: mol_type = other DNA
agtctcgctctgtcacccaggctgagtagctgggactacaggtgcccgccactgctgggattacaggcaagtaaagagctcggacaaacctggcatggtcatcctgggccattcctcatgaccacaaatggacatggtgattggtagctctcccagaaccatttagttgtggagaaatcagatgtctgctgttagtcacttcctgcagtagtgatggctcatcatgtcaactgcatgctttgc

SEQ ID NO: 27408 - DNA, 425 bp, Homo sapiens
  source 1..425: mol_type = other DNA
gggcccgcatcctgcctgctgcccttgcctgtcctgcagacgccaaggccctagagcacccggcacacggggccccgccgtctggagcaggggcaccttgcgggctgcatggccactctgtgacgcttctcccctcagcacagtctcatttgggaagagggggccggtcagggcactgagaggcctttctgctctggcactgcctgccaggcgtgcacctcagggggcccgtccgctgcagggctggggggccgagactcggcagggtcgccgagagctcagtgagcgagcaatgcacaggcggctcctcgccgcaggggcctctgggggccgaggggctctgggcctgcaccccctctgtagacacttaactggtgtgtcttccagctacaagaagactcaagacttcagctgccctgtccaca

SEQ ID NO: 27409 - DNA, 405 bp, Homo sapiens
  source 1..405: mol_type = other DNA
gatgttgcgcagcttaatgactgctaggaggcttcccaagctctgacacttccaggctgtgagactggaacaagcttttcacgcagtgtgtcactgttttaaaaagccaggcagcctacgcggggcaggccgtcagtgagtggcggagcgcctgcacctctccacctccatcccaggacggtggctccgggtgggggcgggggcgacggtccgcagccgtctcccaccagctcgcaagaccagcaagccctgcgcttctctttctgcgcggttccccgcagcacatggcgtgtccacccgggacccacctgactgggaggactggctccgcccccgcgcttcgtccccgcccactcatgggcggagcctccacagggcgcctcggccccgggctgtcactcggga

SEQ ID NO: 27410 - DNA, 487 bp, Homo sapiens
  source 1..487: mol_type = other DNA
ctgacacttccaggctgtgagactggaacaagcttttcacgcagtgtgtcactgttttaaaaagccaggcagcctacgcggggcaggccgtcagtgagtggcggagcgcctgcacctctccacctccatcccaggacggtggctccgggtgggggcgggggcgacggtccgcagccgtctcccaccagctcgcaagaccagcaagccctgcgcttctctttctgcgcggttccccgcagcacatggcgtgtccacccgggacccacctgactgggaggactggctccgcccccgcgcttcgtccccgcccactcatgggcggagcctccacagggcgcctcggccccgggctgtcactcgggactccgccccttcatggacggagcctccgctcggctctctgagcgcatgcgcagccggtcccacccgcggctccgacacgccggagcccacgtccttccgggagcgcgcgcgccggtgcgggtgc

SEQ ID NO: 27411 - DNA, 360 bp, Homo sapiens
  source 1..360: mol_type = other DNA
gaggctagtctcgaactcctgagctcgtgtgctgggatttgcagaggcactctgaaaccctatgtatgtgcttggacagccccacgcatgggaggtggtggccagccatcaccccagggtgaatttctctgcagcctttcccgctggaacagatgccatctgtagcattgtctgctcagtggaagcatcctgtcagtccactgtacagtggggtgttgaatgttgtgattattatatccagataaagttccacagtgcaggcacgtgcctgtggtcccagctgcctatagggagctgtggtcccaccattgcaccccagcctgggtgacagagtgacctgtctggagttcgagaccagcc

SEQ ID NO: 27412 - DNA, 634 bp, Homo sapiens
  source 1..634: mol_type = other DNA
ccctcagcagcatagctgacccccagagtgtggtgggcgccggccctgcccgaggcccagtcggggccctttctgcgcacgccccctgccctgagaacaggaaagggccccctcctgccagtgagcctgaccccgggaggggccgtccccgtgtgccgcgtttggcggggccccaggcggctcccccaggcccgggtctggggccccaggctttcccctgcctcgcggccgggcgcattttgaaagaggttccagctatcacttgtaaccatatatatatacatatatattctatctacaaagtgtttatttgcgggccccgccccggtcctcgtccccgccccgcgccctggtcccgagtggcgtggggacgggcatgtattaaaatgactgtatcaaataaatgtttattgatttttttccggggccctccaggcacgtggcggaggctgccgaactacgggtcccccatgcccgccgcgcggccttgtggggcttgtagtccgcgacgcgcggccttgtggggcttgtagtccgcgacgcgcggccttgtggggcttgtagtccgcgacgcgcggccttgtggggcttgtagtccgcgacgcgcggccttcgcggtgggcaagagagggac

SEQ ID NO: 27413 - DNA, 502 bp, Homo sapiens
  source 1..502: mol_type = other DNA
aaggcaggcaggcaggcaggcaggctctcctgggctgtcagtgccccgccacctcccccagtgccccctgcctgcagaagcccaagctgtggggcagagaaggccctggcactggttcagaaccactgcccccaaccggccttaagccgccaggcacctccggctgcgctgccggtgcacggcccccagggccagaggtcagggtcccgagcccagagaccacactcgccgcgcgggccaggatgcggcggaatcaggtcgcctcaatccgtgcgcgccggactccgggcagtgcctagcgcccctatccgccccaggacggcagaaccggctactctggactgcgggcccggccgacgggggcggaaccgcggagcgggggaaccacaggccagcgccgggcccccgcccccgcccccgccccctccccgccccctccccgtcgcggagcggccgcgggaataacgcgagagttcgccccctcccccccgcagtaaaactg

SEQ ID NO: 27414 - DNA, 515 bp, Homo sapiens
  source 1..515: mol_type = other DNA
caggggctctccagctgtgccgccccccacagggcctgcagcccgggacaacaccggccatgtgaggggtacccagctgacctgaatcaggggcaccccacattcattgtcaatgaatgaatgaatgacagagcctgtggggagacagaaggtgggcacaggcctgcccctgtggccttcagcagggcaggtgaggttcccacgctagggccctcatagagtgagagacctcagccacccactccacacccagggcaggggttggggatgtgtgactccaaatttgaggggtcagcagagggtgtgctcagtgggccaccgccccgaggtggcccctagtgctgtgggaaaaggcttattctaagcccgcgccttccagcggacaggcgccgtggtcgccgggctttgcagggcctcgagcggcggggctggtgcagaagcgcgcggcagtccggggaaacccgtcggactcctcagcccgcacggcacctgccccggccaagcaggctccgccc

SEQ ID NO: 27415 - DNA, 326 bp, Homo sapiens
  source 1..326: mol_type = other DNA
atctgtccctccagtgggactagaggctgagctggacatgaacatggctgtacagaggtcacgtgtgatgcacccaggctcatagctggttgcaagcctggcctgctgctgcaccaggcaaccacagtcgccccctctcccccgggcactgagccaggttctggggctgcagcaccctgatgttcacgggcccgacctcagaggacgcccggcaggttcacggggactctcctccgcggagccgtgcccaggggcgcacggacgcccctcgccctggcggacagccttggtgcacgcaggcccgcgcgccgccgacacacctcgga

SEQ ID NO: 27416 - DNA, 367 bp, Homo sapiens
  source 1..367: mol_type = other DNA
aggtcgagcttgcactgggaccctaactggcccctgggggctaaaaacagcctggggcattgcgcttcacctgtctgtgagagtgggacccatggtcccctccctctcctcgcccctggtgcgccctgtccgagcagagctgtaccctgtccagttgcacacctgtctgtgtgcgtcctgtgcgcacactgcggcatctgtccctccagtgggactagaggctgagctggacatgaacatggctgtacagaggtcacgtgtgatgcacccaggctcatagctggttgcaagcctggcctgctgctgcaccaggcaaccacagtcgccccctctcccccgggcactgagccaggttctggggctgcag

SEQ ID NO: 27417 - DNA, 408 bp, Homo sapiens
  source 1..408: mol_type = other DNA
actgtggttgcctggtgcagcagcaggccaggcttgcaaccagctatgagcctgggtgcatcacacgtgacctctgtacagccatgttcatgtccagctcagcctctagtcccactggagggacagatgccgcagtgtgcgcacaggacgcacacagacaggtgtgcaactggacagggtacagctctgctcggacagggcgcaccaggggcgaggagagggaggggaccatgggtcccactctcacagacaggtgaagcgcaatgccccaggctgtttttagcccccaggggccagttagggtcccagtgcaagctcgacctgcctctccacgaggaggcgctcccgcgcacgcgcctaccacgttcctgccccctagccgcggccggaagtcgtcggacgtcggtc

SEQ ID NO: 27418 - DNA, 679 bp, Homo sapiens
  source 1..679: mol_type = other DNA
aggggaggacctccagagggagaccctcagctctggagcccagatcccctcctgatggacgctcctccggaacccgcccccgcccaggtcagagggtccagggaggggccagtgggaaggacccaggtaggccctgcctcttgctgcagcggtggcctgggctgggcaggggagccagcaagccactgagggtcccagccccttccccaagggcccttggggggcagggaggacgccacagcctctgcgtccctgcgaagaccatcttgtcccataaaggcgtgttttccagcatgggcgcccctggggactcagagcgcctccccaaagacggggccttttctgaaggcgctgcactccaggaaggacttaccggctgttgggaaggcagcctcccagggccctctcctccccatggagcctcccagcggggggcggggaacggcaaccagcgggacactgccgccctcccccagttactgcccgggggtccgactccgtgggtgggtggcagctcgcctccgaaaacccggggggtctctccttctgagaggtctgtgcgcgggggaggcctcagcggaatcccgcccggcctgggagcccccggggaggaggcggccccgacccgcccccgcccgcccgccccgccgccgattggccctgagccgctatatctggg

SEQ ID NO: 27419 - DNA, 745 bp, Homo sapiens
  source 1..745: mol_type = other DNA
ccaggaaaccacccagcatctgcattactggggagctgccaggcagtggtggggatgctggccctgcacctgtccccgtcctcccctaggcctgggccatctctctggctgcctgcagtctggccctacctagggacctccaaaatgtcaatgaacactaatttctcaggcatgtgatgtgaatcagctgacatcatcttgacgcttaactccagtttcacaggtggggagactgagacacagtgcaacgtgcagagcccagaatctgctccctggtagctgactttgcaggcaggggccttgcccacgcagcctcggcagaggcccccgcacctgcagggccccacaagaggcctcccagtgtgcgcgggcctcttgagccccccaaactgggctctgggaggctggggacggccttctaggccaagtggggcgcgcgcagggctcagcggggcccaagagaagggctgagggcactgggtcctgagccacccaccgagcagattcctgggcctcctggggcccggtcgctccgggatgtctgagctctgggaggggcgtgcccggggcgcctccctcgcgggagtcactggcgacggtgggtcttcccaggaggctgtgcgcgccgcgtggcgcctgggagttgtggtccagagcgcgggcgcggcgggcgcggcaggcgggcgcgtggactacgcatcctaggatgccgcgcgcggccgcggggccgagggtttgaaccggg

SEQ ID NO: 27420 - DNA, 520 bp, Homo sapiens
  source 1..520: mol_type = other DNA
cccagacttgggccagggcagtggcctctgcatgcccaggcctcgggggtattgggggccctaagagtgcagaactccaggtggcggatgtgcacggaggcccctccctgccctgggcagaagtgggcgcaggtgttcacaactgcctccggggcactgattggcccccctgtaccaaggagacttgggattcgaaggcatgagggccactcacagctttggcgctcctggtgcacctcccctgcagacggtgcaaccaaatgctgggagggacaccccctcagggactccgaggcttcgactggggagcagggtgccccccacccctgccacccccaccctgtggtagggccttggcacagcagtttcacggaaccatgtttggggggcatgtccctcctcaccggggccctgccgcaggtctagcctgctgcccctggcttctgggacccacagagtgagccccagactctcggggcccctttgggaggggctgggagccggaaaccaagaaagagga

SEQ ID NO: 27421 - DNA, 539 bp, Homo sapiens
  source 1..539: mol_type = other DNA
acccctcagagttctgtgaaggtgtaaggtgtgcacctgacctgggtggagtgcttgtgctggggaggacaggagctgcacacagccgggccaggcgcagggtcagggccacctacagtgtggccttaagctttaggcggcatgactccggatgcaacgcggctcacggaggcgaggggtgggccgggctggcgtacccgccgatcggtcctctttcccaagctgggcaagcagcatatggggcccgtgcctccactgtcgtggaagtcccacacgagcagagtcgggggccacggccacacccccatctactaccgtgcggctccgtccgcccgggagccagggctccactactcgactctccgggccacccccaggcgactgtgggggccgacgcgcgggcggggcgggtggggtgcggagccggccgagcgcggggcggggcgcggcgggcggggcgggcccggcgaccgccggcgcgaggaagtcccggcccctggctttggggaagtgccgccgaggcgcctgcgcactgcgcc

SEQ ID NO: 27422 - DNA, 772 bp, Homo sapiens
  source 1..772: mol_type = other DNA
acgcggctcacggaggcgaggggtgggccgggctggcgtacccgccgatcggtcctctttcccaagctgggcaagcagcatatggggcccgtgcctccactgtcgtggaagtcccacacgagcagagtcgggggccacggccacacccccatctactaccgtgcggctccgtccgcccgggagccagggctccactactcgactctccgggccacccccaggcgactgtgggggccgacgcgcgggcggggcgggtggggtgcggagccggccgagcgcggggcggggcgcggcgggcggggcgggcccggcgaccgccggcgcgaggaagtcccggcccctggctttggggaagtgccgccgaggcgcctgcgcactgcgcccccgcgccccctccccgactgtcgggccggaccttggagcgcgcgggccggcggcggcgcgagtggctcgggagcgcggctggtgagtgcgcgcgcgcagcgccggggacagcggccctgcccctcccggcccgggcccggggaccgtgctgggcgggagcttcgggagccggcgcacgggactcgaaccccaagggctcccgccgccaggtccacgtggaccctgggccgcagtggaagtggagcccgccccccgcgcgtgggggagggggcgccgcagccgggttcccctttaggtgggggccggaagaacccaggtttccgcgtctccctccccctctcagcccggtgaggaggggccggggcgggacaccctgtccgcccccgcc

SEQ ID NO: 27423 - DNA, 813 bp, Homo sapiens
  source 1..813: mol_type = other DNA
ggcccctccagggaaggccagctctccccacctctgaaatggtggtggtggcccacccaccacgcggagcgacccaaaggcggggtgggggcaggaggggccaggttgggtctgggccccaccctggctgccgaaggggcgtgcactgcagcagcagggatcagacggcaggagggactcctgcggcgctctggagggaggctagcgccaggagcccccgatcggctggggccgggggcgcagcgcctcccctacagctcgaagggctgagtggctgcccggggtgggggcgggggcggacagggtgtcccgccccggcccctcctcaccgggctgagagggggagggagacgcggaaacctgggttcttccggcccccacctaaaggggaacccggctgcggcgccccctcccccacgcgcggggggcgggctccacttccactgcggcccagggtccacgtggacctggcggcgggagcccttggggttcgagtcccgtgcgccggctcccgaagctcccgcccagcacggtccccgggcccgggccgggaggggcagggccgctgtccccggcgctgcgcgcgcgcactcaccagccgcgctcccgagccactcgcgccgccgccggcccgcgcgctccaaggtccggcccgacagtcggggagggggcgcgggggcgcagtgcgcaggcgcctcggcggcacttccccaaagccaggggccgggacttcctcgcgccggcggtcgccgggcccgccccgcccgccgcgccccgccccgcgctcggccggctccgcaccccacccgcccc

SEQ ID NO: 27424 - DNA, 468 bp, Homo sapiens
  source 1..468: mol_type = other DNA
gaggtgaggggtcctgagttctgccccacagtggctggggccagagccccctggccatcagaagggaatgggccttaagcgtctgcggccgccgcccaaacccagggccctccggaggggaccctgccccccgccacgacccgccccacctggtcgagggaggggcaggactcccggttgctgggcaactgcagcaggaggggcgggggcgttagccgccgctggggctggccgtggctctgcctctggcacagcgagcccagccctggctggacaaggtggcagctgtaggctggggcgggggaggagccagctgaaccatctaggcctcgaagggcaagagcgagctgtctggtgggagaccctgactgtcggggaccgcagacataggggcacaactcccccaggcgtcacctagagctctccatgtggcagggcctgagattatttcctacaactgagttgatc

SEQ ID NO: 27425 - DNA, 596 bp, Homo sapiens
  source 1..596: mol_type = other DNA
cctccagcaggtcgccgaagagcagatggcggtggcgctgcgcagggagcatggccgccagtccctgcggcgtcagggcccagcccggcttggggggctctgtcgcgggcgcccccttggcacgctcctcaccctgcgccgtgcctggcgcgcgcgggcccttgcgcccgccctccttcgctggcggcggcatcctcccgccctgcggagggaggagggcgtcccgtcggtgccggggctggcaccgggccctgcccgcccctcggcagggccccaacgtgcgccccagctcccgcccgctgggctctccgcagtcgatcaactcagttgtaggaaataatctcaggccctgccacatggagagctctaggtgacgcctgggggagttgtgcccctatgtctgcggtccccgacagtcagggtctcccaccagacagctcgctcttgcccttcgaggcctagatggttcagctggctcctcccccgccccagcctacagctgccaccttgtccagccagggctgggctcgctgtgccagaggcagagccacggccagccccagcggcggctaacgcccccgcccctcctgctgcag

SEQ ID NO: 27426 - DNA, 607 bp, Homo sapiens
  source 1..607: mol_type = other DNA
ggtgccctgggcactgatctggggcccagctgtggcagaggtgccctgggcactgatctggggcccagctgtggcagaggtgccctgggcactgatctggggcccagctgtggcagaggtgccctgggcactgatctggggcccagctgtggcagaggtgccctgggcactgatctggggcccagctgtggcagaggtgccctgggcactgatctggggcccagctgtggcagaggtgccctgggcactgatctggggcccagctgtggcaggggtgccctgggcactgatctggggcccagctgtggcagaggtgccctgggcactgatctggggcccagctgtggcagaggtgccctgggcgtgtctccaagtgacgaacagacccgggtttcaccccgtctctgccactgtgacaggtggcctcacacctctgaggcttcgtgctctcaactgagctccaggagcacacagcaggtgctgggccagtgccgtgtcctggacccagatctgtcgtgccgggagcccagctggggggtccgggccagttgtccccgtccagtgtggggccggcgcagccctgggtgcggtgacccaccttcccgca

SEQ ID NO: 27427 - DNA, 247 bp, Homo sapiens
  source 1..247: mol_type = other DNA
tgacctctcagagaagagggcctaggccccaatcttccctgtggagaacgtcagtgtgccaggaactctcggggagcttatatcctcacctctttgcaggaccagcctctcctgggagcacgaggtcctcaaggtcaacttgtcctgggcagaggatgggttcagaagagaacatcggctgtgtatcctttgtatcttccagaggtccaacctcaggcaggatggcccgggtcgctttttgcaagca

SEQ ID NO: 27428 - DNA, 367 bp, Homo sapiens
  source 1..367: mol_type = other DNA
gaaattcccactttatccctgaatgtgggggaaaatatcaccagacagtcaggctgcataggaaaagagcagaaatgcccaggaatcccggtttttattattgtaaaaattaaagtgaagtgagaacagaaaaatgtcttttcctgatccttttatgccgttaaaaaatacatatccatttaagtcaggggtacttgaatattgatggtagatcatattcctcaccaccaataagtgtgttttgctttttaaaaaaactcaatcatgctgcacattgagtatgaatcagtgtggacaaacataggcaccttctgttggtgctatactgtaaatttatttcacctcagagagtaaacagatatattgg

SEQ ID NO: 27429 - DNA, 348 bp, Homo sapiens
  source 1..348: mol_type = other DNA
aggaaaagagcagaaatgcccaggaatcccggtttttattattgtaaaaattaaagtgaagtgagaacagaaaaatgtcttttcctgatccttttatgccgttaaaaaatacatatccatttaagtcaggggtacttgaatattgatggtagatcatattcctcaccaccaataagtgtgttttgctttttaaaaaaactcaatcatgctgcacattgagtatgaatcagtgtggacaaacataggcaccttctgttggtgctatactgtaaatttatttcacctcagagagtaaacagatatattggatttacaaaggagcctattaagtaaatgagacgtcgcctt

SEQ ID NO: 27430 - DNA, 656 bp, Homo sapiens
  source 1..656: mol_type = other DNA
aaagggttctgcagctacagcctatctgcaaagcttagttaatttacaaagttgccgcgcccgtgacacagcctcaggaagtcctgacatgtgcccaaggttttatacatttagggagacaggatacatccatcgatacatgtaaacaccaacggttaaattcttttgagtttctcatttgccttttcaaaggaggcaaatcagatatgtatctatccaggcctgccctaagcagtttcctgctggaatccacaaagccggctgggtaggagggccccagggccgggtggccgtccgcgtggcagggcgggggtcccagggcggctgtgcttggtgctgggaggccgcccgagggcagcgccggccccgagtcagcagccgcagggcaccctggagatgcggtcgcaaaggcgtctcaggtgacccttagggagggcttctgaggcagcccgtgcggggtccgtcctggctgagcactgcgcggacggcgcgcccgcgagactcggacccggcctagggctcagcgagctctcagcggggcgggcggacgcaggcagcccaggggagtggggcccgccctgcgccgccatcacccctttaagtgccaggcccgcggcgcatgcgcagtcaggccgttgtgcgcaggcgcagaggcg

SEQ ID NO: 27431 - DNA, 363 bp, Homo sapiens
  source 1..363: mol_type = other DNA
ccgggatcaagagatcctgcctcctgagtagctgggaccatgtgacggagtctcactctgtcccccaggctggagtgcagtttgcgccttggggggtgacccaggggttcgggccgcgggcccctcccctcgcccaggcacaccttgcagaggagggggcggcggggacaggacccgggtctgtgcctgcgcacaccctcgcggccgccccgccgggtacctgtcacggctactgccgcggcgcgcgcccgccacgttaagccggatggcgggaggaggggtgcgggggggtggcacggcgcgcgcgtgcgcgggagtcgccgagcaagaactggtagtgcgcgcgctcgccgctcgctcgcg

SEQ ID NO: 27432 - DNA, 428 bp, Homo sapiens
  source 1..428: mol_type = other DNA
agtctcactctgtcccaggctggagtgcagtttgcgccttggggggtgacccaggggttcgggccgcgggcccctcccctcgcccaggcacaccttgcagaggagggggcggcggggacaggacccgggtctgtgcctgcgcacaccctcgcggccgccccgccgggtacctgtcacggctactgccgcggcgcgcgcccgccacgttaagccggatggcgggaggaggggtgcgggggggtggcacggcgcgcgcgtgcgcgggagtcgccgagcaagaactggtagtgcgcgcgctcgccgctcgctcgcgtcccggaggcggagtctgcggcggcgggcggaacgggggcgcgcctatgctagtcacgtgggcgctggggcggggccgggcggccgttcaaggcagggggcggggcgtctccgag

SEQ ID NO: 27433 - DNA, 412 bp, Homo sapiens
  source 1..412: mol_type = other DNA
ccaggagtcccagattgtctctgcaacacagtgagagggtgcaggcccgggaaccatggcgtgtgggctcaggattcccaaggaaacattgtgcaccctctagaatccagagtctgggaagaggaggacggccccttccttggaggccacagctatcgctgccacctccgtggcatgccacccactgcctccagcagtgcagccagggatagtgcccccaaccagcccttgctgggggtagtgacagcccaatgacagtgcaggagctgacttaccggcaatgtgaccttgatattgctcctatccatggtctggatagctcacctacctgagcctagatgccacagagctaagctgagctcccagcttcgattctgattggatgagagaataggcctagaagtttttgcag

SEQ ID NO: 27434 - DNA, 260 bp, Homo sapiens
  source 1..260: mol_type = other DNA
aagctaattttccaaaaaagtaaatttagaatcgcgtctcctatctgactctcgctctgtcgcccaggccggactgcggactgcagtggcgcaatctcggctctcccgagtagctgggacgggtgtcacctatcagtgaaaggtgagttataaatacatgaagacacacgtatgcataagagtgcatagagctatactctcaggagcctgcatggccaaccctcaatttctggtaggcatgagaccctaccatagtccta

SEQ ID NO: 27435 - DNA, 578 bp, Homo sapiens
  source 1..578: mol_type = other DNA
aagcacctgcagtatgggtgaagcagcctggagcctggctgcataagcctgcacagcaggagggtcccagcaggagggtcgaggtgccactgcctgggtccagctcacaggctaccagggaggctccgatctggctccctgcatctccccatcaagccgcctctttcaggcctggagacagcggccgggccagaagccccacagctgttggccctggtttggacaccaggcagggggcaccacagcaggagctagcagcccagccccggccctgtgttctgggcacggaccaaggaggaaggcgcctcacgcaggccctgggctccgtgggcgtctttccagcttctaagctgcagcggcggccacccgcaacagcaccaccactagtgtcttgggggctttcttcaaagcatcctcgaagtggccagaaaaggctgtcactgacatttgtggcgccaagacttgcgcacgcgtgcaatgacgcgcgcacgcctcacgcgcacgccgcataacgtctgaggcgcgcacgcctcacgcgcgccccgcacgcgcgcccgcctcacgcgcgccccgcacgc

SEQ ID NO: 27436 - DNA, 704 bp, Homo sapiens
  source 1..704: mol_type = other DNA
gtggaaggacctagattatttttggtcttcaaacaaattgtagtggtggtattttttaaaaaatggaaatctcatgtaaaattcaaaataatgatggaacttcctcagcagttaaatgtttgtgatttttttaaactaatacttcattttgtttgtgaattttctcaaatatttctgcagatttataacatacaaaaaacacttctgttcttactgtatttttggaactttagagaaacttgaattttttaaaaatgaattaatttttaaactttcaatttatgtacttagaacaactcccaatttttcttgcttactaaagtccattgctaagaaaagaagataattaagtaaacatgtaaaaagaaaatgtatgctaattttaaaatggtcatcatattaaatacttttttttttataattttcaccttttagcctcaagtgatgagccaaaattttgaatgttaaaatagcccctgctttggggatgtaaaataacataaatatgaaaagctcatcttttatacttgaaaggatatggctttcattattgatttatggtatataaagatatcttagtttgtagtcaaagtgaatataaaccacaatttcctgaccgcttctgaaatcctgaggttaaaaggaatacagaaagatgtaattagatttatcattcccttaaattcaacttgtgtagctgaagg

SEQ ID NO: 27437 - DNA, 515 bp, Homo sapiens
  source 1..515: mol_type = other DNA
tcaaaatgaaattttatcataatgttctgatcacctatatgatattcatgagatgatctcaaggtcctatgcagttgacattcaaattgagattttcttgtaattttattgttcataagacttttattaaaaacaaaaattatccccactttctaggaaaataaactttaattctagttttctgttgtgcaaacatcgattctttcaaaaattatttatagtttaatatcttcatgatttgttcatttattctttggacccaaagaaatgggagctctgcaatgaagttaccacaatttaaatcatctctacagtgactttatttaaaatgttgattgaataaatccaaaatcaattaattcccaccgcccagccctacgccaggcgagggagcagtgcggtgggcggtaccccaagtccgctgggggcgtggccctggagccatgcctcgcccccagcgcgcgctcccggcgccggccccgccccctcacccaggcggcgccgtaaagccggag

SEQ ID NO: 27438 - DNA, 374 bp, Homo sapiens
  source 1..374: mol_type = other DNA
actctcagaggagtcattaacctaaaatggctgtcacgttacaggacttgcccataaggtcaattttggccacttaagacttacttgaagagagatcccttggataaatcgaattgactgaagaatgcttgaattcatttatccttcagggctgctcccagcgttggagcacggacgccagagccgacttccctcaggccccgcactgcggcagggacccttctacggaggatggctggggctctctagatccctttcattccctcccgcggaaagagaaaggctggaactccgcttcccagagcgggaccacaggtttgattatagttgcctcagagcacagctgcgggactgccgggaggagtgggggcggt

SEQ ID NO: 27439 - DNA, 533 bp, Homo sapiens
  source 1..533: mol_type = other DNA
ctgtttaattgatctctttgttaaccagaactttacaacatcttaatacattagaaaagtaacatatgataaacatttacttttagtcatgttcccatttatatttagaatgggtctaatccatattttaaaatatatgcatacatgctttaagtaggattagtattgtttaagttctaacttattttatcttctaacattgttttgtttatttagaaatataccatgcctgtaatcctagcatttgggcggatcacgagatcaggagatcgagaccatcttggctaacatggttcagctacatgccactgcactctagagaaaaaatatatacaaaattgactaccttgagtattcttttttttttttttaaataatagaaaaccaacatctcaagttttatttcagatgcattgtaaatttttacttttatataaaccaagaaaatgagttttgttttgaaatccttatggctctcataactgcaggcatgtctaaatatgagatttggaacatatgttgtgcattagaca

SEQ ID NO: 27440 - DNA, 559 bp, Homo sapiens
  source 1..559: mol_type = other DNA
ccaccgcgctgccgccccgagctgctgaagaagtagcagccctgctcctttggattaaccctgctcctgggtcctacgtctgtccagggagctgagcggggcgctcctcaggtctcgtcgctccacacgagtgctgggcgcctactacgtgctgggcgtggggtcaaagtgacccagagttcgcgggcaggcggggaccctggagcgtctggggcgccccggcccccaggctgtgcccaaacgggagcattcggcctgggtcccaagagcgctttccccggtccccaggaggagctgtccaggcgcctgcagcggtcgcgggcggctggacagagctgggagcccgggggacggcccgggcgcgccgtgcagcccctctctcggggacgcggtcctgggtcttgcagccccgtctgggacacccggaggggggttccgcagctcctgtgagccgcccggatccgcgcggcttcctcctgaccgggctgggccgcggcggactcggcggcggagggaggagcgcggctgcgggcgggcggtgagcgaggcgctcaaagtc

SEQ ID NO: 27441 - DNA, 554 bp, Homo sapiens
  source 1..554: mol_type = other DNA
tcattgaattgaaacggtttgctttgtatcaattctgaataaatgatgcactaaaaaacagcagactttattttgccaattgtggtatatgcaaataatatggtattatattatatgaggtttaactatataaaatggcaacagattgcatagttcaatcacttgatgaaaaataattgttttaaaatgtgccattgccactaaggaaaacattggcactatgtgcccggcactgtgctgggtgctgaatttattaagcattaatttgaaaaattgctttcactttcaagactgtgacagtattctaaaactctcattcatattgtttaaaggttaagtgaaatttgcaatacacaatacagttttttaagcgcattagcaacttcatttccaaatgctatcaaattcttcaggatatgaaaacctacatataagaatggagttatgttaacacgtgtactttagcttttttgtgtcaagcaaaaacaatttcatttttcaaatctgtggcccccccaatttagaggcgggtggctccaccgcgctgccgcccc

SEQ ID NO: 27442 - DNA, 572 bp, Homo sapiens
  source 1..572: mol_type = other DNA
ggattaaaaattatacccggattttcaagtgtattctatttgtgacaatatgcattgataatttagctcctggaactctccttacaattccatatatagtcaagcattccatgcatggtagttaattgtttgcttatattaagtcttgggaagataaactttatttttccagaattcgaatgaatgaaggtagatagaaaatgtctatattcatttacgtaatgattagttaaggagaaaagtacttcccagcataaagatttctgcaagttcaaggctaaaggggccggagttcgggaccctacccgacaagccctgggcgcagggaggaacgctgccctccggcctccagtcgcgctccccgaagcccagcgccagcgtcgcgcaacctgccgcaggggcggctcccgggccaggcagccaggcgcgccctcgccccacccgggaacgccaggcccgcgcagggaggggcggggctccatggcggccccgccccgccgcccggagggtcacaatgtagggttagggcggccggcgggcggggctctgcgggggaggagccgccgggcggg

SEQ ID NO: 27443 - DNA, 646 bp, Homo sapiens
  source 1..646: mol_type = other DNA
aactgtcgcggcactacaaagtctctatgtagttataaataaacgtaagctcactcactaatattggataatagttgctgggactatagcgcttactagccagcttcagggctagaatagctgaaaaaacctcaggtatttcccaaatcggtagctgcagaggggctctatccctaccagagatggagaaaagccctctcgcgctttttatgtcagccagagcggctcgttaagagaggtcgcatcccgtgagcatagagaacctgcccctggggcaaaccgcgaggggtgggagggcggagggtaggagccgccctagtggcggcccctgggagtgtcccgtgcctcgccttagtatgtgggagacgggctgccccacccccgcgcgcaaaaccctggtttagaggcggggacccctgcgcaggcttgcggcgtgggaggcggccgcccgcgacctacgacgccgcgcgccgggaggctgagagttcggcgccgggagggtcccggggacagaagagcgcctcgcccggttgccaaggcaaccccacgcggctggagaagccggcgctcgcagcccggcccgggccgctgccggaagtgacgcgagttcacctgccgagcgggggaggggcggagggtgcagagg

SEQ ID NO: 27444 - DNA, 591 bp, Homo sapiens
  source 1..591: mol_type = other DNA
ttacaacatggtttagccctcttttaataataataataaaaaggtaggaatatcttgtattcctcccgctagttggatgtattaaagtgctttcacaaaactaagaccatggtgttaactcaatataaaaggttgaaaagatgttccttcttttcttcagaactcaaagatgaagctttgatagagtgtctcagaaatagaaagcctggactctcaaggcttcatccacaggaggcaggccctgctgtgaggggccagggggcgaagccccgggtctagagagctgggtctagaactcgccattccgccctgagggtgtcaagtcgcgcgacccccgaaggcgctgacgcacgtagggcggccgggcgggggtcccacaggccttcagcgccgctttttgccggggagggaagcccgcggttctgcggaccgcgccgtcgcggtcgagggtctgcgccaggctcgtcgcctcccgtgcggctaggcccggggctcgggggtggcctcgcggcgaagccccgcccccggcaccgcccctcaggcgcgcgagccgatcccgcgcgcgccaaccgggccgcgagccccctgcgc

SEQ ID NO: 27445 - DNA, 385 bp, Homo sapiens
  source 1..385: mol_type = other DNA
tttttaaaagaatgctttttattgaaaagataaggtatcttagtcgtagttacctagaatgagaaattcgaagagaaaaagcacaggcttttcatttcaattagtgcatctcaaacttcgatgttaggaaatctcgagtgggtaatgtcaatgttgtttgttcatctaccaagaatgcctacatgtagattgacaggctagccctctttctatgtgagtgcaaccagaacacatacatatgatgctgtagaaaataacattgatcttaggtcagaactctcctatattgggggcaggggcgccccacaacaaataatgtatttgaaaagattctgtatttgaaattatgcactggcacttaactataagttcagtgacagtattc

SEQ ID NO: 27446 - DNA, 416 bp, Homo sapiens
  source 1..416: mol_type = other DNA
caagaatgcctacatgtagattgacaggctagccctctttctatgtgagtgcaaccagaacacatacatatgatgctgtagaaaataacattgatcttaggtcagaactctcctatattgggggcaggggcgccccacaacaaataatgtatttgaaaagattctgtatttgaaattatgcactggcacttaactataagttcagtgacagtattcacccccgccgcctgcggcccccgccccggggcagtagtcgtctatctacgcacctcgaggaggggtgtgtggagcggaggggcggacccacagcagcccggcgagcgcgcaggtgtgcccgcggccgcgccaccctccccgcagcctttacgggatggagccggcgggagagggcggggccaggcgcgcggcggccgcct

SEQ ID NO: 27447 - DNA, 204 bp, Homo sapiens
  source 1..204: mol_type = other DNA
cagactcctgccaggaggtggcgctttccagagagcacatgacattcccaagtgaagtcggggaaagctggcagtcacaggcctcaagccttgagtctgtttccaggtggtgggtaaagcccacctcccagctgggaacgaaaagggcttggttcttcccccacctgtgggagtgtgcgcacgggattcatgccctccccccag

SEQ ID NO: 27448 - DNA, 472 bp, Homo sapiens
  source 1..472: mol_type = other DNA
gtacttcctataagacaagtaatgttatttaacaaattctcatgcatttaaagcaacataatgagactactgaagctcattatgagaacattttcagagttcatactatggacttgatatacattaaattcttaagaacttctctccagtattcctggaaactaggtatcacagtccttgtagactgttttaataaaaggttatgaaaaatgcaggttttccaatgagctttacttctaatgtatatcgtagatcactgatagatgattgcaaagaaatacatacatttcattttacctccaggaaattcccaagaattcagaatgagttgcaaacactgagagtgaaatcagtttcgaaaaccattcgtcaaacaacctgcttggagataatctatttgcagaacggctagtacatttatctttgagaaaactaaacggccagagtttaatagcaaagctgtcacatttta

SEQ ID NO: 27449 - DNA, 365 bp, Homo sapiens
  source 1..365: mol_type = other DNA
gaaattcccaagaattcagaatgagttgcaaacactgagagtgaaatcagtttcgaaaaccattcgtcaaacaacctgcttggagataatctatttgcagaacggctagtacatttatctttgagaaaactaaacggccagagtttaatagcaaagctgtcacattttaagcggctgctgctgctgtgatccaggaccagggcgcaccggctcagcctctcacttgtccgcaacggtgtggtccaagccggggcttctgcttcgcctctagagccccgcacatccacgcgcggcacaggcgcggcaggcggcaggtcccggccgaaggcgatgcgcgcaggggggaggctgcagagtcagagtcg

SEQ ID NO: 27450 - DNA, 677 bp, Homo sapiens
  source 1..677: mol_type = other DNA
agttcaactaatacacaatggttcagaaagtactctatgaaaatgtggaagaaattgaagtattttgtttttatattgactttcatttttatatttatcagaaaatgtgctatgaagtgcattttaaagtaacattcagccgcttgcattttgtttgttaccagagagcaagaaaatggaaacatgttcttcgaagacatgtagtaacttcttttaataactacctaacttcaattctcaagttttcaaaataataataatacctcacagagtttctatgcagaaaaaataagataacctatgtcagtatttttcctggaacaaaataagagttcattatatgttagcctataacatttaacactataatactactagcaatactttaaaaacttgagtccaatcctagaatcaaatggcttccccaggaatttctttaaaatacttaaaatggaaataacacagatatacagaatttccaaatgtttttgaatgatcttcaaaagttcatgaagctatcatcttgagattaatatctgaaaagttgtgagacaaaaggacagttacagatctgtcttagaaacaactcaattaggcctaagaatatatataaatgataggatttggctgtgtttggagataattgaatcatgggagcagtttcccccatactgtta

SEQ ID NO: 27451 - DNA, 439 bp, Homo sapiens
  source 1..439: mol_type = other DNA
gtctaaacgtttattgaactgagacccatgaatgagttactcgactaggcttgtaggatgttccccttgtggcctccaggaatatgtcctgggttgaggtcaaaatttttgaagttttaagtcctatatcttgacatggatgaaatccaggatcgcctgaagaccatttcttcctctcttagggacctgctggtctccagctgattcggtccaggaggagctcctctcgggctccctgcaaggagagagtagagacactcctgccacccagttgcaagaagtcgccacttccccctccagccgactgaaagttcgggcgacgtctgggccgtcatttgaagagaacaaaggcccaagccttgcggaaaacaccaactacccgggcgctgggctttttcgacttttcctttaaaaagaaaaaagtttttcaagctgttca

SEQ ID NO: 27452 - DNA, 723 bp, Homo sapiens
  source 1..723: mol_type = other DNA
cggtgcactcctggcggggatctggccagtgcagcgcactgggaccgagggcagagcccgcggagtgaggccaggagagacttcaggcctctaaggacacagctgaggctaaggctgagttgaacgcagcccatttttccgcccaccctcctgaggagacagacagtgtagactttagggtacaattgcttcccctctgtcgcggcggggtggggagcgggccagcctgctccaggaaggaggtccacggagagacaagaatctccctcctcccacctccagatcccccattcacgttgagccggggcgcgctcggggcggtagcatcagctcagctcagctcagctcagcatcagctcagctgtcctgaggcagccggcggctgtgaaggagctccaggctgccccatccccacgcccttctcggctcagggcgtgcatgaacctgcggatggccggcgggcgagtggcgccttcgcgatcgcggccgcccctctaggcggaggcaccggggaccgaacccgtgacttcgagctaatcccgggaccgcgcgcctcgcggaagagcggccgccgtgcagcgcggagggatacgcctcggccgcacctcccctcgccgcgccgcccccgccgccctccccgcccggctctgctgccgccgcggcggccgctgctgctgctgcttctgccgccgctgccgccgccgctgcctggatatagtgcgg

SEQ ID NO: 27453 - DNA, 368 bp, Homo sapiens
  source 1..368: mol_type = other DNA
aaaagaagatgccaacaacttttctttttaagcatcaaattttaaatacaccactaaatcaactatctgctgtaaacaaaagaaaaaaactgatgtatactaatttcttctcctgggaatgctttttccagatttttggtccctaggaacaaatataaaaatttaagtgtggtgcaattttaaagcacgcaacagagcattcataatgggtttcccttttaaaagcaggcagctgtagagttttaacacgtggaaaactccacaagcagcagttatgtaacttgaaagaaacatgataaatatttcacaccaaaatctgagacgaggcggagcccgcgaaccccttgggcagaattttccaaatattc

SEQ ID NO: 27454 - DNA, 443 bp, Homo sapiens
  source 1..443: mol_type = other DNA
acttccacctggtggcggcgcattccaattgccagaattaaactactgtaaatgaaaatatttccatcctgtacattcattcattcattcattcaagaaacattctcctatacatcctatactatataaactaaactagaaaatttgtaaagagctcttaggaattacaaggatgtcatcgctgacaaaccaagaaaaccatatattcttttagggaactacgtggtgggcggcaggccgaccgccctgggggccctgcacctctgggtaggtgaccgcgcccaggtatcgagcacaggtaacgcgccccggctccgagtctcggggtctcagccactgaatccccagcgaggcctgacgccccccggtggaggcgagcagtctgagtgctgggtccggaacagacctgtcctgcggaactccgagtgcgcgttcggtttccg

SEQ ID NO: 27455 - DNA, 422 bp, Homo sapiens
  source 1..422: mol_type = other DNA
aaacaaaagaaaaaaactgatgtatactaatttcttctcctgggaatgctttttccagatttttggtccctaggaacaaatataaaaatttaagtgtggtgcaattttaaagcacgcaacagagcattcataatgggtttcccttttaaaagcaggcagctgtagagttttaacacgtggaaaactccacaagcagcagttatgtaacttgaaagaaacatgataaatatttcacaccaaaatctgagacgaggcggagcccgcgaaccccttgggcagaattttccaaatattccagcccccagctcctcgccctggggacagctggcagccccgcgcggaccagaggcgtgggggcggagggacgacccgccggggctttcccgggcgctgctctcctccgctaggacccggcggacgcc

SEQ ID NO: 27456 - DNA, 524 bp, Homo sapiens
  source 1..524: mol_type = other DNA
cccagctaccgctgaacactgttggcttcacacttttacacttttaaagaaaatcttaaaaatctattaaagacctatatttattaacacatatcagagatattgtcaaatactaaaaagacatggctgcttttcctttaaaatttactttttttaagcctgattttgaccattaaaatattttttaaaataacttccttgagagacagttatagtcactaaaattttgaccatgtcaacaccataaagtttactcttttaaagtaagttcctttatagattatttaacatttgaggagatcaaagttaaacaaaaaattacactcagatttctgagaaagctatgaccaagaatttataaaccatttcttcatgttctaaaggaagggtaacatccctccacaacaagcatctgctttattataaccaaatgccaaataatttatttggactcagaattaaaagaacatttgacagttatgaaatgcatgtttattctgaaacttctaactagttgtacaact

SEQ ID NO: 27457 - DNA, 337 bp, Homo sapiens
  source 1..337: mol_type = other DNA
ctgattagtgaatgcatattgtcgtaccatcgggtgccacgagagcatatgatagcgtctgacatgatattcctatgaacaatccatgggatgcaaactttcaatattatgactaattttttccctcgcctagacgctcccgtgcgcccggggcgggtaggcctggccgaaaatctctcccgcgcgcctgaccttgggttgccccagccaggctgcgggcccgagacccccgggcctccctgccccccgcgccgcccctcagagaggaactccaaggtctacaaacgtagaggtcagctgtgaccccgggccaagagctgctctctcctcctagtaa

SEQ ID NO: 27458 - DNA, 394 bp, Homo sapiens
  source 1..394: mol_type = other DNA
ggagcggcgacaggcgacccgtccggcacgggtcccggcggtgcccggtccccccgggctccaggccgctcgcccccaggcggccgcgggggggcccttgtgggggaaaaggccccggaacgaggccggcccgcgagggcccgcgctcccctcctccccggcggcccggaatcggccctgtcgcccccgcccgcactccagagccggctgagaacggcagcggcgagggctccacgtgcagcgtctctccgggtaagacctgcagctcccgcgactagaagtgtgaggtcccagggcccttcccgcggaatcggcgctgagaagccccaaggggaccgtccggtcgcagactgtctccgagacgcttcctgtccggtgagcgtcgaccgactga

SEQ ID NO: 27459 - DNA, 315 bp, Homo sapiens
  source 1..315: mol_type = other DNA
gggatgcaaactttcaatattatgactaattttttccctcgcctagacgctcccgtgcgcccggggcgggtaggcctggccgaaaatctctcccgcgcgcctgaccttgggttgccccagccaggctgcgggcccgagacccccgggcctccctgccccccgcgccgcccctcagagaggaactccaaggtctacaaacgtagaggtcagctgtgaccccgggccaagagctgctctctcctcctagtaatcagtcggtcgacgctcaccggacaggaagcgtctcggagacagtctgcgaccggacggtcccct

SEQ ID NO: 27460 - DNA, 413 bp, Homo sapiens
  source 1..413: mol_type = other DNA
catctagctcatgatttaattacaattcaggtaaaattgacttgaagtccactcagcgtcactgtatgtctaaaaaggacaggctagtccctcaagcagttgctaaagagttgagcggtttcttctgaagttcaagataacactaccaattagtggaaactacttatgaaatgaattttatttctaaatttctaatcatcttgcaatgcaatatgtcttctagtacacaaaaaaatttccaagtagacaacccattgttatctccttggtttacttccttgcttaaaaacaaaaaaacaaacccatatcccagctgagcaggctgagactgctgggagcggcgacaggcgacccgtccggcacgggtcccggcggtgcccggtccccccgggctccaggccgctcgcccccag

SEQ ID NO: 27461 - DNA, 202 bp, Homo sapiens
  source 1..202: mol_type = other DNA
tatgagaagtaattcccataatacggatatcgatacactattattaaccagtattcctgttttaacaattattacttatgacagtatcgtgcagagtagtttctaaaaattggcatccccttttagcaactgcagaaactaaaaatttttgaaattgccaaaattccgttatttgtgtttgccttcacagtgaagacaaagt

SEQ ID NO: 27462 - DNA, 406 bp, Homo sapiens
  source 1..406: mol_type = other DNA
gaatgaggttttgctgtctcaacaagcaaagaaaatcctatttcctttatcctttatacgacacccccgggaggcctgcggggtcggatgattcaagcccaggtgggccgtcggccggggagcggagggggcgcgtggggtgcaggcggcgccaagggcgcgtgcacctgtgggcgcggggcgcgagggcccctcccggcgcgagcgggcgcagttccccggcggcgccgctaggggtctctctcgggtgccgagcggggtgggccggatcagctgactcgcctggctctgagccccgccgccgcgctcgggctccgtcagtttcctcggcagcggtaggcgagagcacgcggaggagcgtgcgcgggggccccgggagacggcggcggtggcggcgcgggcagag

SEQ ID NO: 27463 - DNA, 311 bp, Homo sapiens
  source 1..311: mol_type = other DNA
aactggacagtgaatgaggttttgctgtctcaacaagcaaagaaaatcctatttcctttatcctttatacgacacccccgggaggcctgcggggtcggatgattcaagcccaggtgggccgtcggccggggagcggagggggcgcgtggggtgcaggcggcgccaagggcgcgtgcacctgtgggcgcggggcgcgagggcccctcccggcgcgagcgggcgcagttccccggcggcgccgctaggggtctctctcgggtgccgagcggggtgggccggatcagctgactcgcctggctctgagccccgcc

SEQ ID NO: 27464 - DNA, 238 bp, Homo sapiens
  source 1..238: mol_type = other DNA
gatgtataaataggaataatataatttaagcgtataaacaaatactgcatgacaataaatatttgtccttatttgttgagaaatgacttcccaggaaggaagtctgtaccccgctggctgagccatccttcccgggcctaggcaccggagagaaggcaggctgcagtgcagccctcagaagggccttctagtctggacactaactggacagtggacggaatgaggttttgctgtctca

SEQ ID NO: 27465 - DNA, 666 bp, Homo sapiens
  source 1..666: mol_type = other DNA
ttccaatgttaatctaaactgttttaattattgtgatattatatgtaatatcccattcattattcccattactcttgttttaaatagatattcttacatatttattttccatataaactttagaatcagattggtttgaaaaaaatcatgttattttaaaaattgggatcaattttatttccaaatgtatataataatttggggaatcttgttgtctttatcctactaaattttcttagtgaaaaaagtatctctttacttattcgtatcattttttttccttcatgcataacattgagaactttctgatttttgtttgcaggaaagaaaactattggtttgctaaacaagagctttatagttgattaactttgattttccatgtatacacgtatttcatttgctaatgacaatttagctacgtcaaaatcataacgacagtgtgcactgttgtgttttttttttctgaatttacaggaaaaaataataaacattttatcagctttcagcagaaaattccttccctttgtttaaagataaaaagcaaagttgttcatccattgcttagaaaggggaaaagtttcttggtcccctagtcactcttaacccgggcttggggaggagtcggggccacccccgccccctgcccgcagtcgttgccacccg

SEQ ID NO: 27466 - DNA, 367 bp, Homo sapiens
  source 1..367: mol_type = other DNA
ctagccccagcgatcgctgctggcccccgggtagaagaagaaaaagcgcaattccctccttatgctctagggccgcgtcccagatcacccattccagaaatgtgaaaccgggccccctcacccaggcatgctttctgggggaagcgcagggccaagctttccctagaaaagctcatctcctgcgttcgcagcccagcgcggtaactgagttaccgcaaccgggcgggagagtcttctccctggagcggccccagcagtacaaagtgctagcagtggcgtggagccagcgcggaggctgccccctccccctcccgagcccgcagcgcggagcgcggtttagcaccaacggagccgggggcggcgggac

SEQ ID NO: 27467 - DNA, 296 bp, Homo sapiens
  source 1..296: mol_type = other DNA
cttgcggcaggaacttcccacccaaccccaagacagacccggagccgctgtggctttaaaagtggccaaggaaatctgttttccctcccccatctgattaggcgcggactgggaagggtctcccttgttgaaattgccattgcaggatggcatgccgctataaacgctgctctcggcgctcgcagctgccgactggggatgacggcgggcagcctggtcccagcagacctccacagccggcttgtccagcgcagcgcgggggcgggaggctgcgcgcaccagttgccagcccggtg

SEQ ID NO: 27468 - DNA, 421 bp, Homo sapiens
  source 1..421: mol_type = other DNA
aaataaaagtatgagcgcaaaattttaaaatctttcagggaaaaaaaatgagcggaattccctctaagagttaactctttctcgctctgcctttttagagcaaaggaagttcgctgggagcccgccgttcgcacacaaagctgcggagttcccaagcggcgggcgttctcgccccggggtaccgcagcgcgccaggaagcgccctgggctctctggctgtccagccgctctgctggtggccgggagaagtcggagcccttgcggcaggaacttcccacccaaccccaagacagacccggagccgctgtggctttaaaagtggccaaggaaatctgttttccctcccccatctgattaggcgcggactgggaagggtctcccttgttgaaattgccattgcaggatggcatgccgctataaa

SEQ ID NO: 27469 - DNA, 561 bp, Homo sapiens
  source 1..561: mol_type = other DNA
tggctgcaggcgcctgtaatcccagctactccggaggctgaggcaggagaaccgcttgaacctgggaggcagaggttgcagtgagcctagctcgcgccactgcaacagcgagacttagaaataaaataaaataaaatttgtacctcaaatacttttctgtatttttatttctcaaatttaaaaaacgagctgtaaaaatgtttcattgcgaaacaaatttcagaaattgactcaaaaagaatgcaaatacttgaatagtctaataacttacagatgttaaggcttagcagtgtattaaaccgcatcatcttgcttaaggtttataaaaagagtgcattcatgattcatcaggaaaagtcttcatctttatagcgtaaagcttaaagttcagctgacaaaaaaacagtaaaatttattatgtattttttcaaatccttgcaaactaggaataaaacagaatttccaaatatcattagaatgaataaaatttaaatgttcgtctacttcgccagccccactcctaggcctgcgcatgagggtgagggcatgcgcatgcgcatg

SEQ ID NO: 27470 - DNA, 373 bp, Homo sapiens
  source 1..373: mol_type = other DNA
cagatctctgaggagagcactgactgctgctgtgatctctttggctaaagcaattgctcctgccacggtaaaatgcagctgctgctggcatgatgcttacagaatggagcaagtcccttcttcaataaccagcacacatttacttgtttctctggtgtgattctgagtcgcacaggatttgtacatttcaaattttaatagggacctgcacgttaacagtttcaaagcagtaatcaaattttaacaagacttgggaatactgtcaaagttggccttttctaaaaaacgcccagatgattgcatcatgttggaagtctaaaacactcccaatttggcgccacgggtccaatgcttggcttcctagtcctcttcc

SEQ ID NO: 27471 - DNA, 350 bp, Homo sapiens
  source 1..350: mol_type = other DNA
ttgctaaatgtcaatgtttacaaatcttatctatgacatttctaaaatgaatattataaagtgtattgcatatagttggattgggaagaaaaacatttctaattattctcccctcctccatgattcagggacaaggaggatgaatttgaggaacattaacggaccaattctttgtccctgaaaagtgcccgcctgaggtcagcccccagctactcggggcagtgagccgagatcgcgccactgcactccagcttgtgaaaagtacctagcagggacaacgcattccctacgcggctcccaacaggcgagccccagcttccggtccgcggccttggacgcgcatgcgccgc

SEQ ID NO: 27472 - DNA, 306 bp, Homo sapiens
  source 1..306: mol_type = other DNA
ccaggctggtctcgaactcctgacctcacgtgacgcctcggcctcccagtgttgggattacaggggtgagccaccgcgcgctcgcacttacaaattttcaaagaatggacagtaaatatttgaaacggccgggcgcgagcacgttgggaggccgaggcgggcgcatcacaaaattttatcccagctacctgaggcagaagaatgcactccagcagagggatattccgtctcaaacaaacaaaaaatcactcgctgcgttttttattctgacatatgtgttccagaaaggtaacctaacttcgtggt

SEQ ID NO: 27473 - DNA, 541 bp, Homo sapiens
  source 1..541: mol_type = other DNA
aagggatttatatttatctataaattcatatataaatcagatatatttatataaaatgtgtatattatatatataaatcagataaataaatatgtatttatatctgatcttaaaagagtaaaagggatttatacattttgcaataagtctgatctagataggaattctagctttaatatttactagctctgtgatgaaaattatttacagtttgtgaacttcagtttcccttctacaaaatagagacagtaccatttaatttttaatttttaatggtatcgtctccattttatggaaggaaaactaaatggtattttaaccgacaattcattaatttttaagactgaccattcttgatgtgtactacattactcttgagacttaatctgactacggtcagagagcacagactggagcaacctctcacggcctgggctgtctgcgcgtgcgtgagccagaaacccgaggggctccctgggcccgccctatcgatcgacccgatcggggatcgaagagcgtgaggcggccccacgctgctttc

SEQ ID NO: 27474 - DNA, 522 bp, Homo sapiens
  source 1..522: mol_type = other DNA
ccagctaacataagttgggaccggaactcatttggcgtatgtttctcactgggaagcaagcaaccaaggataatcgacgtcgcctttaagggtgacgggccttagccccatttacggatggaggcaaaacgcacgcgcggcttcacatccgtccaccttcaaggtgtacaatgtcgatcgttccctcggccttctcccggtcgcggaagaagagaagtgcccgcaggctccggtggctgagcagggacagcccgttagtaggccctcctacttcgccgcggccgccgcagccctctgggcaaagcccggagccttgggaacgtgaagcgccatggccagcctgcaggaatcacggagcacgcacagccttctgggaaagcagcgtggggccgcctcacgctcttcgatccccgatcgggtcgatcgatagggcgggcccagggagcccctcgggtttctggctcacgcacgcgcagacagcccaggccgtgagaggttgctccagtctgtgctctctgaccg

SEQ ID NO: 27475 - DNA, 212 bp, Homo sapiens
  source 1..212: mol_type = other DNA
tctccacccttataaaagattagcgctcttatgaaagagcttctgctagcaccttgatctcggacttccagcctcacgaactgtgagtaacacgactgacttcaagaatgaagccgggctcaggagtgaagctgcgaaccttcgcaggacccaatcgggttgccactgctggctctggcagctagacacacaggcattcacaaaccctgagc

SEQ ID NO: 27476 - DNA, 302 bp, Homo sapiens
  source 1..302: mol_type = other DNA
ggctcaggagtgaagctgcgaaccttcgcaggacccaatcgggttgccactgctggctctggcagctagacacacaggcattcacaaaccctgagcgagcccagctggcttcacccagtggatcacgcactagggctactgggcgctgtggagcagcgggcggcgctcgtcgcggaggctcgggcatggcgggctgcaggtccctagccctgccctgcaggaagacagctggccaggcgagattgagcacggcagctgctggcccaggtgctaagcccctcaactgcccggggccggtgggg

SEQ ID NO: 27477 - DNA, 260 bp, Homo sapiens
  source 1..260: mol_type = other DNA
acagagtcagatatatatatatagtgtatatatgagaaataatgcctttctgtcttacctggatcgactcccagttgtgcctttggtaaatcaatgtctaaacaaaaaggtcaataattacctgttggtaactgaaagaatataggctcattcagagcgttcagtgtttgggatttttagaaatacttcaatgagtttcctttataatttcagtaaagatatgaccttaacattgaagcttatttgagaaatgtctgaag

SEQ ID NO: 27478 - DNA, 400 bp, Homo sapiens
  source 1..400: mol_type = other DNA
ggctcaggagtgaagctgcgaaccttcgcaggacccaatcgggttgccactgctggctctggcagctagacacacaggcattcacaaaccctgagcgagcccagctggcttcacccagtggatcacgcactagggctactgggcgctgtggagcagcgggcggcgctcgtcgcggaggctcgggcatggcgggctgcaggtccctagccctgccctgcaggaagacagctggccaggcgagattgagcacggcagctgctggcccaggtgctaagcccctcaactgcccggggccggtggggccggcaggcggctccgagttgcgaggtccgcggggcccacgcccacccggaactcacgctggcccgcaagcaccgcgcgcagccccggttcctgcccg

SEQ ID NO: 27479 - DNA, 414 bp, Homo sapiens
  source 1..414: mol_type = other DNA
ttgcttttgtaagaaactgcccaactgtttactaaagtgggcaccaacatttgatgttgttattccaataggtgtatagtggtatttcattcttagtttattccctaatgacatatgatgttgatcatcttttcatatgttggatgccagtccatcatctgatatgtattaatatttattttgcttatttaacctcaaaaatcacaatccaattattttttaagtaccaatgacatccaggtttacagtttttaaaaaggttgacaaatcctaatgctgtattcgttgcatttgaagaatgaatcgagtcatcaagccaagttggcttatctttgccagtttgctggaatagacacagacacaagacattcctgtctcaggactaatgaattaaaacatttggctttttctaga

SEQ ID NO: 27480 - DNA, 400 bp, Homo sapiens
  source 1..400: mol_type = other DNA
gacatatgatgttgatcatcttttcatatgttggatgccagtccatcatctgatatgtattaatatttattttgcttatttaacctcaaaaatcacaatccaattattttttaagtaccaatgacatccaggtttacagtttttaaaaaggttgacaaatcctaatgctgtattcgttgcatttgaagaatgaatcgagtcatcaagccaagttggcttatctttgccagtttgctggaatagacacagacacaagacattcctgtctcaggactaatgaattaaaacatttggctttttctagaaagatgacaacaggcagagcaggtagcagcgtgctgccctgacagctgtctccgctcctcagtggctgctatgcagcaggtgcagcctggtctct

SEQ ID NO: 27481 - DNA, 562 bp, Homo sapiens
  source 1..562: mol_type = other DNA
ttaactgattgctagctatcattgctaaataacagggaggatttggattacagacccaatgtgtcctattagctgctcaatagatgttgaaaagagcccatcatcaaatgtactatggtacatcataatggttgggctgtcagtaagaaagttctagcttacacattgtatttgccaaacaggcagtgaacatctgtttatataaaaaattttcctctatcctttaaaaaatttcttaggatacatttgaagaagaagccttcaaattacttccttaatgcattaaaaatatgataaagtgatttgccaatttgcgtaagtcttgcacaataaataattggtaaattttaataaaaatgtacttgtgctgtgattttgtcccattataaacatatcaagcaactattttttttttcaaaaaagctaaatttgctagagtgtacagctactgtacagttcactgtcaaaatgttttacaacgattcagccaaatgtttttggaacagctgtgctaccttttagaatatttgcctatttttaaaaccagtcaaagaaggcagcc

SEQ ID NO: 27482 - DNA, 496 bp, Homo sapiens
  source 1..496: mol_type = other DNA
cagacctcaaggtccccctcgtggggttggcgtgcccagtcccctccgctgcgcgtgcatcccgctccgctgacagctggaagcttcctggcagcgaaaggtcgtgggcgcccttgagcgaggagctcttcctctctcctgctgttcgcgggcacccgggcacgcggcgactcggctgaattagggcgtcctgcagctcccgaggcgcttggcctttccgttccgccctcagaagggagaggagtgccacgcgcggaggtccggggaccccaccgccgcctcctcgaggcccgtccctgcaaccccccgcgtgggcttccggccgcggcgacccctgccccgcgctattgcgcgcgctcgttcgctgacagaggcttcgagggcggcagggcggggcttcggcgccgggggcggggccttcagcgggcgggcggggttttggcgccgcgaggtggcggcagcagagcgggagtcacctgaccgctgccctcgccgc

SEQ ID NO: 27483 - DNA, 366 bp, Homo sapiens
  source 1..366: mol_type = other DNA
tctagtgagtgttatttagaaattaattcaccagacccggccccagagattgtgccactgcactccagcctgggtgacagagtgagactctgtctcaaaagattcaccaaatattgattaataaggggaaatttgttgttccacaaatgcccatttaatctgtttgtgtaatcacttgagtcatgtaacatgaattgaaatgagttttaattggaaattctttatcttgagatccttattaagcttaactgaatttttattataggaagtgttaagccaggtaagatcacatggttgatgatatcagtagagcgttaatctgattatccacagctgtgtgtttaacacttcatatttttcagaggg

SEQ ID NO: 27484 - DNA, 338 bp, Homo sapiens
  source 1..338: mol_type = other DNA
cctatctttcagtattcagacctgacagttaaaagaatggaggctgcttctatcaatttgcaagagattatcttgggtccaaataggaatgaagccactataatcttggagtactgaaattttccaaaataaggcttccttgtgtgtgtgtgcgcgcgcgcgcgcgagtatcccggaacgtggctccgctcccagttaacctgctggagctcatcaggcttgctcagagagatcggggcagcaactttcctcagctggtctctgggctccgggagccagagagcgctgatcctccgcggtctgcggcccatggaagaggaggcactgaggagccccga

SEQ ID NO: 27485 - DNA, 835 bp, Homo sapiens
  source 1..835: mol_type = other DNA
ctctcctgctgttcgcgggcacccgggcacgcggcgactcggctgaattagggcgtcctgcagctcccgaggcgcttggcctttccgttccgccctcagaagggagaggagtgccacgcgcggaggtccggggaccccaccgccgcctcctcgaggcccgtccctgcaaccccccgcgtgggcttccggccgcggcgacccctgccccgcgctattgcgcgcgctcgttcgctgacagaggcttcgagggcggcagggcggggcttcggcgccgggggcggggccttcagcgggcgggcggggttttggcgccgcgaggtggcggcagcagagcgggagtcacctgaccgctgccctcgccgcccgccgggcgctctcgcttcagtcagtcgggccgcgccgcgcctcagctctggtgagtggctcggccgtcccgccggcccttctccgggagggttggcgcggtcagggccgcgggcctgtgaggggaggccggcggacaggtccagtgaaggcgcgggcgggccgggggcggctctttctgggctgggcggggcgcggggggcacgtatcggggcccgcggggggcgccggcggccgggatcctggaagtggccgcgacgccggaaggggcgtcccgtcggcggccgaaccccctgcactgccggagctgtgtttacccgcgcgcgccgtactttacccggggcgggcgggggctgggggccgcggggtccctgccccacccccctccctgccctcgggcgccagcccggcccctcgcccgcggcccgcccgggctgtgacacatcagcaccgccctcgcggctggggcccc

SEQ ID NO: 27486 - DNA, 389 bp, Homo sapiens
  source 1..389: mol_type = other DNA
aaacaaaatactcagtaggtatttgttgaataatgaatgaattaattaattaatacacgaatggactttaagatatattagattccttttcaactgtggacatacttttcatatggatttggtcagttcttcaaaatctatttaccagttaaaaaaaagagatgttaatatagaaaacatatatataaatgctgatttccctagggaagtgtccttcctatctttcagtattcagacctgacagttaaaagaatggaggctgcttctatcaatttgcaagagattatcttgggtccaaataggaatgaagccactataatcttggagtactgaaattttccaaaataaggcttccttgtgtgtgtgtgcgcgcgcgcgcgcgagtatcc

SEQ ID NO: 27487 - DNA, 455 bp, Homo sapiens
  source 1..455: mol_type = other DNA
tagctttccacagtggagttctaacctcccttggagaatgaacatgcattttccccaccatagggtttttagtgaaaagtatagtgtctgacaccacaaacaaaatactcagtaggtatttgttgaataatgaatgaattaattaattaatacacgaatggactttaagatatattagattccttttcaactgtggacatacttttcatatggatttggtcagttcttcaaaatctatttaccagttaaaaaaaagagatgttaatatagaaaacatatatataaatgctgatttccctagggaagtgtccttcctatctttcagtattcagacctgacagttaaaagaatggaggctgcttctatcaatttgcaagagattatcttgggtccaaataggaatgaagccactataatcttggagtactgaaattttccaaaataaggcttccttg

SEQ ID NO: 27488 - DNA, 407 bp, Homo sapiens
  source 1..407: mol_type = other DNA
ggcacatgcctgtggtcccaggtacttgctatgatggcgccactgcactccagcctgggtgacagagcgagacattttctcatttcacaatatgtttttgaaatatttcccttgaaaggtaagtcatatttatcattcctgttgtatggaggcatcataaattatttcaccatttaggccagacaaaaacggcctagaagccaactagttgccgtttggttatctgtaggaatgtcagtcataactaatgacatttctagacaaagtgacttcagattttcaaagcccccgtgaaaagaccggctgcggggcggggggagtctccggcgcacgcggccccttggccccgcccccagtcccggccactcgcgacccgaggctgccgcagggggcgggctgagcgcgtg

SEQ ID NO: 27489 - DNA, 620 bp, Homo sapiens
  source 1..620: mol_type = other DNA
cactaaactgtgctgttttcaggcaaaacaattatcgtttatttaaggctgcacaggggttccttaaggcctggagagccgaggttaaatcctgcgccctttgttcgcggcagccgagagccagcggctcagtgcccgccgcccccgccgggtgcagggccggttagggccgagcgtttcgcagagacgcaccccgggagcaccgcgtcgagcggagcgcgcgtgcgccagggcttgctctgggtcaccctcgcagccctgggatcccgcgctctgcaaggccgtctccccggcccgcggccgcggccgccgccgccgccggcgggaaagcgcccagcgtcccggcgtcacgcgccagcagccctgcacgcggggcggtgcagggcggcgcagggcgggacgaggcggggagggggcggggccagcgcgacggggcggggcgaacgccgggcacaggaagcgccgggaggcctgagccgtcccagggtgccccgcgcggcgtggactcgggccgctgccgccatcccgctggagagagggagagagaggcccgcccgctcgccggccgggccagtgtgagccagtgcgtgagggcgcggggggccgtgtcagcgagacgc

SEQ ID NO: 27490 - DNA, 565 bp, Homo sapiens
  source 1..565: mol_type = other DNA
cagctccagctggtcctccttcgggggaggtgatggtggcagtcctcatcaggctctgcaggcctctcctccctccagatgtagcctggacttcctgtcggacactaaactgtgctgttttcaggcaaaacaattatcgtttatttaaggctgcacaggggttccttaaggcctggagagccgaggttaaatcctgcgccctttgttcgcggcagccgagagccagcggctcagtgcccgccgcccccgccgggtgcagggccggttagggccgagcgtttcgcagagacgcaccccgggagcaccgcgtcgagcggagcgcgcgtgcgccagggcttgctctgggtcaccctcgcagccctgggatcccgcgctctgcaaggccgtctccccggcccgcggccgcggccgccgccgccgccggcgggaaagcgcccagcgtcccggcgtcacgcgccagcagccctgcacgcggggcggtgcagggcggcgcagggcgggacgaggcggggagggggcggggccagcgcgacggggcggggcgaacgccgggcacaggaagcgc

SEQ ID NO: 27491 - DNA, 568 bp, Homo sapiens
  source 1..568: mol_type = other DNA
attgtttatgcgatgagcacagtcacagcgcagcaaacgccctctccaacacagccaaccaggctgcgtgcgagcccgggcagacgcctggccgcctcccccccggtccagggggccctactgtgtggcggactcagggccgggcacgcaacccgactcccttcccccttccccccgccccgggtgggtgcggccagtgggggatttcaccgcgggcaagaggcgcagccggaggcggcccgacctgggcggcccgggagcgcgcgcctccgaggccgcgcaggttctccctgtctggccctcccctctccagcgagggtcgagtttgactgtggcgcagctcgcatctgttcccgccgcccgcgagcggattaaatttctgcaaattcaaactgctgctgccttccagagggcgccggcagcccgccgcgcgcttctctccggcgggagcggccgcccagcgcacggctaggagcgatcgcgggagcccgacccaagcccgtgcgggccagacggcggcggcgaggcggaggctgcggaggcacccgggctcccggacccaggcacc

SEQ ID NO: 27492 - DNA, 442 bp, Homo sapiens
  source 1..442: mol_type = other DNA
tgaggaaatctgtccttatcatcaacaagggatgcttcttccttgcaaggacgaattgttccttgatccaagcagcagggacacttccccttcccagggtctcacgcaaaaggaccctgtgatgagggactcctctttctccacttcatggacttatatacaactataattagtccacggctgccaatactgacagcgtgggcacgcctaggagcttatgcagattctcgggctaacctgctacctgctgaaccagtctgcttaagaagctcgccaggcggttccagtgacgctgcccctcccacggaaagggggtctgcatcatcaatttcttcaggctggaaaacctgacgcttggccaaggccgcacggcgcgcatgcgcactagaggccgcccgccgtcccgccaccgctccccgccccgcgcatgagcagcggcggt

SEQ ID NO: 27493 - DNA, 300 bp, Homo sapiens
  source 1..300: mol_type = other DNA
gaatgcctcaggcgtggcaggcctcagcaaagactgtctacactgtcaatatgatactgtagaccggaccacatggggttgtgtcagagataaacagccttttgagtctgaacaaatgcagccggctaagttcacggctggcatcactcgatttctgccctcagatattgaatctattacattttggttcttttaacttttcaagtatttaagacaaaaagcgaaaggggccctgggcgactacgcccagctccctgtcctcacacagagagggatcctagggctgccctggaaagccgt

SEQ ID NO: 27494 - DNA, 295 bp, Homo sapiens
  source 1..295: mol_type = other DNA
ggaccacatggggttgtgtcagagataaacagccttttgagtctgaacaaatgcagccggctaagttcacggctggcatcactcgatttctgccctcagatattgaatctattacattttggttcttttaacttttcaagtatttaagacaaaaagcgaaaggggccctgggcgactacgcccagctccctgtcctcacacagagagggatcctagggctgccctggaaagccgtctgcatcagtgaggcagtctcctcccaggggcttggcgcctggctcgaggcgaggctgcc

SEQ ID NO: 27495 - DNA, 490 bp, Homo sapiens
  source 1..490: mol_type = other DNA
aaaatatgtatcagagcatttaatgcggtttacaaatcaatcacatcttccaaaaacacactgtgttgtttttcagttctccattttaatgacaggaaccaccctgcacggcgcaaagagcccatgtgacaggctgctaccagaccagtcgatctggtgggcacccgcacaggcggacctgcctggcacctagccaaggcgaatccaccttcccggccagccaccgtgtgtgaagcaagctcttcatgcgacaccttcagggcgccggggcccgagtcttcgtggatcggccaggccaggggtctgggagttcttccggccaagagcacccgaagggtggaccccaaaccctgcagccgggggcggggggtgtcgtggagtgtccgctcgccccatgccgtgaccgggacgagccccaagactctggatccccaagactctggacccttccgccggtcccagcctcgcgcgggtcggccccttccgccgg

SEQ ID NO: 27496 - DNA, 414 bp, Homo sapiens
  source 1..414: mol_type = other DNA
actgtatgcattcatccactttggccatcataaataatgctgcaatgaatatttttaccaggtaagaaagcctggggatgctgtcacagtgagtaacagtgcccacttagcagggcagtgctgcccactcccaggactcgggagcatggctgcctccctcaattcatatctacacactaatattttgagtttttatttaatatttgaatgtagattttaaaaatcattatgccagacaggctgggcctcactcgataaacactgatgtttagcattgcgcccacctctgagtgggtcccacggggaccctcagcaggcctccctgcacactctggggcgttcgcagctctggagcccgcggggcagtgcgtccggccccgccctgggcctccacgcccgccgcgaacttggcag

SEQ ID NO: 27497 - DNA, 604 bp, Homo sapiens
  source 1..604: mol_type = other DNA
gcgcccacctctgagtgggtcccacggggaccctcagcaggcctccctgcacactctggggcgttcgcagctctggagcccgcggggcagtgcgtccggccccgccctgggcctccacgcccgccgcgaacttggcaggccctcccgccgggttcgggaacactgtgtgcctagcgcttccgccggccccgcgcgatccatagggtttgggtcgctgggcgccaggtacccgcacccggcaagcagccacggagcctacgcaggccactcaggccactggctgggcgtccgcgccggtgcagtgtcagatcccccagcgctgcgggagctaaagatcccggctccggagccatctcagacctccagctcgtcgccgtcctggctgcgagagcttgggcacggcgccggggctcagtctgcacgtggcgcgcggcgggtggcggggatggcagcggtgcgatcccacgcctccaggaccccaccttcctgcggcccccgatcggccccgccccgggggcgccccagctgcacgcgcggcgctggctccaaagtgcgtcacgggcaccggccgcgctccttctgccgccagggcgaggctggcacc

SEQ ID NO: 27498 - DNA, 688 bp, Homo sapiens
  source 1..688: mol_type = other DNA
ccgccggccccgcgcgatccatagggtttgggtcgctgggcgccaggtacccgcacccggcaagcagccacggagcctacgcaggccactcaggccactggctgggcgtccgcgccggtgcagtgtcagatcccccagcgctgcgggagctaaagatcccggctccggagccatctcagacctccagctcgtcgccgtcctggctgcgagagcttgggcacggcgccggggctcagtctgcacgtggcgcgcggcgggtggcggggatggcagcggtgcgatcccacgcctccaggaccccaccttcctgcggcccccgatcggccccgccccgggggcgccccagctgcacgcgcggcgctggctccaaagtgcgtcacgggcaccggccgcgctccttctgccgccagggcgaggctggcacccggccagcgcgggcagggccacgggtgcccggctgtttcccgggcgctcaaggtgcgcggcccggggcgcgctactgggggcgccctccgcggtgggcagcgcgccagggatcggcctgggcagccgcggggcgcgcgaaggctgcgctttccctacggcccccctcgcttcctccggcacggcggcaacggagatttccttcggggaaactacgcggatcccggggatcctcccctcccctttgctggggcgcctgggctgg

SEQ ID NO: 27499 - DNA, 266 bp, Homo sapiens
  source 1..266: mol_type = other DNA
acacatggggacaaaagtgccttctgtttccattcatgacgtcggcatttactgcctattgcatgcgaatcgcttgcagtaatgatgaaactttgaatccttatttaaactcacatatattattttcccttcataaaaatgttttttctagtaaataatttgatatccgaagaaagtttgtatttctaatgtatgctgaacacgttgcgttataaaacacatggttttgactcaagaattgcaggattcatgtccctttaagacag

SEQ ID NO: 27500 - DNA, 413 bp, Homo sapiens
  source 1..413: mol_type = other DNA
ccccaattgctatgccctgcttcagagcagagttctgaattcaggagcagcccctgagagtgggtactcatgagtgaggggtttggccccacacacagtgtgaggccgctcatcaggagtgactgcaaacatttcctgctaggaagccagctcaatattctttgtctaagccatgttaaataaatgaaatatgcagaagtaaacaggcagcccctttatacctcgacgatgccagtgcccttccctggcagtggcctacagatctgtcaggatctccctgttgtccaggcctcccatggtgagcacggggagaaatctgtcccctgccccctgctgggaggggctcagctgggctctgccccctgggtgggaacacacagccattcttacgactggccccaggcagggctcaa

SEQ ID NO: 27501 - DNA, 273 bp, Homo sapiens
  source 1..273: mol_type = other DNA
gtgcttggtctcccaggcacggccagccccttcaaggggctcgttataaataacaagacactcctgtcactcaggaaattccaagagttttggagctctgtgcctggaactgagtagcaaagaccagatatatttgttatttcatcatggcttactccaacctctgccctgctgagtactttgccatgttggccaggccaccacatctggtaggtctgttctatgtgaactcttcagcctggcttttacttcagctgatccagctagagctgg

SEQ ID NO: 27502 - DNA, 401 bp, Homo sapiens
  source 1..401: mol_type = other DNA
tttgttttctttttgtcacactaaaatataagcagcgactgacgccgactgccttcagcaagagtccgctggaggatgtcgctctggcaggggccgctggagctaccccagcaacaagactcagttctgggtcgctgccgccgaactttcccaggccggaaacagcgtggaaggcggcagctgcggaactggagtggaaatctcgggccccagaccagtcgattgggaggtccgccctcccgttttggcagttgccgcgacaacagtcacttccgggaaggggctctgcgaactcagctgtcctctcagactgtgtggggcttggattgctgggcctcggtgcaccccagcctcccccactccaacatccacttccgggagcgagtgccgtttcccccgct

SEQ ID NO: 27503 - DNA, 337 bp, Homo sapiens
  source 1..337: mol_type = other DNA
agacacagtctcactcccctagtagctggaattactggcacgcgctttgttttctttttgtcacactaaaatataagcagcgactgacgccgactgccttcagcaagagtccgctggaggatgtcgctctggcaggggccgctggagctaccccagcaacaagactcagttctgggtcgctgccgccgaactttcccaggccggaaacagcgtggaaggcggcagctgcggaactggagtggaaatctcgggccccagaccagtcgattgggaggtccgccctcccgttttggcagttgccgcgacaacagtcacttccgggaaggggctctgcgaa

SEQ ID NO: 27504 - DNA, 349 bp, Homo sapiens
  source 1..349: mol_type = other DNA
acatactcccaatatcacagggggagtacacccctccatgacattactctcaatatcgcaggggtgtacaccccactgtgatatttttctaaatattcagggcgaagaagtccatcaacctgtttagttttcagacacagtctcactcccctagtagctggaattactggcacgcgctttgttttctttttgtcacactaaaatataagcagcgactgacgccgactgccttcagcaagagtccgctggaggatgtcgctctggcaggggccgctggagctaccccagcaacaagactcagttctgggtcgctgccgccgaactttcccaggccggaaacagcgtggaa

SEQ ID NO: 27505 - DNA, 490 bp, Homo sapiens
  source 1..490: mol_type = other DNA
attaggtctattcaatggaagcagaaacatccgtcggtgacaaccacagctgtcgtggcctgctgggctgtcgacaccatggacagctcttcaggcgccacctggttggctcggcgagccgaccgtcccgagcccttcctcctctcccgtcaggcccgtgggggcggcggggttggtcctgacgcccagcttggggagcagcaatacggatcttccctctccctgcacccccggcggtgggatcgcagctctgcctgggggcggccgcaggaggcaaaggtagctggagactgaggctggggccgcccgcgggtgccaggcccagccggtcggcgcagagtgggcgtggtctccctcgatgccccgccccttccctcgcgcggggcggatcttccgcccccggccgcggcgcaatgcggaagagatgggcctgctggagcggaagtgacgctcccggcggctgtggcggcggctgcgggagaaggcgggg

SEQ ID NO: 27506 - DNA, 455 bp, Homo sapiens
  source 1..455: mol_type = other DNA
ttaaatcctgctttggctgttgaaaaccagaaggaattaggtctattcaatggaagcagaaacatccgtcggtgacaaccacagctgtcgtggcctgctgggctgtcgacaccatggacagctcttcaggcgccacctggttggctcggcgagccgaccgtcccgagcccttcctcctctcccgtcaggcccgtgggggcggcggggttggtcctgacgcccagcttggggagcagcaatacggatcttccctctccctgcacccccggcggtgggatcgcagctctgcctgggggcggccgcaggaggcaaaggtagctggagactgaggctggggccgcccgcgggtgccaggcccagccggtcggcgcagagtgggcgtggtctccctcgatgccccgccccttccctcgcgcggggcggatcttccgcccccggccgcggcgcaatgcgga

SEQ ID NO: 27507 - DNA, 296 bp, Homo sapiens
  source 1..296: mol_type = other DNA
ccgagatcgcgcgtacttctcaagcaacacatttgatatcaacagttttttctgagacagtactgacatagaaatcccctctagttcttagaactaaatccaagaatctttgtgttttgatttttgcaacataaccaaatttaaatcctgctttggctgttgaaaaccagaaggaattaggtctattcaatggaagcagaaacatccgtcggtgacaaccacagctgtcgtggcctgctgggctgtcgacaccatggacagctcttcaggcgccacctggttggctcggcgagccg

SEQ ID NO: 27508 - DNA, 507 bp, Homo sapiens
  source 1..507: mol_type = other DNA
ttctgaaactcactaagctttggaaagtatttagtcatagaattgcttgcaaacttggcattctttagaaaacacggaaacacttttgctttccttgttcctgaggtaacattgtatcataactgaaattcaatgtctttgaagtaacattgtaccataaatgaaattcaatgtctttgaagtaacattgtatcataaataaaattcaatgtctttctaagagctctgtagctataaagctgtagaaatacaaagtattactcaagaataactagtaattaccaatagtcacgtttggaaggaacattaccgctccgcgtaagtgcgaagacgcactgcagcagcgccagagcgatgcaaagagccgacgctctcgcgagaggtgtggggctctctcctcactctctctctttctccaagtattgagagcgcgtgggagcataggcgcatgcgcgctcgtggggtgcgcggtagcaacagaggactcgacccggctggagctccgga

SEQ ID NO: 27509 - DNA, 431 bp, Homo sapiens
  source 1..431: mol_type = other DNA
cttttaatttcgaaacatcaaaatgaattcgcacttctgaaactcactaagctttggaaagtatttagtcatagaattgcttgcaaacttggcattctttagaaaacacggaaacacttttgctttccttgttcctgaggtaacattgtatcataactgaaattcaatgtctttgaagtaacattgtaccataaatgaaattcaatgtctttgaagtaacattgtatcataaataaaattcaatgtctttctaagagctctgtagctataaagctgtagaaatacaaagtattactcaagaataactagtaattaccaatagtcacgtttggaaggaacattaccgctccgcgtaagtgcgaagacgcactgcagcagcgccagagcgatgcaaagagccgacgctctcgcgagaggtgtggggctctctc

SEQ ID NO: 27510 - DNA, 328 bp, Homo sapiens
  source 1..328: mol_type = other DNA
catggactggtaccagtccgtggcatcagttgttaaggcccaggtatttatcttcccttaaaatacatatattgaaacctagaaataaatatgttgtttgtaagttacccaactaatggtattatggactatcagttaatgtacatagaataattgttacctatttattggcttctaatatttttttaaatgaattttaaaaaagacagagaataatgtctatctttggagttcaaatgagttttttttctttgacaaggagtctccgtaccatttaatccattcaattaagtagaattttctagaaacagcagcttctcctggttcc

SEQ ID NO: 27511 - DNA, 399 bp, Homo sapiens
  source 1..399: mol_type = other DNA
cttactatcatccggctcccctgctaataaatggaggggtgtttaacacggttaccgtggagagttgtgaattctttcaaaacactcttcctgcccccagctgggggcgctaccggctgccgtcggagctgcagccacggccatctcctagacgcgcgagtagagcgcgccaaacgaggagaccccagccccggatcctgggtcgccagggttttccgcgcgcatcccagatgtttgttagactctgcagagtctccaactcccggccacgggcgcccattggttgtgcgcagggagcggaattagcccggatgaagccccccggcgggcccagctcattggcgaggcagccgcccccgcccccgccaccgctgccgccgtcgccgctgccaccgggct

SEQ ID NO: 27512 - DNA, 493 bp, Homo sapiens
  source 1..493: mol_type = other DNA
tcccaggctggagtgcaatggtgcaattgcctcaggctcccaagtaactgggattacaggcgatgttggtcaggctgggtcttgaagtcctgacctcagatggtccagtctattttagaagttgacaggctataaataacaagcagacaaattaatgaagaacatctgtctttctgcctggataatgttgtagatatttacaacatttactcaatggtaggtatttttatcctcgttttactagttggagaattatatcatgcaggtttatacaatttcactctttagttcattcattcattcagtcagtcaagctatggagctttctcggcgaaggcggcagcagacgattgtaaatgaccgtgcccagcccccggcccggcctccgcctccggccctgctccagccccgccagcggcccaggacccgcccctggctccggccccgcccctggctccgcccccgcccccgcgccggcggcggcgcggcgccc

SEQ ID NO: 27513 - DNA, 653 bp, Homo sapiens
  source 1..653: mol_type = other DNA
ttgaagtcctgacctcagatggtcgtctattttagaagttgacaggctataaataacaagcagacaaattaatgaagaacatctgtctttctgcctggataatgttgtagatatttacaacatttactcaatggtaggtatttttatcctcgttttactagttggagaattatatcatgcaggtttatacaatttcactctttagttcattcattcattcagtcagtcaagctatggagctttctcggcgaaggcggcagcagacgattgtaaatgaccgtgcccagcccccggcccggcctccgcctccggccctgctccagccccgccagcggcccaggacccgcccctggctccggccccgcccctggctccgcccccgcccccgcgccggcggcggcgcggcgcccgcgcttccgtatcgctcctcgtaggccggggctcggcgcgcgcacccgcactaaagacgcttcttcccggcgggtaggaatcccgccggcgagccgaacagttccccgagcgcagcccgcggaccaccacccggccgcacgggccgcttttgtcccccgcccgccgcttctgtccgagaggccgcccgcgaggcgcatcctgaccgcgagcgtcgggtcccagagccgggcgcggctggggcc

SEQ ID NO: 27514 - DNA, 258 bp, Homo sapiens
  source 1..258: mol_type = other DNA
aaaaaaaagaggaaactgaatcacaacatactttgcttttttcttttctcacaaaggaacagtgggccctttttcactgggcaccaaccttctgggctcaagacgtctaattcattaccattgccttacactgtgcaacaacttgctgaaaataaaagtattttaatgtaggccaaaggaacatgccatgttccagaaaatgtcatcgatatcttaaactatttaaattcaaagaaaaagatttaggaatcttccaag

SEQ ID NO: 27515 - DNA, 203 bp, Homo sapiens
  source 1..203: mol_type = other DNA
tttgaaggaagcacatgtgcacctttcgtaagtagctgggattacaggcgcctgccaccatgcctagcaaatgccaggcgctggccctgtgatatttctgtgaaataaattgggagccatcgaagtttcagtcggtgagccttagttaaagtggggaagacagtgccatattttaagttaaaaaaaaaaaaatttgacaattt

SEQ ID NO: 27516 - DNA, 531 bp, Homo sapiens
  source 1..531: mol_type = other DNA
ccttaaccttctggaagacttagagtacataatccatttggcctgaggctctactgatttttcaaaaataactgaaattttccaaaaggaattttgcaggttctgcagagccctgacttgtggccccagcgtggctaaagtccagcctcagcccagttggttgttttcaagcaaacttaattctgtttaattttaatcatttaaattcagccagctgcagccagtggctactccactgtacagtgcagttatagaacataaactgaaggaaattttacttttaaaagctaagtctattttattgtttaaaaaatgcacacttagataataaaactgttttttcaaacctttggtttcttgcttgtaacaccaggccaatgtacatttatttccatctgcaattgtttattgcattttttgaaataaagtcatttaatttttcatcaacagaatcagcagaatctgccaaaataggaggaataattactgtgtttttgatagcattggtcttgacaagcaccatataagaaa

SEQ ID NO: 27517 - DNA, 492 bp, Homo sapiens
  source 1..492: mol_type = other DNA
ttcaaggactttaaatagattatttatatgattgctatttaatctaatgaaattccataggaaagaggccttttgtatattgaatcacatattctgaaagattaacattttgtataatgattggaggttggtaaaaagtaacacaacagtacttttttaatacaaacttggtgagagcgtacgtgtgccacagattggtgcacctgccggcatctctttggtggcctgcaggggcctaggtcagacatcaggcgatgccgtgcattacccaagacactggacaggttaaaaagaggaaattaacgctttcttagtagtctctgaaagaaactagttatttgcgtaaagtatccctggggagtgcttttaactcacctgtgcggagagccagcatgcagatctcagtcctcaagcctgtgccccgcgcctcgcgggtggacccgggctggtgggcggggcctgcagcggggtgggagcccggtcgcccggccc

SEQ ID NO: 27518 - DNA, 610 bp, Homo sapiens
  source 1..610: mol_type = other DNA
caacatctattgattaatttatataggtgtggttcatggtaccccaatcactgatcacagatcaccataacacatataatcatgatgaaaagttttgaaatattgcgagaattaccaaaatgtgacataaagacaaagtgagcatgtgctgatgcagggttgctgcagaccttcgatttgtaaaatcacaataaaatgaggtatgtctacatctaaatgtatttaaacatagaaaaggtacagtaaaaatacagtatcattatcttaaatgtcattatgcagcacatgactttattgaaaatcattgtaatatctttattttggtaaatttttgtaaatcaatgtctcataaatcacatgcccctgttttcaaaaatacgtaatcaaggaagcaagctttcttggtcaagtatgctgaatcgtagtcattaagatgttcaagtctctgagaagttctgttttgaagacacgtatttccagcctcagggagactgaagcttgtgtagttataggatattccaagataaatgcatgaatactcaagtctttccaagtatggtgaccacaccttgagagtcagggctgaatttgcagatgagcattcagactg

SEQ ID NO: 27519 - DNA, 229 bp, Homo sapiens
  source 1..229: mol_type = other DNA
tatttgtttgaaaacagaatcctcggagtctcggtctgtcacccaggccggggtgcagtgggttcgtgtaacatataaatacatctctgtatctagaaatatccaatgcataattcaattgccaatttcaaaataaagctctatgttgcaaaacccatttttgcccgggacgacctgggctcgggctggggagcgggcctgcggctgcccagctgctaaaggactgccg

SEQ ID NO: 27520 - DNA, 551 bp, Homo sapiens
  source 1..551: mol_type = other DNA
tagagatggaatatatagatggaatatagagatggaatatatagatggaatacatatatattccattgcattgttctttacaaacattcatttaattatgtaattgctaattaattgcttggttgttataacaacgaagtatttgattccttattttatctcatcatttaaattttatttcaatgcactggatctattactgaggaatttaattaaataatcattcgaaccatgggctcgaattgtttactctgtttggagcccctcggcccagggcccgtggctgttctctccaagggaccaaacgagcgctcgaccgcctctgccccgctctcgctctgcacacagcaacggtctggtcgctcagccatggttcccaggccgctggggactcccaacgccactgtccaagactctagggtcgaagagcgccgggccgcgaccaggagcccacccgcgccctccgactccaaagtcgctgggtctgcgcaggttcctgtgaaggtcaaggcctgcctgcgatttctaaggcgcgcgccggcgcgtgcgcg

SEQ ID NO: 27521 - DNA, 276 bp, Homo sapiens
  source 1..276: mol_type = other DNA
cggagtctcggtctgtcacccaggccggggtgcagtgggttcgtgtaacatataaatacatctctgtatctagaaatatccaatgcataattcaattgccaatttcaaaataaagctctatgttgcaaaacccatttttgcccgggacgacctgggctcgggctggggagcgggcctgcggctgcccagctgctaaaggactgccgtaaaacccttttcaaaatggggttgactggaggctgcagtgagccgagatcgccccactgcactccagcc

SEQ ID NO: 27522 - DNA, 490 bp, Homo sapiens
  source 1..490: mol_type = other DNA
aagctctatgttgcaaaacccatttttgcccgggacgacctgggctcgggctggggagcgggcctgcggctgcccagctgctaaaggactgccgtaaaacccttttcaaaatggggttgactggaggctgcagtgagccgagatcgccccactgcactccagccgggctattaaagcaaacatttcgactaaactcgaattgtgcctccagggaaagcccgggggtctgggccggggtctcgcggggcccttccggaaggatcgcggcccccgaaggtgggcgtcccgcggggctccagtctccaggacgttccgggaggctccgcgctctgggaggccggctgcgtggggtccccgcgctgcagccgcagaggccccccagggccgcggttcccggagcgggaaagtcccgcgcgggggcggtggcctcgggggcgggacggggcgggggcgggggcgcgggcggccgagccgaatcccctccaccggg

SEQ ID NO: 27523 - DNA, 487 bp, Homo sapiens
  source 1..487: mol_type = other DNA
aactaaatggttataggcatttctgaaatttagacggggcttccaaacgctgttaaagttatgttgaaaatgaggatcacctcgggtaaccagcactcgctgggtagcccttgaattgaggggattagaaaaaggcatctctaaagacccaagggaaaccctggtcccccgggtctcgagctccacttcaagtcacgtgcagaaacgcagcagtgggagcccggcggcggccgcccaccggcaggggacaggagaggcccgtcccgctctgcccggaaccctgggtctgaactccggctccgggaggcctgcagagcagcccaccccgtcggagctcgccctgcccccggccggccacttgctgcacgccgattggtcgcgaggagcgcccggcgtcccgctgcgcccagccaaccccgccccgcccccggccggccacttgctgcgctccgattggtcgctgcggtgcacacggcgcctcgccccg

SEQ ID NO: 27524 - DNA, 491 bp, Homo sapiens
  source 1..491: mol_type = other DNA
gaagttcccttactcttaaggaaaagattaatgtgatcagatgcaggtttctttcctcattaaacaattgcttttataatgagatttacgataacacaagaatttaggttgtcatcctaaaatagcagacagttcttaggagaaaggtctaattactattacattgcattaaaaggaggtcaagaccatcctggcctagtcagctactcctgaggttgaggcaagagaattgcttgagtgagactcgaagacctgtctgatagggaaggttcttttaagtgagagaaagatctttaatttttatgtatttggagcagtggtgcgatcacacctcactattatttatttatttatttatttagtctcgaactcatggactcaagcagtccttgcctcagccgtaaatcacttcacggtgtgaaatactgttgctatttgaaatcatatgtcaaatatgcaagctctaggactggagggcaggcactgccctc

SEQ ID NO: 27525 - DNA, 299 bp, Homo sapiens
  source 1..299: mol_type = other DNA
ttgatacaattattatttcattatatgtaaaatagggaaaataacagcatttatctggcaggcagatcaccttagctcaggggttcgagaccagcctggccaattccagctacggttgcagcgagccgagatcgcgccaccacactccagcctgggacagagcgagactctacttagcacaatggcatactatttactatagtttactatttatctgaaaactcaagccagaagatccctattttgattttgtctccgagaggcgcaggcgcactcggccggaccacctccgctcgggg

SEQ ID NO: 27526 - DNA, 320 bp, Homo sapiens
  source 1..320: mol_type = other DNA
gcgagactctacttagcacaatggcatactatttactatagtttactatttatctgaaaactcaagccagaagatccctattttgattttgtctccgagaggcgcaggcgcactcggccggaccacctccgctcggggcggggacggaggtggagctggtggtccccggtcgggacgaaggctcccgaggtgccctgcctgggtcctccggcaccagctggaggcggtgggagggacacccgcagggcggaccgcgcacgcatgcgcagaggcgcggcaggggggcgggagccgcggaacccctaccccaggtctgcgca

SEQ ID NO: 27527 - DNA, 500 bp, Homo sapiens
  source 1..500: mol_type = other DNA
tcctccaggctcccagcatgcctcgggaggaggcgcacgggccaattcggtctctcgccttcctgattggctccaaagggaatgcccggtccggcccgctccaccgaaggtgctgacgtttgcgccgcgcacgactatgtccgccatgttagtgtctgacgcaggcgccattacaggagccgtctctcttgaggcgaccgtgtccccagcagtgtttgggagccttaacaggcttgctaaacccggtgtttaacacacggcccccgcccccactggcatgtgagaggaggaactcgcgaccggcattcaaagcccggtgcattttagtctcatcagctgctcagctctgactcgtgagcggcgcacaatttcctggaacactgcgtggcaccccgtaccactgtcacattatagactagattctcgccgcggagacccagggccgcgcggaccaatggggcaggggggcggggcagtgaggggcggtgccgcgctggtcc

SEQ ID NO: 27528 - DNA, 500 bp, Homo sapiens; identical to SEQ ID NO: 27527
  source 1..500: mol_type = other DNA

SEQ ID NO: 27529 - DNA, 495 bp, Homo sapiens
  source 1..495: mol_type = other DNA
tcctccaggctcccagcatgcctcgggaggaggcgcacgggccaattcggtctctcgccttcctgattggctccaaagggaatgcccggtccggcccgctccaccgaaggtgctgacgtttgcgccgcgcacgactatgtccgccatgttagtgtctgacgcaggcgccattacaggagccgtctctcttgaggcgaccgtgtccccagcagtgtttgggagccttaacaggcttgctaaacccggtgtttaacacacggcccccgcccccactggcatgtgagaggaggaactcgcgaccggcattcaaagcccggtgcattttagtctcatcagctgctcagctctgactcgtgagcggcgcacaatttcctggaacactgcgtggcaccccgtaccactgtcacattatagactagattctcgccgcggagacccagggccgcgcggaccaatggggcaggggggcggggcagtgaggggcggtgccgcgct

SEQ ID NO: 27530 - DNA, 377 bp, Homo sapiens
  source 1..377: mol_type = other DNA
aacaaactagtttgagttcgttttaattgaaacatttaactatcagaacaccctttccggtcataggcaccggccggggaactaggcccgtccctggcggacgggggggcccggaaaatggatcccaggcccaggcggggccctagcggggcctgagccggggaacgacagggcctaacggtccgtttttacctggaaagctcctgttgaatttcccggaatttactgacctcctccaggctcccagcatgcctcgggaggaggcgcacgggccaattcggtctctcgccttcctgattggctccaaagggaatgcccggtccggcccgctccaccgaaggtgctgacgtttgcgccgcgcacgactatgtccgcca

SEQ ID NO: 27531 - DNA, 547 bp, Homo sapiens
  source 1..547: mol_type = other DNA
ctggttcccgcttgcccgctcgccggaagtcggcccaccgggaccggcgcgggaccagcgcggcaccgcccctcactgccccgcccccctgccccattggtccgcgcggccctgggtctccgcggcgagaatctagtctataatgtgacagtggtacggggtgccacgcagtgttccaggaaattgtgcgccgctcacgagtcagagctgagcagctgatgagactaaaatgcaccgggctttgaatgccggtcgcgagttcctcctctcacatgccagtgggggcgggggccgtgtgttaaacaccgggtttagcaagcctgttaaggctcccaaacactgctggggacacggtcgcctcaagagagacggctcctgtaatggcgcctgcgtcagacactaacatggcggacatagtcgtgcgcggcgcaaacgtcagcaccttcggtggagcgggccggaccgggcattccctttggagccaatcaggaaggcgagagaccgaattggcccgtgcgcctcctcccgaggcatgctgggagcctgg

SEQ ID NO: 27532 - DNA, 586 bp, Homo sapiens
  source 1..586: mol_type = other DNA
catttgaaaagtgtttgaaaaattcttgtgcaaatgatcaagataattctataattaacatcttaagggaatttttctaaaaaccttttcattgtttctcttccatgaagaaaactgctgctttcagcaaaagtcacactactcttgataaaagcctttgctaagctatcaaagtaacgtattaatttgctgtcataatttaagcatttgagtatattttgaagtcttaaaagacttagcccataggcacttaaatttaacttgccagtggcagctgcctggaagtctggtggcctagtcccctctcctcgcctcttgagagcagtagccactccggggtgccccctggacgcattccagaagcgtcgctgaacctggcgactggactctggccgaggacctggcagaagcgccagggcagggtcaccgctgggacagtgggcgttgacggccacccgggatcgccgctgcgggctgcgtctcgcgggctgcccactgcgcatgctccgctcggaaccggcgggggcggaggcggggccgcgtcgggggcgggagctcggcgaggcgccacgtcaggggcgggccc

SEQ ID NO: 27533 - DNA, 391 bp, Homo sapiens
  source 1..391: mol_type = other DNA
catctccgggcgggtccgcgctgccgccccagggacaaatcagtgccgctcacgcgccgctgggagggacgcaggagccgcagccccgcacaccatccccgcccggagcccgctcgggattcttcctcgcgagccgccgtactacggagctccgcccataagtgggtggggaaaccgccagccaattggaagaaggggcccgcaccttctccatgcgctgtgtgggggcaggattagcactctccccctcctccccatacttaattgacttaattacccaaaggggttggccggggcggggcctcgcctctttctccgcccccgagcggttgccatggcgttctggacagcctcgcgagtccgaccccgcccttcaggagtgacgagcggc

SEQ ID NO: 27534 - DNA, 274 bp, Homo sapiens
  source 1..274: mol_type = other DNA
tttcccagacctctgcctccataagcggcctcagctaagctaggcctgggcccgaacaagtcccaggttagggttcgacgcgaaccaccatcctccccagggctgcacggttaggacgcgtttcccggggctcacctgcctgccgctcgtcactcctgaagggcggggtcggactcgcgaggctgtccagaacgccatggcaaccgctcgggggcggagaaagaggcgaggccccgccccggccaacccctttgggtaattaagtcaattaagt

SEQ ID NO: 27535 - DNA, 358 bp, Homo sapiens
  source 1..358: mol_type = other DNA
cggcctcagctaagctaggcctgggcccgaacaagtcccaggttagggttcgacgcgaaccaccatcctccccagggctgcacggttaggacgcgtttcccggggctcacctgcctgccgctcgtcactcctgaagggcggggtcggactcgcgaggctgtccagaacgccatggcaaccgctcgggggcggagaaagaggcgaggccccgccccggccaacccctttgggtaattaagtcaattaagtatggggaggagggggagagtgctaatcctgcccccacacagcgcatggagaaggtgcgggccccttcttccaattggctggcggtttccccacccacttatgggcggag

SEQ ID NO: 27536 - DNA, 495 bp, Homo sapiens
  source 1..495: mol_type = other DNA
atgtgtctacttttcttcagtagctaaacagaagtaattatatatttacattctacctatttcatagggatgttgttagaattactgtgattagatttttttttttaatttccaaatgtatttaagcttctttacagataggtgccatatcaaagcaaggtgtctcaatttgtgtttttgtcactagaaatatatatatattgctttttctcttttttctgataaatgttttgaaatttgttatcttaagtttttcatagctggaatgctagaaaagcatttatgtcagttactgtttacagtgacatgtttcacagtctgtgtgaccagccagttttatatatcacatttcaagatggcaaaatgaggtcctgcatgttacctggcataaattagaaactccaatgtggtggatatttcaacacaatttggacatgcttcctatatattttgcattcttttggttaactttataactaatagttaaagaatttt

SEQ ID NO: 27537 - DNA, 516 bp, Homo sapiens
  source 1..516: mol_type = other DNA
gaagcctgactaaagtttggccaagcatgttcactaaactttacctattaacgttaaagcactttaagttgacaaacacagaggcctcagctgcagggtactcaactgcagaacgtatgcccctgcccaccttagacagttgctaaagggtagcctagcctttaagtgaaagcggaggcaggtcaatgcccgtatcgcgcctgtgtgtaccaggcacgtcacgcagtgccaagggactgagtcagacccgagcccgcgcgccgcggcccacggcctgtgccagcgcgctcctcgccgggtagggggcctggtcagccgcgtcagacctgagagttgtggctgggggcgagagctgcacccccctaccgaccccgggcgggaatggaacccctgcgagcagccgttggccgcacagcccccgggccggccgcgaccccgccttgcgccgcgaaggtccctagctccggggagtcgcgggcgaggggcacgcgcacggacgagaccgcaccgcagcgc

SEQ ID NO: 27538 - DNA, 327 bp, Homo sapiens
  source 1..327: mol_type = other DNA
ttttagcaaaactgctaagccccaggtgatgtctgatcacctaaagtcttccttatcatgctttaataagcatcactgaataattctttatttaacaatgggtagccaagtttgtatgcaacgtgagaaaaagcgccaccatatttatctaaatgtaaattttaaaactgaacaatgacttcattttcagatgcagtcgaagccctgtggctccaccccgagggtccagccctctacaactcccagcccgagggaggtctctgcgcctgcggcctgacgccctacgccagcggttacgccaacgcgcgcgtgcgcccttgcgcgttt

SEQ ID NO: 27539 - DNA, 709 bp, Homo sapiens
  source 1..709: mol_type = other DNA
gcagaacgtatgcccctgcccaccttagacagttgctaaagggtagcctagcctttaagtgaaagcggaggcaggtcaatgcccgtatcgcgcctgtgtgtaccaggcacgtcacgcagtgccaagggactgagtcagacccgagcccgcgcgccgcggcccacggcctgtgccagcgcgctcctcgccgggtagggggcctggtcagccgcgtcagacctgagagttgtggctgggggcgagagctgcacccccctaccgaccccgggcgggaatggaacccctgcgagcagccgttggccgcacagcccccgggccggccgcgaccccgccttgcgccgcgaaggtccctagctccggggagtcgcgggcgaggggcacgcgcacggacgagaccgcaccgcagcgcacgcgcactggcgggcactcactcgcccgccgcccgggaggagaaggaagaggcagggtcgcgagggggcgtgcggccgccgcgagccgctctgggccgcgtctgcagcaccgcccctagccgcggccggcgggctgggctggggtcggggcgggggccgggtgcggggctgcggagggggcgtggcggccgcccgcgggcggagagggggcggggcggcggcaaggcgcgcgggcggggcggggcgcgccgagggggcgtggcgcggcgtctgcgcagctgccagcgcctttaagcccg

SEQ ID NO: 27540 - DNA, 244 bp, Homo sapiens
  source 1..244: mol_type = other DNA
agttactaaggtaacttctctttcagctgtgtgggaacagttgccagacaggtcgaccactgagatttttatctgaatgaacatatttgtctagtccagtacataccctcaactggagctatttgagatttctgcatctcttgttgcttaaaaaaccactgttgatggtaatataggaacttagttgttaatatttgatttttttatttaacaaacatttgagcacctgtaatatgtaagattg

SEQ ID NO: 27541 - DNA, 343 bp, Homo sapiens
  source 1..343: mol_type = other DNA
cttttacaagacaacaatgttgttataaactcatttgcccagagatggctgtttcattgagacagagtctcactctgtcacccagcctgacacctggctaattagagacggggctggtcttgaactcctgatctcaggtgatcgggatcccacccagcccttcgcagggaatgctcaagcctaccctaagaggaagacttcttctggggaaagatgttcactgtacccaggccctgccctggctggagctggcaggaagggcttgtgccactctgcccaaagccagagtccctgaggcacccaactgccagttagttttaactttccgattagattaaacatg

SEQ ID NO: 27542 - DNA, 433 bp, Homo sapiens
  source 1..433: mol_type = other DNA
gtgaaatggttatcattatagctatgagacttaggcaatagccactagtgcttagaacaaagctatttttgtaagggatttggagttacactgcctgggttcgaatctcaattccgccactgccattcgcgacagccagtttgtgccctcacatggcgctagcactgagtgggctcaaactctgtacgcgtttactaagcattgtcctcagctgcagacagccccggcctacaccccagcggctccccgccggggcctacgtggacttcagcctccagccacagggacaagagctgctggccagggctgcccgcctgggctcactgcgcctgcgcagtgagcagcgcgccccaggtcttctgcccgggcccactgcgcctgcgcacggagtagtgcactctcgtcggcggcaccggcccactgcgcctgagca

SEQ ID NO: 27543 - DNA, 481 bp, Homo sapiens
  source 1..481: mol_type = other DNA
tcaagtttttgtgtaaacttacatttttatttctcctgggaagatacccaggagtagaattacccattgatggaaatttcatcaaattgtatggctggatgatttaacttgccagtcttccaacttttcctggggaaactttacccgcagaaagagaagagccatttctcaccacctggcacaggacccaagtcccctcaggtgtgtcacccttggggtgtcactcccagactgtccagaggaagctggtgactctctgccacacctggccatctgccacacctgcaacaggtgcagaaataccagcacgttttaaaaatttgttttgattgagaacttcttaacaagtcaaagctgggaagtgctttctgttctgatgcaacagaagacacagcaaatcggatcctctgattaattgcatgaaagcaaagtcatccacttactaagtttcagtgcagctcaactgcagtaggactgattc

SEQ ID NO: 27544 - DNA, 334 bp, Homo sapiens
  source 1..334: mol_type = other DNA
gcaccccttggctgcctctgcgacccgcctgcagagcaggagcctggagcctggacgtcattccctagaaggttcacttgcctgccaagctggtgagcaacgcggctcgggtgcctagcgactgtctgccgctccgggcccggtccacagctgcacccccagctcagggctgcacacccagtaagtgggtgacaggatctaccgggggggccggggctggtctggggtggtcccggggaaccctgggctgggccgggagtggggcgggacgcctggcggctctgggaggccccgcccgcccccatccctgtgcagcgctcaggcccttagaagg

SEQ ID NO: 27545 - DNA, 588 bp, Homo sapiens
  source 1..588: mol_type = other DNA
cattttgcttcatgtaaagtatgcctcaataaagtgtacttgattttaaaatcaggataaaggaaaaaggtcttaattatcatcatatccttttaaaaacgtttttcaagtgtgtgatgctctgatgacattcttaagaataaatattttctgtaagacactgatatgtctatgactatttgctaaatttaaaaatcaacttggaccatatttttaaagtctaatagacgactaatttcttctatgttcagaacaaatatgttgctactttaagaacagcatacataggtgtgtaacaactacttacaaagcatttacatagtattaggtgttagaagtaatcaagagatgatttaaatcaccatctatgattggctgatatgcataggttatatgcaaatactatgccactatatataaaggacttgaacattcgcaaattttggtatctgcaggggattctggaaccttcaggcctctataaagccctgaatattagaaattactgaatttcttctcaggaaggacagcctggtcatgccacatgagctgagcagtgggtaggcagagtactttctggaaataagc

SEQ ID NO: 27546 - DNA, 582 bp, Homo sapiens
  source 1..582: mol_type = other DNA
acagctgtatacatctgttgaaaactcatcaaacttatcatatttagaaagggtacattttgcttcatgtaaagtatgcctcaataaagtgtacttgattttaaaatcaggataaaggaaaaaggtcttaattatcatcatatccttttaaaaacgtttttcaagtgtgtgatgctctgatgacattcttaagaataaatattttctgtaagacactgatatgtctatgactatttgctaaatttaaaaatcaacttggaccatatttttaaagtctaatagacgactaatttcttctatgttcagaacaaatatgttgctactttaagaacagcatacataggtgtgtaacaactacttacaaagcatttacatagtattaggtgttagaagtaatcaagagatgatttaaatcaccatctatgattggctgatatgcataggttatatgcaaatactatgccactatatataaaggacttgaacattcgcaaattttggtatctgcaggggattctggaaccttcaggcctctataaagccctgaatattagaaattactgaatttcttctcaggaagga

SEQ ID NO: 27547 - DNA, 277 bp, Homo sapiens
  source 1..277: mol_type = other DNA
gataagattttatgcaaataattacttagtactgtttgtaaaacaatgcatattcattgtgaaattgagatgtaagagctctattctcaaaactaggatcggggaaccctaggggcaggtggagccctggctccctgtcctgacctcaatgacagtgacttaaattgtgactcccatagccctgggagggggacgcctggacattgactgcccatctcccggaactggccactgcagttcttccctgcaatgcataaactatgatctcttatatgcc

SEQ ID NO: 27548 - DNA, 506 bp, Homo sapiens
  source 1..506: mol_type = other DNA
atggcaaaaattcaaaaaattgcaacctctggcataatgctttgaaaatgatcgaagtgtttcatatccccagttctcaaattataataatgaagttttcaaatgaaaatcctaggattgtgtgggatacactggggaaaaaaattttaactacacttcaaaatgattcctctttttgtcctttaaaatttttattgaccaagacagatttcaaaatgttttctctaataccccaaagtgaaactttgattgaggttttcaggaaattcggactttggtttccaggtttcccaaagccttgatccatcttaagaagggttgataaagcagctgtgaagcaaacctcagctgttttttccattcccaagcaaagttaattagcatagggaaaatgactaaggtgttgacgtcacctctttccagtagaaacttacactttgtccctgtctgcctgcaagcatgcaggacttgactcaggaatctggcccttactgctttataagcac

SEQ ID NO: 27549 - DNA, 412 bp, Homo sapiens
  source 1..412: mol_type = other DNA
atggcaaaaattcaaaaaattgcaacctctggcataatgctttgaaaatgatcgaagtgtttcatatccccagttctcaaattataataatgaagttttcaaatgaaaatcctaggattgtgtgggatacactggggaaaaaaattttaactacacttcaaaatgattcctctttttgtcctttaaaatttttattgaccaagacagatttcaaaatgttttctctaataccccaaagtgaaactttgattgaggttttcaggaaattcggactttggtttccaggtttcccaaagccttgatccatcttaagaagggttgataaagcagctgtgaagcaaacctcagctgttttttccattcccaagcaaagttaattagcatagggaaaatgactaaggtgttgacgtca

SEQ ID NO: 27550 - DNA, 347 bp, Homo sapiens
  source 1..347: mol_type = other DNA
atcaagtcagtcttgagctgggggtaacccagtttcttggtaacgtggcttatcaccataataacttcctttttaaagtaggtattgggtctgtgatgggagaaccctaacccagggaatagctcttaacttggagttagaaatctaggagaatcagcaagatacacagactcttacagtcttcgatcctccagacaggcccggagaagcggaccctcatggacaacagcgcccatctctggtcagagaaactcgacggcttgaggggcctctggaacctctccgggggccctgcagacatgggaaggcggccagcgtagcctccccaagccccaggggatggagtt

SEQ ID NO: 27551 - DNA, 594 bp, Homo sapiens
  source 1..594: mol_type = other DNA
actgtcctaagactatgataatagtaatcatatatactttttgttataattactaacacttcctaactagagagtaagcctaagctaccatttattaagcactgactgaattcttagtaatatgtcttcatttttttcagatgaggaaactaagattcagcttatttgtacaagtagttaaaaatgaaattcagacccaagttctcactgtatcatactgtccaaaaaagaattctatttttcaggaagagacatgtctgcaggaaaggggtgaaattctttcgttatgtcctattgtacatagcatataatggtaattcagaaaaattacttctaattacataaattttcacaatggtatagtgactaataaaggcattgttatcatggtcttatctgataaggccacagagccacagggagactatgtctcgctggcccaagagccgaggactctgcccggcgtccttcagctggcaccagctgtggccgccctgaggcttcgggcttcgggcggcagaaggaaggtcacgtgttccgttcctttattggccccgtctcctggaagggcggggtacaataacccaaccggcg

SEQ ID NO: 27552 - DNA, 705 bp, Homo sapiens
  source 1..705: mol_type = other DNA
ttgtcttcatttttttcagatgaggaaactaagattcagcttatttgtacaagtagttaaaaatgaaattcagacccaagttctcactgtatcatactgtccaaaaaagaattctatttttcaggaagagacatgtctgcaggaaaggggtgaaattctttcgttatgtcctattgtacatagcatataatggtaattcagaaaaattacttctaattacataaattttcacaatggtatagtgactaataaaggcattgttatcatggtcttatctgataaggccacagagccacagggagactatgtctcgctggcccaagagccgaggactctgcccggcgtccttcagctggcaccagctgtggccgccctgaggcttcgggcttcgggcggcagaaggaaggtcacgtgttccgttcctttattggccccgtctcctggaagggcggggtacaataacccaaccggcgccggccttaaaggggccaccgttggatctgccggtggccggccctaggggctgggggggcggtcgccgcgccgggcttctgcccctcccgcgcggaacggtgacgggcggggctggcgctgggaggccgtgtcgctgggagactgctgacagcccgccgcctgccgccgcgcgattccgagggggttaacggcggagccgccggccgggcgcggaccggagcgcgtgaggct

SEQ ID NO: 27553 - DNA, 417 bp, Homo sapiens
  source 1..417: mol_type = other DNA
gctcttaacttggagttagaaatctaggagaatcagcaagatacacagactcttacagtcttcgatcctccagacaggcccggagaagcggaccctcatggacaacagcgcccatctctggtcagagaaactcgacggcttgaggggcctctggaacctctccgggggccctgcagacatgggaaggcggccagcgtagcctccccaagccccaggggatggagttggcacagcgggccgggcgcaggagcgaagcagccctctccagccgtgcactgcacctccgcggcccgcgggcgagattggggtcccggcagaggcttggggccaagcggagtttgccctgcgggtcctgcgcaaggccccagtgccccggctaaacctttgccgcaggatcccggagccggcgtccttcaa

SEQ ID NO: 27554 - DNA, 447 bp, Homo sapiens
  source 1..447: mol_type = other DNA
ggcccggagaagcggaccctcatggacaacagcgcccatctctggtcagagaaactcgacggcttgaggggcctctggaacctctccgggggccctgcagacatgggaaggcggccagcgtagcctccccaagccccaggggatggagttggcacagcgggccgggcgcaggagcgaagcagccctctccagccgtgcactgcacctccgcggcccgcgggcgagattggggtcccggcagaggcttggggccaagcggagtttgccctgcgggtcctgcgcaaggccccagtgccccggctaaacctttgccgcaggatcccggagccggcgtccttcaaggagcacagagggccccgtagcacgcccctaaggacagggatctgcggccatggccgaggccgcggagccggagggggttgccccgggtccccaggggccgccgga

SEQ ID NO: 27555 - DNA, 585 bp, Homo sapiens
  source 1..585: mol_type = other DNA
cgtgtggctgcggaaaggggtccgcacgcgggcggggccccgggccagcatgcaggcttggatgcggggcgcgggggtggcctccgactccccgcccgggctgcgtacagtagcgcgcggcgcggcggcgggggcgcgcgggccaattccaggagccggcggcggcgagccgcgccctggctgataccggaaaggcctgtgattggccgccggccgcccctatgcaaacgagctgagggaatggaattcctccggccgggcttacagtaaaagcacgttcatttccaggcactctcattcatagagccagcgggcgcgggcgggacgggcgccccgcggccggacccagccagggcaccacgctgcccggccctgcgccgccaggcacttctttccggggctcctagggacgccagaagccaattgttttccttttacaacagggggagaaaggcgccccgccgcggagatgcctcggagcagctaaccggcgggtgctgggcgacggtggaggagtatcgtctcgctgctgcccgagtcagggctgagtcacccagctgatgtagacagtggctgccttccgaa

SEQ ID NO: 27556 - DNA, 377 bp, Homo sapiens
  source 1..377: mol_type = other DNA
caggagaagtgtctcctcctggagtgtagttttacctacaggtgtaaattagcctattgatttgaattgaactagatgattttatctctttactgaaagagatacatactaatttagggggaataaaaccacataattttggtttcattaaaacagtccttttatttcaaaagtaaaattctttccctttcccagttgtaggggtcagactctcaccaatcacttatgccatgatagacgttaccaagcctagcattttaaatgatgggatccacatcctgtattgaataagcagcaatgaaatctttatcaaaataatcagtagttattgagatataataagtgactgagtcactcatcacttaagtcacatgatt

SEQ ID NO: 27557 - DNA, 813 bp, Homo sapiens
  source 1..813: mol_type = other DNA
ggtgggttccgcacctggggccgctcgagcgcacgggggcggggagaggagcgggggccgcttccggggagccggaggggagacgcggggcccgggcaggctgtccggctgctgcgggtgccggcgctacaaggcccgggagcaagccgcgtggctgcttgacgcacgcagcaagtgagacgcgcggagggatcgagccgcggcccgggcgcagcgcgcgcggacgccgtccggcctcatgcaaggaatcagcgccgcttcgccgcagctgccagccggacggtgcaggagcgcggagtggctcccccgggccccgcggccaaatcgcacccccgccctggaagcggaggcctggccctgggcggccgcgcaggatctggggccgtccgcgggctgcagcccggttcgggagcctcgtggcggccactgcgcctgcctgcagcggctcgcggggccgggcctctccgggtgcggcgcgccggccgggtcctcctcgggccggcggggcctggccactcgcggagccgcacaagcctgcgtgtggctgcggaaaggggtccgcacgcgggcggggccccgggccagcatgcaggcttggatgcggggcgcgggggtggcctccgactccccgcccgggctgcgtacagtagcgcgcggcgcggcggcgggggcgcgcgggccaattccaggagccggcggcggcgagccgcgccctggctgataccggaaaggcctgtgattggccgccggccgcccctatgcaaacgagctgagggaatggaattcctccggccgggcttacagtaaaagcac

SEQ ID NO: 27558 - DNA, 449 bp, Homo sapiens
  source 1..449: mol_type = other DNA
gccccatatattttaaacataattgtgtattggcaatgactgtgactgtccctctctctgcctccaagataaaatattacagtgcattaaaaatatttctgagaattaatgttgtagaggaaaagtttaaataaagtcaaaatagtgtttttccttaggggttactcacctttgtacaataattgaaattaccagaatctggtgtcaattagttcacgagtggatttaaaagtgttttagggacaattcttgaacttttaacattttatgtaggaattaaagtacatgttgttacagattctgatactatatgtgctcttaaaatatccaaagggttacatattttcaacctttaagaggatgctattgacatgtaagtttaaaatgtcggatcattaacaataggttaatgattaagcaaggcacgtgacctccctgtgcctcaggtt

SEQ ID NO: 27559 - DNA, 480 bp, Homo sapiens
  source 1..480: mol_type = other DNA
tttacaccattgtatacaagggacttgagcattctaattctggtatccgcagggtcctggaaccattcccccacgtacttgtttttcatgacagaaaacatgtttaggagtactaattttttttcccccatagaagattacaggaacatgctatcagcatgatttcttcctgatgttagtatttagatatattatttccagcctggcgcccgaggtctgggcgaacagggccgcgcgccctaggtggtttaacttcgtaaggaaagactccgcaggccggcttttcagtgctcgtccccgactgtactgggcgttggcggcgagtccgcgaacactgcgcatgcgcgagccggaagctgccgcccgcggcggaaggggcggacccggtaaggacaccaggcaggcgcgacagccttcagcctctcccgcccactgcagcctccatcttggaagcggccgccggcgcctaggtgagctagt

SEQ ID NO: 27560 - DNA, 454 bp, Homo sapiens
  source 1..454: mol_type = other DNA
tcattcttttagccaaagataattgatttaaagcaattcatataatcttcattttcatattcccattgcaatgctactcccttaggtttacaccattgtatacaagggacttgagcattctaattctggtatccgcagggtcctggaaccattcccccacgtacttgtttttcatgacagaaaacatgtttaggagtactaattttttttcccccatagaagattacaggaacatgctatcagcatgatttcttcctgatgttagtatttagatatattatttccagcctggcgcccgaggtctgggcgaacagggccgcgcgccctaggtggtttaacttcgtaaggaaagactccgcaggccggcttttcagtgctcgtccccgactgtactgggcgttggcggcgagtccgcgaacactgcgcatgcgcgagccggaagctgccgcccgcg

SEQ ID NO: 27561 - DNA, 495 bp, Homo sapiens
  source 1..495: mol_type = other DNA
ctatatcctaattttaatcagttgagaagatggatttgagactaagttataaattctgaggatggatccctgtttcttcattttaagatggggattaaaaggtacatcctagagcttataaagatttagtgaatgtttcccaccattattggaaaatctacaaaagtttcttctgcaactctagctccaaagactgcagttcctgcagtatttttttttttagaacaccaggaaaaaaagaaaaaaaaaccatgcaaatgtactatttcttcaaacacaactaggaatgttacatggccactaggaatggttcttcactgccacgtgggcagccaacagccagtagctagagaccagcctcggtcttcggcctggctctccgcctgctccgcaccccggcgaggttccggtggggaggggtagggatggttcagccccgccccgctagggcggggcctgcgcctgcgcgctcagcggccgggcgtgtaacccacg

SEQ ID NO: 27562 - DNA, 343 bp, Homo sapiens
  source 1..343: mol_type = other DNA
aggggcccctctaattttgtgcccacagcttgacacaaacatatgatcaatccagatctttatagatctatatcctccattccctcccacttgggggcacattcactgggaatcccagagcgatgtcgcagtgcgctcacagggttgagttccttttaagcaagcaaggcaaccagagaagcagttactgtgtctaagtaagtcactgcatcttaggaaaaagcaaacattcgcattttgcagaccccgcggctcagagcccggatcctgaagggcgcagcgtgggggcgggcccggcacagacggcccctcctcggaggggagggaccggagccggggcctt

SEQ ID NO: 27563 - DNA, 555 bp, Homo sapiens
  source 1..555: mol_type = other DNA
tctgtccaggtagaaatgatctcacctctcctgtcgcccagggtcggaaacctgaggcccgtgcgggctggggcaacttagcaggggtcccaagcccgccgcgccccctgcgccccaaacgtgtgtggagggctaccaggtgccgcgcacccttcgaggagcccccgcttctccgttctgtgagtgactccaaagcacctccgagggccgacacacgcgcggacgaccttgggcgggcactgaccaatgtccgggggtccccaggtgaggcgcgaacgccgccccgctcacctgtacgaggcctttcccggagcagcccggctactcacaccgcggctgaggcgactgaaccgccccagtacgccggggcgagtcaagcctggcctttcagtccagcccagcccgtcgaggaggccccgccttccagcctagcccggccagccgaggccccgcccctgtagggacagcccgcctgagcccgcctcccagccccgccccaagcgccgaggcccggcttccaggctccgccccgacccgcgcggtggggaagagccg

SEQ ID NO: 27564 - DNA, 356 bp, Homo sapiens
  source 1..356: mol_type = other DNA
gtagctgggattacagactaatatgcccagcccaggctgagtgcaatggcgccagaactcttttttttttttttaaatcatgagttagattgatagttttcaaatccgaccaggtcaagtgactggagttcaccggtctcgggtataccgcatctcgcgccaggcttcaaactctagatccccgagtctcgagctccagctgggtgtcgagacgggtacgggccggccgcgcctcgcgcatgcgccctaggcccgcagggccccgcgctggaagctcagctcccactcccaattcggcattgcctggaggcggaagtgggtgggaggggccagacgtgcgcccctccccggaagtg

SEQ ID NO: 27565 - DNA, 575 bp, Homo sapiens
  source 1..575: mol_type = other DNA
attatctaaagtatataaaaatctaaaaactgcatatccggattatgttattctagcttcctgtagaaatcaggcttacctttcataaagctggctaaaagcatcagccggtatttatataagaatccatgtctgttctttttttccaaaaatcctagaaaaagcagtttacagcctcactttaaaatgttagtctgttcttaaaaagggtttataactgcatctactataataataaaatgtaagcaaccttgaggtactgaacaatttcatagctttgaactctccaaaatgttctagaagccaatacagaaaacccaaaaatctcagtttttgtttgagggtctgtctaacacacagcccaggctctaataagtaatggataataataataaataataatgaatccattcttcctggcaggcataaattccggccgggattccgaccccagggccagagcaggactcgccttggcgtctagtgggcggggcttccctggggtaccgcccacgtcgggcgggacctgagggccgctggaggggcggggcgtctatgaggtcccgcccatgcgg

SEQ ID NO: 27566 - DNA, 369 bp, Homo sapiens
  source 1..369: mol_type = other DNA
ggccaggcgatccccatggccccaaagttgacgcagctggggtccaggtgggccaggaggtgagcaccctactgtgtgctcaccctgcttttttaaagaaaaacataagtttatgttggaagggcctatagcagctctagcatttcacaattgcttcacagattttcaaaattctttacatttggaataggggtatttacctaatgcctgtacccccattctatctaggaagtaactaatttgcttttgatgttgtagataggcagaagccttgtctcaaactaagtccgaatgatatggtttgtctgtgtccccatccccaccatgctattctcatgatagtgagtaagttctcatgagatctgatgg

SEQ ID NO: 27567 - DNA, 312 bp, Homo sapiens
  source 1..312: mol_type = other DNA
gtgggttatgtcaatcctccatcaataacatttacattgccagggacacaagggccaggcttttggtccatgcccagggcgtttggtccctggccctggagcaaatcgcccacaacgattttcaaaattgaaaaggtccccaaaccttggagccactcagggtgcaagagatttcattcttgcaattttcaatggacatcgctgtcaagcaagtgtcttgaccttccaagaaagtcacccttgtagcaaatagttgctcgttgatcagaatcgaccagcatgcatctagggcccatagcagcctaaaggctg

SEQ ID NO: 27568 - DNA, 332 bp, Homo sapiens
  source 1..332: mol_type = other DNA
aggttgcagtgaactgagatcccgccactgcactccagagtgagactctgtctcaaaaaggtgagtgtgcacacacctgttatctcatcagttcattcctgggaagctcagctgggaagttacttccggtgtcctgagataacagtgaggttgcatttcacaaatgtgtcatctgactttgatctgaagaagaaaagtgtaaaaggaacctctttaattcatttcctaaatacatattctctatttggaaatttccttactaaagaaaattctatctgattctttctaagtagactatgaggcactattaacctaagttatacatgaaatta

SEQ ID NO: 27569 - DNA, 714 bp, Homo sapiens
  source 1..714: mol_type = other DNA
aaaaggactctttaggtccaaaatgaccctccagtggccgcgtctgcgggccccgccacctgcgcccaccctgtgaccctggctcagcgaccttggcccttaatcgcccaactttgccgccgccccggcagttgggccctgtttccgccggcgccctgggagaggcctcaccactcggctgggctccctgggaaagggcagaagggtcacttcggagccactcgcgccgttttcacgtgtaatggggggaggggggctcccggctttccccttttcagctcttggacctgcaacaccgggagggcgaggacgcgggaccagcgcaccctcggaaggctcgatcctccccggcagggcgcctggccaacgagtcgcgccgcctcctctcggccgcgcctgctggtgaccttcccgagagccacaggggcggcctcggcacccctccttcccttccctgccgcccatcctagctccggggtccggcgaccggcgctcaggagcgggtccccgcggcgcgccgtgtgcactcaccgcgacttccccgaacccgggagcgcgcgggtctctcccgggagagtccctggaggcagcgacgcggaggcgcgcctgtgactccagggccgcggcggggtcggaggcaagattcgccgcccccgcccccgccgcggtccccctccgggacccaggcggccagtgctccgcccgaaggcgggg

SEQ ID NO: 27570 - DNA, 405 bp, Homo sapiens
  source 1..405: mol_type = other DNA
taagcgccgcagcctcgcccggctttcctgcttcctcggactgtgcaggggaagcagcaggaggggagtcctgacgggcaggtccctcttccgccggcagattggagtctgctctcggggagcccccaggtaaacccctcacagggagaaggctcagctgcctcctggcctggggtcaaatcgatatccccgtttggccacgagaacatgagcacgtgggcgacccgcgggagctgtgggcctggcaggctcgcacaggcgcccgggctgccggccgctgcggggatttctcccccagccttttctttttaacagagggcaaaagggctggcagggtgcaggggttccgcgtgacctgcccggctcccaggcatcgggctgggcgctgcacgcgtggggacagcc

SEQ ID NO: 27571 - DNA, 503 bp, Homo sapiens
  source 1..503: mol_type = other DNA
cagaataggaagccactggatggaattctttgctgtgcttcgcagctgttcagaacacgttctttacataatgccttttaaagaaatgaggttctattatgcttcccttggagacaagaacaccaaatcatggtgatgttttccttttcctaaaaaaacatttgaatgtatgtgattcttttgcatgaaggcttagtataatttaataaaaacggccttatcttatttcctcccacccctccaaggaagggaggccggacttggggtcgggcagccactggcggccccgcaccgctccgggtgcagccccggcgtcccctgaccccggtgcacacccgccccagcgctgcccctcgccgccgccaccagccctgggcgcggcctccggagctccccacagccgggcgcggcctcaccccccccctcccccgccgtccccacccccgcgccgcctggcccgggggggcggcgcggcccttccggccggggcggggccgggcctg

SEQ ID NO: 27572 - DNA, 460 bp, Homo sapiens
  source 1..460: mol_type = other DNA
aaccccttggaatttcctaggcaataggagtgtttttgttattcataatgactcccttagtcaaattccctactcctcttgcgggaagggaaaggggctgaattcaatcactaatggacataatgaaacctggataaaaatctcttaaacagggttcggtgggcacacagaggtgctgtgaggacagcactcccgccagggaattgctgaacctcacgggagctgtggcaatccctcagttaatggaagggagggcagtctccctgggctaatcgggaaggtgtaggcctgccttccgcagggcagggtgaggttcggcgcgcgcctcccaggcagggctagcggcgaaaggcccgcgttcccgagcgcgcggcaccgcggccagggcaggaggaggccaggcggccccgcggccctgcgcagagagcccagttgcaccaccaggcgggccacgagaggg

SEQ ID NO: 27573 - DNA, 373 bp, Homo sapiens
  source 1..373: mol_type = other DNA
cccaaagtgctgggattacaggcccagtagctgggattacaggagcctgccaccacgccggattttttaacatccatcacagtaacttaaattatataaagtaactacccctgaggagcccggggtagttgaaggccctccagcgccttcgaaccgctttctcccaccctggccgtgcgctggtgatggtggcagcggcgctccagcgacgcccggggaagtgtccccagggtcgtcgcattctttccaaggccgccatcggtgggaagggtgcgctcgtagcacccctccgcgccccaccccacccgcttcgccacgggttcgagccctggcgtcggggcgtccgggagcccactgtccagcaccgaaggca

SEQ ID NO: 27574 - DNA, 336 bp, Homo sapiens
  source 1..336: mol_type = other DNA
gcggcgctccagcgacgcccggggaagtgtccccagggtcgtcgcattctttccaaggccgccatcggtgggaagggtgcgctcgtagcacccctccgcgccccaccccacccgcttcgccacgggttcgagccctggcgtcggggcgtccgggagcccactgtccagcaccgaaggcaccgctgccactcctcacatcccacatccggcaggggaagcccagcaggtgagcgcaggtccccccagtccccgagggagtgcgcccgacggaaacgcccctagcccgcgggcctcgcccgagctcgtcgcgccgccccgcccccgtttttaaacctg

SEQ ID NO: 27575 - DNA, 647 bp, Homo sapiens
  source 1..647: mol_type = other DNA
agccacgcaccggccgaggcacgggcagcggggggttgccccagggcctcgctcgcacccactggggtaggcaactcaccacacacccacggagggggtgtggaaggccccgctcccccggcatctcggctgcagcgggacaaggtgacacatccgggagcccggcagcgcgccgggtgtgcactcacccgggcccgccgcccgcgagcctcggacgcgggcagcagcagcagcagccgccgccgccgccgccgccacctccggccctccacgtcagccgacggcgggagggagcgggtggcggtcacgtgggctggcagcgcgcgtgcgcagtcgcaccccaccgccccctccttcgccgtcgcgagccgcgggatcacgcccgcccccgcgctcgctggctcccacccggggagggtcgttgtgcgcctgcgccagggcggctccccagtcggcgcttgcgcggagaactcagcgctgaggtggcgtatgaaggacccgaggtcgagggcccccccatacaatgggcagggcccggggcctgggcgccgcgacctagtaggcccgcatgctggtgggcgccgcgcgagccttgttccctgccctcccctcccacagggaggccacgcttgcagagctggagcgcg

SEQ ID NO: 27576 - DNA, 621 bp, Homo sapiens
  source 1..621: mol_type = other DNA
tctgcgtcactcggagacacgcaaggacgcacacttgcgcgagcaaggctctaggcgggggtctgcagaaggcgcggccacgcgcgctaggggacgcgcagccccctgcaaggccgagagcgcccacgcagccgccagggagcgcggcgacacgcgagcgcctccacccagcggaggtgtcagccacgcaccggccgaggcacgggcagcggggggttgccccagggcctcgctcgcacccactggggtaggcaactcaccacacacccacggagggggtgtggaaggccccgctcccccggcatctcggctgcagcgggacaaggtgacacatccgggagcccggcagcgcgccgggtgtgcactcacccgggcccgccgcccgcgagcctcggacgcgggcagcagcagcagcagccgccgccgccgccgccgccacctccggccctccacgtcagccgacggcgggagggagcgggtggcggtcacgtgggctggcagcgcgcgtgcgcagtcgcaccccaccgccccctccttcgccgtcgcgagccgcgggatcacgcccgcccccgcgctcgctggctcccacccggggagggtcgttgtgcgcctgcgccaggg

SEQ ID NO: 27577 - DNA, 585 bp, Homo sapiens
  source 1..585: mol_type = other DNA
ggtccgttccgtggggacaggccctggactggactgccagttcacacaaggggtgtgcacgaacgttcacgctctgcgtcactcggagacacgcaaggacgcacacttgcgcgagcaaggctctaggcgggggtctgcagaaggcgcggccacgcgcgctaggggacgcgcagccccctgcaaggccgagagcgcccacgcagccgccagggagcgcggcgacacgcgagcgcctccacccagcggaggtgtcagccacgcaccggccgaggcacgggcagcggggggttgccccagggcctcgctcgcacccactggggtaggcaactcaccacacacccacggagggggtgtggaaggccccgctcccccggcatctcggctgcagcgggacaaggtgacacatccgggagcccggcagcgcgccgggtgtgcactcacccgggcccgccgcccgcgagcctcggacgcgggcagcagcagcagcagccgccgccgccgccgccgccacctccggccctccacgtcagccgacggcgggagggagcgggtggcggtcacgtgggctggcagcgcgcgtgcgca

SEQ ID NO: 27578 - DNA, 466 bp, Homo sapiens
  source 1..466: mol_type = other DNA
ttttcttaaaaagaaagaatcaacagttcatgtgtgcacagtccctcctcgctccgccgcgggtacggcccccgccgcgcagaaccgcctcccgcgcaggctggcgcgcgccccgcaacgcgctccagctctgcaagcgtggcctccctgtgggaggggagggcagggaacaaggctcgcgcggcgcccaccagcatgcgggcctactaggtcgcggcgcccaggccccgggccctgcccattgtatgggggggccctcgacctcgggtccttcatacgccacctcagcgctgagttctccgcgcaagcgccgactggggagccgccctggcgcaggcgcacaacgaccctccccgggtgggagccagcgagcgcgggggcgggcgtgatcccgcggctcgcgacggcgaaggagggggcggtggggtgcgactgcgcacgcgcgctgccagcccacgtgaccgcc

SEQ ID NO: 27579 - DNA, 553 bp, Homo sapiens
  source 1..553: mol_type = other DNA
tcataagattaattccaatgaacatttgttgtatacctaatgtatgtcagatcctatgattgatgtatagatagaatttccatgatatgttaaatatgtacctatttaattaaaagtattttttttcttatgatgaatgtttaaaaaatttttcttttcctctccattttattgtagtatttgataaattcaaaatatatgtaaaacatatgcaagctgtatagtattgaatgtgcttactttaccatcctgaattgtgtatattatgccttgtttttaaaaataattttatcagatatgtatacatccctcaaaaatgtaatattgggtatagatgtaagtcattaattttcactgctgtgtaatattccaagtgtgaatataacacagtgtatgtcacagttgtaagaatttttctaattttcacactggggtatgttaatgaatcagtttctagatcattacattccacttgtgtttctaacattgcactttataagacagattgcccaaagggggaaaactcccttggggaaaacaaagggattttttt

SEQ ID NO: 27580 - DNA, 569 bp, Homo sapiens
  source 1..569: mol_type = other DNA
taatgttcacatggctgcgagtctcagaccgctccgttgagtagagcaacgcacagcacatcacatcgcatcctccgtagcgggaggctctggcctcaccgcagcggcacttcccggaagagcccaggatattcggggacccgcaccggacaggcggcccaggccccctggcgcccagctggccgccctgttgcagctctcatgccaagacctgcgcctaacggcagggattccgtccagcagccaccggggcgccaggttatgctggggctgcaccacccggcccgaggcttttgaagccacgcctgagcgcggaggatgggcaggatttgccccgtgaactcccgcgcacgcaggctccgcgcgaggcccgggcgcccgagcggcgattccccagctccagggtggtgccccccggctgtggagcccagaccccggccgtccagcagtgcgatgtaactgcaccgcgctggggatccacctcccgccagggtgagggcgccgtcctccagcgtatgctaggcaggcgcgccccgccctcctggtcacgtgaccacgcctacagccga

SEQ ID NO: 27581 - DNA, 622 bp, Homo sapiens
  source 1..622: mol_type = other DNA
taataggcagattcactccagctttcagaatctccaagccccagagcctgggggccgtgcacggatctgaacccggttcatccctcgcggcccgcggagcccggctggcgggtgacccagcgcccgcggctccgagaggagcgaggtcacccggcgcttcccgagaccttggccctaggcccagctggcgctgggacgcgaggcaaccgagccgccggccaggactagcacgcaggggccgcacccctgagggtgaccggaaccgctcccgcgggaagggcagggtgcggcgcctggccgcagacagacaagggggcgccggctcgcgccgcacagcctgacgggagcgtcatccttcctgcgcaggctgcacggctccgcctccagccgcggggcacgcggggagagccgttcctccctccctccgctaacaagactgtccctacggaaggggtggggctagcttggccccgtctttcacgcccagagggggcggggtgaaccgtgacagcgcttcggcccgcactaaggccggctcttgtgccggaaggaggaaggcgtgggcattcgcccctcggagcgacgccgctgcgaggtcggcccagaacgaagcggggaggcg

SEQ ID NO: 27582 - DNA, 575 bp, Homo sapiens
  source 1..575: mol_type = other DNA
tccacttcttgaattcaaatagactagactgtgattttcaagtcccaaatcgctgatatttgaaaataccatttattaaccttcaaatgcaattgtagctgcagcaccaaaaactttatattcttaagaggcattcgtgatactaattctttttacagatagtttctgatgttatcccaaaagcaatgcactttaaatgatcaacttttcaccgcattatttaattaaatcatttgtcaaaatgaaatttgaccttctgcttattggcaaaatcctcatttataacatttacaagagattttaactcaatacagtgcactcacaaactgtatctgggtaataggcagattcactccagctttcagaatctccaagccccagagcctgggggccgtgcacggatctgaacccggttcatccctcgcggcccgcggagcccggctggcgggtgacccagcgcccgcggctccgagaggagcgaggtcacccggcgcttcccgagaccttggccctaggcccagctggcgctgggacgcgaggcaaccgagccgccggccaggactagcacgcagggg

SEQ ID NO: 27583 - DNA, 613 bp, Homo sapiens
  source 1..613: mol_type = other DNA
acttttcaccgcattatttaattaaatcatttgtcaaaatgaaatttgaccttctgcttattggcaaaatcctcatttataacatttacaagagattttaactcaatacagtgcactcacaaactgtatctgggtaataggcagattcactccagctttcagaatctccaagccccagagcctgggggccgtgcacggatctgaacccggttcatccctcgcggcccgcggagcccggctggcgggtgacccagcgcccgcggctccgagaggagcgaggtcacccggcgcttcccgagaccttggccctaggcccagctggcgctgggacgcgaggcaaccgagccgccggccaggactagcacgcaggggccgcacccctgagggtgaccggaaccgctcccgcgggaagggcagggtgcggcgcctggccgcagacagacaagggggcgccggctcgcgccgcacagcctgacgggagcgtcatccttcctgcgcaggctgcacggctccgcctccagccgcggggcacgcggggagagccgttcctccctccctccgctaacaagactgtccctacggaaggggtggggctagcttggccccgtctttc

SEQ ID NO: 27584 - DNA, 562 bp, Homo sapiens
  source 1..562: mol_type = other DNA
cttattttatttcttctgcagcaacatatgcaacattgttctatttaaaatattccttgaattaaattcgatagtatcaatttaaaacataaagttttcactcaactcctttagaagttagattttactcttctgctgattatcagttgacaacactgagattacttttgaatttttctatgtctcagaacttaatttacaaataacattggtagattgacatgttgtctttcctataaagtaactttacctctgtcttaatagtaaactactatgaaagtgaattcgtgttcctcttgatttgtgaactgatgaaaattacaaaatgtggagttttttccccagataaagtaaatggtggaatattcaggtttatttgatacctagaaaatacctgaaattttccgtggtaataggcacattttgaaactgttttttttttctctgacaattgaatatattttatatatagttgattttgattattgaagactaaggaaaatttaagtttgaatgttagaaaatgaattttgcaaatttgaagtaattttattctttatgt

SEQ ID NO: 27585 - DNA, 680 bp, Homo sapiens
  source 1..680: mol_type = other DNA
cggaatctgccgttacctgagcaacaggccccgcccgccggctcggggctggggggcgggaggaggacgtcagcactagcgaccgggtcggtccgcgggggtggcggcggcaaccgcggcgggggtatccggggagactgctgctgtcgctgctgctgatcgcggcccaggtcggcctcagagagcggacaccccgagcggggggtgcgggcgccgccgccgccgcttctgctgctgctgttcctgctgctgctgttggtgccgctgccgccgccggcgagcaggcgggaccggggcgggcggttcgggctctcctggcggaggagccgccgccgccgcccgggccccggcgcttctcgctgcgcaggttcggagcgcgcgcctcgggaagaagccgccggcagcagccgccgctcggcgcccggcctcgccgacgccgccctctgcgccgggccggccgtgcggccccgccgcctggaatcggggcccggggactgcggtatttgccggggagggggctgtcgcctccccggccccgggcgccgctggaaccgcgagccgaggagagactgagcaggctgcggcgcggccaggagccggagcgccgggggcggagagaggctgccggggcggcgctggctgcggaggccgcggcgggagcgcggcgcgggagcccgagg

SEQ ID NO: 27586 - DNA, 546 bp, Homo sapiens
  source 1..546: mol_type = other DNA
ttccacatttagatgctatagttttaattaaattattttcatttactttttgttatttaactgtttctctttaaaatctactatcaattaatactgtcacaggaatggtcccctgttaacacattactagacattcagatctacaagtagagcttgaaatatttctctgtagaatcagtgctgatccatactggtaatatggtctctagttattatagttccttgctagaacatagtaatgaagtaagaaagctgcttcatttttcttttagtaaaatattgaatttttcccaagtttagcaaagttacagaaacatgctcatgacatgctttccatactgtttgacagcagttgaaaatactttggaactgcactccaaatgatgattttagatagctttgaattatttgttaagttcatcattaaattataacattatctgatgttaaaacatgtattgtgatacattcttaagctaagatattattatactgagttgaataaagattatataatacggtagatagtaggttgaaccatatgat

SEQ ID NO: 27587 - DNA, 528 bp, Homo sapiens
  source 1..528: mol_type = other DNA
aggcacaagtattttgaatctagtcattcttgttgaccaatctgtgattacaaatttggctgaatttaagaaaaatcttttttttatccttttcttaaagaattaccttttattagataccattacttttatggaccaaagtgttaatttttcatttccaccatggatatcatgatcatggttcatcctacccgtaggataattgaaatccaatagcatctcagaaatgttcctttgagttgggaagtccctcaataattaaaagattacttatttaacttgtattatggttcttaatttatgaaaatcctttacaaaaagattttctgaagattttctcaatacaagtttatattcattttaatcactatggatcttctataccattaaaaacataactgttgtgttgagtaacatatacctgtttgtagttagaaaagttttttaatattgaatatcctaaagttcttatttaaggaaccattagatatgtcaaatgatacaaacattaggatatgaatatttcct

SEQ ID NO: 27588 - DNA, 437 bp, Homo sapiens
  source 1..437: mol_type = other DNA
agtgctagagacccctaaagcatgccttggtgttttcacttcagtaaaagtaaaacaaagtgtcctctactcatttttagaggagactttggaaaggcttgctaggagcaagttgacatcctacatcttcaaagctttgtatttgaagctacctaatcatgcacagagcttacaagtctgggtaacttgttaaacaatggcatacagatatttaatctgaatgccaatgttttaaaaaagaaacactattaaagaacctcacctgaggtcaggagtcaaagatcacaccattgcactctagacaaaaatagagaattggagaattgcatattcctttcctgttggatgacgtagactgaaaccggcctcaagccccacaacccggcttgtgatgccggatgactcaggcctgaaaagctgatattttcatatggtct

SEQ ID NO: 27589 - DNA, 464 bp, Homo sapiens
  source 1..464: mol_type = other DNA
tgtagaaccattgtttttgatgaccataagaaaaagacattctttgtctccagtgaccccagagacatcatatgtgcagcagccgaccaggtcccaggcaggctggggcgccaccaggtgggatagggcccctcccctccgtcccggccgctcgctgcgccccctctgggcggtgcaggctccggctcccgcgccggggctgcctctcacggatttcagcccggtgggaggctccgggaataacttacttagtggactggggggtcggggaccgaaacccaaagagcacccgtttccagtggcgggggatgcacgttggtttgtgcccagcccgcccccaccaagcccggtcctcgacgcgctgacacgctagctggcatggctcgcccccgccccttcctcccggaccgcgccggcgctgtgcgggagccgcgtcgcttcgtgcgctgccagcggggctcagc

SEQ ID NO: 27590 - DNA, 198 bp, Homo sapiens
  source 1..198: mol_type = other DNA
tcatttttgctcagcaagatgaagctaaatgagtcactgattgcagtaaggtcttccttttaatgaaaagcagcccccaaatcattttcttttctaacaaaaagcagtgagccaagatggcgccattgcactccagcctcatgttctaaatggcagctccatcttctctttttgccacccatgtttacagaaaaacct

SEQ ID NO: 27591 - DNA, 535 bp, Homo sapiens
  source 1..535: mol_type = other DNA
cagaacagcagcagctgcacttggggtgaattgaggaagtatcattcaccagatgccgtggtctggccccaccgacatgcctgggcaggggacgtgtgggtatatcatcgtctcccatgggaaacagaccgtttgcgagggctctctctaggggaagtgcttttgaaaaacccattccgccgtgagaaggccaggagagcacatgagccttggacgggcctcccttgacttctgcttccagagatcttccattagaagccttcttcaaggttgctggaactcagattccaacaaagaaccaaattttgcccatgtctattcagcttatatatatatatatatataatatttatcagggaaggggttgagctaaaaacatgagttttcctctgtaggtatagtctgtatggattcattctgattccaccaggagtctggttatttatttatagtttacttagccaaagggaccttaaaatgctttgataagaatggccaaagtttcttcaaagattaactggcattctttaaaaag

SEQ ID NO: 27592 - DNA, 461 bp, Homo sapiens
  source 1..461: mol_type = other DNA
aggggaagtgcttttgaaaaacccattcgccgtgagaaggccaggagagcacatgagccttggacgggcctcccttgacttctgcttccagagatcttccattagaagccttcttcaaggttgctggaactcagattccaacaaagaaccaaattttgcccatgtctattcagcttatatatatatatatatataatatttatcagggaaggggttgagctaaaaacatgagttttcctctgtaggtatagtctgtatggattcattctgattccaccaggagtctggttatttatttatagtttacttagccaaagggaccttaaaatgctttgataagaatggccaaagtttcttcaaagattaactggcattctttaaaaaggcatcagttttccccactagaatcctgtgctggtttgtagatttccttaagaccttaagacatgctgacatcatgg

SEQ ID NO: 27593 - DNA, 379 bp, Homo sapiens
  source 1..379: mol_type = other DNA
aaagaggcatgcgattcctgctttttcatgcccatcctgtgcagaaggtcactataggatagaaattcacatggtgcttgtctagggaagctgctagcatgctccttgtttataattagaggctgctttaaaaattaagaattactaaagttcatctctgaagaattaaaaaagttttgttgtcaaatagcttttaagaaatctggagctatctcagatataaataccttaatgaaagccatgtgccagaagccctcgtggctcaagggctctgtccttggcagctgggcggtgggaccgaggctctgcctgaatgctcagcttctgcaagctgttcctgcctaccggctcagccagcacaggagcacgtagcctgcag

SEQ ID NO: 27594 - DNA, 619 bp, Homo sapiens
  source 1..619: mol_type = other DNA
gcaaaatgtttcttccaagcaatttcctgaaaatgagtaattaaagtcctgaaaccctctaaggaatgttcaggcctttaatggggccctcacatggcatctctgggtagccaaaaggagtgagaccagctcactgatattccgggacatttgtagtcacttcagttatttgggttttaataaatacttgaaaacaagacttaggaaggtttatttttcctctttattttttgtccttgcgttttcaacaactttgttgtagagcaaataaagttctggaacacttatatgaaatgttgaataaatataggttgttaaaaataacctgcaaagtttccttttaggagaaaggagctcaagtcctctgtcctagtaattctgccccagggcagtggggtgccctcaacgccttggctccaaggtgcttgcagcccgtgtgaagccatgcggagtcccatcctcagtgcagtgtgtcacacggcggcacaccggtcacacctttgatgccttttctttttttaattaaaaaaaaaaaatctcctggctgcatatcatcaagaaaaacaacattgttttcaatatcctgtttctttgggctggacagccaggaccaatagaa

SEQ ID NO: 27595 - DNA, 648 bp, Homo sapiens
  source 1..648: mol_type = other DNA
ggcggacaagctgagcctcctggctgcaccctttggaggctgctggttgcagacgccgtcgtctcccaagggcggctgtcaccgcgtgcgtcggtcagaccaggccgcggtgccctcggcatccccgcgtcccggcggctgtatccggctcctccccacgaccgaggtcccgggcaccgcgcctctccctccggacgctctgcgcgacgtcgtgcaaccgttttcacttttactattttcaatgtttgcaacggttttcaatgtaggaggagcgcgcacccccgcggctccccctcacccgagcagggcgcgtagtgtccaaacctgcccgcgcggcccgcgctcttggccccgagggcgcgcgcacggacacgcgagcacacccacacccacgcgcacacggacacgcgcgcactcgaagactcccgcgcgctcgcacccacgcgcacctggccacgcgcgtgcattcccgcccacgcgtccctgccccgcccccggcgcgcactccgggttcgcaagtcgcgcgtcggggcggccgccctgctccgcgattggcgggagccggagcctccctgaacccggcgcccacaccatgggctgagcccgtcggcgccgagggagttagtgcgacccggctcggcgcgcacg

SEQ ID NO: 27596 - DNA, 473 bp, Homo sapiens
  source 1..473: mol_type = other DNA
aagggtggtgagacttgaaaattagtggctaattggaagatttcaaaatccagtgaaatatcttggatctggaatatttgagattcagatcgaatctttttgatgagcacattcaatactaaaggaaatgcaatcgactttgcaaatgacgatcctattactaaatacccactttgaaatatacattctgttctttgtacctcaggggacaaaaagggtgcataaatttaatctgttttcaatatttacaagaaatttcctaggaatgcatttgtagtttcacgaaggctgtccatcttaacagggttaaagatcctctcagaacctataggtactggaaaagtcaggtccatttcaaacaggaaatggagtgcgcggggagggggcacactcaccctgcccacatccaaccctgagcctgacccagacttgggggctttgcttcatggagcagaattctgaagcaatctgca

SEQ ID NO: 27597 - DNA, 450 bp, Homo sapiens
  source 1..450: mol_type = other DNA
tcagataaactcaggtttccaccttgaatttctcatcaatctgacgtggcaggttattcctaaggttcagttcccaccgcggccaaggcgggtcgctatctgggcaccgctcagctccagagggcgccactcccgcggagcctgcgggatcggggcttcccgggagcagcgcgatcgtttctacaggaagcgcctcattttcctaagcccattcagaggttcaagaatggggtggtttggcgttagggccttggccccagagaggacgccgagcgctccacggaaagtctccgcccggctcccagggcgcacactcgcgcgcacgtggggccgaggccctgctcccggggcctcagggccagccggcgagggacccagccagggaaggttgggccggaaggtgtcagccccgccccgcgctccctctcctcctcccgctcctgaagagcg

SEQ ID NO: 27598 - DNA, 473 bp, Homo sapiens
  source 1..473: mol_type = other DNA
tcgactttgcaaatcctattactaaatacccactttgaaatatacattctgttctttgtacctcaggggacaaaaagggtgcataaatttaatctgttttcaatatttacaagaaatttcctaggaatgcatttgtagtttcacgaaggctgtccatcttaacagggttaaagatcctctcagaacctataggtactggaaaagtcaggtccatttcaaacaggaaatggagtgcgcggggagggggcacactcaccctgcccacatccaaccctgagcctgacccagacttgggggctttgcttcatggagcagaattctgaagcaatctgcattaataaaactgcatgttaatagcgaccaattaatagattatgttgctcggccttaaaagttgagggagttttaattattatttttcaaattaaaggagtgcttattccctcccttcccttggggtggggggcgggggg

SEQ ID NO: 27599 - DNA, 584 bp, Homo sapiens
  source 1..584: mol_type = other DNA
acacattctgcttattaaaggctatttaaaaagaaacattttgtattagaaaatggccaactttaaaacactattttttacactcataaaaatgttttttaaatcgccttgacaatcatcagcttttgaaatgtgaattcctattggcccgtgcccgctgtctgagggcgcgcctggctacgggggccctcagtaccaccgcgccgccaccgacggccccacagctcccggacgccacggccagcggcgctggctccgcccctgcacccctggttccgctaccgccacgaacggaggccctcccacctcctggcgcccgcagggctcaagctgcgaatgaaagcctttgggggcccccccaatctgtaatttaaaaacaaaaaagctgcggggatggcccagggcatgacagcgcgggcgggcggtgtagagggcgtggccgcgagctcagggtgtgcctgggagcgagccctgtgcggggcgggacgtagcgcccgcgcggtgggggtgtggccgcgagcggcctgtgcggggcgggacttattgcccgcgcggtgagggagcgtggtctcgcgcaagccggc

SEQ ID NO: 27600 - DNA, 672 bp, Homo sapiens
  source 1..672: mol_type = other DNA
agacaagggaattttctggaaggagggtctgcggcccgtctgcacttggatggatccagccgagccgtcagccgcagctgcgcgctgctcccccgactcgcaccccctcggcgaagcgctgcattttgtggctgggtctcggcagccttcagcgccgcagacgctccggcaacgccagcatacgaggcccccgccccaggagcgcgggtccgggcggcgttcccctctgcgggaggcgcggcgagccaatcctcactgtcctcgaagcgaggggtcttccgtgcggggcaagacgcactggccccagacgaccggtgcgacccggagcgggcgaccttgcccaacccgcgactcggggcccctgcggtcccgcgtagaggacccaggtcccacggggggcggcggtgaatcgccccctcttgtggccgcgcttccgcccccggcacccgcccgctgctgggccacccggcgtcgcgctgccgcctcacaaagcccgggcagccgcctcattgcgcgcagggattcggactgcggcgcccagcctcctcatcgagtccccggaggcagagagctgagcgaggttcgcctccccgggcgggacacgagctccggtcctctcccgccccccgcggagggactacttttcgtctcccgcggaggaactacttcctc

SEQ ID NO: 27601 - DNA, 557 bp, Homo sapiens
  source 1..557: mol_type = other DNA
ctgggcaaaatggtgccctgtggtcccagctactcggaggctgcaatgagccgtgatcgcaccactgcactccagcgaaaggccgcgtcggctctccttcccacgccctcctgcagcgcctgcgcaccagggcccgcttcacgcaggcctgcgaagctggagcccctgggagaaaggcgcccaggtatccagaattgtgggtggggacccgcggtcccgtgacgtgcgtccgccaatcagcgcgcagaccgcactttgcggctcggcttcaaactaccgtgaggccggagcgccactgggaccccgcccccttcgcctgggtctggggccccgcgagacggcggaaaggggtgggggcgcccggggggggggggggggcccccggaagggggcggggtccgggatcaattaagggcccgcctcacctattccgggcgcgggctgagtcccgtagccaatgggcgggggtggggggcggcccggccggcggggagggggagcccgcggccggggacgcggggggaggaggaggcgggctcccaatccggttccatccg

SEQ ID NO: 27602 - DNA, 560 bp, Homo sapiens
  source 1..560: mol_type = other DNA
ccagaaacgaccctcgtgcacctgcagtctgggcaaaatggtgccctgtggtcccagctactcggaggctgcaatgagccgtgatcgcaccactgcactccagcgaaaggccgcgtcggctctccttcccacgccctcctgcagcgcctgcgcaccagggcccgcttcacgcaggcctgcgaagctggagcccctgggagaaaggcgcccaggtatccagaattgtgggtggggacccgcggtcccgtgacgtgcgtccgccaatcagcgcgcagaccgcactttgcggctcggcttcaaactaccgtgaggccggagcgccactgggaccccgcccccttcgcctgggtctggggccccgcgagacggcggaaaggggtgggggcgcccggggggggggggggggcccccggaagggggcggggtccgggatcaattaagggcccgcctcacctattccgggcgcgggctgagtcccgtagccaatgggcgggggtggggggcggcccggccggcggggagggggagcccgcggccggggacgcggggggaggaggagg

SEQ ID NO: 27603 - DNA, 504 bp, Homo sapiens
  source 1..504: mol_type = other DNA
gagtctcgctctgtcgccagagctggagtgttctcctgcctcagcctccggagtagctgggactacaggcgcgcgcatcttcacctagattcaggttaatttattaactattactaatgattgtgaacagtgcattctattaaacttatttttcagtatgcagttgtgtaagcattttccatgtaactgcttggaacacgacagttacctgctactataaaaacggtagttttctatttatggaagagtttttcttaaacttatctagaattaaaagttaatttaaagaaagtactaattatgacatttggtactatgagaaggtttttaattttaaaaagaaggaaaactccaacggccccgcctcccgcgagggcgacgcagttcgcaggcgcgtcggcgcgcctgttctggggcgcttggcttcaccgcgcaggcgcggtcgccccccatggagctgccgtagcggacccagcacagccaggagcgtccgggatgagctca

SEQ ID NO: 27604 - DNA, 470 bp, Homo sapiens
  source 1..470: mol_type = other DNA
ttaacattgatacatatttgcaaatttatactttaaaacttttttttttttagagacagggtctcactctgtctgtagtgtggtggtgccatcataacagcctcctgagtagctggggccaaaagtgctggcttatacatgtaatagatgtaattattttttcaagcaccagttgtttttgttaacaaaacttggaatctctttttctttttaaaatatggttttaaaagtcagatttattgaagtgtaatttgtataaggcgaattttccttgcttttgaaagataattttgtgattcatctaagagaattattcctatttccttctccagagtggatcaggctggacacaaagagagctggatttgaaccccctactccctgcgcaggctgccagaagctgcgctgcagtgaacacgctgcgcatcacgcaggcgctggtaggcggcactgggcgggtcagaaaccac

SEQ ID NO: 27605 - DNA, 479 bp, Homo sapiens
  source 1..479: mol_type = other DNA
aacattgatacatatttgcaaatttatactttaaaacttttttttttttagagacagggtctcactctgtctgtagtgtggtggtgccatcataacagcctcctgagtagctggggccaaaagtgctggcttatacatgtaatagatgtaattattttttcaagcaccagttgtttttgttaacaaaacttggaatctctttttctttttaaaatatggttttaaaagtcagatttattgaagtgtaatttgtataaggcgaattttccttgcttttgaaagataattttgtgattcatctaagagaattattcctatttccttctccagagtggatcaggctggacacaaagagagctggatttgaaccccctactccctgcgcaggctgccagaagctgcgctgcagtgaacacgctgcgcatcacgcaggcgctggtaggcggcactgggcgggtcagaaaccacgcgcatgcgca

SEQ ID NO: 27606 - DNA, 380 bp, Homo sapiens
  source 1..380: mol_type = other DNA
tgccattctgtgggaaggccctctgcactgagcttgggcaagaggttacatgttccctgtcactggttttcatttcacaattgcaattttatttatagtgaaacagacaaacatttgtattaaggaaaaatatagtttgaatagcaatttgaatatgagttttttttttggtcgttatagggagccgaaaaaggcagttctgtctggccaaacccacaaaagcagtggcaggggagttccctcaaggggctgctccagccagtgagaggggacatttacctagggctgtctgccacccgctttgctctttatcagtcctgggaacgttcacggccgcagtttgcattcagtcctgcagggacgcacacaactggctgggt

SEQ ID NO: 27607 - DNA, 128 bp, Homo sapiens
  source 1..128: mol_type = other DNA
gagtggtattaagaaacactgtcacgcagctagcagaatctccaataagacaaagcctgaaaaagtctcattcctggtttttgttcagttctttaaagtttgcctgaaagaagattctttttttctgc

SEQ ID NO: 27608 - DNA, 469 bp, Homo sapiens
  source 1..469: mol_type = other DNA
agttttaaaagtctattcttcctactaaaaaggaagtcaattaagatgccaatttttgacaataaaatgggcaaaaaaattttaaaacttactggaaggcagttcctcaagattcatctgcaatgtaagtcttcctaaattatgccaaattcctatgctgtcattaaaaaacatctataactccatcatctaggtgattttgactttttctaaattctctatgccaaacatgcattgttttgtcatcagattttgttttacaaaaaaaaaaaaaaaatcgtcttgagagcgccagagcgcgtgacaggctccctcgtctcggtgcggccacgcgggaaggcagggtcccgggcgccagacgcccctccccgccgcggctcctgctgcccgagtgcgcatgcgcgcgcccagcccccgcaggccggcgcttcccaggaggccccgcgcgcgggtttccatggggacgcgc

SEQ ID NO: 27609 - DNA, 488 bp, Homo sapiens
  source 1..488: mol_type = other DNA
tacagatacaggcgcctgccaacggtatgttacccagactggtgacctcccaaggtgttgggattacaggtgtgagacactgccccggaccttctctaacttttaacacaattcaaaatacctatataaatattaacatgtataaacacaaatatatataaataaacacaaaatacctatgtaaacaaagagcctgttataaacagattattttggttttttcccaagcactttaaaatagttaataaacttcaagtcagtgacaagtaaataaaatagtgagacaattggctattgtatgacagtttacttaaaaaattttttttaacctgccaggaaaaaaaacaaagttgctctttacttaaaggcctcctgaggtggtgttgggccccacctcccttggccccaaggcatctctgcacaggtctccgattggtgcacagcacatttatcgaccaatcaaatattttcctgacagatcccaaaat

SEQ ID NO: 27610 - DNA, 379 bp, Homo sapiens
  source 1..379: mol_type = other DNA
catccaagtagggatgtggcaggcatggaattcagataggctcttggtctctgaaaaaagttaaccgttggcttaagtgtggcaacgaaaactgcggtggggcggcggtgagatcggcctccgccccctcgccagacccaggcgcggccccgggagcgctaggtcacctcggcccaggccgtccccctgcccagcgggcctgagagtacgtgtgtcgccggggcgcccggtcactgccgagccggggtagggggacgacggcagcagcggggccgttacctgctccgcgctgttcccacgactgcgccaacgccgcagcgccggcgcgtccccatggaaacccgcgcgcggggcctcctgggaagcgccggcctgcggg

SEQ ID NO: 27611 - DNA, 359 bp, Homo sapiens
  source 1..359: mol_type = other DNA
taatcccagctactccggaggctgaggcaggagaatcgagtgagcccagatcgcaccactgcactccagcctgggtgacacagcgagactcagtctcaaactgagaattgttatgttctataagctttacaacaacgctgttatcatgcccactgtgtagacaaagcctggaacttccatgctgaaggttccagatggaccttgaatgtccagtgaaaggtgatgatcattttcaagtgttcttggtttttcatgtgtcataaaattgcactattcaggaataatcccaaaatcaaattaaaaacttctatgaaaatatgaaatggaaagcttacatgcatgtcagaggtgaccaggga

SEQ ID NO: 27612 - DNA, 270 bp, Homo sapiens
  source 1..270: mol_type = other DNA
tggtctggaattcccgagggccacagcccctggagattcaggtccaggaagtgcatcttgaacttaactttccagtagcctcaggtcaggcttaaggcaaggtctcctcacctggcctggggagagtcccaggacgctgcacgtgccttccactttaattcaaaatgtaccataccccttgcccttcaggcactatggccagaaggggggattaataaatacctagagaactggtaaagcagggaggagctgccctccatgtgggcaggc

SEQ ID NO: 27613 - DNA, 449 bp, Homo sapiens
  source 1..449: mol_type = other DNA
cagtaacacctacttttgagttattataacagttaaatgagctagtacttataacacagaacatctcttcttggtattatggagtctgtatagtctcactcatcaaattcaatagtcacaaagtaataagtaaatacccctgggtgactgaaatatagtaagtactatacagtctgtatttcaggtacctaggaattatttatttttctaatagttaacagtgaatcaaaagagtgtataaaaattaatgagactcgatttttagaataagtatcccgattttcaggatttcgtattcaatttcaaaagtaagtttgaaaccacatctattttctgaaaacatacgtacacacaactgcgggatttttggatttatgttatcgcctgctgtgggcggaggccagggccaccggcagaggtcctgcggatgcctgcaagtcacgtgagga

SEQ ID NO: 27614 - DNA, 458 bp, Homo sapiens
  source 1..458: mol_type = other DNA
ggggacgggtggcaagacgcttcaatcttctcgccagaccctctcagtcctgtaccgggactggcagagtcactctgatgccttgaagactcttcagagcctcacgatgtgaccttcaaccaggccagggccaatgcccaggctccttcctggccccactgtggttgtgaggagggcacatcagcaaggctgctggagccgctcgcctcctttccagctcagggtagaaagtgcgtgagcgggcacgcaggtatatccttcccattgacatttgaaaggtattttacatgcatgtaaatcttgcactcattgaaaaactttttttttttttaaaagagacagggggctggagtgtattactttttaaagaaatcgagcatttccggcttgcagacaggtgaatgcatctcattggctccagggaggcatgatgccaccgggcagctctttttaagaga

SEQ ID NO: 27615 - DNA, 468 bp, Homo sapiens
  source 1..468: mol_type = other DNA
acacagggcctggccatcttgtgcccaaccctggtaaagcatagtgcctaggaaaaatagtcctgattgtcctgactgtgagcattccaacactggggtgcattccagccgagagctttaatttaaatattatcatgacttcaagaatcatacagaacattcaggaaatgttaacatattgacttttcacagaaaaagggctatatgtttgggattactcaaattatcagcaatttcaatcttgcattctaccatgtattcaagataattaaaaatgatctaggagcatttccctctaagcaaatgaactggttttctgagagtaaatacggaatcggaatccagctgcacattttattaaaaataagcagctgttgaaatgattatttaagcctctaagaaattctctgctgctgctttaagactgcagagcgccccagcggccagaggcaggggaggggtccctgc

SEQ ID NO: 27616 - DNA, 266 bp, Homo sapiens
  source 1..266: mol_type = other DNA
tctgaaaatcaatagaagatgggcttgtttgttttttaaaacagccaacataattcagctggaggaggtacaaagaattttctattccttgtttctgtagaaaaatagtggccctgatcctgacagcaacttactaggtggcctgggttcctagcatcggggtgaagcccagcttcgcagctagctgaggctggggccaggcgccagcagcagccacgccccccactttagggaaaattctccaaccacccaggggccgccggggg

SEQ ID NO: 27617 - DNA, 338 bp, Homo sapiens
  source 1..338: mol_type = other DNA
aagaattttctattccttgtttcaaatagtggccctgatcctgacagcaacttactaggtggcctgggttcctagcatcggggtgaagcccagcttcgcagctagctgaggctggggccaggcgccagcagcagccacgccccccactttagggaaaattctccaaccacccaggggccgccgggggcgcaggctcggaaaggcgcgcgaggctccaggctccttcccgcggaagctcccgccactgccgggcgaatagacccccgcggacccccaagcgcgcggggccggggccctagttcaggccctcgctgcatgagcctcgtcacatccgttgg

SEQ ID NO: 27618 - DNA, 510 bp, Homo sapiens
  source 1..510: mol_type = other DNA
ggggtgaagcccagcttcgcagctagctgaggctggggccaggcgccagcagcagccacgccccccactttagggaaaattctccaaccacccaggggccgccgggggcgcaggctcggaaaggcgcgcgaggctccaggctccttcccgcggaagctcccgccactgccgggcgaatagacccccgcggacccccaagcgcgcggggccggggccctagttcaggccctcgctgcatgagcctcgtcacatccgttggccgaggaaattcgggactcgagtttcccggggaagaggcgcggcctgagcccggcgagggtggggagggcaggcgcaggtggaccccggcgccccccgagccccgctgtgaccttggccgcgggggaggggctgggccgctgcggggcagtcgcggccgccagagggggcagcggagaagaacttgcccaacttggcggcgcgggctggggcggctctgcgcctccgcgcccgcctccccggcccgccgcc

SEQ ID NO: 27619 - DNA, 395 bp, Homo sapiens
  source 1..395: mol_type = other DNA
cttgagtcattaggaaggattccttactgtctccacaggacatgtgtccctagaacttcccaggagccccaccagggtgacccacagggtggataatgtccctgggatccaagaaccagccggaccctggggcggggactgggtctttcgcagaccctgcttccctggagctctcttctgcaaatcggtcatcatatcatataaaggaggacctgcagacccatgccgtggccagaggggctgggcatggccctcgcttcactttcccagaatgaattcatgggcctctgctttgaaaggcttgggtcatgcttcttttaactgggagcctagggagccaaagtgctgggcttctccggtcagatcagccctggcccggggtcagcccggcgggg

SEQ ID NO: 27620 - DNA, 472 bp, Homo sapiens
  source 1..472: mol_type = other DNA
acccacagggtggataatgtccctgggatccaagaaccagccggaccctggggcggggactgggtctttcgcagaccctgcttccctggagctctcttctgcaaatcggtcatcatatcatataaaggaggacctgcagacccatgccgtggccagaggggctgggcatggccctcgcttcactttcccagaatgaattcatgggcctctgctttgaaaggcttgggtcatgcttcttttaactgggagcctagggagccaaagtgctgggcttctccggtcagatcagccctggcccggggtcagcccggcggggaacgggtccaccctccgccagcgacctcagagctcccgggcacagcccggggcacagccccgcgcacctgccccgcccacgcccgccccgcgcacctgccgggtccgcacctgccatttgcccgactggccgcgcacccagctggcccgcccctgc

SEQ ID NO: 27621 - DNA, 443 bp, Homo sapiens
  source 1..443: mol_type = other DNA
gctgagagcctgctccctcccagcctgtctggagggctcctcctggaggttcccagacctcccctccttgactttggtcacagagcaggaagccttagtgcaccttcacttttgcaggtgaaaagtaactaccaggctggctcagggctgagttccggagcctttccgcacctaatgaggggaagcaggacagctcagacagatcatgtacctgagagcatgtcctcggctgtaacaggagtgcatctgtgaggtcattcaaattacatggagttcgaagtccagtggtactggatggcactgtcagggcagaaccttccagtgactgagccactctgagctgccctggcagcccagacctgacagatcagactctctggcgggggtggggggacagccgccccgtctccacagctctcccaggattcggatgcagctggagt

SEQ ID NO: 27622 - DNA, 508 bp, Homo sapiens
  source 1..508: mol_type = other DNA
gtccgcccgggctcttgggaagagaagtggttcagggataggtgatcctgacgatgatctcctggtgttaatatttctaatgccaaggttttgaaaaacatgttaagtttctaaatatcttccgtaaagttaagtgcactcaagggaagtcactagctgagagcctgcttcctccctcccagcctgtctggagggctcctcctggaggttcccagacctcccctccttgactttggtcacagagcaggaagccttagtgcaccttcacttttgcaggtgaaaagtaactaccaggctggctcagggctgagttccggagcctttccgcacctaatgaggggaagcaggacagctcagacagatcatgtacctgagagcatgtcctcggctgtaacaggagtgcatctgtgaggtcattcaaattacatggagttcgaagtccagtggtactggatggcactgtcagggcagaaccttccagtgactgagccactctgagctgccctgg

SEQ ID NO: 27623 - DNA, 443 bp, Homo sapiens; identical to SEQ ID NO: 27621
  source 1..443: mol_type = other DNA

SEQ ID NO: 27624 - DNA, 267 bp, Homo sapiens
  source 1..267: mol_type = other DNA
ctggcgggggtggggggacagccgccccgtctccacagctctcccaggattcggatgcagctggagtccatcctgaacgtgcaatgcacagcagatgcgtgtttaaaaaatatttcctgcagaaagggcccatgttgccaccagcccacagtagccttgtgcacagacaaagaggctctggagggggctggccctggggacagggtggcctccatcctgatctggcctttgctcagtggggctgaagtccattttataattgatata

SEQ ID NO: 27625 - DNA, 372 bp, Homo sapiens
  source 1..372: mol_type = other DNA
tttcaatatgttgttaatacttcctggtataaaaaatttttcttgccaggcatggtggcgcctgttcccaggtgccattgcactctccatctaaaaaaaaaaaatttcttctagcctcaaacttctaagaaataattggtttgtaagaaataagtccatttttatggattctcacatcatcgattatagaaaaactttggtttggcggttattgagaaatcgaatatttttagtgcttgcctaaaccaaacatgggaagatttaaatgtacccttagaagcacatactcaaagaaaatttggtttgaaggagccagtggttcattacctggaaagtttgttacaattaaaattccagatcttcctggatgct

SEQ ID NO: 27626 - DNA, 352 bp, Homo sapiens
  source 1..352: mol_type = other DNA
ttctcccttcctagatctggacaagggaaagaagtgggcccatcatcacctgaagtcaggagttcaagacctagccgggctactcagtaagccgagattgccccactgcactccagcctggaaaaaaaaaaaaagattttaggggtaaaatattttgctttcgctgctctccgcagggctctctggtgggccccagacagagatgaaggaaaagtctggccttgaccttggtctcgtgcccagttgccaagggatcacctgaggaaggccctttaatgcaggggtcttgggatggccccggaccagtccctttactcgcgcccagggcaagggtgggggcgggggcgcgggc

SEQ ID NO: 27627 - DNA, 352 bp, Homo sapiens
  source 1..352: mol_type = other DNA
aatcacaatggtggaatgtcatcagtcacaggggatgcgatggcctggcctgggatgcgatggcctggcctgacaactattacctgttatgtttattattttaagctttattattactattttagctctgcagccattggcacacaatgcctgggagtccctgctggtgctgggatcatcccagtgagccctgggagggaaggatacgtgcaggcttggatgactccgggccattagggagcctccggagcaccttgatcctcagacgggcctgatgaagatctgattcagcaggcctgggttcgggcccgagaacctgcgtctcccgcgagttcccgcgaggcaagtgctg

SEQ ID NO: 27628 - DNA, 426 bp, Homo sapiens
  source 1..426: mol_type = other DNA
aatcacaatggtggaatgtcatcagtcacaggggatgcgatggcctggcctgggatgcgatggcctggcctgacaactattacctgttatgtttattattttaagctttattattactattttagctctgcagccattggcacacaatgcctgggagtccctgctggtgctgggatcatcccagtgagccctgggagggaaggatacgtgcaggcttggatgactccgggccattagggagcctccggagcaccttgatcctcagacgggcctgatgaagatctgattcagcaggcctgggttcgggcccgagaacctgcgtctcccgcgagttcccgcgaggcaagtgctgcaggtgcggggccaggagctaggtttcgtttctgcgcccggagccgccctcagcatcgcggcgcggggcggggc

SEQ ID NO: 27629 - DNA, 469 bp, Homo sapiens
  source 1..469: mol_type = other DNA
gggggcagcgcccagtaaccgcgctaggagcgcggaagcgctccggagcacgggcactgctgctagtaactaacaataataataatcataatcatagcagggcgggctcggagcacgcctgattctggttcccaccaggctgcccaggctcctgatgacgcatcagaatccccctaacccgcggccttcctgcaggagaggttggtccacggctgcgcgggccacgagcccacccgaagagctgggccgagatggggcatgcgcgggaagacccctgcccgctgttcccccccaccgccccagtggatgccatgcctggggcctccccggcgcgtggggctgacgcaccctcggggtctggcagaaggagcccgggcacagctgagacctgcgctcccatccccagcaggtgctgccgagctgggcaattcccaagaaatgaccgcagttgccggccaggaatcccagt

SEQ ID NO: 27630 - DNA, 632 bp, Homo sapiens
  source 1..632: mol_type = other DNA
ggtgataaaagttgtccgggaacagctctcttcctggtacagtcctttataggtgcaaatttcctttacaaaagggcattttctcagaggtagactatgttggggtagcagattctggtctcctccagtcctatatgccacgtcttcctggctgaggtgtgctcactcccgccctggccggtggtgccgagagacctgggaccatccgggggagcactttccaccggacgctggcctaggcggactggggagggtcttgggcgtccggcgctgtgtccccgccactcgtgcttgggccagcagtccccaaggcctaccctgggtccttgccccggaggccaagacggggccggccgcctacaggagctcgtgaggtagcagctccgggggctcacccaggactccaggagcgctccccgagccctcgggcagcgctgcgccgcggaccggagaggggcaggttggccgctgtggccgggcccgggaagcgccccagagtcccttatgggtccctccgcagccggggttgagccaggcagggaacccgtcccggacttcccccgcccccgcccgcccagggtgacccgcgacccgcttgggggtgtcgccctggaccctgggacaccgcctcc

SEQ ID NO: 27631 - DNA, 373 bp, Homo sapiens
  source 1..373: mol_type = other DNA
gtctcaggaatgagtgagaatatccttccaaggctgggaattttttttccccatatgtgaaaaaaaaatctttccttttcaaaccatctgttctacctgtaaaaagaggctgttattggtaattttttaaaaaaagttactttctgagaggaaactcgtgtatctaaacataacatttctgaaataaaacaattttagaaatatatcaaagtcaatatcctggttgtttggcaaagttttgcaaagtggtaacactgggggaagcgtgagaagctctgctcacccaggggagagcgcagtgatccgtccgcagtcaccgggcgctggcagagagggcgcccggggggcgggagcgcgcacctgggcacctggg

SEQ ID NO: 27632 - DNA, 379 bp, Homo sapiens
  source 1..379: mol_type = other DNA
taattttctagtaagatatgaagttatagttcatttctttgaatgaactgtggatgcccagttgttcctgcactaactgtggattttaaaatccaatccgcttttgtctttgtaaaaaaaacgaggtcaagagatcgaggccctcctggccacgtgcctgtaatcccagctactcgggaggcttgagctgagatcgcgccactgcactccagcaaaaaaaaaatgctttgggcatgtttgatcaaagtttttatgatggtagcttgataattaagtttgaatctttagttgtttttaacaggtgtcttcacggagcgttccgtgtaaggaacctgataacatttctgattataaaaaacagcagggccctctgccaagc

SEQ ID NO: 27633 - DNA, 365 bp, Homo sapiens
  source 1..365: mol_type = other DNA
ctggagctcaagggcatccagtgggggcttgcaaatgtcagcagacagcccccttcgcactcccaggcgggtcaacagtctctccgtggagcgtttgtaaccacaccgggcacgttgtccatgcaggcacttcatgaggttaattaatgttgtccttggccctaaaatgtatttaaaacgaaactaaattacttttatacttggaaaatgactgttaacataatagcagctgcgctcccggaatcccagagggtctggaactcgaattcacaattcctggtcgttttaccagttgtcatgtgaatcggtatggtcttcagtcccaggcactttgcagatgattaaataaatgaaattggagcgtt

SEQ ID NO: 27634 - DNA, 473 bp, Homo sapiens
  source 1..473: mol_type = other DNA
agtttcttcaaaattatgctattaaaacttttttttgtgagacagggtctcactctgttgcccaggctggagtgcagtgacacgatcacagctcactgcagcctcaaactgtgggacttgactcagagtagctgaggttgtattaaacgttttaaaaaatctttgctaatctaataaaaatgatcccacttagttgaatagcttctcatatgcttaagaaccatgctcatttttctatatacatatatatttttattggttcacaaggcaggcagcaatgaacaagacagtcggcctctctgaatatgggcggcggagagccaggtccgcggctggcccggtgctcaccggtagcgtggcggagcccgccaggccagactcccctcgcgggcacagagctcgtgtcccagggccccgaggtggagagggagctgcccgcgcgcgtgggcggcagggccgtgccacgtgggagg

SEQ ID NO: 27635 - DNA, 363 bp, Homo sapiens
  source 1..363: mol_type = other DNA
cacgtgcctgtagtcccaactactcgtggagatcctgccaccacactccagcctgggcaacagagtgagactctgtctcatttgagagcctgaggcaggctcaggtcaggagtttgagaccagcctggccaacatggtgaaaccctgtctagtgagactctctcaaaaataaataaataaaaatacatctttagccgtttattttgaattagtgggcaaatctttagctctaatggagtttactttttaaattgagtcccagttccagagtagaaatagtattttatatccagttcatactgtcttaaaagtgaaaattattcgagtatctaaaccttttgtatggagacaaaagtaattaca

SEQ ID NO: 27636 - DNA, 516 bp, Homo sapiens
  source 1..516: mol_type = other DNA
acagaaggcagggcctgggcctggtgctgagcccctccttgcctctgagaagcacgccccctaaggcaggcccagcccctggctccaggggcagccacggatttccagggactttccgaggactgagcctggatcctgtctcgctgccctgactgcgcgctgtgcacacgcacactcacacatgtgcacacacacgcacttgtgcaagcgcgcacacgagccaagccaagcagccgcacagcagccgccggggttgggctgatgaatccggaggcccgggtcacctcgcggcccgcgggcaggcgccggaggggcgggcgacgcgcgcacgtggcggggccgggaaggccgggcctttaggggggcgggggcacgccgcgttgggagcaggggggaggactgcggcccccgcaggcccggccgcgccccctccctcgggcaccgcccccgccccgccccgccccgcggccagagcctcctccggccaccgctgggccgcgggcgggacgcccgggg

SEQ ID NO: 27637 - DNA, 851 bp, Homo sapiens
  source 1..851: mol_type = other DNA
gcgaggctttcctcccggtcggtgtgtggagttgtaatatttctgcaaaaaaaaaaaagatcacagcgccgggcactatgcgaagtctccggctgcctgcgggccgctgtggacgccccggcgggggtcaggaccgacccccatctgcgcggcgaacgagcccggacgccctggccgcggccgccgggtccccgcccaggggccaggtggccaggttgcgtccgactagcgagcggcaggagccgcctcccgcgggctttcctcgcgggccgggagcgtctgccgccgacccgaggaccgcagggccccgctcgccgcccgcgcccgtcagaaagccgcgcgtcgctcccgtcgctgtcggggtcgtcggctcggggagtcgcccgccgtccaccggtgaacgggagcgcgtcctcccctccgagggactaagcgctcgcgccacgcatcccgccgcgccggaagcggggactactggcggcccagctgggcaggaccgcggccgaatgacccggggcgaccccgcagcaagggcgcctccggcaggcggcaaagtcccctgagaatcggcgcgctcctcgccgcgacggactccacccggccggggcgctcagcctcctcgccgtggcccccagcccggccgcctcccctaacggccgccgcaggctcccctcatggaccgagagcgcgggcttgcagcgcggcagcgtccgttcggcgcgcggctccgggcaggcccgccctcccccgtccccctgcgccgcgaggccccccccccgccccgccctccggcgcccggcgcccaatcagagtgccgcgcacgtgacgagcgatgcctgcgatgacctcat

SEQ ID NO: 27638 - DNA, 215 bp, Homo sapiens
  source 1..215: mol_type = other DNA
ggactgatggccactgtcatcagcatcatggtgagccaatggccttccccacgtgaactcgcggcaggcagagaatctaggttgggaccctggactgcacccggtgctgggcagcccatcacccactgttgaggtttagggctgtgcccagccagcgccagtgccaacgccgagccgcctctgcaggggatgaactgtcagtcgcgaccaccgag

SEQ ID NO: 27639 - DNA, 449 bp, Homo sapiens
  source 1..449: mol_type = other DNA
gtagtaatactgtattccaattatataaagatcaagaataaacatttttacacaatgcaaatggtctatatcaggatctggatggtgaatgtacaggtgcatagacatgtaatattcatcagactttacagaaagatttgtgcactttacttaaaaagcagtccttaggaaaaaaagggcagcttctggagccacacccacctgttgagcaagtaaagctgagatctcagtattgtgatatgatgtcattaaagttaatctagacgaaaatttgatttacctaaaactaaattgttttcaatgtgtgttataaaaaataaattccactatgttcacgaatgtacaacttataatctgaccaaaagtgagagatcagaattttctgcagtaacaattacattaggcaatattattacacatggaattgcatcatgctgattttaaaacaa

SEQ ID NO: 27640 - DNA, 345 bp, Homo sapiens
  source 1..345: mol_type = other DNA
aagcaccccaatggcctggctggttacatgtcagcagctgatggaataagagttctcttcccacaccactcgaagtcaactgggtgttggctgcaagtcaaggccaacatgggctgtgctaatagatgcagaccctctagagggaaggagcacatcaccctggcctgtcagagaacaagggtctggaaagaatgttgttgccatcattggctggccagggtccaattggacacaggttcagtttgctaatggtgacaacacttaaatatagtttggctgtgtccccacccaaattattctcatgatagtgaataagtctcatgagatctgatggctttataaagg

SEQ ID NO: 27641 - DNA, 612 bp, Homo sapiens
  source 1..612: mol_type = other DNA
tgaaaagaaatgcattcctgtttttcgtctgggagtaaagaattccttgtcaccatggatacccacttatatataataagggctttagagatgctggaccatctgatattccagcctggggccacatggtcttatacagttccatgaacatggctctggaaacacctctgtctgcagaaaatgaggcttttctggcagaggcctgggcatcttggctggcgcacagcaatgtcacatgtgtgagtgcacgccaggggtcaccccacaccggtgctgttgggggagagctgcccaacaccgtcggggtggggtgaggcttggaggcagtggatttccgagcctgggaaccccggcgtctgtccggtgtccccgcagcctcacccgtgctggcccagcccccgcgagttcgggacccggggtttccggggtggcagggggttcccatgccgcctgcgaggcctcggctcgggccgctcccggaacctgcacttcaggggtcctggtccgccgcccccagcaggagacaagagcacgcgcacctgccggcccgcccgcccccttggtgccggccaatcgcgcgctcggggcggggtcgggcgcgctggaaccaga

SEQ ID NO: 27642 - DNA, 668 bp, Homo sapiens
  source 1..668: mol_type = other DNA
ggaggcagtggatttccgagcctgggaaccccggcgtctgtccggtgtccccgcagcctcacccgtgctggcccagcccccgcgagttcgggacccggggtttccggggtggcagggggttcccatgccgcctgcgaggcctcggctcgggccgctcccggaacctgcacttcaggggtcctggtccgccgcccccagcaggagacaagagcacgcgcacctgccggcccgcccgcccccttggtgccggccaatcgcgcgctcggggcggggtcgggcgcgctggaaccagagccggagccggatcccagccggagcccaagcgcagcccgcaccccgcgcagcggctgagccgggagccagcgcagcctcggccccgcagctcaagcctcgtccccgccgccgccgccgccgccgccgccgccgcccccggggcatggcctgtctccctcccaggagcgcgtcctctgggcgctgacccagggcaccctagagtggcgcccggctccgatcgctgcccctgcccctccgccagggccacctggagcctcgggatgccccttgcaccggcagagtggggacccggagcgcactggggggagccccgcgcgcgcggctgtgggcttggggaccggggacttctcgcgccatccccaggaacgccaggc

SEQ ID NO: 27643 - DNA, 482 bp, Homo sapiens
  source 1..482: mol_type = other DNA
gtgctattggcataatttaaataatgggaaggattttattcttccaggtttagaagcctggaaaaagaccagttctgcttttagaagtataaacttcatgcctgacaggcagatgtaaatgatttccagttatatttcagtacctgcgcaggggcagggccccgttgcgtgtgtgtgcacacaggatgtatgtacatggtgtgtctgttgtgcacgcatgattgtgtgtacatggtgtgtgtgcacatgatgcacatgtgtgtatatgggtagacgtggtgagtgcacacatgtccatgtgtgggtgtgtgtgcatgcgcggtgtgcacatggcctgtgtgtgcacactgtgtgtacagggcagacgcactcactgagggcccctgggctgggatgttttcacagaaatcacagagcagctctcagagcccctcacctgtttagaggggatgtggctggggaacagcattggacaaatgtcc

SEQ ID NO: 27644 - DNA, 377 bp, Homo sapiens
  source 1..377: mol_type = other DNA
ccaggagtctgagaccagcctggccaatggcatgcctgtggcccagctacttaggaggctgatcacttgagccccgcgagggttctgaggatacaaaaagtgttcacaatagatcaatagatgcctctaaaggctcttttgtattatttgattttaaaaatcaattatgtgtaccatgtttttactaacatattttcaatcaattcatttcatccacttattaaaatgtagttactaatttttaggggatctgtgtttttgtgagagagccgcagggtcctgactcactcagagctgcctgtctccgaggccgatctgggatgaagcagcctgggcgctccccagacagtgggggctgaactgacctctcccctttg

SEQ ID NO: 27645 - DNA, 397 bp, Homo sapiens
  source 1..397: mol_type = other DNA
ctcatctgatatgttgttataaaacaattcctgagatgtagtctttagtttttaaaccaggagtctgagaccagcctggccaatggcatgcctgtggcccagctacttaggaggctgatcacttgagccccgcgagggttctgaggatacaaaaagtgttcacaatagatcaatagatgcctctaaaggctcttttgtattatttgattttaaaaatcaattatgtgtaccatgtttttactaacatattttcaatcaattcatttcatccacttattaaaatgtagttactaatttttaggggatctgtgtttttgtgagagagccgcagggtcctgactcactcagagctgcctgtctccgaggccgatctgggatgaagcagcctgggcgctcc

SEQ ID NO: 27646 - DNA, 502 bp, Homo sapiens
  source 1..502: mol_type = other DNA
ggagtatggggcctgctctccagaccctgaggacagccccgtggtggaccaaggattttggcgtggggaacttctcctaccccaggaaggccatgggctgggttgcctgtcacaggctactccgctgaccctgtcagcctcatctccatggagagcagcccctcctgctgaagatgtggggaggctctaaccacagccctgggagcagtctcttacctcctctgagatgcttcccttcctcagggaggggacttagaaatgcatagcttatcccttcctgggtgtgaccctgtgtgtgcccagccccagacctgcacgtggccggttttccacgctggcagcctggcatgatctgtccagggcaggacgagcagggagagagtcaccctggcccggaagcctcgcctgcacagggcatcctcttcgcctccacggtggaagggctggggccacggggcagagaagaaaggttatctctgcttgttggacaaacagaggggag

SEQ ID NO: 27647 - DNA, 402 bp, Homo sapiens
  source 1..402: mol_type = other DNA
gatgaaacctggaggatggagcctggaggatggagcaggacaggagtatggggcctgctctccagaccctgaggacagccccgtggtggaccaaggattttggcgtggggaacttctcctaccccaggaaggccatgggctgggttgcctgtcacaggctactccgctgaccctgtcagcctcatctccatggagagcagcccctcctgctgaagatgtggggaggctctaaccacagccctgggagcagtctcttacctcctctgagatgcttcccttcctcagggaggggacttagaaatgcatagcttatcccttcctgggtgtgaccctgtgtgtgcccagccccagacctgcacgtggccggttttccacgctggcagcctggcatgatctgtccag

SEQ ID NO: 27648 - DNA, 286 bp, Homo sapiens
  source 1..286: mol_type = other DNA
gctgtcctctaaaatacccagaaggagactcaggctggagtggactcactgcaacagtgattctctcccaaagtgttgggattaccctacaatttcattattaaaacaattccactgtaaaagaattagcttaggcctagacggaatgggcttcatgagctccttcccttccccctgcaaggtcacggtggccaccccgtgagccacagtgagttttgataaaaatcagtggagattattgtctcagaggatccccgggcctccttaggcaaatgaacagagcctg

SEQ ID NO: 27649 - DNA, 356 bp, Homo sapiens
  source 1..356: mol_type = other DNA
ctgaagaagaaaagatttctcctgttgtccaaacagctgtactaggagatgaggacttctgctcccatgcgccctcccgtctgctgcagggaggagtgcacaacataatgtgtcagtcacttgttttatccaccaggaggtagctgtcctctaaaatacccagaaggagactcaggctggagtggactcactgcaacagtgattctctcccaaagtgttgggattaccctacaatttcattattaaaacaattccactgtaaaagaattagcttaggcctagacggaatgggcttcatgagctccttcccttccccctgcaaggtcacggtggccaccccgtgagccacagtgagt

SEQ ID NO: 27650 - DNA, 384 bp, Homo sapiens
  source 1..384: mol_type = other DNA
tgctgttgctgcacagatccaatcatcgtcattgggatcattgcattgatattagcactggccattggtctgggcagtggatctcaaatacctagccaagtagttaactggaggcaaacatccttttggtttgctgacttgaagttttatttgcccagaactggccatgctcatggctttgtcaccaaggaacctgcccaccagctgtttttacaataaggtgcactctaatagggaacaatttttctttcaaatacctgatttctgccttcggtaagagaaaccaggaaggccgagcagttctcagtcaggactccttgctcggctggctcagcaggtcggccagagtcaccttgcactgtggttcctgggccaggccacata

SEQ ID NO: 27651 - DNA, 371 bp, Homo sapiens
  source 1..371: mol_type = other DNA
tgagatatgatagagaatatgctatatggttctatttggagactgtcctgggcactgtgacaggaaacaaaaatgtctccagacattaaattccttgagctatacacatatgattcatcaacttttctgtacacatataaagcttttaaagtttttaaaataaaaaaacaagtcaatgaatgactgagatccggccagcaggatccaggagggaactcattccctgacttgaggctgatcccgtgcaggggctattggtggacgctgcacccagcatcctgcaaacagaattctgaaaactgatatctcatgcaaacaggatatcaacttttgtcagaaagatcaaaaagagcttgaggtttttcttcaca

SEQ ID NO: 27652 - DNA, 495 bp, Homo sapiens
  source 1..495: mol_type = other DNA
gggctatttgataggcccacggcagcttgtgacttggggaaaatattccccgaatcacacttgtttttataatgaaaaaggaaattatttctgcttttaatgatgaggagagaagatgcttctcaacacttctcagtgttgtacagcttgccaaccacagcctgtttgggaggggatgtgcccacttattctttttatatggataaacgatgtaatttgctacatgctgataataaacatgaacttcttgcttttctaagttactctttcaagctcttcttgcgatagaaatgaaatgaacatttttggcacagaactcttgtttagattttactatgatcttgggaaacttcaaatttactagatccctttggaatttcaaacgttacaacaggtaggaagcaggttcccagagcagcctttcgtaggaaacacagccccggggttattttgatgcaagccgttggtccaaagccactccccggaaggaccggg

SEQ ID NO: 27653 - DNA, 382 bp, Homo sapiens
  source 1..382: mol_type = other DNA
gcctttgcaggtgaagtcccagacttggcctaatcctttcaggcacttctggctctccatactgggcaggtagttccaaaggtctgggcaggcactgacagcaccactgcagagtcgctagatttttcagttaattctgaaagtacctcaactctgtactgtgcatgcacatggagaggtcactctctggagtagggaggaactactctctgggtgatagaaatattcgacctgggtcagttcagatgcatgtgaggatacctataaggtaatatcttcaggaaccctctcctgagcccagggcctccagcatttcttggaggctgccaggaagcaactatcctccatgcagatctgctcatccgagccaaagcttgtggta

SEQ ID NO: 27654 - DNA, 427 bp, Homo sapiens
  source 1..427: mol_type = other DNA
gctttgcagtctgggatgatttccggcagatttccaagcctgcacgtgtacatgcgtgtgcgtcgaggcccccggacggacatcactgtaggccgcacctgctgagaggccagagctgcctcccagcatccccggaggggcctgcgaggcctgggggcgagggagcgggcagtgcccgcactgggcaggggtgaaaccctctcgagagttggcccggacgcgtttcccgcgtccgtacccaggtggctcctcgggcagccaggcacagaacccgctcaggccctgcccagtccccgccccctcgcttcccgagcagtgattggccgaagcggcccctcgttgctatgacggcaccagagtgctgccactgattcccgggcggctgccagtggtgtccccgctccccatcttccgggctgggagggag

SEQ ID NO: 27655 - DNA, 475 bp, Homo sapiens
  source 1..475: mol_type = other DNA
agatctgtgatataaagaaataactatagttttctggcagtagagagtggcttaagcaaaccacatggttaagcaaaccctgttctggaacatcattagcagctagacgtctagctatagctattaaatcctaaggtttacaatttgatttctatcccatacgaacacactgtgggtttggcaattatccaaaacaggatgggcctcccggcatctcctgcagcagcacctgccagaaagaagctgcatcccagcccagatccagctgagagccacagctgccaagaggcagtcggagctctgggcacctctctgtgcacccaggaagccccaggaggacttcaaatgcctggtgatgccagaagcagcgctttccaattctgaaggccctcaaagaggtttttccttactggaaaatgagaggaaatcctctttcactacttaaaaatcaaaaggggctgtccatattccctgg

SEQ ID NO: 27656 - DNA, 546 bp, Homo sapiens
  source 1..546: mol_type = other DNA
acctcccttcccatcatggctgagaataggaggttatttttagtttataaccccctataactccctttccttagatgttcaatggaggaatgatagtgaggatttaataagataactcataaaattcttaaaacagtgcccacacacagtgtcagaacttagtaaacactggttactgtcattgttaggacaaatttgaaagctaaatttctgacattttaaatgtaaaaaacgagtatttatttgcatatacttatgttaccattctagatttctaacatttaaaatgcttctggcattttattataaaaataggacatgcttaattgtagtaaatatgtagagaagaaaataataatcatctgttatccctaacttttccccataagaaaagctgttaaattttggtgtttacaacatttttatctttgcatctaaaaaacgacataattttggaatcgtatttattcagtaagtaatatagctttgcagtctgggatgatttccggcagatttccaagcctgcacgtgtacatgcgtgtgcgt

SEQ ID NO: 27657 - DNA, 616 bp, Homo sapiens
  source 1..616: mol_type = other DNA
tgccttctccattctccagagggaagctcaacgtgcctggggaagggaggccttatccgggggcaggctttttccccggaaaatttccgccgaggagtgggctgggagccccctctgctctgaacaagcttctaggggactggccaggcccctccctggggctgcctaaggcctgtgtgccagggcactggcccgcaagggtaagaacccggcgggctcccgcagcctaacagggagctgcctctgtcacgtgcctggcggcggcatgtgaccctcgccgcctgtggggaagacctgccttgaggacagagcgccaggggtgcagaggccgcctgggactgcccggaggccggtggggagcgcgccagcgaaagcccgtgcgccctcggagccggggaaggcgcgggccatgacccgggttcgcccgcaaaggccgggcagtgccgcaaggcgtgggggcgcccccgcccggtggccccggggctggtgcgaccctgggcacgccggggccggggccggagccgggggtcgcggcggccggggagggggaggagccgcgcggctccgccggcgccccgcgggccagggaaagtgaaagggcggcggggcctcccgc

SEQ ID NO: 27658 - DNA, 458 bp, Homo sapiens
  source 1..458: mol_type = other DNA
ctttgctgcacccagggctcccaatggaggagcccaggagaactgggggcggccaaggcagcccttccctgctccgcagcatttcagctccgggcgcagctggaggagccccattcaaatgacccggcggggctggggggtccacagcggcgcggccacgctcagcccagcgctggcttaggagggacgggctgcgtggggaggcgacggctccgggccgaaggggtcgctcagggctctgcacagctgtccagggggcatcgggcgggcggccgaggagcgcgcgagccggagtcggagcccgagcccgagcgcgagccgagcggaggagaccctgcggcgcgcggcggcggctcccgggcgtcccgggcccggtggcggcgcggctgtggttggctgagcgccgcgggccgccccccgcccgccccctcccctgctcccctcccccgcctcccgcg

SEQ ID NO: 27659 - DNA, 843 bp, Homo sapiens
  source 1..843: mol_type = other DNA
ccgcctgggactgcccggaggccggtggggagcgcgccagcgaaagcccgtgcgccctcggagccggggaaggcgcgggccatgacccgggttcgcccgcaaaggccgggcagtgccgcaaggcgtgggggcgcccccgcccggtggccccggggctggtgcgaccctgggcacgccggggccggggccggagccgggggtcgcggcggccggggagggggaggagccgcgcggctccgccggcgccccgcgggccagggaaagtgaaagggcggcggggcctcccgcgcgccgctccaggaagtcgcgagcaggaagcgcccgcggcggccgggccgggctgggctgcggagcgcgggcctcggcggcgcaggtgaggcgcggggccggggccggaccgggaggcggggaccccccgcccccccgcccgcacctgcggggcagccggcgctcaggcgccgcagccgctcagcacctgcggcgccctcagggagccgggcgcggggccctgcgcactcggagctcggctcctctagaagagtggccctcggcgacaatgccgggcgttcccggaccggggcaacgctgggattccggggcagagggagcgggcacggggccggcagccgctccacggagtccccggcaggggcgagcttagctgtccagccgggtcccctgcccaccccggcccgggccgcggtgacagctgagggtccagagagccggcaggaggggaccctgcgcattgtctgccgcggggacgtgggcgtgcccgcggaattcacctcctccggggaccagccgcccagggaggagccggcacagaacgctggctcggag

SEQ ID NO: 27660 - DNA, 313 bp, Homo sapiens
  source 1..313: mol_type = other DNA
gtcccggctcaccatcatatattgcgtgcacgggagagaaaattaatctttttatcctagattttggaaactaaccatagtttgggttgaaaatatcactacagtttcagtaggcttagagagtctcgctctgtcgccctggctggagtgcagcgggggcgatctcgactcacaacaaatttttgtacttttagtagaaacggggtttcatcttgaaggcgtgcgaagtgcactccatcagatcaccttctcaaggcaggctcgtccttgagcatgcgatctctcggcgtctgcgcctggcgtcaccgaccgg

SEQ ID NO: 27661 - DNA, 528 bp, Homo sapiens
  source 1..528: mol_type = other DNA
gggccactagggaggtgcgcactgcgagctccacgtgcacgcttggaggtcagtgagctcgcagtgagtaagcccctcccttctcaccagggagacccgagacccgcttcttcccagttctgcagagcgtgttcggccgggccttgctgactggtcagtacctacccggtccccgccggcgccgcggagaccggaagcgacccggcggcgctaacccgccggagccggggagcggacgccgagagcggacggcgccaggcgcagagacgcggccaggccgagactgcggcggaggactcgtgggctggagcggagttccccggggtcaccccagagtgggtgcgaccaggcggtgcgggagaagcggggtcgccaggacccgacgcgcgcccgcagcctggtctcccccctcacctgcttgctatggaggtggccaggaatcggctgccgccctcctgtccgcaccggtcggtgacgccaggcgcagacgccgagagatcgcatgctcaaggacgagcctgccttgag

SEQ ID NO: 27662 - DNA, 505 bp, Homo sapiens
  source 1..505: mol_type = other DNA
catgattatcctaagatctaaatagcagactcctctttgataaaggcctttgataaaggcctctcaggaatccctacacaatccatttaaatgactgtggcagggcctcttcccctgtggaagctgaaggtggcacgtccaactctttgctaaataaacatttaggtgaaacaaagctgtgtgggcgccgaggtcccgagctgaagagctttaaaaccagccggcccagcgcagacgcctgagaggggtgcccagcagcccccgcaggtctccgccgcgcccccgccacagcgcccaggcgcccgcagggcacagggatcggcaccagccggtgacgtgtccctcacgctgctgcctgtgaggtcccgatccggggcgtggccccaagggaggcacttagccctactggggatgcgcgcgcagacccacggcctctgctccgcccccagctggccattggcgcagtcggcccaaggggcggctgttcaggcgcgggtgcgcgcgc

SEQ ID NO: 27663 - DNA, 505 bp, Homo sapiens
  source 1..505: mol_type = other DNA
tcatgattatcctaagatctaaatagcagactcctctttgataaaggcctttgataaaggcctctcaggaatccctacacaatccatttaaatgactgtggcagggcctcttcccctgtggaagctgaaggtggcacgtccaactctttgctaaataaacatttaggtgaaacaaagctgtgtgggcgccgaggtcccgagctgaagagctttaaaaccagccggcccagcgcagacgcctgagaggggtgcccagcagcccccgcaggtctccgccgcgcccccgccacagcgcccaggcgcccgcagggcacagggatcggcaccagccggtgacgtgtccctcacgctgctgcctgtgaggtcccgatccggggcgtggccccaagggaggcacttagccctactggggatgcgcgcgcagacccacggcctctgctccgcccccagctggccattggcgcagtcggcccaaggggcggctgttcaggcgcgggtgcgcgcg

SEQ ID NO: 27664 - DNA, 606 bp, Homo sapiens
  source 1..606: mol_type = other DNA
ttcaaagcagtttgaaatgcagacacttgtgggcgtcccctaaggcaggtgccctccaacccctcttgctggggtcctcacagagggaagacagcccccagggtaaagcctcaggtgctaagcactcgcgctgccgcagggggggaggcacgtgagcatccactgtgccgcccaggacgggcccacccgggctccagagcctggggaggaaggctgcgaggctcccacgaacggaggccttcggctacgggacgcccggcggtggggttacggatggtacagccctccctccctgggcggcaaccgagggcgcggagggggcaagacgtgcgctgaggccacgcccctactgcatagtcataaggcgggaggctctgccttcggggcggggcagacagctcctcgcgctcgggcgcggccggttgggggcacggcctagctccgggtgcgggcggggctggaggcggggccggccaccgcccggttcccgccctcgctcttcaggccccgccccgcgcccgccgccgcgcagggaggggcggggcccgtctccggcaggccccgccccctctctgaatattgatgcggcgcgcgtcggcgtcgccc

SEQ ID NO: 27665 - DNA, 572 bp, Homo sapiens
  source 1..572: mol_type = other DNA
cccggggagggcgggggtcgggcaggccggagggtcccaggctgcgcgggtgctctgccacgagacattggccggcgccggcctccgcccccgcctctgctcccctcgccgtgggtccccgcgaggccgccaccccggggtcgccgtctccgcctcgccgcagtcggggcagccgctcgccaccgagactcgctcccctctctggacagaggatctcaactgggtcccggtttccctctccgcgcctccgcccagagttgcatcccgaaaggcggcgagacagggtctcccaagacccccgccccaccggcgcccacgcctgcggtcttgaccgcccagaagatgggggctggccgtgcacgtggccccgggctcccaccccagcccccgcgccggcggagtggaccccactggcggcgagtcctggggctgtttgcaaatccgttgcgcgggcggcacgcgaggtgggtgcccgctgggggagggacgcggggctctgcccgggacctcacttccctgagccccaggcgagaccgcagctgagctggcgaaattctcggcttcccgcggag

SEQ ID NO: 27666 - DNA, 646 bp, Homo sapiens
  source 1..646: mol_type = other DNA
agccggggacgctgcggaggcgcagcacgttcctctgcccagagctgatgggcaccgtccgtgtctttcgctgcaggtccggggggagactcgggggcctgggatcccccatttagccctcacggccccgcccgcggcctccgggacctggcgaaggagccccgcggggcgcccctgctaccaccctgcgcggagtcggccccgtccccgagagcgcccggcagcccctggccgtgggccgcaccggagccgcgcaaggcgactgttctgcgcctcggctcggggttcggacccggctctgggcgcggtcacgcggggcgctgcgcacggcgtccggcggccacagagcgcggccatcgagtcccgccccggcgcggcgccccctcccgggcccgcgacacacgccctcggggtcggtcctcgaggacgcgcagggccccccaccaggttccttaaattaagacaccaccggggtccgcgggtgggggtggctggaacccggggcgggggcatgccggggtcccggggagggcgggggtcgggcaggccggagggtcccaggctgcgcgggtgctctgccacgagacattggccggcgccggcctccgcccccgcctctgctcccctcgccgtgggtccccgcgag

SEQ ID NO: 27667 - DNA, 525 bp, Homo sapiens
  source 1..525: mol_type = other DNA
ggctggctgaaggctctgagggaggccctggccacctttcccagccctgtggaggccgcccaggctggaggacagttgtgagccccacgtggcagagaccgcggcggagctgcgcgggccggaggaggctgcggagcatcgctctgacctgagccggggacgctgcggaggcgcagcacgttcctctgcccagagctgatgggcaccgtccgtgtctttcgctgcaggtccggggggagactcgggggcctgggatcccccatttagccctcacggccccgcccgcggcctccgggacctggcgaaggagccccgcggggcgcccctgctaccaccctgcgcggagtcggccccgtccccgagagcgcccggcagcccctggccgtgggccgcaccggagccgcgcaaggcgactgttctgcgcctcggctcggggttcggacccggctctgggcgcggtcacgcggggcgctgcgcacggcgtccggcggccacagagcgcggccatcgagtcccgccccggcg

SEQ ID NO: 27668 - DNA, 599 bp, Homo sapiens
  source 1..599: mol_type = other DNA
tcccagaggcaggtcactggccttccagctccacctgtgggtggccttggccaggcaactgcaagagtgcagggccccggggaggtcgcacctggcccggagagacaggtctatgcggcttcagcggtccccacccatgcctggcaattgtttataaagaacaacgtacagccaattaatagcttgttattttcatgtaaattcttggtgagtatttaacttgaagctatgctcccgggttgcaatcttcaaacttggccgttcccgccccgcaagggtgcagggaaggggacgcccgcacttcctagtgctcccttagctggggtcgagctgagcgccccccaccgagccccaggcggctctgtggagaagcccctcggccccgggttcggtctgcactgccagcccccagtccccggcgcgcaggatccagcagggccagcgccgggcgggcgggcagggggcgcgggttcccaggaccggcggagcctcccacctacgtgctccctacgcgcatgcgtcccgcccacgcgcaggcagcacctcgcctgactgggtagcgctgccacgtcggggcggggaagagcgtcgtcgcgtcc

SEQ ID NO: 27669 - DNA, 508 bp, Homo sapiens
  source 1..508: mol_type = other DNA
tcaccaggacttgtggacgtggggacatgtcgccggcaggtcatgccacggaggctcgaggcgttacgtggggatgttacatcaaggcattacatcattacgagatgtaacgctcgaggggccgcagagggaagctcaccacgtggtgctctcatctgcccacgaggcatgtgacccctggaggacaagcatgaaacgccatagggctcccccaggtgctggacacagatgcactccgctttggaaaccagtgcactctttgggtgtgtgctctccctcctctggcgaccatgaggaccaccccatggtccctggcacgtagcccctgcccagtgactgcgccccaggcgagtatggggcacaggcgcctccttgggttgtctgccctcccgggagccccagggtgcccaggcgggcctcagctgagtccaggcctcggggacagtccgtgcagcccctcctggggctgggggcgggcacttgtcccagccacgtttctgctgactga

SEQ ID NO: 27670 - DNA, 457 bp, Homo sapiens
  source 1..457: mol_type = other DNA
gggtccggctggtctcgaactcccgacctcaggtgatccgcccgcctcggcttcccaggcccagtgattcgggaatcggacccatgtgactttcataagtaacggaaccccgaagcggttccggcagcgcggaaacccgcattccgtgccggggccctggccctagccccagccccggcccccggcccgccatgtggcgcggctgaccgcggccgtgcgcccacctggacgccagccgctgggcaaattggatctcggccggctgcatggcgggggccatcgcgcccgctggagcatccccggccgcgcaacccgcggtgccgctgcagccagccgagcgctgcggagcagccagccaccgtccgcccgggccgcgactgcacagaaggcggcggcggcggcgcgcgggctgatggcgtcacaaaggcgccgcggctcgcagcgcgctctgggagtg

SEQ ID NO: 27671 - DNA, 874 bp, Homo sapiens
  source 1..874: mol_type = other DNA
ccctgaagaaaacgttttccgttcggatgaggcatcggccacgggcaagcaagtggtcccgcgcccccgtcccctacccaggcggccggcctggctccgtcaccgcccgcagcgtccgcccggggcccgcgcgggaagagggtcccagccccacatgctgcgggggcagccccgggacgcgcagacgccagcgccgctgagggccggggccgggaccggccgcgcggcgggggcttccagagcggccggtcactcaagtttctaacttgctgaacatttcagattttaacagacgtccccgcgggcaagcggcctctcggggtctgcagcgccccagggcatccgcgccgccagccccacgcgcgagcccgcgaggcccccgggcccccgcacgtcccgaggctctgagtctggacgaacgcaggccgcgtggaggggccggcgacccctgcccgagagccgtcccctcctggagggagcgagcacaaggcgcccgcgggacccggcccgagtgcccgagcgtggaggggcgggcgcgccctcggcggtggggccgcccgcagtgcccccagcgcccgggagggggcgcccggcggagcgcaggcgggcgggcctcgggcggcgggcgcccctgacgtcaccggcccgcggtcgccagggcaacggcctcatcccgcgcgcgtcagagccgccagtctcttggccgcccgatctcccgctctccctccgcccggcgctcggccgcgcgtcgctctggcgtcaaagcgacgtcaatgggcggcccccgcccgggcggcgggggcggggcagggggcggggactacggggggcgggccggggcgggccggggcggggccgggcgccgcgtgcggcg

SEQ ID NO: 27672 - DNA, 517 bp, Homo sapiens
  source 1..517: mol_type = other DNA
ctcgggttttagatgaacccaaagctaagattactcccctggaagcgcgcgtgctcgccaggcctcgggacgcctgcgcgggcgcccttgcactggcaccagggctccggggtaggggcgcaccgatctgcccaagcctctgcaggcactggaggaaggcgagccctccacccgctcaacaggccacccgggggcccgggggctccacagttagccacggacgtggccaggcgcggcggctcaagcctgtaatcccagcgatcagggaggccgccgcgcgtgatggcgcgcgcctgtagtctcgatcgatgaggctgcagtgagccaggatcaccgccaattccagcctgggcgacagagggagaccctgtctagcctgaattttggcacgaaaggcagcgccggcgccacgtgcacacgggctgggccgctccgccagctgccagggccactgccgcgctcactcccagagcgcgctgcgagccgcggcgcctttgtgacgccatcagcccgcgcg

SEQ ID NO: 27673 - DNA, 601 bp, Homo sapiens
  source 1..601: mol_type = other DNA
tatccatggtggacccccaccctgtgtggatggctgccccctgagcagcaggaagggctcccaggaggctggtggtcccgcctgcaggaagccgacgcgtccctggctacccatcgggccaagggcaggttgtatacacctgggctgagacctgccagggtatccgggtgacagtggccggtggccgagcaccccggcctgaatactgggacgcagctcccgcaggaactggcagtgggagtgtccctgacagtgcaggggcggggggctcgcgggggggctcgcggggggctcgcgggggggctcgcgggggggctcgcggggggctcgcggggggctcgcgggggggctcgcggggggctcgcggggggctcgcgggggggctcgcgggggggctcgcgggggggctcgcggggggctcgcgggggggctcgcggggggctcgcgggggggctcgcgggggggctcgcggggggctggcggggggctggcggggggctcgcgggggggctcgcgggggggctcgcgggggggctcgcggggggctcgcgggggggctcgcggggggctcgcggggggctcgaggcgtcccatgtgggca

SEQ ID NO: 27674 - DNA, 382 bp, Homo sapiens
  source 1..382: mol_type = other DNA
tggaaacagccgctgtcctggtgttgacagcagaggtggcactgcctggtggggatggccccccaaactagcggaggccgggcgatacaggaaggaggcccccactccgtggattccgtcctctcactcaggcttttgaggcatgtgtcggagcccttggcctgacttcttccaaggggtggggcagagacagcctcccagcctctgttcagtgtgtggatgggctgggcgatgccctcccgggctggttgctccccagagagggaagcccccctgcctgtgcacatgtcatgtgtgactcggggagagcctcctgctctgatgcgtcagccctccagcctgcagctgggggccccgtgccagccgggacgggaccccagac

SEQ ID NO: 27675 - DNA, 735 bp, Homo sapiens
  source 1..735: mol_type = other DNA
ccctagcgctgtgttaggtcaccaagactttagtctggtgatactgaccccagcctccgttccccggggtggtgcagggctgtggggtcccccagggggtcaggttcgtcctcgaaggcaggccctccacaggaagacctggttggggtgggatcggacacgcggcccagacccaggcacctgtggatggacggccgggcatgtggccatcggctgggggcctctgcaggccgcgccaccagagtgggcactcagggtccgcaagggtctggggcgcccccagagaagcccgccgccccaggccggtgcggagttgactgggtccccccggccccgtgtctgtcagctcccgcgcggcccctgggaagggacgcggatcggatgcgggctccgggccctgcaggcagttgagagcgcggttcccttgggtatccggggtccggggtattcccacgcccgcgcgcactctcgtggccatccgcgttgcgagagtgtcgcgcccggaggtcaggggcgtggagcccgggcccccgagtctcccctgcgtgcggcggggcgcggggcgcggggcgcggggcgcagggctgggcggcagagtggcgggggccacctggcgcggccgcgcggccagggtccggtttcgcttcctcccagcccgggggcggggcctgcgtggctgtccccgccccggtccgcccccggccagcccccggcgccgcgcggaactcgcgggtt

SEQ ID NO: 27676 - DNA, 592 bp, Homo sapiens
  source 1..592: mol_type = other DNA
tagttgcttatctgcatacacatatgtgcgtgtaatgatttacttttttgcagaatgaattacagacatcatgacaggtcacctttaccaaagagttctgcagttatttctaaaaataaagaatatttttctacttcaacagagtctcactctgtcgcccaggctggagtgcagcggcgcaatctcgactcctgagtagctgggattacaagcgtggtcaggctggtccaggcccggcacacccctggttttaaaaataaagtttcgagccgagagtggtggcgcccgtggtcccagctcctcgggaggctgaggctgggggatccctggagcccgcgaggcaaaggctgcagtgagccgagatcgcgccttgcactcccccaccgcagccccagcgaggcgcaggcgcaggcgcaggcgcgcgctcgctggttccgcccatgcgcacaggcagggagcgcgcgccccctctgtagccttcggcctccgggggctgcagttgcgcggctcggccactgcgcggcggtggcgtgcgcctgggcggtgtcgcgggctgtgacgtcacgccacgcgccggggccaggaggaggcg

SEQ ID NO: 27677 - DNA, 506 bp, Homo sapiens
  source 1..506: mol_type = other DNA
tcccagcactttgggaggccaaggcgggtggatcacaaggtcagagtcccagctactcgggagcccccacccagcctggagcgcgtgggcgccgtctccccctccctggagcggtgatgtccactgcagcccgcacacctgctcccgcggggccgggacccctgacccctgacccctgcagcgctgcgccccgccctccctcgtgcgcggcccggaccccgccaccctgcaggatggcgacacccggccgcgcccccgccccggtccgtgtgactcggcgcccggaaagacgataccagccccgggaggggggcgctccctcccgacaccagcgctgggcgcggagacccagcctgcggcgagtggtggccaggttccccgccccgcgccccgccccgcgccccgccccgcgcgtcccttcttgcggggccaccgcgaccccgcaggggactccgaagccaaaggtccgcccgcgcgtcacgtgaccccagcgcctacttgggctg

SEQ ID NO: 27678 - DNA, 823 bp, Homo sapiens
  source 1..823: mol_type = other DNA
gcctgaggacctgagcaggcgccaggtcgtaccgggcgcaggaggcggagcccgcagcgggccctgccctgacagcggcacctgcgcggcctccgcaggttctgggatcggccgctggccaggtgcagggaggggggacggcagccgctgtcctggggctccgcggtctggaggggacggcgtcagcgcccgcgggggttcgcagggcagccccggggcgacccccacccccgccacggtcaagtgtcgatacagtgttgccagccgggtgccggcgcggcacgtgggccgaaacgcgatccttccgcggagccgctgcgcgcagggccgtccccaccgagcccgccgcgcggcgacccctgacggcgaccctaagccccggccgaccagggcaggagctcgcgcgcgaaacttccccggcgcccgcaggagaccccggcaggggagatggcggggcccaggcagagctcggaggcccctcccggccccaccccgcgccccggccccctctgcccccgacccggtccgggggagccctcgcgggaccccagcctggtccttcggatccccgcgccccccgcggtcccggcccgccccctcccccagcccgggccccagccccgtccgttagcggatcccacgcaggctccgcgcccggccccgccggcgccctcggcccacacccgcgcgcgtgtcccgccgtgtcgcccctccccccagcgtgtccctcggccgccccgcgcgcgccggcggaactgtgggatcgccgcgcacaggaagtggcggcggcggcgcggccgagggcggagcggcgggatggggg

SEQ ID NO: 27679 - DNA, 274 bp, Homo sapiens
  source 1..274: mol_type = other DNA
gtgactgccccagggacgggagggctcaatgccctacataactttgtaaattgcaaaatataatgaaaagtgcatgaggcaggcactgcagtgagctgaggtcatttctatagagtaaaagtagttattataacgcgtagttcgttgtaagaaaattatgtatgcacacaaatctccaccctggtgcatggctgtgccctagcatgggaagcgcctgctgtgtcctgcaggcccgcagacttgtcacaggtccattgtgcagtcatcaggccct

SEQ ID NO: 27680 - DNA, 484 bp, Homo sapiens
  source 1..484: mol_type = other DNA
tctttttcctgggaaacatgatcttaggggctgggaggtggggcgggcggcgggcccaggctgctagagggacccaggatcctgcagcttttaaattgcaggcgcggctgctccgactcgactcgcttaggaatagaggggtctcccgaggatgctgagcactctcttcttgaggacattgtctaaaaagcagctgcatgccattgacattcagggccccttggccttagaaggtgtaggggccttaaatattctgaaggtgacttcatggagtggccgccctcttcctggcgtatctgccagggggacgcgctgcagcagcctgaagatggattctagaacaggccttcctggagggagggtgctgccccgccccaggctggggccccagtgcagactccacgctggggagctacaccctgcgcctggacgcgcgtctaagtaatggctttattttggaaattagaaaaagagcatacacgtg

SEQ ID NO: 27681 - DNA, 546 bp, Homo sapiens
  source 1..546: mol_type = other DNA
gtgacaagttggtgactttgacactgcaggtattccattttcatggtttactatgaaaagtcatttttcatattatgtaatatattgttagattaaaaccattgtattaagactttaaaatgtaagcattgtaattctgaaaatacacattttaagaagaaactattttgcactgatcttttgctgcgacatggtgtgacaacagtatgtaatgtgaagattttattgttcagcctcccgagtagctgactttagtagagatgacatgcaggctgggcgtccgtgcggagcgcgcccagcgctggagcgcgcctaagaggcgccctgcagtgtggctccggggtgtgggcggggcccggagaaggcccccgccttgggaggggttgggcctcgcgttcaaactccgcctcggggcggggcgagggcgacgcagctcctcctgcctcctgggccgctgcggacggtggtgcgcgaccccgtcccgggcgcgcgcgctgtgggcggtgcacgccgtcgcttcccggaagtgcgtgctgtgggcggtgc

SEQ ID NO: 27682 - DNA, 505 bp, Homo sapiens
  source 1..505: mol_type = other DNA
ataacaaacagatttttttaatggaagaattccagctaggacccgagcagctgggatcttcacactgaccgtccatgctaatcccagcactttgggagtccgaggcgggcagatcacctgagctcgggacagctacttgggaggctgaggcagaagagtcgcttgaacctgaggttgcgttgagccgacttcgcgccattgcggaactgcagtttccaggatacaacatcccggggtcagtaaaacccggaggggtcgctccgtgggagccggactgaccccgcgtgggtcggactgagccgccccgaggcagccttgctctgcggatggcggaaagggtgcgccgcctgtggaggcgtccgatgggggcggggctggggaccccgggagtcaccagcatccctcagcctcagggttcccctattcggaggctctgcgcaggcgcggcccccgcccaccggcgaactcactggatagggctgagacgggggcgggtcttggctcc

SEQ ID NO: 27683 - DNA, 479 bp, Homo sapiens
  source 1..479: mol_type = other DNA
cacacctgtaatctcaaggccaaggctggaggatcacccgtggaaggtggaggctgcagtgagccgtgtcccgccactgcactccaggcacgcgccggggacactcagcggcgagggcctgcgggagcccccagcgcgataaggagcccggccggggagcagcggcccgccgcgggacgcccgagctgcggggaacgcgagggcagcgaggccggcgtctctggtccgggagcgtccaggctcgctcaccgcgcgcgaggcccgcctgccgagtcctggcctcagctccggcgcagggcccagcggggcgcccactgccgagggaggaagatggacgtgtcccgggagccccgctccgcctcccacttcccacctcccggtcccgcgcggccggcccgggcgcacttccgtcggaggcgaagcgcggcgaagacccgccccgtgaagcctcgcgcgccccggaaatggtcatgcggcgg

SEQ ID NO: 27684 - DNA, 773 bp, Homo sapiens
  source 1..773: mol_type = other DNA
gggatccgagcctcagcccagaggcgggggctccgggaggagggtgccccgctgccctgtctagcagcctcacccaggcccttccggaggtgcctctgcagaaagggagtcacgtcccccctgggcctcacctggcttgcagggatcagggagggactctgggtcccaccctcggttgccagctgcaggccagacgccctgccaaggctgacgagcccagagccgcaagcctgcctcggtttctcggcgggggatcctcagcagtgggctgcgccagcgcccttcacacccctagaaggctaggggagcggggcgggctggggctggcccagagggtagagcccgcccactattcatgcatgcgttcattcagtagatcatcggagcgcagccggccaggggcctggcgctctcccagccttggggcctgggtccccggactcctgctcggggagggccgcaggaccggcgcattgtgcgcggcgcggggaacggcccttgcctcccacggtgccctccctcgctgcgccggcacccgcagcacccctggcctgcgcttcccagggcacctacggcgcccaggtccgcgtccaggcggacaggccgacctgcctctgtcccgcctccggccgacgggcacacgcctgggcagagccgaactttccggagccgccgcgcagcgccccgcctcctgtcccggggcggtctcggtcgccagaggagccaggccgggggcggggcggggacggggcggggacacggctgcctccagc

SEQ ID NO: 27685 - DNA, 43 bp, Homo sapiens
  source 1..43: mol_type = other DNA
agggctgccccgcgtgacctctggccacccgctgtcccaggtg

SEQ ID NO: 27686 - DNA, 704 bp, Homo sapiens
  source 1..704: mol_type = other DNA
agatgcccccggaagctcctgaggaagaccctttgggagctctcactcagggccacactcaggacccccgttgtggggctggccgccttccttctaaagcacctggaggaaggaaggagggggtcagcctcaatccccagtgaggtcaggagctccctggcaacacccaggctgccgtaccgtctcctgcatcagactgagcctccatcgggctcctcccacagccccaggcgggcccctgagtaggggctctcagcttgtgtggaggtcccccaggaacaccaccccgatccagcctccatggaggctcttgccggccactgggaggggccggtgcaccctgggcagcccctgccagggccctgagacccgagcctccccgccgagggcacctgtctcggctttgccccattcgagcagggccctcgccgaggcaggacagggccacattcggagagttctctgagtcccgcacagagcgagtctctgtccccagcccccaaggcagctgccctggtgggtgagtcaggccaggccgggacagcagcgcctccatcacagggaagtgtccctgcgggaggccctggccctgattgggcgccggggcggaacagcggcgcgcgtggctcgcagaccggggagacgggcgggcgcacagccggcgcggaggccccacagccccgccgggacccgaggccaagcga

SEQ ID NO: 27687 - DNA, 419 bp, Homo sapiens
  source 1..419: mol_type = other DNA
caggaggccgggggcgcccgccggtcgggcctgggcggccgccatgaagttctgacccgggccaaggcctcggagctgcacagcgtgcgcaagctcaactgctggtgaggcggggcctggccgcggccgccccggggtggggggaggagccggggcggggaggggaggaggccgggggtcggggtcgcctgggcccccccccatttcccggcccgcctttgccccgggtgccctgtgggctgggggttgccagcagtcactgggaccccgttcccagggtactcctatgctgagtctcactgagccagagttgaggcctgcaagatctccagggttccctggggactcagcagagtgaccgcgccgtgtcaactggcctcaccgtgcaggcgggtgtgggggtcagcgagagcagacgc

SEQ ID NO: 27688 - DNA, 547 bp, Homo sapiens
  source 1..547: mol_type = other DNA
atgaggtggtacctcattgtggctaaaccatgtacgtttaagaatttacaccgcatatgcatttcacaattaaataaggagtagttgatattcactcccgctcgtgcggtcacgaggcggctctcccgaacaccggctctgcacccccagggcccggggaaccaagacttagggaggagtgctggctgctttccgccagtgctgaggcctgaaggcgccctgagggcccctggggggcagggaggggcggtggctgcggccgacagcaaggaacctccggagaagcgaagccgggccagacgtgccaccggggcctcggcgctggcgaaggggcgcgtgcggccgcactggggccagccccgccctggtccccggccacatcctcgagaccaccggggtggaggggggggtctcacgggaaggtggccccggcgggccgagggcgcaggatccctgctccgtccagggtccgtcctgcgaggaggcgccgggggcgggcccggggcggggcgggcggaaggcgcgcgcggggcggggcggggacggc

SEQ ID NO: 27689 - DNA, 478 bp, Homo sapiens
  source 1..478: mol_type = other DNA
ttttgtttcagtttaatctataaactaaattcctgaggagatcttcccctgtcataatttcttcagttatgtttagttttgaggaatatcacttaaactacaaagttacctttgcttatccaggaataattaagggcaagatgggggttggccagatctccttcaaggccaacctttttttgcaaaggcggtttcagaacgtcagaacgcctgtacacagccccagggctgccctgggtttattcgcccatgccatccacgctaggcctgcgctcagagtcaggcctaggcactcggccatgatgcgcgtcggaccgagcccaccccgctcggttccagccctcactgggccgactcggggaccggcgcttccggggtcgcgttagaatcgccgtgtcagcggcgcccaagcggccccagcgggctcgcgtcgccccgctccggctcaggatccgcccctgacgacgcgggccccgcc

SEQ ID NO: 27690 - DNA, 413 bp, Homo sapiens
  source 1..413: mol_type = other DNA
gactcttgccgccagaggttttttgtttcagtttaatctataaactaaattcctgaggagatcttcccctgtcataatttcttcagttatgtttagttttgaggaatatcacttaaactacaaagttacctttgcttatccaggaataattaagggcaagatgggggttggccagatctccttcaaggccaacctttttttgcaaaggcggtttcagaacgtcagaacgcctgtacacagccccagggctgccctgggtttattcgcccatgccatccacgctaggcctgcgctcagagtcaggcctaggcactcggccatgatgcgcgtcggaccgagcccaccccgctcggttccagccctcactgggccgactcggggaccggcgcttccggggtcgcgttagaatcgcc

SEQ ID NO: 27691 - DNA, 575 bp, Homo sapiens
  source 1..575: mol_type = other DNA
cactttgcaggcaccaggatggtggcatccttgggcgcgccagcaccgctggctggctcatctgcggagggccttccagaggcgtgtgctctgggcagtagtctgggcagcaggcctgcaccaggcagtagtctgggggcaccctccctcctcccagatcagcaggacctcttcacttccctggacatggaggccagcagggcccagttgggaaaggcacattcgccttctcaggcatgagctccccaagccagagagtgggcagcacacagggtgccatggggccccgtggccagcacctgccgcgatggggactgccactgtgacacatccagggagcaggccctgagcctgccccagccttggggtcctgggaatggtccctggcttggggccacattctcgttgtggggggggtctcactcaggcccaggtccccctgcgacccgaaggcacacatccgcgcgagggtccggttccagggagggcgggctcgcaggcggggtgtctgggcccagccttccctggcgtgtccttggctctagctgcgggcgcgggacgcggcgcgggagacg

SEQ ID NO: 27692 - DNA, 305 bp, Homo sapiens
  source 1..305: mol_type = other DNA
ctgggtgtcagggactcagggaggccgatgaaggccaatgagagaaaaagattcatttgaattattgtctttttccaggtgtggtgattggcgcccataatcccagctacgaggttgcagtgagccgagactgcgtcactgaactccagcctgagcaagtgggactttaaaaaaatttttgtacagttgctcagtgcagctgcacccgtgggggagggagctcttcccagagtgtccgggggccccagccaagggacacagctcaggcagctgtgaggaagcatgtggccaggtcctctcaacat

SEQ ID NO: 27693 - DNA, 314 bp, Homo sapiens
  source 1..314: mol_type = other DNA
cagggtctcagtctgttccccaggctggagtgcagagttgctgggactagaggcgtatgcacccaggctggagtgcagtggtggtggcgctatctcagcctcagcctcctgagtagctgggactggctggtctcgaaccctgacctcaggtgatctgctggctgcaaaccaccagcagcagatggcaggtgtcctaggaccaggctgagtgttgggagcgaggaagcactctgccgcacctggtcccctggggcctgaggaggcggcagggaccgggagaggggcggggcctgctcctgttcccaccccacctg

SEQ ID NO: 27694 - DNA, 529 bp, Homo sapiens
  source 1..529: mol_type = other DNA
gggccatgccttccagcccagacagcccaagccctgcactggatcgtgaggacgctgcgggccagcggcttcagctcggaggcggacgtccccactctgggtgagtgggtggccaggccagcagctggtctccagccgcaggaggaaggcactggctgcagcctgttccaggcagggccagcgccctcaggaactcagcccacccaccgacgctggcgccgaggccctggacgtccacggggaggcctggcctgctgtgccctgagctccccacataccgcactgcagagtgggggtgcgaggcgggcggctgcagactgtgtctgaacctggctgagtgacgagaagctttcctaaattcgcagccggctatgaaatgcacataaccgcactgcgagttcagctcattgccgagggccctgactgccgctgcacaaagaggcaggtgccggcggggacgctgcctgagctcccgtggctgtcctccctgggggccgaagtccttgtcctgcgggcgggcacctgagcc

SEQ ID NO: 27695 - DNA, 292 bp, Homo sapiens
  source 1..292: mol_type = other DNA
agctacacaaaaagtacatattatatgattccatttgtgcaaatcataggaaatgcaaaacccggggtgttctgtggcttggcggagatctagccctactcacccactggccacggggtaggcgagggacgctcagcaggggcttcccgcagacccagggtcttcaagccccagaagtcctgatgccagtgaggggcaggggctggacccacagcccctcccggcgcgctgcgacctgggtcttagtattccccgcccccgcggggaatcgacacagcctccgccccacccc

SEQ ID NO: 27696 - DNA, 424 bp, Homo sapiens
  source 1..424: mol_type = other DNA
gaacccagctgggatcagtgtgagctgggcaatgtccgactcctggcaggtggacgactgcccagagagctgctgtgagcccccctgctgcgccaccagctgctgcgccccgcctggtctgcaccccagtgagcctgctgccaggtgtgcaccagctcctgcacgccctcgtgctgccagcagtctagctgccagccggcttactgcacctcctccccctgccagcaggcctgctgcgtgcccgtctgctgcaagcctgtgtgctctagctaccagccagcttgctgttcctgccagccggcctgctgtgtgcccgtctgctgcaaacctgtgtgctgtgcgcccacctgccaacagtctagctgccagccagcttgctgcatgccagcagtcctactgtgtgcctgtctgctgtaagcctgtc

SEQ ID NO: 27697 - DNA, 364 bp, Homo sapiens
  source 1..364: mol_type = other DNA
cagtatcaggcttaacagtgacacctgaatttcctctcaagcctggcaagcctgggatgcctttagcctgcttgctgaggggctgaggcttcagggcccccaggagttctttaaccgtgatcatggatatcaaggcctcatgcggcacccccggggcctccaggcccctctcgtccttcatcgctgagggattgcaggaggggccccagcttcctggtggtggaaccctggactggaaggcatcttctcttggacaaagaacatgctttcttccaaaaaaaattctgtagaagaatctctgacaggactgttggcagccctgctggcccagagctgtttgtggagtccagctgccccagccggt

SEQ ID NO: 27698 - DNA, 427 bp, Homo sapiens
  source 1..427: mol_type = other DNA
agctgccgcacgagctccgtcatgtgggagcagccgccgtgcttgtggacacagagcctggcgcgtggcaggtgctctgcagacacccatgctgctggacagaaccgggcctcccccaggagcctctgagggtgggtgctttgacacgggctgcactttcatcttttacaggcacagacgctcctcgtgttttacacttgaaaacctggagtcacactcggagttacctgtggcaacatgcacacaagcatgcgtgcacacgcactcacacatgcacgtgcactcatgctcacacgcattcatggacacatcggccccgggcagtgaggccatgtgcagtggcagaggctcagcacatgaagcagcactgagcatctttatgcagtaatctgccaacaaattgttaaatgttagaagtttacaagtt

SEQ ID NO: 27699 - DNA, 543 bp, Homo sapiens
  source 1..543: mol_type = other DNA
tgtaaaaagaatacttctagttaatagctgctcccctcgagtggcatgcccattgcagtggcgagggtcctcggctctggatgagtgaccatggccgtgccccttccctgagggctcgggagggctgggcaccagccctccgagggagcccagcccctcctggggatggacggccgctgccgccgggggacccagcagagcccgggacctgccgcctagacccccagcagagcctgggatctgcctccaggcccctagcagagccccgacctgcctctgggaccctccagcagactgtggggacctgctgcccaaacccccactcccggcctgccatggtcgcctgtgcccctggtcctaaaaggcggtgagcccagggagcctgcgcctgagggaaacgactaatcccaggccgggccgagtgccaggggccacctgcctcccgcaggcagcaaccagaagctttctgtccccgccttaggccgctggcatgtggccgtcgcagtgacccccgggggccccgcggccgcccctggaaaggct

SEQ ID NO: 27700 - DNA, 410 bp, Homo sapiens
  source 1..410: mol_type = other DNA
gatgcaaactttttttgcaaaggtgtgtgtgtatatacatccttgcacctacctgccccttacaggatcctcaactgtggagaggccgggagcccacgcggggcgctggggagtctctcagcaccccaggggttcgggcagggacctgagccgcgccctctctcccgggggtgccctggggtcgaggctgctcggcagagccggcggtcagttcgagccgcgggcccgaacagggctctccccgcgcccggccggctggggacggttggaatgttcggccacgcgcggctgaccctgaggcctcgtagccgcggtcgcgggttgagctcccaccacccggacagcgcgcctcggcgatcgcgcacgcgccacgccccggaagagttcctgggcccgcgacggtggcccgg

SEQ ID NO: 27701 - DNA, 838 bp, Homo sapiens
  source 1..838: mol_type = other DNA
gtgcggcctcccccgccttcggccgggctcaccatgcctccgccacgccccggctggcaccacccgggcactcctgagggacgcaggggtgtccgccctcaggtccgttccatccgaggccctgggatcacagacatggaggccggggcgggccaggcaccccaggaatggcgcccgcaagtccggggaggccgtcctgccggcccagcgcgtttcccgcgtccacgaggtccccgttccgccggcactggcggcgtccagcctgggtttgcccgcgctcgccgacgtggcggcctggccaagctcggcgccgctcaccagcgctgacctgggggtgggcccggggcagccccgccggaggcgggtggcgcccccaatcgtctagggtgctggcccgattcgcgcggcccccgcggacgggaccccgcgggccgccttctccgctctgtccgcggctcctgagagggaacgtcacccccagcgtcctccctcctccgccccaggtccctgcggccatgggcggcggccccggcctcacttcccggcgccccaggaacgcggcccccaggaaaggagtcggggcccgggcgacgcggggaggcgggcaagggtccccagggcccgggctccccgtaaacgctcctggcccgcgccccacagcgccctagggcttccgcgcccgacggggtcgcgcgggacccgccccgtgacgcatctccaaccgcccagagccgcggcccggcctgcgcgcgcccgacgccccggggagcgcgcctcgtgaacgcgcgcagccacgtgacccccgtgccggccaacgggtgcgccgggatttggggga

SEQ ID NO: 27702 - DNA, 654 bp, Homo sapiens
  source 1..654: mol_type = other DNA
ctgtccccggcaccggcgaatcccggacccgagggcgcacagaagcgggcggccccggctctcgcggggcttaaagcgcgcagttatttttgccatttcttaagtagccttaaaaatgtccgtcacgcgtcggcgagaagccatggaggagaaacggcgcttctctcgcagcaccacgcggacatcggcgggagcccagggccggacgccgcggtgtggagcgagggcgccggcgcggactatgagggcccaccgcgcctcgtccagggctcacttaagagcagcgtgagcagcgcttgggaccgccgtccgggacgcccgcagccctttaggatggaggccaccgtgacctccgcagccggtcgccgttccccgccgcgcaggcgcaggagccgcggcgagcccctcggtcacgcctcgcccctcggtcacgcctcgcccctcggtcacgcctcgcccctcggtcacgcctcgcccctcggtcacgcctcgcccctcggtcacgcctcgcccatccgcgccgcgcaggcgcactgagcctcagccgctcgcaggcgcactgaacctcagccgcgccgggaggcgagcccgttggcgaggggcggggcagctgctttttgaggctgcgcactcgcatggccccacctcgcaggt

SEQ ID NO: 27703 - DNA, 294 bp, Homo sapiens
  source 1..294: mol_type = other DNA
gtacatgtgcctgtaatcccagctactttgcagtgagctgagatcacgccactgcactccatgcaggtggatgtcaatgcgtgcacgcacttccgctctgtagcagaatgtgctactgttcctggcgctcctggaggccgggcccctctcaggtccttcccgggacctcatgtgagaaatgacatgtcccacctgtctcaaggggccgctctctgacatcagagctgctggggtgaagggccacggtggtgcaacccaccacttcctccaaggaggagctgagaggaacaggaa

SEQ ID NO: 27704 - DNA, 556 bp, Homo sapiens
  source 1..556: mol_type = other DNA
aattgtttatggtagccatgcattaattttataatcagaaaagcatgttattataactcaagttcctgcccctctctagctggagagagggacgccgggctctggaacccgacccaagggtcagggctaccaggaagcggctccgtgctgggctcagccggtctcctacccggaactcacagccccaaactgaggcacggacaggcggcgtccctgcgcacggagccaagaggggaggcacgcgtgccggttctcggaaattcattatgggaatgtgcgcgttgtgacaggtcactggggcagaggccgcccgaaaccagctgtcccctcccggcctaggcgcgccaggtccccgcccagccggggcgatcctttggtcggacagtgaggttgggagcccaccgcacccaagtgccgccgcatccacccggcgcaggcgacccccgacgggcagccgctcaccttctcctggccccgggcttcaggaaaactgcctggaggtggccggggctagcggaggctgggcggcgggcttcgcgcctgcctcagtctccca

SEQ ID NO: 27705 - DNA, 839 bp, Homo sapiens
  source 1..839: mol_type = other DNA
gctggcctctgggtcgtgccccgcagactgagctgcgcttgggggtcctggcggcctgggccgtcccgcaccgaacccaggcggtcggagcccggcggggaggcgcgaggtccttctgggggctcctccgacgcctgagggcgctgcttccccgcggccgccccgggtttctgcggagccggggcctccgctctcgggagacccggtgagacccccggggaggccgctggggaggcgcgggctctgctcccgggtcccaaatgcaccggctgcccctcaggagggacggcgacctccacccacggcgctggcgcccgcacggccgctcctcccgctcccgcagcctggacgcctcccgaggccgccccgccgggccccacgcgcggccccatccgcaggccaggactgccttcccggagctggcggcccccagcctggaggagccggccccagacgcctggccccgcagcccccgcctggtccgagtgcgggtctctggccccggcctttcccggggaaggaaagctcccttcacgcgccccagggaggcggccaggctcggagcgtggaatccctgcccgccgcggaccgcaggttttgggcaagctctggccttcctgagcctcagtttccccatctctagggacggcaggggtttttctgaggacccccaggaaaagctccaggaagcgcctactcacagcgcgtgctcagtggtggccccggagctggcagggtgtccgcggcgggggaggctccgcgcaccggctgagcagctccggacagcgggtgagggaaggcggcttcctcctgcttcccatcctcgtgcccaggggagc

SEQ ID NO: 27706 - DNA, 520 bp, Homo sapiens
  source 1..520: mol_type = other DNA
acctggctgggcccggacttggcagccttcgccactgttcccatgagaacaatgggctccttgaggacagcccgttcccagcacgggacccagcccaattgacatgaagtgaaggtcaattaaaatgcactgccgggcgtggcggtgcccaccggtggtcccaccttctcgagaggctgaggcgggaggtcgtggacgtcgaggctgcaatgagccgatttcgcgccattgcgctccagcctgggcgacagcgcgagactccttctcaaatatagaattttaaaaaggccatctcgactgccgcgggggtcgcgtcctctccatccccgaccttggacgcaaccccgggcttgggtcccccacgatctagaagaaactcaggtgcgtcggtgaaaggcggagcgccgccaccctacacccgcgaccctgcgcccgcccgagccgcttccgggtacttccggcggccgcggggctcccggcagccgcggctcctgtttccgccgggcggcgagaacgcagg

SEQ ID NO: 27707 - DNA, 265 bp, Homo sapiens
  source 1..265: mol_type = other DNA
actatatatcaatatttttaacagtttttaaacaaaatctgagataatttcttgtatgcttagacacagagttaccatacgtgttaagctgtttttatggagctataaatacctgagaccaggtcatttatcttcctctggggaggcgagtgagagctcactcttcaccacggggatggctcaagccattcctgagggagtccttggcaaggacatgcgtttaaactgtatccccgggctgtgttgatcagaggcgaggcctgcc

SEQ ID NO: 27708 - DNA, 407 bp, Homo sapiens
  source 1..407: mol_type = other DNA
gccccaaagacaggcttgttttccaccaggcagtgactgaagccggcagcctgctgcataccgcgggccttcccctgacctgtccgggactgcgggctggcggctgactgcccgggccagagcgcagcggccatttataggcgcggacctcggctggctgagacacagtgtgcgccaccccatcctcttactccccactttacaagggaggaattcccccacccaggtgcgggacccacccgcttgtctctgcccaccgcccccggctgctcctctgggctcaggtcgccgcggtcaggagatttctacatatgcttatcatcatctgtgtaaacatttcttgtctattgcatatgctataaaaaaatgcttttactatcaacttggtaactggagcagctgctagt

SEQ ID NO: 27709 - DNA, 768 bp, Homo sapiens
  source 1..768: mol_type = other DNA
atttctacatatgcttatcatcatctgtgtaaacatttcttgtctattgcatatgctataaaaaaatgcttttactatcaacttggtaactggagcagctgctagtacggcgggaaccgtgtccagccagggtcctgggccgcgacctggttctcccgggcggggagagggggccggcgggacccgcgtgtcccaggcaactccgggagaggggtggctcggcgggggctcggcgggggctcggcgggggctcggcgggggctcggcgggggctcggcgggggctcggcgggggcagcgcccgctgcagggaggagcgcgggggcccgggagcctgggcagcaccgcgacgccaatcgccgggcgcctgcggtcccagctaccagggaggctgaggcggcaggatcgcgtgagctcggaggtccaccgcgctccagtctgggcgacagtgagaccccgtccccaaaacgaaggcgggcagagtctcctcagccgcgctcgggcgggcggcgccgcgacgccaggccggtcccgcgctctcgccccacgctccggagccgcccagccgcggtctctcagctccggccgcgctccagccccaacggccccgcgcccgtccgccgcaggtggtcgtgagggaggtgccacagctccggctgcccacgacagacacgggcgccccagcgcgcgcacgtccggcgtcgctgcgccgcccccgccccctcggcgtgcgcgcgcccggcgggccggcgggggcggggagggggcg

SEQ ID NO: 27710 - DNA, 388 bp, Homo sapiens
  source 1..388: mol_type = other DNA
gatttgtagctcccattcttaatgtgggcggtacctgcaggtactcacctattttccatgtccttttaaaagaattttaatatgtaaggtcctggtcccagaaatctgagagaagtcagccttctcaggcaaaccaattattgattaattatgtataagaattaaattagccatttgtctgcctattattaataaactttttattcctgaggtcaggagcaggcagcttgaacctgggaggtagaggtctcaaaaataaaaaataaaaaatactttttattttgagataatatagattcacatgtagttgtaagaagtaatacttatatgaacgtaagccttcatttctctgggataaatgccctttttaagaaactgccaaactact

SEQ ID NO: 27711 - DNA, 651 bp, Homo sapiens
  source 1..651: mol_type = other DNA
ggtgccctcagaaggccgggtttgccagcgccgcgccccaagccaggtcggtcggccagtgctggtgccctcggggaacagcgggagctgcctggaggctgcggggagcggcggcggcgggcacgcacctggctcccgaaaccagtgggaggttggcagcgcaggggcggcagccccggatccccccaggtgcagcacagtccctccagggctccttggagggccaggcctcagcccgggtgccccctcgccggggctccagggttgggggcacccaggaggccgcaggtgtggagctcgacggcgccccccgactagaaacccaggctctcatgcgcggctcccgccccgaccccagctccagaggggcgagagcacccggcgccgaccccgtctacggaccccgaccccgggacctcccgacccccggacctcccggcctcgcggaccctcaggagcccctgcgtgggctgcgccagggcgcccgcgacagcaccgccgcgaaccacagccacggcctccgggtctgcctctagccgctgcggtcaggagggcggagactctgcgcacgcgcagttccccctcccgcccctgcttgccggtgatggcgcataacgcatgcgcggggagggcggcggggcgtggttccgg

SEQ ID NO: 27712 - DNA, 576 bp, Homo sapiens
  source 1..576: mol_type = other DNA
agggagcggtccggtcgggtgggggcacagctgccaggcgcccagggcctgcaggtggggctcaggatgctaggctctgctgggccgcgccctgggaacagggggacctggggacagatctggccctcgcacgcccctcctgtctcgcgtccgtccctccgtgcagccggggcaggaccctgcaggggccttgcgggccggaggtgccggcttcctcctccgtcccgtcccttcccgctgccccaccggactcaggggctggggtcgtagcccggcgggcagcgcctgggcttcctcgcggggcagcccccgggccctgtgctgggtcgcagcctcgggcggttccctcggggcgggacgtgtccccgtccgtcctcgcccgtccccgccgcccccgggtcccggcccgccccgtcctcgcagccgcaggtccgctgcggcgcccgccccgggtcgctccgccccctgcccggcccctgcccggccccgccccgcgcccgccccctgcccgcgcccgccccgccccctgcccggcccctgcccggcccctgcccgccccctgcccggcctcccagc

SEQ ID NO: 27713 - DNA, 691 bp, Homo sapiens
  source 1..691: mol_type = other DNA
atgggctccgtgatcttgagcggggtcaccaggctcatgccatctgtgaaatgggccgatggccaggctgcacacaggtcctcagagggcataaggcacactcagcacccactgctgtgcctgggcagctggcgggggggcacagcagccactcacatgccactcacatccctgtgggttaccggctgcctggaatgttccagtctaaccggactgaggccgggaaggagtatgcattcctgccctggtcccgggctcggtctcctgggcagaaggggaggcacagcagctctgagagggtctgagcccctcgagaccctccccgggatgggcagccattgcaacagtggaattggcactgcaggctccaggccaggcgcctctgggcgtagggggagcaggggctgggggccgctgcctcagtgcttctgggatggggtcctggcttggagccccaatccagagactcagcagccctgccccggcagagcctagcggagcgttgggaaccctgtggacactgcacacagcaccctctgtcctcacggagcctggggctgctgcagggccgtgatccttgggtgctggaacccccgggtgctgggcaccttgattgcgctgggcctgcacaggggagggcaggagggcgtgagcctggctagccccacctccaggcacagaggccctcccg

SEQ ID NO: 27714 - DNA, 795 bp, Homo sapiens
  source 1..795: mol_type = other DNA
ggcagggtgcccgcccgagggaccgacacctccgcgagtggcaccccaggatgctgacgccggcgggggtgggggcccgaggggcggtcggggtcagggggcggccccaggggtagggccgcagcacgaggggccgcgtgaccccggcggtgaccgggtggggagaggccggcgccggcgtgggtgggagggtgccccgtggggacgctcctgccgcagcgcccggccacgcgcgaggccccgccctcaggacgcgttcggcgggacggacccgcccaccccgcagccgcgcgcccgccgcgccgccttgtgggcgctgtagtcccggagtccgcgtgcgcggggccgggtccgggagccccagggcagccgccccgccgagtcgcaggtaccggtggggaacggggccacggggccgcgtgtcgggggctgcggggtgtctcggggccctgtggggtccgcggggccctggggagggtgcggggcgtgggccggggtctgcggtctgcagcctggggtccgcggggccctggggagggtgcggggcgtgggccggggtctgcggtctgcagcctggggtctggtggccggggtctgcggtctgcagcctggggtctgggcccgcggggcgtgggccggggtctccgcgggggtcgcggtggcccgggcgcctggcagaaccgttgctgtgcagcgggtttcccgccgctcgctttccgccgcagcctgcgaatggggtggggagtcccggcccccagcctgccctccgcgtcatcctggggcgccaagtcccac

SEQ ID NO: 27715 - DNA, 768 bp, Homo sapiens
  source 1..768: mol_type = other DNA
ttggggcccccacagccctcgccctccccatagccaggccctgggtaactccaggggaaagtgaccctgaggtcctgcacaggccttgggctttcggcggtgctgtctgccgcagccccacgccttcctgggagagtggcccaggccccccttcctgagtgtgactgcgctgccgtctgcgaggcctgcgcgggtctcccccgggctgtccctgctgggatggggactggtggccccgggccacgtcctggatccggcttgctccttggtacaagcccgtacgggtcacggtcaggcaggagggcgggcggcggggtcccgggggcgccgagttcggggccgtgcggtccccaagagcaggctgtgcgtgtccctgttggagccccacgaaggcggcccagggccacccctgagggcgcgtgggcccgacccgcgtcccggatccagcttgcggccaggaatggcagggtgcccgcccgagggaccgacacctccgcgagtggcaccccaggatgctgacgccggcgggggtgggggcccgaggggcggtcggggtcagggggcggccccaggggtagggccgcagcacgaggggccgcgtgaccccggcggtgaccgggtggggagaggccggcgccggcgtgggtgggagggtgccccgtggggacgctcctgccgcagcgcccggccacgcgcgaggccccgccctcaggacgcgttcggcgggacggacccgcccaccccgcagccgcgcgcccgccgcgccgc

SEQ ID NO: 27716 - DNA, 331 bp, Homo sapiens
  source 1..331: mol_type = other DNA
ggttttaagaaatttctctttaacacaagttttgagcagttagattataatcaacttaaagtgccttaatattacacacgcattagggcactttaagctcttttctttaccattttgaacataaaaatatagttacaataattgttttaatgtccttttcactaatttttgattgcatgccagatattctgagtttactttgttaaataattgacatttttacaactggaatgcaattaagttacatggaaagctttgaacgtttcaggcaaggtcagaacagtttttagcctagtcccatgggccatgagatctcaacaggcaacattcc

SEQ ID NO: 27717 - DNA, 426 bp, Homo sapiens
  source 1..426: mol_type = other DNA
gtgagctaactgaacaagaactcactcatcaccaaggtgatggtgctaagccattcatgagggatccgtgggaatcacattccaacatgagatttggaggggacagagaatcctccatctgcatgtgcacgtctctgcacgtctgcatggactatgctgacggggaccttaaccacagggacagccctgcgtctctccagccaaggcagaggactggcctctggcagcactgctgtggggtgggctgcagagcccacctgagcccctccaggaggggaaggggtctctgcggcctgcagcccccagacatcactgtatatggctggagcctacaggctggagggccgggatccacactgctgggcccctgctcccagggacgcacttaactatttgacaaaccgataccagtgtcactcccaagtc

SEQ ID NO: 27718 - DNA, 255 bp, Homo sapiens
  source 1..255: mol_type = other DNA
cacagcatatataacaactatattgtgattggcaaatacgtatctcacggcgaggtccgtcccgcatggagcgaaagtttcaaggaactctccctgggcagctgctgcagtttcctcctccctgacacgggaactgaactgcaggccgcggcgagccagccagggaaaccgccttctccctgggctcggagctgctgccggttctggagggagagaccccagcaaggaggtggtgactcatgggccgctcctccc

SEQ ID NO: 27719 - DNA, 574 bp, Homo sapiens
  source 1..574: mol_type = other DNA
cgagattttggacatcatcatgaaaatgtgctgtgagagcagggccgccagcctggcctgttccactcctagaaggtgggtacatccttgaggaggctcctcagccagcccctaccggcctccaaagccctcccaggcccccgggtccccgcacaggctgagagtccccggtgcggtgcagagctgccacgtggggagcccgtcagcttgctgtggtgagacccaggctctagctcctgagagaatggatcccgggggtcggggagcgaggcctgggtcccacacgcagctccctgcacctgcccgccccctctggggcctgctccaagccagcagggttcccgggtgttgggctgggccccgccctctttgggggggtccctgctccatcattctggcccacaggccccaccctagcctggctgagcaacgccagccctgaccagccgccggacagagcagcctttacggggccatgggagggacggggggaccccaacgtgtcaggtgcactggaggggaggggcgtgctctgctgacaccgcccccgcctgcagaatgcaagtgcggcccc

SEQ ID NO: 27720 - DNA, 736 bp, Homo sapiens
  source 1..736: mol_type = other DNA
ccttccaggacagctctgaagggagccctgtcccggagcccagggacctctccccctcaaggaggaaccccggccctggctgggggactgtgaccagggtggggagtggggaccccagacagagccctaccagggacccctgtcactctgtccccggctgggctcaggtggggacctcacggtggtcccagggcccagcaccaagcccacctgtggtttccagcgggaaaggggtggcaggggtggctcgccgcatgcccaggctctgccccaacctccgcgcccaggctctccccaccctcaggccccaggagcggcagtttctgcaggagctcctgacccggggcctctcgcgggaggcctgagcaagccggacacaggtcggggggctgatggggggaaccctgcaccccccagggcagctgctaccaaggggcgagtcccagggcccccgtcggccctgcgtgcggggcgcggtccccaacacccagggccccggaggcggacacagccccagccaggtcgtccgggaaatggggcgggggcgacgggcggccgggcccgggacgcgaagtccgagcagcagcgggcaggggctggcgggggagctcggcccgggctgcaggggggtccccaccctctccacccctcctcccatccgcggggccgcagcgcttcctggcggcggggcgggtcaggccggcggggcggggtataaagggggcggcgccggccg

SEQ ID NO: 27721 - DNA, 602 bp, Homo sapiens
  source 1..602: mol_type = other DNA
cctccctgggccccaggctgagcaggtctggcctgggtcacctcatcccctagtcccggtgcttggacactcctcccatctgcaccgaggagagggcggcactccaatccctgcattacccctggaactgcacgctctgaaccaggcccggtagctgcccggctgctgccagccccactctgcggagccagcagcacagtgaggcccgtcctgatggcctcctggagctggagcttaggccaagccacagggggtcctggtcctccttatcaaagtcctgtttaaagggaatggagccgtgcctagctctgcaggggagccggtctggggaagctgggatctctctcccgccctcccctctgcactgtttccagggcagccccaggcagtggggggcgccagacagtggtgctccattcacccagccctggaggacatggaagggcacccagggtggggcaagagggcgcaagccccccagtccagatgctggtgacggtgtgtgctgggcgcagaccccgcttccttgaagactgagggcagtgcccccaatcccgctgacctgctgtgcgtgcgcctgccatgggggagggtgccagggg

SEQ ID NO: 27722 - DNA, 388 bp, Homo sapiens
  source 1..388: mol_type = other DNA
ggccctgcccaggcctgacaaagagctcagagcaaagattattataatgttaaagagtaattgctacaaactaatgattaataattatatataatcatatctatgatctatatctagtacaactcttgttattttatatattttattgtactaaaacagtgcctgggcacctggctggcttgccgcccacaagatgtgccccagcctctggagcagggctgggggcgcctgtgtttctgggagggccacaagacccccagccctaagttgggaagtctaccttacaaggctgggtgaaggtttgtaaacacaccagtcagcacggttcctctttaaaaactagcactctgtaaaatggaccaatcagcactctgtaaagtggaccaat

SEQ ID NO: 27723 - DNA, 430 bp, Homo sapiens
  source 1..430: mol_type = other DNA
cagctggggagagctggggtctcagctgccttccccacggctcacatgtatccacgctctcacacatgtgctcccctggctcacgtgtcctgtctgagctgagctgacctcagttgggtgctgcgagccagggcctcatgctggcctctcgccctccacagccccaggggtcgtcctccaggaacaaacgcaggccccacgggctgcctggaaggcctcccagaaggcagcacagggtcacgagggtcacccgcagtggcacagggaggcctcgtcacgacaggattccagccaggctggcctgatgctcctggggaccacactctggctgagtggagccatcccctctgggtcaacagcacccggggtggctctgcagcaccccactccgcggctgcacagggaccttggccccactgctccttgaggc

SEQ ID NO: 27724 - DNA, 249 bp, Homo sapiens
  source 1..249: mol_type = other DNA
acttccaattatgtgattgaattagaagaatgtataatgttaatactgtcagtatggtggaagtctctcactattattagagtctaattaaaatctgttttgtcagaaactatgattgcaaccctgcaatcatgaagacagcataccaatgtcttgctctgtctcccaggcaggctggagtgcagtagcactgcaaccggttcaagtaggctggtcttgaagcctcaagtgattcaccaccatgcctgg

SEQ ID NO: 27725 - DNA, 381 bp, Homo sapiens
  source 1..381: mol_type = other DNA
aaatggcgcagaatctctgcggctcattttaaataaaaatacttaaaatattaataaattgaatccagcgctatatgtcagaatgttgaaagccattcagggccccgtcgggctcagagcggggggcgcatccgtgactcatcctcctggacgccctgcagtggtgcaacaccagtagaaacctcctttctccacaaagctcccctaatctggccgcccgggctgaatgaaggtggtgttctcccaggggcatctgcacctgagtgcccttgcccgtcacagggctggaggtgtggccggcccactcccatcacagggtgtggccggcccacagtggccggcccaagtggccggcccaagtggccggcccagtgtggccgg

SEQ ID NO: 27726 - DNA, 604 bp, Homo sapiens
  source 1..604: mol_type = other DNA
ccccgtgagcagctgaggctctaccgcgctcggtcctggccagcgacgcagcccttccctggcggggctccagggcttctggcccctgtggtccgccaggtgtgggggcccacggcctcaccgcgcctaccccactccccccggcgaagctacgcggcgctcagcttcccagggacgccggcggcgccctcggctcctccgctccgccccgccctcccctggtctcgcactggagccgacggcccgcgcccacctcacctcagggcggcctcccgcccccacccccggccccggcgtccgggcaacgagagcaattcctggatctcagagaggctcacctcaagcgcggcgcacgaggccgggctcccgggacgcaagcctctagagggcgcgcgagaggccccgcccccgcccttcggcccctcaggccccgccccacgccgcatggggcaccaagcgctccaccactgtggtcgcctggcacaccccggggtcacgctgcgtgggcgtcggcccacctaagcctgagcgcctgccgaggcctgcgcctgcgtagtgcgcgcgggaggggcggctgggcggcaggtcccgggtgcggacatct

SEQ ID NO: 27727 - DNA, 379 bp, Homo sapiens
  source 1..379: mol_type = other DNA
aagaggaacattttttttttacctcatgaaatggaaaagaaagcacatatgtgctgaatattcttgttgtcaacacagatgatcccataaaatgttcagatcactttatttggtggaactgattgaaaatcttaagggaatttacatttcgcggaatccggccagaaggactccaggcgggcggaggcgcgcggacgcgggggccgggtcctctggggtctggggcgcccgcagacccacgcgggtgaatgcgacgctctcgccggacgtaccggtgtctggacccagcaaaggacgcgagagcgggcggaccctcccgaccggaagccccgccacagagcgggttgtggggagcggaaccggatcgcggcggaatccg

SEQ ID NO: 27728 - DNA, 686 bp, Homo sapiens
  source 1..686: mol_type = other DNA
cagatcatcatagctatgttctgctacaagtctaagaaaagaatttttgaacactgtcatactaaaaggataactatttaataattactttgttacagaggtttaaagcgtgatcctttaagattaaaaaaaaaaaagccgaatctttttactgagttagtaaattcatgaaaaacctccattggcagtaagaaaatgaatgctgttgtaacgctgtcaaaacctcatcgcgccctggcggccaccctcgagcgggctggaaggacgagggcgctgccacgaagctgaggcctctcggcggggacggcgtgcccggggagccagcccgaaacggcggaggccacgcgctgggcccaggccggcctggccactgtcccgccccgggctcgccaggggtcgccggcgccgcaacgctccgttagcgacgatgtggaggcccgggcgcgcggagctgcgtgggggaaggaaacggcgcccctggcgccggcccagcccccacgctcccccaggaccccgaggcccgcgctgcccactggcccctcgggaggcgcaagcacaggctgctgccgcgacactcagcgctgcgcaccgcgggcagaaaacgccgcggaccgacttccgcggattccgccgcgatccggttccgctccccacaacccgctctgtggcggggcttccggtcggga

SEQ ID NO: 27729 - DNA, 620 bp, Homo sapiens
  source 1..620: mol_type = other DNA
aatgaatgctgttgtaacgctgtcaaaacctcatcgcgccctggcggccaccctcgagcgggctggaaggacgagggcgctgccacgaagctgaggcctctcggcggggacggcgtgcccggggagccagcccgaaacggcggaggccacgcgctgggcccaggccggcctggccactgtcccgccccgggctcgccaggggtcgccggcgccgcaacgctccgttagcgacgatgtggaggcccgggcgcgcggagctgcgtgggggaaggaaacggcgcccctggcgccggcccagcccccacgctcccccaggaccccgaggcccgcgctgcccactggcccctcgggaggcgcaagcacaggctgctgccgcgacactcagcgctgcgcaccgcgggcagaaaacgccgcggaccgacttccgcggattccgccgcgatccggttccgctccccacaacccgctctgtggcggggcttccggtcgggagggtccgcccgctctcgcgtcctttgctgggtccagacaccggtacgtccggcgagagcgtcgcattcacccgcgtgggtctgcgggcgccccagaccccagaggacccggcccccgcgtccgcgcgc

SEQ ID NO: 27730 - DNA, 353 bp, Homo sapiens
  source 1..353: mol_type = other DNA
ttttcaaaattaaaattaaaaatcatgtctgtaacatatatacttataggcaccatggagcctagcctataatataattaatacatgaaatttaggcccagcatctgtggtcccacctactggggaggctgagtgagccgagatcgcaccactgcactccagcctggaagaggaacattttttttttacctcatgaaatggaaaagaaagcacatatgtgctgaatattcttgttgtcaacacagatgatcccataaaatgttcagatcactttatttggtggaactgattgaaaatcttaagggaatttacatttcgcggaatccggccagaaggactccaggcgggcggag

SEQ ID NO: 27731 - DNA, 342 bp, Homo sapiens
  source 1..342: mol_type = other DNA
atgggccactgaggcaagttcctgggttagctgcaccgaggagggtgctgacctctgcccctcgggtccacaggtctgggcccctgggcaaaccagccccaaggtgggacaatccccgctctgagggtccctaggagggaggtattaagggcgccctcccacgactgcccttcccccaggtctgagggttcaggacgcacagtggaaacctggcaacctggggcctccctgtgtctggcagcctggcaactgtcacgcggcgcccagcgctggcttctggggcactgcagtccagcaggctggtctccaggaggtaaggcccgccctgcaggcaacaccggt

SEQ ID NO: 27732 - DNA, 689 bp, Homo sapiens
  source 1..689: mol_type = other DNA
cctggggaggcgctgcaggccacccgcgccacgcccccggccccggccgcgcaggaataccggccgcccgccccaggccacccggtcccggaggacgcgggagccactggaagatccagcctggggtccagcgcctgccgcgccccacaccccgccccggcgtgcaccgcgcccagcccgcgccccaccccccccgacgcaggcgcagccccgccccggcccgcccgagaggcgccgcgcgtcccggccgctgattggctgtggccgcggcgggggcgggacctgagatggcggcggccaggaggcggcttccagcggagccggcgggaaaaagcgagacctccgcggcggcttccgccggaccgcgtcctctcctggcagggggcggtggcgggcaccggagccgcccttaggccctcagactccgcgcgggccgcccggcggtgacggggctgacacagagcagccttcgcctgtcacgcagccgcggccccgcccccgacacgcgccgccaatcagggggctgcgtttccggtctcgcgcacgcgcgctctgggcggtgcagcctgggcggagccccgccctttacgctcgccggccacagattggtgcgctcacgtacccgcctcctacggcaggaccagtaagcggaacgccccccctgccaggctggccgagcggcaaaaagt

SEQ ID NO: 27733 - DNA, 701 bp, Homo sapiens
  source 1..701: mol_type = other DNA
cggaccccgggactgtgtccgggcttcggtgtccagagagctccaagacacccaaaccttccgtggtttccacctctgcaagcttatgttccgctgagctcaagctgagggacgacgacctcatgcgacgtcagtgctccaagcggcggggcctgcaggtccaggcggttcgcgggctttctgaccgcattcggccgagttcttctctgaagacccaggacccccggccgagggggcgcattcggcgggctggttcccagggtcccggcaagggtgagggagcccttgcggatcccctgagatccacctcagcagcctcctccgtggtaggcctcaacttcccgcggcggcccacaaaaacggcctggccctgtccgggtggttgctgagcaccgttcggcgccgcccgcgcctgcagggagcccggcccgctgtcctggtggacacaaagcccaggggccgcccgcgcgggaccagcagcgcgaactttttgccgctcggccagcctggcagggggggcgttccgcttactggtcctgccgtaggaggcgggtacgtgagcgcaccaatctgtggccggcgagcgtaaagggcggggctccgcccaggctgcaccgcccagagcgcgcgtgcgcgagaccggaaacgcagccccctgattggcggcgcgtgtcgggggcggggccgcggctgcgtgacag

SEQ ID NO: 27734 - DNA, 633 bp, Homo sapiens
  source 1..633: mol_type = other DNA
tttaatgctgcagaatggtttctccagaagcagacgctggcaaagctttggccaacctcgtgtggagctctggaacgagaactgctgaagttcgccagactcgggcactcctgcctaactcaggggcggcatcgggacacggacacgctgctcaggcccagcagggccttcaggacgccggcggcgccctctcagtctactccaaggtcacctcgcggtccgacatggctgcactgcgcagcgttcgcgatcagcacagcccgaaagggaagacagcggtcaacgcggacgcgccatggcgcggggaccaaggaggagccccgagaggggcggggctggccggagggccgcgcgcggggccaccagcggcgcctaggggtcagcgccaacgcccacgggttggtcatccccacttaggcgcctcgggccgagcagcctgcccgcctcaagcccgccaccctcaagcaggcccagcgcagagcctgtcgggagcggcgctctcccgcctctcccaatgggagcccggagcggcatcgacgcgtcttcggggccaatggaagcgagggcggggccgggagggctgcgcgggcccgagacccactgcgcacgcgcgctcgctacccgcccttcccg

SEQ ID NO: 27735 - DNA, 701 bp, Homo sapiens
  source 1..701: mol_type = other DNA
gcaaagctttggccaacctcgtgtggagctctggaacgagaactgctgaagttcgccagactcgggcactcctgcctaactcaggggcggcatcgggacacggacacgctgctcaggcccagcagggccttcaggacgccggcggcgccctctcagtctactccaaggtcacctcgcggtccgacatggctgcactgcgcagcgttcgcgatcagcacagcccgaaagggaagacagcggtcaacgcggacgcgccatggcgcggggaccaaggaggagccccgagaggggcggggctggccggagggccgcgcgcggggccaccagcggcgcctaggggtcagcgccaacgcccacgggttggtcatccccacttaggcgcctcgggccgagcagcctgcccgcctcaagcccgccaccctcaagcaggcccagcgcagagcctgtcgggagcggcgctctcccgcctctcccaatgggagcccggagcggcatcgacgcgtcttcggggccaatggaagcgagggcggggccgggagggctgcgcgggcccgagacccactgcgcacgcgcgctcgctacccgcccttcccgccgcgcacgcgctcccgtgtagggccggccgggcgctcaggagcgcgcggggcagcggcggcgcggcggagccatccgcgctcgtgcccgcgcgggtgcgttgctgt

SEQ ID NO: 27736 - DNA, 546 bp, Homo sapiens
  source 1..546: mol_type = other DNA
cggccactttgaaactaatttgtcagaaggaacacctacttcttcattcttgtgaagaagaacccataaactggcccccgtgttcagaggctccagtcgagcccttcctcaggctggctggaggcttcagcaagacgcctctgtaaaacagcgttcgaacgggactctgagagtctgtgaccttccaccctggggtggagggaaaggccttggtgcagacactggcctcagcagcttctctgaggcagccccgttgagcccagggctgaccacagacaagcactactgtccacagaacttcacgcccagtggggccaagctccaggggcctctccattagaatgctttgtttgaatcaattaatccaaggtgacatcaatattcatgtaactcccagcaagtccccggggctgcttggtcaatgcagccctgtgtgcaggcctggcagccctgccacccccgccttcggctcccattggctgccacggcctgcagtgggctgcaccagggttcatccatcctccctgggcagagggaataagaggc

SEQ ID NO: 27737 - DNA, 365 bp, Homo sapiens
  source 1..365: mol_type = other DNA
aaactagatcttgactaaatctgggattgtcctattggtttgagccataaagatagctcaagctggtactaaggactgacagatttgtcaaaggtggttaccaaaatgtgaaccttgaatatctgagtcagatctcagtcaacttaggaagtttattttgctgaaatgacacggccgtcggaggccctgatgacatgtgcccaaggtggtcagagcacagttcaatcaatagcttgagtttctggttagcctctccagaggtggcgcatttatctcagtgagctgagagatgactttgtaatgattttgcggcccccaaatttattttaaatcagacttaaggtctgccgtccaactcttacttc

SEQ ID NO: 27738 - DNA, 499 bp, Homo sapiens
  source 1..499: mol_type = other DNA
cttgagtttctggttagcctctccagaggtggcgcatttatctcagtgagctgagagatgactttgtaatgattttgcggcccccaaatttattttaaatcagacttaaggtctgccgtccaactcttacttcctgcgcgacagaggaggtggggggtcccccaagccccagccattttgtggctcgtaggggttgtcgcttcccaagccgtgaatggcccaaacccgcccccgccccaggtcggactcctgccccgcgcccctctgggtcggaccccaagccgagccccccaaccccgcggctgggctgggcgattggggacgagctccacacgaacctggcctcgcctcgcaagaccgcgggacgcgcagatgtgaagtgcgcctgcgcggggcgcagccccagctgcagacgaagcgacgcgccggcgcaagtcaggactgcgcctgcgcggggcgccgggccctgggcggggccttcccggctgacggcctgcgt

SEQ ID NO: 27739 - DNA, 617 bp, Homo sapiens
  source 1..617: mol_type = other DNA
gtagtgacaggagacaacatataactggattttactatttttatttctcttagtatataagccatttacaaggtttgtagtgtacatctcaaatttaccacaacctaccttgaagaggtattacacttctctatggacaatgttaaaacactaaaacatgcatttttaaaattatataaccacaatattttattatttcaacagtcaattgcatttttcaaagatttgattaaagaaaaaagtctaaaattaacatacaaaattgccattttcagtttttgtcattttataagatctattatatctcctatcacagccatttgataaattaatttgtagatacagtaagaatgtcatgtatttattaaagtttttaatagtgattttaaaatttcttattaggtggcaaaaaataataaaaatactaactgtaactccatgtaacagctatagcatagtttgtttgaactgaaattcacataaaataatcatattgaagtccaaaaaatttaaagatgtagtgtaaattcaatttatatgaaattgaagcacgaggtttacctgctgcctacagagttagaatctaattcttctgattattcttgtaacaaaatctt

SEQ ID NO: 27740 - DNA, 538 bp, Homo sapiens
  source 1..538: mol_type = other DNA
acctacttataaggagatcccaaagagtgtaaaaatgtaataataacaagaaagtgttttaagtaaagtaaatttgtatgtatgtctaagcagaaaattttattatttggttccaagagccaaatatctatttaaaaaatatttcttaaggaataatctctgtgtcctgcaacgtaaagttatcattataaaacaggagtcaaatttgtgaattaatcttagaattgaataaaatatttcttctctttgaaaaataatcatgccccatttacagtaagaatttttatatgttcatgcttgagaggtggtatattaaaattctaatgccttggctttagtgtggaataaaaaaataatgattttgatatttcttatactgtaggaggcagtctcttgtttagttcaaaattttccatattagcagtaagtaacaaaaaatgtggttcatcaattttgacagaattttcatttaaaaaaggcaaaattaaaatttgtttaattgtttgctttgactcagctagtgcagtcacctgactcc

SEQ ID NO: 27741 - DNA, 707 bp, Homo sapiens
  source 1..707: mol_type = other DNA
cacctgggcaggccccgggccgcatgcggaccctagaggcaaccagcgggctggatccgcacagcggccctgctttcgggctcagcgagcttcaagaggtggccgagattcccccaccccgcccccagatccccgggagaggtcagcacggcccctcccgtgggtgtcacagagaccgataccggtcccgctccccgggaaggagtgggtctgggtccagtccgcaggaccccctcgcggggcagcgctggaccctagggcccctgcctgcctcctggggagcccggtgacccaggcagccctggtgaggccgcaggagtctgggccctagcgacgcccccgggctcccacaggacaggacgccctgctgccctcgggactgtccctccagcccctgggccccctctgcagaggggcaggggagcccaccctggatcctgaggcgccgagcttgagggaccccagagctccagcggagggcaggggcaggtcccgggcgctcctcagggctggggtcacaggaggcgcttctgcgacctctagggccctagagcccgggaggatgagagactgggggcctttcgtccacccctggggctgggcagacgctcagcctgtgcaacccgaagctgcttctgcccagtcccagccgcggcccctttaagagggggtggtgcttcagcctggcgccagggacgctgccagca

SEQ ID NO: 27742 - DNA, 421 bp, Homo sapiens
  source 1..421: mol_type = other DNA
cgctggcgacagcttccgcggccgtggctgggacacagtctcacagaccaggtaagttgcctgccctccaggaactcaagtgtccccgagtccgagccaggaggctggaagtgactgctgtcccatcctccctggagcccggagctgtccttgtcttgagaaagagaaagcaaagcttggccgaagctgcagtgagctgcggttgcaccactgcactccagctcccggcaggcgaggctccagctggagttgacgctagcccgacgcgggtgcaactggaggcgcgacgggccaggcccaggagcagcgggaggagcgcacctggggcgcgcgggcaggaacggggggagggccctgtctcaccctaaacccctccccctcccctcggcccggcccgcccctgggcccgggctggaagccg

SEQ ID NO: 27743 - DNA, 564 bp, Homo sapiens
  source 1..564: mol_type = other DNA
tttttagcatagctatacctatgaatgacatttcaaacggtgggaatggagactctactccgggaaacgcgcagcggacacagtcgtgttccctaagtgtttgctgaccctctccgcagtgcgcgcgggggcggactcacgtgcgcagtctccctatgcgctgggacgcgcgacgagcgtcccttgactggcaggggcccagaggacctgaacatcactaagggtctgccccagcggcccggccctgaagtcaaggttgagacccccggcccagactccgcgaagctgagggaggccggcctggggcctgccgcgcaatgttaccgggatccgcaggcacagggcgatagtacggacgccgccgcccaggccgtgcccattgtgcgccgcggccagctcaccgcgatctcggtctaggaggcggcgggaccccgcttgcaacggagcccctttggcctgcgggtcgagttccataggcgcccgacgggctccgcgcgcttacaggaactcccgtgatgccgcgcgcgccgaccgctgattggctgtgcagcggacggactcgcg

SEQ ID NO: 27744 - DNA, 172 bp, Homo sapiens
  source 1..172: mol_type = other DNA
aggtctgactctgaccgtcctaaaacatatattttattatagctacttaaacaccacgcctgcaatcccagctactcgggaggctgaattgcgccattgcactccagcttgggcaacaagagtgaagcatgcatgtaggatccctggtgcagtgctctgcacagatgctggg

SEQ ID NO: 27745 - DNA, 193 bp, Homo sapiens
  source 1..193: mol_type = other DNA
ttctaagaatagtcatggctaatatttatcaagagctttctatcattttcagatgaggaaaaagcgaggtctgactctgaccgtcctggtaaaacatatattttattatagctacttaaacaccacgcctgcaatcccagctactcgggaggctgaattgcgccattgcactccagcttgggcaacaagagtg

SEQ ID NO: 27746 - DNA, 487 bp, Homo sapiens
  source 1..487: mol_type = other DNA
ctatttattcctcctaattagatggggaggaaagtctttgaagaggaacctctacttttatcataaccaacttggcagcttaaaacagcacactgttttttgttttgttttgccctctgttgcccatgcagtttcccctcgggaaacctcaggtgatccgcctgggattataggtgtgagccacggtgcccagccccaaacacactttctgtggctcagctgcagtgaaggtattagctgaggctgtggtctcatatcagggctcaactgaggagggatcagcagatccaaaatcatgtgggttgtgatacccaccattgtattttaaatatttaactatttaatccctgtgatttagtcaattattattattattattattgcaacacactgaatagtctactgttgtaccattgataaaaatactatattctaaaatgttatgtatagttgagtcaacatcatagttttaaatcacacttttatt

SEQ ID NO: 27747 - DNA, 404 bp, Homo sapiens
  source 1..404: mol_type = other DNA
tagcatcttccactggttaactgtttcaaaacagtgcagtaggcaaactgttactgttaagcatcctgggtaaatatatcttacacagataatcctacacttaaaatagtctcaaaagttctgatcaactttctattttgacatttggagacatccatagaaagattaatgtctcttgtctctaaaccaattcggggaatcttcctggaaggtgaacggcccgctcatggagccgcggcagagccctgggtgacccagcagcagctgcctgctgtgttttccttaagcagttttataaaaaaccttcagtgaaagaaaatccccagatttggctctacagccatgacatgcatatcaatgcaggtgcccttgagactcctgcaggttaagcatgacatgtccca

SEQ ID NO: 27748 - DNA, 264 bp, Homo sapiens
  source 1..264: mol_type = other DNA
tgaaggaaaaatatttttggttcctccctatttaatttggatgagcttgggagaagtgatggtgatgttctcacaatgtagcctggccatcatctgggaacttgctggaaatgcagaatagctctctcttgtaactagcaacagatgcaacctgcatggttctgatgcaggtaatctgagctgaacatcttcaaacgaatacaaacagtttatataaagtaaaaaaaatttttagaaagagctacgtgcactccagcctggggg

SEQ ID NO: 27749 - DNA, 374 bp, Homo sapiens
  source 1..374: mol_type = other DNA
ctatatctcaaatttcttcaagataaaaagaaaagtgggtgtaccatttgacctcttattctactattaggagtcagtctatcctaaagataaaggaattttcaaaagtttttgcctttgcttttgaaaaatatataggctatctcagaaaagttccaaataaattatgtagctgctccaccctaataaggaagttcctaagactacattcaggtaatcaaggttgacatgaatagtcagaaatcatgtatccccctcctggtctcgaacttgaggtcaagctaattatgcgaaaaattccaataaaggcacattcccgaggacgcgcccacaggccgggacagggcgggacttcctgggcgtcgctctcttgc

SEQ ID NO: 27750 - DNA, 406 bp, Homo sapiens
  source 1..406: mol_type = other DNA
ttaagcatttccctcagggttaaaaaaaaaaaaagtgacaaggctggtttgttttttttttttcttttgtctcgccctgtcgcccagcgcctccgggttcagcttcccgagtagctgggatctcggactcctgacctcaggtgatccggccgcctcggccttcaatccttgcacagatctctgtccgactaggaggccgacctcttggatctggtgacttggagcaagggaccttcctgcggcatctgggcggctcaaggcccgcggccttccctaggcgggctccagcccactccccgggactgccgccgcggcttcgtaagcagcatcgctgcataaagggaacccctgcgcagatctcgggtgcaagagagcgacgcccaggaagtcccgccctgtcccggcc

SEQ ID NO: 27751 - DNA, 202 bp, Homo sapiens
  source 1..202: mol_type = other DNA
gccttgttgagatatagatctcataacatagaattcacctatagtgtacaattcagtagttttcagtatttaaacaaacatccattaatacaagttaagtatgttggtactgttaacaaaatcaggtcacatctggacggagagacctccggggcctccgtggtccttccggaaggtcccgccccgacgccggccgtgacga

SEQ ID NO: 27752 - DNA, 497 bp, Homo sapiens
  source 1..497: mol_type = other DNA
tgagtgacatcctctgaccttttataaaagagctcagggagtgagcccacgcgagggcgcagagcaactggacgctccaacagggctggtggaagtgcagggctctgcagcagcactgccggtgagagctgcatccggggatgcatggactggcctgtcattccagcaccctggagcccaggacctccagaggtggacaaaagaaattagtatatgttaaactgatgttttaaatcagagttgatatccaaataatgaggggctgggccagattctctgcactgttccagaaacagcctggggattctgaatgtttcccagagaatcattaggaattatcccaagtggccaacttaaagttggacgacactgtctgaaacagctgccggctccccgccccgctccacagccccgcgccggcgcgggctccccgggtccccgcaagccgccgggggcgggccggggcgggccggggcgggcccgggcgtggggggccg

SEQ ID NO: 27753 - DNA, 313 bp, Homo sapiens
  source 1..313: mol_type = other DNA
ttctctcaagtctccagaaaggggagtccttattaagatctttcaaaaatccttcctgctaatctgtgtgcctttttctatgggaacaaaggtcagcctcttgcgtggagactgagttctcatgcatactcccctttagagataacaagtgttatttataaagcactcttttctagaatgaactcatgggtgctgtcctaatagctgctttcagatgtcctcctgagaaaggagagcctgcttgctggccagagaaaagcagccgacattctctggtgactacagctcattccagattcccaaatatggagaa

SEQ ID NO: 27754 - DNA, 277 bp, Homo sapiens
  source 1..277: mol_type = other DNA
cttcatttattccacaaatactttttgactacctatagattaggcattgagtgaacaaaagagacaaaaacgtctgcctttgtgagtttatatcatagtggaaatatttaacgttgttttttaacagcaaatgaggcccttatgctcagcgcccccaaccccgcctcggtggggtcaaaatgtttgatcaagctctgaattccggggcgcggcgtgctgggggttgtagtccgcgctctgcctcctacttccattacagaaggcgagtactccgcgc

SEQ ID NO: 27755 - DNA, 317 bp, Homo sapiens
  source 1..317: mol_type = other DNA
gagtcttaattgtcaggatcttacattataagatagacaaaaattcaacgcatgctttactaagtaccgtttgtatcagtgggtaaagcactgtgtttggtactctctcaactatcgtttatgaatgggtggccaacattgccgcataggtaagcagaaatctgctgcttggaaacttggggagttaccacgtctggattgcttaaggaaaacccagcccctcacccacctggggggaagtgaggggagatgggcacccaccccttcccgagcagaggcgggccttggcggcaggaggcacaggctttgggagcaga

SEQ ID NO: 27756 - DNA, 437 bp, Homo sapiens
  source 1..437: mol_type = other DNA
ccagcccctcacccacctggggggaagtgaggggagatgggcacccaccccttcccgagcagaggcgggccttggcggcaggaggcacaggctttgggagcagaggccctgcagcttgccctagggcgcccagctgagacggcaccttggcacccgggcccgctgcagcccgctccggtcagctgcaccccagtcagagacccgcgcgattcgcggcagctggggtcacgaagatagggcagcctcccccgcgggcgcagtccccgctgcgagcgcccccggctgctgaggcgggaccgaggacccggagagccgcgggtgggcggggaggggcctttgtgacctgcccgcccctccccggcactgtgatgccggggggcagctgcgggcccggcgcgcctgtccccggcgtccccccctcccggtgtgtcacaacg

SEQ ID NO: 27757 - DNA, 288 bp, Homo sapiens
  source 1..288: mol_type = other DNA
gagcgagacttttggagaggttcagtaacttgctcaagttcttacaacctcaccatccacaagttactgggctgaaaccttcatgtacctagagacagactctgcagccatgagctcctgggctcaagtgatcctcccacctcagcatcccaagtaactgggaccccagttaacttttaaaattttttgtagtgctgggattacaggcattgagtcactgtgcctgcttcaaagctgttttgatttcatccacaaaaaaatatgaggcagacagagtgggcggtctgg

SEQ ID NO: 27758 - DNA, 321 bp, Homo sapiens
  source 1..321: mol_type = other DNA
aagttactgggctgaaaccttcatgtacctagagacagactctgcagccatgagctcctgggctcaagtgatcctcccacctcagcatcccaagtaactgggaccccagttaacttttaaaattttttgtagtgctgggattacaggcattgagtcactgtgcctgcttcaaagctgttttgatttcatccacaaaaaaatatgaggcagacagagtgggcggtctggcaatctctactgcagtggtggagccctacaactcagattgtgctttcatggtggacaacgaagccatcgacggggccctcaatgtggacctca

SEQ ID NO: 27759 - DNA, 246 bp, Homo sapiens
  source 1..246: mol_type = other DNA
ctggtacatctctaaagaggtaataagcctttccggtgtgcatgttacagatctcttaaccttatatatacacagatgagtagccctcaggtgattaattgcaaggaccttacgcctgtagggtggcccacacctgtaatcccagaggaggcgggcggatcacctgagaccagcctggccagcatggcaggagtggtggcgcatgcctgtaatcccagctactccggagcctgaggcaggagaatc

SEQ ID NO: 27760 - DNA, 333 bp, Homo sapiens
  source 1..333: mol_type = other DNA
agtagccctcaggtgattaattgcaaggaccttacgcctgtagggtggcccacacctgtaatcccagaggaggcgggcggatcacctgagaccagcctggccagcatggcaggagtggtggcgcatgcctgtaatcccagctactccggagcctgaggcaggagaatcaggtgcgcggctgcaacggcagccgcgggaagctcgggccggcagggtttccccgcacgctggcgcccagctcccggcgcggaggccgctgtaagtttcgctttccattcagtggaaaaccgagcgcggggccagaccaaggcgggcccggagcggaacttcggt

SEQ ID NO: 27761 - DNA, 720 bp, Homo sapiens
  source 1..720: mol_type = other DNA
gcccttctggtggccctgtctgggcataacagaaggctcgcaattatagagtgaggattattataatactggaataaagagtaattgctaccaactaatgattattgatattcatatataatcatatctaagatctatatctggtataactattcttgttttatattttattatactggcgcctgggtggcttgccgcccacaccagccaccagaagctccccagccccggcccagcagctggtctggggagcggggagagggcagtctgggctcgcggttccggctgggggctgggcaccccggggcgaccacggcaggcccagatggggactccggttccaactctcctggcccagtcttgtctgtctcactccgggggcagagaggacgcagacagaccccaacaccactgctcggccgcgatggtgccttagacccaggtcctgtgggctctggcccgagacccctccctctgggaaggccggtgaccgggacagtccacctcgcaggcgcgccggcgcggagcccggacctcagcccgcaatgactcacaagggccggtggatatcaaaccctccttgcagccaccacggagggacggggcgcgtctccttctgaatgacgcaaggggcggggcgcgtggtggggcggggaaggcgcgaggcgcgccgcgatcggggactgtcctaagacgggcggggcgcgctgcgctggggcg

SEQ ID NO: 27762 - DNA, 415 bp, Homo sapiens
  source 1..415: mol_type = other DNA
gtcccagctactgtgagctgagatcatgccactgcactccagcctccatctcaaaaaaaaaaaattcacttttatttttgagacaggaggctggagttcagtggcacaatcagctcactgcagcttcaacctacctcagcctcctgagtatttttattttttagttgacacataataattgtacatataattagcatcatctcaaacatttattatttctttgcataacactcaatattcttcaagctatctgaaaatacataatttttgttttgagacagggtctcactctgttgctgtcttcacggagagcaggagcagaggctttgagaagccagtgggccttggcctcagccctgccggcagagggtgcggggcggggcggggcggggcgggaccaacagcgcactaagcg

SEQ ID NO: 27763 - DNA, 338 bp, Homo sapiens
  source 1..338: mol_type = other DNA
tctcctggggctgtgtcccaggctattggtcacatattggctcagaagaaatgtcttcaaatattttacagagttggactcttcgccgacactgccctccaaggttcaccctgttggtggggattgtgtaggcaggtcctccagggagccggcttcgctgcagtctcggccttaaaaagacccctttggggcgcacttttgggcgtggccccgccgctcaggccccggccccggccctgcctccttaggtccccgccctcgcgaccttaggcctcacggaggtcattggcccgcgcctgcgtcgcgggcgggaggcggggcggggcggcgcggcgcgg

SEQ ID NO: 27764 - DNA, 471 bp, Homo sapiens
  source 1..471: mol_type = other DNA
gttccgagtagctgggggtctagaactcctgacctcattctgggattacagaataatctttagacatttcttaatgtcttgttctttcaccttttgttagataactataaaaaaaaaaaaaagattgtttcctgtaatccagagcagctactcgggagctgaggcaggagaatcccttgaacccgggaactccggtgtccgtctcaaaaaaaaaattgttttaaggcccttttcttgcataaagcttgaaactcctatataagtaaatttcctggtttgtatttttgtagaataatctcgaagcatacatagttcttatttgtgggaaattagaattctaaggcctttggacgctgcaaagccagaatttctcgcgtgaagaaccatttccaataaagtctagcatttatagattggccaactattggaggcgcctgcgcaaatggtgcagtcccgccccctccaccctgt

SEQ ID NO: 27765 - DNA, 388 bp, Homo sapiens
  source 1..388: mol_type = other DNA
cacctgaggtcaggaaaaaaaatgataataaaataaaaataaattttctctcctctcagcattattaattatgctttaaaaaattttttttagtgattgctctagagtttacaataaacatttataacctaactctactttcaaataatattataccacttcatgggtagtagatttcactcattcataaactatagtaattcaagacatgggtttagaaagttgtctctggaatatgaaatacaaaagattctattttatgttcattgttttttttagatgatcttctctctgaaagacttttaacatttcttgcaaggcaacttttgaggcataattttgtttaagcactttaaatatttcacttcactctttcttgcatgaatgg

SEQ ID NO: 27766 - DNA, 629 bp, Homo sapiens
  source 1..629: mol_type = other DNA
cccagagcctggggaggccagggtacggcgcaagaccagctttagccgacaacactgtgggccctcctgctggagccaggccttcctcctgggcgcctccgactggctggagctgccccctccaggcctcttaggccccgcagtccaaccttgttcgctgagcgcagaaacccggcaggtgaggcccggcccgtggctgctgcgggaggggggcccggcggcgtagccccttctcaccggcctcccgcctgggctagccccacgtggggagggtgtgcccctggcctccgggatccctggggatcccgccgctctcgacagtcgcgcagacccgaggcccgctatcccgcggcgcggcacacagtgcaccttgacccactgctcggagctgggccacggctccgcctcccgcagccccgcccccgtcccgccgctcgcggtcgcccagggactcggcctcggccattggctgcgctttggccccgcccctacgcctgcctcggcgcgccccgcccaggcctcagtttcccggcccgcacggggcgggctgggggcggggcctggctcggaccacgcggggcgggacctggagctgacgcggccgccccgcccctgggaccataaccggc

SEQ ID NO: 27767 - DNA, 349 bp, Homo sapiens
  source 1..349: mol_type = other DNA
gcgtcccatgcatccatgagctgatgcggtccgctgctgctaggccgcaaacccgcaccgcgtgtgaggtgcgttattcccctggcacggtaatgacatacctgtacgtgtatctccaaatacaggagaggaaatgtccttagctaagccctcaccagagcactggcccgctccacatgtggaaggcgctgggcaagggccgcagggcagagggcgcgcgggactactttccgcggaccctcggagcgggcggagggatccgcgcaggcggggcgcggtcagggaggagggcgggggccaggaccgggagctcggggcactgcgcctgcgccgtcgccaccggtcagcc

SEQ ID NO: 27768 - DNA, 401 bp, Homo sapiens
  source 1..401: mol_type = other DNA
ctcccaggtctctgggccagtcagtctggggcaccagaccctgcaccattgctcaccaagagtggccctgtggctgtggcttcaagagcagaggcagaggctgtctcttcagcctcagaggctctgatcatcggtgtgtcagcactgcctccaccaggccccaggtgattgatgctcctctggagatgtcaaagccatttgattcattgtgagatgcttaaaaataaaatactgttgattttgcttctttaaatagccaacataagtaacatttagtatacaatttagaaaactaaaagttaatattttgcatagatgcatgtcattttacataagtgatatcatattgtatgtgatggctggctgcagggagcatttctatgcagtgcccagagcactcc

SEQ ID NO: 27769 - DNA, 279 bp, Homo sapiens
  source 1..279: mol_type = other DNA
gtataggatgaacagtttcaatcagggtgaccctttgcctgtcaacagtcagacaggccagaatcaggccctgggctggaggagtctccctcttacagtgctgtagcagtggatccttcgcgggggcccggggcccccaaaccctcctatttagggaccacaattccccaactgggggcactgtccccagatccagaggggcagcctcttgcgaaaggcacaagggggatttcgggcgatgcagaccagtggaaggcactggctggcaccaaggcccgc

SEQ ID NO: 27770 - DNA, 780 bp, Homo sapiens
  source 1..780: mol_type = other DNA
tgctgaggtccggcagaccaggcgcccagcgctcaggcgttccggctgcgtgggctgggacgcgcctgtccccgcccccgacgcagccccgcctagggtgtcagctgcgcacacacgagggccttgcgtcgtccccgccctgtgctgggagcgcgcctctgcagcgggcacagtctagccagtcaggccctagccggttggtcggtctgcgccctcgcgcgggcctcggctccgcagtgcagccggagcggccgagggggcgtccctctgctcctcccccccgcattcgttcgagtccgaagcccggatcgcattccggcgccggcgcggagcccggcgctcgcaagatggcgaggcagagctggtgacgggcggtccacgccacctgggccccgcctgcctctgcgggcggcccgggttgcaactgcaggccccgctcgctgtccgccgtccaggcgaaccgccctttctggggcgcccgcgcccgggcccgacccgaagcccctgccagcggaggagccggggcggcccagtccgcgtggggagcggtttcccgccggggcgacgcgccgtgacttccggcgttgcccgggagccgcctgaggaggagcggcgcaggggatgcggctgtggtggcggcggcggcggccgagcgcgggtggcggctgtggcggcggaggggggcgcgggccggcgatggcgcggcggccctgagggcgcggggcgggcggcggccggagggcgggtggcgcgggaggaagcggcggcggtggctccatg

SEQ ID NO: 27771 - DNA, 760 bp, Homo sapiens
  source 1..760: mol_type = other DNA
agcacaggcgagtcctggcggacagtcgcgaagaccccgcacgcgccctgggcactccgctatccggccagcgtccgcactcacccgctagtcgggcgcagggctagcgagatacttcgcagcacggaggccgtcatggctaccctcgccgcttccgggcgtgcgcccctccacagtccggcccgcggtgccccctgctgaggtccggcagaccaggcgcccagcgctcaggcgttccggctgcgtgggctgggacgcgcctgtccccgcccccgacgcagccccgcctagggtgtcagctgcgcacacacgagggccttgcgtcgtccccgccctgtgctgggagcgcgcctctgcagcgggcacagtctagccagtcaggccctagccggttggtcggtctgcgccctcgcgcgggcctcggctccgcagtgcagccggagcggccgagggggcgtccctctgctcctcccccccgcattcgttcgagtccgaagcccggatcgcattccggcgccggcgcggagcccggcgctcgcaagatggcgaggcagagctggtgacgggcggtccacgccacctgggccccgcctgcctctgcgggcggcccgggttgcaactgcaggccccgctcgctgtccgccgtccaggcgaaccgccctttctggggcgcccgcgcccgggcccgacccgaagcccctgccagcggaggagccggggcggcccagtccgcgtggggagcggtttcccgccggggcga

SEQ ID NO: 27772 - DNA, 763 bp, Homo sapiens
  source 1..763: mol_type = other DNA
ccttcgcgggggcccggggcccccaaaccctcctatttagggaccacaattccccaactgggggcactgtccccagatccagaggggcagcctcttgcgaaaggcacaagggggatttcgggcgatgcagaccagtggaaggcactggctggcaccaaggcccgctcctgggagccaggccgcggcccctccaaggaccacaggtgggcgcgaagatggccctcgctgcggtcaacccggagcacgtgctggggctcaccagcctctccgcgctgaggacttgggcaccgggtaccgggcgtcaggggcgagacaggcaggacttgcgcgcgccccgactcgactccagaccccgacccgactccgggctcggcctcccgcgcttcattgttcggccgccgccgccgccgggctgaggcgagcgccgggtccctcagcgcgcccgggccatggagccaccgccgccgcttcctcccgcgccacccgccctccggccgccgcccgccccgcgccctcagggccgccgcgccatcgccggcccgcgcccccctccgccgccacagccgccacccgcgctcggccgccgccgccgccaccacagccgcatcccctgcgccgctcctcctcaggcggctcccgggcaacgccggaagtcacggcgcgtcgccccggcgggaaaccgctccccacgcggactgggccgccccggctcctccgctggcaggggcttcgggtcgggcccgggcgcgggcgccccagaaag

SEQ ID NO: 27773 - DNA, 778 bp, Homo sapiens
  source 1..778: mol_type = other DNA
gccacccgccctccggccgccgcccgccccgcgccctcagggccgccgcgccatcgccggcccgcgcccccctccgccgccacagccgccacccgcgctcggccgccgccgccgccaccacagccgcatcccctgcgccgctcctcctcaggcggctcccgggcaacgccggaagtcacggcgcgtcgccccggcgggaaaccgctccccacgcggactgggccgccccggctcctccgctggcaggggcttcgggtcgggcccgggcgcgggcgccccagaaagggcggttcgcctggacggcggacagcgagcggggcctgcagttgcaacccgggccgcccgcagaggcaggcggggcccaggtggcgtggaccgcccgtcaccagctctgcctcgccatcttgcgagcgccgggctccgcgccggcgccggaatgcgatccgggcttcggactcgaacgaatgcgggggggaggagcagagggacgccccctcggccgctccggctgcactgcggagccgaggcccgcgcgagggcgcagaccgaccaaccggctagggcctgactggctagactgtgcccgctgcagaggcgcgctcccagcacagggcggggacgacgcaaggccctcgtgtgtgcgcagctgacaccctaggcggggctgcgtcgggggcggggacaggcgcgtcccagcccacgcagccggaacgcctgagcgctgggcgcctggtctgccggacctcagcagggggcaccgcgggccggactgtggagg

SEQ ID NO: 27774 - DNA, 318 bp, Homo sapiens
  source 1..318: mol_type = other DNA
gtgatgcctgggattgcagcagctgccttcaggttcctggggcagagctggagagtgcagcagggcatgcccatgaggggcttcccctgcatgctctgttaggaagcaaacagataatctctcaccacagttttgaaacagacaagttgtcttcaaagagtttctgttggacattaaaatgagctatgcatggtggcgtgcatttgtagttccaaaaataaaatggtggtaatttcacaaatactgtaataagagcaatatctttcaaactttttggacaggtgctaagtgtggtggctcacacctgtaatctcagct

SEQ ID NO: 27775 - DNA, 268 bp, Homo sapiens
  source 1..268: mol_type = other DNA
aggccaaactagcctgggtaacttaatgttacatgtcggctgtactcggattgcattctcagctccatcctgagtggacgctcaagcaagactgctggagctgcagatctgggaggttcgctgcaccagaaaatataccggattgttgagatttgagaaaatctcataaagctgctagctgcgcggcccaggatgcccgcctggcccggggccctgcgaccccggccctccgcgcgcgccgcagccgccctcggggactgaggggcgg

SEQ ID NO: 27776 - DNA, 260 bp, Homo sapiens
  source 1..260: mol_type = other DNA
aggccaaactagcctgggtaacttaatgttacatgtcggctgtactcggattgcattctcagctccatcctgagtggacgctcaagcaagactgctggagctgcagatctgggaggttcgctgcaccagaaaatataccggattgttgagatttgagaaaatctcataaagctgctagctgcgcggcccaggatgcccgcctggcccggggccctgcgaccccggccctccgcgcgcgccgcagccgccctcggggactg

SEQ ID NO: 27777 - DNA, 185 bp, Homo sapiens
  source 1..185: mol_type = other DNA
cagactgtcactttatgcataatgaattggagcactgatcctggtgagccggctgcctcaacagcaggacccctggtaaaactgcatgtcccagtgtcattcctgggactggcccagcagtccaggccaaactagcctgggtaacttaatgttacatgtcggctgtactcggattgcattctcag

SEQ ID NO: 27778 - DNA, 355 bp, Homo sapiens
  source 1..355: mol_type = other DNA
cccttccccaccggcaaggcctcggcgggggtcccggactgggcgtcagccacggcggccggacgcctggcgctcgcgctgaggtaccaagagcccggcggcgaggcggccattagcgctctgccattcacggccagcgtcacctctgaggcagaaaagcgacgctgggcggacatctttactttgggagcctactgcctcccacatacccaatggggcagcatgataaggacaatgggccctactaaattcgtctggaatactgtcaacacgtaatttaaaataacgtttaaaaatacctataaaaggcccgggcaccccccctccgggtctcgggtccggcacttccggtgag

SEQ ID NO: 27779 - DNA, 340 bp, Homo sapiens
  source 1..340: mol_type = other DNA
gtgacacgactatacccacagttgtcacagattattaatattaatagcttattgcaaaaatacaaactagtctctttaccttttcacaccgttgggacagggaggcaacctctcccctcgcgcgccggccccgccctccgcccttccccaccggcaaggcctcggcgggggtcccggactgggcgtcagccacggcggccggacgcctggcgctcgcgctgaggtaccaagagcccggcggcgaggcggccattagcgctctgccattcacggccagcgtcacctctgaggcagaaaagcgacgctgggcggacatctttactttgggagcctactgcct

SEQ ID NO: 27780 - DNA, 464 bp, Homo sapiens
  source 1..464: mol_type = other DNA
gcggccgatgagcctgcaggccggactcaggcccgggtgactcggcacctccgccgccgtcccgccccgccctgccccgccgggccctacctcaggccccgggccaaggcccagcccccgcccgctgcccgtcagcgcttaccatgatggacaaccgctctcccagccgccgctgccgctgccgccgcgccaagccggtacgccccagaggctcaccggaagtgccggacccgagacccggagggggggtgcccgggccttttataggtatttttaaacgttattttaaattacgtgttgacagtattccagacgaatttagtagggcccattgtccttatcatgctgccccattgggtatgtgggaggcagtaggctcccaaagtaaagatgtccgcccagcgtcgcttttctgcctcagaggtgacgctggccgtgaatggcagagcgctaatggccgcctc

SEQ ID NO: 27781 - DNA, 561 bp, Homo sapiens
  source 1..561: mol_type = other DNA
acggtgggagggcagggcacagcccctccgtgtccagagcaggctgctaggcctggggccaccactgcccctgggtgctacacccagtgtgctgggtcactgggaacttcctgggggtgcgggcagtaccccctgcggcttgccaggcagggggaaagcccctgtgccaccgctttttgccagagactcaggctccagatggggggtgaggctggggccctgggcctgacctccacacgcctgcctggcctctctgtttgccatgggatgagagagacagtttggaccccggggcgggctttctggagagcccccctacgagggcctctacggcggtgacggggtgggcggggccgggacgcgcagggaggcggcccaagaagcgcgccctaggccagcccagaatgcgctcggccgcgactggtggggctgggggcggctgccgggcggggagcggtcccgcgccctcagctacccctctgccagaggctcccgcgcacggattggctgcttcgggccggggggccgggcccgggggacagaatccgcccccgaacctgt

SEQ ID NO: 27782 - DNA, 542 bp, Homo sapiens
  source 1..542: mol_type = other DNA
atgtatgatgtatacgcctgagttccaaacacatcttggatgagaggttggatccctacactggttagagttctagacccagagcagggttatggtcaacggcgctctggccatccacccagggagcccacgggccagcagagggagacatctccatacaagggggccctcacctggggaggtggtgaccgcaagcctgacagccccaaagccttcagagatgccgcctggggacacttgagagacttgctctcagtcactgagtctggctgactcactgaagattagggcctgaacttccccctctgtaaatggggtgcaggccctggccctgccttcacacccacggggtgagacggtcagggccggtcctgccagacccaaaagcctgtggcctacagcctgccaggtgcgtctgctcgcagagcaggtctgcgcagcaccgagcggtcagcaggggcaatgctgggcactggccagccgcgccaggaccatccctgctgacctcggcggggtggggcggagcgtgcagggtctggccc

SEQ ID NO: 27783 - DNA, 463 bp, Homo sapiens
  source 1..463: mol_type = other DNA
catggcagcttccctgctagcgttccgtcaaggcagcaccggtgatctcttggccctggctgctgctcccagctgtgtcatatggctcaggagaccagagaaagggggtggcaggtacggccccttccttgaggctcccccagggaatccacaggccctgactgggccccagtgggtggcagggcaggtgggaaactgaggcaggcagtctgagagccacacactctgttcacctcctagcctgaggcctaggcccagggctgtctgtctgccctgggcctgagatgccagcctgtctgggtaaactgggtgggactcagcctagaggcttcctgcaggtcagggccatgctggagctggggggcctggagctgccccctttccctgggatgctgtgggcctgcccctcctccccaggtgccagtggtccaggccccacaacaggaccagggcctggacagga

SEQ ID NO: 27784 - DNA, 699 bp, Homo sapiens
  source 1..699: mol_type = other DNA
ggccctcacctggggaggtggtgaccgcaagcctgacagccccaaagccttcagagatgccgcctggggacacttgagagacttgctctcagtcactgagtctggctgactcactgaagattagggcctgaacttccccctctgtaaatggggtgcaggccctggccctgccttcacacccacggggtgagacggtcagggccggtcctgccagacccaaaagcctgtggcctacagcctgccaggtgcgtctgctcgcagagcaggtctgcgcagcaccgagcggtcagcaggggcaatgctgggcactggccagccgcgccaggaccatccctgctgacctcggcggggtggggcggagcgtgcagggtctggcccggaaagccagggcaggctggatggtccgaggaccggcatggacccgggtcccagcgagggcggggggagctgggcctgggctgcggcaccgccggcaggaacagccgtgcagggcgggggcggcgcgggtctggtcgggtgaccccgggcgcggccagggctgtaggaggcgagggcgtcgccccgaggccgtggtctcgggtccatggtgggggacctgggtccccgcccccccgggccgccctgggtcgcgcgtgggcgcggcgggcgccgattggctgccgggcgcgcgggcggagcgggcggcggcggcggcggcgc

SEQ ID NO: 27785 - DNA, 679 bp, Homo sapiens
  source 1..679: mol_type = other DNA
gagagacttgctctcagtcactgagtctggctgactcactgaagattagggcctgaacttccccctctgtaaatggggtgcaggccctggccctgccttcacacccacggggtgagacggtcagggccggtcctgccagacccaaaagcctgtggcctacagcctgccaggtgcgtctgctcgcagagcaggtctgcgcagcaccgagcggtcagcaggggcaatgctgggcactggccagccgcgccaggaccatccctgctgacctcggcggggtggggcggagcgtgcagggtctggcccggaaagccagggcaggctggatggtccgaggaccggcatggacccgggtcccagcgagggcggggggagctgggcctgggctgcggcaccgccggcaggaacagccgtgcagggcgggggcggcgcgggtctggtcgggtgaccccgggcgcggccagggctgtaggaggcgagggcgtcgccccgaggccgtggtctcgggtccatggtgggggacctgggtccccgcccccccgggccgccctgggtcgcgcgtgggcgcggcgggcgccgattggctgccgggcgcgcgggcggagcgggcggcggcggcggcggcgcggaggggccgctcaccccgcagcccggcctcggcctccgccgcttgtcgtcgcgc

SEQ ID NO: 27786 - DNA, 699 bp, Homo sapiens
  source 1..699: mol_type = other DNA
cacgtgggagatgggtcccatcccacccccacccctgtctctgagggcagggccacctgagggctgcagggcaggcttccaagttttgcagggacctccagtactccggcagcctcaccctaagcctcctaggggacaggcaggctggacttcagaaaaggtgggctctgccccacacacgtacacacacacgcatacacgcatgtatacacgcgcacacacgcgcacacacaaacgcgcgcacgcacgcacgcacgcacgggggaggtcagccccaagcagggctggggaggttggggcgtcgagacgccgccgggaggtagtctgcgagaagacggcgggccctgaactgggcgggtacccgcgctgttgcgcgtgggtcccgggagcggcctccggcgccctctggcgggcggaagccgcgcagcacctcttgggggcgggacgcgcggtggctaccgactcccggcccgccccggcccgcgtgcaggacccggtcgtcccctcctgctgtcctggagcccggactgaggccccgggggcgcggcagggctcccggtccacgcgagccatggcccgaccgcgcctcggctcagccctgccctccgcagccgctttcgggtggctccgcccgcggcccaatttccaggcgaccgtttcccggcgacggcgggcggggccgtctctgccgccccccgc

SEQ ID NO: 27787 - DNA, 480 bp, Homo sapiens
  source 1..480: mol_type = other DNA
gccaccgccgctgccgccgcccccgcggctggatccgggccaggtggggcctcccgccccctggcactctccggaggggtgagtgtcgaggcccccagcttcttgagcaggggtcccaatcctgctgccctctgcccgaggagggaggacatcgcctgcagtggtccctgcagagccctccctgggattggggccaggggtgccttcttgtctcctcataccgcatttggtaagagacagttcgccacactgcccaaccaggtgcaccgcaagtcggtgaagaaacatgggccaggctcctcgggggagtggctggggtcactggccagccaagctctgtgtgcaggtgagtcaggcctggtgctgagggtgagtggcccccaggaggccctggcactgatccccagtccccttccatgggacctctccaaggccctggggctgagggttggagaggcccttccagtggccccttccccg

SEQ ID NO: 27788 - DNA, 359 bp, Homo sapiens
  source 1..359: mol_type = other DNA
tgctgagggtgagtggcccccaggaggccctggcactgatccccagtccccttccatgggacctctccaaggccctggggctgagggttggagaggcccttccagtggccccttccccgcgctgtcaacaacaccgagggcctgctgagaaaggccttgcctaggcggccacagcactcgaggcctggcctcacctggctgtcctggggccaggctcgggagtgcagcccctacaatctatgcccacccttggctgctctcggcaggctgcggccagtggatgttgcatgagaaggtcaacatgcctgccgtcgcacaggggcctggccagggccctggggctgagagtacggatccat

SEQ ID NO: 27789 - DNA, 588 bp, Homo sapiens
  source 1..588: mol_type = other DNA
tctaggagtagaggacctgtacccccttcatccagggctagaaggtaaaggtcaccatgttggcaggtatggagcacttgcccagatccagaggtgcagcagtgggccaggcccccaaccccaaccctcttcccatgggtcaccagaggaaggggctgccccagtggcacaccctggctcccagatttctgagcgaccatgccaggggcaggtggccaccagggcaggggcatgggcatagcctggaaaggccctagccacatgggctctggctccagccagggatgcccgtttcccatcagtaaccgtgcaattacgctcaccgggtgtgagcctttctccctccttcccccaggagagcgcgcccttcgccgttataggcagccggtggtggaggccaaggggcagcgggtccggggccgactgtacccctgggctggtgggggaaggctgtcctgggccggcgccagcccactacccacccgcattgcgacttcgtgaagctgcgcaacatgctcatccgcacgcatatgcacgacctcaaggacgtgacgtgcgacgtgcactacgagaactaccgcgcgcact

SEQ ID NO: 27790 - DNA, 597 bp, Homo sapiens
  source 1..597: mol_type = other DNA
ggacgtgacgtgcgacgtgcactacgagaactaccgcgcgcactgcatccagcagatgaccaggtgcgcgccccagccgcgagccagacctcgcccctcgagcctggtctccctagaaccaagtccagggctgtgagggctccggagggcagggcctcagcagtggcggggatgggccaggcatcgccagcccacgctgagcctcccggtggcgccgccccgcccatctggagagccccatcccgatcctgccgctggcggcggaggcgggcgtcagggatgctcctccgcggtgctgctcacccgccgggttgtctccgcccgcagctgaggcgcatgcaggagatgctgcagaggatgaagcagcagatgcaggacctcgccgcggacacaccgtccgtctccgggacgcaagaccggactgttcccgacccggagacgcggggcccgaggggcctggaccgtagcccccgcccagctggccccgaagttgggcgggacttcagagatccgcctcccccctgctctggcaggcaggcaaagctaggcagaagaggattcccaggatcctgggtctgttccctgccccagtgctgc

SEQ ID NO: 27791 - DNA, 587 bp, Homo sapiens
  source 1..587: mol_type = other DNA
gagcctggtctccctagaaccaagtccagggctgtgagggctccggagggcagggcctcagcagtggcggggatgggccaggcatcgccagcccacgctgagcctcccggtggcgccgccccgcccatctggagagccccatcccgatcctgccgctggcggcggaggcgggcgtcagggatgctcctccgcggtgctgctcacccgccgggttgtctccgcccgcagctgaggcgcatgcaggagatgctgcagaggatgaagcagcagatgcaggacctcgccgcggacacaccgtccgtctccgggacgcaagaccggactgttcccgacccggagacgcggggcccgaggggcctggaccgtagcccccgcccagctggccccgaagttgggcgggacttcagagatccgcctcccccctgctctggcaggcaggcaaagctaggcagaagaggattcccaggatcctgggtctgttccctgccccagtgctgcagaacggacttgggagccctcctttgcctgctcccgcgggtcacccagcgagtgcttcccttatccccagacgcctagcgggcagggtt

SEQ ID NO: 27792 - DNA, 587 bp, Homo sapiens
  source 1..587: mol_type = other DNA
cgaggggcctggaccgtagcccccgcccagctggccccgaagttgggcgggacttcagagatccgcctcccccctgctctggcaggcaggcaaagctaggcagaagaggattcccaggatcctgggtctgttccctgccccagtgctgcagaacggacttgggagccctcctttgcctgctcccgcgggtcacccagcgagtgcttcccttatccccagacgcctagcgggcagggttcaaggagcggggtcgtgaccgcttacaccccttctccacagcccggcccgacctggagggcccccggggcactgggcggtgagccacctcctggctcttctccccagcaccgctgtggtgtgccgggatcctgagcctaggcctcccgatcctggtgacacgagtgctccgtgtgcccctgagagcgggtgggagcggaagcctgagcggcctgcggcctccggcgatagtgtgctatctgccgctgcagcgcgcgtccgcgcggcctctgggctatttctggccaggccgcagcactgtggtcggtgcgggcgtggcaggggcggggcggccttatcgctcggctctc

SEQ ID NO: 27793 - DNA, 871 bp, Homo sapiens
  source 1..871: mol_type = other DNA
gggagcggaagcctgagcggcctgcggcctccggcgatagtgtgctatctgccgctgcagcgcgcgtccgcgcggcctctgggctatttctggccaggccgcagcactgtggtcggtgcgggcgtggcaggggcggggcggccttatcgctcggctctcccgcctacgcctcccgctgcagagtaagccgggctgccgtcttctcgccatgggctccggtgagtctggagtccggtcgggcccccggctgctccctaggccgacccgggttgagcgggctaccgggacgccgggcatcaggggctggatggagccgggccggcagtctgggtactcagagatgtcgcccaggtgcccgccgaccgctcggcttactgcggcgcttcccttgcagggccgcgcggggcgctgagcttactgctcctgctgctggccccgccgagccgcccggccgcaggttgcccggcgccctgtagctgcgcggggacgctcgtggactgcgggcgccgcgggctgacttgggcctcgctgccgaccgccttccctgtcgacacaaccgagctggtgctgaccggcaacaacctgacggcgctgccgccggggctgctggacgcgctgcccgcgctgcgcaccgcacacctgggcgccaacccctggcgctgcgactgccgccttgtgccgctgcgcgcctggctggccggccgccccgagcgtgcgccctaccgcgacctgcgttgcgtggcgcccccagcgctgcgcggccgcctgctgccctatctggccgaggacgagctgcgcgccgcttgcgctcccggcccgctctgctggggggcgctggcggcgcagcttgcgctgctgggccttgggctgc

SEQ ID NO: 27794 - DNA, 432 bp, Homo sapiens
  source 1..432: mol_type = other DNA
tggcggcgggccttccccgagaccccgaggccgcggcccggctcctcagtgcttccctttgcacggtgcgcggcggagcatttgccccaagtagcctgggaccaatgctgggggcgcaacttgcctgggaatgccgagggtgcctgtctgaaggctcccctgagggagccacgtgtgagacagatgggcggccacaattctccagcctacgaagactggggtggggggcgagtctcagcacactggactcccttgggctgaggtgcagcccagacagcaaaggccgccgcgggtcctcggtcgctggaagccaagcttcggttttccggcctgtaaaatggtatcatagctcccatctcgccccctgcgctgggagaaatgggcgtcttgtcttcgctgcgcattgcatgcggctcagcccaggccctagcc

SEQ ID NO: 27795 - DNA, 581 bp, Homo sapiens
  source 1..581: mol_type = other DNA
ttgtccctgggtcccctcagtgacactgagagacataagtcattgtcactgtcatggcccagaatcagggcaagaaaaatgcactaaggacagcttcccaagctccagctgcaggcggcaggggttgtggggggcaggacatgaggcaccccatacagcgttcctgaacctcaggcccagggccagcctccccactggcgcccagccccccagcccgttactgggcctctccagcccagggtctgaggtcctgagatcctaaaaaccctgggagagtgcctcccactcccatcctgagcatgcacaagcgaaggctgcttctgtacagaggccaagtcaggccttggcgtctgggatgcctgggcctagaaaccaggcagagcggcgggcctcggcctcactctgcccagcctggtcgggccatagagcttctcccggcaggcaggctggctgctgggtgccggggggcagcatacgacccagtggcctcggctggccaggctccgcccccggccctccctgcgcccggccggtgcgcagggaggtcggaggagcgggcactgcccaccctccggatgcgt

SEQ ID NO: 27796 - DNA, 487 bp, Homo sapiens
  source 1..487: mol_type = other DNA
ccaattaacgagtaaaatggattattcagtaaattccagattaaagatttcaatgttacaattatgaaagtactagaggaaaatatgggtgaattttttttttttttttccaggattttaaaagttttagatgccgttggtgggaatacacaataatataatttgaccacgaggcacatgcatgctgtgactacttgctaggtgcatgaaggctctggttcagggactggaggttggccttgcctcctcccctccccgcatcccatgcagtgccttggctggggtctgggccctctaacacccacctcattgcaggatcagtcagcatgagccagattgtgctgcagtacagcgcagcggctacagttggcccgtggctggggcctgtcagacctgtgctgacgacagcctacctggacatatttctccatgctcactgaggctgtgtgtcaccccacttccatttctgtggccaaaggaagccaca

SEQ ID NO: 27797 - DNA, 489 bp, Homo sapiens
  source 1..489: mol_type = other DNA
aaaacaaaaaccttatttagaaaaatataaattgttgggattattttatggtaactatcactagaaaagtggcccagccccatgcttctgtgccaggtcacagctgccctatgactcaggccccatccttttgtgggttgggtcagacacctccagtgcactgtggcctggctcacctgtgggtctggcagtagaacccagagttgctctctaggatggacagcctagtcacccagctgacctttaccctgtcccacaggcttctggacagacccaggatgcagtccttgggagagtccaggtgacctggtttttaattaaaacgcgtcctccaggtttcctgcacaggtagggtggaggcaacctggcatggccttccagacaggcagtgcacacagctcctttcagagtggctttgttgccagctgctgcagcacctgctttcagacagatgatgaccaagctgctttcctgctgggggaaggaggc

SEQ ID NO: 27798 - DNA, 361 bp, Homo sapiens
  source 1..361: mol_type = other DNA
ctggcactcgacatgggtactgcccccaggtctttaccagcgcctagaagtgctctgttcgagcagcagctgaccaaggagagcacccctgggcccaaggagcccccagtcctgcccagttctacatgtagctccaagcctggtcctgtggaaccagcctcttcccagccagaggaggcagccccaggaggtgtccttaggtaccccacaggaggtggtggaggccccggagaccccaggagagccaccactttctcctgggttctgaacacagcccaggtgggaacctctgatgattgttgagcgccccatagtccccaggagtggtgtccccatggactctgcgctgagcagaaccaga

SEQ ID NO: 27799 - DNA, 491 bp, Homo sapiens
  source 1..491: mol_type = other DNA
gactgacagtctctctgaggctgcagctgtcagctccctgatcctcagcacttgcctggaccagtgcgggtctgccacgccctgcatgcctcgtggccggtgccgtcagcagggccctcgcaacaaggcgtctcctggggtggcatacaccccccttgtggggcacttgtggcggtaaacctgcagaaaggggtcccctagctgggcacatgcccagctcccgaccccacagggtggacttctgctgggtaccaggctcagacccaggcacctttgatggctcccttcttggcccagcgcctaacaggccgagcccaggcctgggcagccccctaccttgatggggacctgtctgccaggatctcaaggaagttgttcaagacccgaacctgtcccctgcccctggcctccagccagctgccagtggcccctcagctgcctgtggtgactggcactcgacatgggtactgcccccaggtctttaccagcgc

SEQ ID NO: 27800 - DNA, 719 bp, Homo sapiens
  source 1..719: mol_type = other DNA
cacctcttctctaggcaccgtgaagccgaggagaggtggcctatcttgtcccaggatctgggtgctgactcggcaggcgggctgggcacggccctgtggggagggcttggtagcctgccctcgctgtcgtctccgggtccagcctcggcctgagtcgggacccagaggccctgcctgcagcccccaggtatgcaggtagagggtcctctcggactgcctgccccctgcctctggcactccgcgggcacgccgttccagggcgctcacgaggcagcagcaccccagtgtctggctgacgccagggcagtaacggcgggctgaagcagcatcggcccctcggtctacgccacagccgggtgcagatttcccggatctgagggaccgccgggcaccgtccgctggggatcatgaggggcagctttggcccgaccgtctcgcgcctgtacacgcggccccacctgatcccgtggcacttggcgcggcgtgggaatgggcgcgctctcccatcacccaccgcgcggcactgccgcgccagcagggaccgggagagcctgcgaggtagcggccacacggcatacagcgcaggcgcggcctggatgggaggagcgcgtggagcgtgccgggagcatgcgccgggtcgtacacggcggccgcgcgcacgctgggggcgtggctgcgcgatgctggacgctgcgcggcgctcctaggagcaggcgttc

SEQ ID NO: 27801 - DNA, 719 bp, Homo sapiens
  source 1..719: mol_type = other DNA
ttggcccacaggcatcagatcctgagctggggcgcctgcaccctctcccacctcttctctaggcaccgtgaagccgaggagaggtggcctatcttgtcccaggatctgggtgctgactcggcaggcgggctgggcacggccctgtggggagggcttggtagcctgccctcgctgtcgtctccgggtccagcctcggcctgagtcgggacccagaggccctgcctgcagcccccaggtatgcaggtagagggtcctctcggactgcctgccccctgcctctggcactccgcgggcacgccgttccagggcgctcacgaggcagcagcaccccagtgtctggctgacgccagggcagtaacggcgggctgaagcagcatcggcccctcggtctacgccacagccgggtgcagatttcccggatctgagggaccgccgggcaccgtccgctggggatcatgaggggcagctttggcccgaccgtctcgcgcctgtacacgcggccccacctgatcccgtggcacttggcgcggcgtgggaatgggcgcgctctcccatcacccaccgcgcggcactgccgcgccagcagggaccgggagagcctgcgaggtagcggccacacggcatacagcgcaggcgcggcctggatgggaggagcgcgtggagcgtgccgggagcatgcgccgggtcgtacacggcggccgcgcgcacgctgggggcgt

SEQ ID NO: 27802 - DNA, 728 bp, Homo sapiens
  source 1..728: mol_type = other DNA
ccccaaggactcctggcttgcatccaggtccttggcccacaggcatcagatcctgagctggggcgcctgcaccctctcccacctcttctctaggcaccgtgaagccgaggagaggtggcctatcttgtcccaggatctgggtgctgactcggcaggcgggctgggcacggccctgtggggagggcttggtagcctgccctcgctgtcgtctccgggtccagcctcggcctgagtcgggacccagaggccctgcctgcagcccccaggtatgcaggtagagggtcctctcggactgcctgccccctgcctctggcactccgcgggcacgccgttccagggcgctcacgaggcagcagcaccccagtgtctggctgacgccagggcagtaacggcgggctgaagcagcatcggcccctcggtctacgccacagccgggtgcagatttcccggatctgagggaccgccgggcaccgtccgctggggatcatgaggggcagctttggcccgaccgtctcgcgcctgtacacgcggccccacctgatcccgtggcacttggcgcggcgtgggaatgggcgcgctctcccatcacccaccgcgcggcactgccgcgccagcagggaccgggagagcctgcgaggtagcggccacacggcatacagcgcaggcgcggcctggatgggaggagcgcgtggagcgtgccgggagcatgcgccgggtcgtacacggcg

SEQ ID NO: 27803 - DNA, 326 bp, Homo sapiens
  source 1..326: mol_type = other DNA
tctgagacagagtctcactctgttaaccaggctggagtgcagtggtgctatcatagctcactgcagccttgaactcctgggttcaacccagcctcagcctccctagtagctgggactgtgggccctgcagtttctccttttaggaagatgcagcccctgaaatacaggagggcccctgaggtggcaccctgaggtggccagcctgcctgtgggtgcacattgccactggagtgcacaggtggtgtgtccccaggtaacgtcctatgcttgcaaacgactgccctatgccagtgtttatcagcccgagagggctcctgggtgtgcac

SEQ ID NO: 27804 - DNA, 374 bp, Homo sapiens
  source 1..374: mol_type = other DNA
ttaaaataggaagataagggcattatccccctaagtctcgtatgatattccccattctgagtccagaatacctagaaatttggaatttgaatccccttttatgggactccgccagcacgggtgtcctgagcttgcggtgccctggctgagggttccaggtctcagcatgcctcccagaactctgttgggccaccgagtccaccgcgggcagagggccagccaccatgcctcccatagccgccatccctgggaaggcctctacactcactgcctgtggggagagctgctcgctgtccagggggctgggtcgaggggccccctgcatggtgggggaccatgggctccaggaggatctaacctctagagtctagtca

SEQ ID NO: 27805 - DNA, 349 bp, Homo sapiens
  source 1..349: mol_type = other DNA
cagtagttaccaagtaaaatctgttttttctgcattaactatctgcagggccccccgaccctggggagtcctgggccccttcctggtggagcagtctcttgcagggaaaggccctggggtaccccaaggcctccaacagggagcctgttggagaagtcaccaaggccctctgagtctggggctccacagtgggaccctccaggtcaagccctactccagggagaggcttatcctcctggttggggacccccccgccccgaatccggccgcattcggccccggtctagcacctctcccgcgacggcccgcccgggactggacccgccccggtccggcgcaggcagcgcgg

SEQ ID NO: 27806 - DNA, 541 bp, Homo sapiens
  source 1..541: mol_type = other DNA
cgagtccaccgcgggcagagggccagccaccatgcctcccatagccgccatccctgggaaggcctctacactcactgcctgtggggagagctgctcgctgtccagggggctgggtcgaggggccccctgcatggtgggggaccatgggctccaggaggatctaacctctagagtctagtcatcttcagaactgtagttgttactgggataccagctccacccagccccagtttccccacctgggaagggggctacttgtggctagaagcagcccggactcctgaggtatgtggacacccccgcgtgggcacccccacggggacaccctggccaccgccgcgcggacaccctcacgaggacaccccggccgcgcggacacctaccgcggggacgccccgactcctacctgctgcgccccgcgccgcgccccgcaccccgcccgccacggcctgcgtccgccaccggaagcgcagcgccaccgccattgccgccatcgtcgtggggcttctggggcagctagggctgcccgccgcgctgcctg

SEQ ID NO: 27807 - DNA, 182 bp, Homo sapiens
  source 1..182: mol_type = other DNA
tgggtccctgaggcactgcgagcccctgatggggcaggaagcctaaagttccagggaccgtgggccttggtaacaacaaggaaggaagcagacagaggcgcacttgttccttgcacgcctagtcccagctacttgccagcctgggcgacagagcggactcttagcgcctcagagccttactc

SEQ ID NO: 27808 - DNA, 624 bp, Homo sapiens
  source 1..624: mol_type = other DNA
gagagtgggatctcctatgccactgggagcccagggccccatcccagaaagacctctgagtgagcacaggggccctagaagaagtttgtgacctgaacccctgggcttctgcctcaggcctaccaggcttctgtctggttcccaggctacctgcctggagggtcacgtttcaagtggggtcacttgccatcactgtgccccacgaggtacactgttgtgggcgggcctttctcatctgggacatgccacgttgctgttcccaaggggtggggactgccagtgtccttacttggacactcaatgaaaagcacgggctcaccacatgaggccaaggggctgcaccatacaggggccatggggcttacccctgggtgtcctctaagccagctgggagacaacagcctgatccctgggctgcctggggaagcacccagggccagggagtgtgaccctgcaggctctctgtctacccgagggcaccagagggcacgagaaggctggctccctggcgctgacacgtcaggcaactgaggcacaaggctggcatttctgaaccttgcccggtgctgcaggaggagcacagagcactggcgcccctcccctcccgccctgcagatgccggag

SEQ ID NO: 27809 - DNA, 674 bp, Homo sapiens
  source 1..674: mol_type = other DNA
ggcagtgaagcaccgtttcttcctgactccaggtagggtgaagcgcacaactctgcctccccagacgcagagctgtggggggccccatggggggcctgcagggacaagcccaagaggtctctacatccaggcctggtgggggaggtgagcccctggtttaccgagggggtcccttccacctccatcgtctccccgctgcggggacccaggggcgtgaggatgagagagcccccaggccccagggtcagtgagaacctctctgaggctgtttcccaactgtaaaagggagcggcgcgcagcgcgcagcgagtagcggcggaggctacgcggccagagtccggggaaggggcgccggctctgccagtccctgctcggggcggctgggagggagcggtcccgcgtaccctgccaccgccgccgcagaggttcgggcaggtgcggggccgcggcccctccgcgagggggccggtcatccgccgggactgacatcccggaggcccaatcgcgcatccgcccaatcggcgccggttgccgtgccgcgccgggtctctcgacctcagatggggcggggcggagattcgcgtcgccggcccggtccgctttgcgcacgggccgcgtgagggcgggagggctggcccggggtctcgggttgcgcgctgggcctggagggaggg

SEQ ID NO: 27810 - DNA, 912 bp, Homo sapiens
  source 1..912: mol_type = other DNA
ggggagggggacccaggccgggggtccgggtggcgcgccctctctcacccccgaggcggcaggagcagcgcggcgcgaggacacctccgggccgtcggtgcccctgagcttcccggcggcgcgctgccccaggaaagttcccggcctgccgcccctcgggctgttggaaagtttcggcggctgcagggccctggcagctaggcgccaagcgtcgcgcggggcgggcacggctgcggggtcgggccgcgctcggctggagtgctcagtgcaaggcccggacgggtagggtagggccccacacaaagagacccgcccccgccggcccggggtctcggacgccgcagagcgcgcggacaagagcgggtggggcggagattggctccgacgtccggcccagaccctcgcccggatctcgactccagggataggaccctgtccggaccgctgcccggaatgcgtcgcccccagtcccggctccgacccgaggccccagccccgggtcccacaccccgcccactggctcaggcttacctggagcgcagcgtgggcggccccgcagcgcggcctcggaccccagaagggcttccccgggtccgttggcgcgcggggagcggcgttcccagggcgcggcgcggtgcggcgcggcgcgggtcgcagtccacgcggccgcaactcggaccggtgcgggggccgccccctccctccaggcccagcgcgcaacccgagaccccgggccagccctcccgccctcacgcggcccgtgcgcaaagcggaccgggccggcgacgcgaatctccgccccgccccatctgaggtcgagagacccggcgcggcacggcaaccggcgccgattgggcggatgcgcgattgggcctccgggatgtcagtcccggcggatgaccggccccctcg

SEQ ID NO: 27811 - DNA, 457 bp, Homo sapiens
  source 1..457: mol_type = other DNA
tgtttacatctcattgggtttagagtgctttacacattatcattatccctaatgtctttgggcagggcctgagcctctgggctttgactctccacctttcttagagcagcggtcccagctggccacctgctcaccctgcacaagtcaagctgggccagcccctcgtcgctggggcctggacctggtgtccatgagggcatggactcaggggcggctgcgacctcccatggcgtccctgcaggcagggagccgcggagtccccgaaggccgctcccgcgcagcccgaagctttggcgcagccccgggggcggggcgccaggaggtggcagcctccgagcgacagcgcgcccagccaacgggacgccggcatgcggcgcgccgccccgcccctcgctgcgcggcccaatggtgaacgcgccggcttcgggctgggcggtactgggctggctgcggtggc

SEQ ID NO: 27812 - DNA, 400 bp, Homo sapiens
  source 1..400: mol_type = other DNA
gcggctaattaaaaataattttgggcccggcgccagcctggcaatcgcttgtgcagtgagctgagatcgcgccactgcaccccagccgtgcccggccgaaccaccgtgccctttataaatgatgatgtctgatacagtgatgctagtgtccaccgaaggtggcccctcccggcgccggcattcccggggcgctcctcgcggccgccgccctcagtccagcgagccccgcctgggcagcgactgttagcgcgaccgcggcctgggcgcctggtccctcccgcgcggccgcgctattgggccgcgcgcggcggacacacgcgctacgcgccgccgattggcggcctccgcagcgcgctctgcggctcccccaatgcggggcggccgcgcgcggggattggcc

SEQ ID NO: 27813 - DNA, 498 bp, Homo sapiens
  source 1..498: mol_type = other DNA
tctcaagtaggaacctacttgtgagggcggaacgggctgcaggtggcacccaggcctctctgtgcctcgaactatgctgccacctctggtgacctcagcaccgtgctaccctgtgggcccaggagagccctggggtccctgggtagcagagcgcctggccatgcctctgaggcccctagtgccgcagagttgagctgagggtctcgctggtggcctgagggaggccacgcgccttctgtgtgttccagaaagggtgcctccttagtgtaaatttttaaaatattttttgagccttatgattatatagttttaagtgggcattaacaaaatatttaactttggacttaagttataattcaggttctgaagaataaaagtaaggttagtttgttttgatgcctaaaaagtcctcttagggaatattattttgaagccctttactagctgtatatttttaaatttgcgcttagtccagtcacttaagctctaaaagctgtc

SEQ ID NO: 27814 - DNA, 721 bp, Homo sapiens
  source 1..721: mol_type = other DNA
cgccgcccgcaccagttcctggaggctggggccgtcccgcgtggcgacggccgctccccaacccaccccaaggtcacgcgggggccctgcagcccccaggcctctgcagagcctgcccccgactccgcgccaccgaggcccagcagacggccgagcctgcaggccggcggaggttggtggcggcggcgcgggccgcccacgtggccgctgataacggccccggccccgcccgcccaccctgtccccgcttgggcccggcggcaccttggcggccgccatgggggcgcggcggcggcggcggctcggctgggtcggtcgtcgctggctccgcggctggcgccggcgcctcccgccctgccccagcggcgggaaacgcgccgcgattcaacaggaggtccggcccgccccgcgcttcccgccaaaacgcccgcggcgcatgcccggcccgcccgtcagccagaggagcgcgcactcccggcgacacccgcgcgcacttccgtcccggccacgcgcgcctctagaggctcggcctccgccgcacgcgctggcggactaagagtggctggcgaagcgagcggccggcgcgggcccctggcgggcgggcggtacagccccaagcctgagacccggacctgagcatcgcaggttcgagtcccgccccgcctggggcgaagccgggggtggcggcgacctcgcggcgttgcaccggctctgtgagcac

SEQ ID NO: 27815 - DNA, 653 bp, Homo sapiens
  source 1..653: mol_type = other DNA
cactgcggctctgcagcgccaacaaagccgccgcctgggtcggcgcatctaggacctgtggcgagcttctgccacagaggccagtggcgtactagtggggagccccaagtgggccgagccggaggaaacccgccgcccgcaccagttcctggaggctggggccgtcccgcgtggcgacggccgctccccaacccaccccaaggtcacgcgggggccctgcagcccccaggcctctgcagagcctgcccccgactccgcgccaccgaggcccagcagacggccgagcctgcaggccggcggaggttggtggcggcggcgcgggccgcccacgtggccgctgataacggccccggccccgcccgcccaccctgtccccgcttgggcccggcggcaccttggcggccgccatgggggcgcggcggcggcggcggctcggctgggtcggtcgtcgctggctccgcggctggcgccggcgcctcccgccctgccccagcggcgggaaacgcgccgcgattcaacaggaggtccggcccgccccgcgcttcccgccaaaacgcccgcggcgcatgcccggcccgcccgtcagccagaggagcgcgcactcccggcgacacccgcgcgcacttccgtcccggccacgcgcgcctctagag

SEQ ID NO: 27816 - DNA, 503 bp, Homo sapiens
  source 1..503: mol_type = other DNA
gggcccaggactaggccctgggggcctggccccccaagcttccgcccaggcggttctccgcctagaccagggacgccatgggggccgcctggccacctcgtcctgggcctgtcacaagggaagtggcctgtcacaaggtgctcacagagccggtgcaacgccgcgaggtcgccgccacccccggcttcgccccaggcggggcgggactcgaacctgcgatgctcaggtccgggtctcaggcttggggctgtaccgcccgcccgccaggggcccgcgccggccgctcgcttcgccagccactcttagtccgccagcgcgtgcggcggaggccgagcctctagaggcgcgcgtggccgggacggaagtgcgcgcgggtgtcgccgggagtgcgcgctcctctggctgacgggcgggccgggcatgcgccgcgggcgttttggcgggaagcgcggggcgggccggacctcctgttgaatcgcggcgcgtttcccgccgctggggca

SEQ ID NO: 27817 - DNA, 832 bp, Homo sapiens
  source 1..832: mol_type = other DNA
ggggcctgcaggccaaggagcctcatgcctgtgccgcagggtagggcctgggggcgatgggtgaggtccccccacagatctccacctagggagggacaatgaccctcactggggacgctccggagcttgactgagggtctcccgctggcaccgcctcctctgccggcgtgtgtgtgtctgggggggggacccacacgaggccccgccccaccccgcccacagcgccgtcggccccggcccggtccaccttaagcggcggcggggcgggtgggatttcctgcgggaggagacgcgccgggcctatcgggcagggccggggcgccgggcttcccaaagggccccgcctcggggaggatgggggctccagccgaccgtctctcaagcctgcagctcgggccaggacgtggagggcccggcgcccgctggccgggctcctccagcccagtggcccgagggagggctgcgaggggcaaacagccacgacgccgctgcggtgtcacacccgcgccccctcgtgaattccaaggggcgcgcccacagacgcccccgaggccacctgcacggctccgcggcccgggaccaggggggcctggccttcgccgtggtgcccaccacccgggccgcaggggtgcgtgggtgcccggcccccgagagccgcgggcgcccgccgggctggggtccccgaggccgcggggtcctgccccctccgaaggtcccgcgaaccggtggcggtccccgggccccatcaactcgccccgcccggtcccgccccgccgcggcccccagcgcccggtccaccttaaggggcgcgctgacataagagcgcagcagc

SEQ ID NO: 27818 - DNA, 652 bp, Homo sapiens
  source 1..652: mol_type = other DNA
ggcagagggcacaggggtgcccagtcaccaggtctctctgctggctctgaggggggccatcaaggcatcaggctggcccactccgtccttgagtcagggtcctacagactgacaccaggtgggcctgcaagaccctcatctgcatggtcctctcatgcagggtgggcctggggaggacccagcccggctgagctgactcccagcacttctccaggtgcaggggcagcctggcgaccccgggatgcacttaggagctcatcggtgagggtggtgtgtgcaggggcgtcactggaccccatgcctcacaccgcccgtggggggctggccgtcttctgggtttggagcccccattccgcagaagagagggccacaaaggcccaggagggcccccagaactctcttgcagtcaggcagaggccattcctaggcctcgggacaaagcccttgcccgcttggggaccgggccagcctaggccgccacaccctcgggcccgcgtccccggccggctccggcccgggccgccatcccctccgccgcctgcaggggccgccgcctcttcaggaatgcgccgcctttgtctgggaccgcgcggcgccggtgcaccgggcgggctgagcgcctcctgcggcccggcctgcgcgccccggcccg

SEQ ID NO: 27819 - DNA, 645 bp, Homo sapiens
  source 1..645: mol_type = other DNA
tgggcagtgcagcctccacaccaggcagagggcccacccagcatggctccaccctgcgaagctgcctgccactgggatcagatgggagcaccagggctggtcctcacaaggcaggcaggtcaccggccctgcgccctgctcatctccctcagggccacctccatggccaggggcaggcagagggcacaggggtgcccagtcaccaggtctctctgctggctctgaggggggccatcaaggcatcaggctggcccactccgtccttgagtcagggtcctacagactgacaccaggtgggcctgcaagaccctcatctgcatggtcctctcatgcagggtgggcctggggaggacccagcccggctgagctgactcccagcacttctccaggtgcaggggcagcctggcgaccccgggatgcacttaggagctcatcggtgagggtggtgtgtgcaggggcgtcactggaccccatgcctcacaccgcccgtggggggctggccgtcttctgggtttggagcccccattccgcagaagagagggccacaaaggcccaggagggcccccagaactctcttgcagtcaggcagaggccattcctaggcctcgggacaaagcccttgcccgcttggggaccgggccagcc

SEQ ID NO: 27820 - DNA, 619 bp, Homo sapiens
  source 1..619: mol_type = other DNA
acctgacctgactctggcagggcctttgcaggagccattcctccaccaagccccccagccccggcccagcagctggcctgtggagcggggagagcgcagtctgggctcacgggctgggggccacggaggcccagatggggactctggctccgactgtcctgacccagaggctctagggcggtcctgtctgtctcaccccgggggcggggaggacgcagacagaccccagcgccactgccgcggggtgccttagacccaggtcctgtgggctctggcccgagacccctgcctctggggaggccggtgaccgggacagtccacctcgcaggcgcgccggcgcggagcccggacctcggcccgcaatgactcagcaagggccggtgggattctccgtggtcctgcgatatccagacggcggagtctcgcaggtgcgagcctgcaaaaccctccttggagtctccgcagaggagcggggcgcgcctcctgaataagcaggcggcggggcgcggggcagggcggggcaggcggccaggccctctcgggactgtcgtaaaagggggcggagcgcgccgcgcgtgggacaatcgtaaaaggggcgggacgcgccgcgctcgggatg

SEQ ID NO: 27821 - DNA, 432 bp, Homo sapiens
  source 1..432: mol_type = other DNA
gcaatgcagactgctgtgagcattctgccagaaaaatgtactccaagctctggcgtcatcactgtgttcatggcagagctctgtgccgccaggactgggccgccacccagaccttcctttcccgccccaggggtgaactgtggacaggaccctctggggggactaggccaaggctctcccacctctggggacccgcgcccatgggcctcagatatgtgggggcagggcccctggtttcctgcagacagatgtgggcaggaacccacccgactcccagctacgtgggccccgcaagagcatggtgggtgccggagctcccggctgtgggcccaggaactacatttcctacgttcgcgtcgggacgcaagcaccggcccgaactccgcctgcgcggcgcaaacgctcccgggaggtgtagtttgcgcctatttc

SEQ ID NO: 27822 - DNA, 561 bp, Homo sapiens
  source 1..561: mol_type = other DNA
ctgagctgggttatcacctcagccttggtcccttaccccagctagctcacgttcagcgcaggatctggagccgagtcagccccagcagtgggcgctgcggcgcggccaccacgggtcctatcccccatgttgtgcaacatgagagagcccggttctgggaccctggaccctgggccctggccgcgggtgaggggtgagggtagggggctaggggggcggctgtggcatgccttgaccctatgtcccggcagctgtaacgtgacgtgcccgcccggactccacggcgcggactgtgctcaggcctgcagctgccacgaggacacgtgcgacccggtcactggtgcctgccacctaggtcagcgcaagggcgtgatgggcgcgggcgcgctgctcgtcctgctcctcggctgctgctgcgcttgccgcggcaaggaccctacgcgccggtgcctgggttcaggccgcaccctctgggtgccaccggacccagccgcgcccctgccccggacgtggccccgccccttctgtgcttggctccggccgagatctaatcgcccctgg

SEQ ID NO: 27823 - DNA, 564 bp, Homo sapiens
  source 1..564: mol_type = other DNA
tcggtccgccccttgcgagctctgagtgcgcaggagtgcgcagggggagctgaccgcacaccccagcactacaaggacttcgcggtggggtgctgtgcgggccccactcccttggccggttccgaggcgctgggagcgggggtgggcttgcggagtcgcgtccgtgtccccgatccgccttcccgtcccgggcctggcctacgcagtgggcgcgcaggggcggctgcaggcgcgggaaccggggattcctcgggcggaccctccctccagcgggcctcctccaagttcgcccccaagtttgcgagcggccaaatgggggcggggggtctggagcgcggggcgggcgctgccgcctggccggccgcggctggcccgggatcagggagccgatgtggaatttcctgcccggctcggcgcccctcctgccgccccccgcccggcctcgcactccgcttccggccgctctcgctgcggccgcacccgcgcccgtgcccgccccgcgcctgccccgcgcctcatggagggcgcagggccccggggggccgggccggcgcggcgccgggg

SEQ ID NO: 27824 - DNA, 454 bp, Homo sapiens
  source 1..454: mol_type = other DNA
cagttgccccccggggacccgcaccctgtcggtccgccccttgcgagctctgagtgcgcaggagtgcgcagggggagctgaccgcacaccccagcactacaaggacttcgcggtggggtgctgtgcgggccccactcccttggccggttccgaggcgctgggagcgggggtgggcttgcggagtcgcgtccgtgtccccgatccgccttcccgtcccgggcctggcctacgcagtgggcgcgcaggggcggctgcaggcgcgggaaccggggattcctcgggcggaccctccctccagcgggcctcctccaagttcgcccccaagtttgcgagcggccaaatgggggcggggggtctggagcgcggggcgggcgctgccgcctggccggccgcggctggcccgggatcagggagccgatgtggaatttcctgcccggctcggcgcccctcctgc

SEQ ID NO: 27825 - DNA, 343 bp, Homo sapiens
  source 1..343: mol_type = other DNA
tgggaccaggctttaagactgggaattagatttactgcaaaatctcagtcactctggcggtgttaatcccgcagggggcgcgctacggtcagcggcaccgaccgcggagggagcgtcggccccgccaagtgccaggtgccgcgctagtgcggggactcactgagccttggcgatcgctgctgtcctccgcagagcgccggagtggagccgccccctgtctccccgccccagggccgcccccgcgctgctacccggccaggccgggaacccccgggcctacgtctggcccgcccggcgcctgcgcggcgcacccacgtgacggcccaggcccccgccccgccgg

SEQ ID NO: 27826 - DNA, 299 bp, Homo sapiens
  source 1..299: mol_type = other DNA
gggagagtgctcactcctcgcctggcacttaggcttcagtaggtgccagtccacagtctcctgaggcccatgttggttggtgtccacctggtgcttattgaccacttgcaacccccactggtcgctagcaggcagttgcatgaaagcagatcccaatgatagaggcgcaggtctgctgcgggagcacctgccgtgtccgacagctgcactggaagaggggcgtgtgtctcccagccgggcggaaccgagaccgcttcgtccccggcggggaacctcggccgaggcactgcggacggctt

SEQ ID NO: 27827 - DNA, 145 bp, Homo sapiens
  source 1..145: mol_type = other DNA
tctcagccactcaggaggcagtgagctgagatcgcaccactgcactccagctctgtcccacaggcagatgcatggtctctactttcagctaccctcaatgcatgcatgctaacacaaagtgtcagctctaagaactggagatgag

SEQ ID NO: 27828 - DNA, 564 bp, Homo sapiens
  source 1..564: mol_type = other DNA
ctctttctggctcactccggaaggaatggccaaaaccctgtgccagattttgcacaggaaataatgtcgacctgctgttcagaatttttactcacctggacagaaaatataacagattgttaccaccatcgagtcactaaggtaattctcaaaagattgtgagcaaatcgtacatgagggccagggacctgctggtgctggcggccgtggcctcagccctgcggaggacctcctgccgcaagtactgctgcctgtccgcgggcgcgtcgggcccgtcggggaggtctcgggcgtccctccaaggggccggccgggcgccttcgtcctccccgtcgtcgggcgcggctctcggtctgggaaacagaaggaggagccccactgccgccgccgtccagggcctcgccccgcccgccgaccccgcggtcgtcgcgcgaactccttccgcgcgtcgcgcgcaggtggccccgccctcggagccgaccatcgcgcaggtcggctggggggggcccacatccggcgcgcgcaaccgccctgcagcggtgggcccgccccgcagccacgccc

SEQ ID NO: 27829 - DNA, 497 bp, Homo sapiens
  source 1..497: mol_type = other DNA
cagaaccccaggtcttgacccctggtcctcggctcagcggccctgcaggccccgccggcgccccctcccgcacaggctgccggcgagcccagcctcggcctcccctctgcaccgccagggagcgggccagtgacaggacccgcgaggcgctggagccggagccggagcagccgccgccgcctccgcctccgcctccgcctccccgggccggggccgccgccatcacctcacgagccgcggcgctgcccgccggctccccgctcctggcccgcgagcgcccgacctcagggcgcaggcgtaggtgcatccgccacgtggggcgtggctgcggggcgggcccaccgctgcagggcggttgcgcgcgccggatgtgggccccccccagccgacctgcgcgatggtcggctccgagggcggggccacctgcgcgcgacgcgcggaaggagttcgcgcgacgaccgcggggtcggcgggcggggcgaggccctggacggcgg

SEQ ID NO: 27830 - DNA, 404 bp, Homo sapiens
  source 1..404: mol_type = other DNA
cccagctactcgggcagtgagccgagatcgcgcccctgcactccaacctggttcggggccacgcttaattgagtcaaggcttccttagcctatcaggccacctggggactgagtcattcagtcagtcacctaggcccatcgggacctgtcagtccttgacctccctcaggcccctaggctggccaggtcgcctcagtgccacgcctccctggcttcgaaatcctgccagcgctgggagacccggcagccgcagcgcccccagcggcgcgcagcggcccaggaagagagtgcctaccgccggcgcctcttcagcctcctcctggaacgcgggagcgggcgcgaccagcgcccaccctgatcgtcgcgacggtgctcgtaacgggagggccccggcggccgccggg

SEQ ID NO: 27831 - DNA, 514 bp, Homo sapiens
  source 1..514: mol_type = other DNA
gcagggcctgttcctgaccctgaacgagaccaggactcccggctgggcctggcaactttactgctgtcattattgtcctccttacaggagaggagcacacagcctctgtgctccagcctgcttgaaagacaaggtaatcagccctaatagaggggaggctgatcagggagggcctcctggaggaggaggcacaacatcagggtgcactgtgatttctggataataaaatataattggaacctgaactcccccacgcgccccagctgggcatccctgggaggtcgcgaggatccccggagacccagactcgggcccggggcgcccccggccagagcggcccctggctgcctccctacgccccgcgactccggtccggacgccgagggcctcggcctgcccctgtcccccggccgccccccacctgctccggcccggcggggcggtgctgggcccgcgggctccccggccgcagtgcaaacgcagcgccagacacgccccgcccgcgcctccccgc

SEQ ID NO: 27832 - DNA, 509 bp, Homo sapiens
  source 1..509: mol_type = other DNA
gccccagtggctgtgggagccaccgcctcctccggaccgacaggcgcaggggccaggcaccaagggtccctctccaacctgtcctggtatctggaccagaccaggtgggtctcagccccacctcaagtgagacttcaggaagaacttccagagccacctgtaggctgcatcttccggaaggcccaccctgtagcctggaaggcccctcccccagggcaccttgcagggccttagggtgattgggcccctgcccaccttaaaactgatcaaggtgggagggtggctgttgggcatgactgcccacaggcctggtgggcgcaggcgtggcagggctgtgtgcctggccgggctggccgcccacttctgttcaccacagagcagggtttccctggggaccagtggactggcccagccccacaccgccccccagcccctcctggccacagcttgagctgggaggagggtggaggctgggccgcctcctggacccctgccctccctgcccggcc

SEQ ID NO: 27833 - DNA, 439 bp, Homo sapiens
  source 1..439: mol_type = other DNA
accaaaagtccaaagtgttgctaggttgtaagtaaccaaggcaacttatcagccaagtataattaggatttttgaagtacatccaactaccacactgatacgtctgattaggattctttaaggaagcaatcaagtggctagctaggtgttcccctgcaccagtcagctgcaggtgcaagtgagcactcttgacctctggggagaccaggaggagtagccacacgtgtcaggggtccccagggcaagggttctcacggccctgggtcccgcagggcgcgtggcagcccagcggagatgagcactgtgccctacctctggaccgccatgtttggcaagagcctgcgctacgcgggtaaccccggggcctcggatgggggcggggaggaggggatcctgtgacgtctcgttccctcccccggctcacgtgggtgccacccac

SEQ ID NO: 27834 - DNA, 362 bp, Homo sapiens
  source 1..362: mol_type = other DNA
ccaagggcacaggccaagccttgggggcaggtgccagtcccaggatcccccagggcagaacctgagccctcccagtgcttgccttcagccacctggctcccctcctgggaggcctctgctggatccagaagatgctccaaggcctctgctgccactgacagctggcactggaggcaggacaagccctgcctcccgtaaaattaaaacgcacaaatttgcagatctgtaattgggccactgtgtcctgagacagaccggctcctcgccgggctgcctctcagtcagtagttgagccgcctgcagaggccgctgcgagcccggaaccctccatgggggatcccggcagcggcagacgatccagg

SEQ ID NO: 27835 - DNA, 350 bp, Homo sapiens
  source 1..350: mol_type = other DNA
ccgtaaaattaaaacgcacaaatttgcagatctgtaattgggccactgtgtcctgagacagaccggctcctcgccgggctgcctctcagtcagtagttgagccgcctgcagaggccgctgcgagcccggaaccctccatgggggatcccggcagcggcagacgatccaggccggagccacgcgcagacccagggcatgccgggaactgcgagccggccgcgggtcttcgggctgcgtgggcctgggaggcgccgctcgccgcgcggtcgacaaccgcatcctgcgctcgcccgcggtgtctcggcaagcgggcgcaagtgcggcgctggccggacgtgccgcaccgtcag

SEQ ID NO: 27836 - DNA, 464 bp, Homo sapiens
  source 1..464: mol_type = other DNA
cagcctcagaccctgaggcggagaccgcttggcgcctcacttagagcgcgacccggggatgtgggcggagtctgcggctgcgctgaccaatcgagtgtggcgtccatcgactggcgtctgccacggcaattagcgacgcgctcccccgcggcggtcgccccggcaacccagtcgtggctctcctgcgctgaggctcctcgcctgagaggataaactgcacgcgccacgggctatgcactgggctgggcgccttgtgtccagcatcgccgaagctttcaggagggcctggggaacttcgcagagccaggtgaggtcacttcttccggaagctttccctccactcccaccccaggaagtgaggccagagggcagggacagagctgctgctgttctctgtgtgccagggcccagtcctgctttaagcaactggcctggcctggctcgggccctgcttctgttcagct

SEQ ID NO: 27837 - DNA, 374 bp, Homo sapiens
  source 1..374: mol_type = other DNA
gctgagcaacaccacggccatcacggaggcctgggcctgcctggaccataagttcggccaagtgcgccttagtgggaattctccgaggcccgcgaggatctggcagctcgagggtgcggcaggcaaccatctcccagcgagatcgcgccactgcactccagcctggaataataataaaataaaaaataaaatttctgtattgcgatactgtctttgcggccgctcccgggccgctcccgaacgctggggccgctccatcgtggtgggctgggacgacgcgggcgcgtcagaaactcgcacgctcgcgccgcttactaacccagctagctaggacctcgccccgccccgccccggtggcgggggcacctccggct

SEQ ID NO: 27838 - DNA, 400 bp, Homo sapiens
  source 1..400: mol_type = other DNA
ctgaacacatgtctagaaattaaaaaatttggggcgtggggcactggaatgcagtacggatctgctattggggtcccatagggccctcccggcctgccagaggtgcctaggctaggaagggctgccactggggtctgaggagctctactcccccacaggagggctgcaggcgtcccagaagctgcttgcttccttgcacagtctcttccattgtaagagtagaggtcagggaccgccccacccgacctaggctagtcagtcagccggcggtctgaccttctccatctgtgactgagtcacagtcacagggcttccctagaccccggtgagctccggtaacgaccttgcggccgcgcggggggcctgggatgggggcgggccctgcgctcggcgccggcga

SEQ ID NO: 27839 - DNA, 329 bp, Homo sapiens
  source 1..329: mol_type = other DNA
gaagtgcctagacttttgtggtgacatttcaggacaaggtattggcattctggccgaggcagaatgttccaaattggcaccatgctggactgaacacatgtctagaaattaaaaaatttggggcgtggggcactggaatgcagtacggatctgctattggggtcccatagggccctcccggcctgccagaggtgcctaggctaggaagggctgccactggggtctgaggagctctactcccccacaggagggctgcaggcgtcccagaagctgcttgcttccttgcacagtctcttccattgtaagagtagaggtcagggaccgcccca

SEQ ID NO: 27840 - DNA, 641 bp, Homo sapiens
  source 1..641: mol_type = other DNA
ctggggcacaacttcccgctccctagagaagcagtggcggctcaggccagcccagcccctgggaaggctatctgcatggcggccgggagcccgggtcctggtgggccggctcgggcaggcgcttgacccctggggcctgcgaggggctgcggccaccggaaggggctggctgagcgcagcgtgctgggtcctccgcgccctcggagcaggtagggttcgcgggggtgcgcccgcgggggcccgaggggcgctggggtcacgggaggggcgccccttctcttttgcaccccccgggcttccgcccagacccccgagcttgcagtcactgctggctgcgcctttgagcctcgggcaaccgccttcggggtcggggggggccagggtccctgtcccgggggccggtatgcggtccgggtatttcaggggcgaggtcgcggtcctgccctggcgcttgaggtcggagtccggttagatgtccggggtctgggtccccggctcctcccgcgcacccctcccccacggcgccggaccccggcagcccgccccgcctagtgctgggaccgctgtccggcccggccccgcccccgcaggccccgcccctgttcccccgccgctcgcccattcagatgtgggtcaggggt

SEQ ID NO: 27841 - DNA, 284 bp, Homo sapiens
  source 1..284: mol_type = other DNA
cagcctcccatccacttgaagtcagctcagcagccagcccctggagaagagctggcgggggagcagtcagccccaccctgcccgctgcccccagtacctgatccctgggagagtggggcacactttcaccgcgggaagaaagaacacattgggttcctcccttcttgtctcctccgagcctggcctaggacggacccctgtggggcgtgcattgctggctctgaacagaactggagtttacattcatgtatcgctgttttctgggactgctactgggttttaaa

SEQ ID NO: 27842 - DNA, 258 bp, Homo sapiens
  source 1..258: mol_type = other DNA
tcccagctactcgggaggctgccttaggacaacttaaaaacattatcaggtttttatcttttagatagcagagatgagtctgctcttaataagctcctctaggatgggcactccatccgatcaggatgatgtgcacgtattgaattcaaggacagcctacgtaagtgtgcatttgctcaaaagtatatttgagagattcatctgcgttgtttcaaaccatgtgaaagctgtttttttacccctaaaaggtaaattcat

SEQ ID NO: 27843 - DNA, 309 bp, Homo sapiens
  source 1..309: mol_type = other DNA
agccagcagcccacctgtgacaggagcctggctctgctcctagctgtggcagtgtgaagtaaccttggttattcctctgtcacccaggctggagtgtagtggcaagatctcggctcactgcaagcgtggccaggctggtctcgaactcgtgaccgcgtgatccacccgcctctgggattacaggcgtgagcccccgcgcctaaacgctgaggcccagcacagtgggaagcacacagtaggtgctccgctctgctcctgtgccccgccccgcggcccctcccccgctccaggaagtgcgggggctccagc

SEQ ID NO: 27844 - DNA, 476 bp, Homo sapiens
  source 1..476: mol_type = other DNA
ctcaaatgactttctttcattttcttagtgtctagagctcaagaaaaaaaaaaaattcaataggcaatttgaaaaagaataaaaatagctaataatatgaaaattttcattcgcactgctaagaaactactagaatgtgataacattgatataatcatctttatgttctcaaaacaacacacaaaaaagtacaatgctctatcgcccaggctagagtgcagtggtgcgatctcggctcaccaccacgctcctgcctcagcctcccgagtagctgggattacaggcgcgtgccaggctggcctcccaaagtgttgggatattttacatattaaatatcactttgcaatgaatccatcattgccgggtccttgcaggggcagaagtgcagccgcacctgggcgtgtgcgtcggggcggggcccgggcagcgtccgggggcggggcctgggctgtccggcccactcccctgggagcgcg

SEQ ID NO: 27845 - DNA, 423 bp, Homo sapiens
  source 1..423: mol_type = other DNA
cgggcccctgtaatcccagctgctcgggaggcgtcagccgagattgcgccactgcactccagcctgggcgacctcccgtctccaaataaataaattaattaattaaagaatacacaaccatagtgggatgaagctaggtctgtgacttagagccggcactctttccactgcagaggggagaggggctgtgcacaccgcggaagggcaggtgccaccggcttttaggctcccctcggggcaggagcagatcaaagagcctagccccagcttcggtggtgggtggggggtcctcccggcagcggggagcgtgggcaccagcatcctcagcctgcggctcccaggcgagtgaggtggggccaatgtgggccccgcccccaaccattgtgtcggagagggaagtggacgagctcctcggcaagtgga

SEQ ID NO: 27846 - DNA, 606 bp, Homo sapiens
  source 1..606: mol_type = other DNA
tgctctgtgaccccacagaaacagaggtgtaagttttcctcccttgaaggtctactcatggccaggagacctgggacacggtcgcccaggcatggttcagctttgggtgagaggaattcagaaaccccagggtctagggactgtggtgacccggaggtttcattaatcccggggtccagggacttaaggactgatcccgattcagtgaccccgggatctgtcgactttgtgaccacaaaatccaacaacctcaagaccctgcagctgcgggcccaggttctgaggggagagtactgagtgcccggaaaggggcgtcgtgaaaacgtgcctgcagggtcctaggatcctgagccggtgtccagggactcaccggctgcgaggagccgcgtcttctctccgcggctcggagactcagccgcccttggcactcattggtaagtcctcggaagcgtggtccccgcccagctacggctctcgcgaaccgggggcgggccctccccgcgctgacccagtggcagtgcaagcggagtgccgcgcgggccgactattggctgccgcaagcgggcgctgtcagaaccggattgggccgcggcggggacggaagcg

SEQ ID NO: 27847 - DNA, 318 bp, Homo sapiens
  source 1..318: mol_type = other DNA
catgttacatttcagatcagtggttacccaagtggagatcaggaacctagcctaggcaagattaccctgggcctgagtgtagctaggggcccaaggtactgatggccacctgctgctgggcctccgaggggcctggaggcggcgctggccgggcgcgaagcctcaggcctgtaatcccagcactttgggaggccaaggcgggaggactgcttgagctcaagagctccagaccagcctggcctagctaggaccccatactgggcaggcgatccttccgagcatgagcacctggcgcgcacgccaggcgcccgtttccgg

SEQ ID NO: 27848 - DNA, 793 bp, Homo sapiens
  source 1..793: mol_type = other DNA
gccttcaaatatatatattcaaataatacatatctattttcaaataatatatatttttttaaagaagggattggcgcaggctgccggggcgtcgggagcactacccagaggaaggggctttctgtagggtctgacgcggcagtcctggagcagagcgaggggccagacgcagacccggggggtcctccgtggcgagggggccggacgaccgcattctggggacccggccgcggaggggtccggccaaggcgggccctggtcaggcgcacacaagctcgcctcggcctccacgtccgtcccctacaacgcggccgaccgcgcggacgggcggtacgtgcacggcgctggacgaggaggctgcgcgcaagctcgcctcagcctctggagctgcgggccctgcacgccctcggcccatccccgcgagccggaggaacgagtgaaccaccgccagccccgccggccgagtgtccctgcccagccagcctgcgtccgagcgcggcgctcctcgcggaacccgcccctgctctcgccccgccccgcgcggccccgcccccgtgtccctcggcccttacaggctggctccgaggccgcgcccggcgggtcagccaatgggagtgcggcgcgccccgcggcacgtgggctcctgcccgtcccggccgggtgcgagctggcggagctccttggcccggagcgcgcggggcgggggcgcgcggggcaggcgggacgcgggcggggcgctggcgacatggcgcgctgattggccggcgccgcgctccaaggctgttaacggcgt

SEQ ID NO: 27849 - DNA, 299 bp, Homo sapiens
  source 1..299: mol_type = other DNA
ggctggtctgtagagacctggtctacacgcagaggcctctaagtgtggaccacagaaggcctgagctgcggcgctgccgggatatggcgcgtcgtcgggcctcaagcacagcccggggtccctcgctggctctgttcggaccctgctcggtcgctcgcctgggccccagccagtgtcttaagatgcacgtgaccgcgcctagtggcgccccccccctcccgaagcccgccgcttccgccggcccgcgcggccccgcccccagccgcgaggaaccaacggcgcgcgcccctccctccgcc

SEQ ID NO: 27850 - DNA, 510 bp, Homo sapiens
  source 1..510: mol_type = other DNA
acacgcagaggcctctaagtgtggaccacagaaggcctgagctgcggcgctgccgggatatggcgcgtcgtcgggcctcaagcacagcccggggtccctcgctggctctgttcggaccctgctcggtcgctcgcctgggccccagccagtgtcttaagatgcacgtgaccgcgcctagtggcgccccccccctcccgaagcccgccgcttccgccggcccgcgcggccccgcccccagccgcgaggaaccaacggcgcgcgcccctccctccgcccgcccgccggcccgcccgtcagtctggcaggcaggcaggcaatcggtccgagtggctgtcggctccggtcagcgtcggcggctgcaccggcggcggcgcagtccctgcgggaggggcgacaagagctgagcggcggccgccgagcgtcgagctcagcgcggcggaggcggcggcggcccggcagccaacatggcggcggcggcggcggcgggcgcgggcccggagatggtccgcg

SEQ ID NO: 27851 - DNA, 337 bp, Homo sapiens
  source 1..337: mol_type = other DNA
gcctgcagtcccagctactcgggaggctgaagccactgcagtacagcctgggggctcaactggccattgctggaacagtttctcccctagaatcctcagaaaggaggtgcctccttcccggacggatgagcctgcctgggcagtctgggtttgcatccctgctctgtcaccagctattgacggcagaagtctggggcggctccggagcccaggtggagccgcagttcgcctccgtccacgtagccgccagggggcagcagaggtccggccccgccagcctggaggcccgactgcgcctgcgcggcgcccgcggcgcccgcggcggccagggacggga

SEQ ID NO: 27852 - DNA, 502 bp, Homo sapiens
  source 1..502: mol_type = other DNA
ggttaacacgcgtctctactaaacccagctacttgggaggctgaggcgagatcatcgctaaaaaaaaaaaaaaaaatatatatatatatgtatacacacacatatatatacatacacatataaattagctggcttgagaggtttcagtgagccgagatcacaccactgcactaaaataaataaataaataaataaataaataacttaattttagaattcatcttccaaatatattttacacagatcatagatttttttacagcatcgaaaagaagcctgctggtacatttttattattttaattattaacagcataaatgttttcatgccagttttcataatcattgtaatgataattgtcatgattgtctcagggcttggggatccctgcggtccgcggcgtgcaagtgccactccctggggtgctcccggaatccgcgagccacggaacctaagaacgccgacccgccggagccggagggcagacgctggcacaccggac

SEQ ID NO: 27853 - DNA, 564 bp, Homo sapiens
  source 1..564: mol_type = other DNA
catgtaacaccaactgatgtaaaaatcattgttttatgtactcactttttaaaatatttatttctaatttggggagctactaactgagattatttttcatctcactgaaaaacagttttagaatttcctgtagagcatcctattttttctgtttattatatagaaagataacttatataaagtaaaattcacaggtcttaattatacagtttgatctccattactgcagaatggagacattctgttccagtcaatgtagagacacctttctcctacttttgcaaagtggggtggatcatgtgtcactttgcccttggacagagaacaggccgtggtcaaggccctggtccgggcagaagcctctgtcaggacccactggcatctggtcacagacacgatggacctgggcctaggctgtgggtttctcagctgggaaaccaggccagcagctgggctctctctgcacccttggagagcctcaggccaggcccagaccccaccactgggactgacactcaggcacacggagtgagcacatttgcatgaagggcccctctctctcct

SEQ ID NO: 27854 - DNA, 221 bp, Homo sapiens
  source 1..221: mol_type = other DNA
gggttaggatggtccagcatcctgaccccaggtcactgaatgaggaactccctgggacaaagccagtgggacattctgttagagaactggggccatctctgtcatgctggggcctgctactagctcccatatcccccatcctttggccactccaaaattgggagagctaataacacctattcattagtgtctcggtcccataaagaactttttttatccta

SEQ ID NO: 27855 - DNA, 315 bp, Homo sapiens
  source 1..315: mol_type = other DNA
acgctgagatgatttagggctgaaattacctgacagatattgttgatgagcaatttcaggcattcttgaaatgaaaaatttaaagcaatcagtctgctcaatcccagggtgagggctagaccatctgaacatatttcaaagtttaaatgtacagtgagcataggatgctgagcaaaggacaggtcaggggccctgagcacctgtacctgcacctgcacctgcccagggtgcacatccaccagagggcgctgtggtctaagcaactaatcagagctccccccataaccttgtctgaggtcaaaggagggggttgtg

SEQ ID NO: 27856 - DNA, 341 bp, Homo sapiens
  source 1..341: mol_type = other DNA
aagaggatcaggataaccagtgactctctggctacctgggagaaattcctgagatggccccaacaacacagacctgtggggacaggggtcaccataagccagtctccaaacagagcttcagcaagcatagtgggaatcactcactctgcaggtgagagtggaccttacccagggatctgcacccacctccagtgagtgtcagtggtccaggcagggctgactcagccaccctcggtgtccaagggcttgagacagaccgcaacattgttggcaaccaaggagcagcttggctgcagcagcaatctcagagagattctctgcatccaggtcaggcagcctga

SEQ ID NO: 27857 - DNA, 355 bp, Homo sapiens
  source 1..355: mol_type = other DNA
agttggaagtaatacaacttcttatgcgacacgaataaaaatataattatcagttgaacaatgtgccacttattttaaagcagaaacatgcataacgaattcttcaagcttatataacaaatccatagagaggtttttagtgtctagtgataaaagtactaataatattacgtaattaaattccaaaaaattaatacagaaaaatattcttgatttgagtctacatgagctgctgatgcagtggatgacaagctctcaagaggatcaggataaccagtgactctctggctacctgggagaaattcctgagatggccccaacaacacagacctgtggggacaggggtcaccataag

SEQ ID NO: 27858 - DNA, 376 bp, Homo sapiens
  source 1..376: mol_type = other DNA
atcagagactttaagtccaaatttccccttaatttttttttaaatcttgcaggtagtatgcaaacatacatttaatgtattatttttattctcatttgctgcagcctcaacccagctaatttttaaatttttcgaactcctgagctcaaaggccctaacatgccaagctgcacctgctcggtgagccagaacaggggtggggaaggcaccaggccctggtgcttctttcccatgccactctacttggttctagtagccgctctgggcccccagtgtcttctgctgtacaaagcaggtgttttcactttaaatgtagacagaaaatttatttatggggaagttgaggtcacgacccctgaggtaccttaacccaaag

SEQ ID NO: 27859 - DNA, 391 bp, Homo sapiens
  source 1..391: mol_type = other DNA
ccagctaatttttaaatttttcgaactcctgagctcaaaggccctaacatgccaagctgcacctgctcggtgagccagaacaggggtggggaaggcaccaggccctggtgcttctttcccatgccactctacttggttctagtagccgctctgggcccccagtgtcttctgctgtacaaagcaggtgttttcactttaaatgtagacagaaaatttatttatggggaagttgaggtcacgacccctgaggtaccttaacccaaaggcctccagggcactggccccagagtctccaatatggcaagatcaggtaaccgacgttgcgggtgtgccacggccccacctctcagagcagggaggaggatgctgggccagcccttggggaccccag

SEQ ID NO: 27860 - DNA, 567 bp, Homo sapiens
  source 1..567: mol_type = other DNA
tggagtgcagtggtacaatgatagctcactgcatccttgaactctgggtctaggcaagcctcctgcctcagactcctgagtcaattctatcacttgtgttaacaccactgaattttacagttaaaagtgatttaaatggcaaattttatgttgtgtgtattctatgacaattaaaaatacacttgttcaaatgtcaaaatatatatgatgttatattcataaaattttccttttcacacttatatatttatcctattctaactcattctcatcaattaaaaaaagtactgtaattactggtcattatgtactaaattttccataattcacattgaagccttaacccccaatattactgtatttggagacgatcataagtctacaagtgtggacacatcttcagtttgaggatcactgcatcccactgtgggaccccagagggaagcctgagaaatttccaggacacccacatgggctccaggtgaagcaggggcccagaaggccttggagccctgcccttgttaatcaccagccctgggagggagctcactgagggaataagaggct

SEQ ID NO: 27861 - DNA, 479 bp, Homo sapiens
  source 1..479: mol_type = other DNA
atccatttgtcctctccctagacaacgctgcattctgccggcaacaatgtgtgattctagcattgccaaccagcaaagctcacccaggcttggtgtccagtagaccttgatgaccatcctcatcacttgagtttccactgaattgacaataaaacttcaatcttcaacctttggtcattttcttttaaaaaattttctaaagaaaattattttaaaaagtctcatataaacgagctgtttatccaatatgtttcaaaaagtcagtaggtcattaaaacaattatttagtcattcaaactaaatatttagtcattcaaacgttgttatctggtgttcagatagcaacgaacaccatggcaatgtccaaagacaaatcaatagttatttgttaagtggtctgggtctcttggattgtaagaagctcaagaggttcaaacttagccaccctgggctggccccccacagtgtagctgctctca

SEQ ID NO: 27862 - DNA, 438 bp, Homo sapiens
  source 1..438: mol_type = other DNA
accaagttaaaattttaattcttcccatgttcaaagactgaacatctttgctctttttgctcataagtgaaccacagactggcattcagtgcttggaggacagactcaaaaaccctctgggaattcctccccagggcatcccagagggaagagctccctttctcctcagcgcagcaggatccacagaggaaggcccggtgtccaacactggtggggccggtccctgtgtagacatcaccgtcctctacactcctgaggagtccaggtcacggagacacaggtgccaccttactgggccgggacttgctcagaggctctggtcacctgatcatcagaaccaggcacctgccctgcctgatgtcctctgctcagggctggcagctaagcccaggagcctgacccagggctcagggtgggtccccctctcagagtatgaag

SEQ ID NO: 27863 - DNA, 312 bp, Homo sapiens
  source 1..312: mol_type = other DNA
acaagctaaagttttaattcttccatcttcaaatacggagcatatttgcttgttttgctctttagcaaaacactgcaaagtcattcgccaggatctcctgcagactggcattcacactgcagccggtgtccccaaggacctatacagcctggcctggccctgattgtctctgagaggctcttgtacaatgtcgcaccatggacactagggggcgcctgcgcaccagagcaggaccagcgccacctgtcctgttagggctcacagatgtcatctgacatcctcaggcagagggggaccctccttctctcagag

SEQ ID NO: 27864 - DNA, 359 bp, Homo sapiens
  source 1..359: mol_type = other DNA
ggcgagtagctgggactacaggcgcctctggaaatttttctctgatgacatatgtgggcaaatagatttttctaaaagacacctataaaagttatgtatgtacaggtctgcacatccagaccaagactacttctgggagtcagagaccagctgggttctgacgatgttgtggggctgccctgtggttccgacacagctgctcagtgccttgagggccctgtgctcactgctcggcagctgtgtcccctctggcctggcagagttccctgagcagggacctgtgtatggctgctcagtctgcagagagagctgagctgcatccccaggtctcaaggaggggcccggcagtccctggggag

SEQ ID NO: 27865 - DNA, 325 bp, Homo sapiens
  source 1..325: mol_type = other DNA
aagactgagcatctttgctctttttgctcataagtgaaacactccaaagtcatttgcaggatcccctgtagatgggcattcagtgtacagaaaaaccctctgggaatgtcttcccaaggcaccctagagggaagagctccctttctcttcagctccacaggatccacagacgtggccccgcttgtgtagacaccacctgagtcctctgcagtgtcacaggtgggcggtgatgggagcacaaccggccacctgttgtgcgggaccacagggcaaggagcctgacccagggctcagggtggggtcatccccctctcagagtatgaag

SEQ ID NO: 27866 - DNA, 465 bp, Homo sapiens
  source 1..465: mol_type = other DNA
cctagaaaaaaaactcttagttatacagtcaaataattttaaacaaggttgtcaagacttttcagtggaaacagtacagtctttcacaaatatagacgacagaacatagcttattgattttgtaagttaaaaggctgagtaagactgtgagagactctaatccttctgtaaaactgtcattaaaaaaaaattgtctaaagtaaattttttaaaaaattctcacttaaaccagctgtttaaggtcattaaaacaattaatttagtcattcaaataaaaatctaatatcaaattatagtcaaatattgtggcaatgtccaaagataaatccacagttatttgtgaaaaaagccaccagggggtggtctgggtctcttggactgtaagaagctcaagaggtccaaacttcatgaaccctgcacaggtgctccctgggctggcccctcacagtgccatggagagagctc

SEQ ID NO: 27867 - DNA, 382 bp, Homo sapiens
  source 1..382: mol_type = other DNA
tgggagaggtagctgtggacctgctcctcgctctgccctcaccctgctgatggggcatccaccacctggcagggccatgagcagccttgtcctgtatgtgagacacagctcagcccgctcctagagggaagagcttcccttctaggacccggtgtccccacaaatggccacctggcctggccctgacagggggcacagtggggtctctagaggctctggtcaccccatggatcattcctgagaagactgatcagagcagaaccagcccctgtcctgcctagtgtcctctgctcagggctcacagctgcgtcctttacacctcaggcatagggacctgacccagggcccagggtggaccctcccactctcagagtatgaagag

SEQ ID NO: 27868 - DNA, 540 bp, Homo sapiens
  source 1..540: mol_type = other DNA
agaaaataacattatagattaattaaaccaaattgctaaaatagacttttggcagaattggtcaattcaaaaaaagggccagacagtaaatattttaagcttttcatacatggtatgtttgttgttccaataaaactttatttatggacactgaattttgaatttcatataattttcacatgccacaaaatattctctttttagccattaaaaaaacgtgacttagcttgctgccagctgtacaaaaacaggtggcaggctggattcaactggccccagatgtaactagaagaggaccggtccaatggaccctggctgcgacagctctggaaccctgactgcctgggtgcccctcagctctgtggaccgtgatccggaacccaagatcctttcaaggcctcaggggtattggtcgccaccaggggcgtcagagcgcgcgcatgctcctagctcggagccgcgccgatctcgcgccggcacctggcagccaatcgcaggtctccactggacgcgcgcgtgtggaggcgtgcgcgtcggcgg

SEQ ID NO: 27869 - DNA, 342 bp, Homo sapiens
  source 1..342: mol_type = other DNA
ctggttaaaccaagttaaaattttaattcttcccatcttcaaagactgagcatctttgctcttttttaagtgcaggatcccctgcagatgagcatttagtgtacacttaccaggaaaaccctctgggaattcctccccagggaatcctagaggaaagagctccctttctcctcagcgccacaggatcactcctgaggagtctgaagactcctcagtagagccttatcatagaacagagcagaaccagccgcctgccctgcctggtgtcctctgctcagggctcacagctgtgtcctcccaaggagcctgacccagggctcagggtggggtcacaacctcaga

SEQ ID NO: 27870 - DNA, 198 bp, Homo sapiens
  source 1..198: mol_type = other DNA
ttttactttataaagaataagagcatgttggccaggctggtcttttaaagttttatcaggagatggtactttagaacattttaatttgcaaatgattttcgttttaattttgagacgaaatataaatatttcttttctaatctgtgttgcaaagcctgtaaagactttcctttgagtagcaattggaggaaaactttt

SEQ ID NO: 27871 - DNA, 555 bp, Homo sapiens
  source 1..555: mol_type = other DNA
taaaacaatggtcttcttattttgttttttgttttcaccctaaactttataaagtcagaaatcgtaaagccactcaaggacgaacctttgctgaatgcctcaagcagagagggggaggctgagtctctgtttcgaaggtgaaaacacaacggtttttatcagccctgttttattcaatgcaatgaccctttgcatgacccgcagctcactggcatggggatgcctcgcaccacgcggcctgttgctcttagccaccatgcccatcatagcctgtggcaggagatgttggggtccccccccccgacccctttcaggtgtcccgtcccttgaagggccttgaacacggggtggaaaggatcctccccctctgcagaagcctgaccatccccctagagggcctgggaggaagtgggccccctgctggccccagacgcgagttccggcgaggcttcagggtacagctcccccgcagccagaagccgggcctgcagcgcctcagcaccgctccgggacaccccacccgcttcccaggcgtgacctgtcaacaggttgtag

SEQ ID NO: 27872 - DNA, 510 bp, Homo sapiens
  source 1..510: mol_type = other DNA
tgcagcctgctccctgctcaggtctcagaaaaggagagctgggcaaccctcccagggagccgcccgccttttaaaacaatggtcttcttattttgttttttgttttcaccctaaactttataaagtcagaaatcgtaaagccactcaaggacgaacctttgctgaatgcctcaagcagagagggggaggctgagtctctgtttcgaaggtgaaaacacaacggtttttatcagccctgttttattcaatgcaatgaccctttgcatgacccgcagctcactggcatggggatgcctcgcaccacgcggcctgttgctcttagccaccatgcccatcatagcctgtggcaggagatgttggggtccccccccccgacccctttcaggtgtcccgtcccttgaagggccttgaacacggggtggaaaggatcctccccctctgcagaagcctgaccatccccctagagggcctgggaggaagtgggccccctgctggccccagacgcgagtt

SEQ ID NO: 27873 - DNA, 132 bp, Homo sapiens
  source 1..132: mol_type = other DNA
ctgccttggggaccttggccaggctcatggcatccagctgccagagggaccctgtgactgccgcatggcacagagcaaaagtgtgtctgagcaaattctagaaatattttttgcatgaaggaatgagtgatt

SEQ ID NO: 27874 - DNA, 402 bp, Homo sapiens
  source 1..402: mol_type = other DNA
tataatatttaaatggaacccaaatccattaatatttattttaatatggaacattaaaagagttttgttttttaaaaaaaacaaaaacaaacttatagaatgtctatgtgtcttcagtcaaataaatcaaagtaaaatggacttaaatctttcaataagtcattgcacacagaaatgcctgttagccacagggctccccacaacatgtgccctgtgtggatcagggattcgatgctgcagatgcctcagcactggcccaggcctggccaggagctcactcaggtgagggacttcagcagatctttctctcctggtacaaagagatcaagttcctaccatcagctcctcagctgtctgagcccaggctgccccgccctcctctgaggcagagcggataagaca

SEQ ID NO: 27875 - DNA, 541 bp, Homo sapiens
  source 1..541: mol_type = other DNA
ccctgcatgatcaccagcctcattgaggagacactctccagagggatggggattctcacctgcctcaggccacagctctgaccccggacctgtccatgctcagtgacaggacaataaccaggaacgcagagaccatgaccctgggaccctgggaccctgggaccctgggaccctgggaccctggaaccgtgacagaatccatggggccctgctgctttttgcaagtttacataaaacattgatgagaaaaacagctgagggtgccaattgcttatctctatgagaccagaggccctgttgactccacaggggtgtgtggttgcttaaatgacccaactattcccactagggggaggaagatcatgggtccctgggccacctgctgctgagtcaggtgtcagcatgatctctcggcagggcccagctcagccccatggccaaactcctggaaggtccacagctctgctgagcctggcccaggacagaccccaggaagtcaattccagccagctggtttgggtgacatctctccaggaggagt

SEQ ID NO: 27876 - DNA, 353 bp, Homo sapiens
  source 1..353: mol_type = other DNA
taaaatggaaaaaatctttcaataaatcattcaaggcctgttagcaaacctgtgtgcagagtggactctgtggtccccatttctcaggctgagaaccagagactgggaagtccctcccacatgtgccccgtgtggccagggattcgatggtgcagatgcttcagcatgggagaccagagaccagcgccacccagcagaggtttccacggggtgggcagccccattcctgatgagggccaggagctcactcaggtgagagacttcagcagatccttctctcctgagcaaatcaggtaagttccttgactgctgtccctgagcccaggcccacgtgaggggccccgccctcctct

SEQ ID NO: 27877 - DNA, 351 bp, Homo sapiens
  source 1..351: mol_type = other DNA
acaacttagttataatagacagcaccctccaaaattctatgtgcccttggcaaccaagaattgcattctcctctagcacagaggagctgtgccctggaatggggcctgtacctgtccaaggcttgtgccccagacatctcatgtctgacataaaatatttacctcccttctgagccaggatggaatgaaggaggggactgtggaccccagataattcccggtctttatatcccctagaaaatacaagccaaggagcaaggctgggcacaacctgggtaaagatgtgagcccagagcaggggccagccctccagatctcctccagcagcagcctctgactctgctgatttgc

SEQ ID NO: 27878 - DNA, 253 bp, Homo sapiens
  source 1..253: mol_type = other DNA
attcttctcaaattggactgatgtcctcctaggaaggttttgtgagaaaatatgttttatcttcttgtgggagctctagcaaaaacaagagggtgcatctcctgctttctatattacaaaagtcttcttgaggtaacacttgtaaaaattatggactcataagttgtgcacgctcaagggaagacctgctgttgcttcctatgaggccccgatcttgagaatcatgaagagacttcccttcctatgataagag

SEQ ID NO: 27879 - DNA, 408 bp, Homo sapiens
  source 1..408: mol_type = other DNA
cctgacagataaatcacagtaatggaaataagtctttcaataattcaaacattcacaagtgtgcagagtggactctctggtccccatttctcaggctgagaggagcagcagactcgggctcaggactctggccctggtcagtgccagggtccctcccacatgtgcccgtgtggatgtgatgtgctccagggattcaatgcggcagatgcttcagcacgtgccaagcagagggcactgtgccatgtgcccaggcctggagggccacagagctcactcaggtaagggatgtcagcagatctttctctcctgagcaaggactttaatctcctcggctgagccccgctgtccagggaagaagagcccaggcataaaggccccgccctcctctgaggcagaggggataagaca

SEQ ID NO: 27880 - DNA, 521 bp, Homo sapiens
  source 1..521: mol_type = other DNA
ataatgtatgttattatatttaaaaggaacttaaattcattaatatttattttaatatgaatcattaaaaaaatttgtcataaagatattaaaattattttgaggaaaaaaccaaaattgtatttctcgtcagctttaggttgtcctgaggatgtactccacatctctgtgacctgacacataaatcttttaataaatcaaacactggtgaacacagaaatgcctgttaacctgtgtgcagagtggactctgtggtccccatttctcaggctgagaaccagaggctgggaagacaagtcacctgcttgtgaactcggtctcaggactgcggccctcaggaccaatgccacctcctgacagtagggacaacctggatgagagggcactgcagggtgtgcccaggcctggagggtactcaggtaagggacttcagcagatctttctccttcagcgcctctgagcccaggcccagagatttgcatgcaggccccaccctcctctttggcagaggagataagaca

SEQ ID NO: 27881 - DNA, 434 bp, Homo sapiens
  source 1..434: mol_type = other DNA
aaaaaaatggaaataaatctttcaataaatgaaacattcaaaataaaaggcctattagcacctgtgtgcagagtggacactgtagtccccatttctcaggctgagaactagactcgggctcaggactgcggccctggtcggtgctctgcaggatccctcccacatgtgcccgtgtggatgctccagggattcgatggtgcagatgcttcagcacaagccacccagcagaggtttccacggggtgggcagccccatttcctggcagtagagacagccagagggcactgcagggtgtgcccaggcctggatttcagcagaactttctctcctgagcaaatcaggtgacaaacaagaactttttatctcctcagctgagccccactgtccaggccctgcatggaggccccaccctcctctgaggcagaggggataca

SEQ ID NO: 27882 - DNA, 419 bp, Homo sapiens
  source 1..419: mol_type = other DNA
ctcctagaggagatgctctccagagggaagggggttctcacctgattcaggccagagctctgaccacaaggctgtccttggctcagtgacaagagctcacactctgtgcaaaggctgtgtccctgggatattcccatcaatatttcatgtaaacttgtaaaaagcagaaaatggactgagaaccccgatgcttttctggggccttttacaagtttacacagggtgtgtggttgcgtaaatgaaccacctactgctgagtcaggttcatcaaaggcccgcagccctgctgagcctggcccaggacagacgtcatatggccagtccccaggaaggtgactgtgatcacaggcctcagaggtcgtttctgttcttcagtcacctagtttgagtgacatctttcaatctgccccatagggcct

SEQ ID NO: 27883 - DNA, 464 bp, Homo sapiens
  source 1..464: mol_type = other DNA
tgctgagtcaggttcatcaaaggcccgcagccctgctgagcctggcccaggacagacgtcatatggccagtccccaggaaggtgactgtgatcacaggcctcagaggtcgtttctgttcttcagtcacctagtttgagtgacatctttcaatctgccccatagggcctgagcccagctgtgctgtgggctcaggaggcagagctctgggccaggccctgccccaggctcagtgccccctgccctgaaccctgtgcaaagcccagacacagtcttagggtaggacccctgggaatgggctcttgatctctctgaggcctcctatgagctgacacagccaccctcggtgtcagtgtccccaggacaaggccaggcccctgtgctggtcatctatgaggacagcaaacgaccctccgggatccctgagagattctctggcatggccaccttgactatcagtggggcc

SEQ ID NO: 27884 - DNA, 312 bp, Homo sapiens
  source 1..312: mol_type = other DNA
ccatctgtctcctgggaaagctgccaaagaggcacaaaatagttgctcattaacttctgttgacttaattaagtttttaattccttgatttgttttccccagcaactgaagacaacttagtcatgcatgtgcacttggcaaccaagaaattttatggggtctgtacctatccaaggcacatgagtgtcttcaaaaacggatttaggcctacaccccctccctcctgagccagaatggaatggaggaggggactggggaccccagatgatatctgcagctgagggtgagagtgcaaggccactcctccccctc

SEQ ID NO: 27885 - DNA, 368 bp, Homo sapiens
  source 1..368: mol_type = other DNA
tgtgacctgagtagtaaatctttcaataaaccaaaggcctgttagcaaactttctccatttatcaggctgagctcatgagcagcggactcaggctcaggactgtggccctggtttcacagggtcccacccacatgtgcccgtgtggatgtgggcagatgaggctgccgctgggcagaccagggaccaacgccacccagcagaggcttccagtggggttgggcagccccattccaggcctggaggggagctcactcaggtgaggggcttcagcagatttttctctcctgagcaaatcacgtgcaaagaaatcaacttactttagtctccttggctgagccccgctgtcaacccgcccttctcaggggca

SEQ ID NO: 27886 - DNA, 278 bp, Homo sapiens
  source 1..278: mol_type = other DNA
cacataccacatactgggggtacataggcacagcacctgtgccctaccctaggagctcacagccaaggacactccgtgtaggtccctgcatgtgtgccagccttacggtgtcacctgtggaccacttctggattttgccacaaaatatttagggacaggacactggccatctccacgcaaagaattcctctcagagttctcacacagctcctcctgcagcagcccctgactgctgatttctgcccagcctgggcctcaggaagcagcatcggaggtgc

SEQ ID NO: 27887 - DNA, 468 bp, Homo sapiens
  source 1..468: mol_type = other DNA
tcagcctgctgaagctctggtgtgggagatgtcctccaccctgggtcaggtgactcaggggaggttcctgggcctcaggatcctccctctgaggccaccagggggcgggggtggcacatgcctggacctgggaggtccctgctgggcttcaccctgggtgggtcctaggagctccttcctcctaagtccccctaaagagacagaggcattctggggtcctaaatctgtcatgcccccataaatgcatttctacgaggagcagcagcttcaggcgtctgcagacacccggggctgaaggggactgaagggtccctgtggggccggaggggagagctggggtgtctcccagccactctgggcccccaggcactgtcatgggctgagtctcaggaaatccaagtcaaggagtttcaatccccctggtttgcatggaggccccgccctcctctgaggcatcagggtaagaca

SEQ ID NO: 27888 - DNA, 387 bp, Homo sapiens
  source 1..387: mol_type = other DNA
catttcctcatcttcaaatgtggaggacagtagatgagcttgtaaagcaataataatgtaatgcattattattgtattatgcatcatattcccatattatagtcattctcacctgtaaaacgtttattcaacacccactgagtgcttagcaaacacatggtttctagaggtaacctaggtctagaggttgcctgactcaggaaaacccagccaagaaagggctggtcccaactggctggagtgcagtgtacaggcacccagcctggaagaaccccctgagctcaagcccttggggactcctgctgggcagctctctaggccctagggagatgctccacagaccggtgtgcaccacccaggggcggggccaggcagccggctgtggtg

SEQ ID NO: 27889 - DNA, 498 bp, Homo sapiens
  source 1..498: mol_type = other DNA
gagatgagggactcctggccctgaggtccacagataggctttgaaattgaaaacagaattttgcagccccttccgtgtgccaggattgccagggacggggggcggcggcagagatgactaatgctccctcccatcgctgcctcaccggtgtaaatcgttagggtttgcataggcctttcacacgttctgaaggattggtgagggaccatggctgggctcaggcttggtttcccgggctgccagaggtggcccctggggctcggctaccaggcctcagcgcagcggagtcggtggaacgccggcgcggggagctcttgcgggactgcggcgcgcgcggagctgcgaccccgcccctgtcccgggctactggcccgtccgtcagctgcctgtgcccaatggacagagggccggcgctcgtggcggggcggaggtgcccggcgcgtggtgcccggcgggcgcgcggcacccccccgcccgcggttggcctggcaacgggct

SEQ ID NO: 27890 - DNA, 219 bp, Homo sapiens
  source 1..219: mol_type = other DNA
catacttcactccttcagggagaaggaaggtttcatggacccaggggacagctacgctggccagcctgcctaatcccccggccgcctataatcccagctgcagtgagtcaagatcgcgccactgcactccagcaggttacagagaagggcgtaaataagtcacttcctttcccttctgtacaaagctgagcttttgcagccggccgcagccttgggctg

SEQ ID NO: 27891 - DNA, 326 bp, Homo sapiens
  source 1..326: mol_type = other DNA
ttaatggacttgaatataaaagcactttcaccatctcaggtgatccattgaaatagatagttagttgagtaaactgaggtgcggaaggtggaacaactcacctaagttcaccccctaagcctctcccaaggactggggaggattccttgagcctaggagttcgagtccagcgaaaagttaaggagctgaattaagtaggttctcaaactgaaccccggacttcggaggaaatcactgactcaggtcagctttttattaaaactgctgctcttagccccacccagggctcaggctccgcccccgggcctgttgtcatggtgatctcc

SEQ ID NO: 27892 - DNA, 352 bp, Homo sapiens
  source 1..352: mol_type = other DNA
agtaaactgaggtgcggaaggtggaacaactcacctaagttcaccccctaagcctctcccaaggactggggaggattccttgagcctaggagttcgagtccagcgaaaagttaaggagctgaattaagtaggttctcaaactgaaccccggacttcggaggaaatcactgactcaggtcagctttttattaaaactgctgctcttagccccacccagggctcaggctccgcccccgggcctgttgtcatggtgatctccggctctccagggtgtccaggagtctctctgctgccagccccgcccagactccaggcagggccggtgcaagctggatgcttggacgcgccgctg

SEQ ID NO: 27893 - DNA, 379 bp, Homo sapiens
  source 1..379: mol_type = other DNA
gcagagggcagcagtgagctgcgcaccgcccacccagcctagaaactggggcccatgggcagttctctaccagcctgccggaggctcagagaggctgaaagccctgaacccaagcagggctggcctggctactagcctgggctcagtcctttagattggacttcaaagtatctgctccagatgcattgggaggagggcatgatttggaggcagatgtgcttctcacttcccagcgggctggagtccctgcagagtgctctccactgtgtctcagatctctgtgtccccagagaaccatcactgggctgtcttccacccagccctgtgaacctcagtgcaggttggccgcccccttagagggaggcagtgacctctggag

SEQ ID NO: 27894 - DNA, 808 bp, Homo sapiens
  source 1..808: mol_type = other DNA
gcaggtagatcatgcggaagcgctcctggttcacctcctgctccaggcgccgaatggaggccttgcagcgctccagctcctgctcgatgtcgcccactgagcgcagctccatgcgcgggggctctgagtccgggaactgcgccttccacgcctccgcgaagcccaccgggtccaccatggcgcggccggccttacctgcgccgccgggctgcgcgcggggcccgtctcagcggcggcgcggcgcctcgccagcccggccccgggcgccgggcggcccccatggcccgcgcggcggcggcggcggcgaacaatgcccgcccactccctggtggcaggtgaggcggagcggggcgctcggcgcgcggggcggggcgcgccggggggaagggcgcgggctgcgcgcgccgctattgtgtgcggggctcctccgcacggcgaggcgcgggcgctgctctccgctccgccaggccgccgccagactctggccacggcccgcgcgctcgccccacagccccgccgccgccgtgccgccgccgccgccgccgcctcctcggacgctaagctcagccagccggctctcgccgcactcccgcccggcccgcactctgcgccgcaggaaggggagggccggggggaggtggccgcggcgcggatgacggagccaggcgggcctcttaaaggggccgcgccgtgggcacagggcgggggggccccctggaggcggctcccccatcgagccgccaccctcggactgtgcaactcgcagcccaggggtagacctttccaatacagaggtctgggccagttc

SEQ ID NO: 27895 - DNA, 732 bp, Homo sapiens
  source 1..732: mol_type = other DNA
ctgggtggtccctagtgtgcccagccctgaggctggtgagaggccagacttacctccggaaggtgcccggccagatctgcctggtcttgcagatgcccacgatggtggcctctgacacgacgactgggcagtgccggtgacatggcactgttctgtcggaggactgctgcgagttctgccagagagagcagctcttgtcccgggactggccggagaagtcctcctggccggaggggagtcctgttccaggactgcagaactggcccagacctctgtattggaaaggtctacccctgggctgcgagttgcacagtccgagggtggcggctcgatgggggagccgcctccagggggcccccccgccctgtgcccacggcgcggcccctttaagaggcccgcctggctccgtcatccgcgccgcggccacctccccccggccctccccttcctgcggcgcagagtgcgggccgggcgggagtgcggcgagagccggctggctgagcttagcgtccgaggaggcggcggcggcggcggcggcacggcggcggcggggctgtggggcgagcgcgcgggccgtggccagagtctggcggcggcctggcggagcggagagcagcgcccgcgcctcgccgtgcggaggagccccgcacacaatagcggcgcgcgcagcccgcgcccttccccccggcgcgccccgccccgcgcgccgagcgccccgctccgcctcacctg

SEQ ID NO: 27896 - DNA, 475 bp, Homo sapiens
  source 1..475: mol_type = other DNA
gcctgtcagaagccatgtatcgtacaacatggagtctacagttaaaaactgtattgtatactggaaaattgctaagattagatcttcctcagtaaatatatatacagttttgtgcattaaacagcattttggaccggttggaggagcctcagcccaggcccctgagctcaagccctgggggactcctgctgggcagctctctggaccccagtgagatgctccacagacccagggcgccctcggggaagtggggacatcacctcttgggaccagccccgaggggactcaagcccatccagggcgcaggtgcctccaaaggaaagccccaagggagggtcttggggggccatggcgcatcccaccctctgcctgtggtgggaggtccccaaacaaagcacccagggccccaggggcacacagcagggcagttggcagatgtgcctctgggacagaaccccaggggtaacggtcatgg

SEQ ID NO: 27897 - DNA, 211 bp, Homo sapiens
  source 1..211: mol_type = other DNA
atacacagccataactctctattgagtaaaaaatttgtgtataactacatttggtgactgtcactttgtcacccaggctggagtgcaactgcctcagcctcctgagtagctaggattgcaggtggtagagacaagttttcacggctggtcttgaactcctgacctcagtccccacagactgacctggctgtttcctggtaaccaggtgaca

SEQ ID NO: 27898 - DNA, 538 bp, Homo sapiens
  source 1..538: mol_type = other DNA
ctctccgggtccttgtgtcccggggcccgggcggcttcgcgcggcgacaaccggcgcggtgggaccaccgagacgccgggacctccgcgcggcctagagtggtcccggaagtgcccgcgggccgggggcggggctctgggtgctcgggcggccgcgggctccgcgtcagcagctgctgtggagccaggcagcgtcggccgcgtcggccgcgggttggagcagctcaggtgcggccccgccccgcccgcctgcggccccgccccggcccaggtgagctgccccgccccggcccaggtgagtggccccgcgtccgccggtgtgacctgagtccgcctgaccacctgtccctccggtggccctgggtgtgcgtggggaagcctgtaggggcgccacgtcgccgcctgggcagcgtgtgcgggggaaaccttgatgactaagagtttgcagggtgcccaggccctagggactctctggcggtccaaaaacacttcagataaagggttgctttcacaccactgagttttaaatattggtaact

SEQ ID NO: 27899 - DNA, 420 bp, Homo sapiens
  source 1..420: mol_type = other DNA
ggctggagtgcaatgtcagtagctgggattacaggcgcttgtcacccgcgcccggcaaggggccctcccggtgcgcctgagaggaggcgcttcatggtcttctatttctgtgggggcggggagggccctaacaggaccccggtgcctgtggacagtgacagggtcgacagctctggcctcagtggcttctggcttgcacccagcaccagcgcagatgccccgagtgccggcggctcgaggtcggcccgcccgtccggacctgactggagagactctcctgattcgggtccttgtgtcccggggcccgggcggcttcgcgcggcgacaaccggcgcggtgggaccaccgagacgccgggacctccgcgcggcctagagtggtcccggaagtgcccgcgggccgggggcggggctctgggtg

SEQ ID NO: 27900 - DNA, 416 bp, Homo sapiens
  source 1..416: mol_type = other DNA
cagtgcattcacacaatggattacacacagctatgggcatgaatgaaatattgctgcacacacatctatcattccacttatagttatagttgggactctaatttttgtatttttagtacaaaaaatatggagtttcaccatgttggccaccgccctcagccgagattttctaaatcctgatctgggtgtgtgtgtgtgtgcgcgcgtgtgcgtgtgcgcgcacatgcatgcatgcatgcttgtgggcatacatacatatacataaaatcatcaagctatgcacttaagatttatgcactttactgtatgtagatgctataactgcacatgaggacttctgggctcctattcttggaaggcctggtgccaggaccctgacatttgggaagaaaaggcttggccattgggccccagtc

SEQ ID NO: 27901 - DNA, 324 bp, Homo sapiens
  source 1..324: mol_type = other DNA
ttgcagtgagccgaggtcacaccactgcactccagcgtggtacacctagtcccagttaagtgagccgagatcgtaccactgcattctagcctgggtgacagggagactatttaaaaaacaccaataataataataattaataaacttaataaataaataaataaaagagctagtggccagtgcaagtttaaaacaccatactgtacaagtggttcacaactgcaatcccagcacttgtgggaggctggggctggagaattgcttgagccaatgatggcattcccatgggccccgttaacggatacagggaggaaggcatttcct

SEQ ID NO: 27902 - DNA, 517 bp, Homo sapiens
  source 1..517: mol_type = other DNA
tccagctaaattgcgaggccgcaggcttcaaacttgcgctagatttgaccgagccgggggggcggtcgggccggcccggggaatccggtggggttcagggccgcgcggggggcctcatatcccccgcgggcactgcgtaaggctgccagcattggcagcgcattttggccaacagtcgaagacgggttgggacgccccctcgtgggagttctggggatgggttgctccaggccttccccagggccgcgcttcacttccctaggccaccggagactcccaggccacgcggtggtcagcagaccctgtctggaggggcagagagcggagtccagcctggagcctcgcgtccagccctcggcgctttgcgacactggcccctgtccccagaacccgcacagcctgccaggcgcagggagggagcagggtcccatttccagccgagacccggagggggcagtgccgcctcccgctgggggcgtgttcctgaggccccgcccggggccccgccttttttgcg

SEQ ID NO: 27903 - DNA, 358 bp, Homo sapiens
  source 1..358: mol_type = other DNA
ctgaagaactggccagtccatgtaatcccagcactttgggaggccaaggtgacgtctgtggtcccagctacttgggaggctgaggtagcgttgcagtgagtggagatcacaccactgcactcctgcctgggagacagagtgagactgtgtctcaaaaaataataataataaaaaataaaataatatccctgtcctctcagactctagccaagtctaagactcagagcggcacgggttggccagggtcacccagcactagggactttgccagccccggggcaggaccctgtctccggccctcgaccccgttcacctcccccacccgggccgcggctgctaggagagttcagaaggggcg

SEQ ID NO: 27904 - DNA, 432 bp, Homo sapiens
  source 1..432: mol_type = other DNA
gatcacgaggtggagatcgagaccattacttgggaggctgaggcaggagactccagcctcaggcatgagccgctgagcccagccacagctgcaatttcattaattattcaatcatgattgctttgcgctgtaagagccaagaggcagagccacagggctgggctgcctggtttcactccccactgcagggctcggttaagtgtctctcccttccgttgccaagcctcatccgctgtccctccacagctgcagggacagccgtaggcccggaactgggatatctcttccgggaagctaaggcacgagattggggtcccaaagcatgcccaagttccagtcctggctgtaagactgggaaagccactggtggctcctttaaggggtccgcggaggcgcgcccggccttttgtttgagcggcggcgcgcgcgtca

SEQ ID NO: 27905 - DNA, 342 bp, Homo sapiens
  source 1..342: mol_type = other DNA
cggaaggccaaggccgcagggtcctctgcctaggaaaaccagagacctttatcagcagttgaaactaacaatgtattaataacaataatattatgaccaatggtttaccattagaaagtttattgatgtaactgatctcattaacagattaaaggagaatacccatatgatcatcttaatagcatgcaataaaatacctatttattataactgctaatattttgtgtttttccttaaaaatgcagtgtttttaggaattaaagttacaaatagcatctttgctggattcctccatgcagggcctgagaagccctgggcaatggatcccctggcggcaacccg

SEQ ID NO: 27906 - DNA, 251 bp, Homo sapiens
  source 1..251: mol_type = other DNA
ccacgagtgtccggctggactctaagagacagtgtcttttcaggcaaacagttgtttaataaaccaaaatgcctctccttccttgggcccccggggaagaaccccgacagcggccggcacatttgagtggggccctggacgtttggggaggtttggacacattcccgaatgcctcccgagccagcacggtctgagccggtggtgtcgtgggtccacgcggggcgcgcagcgcctcggatgcggattggccg

SEQ ID NO: 27907 - DNA, 490 bp, Homo sapiens
  source 1..490: mol_type = other DNA
atcccctggcggcaacccgagaccggttcgagagcgctctcccgtcctctggggaaaggtccatagatgtgcacaaccaagggcttggccctccggagaacgcccaggggcagtggcctccgaggttctggcggccggcagtggcgaccggcgcagggacaggggcttggccgagatgaccttggaccagagctcccttccggtcagcctcagtgctgcggcagaggcggatgctggagccgtccttacggcctcggacgcaggtgagctcccagcggcggcgacaaaccccgcggcggtgaccccaaaccccccccccgcggcggcgactcccccccaacacgctggggcgaactcccacgctgagtccgcgcatgcgcctcaggcgccctccgcgacactctagcggcactgcgcctgagcttgagtctcaggccttagtcccggccatcgtttagcgttgcgcgaaccctcagctggtgcggccgct

SEQ ID NO: 27908 - DNA, 375 bp, Homo sapiens
  source 1..375: mol_type = other DNA
gcccttcatcaggtgaagcagaacccctgagtgtggggggtgagggatcagccctcactgtgcacacgtccaggtgtgagcatcctgggggagagcgcccctaaggagctccgaggagctgtggccatgagctcagcattaaagcattattgctttgcatgaaggcatcgaatccttttgggctttcgtggggcagtggccctgtcctctcttggtcccaacctgggtgggagggatcttgatgttcagacccagactccctgaagaggcatctggcctggcctctcctctgcctccttagggagctcctaggtggccctcaggcctggcccctgctgctggccagctgcctggtgcccggggcgctccagctcg

SEQ ID NO: 27909 - DNA, 368 bp, Homo sapiens
  source 1..368: mol_type = other DNA
tccccaggcgggcccagggccccacgtggaggagcctggaagagccaaagccagctactgtcctgtcattcctcatttaaggagtgtttattgagcacccgtgtgcaacagcaatcaatggtgagcgtggtattccaggctgtaattaactgacagaaaatcagtaacaacataattacaggctaccccctatctctacaaaaaattttaaacattagctgggctagctactcgaggcagcaggatcactagggagacttcatctctttaaaacataataataataattacagaaaatgggaggatcacttgagcctgggaggtcgaggctgcagtgagtcctaattgagccactgcactccatacca

SEQ ID NO: 27910 - DNA, 359 bp, Homo sapiens
  source 1..359: mol_type = other DNA
ctgagactggtatatggattgcacctatcagagacccaggacctccctggctctgaggacctcattcattcagcagtattagtcaatgtctcctgcccagaggcccggagctgagcacgttaaagagcaggggttcagggaagttcctgggattcgcaggggcagctcccccgcatgcgggactggagcccttgaggacatgtggcctcagtgcgccgggcttagcggcggttgctggaggaacgggcggagtcgcccagggtcctgccctgcgggggtcgagccgaggcaggcggtgacttccccactcggggcggagccgcagcctcgcgggggcggggcctggcgccggcggtggc

SEQ ID NO: 27911 - DNA, 478 bp, Homo sapiens
  source 1..478: mol_type = other DNA
taaagagcaggggttcagggaagttcctgggattcgcaggggcagctcccccgcatgcgggactggagcccttgaggacatgtggcctcagtgcgccgggcttagcggcggttgctggaggaacgggcggagtcgcccagggtcctgccctgcgggggtcgagccgaggcaggcggtgacttccccactcggggcggagccgcagcctcgcgggggcggggcctggcgccggcggtggcgtcacaaaaggcgggacccaggcacgtagctcagcggcggccgcggcgcgtgcgtctgtgcctccgtgcccgcctccgtgccggacgggttcctctccgagctcacccagcagctggcgcaggccaccggcaagcccccccaggtttgccgggaggggacaggaagaggggggtgcccgcgctgagggagggctcgggcccgaagtggacgttcggggcccgacgaggtcgctggggcg

SEQ ID NO: 27912 - DNA, 584 bp, Homo sapiens
  source 1..584: mol_type = other DNA
ttcactcgcttgggccactggccagagggttcagctagagtcccgggcccagccctggaccatcactgtgccccctggtgagatgccagggctggggacagtcattcctgcctcccgcggctgcgggctccctgcccccatcctgtgcacgaagtgggagctcccgctgtctggcagctcccgctgtctggcagcagctgctctgcaggggacagtctggacggcagaaagtttgggacacctgcaagtgtcacatcccactgggtgaaactctaagatcccttttaggggatccagagctctgaacgaaccctcagatgtccgtgcgctggggcctttccaggacggcggcgcccagtcgtttctgggtcagggcgacgcctggaactgggcagggtccctggcaccgggatcccgaaaagcagacctgcttctcgtgcgttcatagcgaccgccctccctgtagggacgcacggatctggtggtggagtcttggccggcaggactggacaggaaccgaccggggtggtgcgctccaattgggtgctgtccccagggggtggggcctgatcccctatttcccg

SEQ ID NO: 27913 - DNA, 249 bp, Homo sapiens
  source 1..249: mol_type = other DNA
cacccaggctggagtgcaatggcgcgatcagcagctacctcaggtgagcctggcaaagtctggtggacagtggctcacgggacaggtattgtcgtgagcctagccctacccgctgattgcgacttcgaaatggtggcaaatcattcaaaaggtgttcagacctctaatagggctaggaaccccacctggcgccaggcaggagggccggcacacgtgacttccggctgtggcgcctcgcccctttgggta

SEQ ID NO: 27914 - DNA, 418 bp, Homo sapiens
  source 1..418: mol_type = other DNA
ctcccaggctggagtgcagtggcgcgatctcagcacactgcagagtagctggacctcgtgatccgcccgccttggcctcccgaagtgccgggatgacaggcgtgagccaccgcgcccggccagatccctcgcctttcccctccctcgctgccccatggggtatgggagggccattggggcccggggccagtggggagagccaaggtcacatgggctcacatccttgagcgtcggcagtttccccaggctgttgcaagaactccttgctcttgtgctgccctgaagaagaagaagtctcgggcctggctgggcctccctgccctgccacattccggggcagctgggggggaggggaggcaaatgcgtgcattccacgcaagaactcctacagagcagaaggtaacattatcctcctttt

SEQ ID NO: 27915 - DNA, 467 bp, Homo sapiens
  source 1..467: mol_type = other DNA
ccactgccgttggctgcgacctcttccaagactgccccggctggcagtgtggcaggcccgtgtgggagctcttgctggaggcccacaagctcataccttggcgggacccccagctggcccagaagcaggtgcagtgggtgcagcccactccactgcaccctgctgtctgcaataaacacagcatagagtgagtggcactcagtcctctacgtggggctcttccttggccaccaggtacacagtctggccactgcagccaggccaggaagtttctaggctcctctgtgtggcacacaccggctgagtacctgtggatactcccagcctctacttctagaatcctccagggatgaatgaaaatccagccgtgggaattcccaggcataatcccttctcagactggtgtctgtgaggtggcaccacggggcacgggtcacggctgccacacctttgcaggtttccctggg

SEQ ID NO: 27916 - DNA, 291 bp, Homo sapiens
  source 1..291: mol_type = other DNA
actcaacaattttcagaacttctagcttatcagtatagctttattgtactgaactgagttttatttgaatcatctgtgcaagactcaagcagctatgaatagagaggccaggtaatataatgaatgaggatgctcctcctccctgtcaacacaaattcataaactttcttacaacattttgagattttttggtgatttttatttttattatttatttatttattaacttatcagctaaacaaaagattggacaccccgctctatacgagctggtgctctaagcctccagca

SEQ ID NO: 27917 - DNA, 390 bp, Homo sapiens
  source 1..390: mol_type = other DNA
tttgaatcatctgtgcaagactcaagcagctatgaatagagaggccaggtaatataatgaatgaggatgctcctcctccctgtcaacacaaattcataaactttcttacaacattttgagattttttggtgatttttatttttattatttatttatttattaacttatcagctaaacaaaagattggacaccccgctctatacgagctggtgctctaagcctccagcacgcacacgcacacgcgcacgcgcgcacacacgcgcacacacgcgcgcacgcgcgcgcgcgccgcccaagggtagccgtctgcagggccccagctaagcagcccgcggagagcgagcggcgcgtgcgcccccgctgattggctggcacaaccggcaccggagc

SEQ ID NO: 27918 - DNA, 420 bp, Homo sapiens
  source 1..420: mol_type = other DNA
agagaggccaggtaatataatgaatgaggatgctcctcctccctgtcaacacaaattcataaactttcttacaacattttgagattttttggtgatttttatttttattatttatttatttattaacttatcagctaaacaaaagattggacaccccgctctatacgagctggtgctctaagcctccagcacgcacacgcacacgcgcacgcgcgcacacacgcgcacacacgcgcgcacgcgcgcgcgcgccgcccaagggtagccgtctgcagggccccagctaagcagcccgcggagagcgagcggcgcgtgcgcccccgctgattggctggcacaaccggcaccggagccaatgggagcacgccttgttgtcaggcgcgcagccggacggcgcggtggtcgggacagactggccgt

SEQ ID NO: 27919 - DNA, 328 bp, Homo sapiens
  source 1..328: mol_type = other DNA
gccagggcttggggcagcatctctctcaccttccttggcctcccctcagctggagtgggaggagcagccaactgtcccagtgcagctgtgtgcacactggagctgtgagtaccaggggattggccagacgctgtgagtgaggccctcccctcctgagcctccatctgtagcagggtacagtacccgcttccaggccggagagcgaccctccctgagctctgcaaagctgctgggcctcacagcctagctggaagatgaggctgtgtaacagcaaggacagctcggcaccgcctgcagaggggggatataacccaccatgctctctggg

SEQ ID NO: 27920 - DNA, 631 bp, Homo sapiens
  source 1..631: mol_type = other DNA
tgcaagtgtggcaagggtcccttttggacaccttgagaagctgcagctggaccacccgcctgtctggatgtcccccgccctggctgcaggggctcccagaagccaccaagggcctggctcggccttgccttgtggctgggacagccaaggctccccagggtggtggcatctctggagcccggggatgggccctgtctcccttccgggccccccgctgccctccagaggggacccctgcagagctgcctccgccccagggctcagcctgtgtctgacccaaacagctcctgcctccccctgaggatgagttgggtgcacctccttcctgcaggaagatgagggctatgtcagggccacagagtctcagccccgccgggctcgccctgcatgcaaggcggggctgggacccagggtctgagcttcgccctctggacatccggctcatcgcctgccaaaggtcctgtggctggaggctccggcctcctcaccctcccacagggtcccagggccgatccaggcctgcgggccaggaagggcaacttgggccttgctggtccacgcaggcacctgtggggcggtgccgcagagtgcagggcgggcggggccaggccagcagggagtgagcttgtct

SEQ ID NO: 27921 - DNA, 535 bp, Homo sapiens
  source 1..535: mol_type = other DNA
cacgtgggaagaagtccagcccacatcacctgcacccctgctgagcctggtcaacagagcccctcagtggagccaggccagtgtccctagagaggctgcgctgccagcactacaggcagggcgtggcctccacacagcctccctccctggaggtccatgctgcatttccaggacagcaagtcctggacaaatggtcccggatgccaagtgtagtcaccagcatttgatgctgtcaagtccccctgtcctctggcagactgggaagcccttggccaccctggggagttgtgggacccagggggagcagggctccactctgggaggggggcagccttgccggatccaggggagagagttgagcggccccagctctgctttcccagagctgccgggaacccggggaatggtgtggaggttccagggagccctgcccctacctggcaaccgcagtgcagcaggcaccaagttctcctgcacattgcgacagtgtgaccctgggctctgctttgctgcctggcctcctgccagcaacaag

SEQ ID NO: 27922 - DNA, 576 bp, Homo sapiens
  source 1..576: mol_type = other DNA
tggccaggctggtcttgaacaggcctaagccaccgcgcccggccgggcgtgcttaggcatgtggacatccttcttgaccaccgtgacttcctctttaaaaaggagttcataaatggcaatagaatttctttaatattttatatatatatatatatatatatacatatatatatgtatatatatacacatatatatacatatatatatacgtatatatatatgtatatatatacatatatatatacgtatatatatatacgtatatatatatgtatatacatatatatatacatatatgttgctcgcttgtgccaggaggacagggctttgtgttttcctcacttgcatagcacagcattccgctgggcccagtggggcctctgaagggacccgccttgcccggctccagcccaagacctgaggcatgcgcaccggctggccggctactttcttgaccggccaagtggcagagcggctgcgcgacccagtgccgagcgcctgcgcagtgaaggaatgtaggcggggcctccacgacgcctgcgcagacggccgcagccctgctgggcgcgaaggggc

SEQ ID NO: 27923 - DNA, 674 bp, Homo sapiens
  source 1..674: mol_type = other DNA
agaatttctttaatattttatatatatatatatatatatatacatatatatatgtatatatatacacatatatatacatatatatatacgtatatatatatgtatatatatacatatatatatacgtatatatatatacgtatatatatatgtatatacatatatatatacatatatgttgctcgcttgtgccaggaggacagggctttgtgttttcctcacttgcatagcacagcattccgctgggcccagtggggcctctgaagggacccgccttgcccggctccagcccaagacctgaggcatgcgcaccggctggccggctactttcttgaccggccaagtggcagagcggctgcgcgacccagtgccgagcgcctgcgcagtgaaggaatgtaggcggggcctccacgacgcctgcgcagacggccgcagccctgctgggcgcgaaggggctggccaagggcggggcccgcgagggaggccgggcggcccggcaagcggcgctgcggggtaggctgctttcctgaggccggactcaacgggtctcggctgagccaccgggtgagctcaccgcccagcccaaatcgcctcagcgccgcccgcgctgccgcgcccgggcgtccccgcagaccccggcaggcccagcgcctgcgccgtctctgctcctgggc

SEQ ID NO: 27924 - DNA, 494 bp, Homo sapiens
  source 1..494: mol_type = other DNA
acgtggggttacatcctataaacccctcgtatgacaatgtcatgagttgaaaatacgtttattatacctaacatactgaacatcgtagcttagcctaacctaacttaaattagtctacagttagacagaatcatctaacacaaagcctattttgtaataaagtgttgaatatcttatgtaatttattgagtacagtactgacagtgaaaaacaaggtttattgctttcacatcattgtaaagttgaaacattgtaaagtttaaaaatagtaagtccatctgtgtattgttttcaaggttcacccatattataatatatatcagagccaggcagatcgagacaactaagtgccactgcactccagcctgggtgacagagcgagactccgtctcaaaaaaaaaaaaaaattttttttcaacttttctgtagtgacatctagctttcaaacagttttatcacatggtaaaattcttcgaaaacaaatttctaagctc

SEQ ID NO: 27925 - DNA, 659 bp, Homo sapiens
  source 1..659: mol_type = other DNA
tattagcttttttttaaaactgatatttttaaaacttgggaatggtttccttttattggaatagtgtgaaaagtattcttaagataatgtcactttctctcatggctggtattacagctaaaaccagaatttgtccctagtgggtcatgaaattttacctccccctatcttgctatagtaatagtttttcaaatagagatctgttgatagttaaaaaatatttttggcatatagaggctcctgtttctcagaggcctgtgatttattgctggcagctccagcataatagtgaggactcagttggaactgctacccagggccactggcattcgtattctagttatactagttattctagcttacattttatttatttgttattttagtgcaatgattttaaaataaattttcatatatctttggctaaaatttgagtaatttagattttagggtgtttttagtgatcacttttaaagttacagttttgaactaatacttttgtaaaaacactatttgagaattgttttccctttttcagtttgatactggaaccgtcacaaatatgacatcatttttgttaggacaacatgttaatcattaaacaaacggagaaacgaaaatttccaaagtttccttgtaaataatcaggttaagttcaa

SEQ ID NO: 27926 - DNA, 407 bp, Homo sapiens
  source 1..407: mol_type = other DNA
gcagagttgaggctacagcctgcagggctgaggagccctgtactcatcccacctcaggcatttaatcagaccactaaattgcctcatcaaagacatctttaagcgaaacctgtattttcagattacttttttttaaccacaagtttgtggtggggtacactatagcggaccagcactttgagatacaccctgacttggaggatctcatatggagaatgagttgcattttaatacatggtgctttaaaggtcattgattatggtgacagagtgagactccatctgggggggtcattgattaccacccacatcctctggtctgtactgtcaccccaacaggtcatggtagaggccagcgtgttataccaggcccaggcgtgaccacgtaggggcagccatctacagctg

SEQ ID NO: 27927 - DNA, 264 bp, Homo sapiens
  source 1..264: mol_type = other DNA
tgttgccaagaccagcacctgggccaggctaaggcagggccttgaacgccgtgttcctcagcagagtctagctctgtcccccaggctgcagtgcagtggcgtgatctcagctcactgcaaccagcgattctcctgcctcagcctcccgagtagctgggactaccaccgcgcccggccggcaatggggcgcctgtaatcccagctactcgggaggctgaggcaccggagcgctccaaggggcggggaaggggactcccaggcccg

SEQ ID NO: 27928 - DNA, 446 bp, Homo sapiens
  source 1..446: mol_type = other DNA
cagagtctagctctgtcccccaggctgcagtgcagtggcgtgatctcagctcactgcaaccagcgattctcctgcctcagcctcccgagtagctgggactaccaccgcgcccggccggcaatggggcgcctgtaatcccagctactcgggaggctgaggcaccggagcgctccaaggggcggggaaggggactcccaggcccgaggactccagcgcgctggggggccgcaggcgggggatgtggcgcggtccaggcccgtcgcggcctcgtcctgacagggacacctgcgggatcgtccttccaggatcgcctgcgggcctcgcgggccgatgcctcgggtccccctccggcctcggtttctccgcgcagcggggcggggcgggggcagcgcgggtctcaaagctgcctgcagggggcgcccgtgagcggcgcggccggagccgga

SEQ ID NO: 27929 - DNA, 579 bp, Homo sapiens
  source 1..579: mol_type = other DNA
ggcgcctgtaatcccagctactcgggaggctgaggcaccggagcgctccaaggggcggggaaggggactcccaggcccgaggactccagcgcgctggggggccgcaggcgggggatgtggcgcggtccaggcccgtcgcggcctcgtcctgacagggacacctgcgggatcgtccttccaggatcgcctgcgggcctcgcgggccgatgcctcgggtccccctccggcctcggtttctccgcgcagcggggcggggcgggggcagcgcgggtctcaaagctgcctgcagggggcgcccgtgagcggcgcggccggagccggagacccagcggccgccgagacagcgggagccggcgtgcgagcggcaggtcagccggggtgctaggtctggcgtgcggggtcctgggtgccgggtccggggtgcggggtgccgggggtccggggctggtggccgggcggcgtggggccgtcgggggtctcccctcagggttcctttcccgccgccccgagaccagttccccggcgcggggtccgagtcctgccccgcggcggctgccggcactgcctgtgaagggccca

SEQ ID NO: 27930 - DNA, 466 bp, Homo sapiens
  source 1..466: mol_type = other DNA
caggctcctagtaggggcaaaagggcctgctgggtgcaggagaacctccagtcccaggtatggctgcagcccgtgccaatcctgttccagccacttgaggtgccgacatcacatggacaatggggagcctggccctttgaacagggctcaggaccaggagtgacttcctctccaggttgccagtcctgctccatccctcatgtcctggaagagagagaggagtccacgtgaaaggcagcctctgacctcttgtccccaggcaggtggtggcggctggcaacacactcatagggcccccttagctctcatccatttggatccagaccattcacaggctgcatggcccctagaggtcatttggggtccagctgcctcctgtgaggcagctccctccgagtggaagctcacagtcagctgcagcgccgcccctgccctgactgcagctgactggcaggggcacctggag

SEQ ID NO: 27931 - DNA, 672 bp, Homo sapiens
  source 1..672: mol_type = other DNA
ctgtgcagaacctggggctggcggaggaggcctgggcccctgcagcctggactccatggatctggccaggagagaggagcagcagagcagctgcccctcgtcccagcacaggggatgatgggagcccagggaaggcaggaccctggcttcgggcacccagatgatgtttctgtgagttgccatggggatggaagcttgttccaggagtcactgggcaggggctgctgctgctcttctgtgcccactcctcggatgtgccgctgcagccctggtctctggcatcggccgtcacctggtggagaggctgccggagctggccaagcagagggaggggtgtctcctctggcatgggcaggagacttctccccagaggccccgggctggtctgcccgtgtcacaggaggactcgcctctggtccctcagtggcctctgcaaaccctgagccagcctgggggaggctgctcagtggggaagaagcagtggccaggctctgcttggtcaccctgccctgtcagcctccggggctgcctcgtcgcacctgcccaggggtgaggcgggtcccgcccaggactcctgggctctgtgtccgcggggccccgccatctgagggaggtgcaggtgccaatccttcacgtgacgtgacgtggctcaccacagcctgtgtacatgtg

SEQ ID NO: 27932 - DNA, 290 bp, Homo sapiens
  source 1..290: mol_type = other DNA
gcatggcccctagaggtcatttggggtccagctgcctcctgtgaggcagctccctccgagtggaagctcacagtcagctgcagcgccgcccctgccctgactgcagctgactggcaggggcacctggaggcgagagggcttaccctctgcggcagtgggagacaggaggggctggccgagatccaggacccaggagactggagaccacatctgatccttggccctgagtccagagtgctggagtcctggcaggggcccagctagggcagtactcattctgcagagcctgg

SEQ ID NO: 27933 - DNA, 642 bp, Homo sapiens
  source 1..642: mol_type = other DNA
tcacccggctgcccgccgaagtaagcgggccttactgctctaggaccccaaagaagcaaaaagtgcccatatttgcacggggccctagggtgcagggggcgcgccctcacccggggaccccgcatcggaaccgcaggcgagcaactgaccttcggctccagcggccccaaagccgggggtgggaacgcgcgacccaggtagcggcatggactccgagcctggcccctcgggggttaactccaggtgcagccgccgcgtgcccgtgggacactggtagtcctgtgagggaggctggcccggccggctgccctacggtgcggacaggaggtcgcggtcgggaggggccctgcccggcggttgctgctggaaccagcccccgcaagggcccgcagcggccgggccgtttacctcagacccgcgccgcagcctcccggagcccgcgcccaggactccctcacgacctctccagggtcccggcccgacaccaaggggcaggtgaggggtggaacctggaggcacccgcgccagggcccctgagggaggcgggagggggacagcctcagtcctgactcgcagccgaggcgcgacgactccgcgcagtcccgcctgtggaggggcgtgcctcatcgcttgctaaccgag

SEQ ID NO: 27934 - DNA, 725 bp, Homo sapiens
  source 1..725: mol_type = other DNA
aagtgcccatatttgcacggggccctagggtgcagggggcgcgccctcacccggggaccccgcatcggaaccgcaggcgagcaactgaccttcggctccagcggccccaaagccgggggtgggaacgcgcgacccaggtagcggcatggactccgagcctggcccctcgggggttaactccaggtgcagccgccgcgtgcccgtgggacactggtagtcctgtgagggaggctggcccggccggctgccctacggtgcggacaggaggtcgcggtcgggaggggccctgcccggcggttgctgctggaaccagcccccgcaagggcccgcagcggccgggccgtttacctcagacccgcgccgcagcctcccggagcccgcgcccaggactccctcacgacctctccagggtcccggcccgacaccaaggggcaggtgaggggtggaacctggaggcacccgcgccagggcccctgagggaggcgggagggggacagcctcagtcctgactcgcagccgaggcgcgacgactccgcgcagtcccgcctgtggaggggcgtgcctcatcgcttgctaaccgagaggcgaagggcaaggggcgaagggcaagcgccggatcctttcgccccctccccacgtgagggcggcagaacgtgtcctggcacgtgccgaaggagcgctaaaggccaggggcggtcccacccgcgaagccctggactcacttg

SEQ ID NO: 27935 - DNA, 316 bp, Homo sapiens
  source 1..316: mol_type = other DNA
tcctcactccgcctgccggctgggaaactagggcaccagtacgatagttccggcaccggagggctgatgactgggcccgggggccgccgcaacgacccttggggccggcaaccaaggcggagacgcggggcttgggccctcagaccggggacagcaggaggttgggccaagggccaggcggggcttgccgaagggacgagcctctattcagaaaggggcggggcttccggggcccgcgtcctggtgagctcggccactcaacgctgaggcggcgaatgggggcggggcctccagattcgagacctggaagggctgg

SEQ ID NO: 27936 - DNA, 669 bp, Homo sapiens
  source 1..669: mol_type = other DNA
gggtctccgccccaaaggggctcaggctacccgagtctcggaggccagggcactggcccttccattgctcccaaggcatgggagctcccacggctccagcattctggggaaggtggtgcccctgctacccggaccttcccaccatgctgacaagggtcgcaatcctgcgagtgtcaggaaacccccactgactggaaccaggcgggtgtgggggcgaggcgggagtcggcccaaggtcgcgcgactggaccctgccccgcgctagggaggggtccctttcgttcctagggtgaagactgggcccacagagaggcactgaccgggctcgagcggcggccccgctgcctccgcctccgtcctcatgacccgggcggcgcggggcgcccatggccccggcccagagcgggctacagcttccgcttcggctggggcgggagggcggtcggtgcgtgtcgagttccttctccgccaccgccgccgctgcggaggagagaacgggaggcggcggctgggccgccccaagcgccgccccagcccttccaggtctcgaatctggaggccccgcccccattcgccgcctcagcgttgagtggccgagctcaccaggacgcgggccccggaagccccgcccctttctgaatagaggctcgtcccttcggcaagccccgc

SEQ ID NO: 27937 - DNA, 147 bp, Homo sapiens
  source 1..147: mol_type = other DNA
actctaagtttcaacttaagcaaggctcctttcgcaatgaaaagatagcagcatttatttacaaaacttgttaaaacttctgcaacagttaaaactgctgcaacagtgtttttaaaaaaagaaatgacttcgagattactgccagca

SEQ ID NO: 27938 - DNA, 476 bp, Homo sapiens
  source 1..476: mol_type = other DNA
gcggcgcggggcgcccatggccccggcccagagcgggctacagcttccgcttcggctggggcgggagggcggtcggtgcgtgtcgagttccttctccgccaccgccgccgctgcggaggagagaacgggaggcggcggctgggccgccccaagcgccgccccagcccttccaggtctcgaatctggaggccccgcccccattcgccgcctcagcgttgagtggccgagctcaccaggacgcgggccccggaagccccgcccctttctgaatagaggctcgtcccttcggcaagccccgcctggcccttggcccaacctcctgctgtccccggtctgagggcccaagccccgcgtctccgccttggttgccggccccaagggtcgttgcggcggcccccgggcccagtcatcagccctccggtgccggaactatcgtactggtgccctagtttcccagccggcaggcggagtgagga

SEQ ID NO: 27939 - DNA, 473 bp, Homo sapiens
  source 1..473: mol_type = other DNA
gcgcggggcgcccatggccccggcccagagcgggctacagcttccgcttcggctggggcgggagggcggtcggtgcgtgtcgagttccttctccgccaccgccgccgctgcggaggagagaacgggaggcggcggctgggccgccccaagcgccgccccagcccttccaggtctcgaatctggaggccccgcccccattcgccgcctcagcgttgagtggccgagctcaccaggacgcgggccccggaagccccgcccctttctgaatagaggctcgtcccttcggcaagccccgcctggcccttggcccaacctcctgctgtccccggtctgagggcccaagccccgcgtctccgccttggttgccggccccaagggtcgttgcggcggcccccgggcccagtcatcagccctccggtgccggaactatcgtactggtgccctagtttcccagccggcaggcggagtgagga

SEQ ID NO: 27940 - DNA, 436 bp, Homo sapiens
  source 1..436: mol_type = other DNA
ggcagactgaagccagcggcagatacagcccgcctgctgccagcttgcccagagctgggcttaacggttaacctgactcttgctggggtcagaggtgggggcctgccccaaaccaaacccagggtagagtgcggtggcgccatctcggctcactgtaaccattttttgtattttcaataaaaatgtggatgttagccaggctccccagtcagcactggggccagagggtaaagaggccgagcctggcggctccaggccctcgggttctagcgccaagactgacgcagcagggcctcctccagtgtgatcaggccgaggaacccactggcctcgctccggcgcggggtggggcgggcgctcagccttcggacccggacggggcagggccgcgggcggggcgactaggggcggccccgggagcggggcgcagacagcc

SEQ ID NO: 27941 - DNA, 509 bp, Homo sapiens
  source 1..509: mol_type = other DNA
cctggggtggcccagccaggtcagggcagtgacaatactggcaggctgcagagggcttagaggcttcggcctgccagcgctgtgggggcacccaccccatctcattgaatggggcagagcaggtgagggcatgagatggacagatgggcctcatccccctgcttcctgcctggggggtcaaggaaggaccctcctggattatgtgactcccttcagtccaggtgaccagggtccttgggcccaagctggcctgttaggagaggcatcccctgccctgtcagaccttgtggggcctcagatgcttacatctccccctcctggcgtgggcatctggctgcagcccagctctgtggcgagcagagttcaggtctctcattcagggtttgagaccccaccgggctcagagacacctgcagcctgcagcggtcccagatcacagcctcagggatgggaccaggagccagcccacatccccccctccccccgccccgcccccaggccactagggg

SEQ ID NO: 27942 - DNA, 457 bp, Homo sapiens
  source 1..457: mol_type = other DNA
ctgtccagagccccaggcaggcagcaatattgggtcagccttcatgtccccttctgggctgcaggggctctccggcaccgtagacacatgactcagggagactctggcccatatccttggcagatgagggccacaggggaatgggcagcactgtccaaagtcccctgggctgggtccgcagctgttctggccaagcctgcactgctgggctctgtgagcttgggccagctcaggccctctctgggccccactgcactcagggccccaggccatgttcccggaacacacctggttctggtctagtgccaggggcaccactacagagccagagggaaccagcctggggctcactggagggccctcccagggctgcgtgaactttagtcacgtggtgacaggccgagtcaccatgccaagtcactgttcctcccagccaggctggacctccgtgagaggc

SEQ ID NO: 27943 - DNA, 493 bp, Homo sapiens
  source 1..493: mol_type = other DNA
ggctgggtccgcagctgttctggccaagcctgcactgctgggctctgtgagcttgggccagctcaggccctctctgggccccactgcactcagggccccaggccatgttcccggaacacacctggttctggtctagtgccaggggcaccactacagagccagagggaaccagcctggggctcactggagggccctcccagggctgcgtgaactttagtcacgtggtgacaggccgagtcaccatgccaagtcactgttcctcccagccaggctggacctccgtgagaggcctgcctgtcctgcaccctgtgctcccgtccgccggggctgctgggcacgccctcggaggtggccaccccagtcccaattcggaggccccctgaggagtgctgcagggggccacaggcgtggctctgagccactctggagagtggcggggggcccagccagttctgtggctgggactttcccaggcagacaagtctgtctcttc

SEQ ID NO: 27944 - DNA, 150 bp, Homo sapiens
  source 1..150: mol_type = other DNA
ctgccttggggaccttggccaggctcatggcatccagatagctgccagagggatcctgtgctctgccctaagcctgcatggcacagagcaaaagtctgagcatgcagtgcaaactctagaaatattttttgcatgaaggaatgagtgatt

SEQ ID NO: 27945 - DNA, 260 bp, Homo sapiens
  source 1..260: mol_type = other DNA
gctaatcgctggggttgcagtgagccgagatttccccgctgcactccaacgatgcactccaaaaaaaaaaagaaaaaaaagttttaccaggtctcctgtcttttattaatgctttattgagtaacggaaaaaaaacattaccaggtgctatggtttggatatggcttgtccccaccaaaactgaggctgaaatttgatccccaatgtggcagcattggttgaagcagatgggctgcccagtcttggacttgagatgtcta

SEQ ID NO: 27946 - DNA, 367 bp, Homo sapiens
  source 1..367: mol_type = other DNA
accttttcagaaaaatagccacaggtgcatgtttggctcgtgtttttcccagaaacaacctaaatctggcttgataaaccttgattgattgtaaccagcaaaagggcccagctgctcactgcttgtagaaagaaaaatgataatgacatgtgatttaaaaagaaagaattttataatctatgctaattccactggagtgcagagttgctgggattattttattttttaagatatttatttatttgtttattttttgagacagagtctcactctttcacccgggctggagtgcagtggcgtgatctcggctcactgcaagcctcccgagtagctgggactacaggtgcgcccggccaaagcggttttt

SEQ ID NO: 27947 - DNA, 412 bp, Homo sapiens
  source 1..412: mol_type = other DNA
tggtggcacaatcctcatgcctcagcctcctgagtagctgggattacaggacggagtctcactctgtagcactgtaacctctgcttcccgggttcaagagatccaaagtgttgggattacaggcaagaccctcaataataataattaataataataacagtaacagtggcaagcatttatgctcttaaggctcagatcgttctgagaccatacccattttaaagatgagaaaaaggagggttcaggacggacgctttccttccccgccctagggaagagggagggacgctcgggcgctggcgcgggagggagcgtgcgtgcttggcgcgaaggctcctggcgcaggcgacccggctgccccgccgagcggtggctttccggaggggtggggcggccgcctcgggtcctgacg

SEQ ID NO: 27948 - DNA, 573 bp, Homo sapiens
  source 1..573: mol_type = other DNA
tgctgggattacaagccaggtctatcttgcttataataaaggcacattgattttaggtgtcacagattcaatttgatatactcgtgaaattatttgtttgcctggattttgccagctgcccaccactgggttctccagcacccagcatgcaataggtgctacagcgctccagcgaactctcaggtgcagtgcccttgcttggcgcgaggaggcgccagcaccgcgcacagaccttgcccgcccccgggccggcaccagcagcccaggcaagtcagtgggcccacatttatggagcgcctcctgaaatcctgctgggcagcgggtcggtgcggtgactggggaacatccagggaacgcgggtcgggcctcgaggggcgggagcgcttccggcaggggtgtccaagcgagtcgtgacctctgacccgccggagaggtcccaggcccaggcgccactgcggactcgggtcctgcctgctctgctcccctccgcgcaggcgcggccggcggcagttcccatggtgacgggggcgcgtccccgctcgaggccccgcccccagcaggctaggctgcgcg

SEQ ID NO: 27949 - DNA, 472 bp, Homo sapiens
  source 1..472: mol_type = other DNA
ttcatatacaacctatgtagttaaaaatgaatttgaaaaaatatacattaaaaattacgcaaatgactgaacatcatgaacttaagtttcctctcagggctcactgacgtgcaccatcaaagtcagcgttgatgtgatgagcacaagaagctttttcctaatcagtggtaaaacctgacctgagtgaatataattctactttgactctattttccccactttatatgaatgttcataatacactgcaggaatattatctgctggtggtgttacatatgtatatatatacatatgtgtatatattacatgattatgtatgatgcatgtgtgtatgtataataaatactaaaaattataaattcccaaataaaacatgtaatatgaggctcagaatctgaccctaaataacacaaaaaatctcttttgtgacctaatggagccaaatgttcccactgctgacaccagtactgtc

SEQ ID NO: 27950 - DNA, 320 bp, Homo sapiens
  source 1..320: mol_type = other DNA
gcaaaattatactttgttagacacttaaaaaattgcctgctaaaaaataaaataaaaatacctggatctaccttttttctttggtcataaataagttgactgtgatggtcactttaggtcctggagcaggccaccgggttcacctctctgaactcagtttctccatgtataaagtggaatcagaattcgatggctggatgagaattccatacaatgctgtgatctgacttaaaacttaggccacatggagagctgcacaccgtgccccttgcctggcgctgctacggtggctgaggagacaggcactgggggcctccgtg

SEQ ID NO: 27951 - DNA, 392 bp, Homo sapiens
  source 1..392: mol_type = other DNA
agagctgcacaccgtgccccttgcctggcgctgctacggtggctgaggagacaggcactgggggcctccgtgttgcgaagacaggcgagtctgcagacggccgtggctaaaagccaccctggcaggcccggacctttgtagtttctgtgggacgcatggctggggtcaggtcccagtgagaggaccctgacagcggacccttgtctgcagtggccagggtccaagcccctggacatgtgcttagggcaggggaccttccaaaacagctcctctgagggaggggagtgggcacacatggtacctgccaagtcccccgagagtcccctgtgagctggcagcccgcaggctgtgcatggttaggcccacatccagagtatgtgggctgtgcagct

SEQ ID NO: 27952 - DNA, 259 bp, Homo sapiens
  source 1..259: mol_type = other DNA
aagttggtctggaactcctgatctcatgatctaggattacagccagccctcaaatttttcatctgtaacatggagataataatgctacctatctcataaggttgttgccggtagtaaccggctgttcatcatcctcttctcttgatcattttttgacaagaaggagggctgaagacatgctcctcgcaggggcagggggccaggacccagacactcctgggagctggagagctggctctgtggtcactgcccccaggaa

SEQ ID NO: 27953 - DNA, 283 bp, Homo sapiens
  source 1..283: mol_type = other DNA
gccctgcccaccttggccacctggcacaggccctatttgtcacatgctggttccttgtatatggaccaccaagtggatgcccaacaaatatttgttgaatgaataaatgtctgccatgcctcacggcctgaccagcgtacccctggccctggcagccggacggctgatgcatgcaggcatctccttgcccagccgcctgaccgccctggcgcggacattattgtgcagagacacaatgtctgtgggcatttgctgacggtgtctggggaaggtataaatgcca

SEQ ID NO: 27954 - DNA, 192 bp, Homo sapiens
  source 1..192: mol_type = other DNA
gcctgctccaggtcaccttaacccaggtggcctggctccagagtccatgcactcagcttgctggtgagccaatacatatgtgcaccactgcacttcaaggtccacactgcactgtgcactgtgactggcagggggcgctgaaaccgccttttctgccccacatggtgcgctcaccgtagacgctgcgtggcg

SEQ ID NO: 27955 - DNA, 341 bp, Homo sapiens
  source 1..341: mol_type = other DNA
attcattcattcattcattcaatctgtcagtgctgccatcttctgccctgtgtagccaacagtctagaaggggcaactgttaatactttaagaatccacatgaatctaagctacttcttggagaaactggccaggcagatccttgcaggccaggcctgtgtgtgcagccaggcttgggcttattctaagcttcagtgagcttaagggccttcagtcaaaatttgcttcaggaggccctgcttacccttgggaagtggcaatggttgggaggcttcaccctgcaggtgggttggctactagtaccctggctaccgtgggctgcagtacctgctggagaaggg

SEQ ID NO: 27956 - DNA, 463 bp, Homo sapiens
  source 1..463: mol_type = other DNA
aagctggaaattccccccagcttcggttggtgcgagtgtgctcgcagcagagtgtaagggagtggtgaccttcttaagcggagagctcttccatcagagggctccctaagggcatctctgttcctagccggggaggaggttgggggcccggcccgctgggcgctgttcaccggtagcccggaccagagattacctgctgggataggtgggacacatgtatttccggggccaccccagacctcccccataaccccttgggttgtggacgtctggcccagggcttgtccctcgtggccaccccgaggggagggcgaccgtagagacttggtcgggaggcgccggcccagcgaggccgctgggactgtgcactgaggggcgctgaccgttggacgcgcgctccccgcagaccctcgctgaaggagcagggggcggcgcgcgtgcgcggggcgccgggcggcgcgcg

SEQ ID NO: 27957 - DNA, 291 bp, Homo sapiens
  source 1..291: mol_type = other DNA
gagtctctctctgtcacccaggctggagtgcagtggccttactgcaagctccgcctgtagctgggactacaggtctcaatttccccacttgtaaagtggggctggggagttcatgaaagacctaagcataaggtatgtttacatgcttccagagtctgcctggaatgtagaaccggccagctcaacctctggttcaggggctccatggtctctgctgcctggtcaacggccaccccgggctgccgtctcctggccagacctaatttgaatgactggtcgactcagctgctg

SEQ ID NO: 27958 - DNA, 286 bp, Homo sapiens
  source 1..286: mol_type = other DNA
agctccgcctgtagctgggactacaggtctcaatttccccacttgtaaagtggggctggggagttcatgaaagacctaagcataaggtatgtttacatgcttccagagtctgcctggaatgtagaaccggccagctcaacctctggttcaggggctccatggtctctgctgcctggtcaacggccaccccgggctgccgtctcctggccagacctaatttgaatgactggtcgactcagctgctgggctcggtggggtcccttcgcggccacccggggagacgtct

SEQ ID NO: 27959 - DNA, 192 bp, Homo sapiens
  source 1..192: mol_type = other DNA
aagaaaacccatgattcatggtatacacctgtaatcccagctactcgggtggctgagattacactactgcattccagcctggtggtttcccttcagaaatgttcttgaacttcttataaataaaattataacttttaaatcttgatcagggggcactgttcactccgcggcctgcagggtcctgcctgacca

SEQ ID NO: 27960 - DNA, 264 bp, Homo sapiens
  source 1..264: mol_type = other DNA
gaggcctgtaaagcctgaccggtctgccaaggctacgcagggagagacagtcagtctccaggactgtgcaggcctctcgcagcgctagtgccctgccggcagtgcctggcgaagcaggctggctggatcccagagggctcgggctgctcacgggtgctctccagcctggcctggccaggcagagctgctgggaagggccgacgggccggcggccagaggaggcggctggcacccccggcgccgccgcggcccctccagctcact

SEQ ID NO: 27961 - DNA, 302 bp, Homo sapiens
  source 1..302: mol_type = other DNA
caggcctctcgcagcgctagtgccctgccggcagtgcctggcgaagcaggctggctggatcccagagggctcgggctgctcacgggtgctctccagcctggcctggccaggcagagctgctgggaagggccgacgggccggcggccagaggaggcggctggcacccccggcgccgccgcggcccctccagctcacttcactcgcccgcccgcgcccggcgcagctcggccagagcgaccgcggggctgagcgcgcgtccgcccagggggctccggaagctgccccggcccgcggcctcctcc

SEQ ID NO: 27962 - DNA, 455 bp, Homo sapiens
  source 1..455: mol_type = other DNA
cagagacagatggattgtgggcgggccatcctacccctacccgggggtgagggtcccctcccgctagacggtggctcactgagggcagggcgggcctgagcgctcaccgcgcacgctcagcgcagctggcagggacggggacccaggctggcccatcattactgagggcctcagaagtccgtgttgagtccgacgcgagcctttcttaatgaatgactgcacgcccgtcgccgcctgcgcgcaacctcgggctgggcgggcgctgcgtctcggggcgcactgccaggaccctccggagcggcggcgggcgcggcctcgggtcgcctcccgcactgcgagcgcaggtgccgggtgcaggggggtccccggccccgccccgcaggccccgcccccccgtaccccctcccccggcggcccagcgcgcgcggcattgtgggagttgtggtcttcgcggc

SEQ ID NO: 27963 - DNA, 369 bp, Homo sapiens
  source 1..369: mol_type = other DNA
cattgctttgagactcgtttctataaaaaatttaaaaaaaaatagcagattgagtttgcactgaaccgcaatcgcaccactgcactccaaacaaaacaaaattgaggcctggcctttgaggtgtttgttttatggtcttaaagaggtaatcagataataacattacgtaatatagttatactgcagtgtagtctgtaagagtcttgatatctctgtcagagtttctctgtaaagtttgctcagcaaccgcggagcacactgtgggccctcagtaaatgttgaatgcatgaattcctgtgtgctcagcacttatgaggagtgcatctaatacatccctaacttattttgttatcagagccttaaaagaca

SEQ ID NO: 27964 - DNA, 511 bp, Homo sapiens
  source 1..511: mol_type = other DNA
tttttgtcacaaagacctgggtttgaaatctggtttgagaatcagtgacctgcaatgtttaacataaagtgtgtagaatgattaagctaatgtcaggcacatagcagctgcctgatgatagcagtcacgtgttataatattaatagagtgcttaccacgtgccagaaaatggtttccgtttactaattcattgaatcctcaaaacaaacctacgttctttaatgagctcgttacgaagcacgactccgctgtcagactcgaactccgcctcggggccccggggcgccgcctctctcccccggggcgccgcctctctcccccggggcgccgcctccctccgccgcggccgtcgagccgcggagcgcctcttccgcggagccgccgcctgccaggattccagcgccgcagctgcggccgcagccattggtctctgacgtcagcggcgtgcggcgcactcggcacgtcatcgccgcgcgccggcttgccaggagctggagggggaggtaggcgg

SEQ ID NO: 27965 - DNA, 548 bp, Homo sapiens
  source 1..548: mol_type = other DNA
gcttaatgctttagcaacatggtctcaaatgtttgctcaccattctgcaatctgtgggtacacaatacagtttgttaaaagtctctagagacgacccccattgaatatttgacggcctgtaaaatctctatctctgttactggaaccaaggacagttcccagactggggaggtcctctcttatctctgaaaggtccaccaggaagctgctgggcgcagcccccggggcgcaggcagcgactggtaacagcactagggctgtgcggtgtctggccccagcgcctaaggattaggcggggtcgggtcacgctctaagctgggggcccgcccctcggtatccccgcgctccgagcgccgcccacccaccggagtagccaggcatcccagtgctcggggttcgggactctggaccagaaatgtgggcagcagctgggtacctgcgacttctgccccgtacctgcgcgcgcggcagagaggccttaggtcacgcgccgccccgcctacctccccctccagctcctggcaagccggcgcgcggcgatgacgtgc

SEQ ID NO: 27966 - DNA, 419 bp, Homo sapiens
  source 1..419: mol_type = other DNA
gagcagagagagaaaaattaagcaaaaattaatagctaacacttcttcagcttgaatccttaaccattttgcagaagagattgcactcaaggttggaactccagagcctgtggacacttaaatgtctacaaggagtcctgggcttcccagggagggcccatttagtatattttaattagatcaatgaataaattaatgaatttaccaacctgctatacttgggaactccagagtttgcaggccactgccctgtgcccacgacattattcccatttattttacagatttacaatctcagagtggtaaagtctccttaggccaaggggaggccgattccgcggggaaaccagcggccgctctgcagccatatccgccgtagcgtcccacgctgccctggcagccagcaggacatccgctgt

SEQ ID NO: 27967 - DNA, 457 bp, Homo sapiens
  source 1..457: mol_type = other DNA
tattaatagagacacaggtaatcgcctggtgcctggccaggagtttattaaccttcggaactgaatttcaagtctttatctattttaatttcagaacagatactcattcccattcttggaaaacttttaagtgtgtgtactttgttcaactatcaattttatgaaatctctgtacagattagccatttctactgagaatttagcatccaaatccctgggtttcaaggactaagtaattaaaaaaaaaagactataaactatctcagtaatgtttatattgattgatgataatattttatatatattgagttaaataaaatgttattaaatttacttctgtaacatagcaatttgaagtgtgtctcacactgcatttctattgggctgacatcctctggccaaaggagcctttaggagaggcaggcccatcgcaaggctgactgatccttcaaaggag

SEQ ID NO: 27968 - DNA, 456 bp, Homo sapiens
  source 1..456: mol_type = other DNA
aaatttattttaaacagataatatatacatatggcaaatagaatgaaaagtaagcctgcatgcctaccctaccttttcttcagattcaatgcacaagcatacgatgcatagatagctctattatttttccaattttacacatgaagaagcagaaggttatagaacttagactgtgagtagcctaaatgtcttcagagattcttttttctgtgttttacacaaacagtagcacgaatacaccccgctgcgggtcagaaaggaacttctcttaatccagggcggcggggcggggttcccggggcgagcctccgggaaacttcccgaccagcctctgctcacctcgcggtcccgaggcgcagtggaggggatggggcggggcggggcggggccgcgtatcgggcccgcccccgtacgtcacgtcgccgcggccccgcccccgcgcgggcacctccccct

SEQ ID NO: 27969 - DNA, 275 bp, Homo sapiens
  source 1..275: mol_type = other DNA
agggcaggaggcatttctggccaccagcactgtcctccaggtcagataacgtggcaggcccagagctggctggcctgggctggctctgacccccggggcagcgcgcagtggctgagtcaggattcaaactctggtctgccccatgttggcagccagcagggacccttttgggggcccatccctggctggtctcacaaaggaggcgaggtcagggccccagtcccccactccctgcccaggccccacagactatagggcctgatgtctgccagact

SEQ ID NO: 27970 - DNA, 320 bp, Homo sapiens
  source 1..320: mol_type = other DNA
gggctggatttcatctcagatgatctggtttcctacacccattttacacacaagtatgtatgtatgagggacctcttaggtccctcatacgaattgtacaagtcctggatatttggcaagtgtgccacagtttgcaaagcatgtttgccaggccaggccaattggaaggaaaggaataggcatttcctgaatgtttactctgtacaggcatgttatgtaacctcacaacaactctgtgatatggtttgtttctgccccattttataggcagaaattgaggagctgctgacggcttgccattggctcttcagccagcccga

SEQ ID NO: 27971 - DNA, 464 bp, Homo sapiens
  source 1..464: mol_type = other DNA
gtcctagcctcagagcaaagcatttcctgagagaaaggcaaagagctttgcaatcctgtttccctgtgaaatagggcccccttatcccaggacatcaatcatacatttctactaaatattaataaaggacaagttgattttaaatagccattgctttctaatatgcaaaatatatttatatattcatatatatatatatatatatatatatatatatatgcaatttttatagattgaagggctttcctcaagtatagctttctttaatataaattcatttagatttctaaaaaatgtacttaggagtgagagttagttaatctaatttctctttctagcaaggaaattctatgattcctgatatgattttgtttgcctgacagaggtatttaaatttccacaaagaatcttaataggttttgaaaactgtgctgatataaaatatacatttttaataaatagtc

SEQ ID NO: 27972 - DNA, 663 bp, Homo sapiens
  source 1..663: mol_type = other DNA
tgagcaagcgcccaggtctctcgaggagaaccctaacttcgaggttccccgtggctaacttgggcgccgctagcggagaacggagtgttcaccccccctgcccacccggtgggtctcgctccagttggggggtgaacaaagccaagctcccgccattctcctccgctccagctcgatgcgcccggaggccggggcgcgcccccagcgcactgacgccggaccccgaggagaggcgggcgcaggggaccccagagctggggttcgtggcgggggcttcggcagccaggaccccggaccaccttaagagcgagccccgccccgagcccggaacttgggcggcggcttctcccggcgctgggcgagaggcagacacagagaggggagccgagaccctcggaacgccccacgcagagcccccccgctagtcgggagaggggtgcgcagaccccccagagctgcccccgcgcccccctccccccattccgggctctgagagcgcagcgggaacgcctagcctgctcgcccggcgtggccccccgacccgcgtacgcccccctccctcaggtccgagagggactcgcgaagcaagcgcggagcagggaaccggagccttggagcgacccaacccctcgtctcgctgccctcccgcgcctgcaacggtgc

SEQ ID NO: 27973 - DNA, 567 bp, Homo sapiens
  source 1..567: mol_type = other DNA
gggtctgggtcttggaccgggtggcccagggcaaggtgtgcggcccggcgggtgcgccctcttcggagtgactgtgactccttggagcccacgccggccggtgagaactgagcaagcgcccaggtctctcgaggagaaccctaacttcgaggttccccgtggctaacttgggcgccgctagcggagaacggagtgttcaccccccctgcccacccggtgggtctcgctccagttggggggtgaacaaagccaagctcccgccattctcctccgctccagctcgatgcgcccggaggccggggcgcgcccccagcgcactgacgccggaccccgaggagaggcgggcgcaggggaccccagagctggggttcgtggcgggggcttcggcagccaggaccccggaccaccttaagagcgagccccgccccgagcccggaacttgggcggcggcttctcccggcgctgggcgagaggcagacacagagaggggagccgagaccctcggaacgccccacgcagagcccccccgctagtcgggagaggggtgcgcagaccccccagagctgc

SEQ ID NO: 27974 - DNA, 437 bp, Homo sapiens
  source 1..437: mol_type = other DNA
acagggactgtgtctgcatgcatccgtgtctgacacagagcaagccagcgacctccgggctgcggctttgaggcccacagcccgctttcctgggtctcgaggccaagggcctcttttctcccagagggcctccgtcgggagtgctggccgctcatcctgccgattctccgccgcggtggacctccacgagaccgcgaagcaggtgaacgtcctcccgcggaacctgagctgccaagggctggggaggggaacagaagctggcgtcggctgcctccagaacctgagcttgcgcagccgcagtagaagccgcacgctcttcggcaggctgcgcaaccgcagtggaggcctcgtgtgcccggggtggggcacgaaactgggcggagctaggccccctcgcgcgctgacgcgactggtcgcggcggaagggtgtgcaggga

SEQ ID NO: 27975 - DNA, 372 bp, Homo sapiens
  source 1..372: mol_type = other DNA
agaattctatcaaacaattcaatttcctcaacaagttgtatgcagttactttttgagacagagtctcactctgccacccaggctggagtgcagtggccgccatcactgcttactgcagccttcctgtctcaggtgcctgatactacaggcatatgccaccacacccagttggcctcccaacatgcctggctaggcagacctggtggaggtaacaactattgatctccctacagtaactaatttgttttatgtaacttttttgtatttgtacagtaagaaaatattttaaatggtcaattttcaaggcatgataaatctaagtattggcagctagcctgcaaatgtgaaagtttcgttatggagataaattac

SEQ ID NO: 27976 - DNA, 444 bp, Homo sapiens
  source 1..444: mol_type = other DNA
ttaaccattaaaaccacttaagaggtcttcttcttattattatattgagtccttatatttaggagaaacggcgcctgtagtcccagctactggggagagctcgcagtgagctgagatcgcgccaaagggttagtgggttgagtctggctgtctccgggacgcaggcacgtgcttgcacacctccacgatggccccgccccctcttggcccagaccgtcgtcccaggccccgcgtcgtgggggaagcaggcggcggtgcggagccgggaaccgcgcgctcacccgccgagtccgacgggcccggcgggggtgggcgagacactggggcggccagctccagagggcgcgaggcggggcgcgcggggagggggcgcggcgaacgcgcgcgtgcgcggtgcatgtgtgggcccgcgggggcgcgcgcgcggtttgggggcagtgaggg

SEQ ID NO: 27977 - DNA, 285 bp, Homo sapiens
  source 1..285: mol_type = other DNA
ctcgcaggccagacctcgacgtgtctctcgcccgggcccgtttcccgaaacctcaggtgcctgcagcgctcggcactgtgggcagaagaacctgtcctcccgcccggggccccatgggccgccgcagttccaacagcggggataattgcttcccgcctgcgacgcagcatcgcagcttgctctcccccgccacatctggccggcggcctattagctcacccgaggggaacccgggttctaaggcattgaggcggcgcctgacggccacatctgctgctcctcatt

SEQ ID NO: 27978 - DNA, 263 bp, Homo sapiens
  source 1..263: mol_type = other DNA
tcagggggaaaaaccatattggctcgcaggccagacctcgacgtgtctctcgcccgggcccgtttcccgaaacctcaggtgcctgcagcgctcggcactgtgggcagaagaacctgtcctcccgcccggggccccatgggccgccgcagttccaacagcggggataattgcttcccgcctgcgacgcagcatcgcagcttgctctcccccgccacatctggccggcggcctattagctcacccgaggggaacccgggttctaa

SEQ ID NO: 27979 - DNA, 429 bp, Homo sapiens
  source 1..429: mol_type = other DNA
aaaaggtacagatggtaatcatatatgtatactttatatcaaaaataaataattttttttaaaaattccagaggtctttcaagtgaaacacaatatttttttcaagcagaaaacctaagtccgaaggaggactgatgccctcccctgcagcgcccagtagctaagactggcttctctataagtattttatagattgaacctaaagaatggcaacgatttctaacatctatagaatttttacgaagtcacttcgctctgatattgaagaatacaacgctgttcgggaagtgaacttcacctccgcgtgagcccacctggagccgcacactctccgcagcctcagccagcagagtggcgctaatgaggagcagcagatgtggccgtcaggcgccgcctcaatgccttagaacccgggttcccctcgggtga

SEQ ID NO: 27980 - DNA, 193 bp, Homo sapiens
  source 1..193: mol_type = other DNA
acagttttggcaaataatcttgccaagtcagtttagctagaatcctcgatcctcatatttttgatcatcctagatctctgatccccaactgcaagaccctattgcagtggcccctctacaagatggtcttgaagaaagtctttctggtgcttgaacaagtgtgactgaatctcagggggaaaaaccatattgg

SEQ ID NO: 27981 - DNA, 344 bp, Homo sapiens
  source 1..344: mol_type = other DNA
ccgcgtgagcccacctggagccgcacactctccgcagcctcagccagcagagtggcgctaatgaggagcagcagatgtggccgtcaggcgccgcctcaatgccttagaacccgggttcccctcgggtgagctaataggccgccggccagatgtggcgggggagagcaagctgcgatgctgcgtcgcaggcgggaagcaattatccccgctgttggaactgcggcggcccatggggccccgggcgggaggacaggttcttctgcccacagtgccgagcgctgcaggcacctgaggtttcgggaaacgggcccgggcgagagacacgtcgaggtctggcctgcgag

SEQ ID NO: 27982 - DNA, 277 bp, Homo sapiens
  source 1..277: mol_type = other DNA
tgggatcacaggcgtgacccaggctggagtgcagtggcacgatcgcggctcactgcaacctggtcttgacagcagctgagttcatttgtattaaaattgttacatttttattaatagagtcacatatgaataactgataatgagcgtgtattgtatggtctccatgcacatcaactctatgattatatgtactattattatctcattttactactgtggaaactgagatacgatttgaacctaggtctttgcttgtagtccggagcctgaggtgttc

SEQ ID NO: 27983 - DNA, 435 bp, Homo sapiens
  source 1..435: mol_type = other DNA
ttgcagtgagctgagatctcgccactgcactccagcctggtgacagagcctgactcctgagacctcgtttctatttaaaaaataaaataaaactaaatttaaaaaaatgcacgctcatagtacaaactttagaaatggaacgaaaaactaaaattgaaggtaagtctcgctctgtcgcccaggccggggtgcagtggcgcgatctgactttcggctccactcggatcccgaattaaattctgtcactccggatggaaataagtcctttggccagggattgccgctgccacgccggactcggtcctgaaacgccccgccgggcaggccggaccaatggacgccgagctcggccgtgcgtcacgcgacgctggccaatcgcggagggccacgaccgtagaaaggccgggcgcggcgaggctgggcgctgggcggctg

SEQ ID NO: 27984 - DNA, 585 bp, Homo sapiens
  source 1..585: mol_type = other DNA
gctctgttatttcaggacaggtgcccgcatccccagctctggtcatctctaaccctgggccgccctaggttcccagcgtggcggatccggtcagtccgggcttcctgccccgccccgcgccacgctggcaccgacccgccaggccaaaggcgacggagccctgcggggcggccagtgctgggtccccgctcccagcccctgcccctgggcttcagatctggccccagaccccctcctcagcgccttctcctcggggctcaggtgcgtgaggcgctgtcgcttgcgcgcctggggcagccccccgctcgctgcctccgggctggcccctctctgggctggcaccatgagcggcagggcctggccggccggggctccggcggcggaggcgggctgccccgacagaagcagaacttaggggtcccgtcggccgggttcggcgcggctgccaccaccacgcaccgcgcaccgcgcgccgcagccgcccagcgcccagcctcgccgcgcccggcctttctacggtcgtggccctccgcgattggccagcgtcgcgtgacgcacggccgagctcggcgtccattggtccgg

SEQ ID NO: 27985 - DNA, 373 bp, Homo sapiens
  source 1..373: mol_type = other DNA
aattaaaagtttatttttacagtctccggggctgcagaaagatgaactccatcagaagatcctcaaggtcttccagagtgtctaggcgacacctgccggccttccccgttcgatcctggaggtgggggtgggaatggagcgcatcaagcttgcctttctcctgcaccggaccaggacgcgtggcgcctccagagaggacgcccatcgcccggagcaggttgcggtcccggttcccgccgcggagcgcagaccgcgggcgggggggggaggggcgttctcggcctttgggacccgcctctcgccgcaggcgcgcctgccccgccttctcactccccacggcggcggctgcggaggccgagggcggggagggagt

SEQ ID NO: 27986 - DNA, 441 bp, Homo sapiens
  source 1..441: mol_type = other DNA
aagcctgacccagctcttaggaggtgaggccagggctctgtgggtccagctgccataggcctggaggtggttccaccacagcctgtggtgcggtccgcctgcagggcctccccctcaggagggaggctcctgattgacactgctaacagctctaattactgcatttgccatggcttcccgggagagacatgcagggaaaggtgcccaggtctgcaggaacgtgttctttctgagaacttaacagtgcctcctttatgtacatgaaggagggcacttttgcacatgtaatccccaaatctggtctgcatatttgacttacttcttaagaacatgaagatcttcaaaattcatccaagccatttagtttctgaggctagaagcaaaaatagaacttcttcccacataatttaactataaaatctgatgatgggctcaaagctg

SEQ ID NO: 27987 - DNA, 457 bp, Homo sapiens
  source 1..457: mol_type = other DNA
ccacagctggagctcactgcaagccctcagaatcctgggctcaaagtagcagctattatcacctccatttaacagatgaggaaattgaggtaagagcttgttacatcaagggaaaacagtttgcaaactgctgttgtaattattaccgctgtagctgagctcgcgcgtgggtcacgacctaagtgagggtgagcccggcctatttcagcccggccaaactggtgacttggaggccgggccgaggccccgcccctcacctgctgatcctacccttggatgggacaaacagagggccctgctgggccggcccaggtgagggcaggagcagcgcgcggccggggcggggcgtgcgtgcgcagtgggctccgccccccgggcctctccgcggatccgggcgggccccaggctgcaggggcggtggcggcgctgagctgggcgggccggggcggggcggccg

SEQ ID NO: 27988 - DNA, 440 bp, Homo sapiens
  source 1..440: mol_type = other DNA
acatcatttatctgcaaagaagttatcctgtctttacagatgagatttttcgtgagtaaacaaagcaactctgagttttccagtctgtgactttgggtggagaacccagaggcgggttttcctactcgccaagcttcatcctggtccagggcctcacctcgggaagacctggccttggccttggcctgggtagtacctgtctaaggtgtgggctgacccaaaacacggaaactcagttggggagaagtttcccaggagagagagggcacgtcccgtccgtctgggtacaaggtcgtcccaggacgtccatcccgttcctcgcgaggcagaagttactcgggaaaaggggctgagcgccggctcctcccgcctccgctctgctctgcgcggggaggcgccgggttccaccggtgtaggcgggggcgtcgcagtgaggctca

SEQ ID NO: 27989 - DNA, 613 bp, Homo sapiens
  source 1..613: mol_type = other DNA
gctcggcagcgccagacgccccagccgactgggtcttaaggatgacggggctcccgctcataggccggcacccttttcccctggtttctcaggaaaccctgaaaacggggagggaggcctcacagggacagcagcctgcgggccccccggcggtttcatagtgaccggcttgaggcctggccagggcctcgaaggccgcaggccccgcccacgtggcgggaggcccggagctcagggcgcgaggaccgccacacaatggaggccaaggcgggccccgcgcgcccccgccgcagcaagccccccgcgcgccacgggcgccggaagattccagaaccggcccgcccggttgggggaggggagaggaatgcggatccccgagctcgtcgggccgcggcgggtgcctcaaccccctctcggcccccagtttgggcgttccggctaccgccggcgcgaccgcagctgcgcaggcctcgcaaccccgggcgcgaccatcgggccaggccacgggggtggggtcaggagggatgaaccaccgcttactcgttcttcgtctcagcgtgaaaccggagaggctctcagctctagggacggtcgctgaagagtcggccctgca

SEQ ID NO: 27990 - DNA, 426 bp, Homo sapiens
  source 1..426: mol_type = other DNA
gagagcaccttgttacatacggtgctttaggtaaatgacagctcaatgagaataagaacagactctgcacttatggggtcagcccagattaaaatggggatattgtgcccatgcccaatacacgtggcgcgcactgctcaggaagctttccttggagggctggatccggttcgggtcccggctgcgtctgggaccgtggcccgggcctcagtttcccagtctacagcccgtgggaggacacctcggagctggcaccccgcccccaaaagggccccgcggcgcagggcgtggggctcaggtggacacctggcgggcctcctggcgggggcgccctggccgcccgggcccctccgggctccttccgggttggcagcggcggcgcagggggcggggggcagcgcagaggggccgggcgaggccgggagc

SEQ ID NO: 27991 - DNA, 560 bp, Homo sapiens
  source 1..560: mol_type = other DNA
cagaaatatctttctgcctggagttcggcttggggctggaagccacagagggggcagctcggcagcgccagacgccccagccgactgggtcttaaggatgacggggctcccgctcataggccggcacccttttcccctggtttctcaggaaaccctgaaaacggggagggaggcctcacagggacagcagcctgcgggccccccggcggtttcatagtgaccggcttgaggcctggccagggcctcgaaggccgcaggccccgcccacgtggcgggaggcccggagctcagggcgcgaggaccgccacacaatggaggccaaggcgggccccgcgcgcccccgccgcagcaagccccccgcgcgccacgggcgccggaagattccagaaccggcccgcccggttgggggaggggagaggaatgcggatccccgagctcgtcgggccgcggcgggtgcctcaaccccctctcggcccccagtttgggcgttccggctaccgccggcgcgaccgcagctgcgcaggcctcgcaaccccgggcgcgaccatcgggccaggcca

SEQ ID NO: 27992 - DNA, 496 bp, Homo sapiens
  source 1..496: mol_type = other DNA
tccccagctctgggcaccttagcaagggtgaagggcttacccgtggggccctgcctaccttactgggaagccgggagggcaaccgttaccggggatagggtctcggggccaggcacggcgttcgaggcctcccacccagccgaccggccttggggacccttccccgctggcccgggccacgcgtcccgggtactcactgcagagcgcgcccggcaaccccgaaaggccggtcggggaccccggctgggagtcaggactctagctcccgggcgcgacccgagaaccctgaatccgcacacccggccgcgtgacccctgccgaccggctggcgcgccacccattccccgcggcccgcggatttgcagggccgactcttcagcgaccgtccctagagctgagagcctctccggtttcacgctgagacgaagaacgagtaagcggtggttcatccctcctgaccccacccccgtggcctggcccgatggtcgcgcccggg

SEQ ID NO: 27993 - DNA, 497 bp, Homo sapiens
  source 1..497: mol_type = other DNA
cttaggtcaggagttcgagaccaacccaacatggtgcaggtatcagtaatcccagctactcgggaggctgaggctctctgggatgcctgtgaatgcctggcaccaagaggcctggctcacaggtgctcaatgatccgtggatgagggcgtccccatactgtgccccagttgggcatgacttcacagaggtgacacaggcttccctgcaggcctgccccacccgtgtagcatggctgccgcccagacccgcccgacgtcccgcccagcccagccggcagcagcagggggcaggatttcccgctgatcccggcggtccgtcctctgcagtgagcccagcggggcttaaccctcccgcgtccggccggcctccgatgcccatttcagggtcaaaaatgagcattcagtgagcacaaggagccctcagtcgccaggggcatcctccccctccccgcggcggtgccgtttatctggccaggggaggtccacccgggaggagg

SEQ ID NO: 27994 - DNA, 672 bp, Homo sapiens
  source 1..672: mol_type = other DNA
actgtgccccagttgggcatgacttcacagaggtgacacaggcttccctgcaggcctgccccacccgtgtagcatggctgccgcccagacccgcccgacgtcccgcccagcccagccggcagcagcagggggcaggatttcccgctgatcccggcggtccgtcctctgcagtgagcccagcggggcttaaccctcccgcgtccggccggcctccgatgcccatttcagggtcaaaaatgagcattcagtgagcacaaggagccctcagtcgccaggggcatcctccccctccccgcggcggtgccgtttatctggccaggggaggtccacccgggaggaggtgactttgcagcctaacaggccgtgctgtgcgccagcccggggagcccaccgtctggggaggggggcgattaaaaggtcccaacctcctccccaggagggcccccctgggccggtcgcagttgtctgggggccctggggctctctgcgtcgagagcgctcgaagacccgggattcctggcccgatcgcgggcggggggagaccccagctccaccccagctcccgccggctcggggaaggggcggcccctttaagagcgcgcggccccgcccgccccctccgggcaggatccgaattccagggaggcggggcggagacggcggcgaggagga

SEQ ID NO: 27995 - DNA, 466 bp, Homo sapiens
  source 1..466: mol_type = other DNA
agggacttcaaaggagacttcaagggcccccccactgccccaggctgaggctgtaggttcgagaatcagtttggagcctcttgagtgcggagcgcagacccagcgcagtgcggcgattcgcccaaggtcacacagccgccccccccaattcggaccccgggcggcctgactccgggggccggggcttgtcgggttcctgcgacccttcctgggaggggcgtcctgggcggtggggtgggaggggcgggcggttacctcatcgccgcctccgggaggccccgctcgctcgcgccggcggctggggcggcgactccaggcgcggaagggcacagaggctccgggaggcagcgctgccccccgcgccccgcaccgctgcgggacccgcgccgcgagaggggcggacttcggcgcctcgcgcgtccgccggcgcctgggttggcgctgcggggcggaggcggtgtctgag

SEQ ID NO: 27996 - DNA, 397 bp, Homo sapiens
  source 1..397: mol_type = other DNA
cccccacacgatgggggggctgggctaacccaggctttccaagctgtgatggggcaggagcttctccactagctcgagtgcatccctttgaggggcgctacgggttgcaagggacttcaaaggagacttcaagggcccccccactgccccaggctgaggctgtaggttcgagaatcagtttggagcctcttgagtgcggagcgcagacccagcgcagtgcggcgattcgcccaaggtcacacagccgccccccccaattcggaccccgggcggcctgactccgggggccggggcttgtcgggttcctgcgacccttcctgggaggggcgtcctgggcggtggggtgggaggggcgggcggttacctcatcgccgcctccgggaggccccgctcgctc

SEQ ID NO: 27997 - DNA, 320 bp, Homo sapiens
  source 1..320: mol_type = other DNA
agacagagtcttgctctgtctcccaggctggagtgcactcagcttactgcagcctcagcaggctggtttcaaaccaggtgagctttaagaaaactggcatttgggaactgctcttagaaaagttgtggggagaagaagtctccctagccttttaagcttggtcttatttgacgctgagcaaaggatatttttgtgggaaagatttctagaagaggcacattcaaaaatttgatggcagcggttgatagattcctcagaattacttttcaaaatctaatctgccttgtttctccaggaaatagataagcagctgttttcct

SEQ ID NO: 27998 - DNA, 306 bp, Homo sapiens
  source 1..306: mol_type = other DNA
cagcgctgttggggtatctgcagctgtgctttgaccagctaccctgcagctgtgctttccagaaagaaaggcttatctgtcaccagcaggttgaagaaattccgagcagctctcacattagttatctaaactgagtctcactcggagtgcagtggcacgatctcagctcactgcatcttgcctcagccccgagtagctgggctcaggcaatcatgatattatcctattattttggatacttttggtctcaagtctgtattgtaagacagaaatccccaaagaacccctaggttggtgaggtttctt

SEQ ID NO: 27999 - DNA, 315 bp, Homo sapiens
  source 1..315: mol_type = other DNA
aaccagggatgcagtgctgcaattatagctgccgagttgagccactgtgtctggctcaaggtcactcatcttaagaatgcccctctgttaaataagtaaataataagtaattagccgggcgtagtgctgcgcacctgtggtcccagctgcttgggaggctgaggtgagaggatcacctgagcctgggtcgagccactgcactctagcttgtcttagaacctcagatttgccgtctgctctgcgggagactgcagcatagcagcgccgcggctgccgaggggttacccccgccagggttgtaccctccaccggaag

SEQ ID NO: 28000 - DNA, 345 bp, Homo sapiens
  source 1..345: mol_type = other DNA
tttttctgagacaaagcaggattctgagtaactgggatgggtttcatctggtctcgatctcctgacctcaggtgatccacgtgccttggctgggattacaggcatgagttgggaactgctatagattctagccctttccacagatgaatcatacatgtcatggggagaagtctccctagccttttaagcttggtatcaagcaagatatttttgtgggaaagatttctagaagaggcacattcaaaaatttgatggcagcaaaaaaagttgatagattcctcagaattacttttcaaaatctaatctgcttgtttctccaggaaatagataagcagctgttttcct

SEQ ID NO: 28001 - DNA, 306 bp, Homo sapiens
  source 1..306: mol_type = other DNA
agggtccgtcccctttactggggctggcagcaggttcgggggccactgcagacggagtttgaggaacactgtcccccggtcaggggtctcctcggggctggctgcacagtctctgcaccccctaaggggctcttccgacgcgcacccgggggtcctcactggcccactccggcctgccccgcccctctcactgcggcggagccggtcggccggggggccgcaggggaggaggcggagagggcggggccctcctccccaccctctcactgccaaggggttggacccggccgcggcggctataaaagg

SEQ ID NO: 28002 - DNA, 311 bp, Homo sapiens
  source 1..311: mol_type = other DNA
gatcatccggttttgtggcccaaacccagtctccgaattttcagggagactgatttgagtaataataaaactccaaatgaacccatggggtggttacactgcttcccaacacggtgaaaccccgtttctccagctactcagtgggccgagatcgcgccactgcgctccagcctgggcgacagagcgaaaaaaaaaaaaaagaacccttggtattattgttccatcctgaggcccagagtgggcaaagggcttgaccggccggaggggtggagtttattcgcgccccgcctccgccaccagggcttgggggc

SEQ ID NO: 28003 - DNA, 331 bp, Homo sapiens
  source 1..331: mol_type = other DNA
agtactggttggcgcctgtaatcccagcattttggaaccagaaactctgtctcaataaaaaagagccagtattttcctccttgctcctgggaaggagaaggaactggcgaaaaaatcctgggccttgtttgtacagttcatgccaggggtaggaaatacctgaagctttcaaatactgcgagttgtgactctgtcctgggcaagtcaggccttatggtaaaaataataatgtgttatcttggacataacacaacactactcggtggagcgcccactagctgctggacactctcttaggccctgggcacatcgggggcctccgcgctgagct

SEQ ID NO: 28004 - DNA, 258 bp, Homo sapiens
  source 1..258: mol_type = other DNA
tttatagttcaactttgaaacaaagctgtaacatcactactgatcatccggttttgtggcccaaacccagtctccgaattttcagggagactgatttgagtaataataaaactccaaatgaacccatggggtggttacactgcttcccaacacggtgaaaccccgtttctccagctactcagtgggccgagatcgcgccactgcgctccagcctgggcgacagagcgaaaaaaaaaaaaaagaacccttggtattatt

SEQ ID NO: 28005 - DNA, 425 bp, Homo sapiens
  source 1..425: mol_type = other DNA
cctgtaatcctagcacttcgggaggccgaggcgggcggatcacctgaggttcgagacccagctactcagtgagccgagatcgcgccactgcacccgtcccaataataataataattaataataataataataacaataataataataattctaaagggatggggcgccacactcggagccgaagagtccctccctgggccaacgaagcgggtatcagagtgactgccactgtagccttccattggtggagtcaccccaaaggaggcgggacggagcgggaaagtcctgcctaccttggccttcccagcgctgggcgacctgagggcggggccgggagcaggccccgggctgtggggagggtgcgcttcccgcgggcgcgcggagtgaggacggtgacagccacgcgcgcgcgtacgcgcccgatg

SEQ ID NO: 28006 - DNA, 613 bp, Homo sapiens
  source 1..613: mol_type = other DNA
cgtcccaataataataataattaataataataataataacaataataataataattctaaagggatggggcgccacactcggagccgaagagtccctccctgggccaacgaagcgggtatcagagtgactgccactgtagccttccattggtggagtcaccccaaaggaggcgggacggagcgggaaagtcctgcctaccttggccttcccagcgctgggcgacctgagggcggggccgggagcaggccccgggctgtggggagggtgcgcttcccgcgggcgcgcggagtgaggacggtgacagccacgcgcgcgcgtacgcgcccgatgcagcgcggccccgtgaccctagtcggccgctgagaggcgcgcggagtctgggccgctgccgtctaggggtcccgtcccgaggcgtccccggcatctccggcccgaatcccggagtgccgggtcgcgcctgcaccgaaggtcccggctcctgtgccctccctgcagccgtcagggcccgtcccctcaggcagggtcctcgcggcccatgctggccgctggggacccgcgcagcccagaccgttcccgggccgggcagccggccaccatggtggccctgaggcc

SEQ ID NO: 28007 - DNA, 380 bp, Homo sapiens
  source 1..380: mol_type = other DNA
catttgtccatctgcatatggagtcacagacacctgcgcacgtgcccagtggcatgcccccaccccagctctggggtgccgacgtgccctggggcctggggaagccctgcacatacattaggtctgagctgcagccatgtgaactggcaggccctacaggcaccgggccatgtctctgtcccgaactgccctgggggccatgagacactttggctccactggggccccattgtgaggacccaggtgcttggggccgctcctggtgcgtggataggggcaggaaggaggacccccgcaacccaccccctccctggtcctggtggctgcagacttagggccccgggcaggtttggggcggccgctcaggggccggcggcggg

SEQ ID NO: 28008 - DNA, 528 bp, Homo sapiens
  source 1..528: mol_type = other DNA
gccatgtgaactggcaggccctacaggcaccgggccatgtctctgtcccgaactgccctgggggccatgagacactttggctccactggggccccattgtgaggacccaggtgcttggggccgctcctggtgcgtggataggggcaggaaggaggacccccgcaacccaccccctccctggtcctggtggctgcagacttagggccccgggcaggtttggggcggccgctcaggggccggcggcggggcgggggaggcggggagcgcagccagcgcggcacggagaggcggctacagcctgagcgccgggccggtagcggccgcgccggcgagcggactagcgggcggcgagcagcgcggagcgcgcggggcaccgaggagcgggcgcggcgggcaccgcgcgaggcagccggagctctcggaaaggccagagcggcgccgcccccgctgcccctgcggggccccggctgggagcccgacgagggagcgggcggcatggcccggcggcccggggcgcgggggcgctag

SEQ ID NO: 28009 - DNA, 364 bp, Homo sapiens
  source 1..364: mol_type = other DNA
cgccgtctgaaacttcagccacggcgtctaaggtgtaactctgagagacaggggtcccgtttctggccagaagacgccgacacccctcaggcgggtccaaggtcagggatggcacaggccctcaccccctcgttgatgtggtcgtagatagcgtccgcgccttgatcgaaggcgcgctcgaagaacatgacgcccacgatgatttcgaagtcgtcgcggccgcctcgcgccaccgcgcctgcgctggggccgaccctagacgtgcaacactttatgggatttgtagggacagcccagataatctgataagatttattacccaatttttcttctccagaattcctggctgttagaatatgtcaaa

SEQ ID NO: 28010 - DNA, 557 bp, Homo sapiens
  source 1..557: mol_type = other DNA
cgtagattgagcgctctgtgagagcaaggactttgttcactgctgggtccccagagcagggaccagaacaggcgctgggaaaacatctgttgaatgccccaggtactccaaagccctgccttccaaaccagggttgcccggtgcgaagcccaagggcagatccgtccctgcccttaatccagggtgaagggtttaacctccaggacaagacttttgccgcaggctccagctcctggcctagacttggggctggtgcaggggacaaggcgaagagttgagccagggtctcgggaacccagctgccctcgggtgcgtcccgccgcagggcgtacgcacagagaaggaagtgttcaagtcttccagtgcgctaggactcgcccctcgacgtctcgcggaaggtacctggctccccggtggctgcagctccgggctcctttgacatattctaacagccaggaattctggagaagaaaaattgggtaataaatcttatcagattatctgggctgtccctacaaatcccataaagtgttgcacgtctagggtcggccccagcg

SEQ ID NO: 28011 - DNA, 515 bp, Homo sapiens
  source 1..515: mol_type = other DNA
cattccttgtagccctagtgcatagcaggggttggcaggagtgtcctgggaaatatttcacaatcccagggtggggttgtgttctccattcgggggcttctataacaccccaataatgatggtggttgtgatccatagtcaggcttaggaagtagaaaaaattgcatccttctcttaggatagctatacttgtaacttccttaaacaaaaactgtattgcagaaaaatgcacaaatcttaagcgtacaatttgatgaattttccaaagtgaacacatctacatatgaagacagggggtgaccccagcctcacttgtgggttctagaatttcccgtaaatttgttaaaatttctcttctggattaaatatgtaaaaaagcctgggattccgagacgtcctctcaggtgccatacttgtttcccgattctctgcttaagcagacgccgagtgagaggcgcaacccgggtccggcttcccggcggtgggggcggggccaggccgagacttcctgtctg

SEQ ID NO: 28012 - DNA, 387 bp, Homo sapiens
  source 1..387: mol_type = other DNA
gcactaaaagaatatttcagcccaaatttcagttttagtcattatgttctaaatgaatagttttttttttctttcctgcagaaacaaaataagaacaggaatccccttggggaggttcatgggactccaggagcctttggaaagcagagaatatatttatgttttatttgcataattacaaattaatgttaaaaagaatgcacagcctcccgagcagctgggactacaggcgcacgtcaggtggcccagctaatttttactttttaaaatttttttgagacgtctcgctctgtcccaggctggagtctcgtgcctcagcttcccaagtagctgggactacaggcgcgcacatgccaggctggagtgctgggatcccaggtggagcca

SEQ ID NO: 28013 - DNA, 416 bp, Homo sapiens
  source 1..416: mol_type = other DNA
gattaggagctgaagttgaatcagtttgaaattgtattctgctgatgttgtgagtctgtagtctcagctactcaggagccgagatgccactgcactccagcctgggcgacagagccagactaaaagaaattgtattctgaatacaacttctaaaacactatatttacttgcattatattaaactggttttatcaggtggaagataccactattgttctatttttctggtaagtagccatgtcttgcccagggttacagataaaaatctgtaggaccaccctggggcgtgaccacctgtccaggccccgcccccgtccaaccggcggagacccgccccctttcccggacaccgggctcagcgcccgagcgtgcgcgcgcgtcctcgctcgtcgcccggctcggcgtcgggagcgcgc

SEQ ID NO: 28014 - DNA, 403 bp, Homo sapiens
  source 1..403: mol_type = other DNA
cggacctccaattctctgaggctgggctcaaaggggcttccaaggcaggtctggaagggacttcagaatggaaatgctggaccgccttcccagaggtacagtggtcagcagggcgagtgcactggtggccctctggggccctgggcaacgtgttcccctcggagccccttggggcccagtggcaatgtgcagattggaggaggctacctctggggtggcccccaaccagggggcacaggggcccccaggtgagtcagggccgtctggggcgcccactgctgggacccctgctgactcggccaggggccccctcctggcgatgcgcttcattataattttatcaatcaaattcttagaagagggtatagctgtttctgtcttacaacacaggctccagtatagg

SEQ ID NO: 28015 - DNA, 330 bp, Homo sapiens
  source 1..330: mol_type = other DNA
ggggcccgggcgaggctgcaagagctccctggccttgggggtcccctggggacggcatggccccagacgcgtggccatgctgtctggccggcattcccggagcctctagagggacctccaattctctgaggctgggctcaaaggggcttccaaggcaggtctggaagggacttcagaatggaaatgctggaccgccttcccagaggtacagtggtcagcagggcgagtgcactggtggccctctggggccctgggcaacgtgttcccctcggagccccttggggcccagtggcaatgtgcagattggaggaggctacctctggggtggcc

SEQ ID NO: 28016 - DNA, 572 bp, Homo sapiens
  source 1..572: mol_type = other DNA
ccacaagagagttggcactgacagtttttggaaactataaaatgctttctcaaaaaatagccaggtgctgtctagagcacaagtgagtctcagatctcaaaggttgaggaatacatggccggaggcttcctggaggaaggcgacccgagcactcctgccatgcccttcgccctctcagagcaagaggtgctgcagggattgttgtgaagacagaagccccggttccagacctggctctgttattaactctttatgtgagccccacatagttatcagcctcaatttccccatctggaaaataagcagctgtgatatcccaagcagctgggtagctgcacgtgctagagggtgcactcccttcctggagagcagtgatgggttggatggcacagccaccagacagcactcctgggttcggggtcccatgtggccgggactgtcccgctcaccctgagaccgtcacagctggaaggggccaagccggggctgccactccagggtggggcctggggtcgtgaccctgggagccggcagccaagaagggagggtgccttccatgagggagccggccg

SEQ ID NO: 28017 - DNA, 539 bp, Homo sapiens
  source 1..539: mol_type = other DNA
cccctctgtacaatggggccaacttggcccacctcccagctgtgacgcacagacacgacgttattggcagggccgtccctgacccagtgtggctgcctcccaccctccaccaggggctgggacatggggtgcaaagccctttttcagtgctcctttggagtggggaggccctcccaaggccggcccggctccctacgtctcaggacgtctgagggctgggctcctgcagccctgtgactctacacggcctgtggcaggtctgagtcaaaacacctaaggccgacccctgcggtcatgcggagggctgccgccttatgccggcctgggtcactcaggcaggcggggcgcggccccgtcagctgtgactcaggccccagcggcctcgccacgcagcactgggcaggggcatcgggcacaaggacgccccctccccactgccccaacctgtgtcaggcacagactgggtgggaacccagggccctctgcacctactgcccccagcccttcaactggaggtggggggtggaagtgggacccag

SEQ ID NO: 28018 - DNA, 430 bp, Homo sapiens
  source 1..430: mol_type = other DNA
gaacccgggcctctgttttcttcccagggatgagtttaaaatactttagagttacacaaaattgggtactctgcccgggctgagcctcagtttcccctctgtacaatggggccaacttggcccacctcccagctgtgacgcacagacacgacgttattggcagggccgtccctgacccagtgtggctgcctcccaccctccaccaggggctgggacatggggtgcaaagccctttttcagtgctcctttggagtggggaggccctcccaaggccggcccggctccctacgtctcaggacgtctgagggctgggctcctgcagccctgtgactctacacggcctgtggcaggtctgagtcaaaacacctaaggccgacccctgcggtcatgcggagggctgccgccttatgccggcctgggtcactcaggc

SEQ ID NO: 28019 - DNA, 410 bp, Homo sapiens
  source 1..410: mol_type = other DNA
agtgtgcgagagctgacgctctgctaggcacactttccctggagggacggggccttcagcgcctgcaaagaagtgtgtgctcccggcactgactgaacccgggcctctgttttcttcccagggatgagtttaaaatactttagagttacacaaaattgggtactctgcccgggctgagcctcagtttcccctctgtacaatggggccaacttggcccacctcccagctgtgacgcacagacacgacgttattggcagggccgtccctgacccagtgtggctgcctcccaccctccaccaggggctgggacatggggtgcaaagccctttttcagtgctcctttggagtggggaggccctcccaaggccggcccggctccctacgtctcaggacgtctgagggctgggctc

SEQ ID NO: 28020 - DNA, 452 bp, Homo sapiens
  source 1..452: mol_type = other DNA
tgggctgggaaaggcttttcggtctctgaggcccagagaggttaagtgacttgcctcaggtcacacagcacctcagcaggcttgaaccctggcctcctgtttctctttggagcctgcctacaaagacaaggcctggctttgggggatgctggtcctggggcctgaaccacaatctcggggctgccagcctgcgtctggctctgtgcccagagcccggtggtttccgctcacgtgtcctgtgaggccaatggctcctgggccaagactggcctggggcctccagaggcccagctcgacccactcaccctaggaaggctgaggctgcggttttacatcatccttgggcgtagggctgacctcgaagaggaggagcgggcatacaccgcgccctgcgcccattggccgccacctcatgaggtgttggccaatcgccccagcgggcataaagtggc

SEQ ID NO: 28021 - DNA, 459 bp, Homo sapiens
  source 1..459: mol_type = other DNA
gggctggtgctgctgaagcacgcgctgggctcccctgagaaggtcaaagcctgccagcctcagccccaagatcatgcaggaggcctttctggtccaggaggtacagcccatgcctgccccttatcatggggaggtgggggtcctttgaagggggtcccgctaaccctcagcccctgagggtggatcctgggtggacctcatccttctgtctggtgaagagcatggggcacagagaggcttggctctgcagggccttctggatccgagcgtgaccagcttttacacctggaatttgagcctaagcagccaggctgccctgggcagcggtgggtgacaggttggcagctgtctggccagctcacctggcactcagctgtggggctcgtgactgcagcttgggactagaccctaggcagaaggggaaggtccttcttcttctgcccctgcaggtggtggagt

SEQ ID NO: 28022 - DNA, 494 bp, Homo sapiens
  source 1..494: mol_type = other DNA
gcaggctttggggctcaagtttcaggcttgaggtctgagtactcacctcaagccttaggccttggccacctgcagccccctaaccctcgctcaggcagaggtggctaggattctacctccccctcgcaagcgggttggcggccctgccccctgcagccatgagaggcaggagagcgaaaggcgcccgggggacagcgctgcacagcagacctgtgcctctcatggacttcaatcatgaaacccacgtgtgtgccagaaggacagaaacgtcccctccgggatgctcccaccggctgcgcagctggctttccgcggaaagggcggagcccatcaggggctcccgcggggcgtggccgtcaaggagccggacgccgcgcctggctgggcgggtcagcctcgcagcgggcggcgtggacgcggcagcgcagcggctcctttaaggctcgggcaccacccccgccgccccgcctcccgtgcggcctgggtctagttgg

SEQ ID NO: 28023 - DNA, 425 bp, Homo sapiens
  source 1..425: mol_type = other DNA
ggcctgggacttgccctgggctggacacctgttgccttgaggctgaagtcccaaggcctgccagggttatgcagaattgaagttcttccagggcaccaagttaggagccctcagggagcttccttgaccctgacaggctggcagaggcagacaccctgcaggcggtagctgcctgagcctgctgggtgctgggtgctctggggtgtagtctctgccctggctcctgcagcccacggcatggtcccgtggcctcgatgtctccctaggaggcgatccagctggacggggagatcgccggtggcccacaagcacctcagccgtcagaagatcgacccgctcctctatattgggctgggcttggggggagcacccctgtccccagcagcccacagtggggcctctctttgcagagaaaccccaaaaag

SEQ ID NO: 28024 - DNA, 465 bp, Homo sapiens
  source 1..465: mol_type = other DNA
aggacctattccgtgtgctgaaggcctacacgctgtaccggcccgaggagggctactgccaggcccaggcgcctcatgcatatgcctgctgaggtaccaccaggccccgggcaggcaggggggtgggtggggaacccccaacggcttctggtgcctggtacagatctgtgagaagtacctgcccggctactatgtcgcctggcctgggacttgccctgggctggacacctgttgccttgaggctgaagtcccaaggcctgccagggttatgcagaattgaagttcttccagggcaccaagttaggagccctcagggagcttccttgaccctgacaggctggcagaggcagacaccctgcaggcggtagctgcctgagcctgctgggtgctgggtgctctggggtgtagtctctgccctggctcctgcagcccacggcatggtcccgtggcctcgatgtctcccta

SEQ ID NO: 28025 - DNA, 567 bp, Homo sapiens
  source 1..567: mol_type = other DNA
agacaacctggggcagatgtgaatccggcactgatacatgctacgacataaaaggccatatattgtataattccatttatatgaaatatccagaaaagggacaaatgttctaaaattagaatgttgtgatggctgcacaactctgtaaatatgctaaaaatcattgtacactttaaacgtgaatttatggtatgtttatgttccataaagctggtgattattaataattaggtctcacgaggtgtgagtgcaatgggactgccagacttctggctcaggctgggcctttaagcccgtccttggggtcccatggaggaagccctgggcctccggctcgcgctctgcacaggccccgcttggagccaacccggaaaggcccgagctcgtccaggggagggcggggagggctgcggtgacggctgccccgccccctcacttcgggcttgttggcgcccgccgggggagggtgggcggggcccggggtccgcggcgcccattgggcgtggggggagagctccggggtgggcctggagccccgccccccggccttgcggcggccaataggcg

SEQ ID NO: 28026 - DNA, 311 bp, Homo sapiens
  source 1..311: mol_type = other DNA
cccccaatgcctgggaaaatgccagggacatggctcgtatgtgttcaataaatatttgctggatgaataaagaaaagaaccatactacaatggtttgtgcacatcatcgatggccaacaaacctaggcagggaccatgccccattcattccggtaatgtgggagcctggcacggtgtctggcttgggattaacatccaactggggaaaggctgtggccggcggccccaactgctggattttgttcaaatgtagattcctatttaaaagatctacgccgacggggctgctccgcggttgggacttgcagtcc

SEQ ID NO: 28027 - DNA, 537 bp, Homo sapiens
  source 1..537: mol_type = other DNA
ccatactacaatggtttgtgcacatcatcgatggccaacaaacctaggcagggaccatgccccattcattccggtaatgtgggagcctggcacggtgtctggcttgggattaacatccaactggggaaaggctgtggccggcggccccaactgctggattttgttcaaatgtagattcctatttaaaagatctacgccgacggggctgctccgcggttgggacttgcagtccccgcttattcctgtgcgagtaaggagcgcccaggccaaccctccggctgcaggctgaggggcgggggagactccgtgggcacgggcggcggcgggggcaccgcctgcacgggtccggccggcatgactgcgacgctcagggctgccagtccgcctcggtgtcggtgagcggtgccgcctcaagacagcctccccgccgagctcgcaagatggcggcggccgagcgagttgcggccgcgaaggtacgactggcgcacttccgggaccgtcccctcgccgtgacgcgcttcccgcccctccccgcgg

SEQ ID NO: 28028 - DNA, 252 bp, Homo sapiens
  source 1..252: mol_type = other DNA
gttccagaccagcctggccagcatggcctgtagtcccagccactcgggaggctcgtgagcctgggctctcggctcccggaactgcccccggtgcgcctgcggccaccgggatccccgaaaagccctagccgggcgctcaggccgctgccttggcaacggcgtcggacgccgcggtgcccgcggggaggggcgggaagcgcgtcacggcgaggggacggtcccggaagtgcgccagtcgtaccttcgcggccg

SEQ ID NO: 28029 - DNA, 358 bp, Homo sapiens
  source 1..358: mol_type = other DNA
ccaggctggattccaatggcgcgatctcggctcgccgcaagcgattctcctgcctcagcctcctgagtagctggaattacacgggtctcgaactcccgacctcaggtgatccgcccgcgtgacccagcctctcggtcccactgaggcactgagtccctgcctgcatgtgacttggccctggccaccccgtgggtccacggggctgccgcagaacaagggcctgccaccaggccgttccctcagccgcgggcacctgagctctccgcggccaccagggggcgcccgcggcccagtctgggcgcgagagccgccaagcgcccggtgccccgccccgtccggccgcggccccgcccctccc

SEQ ID NO: 28030 - DNA, 372 bp, Homo sapiens
  source 1..372: mol_type = other DNA
tgcattaattccaggccaggagggcacagctgagcactttccatgtgccaggcagtgggcactccacatatgtcatgccaacaactttgggcaagccatgccttatctgggcctcagtttcattcattcattcaggatacatttattaataatccctgtaatccttaatcccagctactcgggacactgcactccagcctggctgtgctgtcctgcactatgcgagcctggttagaagagctcagcccactggcctcagtcccagtgggcacacttgctcgcctcctgcctgggtctctgacttcaggagggcggagggggcccgtgtcagagccttccgcgccccagcgcggggcttggctgccagctccg

SEQ ID NO: 28031 - DNA, 326 bp, Homo sapiens
  source 1..326: mol_type = other DNA
tcttgcttctctaattctgtatttaaaaaagataaggacacttgaacttgggaagtcgaggctgcagtgagccgtgatcgcaccactgcactccaagcaggagctgccacttccctctgtaaagatccagtgaaatgatgtcataaagtctaggaacattcccactgttcacagagagcctactgtgcgcagagaccctgcggagctggggaacgtggatgcacccctgagggttcagggtgcacgggtaccgtgcacagagcacaggcaggaagagtgactcgcctagaccacaattctggcctgggggatgcacagtgcaatca

SEQ ID NO: 28032 - DNA, 454 bp, Homo sapiens
  source 1..454: mol_type = other DNA
ttggatgaattaattaacgaatgaatgaatcggaggaagccttcccccgctggacctcagttcacccaggtgagcaatgtgtgcacttcactcttaagcgctttgcacggcttatttcctttaatctttgcaacaacccatgatacccggtaggccttattaagaattagctcttattttcatcaaaggtagagaaaatgagtaactattgaggcccccgctggctccctacggaggcccccgctttcagccctaggcgcctctgtcttgtagggctgtataggacagtcctcaagctgagctgatggggaacgcagcggttcccaccccctgaaacccagtgctagctccgcaggcgctcgcccggactcacacttggctcgcacgggctacgcggcacgtactgagcagctggcggggcagggtctccgccgtcactgtgaaggccgtgggg

SEQ ID NO: 28033 - DNA, 346 bp, Homo sapiens
  source 1..346: mol_type = other DNA
aagccgtgcaaagcgcttaagagtgaagtgcacacattgctcacctgggtgaactgaggtccagcgggggaaggcttcctccgattcattcattcgttaattaattcatccaacttagagctcgcattaagagcacgggatctggatccacactgtttggattcaaatcctgtgtgttctgggaaaatgacccacccctgtaaaacgggctcccaggctggtgggaaaatggtgactgttataagggagtggacactattgtgttccccattaagtgctgggatcacaggcgtgagccaacgggcccagcctgtgtccctccctcgtttttacaaatgaataaaga

SEQ ID NO: 28034 - DNA, 383 bp, Homo sapiens
  source 1..383: mol_type = other DNA
gcgggggaaggcttcctcgattcattcattcgttaattaattcatccaacttagagctcgcattaagagcacgggatctggatccacactgtttggattcaaatcctgtgtgttctgggaaaatgacccacccctgtaaaacgggctcccaggctggtgggaaaatggtgactgttataagggagtggacactattgtgttccccattaagtgctgggatcacaggcgtgagccaacgggcccagcctgtgtccctccctcgtttttacaaatgaataaagacactcagtcctgggagcgattagcgccaacagctcatgcgcggggggaatttgcagacgctccctgctggcggagacctcctgtccttcggcgcgggactt

SEQ ID NO: 28035 - DNA, 573 bp, Homo sapiens
  source 1..573: mol_type = other DNA
gcgcgggactttcggcgggtcccggccgggcagacccaagtgccggcggcggagactgcagtggagccagtaccggctgtagtggccggggccgtggcgggagagtcatgtcagagccgcagccgcggggcgcagagcgcgatctctaccgggacctgggtgagcgcggggcgacgggcgcggcgaccccaccaccactgggctggagaagcaggggtcgccggacgcccgcccggggcctggaggaggcggggactgggctcagacagggctagggacttgcccaaggtcacactaccctggtgggtcgcccagggcggaagctcccatggggtgagcgggctgcccgctctggcgagtcgggatctccactcccatttcggtcctcacacgagggcctctctcagccctggcacttggcgagcgtctggtcagtggcgctgccctcgcaatggtaacagtgactcagtgctcagtccgccctcagtggcccgagtccgaggtgggcatcatggcgctcagagaggtcaagtcacttgcctaaggtcacccagggactgcttagctggctag

SEQ ID NO: 28036 - DNA, 394 bp, Homo sapiens
  source 1..394: mol_type = other DNA
cacacgagggcctctctcagccctggcacttggcgagcgtctggtcagtggcgctgccctcgcaatggtaacagtgactcagtgctcagtccgccctcagtggcccgagtccgaggtgggcatcatggcgctcagagaggtcaagtcacttgcctaaggtcacccagggactgcttagctggctaggtggccagctcctacgtgctggcggatgccattggagaggtgagtgttagcctattttccaacccccagtccatagacagtcctgtttgtaggacagtgtaccccccacactcccactccccgaactggatgtggcagactgtaccccactcctgggtgcggacaagtccactggccacttgcccctcccaccaggtgcccagccctg

SEQ ID NO: 28037 - DNA, 552 bp, Homo sapiens
  source 1..552: mol_type = other DNA
atggtgtgggctagcccagctgctggggccgaggctagcccggggttggtttcagcccatgcagaccccctcaaggctgagatgtggccatgtggccatgtggccatgctgcagcctcaagctgatggtttcttcagagagagtcatgtcccctggagctgaagcttacagctccaggggggaccaggactgaaggagagtagatcttccctctaaccacataaggaggggaaggcaaacattaacggccccattttataaatgaagcaagtgatgccatctgtcctcttcttgactgtggacagaaggaggccacaagcccttctccagggcagtggtcactggaggcctgggagggtcagcgggtaggcactcactctgggctccaaggtcacgggaggccagcctcccttcctcccagctgcctcctcctggcaggggacctctggcacacgcatcccaattatgtaatctgcaatgcgcttggagccacgcccaggagtgggggcaaaaggacccagctgggtcagggctgacaaactaggcttggcc

SEQ ID NO: 28038 - DNA, 437 bp, Homo sapiens
  source 1..437: mol_type = other DNA
gtcctatcagtcagtgagcactgacaggtcccaggctgtgttcccaggaggtccagaccagcctggtcagcaccggtctctattttattcaaaataagaaaaagaaaaaaaaaattttttttttttttgagacggagtctcactctgtcacccaggctggagtgcagtggcgcgatctcggctcactgcatcccgagtagctgggaggatggtctcgaaaaaaaaaaaacatttaaaaaaaaatttcctccattttgctggaaagaggatctcagtgtattttcctgccacctgcgaacaggcgggagcccccgcagtaaggaggcctggaggtggctgcctccagctgccccaggccactctcccggcaggtcacctccctgtcccgaactgggcggggcggggcaggcccagtgcctctcccgtcggggcgggac

SEQ ID NO: 28039 - DNA, 367 bp, Homo sapiens
  source 1..367: mol_type = other DNA
tcctggccgcaggctcagcccacagagacgggaccctgcttcccctgggcttgggacagggcatagacctgggctctcacctttcccatctaccaaatgggaggcaggcccctgctttgggcctggctcctatggctggcagcacccagcacgtgtggcaggggcctggcaagctaatgggggccaggctcagtctcacgcctgtaatcccccagcctggccaacccggctctactaaaatgcaaaaattacttgagtgtggtggtgggccctgtagtcccagctactcgagaggctgctgtagtgagccgagatcacaccactgcactccgcggggcagggaggctggtctgccccctgctgctgg

SEQ ID NO: 28040 - DNA, 459 bp, Homo sapiens
  source 1..459: mol_type = other DNA
tctgggcacaaggagaccctctgcccatgggcaaagctgagcctgaacctaagattcaagtgcctgaactgagtcctagggttcctggggcttagggccagggcacctagaactgcctcttctgccaaggccttggggaagatctgcatctctcacccagggatagaggcaggtctctggctcaggaagtgaaatcttgccagactcatcttctgaggatgctctgcctcctggaagccttccaggctgaccttgggcaggtgacgttacctctctgaggcatcagctgtgaacttggcccaaggatacctggaatctttctgtgcccttggatgaaagagctccaaagtgaggactggccagagctgtccagtggaggcagaaggcctgggcaacacctgcagggtactggggtgtgccacctgctatccccaggaagccagccagcttgctgctggg

SEQ ID NO: 28041 - DNA, 530 bp, Homo sapiens
  source 1..530: mol_type = other DNA
ggtccagcttgatctgccccctacagaccgagccctgcccagtgggaactgccccgcccagctgcccagagccagagaggtgatgggcatgtctggctgagaaggcagcatgcctgacacctgatccccgggctgccgcggtgacaggtgcatgtagaggactgtccattccagcccagagagggtgaggctcatccaggcccacacagggggcacaggagggcagtcctggaccagagcagtcactgtgtacgcactgttccttgtcctgtgaaggattgctacctatccccattatccagagggggatactgaggctcagggaaattcatggctcagaggtagctgagctgactcggagtcttgcccttcagcgggtgagcaggctgccgggcagcgcttgctcaggcagagcccttcctggaggaagctccttgcggacagagaatgcctggtccccatgcaatgcagcaagggaggagtgtgtcccccacagcccctcccactgtgttctgagggactgggtgtgc

SEQ ID NO: 28042 - DNA, 529 bp, Homo sapiens
  source 1..529: mol_type = other DNA
aatcttggaattattatttgaggaacacttacagaatttatgtgtacaaattaaaagctcgaatatgttgaatgtacatttaattttatttatttatttatttttgaatgatctggagtgcagtggcaagatctcggctcactgcaacctaagcgattctccccgagtagctgctgggattacaggcgccttgaatgtatttaagtggcctctaggatctctatacctccgcgaggaaaaatgtcttccttttttctattttagccgcatctcagcgcgtctcaccctgcccctcgggaaccgcttctcagcagcggcagccgaagtctgacgacgcgcgcaccatggagtgcggcgcccctctgcatcccagaaggcaccgcgctgtccgtgattacagaaaagcctgtatatccacgtttgttttaacacttaaagtgtttgtaaccatctggaaagagtgttctcagtgatttttttcagactatagttttaaatcttgaggaggattgggcagcccgcacaaaca

SEQ ID NO: 28043 - DNA, 271 bp, Homo sapiens
  source 1..271: mol_type = other DNA
aatttaccataaaataattgcaatgcagattgtgcatggagatattttaaggtcatagtgtcttcacaaattgagctgaaagggaactgttaggatgatcttaaactcgagaggttaagtgacctggccaagagacagggtctcactttgtcacccaagcctgggtacagcgcctcagcctttcaaagctggctggtctggggccagcggcacccaccctcccccctcccgccacaactgagggaggcggtgctgaaaacagctgactcca

SEQ ID NO: 28044 - DNA, 293 bp, Homo sapiens
  source 1..293: mol_type = other DNA
gagacagggtctcactttgtcacccaagcctgggtacagcgcctcagcctttcaaagctggctggtctggggccagcggcacccaccctcccccctcccgccacaactgagggaggcggtgctgaaaacagctgactccagcaatgctgctcacgtgaccactgcagctgcagctcccgttccactccttgtcctgggctaggtgggcactaccaggggctcctttggtaaggagtaccgggtaggcacccggtcctgccaatccaccactggaacagctggggaggcgaggg

SEQ ID NO: 28045 - DNA, 337 bp, Homo sapiens
  source 1..337: mol_type = other DNA
ctgggtacagcgcctcagcctttcaaagctggctggtctggggccagcggcacccaccctcccccctcccgccacaactgagggaggcggtgctgaaaacagctgactccagcaatgctgctcacgtgaccactgcagctgcagctcccgttccactccttgtcctgggctaggtgggcactaccaggggctcctttggtaaggagtaccgggtaggcacccggtcctgccaatccaccactggaacagctggggaggcgagggcgtgcattgcaggcatggaggattaatcagaccagctgtggtcaggagagcctcagcagggccagccccagga

SEQ ID NO: 28046 - DNA, 586 bp, Homo sapiens
  source 1..586: mol_type = other DNA
cccggacttcagagctcagaggggccagggcctggcctagcctggagagcgtctgtcgttctggtcgctctgcctcccagcccagggctctgtcttgccggggctggggcacagggtggaccgacagaggctgctggccggggaaggatgccggccggcggtacctacttccgcagctgtgggcttccctctgagggtccccagggggcgccgccctggactgggaggctgaggtgccttaagggaccccgtaatccagctctgctcctaggatgggggctgtgggcccctcctcactaccctgcttctgggcggctgtgcgggataccccagtgtctccagcaatgttcatctccatggagggctcgccttggcgctgggtggggagcgacttggtcccccctggcggcgaagagaggctgaccacgccagctcgtgggggggtctactgggcagatgcgcaggccccgggcgcgttggggcggggcaagaccgccctcccggtccgggggcggggcttggcctggggcggggcttggctgggcggaggcggagtcaagagcgcaccgccgcgcccgccgtgccg

SEQ ID NO: 28047 - DNA, 623 bp, Homo sapiens
  source 1..623: mol_type = other DNA
tggcggcgaagagaggctgaccacgccagctcgtgggggggtctactgggcagatgcgcaggccccgggcgcgttggggcggggcaagaccgccctcccggtccgggggcggggcttggcctggggcggggcttggctgggcggaggcggagtcaagagcgcaccgccgcgcccgccgtgccgggcctgagctggagccgggcgtgagtcgcagcaggagccgcagccggagtcacagccgcagccagagccgcagccgagcaggagttggagcgcaggccctgctggatccgcgcctagctcgccgccaggcaccggccggaggacgggccgtggtgtcagctcactgcccgggcgctgtgggaggcagcgagcccgcgaccccccgggccgggcaccgccaggcgcggagcccagatcgcccccctgccaggcctggtcacggccagagcacgcaggagttcccagggtctgagaccacctggcacggggcagaggtgcctggagcccacgcttgagcatcggagaccctggccctgtctgagctggaaacacagcttagctttggccccaagcggaactctctggtggcccagaggtcgtcactggggagcccgcctcct

SEQ ID NO: 28048 - DNA, 424 bp, Homo sapiens
  source 1..424: mol_type = other DNA
cctccatggatgggagcctggagagctggggaggacctcggcctcgccaggctctaaggagagtcacagctcaccacctagggcgctgggatgagaaaatccaggttctcccgggagtccaggcgagggagttccggcttcagggagtcccacgggctcccttgcgggtccgagagtctaacgaaggctctgggcaccccaacgactgctcggtccgcggcgcgggaaggagatgtgcgcccctacgccgaagcggcggccctatggaggatctcaggtcccctgtgaccaagggcgtagtcaggggcgccaggagagccgtgctcgttggacgcgcgcagacctggagttagtccctgggcggaacctggagccccgcgcggcgcgttgcctgggagaccgggtcgcacatgcgcacagagcc

SEQ ID NO: 28049 - DNA, 617 bp, Homo sapiens
  source 1..617: mol_type = other DNA
gctgcagtgaaccaagatcacgccactgcattccagcctgggctaccgagtgagactcagtctcggaaaaaaaaattcgctgatgttttaaccacggaagcctcacagactgccagcctacccagggatcccgggaggtctttcttgtactaaaacgcttggtttacaaaaagtcttcggtggaggcggtgaggcggccacttggggccaccgcttctggcggccgcaggagcgacccacagaccccggctttcctgggtggcggagagcgaacccaccccagcctgggttgggggagggggcgtcggcgcagggtcccgtgggcagagctgcgctgggagctggcgggctccgcatcatcattgttcctccagcgcctggcacggctgggccgaagcagagaccgtggcctgagcgcgcccgcccacaggtgttgtcagagctccttccaccggccggacctaggaaggacccagggtccaaacatggcccgaggctggccgagagcacaacagccggcgggcgctgacgggcacggagcgcacgggaccgcggaggaacccgcgcgcgcccccgcctcgcgccgcgcgcacgtgactgcgcccccggccccgccc

SEQ ID NO: 28050 - DNA, 437 bp, Homo sapiens
  source 1..437: mol_type = other DNA
cacgtgacaggggcgggaccggctgctccgcggaggcctcgggggcttggggcgtcggtgcactatcggagacaaagcggtggctgtggtgtctgtgacggcggcggcagagcagctctaaacgccgaatttcgtgcatctcaactagcgcggcgcgcgggcggcgcgcgggcggcggcggaggcagcggcggcggcggcggaggcggcagcagcacatggttccaagagcgctctgcggctgttggtcgccactgcctcttcgtggggaggcggccacgggaccgaggcccgggaagggcctgtgggggcggggcgcggcctgcccgaggtatctgaccaccaccctttttcacttgggaggtggtgaagctgcaacttgcgcagtgggtaaatttccgcgttggtaaatttcctgacaggaaatttcggggaacc

SEQ ID NO: 28051 - DNA, 520 bp, Homo sapiens
  source 1..520: mol_type = other DNA
agagccgccaaccgatcgctcgatcgaccgcacgcccgttccttcgccctaccagacccgggagggggggagggcgcgccagggtcgttaggggcctgactccccggcgacgagacaagatggctcctccggtccgcaccgcagctaccgtcccggctgcgtcgctcggcccgccacgtgacaggggcgggaccggctgctccgcggaggcctcgggggcttggggcgtcggtgcactatcggagacaaagcggtggctgtggtgtctgtgacggcggcggcagagcagctctaaacgccgaatttcgtgcatctcaactagcgcggcgcgcgggcggcgcgcgggcggcggcggaggcagcggcggcggcggcggaggcggcagcagcacatggttccaagagcgctctgcggctgttggtcgccactgcctcttcgtggggaggcggccacgggaccgaggcccgggaagggcctgtgggggcggggcgcggcctgcccgaggtatctgaccaccacc

SEQ ID NO: 28052 - DNA, 367 bp, Homo sapiens
  source 1..367: mol_type = other DNA
tgcttgttatgggcattatatgcctggtacatggcaagtacaaaataaatgatttgttattgtttttatttgatagtctccatggagacccaagggcggctttagggcctctgaggactccagcgctcctaacacagggtcaaggtgctgccagtcactcagtccctgctctgaggtggctcagactctgagactcctacgaccccaggaaacttacctcggctcggggcgccccccccgacttggcgcagagcctgcggacctccctggcccgcgaggggcggggccttcctctcggggcgtggccccaatggggcacgttggctggcgcgtcggggcagggcggggccagccgggctgctggcgc

SEQ ID NO: 28053 - DNA, 284 bp, Homo sapiens
  source 1..284: mol_type = other DNA
ccacccatctcccagctggagctgtgggcagcactggccaggagggctgtcccccctccccatctgcagaaaggatctgggcacccttcctccagcctaagcctcgcctggcccccaggagtgtccaagtcatcctagggtcaggatctgtggggccccagtgatacctcctcccggttcagcaaggagcaacgaggagtagcccagcccctggcccagcttcgaagctgcccccaggaggagggccccagggggcggggcttggctgctaggccccttgaaaa

SEQ ID NO: 28054 - DNA, 352 bp, Homo sapiens
  source 1..352: mol_type = other DNA
caaactctgcctcccaggttgaggcggcccggccgtggttgcctatttatatataacagaggtaacaagatttttaattgaattggatagccacattaaaaaaatcagaaagtctgctcagcagtagctggtccctcagcgtctcgccggcaccctctgccggcgtgaggtggcgctgcctggccgcatcctgggggagcgagcgtcgacactctcggacctgggacccaaacgccagggaggagccaggacctcgccctgagctagcgggaggtaacggcggggagtcctggggcggagaccgagcgctgggggcgtggtctccagcgggactgggcctcgggggcggggg

SEQ ID NO: 28055 - DNA, 359 bp, Homo sapiens
  source 1..359: mol_type = other DNA
ccatgtcctgggctgggtcctggacaggagaccttctcagttcaccaggtgaccttgagcaagttagaagccgggctgggttaggcctggctgtggacatctgagggcagctaggtgtctgcagagctctgagctggcagggagccaggagcaagaactcagttgtctctgaggccctggagagggtgcagacctctgaaccacctgtcctaccttaaggcaggtgtgttaatgcccctgaaaggtgaaggtagacagacagcctccttcctgctgccagttgggacctgggccaggcagatgggtagggtaccaggctgggatttaaattctcagcaggttgaaatggctgatgacat

SEQ ID NO: 28056 - DNA, 267 bp, Homo sapiens
  source 1..267: mol_type = other DNA
gctcactgtggggcccgctgggcctctgttctgtcccccagccacgtggcctcccgctgcaggtgagttcggtgagggagacgtgcagaccgactgcacgcgcactggcctgggcggctactgggtgagcctgtgagcaggggggctttagattagtccccccgcagccatccgaccctgcctccctagggtaacaagggtggcgtgagcgtgcgcctggcggccttcgggcatgcgcatatggggccccgccttgctgaaggtcag

SEQ ID NO: 28057 - DNA, 408 bp, Homo sapiens
  source 1..408: mol_type = other DNA
gaggcaggctcaggccggggcagggccttgccagccaggggccccttcccatgcctggcagcaggcagcccaccccgcgagggttcaggcctcaccggcgcgtgcagttgcagtggaagttgagcagctggaaccccggggcccaatctggtgctcacactggtccaggtggcggcggaagctgcggcagacccagcgggcacctgaggggtggatgtggtgttgatgggagcccaatccaccagggaggccccaccaatgcctggcacccaagccgccaaacacggtagtactgctatgggggacacccagagtactgcccccaaggttaggttctgagctcaccctgaggttttaggccaccctgtgggccctggaggcctgtgggggccacatcaagcctgggag

SEQ ID NO: 28058 - DNA, 445 bp, Homo sapiens
  source 1..445: mol_type = other DNA
agacaagtcactgtcctggccagcatacctgggtatagccccttcctgatggagagattcctgtctcatgaggcacacatgatgcctgctgtgtccccccaggtggccagggatggaggtggccacagacatacaccctgggccactctctgccactctgttgctgcaaggccaggcccatgcttggagtcctaggaagcggggagccctggggctctgtcccctggggagcaccccaggaagccttgggaactcccagggtggtagcccagccctggcagaggcccatggccccctgccagcctgatggaggtggatgtggcagccaccgttttccttcccttcaaggagatgtgaaagcccctggtccccatcccacagcttagggctttggctccctggcaagtgcactcctcagccaatcagcgtcctgcccggctggtgg

SEQ ID NO: 28059 - DNA, 396 bp, Homo sapiens
  source 1..396: mol_type = other DNA
atagctaatttttactaaaaggaagactttcccttcattaatatcttctttatgtttgtaaagactcatggattactattttattcaattagttatactctattactattaagatctccttaaagactattaccatcatccttatattctggtgtaacaagatgttccaagtttatctggtacactcggctagagtgcagtggtgcgatctcagctcactgcctggccaggctggtctcgaactcctgacgcgtggaattacaggtgggagccaccgcgcccggaaattaaaagctgccgaagctccaaggttcctccgcttcctgcccgcaggcggaaccttagaggccggaagtccctccgagaggggcggctccgcgtcatgtgactggagtc

SEQ ID NO: 28060 - DNA, 323 bp, Homo sapiens
  source 1..323: mol_type = other DNA
gccatgaacactcagtgaatagtgagtgaatgagagtcctatttgcagagagctttggaaaagatttttctcctctccagctctagagtctgagtgagttaccgggaataattcctgtctcagagaaatgcccattggtcagctcttgaggctgtccccaggacaggcgcagctcagagctaggatggcaccagaggtccccccgtctggtgtgcttgaggacatctggggccagatatgttcatgcagcgcctgcctgcagcctcgatccagcccagtccctccctccctcattcaggggtgggactgaagaagaagggaca

SEQ ID NO: 28061 - DNA, 394 bp, Homo sapiens
  source 1..394: mol_type = other DNA
gatgatgtattaatatcttaatcacgctagcagctggcattttaagaactttttgatgctatcaacattttttaaaagtggcaaatttcacctaaatatctggatttttggcatgttttggcaggggagtgctcgtcttccaatgcggcgcacaagctctttgacttagctctgagctagaagcttctaagaaaagtccatcctcaaagagctctgaactggcagttagcaggcctgggctcccatcccgcgggagcacctcgaggggacgccgctcgcactagggggcgccagggccgctgcagagcccgagccagagccagggggcggggccgcgtctcgggagcgaggcctgagagcggcggggcggggcgtcggcgggcagtcccctgtg

SEQ ID NO: 28062 - DNA, 214 bp, Homo sapiens
  source 1..214: mol_type = other DNA
tttactgaggctgcctgggagctgtcagccaaacaggaagaagggcccttctgcctaactccaaaaggccggatataaattacagcaaatggatttcctataccattgcactccagcccgggcgacagtgtgaaactctatgaatattattttttctgtactcacacaaatggaaacatgcggcctcgcaggtgaaaacagctcgcgctgcagc

SEQ ID NO: 28063 - DNA, 717 bp, Homo sapiens
  source 1..717: mol_type = other DNA
gcatcctcgtcttggtgaggggggggcgctcggcacaaagaaagttttgcagcgccaggcggcccgggctaggcatccgggcgcgcacgtgcaaggccggggacgccggggcccccactctgagctgagggggggtgttgttggtatcgccccctccttctcctccccccaggggtgaaagtgcaagaggaagtgcagccgctgccatctttcctccgctccgaacacacggagcccggggccgcacagccgccgctccgccgccgccttctcccggcctgaggaagggcctactctgccgccgccgccgcccgcccgctccagccgccgccgccgccgccaccgccctccaggctccgggacccggcccgcgccaccgcccccgtgcgcgccccgccgccgccgccctccggcgcccccgccccggctcgcgctttgcaggggacgcagcgcgcgcccccagcgggcccgggaaaagccgcggcgcgcgcgcgcgcctgcgcggcggacccctccttctcctccccgcgtgcgcgtgcccttcttggctgcgcgccggcgccgcctggcgggcgggaggggaggtggcaggcgcgtttgcaggaggggcgcacctcttcgctcgcgcacccccccggaaggtagaccgggaaggggaggtggggggtggtgcaccccgcagtctagacagtctgatccgggctgggggcgtgtaca

SEQ ID NO: 28064 - DNA, 679 bp, Homo sapiens
  source 1..679: mol_type = other DNA
ctggggatgctccgggcttggagaggcctgagggtgtccccgactcctccggcacccccacttccctgaggattgctggggcttccgggggtccctggcctcccggagctggtgacttcacgctccccggggacaaagctcggcgtgctgtggtttgggggagaagctggacgctggcttcatctctccagctctccatcagatcgaccgggtgcagaagcagctccggaggttcggcctgtctccggccaggaccccgggccctctctggtgcccgaagggtggacgacgcccgctcgacctgcgagtgcgcttcgcaggctggggggcccggatccgcacccctcagttcctgcccccccaccctgctagccgccactctcagcgggcaggggaggggcagtgtggtccgggggggctgagactgcagcccccggccccgcgggcggggtggggaggcgggggccggacgggcatcctcgtcttggtgaggggggggcgctcggcacaaagaaagttttgcagcgccaggcggcccgggctaggcatccgggcgcgcacgtgcaaggccggggacgccggggcccccactctgagctgagggggggtgttgttggtatcgccccctccttctcctccccccaggggtgaaagtgcaagaggaagtgcagccgctgcc

SEQ ID NO: 28065 - DNA, 631 bp, Homo sapiens
  source 1..631: mol_type = other DNA
cccgcccgcacacgcggcgcctgcagcctggggctccgcgccaggcggcccaaaggcagccgccagcgtgcatccccgggcgggccggggacaaagcgccgaggcctggcggcagggcccattaccagagcacccggcgtctcacagggctgcgggcgctggggatgctccgggcttggagaggcctgagggtgtccccgactcctccggcacccccacttccctgaggattgctggggcttccgggggtccctggcctcccggagctggtgacttcacgctccccggggacaaagctcggcgtgctgtggtttgggggagaagctggacgctggcttcatctctccagctctccatcagatcgaccgggtgcagaagcagctccggaggttcggcctgtctccggccaggaccccgggccctctctggtgcccgaagggtggacgacgcccgctcgacctgcgagtgcgcttcgcaggctggggggcccggatccgcacccctcagttcctgcccccccaccctgctagccgccactctcagcgggcaggggaggggcagtgtggtccgggggggctgagactgcagcccccggccccgcgggcggggtggggaggcgggggccggacgg

SEQ ID NO: 28066 - DNA, 599 bp, Homo sapiens
  source 1..599: mol_type = other DNA
tgaaattttaaattttattattacacaagtaatacatggatacattcgtcttgtaaaaatttaacttcaaaattctgtggaataaaatgtgaaaggccttttctctttaaactgcacgttcatacacgtacacctatataaatgtacatttaattttaaaaataacataaatggtatcacttgtaatcatatttcaaaaacaggatagaggcattattcatttatccattttcctactggttaatatagatttcaattttttggtattacaaactattaattttgaatgatagaaagggccctccaagaccatggagggcgtcggggtgtcaccccgcaccacgccctggggtctccagcactgaagcgttcagtaccatgcagagcagctgggagcgggtcccgctgggcggggccgagctgcgcgcgaccctcggcgcgctcggggaggcccagacaggggtggcctctctggcctccgctcccgcgggctctatgacaccgcactggctcgcgggacggggcggggtcgggtgagggggaggagacagccccacgctttgcgactcgcggtgacccctacgcggactcaattcgaa

SEQ ID NO: 28067 - DNA, 614 bp, Homo sapiens
  source 1..614: mol_type = other DNA
tcgctatcaaagccaatcgtgacaaacacgaccgaaacttaggttaagtcagctttgcctaagttcgaaccgttctctgcctatgcgaaccatgcaaatacagcggtcgtcacaggccgtgctccgcctccgggagagtggcgtgccgcgagtcgcgggtcccaagtgccgtccgctctgccctgcagcgcgcgtgggaacgcggcggcggtggcctctgggctgcccacggcgaccgcctgcgcgcacgggagcgggtttccgctatcccaccttcccaccccccggcccgcgcaggggctggcgtccgggaagcgcgcggcgatgcttcgcccggcaccgctgcagccacctcacatccgggcgcgcggcggggaaggcggcgccggggccagggtgcccaagccggtcggggtgagcggcgctgggaccggtgcgggcagcggggaggggagcggcggccgaggcaaagggccgccgagcggcggaggcaccgagtaagggtcggcggcggtggcggctgggtccggggcaccgcgcgcccggtgctcccgggtgtagaaggggcgcgggcgcattgctcccggggtcgcgtgcgtgagcgcgggcgccgg

SEQ ID NO: 28068 - DNA, 478 bp, Homo sapiens
  source 1..478: mol_type = other DNA
caacgctgcgcagtaccacagggcagaaatgggtgcttgtggtaaaacaacatttcaatgaatttgttagtcgcctttatcgctatcaaagccaatcgtgacaaacacgaccgaaacttaggttaagtcagctttgcctaagttcgaaccgttctctgcctatgcgaaccatgcaaatacagcggtcgtcacaggccgtgctccgcctccgggagagtggcgtgccgcgagtcgcgggtcccaagtgccgtccgctctgccctgcagcgcgcgtgggaacgcggcggcggtggcctctgggctgcccacggcgaccgcctgcgcgcacgggagcgggtttccgctatcccaccttcccaccccccggcccgcgcaggggctggcgtccgggaagcgcgcggcgatgcttcgcccggcaccgctgcagccacctcacatccgggcgcgcggcggggaaggcggcgccggggccagggtg

SEQ ID NO: 28069 - DNA, 414 bp, Homo sapiens
  source 1..414: mol_type = other DNA
caacgctgcgcagtaccacagggcagaaatgggtgcttgtggtaaaacaacatttcaatgaatttgttagtcgcctttatcgctatcaaagccaatcgtgacaaacacgaccgaaacttaggttaagtcagctttgcctaagttcgaaccgttctctgcctatgcgaaccatgcaaatacagcggtcgtcacaggccgtgctccgcctccgggagagtggcgtgccgcgagtcgcgggtcccaagtgccgtccgctctgccctgcagcgcgcgtgggaacgcggcggcggtggcctctgggctgcccacggcgaccgcctgcgcgcacgggagcgggtttccgctatcccaccttcccaccccccggcccgcgcaggggctggcgtccgggaagcgcgcggcgatgcttcgccc

SEQ ID NO: 28070 - DNA, 757 bp, Homo sapiens
  source 1..757: mol_type = other DNA
gtgcctgtcacttgccaatggacggcgccagctgccccttgttatccggcgatcagggactggggacggggcccgagcgcccctcgccaggccagccgcacctgtggccatgtcaggggcgccgatggcaaggattggcttccccgggccgcgaccccacccgcagcccctcacgcaggcccgggcccagcggcctccttcggaggaagggcggagaccgtactcactgaggggcggccggccgcagggaggagggaggccgaatctcccggcccgggcgcttcaagctggagctagcgcaggcccgcagccgtcctccccggcccggcggctcggtccccgccagccagcccgccggctacccgccggccgccttgcgggcctcgcgcccctgcccaccccctgcgggcgccccggcgcccgcgctcacgcacgcgaccccgggagcaatgcgcccgcgccccttctacacccgggagcaccgggcgcgcggtgccccggacccagccgccaccgccgccgacccttactcggtgcctccgccgctcggcggccctttgcctcggccgccgctcccctccccgctgcccgcaccggtcccagcgccgctcaccccgaccggcttgggcaccctggccccggcgccgccttccccgccgcgcgcccggatgtgaggtggctgcagcggtgccgggcgaagcatcgccgcgcgcttcccggacgccagcccctgcgcgggccggggggtgggaaggtg

SEQ ID NO: 28071 - DNA, 428 bp, Homo sapiens
  source 1..428: mol_type = other DNA
tttttaaattttatttttagtagagacgaggtttcaccatataaaacataatactgcactgcagcctgggctacaactccttctcaaaaaataaataataaatgttttaattgcaaaaattagcatgtagaaaatagacacccaacaagttaattttcctgtttttagcgtaaaatctttcaaataaataatgctttcaaatgttttacaaagcacgtaaaaaagtatttgaactcctatttttaagattattaggatcggcccaaatttaaaaatttaacaaaaagagtgcttattaattacattttaaaatgaagggttacaaaaagagatgagcctggcatttctaattcgggggccgctcggccgcgggcggcgtaactcggggttccgcctcggaatacctcccacttctcttgtctaagagg

SEQ ID NO: 28072 - DNA, 539 bp, Homo sapiens
  source 1..539: mol_type = other DNA
agtttgaaatatagcgatagaaaaaatagttgctcggtgcagggctgcttgctacaaactttcaatttgtaaaaaacacggtatctgtgaagtgcaataaagcgaggtatggctgtactcatacccacctcccacgcggggaaggcttccaggtctcagtgggagtaaggtcgcccatataccagcccttccgctcctgggccacggagccgggaggagggctaaggggcattgcgtggactcgagcaccggccaggagcgcactagacgcctgggaggatgcggtgcccccagggcggcgggagaggatggcaggctccgggccccgtcctgcgccctctcgggctcggaggaacccgactgaggtccttgccgggctcactgccggaaaggccgacgttagggccgggcctcgtacctggcggccgcctcagcgcttcgcgcgcctctagacgccagtctcgcgcgggcccgccctcgtctccacggcgacgcggcgcgcacgaggaccaccccgcccagaccccggggcttgcgca

SEQ ID NO: 28073 - DNA, 532 bp, Homo sapiens
  source 1..532: mol_type = other DNA
actgcactgcagcctgggctacaactccttctcaaaaaataaataataaatgttttaattgcaaaaattagcatgtagaaaatagacacccaacaagttaattttcctgtttttagcgtaaaatctttcaaataaataatgctttcaaatgttttacaaagcacgtaaaaaagtatttgaactcctatttttaagattattaggatcggcccaaatttaaaaatttaacaaaaagagtgcttattaattacattttaaaatgaagggttacaaaaagagatgagcctggcatttctaattcgggggccgctcggccgcgggcggcgtaactcggggttccgcctcggaatacctcccacttctcttgtctaagaggagcagtagcaagctgagctcagagcgcggtggggatgcccagagggtgcatgctccacgcgactgaggctgcgcaagccccggggtctgggcggggtggtcctcgtgcgcgccgcgtcgccgtggagacgagggcgggcccgcgcgagactggcgt

SEQ ID NO: 28074 - DNA, 324 bp, Homo sapiens
  source 1..324: mol_type = other DNA
cctgaggtcaggttcaagaccagcccagctactaggcgagcacctgtggtcctggatcacttgagcctgggaggtcgaggctgcagtgagctgtggtcatgccacagcaatcctccagctctgtagttcctgcctagagctgacccagcagtacccacgtctcaatgagcttatctgtttaattttgcttgtatattaaaagtatttgcatcacatgcagagataactttacctcaaatttaaggtattttaaggatggtgcagttaagaaaccttattctgcaaagacactgtccaacaagaagtcttctgcatcgggatccg

SEQ ID NO: 28075 - DNA, 577 bp, Homo sapiens
  source 1..577: mol_type = other DNA
gcgcggctgcagtgggcgctccaggcctaccaggggcagctcctccaggagggtgccacgcggctcctgcgctttgcagccagcatgaaggcctcccggcagcagctgcaggcccagcagcaggtccaggtaggcccagggccccttcctgtggggagaggctgtgttgtaggcggctcacagtctccatcgtgccgtccgccagtgctgggccggggcgggaagcctcagcccctggcagccatcgtccccttctcaaccgcattgctgctggggctggggatggcacccttgagaccaagaggccacaggcttctcggcctctgggagctctgggccgcctggctgctgaggagccccacgccctggagctgtgagtagcctgtgctcaccttgtcctcgcttccaccctgggcaaaaggttggatgacgggatgggacgggctggtcacggccttgtcacagctgagctgcttcccatccctcccacggcaagagggagagaatggagtgggatttccaaaccctctctcctttgcctgccaaagctcaggagacactggctttttgtcagaag

SEQ ID NO: 28076 - DNA, 400 bp, Homo sapiens
  source 1..400: mol_type = other DNA
tcccctaaaagcattaagctgattggtctgatcccatgtgggcggtggactgccaagccgcagactagggccctccgatctagcggggtgggaagacagcatgcatcatccatcccatggggccttgtagcttcaagatgggatgcgggaaggatcaaggatcagcacgggaggccagccacgggctgcagacaggcggctcacagaccagcggacagactggcccttgggagcagccgggcccaccttgctggttgagtggggaaaggggccctcgggttgggcggacggcccagcaggactgggtttaagggtggctggggtcggcctcctgcccccgcccctggtagtctgagtggctggagcccgagccccgcccactcgccccaaggcttcccgg

SEQ ID NO: 28077 - DNA, 313 bp, Homo sapiens
  source 1..313: mol_type = other DNA
cccagctactgccactgcactccttaaccttcctgagcctcaggtacctcatctttaaaatggggataatgtctcgggcctagctgcgagtctctagtcagtgctcagtaaaaagtagcaaaaactcgttttcctcttacaattgaagataggaaccttatgatatgacaccatgctcaccaagcccaggtctacctccgcaggtgccaagcgggttaggtggggagtagccacagggcggagcttagtcggctccgcccccaaactcgagactcgtgacgccttaagcgtgcgcccagcgtgtgaagggggc

SEQ ID NO: 28078 - DNA, 249 bp, Homo sapiens
  source 1..249: mol_type = other DNA
gtgattatcagcttagcagatgaaaaagtagggctgcattccttcagttgttggacccaaattctgccagatcccagctactgccactgcactccttaaccttcctgagcctcaggtacctcatctttaaaatggggataatgtctcgggcctagctgcgagtctctagtcagtgctcagtaaaaagtagcaaaaactcgttttcctcttacaattgaagataggaaccttatgatatgacaccatgct

SEQ ID NO: 28079 - DNA, 426 bp, Homo sapiens
  source 1..426: mol_type = other DNA
agacaccgattctagttataaggtctctctggcttcaagaggggaagcagggagtccctagctggcaattgtcaggagtccttggccagagcctgaccagtgccctgggtatgaccaaaggaggatagtatctgcctcctgcatccatcaggtaatagggatgcaatgattacataaggtcttattaataacctgagggggggtttgaaaagccccccgtaagtggacacttccgcctcttagctgcccaatgaggccacatgagtgctctgacggatctcgtttcccctgtggggaggccatgctctagtgctcgaggcgcacacgacgccccgcccccggctcgagccccggatgaggaagtggtgcggccaccgagacgaggcccggcgagagcggcgcgggggcgcgagggcgggaaggagg

SEQ ID NO: 28080 - DNA, 433 bp, Homo sapiens
  source 1..433: mol_type = other DNA
gctggcaattgtcaggagtccttggccagagcctgaccagtgccctgggtatgaccaaaggaggatagtatctgcctcctgcatccatcaggtaatagggatgcaatgattacataaggtcttattaataacctgagggggggtttgaaaagccccccgtaagtggacacttccgcctcttagctgcccaatgaggccacatgagtgctctgacggatctcgtttcccctgtggggaggccatgctctagtgctcgaggcgcacacgacgccccgcccccggctcgagccccggatgaggaagtggtgcggccaccgagacgaggcccggcgagagcggcgcgggggcgcgagggcgggaaggaggcggggccccggggcggagccaccggagcggcgcgggttctcaggttaggcgcagcgcgggccgcgcg

SEQ ID NO: 28081 - DNA, 359 bp, Homo sapiens
  source 1..359: mol_type = other DNA
cggagcggcgcgggttctaggcgcagcgcgggccgcgcggggaacctggagagggtccagccctcagtgccccggccagaggcgggaaggggctctagagcttcggtgagtggagctgcccgccccggacttaggggaccttggcccaggttcgagttccaggctccctcagctgtgaaacggccgaggtttggggaaggaacttctgccttcctcctctttgtggttgccttgctcaggacattggcagcaaaacgacgagtgaaatggaggagtgacttcttccgagagtcagttgcaaggaaaaatctgacattccaaccttttcgtaggcaagatgacttctctgccccaagctt

SEQ ID NO: 28082 - DNA, 492 bp, Homo sapiens
  source 1..492: mol_type = other DNA
ttctaacaaactttaaatatcattgtgagaataatcatatttggaggttttttctcgttctaaagatacactacttttttcaataatcaaatttttttcaaactgcattgtaagatattaaatttggcttcaaaaaataaagaaataaataaacttggcttcttagtttgagaatgaaaccactttgtacatctggcttttatgatcttgttttaagatgtacaaaacaggccggatcacctgaggtccccagctactcaggatgctgaggcaggagaatcgcttgaacctgggcggcagtgagccagtatcatgccactgcattccagcctgggaaaaaaaaaaaaaagatgtacaaaatacaccttctttttggtcccctttcttatagaagaagttgcaagcagtttacttagggaattgcttagagaagaatttacttagagaatgcaagcaagaaataaagattgttctcatgttctcatccttttt

SEQ ID NO: 28083 - DNA, 310 bp, Homo sapiens
  source 1..310: mol_type = other DNA
ggtcaggagatcgagaccatcttggccatagtcccagctacttgggaggcgaatattatatgcatgcagtctgcttcatagtgaagtaaatgaaacaaacttcaaccctgttgttctctactcatgcttaggagaagaacaaataacgggacagtgtaaaaggccatgaggtgggcggatcacctgaggtcagcccagctacctgagctgagatcttaccactgcactccagtctgggtgacagagtgagacctaaaaaaaaaaaaaaaaaaaaaaaaagacagttatctttatttttttgtgatgcaaa

SEQ ID NO: 28084 - DNA, 411 bp, Homo sapiens
  source 1..411: mol_type = other DNA
tttacaaagtcatcccaagattttggtctactcttttaaatagtgtcttaaattaatactaatataatctaattatatcattaatatatataatattaaaataatatataatatataaaataatataatcaaagttttactacagattcatttatggaaggtttaaattaacagcatgaatttttttttttttttttttatgcagtggcacgatggctctggctgggatttcagccctcacagcatgaaatttgagcatttaaggctgctatacatttaactagaatgtggcagttgctataatattgtctgtgacagggttctgaaaagctgtaacatcattattttgttttatttctagtgtttgataagcactacatcaaaccatgatcctgaccaagcagcggatga

SEQ ID NO: 28085 - DNA, 123 bp, Homo sapiens
  source 1..123: mol_type = other DNA
tttttcacatgggaacccagagcaggtttggacacaaaagtactttgaattctaaatgtggacatttttattttaaaatctgtttggaatttactaaaatgccttctcagcagctggtggcaa

SEQ ID NO: 28086 - DNA, 406 bp, Homo sapiens
  source 1..406: mol_type = other DNA
gtgcaatctggaaagagatctttccagatctctgtgtctcagctaaggaggcgctgattagcatcttcagagttgggcaggtgggtccacatcccttagaaccacctcagcaggctccaggagccctcctggtggctgccacacaggcagtctgcagctgccctagggcagcagcggcggcggcggaactccaccagctccaccaaccagaacatgttctgcgagggcgctccagcgccacaggggtgaaaagatcggctgctgaaggacttcacggacttctgcatcaaccacaaccggctggtgaggccagtgccccgtgaggccaggctgcacctgtgctgggggaaggtgggtgagccactgccctcaaacccggggcggaggattccgacaagtcttctac

SEQ ID NO: 28087 - DNA, 416 bp, Homo sapiens
  source 1..416: mol_type = other DNA
tccaataccagccaggattgggaggggctcagtgaccagccagttgggccaccccagctgggtttggactcagatcctggcgttttaaatatggggagaccagctagcggcacagcctgcccaaggcgctgtccccgagggtcggactcgatcctgcccggaccaggctcggggcgggcgggacggctggggcggggctgggcggacccgcccctcggggcacgcggtctcccggccaggggctatgacaatgcactgcctgtgcagccgccatcacggtaaaatgcagcactcgcagagcgcctgcgcggctttcaggccgggcggcggcggcggcggtggctatttatagtaggtgacgtcacctttagggccggcccgcccgcccggcctggcggccgcgtctcctccctcgg

SEQ ID NO: 28088 - DNA, 388 bp, Homo sapiens
  source 1..388: mol_type = other DNA
tcctggcagggtttctgtggctgctctgtggcctctagagccagcccctgcagccctccctctgaaccctggcatgggctgcagggccagctctgtggagggccctgcatcaacagggcaaggaaatagctcccggtgagatcccttcccccagttcaagaatgttctccagggagaacaagacttgactgattcttcagaagagtgctgcacccattgccaagtccttagaaggcatgggactagtcgtggcaggtgatctgaagcctctaggctcctagccccaggtggcctgttccctcaatggagccactccagctctggcaagggcaggtgtggtggcgctgctttgtgccaggcgggcaccaccccctggctggtacctgcc

SEQ ID NO: 28089 - DNA, 511 bp, Homo sapiens
  source 1..511: mol_type = other DNA
ctagcggcacagcctgcccaaggcgctgtccccgagggtcggactcgatcctgcccggaccaggctcggggcgggcgggacggctggggcggggctgggcggacccgcccctcggggcacgcggtctcccggccaggggctatgacaatgcactgcctgtgcagccgccatcacggtaaaatgcagcactcgcagagcgcctgcgcggctttcaggccgggcggcggcggcggcggtggctatttatagtaggtgacgtcacctttagggccggcccgcccgcccggcctggcggccgcgtctcctccctcggcgttgtccgcggcgcgagccacagcgcgcggggcgagccagcgagagggcgcgagcggcggcgctgcctgcagcctgcagcctgcagcctccggccggccggcgagccagtgcgcgtgcgcggcggcggcctccgcagcgaccggggagcggactgaccggcgggagggctagcgagccagaggcgaggccgagccgc

SEQ ID NO: 28090 - DNA, 464 bp, Homo sapiens
  source 1..464: mol_type = other DNA
tccctctgaaccctggcatgggctgcagggccagctctgtggagggccctgcatcaacagggcaaggaaatagctcccggtgagatcccttcccccagttcaagaatgttctccagggagaacaagacttgactgattcttcagaagagtgctgcacccattgccaagtccttagaaggcatgggactagtcgtggcaggtgatctgaagcctctaggctcctagccccaggtggcctgttccctcaatggagccactccagctctggcaagggcaggtgtggtggcgctgctttgtgccaggcgggcaccaccccctggctggtacctgccgggccgccgccccagccaacagctcagccgggtgctccttcctgggctccacgcccggagctgcttcctgacggtgcagccgcaaggcatcgcaggggccccgcgctactgccctgctccctgatcattaac

SEQ ID NO: 28091 - DNA, 362 bp, Homo sapiens
  source 1..362: mol_type = other DNA
tttctgataatcatgatcggcttgtggggatcaagattactcaggattaaattctggccccatcttgagccgtcatggaaacttggggaagctacttaacttctccatctagattgattctgcaaaatccgtaatagtataccactgttggaatactgtcaggcttgccagatatttatcatcaaatgaggacagtggtatcccactatatggttttcaattttgtgtaagaaaaaactatttctcagtccctattttatagacaatgaacgaaatttgtgtataactacatttggtaactgactttagtaaccagggttttctatttgtttcctggcaaccaggtgacataggaaggcaac

SEQ ID NO: 28092 - DNA, 473 bp, Homo sapiens
  source 1..473: mol_type = other DNA
atcgctacactgccgcggcgagtaccgggttggcggcgctatcctgggctacaccgccggtggcggggtgacctactccaggcgcccgaggcccacagcacagagcgggtttggggagttatcccgggctgcgctgcccgtggcagggggcaggctgccagcgccattgggtggactgcactgccggtggcgggcggtctgcaagagaggagcggtcctcctcttcccggccacccaagtgcggcgggcgcacagcatttcctgagcgcggcaggggccccagccccgtggtgcttcctgttgcagagaccgcctgggaccccggggcacgcagtagtacagggcgaggagtgcagccagggtggctgcacccgggcactgtggtgtctgcagtccccactccaggccgcagttccccagctcgaaaaggaaaccggcccctgccacccagtggccagcatgacaaggtgcgc

SEQ ID NO: 28093 - DNA, 289 bp, Homo sapiens
  source 1..289: mol_type = other DNA
gcaatgatgccctggatatcacccccgccccccggccgcgggcagtgcacaacccatctccagccataggctggatagcgcccctcagcgggcagtgtgacgccctggatagggcccccaaccgccacaggcagtacggcctgtcgcggctgtaggctccagcctccagcatgcccgcatgcgctcctctaagccgggcacagagcagctacgcaggctttaaacatagtctgatcggatgagagaaacctctaggcctactctgatcgacttgctgtcatccagtcag

SEQ ID NO: 28094 - DNA, 133 bp, Homo sapiens
  source 1..133: mol_type = other DNA
cgtgatcatgacctgagtcctacatatggtgcttgaagagccacttagaaatgtggctttgtcaagggatatagctcattggtcagaaactgtatctgttctctgtggagggctgtccaggagctggctctga

SEQ ID NO: 28095 - DNA, 206 bp, Homo sapiens
  source 1..206: mol_type = other DNA
cctgctccccactgggagcagcaacccagggagacgcccctgcgcgggcaaggtagcccccgatagctccctgctgtgggcagtgcagacgcaggcaatgatgctgccgctagcagtacagcttgggatagtgctctctgtgggcagtgaggccacgccctggatacaccacgccacgccacaggcagtacggcctgggatggcga

SEQ ID NO: 28096 - DNA, 389 bp, Homo sapiens
  source 1..389: mol_type = other DNA
taggtgttcccttatttctatgagaatatgcaaagcatttgctcaaggagagttggttttcgtcaccaggctggagtgtagtggcactgtcacatgcacaggtgacctgtgcacctagggctgcctggcagctctaggaaatggcaattctgtcaggtacttggcacagaaagtcactggccttcgaggatgcatcatttatgggatcctggaaaaccaggtcccacatgaggctcccaggttctggggctccagctgctgtctacatattctgattggatgagaagaaaaacctctagatctacccaatcgagtaggcctagaggttttctgaacatgtagcccaggaacttcatttgcataaattctcatatataaatgatgccaag

SEQ ID NO: 28097 - DNA, 406 bp, Homo sapiens
  source 1..406: mol_type = other DNA
atgaatggaaactacatactgttttttgcaggtgcttgccgtgaattatgatcccattttagagataaattgaatcttgcgtctttctaatcccaaagtttgattaaagaggtcttgatcatcaccaaaaaagttatttggtgtatatccagattcattctgaaacataaatgttcagctatctttttcccctcccagctgagggtgtaaactcaaggtgttttcataagctgctgaaaagcatttccaaaacaaaagataactagattatactttaaacttctggatttcgcttagctgtagtttagaggaaatcgactaataaagatcctaaagttatacactacaggacagtacctgaagaattttgagcctcggcgcttgccgttgctcatctgctgcggcg

SEQ ID NO: 28098 - DNA, 332 bp, Homo sapiens
  source 1..332: mol_type = other DNA
cgggtggatcaatcacgcagtgagccaagatcgctccactgcactccagcctgggtgacagagtgagactcatagataaaacacattaactaaaatgaatttattggagtctgaaaatgttaagttgcatacaacttaggtttaaggaatgctggaacagtaagtcattaagattccagacaggaattccaatgcagtttaacaccgttttcaatcattttggtaaagccatcacaatttcacaagtggtgtatgtatcacattttgaaagaggcattaaaaaaattcaccactgagatgagtcagacttaattatcttggctttttagcag

SEQ ID NO: 28099 - DNA, 305 bp, Homo sapiens
  source 1..305: mol_type = other DNA
ctatgggccatgaagccctagtcaataactgctgccctggcctacagtgtgggacaacaaatgtttattgcgttaaactttaaaatagttctactcacagctcattgaggcctcgacctggattaacctaaggcttctcccgttggggatgccagcgagcggccgcatctcggcgcctgcgcactgtgcccgcgctctcaggcagcgccgttgcgcgcggagtcatcgatcggccgaccccgagaggcccggttcctttaggccgcctgcccgcctccagctctcggggtcggctccaggaggcg

SEQ ID NO: 28100 - DNA, 497 bp, Homo sapiens
  source 1..497: mol_type = other DNA
ttgctctgtcgcccaggctggagtgcagtaggcagagcatggatcattgcatccttgacctcctagggtgctgggattacaggtgtgaaccatgcctggcctcttacgaaatttctatttctttagtcataagattctttgaaatgttatttaaaagtctcaaaactaggtttaatagcttagcagttcatcataattagcaaatgtagataacttgcaaggttggagttaccaaatagtaaatgtgtagttgcaaattttgccttgattttttataaaagcacttaatgacgtgtataataacctctattcactagattcaggatacttaatataaaaagaataactgctgaatgtcttgcagctcttggcagacttgcatggcagccagccgttccaggattgattctttgaaaaggagtggtgcacatgtgcataagcacatcactgggctctttcatggaatgagatgaatttgtatacatgattaaaattga

SEQ ID NO: 28101 - DNA, 497 bp, Homo sapiens
  source 1..497: mol_type = other DNA
gggagcccttcccttactaagagagcaggctgttttgttttcttcatagccctacacagaaaatcaccctgtgcattcatggatgtccacgggggcaaccgtgtttgttgaatgaatacagccgtttgctctgggagagcacagaaaacagtcttctatcatatatcatagccagagagaaagagagagagtttgggtctttctcctctgtgcctgctctctccagagaaactggaggggtagcagcccctcacctgtggaagcggtcctgctggggtgggtccagtggcccaggtgggcgtggggccagggcggcacgagggctccgctccgaggacccagcggcaagcaccggtcccgggcgcgccccagcccacccactcgcgtgcccagaacgatccgggggcggccccgccccgttaccccttgcccggtctgagggggcgggccccaacagcccgaggcggggtccccgggggcccagcgctatatcactc

SEQ ID NO: 28102 - DNA, 245 bp, Homo sapiens
  source 1..245: mol_type = other DNA
tcagaggcagaggactttcataaggtagtctgaacaaatgaagatattattttcattagtaaaaatagtaacagcaaacactagggtgtcagacagtgttttaacaacttatgaagtaccataattatcttccctgtgttacatagtccaggtacctcttctgatcttggattttaaaaggagttattaatcacagtttaaagtgtgtaaatgacacatttgacagaggactcgtatcctgaata

SEQ ID NO: 28103 - DNA, 393 bp, Homo sapiens
  source 1..393: mol_type = other DNA
ggggccaaaccatgcatcgagcctcccgagtagctaggatggccaggctggtcttgaactcccgacctcgtgaaaagtccacgaggacgatagactttgtcttgttccctgttgcatcctggccctagggcctagcccacaacctgggacatttcctgacaaggggccctggtttctctgaggtgccacctgaggtccgggaggtcagctgactttcctggactgcattcttcgcactccccgaggggcgtctagacactcctgggacccagaattattagctaactgggctcctgagtccggtgacgcgggtgggcggggccgtccgggggcctcgttgcccgagccaatggggcgccgcggcgcggggaggccgggccgccgggcgggggc

SEQ ID NO: 28104 - DNA, 865 bp, Homo sapiens
  source 1..865: mol_type = other DNA
gagcaggctgcatggtcctgcaagcctgcgagcgaggcacgccaagcccgaggcggccgggagccgccggggttgggggaagaagggcggggagctcccagcttgcaccctttcatcccgacccggcccgggatcccggctccgggtgttgcttccgcctgcctgccagccagcgagctgaagaagcaccggggcggagtctcgccggggggcggagcctgtgcgggggcgaactctcggtccgcgcggctgcggcgcttgccattggccggccgctcggtcacggggtcgggggcgggcgccgacgcgggcgccggccccgcccccgctcggaacccagccccggctcgcggtccccacagtcactgcagctgctgagcgagtccggcgctctgggcacgcggaggcggcggggccagcccggagcccggaccccagcgcccgcccctgccggttcccgcgcggcggcccactcctggccgggcgcgggaggcggggatcgcgcgccggctccggccagcggcgcccggctgcccgcggcggctgcagcggccgcccagctccgagcgccgggcgctccgggaagccggcgcatctcggaggcggcggcggcggccaaggccggcgagcgctcccggcggcgggggccgcccgcctcggctccccgcacccaccgcgccgcgatccactcgccgcgctcccggggcgcctcccctagccccgcgcccccggccccgcgccccaggccggggcgaggccttttccggcgcttctttcccgcggagccgcgggcgggcggcgcaggccctgggggagagcgcgccgcggccggttgcagccccccccgcgccgccgcgttcggcgc

SEQ ID NO: 28105 - DNA, 434 bp, Homo sapiens
  source 1..434: mol_type = other DNA
ctttagggccccctagtggctgctttaagacctcaggtttcttaggattcggtctccttgactgtgagataaacagataacagttggtttagatagctcattttttttagcaaaagctgctttacaaataacagatatatcactttacatattttattctgctaaaaaggctatataactacatcctacttcagggtttccatgtatatgtatatacatatttagttgcttggatttccaacgtaatactttaaacctgcaaccttgatttgataaaacaaagcttttccacatctaataaggcattatgattccatctagagaatgtactacacttgagtcattataatggattaatatgctaatgtgctgtaataatgcattttacaccactaatgaagaaaaagaaagtacaaattctccctttaacttta

SEQ ID NO: 28106 - DNA, 274 bp, Homo sapiens
  source 1..274: mol_type = other DNA
aaaaaaaaaaaattctcctatagggtttacttgctactaaggggcacagctcctaaaatgcactcttctcagggagtggagacagaagatctagattctaacatccaaatttacattcggctccttgtggccagcatggcatcatggacatccccaggggaccctggaatgcttttcctgatctgatatttgcaagccatggaaagcaggctgacagccagcagacctggctgagtaaacatgttttattgggttggttacacagtaatttgga

SEQ ID NO: 28107 - DNA, 362 bp, Homo sapiens
  source 1..362: mol_type = other DNA
caagttagatcttgaagaataaataggagctttctagctgcatgttgctagctagatgcatgctgggcatgatggcacgcgcctgtaatcccagctcgggacaggcggatcacctgactgggtgtggtggcacatacctgtaatcccagctacttgtcatgccactgcactctataagctcatgttagcagtattaggaagctattgtaatagcccaatgagagatggcccatctattggggcacatttttcttttacatttgtaccatagtaattatggaggggacatttattatttgtcttcccagaatagatcccctttcttttatagaaggactatgtggtatcccaggaactatcac

SEQ ID NO: 28108 - DNA, 267 bp, Homo sapiens
  source 1..267: mol_type = other DNA
tatatatatatcactctccaggctggagtgcagtagctgcctgacctcaggtgatccacccattggtcgaagttctcaatggcaaatcagaaaaattgtaaaaatgtagatgattcgccatgcaaattattttactgtacattgttacaaagagcacactgctattaaagattcagaataagacttggagtaatactacatagcaaaataagtgccagccgggattccccctccggagcccgagtctgcgctctgggctcgactgag

SEQ ID NO: 28109 - DNA, 544 bp, Homo sapiens
  source 1..544: mol_type = other DNA
acttcagggaccccagaaattcagcttttgtcaaattctcaaaggagactgtgacctaaataaaatattttttaaaaatggttacgagtccttatctaattccagtatctagagaaagctcacacagggaattgcgctgcaattcattaaattgccctctgatttaaggtacagcccagagaggctgtcacccagggtaggtgtcacagtgaggtcccaaggactaagggctatgaccctaagagtctctcacccaagtcacttgacccagtttcccaaatgtgtaaagggtcctttagacctcgccctaaaaggtcaggggcgtggctaaagaggaccgcgcttcccgggccccgaccccagaccctacatcgtgtgtgacgcccgccgccgccgagcaagccgcagtgaggtcatcgccctccgcctcgggggcgggaccctggcgtctcagggcggggcttgtggtcgagcttcgcggtgccaccgccccgcccacgcctcctcgccggcctccgagtgcgtcacgtgacgggtcggtggc

SEQ ID NO: 28110 - DNA, 417 bp, Homo sapiens
  source 1..417: mol_type = other DNA
gttcacccagcatgcagaattgattcaataggcgatcagcaagggccagctctgctctgggccctgagcaggcactgagtataagtggaagagtgtcccacgcattccagcgcaggcggggacttagtctcctccctggaatactagagtctctgttttttgacaggaactcaaaaaacagatcctaaatgtacatagacagcagagggttgctaagttccagcgctgcctcccagctttctggaaccttctgggacgcctggggtgcatcaagtcccaaccagagcctgcagcttctcatcctctccaccccacactggcccggggcgggctgggcgcgggcccctgcgggtgttgcaacgcccggccagcagctgttccgcctggcccacgtgacccgccgagcataaatgtgac

SEQ ID NO: 28111 - DNA, 463 bp, Homo sapiens
  source 1..463: mol_type = other DNA
cgagattgagccactgcactccatcctgggggacagagtgagactccctctcaacccgggtcggggacgcgggtgagccgcgcggtaatcgccctgtcctgccaccagctggaggacaggggctcctcagagcctcaggcccagagaaagtctcccaatgcaaaatgggcacctggatgaaaagggtcattttttttcataggactttaaaagaaggcttaagaaaagcacgcaggcctggccgccagtgctttgggacgtcgagactccgtctttatgaaatattttaagaaaatcacgtacagattgcttgagcctttcgcgccaaattgttccgcacacaaacagccaatcatcttcggcagacagtccgggcggcggggctggagggctcagaacggtccaatcgctggccgcgaggctccggcgaaccaatgggagcgcagcggctgcggcgtccgaa

SEQ ID NO: 28112 - DNA, 659 bp, Homo sapiens
  source 1..659: mol_type = other DNA
ctgttaggtgctaatgggtatttaacacctaagccttggcaggccacggtttccagctttctatttatggcaagtgaaatgattctctaaaaaaacggatctgatattttaaaaaatatattaagtaataagtggcccagtgagaaggcccgatgtctggcctaggtcaagcccctcctcaaggcacctggtgtgtcggccgtggtctctgagactcgcatgcccctctgggcgacacgtgcatggcccatgtgccagtccgcagggtcccgtgggcaccgtgagctcgggacctgggagggcacccggggacttccgcgaaggaggagggcgctggaaccgtggcgcgctcgacctggccgggcgcaagccgctggagaccccggccgagtgggcaggcggccggaccccatgcgggtcacctgcggccaggccgggcgtgcgtgtgagcgcgtgcgcagacgtcagcctccgaggcccgggccgccttctgggcaaggtgcgcgcgcccagcggccccggccccacgcgcccggacacgcggaaccgcagaccgcggcgccccggaggccgcgaaagggatgggcggggccgggccgcgggacccgcctcccattggccgggcgccggggcgaggcggggcgccggggtggggcggg

SEQ ID NO: 28113 - DNA, 709 bp, Homo sapiens
  source 1..709: mol_type = other DNA
ctcaaggcacctggtgtgtcggccgtggtctctgagactcgcatgcccctctgggcgacacgtgcatggcccatgtgccagtccgcagggtcccgtgggcaccgtgagctcgggacctgggagggcacccggggacttccgcgaaggaggagggcgctggaaccgtggcgcgctcgacctggccgggcgcaagccgctggagaccccggccgagtgggcaggcggccggaccccatgcgggtcacctgcggccaggccgggcgtgcgtgtgagcgcgtgcgcagacgtcagcctccgaggcccgggccgccttctgggcaaggtgcgcgcgcccagcggccccggccccacgcgcccggacacgcggaaccgcagaccgcggcgccccggaggccgcgaaagggatgggcggggccgggccgcgggacccgcctcccattggccgggcgccggggcgaggcggggcgccggggtggggcggggcgagcgggctctggggggcagacgctggcgctgggcggcgggaggcgcggctcgcggggggccgcgacgctcgcaggggcgcgggagggtgccgctgggaccgtcatcaggagccacctttcggagggatcagcgacctcttcgccctgcgggtgaaagttctcctcatctggggacaggaggagggggcggcgttcaaggccccctcccacacgcgcgcagagca

SEQ ID NO: 28114 - DNA, 231 bp, Homo sapiens
  source 1..231: mol_type = other DNA
tgtttccctactttctctcaattaaatagggataatgtcagtacctattgtttgggacagggcctggcacccagcaaagtctcttgggagtatgtcaagaaaaacttttcagagggaaacctttgtggccaggactgtcctggggccagccggggcacctggtggccaagcttagatgtcggctatgagagtccagacatcccatgtgagcgatctttgtcaagcatccca

SEQ ID NO: 28115 - DNA, 393 bp, Homo sapiens
  source 1..393: mol_type = other DNA
cagagcctaggctggttcttagctgtgtaatcacaaacaacccacaacttaagcctgggtttcctcttccttaaagtgggagacagagtatcacaatcctatctccaatccttattaatatttctgcagtgactgtaaatattcaaattaaggtgaattcatgccagatcaggtcaggttttgccactaaatgaataaattatcatttttttttaagttttcaaatcccaggtgcctgtaatctcagctaccattgcactccagaaacaataataataataataataaaataaagtttccattttcagaggattctgcattcagagttattagccctttaatgctgtgcacctcatagggttgttacccacatcagcgtcacgtaagatgctg

SEQ ID NO: 28116 - DNA, 191 bp, Homo sapiens
  source 1..191: mol_type = other DNA
gtgagccgagatcacaccactgcactcctgtaatcccagctactagtgagccgagatcccaccactgcactgccaagaaccttcaggatcacattgtgctcttcaagcgctgatttttttctgatgagaagaccagaatatttatgcaactcccttgagtagttatatatttaaattccagttactgtcat

SEQ ID NO: 28117 - DNA, 334 bp, Homo sapiens
  source 1..334: mol_type = other DNA
tattaatatttctgcagtgactgtaaatattcaaattaaggtgaattcatgccagatcaggtcaggttttgccactaaatgaataaattatcatttttttttaagttttcaaatcccaggtgcctgtaatctcagctaccattgcactccagaaacaataataataataataataaaataaagtttccattttcagaggattctgcattcagagttattagccctttaatgctgtgcacctcatagggttgttacccacatcagcgtcacgtaagatgctggagctacagagacgagagactcaggcctcctggttcatccaattagagaaact

SEQ ID NO: 28118 - DNA, 501 bp, Homo sapiens
  source 1..501: mol_type = other DNA
gttagaaaagaatgtttcattttcatgcctttgttactggcaaagaaaattttcatgtataaatcacaatcacacaggctttaaaatacatttgaaggagagagagtaggaaatggaagatacctctcctccctctgtctacaaatggaaaggtgaatgctcttccacagttctccctggcaagctttttcctttatgtataggttaagaggaaatgatgaggctctgatttatcaatgagaaatcatttacactgtaggacattcaaatcctttagtctcagacttgtggaaatttcatcactggacagtgctttcctttcctctcccagtaaccaccggagggcgagagagccatcatctgagggatattttcccattgggacccagaggaaagaagtttcaaatatatcttttcaaagtaatttttcaccaaatctgagtttagaaaatttcaacaaactccttcctcttttggaaaagcggagaagcttttgaaatg

SEQ ID NO: 28119 - DNA, 556 bp, Homo sapiens
  source 1..556: mol_type = other DNA
agaccaacttctggactgaaccacatctttgatgcattttttaattatattattttaataagagaactttaaagaaactcttattgtcagtattctcctaaacctgtagctacagcattctataacaattactatttacaataatgacacaaatttctagggtatatataagaaaggatttacctttttcaataaaggctgaaacaaaaggtgaattttcagttaaccaaaattttattgaagctggaagccttaagcaaatttgcatgcacctttgttcagagtctccaggtattttttatagtaggaaaaaaatcatttaaattatcttccaggacaagcaagttcttgcatattcctgttccttgaatgcatctataaactgtacatcagtaaaaatgttttattaatattaaaaataattttgtttcatttcttatttgacatctatagtaagctgctatgaatgcttccagtgctatataattaattccatcatacacacgcgtgcgcccattctccagcaggcctgcttctggactgattaattacctta

SEQ ID NO: 28120 - DNA, 669 bp, Homo sapiens
  source 1..669: mol_type = other DNA
cgggaggggaagcaggcaaatagcctgcctctcacagagtgcccattccctctccgggaaccaggtgcaggagccactccctggccttcgggtctctcaagccccgcctgctctgccccgcactccagccgcgctgtgcctccaggacacccaggcccgtgccggagattcccgagcttccccgatcgcttcccggcctccctcgggcagccagcgaggagactacggagattgccgagggggcctggccccgccccccccgcgggccgccaccgcccccctcgccgtagcctcccgcgcgggctggagttctaccgccttcccggtgctgccacagtggcgggtcggaggatcccggccagtcagctcgcctcgggagcccggaccgcccccttcctccctcggccggcgtgctgtgagggagagtgtgagccagcgcggccggtgggcgagctccgggagtgcgagaggcggggcggcgcggcgggccgggccgggtttcgcgtgtgcgtgcgggggcgcgagcgagtgctcatcacgacccgccagtggccccgcgccgacaacccggcgggcgggcgggcggggagcaagggcggccgcgaggcgcggaggggcgcggagtccgctcgcgcgcacgcacgcacgcacgcgggggcgggggcaggc

SEQ ID NO: 28121 - DNA, 557 bp, Homo sapiens
  source 1..557: mol_type = other DNA
cagtctgtaggggagagaatccgaagaaagagaatatgttctcgtgttctgaattcccaggatttaactaaggttcagtttcatcatcaatgaaatggagatcatggtatctacttatactctaaagctcttacaaacacgggtattattactaacttcattaggaatgtgagttatattagagtcgggaggggaagcaggcaaatagcctgcctctcacagagtgcccattccctctccgggaaccaggtgcaggagccactccctggccttcgggtctctcaagccccgcctgctctgccccgcactccagccgcgctgtgcctccaggacacccaggcccgtgccggagattcccgagcttccccgatcgcttcccggcctccctcgggcagccagcgaggagactacggagattgccgagggggcctggccccgccccccccgcgggccgccaccgcccccctcgccgtagcctcccgcgcgggctggagttctaccgccttcccggtgctgccacagtggcgggtcggaggatcccggccagtcagctcgcc

SEQ ID NO: 28122 - DNA, 251 bp, Homo sapiens
  source 1..251: mol_type = other DNA
ccactccaggtgaaggtagcaggtgctcctggcagaagggctcatgctgaggcaggaggatttcaccccttcaaaatcattttttaaaagtagccaggccgagtggccagctactcagggttcatttgaaccctggaatttgaggctacatcttcctgaagacacagcaaacccccaaccctaagtatgggaggcaggtgggttggcctgctcttggatcagcaaccaagggtgctgctggaccaaggatg

SEQ ID NO: 28123 - DNA, 484 bp, Homo sapiens
  source 1..484: mol_type = other DNA
tggcaaattttgatatttttagtagagtcagagtttcactgacctcaggtgatccacccgccttgcgaaactttgctttaagtattgcaaaccgtgcttctttctaatttttaatttgtaagaggtaaaactctattcaattttccctttaagtcttctgggaattgagttttgattcgaaaggtcttcccaactcaacatttttggagaagaatttgtttcttcttcttttaaatgtaggacctatttcatgggtacctactacagacaaagaagaacaagacttttttgtgtgtattctaagggaaatgacctctttcccgtaaaagtcccttcatggacccggagggagctgggcccagatgcaggcctgggccattgccgaaaccatggctatgatttttttctttctcctcgtacaaaagtaataagtgaaatcagagtcatggtcttatttgttcttccccaaaaagagatgagcatc

SEQ ID NO: 28124 - DNA, 160 bp, Homo sapiens
  source 1..160: mol_type = other DNA
tgcagagtagctgggactacaggcatgagcagatctaggcagcaatgagctaggatggcgtcaaagccctgcagccttcagagccctgaggtgggagggagggctccctgtctgggctgcacaattgttttctaggaaccaaaatcacttccgggacact

SEQ ID NO: 28125 - DNA, 314 bp, Homo sapiens
  source 1..314: mol_type = other DNA
ggttgcatgacttcttagccatagaagtctccaccctgtgtgcctcgggagtggaacacggggcagtgagccatggccttcaacaagagcaggcctggtgcggtggctcgtcaatatagtgagacaccatctctaatataacttttttaaaaattagctttgaaactgcagtgcactatgactgtggcggtgcacttcagccttggctacagagtgagaccctgtctcccacttggcatccaaccccgaggatgccaggcaggtgggttgacctggaggtctggtctcaggctgctcctctaagcgcagcagca

SEQ ID NO: 28126 - DNA, 374 bp, Homo sapiens
  source 1..374: mol_type = other DNA
ggtggccacgatgcccctgtctttgaggcccttctgcctggggcaaagcacaaaagtccaggttgcatgacttcttagccatagaagtctccaccctgtgtgcctcgggagtggaacacggggcagtgagccatggccttcaacaagagcaggcctggtgcggtggctcgtcaatatagtgagacaccatctctaatataacttttttaaaaattagctttgaaactgcagtgcactatgactgtggcggtgcacttcagccttggctacagagtgagaccctgtctcccacttggcatccaaccccgaggatgccaggcaggtgggttgacctggaggtctggtctcaggctgctcctctaagcgcagcagca

SEQ ID NO: 28127 - DNA, 288 bp, Homo sapiens
  source 1..288: mol_type = other DNA
taggctgggcgccgtggctcacacctgtaatcccagcagtcaggagttcaagaccagcctggccaagattgggagtggcaggcacctgtaatcccagctactcggaagctgagatgctccagcctgggctacagagcaagacatccacccagcatgtgtgggggactgagctccactgaggcttgagtctgaccctgctgcctgagacatgggcagctgacacagcagaccttgaatcctgagcggctgctcctctaagtgcagcagcaaggaggctgggcctggact

SEQ ID NO: 28128 - DNA, 299 bp, Homo sapiens
  source 1..299: mol_type = other DNA
atgacttccatgccctccaccctgtgtgcctcgggagtggaacacggggcagtggcctctgctgaaaggtgctcgcatggccttcaacaagagcaggcctggtgcggtggcagagtagcccagtcaatatagtgaggcaccatctctaatataatttttttaaaaattagctgggtggttgaccagctactaagcccagggtgactgtggcactgcaattcagtcttggtgacagactgagaccctgtctcaaaatagacccccagccctgaggatgcgaggcatcctctaagggcagc

SEQ ID NO: 28129 - DNA, 444 bp, Homo sapiens
  source 1..444: mol_type = other DNA
gaaaacttttacactggtggtgggaatgtaaactagaggagaaaagttattatataaaaaagatactcgcacatgcatgtttatagctgcataatttgcaactggatgaagaaaatgtgtgtgtatatacacacacacacacacacacacacacccctatatatgtatatgccatggaatattactcatccgtaacaatctggatgaagttggacaccattattctgagtggaatggaaaaccaaatattgtatgttctcatttattagtaggagctaaggctgggcgccgtggctcacacctgtaatcccagcagtcaggagttcaagaccagcctggccaagattgggagtggcaggcacctgtaatcccagctactcggaagctgagatgctccagcctgggctacagagcaagacatccacccagcatgtgtgggggact

SEQ ID NO: 28130 - DNA, 499 bp, Homo sapiens
  source 1..499: mol_type = other DNA
caagtataatagttctataaacagtgtttggattacaaaaattatcttaaataaattccaaatggatcaaaagatttttcatttaaaaatgaaaacattttttatcctcttgtagtggacagtaacaaaaaaaaagtgtcagatcataattatgtaaaatagcatttttcccatatatggtacttaatatctgactgagagcacagctcgcggggcggggtgtcagagggctcccgcagggcctcgccccggcccaggcaaggcaccaaaaccccggcccggagctctccgcgccccgagtcgccgttggacccgccctagagggcggggctcccgcctaggaagcgcgaggatgttgaatccccacccatctggccgcagacccatcaaggccaggcgcggcctgcagtgagggggcgggattgtgccccaggctccgccccggagccggctcccggctgggaatggtcccgcggctccgagggcggggcgggagccg

SEQ ID NO: 28131 - DNA, 299 bp, Homo sapiens
  source 1..299: mol_type = other DNA
ggatcacttgagctcaggagttccagaccacccagctacctgcagtacgccactgcactgagactctgtcattaataaataaatatatgtaaataaaataaagcaacgcccccgccttcgcccagaccagggcccgcccgcccattgcttccggtccgtagctgaggccccgccccttcaactgtgcccctcaaattggagagggacagatgggcgctggcgcgcgcctctagagccgagatcgcgccactgcaccccagcctagagcgagacctcttcctgccttcggaagtgacgcc

SEQ ID NO: 28132 - DNA, 379 bp, Homo sapiens
  source 1..379: mol_type = other DNA
cttttaaaaacgctctttcagctggtatattcaggacaacttgaatctctgctccgagttgcagctttaggcggacacagacgagggccacttaacatataaagggcatcatgcctttgaggagcttagctttacatattaaatggaaacagaacctgtcaaggatcacttgagctcaggagttccagaccacccagctacctgcagtacgccactgcactgagactctgtcattaataaataaatatatgtaaataaaataaagcaacgcccccgccttcgcccagaccagggcccgcccgcccattgcttccggtccgtagctgaggccccgccccttcaactgtgcccctcaaattggagagggacagatgggcgc

SEQ ID NO: 28133 - DNA, 220 bp, Homo sapiens
  source 1..220: mol_type = other DNA
ctgtctctacaaaatttttaaaaatcattagctgttgagctcaggagtttgagaccagcggcaggcgtggttgtgctggacacgaaaccctgtctctggcggttagaaccctaagcgcgccgcgaagcattgtgggacacagaagggcgccagtcgctccccgcctcgagcttcgattgcgcggccgcctttgggcgtccggtcgtgtttacggcggcgc

SEQ ID NO: 28134 - DNA, 361 bp, Homo sapiens
  source 1..361: mol_type = other DNA
aaaagtaaatgacattctttgaaaatttttctaaggagaatctccagccatgcaaatctgcaggctcgcagttctgggccacttgccacccctgggaagccacagtacactgagtcactgtgccagtcccacaaaactgggtaggccaactagtttctccgtgtagagaggcacctttctcgcgggtgcgcgctagccccaggagcccccggagcagcgaacgcagcacgcgcgcgcctctcccgcgctgggccggagcaggcagcctgccagctggtcccggcgtgccgcgcgccgcgcacgtgaccccgccccctgccattggtccgggcgcgaggggcggagccgccgcggagcaagc

SEQ ID NO: 28135 - DNA, 693 bp, Homo sapiens
  source 1..693: mol_type = other DNA
acaaaactgggtaggccaactagtttctccgtgtagagaggcacctttctcgcgggtgcgcgctagccccaggagcccccggagcagcgaacgcagcacgcgcgcgcctctcccgcgctgggccggagcaggcagcctgccagctggtcccggcgtgccgcgcgccgcgcacgtgaccccgccccctgccattggtccgggcgcgaggggcggagccgccgcggagcaagcgagccaagcgcggcctcattagaccacgggttgcagccggagctggggaggccggagctgcgggcgtagggacctggcggctcctgaagcgcacgcgggcgggcggcaggtgtgcgcggcatccctgtcacgtggccgaagagcctggggcgcgcggaccctggcagggggcggggcgcacgcaggccacacccacttcaggctcccacccggtcgctggagagggccctctggaaggtccaacctggagggtggttccctcaaattaggggaaaattggggagtacgctctccttccccagggtggagggaggggctcgggattccggggagccccaagtcccagcttgaaacggtggagtccgggcaaagctctgaggacggcttctgggcctggccgtgacccagattgcagtgagagttcccgcaggccccgcctctttctgggcctcgtgtctccca

SEQ ID NO: 28136 - DNA, 358 bp, Homo sapiens
  source 1..358: mol_type = other DNA
ttatctcttcccaaccagtttatgaatgacataggatacttagaaggaatccttgcaatgaaaatcgaataatcttcccaaaatgtctgcttgtagaagcaagatttggatgatttaaaaaacacataaagacgtgtttgtaattagagagagagagagagagagagcgcgagctatctctagctacgccttcctctaagctccgggagcccaggagagcgaggaaaggcggcccccgctctgcgctggccttgctgccccggggagggaggactctggccagcgcccccctcctggcgggcggccctgggagccagccggggagcgcgcggagcgggcggcgcagggagctgtccgg

SEQ ID NO: 28137 - DNA, 295 bp, Homo sapiens
  source 1..295: mol_type = other DNA
cctaggcccatcctgaggctgagggccagggatttaggtctctgaccccattctccttttgcagagagtaaatggactaaaactttaataaaacaccttcatattttagattttaacgctcattacatctttgagcttttaaaatcagcggcggcctggcccactgcgcaggcgccgctccagaccgcctagaggagtggcgaatccctattcctcccgaagccagactctgaccaatcagaaagcttcgttgacgtcaattacaaccactcgtcaagcagactgaacttgaaga

SEQ ID NO: 28138 - DNA, 554 bp, Homo sapiens
  source 1..554: mol_type = other DNA
aacaccctacccttcttccaaacacatatgctgggagggagcaccctactctgcccaaaaaaggtttataggagtagggggagtctggccatgatgccaggaccacatcaaatcaggttttagaattgcatccctggccagatgtgggatggggcacccgaagtgggccccagcagctcctgccctgcgtcgggtgggtcaggtttcaggatagcgctcagacaggctggccgctgaaggttcaggatcttcccccacgcggcaggacatccgccccagatctgagacggcaggtggactttccagacccagctggtgacgcgccctggccgcagcccctgggatcccgcggacccctggcctggcggtgcaggagtggtagcaggtccgcgcgccttcttgccggcggccggcgctgctcagcggcgcggctggactgagccgctcccgctgcgctcagagtccgggcccctggcgccatgccaggcccggcgggcgtgcgcccggcgcgcagcactgcagcgctggtcatatgagcagaaatgatgagaaaa

SEQ ID NO: 28139 - DNA, 403 bp, Homo sapiens
  source 1..403: mol_type = other DNA
ttgcatggagcctgggattcctcgtgtcactgtgaagaacaatctttccctttagatattcactacgtatttattgaattcatttggtcagagatcagggcttgggcctttgtgccttcggaacatttccttccccaaccccaggcccgtggctttgagcagcggctgtatcagcataggaatggggctcagccccatgcacagaggatcctttcctggcagaatatggaggaaggaagcatcgctgccatctacagtggtcacggaaggcttcatggaagaggcgagccctgcctgggcctcggggccaagagttattaatagtcttggcctgatgggcccaggggctgaatgtgatacagacacccagcaccacggtggctacggggagtgccacctcccg

SEQ ID NO: 28140 - DNA, 439 bp, Homo sapiens
  source 1..439: mol_type = other DNA
aagggagggggcagctggagccagcggaagggcagccatccgtcagggaacttgagttactgggcagctggacagctgctctccctggtccccacatgggaccactgacgtcgtcacactgggacttagtgcagcccaggatctagaacccaggcctcctctagaagcagctggttgcagcttgaaacgggtctctggctgcatacagataggcaccgacaccctacccttcttccaaacacatatgctgggagggagcaccctactctgcccaaaaaaggtttataggagtagggggagtctggccatgatgccaggaccacatcaaatcaggttttagaattgcatccctggccagatgtgggatggggcacccgaagtgggccccagcagctcctgccctgcgtcgggtgggtcaggtttcaggatagcgctcaga

SEQ ID NO: 28141 - DNA, 155 bp, Homo sapiens
  source 1..155: mol_type = other DNA
attcactgaatattggttgagcacttgcaatgtgccaggcacgctgctagccaagcttcagggcctcaggactttatcctgagcacagagggagggtgaaactcactctgattggcagccccttcctggagggattcctgctaggcccagagagc

SEQ ID NO: 28142 - DNA, 415 bp, Homo sapiens
  source 1..415: mol_type = other DNA
tgactcagagtcctctgtgctcctgagggcatccaggcccgcagcctcccagtgtccagccctggagaagcccctgcagggtttttccatgccaggcagggacctcacactgaccggagtgcctgagagagggtgaggccctgccagctcttcctggccaaccctcttccggcttcgaggcaggttgggaggcagccccacttttcatatttggttcaccgtgggatttttttaaaccatattgcattaaaatattacttacaacaattactgaatttttaaatgcctgtttaaattttgagcacgagagactgcctcactcacctgaccttaggagccactcattcattcattcattcattcattcattcattcattcatctattcattaaaggtgcaatttctcctctgtacc

SEQ ID NO: 28143 - DNA, 435 bp, Homo sapiens
  source 1..435: mol_type = other DNA
acttttcatatttggttcaccgtgggatttttttaaaccatattgcattaaaatattacttacaacaattactgaatttttaaatgcctgtttaaattttgagcacgagagactgcctcactcacctgaccttaggagccactcattcattcattcattcattcattcattcattcattcatctattcattaaaggtgcaatttctcctctgtaccagctaccacttgtagggggttctcctgtggccagctctgagctaaggtttgtagatgcttctgcaaaagtaacagacttggaagtccaacacagatctgtctggctctgggctcaaacccatccccatcaagcagtcagggaaggctgcatggaggaggccctgcgtcacaaagtaggcctgggccggcactgcctgtttcctgatgacatcaacataa

SEQ ID NO: 28144 - DNA, 261 bp, Homo sapiens
  source 1..261: mol_type = other DNA
tatgcttttaagcttaaagagttcaaaggcataggatgtaacattttacatttaaatttataattaacttgttatttgaatcaatgattttagcatttttttaaatttaatatttccatgtttgtgtgtatatgtgtatatatgtgtatatacatgtatgtatctgtgttatatatgttgagtgaagcttccaactaacagaagaaaaggagccacacttgtctgttctgctctcttgggtacttcccagaccagtgaaat

SEQ ID NO: 28145 - DNA, 337 bp, Homo sapiens
  source 1..337: mol_type = other DNA
catgtttgtgtgtatatgtgtatatatgtgtatatacatgtatgtatctgtgttatatatgttgagtgaagcttccaactaacagaagaaaaggagccacacttgtctgttctgctctcttgggtacttcccagaccagtgaaatgacatgtgtgtgtacatgtgttcatgtccaggggatgacactgtggcagagcttagtaggagtcaaatcctaggcttcatgccgcaggagactgagaggtcatgcatgagggccacttctctgggttgtccccacaacacgggcggtgtccctgggacacgtgggaggggcagctcactgctgacatctcct

SEQ ID NO: 28146 - DNA, 305 bp, Homo sapiens
  source 1..305: mol_type = other DNA
caatgtgctacattttgcaaaaaattgttttatgaggacttggccagtctcttatctaataagtgacaggcccagatgcactctctgtttcctggggaaatcctgaaaggctgggcttgcaggaggcaatgggccagtgctggcaccaatgacttctgcctccttcttctctgcagaaaagaagtcacttaattttgttgatcagacagctccagatgccctgtgcctggcacacctggcatgtagtgtgggcctatcagccctctgaggtaacagagccctgtgtatagtgatcaccatggcac

SEQ ID NO: 28147 - DNA, 522 bp, Homo sapiens
  source 1..522: mol_type = other DNA
taccacgtgggcttcagaccagggatcaggcccggcctcaactctggagggttattgtgggaattaagcactcactaacaagttattgggcccaagcggaccctcttccgcccaggtcccgcgcgggagccccgcgccgagcacccccgccgccacgccgcggcagttacccgggtctcggactcccggcttcctggctccgccatggcccccgcggcgcggcgccccctccccgcgcccgcagctcagcccaccgccgcggccactcggagccgctgctgcccgcgccttccactggccgggccgtgggggtacgcccgctccgcccagcccaggcccgcgcggcccccgcgccacccggcgtccccctcagacccccgcgggtcccggaggccccgcgcgcgaggttggcaggtgccgggcgcgaagcggccgcgcgggggaggcgcgggatggcggcgggcggcgcagggtccccctctggcggtggcgcgatggtgcgcgccgcctggggagctgcgg

SEQ ID NO: 28148 - DNA, 310 bp, Homo sapiens
  source 1..310: mol_type = other DNA
ctggtgccagactgactgcctagtgagaagcctggcaccgccgggtgcaacgagtagctgggattacaggttggccagactggtttcaaacacctcaggtgatccaccaggttagtataatataccaggcctcttacatactggagagtctactgtgtcattcagtggtacccagcaaggactcagtaaattctccacccaccctcctgcccagcaagtggaggtgaggggcgtggcctggctctccggcctggcagagggaggcccctggctacccaccttgcacgggccgcacctcccccgccggccc

SEQ ID NO: 28149 - DNA, 765 bp, Homo sapiens
  source 1..765: mol_type = other DNA
ggagaagctctttctccctccgcactcccccgggttccttgtttacagcaagccagcgaggctgggccctctggaaagccggccccgcccctcccagccggcccgggggcccagcgcagaagcgggtgggtcctagaagttacagtactcgatcctgggcttagaatcccctttccttccaaggcagagggggtgggcgcacggctaggaagctccgcgagccgcgcacacgccatcgcctgcggcctccccaggcagcccgagctcgcccgcctccagagtgcccgagtccggcccgtagctcgctgccctctgccctaggtggatcaggggttcccggggcaccccgtcccactctccttccccgggcagcaggtggcccgaccggcggcccaggcgcccggccgctgcccccgccccgcactcactcgccccggacgccgcgctggcgctcgccccggccggctggagaagttggccggttcaaacccccggccgcagctccccaggcggcgcgcaccatcgcgccaccgccagagggggaccctgcgccgcccgccgccatcccgcgcctcccccgcgcggccgcttcgcgcccggcacctgccaacctcgcgcgcggggcctccgggacccgcgggggtctgagggggacgccgggtggcgcgggggccgcgcgggcctgggctgggcggagcgggcgtacccccacggcccggccagtggaaggcgcgggcagcagcggctccgagtggccgcggcggt

SEQ ID NO: 28150 - DNA, 356 bp, Homo sapiens
  source 1..356: mol_type = other DNA
gctaaggagacagcttcctcgtcagcccttggtcccggaccacatgaggaactgcctccgagttaactggggaataacatccctcctccttcttagggaggacgtggcaaggatccctgacattccatggtcagggagcaggaaagacttggtgggtactcactcaccagcaatgtgagtattcttcccttatcagctgttcaccaccccagactgcgggcctgcggggaagggcgaagcggggcgggaccgggggcgggagcagcgcggggcgggaccctacccgcggcccacgcggagccaggaggcgcggactacagctcccggcctgccccgcgtgcggtccccgcccgccc

SEQ ID NO: 28151 - DNA, 371 bp, Homo sapiens
  source 1..371: mol_type = other DNA
ggaagtgcagagaagccagacaccatctgacacttaggggtttcccctggggcttctccaggtgcctctcagcctgggaggggacctgactgccaggcccagtggagaagctctaaaatgactttggggttctcaagcttgtaccccagacacctgctagggaatgggccccattaaaggtgacctgaggggggtggtgcctgctactggaggccacctccctcccctggcaagaggccaggggaaatgccccatccccggaccctgggcaccctcccagggagacccttggggttatgcccaccatgcctccagctggctgcaggctgcttgggtgcccaggtgcccacgcacagtctgcaggcagggag

SEQ ID NO: 28152 - DNA, 466 bp, Homo sapiens
  source 1..466: mol_type = other DNA
cagccaaccccatctcttctaaaattatgaaaattagccgatcccagctacctgggaggctatcacaccactgcactcgcctgtccaggtaagcacctggactcacccttgtgagcccctgcactcacctgcaccggcctctgcacagtccccagtcggaccaggggctgtaaccaggcaggcatgtcaccaggcaacgggcctcgggggagagctcagatctcccgcacctgcctgccagcctctggggtgcccatgcgggggtgggggaagatggggcggggcaggcactgccttctcctacctcccatggagcctgaggccacaggccacaggggacaagggccagacaccctggtcatggctctaggccattgatccagcctgggctggctggttggcctggacaaacagaggctcctgaggcctgtgtgcaggcccggcacctatctgccgctcccaaagg

SEQ ID NO: 28153 - DNA, 458 bp, Homo sapiens
  source 1..458: mol_type = other DNA
cagaagaaaattgcttttaataatacattttatttatcccatgatcaccagtgttatttcaacataaaatcaatataaaaattgttatcgcgtttttctcagttcagactgactcaagagccaaccaggtaggaattcatgctgcgtgcgcagccaaccccatctcttctaaaattatgaaaattagccgatcccagctacctgggaggctatcacaccactgcactcgcctgtccaggtaagcacctggactcacccttgtgagcccctgcactcacctgcaccggcctctgcacagtccccagtcggaccaggggctgtaaccaggcaggcatgtcaccaggcaacgggcctcgggggagagctcagatctcccgcacctgcctgccagcctctggggtgcccatgcgggggtgggggaagatggggcggggcaggcactgccttctcctacctcc

SEQ ID NO: 28154 - DNA, 287 bp, Homo sapiens
  source 1..287: mol_type = other DNA
ctgtctttgcaaccacatgtttgaaactggactcacttatttgtgggagctaaaaattaaaacaattgaattcaattagatcgaatgaataagatctagtatttgactttagtcaacaataatttattgtacatttaaaaataactaaaagagtatacttggattttaacacaaagaaattattatacattgtatgcctgtatcaaaatagctcatgtgcctcatgaatatgagagagggagggcctgcgttcccttggctcctgtactaggcccggaggcagatct

SEQ ID NO: 28155 - DNA, 175 bp, Homo sapiens
  source 1..175: mol_type = other DNA
tgtgagcatgaggcgtgcaccccgcattctggcctcaggagtcacacttaggaggatcatgtgggcccaggagctccagacccagaagaaaattgcttttaataatacattttatttatcccatgatcaccagtgttatttcaacataaaatcaatataaaaattgttatcgcgt

SEQ ID NO: 28156 - DNA, 388 bp, Homo sapiens
  source 1..388: mol_type = other DNA
tatgttaattaaaatgtgttagcttgctaaaacatggcaatgtccggaaattaccctatattgtctaaaagggggaggaagcctcagtttcaggaaattcccacccctttcctggaaaactcatgcaagacaacacccaacaaacatgggttaagccctcatgtgtgaggactgcagttctggaacacctaggctctgagaggcgacgcgactgtggtagcagggccaggattctagccctctgtgactcagagcagtgctcagggtggactcagggctgcctccctcagggggcctcagactcctgcatccctgcctccctttatctccgcagaacccagggaggaggggaagtgggaagcggctctgccctctccctccgccctcc

SEQ ID NO: 28157 - DNA, 476 bp, Homo sapiens
  source 1..476: mol_type = other DNA
tgggccacactcagggtcccctggggtcccagacacctcaggttctgggaagagctgggatgtggcctctccaccctcctgtccgctttaaaggccagcaaatgtgtcaatatttgctcaggggaactgctggctcaacaggccccagagcctgccgatcaggggttgcctctgagctccagccaggaccctgcgcctgctcttcagaagggaggggctctccgccacgcaatcgggtttgaaccccagcgccactgcctcttagcgctgagtgcctttgagccagcctcagagacgcccatctcaaaagcctgtcgcagggctgcggggacggctggagcgtggctctgtgctccccaggcccggcagggggcgccgcgggtcctcaggcctcgcccagtagccgcgtggtatccgcgcagcactcggccagactcggccccctacgccggaagtgcaaaggcagtttcccggcg

SEQ ID NO: 28158 - DNA, 503 bp, Homo sapiens
  source 1..503: mol_type = other DNA
aacaaggtccagagcttggtggccaagggctgttttgggtctgagccagatccaaaacacagttcctagtccagggcccatagtttaaaaacaaagagctctgaggccactggtgtccctggtggccatggcagacaacaccctctgggagacccaacaggcagagggcagcccaggccccatggggaccttggttcctccccagaatcccagcaggccctcacagcagcgtgcaccacactgaggggtgaatgacgggcacacatgagtgcacacctgtgtgtggattcattttctcataggctaacggcgcggtgactcaccgaggtagtcccagctactcgggaggctgaggcatgggccacactcagggtcccctggggtcccagacacctcaggttctgggaagagctgggatgtggcctctccaccctcctgtccgctttaaaggccagcaaatgtgtcaatatttgctcaggggaactgctggctcaacaggcccc

SEQ ID NO: 28159 - DNA, 408 bp, Homo sapiens
  source 1..408: mol_type = other DNA
tcactcctgtgctgaggcaggaatcagcatcccaagacatctgggcctgtgctcaggactgtacggcagagtctcggcccataaaaagaactctattcttctcatacaaaatactggcctcaattattattattctattttgagttttgtcagttacaaaatagtaaaaatctgttttctcactgcacaatgattttgccctcaaagcctaaaatacccggcctccccagtggtccgtgctgcggccggtgtgcccgactgcagggctggactgtggactcccgggctggccagccccacacccagccttgccttgggacacagctgctgccccgggggacctgtgccgcagtggcctcacgagctgctctggctactggctggcagcccaaggccagcgggcggcac

SEQ ID NO: 28160 - DNA, 175 bp, Homo sapiens
  source 1..175: mol_type = other DNA
ctgtgtaacatggggcatgtccttctcattgtggatcacaggagcataggcctctgctcatgctatgccggaactcttcccagacttggaggaaaggaaatatttgctgagcaataacaccgtccagtggtatctctggacacgtgatagtacgtgagttctcacaagatctgat

SEQ ID NO: 28161 - DNA, 509 bp, Homo sapiens
  source 1..509: mol_type = other DNA
tccacgtggagagccctcgtggcgaagggagcgccctgcaagctgcagaactcaggaacagcagccggagccaatagctgcagcttggagctccagggtgcctggtcccccagggcggcctcacttggctcctgtggggcactgcccgccacttcccagggactcccacacaggcccttgcctgggggagcctctgggtcctggctcaagcaatctcccgctccaatgctagcttgcaggcctccagggaccagctgtctcttgcatcctgggatcaccagcacctggtactgtgcctggcacacaaaatgctctgcttagaattgaagtgcactgaattcttcagcctctgggcccgccccgtggacaggaagtgagcctcccagcacagagggcccccaggtctcctgctggagcctccacgcagggggcctgtggggatggccagggctcagcccagcacctgagcgcccctcccaccagctgctctgtccgtggggagagcagct

SEQ ID NO: 28162 - DNA, 399 bp, Homo sapiens
  source 1..399: mol_type = other DNA
tgcattaaaagtcaaccgggtgcctggtgggaatcctgcgctctgccagccagcaggccctggacgagtccagggtgggtgaccagtggctcttcctctccccgcccctccgtcccttccccccggagctggaaaggtgtgtgggtggacacagtccacgtggagagccctcgtggcgaagggagcgccctgcaagctgcagaactcaggaacagcagccggagccaatagctgcagcttggagctccagggtgcctggtcccccagggcggcctcacttggctcctgtggggcactgcccgccacttcccagggactcccacacaggcccttgcctgggggagcctctgggtcctggctcaagcaatctcccgctccaatgctagcttgcaggcctcc

SEQ ID NO: 28163 - DNA, 436 bp, Homo sapiens
  source 1..436: mol_type = other DNA
ttatagggaattcacatttaatttatacctgtttctttacagcaaagctttttgcagaaaggatttgaaccaataacatgatacattttaaccaaagttcggaaagcaaagcgaggctgactagccctagctgagagttcactagacaagaaaaagccagatatttctttgaagggaagcaaagcccttcctagcagtgaattcatttgtctcctgctaggactgtccaagttgggcgctcctatggcatatatgtgaggaggctgccacgtgaatgcccatggtcccctggaaaatgttcgtcctctcaaaactctgccagtttttaggaagtgctgttttgtcaaaagcctgcacacgagacccccgtgggccaggactgacttcctccccacacagggctgggcggggcaagcaggaaacagtcaaggtgacg

SEQ ID NO: 28164 - DNA, 379 bp, Homo sapiens
  source 1..379: mol_type = other DNA
gccaaggtcctgtggcggccaggtgcctgggccagcgagggtcccaggttctagctcacgcctctgtctgtccactggtcaggtgctgggagagaggcaggcacagctggacaggtgccctcaggggacctcctgtgaagctataaactgggaacgacagtcccagtgctgttgtgacctcaactgtgggagccccagaggtcacggaaggcttcctggaggagggaacccttgagtggacggtgctggaggacactcccttccaccgggcacggagggcaccgcagcagctggcagagccggggctgccctttctgctggcgtctggccccgcccctcgggctaagcggggcggggccaggcggtcccggaggctgcg

SEQ ID NO: 28165 - DNA, 468 bp, Homo sapiens
  source 1..468: mol_type = other DNA
gcgcccctcccctgccacagagccggagcggagcctcagaccctacagtttggtgcggccgccgtggtgctgttgcctgagtgcctggcgccccggctcatccccagctcccggctggacttccaagtgtgcccagcggggggaggggaggctgggtgcccctctgggcagccgggcccatggatccctgtgcagaaagcctctctggggaggaactgtgcccatcctcagcgcctggagcccccaaggctcagcctgccacccctgggctaggcagcaggatccgggccatccaggaaagcgggtgctgctgttctgggcttgagcgccagcgtctgagcgcgggccatgctctgctgctcactggcagggcggccctggccaagtcactgcatgtgggccccccttgaggtgtttggctgacctgggagctggcagtcctccccccatgagcccaggcctctcgat

SEQ ID NO: 28166 - DNA, 256 bp, Homo sapiens
  source 1..256: mol_type = other DNA
gcaaatgtccagctgcagaaatagctccttcccttggtggccagcatggggcccctgggagaccttgtctgcagcacggcctggcgcagtgagctgagatcatgccatggtcctgagcccccaggccctgcaggaagtattagggacctctctgtgccctgacagcccgaggactctataggggccagagatctatctcccctccttgaggcagggtcccggggctgattccctgccctccatggaggtgggcggg

SEQ ID NO: 28167 - DNA, 563 bp, Homo sapiens
  source 1..563: mol_type = other DNA
tcctgagcccccaggccctgcaggaagtattagggacctctctgtgccctgacagcccgaggactctataggggccagagatctatctcccctccttgaggcagggtcccggggctgattccctgccctccatggaggtgggcgggtatcccactttcagatcaggacaggagcccaggctgtccggctccagggtcccggtcttgaatgcctgtaaacatcaaggtttaaaggcccaggcattcaaggcctcagatcgttcccggttccccgaactcccgcagggcgcggctggagggcccaggagggagggggttggcggccggggaccggagtcgcctccccggggcagcccgcacgttccccggctggccttgtccggggtggcgagcagaggcctggcctggccccccagccgcgtccctgccagctctcggcggccgcgaggacggtgccggggagggggccggggagggggccgggccccgcccgcgggcgggaggagacgggcgggaggcgggagcgcccacaccccgcccccgcccccggatccagcccgcgga

SEQ ID NO: 28168 - DNA, 377 bp, Homo sapiens
  source 1..377: mol_type = other DNA
attacaggcttgaccatttgttgtaaatagtttgaaatcttttctttgaatccgtgtattggttttgaaacctacatgtccgatcagataatgctctctgacaatgaatcatagccaggcgcaatctcaaggtgggcagatcacgagggtgcctgtagttccagctactcgggaggctgaggcagcacactccagcctgggtgacagagtgagactctgtctcaaaaaaaaaaaaaaaagaaaattagaaacctagacttttttttttttttgcaaagcaaatctctctttttaggcagagctggggctgcttcccctctcgggctctgggagcgctgtcctcacctaggaccttgtaatattctaggatataagct

SEQ ID NO: 28169 - DNA, 367 bp, Homo sapiens
  source 1..367: mol_type = other DNA
gagcctcactctgtccaggtgagcagctgtattacaggcttgaccatttgttgtaaatagtttgaaatcttttctttgaatccgtgtattggttttgaaacctacatgtccgatcagataatgctctctgacaatgaatcatagccaggcgcaatctcaaggtgggcagatcacgagggtgcctgtagttccagctactcgggaggctgaggcagcacactccagcctgggtgacagagtgagactctgtctcaaaaaaaaaaaaaaaagaaaattagaaacctagacttttttttttttttgcaaagcaaatctctctttttaggcagagctggggctgcttcccctctcgggctctgggagcgct

SEQ ID NO: 28170 - DNA, 313 bp, Homo sapiens
  source 1..313: mol_type = other DNA
attccaagatatctcctgcaaatagatatctatttgcagatatctgggagccgtattgaaatacttccctatgccgcccaggctggagtgcagtgacgcaatctcggctcaagtagccaccccaccccagtttgggggaggagcccccttctgtgcccatcacagagcaaaagctctgctacttgtgcggcctcagtaaatggattaattacaaatagtgcttaggacaatgcccagaatactgtaagcactcaagaaactgatttattttcgtcattttccaaggtacatgaggatgtgccctgggctccgg

SEQ ID NO: 28171 - DNA, 415 bp, Homo sapiens
  source 1..415: mol_type = other DNA
ccaccccaccccagtttgggggaggagcccccttctgtgcccatcacagagcaaaagctctgctacttgtgcggcctcagtaaatggattaattacaaatagtgcttaggacaatgcccagaatactgtaagcactcaagaaactgatttattttcgtcattttccaaggtacatgaggatgtgccctgggctccggaagtggcctcagagcccctcagcaacatgcccgcagagaattcttccggaggcggtcacagacatctccgtgacttcctctcccgcctgagcgccgggaacggaaaagcaggcggccggtcccagctgcgacgtagacgccgcgtgggggtctaggcgagctcgttggcctctctatggtgccgagcgcgcccgttcggaccaggtcccgcgagagct

SEQ ID NO: 28172 - DNA, 402 bp, Homo sapiens
  source 1..402: mol_type = other DNA
cctgcctctgagaggcgcccagtctgcaccggcacacagtctgcaccggcacacgagggtgtggcaggactctggggcacaccctcccctcttccccacgcctgcggctcctgatgccacaggggtgcagggtaaggaaaccagcagtaggggtggcacgcacctcccttaaagggaggactctgcagaatgggcaggcccaggacagctggcccatcgagttccaggggcttgtccggcagaaaggcctacccctctttcgcttggtaccctttcctctttgcgagggatgcaaaggttatctgcaggctgcgggtggggcaggcaccccgcctggggcgggttgcgggcgcaggggcaggaatgggcttacctgcttcccgccaccggggctgggcgggg

SEQ ID NO: 28173 - DNA, 411 bp, Homo sapiens
  source 1..411: mol_type = other DNA
aaaccagcagtaggggtggcacgcacctcccttaaagggaggactctgcagaatgggcaggcccaggacagctggcccatcgagttccaggggcttgtccggcagaaaggcctacccctctttcgcttggtaccctttcctctttgcgagggatgcaaaggttatctgcaggctgcgggtggggcaggcaccccgcctggggcgggttgcgggcgcaggggcaggaatgggcttacctgcttcccgccaccggggctgggcggggcgctgcggggaggaggagccgggcacaacctgtggacggccgcggccggcggacacacagcagcgggggcccggccgggggtcgcccgggggcccggaagccgggggccggccgccagcaagagccgcgcggcggcccaggaagcg

SEQ ID NO: 28174 - DNA, 526 bp, Homo sapiens
  source 1..526: mol_type = other DNA
gtcctggcctggtgggaggaggggcctgcccctggcctgcagcgtccctccccctcgctcccacccccagcctctgagccggtggcacggaggccggaagtttggggagcctctcagagcctgtcttcccctccccattctctgggtccagggaggggactgggtgtccagagacctggttctagtctcacactcttggcatcccccatgtgtccccaggtgggggccaagggcctgtgcacccctgcccacagctgtagtccagagtgctgtgtgacctcctcatcccggggtgggctgaggatggaaaagaggcttctgtgtcccaaagctgggccccgggtgggtcgccctgggtggaggaggaaaaacccatgtatcctattcccacccccattccgactgggattgggccacccagggcaggcctcagctgggacaggggtccaggtgccctgctgctccccgcagcaccccggagaccgctgagttcctgggtgaggacctgctgcaggtacgtgcctgg

SEQ ID NO: 28175 - DNA, 281 bp, Homo sapiens
  source 1..281: mol_type = other DNA
ccaaaacagttctgcgctgctcagcaatcctgctgtgctggcagtggcgtgatctcggctcactgcaggggttgcaggggctgtagtgcagtggtgcgatcctggctcccaagtagctgggattacagaaccaggctggtctctcagaattctagaccttgaaggttgaagcccgtggacaccgtggtgcccacactgccagccagaccagcggggacacaggcctagcaaaggccagtggcacaccccaggctacaagtgcgccagggtgtcctgccctg

SEQ ID NO: 28176 - DNA, 393 bp, Homo sapiens
  source 1..393: mol_type = other DNA
ctcagaattctagaccttgaaggttgaagcccgtggacaccgtggtgcccacactgccagccagaccagcggggacacaggcctagcaaaggccagtggcacaccccaggctacaagtgcgccagggtgtcctgccctgctggggcctcggtgctgaagccccacagcctggaggagttctgctccgacccgcacgctgtggcaggtgcctgatccggggagcccctggcttgttcttaatgtggggtccatcatgagccccccgaaaatgtttggcatttttctggggacaagatggctagccttcattttggagagtgggagagcgggtgggggctgcctctgaccctccccacacccctcccccagcctgaaggagccaggggcccggct

SEQ ID NO: 28177 - DNA, 316 bp, Homo sapiens
  source 1..316: mol_type = other DNA
gctcctaagacagggacccagccggcaattggccacgaccattctggatcctgccctcccggggcgtgctgcgatttcaaaagcatttgtcaagacattgaactgtacatttaagatctatgcattttactatatgtaaatgatatctgaaaatatgaactggagcgtccaccgcgtaagagtgtagtcggcgttgaaactcggcggcgactggtccagcgacggggagaaggatcaagctagctcttcattggtcccttggctgcaggccacgccgtcgccccgccccccggtccttccagcgcgccaattggcg

SEQ ID NO: 28178 - DNA, 639 bp, Homo sapiens
  source 1..639: mol_type = other DNA
tgaactggagcgtccaccgcgtaagagtgtagtcggcgttgaaactcggcggcgactggtccagcgacggggagaaggatcaagctagctcttcattggtcccttggctgcaggccacgccgtcgccccgccccccggtccttccagcgcgccaattggcggctgcgtggaacgtgccagggagagcgcgccgtgcccgcggagagagcgcggcgcgggaggccggcggccggccggctgcatggcgcgctgcgagaggctgcgcggagcggccctgcgcgacgtgctgggccgggcgcagggggtcctgttcgacacggggtgctgtggaacggcgagcgcgccgtgccgggcgccccggagctgctggagcggctggcgcgggccggcaaggcggctctgtttgtgagcaacaacagccggcgcgcgcggcccgagctggccctgcgcttcgcgcgcctcggcttcggggggctgcgcgccgagcagctcttcagctccgcgctgtgcgccgcgcgcctgctgcgccagcgcctgcccgggcctccggacgcgccgggcgccgtgttcgtgctgggcggcgaggggctgcgcgccgagctgcgcgccgcggggctgcgcctggccggggacccgagc

SEQ ID NO: 28179 - DNA, 362 bp, Homo sapiens
  source 1..362: mol_type = other DNA
gaccttggaccagtcaaccaacctcacctagcctcagtttgttagaaaaacaaggggggacaccactcaacaaatgtatttattattttatttatttatttattattttattattttatttatttattttttgagacacagtctcaccctgtcgcccaggctggagtgcaatggcgtgatctcggccctgagtagccgagccaggctggtctcattattattattatttgttaattcgccccataattactaaggggcactcaagcccccattgtacagatgagcaaatactgagtgacagattagtcggtcagtggggctggagctggccgaggtggcctcatgcccacccgttacccccc

SEQ ID NO: 28180 - DNA, 550 bp, Homo sapiens
  source 1..550: mol_type = other DNA
cccagctactggttgcagtgagctgagatcacgccactgcactccagcccatctcaaaaataaatatataaataaataaaaataactcctggtctggaccaccctgggccctaagcttgacactctcaggcctgaggctgtcaggccagggcgctttgactatcccctgcctgcccctgaacgcggccaagcccgaggccttagccaagccctgcagcctcaggcttggcgcccggcccagccttcgccttcccgaggagccagcgagagagcgctgcagcagccgcagtccttgcttccggggaaggcccgggtggggccagggcctgtggttaagtcagtggccctctgcagacgcgcacgcagcaggagccacgccctggtccctgcccgggagtggcctggtctctgagcccagcctgctggccacaggcccaatctctgccacagcacaattttggtggggaggtggcggggtgagggggggcagcagctcgccactctgattgcagggggcggggctcacccggtccggtccagttaaaagggt

SEQ ID NO: 28181 - DNA, 176 bp, Homo sapiens
  source 1..176: mol_type = other DNA
tatgttagacaaactttacataaagtattttacaggtctgggaccacacagctgtaggtgtgatgccggaccacttgcggtcaggagttcaagcagtctggtcaacatggtgagcccacatcctaggcagtggggtccaggggacctcgctctcattgaagggtccctttaaaagg

SEQ ID NO: 28182 - DNA, 306 bp, Homo sapiens
  source 1..306: mol_type = other DNA
ggtctgggaccacacagctgtaggtgtgatgccggaccacttgcggtcaggagttcaagcagtctggtcaacatggtgagcccacatcctaggcagtggggtccaggggacctcgctctcattgaagggtccctttaaaaggacccggaagtgtcttcagggagaggaagccggcggcctctgacgaccggcggccgaggctcgttcttagcttcgacgaaagccggaccggactcccctcgagctgttcttcgcggccaaggccaggtctggggccgagcacgctcccgccgggggctcttccgg

SEQ ID NO: 28183 - DNA, 319 bp, Homo sapiens
  source 1..319: mol_type = other DNA
acaccggtctttcattttataggaaagggtttggaaacagaccttccccttccatcagaagccttctctagtcccaacccaggcctgtgatgcagcagggcgcgccaccacttgccagagccatggtggctcggggtgcccagcccaggtccccccgagaccccctgctctctcagcggtgaccggtcccacccctcctggctggcagtagtgacctggccaggtgtagggcccggagcagccctctgcctgtcgttgctggcaggcactctggaggtagagcaggccaactctggcatgaactgtggtgagtcacccc

SEQ ID NO: 28184 - DNA, 355 bp, Homo sapiens
  source 1..355: mol_type = other DNA
caggtgtagggcccggagcagccctctgcctgtcgttgctggcaggcactctggaggtagagcaggccaactctggcatgaactgtggtgagtcaccccgcggtgccccagtctaggctgcggggacctgtcctgcagcctgacggtaatgactgcacagctcaaggttgggaagccaggacctctctggcctggggccagctgaggagcaggcagctgagagcaggcctcccccaggaagagccttcagagccacgtgggggcatcttcccaaatgtgcaccccacttgataccacgcacaagtggaaatggccagggcccatgggtctgtctccagatcctaaccagggttaa

SEQ ID NO: 28185 - DNA, 325 bp, Homo sapiens
  source 1..325: mol_type = other DNA
tcaaaataatctaagatttctgtgaccctagtaccaaaaggaaaaaagatgggaaacaagttttttttttttttttttttttttctggagtgcagtggtgtgatttcggctcactgcaacagtctggagtgcaatggcgcaagaaaactgtcatgacagagaggttaagactcttgctaaagccagcccagcggactgtcggtgccagccctctccagggctccctggggacccccagcgggcaagggctgcaggcggcccaggctaaacgtgctcaggcacctatgcgagcgtggcaggggcgtggccttccacctcccgagca

SEQ ID NO: 28186 - DNA, 444 bp, Homo sapiens
  source 1..444: mol_type = other DNA
attaacacttaatccccagcaacctcatgaggtaacagcattaccgagaggtgccttgcttaaggtaacactaggctggaatccccgtgccacacgaacttcctagtgcaaaaagacccatttgtgaggagtgggcatttgggagagaccctgccagtgggacccgcttttgccccggtccccgccaaatcacggcgccgagccctagcggacccatcgctccggggccgggtcgggaagcgcagcctgggcgagtcgtgcccacgcccggccgcccgcatcctcctcctcccagcgcgcccgcggcccgggcccgcccgccctccggccgccaccgccgccgtcccgccgtcccgccgccccgccgccctagcgcgcccgtcccgttgcggcaggtcccgcccccggcccgtctcgcgtggcccgccgcggcccccgccgctg

SEQ ID NO: 28187 - DNA, 714 bp, Homo sapiens
  source 1..714: mol_type = other DNA
cacattgccttcaaggagccttgggacggggactgaacccccaggctgggcctcacggatggggggcaggtctctgacacagaagaggccacccgggaggccctcctcatctctcagagggtccgggcagcactgggggttcggcctcaggagggaacccaaagtttgaaagtacccttccaactctttcagggaaagtttccttgggggcccaccggtggcggggtgacccccgagaggtgaccggaccccgggggagcgacccctcccccctgtcccggctcggcccggctgggagtcgcccagctcggggccgcgtgggccgctttccggcagctccaccgggctaggggaccccgcagcgggccgggagcagagcccccggtagcctcaggggagagctttgctacggggggtttcccgcaccgaggctccctagccccgcagagccagcccccctgtgccggcacaccagcggtcctcggcgccgtttggggtgcgtggcgggcgcggggggcggcggccgggccagcgggccgcccggcggggaagcccagggagccaggcagcggcccagggcggcggcggggagcaggaaggcccgggccgtggcggcggcgcagcgccattccgggccgggagcaggcagccagcagccctgtcctcaccgcggtccgcccgccgccgctaaacccggatgcgccgcccaagcgc

SEQ ID NO: 28188 - DNA, 396 bp, Homo sapiens
  source 1..396: mol_type = other DNA
tttacagagctagatctgtgtgcatgtgtgtgtttgtgtatatatacatatctaggcacccggagctgggagaaaaaacctgtacagttgtctttctcttatttttaataaaatagaaaaatcgcgcacccccttttttaaacaagtgttacttgtgccgggaaaattttgctgtctttgtaattttaaaactttaaaataaattggaaaagggagaaactgagcggtgtatttttcctcactttgaagaaggaatccttagtcccggaggctgcggaacgtgccttagccgcagagggtaccccatttcctcggtccctggcggatcccgccaggccccgcccccgattggctgctggagcccggcccccggccacgcgaccaggctgcgtccgc

SEQ ID NO: 28189 - DNA, 358 bp, Homo sapiens
  source 1..358: mol_type = other DNA
gcatctcaggcacagtctgatcctgtgtccaggacctagcagttacctggctcagtctattgctctaatgtaatcactttgtattacaaatctttgtagatcagtcatctacgtcggggttacctagagaactctgactaaaggaaatccattgcatttagacactattactcacagtttgtagtggtatctccaaattaacatctatatctattgttttctcattagactgggaaatggagaggaaaacacatctcgagatcaagagatcgagaccatagtcccagctactagcctggcggaaatgctgttttactggctggcggcctgagcccgcccccgctcggttgccgtggtt

SEQ ID NO: 28190 - DNA, 158 bp, Homo sapiens
  source 1..158: mol_type = other DNA
cagagtgtgccactgcattcgattctagacttggagggacccagagagtcctggtcacacagcataaactaaggcctctccttgatcatacaccggctggagtgcagtggcgcgatctcggctcactacaggatcatccattgaataatttactcgct

SEQ ID NO: 28191 - DNA, 298 bp, Homo sapiens
  source 1..298: mol_type = other DNA
gctggagtgcagtggcgcgatctcggctcactacaggatcatccattgaataatttactcgcttagattcaccttctttgagaagctatttgaagagaggaaaattcagaatggcgccctcctgcctcagcctcccgagtagctggaattacaggcagcctcaggtgatccgcccgcctcggcctcccaaactggtggggttacaggtgggctgtctcagatggccagaggcctcggaaaggcttccggtttcccggcaggcccgagtggggctgaacttccggcctcaggacgcagg

SEQ ID NO: 28192 - DNA, 462 bp, Homo sapiens
  source 1..462: mol_type = other DNA
tcaagctcttgacctcaggtgtgagagtcctgggtggtctttgaaggcctaggtggatgctggtgtcaggatcctgaacccaagtccctgatttcataaaaagcatccggaatcctgctttccggacagggcaggagttggcagctcagggctggtgagaagtccagagggctagccaggcactctggccatgctcttcctaggtggcctgagagtccatatactgagccaagatggcggccttccagttgcaggagtgcccagattggcaagctgggttctccaggccctgggccagtattctggacgtcggcctctctccttgataatttacccagaatggcccagatgacaatctgggtacatcgagtgataactaaagggtaaggcactttacatctatctccatttttaagtcgttctttccactcccctgagtgctcagggcttcccttgggaggg

SEQ ID NO: 28193 - DNA, 606 bp, Homo sapiens
  source 1..606: mol_type = other DNA
cagatacaaactgcctgtatgcctcccaggcaggggcctccttggcctaggtggggacccggcaggccgcaggggagctcagtgaatcacctaggggacacctggaccaaaggtggcggaggggcgcacatgacaacttccagctcagcctgcaggggaactgcctccccaaagtttcacgaggtgtcccgcctccaaagggtggagggctcccggtgggtggcgcggcggcggccgcggcggtgaagtcatcgtcgcttgcggcgggtgcgggggcttcgcgggcacccagtggagcagcgggagcccggcgccgtcgaggggcgggcgatggggcgccggcccgtcttggtaggggtgggctccgcactggaggcggagctgctgctgggtggggcgcgcctccggcgcggacggaggcggcgggacgcccgctcccacgaccggcccacaatgaggcgagcgggcagcgcggagtaggcggcggccggccgggccgggccacgcggcggcgctgctcgggcaggttagggcagggccgcggggcgcccgagcgaggacaccgcggccccgcctccgcccctcccctcgcctgccggtcggcgc

SEQ ID NO: 28194 - DNA, 287 bp, Homo sapiens
  source 1..287: mol_type = other DNA
gatcccgcgggcagtctggtgcacgctcccagctagtcgggaggcagccgagatcgcgccactgcactccagccgaaattactgcaaaggaccgtcccagacttttatttaagtggagctgctctggagtactcctaccccttttctagaaagtgctcgagcctgggccctcctgtgcctccagccggggctgtgctcctgggccttgccgcctcagcgaccccgctgcgccccggtcccgcgcggagacccgcaacactacgactcgcgcggctcctagcttatgc

SEQ ID NO: 28195 - DNA, 386 bp, Homo sapiens
  source 1..386: mol_type = other DNA
gtccgtggactggtaccagtccctggcctgttaggaaccgggccgcacagcaggaggtgagcggcaggctagcgagcctcaccgcctgaatcgcacgcggctcagaatcatctgaggtggaacagtttcatcccgaaaccacaaggctgggatcgctgctttaacggactgacctctgagcagctcgcaggtccccgggtggggcggcgccggaaccagggactgtggtgttaacagagtgatatgccaaaattgaaatttcaccctaagaccctctctgggtgctccctccacatagaagtgggctcccggaggcggtgaccactgctttacaggggctgctggagctggcagctagcgcctctcgctactatagaaacgcgcgc

SEQ ID NO: 28196 - DNA, 303 bp, Homo sapiens
  source 1..303: mol_type = other DNA
aggcagggcaagtccccaccccttgttggggtgggggagtagaggacttcgtgacaatcaggactaggactcccctaccctctcccaagacagggtgagcccagtgtggaaggagctgggccagaacgaccaggggtcagctggggctctgcacttctcagagggatccctgagaagtctctctagctgggcatcagtgcctggcacacactatcctgccacctgaggcagacgttaggagtcctggttgggccgggatgaaggaaagcctggaggctccaccttctgcccttccccagcggc

SEQ ID NO: 28197 - DNA, 390 bp, Homo sapiens
  source 1..390: mol_type = other DNA
gctggatgggcctggccccatgctgccggatgaggtggatgcctggctgtggctctgggagagccaacctcccccaggtttcccgagcctcaggtacatgcggaccgtgaccctccctgggaccccaggggggctgctcctcaggactaaggatttacctcaatggccttggtttacatatgcagtctgtccaacccaactgtgtgtggccccgcctcgccggaggtaaccccggctcagggatgctttcgttgccatggcaaccgccgggccggcgcgggcccctgagtgcactgcccttcccaagatggcggcggcggcagggcaaagggccttggttccgagcgtcccgggagccgggaagggaaggggggaaagccgggacttccg

SEQ ID NO: 28198 - DNA, 482 bp, Homo sapiens
  source 1..482: mol_type = other DNA
aatggggggacaggacaatttctccccctccaggggctccaggactctccctggggggcccactctctgtacatcttttgtaaatgatgagaaataaaggaatgcggcagcaggactgaggtcctggctgttccccgggaagttagggctgccccaaagcccccaagggctgggaccaccagcaagctgccctcaggcggcctggacacagcacccaagctgccagcccctcctggaaaccgttggggtctcttcagggcagggctgtgcccccagcaccagactaggacccctgggcaaggtctctgtgtctaccaccccaggctccaggaggcacagggattctcttcctccctcctggactggcttgggacagggagcccaccgccgaggcccagcctggcctggggctcccagtctcttctcccctcctggacaaaagcctcttagcaggggtgtaagctccaggcctggggcaggga

SEQ ID NO: 28199 - DNA, 589 bp, Homo sapiens
  source 1..589: mol_type = other DNA
gtggggccctctcaaaggtcactcctgggagaaactgaaataaatcatttggattcaagttcacaggatccctggcctaaaccggcccttagggtatgcagaggcagctgccaggcccactcttggaggaccagggagagccccatttgtcacccagagaggccggggactccgcgtggacaggcagcgcgtgtgcagggccgaggtctgcccagggctgggcaactccagcgtttgtgctgctcctgctccggcaagtggaggagctgggcgggccagagcggctgtgggagccaagctcagagggcgtggccccactgtgagccgcaggcctgaggacagcggcgttcccctccaggggctgctgctgctgggtctggcagagagagtcctgggggagggcatcgggcagcgcccgcccagtaaggtgggcaatgccgcggggccccccagggttggggtccttgaggagggggtgacccaggagggggctcatccacatgggcacttgtatcagcccacagctccagggcaggtcacacgagcctgcccggcacaggatgccttccctgccggatctggttagatc

SEQ ID NO: 28200 - DNA, 506 bp, Homo sapiens
  source 1..506: mol_type = other DNA
ccatttttaacacaatactaaacttagtatattatacttatgttaaaaattggcgggcgcctgcaatctcagctacgcgggaggctgacgcatgtggtaattcccctagggaatttggccttagttgtgaaaaataaaaaagctataatcaatttctgttctatcggaaaaaaatgtattggctgtttagctgaaattcaaatgtaacttaacatcttatctttacgagcaatcattaacagtaacttcagactccaggctctggtcgctttaggaggcggaaggcggactagggtaggactcctggccctcatcaccaagaagccgggcaccttctgccccgcacaaacatggccgcgcctcgccgccgaggattggctcccgccgaaagctcgtcctcctggctaagggagccccggaccccgcctcccgccgtcctcgggcgcgggggcggagcctagaggaggcctgggccaccagtgattggcggagagcggtggtcaggc

SEQ ID NO: 28201 - DNA, 337 bp, Homo sapiens
  source 1..337: mol_type = other DNA
aatgtctctctgaggcagtgacatcccaacctgagctttgttttgagggagcctcggaggctgctgccattgtccctgatggtgccgagaccaggtgcgcaggagacctgggcctgacacccactggatgcgcagagtgggcagctggctcatagccatataaatgtcatttaaagccacgggactggatgcggggctctcgcgaggtgtcacgtgaacgcacccagcgatcgcggcagccccgggggcggggcttccagggggcggggtcatacgggggcggggccgagggaccaagcggccgctcctggccggagggcggccgggtcggtgacgt

SEQ ID NO: 28202 - DNA, 350 bp, Homo sapiens
  source 1..350: mol_type = other DNA
caacctgagctttgttttgagggagcctcggaggctgctgccattgtccctgatggtgccgagaccaggtgcgcaggagacctgggcctgacacccactggatgcgcagagtgggcagctggctcatagccatataaatgtcatttaaagccacgggactggatgcggggctctcgcgaggtgtcacgtgaacgcacccagcgatcgcggcagccccgggggcggggcttccagggggcggggtcatacgggggcggggccgagggaccaagcggccgctcctggccggagggcggccgggtcggtgacgtcacctgaatgaaaggaatcctgtgagcggcctcgctcag

SEQ ID NO: 28203 - DNA, 340 bp, Homo sapiens
  source 1..340: mol_type = other DNA
aaatactggaccagggtggtagctgcaggtagagccaacaggatctcctgcctgccttattggcagctcagacacgctgactttgtgccagaacttaattgcattttatcttgttcagttaacctaggtgaaaaggcctctttcagtgctttgccatttcatagatcgcagcccagaaagctctcgcaagagaacccgggtcgcgccccaacccgcggggcggcgggctggggttcggggcggcgggctggggttcggggcgcggcccctttaaggcccaggcagtgatctcagccgcgtccgccgccccgccctccccggcggcgagcccagagcgcat

SEQ ID NO: 28204 - DNA, 595 bp, Homo sapiens
  source 1..595: mol_type = other DNA
ttctcccagagcgatctcgcgggtcgaccggggctgcacaggggtgcgcccgccaacgtctcctcctcagacctcactgggcggcaagaggtctcccagcctcacaggtgagctgcccccctgccagtccctctgggcctcagaactgagttagagaccccccagtgggaggtcagatcctctgaggtctgatgagccctcttgagcaaagtcattcaccaaggctcagggcagtaacattccctggcaagtggcacagctgggctccagtcctcgctgccaggggcccagccagggtgggcagcaggggctcagagatgaggtgttgctgctccctgacatcagggagcccccaggagcccctgtgagcccagggcaggtggcctggcagaggtgggtgggagccctgccctcgtcctcctgcctgtgggcgaggagggagtcctgcgagagaaccctcatggccatctttaggtagcaggtttgcaggccttccctcagcttgaggggctgcctggaggtgggggtgggggtacacctcctcagtggggagagacttgccaaatctctatcgccagcggccaagtgtgccatt

SEQ ID NO: 28205 - DNA, 605 bp, Homo sapiens
  source 1..605: mol_type = other DNA
ctgccagaagccattgccaggtcccggcagggggaaggcccctggctaggtaccgggagagctggtctgagtcctagcccagcccagtctgctagaggcctctaaacagctttcctgctcggtttagcaaccttgagtagttaagggctcttggtacacagaggggggccagggcaggcccagccccaggtcaggagggccaagaggtgctcttgatcatcggagagcagggcagactgacctccctctgggctggagcagaaggtttctgagatatccacctggcctccctccccttctgtgccctgcagggctgctgggcccagagcaccctggcctctggggctgcagggtgcagcccggaatcccgaggatggggcagctacgggggtccgcgacccgagccctgccccctggcccacccacgggggccactgccaaccggctccgcagtgccgccgagcccgtggcttccacgccagcctcccgcatccagccggctggtgagcagggactgagggtggcttcccactctccctccattctcccagagcgatctcgcgggtcgaccggggctgcacaggggtgcgcccgccaacgtctcc

SEQ ID NO: 28206 - DNA, 359 bp, Homo sapiens
  source 1..359: mol_type = other DNA
atgctggaggccagcagagccggggttgatctcaaggccgccatttacaggtcaggtgaccttgagctttgctgcggctgtcccagcccagccccgtgtcacctctgtccctcacagcggggcagatggccccgggcccggcacacgccagatctcagaaatgtggggcgcctggcagggtgaccctggtcccttgcctccctgccccgggcaggtgccaacatcgcctctggtgaggaagtcgggcggcggcgggcgccgggtggtgggcagccatgagcacagggtgggccgggcgtggctggctgcctgcctctgacccctgacagaggccctctgcttgacccccagtggggatc

SEQ ID NO: 28207 - DNA, 335 bp, Homo sapiens
  source 1..335: mol_type = other DNA
ctagtgtccccacggcagcactgcctccaggccttcagctgaccaggattgccccaggccagagcagaggggtccctcctctgccccaggccagagcagagggctcccccctggccctgaggaaggagagaagctgctcacatcagaactcctcctcccacgagggccctcttaggagaccctccgccttccccccagtaggggagcctgcaaggcgtgctgggcactggcgaggtctggcctctgggcaggggcagtactttcccttgagaagcttcttttgaggggcccctgaatgagcatcccccaaagacatgagtgcaggctgaccgcag

SEQ ID NO: 28208 - DNA, 367 bp, Homo sapiens
  source 1..367: mol_type = other DNA
cacactggcagcgtggcacctcagctgagacaggccatgggagccaggtgccggggttccctgtcccatctccctcccaggctggcctggttgttgggggcagcacttggcacgggcaaggggctgatcttctgtgccagcacagctgctctgcagtgccctgtcctcggcgaggctggcctctagtgtccccacggcagcactgcctccaggccttcagctgaccaggattgccccaggccagagcagaggggtccctcctctgccccaggccagagcagagggctcccccctggccctgaggaaggagagaagctgctcacatcagaactcctcctcccacgagggccctcttaggagaccctcc

SEQ ID NO: 28209 - DNA, 447 bp, Homo sapiens
  source 1..447: mol_type = other DNA
cagtcacaactgtgtaaggaaacccaagctcagagctgggaggtggcttggctaaacaccactcggagcccagactcaagtgtcggtgctttggtacttgtggcacccctccttcaacaggtgaggggtcctctctgtgcccatcacagtagggaaaagaagaagaggtctttgcccttcgtttttccacctggaggcggactgagcctccagcagtcgcaggggcccagtgctctgcctggagagggcggggagaggagactttgggtctagaccctcccctcccatcccccccacgcgtaagcccgcgcgcctgcactgaggctggggaactgcgtctcgcagctgcggcccccagcgcggagggcgcgggccctttaaatcctccggggcggcggcggcgggccggggatgacatcagcgggcgggcccggggctcaatgggag

SEQ ID NO: 28210 - DNA, 522 bp, Homo sapiens
  source 1..522: mol_type = other DNA
atggcttgagcccaggagttcgaggctgcagtgagccgtgatcacaccactgcactccagcatgacttccttggaagagatttccagaaatggaattctgtccgacagagcggattatctctgcccagcaggctgatattttcaagaaaaaaatttgccaacaggcctttcggaggctcctcatccctccaggtgatctgaagggatcccagctctttccgatctgggagatcagaaagatgctcatctgggagagtgggacctcccctttcagtccgcccacccccgaggaccgcacttggagggccgcacttggaggaccgcgcctccaaggcgggcgcggctgacgcccggggcccaggccatgtggggcgtgcgtgccgggagaagtgtcccagcgcctcacaaacccccggggccgggaaaccggggcggggcggggcggggcggggccgggaagcggcgcggggctgggccggtgacgtcgcggccccgcccccggccggctccctcctcccggag

SEQ ID NO: 28211 - DNA, 677 bp, Homo sapiens
  source 1..677: mol_type = other DNA
cagaacaattaaatagctttctgaagatactcatttaaaaactttatcttctcctcacgcttgaagaaaatctgagggtgacccaggagttcgggccgcgggcccctcccctcgcccgggcacaccttgcagaggagggggcggcggggacgggacccgggtctgcgcctgcgcacaccctcgcggccccccccgccccccccgccgggtacctgtcacggctaccgccgcggcgctcgcccgccacgttaaatcggatggtggcacggcgcgtgcgtgcgcgggagtcgccgagcgataactgggagtgcgcgcgctcgccgctcgctcgcgtcccggaggcggagtctgtggcggggggcggagcgggggcgggcctatgctagtcacggggcgccggggcggggcggggcgtctccgagcggcgggccgagggagggcgcagcagctgctccctgaacccccagcgccggacgcgccgcgccctggcggctctagggaccccccccgcgcctgcacttagccccgcgcccgaggtgagcccggcccctaaatcctccgggcgggggtgggggtgcggaggcgcgaaggcactaggcgcctcggcagatggctgcacccctcgcggccgggtgcgggcgcggaatccgggaactgcgcgaggcctccctcccacc

SEQ ID NO: 28212 - DNA, 589 bp, Homo sapiens
  source 1..589: mol_type = other DNA
agtaaaaaaacaaatatttggctattttgttggatcaggattttttttgtcctttttttcagtaagaaaaaaaaaacagttgggcaaatggatttctatcaaaaccaagtagattcttggaacctagtctaagtttagaaatctcaagcagaacaattaaatagctttctgaagatactcatttaaaaactttatcttctcctcacgcttgaagaaaatctgagggtgacccaggagttcgggccgcgggcccctcccctcgcccgggcacaccttgcagaggagggggcggcggggacgggacccgggtctgcgcctgcgcacaccctcgcggccccccccgccccccccgccgggtacctgtcacggctaccgccgcggcgctcgcccgccacgttaaatcggatggtggcacggcgcgtgcgtgcgcgggagtcgccgagcgataactgggagtgcgcgcgctcgccgctcgctcgcgtcccggaggcggagtctgtggcggggggcggagcgggggcgggcctatgctagtcacggggcgccggggcggggcggggcgtctccgagcggcgggccgagggagggc

SEQ ID NO: 28213 - DNA, 726 bp, Homo sapiens
  source 1..726: mol_type = other DNA
cccccttttggggggggggcacaaaacccgggagcggatccaggaacgggttctgggaggagcgctcctgaggatccagggcaggagcggggccagcagccccccgccccagcccctgctccgcgccgcgggccccgcgggagggggcttgaggccgggtgaggggcgggcagggcggggtcccgcgggcagccggggctcccgggctggggggcgcgcggcctccgcagtggggcgcgggtcacgtgctcgcaaagcggggcggcgtgccgcgagttgggagttctcggcgcgccgcgggcggcgggagctcgggctcccgggcgagccggggacgcggccaaggcgggggccggggtccgagggggaggccggcgggcgaccgcgacggagacggagaccccgcgggcagagggcgagcggggaccgggacgcgagcgcggcggagaccccggcggtggcgacagagcccggccggcgggggcggggagggcgaccccaggccgggaggccgaggggtcgcggggccggggccgagcgcagcggggccgggagtggagcgcagggccgggggcagagcgcgcgagccgcagcgggggacggcggcggggagggcgcctgcagcgggggtggggggcgcgggcggcggggcgccccgggcccccggacccccgcgctgtgagcccggccgggcccgacgatgctgacgccgaggcggcgccgagg

SEQ ID NO: 28214 - DNA, 489 bp, Homo sapiens
  source 1..489: mol_type = other DNA
ggaggggaggctaagggccctcagctcacctggtgggtggtggacctgctcagaccacacagccctgggaggactccctcccaccagggaggcacgaacgagggccctggatctccctgacgacccaggctgcagccgaggtcagtctgattctgccgggtcccgaccgggtggaggtggggactccgcttccggctcgccccgccccaccccactctcccagggagggagctccagctccgggaattccacgtgctggctcctgccaagcgctggcaccagtgaggcctccacatgggtcgtggcgggcacccggcgcacacggcagccgggcgcaggccagaagcccccccgcgtcgccgggccgcccagtccgggagccgggcgctgggatgggcgggaggcgggatctccgggccgcgccgcttcctggctccccaccctgcgccggcggccgccctggccacgtcaccgcccggccaagagtgc

SEQ ID NO: 28215 - DNA, 250 bp, Homo sapiens
  source 1..250: mol_type = other DNA
agtagctgggcatgcctggctccaagcactgttcatggcgccggggcccgccgccattctcagcgggcccagggcggtggggcgagagggctggcggtcccggcctctggcgccagaggactctgaaacagaatgcgttacgcatactgcgcatcgttctagttcgggtggcgcgagaaccgcaaaatacacccgtagttccccgcggagccctcgggctattccgagcgccgtacgcagcgttaagttg

SEQ ID NO: 28216 - DNA, 223 bp, Homo sapiens
  source 1..223: mol_type = other DNA
tctccccaagtcagtctccgcgtgaggggagggctgccagcgatggcgctgctggcacgaaaaaagcgaaatatacttggcgtctgtggtctatttaaaacttcaagttaagacagagaaaaaagaatgggcctcgggtgtctcaatcacagacaagaggaaacgggcccggattcgaccttctaagccaaggcgcgaggtgctcagctcgagggacgcccca

SEQ ID NO: 28217 - DNA, 294 bp, Homo sapiens
  source 1..294: mol_type = other DNA
cctacacaaaatgccaactgctattgtgggaatgttttgctatttattccaccaaaatgattcagacagaatctccccaagtcagtctccgcgtgaggggagggctgccagcgatggcgctgctggcacgaaaaaagcgaaatatacttggcgtctgtggtctatttaaaacttcaagttaagacagagaaaaaagaatgggcctcgggtgtctcaatcacagacaagaggaaacgggcccggattcgaccttctaagccaaggcgcgaggtgctcagctcgagggacgcccca

SEQ ID NO: 28218 - DNA, 380 bp, Homo sapiens
  source 1..380: mol_type = other DNA
gagtgagactctgtcttaaaaaaaaaaaaaattaaatttttaaatggaagcagtgcaaatttagaaatactgattatatcttgaaatagtaatgttttggacatatggagtttaaaacattactcaaattaatttcacttggctttcttttttactttttaaaaaatgtggctactagaaaattccaaatcacatatgtggcctgctaagtctcccctctgcttggagtcaaagacccctgggtcctgccccctacgaacccggggccggtcccgccacgggtccctcaggggaccccgcaaagttctgggtcggcccccgacagccggtgcccccaaactcacagcaaggggtgccctttgggcaacgccggcgcggtc

SEQ ID NO: 28219 - DNA, 331 bp, Homo sapiens
  source 1..331: mol_type = other DNA
cttttttactttttaaaaaatgtggctactagaaaattccaaatcacatatgtggcctgctaagtctcccctctgcttggagtcaaagacccctgggtcctgccccctacgaacccggggccggtcccgccacgggtccctcaggggaccccgcaaagttctgggtcggcccccgacagccggtgcccccaaactcacagcaaggggtgccctttgggcaacgccggcgcggtcagccgggccgggggcccagaccggtgattcacggagtttctggggattggcgcaggctggcgctgggaacccccgcgccggttacccctttcctcga

SEQ ID NO: 28220 - DNA, 315 bp, Homo sapiens
  source 1..315: mol_type = other DNA
ccaaatcacatatgtggcctgctaagtctcccctctgcttggagtcaaagacccctgggtcctgccccctacgaacccggggccggtcccgccacgggtccctcaggggaccccgcaaagttctgggtcggcccccgacagccggtgcccccaaactcacagcaaggggtgccctttgggcaacgccggcgcggtcagccgggccgggggcccagaccggtgattcacggagtttctggggattggcgcaggctggcgctgggaacccccgcgccggttacccctttcctcgagaggccgggcggggcagcgcat

SEQ ID NO: 28221 - DNA, 326 bp, Homo sapiens
  source 1..326: mol_type = other DNA
catatatatacatatatacgtatatatatacacacacataaaatatatattatatataatatataactatatataggcttgcagtgagccgggatcacaccactgcactgttgtaaatttaagaataaacttttgttaaaaaaaaaaatacagtggctcatcatctcttgagttgttattacctggaattaatgcggtggcgccccagacgcccggataaggccagggctgccggacccgctgcgggcactggaggacccggggctagagggcgccgctctcgcccggctcgcgcctcggctcccggaaaagcagctctgtccgcc

SEQ ID NO: 28222 - DNA, 758 bp, Homo sapiens
  source 1..758: mol_type = other DNA
caggctggcgtccaggtaggactccctcaggccgccccgccaggggccgcgccgagcggagcggctggaccccaaccctgccggccgccgccgaggtgcgcagcccgcagccccacacccacgctacacgcccggcgtctgcggctcccaggccggtgccgatgacgtcagacttacgtcaggcgtgacgccacggcggagggcgtttccggagcacgcgccgggcgggggccgctgacgtcgggctcaggtgcgcgcgcccgcccgcacggcccagttggcggcgcgcactccaggtggcggccggctgcggtgaggggaccgccagcggcgagcagtcccggcggccctggggtctgcggccgggggcgcggcgggagggcgtctgggcctgcgctcacgtgacgggccgagccgggtgggcgcgggcccgggagcgcgaggctgactgtccggccccacccctcgcgggccagcccttcgccgcgcggaaccttccctcgggcaggggccggccccgccgctcacttcccgcgcccgctcgccgctgaccggagttgtctcctcctccgcagggccgcggccagagggctagaatccgcgccttccgagggagccgcgccctgcgggccccaccgtacccgaggggatggagggctgcccccgaggcccccgcgcggctcgcggtcccacgcctgccggcccgcgctagcccaggccttgtctcccgagtcattggcaccgattgtgttcggtcc

SEQ ID NO: 28223 - DNA, 621 bp, Homo sapiens
  source 1..621: mol_type = other DNA
ttccacttgaaatgtgactccctggacagtgcggcacggtcgggcccgaaagccgcggactgcagccgctggcctggctgccgccccgaaacaacgcccacgcccgggagaagggcaggctggcgtccaggtaggactccctcaggccgccccgccaggggccgcgccgagcggagcggctggaccccaaccctgccggccgccgccgaggtgcgcagcccgcagccccacacccacgctacacgcccggcgtctgcggctcccaggccggtgccgatgacgtcagacttacgtcaggcgtgacgccacggcggagggcgtttccggagcacgcgccgggcgggggccgctgacgtcgggctcaggtgcgcgcgcccgcccgcacggcccagttggcggcgcgcactccaggtggcggccggctgcggtgaggggaccgccagcggcgagcagtcccggcggccctggggtctgcggccgggggcgcggcgggagggcgtctgggcctgcgctcacgtgacgggccgagccgggtgggcgcgggcccgggagcgcgaggctgactgtccggccccacccctcgcgggccagcccttcgccgcgcggaaccttccctcgggc

SEQ ID NO: 28224 - DNA, 358 bp, Homo sapiens
  source 1..358: mol_type = other DNA
tttccggcttttgaaacaggaattcaagacactaaaacgtgtgttttcggtttagcagttcaccacaaaagtggtgagtgaatggagaattctccctaaggtcagcatttaattattgcctcactctggctgctatagtattacaactcttggaacttacagcatcgatcctactattaaagttgcctggttccagcaactgcctcagtcactgaatcgagtgggacaggtccaggcgcgggacctgttctatgactcgattgggtcctgcccttgtccatcggaaggcttacagcgcagacacggcgggtagcggggactcggtactgccccctcccaagctgggagcagggcttat

SEQ ID NO: 28225 - DNA, 630 bp, Homo sapiens
  source 1..630: mol_type = other DNA
cttgtcccgcgtcgccgctcttcgcgtgcccgcgcgccccgggcccggccgctgtgtcgccctgagcggagcgccgcccgcgggatccccacgcggaaagggggcgcgccccggcggcggcctggcctcggacgcccccggccgggctagaagccgccgcggcagcaggtgagggagagggttggggggccgcggcccggcctgaccccgggtcaccgtcgggccactcgggcggggccgcgccgccaggcctgcttcctcctctccgggacgtgctgggccggatccagcctccacccgggtccgcggcccgcgccctgactcacctcctggcccccgccccgcctgccgcgccactggtcagccgggagggcggtgtctgcgggcgggacttcccgggcagcctcccgggaggaggagggcaaaggccgactgccccaacccggccccgggcagcgcctacgggttttgcagacaggccgtttccagggacaggcagttcccagcctctgcctgtcagaactcagggcctcagaggaaggcccgttttgttcagttctaaaacaaaacaaaacaggcgcgccaggtcccacaagggcgtgtggcctggctgtgcccaaaggatgcttt

SEQ ID NO: 28226 - DNA, 901 bp, Homo sapiens
  source 1..901: mol_type = other DNA
agcctcaccgagagtgcaccaagggccacccgcgcgctgccgctcccagggctcccaccctcccctcggacgccggcctggtgaaccaggctgcaggcgcgcgtgggagcgctcagagctgtctcaggtgttctgagccgccagatcgggagtccagtgccctgctgagcccgagccccagcacaggctcccgtcgcgtcctcccgcagcccggggtccccgcccgcccagcgcctcccacgcgcggactcctaggctgagcgcgcagggcagcggggcccacgcgagggcggggcgagccggggctgggtggcggcggtgggcggtgacggccggcggggcctgaccaatgggctgcggcctgtcagcgttgactgacggccacacgcgcgccgcccggccccactcgcgcagcgcgggcctccgccggccgcattgtccgcccgcccgccttgtcccgcgtcgccgctcttcgcgtgcccgcgcgccccgggcccggccgctgtgtcgccctgagcggagcgccgcccgcgggatccccacgcggaaagggggcgcgccccggcggcggcctggcctcggacgcccccggccgggctagaagccgccgcggcagcaggtgagggagagggttggggggccgcggcccggcctgaccccgggtcaccgtcgggccactcgggcggggccgcgccgccaggcctgcttcctcctctccgggacgtgctgggccggatccagcctccacccgggtccgcggcccgcgccctgactcacctcctggcccccgccccgcctgccgcgccactggtcagccgggagggcggtgtctgcgggcgggacttcccgggcagcctcccgggaggaggagggcaaaggccgactgccccaacccggcccc

SEQ ID NO: 28227 - DNA, 569 bp, Homo sapiens
  source 1..569: mol_type = other DNA
ccaagctgtgcacctgctctatctgtacagttggcggaatgagtggccagccctgccttcccacgagatctcgtctctatttaaataaaatagaaaatctgtttaaaacaaacaaagaggcagggcctcccagcatgtctggaatccccaaattagcaacctgtttccttgtcttgagcaagccctcgacagcctcaccgagagtgcaccaagggccacccgcgcgctgccgctcccagggctcccaccctcccctcggacgccggcctggtgaaccaggctgcaggcgcgcgtgggagcgctcagagctgtctcaggtgttctgagccgccagatcgggagtccagtgccctgctgagcccgagccccagcacaggctcccgtcgcgtcctcccgcagcccggggtccccgcccgcccagcgcctcccacgcgcggactcctaggctgagcgcgcagggcagcggggcccacgcgagggcggggcgagccggggctgggtggcggcggtgggcggtgacggccggcggggcctgaccaatgggctgcggcctgtcagcgttgactgac

SEQ ID NO: 28228 - DNA, 432 bp, Homo sapiens
  source 1..432: mol_type = other DNA
attgtcaattttgtttcagagtaaaactataaactaaattcctgttcgttcagcctatgcctaggaatgaacactgtcataatttcctcagttataattttggcaaagagattaattttccctcccaaggggaagaaaagaggaaggagcccctgggttccttctccagggagattacttaacctctgaactttagttcatcacctaaaagtactgtaatgagaatcaagtgagatattaattgtacagccctacaaaaatgctagttattatcaggcttttcaagtgtcacgacaccaacaagttgcatttgttatttcaagtgactaaaagaacctcccaaggcagtactgcttttcgaagtttgtttccctagaaaaagaacttcatataagggcctttcactctgattgatacttttatccaccaata

SEQ ID NO: 28229 - DNA, 320 bp, Homo sapiens
  source 1..320: mol_type = other DNA
tcatctggggtggggagcagccctaggcagccgtctccctcggagtctcagggtgtggttcctgccatccccagtactgccgggaagtgtcggccgtccttgtcattagtggtcatatgaaaatggccccaagaaggagatctttcaagggacacaggcagcttctctccgtcctctggggaggtgctgccagcagcccccccagcccccagccttggtggggaccaagcaggagccaggggctggtgtgtgggagctgctacctggcagtttctcgagaccgagcctctggtgggacacctgggcaggagtgctctcac

SEQ ID NO: 28230 - DNA, 675 bp, Homo sapiens
  source 1..675: mol_type = other DNA
tttccatcatcctctgagatcacaggaagattctgtccagccacccggtgaccgacctcaggcggcaaggctcaattgcgaccgagcttgtggcgcgcccagtgcacagccccacccggaagaaagctccctcccgggtggatgtgaacatccggcttggggagggggcccgagcacgggagggctgggatgggggtcacccaggagccccgccgcgcggccctcgggtcgccggcccctgcgctgtgaccgcggcgagataaggtcccaggcgctgccctcgctcctcgccgcatccccggcggcgcccccagccgggcgcccggcactgaacgggtgcggggctgggccggggccagggccggcccggggaagcgagtggggcggggccgccgcgcccgctccccctccccgccgcccctcctcccgccgcccgggctcagagcggcggcagcagcggccgcggcgacagctccagctccggctccggctccggctccggctccggctcccgcgcctgccccgctcggcccagcgcgcccgggctccgcgccccgaccccgccgccgcgcctgccgggggcctcgggcgcccccgccgcccgcctcacgctgaagttcctggccgtgctgctggccgcgggcatgctggcgttccccgtcatctgcatcatcg

SEQ ID NO: 28231 - DNA, 601 bp, Homo sapiens
  source 1..601: mol_type = other DNA
attgtttttaagtttttaattgcaaagttaattttcaacaaaatatatatagacatttttgacagaagctgggcctggtccacatgcccaccaggcacgtggcaccgcttgccaacgaaggcagactgcagtggctctggacctgtgaggctctaagcccccaaggattcagaggaggaatttccatcatcctctgagatcacaggaagattctgtccagccacccggtgaccgacctcaggcggcaaggctcaattgcgaccgagcttgtggcgcgcccagtgcacagccccacccggaagaaagctccctcccgggtggatgtgaacatccggcttggggagggggcccgagcacgggagggctgggatgggggtcacccaggagccccgccgcgcggccctcgggtcgccggcccctgcgctgtgaccgcggcgagataaggtcccaggcgctgccctcgctcctcgccgcatccccggcggcgcccccagccgggcgcccggcactgaacgggtgcggggctgggccggggccagggccggcccggggaagcgagtggggcggggccgccgcgcccgctccccctccccgccgcccc

SEQ ID NO: 28232 - DNA, 646 bp, Homo sapiens
  source 1..646: mol_type = other DNA
cctcaagtgggaagctgggatctgggctccccagagcaatggcggaagcttcgcgcagctgcgggcgggggctgtgggcccaaggcggagtgcggggagcccgttcctgcccgcggtccctctcctcctccccggtctcctgggcgaggacaggtgccgcccgagaccccggccgcagacagatgcttaactcttctgaactggttacaaaaccaccctcccacgaatacataaataatgggtggggggcgatgttttaaagaaattcccgcaaggcctggcttctgctgcatgctgcgggagatgcgcggtggcggcgagactcgggctccacagcccttctccgcccggggcctggcgagactcgcgtgggggcagcgtgcccacaagccgggcacccatcgggtcggccggcaattgctccctccgcccgcgcggcccctttaagagccagcgcgcgcccccgccccgcgagcgccgactttccctagcaaccgccccgggggagggggaggtcctggcaaccgcgcgccagccgcgaggatcacgtgacggcccgcagctggaacgcgagcgcgcgccccgccgcgctcccgcccgccggggcctgggcgctgcggcgcgtgcgcgagcggtgccgcaccgg

SEQ ID NO: 28233 - DNA, 397 bp, Homo sapiens
  source 1..397: mol_type = other DNA
tttaaagctataacaattggaagagtgagctgtacaaagtctcaatacagttataaagctataacattccaccccctggctctggcaaattgcacaatgcaaggtgctgaatttataaaatctcattagagagtgcctgtgtaatacttcctcattagtaaggaggagaagttagtatgaattattcatccaatattgaacacctacctgtgcacagcacgcttgcctagtgaagagagcagggctgctgttcctgctctgtgcccgggtgggaggcagacacaggggctgtagcttggtgcacccacttggctcaacaaatgtgtggtgtgtgtgtgtgcatgtgtgtctcacacatgcgtatttatctacatatgcaagaggataggaagaattg

SEQ ID NO: 28234 - DNA, 486 bp, Homo sapiens
  source 1..486: mol_type = other DNA
tgtgcagaggttggacaagcttctgtgcaggtaggggcgctgctgctccccctaccacaacaaactccccttaaaggaatctatttaggaagattatttcaatgtacattcattcctccaaaatatgcttagatggacttaaataatcacaaagaacccctgggcagtgagcctgtttaggggctgacctgccccccaccttctggaagctgggaggttggaagaggggacgcatgccatggacccagcacacagctgggaactcgagctgtgcggagtcctgctcaaagggagggggtggtggagagggggctccagcctgcccaaccaccaggcaacggggcacctgcccctctctcagctgggtctggacccgcctcccaggcttgggtcctgcccaggacagataaagacagagcagcctgtctttattcggggcctcccacaccaatgcctgagcaggaatggggaggggccatgactcat

SEQ ID NO: 28235 - DNA, 476 bp, Homo sapiens
  source 1..476: mol_type = other DNA
gggcctcttctagtctgtggcgcccaccaaaataggacaggggacagcccctgggcccacagggccagcaccttccaggggcagctgtgctgggtgtagcaggtggacctgggaaaggacggcgccagacctgccgccaggactcaggggctcacttggggcaggagcacagtgtccctcacatttctgcagggcccagaggtgggagaaagggcacagggtggcccttctgattagatacactgatgcataggaggatgcaggacctgctggtctcccatcttcacagccagggatgcagcaggtgccagggagcctggaccaggcacatcctgcactggccacaggggaggacacaggggtggctgtcctggagcctgcagattcctgtggcccacagggagcaaagtcactccacagtgtctggtggttcagtggtcgcagggtatcgctgactcagcagctttatattaagg

SEQ ID NO: 28236 - DNA, 242 bp, Homo sapiens
  source 1..242: mol_type = other DNA
gtgccacctcttaaggccattacaatagccattggcaagatcccctggggcaaccagctgcctgcttctccggcgctctgcaggctgagtcaggcaggagcccgcgtgacgatcatgccatggctgggggtgtcccagggcagcctgcaggggtgggactggcactgactgcaactgacagccaggggcctgggaggacaggccagggtcaggggagagcctggattctcaggtgagggtct

SEQ ID NO: 28237 - DNA, 579 bp, Homo sapiens
  source 1..579: mol_type = other DNA
aagggagactccctttcgtgggccttcctaggcactggcgttaccgcctgaccaaggagccctgggtgtgacagagggctgttatttcttggttatattagtaatacaataaagagtaatattaaaagctaatgattaataatatctacactaatgattgataatgtccatgatcatctctgtatctaatttgtattataactattcttattgtaagtatattctttattatactgaaacagttctctgaggggctgaactgccccccaccttctggaagctgggaggttggacagcacacctgtgcggagtccacacttgctgctcaaagctcggagggggtggtggagagggggctccagcctgcccaaccaccaggcaacggggcacctgcccctctctcagctgggtctggacccgcgtcccaggctcaggctgcccgttgggtcctgcccaggacagataaagacagagcagcctgtctttatcggaggttcctctgccagtagccccggggcctcccacaccagtgcctgagcaggaatggggaggggccacaaggccctgggaggtcacttt

SEQ ID NO: 28238 - DNA, 570 bp, Homo sapiens
  source 1..570: mol_type = other DNA
gactcctccaagaaaagggagactccctttcgtgggccttcctaggcactggcgttaccgcctgaccaaggagccctgggtgtgacagagggctgttatttcttggttatattagtaatacaataaagagtaatattaaaagctaatgattaataatatctacactaatgattgataatgtccatgatcatctctgtatctaatttgtattataactattcttattgtaagtatattctttattatactgaaacagttctctgaggggctgaactgccccccaccttctggaagctgggaggttggacagcacacctgtgcggagtccacacttgctgctcaaagctcggagggggtggtggagagggggctccagcctgcccaaccaccaggcaacggggcacctgcccctctctcagctgggtctggacccgcgtcccaggctcaggctgcccgttgggtcctgcccaggacagataaagacagagcagcctgtctttatcggaggttcctctgccagtagccccggggcctcccacaccagtgcctgagcaggaatggggaggggcc

SEQ ID NO: 28239 - DNA, 268 bp, Homo sapiens
  source 1..268: mol_type = other DNA
aaggggccgggcacggcgcggtggctcatgcccagcctggctaatcccagctactcaggaggctgaggcagatgtgcatgtgccactgcactccagccttggcgacagagcaacccgtctctaaaaaaattatttaaaaaattaggcaggtgtggcggcatgcacctgcatcccagcttatcacctgggaggtcaaggctgcagtcagcccagatcccagagagagaccctgtctggaaacggcccggggctccaggcccgccctctg

SEQ ID NO: 28240 - DNA, 425 bp, Homo sapiens
  source 1..425: mol_type = other DNA
cccgtctctaaaaaaattatttaaaaaattaggcaggtgtggcggcatgcacctgcatcccagcttatcacctgggaggtcaaggctgcagtcagcccagatcccagagagagaccctgtctggaaacggcccggggctccaggcccgccctctgcgacgacatactgtctcctaacacaaagtaccaggtcacctggagcccttgcccagactgtgcaggggaggtggccgagttcctggccaggcacagtgtcccctgggtgtctgtggggaccgggccagcgcccactgcaactggcagcctggatacctgggctgggaggggagggcccagggccaggagagaggcctgctgggccctcactgtttctttttctcagattttaaatattgttgggaaaactttgtgtacaatgataatgag

SEQ ID NO: 28241 - DNA, 352 bp, Homo sapiens
  source 1..352: mol_type = other DNA
cgacgacatactgtctcctaacacaaagtaccaggtcacctggagcccttgcccagactgtgcaggggaggtggccgagttcctggccaggcacagtgtcccctgggtgtctgtggggaccgggccagcgcccactgcaactggcagcctggatacctgggctgggaggggagggcccagggccaggagagaggcctgctgggccctcactgtttctttttctcagattttaaatattgttgggaaaactttgtgtacaatgataatgagccattcaagccttggaagggattaaaaaccaaggctacgggagagtctccagtgaggggtctccctggtcatcctaggctgg

SEQ ID NO: 28242 - DNA, 322 bp, Homo sapiens
  source 1..322: mol_type = other DNA
tcatcctaggctgggttccagaccaggctgggtcacaaggtgtgaatatatgtaagttgaaaacccgaagttttgagaaacatcctttgtaaatttcatcctatgaattgggtcattcatgtccacacaacattgtttccgaaatggaaatcccatgggctttacatagggcaagagaacatttctccttcaaattacaattctttctttgcaaatgaaatatgaaatttagaggctcttctaaacactttaaatttgatttgacattttcaaagcagatgtaagttttagagaatgagattctccataaaaatgacccttt

SEQ ID NO: 28243 - DNA, 514 bp, Homo sapiens
  source 1..514: mol_type = other DNA
aatattcatagctcctcctgtagcctgttgaatatgtatgtttagccaaccggatggctaccttgcaggctggtgtcctttgcaaatgcggaggctccagacaggctggcctgggacaccagccgctgcccttcggcgcgcatggcatcccggtgggacatctgaggcccacaccctccctcccacggtggccaccgagggtgaaggcctggggggaggcagacgcctggccctttactctccctccctgtccccatggccgctgggtgggggccgtctctgggatgatccccgagggcaggatccgggagtccctgcagaggcatcagccgatggtggagtggcggctccagctgggcgggaccaccaggggaggggcttgtgctctgctggctcagcctggtgtggacccacctccgcacagagcggcctgtctttatcagaggtccctctgccagggggagggccccagtcccagggcctcctacaccagcgcctgagcaggaagggggag

SEQ ID NO: 28244 - DNA, 258 bp, Homo sapiens
  source 1..258: mol_type = other DNA
cacacaacattgtttccgaaatggaaatcccatgggctttacatagggcaagagaacatttctccttcaaattacaattctttctttgcaaatgaaatatgaaatttagaggctcttctaaacactttaaatttgatttgacattttcaaagcagatgtaagttttagagaatgagattctccataaaaatgaccctttatctggaagctgcaggtccaacttccatgttggccagactggtctcgccctgacctcag

SEQ ID NO: 28245 - DNA, 488 bp, Homo sapiens
  source 1..488: mol_type = other DNA
ccatgttggccagactggtctcgccctgacctcagatatgttccacacatgtttgttcaataagcatcatgaatattcatagctcctcctgtagcctgttgaatatgtatgtttagccaaccggatggctaccttgcaggctggtgtcctttgcaaatgcggaggctccagacaggctggcctgggacaccagccgctgcccttcggcgcgcatggcatcccggtgggacatctgaggcccacaccctccctcccacggtggccaccgagggtgaaggcctggggggaggcagacgcctggccctttactctccctccctgtccccatggccgctgggtgggggccgtctctgggatgatccccgagggcaggatccgggagtccctgcagaggcatcagccgatggtggagtggcggctccagctgggcgggaccaccaggggaggggcttgtgctctgctggctcagcctggtgtggacccacctc

SEQ ID NO: 28246 - DNA, 484 bp, Homo sapiens
  source 1..484: mol_type = other DNA
ggcgcgcatggcatcccggtgggacatctgaggcccacaccctccctcccacggtggccaccgagggtgaaggcctggggggaggcagacgcctggccctttactctccctccctgtccccatggccgctgggtgggggccgtctctgggatgatccccgagggcaggatccgggagtccctgcagaggcatcagccgatggtggagtggcggctccagctgggcgggaccaccaggggaggggcttgtgctctgctggctcagcctggtgtggacccacctccgcacagagcggcctgtctttatcagaggtccctctgccagggggagggccccagtcccagggcctcctacaccagcgcctgagcaggaagggggagggaagcctcgctctctcacccaggctggagtgcagtggcaggaacttggctcactgcaacctaggttcaagtgatgtagctggtgcccggccgggaggtcactt

SEQ ID NO: 28247 - DNA, 397 bp, Homo sapiens
  source 1..397: mol_type = other DNA
aggcgggcggatctcctcagatcgggagttcgagatcagctgggttgactgtacacaaaaaaaccaaatgcatcccttgtgtaattttaggctccagacaggctggcctgggacaccagccactgctctggcgcgcatggcatcccggtgggacatctgaggcccacaccctccctcccacggtggcctccgagggtgaaggcctggggagaggcagacacctggccctttactctccctccctgtccccatggccgctgggtgggggccgtctctgggatgatccccgagggcaggatccgggagtccctgcggaggccaggaggctccagctgggcgggaccaccaggggaggggcttgtgctctgctggctcagcctggtgtggacccacctcg

SEQ ID NO: 28248 - DNA, 452 bp, Homo sapiens
  source 1..452: mol_type = other DNA
ggttgactgtacacaaaaaaaccaaatgcatcccttgtgtaattttaggctccagacaggctggcctgggacaccagccactgctctggcgcgcatggcatcccggtgggacatctgaggcccacaccctccctcccacggtggcctccgagggtgaaggcctggggagaggcagacacctggccctttactctccctccctgtccccatggccgctgggtgggggccgtctctgggatgatccccgagggcaggatccgggagtccctgcggaggccaggaggctccagctgggcgggaccaccaggggaggggcttgtgctctgctggctcagcctggtgtggacccacctcgcgcacagagcggcctgtctttatcagaggtccctctgccagggggagggccccagtcccagggcctcctacaccagcgcctgagcaggaagggggag

SEQ ID NO: 28249 - DNA, 498 bp, Homo sapiens
  source 1..498: mol_type = other DNA
ggctgctgcaggccatctggatgtatatgtggctcagcggcctgacactgacggtgtgactgggatcatatgttacacgcatgtttgttcaataagcatggagtgcagccacccacatgaatattcatagctcctcctgggatggctaccttgcaggctaagtgtcatttgcaaatgcatcccttgggaggctccagacaggctggcctgggacaccagccgctgcccttcggcgcgcatggcatcccggtgggacatctgaggcccacaccctccctcccacggtggcctccgagggtgacggcctggggggaggcagacgcctggccatttactctccctccctgtccccatggccgctgggtgggggccgtctctgggatgatccccgagggcaggatccgggagtccctgcggaggccaggaggctccagctgggcgggaccaccaggggaggggcttgtgctctgctggctcagcctggtgtggacccacctc

SEQ ID NO: 28250 - DNA, 446 bp, Homo sapiens
  source 1..446: mol_type = other DNA
ggatggctaccttgcaggctaagtgtcatttgcaaatgcatcccttgggaggctccagacaggctggcctgggacaccagccgctgcccttcggcgcgcatggcatcccggtgggacatctgaggcccacaccctccctcccacggtggcctccgagggtgacggcctggggggaggcagacgcctggccatttactctccctccctgtccccatggccgctgggtgggggccgtctctgggatgatccccgagggcaggatccgggagtccctgcggaggccaggaggctccagctgggcgggaccaccaggggaggggcttgtgctctgctggctcagcctggtgtggacccacctccgcacagagcggcctgtctttatcagaggtccctctgccagggggagggccccagcccagggcctcctacaccagcgcctgagcagg

SEQ ID NO: 28251 - DNA, 284 bp, Homo sapiens
  source 1..284: mol_type = other DNA
gaccccagtgctcatttcacatcaggctcagggtcctgccaggaggtggggagggggctgcagcctgccctgtccaccaggggagtcagccctggtccctgacttcaggcagtggtgcgacgtcggctcactgcaaccttgttggccggaggatgggaggtgagccacctccatcagacttccccctgagggatctgaagcaccccagggccctcccactccaaaaggaagagggtggagccaccctcatcaagcagtttttgtgacttttgggagagctgcca

SEQ ID NO: 28252 - DNA, 406 bp, Homo sapiens
  source 1..406: mol_type = other DNA
ccaccccatcactccccaaggggaagggttcagcctgtcctcaagactgcagctggctcaggccagaggcgtgtgagcagctcagagcagctctgagcccagggggagcctcagctgtgggcagcagccggtgccctcccaggtgggagagcagacaaggtgggagggagcactcccctcctcctgtccttccctaagggctcacacctgtaatcccaacactttgggagaccaaggtgggtggatcaccaccagcctggtggcaggcatctgtaatcccagctacttgggagggatcgggccactgcactccagcctgggcgacagagcgagactctgtctttgcacagaaacacgatggctctgttaacagccgaaacattccgcgcctcagaaggccttacta

SEQ ID NO: 28253 - DNA, 508 bp, Homo sapiens
  source 1..508: mol_type = other DNA
ggagactcggacccagcttgcagctgaagggcgctggctgccagggcaggatctgaattcaggctctcagactgcagagcctgagtccctccctgccatgcctgtgccagggtggaaatgtctggtggactcctggccttggctctggagacatccccctagaccacgtgggctcctaacctgtccatggtcactgtgctgaggggcgggggttgctcggctctcagagaccccctaagcgccctggcgctgactccgggccagaagggaacagctgaaagggtggcaacttctcctcctgcagccgggagcggcctgcctgcctccctgcgcacccgcagcgctgagggctctccggccgttgcgcgcacacacatacatacgcgcgcccgcagctcgcagctcgcagctcgcagcccgcagcccgcagaggacgcccagagcggcgagcgggcgggcagacggaccgacggactcgcgccgcgtccacctgtcggccgggcccagc

SEQ ID NO: 28254 - DNA, 440 bp, Homo sapiens
  source 1..440: mol_type = other DNA
aaccctgactttgcagttcaacaaattcaaattcagccaacgctggcagggggagactcggacccagcttgcagctgaagggcgctggctgccagggcaggatctgaattcaggctctcagactgcagagcctgagtccctccctgccatgcctgtgccagggtggaaatgtctggtggactcctggccttggctctggagacatccccctagaccacgtgggctcctaacctgtccatggtcactgtgctgaggggcgggggttgctcggctctcagagaccccctaagcgccctggcgctgactccgggccagaagggaacagctgaaagggtggcaacttctcctcctgcagccgggagcggcctgcctgcctccctgcgcacccgcagcgctgagggctctccggccgttgcgcgcacacacatacatacgcgcgc

SEQ ID NO: 28255 - DNA, 285 bp, Homo sapiens
  source 1..285: mol_type = other DNA
cctgcaggtcccgagtcagacctcaccaattctatcatatatctggggccgctggtgcactccgaaggcctctggagctcggaggcagcctatagcttaacattgctagctgctacccaattggcatataaagctgcctgttaagcagtttttagtgccactacatttttgtgtggttagataaaaaaaatgaggatttgaaataagattcagcttaaattttgtcgaatacaaaagcattgcatgggtccctcggcttcctgcctcggaagcgcagcagcaggc

SEQ ID NO: 28256 - DNA, 431 bp, Homo sapiens
  source 1..431: mol_type = other DNA
ccgggaggctgggtgatgcaggagcctgcgtgtcccgacgtgtgactgtgactgagacagtgtgactgctgaaggcagggacacagcagctccctgactctgggcctcgaacccggggtgactttgcagttcaacaaattcaaattcagccaacgctggcagggggagactcggacccagcttgcagctgaagggcgctggctgccagggcaggatctgaattcaggctctcagactgcagagcctgagtccctccctgccatgcctgtgccagggtggaaatgtctggtggactcctggccttggctctggagacatccccctagaccacgtgggctcctaacctgtccatggtcactgtgctgaggggcgggggttgctcggctctcagagaccccctaagcgccctggcgctgactccgggccagaag

SEQ ID NO: 28257 - DNA, 349 bp, Homo sapiens
  source 1..349: mol_type = other DNA
cggccgtttcattgtcaccggcgtcggcacggctgaatccgcgacgcatcgccgccatcccgtcttggccggcgccggggagtctggcctattttctggaaagtcgagcctgcaggtcccgagtcagacctcaccaattctatcatatatctggggccgctggtgcactccgaaggcctctggagctcggaggcagcctatagcttaacattgctagctgctacccaattggcatataaagctgcctgttaagcagtttttagtgccactacatttttgtgtggttagataaaaaaaatgaggatttgaaataagattcagcttaaattttgtcgaatacaaaagcatt

SEQ ID NO: 28258 - DNA, 310 bp, Homo sapiens
  source 1..310: mol_type = other DNA
gatcaccctcccagctacagtgagcttcgcgccactgcgacagagcgagactccgtctcctaggcatcagcgaaagccctcgctgatgcataggtgctcactcggcatgaccagaggtcgtgaggccgttccgcaggcttgggacgctcctgaccctcagaatcaagcgcgggccatcgcccagagatagctcacaggaggagaagcgacgcagccatttttcttcgctccgaagctgacgtcaacttctgagtacgtgcccccgacctgtcgtctgccgcgggggcgcgctcgcacgccggaaggggcg

SEQ ID NO: 28259 - DNA, 297 bp, Homo sapiens
  source 1..297: mol_type = other DNA
tccttacggaatattgtttttctttaaaaagtgctgtattacataatatacagtatgtgcaccatattacctttctaaaaatcaaaaaatgctcaattttgaaacatatgtggcccccaggatttctaataatggattgaagatcttgcactggcgcaatggattacagacgcacaccatcgtgccccgctaatttaccctgacctcaggtgatccgcccgcctcggtctcccaaagtgttgggattactcttagaaagatcaccctcccagctacagtgagcttcgcgccactgcg

SEQ ID NO: 28260 - DNA, 506 bp, Homo sapiens
  source 1..506: mol_type = other DNA
gcaggagagccagccctggaaggtggcccttcccctgcagggagcactcctccgcctccgtttccatgaaacctggaggtctagccactgagcacctactgtatgctaggcccttgggtaaggcattgaataagttagacaacacctggtgaacaaatgattgcgtaattaattgctaggggaagaggaagtctcagccgccgcctctgtgccaggcccctccaggctgggggtgggagggtgcgcgggcaggctcccggggatgcggggcagggacacggcccacacttgctgtgcagaggtcaccgcactggctgcgagcgcgccctgagccccgggccgcagcacgcgcgcccccgcgcccgaggtcgcgcgctgcccagccccccgcccgcgccccgcgagctgcgcccgccgcgcacgacgccccctcgcgggagccctgggccgccggccgcgcgcgcaggggagggggcgggggcgccgcgcacgcgcacgggccggcg

SEQ ID NO: 28261 - DNA, 392 bp, Homo sapiens
  source 1..392: mol_type = other DNA
ccaggactggggcccagcagctggtgctggtggcccaatccccctggctgctgcctggggactgcctggaggaggctgtgtcaggcacctggacatgggcaggggccagctgcctggctgcctgcaccgcagggcagggaccagggctcccccgagccacccagctcagggatgttcctgcgcagggcgtccagatgtcatctctctgcagcttatctgaaaaacgtttaaaacgaggcctctaggaggttcctggcagcgttacagtgatctcagccacccccatgctggctgggcacagctcgccctgagcagccgacgccctgcagtgggtcctaggcacaccctgggtggtctgtctgcagaggggagataccatctcccctcaagta

SEQ ID NO: 28262 - DNA, 452 bp, Homo sapiens
  source 1..452: mol_type = other DNA
gcgggcgcctgtaaccccagctactcgggaggctgaggcaggagaatcgcttcaacccgggaggcagaggttgcagtgtaacataacataaaataataataaaatgaaatgaaataaaataaaataaaatgttagctttttgaaggcctgtcctgctcgctgcagaacccactatagagccaagcagggtcacctaggtagcatttgctgagtgtgcctgtagtcccggctactccggaggctggggcaggagaggcgggcacctgtaatcccagctactcgggaaccactgcactccagcctgggtgacagagtgagaccctatctgcaagagcgcgcctgcgcacacggtccgctacgacccccatccctcttcgggcgtggggtggcgctgggcgcatgctccccggcagcgcggtcgctctagccgccccactcgctgctctgcgggg

SEQ ID NO: 28263 - DNA, 509 bp, Homo sapiens
  source 1..509: mol_type = other DNA
gctggcagcctccagtgaagaggcccaggaggctcgaggcccagctgggggctctggacaggccccagcgtaaccaaaggccatttcctccagaggccccggctcgaacctcctgcaggtgattgcctggggtttccgaaaggcggagggcgccacacagcagccgctccctggccccgcctcggcctcacagactctggcaggggggaaaccagggtggatctttcctctcctcctttcagtggcctcccagcacaggtgctgccactcattagctgagttaaccctgcttcatgcctgtttccttatctgaaaaatggggagaaaggaaggattgctctgtgccaggccccgttctaagcactttgccaacagccctgtcaggcggggtctgttatgacattcctcactttacagatgcctgaggtcacacagtgagtcagtgaatctcggagttgtctgtctgccatgcccaacatcacggcctggcgtgacaatgcaggagcacc

SEQ ID NO: 28264 - DNA, 372 bp, Homo sapiens
  source 1..372: mol_type = other DNA
ccagtagctgggactacaggcatgtgctaccacttcaccatgttggccaagctttgcgcctggcctgtggcttgtggcatgggtgaggagcctccccacctggagacccaggccccagggaggtggaatgcggctcccacaggccaggcagcagctgctgcttgtcaggcagctcagcccctagaggagcagtggggcaagagggctcaccatggagcttggagccccagcctcccccacgtcatcgtggggcctggaggacggcttccattgatgtcaatgcgactggcatagaacccaggtcttaagctccctgggattcagcctctctgggagctctggcaccacagggcctgagctgggacttctgac

SEQ ID NO: 28265 - DNA, 651 bp, Homo sapiens
  source 1..651: mol_type = other DNA
gttggcagggccgaccgggcctagggtggccgggtgaggggggcgggggaggggaggcccccccagttaccccaggagtggacacaggccggtgtacactgcaggcccggcaccgtgcacacatcacaggcccaggcctctgcacatggtcacagatgcctatgcgaaatcccggcccaggttcacgcgggcaggatctgcacgtccatgcacacacaggcaccgacccgggcacgctgcggaacgcaccccgcacacgcccccgcgcaggccgccccgggccgtgggccggcgcacgcacggtcacaggaggggcgcgcgcacactccacacactcgatccagcacgcgcgggcggcgcggggcggcggcggccggagtctgcggtgcgaggcgcccccggcccggcgcggcggcggagcccggctggcgggggaggggggggccggagccgcttgagccggcgggagcgggcacccctgcgcgccgcgctcggcctcgcctccgcgccccccgcgcgcccgccgcggtccctcccccgcgcccgtccgctcgccgggcccccgccgccgccccggggtgcagccgagcggccgcgccgggtccccgggacggggtggggaggggatcggggccgggccggggccgcgct

SEQ ID NO: 28266 - DNA, 407 bp, Homo sapiens
  source 1..407: mol_type = other DNA
ctcctgagcaggctgggctgagggcagccccccaggggggctttttgtataaagctccccggcagcaggaatgctcaaagctctgggctcagcctccttccagggtagggtgctgtcttcaccctcaagaggggtgcacactgaggaatgaatgccttgctaagggtggacccgcttggagccagcagtacaacgtctcctgtgtcctgacgcaggagaggcagtgtgggttcaggctccctgacccccgccctgtccctgcccggtactttgtcagagactcggggtcccgccgtggtccagtagcccctctgggagtcggggtggttctcgggaaccctcccacacattggccctgacaggctcctaggagtggctctgggagggtggggctgcccctcactgct

SEQ ID NO: 28267 - DNA, 391 bp, Homo sapiens
  source 1..391: mol_type = other DNA
tcaccacagccccaaggctgggtgaggttagactaggagccagcggtggccccggtggccccggactccaaagccccaggccctgggcttggcagagccaggcatggaagggagcttccatagagacacggcctcctgcctggcatatggtaggcgccaagaaatacgttttgttgttgctccctcaggtacagtacaggaggctggccaggtaccccgacaggctaaggggttgccagcaggtgaggggcctacccggtgcggcagccttcccggtacccacagccggacccggacaccggagtcctctgggggcggggcgcgagtggcctctgcaggccagtcccttggtgaggtcacacacggaggcggggctcccgtgcgcaaggtc

SEQ ID NO: 28268 - DNA, 429 bp, Homo sapiens
  source 1..429: mol_type = other DNA
tggggtaatgttccctatgtgagacatgcttcgaacattgcacgttgtatatagtgcaatataatgcaataagcatttactgttactaagaaccctgaccaccttctagattcttaatttaaatgtggtcaggaaagcactttacagatatgcttgtgtaagggtttaagtttatacttaaatgtaattatttattgagcatttacaaacctggctaggtgctactaataatatcatacattaaactcatttagtgcttatgccaaccgtatgggcaaaatatgatttttatcctcacttcacagatgggaactgagacaggattcaagtatggaaccgttcattacgtgcacagttctcataatacacaacctgtatgtttccagaatgggcatccagaggctggggtctctagccagtcccccatgg

SEQ ID NO: 28269 - DNA, 566 bp, Homo sapiens
  source 1..566: mol_type = other DNA
cgacaggacggcgcgtcttcccggctcctttccagccggtaggtggacaggcccggcgcgccctctcgaggccccttcaacctcccgggggcagcagcgccaaccgaaggacgcgcaggctgggagcggcggcggggccaccagtgcggacctccactgagggcggcgggatccgaccgcaagggctggtccctgaggccactaaggggtgcgctgggctaaggccgcctgggggcaggagccagcgcgatcgtggcgggccagcaggcggggctggctgaggactagcagcgaccgggccctgagccaataagagctcgagatatatatgattcaccgggcctgggccaatcaccttgacgcgcgctcttcgccagcacctcgcgcgataaacgacctttccccgcccactgcgctgacaccggaagcgaggcgtgtctgggtcactccgcgctccggcggagaagcctagtaaagtagtacacctctctcctttcgtgaggtcgtcacagctacgccgatgcgtctgtgctgcgtccccatagagacgaagtctataaagggcc

SEQ ID NO: 28270 - DNA, 451 bp, Homo sapiens
  source 1..451: mol_type = other DNA
ggtctaagaagcttcttacatttaaaacttcaaatcccagcactttgggaggctgcggatgaggtccggaccgtctctactaaaaattttttaaaaagaaaattagccggccagtgagccgagatcgctgcactccagcctgggcgtctcaaaaaaaaaattaatttaattaaataaaataaattttaaaaaattcaggatcccaaagaacttttgtatgtaggcaactgatatttgccatactagaaactaaaacaaaaattttacatattcattaattcacttaaaatgacaataaacccattgcttggtaacataaacaacgtattttatgagaaataattgtagttttcaaaacaaagatatgtctttaatgtctgttgaacgagaggattggccaacccggcggagcagctctgttcgggctcgggtttccgccgagacgacaggg

SEQ ID NO: 28271 - DNA, 477 bp, Homo sapiens
  source 1..477: mol_type = other DNA
cacaaatgcttgagtttgtgtgagtgaacccagtgctgggctgccagctgcagatggagcagcgaacaagcccagggctcctccccctctatggtctaagaagcttcttacatttaaaacttcaaatcccagcactttgggaggctgcggatgaggtccggaccgtctctactaaaaattttttaaaaagaaaattagccggccagtgagccgagatcgctgcactccagcctgggcgtctcaaaaaaaaaattaatttaattaaataaaataaattttaaaaaattcaggatcccaaagaacttttgtatgtaggcaactgatatttgccatactagaaactaaaacaaaaattttacatattcattaattcacttaaaatgacaataaacccattgcttggtaacataaacaacgtattttatgagaaataattgtagttttcaaaacaaagatatgtctttaatgtctgttgaa

SEQ ID NO: 28272 - DNA, 613 bp, Homo sapiens
  source 1..613: mol_type = other DNA
ccctctccccaatccacagcccttgggtgagagaggaagtcacctgggggccctctgagaagccttcctggaggagagagctgggttctagctcagctctaccgtttaagagctggtcttaggtgggtgacccctcaccggggcagtggggtgaacacccccgatcggcacctgggacccgggggtggtcagtaatgccccccacccccatgctgaggggtcaggaccccaccccaggcaagaacctggattttaaggagctggccgcgggctgggggcttcctaccctctgggaaggggtgggagctcaccagccgccgccgtcagtctgtcacgcagcgcggctcggtctcgccgccgccgcacgtccccgcaccgccaggcgctcgggctcctccgcagcccccgccgcgcgcagaccccgcgcttcgagccctgagccggaggcgcgagcagagccgaggcaggcgagagaccggcctcagccccgcgctccccgccgcgctggtctctcccgggcacttgccccgctgctcggtccccgcagcacccgcgcccccgccccggcccggagcgccgcgctcccgcccgccgcccgcccagagcctcgccg

SEQ ID NO: 28273 - DNA, 421 bp, Homo sapiens
  source 1..421: mol_type = other DNA
ctgtctggcacaaaagtggcacctgaatttctagtcagttgaaatgacagtagtaacacacttttaaaaatgtattcatgtgccactgatgatttccaatttcatccatgtccttaaaacttaaataataataaataaaaaaaaagagatattatgctagaagtctgagtattttactgattttccattttaagaataaattatcatggcaaattttaagttacatacattattttattgtctactttttaaaaacattatcagcttacgttgtgaacatttagtaaattaatttatactcatttttatttaattaagaaagcagctaagaataaatgctcccagatctcaaaaaaaaaaaaaaatttattctttgaaaggaggatgtgtcacagcccggcagcctgtgaaacgaagacac

SEQ ID NO: 28274 - DNA, 370 bp, Homo sapiens
  source 1..370: mol_type = other DNA
aaaaagtttaaattttagaaccccaaattgaatctctcctttcctcttggtattccagggattaatgctaggaagaatggtgccacttagcaagtagcaatgtcttttctgtaaaagatgcaacgttggcaatccattttctagcaagagcagaaagccttcagtctaagactcaacaaagtccagaaattgaaggaactggttccacctcatgctgagaacttaaataagttcccccatgattatactaagagaataagagttttccttaagatcagctatggaccatatcaagaactataaattttcttatgtgaacacagcaaaagtgtttcagtgaacctcctgcattttagttcttaatggatct

SEQ ID NO: 28275 - DNA, 440 bp, Homo sapiens
  source 1..440: mol_type = other DNA
gttcaaaagtagctgggaggcacgtgccaactcctgacctcaggtgattaaccttgcaactttattaattgaatattatgatcaccattttatagatgaggaaatggagactccaagggtttaattacttgagccagctgtagttcatactaaatgtattacatatgggtctcatgcattacaagaagggggccactattttaactcaattcaaaaatgttaaaatcaaaattccaaatgtacttggtttataatatatcataaaataagtaatctgacagaaggaagctgagttccccactggccaatgctgtctaattctcttaaatgattcagatgtaaaagaggaacttgggacagtgtttacagaatagtctttcgggaaaggctgcggatggccttcatttcctgctcctggcatctggggattccgagaatga

SEQ ID NO: 28276 - DNA, 709 bp, Homo sapiens
  source 1..709: mol_type = other DNA
gaaaatattttgaatgtggagaatcaaacatgaacaacataatatgttaatgactaagacgattgtatttaatccgatgggaaacagcagagctgctgccaccgctgctgtgtgtgtgcgtgtgtgcacgcacgtgtgagctcaaacatacattttgaatcactaatatagtaatcatgtctctcacacaccctacttcaaattaaggtgggggcggggggattctgtttggatagctattttttaaaagaaagttttacagtgaactcccagcccagaagggctctgatctcagaactgggacgcccaacaccggaccctcgacggggaaggggtcagctcggcggccccagaggccactgggccagaacacgtgctccggactccacgtgcgcggaaaatgaactcgtacccgcgacgcggccggcgggggcggatggcagcgagggccggacactttaccccgcggaggagtcggggccggagcccgcacgtgggtctgcgacggccccgccccctgggggcgtcccctcagggactctagccccggctggtgggccctgcaggcccgggcccgaccgcgtccgccaggccgcccggaggtcccggcgagcccggcggaggcggcggcccctccccgcccgacggccacgcccgcgcggattggccgctccccgacggcggggcggggcgggacgggccggggcag

SEQ ID NO: 28277 - DNA, 840 bp, Homo sapiens
  source 1..840: mol_type = other DNA
ccaacaccggaccctcgacggggaaggggtcagctcggcggccccagaggccactgggccagaacacgtgctccggactccacgtgcgcggaaaatgaactcgtacccgcgacgcggccggcgggggcggatggcagcgagggccggacactttaccccgcggaggagtcggggccggagcccgcacgtgggtctgcgacggccccgccccctgggggcgtcccctcagggactctagccccggctggtgggccctgcaggcccgggcccgaccgcgtccgccaggccgcccggaggtcccggcgagcccggcggaggcggcggcccctccccgcccgacggccacgcccgcgcggattggccgctccccgacggcggggcggggcgggacgggccggggcagagctcgcggccaggtgaggcgccccgcccctcggcggctccaggtgcggctgtgggacctcggaccgcggcggggccggggccagggccggggccggggccggggcgccatggccgagtcccagctgaggtgaccgaggcgcaggccgccttctactactgcgagcggcggcgggccgcgctggaggcgctgctgggcggcggcgagcaggcctaccgcgagcggctcaaggaggagcagctgcgggacttcctctccagcccggagcgccaggccctgcgggccgcctggagcccctacgaggacgccgtccccgccgccaacgcccggggcaagagcaaggccaaggccaaggcccccgcgccggcgccggctgagtccggcgagtccctggcctactggcccgaccgttccgacaccgaggtgcctccgcggcg

SEQ ID NO: 28278 - DNA, 290 bp, Homo sapiens
  source 1..290: mol_type = other DNA
tgagtcagaggctgcaggcagacccagctctaccctctgtgggaaagggaagaattgccctctgcccagcacacagacggccattctgggagacagcagtttgtggggagttcccctcataactttgtgggatttcgtgggctcatccgagccttccaacagcccttgggaggcaggcagggcaggtgtgggaggcgactcggccccaggcgcaccggctctttgcaggcaacagcagccacccatgcatctcagtttgcatcctgctgtgcaggatgaatcttctggcc

SEQ ID NO: 28279 - DNA, 270 bp, Homo sapiens
  source 1..270: mol_type = other DNA
acacgtcttgctcagcatcaactatcctggaagatttccagggcatgcaataaattattcatttctaagacgtgaggactctctccaaagaatgagtggaggcagaaatgtctaccttaattcaaataaacagtctctgcagtttgacccaggaccagatgccaggcccaggataccaggtttaaccagataatgtttgtgacagtggagtcaaaccaatggtattagcctccaccaatagcttgaagatttgactggggagtgacatcc

SEQ ID NO: 28280 - DNA, 241 bp, Homo sapiens
  source 1..241: mol_type = other DNA
agtctctgcagtttgacccaggaccagatgccaggcccaggataccaggtttaaccagataatgtttgtgacagtggagtcaaaccaatggtattagcctccaccaatagcttgaagatttgactggggagtgacatccgagtctctctgggtcctcgaccgaggaagcggcctctgggatgctgaggggccggaagcatcctccctgcggccaatggagtggggctctgggcgggccccc

SEQ ID NO: 28281 - DNA, 237 bp, Homo sapiens
  source 1..237: mol_type = other DNA
acttacttacttgcgcagtgaagttacctaggctccctcagctgcagagctacctcctgcggtgggggagggcccagagaactccaaccagtccctcttctgcagctgttcagctgtgtgatttgggataagtcacttaacctttctgaattgcagttcagtttcttctatctataaaccaataaaggtttttctgtttaaaagggctgcttcccctttaagcctctatttgaaggt

SEQ ID NO: 28282 - DNA, 682 bp, Homo sapiens
  source 1..682: mol_type = other DNA
gagtctctctgggtcctcgaccgaggaagcggcctctgggatgctgaggggccggaagcatcctccctgcggccaatggagtggggctctgggcgggccccctgcaaggcgaaacgggagggagtgacccctgcgcccctcagtcccccctacgacgtcgcctccatagtctgcggagaagcggagactgcgcgcctcgcctcacagcgaaacgccgcgcactcggagccggcacggctcggcggtgagtgaggtgcggcggccgcgccgtccttcccctcccccgcgccccgccgggacggagcggggcggccgggggtcggcgagggcgcccccgggggcgcgcggcgcggcccggggcggtgagcggaggcgcggcgtgtgcgtgtcctcgcgagggagcgcgcgtggggcggggccgggagggggcgtgagcgcgcgcggggctggtgcggccggcggcgctgagcgcgcgctccgcgggagcgggcgccgccgagatgggcggggagggactcggggcgacgtccggcgcgcgggccggggcgccccgaacggccgggcaggcactggcgggcgcgcgcgcggctccgggcgtcacgcgccagcaggtgtgagctgggggagggcttccgggtgggctggcccggccgtcgagttcgcttcccgtctccggggggcc

SEQ ID NO: 28283 - DNA, 246 bp, Homo sapiens
  source 1..246: mol_type = other DNA
aaaaaaaaaaaaagggggggggccacttgagtgtttctatttctatcgctctgtccaggctggagtgcagtgcccaggctggccgaagtgctgggattagagccgagctcggtgcgccgcgggcaggatccggtctggggcccccacagtgctgcggagattctccgcagccggcagcgcccagggcgcccggaacccagagagcgagaccgcgtgaaggaagtcccgccccgccccgtcctgccc

SEQ ID NO: 28284 - DNA, 208 bp, Homo sapiens
  source 1..208: mol_type = other DNA
agtatatactaggtgctcagtatgtgttcaggtactgtatcaccagtaatcctagcattcttgagctcaggagttcaagagctactcagggctgaggtcaggctgggccaatctgtgtctaggcagaaattcctgataggcagtgacattggaaaaggtattatctgctaatatcttaacattttcagaagtgtatcccctgttaaaa

SEQ ID NO: 28285 - DNA, 463 bp, Homo sapiens
  source 1..463: mol_type = other DNA
ggctgattgagctgaagttgtgcccaagctcatttcatcttttgataaggcttatgactagagtgcagtagcacaatcttggctaggttcaagcgattctccagcctcagcctcccaagtagctgggattacaggcgcctgccgccatgcctggcgtcttgaactcctgacctcaagtttacagtgtaagcaattccttgttgtatttccaatagcaagagcagtatggatttatagctgattgaagcaactgtagccaaagattgagttaattacctacctgccaggagagcactagtgttaggcatagatgaaaatgaaagcttttgtttatcagatttgcagatgacacaaaactgggagaattaacaagtatgtttatttggtaaaataagttttcatctctaacctaaagaggaaaaagttaataaagatcaatgtaaataagttaatcttaaactca

SEQ ID NO: 28286 - DNA, 376 bp, Homo sapiens
  source 1..376: mol_type = other DNA
cacacaaccacacgtggttcattttttgtagagacagggtctcactctgttaaacccagatgtcaggttctgggcagaacttggggcaactgatgaaatgtctgctcagctgaagtcagatttcatttaagaaccaggagagcctgatgtttgtaaactgacacagaaggtactcagaaaatttcgttttctcccaggtgagccgagatcacgccactgcacttcaaaaattagcaagttatttggcttctcaggctgcggtgcagacgaagaaatcatcgctatgcatgctggccttgggatgggggcgcaaagcccctggacgcgccccgcctagtgggcgggaacgagcatgacccgcggccgcccatgccac

SEQ ID NO: 28287 - DNA, 309 bp, Homo sapiens
  source 1..309: mol_type = other DNA
ttcaaaaactttaaacatcatccccaagtcctgcctggagagagtgggtagctgcccaccagctggatgtgctggagaaatcagttatctgctcatagacacccagagagactgtgtgttaacagctaagagtggtcaggtgtggtaagaactgcagtgcaggccgggcgcgctgaatcccagcgccgaggcgggcggatcacgaggtcaggagatcccgaccatcgcctgtagtcccagctactccggaggctgaggcaggagatgcagtgagctgagatcgggccactgcactccagcctgggccac

SEQ ID NO: 28288 - DNA, 576 bp, Homo sapiens
  source 1..576: mol_type = other DNA
ccctgccaagagcttctcttgtgaagatgtaggcaggaggcgctggcccagggcacccagctttggctcctgtgcagatcgtgtctcagaaggacgagcactgctacagaagacttgggtgaccctggccgccaccaagctgtctggcttgaggtccctgaagcagctgagccggcttccctgcctcagcctgcctgcaggctctggtttccagccaagttcgtggaagtccgggcgggctaggcacggctggcacccttctagccagggcctgcgtgcctagcgagtcctggcctctgcaggcgtcaggcagggctttctcagacccatccctcccatcagtactccatcgcgggggatgactcggtgacggagggggtcacagacctcgtgcgagggaccctctgcccggcccttaaggccctgttcgaacatggactgaagaagccatccctgcttgggggcgcctgccacccctggctgtaagtcagtggctgggcccatgacccccacccttccttcctgccccacaggtgggaagctggcagcgtggtgacaggtgcccagtcggcccca

SEQ ID NO: 28289 - DNA, 285 bp, Homo sapiens
  source 1..285: mol_type = other DNA
gttttaactggcttttgaaagaaagatagttgtttttttttttcatctcactctcgttacccaggctggagtgagagagagtagtgtgatctcggctcactgcaacctcggctgatagttgatttttaacttaaaaaaaatccctattaagttttttcattaagcagtattgccttgtttcagtaaaatattttctagcttgcttggtgaaatggctataatttttagatacaaaagaaaaagagtttacaaatagtacttcctgattgtttttaaaaaagtttt

SEQ ID NO: 28290 - DNA, 510 bp, Homo sapiens
  source 1..510: mol_type = other DNA
atacacatacacatacacatacacatacatatacatgtttttaaatcgggcagccacccgctccccgccctcagcccggaataggttcagagaggtgcccgggttcacttgcggagcgtgtggcctctgcgcctaacgcgcgccccttcactacacgaatgggttccaaggatctccacggcctcggcagatagggaggggcaggcaggtgtcagcgtcctccctttcaccggggcctcggcggggcggcaggcggagacccttcagtccccgacaagaatcgggatggggtctgggattaatgcagtaattaccattgaccccttggcaacttcgcaagatccggcagggtccaccgggtgaccacagggctgcggcctctttaaggcccagagctccgcccccggaggtatctccccattggctgcgccgtgccgtcacccgatcaggcctctgattggctagcgccgccgtcacttctccagcggacagtcttcaggacgggaggcg

SEQ ID NO: 28291 - DNA, 489 bp, Homo sapiens
  source 1..489: mol_type = other DNA
ctggaagcgcttctcagtgaggtcttcctcgatgatcaatcctataattgccaataccatgaattgaatcttcatgaggattttttttttactgcaaaacctagaacagtgagtaagtactcaatgaatgtttgttggatgaacccaatactggctcctgagtctggcagtgggtgcagtggcagctcctgtctgtgagggccccagaggctggcagcaggatgcctccgtggaaacctccgggatgatctctttgggggatcatgctcagagagcgtttagaaaataacacctctgtgagcttggtcgtcctgggtgccaggcaagggttcagcagctgacgactcagcttctgcaggatgctggcagccgagggtgccctgagtgtgcatggggggcagccctgctgcagtccaagcccagccacccatacctggaataggggctaagccaagctgctctctcctccaaagggaggcagcctgtgtg

SEQ ID NO: 28292 - DNA, 381 bp, Homo sapiens
  source 1..381: mol_type = other DNA
gggcagccctgctgcagtccaagccagccacccatacctggaataggggctaagccaagctgctctctcctccaaagggaggcagcctgtgtggccttaaggagatccctttcctgatggggctgccctcccagcttccccagggccctggggctctgcaggcattcagaagtggaagccagccacagcctggaggcggcagcggctgccaggctacggaggaagacccccttcccaactgcggggcttgcgctccgggacaaggtggcaggcgctggaggctgccgcagcctgcgtgggtcggacctggaagcctcgctgctgcccactggttcacttcggcaggtgagttgactgggagccctccctcctctgggcggg

SEQ ID NO: 28293 - DNA, 460 bp, Homo sapiens
  source 1..460: mol_type = other DNA
atcttctgcaaattttgtgaaacaggttaaactttcagggattaataagcctgtctcaggaaagaatccctgagtccctgaggacatcctaaagctgaatttgtaattttgttagtcactttgcaacatggaaaaaaatttttttccttcagtattttatgaagtactactacataaattggcttgccaactaggtttttctggaggaagaagtttccagtccacaagtgagtttttttcctcttggccaaaatgtgactttcagaagactggagtctcattgagtttccccatcccggaggaaccgggagccgggtacctggtgtcaggccgccttgcgccttggagcccagccccgcgaacacctccccccgcgcccacaggggccaatcagcgttcaggggcgccccgctttcccgccccgcgacccggaagtggttctagggcaggcgggcgggga

SEQ ID NO: 28294 - DNA, 333 bp, Homo sapiens
  source 1..333: mol_type = other DNA
gcttcgtaacaagagctacttgatgtgagacactttgtcacttaagtgtgataattgccacaacttcggagtccgagtaacttcagccgaaccagggatcgcctgagaccaacttgggtccctccaggggacaccatgggagggcctgcagggccgcgtcgccaggaaaccgggccagccgcacctccccttccggcggaggcggctcgcgggccttccttgcgcggcggcgcaggttgtgacgtcatgccccgagctgggaccggcgttgagctctactcagtgcacgtcgccccctggaggggatgtccccatccagggactagaagattc

SEQ ID NO: 28295 - DNA, 440 bp, Homo sapiens
  source 1..440: mol_type = other DNA
gcacgtagcgatatatcctggaaacatgccaggccttaagaaattatttttctcagacgtgtttggagtgataacacttaataagtgattctcaagataattaatcctacctgtaaggtaaaaacaatcatttttacagttatcatttttattcttactagttttgtaacttttaacttactagtgttatattattataacacgacgtaaaggaatgggcaacctcagggtgcgaggaacccagctctgcctccccgcgaagttgcctccctttcccgggcaaagaaggggcagcgaccccgcctcgcccgccggaccgagccaggtccagcctggctcccccctggggccgtgcttcccccgccgcggatccctgggggggctacggcccggttccaggcccaggcgctggctcggcgtgaccgcgcagaagggggcgg

SEQ ID NO: 28296 - DNA, 414 bp, Homo sapiens
  source 1..414: mol_type = other DNA
gggcaacctcagggtgcgaggaacccagctctgcctccccgcgaagttgcctccctttcccgggcaaagaaggggcagcgaccccgcctcgcccgccggaccgagccaggtccagcctggctcccccctggggccgtgcttcccccgccgcggatccctgggggggctacggcccggttccaggcccaggcgctggctcggcgtgaccgcgcagaagggggcgggaatcttctagtccctggatggggacatcccctccagggggcgacgtgcactgagtagagctcaacgccggtcccagctcggggcatgacgtcacaacctgcgccgccgcgcaaggaaggcccgcgagccgcctccgccggaaggggaggtgcggctggcccggtttcctggcgacgcggccctgcaggc

SEQ ID NO: 28297 - DNA, 521 bp, Homo sapiens
  source 1..521: mol_type = other DNA
aagaaatttaaaaatcaattcttttttatttcagaaggtaagaaaatccataattttaataactatgtgttatctctcattttcattagtaacagtatacattaacacatatcaggaagttacttctaaaacaagaaaattatttggaaatcaaagcaggatcaaaaaaaccatcttttataccctttgctgaatccaatttcatacaattgactacatgagaaatatttaaaacactggctatattttcccaaacctattaattatcaacactattgagtgatcattaagtaaatgcttctaaactacaacacatttttttttttttttgagcaggctggagtacccaggttcccaagtagctgggattacaggatgaactcctgacctcaggtgagggtaaagcaatgacctttaaaccctaggagtaaacttggaaggtgttactgaatttcttctgataaaactatatctcaatacattttatgatgtattgagccaatcgaaagcctagatattgg

SEQ ID NO: 28298 - DNA, 571 bp, Homo sapiens
  source 1..571: mol_type = other DNA
gggccgaaatcgcgccattacggcgctgtgggcgcagaggccaccccccaggcttggcgggcgagtaaaggcagggctgggggcctgcttggccttatccctggagtggagaccagacggtgcctgggccccagccctcccacggggactgcaccttgggcctggctcggaagcgggtcagagtctgcgaaagaccagcgactcttgggtttcggggcaggccgcgggcgcccacccacgccagcaccgggagccgcgcggcgactcggcgagcccggcaggcaggacaggactgcggcgcaggtctggctcaggcggaggaagcagccgccgccccagctgacggagtgcggccgggggcttcccagaggaggcggcgacgtcgagccctttcgaaccgtagcctcggccccgcccggccccgcccggccccgccccacccaccccctccccggcctacagttcgcgggtggggcgacctgcgacagcccctttaagaggcgtggtcacgtgctccgcccccacctccgcctcgcgcgccagtaaggggtggggtgcgggagggctgctg

SEQ ID NO: 28299 - DNA, 491 bp, Homo sapiens
  source 1..491: mol_type = other DNA
taattacattagataaggcaatggctagacgtgtcttttactaacttgttctattgggagcggacgagaaaaaaaaacttctctaaacatctttcctttgttttctggtcagagtaataatgctcgttgtaaaataaataaataaataataaaacaactcgtaatcaacgtgctttttatgtcccggcagtgggtacaccctgcctggtgaattcgaccggggttttgggggacccgccacccaagggccgaagagcagggccgccctacgggcgctcccatttggccacctgagtggcgacttggcgccttcctcggagcagctccggggttccagtttgcggaagcgctaaccgcgttggggcctagggcggatcccgtgattgggacaggccccgcccccggctccacttcccccattgtgtgagcggctcgggcctaggccccgcccccctccggaggcccggccacggccgccgccgctaccgcta

SEQ ID NO: 28300 - DNA, 690 bp, Homo sapiens
  source 1..690: mol_type = other DNA
tgggacaggccccgcccccggctccacttcccccattgtgtgagcggctcgggcctaggccccgcccccctccggaggcccggccacggccgccgccgctaccgctagcccaggacgccgggctgagtgctacagtggcagggggcccggggcgcacgggctgaggcgacccccagccccctcccgtccgcacacacccccaccgcggtccagcagccgggccggcgtcgacgcctaggggggaccaaccccgcgccccgcggcgtcttctcccgccgccgcgggcggccccgaacggagccccggggggcgggcgctcccagcacctggccgccggcggtgggggccgtagcagcggccgcaggggagcgcggcgcgaggaggggccgcctgcgccgccgccggagcggggcctcctcggtgggctccgcgtcggcgcgggcgtgcgggcggcgctgctcggcccggccccctcggccctctggtccggccagctccgctcccggcgtccttgccgcgcctccgccggccgccgcgcgatgtgaggcggcggcgccagcctggctctcggctcgggcgagttctctgcggccattaggggccggtgcggcggcggcggcgcggagcgcggcggcagcaccgggaggaggtgagtgtctcttgtcgcctcctcctctccccccttttcgc

SEQ ID NO: 28301 - DNA, 277 bp, Homo sapiens
  source 1..277: mol_type = other DNA
cagggtgtctaaggaggtgtggatcccgaggtcaggagttaagaccagcagttacttggcttgaacctggcaggttgcagtgaaccgagatcgcgccacggcactccagcctgggcgacatgaggcgcaccaggtttccagcgcccctggtttccacgtcgctatggtaacgaccgcggcttccccgcccacagggagagaatggcgggagcaggcacggaaccggcttttcctccttcctgcagcgtgattggcccgcggctcagggaggcgacca

SEQ ID NO: 28302 - DNA, 539 bp, Homo sapiens
  source 1..539: mol_type = other DNA
agtctgtgttgcccaggcgatcaagatacatgaacattggccatggtctggatgtattatttaaaaaacaaacacgagcttgtatttggatattctttgcaatattgtttgtaaatagcaaaaaattggagatgaatggctaagtcaatgtgatacatttacacaatggaatactatataccacagtttggataactcccagtaatctgaggttaagtgaaactgtgtgccaggtgcgggcctgaacccccactgtgacctcagggagggcagcccacatggcaggagggagcccaggactgctgactcccgggccagctgctggtgccccctccctgtcgggctggcccaaggattcaggccggggcctcagtcctcggctggggcaggcaggaggccctgtaactccagccgctgctccacctcagcctggggaagcctggcttgcctggtctgccgacaatgcctcccattcagccctgtcccagctgccaggcctgcgggccgtggaggggggctcctgccaggcggggacagcc

SEQ ID NO: 28303 - DNA, 354 bp, Homo sapiens
  source 1..354: mol_type = other DNA
gatcgccagtgagcccagatggcgccactgtgctccagcctgggcgactgagcgagactccgtctcaaaaaaaaaaaattctttcatttatttagttacttttagctggagtgcagtggcagtcatagcttactgcagctttgaactcctggctgggactttttactctgtcacccaggctagagtgcaggacactgcctcagcctccccagtggctgggattactggtgtgagctgctgggctcaagcgatcttcccatcacagttttaccagcactcctgattttataaatagtgaggcttatcaaccccatttctacccaaatcttctggtagacttgagtatagccctga

SEQ ID NO: 28304 - DNA, 414 bp, Homo sapiens
  source 1..414: mol_type = other DNA
taatcaaaattaataaatttaacattgatacaatactattatctaatatagtcaagttttgctgtccccacccaggatccgatccaggaccatgtcttgcatataatacagacatttccggaagggtacagatcagttatctcatgattagactaagccgtgtttttctcagtgcatcacacagaaagtaattatcaggtaattgtttcatgggacggaaaagagtcttttctttcgggaaatggatacctgtgtcttgcccaagagaccctgcggtctctgcgagaaaacgctctgcgcgcggtgcgccatgggacgggtagttcgcggtgcgcgccccatcgcgctcccagatggggaactctacccgagaggccgcgcgagcggggcgagggcaagccggccggggcctcg

SEQ ID NO: 28305 - DNA, 350 bp, Homo sapiens
  source 1..350: mol_type = other DNA
actcctgacctcaggtgatcggatgtgatgtgtgatttctgaattgtcatgatgcaataaagtcgagtctttaacaagtgtcattcaatattttttttaacatcctatacataaaacttctatgtgtctccggttcccatctatgagaagggcacaacgcaaccagggttttgggcagccttccatgaaattcgagctttcgacggggaatggggcttccccgactcgcccccacgccccccgcccttctccccaggtgcgcagcccgcgccgcccaccccgggcgcggcgaggcgacgggagccgagctcgagctgcagggagacagtgcctccagcgggtgctgccgc

SEQ ID NO: 28306 - DNA, 393 bp, Homo sapiens
  source 1..393: mol_type = other DNA
ccaccttgcagtccaacttctgtgggatggaaagtattggtagtagaactaaagattctgccagcattttacacagttgctacatgtactataattatctcatttgtgtgaaaattcaaggatctgcattctgctattttcatcaggctgaactgcagatgggttcaaagtctgatgccagctccctgttggcaatacagccatcatttgtctgtgaaagtccccccaaccaggcggccctgagggggggtatgaggccggagtcggcggctcccaggcccccagccccgtcagggcgcccccgtccccaggcgccagagccggggtccgcagccccctagcactccctggacggccgcgggcctcccacaggcctcgaagtcccagcaggcc

SEQ ID NO: 28307 - DNA, 494 bp, Homo sapiens
  source 1..494: mol_type = other DNA
ggaaacatgtactcgggccctggctcaggtcagagctcgtgggcaacccgacaccccgctctagggcggccaagcctgcctacgacttggcaggtcgcggtccccggccctgccctcaggcgacctctgggtcgcgtgggagcagaagtgcgggctaagctcagcgtccctgccccgcgaccctgggcagagtccgccacagccccgcacgtgcggcgcctcgtgcaccgccccgggccccgcccccgccccccccgcgaccagactcggctgcggctccacgtgacccgcggggggtggacacgccgcgcgagcaggagctcggataggtcgctttggccggcctggccgctccgagctccgcccctcttcgaggggacacaggggcggcggggcggggcctccgcgagggtcctcacctggccccgatccagagcaacgatccggggaagctggcctggcctcatgaataattaatgtgccagagccggcgg

SEQ ID NO: 28308 - DNA, 465 bp, Homo sapiens
  source 1..465: mol_type = other DNA
ccggtggggctctcccgcgtgccccacactggggtcgctggccaggagaggggctgcgcccgcgcgcctgcgcagagccagagccggccctccaggcgtttcacggccgtcagcgtggcccaggccccagccccccgaggaatcaccccgaaacgggtccgcagttccccctcccgcagaggccgtaacggggcgatgctatcgccgcggacacggccagaccgaaccatggcggtttccggcgggcatggtgactccctcccctcccccgctgtgcccggctcgtgagcaacccggccccaggtggtccccggccctcacggagcgcccctgggagaagcggctccgcgagataccagcgagctgaggcgcggggctggctgggaagtagtcccggccgggccctggccccgcccctgcagggcggagggacgcatcacgcaggggtggggaagccggatccgt

SEQ ID NO: 28309 - DNA, 497 bp, Homo sapiens
  source 1..497: mol_type = other DNA
gccccgcgcctcagctcgctggtatctcgcggagccgcttctcccaggggcgctccgtgagggccggggaccacctggggccgggttgctcacgagccgggcacagcgggggaggggagggagtcaccatgcccgccggaaaccgccatggttcggtctggccgtgtccgcggcgatagcatcgccccgttacggcctctgcgggagggggaactgcggacccgtttcggggtgattcctcggggggctggggcctgggccacgctgacggccgtgaaacgcctggagggccggctctggctctgcgcaggcgcgcgggcgcagcccctctcctggccagcgaccccagtgtggggcacgcgggagagccccatcccgccggcgtggggtggcccctgaccgtgcaacgggcgcaaggctcgcacccactacggcccctcgggcggcggagcgaggctccgcgaacccgggactgggcgcgccaggcccgcgcgctg

SEQ ID NO: 28310 - DNA, 290 bp, Homo sapiens
  source 1..290: mol_type = other DNA
gaatggtagaagacgtctagatgccgtaggaccattgtcagaagtttcacattggagagtggacaccatactggatatgcagctaatctttaaattaagaatagcaacgatttgagccaggctttacatattgctgcattaaatcctatttacatggctgctggcgaccaatgggaaggggagggggcgtgtgtgtgacgctgtcactcgctgacgcacaggtgcccccggggttgcgaccgagtgtgggggatgggggggcgctcaggctatctcccgcctccctgtcc

SEQ ID NO: 28311 - DNA, 235 bp, Homo sapiens
  source 1..235: mol_type = other DNA
tgcatgccgttcaacatattgggaggggaatctggaatgcctgagtaggcattcaggaatggtagaagacgtctagatgccgtaggaccattgtcagaagtttcacattggagagtggacaccatactggatatgcagctaatctttaaattaagaatagcaacgatttgagccaggctttacatattgctgcattaaatcctatttacatggctgctggcgaccaatgggaagg

SEQ ID NO: 28312 - DNA, 473 bp, Homo sapiens
  source 1..473: mol_type = other DNA
tccagactccaggcctggcaaccgtgaggcctcagggggggccgccgctgcttgggcccacgcttcttgcgaggcagggacagggccaggaaagctgactgtgccgggccagagaagcgggcacgggtgccgggcccacaaccgggacaggtacacgagaagttggccccaggttgggcccgcctcgccctgcctcgcccacagccgccggcacagtaggaggcgaacccagaggtccctgagctcgctcacctgcagccgagtcaccagtaggctgtagggcgccattttgtgcactgatgcgcattaaagtgacgtcccacacggcgcctttaaagcctttgggcaggggcgtgccggaagagtggggcgtcacggtgaaggcgaggcctccctagaggcagaacaaattttagttccaaatctgggagagtttttaagagtttcatgcacctgccaggacctggccgccc

SEQ ID NO: 28313 - DNA, 299 bp, Homo sapiens
  source 1..299: mol_type = other DNA
acagtcttccgatggctgcaagatcgccctgggcaagctcagagtttctctggacctggttggggctcccgcgcctgagaggcgggaaacgtggcgcctgcgaggcacagacagccaggggtagggaccagcctgcttgggaagcttcgggaacgggcggccaggtcctggcaggtgcatgaaactcttaaaaactctcccagatttggaactaaaatttgttctgcctctagggaggcctcgccttcaccgtgacgccccactcttccggcacgcccctgcccaaaggctttaaaggc

SEQ ID NO: 28314 - DNA, 256 bp, Homo sapiens
  source 1..256: mol_type = other DNA
gtagagtgcagcatgcaacttccaatttattataacttttcaattggaacataatgtctacaaataaatgcaaaaatcttgccgagttcaattagtttggacaattatatacgtcaatgttcgggggaaccgctctgctcctgtgaaaggaggaggccccgccctctcctcgccctctctctgccccacgctgtgcgcgagcacacaggcagccccgccccgcctcggcggggtgggggtggacagaggaagcgat

SEQ ID NO: 28315 - DNA, 454 bp, Homo sapiens
  source 1..454: mol_type = other DNA
ccttctttccaagctgaggctgagaaggaaggcctcctccaggccctgggcacagcttgacagtgcggagcacttcgaagagaacaggctgggtgcctgaattcaatcagcccgagcctcccaggctgtggggtgttcacctgtgcaccaattcaattccatggaaatattacaaggggatccctgcgaggggccccccagtgaacgtcactgggcagggcaaattataccgtggcccgaccataaaaaaggcccccgagagacgcagctgagcctctcacctggcagtgcctgactcaggaggtgatgtctgggccatgagccacagagcctggtgtccctttaagcagggagtacaaattctcatccctccctcctgctctccctgacgtcagctggaaggcgtgtgagtgagtgaggggctgaggtaccgcccgcgcgagcacacacagac

SEQ ID NO: 28316 - DNA, 311 bp, Homo sapiens
  source 1..311: mol_type = other DNA
tcctgggttccagtacctagagatgataaaaataaattattaaattgttgtgaaacagagcaagctctttttattttaaaaagactccttttgaaaatggcttccttctttccaagctgaggctgagaaggaaggcctcctccaggccctgggcacagcttgacagtgcggagcacttcgaagagaacaggctgggtgcctgaattcaatcagcccgagcctcccaggctgtggggtgttcacctgtgcaccaattcaattccatggaaatattacaaggggatccctgcgaggggccccccagtgaacgt

SEQ ID NO: 28317 - DNA, 151 bp, Homo sapiens
  source 1..151: mol_type = other DNA
aacctgaacaaaggccttcagtcaagcgattgatggggagcgacctcggctctcttagtcatagacactgcactgcatggtagaggcagccccttaatcggccgccttgtttggagcaatccaatcgaacctggagggctccgctccgccc

SEQ ID NO: 28318 - DNA, 237 bp, Homo sapiens
  source 1..237: mol_type = other DNA
atcgaaaaaataccgacctctaggttcttgtgtttcagggccggcggcggcccgcggaagccagatcccggaggtcccgcccccgacgccattagacggtgagggattcccagcgcaggcgggccgcaagcgcaggcgggcctcaaacgcaggcgggcctcaaacgcgaggtgccgcctccttcccgaggaaggagcgtggtctcgccgcttacctttacgcatgcgcgggccctgt

SEQ ID NO: 28319 - DNA, 413 bp, Homo sapiens
  source 1..413: mol_type = other DNA
tctctgtcaccacgaggggcaccgcgcggcagggcagagaacccgccgggatccagcgctggtttaccccacaccctcgtcgaaggggctctcgagggctcccccctgcaaggtggaggcatgactcctccatcccttccccttgaattcaaacgtgaggatggtgagtcgtggcccaagtcggccagccccttccccctcacccagcatgatggggctgagccgccgggccaggcctttgcggcggctccattgggacccgtggcgacggcggccacgacggccctcgggcacccggcagcggcttggaccttcccgtacccgacgggagtgcgaggggaccgagcccgggcccgggctgaggggtgggggagaggccgccctgcgctgctcgcgcccccacacccgcacag

SEQ ID NO: 28320 - DNA, 266 bp, Homo sapiens
  source 1..266: mol_type = other DNA
catgcatgtagtcccagctacttgggcagcaattgggagaccagactggccaacatggtgaaaaccttctctagcttgggtgacagagcgagaccctgtctatggcggtcacctactcaggaggctgaggctgcagtgagccgagatcgactccgtctctagaggaagagatggaggtcttcccctagttgtcctgggaccaagacaaattcgtcctggtgtacgggctggccctggacgtcacttccgctggcggcagtggcgtc

SEQ ID NO: 28321 - DNA, 396 bp, Homo sapiens
  source 1..396: mol_type = other DNA
cttattaactaattaatggcatttgcagttatgttaaaaattcttactttatagatatatactgtaatacttatggataaaatgatgtcattcagatctgtgtctagctcactgcacggagcatattgggtgatctttttttttttgtttttacaaacacatatttatatacaaggatatattcatattataacgtgcgaatcgcgagtgattcactgcggctaccacctaacctcggccttggaggctggacatacagcgggaccacgctcgcggcaccacagctctcgggaggtgaccgtctgtcttggtagtctcttgccggacaccgcgaggataccagacgccactgccgccagcggaagtgacgtccagggccagcccgtacaccaggac

SEQ ID NO: 28322 - DNA, 252 bp, Homo sapiens
  source 1..252: mol_type = other DNA
ccgcctcagtctcactcctggagtgcagtgtgcagtggtgccgagtagcggaggcgccattacaggcgggagccaccgcatcgctctgtcgcctcagctggagtgctagagttaagtagctggggttacaggcgcccggccataagccgctgcggccggccggtgaattcattttctgccaataatttgtactaggacacagggccagtttccgcgccagtgcccccgtagagggcggggcccactcgctcg

SEQ ID NO: 28323 - DNA, 507 bp, Homo sapiens
  source 1..507: mol_type = other DNA
actatagaagttacagtgctttattttttaaaatggtgctaccagactgaagccaccgccttgcaggagaagcctttcctgcactccaggccgtgagtcgcctctaggtccctggcgcgtgtgactcgcggcgggcactaagcgcagacccatgatctcctcctgaaccccagcaacgggggtggggtgaggaatcccagggtcccacgccatcttcggaaaaaaaaaagttggagccaagttttcttcacccaacttttaggccttttgccaagcaagctgcggggatcctaaggtttcctgaggggccaggctgctgggaccccgccgctgctggggttctaactaagggcccggcggttaagacccaacgccggcggatgagacggcgcaggctctaagcccctcggccggcgcacgcactcaccatggctgcggttccgcgggctcagcactcctaggggagcgcagctgacgtttcagaagcactcgcgtgcgagcgagtgg

SEQ ID NO: 28324 - DNA, 318 bp, Homo sapiens
  source 1..318: mol_type = other DNA
ctgctgcctcagcctcccgagtagctgggccaggctggagtgcagtggtgcgatcttggctcactgcaggctggagtgcgtagctgggattacagttgggtaagatggtcttgatctccagatctcgtgatccgcccaccttttttaaaaaacagtagaaatagcttcctttccttcctttttctggtaaagacattcctgcagggttctaagcacaaaccgcttttggctttcagtggtgtgctcgtctgagactgcagcgccctgggtccgcgcaggcgcattccacaccgacgcaggtccgtcctccaagtgcgc

SEQ ID NO: 28325 - DNA, 288 bp, Homo sapiens
  source 1..288: mol_type = other DNA
tagctgggactaaggcgtaagccaaggcctcaagtgcagggaactgcacttcattcgactgttaaagtatgttcacaggatggatccctttgaaatcctgaaatagccagtcgcaggctaccacctatgacaacaactttttcatcttaaaaaaacaaataggcctttctggctctaataacctgagcttctgttatgaagctgggacccttagagcctcaggatgatcctctgtttgtttgtgaagccccaatcaggtgctaagcaccatagtggcacttagctgaa

SEQ ID NO: 28326 - DNA, 385 bp, Homo sapiens
  source 1..385: mol_type = other DNA
tgcgattcaacagctcccagaggcacttgacctgctccctcgcctcacgtggaggtggatagaggtaaaggaatgtccacgctcgacagtgcctgccctgcgcctgttctggggagctcagcccagaccgggcctccagctcccttcccgcccggcaggggccccgggcccggagatggccacgccacgctgcctacgaacggacgaggaagcccccgccgtctctgaggtccttaaagaggtcgcccggccggtgcccacagcgcgctggaggcacgccagagcctggaggggcaggcgctagcggagccccgcagtggcggctcgcgctcattggccgggagcagcgcggtgggcgggacggagctcggcggtctgcgctcgg

SEQ ID NO: 28327 - DNA, 470 bp, Homo sapiens
  source 1..470: mol_type = other DNA
ctaataaatatacatttgtgtgcgtaattgtattccatcgtgtggatgtaattacttgtaatttttattcctttggataaattcctagaagtttacaactggaactttttcaaaaaactcgtgcccggggcccccctctcaggaggccgtcggtgggcctgggcactggcgtgtcaggtcctcagtggttccgaggtgcactgtcaagcctccgtgcccgcctttgtaaggaggctgggagaagcgggacttggatgacccggactcccgtcccgagcgctggggtccaggttgtgctcccagccaggcctggaggcggccagcggtcgcaggtggagggtggcctgttaacccttcactcccaggccagtggacggacggctcctttcattcgctccgaggccgcggggggagggacggggcgcgcggcctggaggcggggccgcagggggcgcgggctggggcggggg

SEQ ID NO: 28328 - DNA, 525 bp, Homo sapiens
  source 1..525: mol_type = other DNA
taatttttattcctttggataaattcctagaagtttacaactggaactttttcaaaaaactcgtgcccggggcccccctctcaggaggccgtcggtgggcctgggcactggcgtgtcaggtcctcagtggttccgaggtgcactgtcaagcctccgtgcccgcctttgtaaggaggctgggagaagcgggacttggatgacccggactcccgtcccgagcgctggggtccaggttgtgctcccagccaggcctggaggcggccagcggtcgcaggtggagggtggcctgttaacccttcactcccaggccagtggacggacggctcctttcattcgctccgaggccgcggggggagggacggggcgcgcggcctggaggcggggccgcagggggcgcgggctggggcgggggaatcccgccccgccctttctgtgcggcgcccgggcgcaacgcaaacatggcggcgggtggcacccgtcgggggtgtcatgggcggtggcgacggcaccgcccccgcgtctccc

SEQ ID NO: 28329 - DNA, 289 bp, Homo sapiens
  source 1..289: mol_type = other DNA
atcacctgaggtcaagaatcgcttagtgcaccactgcactctttttcaaaaaaaaccccaaccagctctgtccaggaagggctcagggtctgtgtcctggctgcggggtccatccccctccctacccaagaggaggctctggtctgcccccagacacctcccagcacccagcagagggcccacccaggcggtgctggttggggccccaggcgagctcggtcccacccagcaggcgggggcggggcagggcagagtgctccccccgccccccgcttcctccccgagggcc

SEQ ID NO: 28330 - DNA, 360 bp, Homo sapiens
  source 1..360: mol_type = other DNA
attggcccagtgaaataattgcctaggtgctctgtgctgggccctgggaacacaaatgagtcagatcatttcttcttggatgtcatgagcaaagtcatgatcaggaggctgggtcgaggctgctgcaggaggcaggttgtggaacccaagcctcagcagaaacttagaggacttattaaaaaaatacttcctgagtttctgtggtaccgaccactgttctaggctccagggacacagcacgcctggctcccagccaagaatcgcttgaacctgagattgcagtgagccaagatggtgccactgcactccagcctgggtgacaaagcgagactctaaagccccagctttgttctagtcaag

SEQ ID NO: 28331 - DNA, 318 bp, Homo sapiens
  source 1..318: mol_type = other DNA
cctgcatgttcttgctgggtatgtcaagaaagcaagaagcagtcaattggcagggcctgctggtgtgcagcggtagtcccagctactcaggaggcccacctgggcaacatggccagatccccatggtggcacttgtgtcactatagtccggcgtggtgacgcgcgcccgtagtctgcagtgagccgagattgcgcgcattgcactccagcctgggccaccacgtgttccacgggtagcgctaaaggttcggttcctttaagaggccccgcgaagccccgcctataaggaggcacgtgcccccaggccgcgctctaggg

SEQ ID NO: 28332 - DNA, 246 bp, Homo sapiens
  source 1..246: mol_type = other DNA
ccatcagatgcatgaatgttgaggctggacttgtgggccattcatcggtgacattacagttaaatttaattgttgctagactttatgtgttgtacaactaaacattgctgtttgaacaatgtcatctcacccatgtgagactctctgaggtcagttctgagctgagatcattcctgacaggacgcaggtgaggtcgggaggccactcacctatccccgggcactgccctcggcgcaggtcccgccc

SEQ ID NO: 28333 - DNA, 337 bp, Homo sapiens
  source 1..337: mol_type = other DNA
gtcagtgacttgcaccctcagttccctgtgtgcaaggggatctggagcagggcctggaacccgggcccctgactcggctccccagcccccgcgtgactcacgcgcgctcacggccgcccgcagctgccactggtcccctgcgcccctccgcccgtccccgccgcagcccagtgggtaaggggcggggagcagggatgcaggcacctttccgggcctggcacctggagcccgcgggggcggctcctggaccgcccgcagcgtggacccgggaccagttcccgcttgcgggcgcgggcgccgcgggaaggggaggggccctcggcggggccgacgggcg

SEQ ID NO: 28334 - DNA, 464 bp, Homo sapiens
  source 1..464: mol_type = other DNA
gctgggaccaggcacctgcctgacagggtcgacagccaccagacccggccagggcacataaaaataaagatttccctgagtatttgtgtcttcattcctgaaggctctcaagtcacataaaacattgagtaaatcaatctattatgcttttctagtaagggaaaatatcacaccttacttagcagtttctcaataaatacttgatgaatgaatgaagaaggaagtggaaggagagccggctgcctttgcgggagctgtgaccgcctgcttgacggccgcttactgagcgcccacggtgagcctggtccttgccctcttggtccccacagaggtggaaggacaggcctcgcggggtccgggccacgaaggacagccccgagtccgttctgccaatgcctgcctcgctagcacgcagggcgggagcccagtggggaagggttgccttcgtgaggccccgccctcac

SEQ ID NO: 28335 - DNA, 479 bp, Homo sapiens
  source 1..479: mol_type = other DNA
ctaacacatttattatggtgtacagtattaactgaataaaatttagtaaagtttactctagcagtgagtgctacaatggtcccagaggagaccactgagcagagactcaaatctgtcctcctcctccacccactagtgcagagcctgggggctgccggatcagccgaccccggtggcccggtgggtggccaacaaagcttggctggccctcgcgggctgtgtaggagcccaccctagggaggtacccagagacatccctggtttggctctgccggacggtgggctgggtccgaggcccgcggaccgtccgaggggggcctctgggttcgaggccgcccgcaccgaccagtgctgtggctcgggcagttcaccgccctctcgggagttcccgccctggcagacctcgaggcggcctcggagatcccgggcctggcgaatactgggcggggaggggcgttaactccagcctcccgggcggg

SEQ ID NO: 28336 - DNA, 464 bp, Homo sapiens
  source 1..464: mol_type = other DNA
gggggcagccaactcctggagacatctccttgctactcttcccaaagtcgggaggcaaagcggctgggtcaccagagcctgaccatactgacgggcgggcaggctaggcctaaggggtaggctctgagcctcttacccctaagaggcggagatgcgcccaaggcgggcgcccggcctgttccccagccctgcctggaagccccgcagctttaaacacagatagcacgggcctttgctacagtgttttgtacacggttaaaacactagtaaagcttttaaccggccgctgaggcctgttctgacggccgggcggacccaagaccgcggccacgcccagcaggacgcggactgagggagccggggctgcgccgccactctcgtgacgccaccatgccggctccctcccgccgccccaggagccgccggcactgcgcgagtgggagggctgggctcctcaaactctc

SEQ ID NO: 28337 - DNA, 467 bp, Homo sapiens
  source 1..467: mol_type = other DNA
atctgtcaggtgacctagactctgggccatctcagtttcctcacctgtaaaatggggatgctgaggtcagaatggacgatctaaagttccttccagcttccaaattctgggctggttttcagagatccaggccggggctctggagacgcgccagctctttgacacctctcctgcgctaaggaagagttggtttacagagccgccaggcggcaggacaagccccattacctcggggtcccgccacgaggaggttcttcaaggcctgcgcgcccacggtaccaaggagcgcggcgggcagccgctgagggaaaccccgcagtcgctcggcgtccccggcgccagctcacgacccagcgacctcctgcggcccgagcgtcccctggcggcaacgccggctcgttagagcggagcatgcgcagggcgttcctccttagccaatgggaaaagacattcgcccgcggtccgca

SEQ ID NO: 28338 - DNA, 363 bp, Homo sapiens
  source 1..363: mol_type = other DNA
gaagcactggtgcccctggccgtgatctggtggacctgatgcaccggcgccaacgctgggctacccaccaggccccctgccactgcccgggctgggcaacctgctgcatgtggacttccagaacacagaggtgctgaggctcccaagggcatttatacatggcatgaagcaagcccattgggcaacatatgttatggagtacaaagtcccttctgctgacaccagaaggaagtgacccggttcaaaccttttgcactgtgggtcctcgggcctcactctgggtgacgcatacgatcaggaggctgggtctagccccgggggtcgtccaaggttcaaataggactagccgggtgatcctggctt

SEQ ID NO: 28339 - DNA, 368 bp, Homo sapiens
  source 1..368: mol_type = other DNA
tttctaatcagacagcccgggaggatgttgtcacaggctggggcaagggccttccggctaccaaccggaacagccctgttccatagcccggccagagcccaggaatgtgggctgggctgggagcagcctctggacaggagtggtcccatccaggaaacctccggtggacaacaagagatctgtgcaccaccaggcccatgatgccactcatcatcaggagcaaccctggttatcccagaaggctttgcaggcttcaggagcttggagtggggagagggggtgacttctccgaccaggcccctccaccggcctaccctgggtaagggcctggagcaggcccgccctggcctgactctgccactggcagc

SEQ ID NO: 28340 - DNA, 382 bp, Homo sapiens
  source 1..382: mol_type = other DNA
ccactccagacacgcaggcagatgtgtgggtgccaagggtgagggcccagtctgctggggaagggtcccgcgtgctgctagaagtgagagcaggggctgtgacctgcagccaggaggcgtctcctgggcctctgcaggggacccacagaggttctcgctgggtgaatgatgggcagcctgcctttcacctgctagggctgggaacatgaggctcctgcccttcactggtaaacacattattaagggattctcagaatattttagagaagtttgtgttcctggacggggcccctgctggaaaggggccgagctggaccagtctcagtgccagggcttctgagcggaaggtaggggaagctgtcagcgccggccgtcccctcct

SEQ ID NO: 28341 - DNA, 349 bp, Homo sapiens
  source 1..349: mol_type = other DNA
cagtgagccaagatcgcaccactgcactccagcctgggtgacggagcgaaaaaaaagacaaaaagaaaaaatcatgccacctttgttttttgtttcttccagtgctgcctccccagggggaccatggtatgtgtcgggctgaggcgtataaggataacacctcccatacaaggtttctatgagggctggagacaagccaggccaggcttccagcccgggcagcctgcgggcagatggcctccaggtgggtctgcctgcctctggtggggtcagcaccacccagctgcagggccactctttgcctcagtgaagccagctcagagggtcattctgaggggtccctcctgct

SEQ ID NO: 28342 - DNA, 371 bp, Homo sapiens
  source 1..371: mol_type = other DNA
gtccagaaaagtggagtccttggacctcgctctgtccaggctggattgcagtggggcgatcttggcgagtagctggaattacacctagtagacacggggcatgttggccaggctggtctggaactcctgacctgtgttcagtctacctgacatgtcccctgagtggcctaatgggcatctcttagttgctcagactgaaaacctagcagccatcctggatttctctcacactgcctattcaacgtgtgaatgcatgagtggaaagctgagttcgcactcgtgactggccggggtcaactctcgcgcgctgatttatctctgagcggaggcggggcaggcgccacgaaaacgcgctcgcgccggcgccgaac

SEQ ID NO: 28343 - DNA, 486 bp, Homo sapiens
  source 1..486: mol_type = other DNA
ttcagactcaaagggtgcactttccctctttcattaggagattataatccctcacctggagggttctggagtgcagtggtgcgatctcggctcactgctggctggcctcagcctccagagtagctggaacaggatgccgcccaccttggcctcccaaaatgctgggattaccggctattaagactggcttgtgccaggctctgctgagaatcccaggacacggtggggacacggtggacgcaggctgccctgcggcgcgggccagcgagcattcagaggcccaactcgctgtggttgctccccgggtctggtcccgcgcggacgtgggggcggccatcaggactgcccgggggttggcgccctgctgggttccaagccggtgggcgcggaggaaggccgggcctggcgggtgggggcgcggcctggcgggagcccgcggctgtgggagcagggcccgccggggctcgggcagggcgggggcctgcc

SEQ ID NO: 28344 - DNA, 321 bp, Homo sapiens
  source 1..321: mol_type = other DNA
tctcaattagatttgcagtgaggtgaaatcacgccactgcactccagcctgtgcaacagagcgaggctctgtcagcaatatagtgaagccctatcttcaggagccaatagttgactattgagtctcatatccccctgagtggcctaatgggcatctcaccacgctcagactgaaaagctagcagccatcctggatttctctcacactgcctattcaacgtgtgaatgcatgagtggaaagctgagttcgcactcgtgactggccggggtcgactctgacattcgcgcgagcgagggggcggggcaggcgccacaaaaacgc

SEQ ID NO: 28345 - DNA, 319 bp, Homo sapiens
  source 1..319: mol_type = other DNA
caaaagccattccctgtatttaacacgtaaatgaattagccgcacacatggaaattgccagtttcgtgggtcccaacgtcatcccgcaaagtaggcgggtcaccttgagggcgacattcgggcgtcaccccgaatcgttattttccttactcataagtttaaggcataaggacgttttgaattctattctcattaggcgtatgatgactatcgtattcatttaattttttccctcgaggaaaataaataattcataagcaccgcgaaggctcacggggaacgtccccgccccttctcgctccctagcggccgaaggggc

SEQ ID NO: 28346 - DNA, 474 bp, Homo sapiens
  source 1..474: mol_type = other DNA
atcgcgtcggtatttattgagcacctactatatgctatgccctccgggagcgcacagtccactggcgtggggagcggaggcgccgccggcgaggaggctccgggcgggccgtgctgagaccgcagcatttaacccggcccgaggcagctgggaacagtgctgcccagggaactacaaattcaaaggcccggggaagggccgcgctgagcagctgcaggcacaggcccaggccaggccaggcaggaccggcccctgcagtctcggaggccgggggaagattccgcctctcgctcccatccggggggcgccatcttgcttcctttatggcggcgaacgaggcccagagaggccaccgtcccgcgcggggcagcacagcggcgggagagctcggagcgcagagggccgcgcagaagcaggcggagcgacccggtccccgcccccgcgcccgccccgccccgcgcgcccgcctggccc

SEQ ID NO: 28347 - DNA, 332 bp, Homo sapiens
  source 1..332: mol_type = other DNA
tgagccgaaatggcgccactgcattccagcctgatcgcgtcggtatttattgagcacctactatatgctatgccctccgggagcgcacagtccactggcgtggggagcggaggcgccgccggcgaggaggctccgggcgggccgtgctgagaccgcagcatttaacccggcccgaggcagctgggaacagtgctgcccagggaactacaaattcaaaggcccggggaagggccgcgctgagcagctgcaggcacaggcccaggccaggccaggcaggaccggcccctgcagtctcggaggccgggggaagattccgcctctcgctcccatcc

SEQ ID NO: 28348 - DNA, 335 bp, Homo sapiens
  source 1..335: mol_type = other DNA
tgcgtgctgggaacctagctgggtgccggggtctggagccaccatgtgtcacctccccaacaggctggagtgcagtggtgcaatctcggcgcactcgagtctggctctgtcacccacgctggagtgcagtggcacaacttggctcactcaagcgattctcctgcctcagtcacctgagtggtctgagaactcctttagggaaaggctgtgtctgattctccccttctcctgggtaccagtgcagggcctgcccctattcccgtatcagtgaacacatgagccccaggcctgacctgcctgtgtggccagggggacgaggcctctgagagccagcg

SEQ ID NO: 28349 - DNA, 637 bp, Homo sapiens
  source 1..637: mol_type = other DNA
gtggccaggagctggacgggttcagcccggtcccaagaggattgggcacccattgagtgccaggctcttctcagtggcttgggcactgggtcatcagctgagtgagagcaagaagtcacccaatggtttcattttttgcagtctttgttgtcccagaggagtaagaacatgctggaaacatggcatgttccaaagagaataaaatacagttttatgatacacgaattgtgtgtgatacattccaatttctcacattgaacaaattaccaatagcaatagggtgatgcaggcaatgcccttagcacggtcccggcaggaggcggtgggatcaggccgacccgggtcccaggggtgacagcgtcagaatatcgaggtactcaaccctctgaacctcagttttctcatcagttcaatggggaaaacggcgtaatactggcggcgcggaggccggggagcgctccctacctgttggccggcggactggggactgtccgcacccgccccggggagcagcgagggcgcgcgggcggggtcgcggggaccccgcaagggctctggggaccgggacccgcagggtaggtcgggacgggcggggcggggcggcctgaccccgccccgggccggaggggcggtgctg

SEQ ID NO: 28350 - DNA, 599 bp, Homo sapiens
  source 1..599: mol_type = other DNA
ctcttctggctggaattgtttcccagagcagccccgagggccggggttaaaagtcaagcttctcatctggactcatcagttctgactgagcacttctgcaaaaagaaagctttccacccagggcctggcgtgagctgaggggcgcggcggctcacgtctgtaatcccagcccgaagtgggtggaatcccacctactcgggaggctgaggcaggagaatcgcttgaaccagcgcaatcgcgccatagagcgaggtccggcgtcaaggcacgggccctccgtccgtctcgtgccgaaggagggcgcgtgcgccccttcccctgcctcatcctatggcagcgcgcgtggcaggcagccacacccgggcccggcttcgcccagcgctaagggcgtggagccgcgccgcaaatggcgcgcgagcctcctgcgcacgcgcgtgcagcgcctggggtcgggccagcggcgcggctgaagcgagggcggggagggaaagcgagcggcgcctgcgccccggcggtggacgggcccggtcgtgggcggggattggggcggagcctgaccgttacgcgcagccccgcccccgcggcctcgtcgctcctgc

SEQ ID NO: 28351 - DNA, 387 bp, Homo sapiens
  source 1..387: mol_type = other DNA
ttaaaaagtgttattgaataatatgcatacctaaagtgcacagatctcaagtgtacatatcacaagcattttaaaatcgtttttttcttcactttaaattctttgtaaaaattgaagaagcgaggtttatttccatgtgagagaccatggggtcacctgcctgtctccaggggactctgtcacagaaggaagacagctcagatgcagagagagcatgctgtcttttttctcttgtaagcaggaggatcccaaatacaagaagatattagaagactcatgtatggtgtaagttagtttgatatccgtggaaatactgaaatttctctttggccactttctgaaaagagagctcttctgtgatggccacagcaggcaggagcgtgcagt

SEQ ID NO: 28352 - DNA, 371 bp, Homo sapiens
  source 1..371: mol_type = other DNA
ccaagaagctgggattccaggttctccacctggatgacatgaagcagctcaggaagtgctctccatctagtatttccctctgcagaacggggctaataccctatcatgcaaggtgccttgccatccaaatatattttattagagcggaggagctcctaacgacattagcttgaaactttctgaaagaattaccttccctgaacttccggtcaggtgcggtgctgccctcactccccgtcgcggggtgagccgcctctctactcatctggcccaatcgggggccggggctcggtgtccggtagccaatggacagagcccagcgggagcggcgggggcggtgcggtcgcggctggcggcagaagcggccgcag

SEQ ID NO: 28353 - DNA, 470 bp, Homo sapiens
  source 1..470: mol_type = other DNA
gaagtgatgttagcaaagctccaatcatcaacccctcctgagaggcagcagcatgaatggtaagccagactctgtcacttacaagttgcacaagtttgcataactctttaaattgatgaaattaaaaatgaataattgtatagtctataacgagaataataaacgtcttttttttttttttttgggttcaagcgattctcttgcctcagcctagccaggatggtctcgatctcctgacctcgcccagataaacactttttaaaaaaaattattttatttttatgttattattattattattatttgagatggcgaacccaggattcggacctcctttctgggccccgagagggtggacggcctggcatttcctaggatccaagccctgggcatagcggccgcgcagcgccggcggtcgcgtcctgggttgccagggcgccgccctggaagtagagtgcagcgcggggcgg

SEQ ID NO: 28354 - DNA, 456 bp, Homo sapiens
  source 1..456: mol_type = other DNA
cagagctgggggaggggaacccctgtccctgcccctcccctaatctctgaggggatgggctggagttaggccgcgtagcaggctgcccacccgcgccaggcgctgtggggtccgtctcaccagggtcccgcccgcctctcgcggacccggagccccgacgggagggggaagctggaaggctgcggacgggcggcagtggaggggcagccccctggcttcgtaaccaaatgtgaacctcggttttcatatttgtgaaataggctttaaaacacctaaatcccaaagctgccagctgtttccacgtggggccagattctgtcaatggatcgatccgcccgtgctgggcattcagaccccagtccgggattccgcgctcggggtgcgagaggccgctcccggggaggggcgggacccgggcggggcgggaggggcggggcgcccgggcctattaggtcc

SEQ ID NO: 28355 - DNA, 352 bp, Homo sapiens
  source 1..352: mol_type = other DNA
cttgcttttaggttaacattagataaccccaacagcgttgctgtgaggaattaaataagctaatatctgaaacacattcaaggctttgttcaatagcataaagatctattggatgcttattatgtgccaagcactgtgtggtttgtaagaaaacattaccatgccaactaggcgggtggatcacctgaggtcaggagttcgacaccagcgtggccaacatcttttgcagttatttattccataagcccgaagggcctcagagccggggcggaaccagcgtctgcggaacctttcttcccgctcccggtgccccggaagccccggcaggaaatgcgtcagggaccacgctgcg

SEQ ID NO: 28356 - DNA, 574 bp, Homo sapiens
  source 1..574: mol_type = other DNA
acacagtaaaaaatagatttatgtatgtttgttttttaatagataggaaagccatactgcagcctggctggtccccaaggaggctcctggcttctgtgtctgggtagaagtagccacagttctccttggaccctgcaggatcagtttgggccaacgtggctggttcaggctgccatagtgccaagggcctggggctggacacaccctgcatgggagtggacctgggcagctggaggccacctctgggctgtgatgatggcagcctcccctcactgagcgccgagctaagagtgcagcgcgctgcctccgtgccctgcgtcaacaggggccaaggctgctgggcagcaggacgctcagggccttggcctcaggagagattccctagatgttgggtctggccgggcggccgtcaccggtcaccacttgctcgcggccggggggaggcagaagcgcgtcccgcgggagaggtgtgagctcccggtcccgcggggacgcgagtgggcccagtgcccgggctgccaggcggggcggggcggggccgggcgactgagaggggcggggcctggcggctggg

SEQ ID NO: 28357 - DNA, 472 bp, Homo sapiens
  source 1..472: mol_type = other DNA
gcctcagcctcccgagtaactgggactacagacccgacatgtaggagtaaattcctctgacgggtacactttaattggatcaactgacattccgaatccaaatataagcatccaaatctcacaagaatcgagagctcccaaggcagggggcctgcgagctctgtgtgcccggtgcaggcacagaagcgccgcctcaccgggttcgggccccaggacaccttccgggccgtcggtggggccttttccggtcctgacagcgccctgagcaccccgccctcccggcattccccggggtcgccgcgcgctgagcgagaaaagctcagccaaggtgcgcgtgcgcacacggcggcagccaaaccacaggcgcggtcgcagacgcgcgccccctcctggcaagctcgcgcgctctcgcacgcaccccgccgatgcgcagggcctgcccgggggccgcggcaaaccgggctggaggcgg

SEQ ID NO: 28358 - DNA, 774 bp, Homo sapiens
  source 1..774: mol_type = other DNA
ctggaactgagaggggccatttatttccagccgcccgtccctcccaggcccggtgggaccagacccgaagccaaccctcgccaggcgtcaggtgtagaccccaggccaggccagagcagttcctgggtcttcggaccgggatgcccgccctgcccctcctcctggccccgcccggtctgtcacagggggaggcctcggcctcgcattccgggcagcgaacttcgccggccgaggttagccccgtgcgggggcctcccgcgggaccgaccgccaagcggcattgtccgtcccgggcgcccgcccggttccagacgcaggtcctgcggccgccccgtgacaagcacactgacgggccaacgtcacggcagcgcaggcgagtctgctctgcgcgctggcgcgttcccacggatggcgggcgacctcacgggatccccggttcgcaggatccccgcccccgaggctgcctctgggccgggaggggttaccccagaggggcgtccactctcgacggcgggggccggggcgccgcgggcaggggagggcgcagcctccaagcagccccagcctggcctagaccccgcgcctagcgagccggccggccaggcccacaccccccacctgccgcccgccccaggggaagggtccccccgacgacgcccgagcccccctcttcctcggagggccggaggccggcgcccattggccggccctgggcgacgccccgcccctccgacgccacgggccaatgagcgcgcgctgtcagctcatcagccg

SEQ ID NO: 28359 - DNA, 462 bp, Homo sapiens
  source 1..462: mol_type = other DNA
caaagtcccaggccgctgctctgcagaccagcccgccccagggctccatggtgggggagtccaggggtcttgctgtgcagaaggcctggggctcatcctcttggcactgtcctgggcttgagaaccagcccaggaggcacagaggcctgcgagcttccgggaaggggtcccatgtttgggaaacagaaaaacattttacattcaaagtgccatgtgcaaagtgtagagtttttagaaaatcgtcctgtttaacatttcccttaaatcttaaagtgcaatttcagtttcttcagtgagtataaaaataacactcagtgcagaaatagaatttttaaaagacatagtagaaacccatataaaatctttctactttattaccatggaaataatggaattttttaacaaaacacatccttattcaatacagagtaattattttgtctgagatctttcctcactttg

SEQ ID NO: 28360 - DNA, 522 bp, Homo sapiens
  source 1..522: mol_type = other DNA
cagtgtgcacacgtctgcctggcgcttctctcccacagtgagcagtgtggcagggtgcctaagactgacaattacatgtaaagtacatacctagattacattcactcacgtgatttattaataattcactcatttagcgaatatcaatggaatggatgcttacagcctgggcaaagcaggccagctcccgtcctcaccggctgtctcctcgagcagacaagcggacccagtgagacccgctacgtggtggcacaatgcgagtcccaggggctttgcggacctcactgcagccaatcctgaccacaggccccagtgggcacgctgcagagtctgcttctcagagcagggggctgacttcccccggctacacggccctatgcagttcggtgggaccgggccgaccgcccagctcgcgccacgggtcgccagggttcccgctccccagagaacgggacttccggcggaaatttcttccgggagcggaggcgcgggactgacctggccccgccccctcctccagcg

SEQ ID NO: 28361 - DNA, 480 bp, Homo sapiens
  source 1..480: mol_type = other DNA
tcccagctactcgggaggctgagccaggagctgagatcgcgcccctgcactccagccaaaaaaaaaaaaagcaaaaaaaaagcactttgtttttttggctggaaactcttgacctcaggagatccgcccgtgctcgacttacaggcgtgatccaccgcgcctggcgcatatttttaataggacctaatatttacctgaaattatcttggttatttaccaatactaccctgacgcgtgtcggggccctggcccagtgcctggcacagatcagcagcgcgctaagcacgtgttgaatggacgactaccttggctgcagaccgcgggccagggtctctgtcagccccggcagcgggtgggtgaccccggccgggggcggggcggggaggacgcggctccgcggcgccatgacgtcacgcccgtgcagcgccgcggccgcgtgccgggcggcgccatgacgtcatacccgcggagcctccgccg

SEQ ID NO: 28362 - DNA, 376 bp, Homo sapiens
  source 1..376: mol_type = other DNA
tgtgccactgcaccccagcctgggtgacagagtgagactctgcctcaattaaataaacttgattaaaacaatcaccgtagtaaccattgtttgtggagtaagtaatgttattatccccacttgatggctgaatcactacaaacccaagttcttggagctttgcagtttataaagcactttccaatgctggagcggaggctggccccgagacctctctaagcctggtttgaccccaaagaccacccgatgcggatccggggcgggcgcgtgggggcggcgccagcgtatacacagcgcgcgggcacttctggggcacacctggcgcacaactgcgacccggggacttcattggctggggcgcaggtgacgcagcccg

SEQ ID NO: 28363 - DNA, 372 bp, Homo sapiens
  source 1..372: mol_type = other DNA
tagactagcctggccatactcgtgaggctgaggcaggagaatccctttcgtgccattgcactccagcctggggggaaaaagatagaaataaatctcttgtttgtaagccccacattttttacttacaaaggaaactttgaaatggacacttcctgttactttcattcaatgaaaaaaaacgcagagagtagactcttcaggtggtggtgcctgctctctccaggacatgcatcgctgcggggagctcccaggctggacccccccgcacaggtcccctccaagccccgcccgggagggcgtcctgcccgctcattgggcctcccgccggctcatttgcatggtccgaggggggcggggctgggaatgccctgg

SEQ ID NO: 28364 - DNA, 329 bp, Homo sapiens
  source 1..329: mol_type = other DNA
aaaagatgcttctgttatcagacaatatacttatcacaatgtgtggggagctgttttgccaccaaaacccaccgtgtgcccggcccggtgccggggaccatcgtcttcattttaatccgggtttgtgtagcagatgccggtgagacccgactactgcagctcgggggtggccggacccggggtctccccgctgagtctcggggcttcaccggcgcgtgggacaagcacagcaccctcgggttgagtgacacccaacagctggtctcctccgcggccgtgtggggcgcggagaaggcggggaatcatggccgcccccagtgttccgcgtc

SEQ ID NO: 28365 - DNA, 293 bp, Homo sapiens
  source 1..293: mol_type = other DNA
agtgtaccccgggatgcaggtcccctgggactcttgtattcctagggatgtgtgtgccccgggaagacatatgacaatttgcctctaggcatgtgtgtgctacagtgcagggaacgcttggttccccagacattttctcccagggatgcctgtgcccccagggatgcgccccttcagtgcactgattagtgtttcggttcctctttatggcttgcaacgattatagacgcgcccacagcctgtggagcgcccgccatgggccagggtgccccggagcaccagcctggtttaat

SEQ ID NO: 28366 - DNA, 339 bp, Homo sapiens
  source 1..339: mol_type = other DNA
ctactctgcactccaccagaaacaactcctggaactccccttggaggtcaggccaatgacctgtgcaagggctccccctgccccgggcctggctcttggcagaagctgtcgcctggatccggcaccactagcggagccgagcagaggaaaaggctgcgccgctcccggggtggccccacgccccttctctgagcttgagcggcggcgcgggacggggacggctctggccgggaccagcaggcctcgggcatccgggacgccggggccgcgctccaggccaggggcgggggcgggaccggggcgggggccggcggcggggccgcgccctcggcctctccc

SEQ ID NO: 28367 - DNA, 400 bp, Homo sapiens
  source 1..400: mol_type = other DNA
cctccttcctggatgccaggaaccactgaaatttgtgtgttaataaccgcccgcctgtgtcacctggtaggccggccaagtaggtatcatgcgagtcctacttctcccctcattcaaggaccttcctttggggaagtgagtgctcccgagagcagcctgccgcctccgtgtcggggcagcggagatgcagctggggtggcacgtgcccacagtggtgccacctcttgccgggggtcaggcagaggagacccagctcctgtctcagggcccagagagcaaaggcagtctgagccacgtgcacccaggggcctgggtgtggtcacaaggagctatcgctggaaacaaaagaggctttcccttgaagtgcaagtcatagtggcgcccctgccacgtccctata

SEQ ID NO: 28368 - DNA, 276 bp, Homo sapiens
  source 1..276: mol_type = other DNA
aggtgcacaccaccgcacccggcttggatgtgatctttaggtgtgccttttgcatacctgggaaggggtgaatggttctttgaagaggaaccaggcctgcaaggccgctaggggagcctcccgcagcccagagtcccgctgggccgtggttaattgtcttggtgacaaagagcaattttattttaaagcaactgattggatttctggatgttatataaaagccacgaaaaccctggccagcaagcgctttgctccacgtggcgtcacagtatgctg

SEQ ID NO: 28369 - DNA, 328 bp, Homo sapiens
  source 1..328: mol_type = other DNA
tgctgctacatctatgtggctgtgatccagagtcagtgtccagagctgggctgagcctacgggcacttcagaatggcagggactgactcatgtgcctcagtgtctcacaaataaatattagcaacaataccagtactaagttttgtcattttttattactttctgcctaacctgtcagaaagggtagatagcttcccagtcgaaactcaccatttcagcccggatggtgaagattccagcttgagagaccagctcgggtctgaagcagccctggaacgggtatgtaatggtggggtcaggaagtgactcactcctccgagggagcctc

SEQ ID NO: 28370 - DNA, 257 bp, Homo sapiens
  source 1..257: mol_type = other DNA
ctttattaaacagttgctgctacatctatgtggctgtgatccagagtcagtgtccagagctgggctgagcctacgggcacttcagaatggcagggactgactcatgtgcctcagtgtctcacaaataaatattagcaacaataccagtactaagttttgtcattttttattactttctgcctaacctgtcagaaagggtagatagcttcccagtcgaaactcaccatttcagcccggatggtgaagattccagcttg

SEQ ID NO: 28371 - DNA, 577 bp, Homo sapiens
  source 1..577: mol_type = other DNA
atggaccacaggcaataactgaaaatcatgcttctgaactatctttaataggaaaatgtgctgttatggttacaaaatattcataaggtaaaaaatattttgtagaacatatcatagaaaaaggaagtacagaaatattactatctctacgttacatatatatgtattactatttgcttataaagttttttttacttctcttacatcaagatttgttacattaaatttatattcaaatcacaataaggacgcctgtaatcccagaactttgggaggccaaggcaggcggatgccctgagggtagcacgcgcctgtaatcccagttacttgaggttgcagtgactcaggatcgcgccactgcactccagcctaggcgacagagcgaccttgcaagccctctttccgggggcggggcagcggtcgtctccgcacgcgcgggagcggtcggtatccatggcaaccagcggggccagcctaaggcccgcccgccaccgccaccgcgccggccccgcccgcacaaaggccgcgcggtgacccgccctctgccgcgaccccggccccgcccctgccccggccc

SEQ ID NO: 28372 - DNA, 286 bp, Homo sapiens
  source 1..286: mol_type = other DNA
ggcagcacggggctcctagatgccacccaatcctgcagttcaggcagggccctatggaccccattagagtacctggggtctggccgggatgcttgctgtcctgaaatctggtcaccaggaaggccggccatctgatctgccaatatggacacaaatatttgcacaattgcatcagcctggcctctggtacaggacttgcggcttctaccaggcactgactgtcaatcccgggcccaaccccgagttttgcgtccggggtggggccagggactctgcactaacggag

SEQ ID NO: 28373 - DNA, 531 bp, Homo sapiens
  source 1..531: mol_type = other DNA
cagcctggcctctggtacaggacttgcggcttctaccaggcactgactgtcaatcccgggcccaaccccgagttttgcgtccggggtggggccagggactctgcactaacggagcccgctccgcccgcggctggaccccgatccccgggacagggactgagtctgaccgtcttagcgccccgctcaggtcggggcttggggagggggcggcccgccgaggggtggggtgagggcgtcacgggccgatccgggccgccgggtgacccgggacgccccctgccccggcgggcgccgcccacagcctgcgcagtgctcaggggcggaggccgggagggggcccaagcgccagccccccagctccggcggacccgggtgggcgtgcccgcggacccgcttgccgcacttaggcgagtctcccctgcagcgccccgagtccctgggggctgcggcggctgcgggcgcccccgcgcgggcccgaggggcgggacgcggcggagcggggcggggcggggcctccgcggccccctcccc

SEQ ID NO: 28374 - DNA, 563 bp, Homo sapiens
  source 1..563: mol_type = other DNA
tcaccccccatctgatggaggggtcaggtgcccagaagctggggactgggaagggccctgttcaaggggctggacgctgcacaatgttggcacaatgttgggcaagttatttcgtgagcctcaatgtccgagaagaattctgcaccggctgtgccctgccttccagccaggcaatgctgaagtccctgtccaagtgaaggcctctacccaaagtcctcatgagaactgggtgggggagcctgtgttcaggtgaggggtacggaggcacctctgtggcacagcctttgcgaggagggctgtggagggagacctccggggccggggtcgaaggacatcgggcgcgaccgcagtgctgggcggggggcgggcgcttgggcttgggccctgcgtagcacgtcctcagagggcagacccagcgaggcgtcgtggcagctgcggccgcggagacgccggctccgcctcttgcacacgccccctcgcctgaggccccgccccgcccgcgagcccgcccccttccccgccccgccccccggggcgccgagacccgcccctgggcccgcccc

SEQ ID NO: 28375 - DNA, 212 bp, Homo sapiens
  source 1..212: mol_type = other DNA
ggtctgaactcctgaccggatccacccatcttggcctcccaaagtgctgggattacaggcctcctgccttggcctcccagagtgctgggattacaggcgcccaggctggagtgcagtggcgcgatcctgcctcagcctcccgagcagctgggactacaggcgcccgccatcgggggtcgggagccccacagctgccccatgtgcagaggaca

SEQ ID NO: 28376 - DNA, 700 bp, Homo sapiens
  source 1..700: mol_type = other DNA
cagccaggcaatgctgaagtccctgtccaagtgaaggcctctacccaaagtcctcatgagaactgggtgggggagcctgtgttcaggtgaggggtacggaggcacctctgtggcacagcctttgcgaggagggctgtggagggagacctccggggccggggtcgaaggacatcgggcgcgaccgcagtgctgggcggggggcgggcgcttgggcttgggccctgcgtagcacgtcctcagagggcagacccagcgaggcgtcgtggcagctgcggccgcggagacgccggctccgcctcttgcacacgccccctcgcctgaggccccgccccgcccgcgagcccgcccccttccccgccccgccccccggggcgccgagacccgcccctgggcccgcccccgggtccgcccccggcctccgtttgcgccgggtctgtgctggccgcgcgcctggcgctccacgctgagcctctccgtgcaatgattaacccggcggggcggccggcgcgggacccgagacggaggcgcggggccggggcgggaccccgcaggaccgctcggcttcctgctctcgccggagtttccgcgtagagggcgcatcgccggcccggggcccttggtgcggcgtggcgcagggcgcggcgtggggcgcgcgtgggcgcggcgcaggcggcccgggtcaccatgaggttcgcccagc

SEQ ID NO: 28377 - DNA, 479 bp, Homo sapiens
  source 1..479: mol_type = other DNA
aggcacgtattgagcccaggagttccagaccagcctggacaggtatggtggtgcacacctgcggtcccagctactcgggaagctgaggccggaggatcgcctgaatcctgcagtgaaaaaatggggcccggcccagcctggccaacatggtgaaacccggtcgccgggcttcagctggatcgcgccactgcactccagaataaataaataaatacatacatacataaagtaaaataatgaataaatccgccccaggcatgggtgccgtgcgggacggggacgcggcccagccgggaatcggggtgcccagggtgctgtgcgaggggctcctgagcgcgtgtgctccgcccgaccccgccctgtccccccgacacacaggtggacccagggtcagctcgtgcacctgggaaatggctcccgccgggtagcaggggcgcggaggggcgggggggcggggcctgcccgggagccacgtccgg

SEQ ID NO: 28378 - DNA, 762 bp, Homo sapiens
  source 1..762: mol_type = other DNA
aggcctgggaattggcagctgtcatctgccaggagcagaccctgagccaagttccctgtgccttaggctcagccacattttataaatggatgggcccagggccatagaacagctgagctgtggagctggacatcgaccttgggcaggtgctgccaggggcctgagcccaggccctccactcccgcatcctctgatgacccatcctgggtgagtggaggcatctgcccgcgccagtcaggcccagtggtgatggcccccatgcccacaggacagaagctcgcaggccatcttctacccggtgcaggtgggcagcccagccctggggagggaagcccagtgcccctgctgtgcccaccctggcctcactctacagaggggggccgccaggcttggggacacacacacctgctgctgtgctgctgagttgctcagagaagctgcagatatggacgcctccctccctgtgaatcccccagcagcgaggcacagcgtaggggctctgtgacagtaaccctttcactgccagaggaaactgaaggggccctggggcctgagggtcggcaggtctcttccccctgtggggtcccaggaccgggagaggggagatgaggacgcatgtgaccacagccggtggggtggggtgccttccgtccacagggcaaggagccatcggtgcgccagctggccctgctgcacttccggaatgccatcaccggatgcgctggcccgggcccatgcccgtgtgccccctgccatcgtgca

SEQ ID NO: 28379 - DNA, 289 bp, Homo sapiens
  source 1..289: mol_type = other DNA
ctcctgagtcattggattcagggcccaccttgatccagtctggggtggggaggggatagtcttcaaccccctacacctgaaattcaaaattcctgttcttttttgcagctgaaaccctgctaagattcaacttaggagggcctgccctcagaatttggagctggaggttcaaggttaagtccacaccttgctgccagttagcaagtcaacactggatgggcacttggtgtacaaccgaggtagagtacacagtggctgaggcagggcgcctagtgggtgctcggctgag

SEQ ID NO: 28380 - DNA, 482 bp, Homo sapiens
  source 1..482: mol_type = other DNA
tctggctctgaagccagcaggggcctggccagagggagcccttccctccaattacaagcactgaaaatgctctttataaactgacaatggagacaagtaccagcccctgtggcagtagctcaatagcatgcaattgagtgactagatttctaattttatttaattttaattaaagttaaatccccatgctgctgtgctggacagctcagctggacgtctcccaggtgccaggcacttgctgggcatcagggagctcatggcctataaaaagcctctggactagagcctaggtcccgctttccctttccatggaccacagaggtgggaaatgagatgcctggaagctcctctcctgcaggcctgcgcaccgagggcctgttccggagatccgccagcgtgcagaccgtccgcgagatccagaggcagtcctgagccccgagctgcctggtcagcgagcacagcgctccggggcctcagagcgg

SEQ ID NO: 28381 - DNA, 205 bp, Homo sapiens
  source 1..205: mol_type = other DNA
ttttatggatagatatactggtaagtatattcacatggcatcaagtgattccctagctgagacctcaggtgatgcacataacaatatcttaagatcaaaagcattcttcatttaggtttcgctttaaagataatatagatctttgccaaagtctccttgtgtcaggcctctgagcccaagccaagagtgattaaccctgtgaatt

SEQ ID NO: 28382 - DNA, 714 bp, Homo sapiens
  source 1..714: mol_type = other DNA
gggcctgtttacgactcttaacaagagtcttaaaatgtccagtgacatctgttgagagtttaatcgtgtaaaaaaaaatcattaaaggaagagccaagagatcaattttcttgctgtttaggcgacgcgactaatttaatcccccaagtcttacacggcgcagggggtgggggcgccgcgttccccgggttggcccggggacggagaggatgactccgcagtcgtcctctccgagcgcccggcccgagcagtccccggagccggcgaccgtgcgtccccgtccaccgcctccgctcggggtgccgggccgcggcggggcggcagtgcgcaggcgcgggcggggcgggggcggggcgcggcgggctgagggtcccggcaccgccccccgccgccccggcccgctccatccgggcactgccgcatcgtgccgaggcacaaccaggcgcgcgcgccggaggaaatatagtccctgcccgcgggaggctcgcgcgggaggaggcggcggcggcggcggctgggcgggcgcgcgcggggctgcgcggggctcccggcgccgggggggccatgctccgggccgcgccggcagcccggggacccggcgcaacttgccgggcagcctgaggagttggggcagccgagggctcggcgccgcggcgcccggaagcctgtcttccccttcgccagcccccttccctttcggccgtgggggagggg

SEQ ID NO: 28383 - DNA, 481 bp, Homo sapiens
  source 1..481: mol_type = other DNA
cgtctggagcccagcagctgccaggactggggctcccgaagtctcacagctcatcctgctcctcagattattgttggcatggggaggagggaggagatgggccaagttccctctggctggaacgcccttcccggttgtcactctctgagtctgtcaccccagcagactgtgagctccttgagggcagggacctgcaatgtgcctgctacttagcacagtgggggacagaagacagggctgctgccgtcctgcttggtgaccacaggcaagccagggtctcgctgccttagtttccccatgtgtcagatgggctgacgctagcccctgtctcacggagctggaggctcagagggtctgtgtgtggggccagtgctcactcagcgtcagcagctgttgtcaccccctacccactgtttgaggcccagaggaggggggtcttccatttgcggcagcagcctggcccctcctcgggtagcactgg

SEQ ID NO: 28384 - DNA, 564 bp, Homo sapiens
  source 1..564: mol_type = other DNA
aatcggctggagctcagaggctgcctggcctacgggccaggagacctcagcgcaaaaagcgcaggactcgttcccctgctctacagctcggcccctcctggcgccgagacccagcccctccgggccaccccggccaggtacgaccagcagggtcacctgcgcgcgtcccccgagacggggcctcctgatgtgaagcgaccccagtggcacctcacacgattcccgagggttgcgggcggcctctcctcagccctgcagctcccacacgcggacaccgcgggcctcggccaactcctcgcgcatcgccggcccctcagcggcgactagcgcgcgaacatcctggaagacgcgttgccggccccacgtgagccgacgccccaaagcgcggctgctggcgccggctacgagatcaaggtcggcgcgtgcgcgcttgcgcgagaccggcattctcagccccgcgccggtttccagggagctgggcgcatgcgccgcgtaaggggcccggccggcggaaggaggtgctactgccggaagcgccggcgcgcttgcgcagtagctgaacgc

SEQ ID NO: 28385 - DNA, 486 bp, Homo sapiens
  source 1..486: mol_type = other DNA
ctagtggccgagtcctggtcagcccactggcctgcctgtgagcgcgagagagggttctggcaccactggccctcacgtttccagcccgagtaccagcactagagacccggtttaatctactgagttgatttgaagtgttgaatctgtctagagaggggacagacccaccttgtgccccgaggaacctgtggctcagagcccccgcccattgtcccatcaccagcggcagcgctggaatggaaacccagatcttccctaccaatgtgggctttttctcttttgcaggaaaatattacaaatatttatcataaagaaataccatttgtaatagtctccctgcggttcccgcttgcagccttggctggctggagggcgggttcccgctgggactgccgcagccagggggagtggatgttggtgagagccctgcctctccaaaggctcccccagcccagacaccagccagccagtggcgttcctggctcc

SEQ ID NO: 28386 - DNA, 306 bp, Homo sapiens
  source 1..306: mol_type = other DNA
gggtccacacacaggagacctggaaatcaatgcggtctctccatctccctccgtcttcctgggatgctggccagacctggcttcatcaggatgacacgctcccccatgttggggaggcaacactctgcactgtgccaggtgcagaccacggtgtcccccaggagaccaccttctgggagcaggtgacctcttgaggggttctgcggaggaagttcccagaagtcagcgcggggccggggcggggaaggggcggggccggaccggggccgggccgggccggggcggggcgagcggagccgggggcgc

SEQ ID NO: 28387 - DNA, 342 bp, Homo sapiens
  source 1..342: mol_type = other DNA
cttttatttcttaaatgtaaaattgatttaaggagtccatcataattttcaaacgcccctttaagaaggcagccctgggctgagcactggactcctgggttccaccagcctcagtgtctccaggagaccaagcgcggccgggggtgagtccctgtccccgcgccccccactgaggctccaagggtggaagggctgccctggcctgggcacatcctgcccggtgggattgcgccctggggcaccgcgcacgggtcggggaagcccggggcagggccgtcgcgcgaggaggccgcggattggccagcccaggcgggggcggggcgcgccgagggcccagagctg

SEQ ID NO: 28388 - DNA, 252 bp, Homo sapiens
  source 1..252: mol_type = other DNA
cctatctctattaaataaaaaaaataatagataagcattcaggaaatgctcaccaaaggtttaacaatcattttattcagtaataacaatcctacttattattatttttaatctctgccccactgtaaacgagttgtagaaaatggcgagctcgagagggagcattattggccctgcaggaggccgtttgctgcctccggcgtcctgccgcaagtccctgggcagcgccaccgccatggtctgggaacccat

SEQ ID NO: 28389 - DNA, 614 bp, Homo sapiens
  source 1..614: mol_type = other DNA
atttttaggagaaattctcagcctcggggaagagtatttccacgcacaaacatgtgggcggccatggtgtgcccagcgccgtgctggcttctgggaacccccagcgggcaggagtctgctgggggacggagaccagcctcaggtctgggttggggacgaagctgtcaaaggagcgcttccgatcgcactccccctttctgcaaatgaggaaacgggacgcgcggctcgccgggccaggtagggctaggacgcggactctaggcccaagcgctccccctcccccgcacatccgaccgcgcctgcgctggagaccccgggggcgtggcctccccggtgggcgggaccgtggtcaccgaggtgggcggtgcctggcggcggggcggggcggggcgcgcgtcctggcttcgcccttccccggggcggggcctccggggaccgcggggccgttggtttcggcggaacgttcacgcggctggggcgggcgcgcgggggaagggtttgcggcggcgccgctgccggctaacgcggaggggcgcctggaggcggcgtggcgtccgctctggctccgactccggctgtgccccttgccccgcccagcgtcaggggtgcgcggc

SEQ ID NO: 28390 - DNA, 565 bp, Homo sapiens
  source 1..565: mol_type = other DNA
gctagggggcccgtgcccagcccacccaccaaggtaggtgctaggatcacaccctttacggacgcggcacctgcgacagggatgcatttttaggagaaattctcagcctcggggaagagtatttccacgcacaaacatgtgggcggccatggtgtgcccagcgccgtgctggcttctgggaacccccagcgggcaggagtctgctgggggacggagaccagcctcaggtctgggttggggacgaagctgtcaaaggagcgcttccgatcgcactccccctttctgcaaatgaggaaacgggacgcgcggctcgccgggccaggtagggctaggacgcggactctaggcccaagcgctccccctcccccgcacatccgaccgcgcctgcgctggagaccccgggggcgtggcctccccggtgggcgggaccgtggtcaccgaggtgggcggtgcctggcggcggggcggggcggggcgcgcgtcctggcttcgcccttccccggggcggggcctccggggaccgcggggccgttggtttcggcggaacgttcacgcggctggggcg

SEQ ID NO: 28391 - DNA, 452 bp, Homo sapiens
  source 1..452: mol_type = other DNA
cagtttccccaactataaaatggggagagaagctcccttggatccaaatggtggttctggctccctctcacttcaacttcggatgagaagggaaaagcccccagggggacctccgaggtaccccatgggcaggggctgggccagggccaggccgggatccggtcgcggtcaggctccgggactggaaggggaaggccggccaggcgcccgcggcagacgcccacaccccacaggccacgtgtggcctggacgcctgggacggcggaggcgctccggtggcgccctgagctgctcagttaccagagccgttggggccgatgatgcaggtgaacctccggaaggggccaatgacctggcggccccgccacgacttgaaattttccacaagcagcagctccaggtgggccatggcgccgccctcacgcctcacccgcgttatcaagcgcccgcgg

SEQ ID NO: 28392 - DNA, 598 bp, Homo sapiens
  source 1..598: mol_type = other DNA
actcacaggaacaccgctttgagctgcccagtggcgtttctttggaaaataaatctacttgtggttccaacgccaaagctgcctcccctgcagcctcggtgacttcccgggtctctccctccggccctggtgtcccgggtgagcccagcacacgtccctgtctctgagggcagagtcgggtcccatcccgggacacgcctggggttagccaccgacctgcagcctcccggccgagggtgcggggttggcggtaaggcctgccccagtgccccccagcagccgggcctccgactgcaggcccgggtccccgctcctccgcgcggagtcgggcggggataacctttgatcccgagccctcccctcgagagggggtggggggaggagggataggactgggggcatccggcccgaaggcgccccctctgtgccccctccggggaagtctgggatccaggccctcgcccccagccgtgggcgcgcgcccctcgcagccggggtccggggagggagggtcccggcagggggcgccggggagggaggaccaggagacccgcggccccgcctccgccgcgccctcctcccgggcgggataattgaa

SEQ ID NO: 28393 - DNA, 409 bp, Homo sapiens
  source 1..409: mol_type = other DNA
gcaacaatttttgttgaaagtatatacactgtaataaaggcctgtgaaatatattcatttcccttaggaaaaaaaacaattctattgatcagcaatgatcagtaagtacttgcaacagaccgctccagcttccagtggacccgggcgggggcactgatcaacccacttgagcagtgggatcaactcctcccaagagggtcccctccacccagaatgtcctcccctgggggagaccactctgtctgcgggccccctcccacaggagggcccctcttccggatcccctcccctgggggagacccctctgtccgcgggcaccctcctataggacgcgcccgttcccgacggcgtcccctcccctcggaggagccccgtctgcgacgctctcccctcaggcgggacttccgcc

SEQ ID NO: 28394 - DNA, 485 bp, Homo sapiens
  source 1..485: mol_type = other DNA
ttgatcagcaatgatcagtaagtacttgcaacagaccgctccagcttccagtggacccgggcgggggcactgatcaacccacttgagcagtgggatcaactcctcccaagagggtcccctccacccagaatgtcctcccctgggggagaccactctgtctgcgggccccctcccacaggagggcccctcttccggatcccctcccctgggggagacccctctgtccgcgggcaccctcctataggacgcgcccgttcccgacggcgtcccctcccctcggaggagccccgtctgcgacgctctcccctcaggcgggacttccgccggcgccccctcccccgcggcgccgtctcctcctcccgcctgaggcgagtctgggctcagcctagagctctccggcggcggcgcagcttcagggcagcgcgggctgcagcggcggcggcggttagggctgtgtagggcgaggcctcccccttcctcctcgc

SEQ ID NO: 28395 - DNA, 481 bp, Homo sapiens
  source 1..481: mol_type = other DNA
caggcagggagcctggcctggacagcgatctggctgtgtctgggtcttgcccactgaggacagaccaggcttggcgcagcagggtctgcgggactctggcgctcgttcgccctgaatcaggctagccgaatcaggctagatggagtcaatctgacttcgggctctcctcagggaaactgaaccagcgcaggggcagggactctgggggccaggagcctcccccagtgccggggaagcccctcatctttcaggtcccaaagctgggctagcgcaggtggcagcagtgctgggcaatgggagtgggtggtctctccctcccccgtacccccgcccctacccccgcgtgcgcggaggagcgcaggtgtctcttccgagccgcaccctcccctcccccgcccagtccccggagggcaatcggaagggagctaggagggcgggcgggaggcggatcctcctacctggggcgcgctcgctcgctcgc

SEQ ID NO: 28396 - DNA, 657 bp, Homo sapiens
  source 1..657: mol_type = other DNA
aaatactaaaaattctattttatgacataaaaccaggtcgaattcattgtatttttatagtcattttttcttctgattttaaaagaaattaaaatgaaaacatttcatgggccctaggctctatgcctcgtgggcttgtgggcccagaccatccctctgaggcccctgagtctcacccagcgaggagcacagggggaactcattccttaagtcctgccctcagtaaacagtgtgtgaggccccaagtcagtgggagctaagaccctcacccggtacagggctggggtctccaaccggggacctggacaccaacccaagagcaggccagcaaacaggcgtgctgctctgggtagcggtaccgtgaggtgcagcctccgagagcacccaccctccacccctgctgcaggtgctgcggggcccccggttctggatggagggaggaggctgggctttccggcgtcccccagaaccggcatcggctgctctggcctttcccttcccagggagccacggcgccaggcctgggcccaaaccctgctcaggaaggacgggccggtgcaggagatggttaaaattctgcatcccccccccaacccccccaccccgcgaagcaggaggaggggggaaaaaagctgagagcagcaatttgcaggcctt

SEQ ID NO: 28397 - DNA, 562 bp, Homo sapiens
  source 1..562: mol_type = other DNA
aaaggcaatttctaaatttggattaaaaaaaaaattgtactctagcttgcaaatccatgtgctaaaatcatcttaagcagtttaaaataaatcaaaacaaaggccgagtgggccaggctgcctagcacagaccggttcagtccgagagccgcctgggcccatggaccaaagagacctaggtcttagacaaggattaaattataaaataaatcattacagaacattaagatgaataaattgaagacatttatttcctccaagaaaaatgtctggcacttggaattttcaagctgcaagtagatgtacacattttcaaaagatctataaaaacacatgccactttaatttagcaaagagaagccagaatgcagaatctttgcagagattttttttttttttaattaaaaagagagactgacaacttcattttataccctgaggctctagaagctcaatctagaaggagagattttaatatgactaatttattttatcttatccatctatctaggcacaggattaaaatatttatatcagtctgttcactttaaaatgtgcagtt

SEQ ID NO: 28398 - DNA, 576 bp, Homo sapiens
  source 1..576: mol_type = other DNA
atgcagagtgatggccctcacgcggcacctctgagccctcaccgtgtgctgttgcaggtttcacctgggggccaagccctgagccagtcacatggagtgcccctcccctgaggctcccagagcccacggggcttgccctggccaccaggctggcatacagcagagcagggccctggccccaagcttgtctcgccaaggtgtggggccaccagatccctcaggggcggggaaggtctggggtctgggccgagccttccgaaccctgccactcagacccttgccgggatggtgccggggtgggccaggcccccagccccagtgctcctggcagtggccaaggctgctgcctcctcagcgggcacctggcctcaggcatggcccaggctgggggccttgctccccacacagtagtgagctgaaagcactgccatgtccagctctgggaaggagcaggctcccagttcatcccgcagcctcgtgtcgctgccacccacccagctgggctggcctcgagaactggggagtcagagcctgggctcacccaacacagaaggacctcctagtgcccgtgcgccg

SEQ ID NO: 28399 - DNA, 506 bp, Homo sapiens
  source 1..506: mol_type = other DNA
agtgggtcctcctgggcgcccgctgccacaaatacaggggagccctgatgtgccggcacccaggggctttgtgcattccgctccggcagctcgagcgtcacggcccgaacaaagcggctttgcagggcgctctcctactggccaccgggccgcgacctctccttgctctggcagagtcccagcgccttgcggcccctcaccccccagcgcatgaagtaggggcgggcatggggggttgtggggtcggagctggcggcgcctccccgagcccgtccgctcaagggcacccggtcccgggtcccgggtctagaccggctcatcgcacagagtagcagagccgggctcatcgaggaggcaggaggggctcgccagcgtggcacgggcgcccggcgggaacctccacccgccccgcggccgcgcgtccccgcctcgaattcagccccgccccggtgcgccgggctggaggggcgctgacgctcagcggtgtcccatcggtgaccttggac

SEQ ID NO: 28400 - DNA, 720 bp, Homo sapiens
  source 1..720: mol_type = other DNA
tgatgtgccggcacccaggggctttgtgcattccgctccggcagctcgagcgtcacggcccgaacaaagcggctttgcagggcgctctcctactggccaccgggccgcgacctctccttgctctggcagagtcccagcgccttgcggcccctcaccccccagcgcatgaagtaggggcgggcatggggggttgtggggtcggagctggcggcgcctccccgagcccgtccgctcaagggcacccggtcccgggtcccgggtctagaccggctcatcgcacagagtagcagagccgggctcatcgaggaggcaggaggggctcgccagcgtggcacgggcgcccggcgggaacctccacccgccccgcggccgcgcgtccccgcctcgaattcagccccgccccggtgcgccgggctggaggggcgctgacgctcagcggtgtcccatcggtgaccttggactttcccttggctgcagcggccgcggggcgctaggtgggagccgctgagcgctcccggggccccgcccaccgcgagcagccaatcgggcgccgccctccggggggtgtgtcccggggccgaggcccggggcccggagggcgcgcggggcgggcggggcttccgggtcgggcctcgggacactggctcgcgcggaccggggcagggggcgggccgaggggcggtgcgtgtcgcgggggcgcggctggcacggacgcgcgga

SEQ ID NO: 28401 - DNA, 407 bp, Homo sapiens
  source 1..407: mol_type = other DNA
atttgaaatgtctatataatatcccattgtgtttagatacaataatatttagccaatctctttatgtgtatatatttaatacagtcattctataaatattgactgagtagctccatgaaactgattttcataccagaatataaaaaaaaacttaaagataatcctcatcatggtaaaagatgaagaacctatctgttttttaaataaatatttaagtcttgagcccagggcttcaagaccagccacgagtgagacctggtctcaaaaaataaataaatatttatgtaatcatctttaagcagtgtttttaattttatttatttatttttgagacagggtctcactgtgtcacctaggctagagcacagtgctcaggtgatctgctgggactaagccatgaaccactg

SEQ ID NO: 28402 - DNA, 775 bp, Homo sapiens
  source 1..775: mol_type = other DNA
gggttgtggggtcggagctggcggcgcctccccgagcccgtccgctcaagggcacccggtcccgggtcccgggtctagaccggctcatcgcacagagtagcagagccgggctcatcgaggaggcaggaggggctcgccagcgtggcacgggcgcccggcgggaacctccacccgccccgcggccgcgcgtccccgcctcgaattcagccccgccccggtgcgccgggctggaggggcgctgacgctcagcggtgtcccatcggtgaccttggactttcccttggctgcagcggccgcggggcgctaggtgggagccgctgagcgctcccggggccccgcccaccgcgagcagccaatcgggcgccgccctccggggggtgtgtcccggggccgaggcccggggcccggagggcgcgcggggcgggcggggcttccgggtcgggcctcgggacactggctcgcgcggaccggggcagggggcgggccgaggggcggtgcgtgtcgcgggggcgcggctggcacggacgcgcggaggcggcgccgggcatgggccgtggacgcggcggccccgcggcgggggcagcgggcggcgggggcggaggcggccgctagcgccctgcccggcgccgcctccttcggcgttcgccccacggaccggcaggcggcggaccgcggcccaggtgcccgggggcgggcgggcgggcgggcgggaacgcgcgcgggggtccgcggtccgggcttcccaggtcccgggacccggagggcggcggacggg

SEQ ID NO: 28403 - DNA, 372 bp, Homo sapiens
  source 1..372: mol_type = other DNA
gtgatcttggctcactcctggcctcaagtgatccacccacctcagcctcctaagtagctgggaccacaggtgggttttgtcatatcacccaggctggtctccaatgttcagaatttagcaccaatgtcagactcattctgtaaatttttattgaacgtctgcgtcgtgatgggacaaagtccttcccctggagggatcctgagcactttggccagggctgggtgcagtggttcacgcctgcagatcacctgaggtcaggagttcgcaatggcaggtacctgtaatcccagctacttggagccaagactgcgccactgcactccagcctggagagtcatctattttggccagagttcaaggcttgctagggga

SEQ ID NO: 28404 - DNA, 577 bp, Homo sapiens
  source 1..577: mol_type = other DNA
agcatgtgaaaggctgccggctggtggcacaggcagttgggggaaggagggtggccatcctgtcgtccccgcccgcggcggctggggcgagggactcgagctggtcggggcccacaggcgccaggccggcttcagagtccgggcccctgacccctgcctctccaccggaggctccaggagtcagggcacggcgtgtcagaggcgcagacccgaggggcgccgcaggcgacgtgggctttggaggagcagggacaggtcctgagaccccgttggacacaccccctcctgcatgcgggggcagacgtcccggtggggtagactggcagcctagtccgcggcgcgggagggcaggtgggagactggaggcgccctcgcgcccctcagctatccgggagcctcgcgccggcgacctcgaccctgtcgaacccagctgagcgcctcgcagcggccaggacagcgggccaggcccgcgcgctcccgcagcgcacggccagacgccccgaagctcagagccaccgcgaggtcccgcctcccgctccgcgcctgcgtctgcggctgcaccggggttggccgggcc

SEQ ID NO: 28405 - DNA, 388 bp, Homo sapiens
  source 1..388: mol_type = other DNA
ttaaccactcatggggttaccatcattgtatctgagggtagcaattcaaaatgcttcaagatgttccatctccaagaagcatgtgaaaggctgccggctggtggcacaggcagttgggggaaggagggtggccatcctgtcgtccccgcccgcggcggctggggcgagggactcgagctggtcggggcccacaggcgccaggccggcttcagagtccgggcccctgacccctgcctctccaccggaggctccaggagtcagggcacggcgtgtcagaggcgcagacccgaggggcgccgcaggcgacgtgggctttggaggagcagggacaggtcctgagaccccgttggacacaccccctcctgcatgcgggggcagacgtcccggt

SEQ ID NO: 28406 - DNA, 479 bp, Homo sapiens
  source 1..479: mol_type = other DNA
cctgacctcaggtattctggattctagactctatatatgatttacaaattttgattcagaaaagtttttaattttgacgaagtccaactttacatctaagaatccattgctaaatccaagaattttcttctaagagttttatctttacagctctcacataaaacaaataatacttcagtgcaatatttcaaaaatcagcattttaaataaaggccagattgcccgtttgaccctgtggcagagttcaggccgggccagaccgggccagtccagagggactactgcaggagtttcccggccccccgtgcgcgcgcgggtagctgccgaccgcaaccccaagggacccgtcgcgttgcagagttgtccggtcgggcctctggggcgggcccggatcctggaccagggccagtctgtcagtgagcgagcgggagagcgcggccgccccgccccgcccctttccgcgaccgccccgcccactc

SEQ ID NO: 28407 - DNA, 709 bp, Homo sapiens
  source 1..709: mol_type = other DNA
tggcggttggggaagcccgccaagggcgacggttcccctccagccccacaggctgtgcagctccggcggtctctgggtcagccggcgccccagtgcgtgcctcgggggcagggatcccggcactactgttagtaacagctcgcgcgcgctgcttcacagcaggtgggtgagcctacttgacgcggatacctagtgacacttggcggccaggccgggcagacttccggggtgcggagccattcgctgcgctgaagcagtgcgcatgcgcactggacgcttcttaccagcgtcctgacccgcgtctcccggcgccgcgtttaaatccgtgccggaggcgcgtcctggggcgaggcttgcccggtgggcccggtgcggcgcggtgcccgccgttttcgggacggggaggggccgcgccccgccaggagccgggcctgggctcgagcaggggtcactgaggcccctcgcgccgtggtcggggatgccgggaggtctagggctgccccccaggcaagaagccgagaattccgttatctcgctgatggcgttcgggctgactcccggcctggcggcactcgggccctggggtcccctgggatgcgatcatttcagagcggcccccgcgccgcctctcccagacctggccgcggccttcagctctctctgcctctgtgagccgagggctgaaggaagccggagccctgggccctga

SEQ ID NO: 28408 - DNA, 408 bp, Homo sapiens
  source 1..408: mol_type = other DNA
agtgcccgagccagcctggaaggcctctgccctgggccccgggtggctgtttgctgcagcccccgaggtgggtatgcgaggtcagtcttaagttgctgcccactgaccgaggacaggctcccgccacgccctcggcggtcctcaggccttggcggttggggaagcccgccaagggcgacggttcccctccagccccacaggctgtgcagctccggcggtctctgggtcagccggcgccccagtgcgtgcctcgggggcagggatcccggcactactgttagtaacagctcgcgcgcgctgcttcacagcaggtgggtgagcctacttgacgcggatacctagtgacacttggcggccaggccgggcagacttccggggtgcggagccattcgctgcgctgaagcagtg

SEQ ID NO: 28409 - DNA, 534 bp, Homo sapiens
  source 1..534: mol_type = other DNA
cagatctgatatataaataggaatatgtgtttaactatcttgtatgtttgtaagtgtaaatgtagaaacaaaattctgcttgtttttggaattttcttatgaaacctctgaagtattaaaaagaaggtcgaggacctgtgggcagcaggcaagcccagcagcgcccgtgcagggtcctgcctgtacctggggcctcagccctgatcagggcactgggcagcatctggggcagaaggagccagctgcatacccacctaggcctagggaagccccccactagctgcatgcgaggaggagctggccaggaggggtccctgctcccttcaggaggtgcgcattaccttgtgtttagtaactagaaaggaaggggctaacatcagcccctggtgatgctgtctggagggtgaaggccctagagccgggacgcactccacccaggacactgttcctttagagacattttctcataagtttttttggatgtgtcccctcttttctccagaggaaagcgattctactttctccaaaagtact

SEQ ID NO: 28410 - DNA, 396 bp, Homo sapiens
  source 1..396: mol_type = other DNA
cctcccagggccatcgtgggacccttgagagtcacctttggcagcctgagcttctcaaagatcagctgcctctgaggtgccctgccaggaccctgccagctcttgttggacacgcctctctcctgcccatagaccccagggccagatgtgggacagagggctgtgatgacccacgcagccagtccgggaggggaagggaggccctagccggatccacgctcacctagacctgagctcccctctgatccagctgagccctgaggctgacaaggagtggttttcaaccctcagaaacaagctttaggctggtagggattgtgccactgcactccagaaaaaaagaaacatgttttagtagaagttttatttgaaaaagaaaaataagcataaatatat

SEQ ID NO: 28411 - DNA, 347 bp, Homo sapiens
  source 1..347: mol_type = other DNA
agaccttgtctagataagcacctgccctgggccaggggctttctcacagacattaaggattgagtgctgagtatgcttggagtcaaactgtaaaagatttgaagatatttattcatgtcatagtccccctgagaacacgtgctcaaacttttggacataagccataaatcaatacatgtaagatgtaacatagtgagccgaggtcgcgcccacttccatctcaaaaaaatttaattaattaaaaattaaattaaattaaaatactgtaaaatacttcgatatctttcagggcctgtccgcctagacagtcggtctagtgaggcgggtcccacccggcctttcccatc

SEQ ID NO: 28412 - DNA, 389 bp, Homo sapiens
  source 1..389: mol_type = other DNA
acataagccataaatcaatacatgtaagatgtaacatagtgagccgaggtcgcgcccacttccatctcaaaaaaatttaattaattaaaaattaaattaaattaaaatactgtaaaatacttcgatatctttcagggcctgtccgcctagacagtcggtctagtgaggcgggtcccacccggcctttcccatcagagcccgaactcgcggttcaggttccctctaggacgcccttggccgagaggaggcctccaatggcagcccctcgcggcccgacagagtctcggcgccccgcgggtcggtggagcctcaggggtgagcgcaggccggagacggaacgcgggtaagctgccgcagcttccggccgggccactagcgcggaccctacg

SEQ ID NO: 28413 - DNA, 408 bp, Homo sapiens
  source 1..408: mol_type = other DNA
tacatgtaagatgtaacaagtgagccgaggtcgcgcccacttccatctcaaaaaaatttaattaattaaaaattaaattaaattaaaatactgtaaaatacttcgatatctttcagggcctgtccgcctagacagtcggtctagtgaggcgggtcccacccggcctttcccatcagagcccgaactcgcggttcaggttccctctaggacgcccttggccgagaggaggcctccaatggcagcccctcgcggcccgacagagtctcggcgccccgcgggtcggtggagcctcaggggtgagcgcaggccggagacggaacgcgggtaagctgccgcagcttccggccgggccactagcgcggaccctacggccggggcgggacttccggcaaggcgcggaagcggcgg

SEQ ID NO: 28414 - DNA, 394 bp, Homo sapiens
  source 1..394: mol_type = other DNA
tcaatacatgtaagatgtaacatagtgagccgaggtcgcgcccacttccatctcaaaaaaatttaattaattaaaaattaaattaaattaaaatactgtaaaatacttcgatatctttcagggcctgtccgcctagacagtcggtctagtgaggcgggtcccacccggcctttcccatcagagcccgaactcgcggttcaggttccctctaggacgcccttggccgagaggaggcctccaatggcagcccctcgcggcccgacagagtctcggcgccccgcgggtcggtggagcctcaggggtgagcgcaggccggagacggaacgcgggtaagctgccgcagcttccggccgggccactagcgcggaccctacggccggggcgggacttccgg

SEQ ID NO: 28415 - DNA, 908 bp, Homo sapiens
  source 1..908: mol_type = other DNA
gcctccgcagtccttaatgggtgggggggggctccccggcctctcggccccagtcctccgcccccgggtcctacccgcgcggcactcctggcggcgccggggtggggagccaggctctgagccgcggccccgagcccgaggtgcggagccaccgccccacgggtagcggccaccgggggccccagccccacctttcccggccctgttgcctcggccccgccccaccgggaggctgggtggggaggcctccggggagtagggccccagtccccgtcccggccgcgccctgcgcgcacctccgagccggctccccccggggccgaacaatacgccgctgggccgggggcggggcggggccgggccgggggcggggagagcgcgggcggagtgggcgcgggccaagcgcaccgcccaggcagcagccggccgccggggtctgcgcggcgcggagctgcccagcccgctccgggaactcagcccccgccccgcgccgggcccgccccgcttcccacgcccgtccggccgagcccgcgccggagccacctggagccgcctggagccgccgccgccgccgcaggttgatgcgcggcgccctcccgggacgcgcggaggagcccaacttcgcaaactttcgcaaagtgctctcgaagtggaagctgcgggggaggccgggcgcgtggtccccacagtccccgccagggcccccggggaggcgggacgcggaccgccccgagggccgggcgcccgggagccgctccccggcctcgccgggtggatgcggaggcgcgccgggtgctgtgttcgggcgcccggctcgggctcgggctccgggccatggcgccgccgccgccgcccgtgctgcccgtgctgctgctcctggccgccgccgccgccctgccggcgatggg

SEQ ID NO: 28416 - DNA, 344 bp, Homo sapiens
  source 1..344: mol_type = other DNA
tactgcctgcctcagccccagtggttcagatggcactgccagtcacagcaccttggctcaagcgtggcacatgaccacagcaggtgtcctgctggcagagagactgccactgctgcatccgcacaaacagacaatgacacagcctggccaaggtcttggctctgggcctttgctcccaggagcagctcacctgggctgtcagcagtgctggggcaggaggtgccctaagggccccccccctcccccagagccttggcaggtggagtccggcaggctggctcagggcttcctggagtgggcagctctggagctgtgtgtttgggaaaaacaaatcctgtttccct

SEQ ID NO: 28417 - DNA, 247 bp, Homo sapiens
  source 1..247: mol_type = other DNA
gggagtggggcctgagccctggtgagctgcccaggttggctgtccagctgctggtctaacctccatccaggcctttctgacagtctctgcgagtcccccagggacatgctgtttatcccaggatcagcagggccgggccctgatgcactggcccatccgtcctgcttgcagagagggcctggagcctggccgggcgccgccctgagcctgggggatcctgggagaacctggacagccgtggtgagcc

SEQ ID NO: 28418 - DNA, 402 bp, Homo sapiens
  source 1..402: mol_type = other DNA
tgtgggccactgatcctggcctcccgggcagcgatgtggggagcagtaccccacggcacatccgccctttggcacgtggcctgatgcagcacacagtgactcgcacctcagtgggctgggacaggaggcccagctggccatgggtgcctgaccccgctgtctagaagcctggtcgggggacacaaggccaggtcccctacgcatctgctggttctccttcccaatgcccccttgcgcctgcgcgccgcctcgccgagccaggctgagaaccctggcttccttctgcctgctgggagccgggggcctcgcttggtgggaggcaaggacgcagctcagcactgaccaggctggcctgggtggggtggccaagggccccacctgatgggagcggaccggccgtgc

SEQ ID NO: 28419 - DNA, 646 bp, Homo sapiens
  source 1..646: mol_type = other DNA
gtgggcagcgcctgacctcgacgctgtttgccgttggcagctgcagacgacctcgtcacggagctacgtacccagcgcaccggccggcctgggtaaagaggaggacgccggtgtctgacagaatgtgccgtgagtctgaggccaggccgagcgccgacacagactgaggtcgccctgtgacaggccagaggagccctcaggatggcattcacatcccactgccccaggaggagtgcaggagccaggggtcagggcgtgcccgtggggagagccgcccacgctgcagcactcccctgacagcaggcgtgcaggcaaccagggcgaggcctcagggcctgcagggcgctggcagggggtctgcccctggttccatcgtgtctggagaaacaagagccaccaggggacaggtgactcaggatcctggggacaggtcagctttcccaaagcggctgcagaggcagctgcggagaacggagcttcgtcctctgctgagccctggaggtggtgtcccagcgccctgaccctgctttactttaaaaaccctgccagtgcctgttgaagaggaaacatctgtttcgcgccttcctctcactgtgggtgtgacgtgagcgcggtgggcggatgtcaggatctgagagtcaggctc

SEQ ID NO: 28420 - DNA, 624 bp, Homo sapiens
  source 1..624: mol_type = other DNA
cctcagacctcagtgtcacatccaggcagtgtcagtgtgagcctaggctctgccacactggaggcacagtcttcactgataaaactgaaggcgcacggcgtgctctgaaggcagggctggagtccctgcaggctggtgattcctgaattggggccacaggggccgtgtctctccaagtctggggcccaggctccggttcctagggccagctcgggggcggctgctcagctgtctgctctgtggcttcaggccccagagcagttcaaagggccagcgcccccgcccccctgcctgtcggggcccagctgcaggccccctcccaggccgacaggacgccaggatcgtagagggcacccgccgcccaaggtcacgtcgcccgtggcgcccccatccaggcccgccccccgccgcgcccgatcgccaggactgcgtttccacgccgcccggaccccgcctgaaccgaggcccgcgcggaaggcgccactgagtcccggccggccgcgggagcgccagattcagcacccggcacccgccggggagagaaaggcagccgcctcccggccccagcgccctggcctcggccagccccagtcccctccgcggtccccgccgcccgcgtacggg

SEQ ID NO: 28421 - DNA, 530 bp, Homo sapiens
  source 1..530: mol_type = other DNA
ttttagtgattttctgcacacacacacacacacacacaccgtgtgcacctgcagttccaactacaaaataattttaaaaagagtaaaaggaatgtaaaaataattttaatgcattttatttaatccaatacattaaaaatgttacctaacatgcaaacaatatacaaattattttatacgacgtctttggaatcctgaggtttcaagcacgtgatagccgcacaaggctggaacccaggcctggggaattaattcttgcaaatcgtccactgagtatttgctgatcgtcactcagtgccgggtgacccagcttgaccagcacccgcagccgccctgccactgttgggccgggtatttctgggccggctccgaaacgcgctccgctgttgtgtcgggagagccaggagcgacctccgcgatgcgtgtaacgtgcgttgcgcggcgtcgccctttaataacgacgggcgctcggagtgctgcgtcactcgccaccagggacttaggcgggacttccgggcgcgcgtaggcac

SEQ ID NO: 28422 - DNA, 672 bp, Homo sapiens
  source 1..672: mol_type = other DNA
tatgcaggtaaaatagattgcgatcattgtcatgaccagtcctgggactgggagcccggagacgccactgagagccggtcctgcagggactccagggagaaggagatggctcagcaacctgtgcctggcagtgccgccccaggtggaggaggagccctcagggggaggctgtgctcccagtggactcagggaccccactgcaccttaggaggcgtctgccgcccccgccccctccccagccttccaggccctggctgcggtggatgggggcgcggaaggcccaagtgcgcgaacttcacctggcccggccgtcctccccgtggggggcccaggctgcgggcgcgtcaggccgtctctgtcgccatccggaggagcggcttgggcgccgcgtcccctctgccaggcccgggtcggcgggcggctggagcccccagcggtggcgggcgcgcgcctctctcgcggatgccggggcgcgcgtagccggggcgcgcagtgacgcccagagcggggccggcgtccccctggcgggccggcgcggggtcggcgggcgcgggcgcgagcgcgggcggcgcgggcgcggcgcggggcgcggtgggccggggcccgggcgcggcggcggcggcggcggaggatggcgcgcgcggggcccgcacgtggaggccggcgcggggg

SEQ ID NO: 28423 - DNA, 792 bp, Homo sapiens
  source 1..792: mol_type = other DNA
cccggctgcaggctggacgtggactttggagggcacagccgcggggcaggggcgggctccgggcagaggcggccgtgataactccacgctcccgctccagccggtgaccgccacgcgggctcctctcactctcacactcaggtttatttggtctgctcaaacatttgtgttaggaaataacacattaaaagtggcgggcgagtcccgtgcgctccgcaccgccagccccggccccgcgctcgcccagagggccgccctcctcccgccgacccggcttggggcttaggcgttaatcccgtcccccgggggggccgcgcggggagccccgatcgccttagggtcccagcccacgaggcctgaccgcaccgcactgagcggcctctgcgccaggtaagggggttcggggcgggaccgggaaccgcgctgctagccgtcccggaaacccgcggtgggccgttgggtgcgcgccgagccgctgccaactgccaagcgcgcccgcgccccgcccagccagagcgcctaagcccttcccgtcgcccgccagcgccggagcgcccactgcgcctgcgtagtttgccctcctggacccgggggcggagccgaagcgcgcattgcgcctgcgtcttccgcccgaccccgccccagcggccgggcctccggcgctccgtcctcccgcccggccagggacgaggcggggcgggtacgcggacactgcgcctgcgagagtaggccccgcccccgatcggccccgcccccggccagccccgccccgcgccgcgcggggccctggga

SEQ ID NO: 28424 - DNA, 620 bp, Homo sapiens
  source 1..620: mol_type = other DNA
ccgcctcagggacccccactcctggccgttcccccgtcagggcccccgactggcggctgctcccccatcctgcctcggggcccccccgtccccccgcctgtgggccccccactccaggccggtggtagcccctgcctcagagccgcccactcctgggcggggccccctccccgccgcctcagggccccctttggcccccgctcctcgcggcgccccctcccccgcgcgcggccgaggcagcggagtccgcgcgtcatggcggcggcgggcggggcgcgtctcgcacgcagcgcgccgggcggagcgctcgccgcattgtttgcttcgctggggagcgagcgagcgacccggccctggagtccgagccagccccgcgtcccgcgcccgccgcccgccgcccgctcccgcgcccgcgcccgcgcccgccggccgggccccccgagccgggcctccagctgggccccgagcccgagcccgcgccgcgcgagccgctgcccgagagtccgcggccgccgctgccgggcccggagccgccgcggccgagaggggcccgcgcccaggagcggcggcggggcccggcctgcgcggccgttggcggaggagccgcgggcgccattagc

SEQ ID NO: 28425 - DNA, 821 bp, Homo sapiens
  source 1..821: mol_type = other DNA
gtttatttggtctgctcaaacatttgtgttaggaaataacacattaaaagtggcgggcgagtcccgtgcgctccgcaccgccagccccggccccgcgctcgcccagagggccgccctcctcccgccgacccggcttggggcttaggcgttaatcccgtcccccgggggggccgcgcggggagccccgatcgccttagggtcccagcccacgaggcctgaccgcaccgcactgagcggcctctgcgccaggtaagggggttcggggcgggaccgggaaccgcgctgctagccgtcccggaaacccgcggtgggccgttgggtgcgcgccgagccgctgccaactgccaagcgcgcccgcgccccgcccagccagagcgcctaagcccttcccgtcgcccgccagcgccggagcgcccactgcgcctgcgtagtttgccctcctggacccgggggcggagccgaagcgcgcattgcgcctgcgtcttccgcccgaccccgccccagcggccgggcctccggcgctccgtcctcccgcccggccagggacgaggcggggcgggtacgcggacactgcgcctgcgagagtaggccccgcccccgatcggccccgcccccggccagccccgccccgcgccgcgcggggccctgggaggggcgcagcgtccggcggcgtcgcgggcggcgggcggcggggccgcgggaggggcgcggggtgaatggagcgtccgcccgcgccgccgtcgtccgcagccggccgggagccgccccagaggccgggccgaggtgagtgcgcgggcgccgccgccccgccgcctgccgcg

SEQ ID NO: 28426 - DNA, 713 bp, Homo sapiens
  source 1..713: mol_type = other DNA
tctgtctccctgtcattaacacaggcaccaggggtgctccagggcacccaccgtaccacctgacccgggtccagggtgggggcgagcccaggtcgagggtgaggggactccaggcccacggtggcgtcgaccctggttccacggtgggggtggatccggggatcgacggtgagggggatcccgaatccagggtgagggggaccccggatccagggtgagggcgaccctgggcccaaggtggggcgaccccggatgcagggtgagggggaccccgggcccaaggttgacgaccccgcccggcccttgtccaccagcccccggcaccggtggcagggcgtcggcttcttggcggcctccggcgcgggcggcagcagcagcagaagcggcaggagccccagcgcggcccggcgcggcaggcgcatggcgggtagcgctgcgggaagacgcagccggagctccaggtcctgcggccgtgctgctccggcctcccggccgcccacccgctcccagccgcgccggcctgtcccccaggctacttgacggcgccggcgaggccccgccccacccgccagccccgcgccgctattggttgatgggaccccctgatatggcccaatccgaggacgggaaggccccggatcagcggccgccaggagtccgggggcggggcgtgcaggtccgaccccgcctcccgctccccgcccctcgcgcgc

SEQ ID NO: 28427 - DNA, 729 bp, Homo sapiens
  source 1..729: mol_type = other DNA
aaaaacagaaaagaaactggtcaaatcagatgttactttttttttttttaggcaggagttctcttttaaaccaggggttcctgaacatgagcgagtgttcatcacctcaagcgcctgtagaaatgcagatcccatcccccaggtgggaggtccggccccaggtgaggagcccggccccaggtgagaggtccagccccaggtgagaggtcgggcccccggatgagaggtccggcccccgggtgagaggtctggcccccaggtgacaggtccagccccaggtgaggagcccggccccaagtgaggggtgcagccccaggtaaggagcacggggctacgcgtggtgaggcctcaggaatccagcgccagcgccagctcgggtcgcgccctcgcccgcctcctccctggtctcgccgcgcgcccgcctgaaggccccggtcgcggcagcgcgcactgacctccgcagctcccggcggcgtccttcgaagcgcggctgcctgggccagcctcggcaggaagcaaagtggctaccgcagccccggccgctacggccgcagagaccctctgtgccctgagtaaagatggccgccgcgggctgcgcgcgaggggcggggagcgggaggcggggtcggacctgcacgccccgcccccggactcctggcggccgctgatccggggccttcccgtcctcggattgggccatatcagggggtcccatcaaccaatagcggc

SEQ ID NO: 28428 - DNA, 819 bp, Homo sapiens
  source 1..819: mol_type = other DNA
gagcgagtgttcatcacctcaagcgcctgtagaaatgcagatcccatcccccaggtgggaggtccggccccaggtgaggagcccggccccaggtgagaggtccagccccaggtgagaggtcgggcccccggatgagaggtccggcccccgggtgagaggtctggcccccaggtgacaggtccagccccaggtgaggagcccggccccaagtgaggggtgcagccccaggtaaggagcacggggctacgcgtggtgaggcctcaggaatccagcgccagcgccagctcgggtcgcgccctcgcccgcctcctccctggtctcgccgcgcgcccgcctgaaggccccggtcgcggcagcgcgcactgacctccgcagctcccggcggcgtccttcgaagcgcggctgcctgggccagcctcggcaggaagcaaagtggctaccgcagccccggccgctacggccgcagagaccctctgtgccctgagtaaagatggccgccgcgggctgcgcgcgaggggcggggagcgggaggcggggtcggacctgcacgccccgcccccggactcctggcggccgctgatccggggccttcccgtcctcggattgggccatatcagggggtcccatcaaccaatagcggcgcggggctggcgggtggggcggggcctcgccggcgccgtcaagtagcctgggggacaggccggcgcggctgggagcgggtgggcggccgggaggccggagcagcacggccgcaggacctggagctccggctgcgtcttcccgcagcgctacccgccatgcgcctgccgcgccgggccg

SEQ ID NO: 28429 - DNA, 722 bp, Homo sapiens
  source 1..722: mol_type = other DNA
gcaagtgtgtgtgcgcgctgacggtcacaccagaccgcccggggatctggcagtgccaagaggaccagcccctgggccctctggcccccaactctcaacccactagccctggggctggcgggtggccactcacgtcctggacctgagctgctctcaggccgattggcaatctgtgggtttgcaccaaaccacacagcaggctccctggtggaggtggacagcagctgctggagagcccggcagccaggaccgtgtcagacggcaggagtcgggcggggccactccaggcaccggccagcagggcagaggtaccagggagggccctcgggctgcgggcgtgaggtcagagcccagggtaagcatctccagccaggtgcgctctcggcccccgccggggctgcgaggctgggggcgctgccgctgcgagggcttccagaggagccggcgctacctccccgcgcgcccggccacgtgcgcgacgggatgcgcagacagccggggacgcagactggcggcgtgtgtcacctcgaggccgcgggacaagcgcaggtcgcctcccgcactcccacacccccaggaaccctgctcggggccggcgggtgaccttcctaggcactgctgggggcggagccaggaaacggctcgccccgccattggctggggcgccggatttctttaccctcctcgttctgcccgaggcgccacggccgccacccgcgcgg

SEQ ID NO: 28430 - DNA, 803 bp, Homo sapiens
  source 1..803: mol_type = other DNA
caggctccctggtggaggtggacagcagctgctggagagcccggcagccaggaccgtgtcagacggcaggagtcgggcggggccactccaggcaccggccagcagggcagaggtaccagggagggccctcgggctgcgggcgtgaggtcagagcccagggtaagcatctccagccaggtgcgctctcggcccccgccggggctgcgaggctgggggcgctgccgctgcgagggcttccagaggagccggcgctacctccccgcgcgcccggccacgtgcgcgacgggatgcgcagacagccggggacgcagactggcggcgtgtgtcacctcgaggccgcgggacaagcgcaggtcgcctcccgcactcccacacccccaggaaccctgctcggggccggcgggtgaccttcctaggcactgctgggggcggagccaggaaacggctcgccccgccattggctggggcgccggatttctttaccctcctcgttctgcccgaggcgccacggccgccacccgcgcgggcactgcgcctgcgcggagtgagagcgtgagcgcggagagcggaccgacgcgacacgccgtgcgcctccgcggctgcgctacgaaaacgagtcccggagcggccccgcgcccgccgcacccggccctcgcccgcccgaagacaggcgccaagctgccccgccgtctccccagctagcgcccggccgccgccgcctcgcgggccccgggcggaagggggcggggtcccgattcgccccgcccccgcggagggatacgcggcgccgcggcccaaaaccc

SEQ ID NO: 28431 - DNA, 286 bp, Homo sapiens
  source 1..286: mol_type = other DNA
actaaccctaaaatactagtatagcttaaactttcgtttattgctaaaaatttttgtatgtgtaatcttactaaaagctaataaaaacttactaaaagctaataaaagcttactaaaagcttcttgcttagtttgagcctttttacaatgtgcacaaaggggcgacacacacgaggaccgggcccaccagccatccgggctttcagaaacagagcctgctcagaatgtgtaagacccgactgtggcgagtggcacaggcagggccccttcccagctccgaggcagt

SEQ ID NO: 28432 - DNA, 478 bp, Homo sapiens
  source 1..478: mol_type = other DNA
aacagggcctgttctagaaactagtgttgccaacagaagagcatttctcaagtgatgacttctaagtggagagcaacttttgaaagaaaaaaatgttgaaatccgattaacatttttttccaaacaaaaagaaacacaggaggattcgatccagttggacccactcccactaatcccgtttatcgctttaaaagatagtgaagtttgggaggtttctcaatccattaaaatgagttcttgacttcacagattatagtttttgaaaattatttctcatccttgcttgattgaaatgaagacaacagaaactaaccctaaaatactagtatagcttaaactttcgtttattgctaaaaatttttgtatgtgtaatcttactaaaagctaataaaaacttactaaaagctaataaaagcttactaaaagcttcttgcttagtttgagcctttttacaatgtgcacaaaggggcgacacaca

SEQ ID NO: 28433 - DNA, 334 bp, Homo sapiens
  source 1..334: mol_type = other DNA
gtgtaaagatatttttaaaatagagaaaaatcaatgaaatcaagggatgattttttttaaaaactcaataaaattgataaatatagactgactatgtcaagaatgaaagatggctcatcattatggaccatacagacgttaagattaggaaaacaactttatgccaataatctgacatctaataattggatgaaatggacaaattccttaaaagaattaccaaagtttattcaatattaccttgataacttgaatagatagaagtgaatttctcccggctggacaaagcgttaccaagctgacaggatcatttgaatacatgcagaaaagcgtt

SEQ ID NO: 28434 - DNA, 447 bp, Homo sapiens
  source 1..447: mol_type = other DNA
ctatgtcaagaatgaaagatggctcatcattatggaccatacagacgttaagattaggaaaacaactttatgccaataatctgacatctaataattggatgaaatggacaaattccttaaaagaattaccaaagtttattcaatattaccttgataacttgaatagatagaagtgaatttctcccggctggacaaagcgttaccaagctgacaggatcatttgaatacatgcagaaaagcgttggcggacccgctcgaagctccgcccacccacgcgaggccccgcccgcccgctcgaagccccgcccacccggcggtcacaccgccttgcgcgctcggcatgacgtcactcccaccaggcacctcgccttgtcaggagctgccaggcgccaaccgccgacctctgaccgctacgggtcccggctcgcgcaacgaccccaaggcgca

SEQ ID NO: 28435 - DNA, 419 bp, Homo sapiens
  source 1..419: mol_type = other DNA
cctctgagtgcccccaccagcagtctatcctcaggagcggaggcaggcgaggaaagagacgccgcccctgttcatgaggccactcatttctatggaacgattttgagagtgagtttgccactgaaacattttctataaagctacattaatggcttttacactatgactcaataatttctgtaaaaccaactttactttggtcattctggagtgcagtggcgcgatctcagctcactgcaagtagctgggaccagagatcttttcaaaattttttacccaaaaatgaccttttgacttatattcataagtgtatatgataactgaatattttggttttatagttaattgtatttttccaggaataaaggagacattcggctggctggataaatctaaacaattcagatataaagaccaga

SEQ ID NO: 28436 - DNA, 876 bp, Homo sapiens
  source 1..876: mol_type = other DNA
tgccctcattgcccgcgcactggcgcccgagcccagagaagagagcgccggcttccccgccagtggccgcagcaccccaggagcgcgggaacctccggacccacagcggggcgcggccggggcaggtggggggcccaggcgaggaagccccctctgcgccctgggctgggcgaagggccctgcgatgcgacgggggcagccccagcgcgcgcccagtcctcacgtcgccaccgagcggcgcccccgccccagcccggagccccgcagggccgcccccacccctgcccaccctcccgcgggccggggcagccccccgccagccaccccgcgttcccaggaagagggaccggtcaagtcatcgcccgcgccgcatctgcgtggcggggggcggggtggggcggagccacgccgcggagtcgccgcaggtaaacagccccctccccgcggcgggagcggggccgccggccccaggcagggacagcagccgccgcccgcgctccgggccgggatcccgccgccgcccccgccggaggcacgcgccagggcgggggccgggctgcggcggaggcgggcggctccggtgccccccgccgccgccccggcccggcccgcccgccccctgaccccgggggcggcggcggagcgccccccaaaccccgctgcgggctccgcgcccggccagccccgcacccgccgcgcgcctccggctaccccggagccccccgctcggtcccggcgcccgcggcccgcggccccgtccccgtcccgcgcccccccgcgccgcgcgtcccctcccgcccgcgcccccctcgccgggccccgccccgcgccccccgccccgcccgcgccccccgccgggccgcgccccccgccccc

SEQ ID NO: 28437 - DNA, 837 bp, Homo sapiens
  source 1..837: mol_type = other DNA
ggcgcagcagcttgcgggcagcgagtcgtctgcatgcggcggcgaagcgcccgggcccccgtccgcgccggtgcccgcagcgcgcagcaacttggccgccgggtcccggccgccccggtagaggctgggtacagcgagggggccgggcgcccgggcaggacgggcgcggcgggtggggcctggccgtctccccctgccctcggggccgaacacgcacagcgagagtctagcgtcggcgtggctgcggccagccgggtccccctggaggcctccggacgatcggaagtgactgagcgtccgggtccgtgaggccgggggtcggcccgccctaagactcccctccgtccgctaggctggccgcggggcccctggggcccgaccttcccggggtgccccaacctgcggcaaggccgaggtcccgctgaggcatgagtcccgggtcggggaccgctctgggccgacccccggaggacggactaggccgatccccagagggaagggggccaggccgaggccatggcagcgcgttccctgatcccggctgtccctttcgtgcgggactgacggctcacagaacagttacatttcaatatcattcgactgaaaaccatcattgtccccatttcacagcttgggagctgcgaccagagaacgtgggcgcgcctcgcaaggccgtgaccgcggcgggactcgaacccccctccgtgcgcgccgatgttccttaggacccgggagcgccgggggggggggggggggcgggggccccgcgcgctaccccctgggacttcccggcatgccacgcggccgccggcgccctcggcccgtccgccccgcccc

SEQ ID NO: 28438 - DNA, 707 bp, Homo sapiens
  source 1..707: mol_type = other DNA
cagcgtgcgctggccggaccccaggtgatgctctgctgggacccagagggggtggctgcagtgtgtgctggccggaccccaggtgatgctctgctgggacccagagggggtggctgcagtgtgtgctggccggaccccaggtgatgctctgctgggacccagaggtcagacattgtctctgaagacacttcagagtccaggctcagcaccagggccttttgctcaccgccaggcagctgggagaggctctgggcccagccataaatgtctgagagctagagctctccaggggccttaagagtgactgtcagagacgtcccccatggggggtcctcagtgaccttcccgcctggctccctgcgggcagcacgcctctgctgagaggctgcaggggccagggctgggggctggcactgcctctggtttggcagccggcccaggaaagcttctctgccctccctgacaggagtgtgcacccaccccatggcacgactggggtcaggaccagcgcctgctgctgcaccgagaccctgccctgtccatggccacaggcgtaccctaggccggcctcagaggcgggtctggccaggctgggtgggggctgaccgcagacctggggctgccacacccatgggggaagggctgtggcgacgtgggcgcctcctgttggctgggccgacgcagcctcccgcccggctgcacaggag

SEQ ID NO: 28439 - DNA, 701 bp, Homo sapiens
  source 1..701: mol_type = other DNA
agggtcctgagggcttcacccgcagccccaaaggggcagagctggggtcacgcagagtctcggaagcccacgctgtggccccaggagaagcttctggatgtagctgggaggcgcgtccaggatccgcggccaccggcctctcagacagtcctctggggccggggccggaggagactgaaccgggtcgggtcgccagccgaagaccccggtgcccgcccagccctccgggagggtctgcgcctgcggcctcgcggggcctctccgagcccgggcgctgttccatgggcggggcacagatccaaggccccttccctcctagacggcaggcgaggggcccgagaggccggaggccaggggacaaggtccccgagaggcggcgcgaggctccggcggcccagaaccgcggcggggtccgggtggggtcccggccgcccgtggggcgcggggctaagccccggcccgacccgaacggacgcgggcctcggtccccgctgccggcgccggtgcagccgaggaaatccggggctgcccgagcggggtcgtcgctggcggtctcggaggcgttctgtcaccccgttcgcatcagcgcgcgccccgtgacgccgacagccaccccggacgcctccgaccctccggccgggagatgcggaccgccccactctcgcccactggcgattgggttgcgggacgcgcggggcggg

SEQ ID NO: 28440 - DNA, 445 bp, Homo sapiens
  source 1..445: mol_type = other DNA
ccgcacgccagcgccccgcggccgcgatccggaccccaagcccacggctccctcgactctggggcacggactgagctcggcctcggtctctcacccgcggtgccggactcaggccggaagtatgccgcggcccaggcctcaccaacttccgtgacgtttccggcgcgcccgccctagtgctcttcacactggcgcggctgtgacgcgacggaggcggcgagagcggcagccgtgggcactttccacgggtgaggcctggagaacgggtggacgtgcaggccagaacccgggacccacccggctgagcccccagactctcccctcggagtggcacccccgcgggtgcaaagccgagttcgtccgctgtactgcgcgggcgcgcgctggcttctggtgggctgccgggcgccgggcagcgtcttcggcattggagaggccgctctca

SEQ ID NO: 28441 - DNA, 577 bp, Homo sapiens
  source 1..577: mol_type = other DNA
gtggcgctggggcctggccatggcctgcagggcccccacgctgcactcctggctgcaatgcttcgggggctggcagggggccgagtcctggccctcctggaggaggagggaaaggaccagtgactgcttccgtcttcgcccctggtccaccccagctagcagggatcctggcccgggtgctgaatggagaggcacctcctagcctaggcccttcctctgtggcctccccagaggacgtccaggccctgatgtacctgagagggcagctggagcctcagtggctgactgcggaggcatggccctgccctggggcctggctctgccgcacagatcggtggggagggcagggcaggggagtgccctgaaccagctccagcgccggatggcttgaaatcggccaaggtgggagcatccgcacgccagcgccccgcggccgcgatccggaccccaagcccacggctccctcgactctggggcacggactgagctcggcctcggtctctcacccgcggtgccggactcaggccggaagtatgccgcggcccaggcctcaccaacttccgtgacgtttccggcg

SEQ ID NO: 28442 - DNA, 663 bp, Homo sapiens
  source 1..663: mol_type = other DNA
acgccactgccagtggtgagtgaccatgccacgcggcaaggcaggtgctcccatggatgtgtacagctgctgtttgctggcattgtcatgatcctactccaggggccctgagattggggctctgctgtccccacagatgaccgggcccctggcctatggcttccagcctgacctggtgctggtggcgctggggcctggccatggcctgcagggcccccacgctgcactcctggctgcaatgcttcgggggctggcagggggccgagtcctggccctcctggaggaggagggaaaggaccagtgactgcttccgtcttcgcccctggtccaccccagctagcagggatcctggcccgggtgctgaatggagaggcacctcctagcctaggcccttcctctgtggcctccccagaggacgtccaggccctgatgtacctgagagggcagctggagcctcagtggctgactgcggaggcatggccctgccctggggcctggctctgccgcacagatcggtggggagggcagggcaggggagtgccctgaaccagctccagcgccggatggcttgaaatcggccaaggtgggagcatccgcacgccagcgccccgcggccgcgatccggaccccaagcccacggctccctcgactctggggcacgga

SEQ ID NO: 28443 - DNA, 524 bp, Homo sapiens
  source 1..524: mol_type = other DNA
acagttcaggatgtagcctgggatgtcctgccaggttgggatctttgaggtgactgcacggagggctcccccagggcagccgggtgggagggggacccactcctgaggggatgggatgggcctggctcgccctcacctgggctccagccccatcggggaccctgaggtgagggccttgccttgccagggagggcttctggggtcctggggcccaggtcccccatcacacatggctctggttccaggggcaagcccacctcacacagctgctgcaggtgctggccggcggccgggtctgtctctgggccagaggcctgggggtcaggagcatgggagccaggcgtcctgcccgggatagagccaggcaggggctctcccggtgacatcccatcccagcccagggcggctaccacctggagtcactggcggagtctgggtgacccggccccacccctgtcagggccaatggcgccgagaccaggtgtcacgactgttgtgtctctgcccgtgctgcccaggccccg

SEQ ID NO: 28444 - DNA, 468 bp, Homo sapiens
  source 1..468: mol_type = other DNA
agtggtatagcagccactccagcctctgctgcagcagccaccctggatgtggctgttcggagaggcctgtcccacggagcccagaggtaagcctcggcaggacctgtgggcacccctatcctggctggccaagcacagagagtacacctgtcctgaggccagctcttcttccaggctgctgtgcgtggccctgggacagctggaccggcctccagacctcgatgtccagccatgcatgtggacgggcatgtgcctgggccccaggtgggtctccagcacagaggctcagcagtcacagctcaggaacacttatgcacctgtgtccggcggctgcctccatgttccatgctccacgccactgccagtggtgagtgaccatgccacgcggcaaggcaggtgctcccatggatgtgtacagctgctgtttgctggcattgtcatgatcctactccaggggccctgagattg

SEQ ID NO: 28445 - DNA, 545 bp, Homo sapiens
  source 1..545: mol_type = other DNA
cacgtgcctttgagcctgcctgctggcactgccagagcctggggctggcctgttctgctcagcagctggtgtcttgcagcctggccagggaaggcagggggctcatctgcgcccctgcgcccacagagtacctttcactgcgcgcggctggccgcaggggctggactgcagctgccctggtgaggtgagagctgccccttcccctggctgctcctccgtgggtggccctgtgaggggccagggcgaccctgacgtggccgtaggcctcccgggcaccatggccagagggcggctgccaacggccatagcagctgcacatgccaagcagaaaccgggctacacaggtgtgtgccaggctggctgcaggggggtgggcccaggccacacagcaagccagcaccttcccatccctggccgggctcctggaggtgggaggccctgcccgatcctcgtcgtggacgagcaggggtgcggaaaccacccttccctgcagccccagtttttgggtgcacagcctgcggagctgtagagctgttgagggtcct

SEQ ID NO: 28446 - DNA, 751 bp, Homo sapiens
  source 1..751: mol_type = other DNA
agggcaggccaggtgtcctcggtggacatgcccacagctggcccagccaaagtggacctgatgagctgccacgacagatgggccttctctgcccagcgaccctcatgcctctccagggcatccgggcctgggggacgtgatcgccatcagttccggagccacgttgtggcgctgctgtccacactgggcccaaagtgtgggcccataggtggcctgaggactgggggccccaaaattctgtgacccagctggatgtgaactcccgcgggggcagggtgtcccctgggctccagggggcctcaggtttcctcggagctagaagggggcggtgctgcgcctccatgcagccacgaccaccgccctgagccggccgcagcgccacctgcctccccgcgggctcctcccgcctcgtggcaggtcttcctgcgcccgggccgggtgggccttggggctgcgctggaccctgacccagctggtgcagaacggggctctcatgggcaggctcggccacgggcgttcgggtggggctgcggcgaccactcgcctaaggccgggggaccccgcccctcttggaggggatcggggcggggccaatggggaggcggagccgcagcgcagctccgagggctggcggctcggggcgccgaggcttccgcgcccgctggttcctcgctccggggcggagctcgcgatagcgaccgggagcagggcgcggggcgggacccaggtccgaggcgaggaagccggaagc

SEQ ID NO: 28447 - DNA, 681 bp, Homo sapiens
  source 1..681: mol_type = other DNA
tggacaggccatgggcacctccaaacctgtcccagggcaggggttacagggcaggccaggtgtcctcggtggacatgcccacagctggcccagccaaagtggacctgatgagctgccacgacagatgggccttctctgcccagcgaccctcatgcctctccagggcatccgggcctgggggacgtgatcgccatcagttccggagccacgttgtggcgctgctgtccacactgggcccaaagtgtgggcccataggtggcctgaggactgggggccccaaaattctgtgacccagctggatgtgaactcccgcgggggcagggtgtcccctgggctccagggggcctcaggtttcctcggagctagaagggggcggtgctgcgcctccatgcagccacgaccaccgccctgagccggccgcagcgccacctgcctccccgcgggctcctcccgcctcgtggcaggtcttcctgcgcccgggccgggtgggccttggggctgcgctggaccctgacccagctggtgcagaacggggctctcatgggcaggctcggccacgggcgttcgggtggggctgcggcgaccactcgcctaaggccgggggaccccgcccctcttggaggggatcggggcggggccaatggggaggcggagccgcagcgcagctccgagggctggcgg

SEQ ID NO: 28448 - DNA, 794 bp, Homo sapiens
  source 1..794: mol_type = other DNA
gacccctcgaccccttggcctgcgaagttgaccccgggaaggctcagcccgacttgcggctgccatagaagtcagcgctcaggctgtcaaggatgggccctgcgccctgggcggggggggggggggggggctcctgctgagacccccccagggcggggaagttcagcaaaggggagaggctggcagaggtatctccgcgccgcgtccggccctttatggggacgaagctgcggggcggcgctcccctccccctgcgcttccccccaggctccggccctccccaggctccggccctcccccggcggcggccgcctcgggtttccggaggggccggagggcgggcgagggcgtcacgtgcgcgccgcccgcgggccggttggtccccgggcgggggaggggccgtgcgcagcctgggtcggggtcgggccggggtcggcacctgggacatccctgagggaagggccgggagcgggagcgccccagcggccggcgggcgggcgggcgagcggacgagcggcgcggagccggcccgaggcgcgcgccgagggagccccgtccccggtcgtgggggcaccgcccgcaggctctgcggggtgggcagctcccgggcctgccatgagctctccgccgcccgcccgcagtggcttttaccgccaggaggtgaccaagacggcctgggaggtgcgcgccgtgtaccgggacctgcagcccgtgggctcgggcgcctacggcgcggtgtggtgagcgcgggccgggcggggcggccggcggggcgggcggggcctgcgcggggt

SEQ ID NO: 28449 - DNA, 647 bp, Homo sapiens
  source 1..647: mol_type = other DNA
ccaccagcccagtgggctcctggggtgccccaacatcccttctgagaccagacctatgggaggacaatgcccacacagaggggtcaggcggagggccccagcaggtccccatccctgctggagagagtgcagccactctcagcctgggttttgcaggacaggacaggcaccccagggtccaaaagggcccacggggacctatgggactgagaggcccggggtcagtgacccctcgaccccttggcctgcgaagttgaccccgggaaggctcagcccgacttgcggctgccatagaagtcagcgctcaggctgtcaaggatgggccctgcgccctgggcggggggggggggggggggctcctgctgagacccccccagggcggggaagttcagcaaaggggagaggctggcagaggtatctccgcgccgcgtccggccctttatggggacgaagctgcggggcggcgctcccctccccctgcgcttccccccaggctccggccctccccaggctccggccctcccccggcggcggccgcctcgggtttccggaggggccggagggcgggcgagggcgtcacgtgcgcgccgcccgcgggccggttggtccccgggcgggggaggggccgtgcgcagcctgggtcgggg

SEQ ID NO: 28450 - DNA, 597 bp, Homo sapiens
  source 1..597: mol_type = other DNA
cgagctggtgaatgccgtgggcccacccttgagcggctgagctgctgattcatggcaggagggcggggcagaaggccctagggatcctgttacccaccagcccagtgggctcctggggtgccccaacatcccttctgagaccagacctatgggaggacaatgcccacacagaggggtcaggcggagggccccagcaggtccccatccctgctggagagagtgcagccactctcagcctgggttttgcaggacaggacaggcaccccagggtccaaaagggcccacggggacctatgggactgagaggcccggggtcagtgacccctcgaccccttggcctgcgaagttgaccccgggaaggctcagcccgacttgcggctgccatagaagtcagcgctcaggctgtcaaggatgggccctgcgccctgggcggggggggggggggggggctcctgctgagacccccccagggcggggaagttcagcaaaggggagaggctggcagaggtatctccgcgccgcgtccggccctttatggggacgaagctgcggggcggcgctcccctccccctgcgcttccccccaggctccggccct

SEQ ID NO: 28451 - DNA, 660 bp, Homo sapiens
  source 1..660: mol_type = other DNA
cgctggagggggtcgcccagccgcgaagcctcccaccacggctctaccagggcggaggtcggtggccggtgttccagggagcaatgctccgccgagccccggctgtgcggccccgagcgcggcagagacgccgagtggggcgctgcccccgtcaccgccaaggcagccccccgcgcctgcccgcccgcggggctgacttcaaggaccctgcacccaaaggcggctcctcggggatcccccggggtgacgccgctgtccctggtcctgacagtccagcggtcgcgcctctctcagaggggaggtcagggcgagccggggcaggaggcctggaaggttcccggggcgcaccgcggaccaaggcctgcaggtcctgcgcaagaaagccaggccggccctctccctcgttggggagggcgccgccggggtagggaagcccgggccgagcccagacgcgggcgcaagtctggagaagcgcgcggcccccaagaggtgagagccggagggaggtgtccgccctcggcgccccccccgggaaggggagggctggtttccgctctgccaccgcctccgaggcgcaggaagcagcgcgccccggccacccagcccgggaaatccgcccgggcctcccggccccgccccggagccccgccccgcccgccg

SEQ ID NO: 28452 - DNA, 657 bp, Homo sapiens
  source 1..657: mol_type = other DNA
gctggggttcgccgcgtctggccaacacgtggtaccacgactcaaaggcgtgccttccacgccgggcctcaaggtgctctgtggaccacagcggggcccggggccctcgcgagggagggaagagttcgctccaggtccccgcgattcccgcgtggacacccgcggtcagacacgaccccaggccgcgcgggccccagaggaagcgagcgcgagtccgcggtggtggctgggcgctcagtgaggacgaaaacgcccgcgacgccgctggcccctgcgcggtggggcgaggtaggctggccggacctgcgaagcccgacgagcccggcgccggctggctgcagcttgctctgcctccctggcctggccccgaggctcccgcgagccgggatccgcgaacaccggggccgaaccgactctctcgggcctcagacggcgtggaccctggaaggccccagttcggccgcttccccggaagtcccccagtgggctccggccgctctggcccgcgcgcgtccggctcgctggtgccctgggcggcgcccggccgctggcgcttctcgggcgctagggggcgcgcggccgcgcgggagccgcactgggccgcggcggccgctcgactgttctgaggagcggcccggacgcgcgccgcccccgccc

SEQ ID NO: 28453 - DNA, 271 bp, Homo sapiens
  source 1..271: mol_type = other DNA
gggggccgggtctgagcggcgggcggccgcactcacctgccctgcgggccgggcgtcgcggcagctcttcggaggcccgtgtggaggcccgagcggaggccagggcgctggtggaggcaaagcccgggcggcctcgggcgggccgcacacacatgggcccggccgagggcgcagcgcctacggacaccggcacggccggccggcggctcgagaccgactcggggccgcgggcggcactccgatcgctccaaaatggcggcggcggcgcacg

SEQ ID NO: 28454 - DNA, 579 bp, Homo sapiens
  source 1..579: mol_type = other DNA
tttgctggggaaaggctcgccaggggacaggcgtcggggaagcccggggccgccagccgcagggccaagcccgcccagatacgctttcgcagagagcatgatcccttactaacatctgaaataatagtaatcatttttgaaattattttgatggaattaaacaattccagcacttgttaaataggcacatactattctggaggcggctcaggcactccgggtccaggcaggacgcgggacggggaggggccaggcctggcgcccggggctgagcccgctcctgctgctcggggcgtccacgccccgcggcctctgggaggggcctgtggcaggagggaggcccgggagaacaggccctttcctgggccacgggggaaacccctgccccaggtgtgtgtctcacacgcgaggattgttttgtggctacaacaaaattaactatgcttgccacgcgggtttcaccgagtgccccactccagggggcccggagagccggcccaggtcccggccccgcccacccgcgcggccccgcccccggccgcgagcgtgcgcgccccaagcggagaccccgcccccgga

SEQ ID NO: 28455 - DNA, 627 bp, Homo sapiens
  source 1..627: mol_type = other DNA
gcacacctgtaatcccagctacgcgggaagctgagctggtgtcactgcacttcagcctgggtgacggattgagactggtttccctgctgcaccaggctggctatgctcatccctgagccacttcaggggtggccctggccagccctgcccttgagaggggtgggcactgtcagggatcctgggggatgcagctttcccagagccccctgctcttcagcctgggaccccaagggcagggcctgcgccaggctggcagcccctgaggtgatggccctgcgccaggctaggcttctcccgcctttctcccgctggacagagaggggcgggggacgaggagtctggggacccgatccccagattgggacggcccaggggtggggttcgggctcctgtgcggggagtcccaacggcgagggcagctgtggtcctggcccatgcctcccgccgacaccacagccgacccgggtcagggcgtcagacccgccggagccgtagtccaggtgcccggcccgaggggcggtgctcgggccccagagtggtcagcgatgggcggggcgctgctctcgggagccgccctcccaccctctgcggttgcaggccccgcccgctcagggcttgacgacagcg

SEQ ID NO: 28456 - DNA, 246 bp, Homo sapiens
  source 1..246: mol_type = other DNA
cttgagtgcagcagcgcggagtgcaatggccagcctggcaggcggcctcctgatggccctgaccacaggcaggccccagacggggtgccaagctggactttgccgagtagcggacgctgagctcctgacccccgagccttgccccagggccagtggtcacagggcacatgactctgaggccgaggcccctccaccctgcagcagccacgcctcctgtgcacctggggcctagggaaggcctgctgt

SEQ ID NO: 28457 - DNA, 685 bp, Homo sapiens
  source 1..685: mol_type = other DNA
aggagagggctcccccccagaccagggtaggggggagtctcacgttggagtctcgctctgtcgcccaagctggagtgcaatgccgcgatgtcggctcactgcaacctccgccgcctggattcaagcctcagcctcgagtagctgagatttcaaaaaccgtgcaattttggtccggggttggagcggccgagggtcggtacagccttttaggagcgcagccccggggtcggcggcaccgcgtcagaggagagcggaatggccagcccgctgcggaatcccgcggacttgctggtcaggctggggggccggggtccaccgggtcagaccctggagggtgggaccgcccggactcgggaggtggttgacggggtgggccccgtcgggtccgagtccgccccagccgtgggatcagctcggacgacggttcgccccccagaaccccgctgcagcgtggggaagtccggcccccgcaggctcggggctgcgtccccaccagaaggcgcttggagtgaggctggcggtcccgcggtcccgggccggtcgccgagcgctcccagcggggacaggcccctccaccgctcccttcgccgcagccccctccccgccccgagggtggctgggcccggaggaggggcgccccgccccgtccgtgcatccggctccgccccttgctggaaaggctacg

SEQ ID NO: 28458 - DNA, 315 bp, Homo sapiens
  source 1..315: mol_type = other DNA
cacggtgtcctccatgcctgcagggcccatgcatgggaagttccgtgaggcccctctcccagagcctgacacactctgtggccgaactctaggcaggtgcccctgagtcctttcctcgacgaggctcctcgctgggcccgccgaccccggtgtggttgttgaactcggaggtgagctcctctcaccactctcttgaataaagcttttctcaccattttaacaagggtctgcccctacttgtgggaccccacagaggggtctaaggccagggcccaagtgggaggctgggcccacagatctccctatataggagcc

SEQ ID NO: 28459 - DNA, 439 bp, Homo sapiens
  source 1..439: mol_type = other DNA
tggagacggtggggcgcccacagccccgggcccggagcccccgccccgcagccccacccccagttcttggtgaggtcgcggatgggctgcaagaggtgggcgaagcgcgcctccacgtcctccatgtccgggagggaacgggcggcaaagggaccgcagggctgccttccgaggggtacggcgtcctcagcccgccccgcccaggaaaatgcgtaggcgcggcgtcgcggaaccccggcgccgcgcagcgggagctcaccggaagagtcgcggggcggggtcggcggggtggggcggggcctggagctgccgcgggcgagcgggccgggcctggggcagccgcgggcgggcggacgggccgaggaggggcctgggactgccgcgggcgggcgggcgggccgaggaggcggggcctggggctgccgcgggcgggcggacg

SEQ ID NO: 28460 - DNA, 473 bp, Homo sapiens
  source 1..473: mol_type = other DNA
tctcctacctgtcccaccaggtctgggaggaagcctctctcctcagagttctgaggtcagagtggcctggccctcactcccaaccccggactgcgtgagtgccgggcatcccgcgccgaggctgggggtgtcccaccctgggtgccttcacctggccgccacgccctggaggaagagctgccgcgggagccgggagcccgccatgtccgctacgcggcccgctagagcagggcccgccctccgcgtccgcccgcccgcggcagccccaggccccgcctcctcggcccgcccgcccgcccgcggcagtcccaggcccctcctcggcccgtccgcccgcccgcggctgccccaggcccggcccgctcgcccgcggcagctccaggccccgccccaccccgccgaccccgccccgcgactcttccggtgagctcccgctgcgcggcgccggggttccgcgacgccgcgcctacgca

SEQ ID NO: 28461 - DNA, 844 bp, Homo sapiens
  source 1..844: mol_type = other DNA
gagcgtcgggggagtccccgtccttccgcctctccccgcaggcaccgtggagctggtccgggcgctgccgctggcgctggtgctgcacgagctcggggccgggcgcagccgcgctggggagccgctccgcctgggggtgggcgcagagctgctggtcgacgtgggtcagaggctgcgccgtggtgagcgccgcccccgccctgctggccccgcacccccgcccagctccggccgcgcggcctctaccctcgctctgcagggaccccctggctccgcgtgcaccgggacggccccgcgctcagcggcccgcagagccgcgccctgcaggaggcgctcgtactctccgaccgcgcgccgagctcgttctgccgccgcagcaataaagctcctttgccgcgaaaccttgtggaggcgggggccgtctcgatgaacacgtgacccccggcgggctccgccttccgcgcacgcgctgagagcctgtcagcggctgcgcccgtgtgcgcatgcgcagctccggggacgcctgcgccctgcctgtgagcgtgtggcgcccgctttccctgagccggcggggcagagcgcagggagctggaggtcggcgcttcctctcgtgcttggtccactgacgcgcggccccgccgcgaggtgcggacgccggggctgggaggggaggaggtagccctgaggactcgctggactccggggtagtttcccagctccggctactgcgcggggctggcggggcacaccccagggcgcgctggaggccggagcgaggctggggcgcccgtgggaggctcccagcaggcaccggtgttccgcggccaagcacagttataacgcg

SEQ ID NO: 28462 - DNA, 561 bp, Homo sapiens
  source 1..561: mol_type = other DNA
ataagggacttgaccctcaatgctcagggcccctgaccttaagttcggaggggccgccgtcttccccaaccaggagcaggcccgggagctggcaaagacgctggtgggcctttccctgggcaagcgtctagaggtcaaggctggcccggcctggacctggggaagccctctgtggcgttcctgccccagaccctggcccctggcgagtcatgctggggggctggcaacccagggtgcagcagggtgcagaaggccccgccatggggggtccacgctgagcctcctctccgcaggttggcgtgggagccagcctagggcttcgggtcgcggcagcgctgaccgccatggacaagcccctgggtcgctgcgtgggccacgccctggaggtggaggaggcgctgctctgcatggacggcgcaggcccgccagacttaagggacctggtcaccacgctcggtgaggcggaggcggcggggggtgcttcccgctggggccgccccgacccggccgcgcctaagacccgtccccgcccgcagggggcgccctgctctggctcagcgg

SEQ ID NO: 28463 - DNA, 833 bp, Homo sapiens
  source 1..833: mol_type = other DNA
cggaggcggcggggggtgcttcccgctggggccgccccgacccggccgcgcctaagacccgtccccgcccgcagggggcgccctgctctggctcagcggacacgcggggactcaggcccagggcgctgcccgggtggccgcggcgctggacgacggctcggcccttggccgcttcgagcggatgctggcggcgcagggcgtggatcccggtctggcccgagccctgtgctcgggaagtcccgcagaacgccggcagctgctgcctcgcgcccgggagcaggaggagctgctggcgcccgcagatggtgagcgtcgggggagtccccgtccttccgcctccgtccccgcaggcaccgtggagctggtccgggcgctgccgctggcgctggtgctgcacgagctcggggccgggcgcagccgcgctggggagccgctccgcctgggggtgggcgcagagctgctggtcgacgtgggtcagaggctgcgccgtggtgagcgccgcccccgccctgctggccccgcacccccgcccagctccggccgcgcggcctctaccctcgctctgcagggaccccctggctccgcgtgcaccgggacggccccgcgctcagcggcccgcagagccgcgccctgcaggaggcgctcgtactctccgaccgcgcgccgagctcgttctgccgccgcagcaataaagctcctttgccgcgaaaccttgtggaggcgggggccgtctcgatgaacacgtgacccccggcgggctccgccttccgcgcacgcgctgagagcctgtcagcggctgcgcccgtgtgcgcatgcgcagctccggggacgcc

SEQ ID NO: 28464 - DNA, 751 bp, Homo sapiens
  source 1..751: mol_type = other DNA
ggccgcagagcggcggccggggcggacgcagggggtccctggtccgcggcagtggaggcggcagccagcaccctctgccctctcgcagaccccgggcccctgcgcctatcaggtcgtgagtccaggggtctacaagtcccgggccccccagttccagggcccgcggcctacaacgtggatcaggtggcctggagcccagggtcatcagagtccccgggggtccaggggtcccggcgcggagaggatgccggccccgcgaggtcagcggtgtctccgggcccgcagcaccggaagccccgcggctggagtttcgggatccggcactcggactacctggccccgctggtgaccgacgcggacaactgacccgccaggcgggagcggccccgcgtcctggcgcaaggcctggggtggagccacggctggggccgtgtcccaactccgaacccagcggggcggggcccgagcgtcgggcgaggccgggaccccagcgctgcgccgcgtccgaacgtcgagaccccaccgagggcgggagggggactctcgggagccacagacgcccgagacccacgccgggcgggaccggccagggatcacccccgccgacggccccgggccccgacggcccggaagttccgcgtgtccgggggcaccgggggattggccggggcgcggcgtgcaaggcttcccgggggcggcgactgccgagctccgccctccaggcggccccacccgcctgccgtcctggggc

SEQ ID NO: 28465 - DNA, 551 bp, Homo sapiens
  source 1..551: mol_type = other DNA
attccagaatgggtatactgaaattctgggtggcccaggctactatcccacccgtgccacagaatccacacagaggcccagcggcggcactgggtggccgtgcacctcggggcaccgggtcccccacgcaggcccttcccggggccttcaccaagtctgggtctagacttggcccccgcgagttcacgtccccgcctggagtccgggtgatggccctggatccgctcccggccccaagctccacacagccgggaaggaagctcgcgtttgttttgctggcgccagggatacggtccaggccccgccccgccccgcgctgatcccagggtagtgggagcgctccccaagaatttgcggtgcaggggccgcggccaccgccttctgtccgcaggtgctgcgagccgtaagcgccccccacccgcgctatgggctcggacgcctgggtgggcctttggcggccacaccggccccgcggccccatcgcggcgcactacggaggccccgggggggcaggcccccagggaggcctgcgctcggggctgaaccgtgcc

SEQ ID NO: 28466 - DNA, 477 bp, Homo sapiens
  source 1..477: mol_type = other DNA
aattttttgcctagaattgtatttgattgtaatcaaatcatgtgtcacatctttttttcaatgtggcccaatacatgatttttatatttcatggacttaaatagataagtcctctctctacacataattaaatggagtgtgtgctttgattccagaatgggtatactgaaattctgggtggcccaggctactatcccacccgtgccacagaatccacacagaggcccagcggcggcactgggtggccgtgcacctcggggcaccgggtcccccacgcaggcccttcccggggccttcaccaagtctgggtctagacttggcccccgcgagttcacgtccccgcctggagtccgggtgatggccctggatccgctcccggccccaagctccacacagccgggaaggaagctcgcgtttgttttgctggcgccagggatacggtccaggccccgccccgccccgcgctgatcccagggt

SEQ ID NO: 28467 - DNA, 338 bp, Homo sapiens
  source 1..338: mol_type = other DNA
gcccttaaaagggacgctcggctcttgagacaggagtctttttttaaagatttgtcaatttcaaaatattagtggtgggatcactgctcactgaattttttgcctagaattgtatttgattgtaatcaaatcatgtgtcacatctttttttcaatgtggcccaatacatgatttttatatttcatggacttaaatagataagtcctctctctacacataattaaatggagtgtgtgctttgattccagaatgggtatactgaaattctgggtggcccaggctactatcccacccgtgccacagaatccacacagaggcccagcggcggcactgggtgg

SEQ ID NO: 28468 - DNA, 476 bp, Homo sapiens
  source 1..476: mol_type = other DNA
agcttgtcagaaggctagagaaccctctggaggaggtcccagatccctcccgttcctgcaactcaagaacaagtacaatatcagcttggctttcagatcttcaaggttagtctcctgccacagctcaggcctgaggaaggggtgccacctggggctgcccaggaacacaggtgtccagcgctttggcaaagccctgctggacgaaggttggagaaatccagctgccctttcgtccccacactgtggaggaagggacctgtggcagctcacaggcatgaggggtggccgtgcacaggtgcccaggctccaaggacagctccggcagcaggtcctcgctgggcagatgctgctccctgagggcccttttgatttttttttttcttgatagatactaataaaaataaggctgtgtaattttctctgggaactcggaggccctccccctcccccagctcagaccacagaggtggcaagag

SEQ ID NO: 28469 - DNA, 339 bp, Homo sapiens
  source 1..339: mol_type = other DNA
caggctgctaagaatcagaatccctgagagagtctaaggtttgtcaggattctcaaacacaagtctggaatacggccggccccgtcgccacccgcctcggcaaggctgagctcagactggcctctggtcagcccttgcctggagaccaggagcgcccgggaggccccagcactttccagcccacatagcctgggcgttcagcgactcattcgacaaatgtcaggccgggaagctcttcgccagtcccagactcggacgccgcagacctgtgggagcagcgcggaatgccccgccccttttcccacttccggggagggttcgctaacggaaagggcgggg

SEQ ID NO: 28470 - DNA, 341 bp, Homo sapiens
  source 1..341: mol_type = other DNA
caggccttctttagctctggaaagaataaggctgccttggaggccatcgagcgtgccgctttcttcgtggccctggatgaggaatcctactcctatgaccccgaagatgaggccagcctcagcctctatggcaaggcccagccccacaggttacagcttaaggttaaaagttagggttatgggtgcagtggcacacacctgtgatcctagctccatctcaatttaaaaggcagatgctcccatcattgggcacctctgggagggagaggggatgaggccagcctctcagtctcctgggcacagacagcttccacctgggctacacggagaccgggcactgc

SEQ ID NO: 28471 - DNA, 406 bp, Homo sapiens
  source 1..406: mol_type = other DNA
cgaccaacccccaggatggcggaagctcaccaggccgtggccttccagttcacggtgaccccagacggggtcgacttccggctcagtcgggaggccctgaaacacgtctacctgtctgggatggccttccggctccataagggcgcctgtttctgcccacagaatggcatcctcaggggggcagccccaccagctggctggtcgtcatcatggcggacatctccgtgccaccagggagggctgggcccagctcccaaggctgaggttcctgagctgggcagatacaggacagcagccattggcagtcacggggcagccctcccatttgatgcagtcagacatgagtgtgcccagggagccacccgaggctggcctcaagaggaccccctgcagcccgggcatggcc

SEQ ID NO: 28472 - DNA, 506 bp, Homo sapiens
  source 1..506: mol_type = other DNA
ggatgccgcccggacagaacaggcagcagctgacacatcggtgaccttgcaatcctcacgagactctggggccccccaggctcccagaccttttcccaccgcggaaggccccgatttggggggacacgggccagagtggctggccccacgcacgggtaggggccggcacagggcggcccgcgggggtctgggccctcagccctgcacaggggcgaggacggcgctggggcccgcgcgctcgggtggggaagggcgggctcccgaaccctgcctctgtccaggccggctccacttccaggggcgccccttcgccgtccttggggctcctggagctttcaaggcccaaatcccctgcaccacagtggctgtgcccacccggaaggctggcgcgaggattggcggcggttggcctggcggggggcgcgggccgggggcagccgctagtcgcgggcggactggctgggggcgtctcggcgcggctggcggcggggccggcctaagcgcgc

SEQ ID NO: 28473 - DNA, 341 bp, Homo sapiens
  source 1..341: mol_type = other DNA
gcagcagcagccacactcttccaggaggcctggggagtcccgggtggcctacttccagcagaaggggcagctgaccagtgtccactcctcctcctggagcctccagggcaggaccttggagggagcgactgggctgagcccccaagtgaaactgaggttcaggagaccggcctgtcagagcccgtgtcctggccctgctgagcagcagcagggatgccgcccggacagaacaggcagcagctgacacatcggtgaccttgcaatcctcacgagactctggggccccccaggctcccagaccttttcccaccgcggaaggccccgatttggggggacacggg

SEQ ID NO: 28474 - DNA, 321 bp, Homo sapiens
  source 1..321: mol_type = other DNA
ccggaccacctgcccagcgttggcgaggagccccgggaggtgcttctgcggcgcagcaccagtggctttagggcctgtcgcttacgcgatgcggtgggcctgtattcccagagctttggagcctcagggcgtggactccgctggggccccagctgtacggagtcttcccagagggccggctggaacagtacatcccagtgccattgaaaactcaagagcttcgcgcaatttcatggcatggagatgcctttcaccaaggagccccactggctgtttgggaccatggagcggtgagtcaggagcctcctcagggctcctgta

SEQ ID NO: 28475 - DNA, 824 bp, Homo sapiens
  source 1..824: mol_type = other DNA
gccctcgcgccggagctgcagctgcagccgccgccccgccgccccgccggctcccacggggcagagacgcagctcctctccgcccgtacgctaccgcgcccgggcagttcctcgcccgcgcacgcgccgctccgccaactgattggcctccggcgcctcggattggcccaggccgtccaacgcgccccgagaccattggtccttgcccataggggcggggcccggcagagatctgcggaattcggccttcggaagagcccccgggccggggcacggagagagccgagcgccgcagggccggccggcggccggaaggaaccgagcccgtccgaagggagcggagcgcagcctggcctggggcccggtcgagcccgcgccatggcggccgaggcgacagctgtggccggaagcggggctgttggcggctgcctggccaaagacggcttgcagcagtctaagtgcccggacactaccccaaaacggcggcgcgcctcgtcgctgtcgcgtgacgccgagcgccgaggtacttgggcggggcctggcgccgagtgcagcccgaggagctgagggtttaccccgtgaggtgtcggggtcaggggtcagccgcggggccctcaggatgctttcgcccccctcttgcgcccgcgcctggggcggggcggggccggcctggccgggagggggccggggccgcggcaggtagggccggccgcgggctgagcgcgcctggtgtgggtctgcagcggaggcctcagcaacctgctcttccctcccggaccacctgcccagcgttggcgaggagccccgggaggtgcttctgcggc

SEQ ID NO: 28476 - DNA, 809 bp, Homo sapiens
  source 1..809: mol_type = other DNA
atcggaactgtcccaagggtcacattcctcccaccgggtgcccgcatcccgcactctgcccgcgctgtgcggccctgcctagcgcgcgcgcctcctccaggcctcacccacgctcaggacggacgcgcgctggacggctcttccttgtcggagcgccccaggggtcggggaagagggcccggcaagggagccctcgcgccggagctgcagctgcagccgccgccccgccgccccgccggctcccacggggcagagacgcagctcctctccgcccgtacgctaccgcgcccgggcagttcctcgcccgcgcacgcgccgctccgccaactgattggcctccggcgcctcggattggcccaggccgtccaacgcgccccgagaccattggtccttgcccataggggcggggcccggcagagatctgcggaattcggccttcggaagagcccccgggccggggcacggagagagccgagcgccgcagggccggccggcggccggaaggaaccgagcccgtccgaagggagcggagcgcagcctggcctggggcccggtcgagcccgcgccatggcggccgaggcgacagctgtggccggaagcggggctgttggcggctgcctggccaaagacggcttgcagcagtctaagtgcccggacactaccccaaaacggcggcgcgcctcgtcgctgtcgcgtgacgccgagcgccgaggtacttgggcggggcctggcgccgagtgcagcccgaggagctgagggtttaccccgtgaggtgtcggggtcaggggtcagccgcggggccctcagga

SEQ ID NO: 28477 - DNA, 575 bp, Homo sapiens
  source 1..575: mol_type = other DNA
gccacagatctctgtggatcaggacgccctcaatgggaggtgcgcaggccgaggagggggctgcggcgggagtccccgagtcatcggaactgtcccaagggtcacattcctcccaccgggtgcccgcatcccgcactctgcccgcgctgtgcggccctgcctagcgcgcgcgcctcctccaggcctcacccacgctcaggacggacgcgcgctggacggctcttccttgtcggagcgccccaggggtcggggaagagggcccggcaagggagccctcgcgccggagctgcagctgcagccgccgccccgccgccccgccggctcccacggggcagagacgcagctcctctccgcccgtacgctaccgcgcccgggcagttcctcgcccgcgcacgcgccgctccgccaactgattggcctccggcgcctcggattggcccaggccgtccaacgcgccccgagaccattggtccttgcccataggggcggggcccggcagagatctgcggaattcggccttcggaagagcccccgggccggggcacggagagagccgagcgccgcagggccggccg

SEQ ID NO: 28478 - DNA, 557 bp, Homo sapiens
  source 1..557: mol_type = other DNA
actgactcagatttaaacagaatgatcatgattttgatcaccaatttttgatttctttctggttatcaaacaatactctagccacagatctctgtggatcaggacgccctcaatgggaggtgcgcaggccgaggagggggctgcggcgggagtccccgagtcatcggaactgtcccaagggtcacattcctcccaccgggtgcccgcatcccgcactctgcccgcgctgtgcggccctgcctagcgcgcgcgcctcctccaggcctcacccacgctcaggacggacgcgcgctggacggctcttccttgtcggagcgccccaggggtcggggaagagggcccggcaagggagccctcgcgccggagctgcagctgcagccgccgccccgccgccccgccggctcccacggggcagagacgcagctcctctccgcccgtacgctaccgcgcccgggcagttcctcgcccgcgcacgcgccgctccgccaactgattggcctccggcgcctcggattggcccaggccgtccaacgcgccccgagaccattggtccttgc

SEQ ID NO: 28479 - DNA, 430 bp, Homo sapiens
  source 1..430: mol_type = other DNA
tcgccgggactacaggcgccgtgggattgcagccagccaccggtctctattttagaaagaaaaaaagtgggtgcccaagaaaaagtgtttccagtgggacgcatgcggtacgtccgtccggctgtgcagttgctcaaagtcggcagacgtccccgtgcagccccggtcagcaccccgtggggacagctccgatcagcacccgacggcggacacctcgcccgccaccccgctccgggccgcacccgggttagggttcctggggggatcctgggcgcggcggcgcagctcccggggccgccccggcctctcgcccagaggaaacagcccacggcgaacccgaggcccgcggaccccggcgctgcctcctcggcctcccgccccgcgcgggtcctccagggcggggcccgacgcccacccgcccgccccttcc

SEQ ID NO: 28480 - DNA, 552 bp, Homo sapiens
  source 1..552: mol_type = other DNA
ccagccaccggtctctattttagaaagaaaaaaagtgggtgcccaagaaaaagtgtttccagtgggacgcatgcggtacgtccgtccggctgtgcagttgctcaaagtcggcagacgtccccgtgcagccccggtcagcaccccgtggggacagctccgatcagcacccgacggcggacacctcgcccgccaccccgctccgggccgcacccgggttagggttcctggggggatcctgggcgcggcggcgcagctcccggggccgccccggcctctcgcccagaggaaacagcccacggcgaacccgaggcccgcggaccccggcgctgcctcctcggcctcccgccccgcgcgggtcctccagggcggggcccgacgcccacccgcccgccccttccagcgcccggcagtgaagccgccgcctctcctccgcctcccccgccgccctccccgcgccgccgcggagtccgggcgaggtgcgcggggcggacgccgcagggcgtgtcacgaggtgagcggggcgggccgagcgccggcgcggggcgcggcgag

SEQ ID NO: 28481 - DNA, 209 bp, Homo sapiens
  source 1..209: mol_type = other DNA
tcctcagatcactcccagaaatttcatttattgaagaacatttctgagcaactgcgacagctgctctctggagctgcgtgccaatggccctggggttggcgcaaacgctgagccccaggtcttgttcttggggggcataacatggacatgaccctgcccccaagaactggagtgatcccaatgtgtgttaggcagattttgaaaacatc

SEQ ID NO: 28482 - DNA, 318 bp, Homo sapiens
  source 1..318: mol_type = other DNA
cgtacgcagaagggtgtcaaagctttagcccgcagtccgagggcccgagtctcccagtaccggaggtctgggggcgcacgagccgctcctcctctggagaagctccggaccgagaggacaccggacactgcgcagcgccgagccccgcgcgcagcccgggacgcctcagccagggccgaccgcgcagaggaagctcccagagcctcaggcgcacacggcggcctcggagcgagcacgcgcagcaacgcccctcgccccggcccgcccccggccccgcccccggccccgcccccggccccgccccgcaagggtcacagg

SEQ ID NO: 28483 - DNA, 440 bp, Homo sapiens
  source 1..440: mol_type = other DNA
atcaagatcatctgataatctgaaataggagatgagatgtcctgacactcaggtgaggtaaggctgccctcatgcaggtaagagtgtgacctcctgacacttgcaggcgatgggaaatgttttaacattcggtgtttgcaataagcatttgtcacacaaaatgatgcttcatgatattcaggtagctgtatgaaaactcttgacattgcagttgtaaattaggaaaattcaaaatgactcttggaaaagtgtgttgatattaattcatcactgaagggctgagccgctcctcagtctgtgagtctgcagtggtcaacgcatgagaggcagactctgaacctgcacaaagccagagccttgggtgatgtgctgcacaggagtcccccatcatcctggtggtgggggtaagggggggtcacccctgctgattggccaggcag

SEQ ID NO: 28484 - DNA, 319 bp, Homo sapiens
  source 1..319: mol_type = other DNA
aaagggttaaaggaatccctccctggaattccaaaggcgcagccaggctcggatttccactgaattaacggctgggccccggcgcctttcttttaactaatttgggggtctgcgtgtcctcagctgcagaaaggccgcccctgagcggtctggttttttacgccccgggtccctgaccccccaagcccttgctctgggacgcgccttggacacgtctgcagattcagccctggccggttcagcccccagcggctgctatctggctgcagctgtttctgctggagctgcctctggggcaggaagtgtcacgttcacccca

SEQ ID NO: 28485 - DNA, 440 bp, Homo sapiens
  source 1..440: mol_type = other DNA
ggggcccctacatatatatgtataaaagccacctttggcacatgtcaagacctcctgaggctgtgtcacgggaactttctaaattgactgagaccgtctcacatattcgaggttcacaagcccatgcatggggacgtcccctggggtagcgcccctcctccatctccacaggcacatgggcggcgtacctgctgggctgtgtggagaggaccgggttcctctcctaacgaatgtcgacaagtcgagaaaattgctcaaatttacccctaggcgggcggcacccgctgaagccggagccccagtcccgcactcggccgcatgcgcactccctgcggccctcccgccaggcgccgcgctgggcagccagcgccccggcggggtccttcaggccttcggccgggcagcctccctcggggtccttgtgcggttgcgtagcagct

SEQ ID NO: 28486 - DNA, 606 bp, Homo sapiens
  source 1..606: mol_type = other DNA
tgtgtgtgcagacatgcatgtgtgtgcaggtgtgtgcgcagatgtgtgtgtagttgtgtgtatgcacatgtgcataggtctgtgtgtgcagatgtgtgtgcaaacatgcatgtgtgtgcaggtgtgtgtgcagatgtgcgtgtgtaacgtacgtgcaggtgtgtgtgcagatgtgtgtgtgtagctgtgtgtacacacatgtgccctgtgtgcaggtgtgtggggatgtgtgcgcacgtctgtgtgtgcagacatgcatgtgcctgcaggaaagtctgtgtgtgcagatgtgtgtgcagacatgtatgtgtgtgcaggtgagatgtgtgtgcagatatgtgatgcccatgtgcactgtgtgtgcagttgtgtgtgcagacatgcatatgtgtgcaggtgtgtgtgcagatgtgtgtgtagctgtgtgtacgcccgtgcgcactgtgtgcaggtctgtgtgtgcaggtgtgtgtgcaaacatgcacacgcgtgcaagcatgtgtgcaggagtgtgtgtgcacgtgcaggtctgtgtgtgcagatgtgtgtgcagacatacatgtgtgtgcaggtgtgtgtgtgtagatgtgtgtgggactcacactc

SEQ ID NO: 28487 - DNA, 307 bp, Homo sapiens
  source 1..307: mol_type = other DNA
aagtgctgggatgacaggtcacccaggctggagggcactggcgccatccttgcctcagcctccagagaagctgggattacaggcacgcctggctaatttttaaatttttactagtgctgggatgacaggtgtgagccaccacccctgggagtgcagactgtaacaagcgattctccttcagcctcccgagtagctgggattacaggtgctcaccccatgttggccaggctggtctcaatcttgggaacctccctgtctgggtgctgtttcccacgagacagggaggaaacacaggcaccagcgtttc

SEQ ID NO: 28488 - DNA, 409 bp, Homo sapiens
  source 1..409: mol_type = other DNA
tgcctcagcctccagagaagctgggattacaggcacgcctggctaatttttaaatttttactagtgctgggatgacaggtgtgagccaccacccctgggagtgcagactgtaacaagcgattctccttcagcctcccgagtagctgggattacaggtgctcaccccatgttggccaggctggtctcaatcttgggaacctccctgtctgggtgctgtttcccacgagacagggaggaaacacaggcaccagcgtttcatgataattttcaaagaaagagtctttctttcaaggaaagtcaggttcatggttacgaagctgctgaccccaggatcccagcccgtgggagagaagggggtctctgacagcccccacccctccccacgtggggccccagctggaggttataa

SEQ ID NO: 28489 - DNA, 668 bp, Homo sapiens
  source 1..668: mol_type = other DNA
gagtgggaggtcgcgaaggaggaccccggccgcagcccccgccgggcagggggagcccgggcgggtgggcgcggcccacggaacccccagccccggcgcggagggcaccgcggggtcgatcccccccccaccaacctaggccgggcgcggagggcggcgcggagtcacggatcggcagcgggactgagccgcgcccacgtggaagccgccgcaggcttcgcgcggggccccccgggtgcacgcgggcaggggccggggtctcccgacgcacgaccccggagtgtcgcacatcccggcggggtcgccgcggcctccgggagaaagcggacgcatcagggtgggcttctgactccgcagctgccctcccgcccgctcgggtactggcagcggcctgaccttcacaaggtcaaggctgccgcggaacccccagcggcccctacggcgcatgggcggggcctggctcccggcatacctaggggtgcggggcgggacgtctccggggagcgcagccaatgggcgcggttcgctggagtgcggggcgggacgcagcgggattcccggcagccctcagaggcgaggcacgcaggctggtgtggggcggggcctggcggcgcagccaatgagcgcggcgcgaggaggcgcggggcgtggcgtcggcgtcttagcgg

SEQ ID NO: 28490 - DNA, 485 bp, Homo sapiens
  source 1..485: mol_type = other DNA
actgtagttaactctttaaagaggtaacctccaaatacagccacattgtgtggtcctaggggttagggtacaatgcagcctgtaacagacacaacacagaaaatatatactgagctcgctgtttgtaataaagggctctccctttaatttttaagacagggtcctgctctgtcacccaggctggagtgcagtggtgtgagttcaattcagttccgaacagatgagtactgactacttttaaatagtgaatacggggtggatcacctgaggtcaggagttcaagacccagctacttgggaaaatagtgactatggacatacatatttttaaaaattagtattttcacataaagcataaagtaatatccaatatataagctgtccttaagtttaacccattctcattttttttttttaaagcctaattgaaaaataccgcattagtgacctcgctccctggggcccagggccaaaaagaggaagctt

SEQ ID NO: 28491 - DNA, 297 bp, Homo sapiens
  source 1..297: mol_type = other DNA
caccctcggatgtcattccacagttaacaaatattatttttgacattttattttaaaatcttttgagtcacaaaggctggggaaacagtgcccggagtctccacgccacagctcacgcgcgccccctgcagcctgcggcgcgcaagggacccgctgccctggaggtgggctccgtttagggagggaaggcacagccgggcgtcccccacctcacagcgtgcgcccccagcaccgcgcccccagggggtccccacgccgcgccccggggaggcccgcggggaccgagcattctcgcgg

SEQ ID NO: 28492 - DNA, 377 bp, Homo sapiens
  source 1..377: mol_type = other DNA
acagtctcactgtcacccagactgggtagctgggacccccaaagtgctgggactacaggcgtgagccaccacacccagcctggcttgagcgttgctcctcacaagcaaggataccagagctcggaaacctggttctctcacaggctgtgtaccaaggcacagctttagagtctaaaaggaaacgtgttctgttctttgttttgttttgttatttcagaagaaacaggaatacaaaatttagaaaaatcattctccctcttttcctcactctcagggttctcttaagagtagggccccctgggtgctgcccagagacacagcgacgttactccagtgggctcagccctagtgttcagacagttacagaggaaatcacc

SEQ ID NO: 28493 - DNA, 828 bp, Homo sapiens
  source 1..828: mol_type = other DNA
cgggcccggccccaggctggtatttattattttgtaatcacattataaattgtcatttattatttcataattacattataaatgatcatttcagaattacattatatattttcatttatttcataattacactatagattatcatttattattccaaaattacattataaattatgattatattatacaatagcatttgcttcataattacattagattatcatttatttttaaattacattatatttatttcataattacattataaattatcttataattagaaatgatcatttatttcataattgcaatataaattattattaatttcataataccattgtaagttatcatttattatttcataattacattatgtaatggtatgcgttaataattattaatatacaattaataattattaaccattcaattaatagttaattaactagcaatttatatgtaattctataattacgtcatagaatatgatatctaatttatacataaattatattattcaagtatattacccataatttgcaagtatagtatagaatcccgttataggatcctattacattttagaattttgttatatatatttgactctacaattggaactatgaccacagaccctggcccctggttacccgcaggcaggtggcaccatgggggcggggcggactcgcgcacgcgcagtgcaaaaggtcgggctcccggaagtccctcctcccgggggcggagccagggcaagaaggagaaacccggtgctgccgcgcggcctcttccgcgagcccgcgcgccggaagtggaaagcgagggcgg

SEQ ID NO: 28494 - DNA, 314 bp, Homo sapiens
  source 1..314: mol_type = other DNA
ctgggccttgtgatccgcctgccccggcctcccaaagtgctgggatgacaggctaccacgcccagccctggcacggtcacattttaattatgtgcaggcatttagattgtccaaataaaaagaatctcttgaagtcaggagttcaagaccagcatgcctgtcttcccgcagaccagcctggccaacatggtgagtcccagccactcgagggtgccaccgcactgcctgctggcatcttgatgttgaacttccagcctccagaagtgtgagagaactggtttctttgctcaatccataagacgataatgagtggg

SEQ ID NO: 28495 - DNA, 376 bp, Homo sapiens
  source 1..376: mol_type = other DNA
gcctgccccggcctcccaaagtgctgggatgacaggctaccacgcccagccctggcacggtcacattttaattatgtgcaggcatttagattgtccaaataaaaagaatctcttgaagtcaggagttcaagaccagcatgcctgtcttcccgcagaccagcctggccaacatggtgagtcccagccactcgagggtgccaccgcactgcctgctggcatcttgatgttgaacttccagcctccagaagtgtgagagaactggtttctttgctcaatccataagacgataatgagtgggggggcgcccagaaagccagggaatcgtttgtgggcagcagctgtgagcgggtggctcttccccacctgccagcaggct

SEQ ID NO: 28496 - DNA, 425 bp, Homo sapiens
  source 1..425: mol_type = other DNA
aggtgggcagatcagctgaggtcaggagatcgagaccagcctggccaacactgatggcatgtgcctgtaatcccagcttctggaggctgaggccagagaatccagtaagctgagatcgctgcactccatgcagcagagcctagaggagctgttccttccttcacaccatgtctgattcgagttctccctgggagggtttagaagaaaccttcgatcactgaattcatgtttacattctcgtgcaagcagggacctcttgtaagagaccttttagccaaaatgcccttcttaaaaagagagacctttttttttaatgttcggttaaaaatgtgacaaaaagtgtggaatgtgttgtattttcgacaggttgctgccagagagcctgcttcctgctgcctgccgaagtggcacccgcctgatcccag

SEQ ID NO: 28497 - DNA, 424 bp, Homo sapiens
  source 1..424: mol_type = other DNA
tgcagcagagcctagaggagctgttccttccttcacaccatgtctgattcgagttctccctgggagggtttagaagaaaccttcgatcactgaattcatgtttacattctcgtgcaagcagggacctcttgtaagagaccttttagccaaaatgcccttcttaaaaagagagacctttttttttaatgttcggttaaaaatgtgacaaaaagtgtggaatgtgttgtattttcgacaggttgctgccagagagcctgcttcctgctgcctgccgaagtggcacccgcctgatcccagctactcgggaggctgaggcggaactgcactccagcctggaggccagagtgagactccgttgattcttctcttttaaactgaataccataggggaaatgaattttaaaatattgcccccggatcctgc

SEQ ID NO: 28498 - DNA, 716 bp, Homo sapiens
  source 1..716: mol_type = other DNA
gagcacgctggccatgctgcagcgcctcaaggagcagcagttcgtcatcgccggggtcttggtggaggacagcaacaaccaccacctcatgctggaggccagcgagtgggccaccatcgaggggctggtggagctcctgcagcccttcaagcaggtggccgagatgctgtcggcctccaggtaccccaccatcagcatggtgaagccgctgctgcacatgctcctgaacaccacgctcaacatcaaggagaccgactccaaggagctcagcatggccaaggaggtcatcgccaaggagcaacgtggccaccttcctggcaagaggctgcccttcctctccgccttcgagcggcagcaggtggagaatcgccctgctgggtcaaagacggcggctaccggccggctgaggacaagatcttcccggtgcccgaggagcctcccgtcaagaacgccgccgcccgccagcgtcatcaacaacatgctggccgagatcttctgccagacaggcgggctgagcaacttcaagtcccagaaggagtggtggtcagaccgcctggccctcttccccctgctgcccaaggtgctgcagaagtactggtgcgtgacggccacgcgcgtcgcccctgagcgtctcttcggatccgccgccaacgtggtcagcgccaagaggaaccggctggctcccgcgcacgtggacgagcagctggaccaggagc

SEQ ID NO: 28499 - DNA, 506 bp, Homo sapiens
  source 1..506: mol_type = other DNA
atccctgctggggtctgcagtcctgccgggagggggaagggtccctgtccgctcggggtccccagtcctgcaggcggtgcgggatcccagagggcccgggcggggtctggggttgggggttccccgcaggccggggcggttcggggcgggcagggggcggtccggggcgcgcgcgtttccgccgtccgtccgggcgggcgggcgcagagtcccgcgggcggcgcggaagcggcggcggcgcggccggggcagccatgtcgccattgtctgcggcgcgggcggccctgcgggtctacgcggtaggcgccgcggtgatcctggcgcagctgctgcggcgctgccgcgggggcttcctggagccaggtcagcggggcggggcaggggtcagggctccggggacccgggtgggcgcgggctggctcgggggcgggggcgcgggggctccgcgtgaccttggcgaggcggtggcgctcggggtggggggggggcggcgtgcgcgctgggac

SEQ ID NO: 28500 - DNA, 208 bp, Homo sapiens
  source 1..208: mol_type = other DNA
gggccccagatccctgctggggtctgcagtcctgccgggagggggaagggtccctgtccgctcggggtccccagtcctgcaggcggtgcgggatcccagagggcccgggcggggtctggggttgggggttccccgcaggccggggcggttcggggcgggcagggggcggtccggggcgcgcgcgtttccgccgtccgtccgggcgggc

SEQ ID NO: 28501 - DNA, 635 bp, Homo sapiens
  source 1..635: mol_type = other DNA
tgtccgctcggggtccccagtcctgcaggcggtgcgggatcccagagggcccgggcggggtctggggttgggggttccccgcaggccggggcggttcggggcgggcagggggcggtccggggcgcgcgcgtttccgccgtccgtccgggcgggcgggcgcagagtcccgcgggcggcgcggaagcggcggcggcgcggccggggcagccatgtcgccattgtctgcggcgcgggcggccctgcgggtctacgcggtaggcgccgcggtgatcctggcgcagctgctgcggcgctgccgcgggggcttcctggagccaggtcagcggggcggggcaggggtcagggctccggggacccgggtgggcgcgggctggctcgggggcgggggcgcgggggctccgcgtgaccttggcgaggcggtggcgctcggggtggggggggggcggcgtgcgcgctgggacctccccgccccgcgctttccgtccccgccggctcttctgcgcgcctggcccggcccgacccggcccgacccttccctccccgcgcgtgtggcctccccgcctgtcccgggtcgggctccaaccaagcagcccccggcaccctgacacctccgggccatggccggggacccgggg

SEQ ID NO: 28502 - DNA, 192 bp, Homo sapiens
  source 1..192: mol_type = other DNA
gggccccagatccctgctggggtctgcagtcctgccgggagggggaagggtccctgtccgctcggggtccccagtcctgcaggcggtgcgggatcccagagggcccgggcggggtctggggttgggggttccccgcaggccggggcggttcggggcgggcagggggcggtccggggcgcgcgcgtttccgcc

SEQ ID NO: 28503 - DNA, 318 bp, Homo sapiens
  source 1..318: mol_type = other DNA
cctggacctcggcaggggctggggggtgcccatcggcacgagaggggtcccgatctagcccccaagagtggagttttagtttattagaaactattccattacatctgtaatcccagctaccagggaggctgagagaggagactctcagtgagctgaggttgcgccactgcactccagcctaggccacagagccagactcaaaaaagaaactgttttgtcatagaggtgtaacataaaagctaggttaaagcacgtccatgcatgactgtaataacagcatatgtggttacgcgatatggcgacatccatcttcagccg

SEQ ID NO: 28504 - DNA, 534 bp, Homo sapiens
  source 1..534: mol_type = other DNA
cacccgcaggcctggaagggcccctgacgcagcctgctggggtgagtcgccaaggaccaggtcccgcgcagagcgggtatccgagaaaggaccaggggccgtggctgcctgtcaaggcctacgcctttctaagcagggaggggattgcactttgcaccccttggggatcgccctgagcgccccgtgagcagctggaagggggccctcatttcctccccgttggggctgcgcggagaggcccacacctctccaagaagggcagcggtttctcttggctccaggtaggggccgccctgggagggagggacccgcactttcccgagaatgttggctgagaagggaaggagggcgtcccgtggtcccctcggcgcggcccgagccacctccgcccccggcgttccctccccttccgtgcgccagtggaggccggggtggggcggggcggggcaggcgcagcctgggctgagtttgcagggctgctcccctctccgcgggctccgccccacccggcccgtgggggaggttccgtcccgc

SEQ ID NO: 28505 - DNA, 306 bp, Homo sapiens
  source 1..306: mol_type = other DNA
gtgagactctgtctttgcagagagaaaagtccaaggtttatttctccttaccagaggacttcaaagctgtttgcaaatggtaactctccaaggagatttcaaacagaagatgtaaattttggtagttacataaaatgtctcagatttaaatgaaagctgaaatattagtataaaagccaagacttcaactgaggtctttgcactgatgtgtacattaaccccacactgggtatcactgacacccggccggcttgctgctgcagattggttggggcagcccggggaggctggctccgacacacgacg

SEQ ID NO: 28506 - DNA, 304 bp, Homo sapiens
  source 1..304: mol_type = other DNA
ttaccagaggacttcaaagctgtttgcaaatggtaactctccaaggagatttcaaacagaagatgtaaattttggtagttacataaaatgtctcagatttaaatgaaagctgaaatattagtataaaagccaagacttcaactgaggtctttgcactgatgtgtacattaaccccacactgggtatcactgacacccggccggcttgctgctgcagattggttggggcagcccggggaggctggctccgacacacgacgtgtctcccttccttccaagctgggagaccagaggccgggtctcac

SEQ ID NO: 28507 - DNA, 815 bp, Homo sapiens
  source 1..815: mol_type = other DNA
tcactcattcgtgcactcatgcatgcatgaattcacttgtttactcactcatacatgcacttatacatgcatgaattcacttcttaagtcattcatgcactcaatcacgtatgaattcgcttgttcactcattcatgcactcactcatgcaggcatgaattcgcttgtttattcactcatgcagtcactcatgcatgcataagttcacttgttcacttattcatgcactcactcatgtatgcatgaattcacctttcacccattcatgcactatgcatgcatgaattcacttgttcactcaatcattcatgcattcaactcattcattcactcattcatagattcatgccttcacgcatgcatgcatgcattcacctataattcacgcatctatctctaaattcattcatacatgcattggctcgttcatgccttcaactcatgcattcatgtgtgaatgcattcattccctccttggcgcaaacattgattcaatggttcattcatttcctcctcacatgcattcacgcatacatgcactcacgcatacatgcactcaccgcgtgcgtacagccactcgttcgtgcactcattcattcattcagtttatgcgtgtaagtacgcgcacgtgcatttttcatgcacaagatcgcggaggcttccagagcggcctgcgcgctggccttgggcccagggccttaagtcatcgcaaacgtttactttggggctggctgattaaaggttaaatgtccaaaaaccgccgactgccgaaggggccgcggcgggcgaggggcggggcgcgggcgtggatcgca

SEQ ID NO: 28508 - DNA, 337 bp, Homo sapiens
  source 1..337: mol_type = other DNA
cacgcgcctgtagtcccagctactcgggaggctgaggcagagccgcaccactgcactccagccccctatctcaaaataataataataatagtaataaaagcagtaggtcctaagacccttcagtgtcactctaggctggagttgcagtggcgcgatctcagctcaccaacctcaggtgacccactcgtcttggcctcccaaactgctgggattccaggcgggagccaccgcgcccgcccaggccttcccgtgtgacgacctgggaaaacctgtttccacgcgcaggtcccggaggtcccggaaggaggggcgggcgcccggcccagatcccgcagct

SEQ ID NO: 28509 - DNA, 801 bp, Homo sapiens
  source 1..801: mol_type = other DNA
atgaattcgcttgtttattcactcatgcagtcactcatgcatgcataagttcacttgttcacttattcatgcactcactcatgtatgcatgaattcacctttcacccattcatgcactatgcatgcatgaattcacttgttcactcaatcattcatgcattcaactcattcattcactcattcatagattcatgccttcacgcatgcatgcatgcattcacctataattcacgcatctatctctaaattcattcatacatgcattggctcgttcatgccttcaactcatgcattcatgtgtgaatgcattcattccctccttggcgcaaacattgattcaatggttcattcatttcctcctcacatgcattcacgcatacatgcactcacgcatacatgcactcaccgcgtgcgtacagccactcgttcgtgcactcattcattcattcagtttatgcgtgtaagtacgcgcacgtgcatttttcatgcacaagatcgcggaggcttccagagcggcctgcgcgctggccttgggcccagggccttaagtcatcgcaaacgtttactttggggctggctgattaaaggttaaatgtccaaaaaccgccgactgccgaaggggccgcggcgggcgaggggcggggcgcgggcgtggatcgcagcccccggcggttcccgggtctctcttcccggcagccggggctgggcaccaggcggcgcgcgggcttgcgggcaggggctagaggacccgcgcccgcgggggctggcggaggcggggccgggcttccggacagaggccaa

SEQ ID NO: 28510 - DNA, 238 bp, Homo sapiens
  source 1..238: mol_type = other DNA
ccaccatgccaggttggatatgatcatattatagccagcaacttgggaaaaacaaactcgaagttaatcattcccagctcaaagcttgtgcaaggattcaggaaggagcccaggagcagtaggaatgcactctttaggagaggccttgggcaggccccatgctctgggtcactttatttatttaacgtttttctccaagaaaaaatattcatatttttacttataaatacataacatt

SEQ ID NO: 28511 - DNA, 262 bp, Homo sapiens
  source 1..262: mol_type = other DNA
agaattcttatttacttcatttaccactcaacaaataacttctttaaaacatttttttttgaggcagggcactcaggctggagtgaaactgcagcttcaacctcccaggctagtagctggcagtagagacacatgccaccatgcctggctaattatagagacagggtcccaccatgccaggttggatatgatcatattatagccagcaacttgggaaaaacaaactcgaagttaatcattcccagctcaaagcttgtgcaag

SEQ ID NO: 28512 - DNA, 344 bp, Homo sapiens
  source 1..344: mol_type = other DNA
aatgcctttcctcaggcacaatgacttttttttaattaaaaaatttgcagcctacaatcagcctcctcaattattattattattattaattgttattatcattacttgaaacagggggagagtctcactatgtggtccctgggatgacaggtgtgagccctaagtgtcctcttaaaacccatgaagtcttttagggctctctatggaattcaaatcgctaagcattcatgaaagtttagataaggtggaaataaatccaacctttaggatggatgcatgctggagtgcaacggcacgagcgattgagtagctaggatgaactcctgacctcaggcacctgtgaa

SEQ ID NO: 28513 - DNA, 211 bp, Homo sapiens
  source 1..211: mol_type = other DNA
gattatgtaaaaatacaaaaattatccatggagcctgacaaaacaaaatctggtttctagagtttatagaatcatacaacagcatgtttcatggagcgttccatattctcaaatctttatttaaaatgctgggagaccccacactttgtcttgttgaatattattaagatataaagacagggaaccagtggaccagccctcccaaaagagg

SEQ ID NO: 28514 - DNA, 425 bp, Homo sapiens
  source 1..425: mol_type = other DNA
ttggggtttctgaaattgaaatgcctctgcacaattctttgttttttaaaggaatgtttatttgtaaagaattctagatgcacagggtcgagcccgcccttccccagcccctcttggggatccggaatgacttaaagccaatcagaggctacttgtgctcaggagttccagaccagcctggccaacatggcgggcttgggtgcagcgacgcgggtggcccgccagtgcgtccccgaggagaagtcagcctgggtcccaccccaggggtgccccgggcgcggagggggcgtgggcacctccccagcgccgcacgcccgggtctccggctcctgggctgggtcggggcgggggcggagcgcgcgcgaaggcgacgcccccagccccgcggccgggttagggcggggagaggcgcggtcacgcccagg

SEQ ID NO: 28515 - DNA, 506 bp, Homo sapiens
  source 1..506: mol_type = other DNA
gttttttaaaggaatgtttatttgtaaagaattctagatgcacagggtcgagcccgcccttccccagcccctcttggggatccggaatgacttaaagccaatcagaggctacttgtgctcaggagttccagaccagcctggccaacatggcgggcttgggtgcagcgacgcgggtggcccgccagtgcgtccccgaggagaagtcagcctgggtcccaccccaggggtgccccgggcgcggagggggcgtgggcacctccccagcgccgcacgcccgggtctccggctcctgggctgggtcggggcgggggcggagcgcgcgcgaaggcgacgcccccagccccgcggccgggttagggcggggagaggcgcggtcacgcccaggcggcttccgcccgccccaacagcgcgcacgcggctaccgagctggaggaggcggcgggcgcgagacccggaatgcgcagggcccccgcctcgccccccccagcccgggccgcggcccccgc

SEQ ID NO: 28516 - DNA, 235 bp, Homo sapiens
  source 1..235: mol_type = other DNA
gtaatcaccatgtaatattgttgtgataactcagctaatcattacagtattacacggtgattatctgttccattttttaaaaaatttataagtatccaacattttatcaaaatcatgaaagtataagaatacaggtcctgtactttacagaactgtattccaaattttctcttaaaaattttttttatatcattgcttcccaaatgaattacaataattaaacagttaaagatac

SEQ ID NO: 28517 - DNA, 490 bp, Homo sapiens
  source 1..490: mol_type = other DNA
ctcatttagaagtttaataaatttaattttaatgagacatcttgtttggtattaaaattcatgagactcccagaacaggttctctggacctttattagaggataagaaatttatttgacaatttaactttttgaccaccggagtaggaaaattcatgtttctgaaattgagtcatttcaaattctgtgttcataaaatgaagagactgcatgcctttttaaaaggaattcacaatttaagatgagctcaacatcatttatatttagaactggaaattagtgacatgcaaatacttcctcctaacttgcaggcagctgtctacaaagagtatgcagacatgtttatagatatatgaaggagctcagcatagttctgtcttgagttaaaaacagggttttattctttgaattcaagttcacatgtgctaagactgactaccttagtttcttaatgcctcggattgatagagcagctgtcgccagagcagggc

SEQ ID NO: 28518 - DNA, 558 bp, Homo sapiens
  source 1..558: mol_type = other DNA
ctgtcttgagttaaaaacagggttttattctttgaattcaagttcacatgtgctaagactgactaccttagtttcttaatgcctcggattgatagagcagctgtcgccagagcagggcatgtccccggtgctggtcaccctaggcagcccatagggcactcctggcagtggctgtgacagccaaaatgtctcctgacatctgcaggatgctaccttggagcaggcaggcaagtatcctccaggctactaagagagcgcggaggtcccgccgcgcctcgctctgaggagaggacgcggagccgcgcgcccgcccggtggaccccagggactgctcccacgtgctccggccccacgcgcgggccgccgaccggaagcgggtgctggggccgcgtagacgccgcggccacgcgcgcccgccagcccggacatgggcccgcgggcgctcctggccgccgcccgacttcggggccagccgggggcagagcgcgcgggagcccgagcgtccctgcatgaacaccgccccgccgcggcccccaggccgtgacgtaccccgcgccg

SEQ ID NO: 28519 - DNA, 481 bp, Homo sapiens
  source 1..481: mol_type = other DNA
gtttttaaagtcttgaaattcttatttaaaatttccttaaacgtgaatagggacaaaaaagtatttttttgacgatggcaaacgggaaaaaaaaatttgcaggcacggaggttgtgcagcctctccgcacactgcgcatgcgcggctgccggttcaagtcgcggtccaggaccgcggtccagggactgggggctcgggcgaacccacccagggacctcctgaccaaggccatttgtcccccagacgagggcctcggctctgcgcggccgctggctgagtaagcgccggcccgcgccgcatcccgggtctgcagctacagctgcggcgaaagcccaaggtgcgcgtgcgcggagcgccactaggcagcccaggacgcgcgggctcggagccgggcgaggggccgcggaaggcgcgtgcgcagagcgaccccgggcgcgcgagaaggtcctcagtgcgcgtgcgcggggcgggcgggtgcgcg

SEQ ID NO: 28520 - DNA, 430 bp, Homo sapiens
  source 1..430: mol_type = other DNA
catttttaattgccaaggaaaattttattttaactttgcattaatatgttctaaggaacctttatacttgatgcaatcagattctcaaggaaatctgactgcaattttatgtatgcgtcactaatctatgtgcttaacttttaacatctatgtaatgctaagaatatagacgaatgatctgatatcatgtgtgatcagaattttacaaagaagtggataatcttagaattgtcaagtcttaacctttgccaaggagaaaatataacagcatataataagagatatgttgtggttgcagcatgatgcaacctggctctgcagttagcaaacctgggctttccaaaagctaaaaccacctcagcacaggtgcagcttttatagaccttaaaataaagcttactcttataagaatagcttaaactatctttag

SEQ ID NO: 28521 - DNA, 242 bp, Homo sapiens
  source 1..242: mol_type = other DNA
tgaagccagtgctttaaaccatctttgattgcatccaagaagtgctgcaacctctgcctcccgggttccagcgattcaggtgatccagccaccttggtctcccaaagtgctgggaagccctccgtctatcccagttagcatggagggatcgggggaaacatgtggcggaaatatcctcccgtgccacgtgattcccgcccagggcgaccattggctcctcaggggcgtgattgtctcgtcct

SEQ ID NO: 28522 - DNA, 374 bp, Homo sapiens
  source 1..374: mol_type = other DNA
atctatgtgcttaacttttaacatctatgtaatgctaagaatatagacgaatgatctgatatcatgtgtgatcagaattttacaaagaagtggataatcttagaattgtcaagtcttaacctttgccaaggagaaaatataacagcatataataagagatatgttgtggttgcagcatgatgcaacctggctctgcagttagcaaacctgggctttccaaaagctaaaaccacctcagcacaggtgcagcttttatagaccttaaaataaagcttactcttataagaatagcttaaactatctttaggctagcatacacaaataggggagaagttgccccttctgaagaatccggtttaccaggatcacctgaa

SEQ ID NO: 28523 - DNA, 248 bp, Homo sapiens
  source 1..248: mol_type = other DNA
ggagagctccctttgtagcctcagagaaagtaaatctctgcccttaaagctttccggttatgctacctgctcaaggtcacacagcctaaggtcaactgaggatttcctttagatagcacttcttaaaaaaccagccctagccgctggagttggcccctaggggcagctggaccgcccaggcgggcgaaagcggggcctagcgggcgccttcgtcggcgcgatgacgtcacatacctgcgcgggaggcg

SEQ ID NO: 28524 - DNA, 353 bp, Homo sapiens
  source 1..353: mol_type = other DNA
tgagtcaatgtgtgagccaattacttagaataaactgtatcatatatataattcataaatactacatgatagtaaatatatatttatgatatataatattacacacacacacacacacacacaatatcctgttggtttagtttctgataccgatacccagctgatctggaagccagtgctttaaaccaaaagttgtttcatggcatccaagaagtgaagattgacgtcttcgtatagccctccatccatcccagttagcatggagggacgggggaaacatgtggcggaaatatcctcccgtgccacgtgcgcccagggctaccatggcttcaggggcgtgattgtctcgtcct

SEQ ID NO: 28525 - DNA, 334 bp, Homo sapiens
  source 1..334: mol_type = other DNA
gactgtctctctttccactacctgggcaaaggaaattcgagcgcggggtcaatccccaggcaggtgggacgcccctgggggtcctgaggcctcttccctcctgctgaagggagcacccctcctggcaggcctggacctgctcacaccgacgtttacctggacggctgggcccctcgagacctgcgcggcgtggaaagccgctcggcgtcgccctcccccggagcgcccgggctcgcagctgacgagaccggcccatgggccctgcgcccggcccccctgtcactctgtccccctcaccccacccctcgagggcgagctgggagggaggtcggcg

SEQ ID NO: 28526 - DNA, 443 bp, Homo sapiens
  source 1..443: mol_type = other DNA
ctttataatttcaatagtataatgaaactctgtatcttgatttacaaactttaggcaatattttgtaatcccagcactttgggaacaacaacaacagggcgtggtgttgggctcctgtaatcccagctcctcgggaggctgaggcaggagaatcgggagattgcagtgagctgagatcttgccactgcactccagcctgggcaatagagtgagactcagtctcggcatgggagggagcctgggctccacccacagggtgatggccattctagccacaggggtggctggaacaagccccagggcgaggttctaggccctgtccacttggcctccatcccaagtccttgtgtctctccccaggaggagtgtggggacagaggccccaaagggccaaggggaagggtgagggcgtgccagcagggggcctggccccacacagcccg

SEQ ID NO: 28527 - DNA, 286 bp, Homo sapiens
  source 1..286: mol_type = other DNA
tcaataactgaaaataagtgtttgcaacacacacacgcgcacacacgcacatggctagtgcagtgggtttctgtgtaaatcagctcttttgcattgtcgctcagctgtaaatggccacactgggctccagtttgaaagtgaggacaccactttcccatactttaaaagactggcagtttagcttggaatttccaactgctaaccacaagcaggtcgcaagcttggctgcgcagcgtgcggtagccgagggctgcgctttccaaatctcccaccagcaggcggtggg

SEQ ID NO: 28528 - DNA, 477 bp, Homo sapiens
  source 1..477: mol_type = other DNA
ctttgcaagtgggagtgatgaggcccgagtgcccaggtccccccaacctccccgccggaacccccactctaagacgccgctttcgaggttcccctgccccctagaaactgagggggtggccgaggtagccctggggtcctctcagtcccacggaggccacggggaagggaccgggaccagagcaactagggagaggcccgggttcccctcacccaccctaggcgtgggggagcggggcgggcttagggacgctggtcccccgaccgtgggacaggggctgggttgggacgcgggtccccactaggagccgcgggggaggggcagggccggagtccctaccctcgtaggggaggggctggttcgggacgcggctcccccggggcgcaggggcggggccgggtggtacgccgggtcccctcccacggccgtgagggaggggccggcggcgggggcggacccctggcggtcctcctggct

SEQ ID NO: 28529 - DNA, 332 bp, Homo sapiens
  source 1..332: mol_type = other DNA
ggctcaagtgatcacctcagcctgccgagtagcttggatcacaggcaactcttgactctgtttgtttcattcattaattgtaaacgaaaattcacagtttatgaacatgttctggcgccttaaaggcatctagtccacgaggcctgtttctctagaagaccatggggagaaaggtaaccttcccaaccttcacctcgtgaggcctcgtggcgttagcccagtgctctcggcccccaccgagcctggctctactgcaggcgctgggggttggggtgggggagaggcccagggcacatgatgccgcccccagcccgcccagcacatgacccagg

SEQ ID NO: 28530 - DNA, 312 bp, Homo sapiens
  source 1..312: mol_type = other DNA
tttatttttttaatgtttttaaattttaaacttaattgtgtgtgagagagagagatagggtctcactccattgctcaggctggagtgcagtggtgtaatctctgctcactgcaaacttgccgggctcaagtgatcacctcagcctgccgagtagcttggatcacaggcaactcttgactctgtttgtttcattcattaattgtaaacgaaaattcacagtttatgaacatgttctggcgccttaaaggcatctagtccacgaggcctgtttctctagaagaccatggggagaaaggtaaccttcccaacctt

SEQ ID NO: 28531 - DNA, 774 bp, Homo sapiens
  source 1..774: mol_type = other DNA
cagtgcgcagtggagtccaaggggtgccgaaccagggaccccagagaggcaaacataggtggggacggctcggggacacgttccttcgctggcctccaggcagccccgcaggtgcaggccgccactggcgggcccgggagcgccagaggacccggccaggcccctgcccggaggagggagggggaggggaaagggactccgggcaggagaggcgcggggaaccgccaggatcacacgcccacgccggtcccggcgcccaggcccggcaggtgaccccagcagacgcgcgcgccagacccgggggcgcgagcctaccgcccctcccgcgcccctacctcgacgcgccccgcagggcggccagctcccggctgtcagcgcccgcgccccgcggccgccttaccttggtgatgaccagcggctcgccgtgctcgcggccgcccttcagggtgaagccccacggggcgccgccgctcagctgcacctccaccaggcgcccgccgtccgccgcccgcgtctcggcctcggccaggcgctcgggccgcgcgcggggctcggcgccctccatggcgcgaccgctcagcgtccctggcccgcgcccatgcactccgggcagtcccggccgtgggatcgcaagggaggctccgagcgccgcagaacttgcgccgtaacttggaaagtgccggcccggcggcggagggagcccggagggctggcggggagggggcggggccggggccggggccggggccggggctggcggggagggggcggggc

SEQ ID NO: 28532 - DNA, 343 bp, Homo sapiens
  source 1..343: mol_type = other DNA
aagtcaggtccagcctgcctttgtcttccctgcacacactgttacattcctaatgagtgtgtaatcaacccaagaatatatggacatagaataggctgttgaatgtcacatatgttataggattatctagcatcacttaatagagaaagctgtaacatgtgggctttctatatttcttaaaatataagaagtgctgggcacaggatcataccactgcactccgagccttttggggttttaaattacaagacccccaagccttttggggttttaaattacaagacttttggggtttaagcactgaagtcctgcagcaggcacagacaggccagctgttgtgagc

SEQ ID NO: 28533 - DNA, 413 bp, Homo sapiens
  source 1..413: mol_type = other DNA
tcactgaaacagtgattactgttacatgggaatcacctgaggagcttgttaaagagcaggttctgattctgaggagcttgttaaagagcagattctgatcgccaggctggagtgcagtgacacgatcttggctcactgcaacctctgcatcccaggttcaagcgattctcctgcctcagcctcctaagtagctgggatggtctcgatggccgagaatccccatttttaatgaggatgctgatggcacgaatggttgactcattttgttgttggccacaatcagaattaggaccttctatcaacacttctagctaaagtgacagagttaaactgatcctttataaggagcataaatcagttggttagtgatgaaatagcttattgagatcacacaaatctataaatgggagaga

SEQ ID NO: 28534 - DNA, 815 bp, Homo sapiens
  source 1..815: mol_type = other DNA
ccccttttcggggatgtaaacctgaaacggggcacggtccttctgcgcccgccttccaagcccctccagaggccggacccgcgcccggctcaggctgctggggggcgcccttcccggctctctaagtccagagtgtgagtgcgcgcagggccgcgcgggacgggcggtccctctgccccggggcagcggccacagcgcgggcaccagggcctcccgcggcgcttccgctctcacctgcgcggcagcccgcggtgcgcgagaacaaagtgtgggcgccggcgggccgcgcgccccgagacggaggaggccggagactcccgccacgccaccctgcccggtcctggcctccaaccggcgggcgggggcgcccagagcttcgaagcactgcagagctctggcgcgggaggaaaggcccgacctggcgccggggcctccgcccccgtcctcgcccgcgctggctccgccagccccggggcgcgcgctcctcgaccccgaccccgaacccgctgaacggcgcgcgcgcctgagcgcccctcccggcccgctcccctccaccgggcgagagaaccggggcgcgcccctctccagctctccccggtacgagcggccgcgtgggcccctgagcgcgcacctgaccccgtccctcacccttcgggccgcgggctggacctctggacgcgctccccgtgaccggccccgcggtacgagctcccgaacgcgcccgccccgccccccgtcggccccgccccctccccgccagccccggccccggccccggccccggccccgccccctccccgccagccctccgggct

SEQ ID NO: 28535 - DNA, 441 bp, Homo sapiens
  source 1..441: mol_type = other DNA
agcagttctcctgcctcagcccgagtagctggcttttttaaaacaacctttcccctcataaaagtaatattaccattttacaaaaaattggaaggcaaatcatttttaaaaatggaatgcaaactcttgtgagcatttcaggacatcagatatttttgtatcactgtaactgtttaaaaatctccctgacacagccccaactctggagcttcagcttccccagctgggagccagtgaaacagaagttcccgggcccccaggttagcccttctagggctgtcctggcggggacgcaaagtggccacctgcccagctgcccgcttccagaggcgtcctccctgcgccgcccgagaggaccggccgcgggctcccccagctcctcgagggagaccgagggcgcagcctcccgccaagtgcgcagagggtctccagacagccaga

SEQ ID NO: 28536 - DNA, 657 bp, Homo sapiens
  source 1..657: mol_type = other DNA
ggcgcagcctcccgccaagtgcgcagagggtctccagacagccagagcccgggagcgggtgaagggagggcactgcccgctctctcgggagcgcccgaggagtcaccccaggcaggccgcgcccgcagtccgggtagggcgtcgtcctccccgcccgccttcctctacgcgggggcccgggggcggactgacgcggcggcgcccatcctggcctccatgcggtttcccgaggccagccggcgtgggtggagccgccggcgtgccggggcgggacggccggaggcggggcctgcgaacgccctgcccctgctcgcccgggccgcgccgaggaacgaagatggccgggcgcgccgcgggaacggaggggcggccggcagcggcggcggcggcggcggcggctcccgggctgtgacttcgcgcgcggcggccacccgggctacctgaacggagtgggcggcgcgggcagcggcttgctagggcgggcgggcggacgccggtgcacgggcgccgggcggaggatgcgccaggagcggcgggcggctccccgcggccgcccccgcgccccgggcgccgggccttagtgctggcggaggaggcggcgcgcgcggggcggccgggcggcggcggggcccgcgccgtcatgccttggctgagcgg

SEQ ID NO: 28537 - DNA, 321 bp, Homo sapiens
  source 1..321: mol_type = other DNA
agtgagtttgatactttagtgaattcatttcctaatagttttctgtgttcgcaaaggtatatgtgtagatataaatatattacacctacatagatgctttgaagcccactgcacagatggcttataatttaaaacatcccctgtttttggaaatattcaagttgctggagtaccaacagctgtttgttttttaatcttggctaaaatgacaatttgaactgcaatgttttttacaattgagcaatcacctccggaatacggagcatgcaccgtgctgcgtgcagcccagcccctgagggtggggcgtcctgtctccgggac

SEQ ID NO: 28538 - DNA, 312 bp, Homo sapiens
  source 1..312: mol_type = other DNA
ccactgcacagatggcttataatttaaaacatcccctgtttttggaaatattcaagttgctggagtaccaacagctgtttgttttttaatcttggctaaaatgacaatttgaactgcaatgttttttacaattgagcaatcacctccggaatacggagcatgcaccgtgctgcgtgcagcccagcccctgagggtggggcgtcctgtctccgggacgccgggcggggctccggagccaagaggtgaccaggctggctgggcagggctgagtggctgggccgagcacgtgatgctcccagccggcctccgggg

SEQ ID NO: 28539 - DNA, 733 bp, Homo sapiens
  source 1..733: mol_type = other DNA
aatacaaataaaagcagtctttgcttttgtccttttacatttcaaaaacgcttgtgtattttggcaaaagaaaagtttatatgtgcactgcttaagtttgaaatacgctatttcaaatttacaaaattatcacagttgtaattttctaaagtctttctagaatgagaaatgttgacattgtacatattttctgtgatagtaaaatgactcacttcttcagaatgtgataaagattagaaaatgtgaaataatgagttattgtgaattaagtcatgtctcagagattaaatgcctcacgtagcagtgctttattttaaatcatcacatatttaagtaagtagtagaaatacgtggtgtcaccattttttcctttggcaaatacaaattaatattggaatgcagctattcagagtaattaaagcattattcatccgtgcaattagtataatgttccataatgaattttaactaaagtgtttggtataatacatagaaactctaggcaaagtatgtccatgctatattttgtgtcattttgatttgcacaaaatgtttatttctccactgcatttgataaatactagttttaaaataaaacatgaaattgtatttcctttcactgtaaagcgaaacgcctgaggggcggccagcgcgagggtttctggccatcgaccctcacctcccgggacacctccctgcctcgccccgagggcgtcacgtggcagcgtggggc

SEQ ID NO: 28540 - DNA, 572 bp, Homo sapiens
  source 1..572: mol_type = other DNA
cttgcatggtgataagcaatatccttcaaagaactgcagcgcaggactttttcaatcaaattttaaaagattacttcacagatttgctattatatatataccgtgtatgtaatattaaatatatatatatatatacacacacgatgtttttatatatgtgtgtacataatgtatgcatacgtgtgtatgtgaaacctgtgtgtatatacatatattttaaattgtttatcaggatgatagattgctatttaggtcactatttttggaagaaataaatgactgtcttcctgatataactttgaagaaaacttcttccagacattatacattaattcagaagataaaggcacaaaataatgtgtatattatttttttaaatgaacaagccagcatgcagagcataatgtgatcatgtgctcagtacgggcaaatgagtctagtgcctgttcccagccccaggagctgggcaggacggctcctaggtggcattgaaagctagcattcagccttgccacaggacagtgtctcattcggccaagctgctgctggattcttcaactcgggcaaccctg

SEQ ID NO: 28541 - DNA, 503 bp, Homo sapiens
  source 1..503: mol_type = other DNA
gagaattaaattgtttaaaatgaaacttttttcctttaaattttaaataaacaaataagatgcaaattggggataagggataaccttagggataaggtcataccttttgatattaactccaaactcatgccttgtattcgtgttttacaaattacatttataatttatctcaaagataacaaggaagcatactttagaatatgttttaaaagccattagaagcttcctagcgtttacagaattctcaagtctccaaataaacagtttaaatcttggcttttaggccaaaaagtctttgggcttgtggaagagtggatagctacaaagagaagagagacagaccctctcatattgttgtatattgttttatactcagaaaagaaaccaggcctgggcctgcctgacctaagcctggtagtctgatgttatctatagattatagaaagacattgtaaaacttcccttacgtggaccccccttagagttgtgagcccttaaaaggg

SEQ ID NO: 28542 - DNA, 548 bp, Homo sapiens
  source 1..548: mol_type = other DNA
acaaaattgcggtcatttcttgggggaaaatatgccattagttctacacaaagtactctttgctcaacttgcactttcttgaaatccagaaggtagatttacattaaaatcaaaaagttattgcttatatggagttaagaaagcaaactttggaaattttttttggtctgagtttgcttgtccctgttaataagttcaacagatgatgcactaaatttttttttttctgaacaaaatgtcagtgtgtattgttctatgacaatagtgttatttgaaattattcttgtcatttgctgcatttcaaaaaaattgtgtgcacgttcccattaagatttatttttcttaaattgaatatacagttaatctatatgcagatgaggtaggtgcaaaagtaggcaagatatccttttaaaaattctggctgaaataattttgcaccttccaaatgttttaatgctgttagggagctcttaaaatgcaaggatttaaggcccttagctagttaagcttttagcagaactagagctgttagataagaatagaactgc

SEQ ID NO: 28543 - DNA, 510 bp, Homo sapiens
  source 1..510: mol_type = other DNA
ctagaattttttaaaattattactttactaagtagtagataaaatgtaagagactatagagttcttttgaagatatattttcttatcttcttaaatcgaggaagttgtttaaaaatgtttacatacaagtatgcaaattcgcaagtcttagatttctttcctgaaaccatcaaataacacatcagcatatctgtcattttgcccatcaaaaaatacagtagcaattactgcattgtaaagggagagttgaataactattcgttactatgctcaaataaggatttgagcctttctttgaaaataatctcaagttcaattaccctggttttaaaaacatgaaagacaacttataaaatgttacactttttttaaagatgattttaattaaattgcacaaatcccttatagagttaaccaggttaccaggattcctagttaacttctttcaccaggaatgcaattcatgtttacctatataaggaaacctgtttaagcacacaccctcagctg

SEQ ID NO: 28544 - DNA, 526 bp, Homo sapiens
  source 1..526: mol_type = other DNA
aagtttttcccagtggaaattgctattcaaaaatagttacccttcctggcagcagccttgagctgtttttaatacttcaacccatggatgaaataaaaacaagtgtttcattttgagataggtcctgtacacaggaaagtcctagaattttttaaaattattactttactaagtagtagataaaatgtaagagactatagagttcttttgaagatatattttcttatcttcttaaatcgaggaagttgtttaaaaatgtttacatacaagtatgcaaattcgcaagtcttagatttctttcctgaaaccatcaaataacacatcagcatatctgtcattttgcccatcaaaaaatacagtagcaattactgcattgtaaagggagagttgaataactattcgttactatgctcaaataaggatttgagcctttctttgaaaataatctcaagttcaattaccctggttttaaaaacatgaaagacaacttataaaatgttacactttttttaaagatgattttaat

SEQ ID NO: 28545 - DNA, 432 bp, Homo sapiens
  source 1..432: mol_type = other DNA
agcatttgaggcctgaactgcaacagcaggaaacagtgttgactgtaaacaattttaaatttccacaaagagacagattaatgtctctggactcagactattctctcaatatattgcccccttagggaaggggaggtccattgagcctagacttgacccccatccccagagccttagcgaggggctgggggtccgaccacctgctccagcccgtggtccccaggccgcggccccccgggctgttccgggaggccggtaccgccttcagtcgccaacccgacagagcagcagtgacttcacgccgccgccgccgccgccgccgccttcctctcactcggtcaccgctgtggctgcggtcaccgccggcgttctcaccctacctttttagaaggcgggacttccgggcctgctgcgggggccgctttctgggcc

SEQ ID NO: 28546 - DNA, 434 bp, Homo sapiens
  source 1..434: mol_type = other DNA
cccttgcagagaccctcacctggagactcagctgaaagctgtgagcccccaacactatagttatatagaaagatatatgtttctttattaacactttaagtaacaagatcaaattaccttaatttcaaagtagtggatggcacaacaaccatatgtgacataatttatctgtaatgtgtattagtgccacatacagctaatagtactaggatttattgcctacatccctgatggaagaaaatgctaaatttacgtttcttgaatcattgctacaattaaaaccgataagatttaaaaaaaacatagtagagctcttcactctagggaagcctctggagcagacccctgaggctcctggcctggaggggcgggcccagaaagcggcccccgcagcaggcccggaagtcccgccttctaaaaaggtagggtgagaa

SEQ ID NO: 28547 - DNA, 472 bp, Homo sapiens
  source 1..472: mol_type = other DNA
ctggaatattttactgctttaaaattccttccttagcagcagcagcagcagaggctatttcacagaatcctagtaaaagcataccgagtccttaattttgaatcagtaagatcttaaatcatttcccggtttgtaaattataatcacagtgattcttttgttggaattcacttgagacccatgagagaactataactgactgggaaacaaagatgtctttagatcaaggtaattcgcgatatggccatgtgggtatattgtgttatgcttcagtgtgaaagagaatgaaaacttttgcttttaaatggagtcagtagttttaaaatataatttaagaactgagaatttgtcctaaacaaagaaggcatcctatgtgcttgtggaaaagaggattttttttagaggaatccttttctaactcgagtatatttcttcaaaatatctctctctctctctcacacacacacacaca

SEQ ID NO: 28548 - DNA, 477 bp, Homo sapiens
  source 1..477: mol_type = other DNA
gccatactgagaggccaagctgctctgttgacatgagtttgcttgtaaaaaacaaaatttactttaaaatgtgctgtctggtgtgcattgtagtatagatcatcagtaaaagctttgctactgcaagaaccttaagttcctgattgtcccctgttttggtggacaccagagggtttggggttttacccaaatgggaatttgaatcaatttctcctgatctgaaagggctggaaaaatcctggaggatatccagattacactagagaatctcaaccacctaccttgatttttgtaaagaacaacgttgtttgctagctttttaaaaataaatctgaatatatcaacatgtacagtcaactaatttgctgacttcaaaatagcgtgaattattgcccataatgaaagattccatatgcacttatgtctgatcatagcttctaaaaaatcatgatacagggatttttagttatactcaat

SEQ ID NO: 28549 - DNA, 378 bp, Homo sapiens
  source 1..378: mol_type = other DNA
tacacagagcaagtggattcatgagtctggagtctctactctggccccaggcctggccttcctctgggctcttattgtgaacctacagaatgtgccaccctaagtgaccagcatcctgggcagccagcagtcctgggtgagactctcacagaagaaggctttctagaaagggaaactctgccctcccaggagaaggctctgagtgaaagtctctctagtccccgcctcagcagccggggtcccacgggtccggggagggtggggtggcaggaggcaggcgtgccggccagcctgacacctgtcgtgggcgcgttcggcctccgcagcccccaacagctgtcagcggcggcggccgccggagggacccgccaggagcgg

SEQ ID NO: 28550 - DNA, 562 bp, Homo sapiens
  source 1..562: mol_type = other DNA
tattcaaggtatagccttttcaagtctactatttaatacattctattagagaggaacagataaatgtgcttaaagaaatcaatgccagcaatatttctagcagtaactttggatgtagcttcttgagactctcctctggattatcagcagtgttttggagaaattaggacatttagaattcctaaatgacatcaaactgtagaaaagaatgcattgttatactatatataaaggtataattatataattatgactataataattaaaacatattgtgcttaacaatagtatcaaattgttttcatctgagttcttaattacctaatataaatatgtctgtacctaaaggaatttcttatatctaggaaaaatttaagggacaagaatggcactttcattccagcttataaatcatgtcaattttaacaatgacttaaaaattcttttgtgatttgtttaaactctgaaaagaggcttgtttgaatgagttatgtgctcatattatatatagatgagtaaaactcttcattagaaaacaataagatactcccacggtttcttt

SEQ ID NO: 28551 - DNA, 507 bp, Homo sapiens
  source 1..507: mol_type = other DNA
cttttcaaagagtctaagtaaattaacttttcccctgaatatgtcatagggaataaaggaagtcttccagaatcaaacttggacaattctggtagatatgcaagaggaatgttcgtgtccaacatctgtatttataatttcattgtattttttctccaaaataaaagaaatggtagagtcacctttacatttatataaaattatcttcatccctaagtaagttgcattgcaaagcttaactgttacagtccgacagcgggagaagctgctttcagactcatctccttgccgggaagtctccagcttcccaggactgtggccaccgcgctgagacccgaggcgtcccagagcgggacgcggagacagatcgctttgtgagcgccaatctctgcagcctctgggctgaagctgcgcccggcgcctgccccctatccttcctttttaaaaacaaaaactggccttcctttccagaaacgtgagtggagcgagacgggggagaaggtccgc

SEQ ID NO: 28552 - DNA, 605 bp, Homo sapiens
  source 1..605: mol_type = other DNA
agcccagcactgtccttcctgtattgatagcggcctcaagggtgcttctgacactgaagacgtcagctactctgggggaggcctgaaggttctgccctcgcccgaggccactgcccgcctggggccagctccagcgctgcagcgtggccacactcatcggcgcgctgctctgccaagggggctgacgcggcgcgcacggccagggagctcttgggggcagacgccgtccagcctcccggccgccgggtgcctacccctaggcgcctcccacgcccgggccggagagcgggcgctcggggcgacggacgaccctgcgcgcacgtgggcgcagcctggaggccgcggggaccctctcccatgggggcgacgggagacgtcctgccggtagaccttggccagggggtcgcgctccccgcccgcacccctcccggagccccggcggggacgtgcggggacgcgcccgggcgggagcgcgcgcgccaggcgcctccgaggtcccggcagcggctcggggcgggcggaggaggggccgagggcggggcggccgcagcctccgccattcccggccccccccggccacggcgcaccccgccctcccccaccgc

SEQ ID NO: 28553 - DNA, 446 bp, Homo sapiens
  source 1..446: mol_type = other DNA
cgggatctagggtcctgttggcttacatattttagatcagacaagtagccttatgtgatcatacacacacacaaaacatctttttgtctggtatgttgagaatagattatggcataaaaataaaagatttctaaatatattgccttatatgaaaagctttaaaaattataaagcacctataattattttacattaaactagcctgtttaatagaagctgcaggaaaactgataactatgtattcaaaaacatgtaattttatgcctgagttttaagtcatttagatatttattttatgttcagtttttgaaataaatgcttaaaaaaaacgctttagtactaggcttgaatactgaagactttaaatatccctcgagctagactggaacactggctggatcgtggccctgccgccaggtgaacgctgccggtgggagagcacacac

SEQ ID NO: 28554 - DNA, 317 bp, Homo sapiens
  source 1..317: mol_type = other DNA
tggccctgccgccaggtgaacgctgccggtgggagagcacacacgttaatgaacagggctgattatccaaggagggtagaccctccgctctatgctcctcgaggagggagcagctgtgttcacggtgctgctggtctcgccccagcgattcgggagaagcagtgggaactctgagctccccgaatcgtacggagcaaaccgaggctttgagcaacctgcggttgcacggctctcagatccttcagatctagaggcacacgcagtgggtgacaggagagtgccccctccccccgggcgggtgggggtggggagaggag

SEQ ID NO: 28555 - DNA, 382 bp, Homo sapiens
  source 1..382: mol_type = other DNA
caggcccttgagcacccaacaggcagaaggttgtgaagtgcctgggggacccctcagcctgtgatgaggacgtagttcaggggtcatcaagtttgaactatgagggaccacgccaatatttacataacaagagagaaaaaattgtcacaatgtttttattgatataatccaaaatacggtaatatttgagtacaattatttgcaactcacatctattaataaaaaaatgttcatgtatgaaaactggtacaaacgcgcccacactgggtttgcggtgttccggggtgggaagtcgctccgggctgcgaagcacctcgagggatccccccggcccgaacttcaggaccacccagggcgtccctgccagggctgtgcccccgcc

SEQ ID NO: 28556 - DNA, 456 bp, Homo sapiens
  source 1..456: mol_type = other DNA
gacttgaggcaaatccaatatttcttctgttataaattccagtatttgtaaaaaatgggtaataagatctctattttatatagttttagtatttaatgagataatacatataaagtcattaaaacagataaaaaaccctcaataaatgtcacttattactgtataagtagattaaagaactttaaacataactaccatattttggctctatctacaaaatgtccaataatgagaagcaaatgcagctgaactttgccactgcttaaaaaccagccaagacagaataaggtaaatttagatatgtctctaatatatctatagaacagaggggataatttgcaatgtcaatatcctatggtgcaacagagaattatctaagaaatttggtctacagagttgtttggattcttttgcaaagccctggggtggcagttggaaactccagggctggctgcc

SEQ ID NO: 28557 - DNA, 560 bp, Homo sapiens
  source 1..560: mol_type = other DNA
agcaaatttggcatattatgtagctacttatatagtaaaataaaaatttccacaattatgtaattgatgaaactcaaaatgtaataataataatcgaaggcagtttttttgtagtatagaagaatggaatcatttttgttactgtatcagcaaatccattgccaatggaatccatttatcagactaaatcgggaagattaaattttccattgacgttcatacaatgaacactcattgagcttatactacatgccaggtgctggaaggcatggggcgcccattgcggccacagcccagtgggagggagttcatgttattcgcctacatctgtgaattacacaaggaagacggaagttcagtacaaatttatggtaacttttttaaaaaagaatacactgaagttttcttagtgaatggaataatgttcccttacacaaaaactaacaaaaatacgtcgtgtgtgtctgatttgggttgtatttaaatcatttcataaatgactttttcccataacttcagtttcaaagttttaaagcacagtcaattaatgatttggcaac

SEQ ID NO: 28558 - DNA, 469 bp, Homo sapiens
  source 1..469: mol_type = other DNA
gtgccattttgaaaactgcccttgaaaatataatttgatttttgaatttcatcttaagacattagagataatgtaactgtagtctttggaatctccttagccatcacttttaaaatttatgaaaataaggaagaggaaggtaaagaacttcctcattgtccggtcaactgttgagtgctcacaaaaattatgctgatgaaacaatatggatgtttcagtgatgaaactttctcttttaaaatcacttaaccggggtggggcgcatgcccgccactggactgaggaatcgtacccctgcagcgggccaggccctccagggagggacaccgcgcccttgtgtggagatgtccacagtagacaaaggcagatgcctgtcaccccaggtgcctggaccccgggtgggggtggggctcccctccccaaaagcccggcaggcctccggatgccgttccgagacgcggcgcgaagg

SEQ ID NO: 28559 - DNA, 421 bp, Homo sapiens
  source 1..421: mol_type = other DNA
agtcccagctacttgggccacacagagtaagactctgtctcccattgcagcccagcctgggtgaatgagaaatctagacataaagtctttaactttgtatatccactgcactacctgcccctaacaattttcttatgggagggagcctgggctccacccgcagggtgatggccattccacccaaaggggcaggagtggctggaacgagcctgggggcaaggtcctaggccccgttcacttggcctccattccttagggcagggtcccctggcactgagtccacagcagccatggacagtccgtgagggggagggtgtgcctgcagggggcgtggccccatgccgcccgccacctgcatgcgcactgggccgaccaatcagcgaggagcgcgggcagccggggcggctgctgctctcgtgag

SEQ ID NO: 28560 - DNA, 623 bp, Homo sapiens
  source 1..623: mol_type = other DNA
aggtagacctctacaatggcctatggccatcctccatccacttctcaggagcccttgggagggatcctcatttagctgtgttcttcagggaggccgcttggctcctgtgaagacagtccttttaaaaaggaatgcaaataacctatgtaagtggctttacccagagtaatagacttgggatcttaaatacataggcattattgttattattttaaaggccttatctgctagaagataatacagaagtatctactggtgaaagtatacaaatgcattagatttgctttaaattctccagcaaaatagaagaggaatgttaatgtcagaatgacagtcatagttgataatgggttcatgaggcctcattatactgctctacatttgcaaatgtttaaaactttccaaaataaaaattaaaaatataaacctggtcttgctttgagctatcaagttttcttgcagatcggggacctggtgccagctactccaggacttagagagagcttttctggtttttttcaggactccttaaaaaatagcccaggtccagagcatctctgctgcatgctttgaattataccatccatctttttacacaaagacactcgctgggaatcctggaa

SEQ ID NO: 28561 - DNA, 265 bp, Homo sapiens
  source 1..265: mol_type = other DNA
tctcacactgggccactgtgtgtcagaggactatcacaataagcctcagcttcaagctatagatctgcaggttgacgaggtctgcctaccatgaagccacagtcattcattctaatgtaacacgttgtcagaacaaagaatgtgaatggatctgaattcatatagcattcatcataaattcttaagtcctggagtgcaggtatcaccgaaattccccatgcctgaaacgggtcatgctggaggcgggtcccagccagatgtgcac

SEQ ID NO: 28562 - DNA, 465 bp, Homo sapiens
  source 1..465: mol_type = other DNA
gaaaagtcattacctgaaaatgactccccaaaaagctggagattatttaacttgttgtgagccccagcatcataaaagtgagatctttgtcttggaaaataaacagactaaatcttttttaaaaagcttttattttaggtttggattatttagttacccaggtaataagcatagtacttgatacctagttttttatgagtgagaacacgcagtatttggttttctgataaacaaactaaatcaccgtggacttaaggagagcttctccaacctttaacaagattaaaggaaagttttaatagcttcatttaaaaagttcttgtttttagtatcacaactgtttgtaatcacgacatcctgttccactttacgtaaacttttcaaaatgacagttatttcgtaaccttccccgcgcccgtcccccagggtctcggccgcgggaccccgccttccaggccccgcccc

SEQ ID NO: 28563 - DNA, 450 bp, Homo sapiens
  source 1..450: mol_type = other DNA
ttgtcagttcaattaattatttgaatatgctctttatcaacattttctcaaacattttcaagagactgtaatgtttcaggatacagagttattcgggaatataaaaatgtaattcaccaatacaatctatgtatcatacgattattaaaacctaaaccttgattgaatttgaactacctgttacaggttacacttgtaaaagctgacacagttgagtgtatccggtaaacatgttgggccgcgccagctccctccggagcccgcctcgctcgccccgccgcggcccgagtttagtgcccagcccgggcggtggggccaagacgagggggaatccctgccctcagaaccctgcctctgtcccgagggttcgggaggaacaaaggtgctggaccgcctcacaggtcccgagctgaagagctacggcgcatgagcttggttgcccagcacgag

SEQ ID NO: 28564 - DNA, 470 bp, Homo sapiens
  source 1..470: mol_type = other DNA
ttatttaacttgttgtgagccccagcatcataaaagtgagatctttgtcttggaaaataaacagactaaatcttttttaaaaagcttttattttaggtttggattatttagttacccaggtaataagcatagtacttgatacctagttttttatgagtgagaacacgcagtatttggttttctgataaacaaactaaatcaccgtggacttaaggagagcttctccaacctttaacaagattaaaggaaagttttaatagcttcatttaaaaagttcttgtttttagtatcacaactgtttgtaatcacgacatcctgttccactttacgtaaacttttcaaaatgacagttatttcgtaaccttccccgcgcccgtcccccagggtctcggccgcgggaccccgccttccaggccccgcccccgccccggcccgtcgccatgttgttccctccgcgctggacgggagca

SEQ ID NO: 28565 - DNA, 345 bp, Homo sapiens
  source 1..345: mol_type = other DNA
agatgatctggatataaaacgtttagctcaagaggacatctggcaatatctggagacatcttccgttaagaaaccctgggttagctgaatgaccgagagggcggacgtctgcaggtggaagggctgcgcggatgagccagcggagggctggcaggtccggcccggccaccccggggaggggtggaggtacaggatccgcgtcacgcaggggctgcagtgggaggccgacaacggaaacgcaatgtcagtttccgcggaagagaacgccgaagcagttctcgcgataccctgggatgtgctctcgtgctgggcaaccaagctcatgcgccgtagctcttcagctcg

SEQ ID NO: 28566 - DNA, 350 bp, Homo sapiens
  source 1..350: mol_type = other DNA
ataaaacgtttagctcaagaggacatctggcaatatctggagacatcttccgttaagaaaccctgggttagctgaatgaccgagagggcggacgtctgcaggtggaagggctgcgcggatgagccagcggagggctggcaggtccggcccggccaccccggggaggggtggaggtacaggatccgcgtcacgcaggggctgcagtgggaggccgacaacggaaacgcaatgtcagtttccgcggaagagaacgccgaagcagttctcgcgataccctgggatgtgctctcgtgctgggcaaccaagctcatgcgccgtagctcttcagctcgggacctgtgaggcggtcc

SEQ ID NO: 28567 - DNA, 525 bp, Homo sapiens
  source 1..525: mol_type = other DNA
caagaaggcaaatcattattggtatactagcctttattcttgaaaacaccccttcgatttggagtgaggaattctaatgagtaaaactccatgtagaaataaccatatccgattaaaaaactattttgattttcattccaagaaactaccaaaatcttgtgaacatgttatgcttatttttaaataaggaagggtgcctttttacaaattgtttctcttactatcatatatattaactatagacaagggagtggaataacaaattgctactttaatttatatttttaaaaagcaatgtacttatctagaaattgtatgaaagacaaatatttaagaaagtaaatagagactatgggcacgtcctttgaatatgttttagtgtcatgcctatgcaaagacatgcattctccttagaatctattttttcctgggagaattaattaggaagagcccggtggggagcaggtccttctcccccaccccccactggagccgcattgagactgtaggcaccaccgggcgccg

SEQ ID NO: 28568 - DNA, 472 bp, Homo sapiens
  source 1..472: mol_type = other DNA
tatgcttggaaacatggctcataatcatgataaaggcttatatcaagaaggcaaatcattattggtatactagcctttattcttgaaaacaccccttcgatttggagtgaggaattctaatgagtaaaactccatgtagaaataaccatatccgattaaaaaactattttgattttcattccaagaaactaccaaaatcttgtgaacatgttatgcttatttttaaataaggaagggtgcctttttacaaattgtttctcttactatcatatatattaactatagacaagggagtggaataacaaattgctactttaatttatatttttaaaaagcaatgtacttatctagaaattgtatgaaagacaaatatttaagaaagtaaatagagactatgggcacgtcctttgaatatgttttagtgtcatgcctatgcaaagacatgcattctccttagaatctattttttcct

SEQ ID NO: 28569 - DNA, 458 bp, Homo sapiens
  source 1..458: mol_type = other DNA
tgcaagggtcccatgactcttctaatacctttcctggacactgttaaaccatttaattcacttaaaggctcaagcaagtctccaagaaaatctggcaccactctagattggagggtgctacctgtgtgtcattagcgactacttatgtcaatgatgaaatccggtttccagaagcacgctaagtactaagtgcccttggtccagtgtcccgtgatctgggacgcggatcgccgcctccgcgatcctatcccgcgaccctcggcgctcgcccgggggggtcccagaggaagccgcgagctttgcctgcagactccgcgcgcccgctgcccccaatcgggccctagctccgggcgcacaaagcccccggcgctgacgtcagggcccctctccgcgcggccggcccccagtgcaggcggagccgcgccgcgctcccaccccggccgggagctaggagccag

SEQ ID NO: 28570 - DNA, 264 bp, Homo sapiens
  source 1..264: mol_type = other DNA
cctcttttttattaataataatatttgtaattttgatttgaaatagcagggttactgtacagatttatgaacttcatctggaatgggcagatgaaactcatttctaacatggagccctgctctatgcggatgcccaagctttccctcataaaggacttctaaattaaattatcgatcttctctgtgccaaggaaatgttcccttctcttcggcacaggactccacttcagagcttggagctgtccgagtgctgaaatttatagg

SEQ ID NO: 28571 - DNA, 628 bp, Homo sapiens
  source 1..628: mol_type = other DNA
aaatatttgttaaagttaatattcttctataccattttaattcttctgtagtccaggaataatacagtaatgtcacgtcattaataccacccaattgacttagaattttcactttttaaaataattctgtaataaacatctatctggttcgtacctgtttttccttggaataaattcccagaaagtattaaatatggtaattgccccagaaatgatatgtcacgtaagacttgtaatgttaacagggcaggtattgctgtgatggttataattacaaacatattagtactaatgttttgtctgctgcaatgcatcaggcactctgcattaggttatgcatatcttatagatgagggacaaattaagaaactaaaactgttttagttaagccggtgcagaagcaccgtccgacccccggcgcgggtgcccgccacagtcccagtgccccgcccggtgcagcacgcctgccgccccggcgctccactcggggtagccgattagcaggcagcttccggcctccagcactgcaccgcctgcggtgcgaacgtgacgtccgcgacacagggggggacttccggcgcgccgcgccacgccacgtgttccgcaccggaagcgcgcttccagtcgc

SEQ ID NO: 28572 - DNA, 421 bp, Homo sapiens
  source 1..421: mol_type = other DNA
cattaaccctttaaagggagcatgggaatttgaagcagtgcacacggttcctgtgagggtcgaaagggtccctaacacctggctcagagacctgcacacgggcgctcggtccccgggcctcagaggcggcttccgggtccggggggccagcggcggtgcaataggctcctcacctctgccatgatcaccgtcgtggatgtgattgcggttgtcgccgtcgcccgttctaccgtcgccggccgccgcaccgcccaatccaatgcggacgcctgggtctggaggcgggaccaggccctcagcctaggtcccattcgattctcgtctggcactgcggtcccgcccccgccagccgcgagatcgccggcgcttcccccgcggagctccgccctagagagctcgcgggctccgacgcagcctccgc

SEQ ID NO: 28573 - DNA, 358 bp, Homo sapiens
  source 1..358: mol_type = other DNA
ctgtcgcctgggctagagtgcagtggcatgatctcggctcactgcaagcgattctcctgcctcagcatcccgagtagctgggattacaggcgcctgccaccaggctttaacaaaataaattttagtaattcacaatgaaaagcaaccgttcattatttatttagaagttaaaatgatcttgcagctgaaaggaacaaatggttctttccaaaggtacattttttgtaacatatagacacatttcccatacatgtacagatggccagggcgtgctgtgcatgttactgtgcaagcaattcagcagggctgctgcaaaaccagctttcgacatcagcaacttcgcagacttagggctggc

SEQ ID NO: 28574 - DNA, 526 bp, Homo sapiens
  source 1..526: mol_type = other DNA
gcttccctggtctctatccactagtagccagtgagcatctcttttgcccccggcccctagcagtggtgactaaacacgctttttttaactttatataattatttgagattaaagatttcagagatattttgctcattaagcatctcaagttggagtagcacttaaaatccaattatcattgcaaggaatgacagacccaggtctcgggatgcccgcttccttccctctctcccgcaatgcggggacaaggggaggaaatccagccccatcgccccctctgcgtcctgggaagggaagactcgccagcaacctcccgccagcgcgctgcatcctgggaggccgggcggaggctgcgtcggagcccgcgagctctctagggcggagctccgcgggggaagcgccggcgatctcgcggctggcgggggcgggaccgcagtgccagacgagaatcgaatgggacctaggctgagggcctggtcccgcctccagacccaggcgtccgcattggattgggcggtgcggcggc

SEQ ID NO: 28575 - DNA, 365 bp, Homo sapiens
  source 1..365: mol_type = other DNA
ccaaaagacatggacacagtacatccaaattttctcgcactgtcgcctgggctagagtgcagtggcatgatctcggctcactgcaagcgattctcctgcctcagcatcccgagtagctgggattacaggcgcctgccaccaggctttaacaaaataaattttagtaattcacaatgaaaagcaaccgttcattatttatttagaagttaaaatgatcttgcagctgaaaggaacaaatggttctttccaaaggtacattttttgtaacatatagacacatttcccatacatgtacagatggccagggcgtgctgtgcatgttactgtgcaagcaattcagcagggctgctgcaaaaccagctttc

SEQ ID NO: 28576 - DNA, 462 bp, Homo sapiens
  source 1..462: mol_type = other DNA
ggttgcagtgagccgcgatcgcaccattgcactccctaaatacatacatacgtgcatacatgcatacatacatacatacagctttaggctggagtgcagtggcgcgatctcggctcactgcagagtagctgggattacaggcatggccaggctggtcgcaaactcctgacctcaggtgaaaatattttagatttggatttaatcctctataaacttcagaattaagagaaaatgaatgctccagggagtagtatttcccacttagaacatacagcatatttgcacttcttttgtatgtcaaataacttgctttgttctgtggaagccaagaagtttctatctttccaaccctgctttctaacataaaataggaaaaataggggatatgaatcttatctgttaagatacagagatctcggtttaaaatagatgtcatatgataccaattataactcagtgaaa

SEQ ID NO: 28577 - DNA, 537 bp, Homo sapiens
  source 1..537: mol_type = other DNA
ttcgtctttataatcaataatcatatacaattgaaagtgcttggattttgttttaaattaagaactacagaaatatatatcatttctagtggtagaggaaaatattgccacccagaactttctggagatttctcaagctattcttgatttcagaaacgcaaaaaatggatttctgagattgagccattgaaggcaaaacgtgataacatggtttttgtaacaataaatgtaggatatttcctggcacatgcaaataaacctaatcattgtttctttaaaaatcagtgtttttcatttgagatacctaagttactaagcttctgtttaaaaattttaaaaatcagcagcagatgcatgagcatctgaggtcccttcttcatgttacaggttatctgctttaaaataacggcagccctgaacatttgagtcagttcttaaaactgccctgctattggtaggtgcattttctgccaaaatctgtgtcagatttaagacacatgcttctgcaagcttccatgaaggttgtgcaaaaaagtt

SEQ ID NO: 28578 - DNA, 446 bp, Homo sapiens
  source 1..446: mol_type = other DNA
tatcatctgataaatgttatactttggccagcatgtggccaaagtactattaaaattaaaaagtgagagtatttcattctcttacacagaaaggaatttcttctcgaactgtgacgcatggatgaccgtgggagttgatatttcagatcagacctaggatgtctagttaaatttacatgtccccaatatttggtacatgcttgtattaaacatcatttgtgctttatctgaaattaaaacttcatagtttcatgtaagaaccggcacggttttgccgtggcacccaccctaccgtcggccgcttctaggagacgggcgcaggcgcgcgctgacgttagtggggacgacagagcgtctctctcggacgtgactgcctcgggggcgcggcccttgggcgcggacgccctagattggtgctgcggaacagcagggagggactccggctg

SEQ ID NO: 28579 - DNA, 548 bp, Homo sapiens
  source 1..548: mol_type = other DNA
atgggttcaattcttgacatcagctaatgttataaaaataactacaaaattggttgtaatagaaccaaatctaagactctttttaataaaaaagatcaccattgctggtgggtgagatgccattgcatttatctgaagtttcgtctttataatcaataatcatatacaattgaaagtgcttggattttgttttaaattaagaactacagaaatatatatcatttctagtggtagaggaaaatattgccacccagaactttctggagatttctcaagctattcttgatttcagaaacgcaaaaaatggatttctgagattgagccattgaaggcaaaacgtgataacatggtttttgtaacaataaatgtaggatatttcctggcacatgcaaataaacctaatcattgtttctttaaaaatcagtgtttttcatttgagatacctaagttactaagcttctgtttaaaaattttaaaaatcagcagcagatgcatgagcatctgaggtcccttcttcatgttacaggttatctgctttaaaataacgg

SEQ ID NO: 28580 - DNA, 517 bp, Homo sapiens
  source 1..517: mol_type = other DNA
tgtacatggcctgcaaagtcaaagtatttactatctggtccttcacagacaaagttttccaaccttattttagagacttcctttctcaaaaccaggcaatgagccttctggtgtttagagaatagaaactgcagctctagttaatcaggcaggaataaagacgtatggctgcccgtgcttagaatgtgacaggctcatttaattctcatttcagcccgataaggctggcactattatcatcaccatcctcattttatgagccacctgtccctcccagcggtggaggcagcactggaatccgtgccgccaagctccgccggctggggagcgccgatcagagcacctgcccgggccgcatctcttcccggcacgagaggcagggaggccaaagggccgccaagctggcctgccgagggcggagccccagggcctccgagacccgtagactcccgcctcccgcctcctctaggccgccggccgcgaagcgctgagtcacggtgaggctactggacccaca

SEQ ID NO: 28581 - DNA, 353 bp, Homo sapiens
  source 1..353: mol_type = other DNA
taatagaaatgatgttacttacaaataagttacagtaagcaacaatttataagtaaacacagtgtgtcaatgcatgatgattacttttcttggctatccatagcaggacataaaatatgtccttagatttattacagatggccactgtcataatgatgtcaagtgacacacttttttattttccatttctggatttcttaataacttaaactatataaataagctcctatgagttttcattgcgagaagtgagatattttcttgtcctttccagcatagagcttgtacccgagagctgcctgggaaaagtgggagctatagttatcaaaattggaaactttatgaagtatgct

SEQ ID NO: 28582 - DNA, 493 bp, Homo sapiens
  source 1..493: mol_type = other DNA
agcatctaaaaaaattaaaaagtaaattttctattcaactaatcagatctatttaattagcactctgtataaaaaattgacaagagttttcacagttttctccttctgcttcattagtaaaatacggaaatatattctcttccggccacagactttggatgtagaaaatccctgtctttgatcactgggcaaagaaaccagtgaccatggcaaatcattatacttttgtgaaagaattatcctttttaaatagctaaaacaatatcccagggaaaaagtaaccaagactttattatattgaatggataagatttccaataatgcccttggaggacattttaggaattaataaataatcttttgttctacatagtaaataataaaagctggttttcttaattccaagctggctggagccaaccatggttaattcaatgaggccagtgagattggatgggttcgcttggcgcccgcctccatgcagacagagcaa

SEQ ID NO: 28583 - DNA, 311 bp, Homo sapiens
  source 1..311: mol_type = other DNA
aaatgagcttttttaagttttgcatcataattttaaaaaatggccatggtcccagctactcgggaggctgagccgagatcgcgccactgtgctccagcctgggcgacagaccgagactcagtcttatgatcttgaaataaaaataaatgtgagataacctattaatgaaattgtctgaaaacactgtaaaattataacattttccgtgtatctttaacagctttctaggaaaatattaaccaaaagtaggattaaagaataacgtattcttatttgattcactttaaaaaattattctaaaatctgttaca

SEQ ID NO: 28584 - DNA, 518 bp, Homo sapiens
  source 1..518: mol_type = other DNA
gatcaagttaatttttctgaaatttctgtttcatttaaaattctttattattattacttatatttgtgagctgctttatttttttaaaaggagagtatattttgattcacatcaagggaagtaagagtccacctctttttgatgcagtgtaactaaatctgtcatcttcactgaggcacaaggcgactgttgactacaagttagttaagagcctatactctagaatcagaatacatagatccatgttctgagctgagtgagatatagcaatttacttaaacttagtttcataattcataaaatggtgataaaatatttgcctataggtttcttgtgatgctcaaatgagatattataacacaaagcactttgaatagttacttataattgtttttttcctattctacaataatatacacaactttggaataaggaaaagcagtggacatttttttaaatgcaatgtcacctgaacctggaagacttgtttttctgggtgaagaaatattttctctgtg

SEQ ID NO: 28585 - DNA, 459 bp, Homo sapiens
  source 1..459: mol_type = other DNA
acttcagagtgggtaacttttaatgaccaatgtagtcagtagccacatgtgcctacttaaattaaattaaacaaaaattgtgaggaatgtcccttggacagtgctgctctgtatcattaactttgatttaattcaagtgccagacctcagggctgaaacaatcattatgtgtgaatgtgcaggcaccgtttggtgtacagattattttgtcacccagataataagcatagtattcgaccctctaaccttaagtaggtaagaggaagcggtgagagtcaggtgaggcccttcacggagggcaccctttgtttaccagagagaagggagtcacgtttgtttcctgaatgaacaactttgagtcagcaaagaagacataaaacaactaatctgttttccaaacaggttttcataaataactgacaggagatggacccaaatgatgggtgttaatcattaaac

SEQ ID NO: 28586 - DNA, 374 bp, Homo sapiens
  source 1..374: mol_type = other DNA
ttgatcaattccaattttacttcagagtgggtaacttttaatgaccaatgtagtcagtagccacatgtgcctacttaaattaaattaaacaaaaattgtgaggaatgtcccttggacagtgctgctctgtatcattaactttgatttaattcaagtgccagacctcagggctgaaacaatcattatgtgtgaatgtgcaggcaccgtttggtgtacagattattttgtcacccagataataagcatagtattcgaccctctaaccttaagtaggtaagaggaagcggtgagagtcaggtgaggcccttcacggagggcaccctttgtttaccagagagaagggagtcacgtttgtttcctgaatgaacaacttt

SEQ ID NO: 28587 - DNA, 424 bp, Homo sapiens
  source 1..424: mol_type = other DNA
atataagtaaattgtatgtcactggagtttggtgtacagattattttgtcacccagataataagcatagtattcgataggtcaatgtagcccacttatcagtgagactgtatttgatcaattccaattttacttcagagtgggtaacttttaatgaccaatgtagtcagtagccacatgtgcctacttaaattaaattaaacaaaaattgtgaggaatgtcccttggacagtgctgctctgtatcattaactttgatttaattcaagtgccagacctcagggctgaaacaatcattatgtgtgaatgtgcaggcaccgtttggtgtacagattattttgtcacccagataataagcatagtattcgaccctctaaccttaagtaggtaagaggaagcggtgagagtcaggtgaggcccttcacg

SEQ ID NO: 28588 - DNA, 280 bp, Homo sapiens
  source 1..280: mol_type = other DNA
caattcttgtgccatctaaacttgagttgggataaatctgtcttgaatgaatgaatgaatgaatggctaatggaaccatcctctaagaatgtccgttcagaaatttctggacagaaaagctggtaataacctcctcacttttttctaagtccgctgactttaaatgggctggaaccagtttatctccatatcgggttaaaggacatgaaacctagctagaaggaacattgctccacctccaggacctggacagtcctctctggagactggtgggcccctc

SEQ ID NO: 28589 - DNA, 285 bp, Homo sapiens
  source 1..285: mol_type = other DNA
ataaatctgtcttgaatgaatgaatgaatgaatggctaatggaaccatcctctaagaatgtccgttcagaaatttctggacagaaaagctggtaataacctcctcacttttttctaagtccgctgactttaaatgggctggaaccagtttatctccatatcgggttaaaggacatgaaacctagctagaaggaacattgctccacctccaggacctggacagtcctctctggagactggtgggcccctcgcatgcgcaggatgcgtagccacggtgggaacggcc

SEQ ID NO: 28590 - DNA, 309 bp, Homo sapiens
  source 1..309: mol_type = other DNA
tagaagagtggggaagtggctatttccccgccgccagcctcccagggccccggccaacctcgccgcaccaaaagcttctctggctccagggccgatagcggcacgcggtcatgtttgcggcaagtggcacagtcccggtacccgaggatcccgcacgcggccatcttggtgaaatctcgccctggccacgcttccccagcgccggagtccacacctgcgccccccacgttcgaggcacgtcctccgcctgaggccgaccctttcacgtaagggctaaagtccgttcgggccacgcccctgcggtacgcc

SEQ ID NO: 28591 - DNA, 260 bp, Homo sapiens
  source 1..260: mol_type = other DNA
tctccatatcgggttaaaggacatgaaacctagctagaaggaacattgctccacctccaggacctggacagtcctctctggagactggtgggcccctcgcatgcgcaggatgcgtagccacggtgggaacggccacggcgggaacggccccgccagtgagcgtgacccaggcgtaccgcaggggcgtggcccgaacggactttagcccttacgtgaaagggtcggcctcaggcggaggacgtgcctcgaacgtggggggc

SEQ ID NO: 28592 - DNA, 354 bp, Homo sapiens
  source 1..354: mol_type = other DNA
agactttcaaagtgctaataaggagcatataaacaaattaaggtttacgcatcttcgttaaagtgagagaagtacacagatattaatactaacgcgtggaaaactcagatttgtccaagggacacaactgtgctttttgcagacccgagggagtcccagcttgctgctccctttttaatagacagaatcagagtggggaagtggctatttccccgccgccagcctcccagggccccggccaacctcgccgcaccaaaagcttctctggctccagggccgatagcggcacgcggtcatgtttgcggcaagtggcacagtcccggtacccgaggatcccgcacgcggccatcttgg

SEQ ID NO: 28593 - DNA, 211 bp, Homo sapiens
  source 1..211: mol_type = other DNA
gcatgcgcaggatgcgtagccacggtgggaacggccacggcgggaacggccccgccagtgagcgtgacccaggcgtaccgcaggggcgtggcccgaacggactttagcccttacgtgaaagggtcggcctcaggcggaggacgtgcctcgaacgtggggggcgcaggtgtggactccggcgctggggaagcgtggccagggcgagatttca

SEQ ID NO: 28594 - DNA, 223 bp, Homo sapiens
  source 1..223: mol_type = other DNA
ctcaataaatgaaatttgcatgaatgagtcagagatttattcacacgccctcagcagcaacggggcactgggtgcttaggggaaaggacacgttcagtgtttgtttccttcccagcacataaagtcgtggtgtttggaaatgcggccagtggtccggcgggggcggggccagagcagggctcagaggcgtggcccaggcgcctccattgaggggcgtggccct

SEQ ID NO: 28595 - DNA, 193 bp, Homo sapiens
  source 1..193: mol_type = other DNA
ggagctgatgtctctaatatataagaaatgaataaataaataaattcgattgccaaaattcttgcctcaggggcagaggtaaccgagcagctctgtccgcctagccacaacacgtcctgctagggcgaggagtggaggttgctcggtacccgcgcctgcgcgtgcccgtctccttaggcccgccctttcctgc

SEQ ID NO: 28596 - DNA, 543 bp, Homo sapiens
  source 1..543: mol_type = other DNA
tttatacttaaactaatttgtatgtatttatttgtgatgcaaatgttctactaatttaaaggcagaattcacataggtatccttttttcttttaatcactgttaagttcctttaacagcgttactgcaaataagattcaagcatgattctcaagattcaccacaccatcttgaatttgaacacaaatttacaccaatgtagaataaaaatgggccctaaatttcggtaagaaattatcgtcgctttttgtatatctgacgtggcaattcaactttagtaaagttaaaatggtcttattacctcacttaaaatgcgtagggaacaaggacattattaggtggcatttactgcaaacccagaacttggttgcaggacgaaaaaacaatgtattctccttaaaataaattatgtcctaacatgggacgaaacggttgcaagcaccttccctcgtgttaaaaaccaacgctttgattttgccgcaaatgctcagccgcggcgcgggctcggggccagcgttcctcgggtccggccgtcgccggtgcc

SEQ ID NO: 28597 - DNA, 329 bp, Homo sapiens
  source 1..329: mol_type = other DNA
cttttcagccgaacggacggtaactcatccagtccgcagcaccgccgcctggggacacagagaatcattagagcaggacagccgcccgcgcgcgtcccggaggcacctgcaagagcgcgcgggcgcgcgggcgctcgggcccggcaaacgccgcttccgggtcacgtggcccggcttccggactcagcggttacccgcgctgcctccggtgccgctggcgaccgctgagccgcttcccgcgcgtcgcctagcccgcccctcagctcgccgcagccccggctcctccctcgtccggcccccggggcggggtctgtcagcttgccctcccc

SEQ ID NO: 28598 - DNA, 334 bp, Homo sapiens
  source 1..334: mol_type = other DNA
ccaattagatttaagtagtgaggctgagaagttctctttgtgaaccaaaaatatgcctttaaagaccttgtcaacacttaacctttaaagatatcgtcttttctggagaaaaggtagtaactggtagatgtttgataaatttttttcaagtaaataaaggagttgctaattcactcgtatgagtgcttgcctattgatctgaggtcaatcactcaatctaataatgataataataataagtgctaatattaattgagcacttactatgtgccaaatactatgcatcttaacatgaatcattctaatcaacaccactgggctcatggctattggc

SEQ ID NO: 28599 - DNA, 382 bp, Homo sapiens
  source 1..382: mol_type = other DNA
ctataaagaggatatttgctataaaacatggttcaattaaaaatgcaaatagctgcatcaaaatgccgattcataaaatttttagattcccaatttaatttctccctggtaaacagaatattgtgcttctggcttttccagatgttgggataactcacacatggacaccctgtgcatcagtgtgcgtttaattcaaagacagacctcatttgatagcaatattgacatgtcattctaatgaattagaaaaaatgagaaaatgggatgtaaatccccatctggattcatgataggcagtcggctggttgcttctcatctggagaaagcaggcaactgggccacctcttcagagcctcagctcagcggagctgccgtttgctgg

SEQ ID NO: 28600 - DNA, 523 bp, Homo sapiens
  source 1..523: mol_type = other DNA
tcacaagtttttcgaatgatcacgaaatatatttggtttactcaatattgatttgccaaataaaaccacaaattactgtgaagcaatacttccattcattcattcatgtattcaaatatttaagctgctaatatgtaaagacatcagaagccataccgtaattttttaaactatgtaatattgtccttctatgacagcattttttcttttttacagacaggatctcactctgtcacccaggctggagtgcagtggcacaatcatgtcactgttgcctcaacctcccaggcttaaggaactggtacaggcatgtaatcacacctggctgattttttttctggatatgaagaaagttattttttaaagcctaaatatgcaactaaattgaaaagaatcctctatatctaagctttatgaaattagcaaatataattctacattggttggttcatgcagtcttaagcctgagtttcaaaaaccattaataattacccttaaatggccaacaaaaggaaattttcat

SEQ ID NO: 28601 - DNA, 306 bp, Homo sapiens
  source 1..306: mol_type = other DNA
ggagtgcagtggcctgatctcggctcactgcaaccggcaggtgccaccacacctggctaattcacgttggccaggctggtctcgaacggttgggattacaggcgtgagtcacccgaagagtgacttttaagcctgtaatcccagcacagagggaacttactggttccaacagacgggtggacctcccaccagagatctgcacgggaggacccgagcgagggtctcggcttgccaggaagccggggttccccgggaagcgtggagttcacccgcgcactcgaagtgccttgaggagcggtccccggg

SEQ ID NO: 28602 - DNA, 196 bp, Homo sapiens
  source 1..196: mol_type = other DNA
ggctggagtgcagtggcctgatctcggctcactgcaaccggcaggtgccaccacacctggctaattcacgttggccaggctggtctcgaacggttgggattacaggcgtgagtcacccgaagagtgacttttaagcctgtaatcccagcacagagggaacttactggttccaacagacgggtggacctcccaccag

SEQ ID NO: 28603 - DNA, 286 bp, Homo sapiens
  source 1..286: mol_type = other DNA
ataatgaattatttaagacaatatatcaggatttcatgatggagatggaaatagggaatattcctgaggaaatctccccaaaattcggttcagcaaaccgagtttgttgaaaaaatttaggtggctcggggcaggtgcccgagcactacaccttccgtcttgaaagtcgtgaagtattaaactttccgcggatccgagcctgcgagctgtggccgcacgccctgctgggacttgtagtcaacctcctccggtcacgtgggaagtctcacgcgaaaggccctgcgag

SEQ ID NO: 28604 - DNA, 509 bp, Homo sapiens
  source 1..509: mol_type = other DNA
tatttttcattcttttaattgcaagatgaagagttctgaagattgattgctcaacaatgtaaatgtacttaacagtactgaattgtacacttagaaacggttaagatggtaaatcatattaagatggtaaattttgtgtattttaccacaattaaaattttgtaatttcacaattccttaattttatcaactactccagttcttataataagtatcatactatttttttcaatgtgtttgctgaattaggatcctaataaaatgcacaaggggccatgtgttacatccttgcaatttatttgaagaaacaaggttcgggaacgcagccctgcgggcagaggcaacaggtccacatgcctactaggtcagtcacctacaaagcaaagctctttgtaaacagttgtcacaactgacgtcaccaggggcggagcctttggacggaagtgacgcttgcgcggccgcggcggagtcgtcatagaggcggggctgcggcggctgcggtgttcctc

SEQ ID NO: 28605 - DNA, 497 bp, Homo sapiens
  source 1..497: mol_type = other DNA
agttcctgagcagagcagggctcaggtaagcaggcccagggtagttcagccctgctctctccagctccgccagcttggggtggggtcgcgctgggacccctgcaggtatcggcttcggcccgccggcggcctgtgccgccacaggctgcacatttagcctaacagggcggcccggcggcttttgcaggcagaaaacgcccgcggcctccgccccacctcggcccgaccgggccccaggaaaggccagtcggagcggcggcagcctccctaccacgccccgcgggccccaaggctcgccgccccggggctcgcggcccccactcagccggccagccgcgccgccccgcccccgcgcgccccatccgcctccgcggccggccctgggagcgccgggcgagccctcgcgcctgcgcatcgcgccgcggcacgccgcgtgaaacccgcccgccgcgcgtcattggtctcggcgccggagccgttggctcccagacccccca

SEQ ID NO: 28606 - DNA, 543 bp, Homo sapiens
  source 1..543: mol_type = other DNA
tgaacaagttttgtactaaaaaaaatgcctgttttactactaaaataagtgcttcctttaggatcctctgttactgaggtttgtattttcaggccctagcatataaatctgctacatacgagatattcattagagttattccttataaagtctgaacactctggggtcagtgggaccctgtttgtacagacgacataagcagtactgctatggaagaaaggaaacctaatttcccatgccttgtccctttctggaaagggcatggcgtggtgtgggcaccacacctcccttcccaaccagggcggatggccaaaggctccgctcccttgcagggtaggcttggaaaggcacggggcccgccttcctgggcaccggagcctgtgacgggcggagggcgtgcggcgcgctgggttagttacctggcgctgggcggggcccggggtgacatctcaggctgtgattgggccgcgccgcgcctgtctccatgtgccgcgcagctgaggaagcccgggggtggggccggcgcgcgccgggaggaagcgg

SEQ ID NO: 28607 - DNA, 624 bp, Homo sapiens
  source 1..624: mol_type = other DNA
aggatcctctgttactgaggtttgtattttcaggccctagcatataaatctgctacatacgagatattcattagagttattccttataaagtctgaacactctggggtcagtgggaccctgtttgtacagacgacataagcagtactgctatggaagaaaggaaacctaatttcccatgccttgtccctttctggaaagggcatggcgtggtgtgggcaccacacctcccttcccaaccagggcggatggccaaaggctccgctcccttgcagggtaggcttggaaaggcacggggcccgccttcctgggcaccggagcctgtgacgggcggagggcgtgcggcgcgctgggttagttacctggcgctgggcggggcccggggtgacatctcaggctgtgattgggccgcgccgcgcctgtctccatgtgccgcgcagctgaggaagcccgggggtggggccggcgcgcgccgggaggaagcggccgcgcggcagctgcggggcgtgggtggtggcggcggcggtggtggcggcggcggcggcggcggcagctgaggccgaggaggcggtggctgtggcggacgcagcagcaccccagctagggacagggctccgccgcgcccc

SEQ ID NO: 28608 - DNA, 370 bp, Homo sapiens
  source 1..370: mol_type = other DNA
tttttagaaattatacctttcagttaactgaaggggaaaactttcccttcttctgtaaatctgatggagaactttaaatgcccaaaacatagagcccggggatctccaaggagcacctgaacgcgcccagcacggcgaggccaccagtgactcccagcggccgcacagggcgctgcgcccccctcgccccggcctcccccgccctgcgtccgccccgtcacccccgcgcggcctcctgcgcccgggctggaggcagattcccgaaacctcctccccgcccagccagggagagagatcccgggcgcaatcgctccccggagcggccgaggggcgcgcggggagaggcctgcgccggggccatttatatagg

SEQ ID NO: 28609 - DNA, 329 bp, Homo sapiens
  source 1..329: mol_type = other DNA
aaaaaaaaaacatatactatatctataatgggctttaatctttatttgagaggaaaaatgatacatttcctcctctctgggccaagaaaagatgtatagctttactttactcagactgtgtctccttcccactatatgccactagatgatgtcacatagcctttattacaatagcaaaattctatgccaggtactgttctaagtgctttgcatacattaaggggatacttggcttgcctaaggccataggagggggtgctggagactggaaatatcttgcccgcctggctcagggcaacaggagaagggttgcgcatgcgcgccagcct

SEQ ID NO: 28610 - DNA, 309 bp, Homo sapiens
  source 1..309: mol_type = other DNA
tactcagactgtgtctccttcccactatatgccactagatgatgtcacatagcctttattacaatagcaaaattctatgccaggtactgttctaagtgctttgcatacattaaggggatacttggcttgcctaaggccataggagggggtgctggagactggaaatatcttgcccgcctggctcagggcaacaggagaagggttgcgcatgcgcgccagcctcctgcgcagccgcagaccgccctcacccaaggactgggagagcacccgcggattggccgatcaacggtgacgcctgtcagtggccag

SEQ ID NO: 28611 - DNA, 351 bp, Homo sapiens
  source 1..351: mol_type = other DNA
tgatgtcacatagcctttattacaatagcaaaattctatgccaggtactgttctaagtgctttgcatacattaaggggatacttggcttgcctaaggccataggagggggtgctggagactggaaatatcttgcccgcctggctcagggcaacaggagaagggttgcgcatgcgcgccagcctcctgcgcagccgcagaccgccctcacccaaggactgggagagcacccgcggattggccgatcaacggtgacgcctgtcagtggccagcccccccccccccaaccgcgagtgtgggaattcggcgtcgcggggcagggcatcactggtctcgcgtgcgcgtgaccaggc

SEQ ID NO: 28612 - DNA, 452 bp, Homo sapiens
  source 1..452: mol_type = other DNA
ctaattataaactgtgttataaaactcagatttgataagacaagaacaactagattcattttattctctgctctgattaaataatttcatcctgttttgattaatagaaaaaaatctttacatctttggagaatcattaaaccaatttggttgcttggtttattgttttcagttttaaaatgatcaatagtacaactgacacctactacttatttactggtcagcaatcatacagtcaccgtccagttctttgcccagtatctggcaaacactaggcgcttaataaaggttagattgatacatgaatcacctcttggatgaaattacattacgtaggtggacatcctggggtctggaatggtccccagcccgccgggaggcagtagggtcccagctcctccggccctcccccggcgccgcccacggccacgccctccccgtgggcgagatca

SEQ ID NO: 28613 - DNA, 344 bp, Homo sapiens
  source 1..344: mol_type = other DNA
catatgtggtacatatacaccattcacttgtaagcaggagcttaaagatccgtttcggatttgttcccaaagccggtatcggatatgaggacgaggtgtgcgagggcccggcccccttgccgcgtggtatcgcctccctcccggctctccccgagtgcggcaaaggaagggctgcctttgagagtccaagatttagaaagtctctctctatctctacttctgtatctatatctacatatattcacacacacatatatagtacaaatatatatatacatacatatgtatatttttgtaaaagggactctttaagaaagtgagagggcgaggccctttgaccccca

SEQ ID NO: 28614 - DNA, 473 bp, Homo sapiens
  source 1..473: mol_type = other DNA
gctttggaaagatagcaatggtttgtttttggctaacatagcacattgtattatttttcaaacaaaagtttgaaatcagcttatacctaacctgagaacgttgcccggaaagggagcgtgcagaagggaccccaaaacgcactctcggggatgctcctgagtcagtaagcccgttagctcaaccccgggtttagaggttcctcaagctgctgtaaccagctgcttctccctgctcctcgaagttcccgggatggaacttgacgtggaacccggggtcccatcgaggggctccccacggcctcggggctttcccgggctcacagtgtctcatggtccgccactgcctgcggtggcgctcggcttgaccccggctcgggccccgcacgcggcggcggtcaaagggcgtgctcgcggcaaccgcagggcacgcgggccggccgcgcggggggcggggcggcagtggcggttgcggg

SEQ ID NO: 28615 - DNA, 377 bp, Homo sapiens
  source 1..377: mol_type = other DNA
tgaaataaagggacatttcatccaagatatgtagtttgccatcaccagaactaaaacgttttagtttttatgccttaaaaaaaaagattaatcagttatattcatataaaattgcagctaaatccaatatggcataatttttttcttcagtatgaatactggtatttaaaagaccattcttgacatccaagataagtatccactcacatcattattatttttttagtgcagtgacgtgatcttggctcactgcaataagcagtctgcctgcctcagcctcccaaagtagctgggattacaggtgcggtctcgagttattactcagttttgactgccacaaagaatagtgagaccaaatgttttttttaaaaaatttt

SEQ ID NO: 28616 - DNA, 451 bp, Homo sapiens
  source 1..451: mol_type = other DNA
gtgggtcgttgctgctgctgctgctgctactgctgcaacagctctttgcacgcgcccagctgctgtgtaaggaatcctcaggtgcatatgtgcgtgtgtgtgtgcacacgcagcggcccccaccccagcccccggcacgggtccctccggagggagggcagggtagctgcgctgcaggcaggattccctcggcggattccgcggcgtcgactccaggctcgggccccgcccctctcagcctctccagcccaggttgctagggcttggcggggcaaccaaacctggcgtgccaggaggcgcggcgcgcgcgtgagcgcgcaggcgagctcttcggagactcgagcacgagcggcgcgagcccgaaccccaggaagcgcttcctcctcattggctcctaccagaagctttcccattggtccgaacgggccggctggggcggggcagttagcaa

SEQ ID NO: 28617 - DNA, 274 bp, Homo sapiens
  source 1..274: mol_type = other DNA
agagatattaataacttgccctgaggtcacaatgtaacaagtgatttggcacccagtctgggttggcagtctgtgttgttaaaagtaacacagcaatgcacagctttgtgtcatacaattcgattgtatcacctgaggtcaggaggccgagatggcgccattgcactccagcctgggtgagttgatgctagtatcttccatgagacttgtgggttaacttggggctcagcctggattaagatgcttaatgaggccagggctcaacttaatcccc

SEQ ID NO: 28618 - DNA, 351 bp, Homo sapiens
  source 1..351: mol_type = other DNA
ttgcaatttcacatttatgattactactagcctataagctttaggagggaagttttgctaactggtatatccccagacataatagatgctcaacaaatatttatttaatgaatatatgaatgaaacaaaatgctctgaaaatgttttccaaaggcttctccgtgaactgaaaagaaagccctggatattttctaggacacagagtcttactctgtcacccaggctggagtgcagtggcactgtcaggctggtccatcgtgcctggcccaggccttccaagaaacaaacttttctttgtttaccatgttcatgaacacaaaaatagttgaaagctggaatctgcctttcaat

SEQ ID NO: 28619 - DNA, 465 bp, Homo sapiens
  source 1..465: mol_type = other DNA
gctgcagtgagctgtgatcacaccactgcactcccttcctaaatttggagagtacagtggtgcgatctcagctcactgcactcagcctccgagcaggctggtctggctgcctccttttttttaaaacaaatgttcccaacttattcgaaatactgtcaaagaactcactttgaatttcagcatagctgttaaatatgttgtttttagtcaacttccaatttgtgtttttaaaagcctagataggttgaattactttgagctgaaaaccaaaacagttaatatatttaaattagaaaatcgtacactctcatatttcgatttttttatacagagctggatgtgacctagacaagagaagcagcctatagctgctctgtagctgctgctgtgttttggaaaataagccaggattagattatgtctgaaaatgaatcctgctgagcagcccctcagctaccatgtggt

SEQ ID NO: 28620 - DNA, 470 bp, Homo sapiens
  source 1..470: mol_type = other DNA
tatgtgggccagattttggtggacacccgaggaagcggcgcccaagtggctaggggcggggtcacaggcgccagaggtgtcgctggggcacctctccggactccagttccgctaggcggcggacggggccagactacaatcttggccctcagaggggtgcccaggcggccgcggtaggcggccctctttctccggcctcgagtgggactggcacccgtctcggggggccgaagccgggttgtcccccccgaggccgcgactctgagggttccgctctgcggcggaggtgggtcgttccagggcgcggggcggggccgcccccttacctgtgcccctcccactccgcggcaggggcgggggcgagtccggagggcgggtccaaggcgcccaggtggccgcggcagaagggcctgtttagagactcagggaggcaacctggttcccgcccgctcaggccgcgacttggaggg

SEQ ID NO: 28621 - DNA, 332 bp, Homo sapiens
  source 1..332: mol_type = other DNA
gccatagatttatgtcaggactgatttcatttactcatgcgagcaacattaattgagctccaatacattccaattaggaaaattgtggccaagtgacaacgaaattagctatgatttattaagtatttttctactagccaggcttgtgctaaatgcttatctccattttacagatgagaacacttaagttcaaacagacagaactgacatttgaactcaaaatgaatctaagttatgtgggccagattttggtggacacccgaggaagcggcgcccaagtggctaggggcggggtcacaggcgccagaggtgtcgctggggcacctctccgg

SEQ ID NO: 28622 - DNA, 433 bp, Homo sapiens
  source 1..433: mol_type = other DNA
ctccattttacagatgagaacacttaagttcaaacagacagaactgacatttgaactcaaaatgaatctaagttatgtgggccagattttggtggacacccgaggaagcggcgcccaagtggctaggggcggggtcacaggcgccagaggtgtcgctggggcacctctccggactccagttccgctaggcggcggacggggccagactacaatcttggccctcagaggggtgcccaggcggccgcggtaggcggccctctttctccggcctcgagtgggactggcacccgtctcggggggccgaagccgggttgtcccccccgaggccgcgactctgagggttccgctctgcggcggaggtgggtcgttccagggcgcggggcggggccgcccccttacctgtgcccctcccactccgcggcaggggcggggg

SEQ ID NO: 28623 - DNA, 520 bp, Homo sapiens
  source 1..520: mol_type = other DNA
gcagagtcagccaggatatgccttaaagatctgcacttgataaccatcgcgtctccagggctgtgaatgcaattcagaatccagaattttgttctagctttaaaacgacattttaaaaattcgtattgtagaactgagcctccattttcccatctgtaaaatagggtactttgacaaattggcagagcgcccgagatcccggtttctgggaacccggtgtatttccagtccttcaccaggaaaaccatcgaactgaatcctttactgggatctgacatctgatctccggagccctcggggctcccacccattacagcgtgcgacactggggtccgttggggtccccaaggaggagctcgctgggctggacgccgggcatctgagggtcccgcagtgcctggagcccaggagcgctgcggggcccccggctgcggtggggtgggcggccgagctcgccgcccccgcttctccccggcccctgccccgagctcccagcccggcttcggccggccgcgctgcc

SEQ ID NO: 28624 - DNA, 554 bp, Homo sapiens
  source 1..554: mol_type = other DNA
aattcgtattgtagaactgagcctccattttcccatctgtaaaatagggtactttgacaaattggcagagcgcccgagatcccggtttctgggaacccggtgtatttccagtccttcaccaggaaaaccatcgaactgaatcctttactgggatctgacatctgatctccggagccctcggggctcccacccattacagcgtgcgacactggggtccgttggggtccccaaggaggagctcgctgggctggacgccgggcatctgagggtcccgcagtgcctggagcccaggagcgctgcggggcccccggctgcggtggggtgggcggccgagctcgccgcccccgcttctccccggcccctgccccgagctcccagcccggcttcggccggccgcgctgcccgctccccctccgcgcccagcctcgccgccgccgagcgcccgacgcgccacgccgcgctgggcagctggagagctggcggcggagcgggccgggagcggcgggggcggcgccgaggccgcgggcggggggaggagggccgcagccccgggg

SEQ ID NO: 28625 - DNA, 470 bp, Homo sapiens
  source 1..470: mol_type = other DNA
aagttatatgtaagttaaaaatacgtgttaagttcattcaaacggaaccaatttaacccgttggagtaataccgggtgtgtttatttaataccctcatcaaaacttttaatttatgtacaatcagttaaaagtctctctgaaaagactgtccattcatttattcagtttgtttgcaaaacgcagagtcagccaggatatgccttaaagatctgcacttgataaccatcgcgtctccagggctgtgaatgcaattcagaatccagaattttgttctagctttaaaacgacattttaaaaattcgtattgtagaactgagcctccattttcccatctgtaaaatagggtactttgacaaattggcagagcgcccgagatcccggtttctgggaacccggtgtatttccagtccttcaccaggaaaaccatcgaactgaatcctttactgggatctgacatctgatctccgga

SEQ ID NO: 28626 - DNA, 479 bp, Homo sapiens
  source 1..479: mol_type = other DNA
gcgtcacttcaaattcttgaaatcactgaaatttggaggtcagttgttacaaaatgtggagataactagagaaaaaagatttttcccattgtcctctcgacatatattgggaaacaaattttttgatccgcgttcaagtaggtccaactgctacgtgatcttttaaagtggcagaccatttacagaaaccagatgttctgtcttttggctctgagttcatcatctagtgtactgaacgagatgtctgcagagctgcagcaccggcgggcgctcggtaggacggggcctgcacaacctccggaaggctcctttcccgcggcgccctggaggcgggggccccaccttcccacgcagccgcctcctcacccgcccgcggcgtggcgtcggaggcagcctcaggcctttagcgggggcggggcaccccctggacgccgttctggttggcccgcggcccggcgcagcgcatgtcacgccgcggt

SEQ ID NO: 28627 - DNA, 414 bp, Homo sapiens
  source 1..414: mol_type = other DNA
ctttacatctctgaaaagtatcaattcagatctcactaattcaggaggttctgataatttggtcggtaacactaacatatgtaaataaatgatttgagtaacattcgaaaaacctgtttgctttaggatagaaatatctaaatatacgactagaagtaaatagtagaaaatcattcctatctagttattaacttagtcccttggaatctctccttgggaaaaaataaaatcctgctctgactatgtcagtatttgaattactgtatgaacctgaaattaacaaaaatggactttcaagtataattcatgcttcactgagatttggactttattaaattttactttattacttatatgtaataaaaaatcaaggtaagccccttttactgcagaccttttcacttgattagaata

SEQ ID NO: 28628 - DNA, 578 bp, Homo sapiens
  source 1..578: mol_type = other DNA
tgttaacattttagcgcccactcaagggtcggccgtcagccctcatctcagcggattcctgggaacgtcagagctccccgaaccgcacctggcccaggcactggggcggggcttaggcgggtcccagcgaggcgatgcgtcccctcggccccgctgcgcctgcgttcccacgccccaccgaagggacgccggatgccccagggccacctgccatcaccctggtcaggcgtttggccccgggcctgccctggtctccatcctctcctccggtctcgaggagtctcgcggcacttcccggggcgtcagcccagccgctgcgggtgggtggcagccgcgcggagaggggtgcctctggcgcgggcggtgaggagggcgcccaagcccctcagccgcagggacgcccccggcgcctgccccgacgcggccccggccccggccccgcccctctccggccccgcccccgcccggcggccgcgcgtccccggcaggcggagctgcaggagcctcgcggcagcgctgaggaggaggggagagcgggcggcgcggccgcggctgccgggcgctgggctgggcggcgc

SEQ ID NO: 28629 - DNA, 637 bp, Homo sapiens
  source 1..637: mol_type = other DNA
tgatttttattaaaaagttatatttccattttatcgttgtataatagtatcccataggattttttaaaagcaacatttcttggttttcacccttccaaatacaaaagtaatgaattcttttttggctctgttgtatcttaagaaaaaacataattttgttatattttacttaagcatgaaagtcctgctgaaattacttagcatttctgatctaagaaatgttaatgtatataggaataggtaatcatgatttgaccagatctttctgattgatgagtctatctgatgattagtgaaccagctattcttaaggaaatacgttgttaccatatttccttagtatacctgaaagttataatacagaattagtgtaattagggccttccttactaaaaatacctttgcaaacaaaagaaaatggtaacacagatactcccatcttgacttagcagtgacactgcaggaattttttttcataaaatattctttatagttattgtcttatataaaaggaatgctcttatgatgaaactttgagtaaattacagtatttcttactgtgtccttagctaaaatcaatgaaactgatacatttggtcctggagatgatgatgaaattcagtttgatgacattgga

SEQ ID NO: 28630 - DNA, 501 bp, Homo sapiens
  source 1..501: mol_type = other DNA
aagtgtacattcagaaaatttgaatatgagttatataagcattgtattaatgttgcatctcaagtaatgattaattcaccatcacagtagttattcaggcagatttattaatcaggttgactaaaagtcccaactctgattttttttaatttggtatgttaatccttctattcccaaactaaaatctgagacagagtctcactctgtcatccaggctggagtgcagtggcactcagtgagtaaagacaaggtccaggctggtcttgaccaaactaaaatctcttaatttcttttctttttttttcttttaaagaagtttatttatttgtttttttgagacggaaggctggagtgcagtagcgcagtcttggctattctccagcctcagcctcccgagtagctgggactacaagggccctcaggtgatccgcccaccttggcccccagtgctgggattacaggctaaaatctcttaatttctaaactaattgattgttactc

SEQ ID NO: 28631 - DNA, 725 bp, Homo sapiens
  source 1..725: mol_type = other DNA
cgcccgcgtcagcctcccgaagtgttgggattacaggcgggagccattacgcctcaggagaagaggaaccaaatgaaaggcctaggtcggcctacggcgcgttgctgtccctctctgggtgaccgcacgctgagggtggggcgtcactaatgtcactggcccaactggcacccacctgggggcctagccagaaattgttcccaaggctgcattgctgagtttgcatgcagacacccagtgagtgtaagcgtgtgcgtgctgagtgagcacgtgtgtgctctgtgttcacacattgagtgaggatgtgtgtgcacggtgtctgagaaactgcaccctacatctacacacgctttgagtgtgtatctgctactgtgagaagatgcatttacgctgtgtgtgtgcatgttgcagaactgtgtgcgtacgcacgccttctgtgtgtgcactgtgtacagcagcgtgtaaggacgcgtgcacgcccgtacgcgctgtgtgaggactgttgtgcacattgcatgcacacgctacaagcgcgcgccgcgtgagaaccggtgcgcctatcgcacgtgcacgccctgcgtgcgctgtgcgtggaagcggtgcgcctatcgcacgtgcacgccttgcgtgcgctgtgcgtggtaaccggtgcgcttatcgcacgtgcacgccctgcgcgcgtgctgcgtgaggacgcgtgcgcatgcggacgcgcgcgggttcgg

SEQ ID NO: 28632 - DNA, 425 bp, Homo sapiens
  source 1..425: mol_type = other DNA
tcgagaccagcctggacctgggcatggtggcacatgcctatcccagctacttgtagtgagccgtgatcgcgccactgcactccagaaaattaaaatatggatcacgtggtcaggagttcaagaccagcgtggcggcacgtgcctgtaatcccggctactccggaggccgaggcaggagaatcgcttgaacccgggcggcagaggttgcagtgagccgagatcgcgccactgcactccagctccaaaaaataaaataaaaataaaaatatacatattttttaaaaactgagctaaccacgaggttaacgagtcagccacttgtgaaaccgggagacgcgcgtttgctacaaagcagcggccacgcctgcgtcataaagcctgggggcgggcccagccggcgacgggaggcggggaaaagcgacgca

SEQ ID NO: 28633 - DNA, 627 bp, Homo sapiens
  source 1..627: mol_type = other DNA
ggagccgagcccccaggaggctcctaggcacgaagcctcccttgcctccgtcgggggagatggggggcaggtgatacgggatgcgcccagagactaggcgcgtccgcacgcacgcacccccggaggtccccgggtccttggctcgggactgcgcccccggttgcccacctccctccccagctgggcggggaccactgtccaaggagcctccgacctccttggacccttggcggtgaaaggctcccagccttctgttgggctcgcccttcctgaaagtaggcgaggcccagcgcagcggccgggggcgtgtcttccactagcccagcccctgggtgcgcgcggcggtggtggcggcggccgagcctcgctcgcgcggcggtcgcggcggggggccgtagtcccggcgacccggtgcccagcggaggcgcgaggctctcgctcagcgcgcgggcgtctctggccaggcgcgcggctttcgggcggtcggcgtcggcgtcgagccctctctggggccgccgccgctgctgctgctgctgccgctgccgctgccgctgccgccgccgccgccgccgccgccgctgccgtggggctcgggcggcgacggagcggggccggccgtggggcggg

SEQ ID NO: 28634 - DNA, 434 bp, Homo sapiens
  source 1..434: mol_type = other DNA
cgcagctgaaggccgagagctctgcgcacggagccgagcccccaggaggctcctaggcacgaagcctcccttgcctccgtcgggggagatggggggcaggtgatacgggatgcgcccagagactaggcgcgtccgcacgcacgcacccccggaggtccccgggtccttggctcgggactgcgcccccggttgcccacctccctccccagctgggcggggaccactgtccaaggagcctccgacctccttggacccttggcggtgaaaggctcccagccttctgttgggctcgcccttcctgaaagtaggcgaggcccagcgcagcggccgggggcgtgtcttccactagcccagcccctgggtgcgcgcggcggtggtggcggcggccgagcctcgctcgcgcggcggtcgcggcggggggccgtagtcccggc

SEQ ID NO: 28635 - DNA, 351 bp, Homo sapiens
  source 1..351: mol_type = other DNA
taacaagaagagctcacttccacagtggatggattttaagtcctgataaaaatagtgagcatgtatcttagtgggcagggctgtaggccctggaacctcttggaccatttttgacctacaaaaagggctcaacttactaggataattatcatcatttggtgactatttgttgagtacttattattaagtaactttaacaaagctaggattcaaaccctgtttaatgtcagtgagaaataaagctaaagatagactttccttatatgagaaaatgcagccagcatcttctggaagattaggaggggagcctgctttccgcacggtcaagcctttcggaggcagccaaacctt

SEQ ID NO: 28636 - DNA, 820 bp, Homo sapiens
  source 1..820: mol_type = other DNA
tgaagaaaatgagttttgaaaaatcatgtctacaatttgtcactcattttaagcccttcggttcttattaatatataagaatatcaaacacaaaatgaaaaataggtactttagaggagttggcccaaaacctgaaacagagccctttaaaatggtacttggggcagaacctgtctcaggatcaccacaaccagcagctggcaggtgacaacccggggaagatccgacagcactagccctcctgcctcatcatcgctgcgcttctggcaggcggagccccgcagtccacaccgcaggcgtacgcgggtctcgggaatcacctccggagcccactcagcagcggggagggagagccaggaaagcccgggctctcgctgtaagccccgcgctcagtggtgtccccctcccctcggtggtggggccgcggatacctcctcagccgcctcagctgtcggagttcaactggtgggcggcccgtcccgccgtggccgccaccgccgggtcccctcagaggtgaccgaccccgggctctggctctgcctcgcgccgccaccgcctccgccgccgcgcacgcgcacttcgcgcgcctctgttcccggacggcccccagagcgggaacgccaggctgcgagctgctggcacctgtctgcctgccagacagaccctgggctccggcctcgtgccggcacgcgcacgcgcacgcgcctcgcgcgcctgccgtcggccctgggggcgggaccgcgcggcagcgagcgggcggggggctcgtggcgcgcgcgccccgcacccgagggctgcggaaggaggcccctcgcccgag

SEQ ID NO: 28637 - DNA, 777 bp, Homo sapiens
  source 1..777: mol_type = other DNA
ttaaaatggtacttggggcagaacctgtctcaggatcaccacaaccagcagctggcaggtgacaacccggggaagatccgacagcactagccctcctgcctcatcatcgctgcgcttctggcaggcggagccccgcagtccacaccgcaggcgtacgcgggtctcgggaatcacctccggagcccactcagcagcggggagggagagccaggaaagcccgggctctcgctgtaagccccgcgctcagtggtgtccccctcccctcggtggtggggccgcggatacctcctcagccgcctcagctgtcggagttcaactggtgggcggcccgtcccgccgtggccgccaccgccgggtcccctcagaggtgaccgaccccgggctctggctctgcctcgcgccgccaccgcctccgccgccgcgcacgcgcacttcgcgcgcctctgttcccggacggcccccagagcgggaacgccaggctgcgagctgctggcacctgtctgcctgccagacagaccctgggctccggcctcgtgccggcacgcgcacgcgcacgcgcctcgcgcgcctgccgtcggccctgggggcgggaccgcgcggcagcgagcgggcggggggctcgtggcgcgcgcgccccgcacccgagggctgcggaaggaggcccctcgcccgagctagtcgtgctcggggcttcactcccgcgcgtgaggcgagcgggcaagttggctgagggcgtgcggcagaggctgcttccctcggcgacgcgacccctcagca

SEQ ID NO: 28638 - DNA, 499 bp, Homo sapiens
  source 1..499: mol_type = other DNA
agaacgtaaaaaaaccccaataaatagttttcttttctcttagagagaattttaaaagaccttggtgatcctaaagtgcaggtaaggttgagaactgctgctctagttcaatatataatcaggtatacattaacgttaaaatgtgtaggtgttcagagttctgatttttaaccatagcaccatctcaaatattataaaaggttgaaaaaagagcctaatttaatcaacatggataaatttcaaaagacacaaagagtacttattgctttctatttacataaagttaaaaataatcagaaaggaaattcctgagagggaaattttctccattttgattagggtacacgtatatatatatatatatatatttatcaaaactcacagaaatggacaattgagctctgtatgtatgatttcattacatgtaaatttacacttcagtaaaaaggataaacaattaaatctggataccactggaagagtccggtgcaccgcaagg

SEQ ID NO: 28639 - DNA, 386 bp, Homo sapiens
  source 1..386: mol_type = other DNA
agttcttaacagagaaaggtctgttcaacagacccttgttgaacacttgtgaagacactgcccagtttttgtaagttcatggatttaaattttgtctaaccattacagcaattcctgtggccgtcaaggctattgccattaatagaggcgccagtgatggaggctgctagacaagcaactccggagtctgcagtttcctaaaaagcagacccttgctaataatggtaataatccgaatgggtttaactgcagcatttacaggggcatcatttgattttcccgactccgccaggggtgggccccccgacggatggcgggagcggccgcgcgagccttggagcagggcgcggccattggtgacgcacgccggggagcacggcgcccac

SEQ ID NO: 28640 - DNA, 427 bp, Homo sapiens
  source 1..427: mol_type = other DNA
agttcatggatttaaattttgtctaaccattacagcaattcctgtggccgtcaaggctattgccattaatagaggcgccagtgatggaggctgctagacaagcaactccggagtctgcagtttcctaaaaagcagacccttgctaataatggtaataatccgaatgggtttaactgcagcatttacaggggcatcatttgattttcccgactccgccaggggtgggccccccgacggatggcgggagcggccgcgcgagccttggagcagggcgcggccattggtgacgcacgccggggagcacggcgcccacctcacacccggcgctccaagttcggggctggaggcgtcccggcttcctccctcccggagcgggaccggccccgcccccgcgccccgggtcgctcccggcggcccctctggcctc

SEQ ID NO: 28641 - DNA, 451 bp, Homo sapiens
  source 1..451: mol_type = other DNA
actgagctcatcagcacctgctgagctcgccatgcgcacaagttttgcattgagataattgctgtgttgtgagttaacgatatctatatctttggataataaaatctatatcatttcaacattgttatcgtttaaatcattatcataatcaaaaatatcaaagaccgagacagggtctctctctctgtcacccacctgagtagctgggaatacaggtgctcaccaacggctaatttttgtgtttttagtacaaacaaggtttcgcgccaggcgattacaggcgtgggccactacgcccggcctgaaaccaattgcctttgaatttatgtaaacaaaaacacacaaggaaaaaatttttcatcatatcttttgtagttgctaataaacttaacacttcttagtaccacaaagaggaagtgctttttctccttcctttaagaaaaagttccag

SEQ ID NO: 28642 - DNA, 470 bp, Homo sapiens
  source 1..470: mol_type = other DNA
gtgttgtgagttaacgatatctatatctttggataataaaatctatatcatttcaacattgttatcgtttaaatcattatcataatcaaaaatatcaaagaccgagacagggtctctctctctgtcacccacctgagtagctgggaatacaggtgctcaccaacggctaatttttgtgtttttagtacaaacaaggtttcgcgccaggcgattacaggcgtgggccactacgcccggcctgaaaccaattgcctttgaatttatgtaaacaaaaacacacaaggaaaaaatttttcatcatatcttttgtagttgctaataaacttaacacttcttagtaccacaaagaggaagtgctttttctccttcctttaagaaaaagttccagttggcacatgctatcatacacaaagttcctgaaataaaatgctccaggatatcctaggaactcttagaaggctttaaaaagg

SEQ ID NO: 28643 - DNA, 584 bp, Homo sapiens
  source 1..584: mol_type = other DNA
tcccaaaccgcgacttgctgtttccaacgtgcaagttcccaagttcagtttgagaaatgcctccccgaggcgcattccgcctcccgttcgacccctggcactgggagactgagtgggatggggaggctgagcgctcagagcgcggagtctgaggacccctcgccgcgccctgtatcccacccccctggctggagagagcgcctcagtgacccagactcccccgctcggtctgcgttgcagtcgttcccgccgccgccgcaggtctatcccggggccgaagccggcgcccgccttctcggggaattctccggagggggagtgcgaggggaaccacggtgactgcctgctagctcacggctggcgcgcacacgcacacgcaagccgtcggcgccccgcgggctcccccgcgccccctgcggctcaacacgctcggagacctgtatctctcctgctctgagataaggttccctccactctcacaccttcgcatgtaggggaggagagggcgaatgctactgactccctggccgcccgcaggggcgcccgcgccagccacgccgcaccaggtcccccagacctgctgg

SEQ ID NO: 28644 - DNA, 693 bp, Homo sapiens
  source 1..693: mol_type = other DNA
gcgctcagagcgcggagtctgaggacccctcgccgcgccctgtatcccacccccctggctggagagagcgcctcagtgacccagactcccccgctcggtctgcgttgcagtcgttcccgccgccgccgcaggtctatcccggggccgaagccggcgcccgccttctcggggaattctccggagggggagtgcgaggggaaccacggtgactgcctgctagctcacggctggcgcgcacacgcacacgcaagccgtcggcgccccgcgggctcccccgcgccccctgcggctcaacacgctcggagacctgtatctctcctgctctgagataaggttccctccactctcacaccttcgcatgtaggggaggagagggcgaatgctactgactccctggccgcccgcaggggcgcccgcgccagccacgccgcaccaggtcccccagacctgctgggaaccgggagccggggagccccggagctcgggagcccgggagcccaggcgacggacagttccatcgactgaccgtcattatcagcacttttattactaaagtgtgcaacagagctggccagccccaatccactctggagcgaccctaaattagagccacagagaaagattctccacggataccttttgagtggacacacacccggaccccgtggtcccgccgaagctgcagccagtgcg

SEQ ID NO: 28645 - DNA, 484 bp, Homo sapiens
  source 1..484: mol_type = other DNA
tgctgggagagttttctggtaacttttcaagtcttcatttaaattaaaaaaaaaaaaagctgtctttgaaacaatattttccaggacttaaaagagctgcaagtaggaaaaaaaattagtaaatgtctattagatcttgaaactttaaatacagtcaataataatgtatatttcaaaatgaataagagtaaatttgaaatgtctctaatgtgatgtaatcatcccacattggatacatatttcaaaaaattcccacgaatgtatacaattatgatttgtcaagtaaatataatttttaaaaacgttaagtgactttttaaaaagcttattagaagtataaaatgcaagccattcacaagcataaggtcaggagacctacgctcccggtcctggtcagccgcgggacgtgcggccggcgcccacgtggcgaggagctggtctcgcgaggccgcgccccggttcgcgcgggcgtcgtgcacgcggt

SEQ ID NO: 28646 - DNA, 515 bp, Homo sapiens
  source 1..515: mol_type = other DNA
caaaaccatcttctagcagatctgcaagaaggaaggtgacaggcaccgaacgcttgtccccggcccggccagctcaggggaacggaatggggcggctgggctctcacaccgctccaccccacgccccgggaggagctctgagccgcagtatgtcactgcagtcggcggcagtggccggaccaggcccctgtacttgaacagtaggaggaggtggttcctcatctcagtcaggctggcaccatgacccaaggaacctcggcgagtgtgcgcatttgaacattggcccggctcggcttttaagcgcaaagaagccccgcctcgggccgtgaggtgggacctctcatccaatgaggccgcggccccggggcgcatcgttccctctcttccgggcgcccgtgtgaacccggaggacaaaagtgggggcagcggggcgcgctgtgggattcgctagcggcgccctctagtggcgtttcgcggagccttggcggaaaccctactgggagccgtcccccagt

SEQ ID NO: 28647 - DNA, 310 bp, Homo sapiens
  source 1..310: mol_type = other DNA
gaaatggagaattagatcgtagggtgaaataatcttaaactctcgcccaagatatcaaacaagcgatactcgtgcctgtcccccgagtagctgggattacaggcgtctgcgaactcctgacctcaggtgattttggaaagttgcccaggagattccaatgtgtaggcagagccgggcctcttctcgacgtcacgccctggcgttgctgcgccggtcctagtgggaagctccgcagaggcggactccagcctcccgccaatgaacgggtagggtccgcccggcacagcgcggccacgccccctggacgccg

SEQ ID NO: 28648 - DNA, 492 bp, Homo sapiens
  source 1..492: mol_type = other DNA
gagttatctcagttgattgttcacaatcagttacacattattttactctgactactgcacttgactagtctaaaaaaagaattataagatgtttttactaaaggattatgaagaatgtacctcatccaaataacctaccttaggaaattctaaaagaatatacgagctcacattcctttggtcataagagcagtgtcatcattggaaaattccattgtgagtttaaaaggcaaatgacgtctataattctaaaacggccaggagaaaactgggggacggctcccagtagggtttccgccaaggctccgcgaaacgccactagagggcgccgctagcgaatcccacagcgcgccccgctgcccccacttttgtcctccgggttcacacgggcgcccggaagagagggaacgatgcgccccggggccgcggcctcattggatgagaggtcccacctcacggcccgaggcggggcttctttgcgcttaaaagccg

SEQ ID NO: 28649 - DNA, 585 bp, Homo sapiens
  source 1..585: mol_type = other DNA
gaaataggaaatacatcctcattatgagacagtgcaacaattgttttggctagaacacaggtttcaaaggcagactaatgggtttggatatcatgttactcttgttaataagataattattgccattatcagttacttctacaagtattaagggacaccgcttgtttcttaacgggaaaaaataaggtcagagccttttccgattaaaggacacagcatattagtttaaatttaaaacctgagaaacctcaaggccgccaaccggcggcttccggctgcgaagctttcgaagccgccggtggccctccaagcggggcgcccagtcgccgctgcaaagacagtttcccagcgccgcggcaacgccaggcgcctccctcctcgcgcctccgccagagccggcgctttcttgccgcctagcaaccgccggcgcaggggcggagcctcctggagggcggggtttgcgttcacccgctgcccgggcgcgacgcgctgcggctcagcgacgcggcttctagaacctgcagtacggccgtcacccgcaccgctgcctgcttgccgggcctccgtagtcacctctctatagtg

SEQ ID NO: 28650 - DNA, 517 bp, Homo sapiens
  source 1..517: mol_type = other DNA
tcaataaaacttttaaatgaatagtacaattctgagatttcattagcactattctgtgattttttatgacaaaatacatataatttactttttaaaaagtagaataatggctttatgctaaagtgcagattttcgaaattaagtcttcatcgtaaaagtcgatttttttccaaaggacggggtccactggcccgtattaaattggagcaaagctccagactttaaattttcaaagtgtttaacacccacccgggggtctcccgcctccgcccggcagccgctcatccccagtagaccagtgaatgaaccgcggggccgggacgcagccggcccagtggcggggccaggcctggctcccgggagggggcggtgacagctgtgactcgactccacgctctcatgtcgctggcagcggaggctccggcagggtcaccccggcctcggccacgcccactatagagaggtgactacggaggcccggcaagcaggcagcggtgcgggtgacggccgtactgca

SEQ ID NO: 28651 - DNA, 501 bp, Homo sapiens
  source 1..501: mol_type = other DNA
ataaatctaactcttttactgaaatatgtcccttgcagcaatgagtcactgtacaaattctaaatgaaataggaaatacatcctcattatgagacagtgcaacaattgttttggctagaacacaggtttcaaaggcagactaatgggtttggatatcatgttactcttgttaataagataattattgccattatcagttacttctacaagtattaagggacaccgcttgtttcttaacgggaaaaaataaggtcagagccttttccgattaaaggacacagcatattagtttaaatttaaaacctgagaaacctcaaggccgccaaccggcggcttccggctgcgaagctttcgaagccgccggtggccctccaagcggggcgcccagtcgccgctgcaaagacagtttcccagcgccgcggcaacgccaggcgcctccctcctcgcgcctccgccagagccggcgctttcttgccgcctagcaaccgccggcgcaggggc

SEQ ID NO: 28652 - DNA, 481 bp, Homo sapiens
  source 1..481: mol_type = other DNA
cgagatcgtgccactgcgctccagcctgtctccgaaaaaaaaaaattttactttgaaataactatagacttatacgaagttgcaaaaatcaaagttgagatcttatatagccatagtatatcaaaaccaggaaactgatattggtaaattactgttaattatactatagacattcataatacaagttgggaaatattccctcctcttcaattttctggaatagtttctgtaaaattggtgctaaaactcatagaattttaaaactataaagacaacagagaccccattttttctctccaggtagccaaaatcaatggtagattgactattcttaacacagtgtacaaagaaggcagtctgttcagaaatagctgaaaagccattttctgtcttcagggtcttctggttttccccagaagcctatcctgaggcaagcattccactctaagtacaataattattctcctggaacttactggtg

SEQ ID NO: 28653 - DNA, 585 bp, Homo sapiens
  source 1..585: mol_type = other DNA
gcataatagctgtctaacaagtttttatggaaataaatttattgcaaacaaaaaaggaaatagctgtttatgataaaatttgtatagaaatgaatcactcaactgcttttcaacacgacgaaaagtgggttaaggtctcaaaattctttaaattttaaaataccgatttatcggtaatcgaggtttttttggatctgcttctttaagaaaaaaaaaaacaaaacacacaaggcccacctcccgggccctagaaatcgctctctggtccgcgcgggggcgcccgccccacctcccgccggggctcagcacgcggccttctcccagccaagagccccgtcataggtgggcgccgaccccgagccgatctcgctttattaaattacagaaatcggtattcaaaaaaaaaaaaaaaaaagggcggggaggacactccctcttctctgtttttcgggacccaggccagcgcgcgcgccgggttgcatcacccgcctcgcacgggccggcggggcgggggtttggtggagccccgacaggcactgtggtgaggccgctgctgcaccggccatcctgcagatgatcaggcgg

SEQ ID NO: 28654 - DNA, 566 bp, Homo sapiens
  source 1..566: mol_type = other DNA
gccaggctggtctcgaattcataatatttatttcctaaataagctaacttgatgactacttacaagtattctaaagtgcataatagctgtctaacaagtttttatggaaataaatttattgcaaacaaaaaaggaaatagctgtttatgataaaatttgtatagaaatgaatcactcaactgcttttcaacacgacgaaaagtgggttaaggtctcaaaattctttaaattttaaaataccgatttatcggtaatcgaggtttttttggatctgcttctttaagaaaaaaaaaaacaaaacacacaaggcccacctcccgggccctagaaatcgctctctggtccgcgcgggggcgcccgccccacctcccgccggggctcagcacgcggccttctcccagccaagagccccgtcataggtgggcgccgaccccgagccgatctcgctttattaaattacagaaatcggtattcaaaaaaaaaaaaaaaaaagggcggggaggacactccctcttctctgtttttcgggacccaggccagcgcgcgcgccgggttgcatcacccgc

SEQ ID NO: 28655 - DNA, 544 bp, Homo sapiens
  source 1..544: mol_type = other DNA
tgcttttgaggggtcaatgggttgaacttagcaaaacttcaaagcagctattacaaatatattccccaggtgagcagatcacctgaggtcaggagttcaagaccagcctctactaaaaaagaaaaattagctgggtttgtcccagctactcgggaggctgaggtgggaggatcaccagacgttgcagtgaaccgagattgtgtgccactgcactctggcctgggtgacagagtggcaccctgtcataaataaataataataatgcactacctaaacccaaagaatcactgtttcttgaagtggtggtttaagtgcaaacagcaagcgaatctcattacttttggtggctgtgtccttaaagtgaacttagaggctctacatccctggtggccagtgcctgctgggaccagaggctgtggccatctggccccccagtcagccccaagtcatcgcccccaggcaatggctgtgcctgacagaatgtaccaggtggaggtttgccaaatgcctagagtccaggaaatgcggttaccctcatgggtgc

SEQ ID NO: 28656 - DNA, 389 bp, Homo sapiens
  source 1..389: mol_type = other DNA
gatcctcccacctccgcctgcaggtataggtgcatgtcaccatgccaggctctcaagttcacttgagtgaccttacatttgatcctttccagtgacctgtcccagagtcagtctagttaggctggagcagcgcggaggatcggattccgggctcctggcctcttcccggtccgcgggcacctcggctacctttcggcagcggagaacccagccagaggcggagctgaaagcccatgagccagggaggggggtctctggcgccgcgcccgcagcggcggccaatcagtggagggcgcgcgcggccgcgtgcccctcgcgctcctcgcctcccctcgcgcgccgcgtacgtgcagcaaccgactccgcccagcgaggcggagcctagggaa

SEQ ID NO: 28657 - DNA, 607 bp, Homo sapiens
  source 1..607: mol_type = other DNA
tcctctctattaaggaatgtggaaaattcatgatttatgaaacgaggaaaatacacagaaaattcctgttctttgcaacgtgcgaaacgtttcaaaatgcaaaaatcagtttggctctgactgcttatttttaaaaagtagacggcctggtagggctctagggataacccttttttatttcaaagggggttgctaaatttatcttcctccccagccacggggatgaagaaaacacacaactcgagctggagcctcggccaggaccggcgcgagaggcggtaggtctccagggaggcccccggggggcggccgcggcccacgggacatggtggggggcggccgggccgcctgcctctccgcggggtcggccgaccgcggccccgcgcgggctttacggccgaggcggcggcggcagcggcgcgtgtgtggcggcggcgggcgggggcgctgtcacggagactccggccgccggagaccccgccgcagcgaggccactgggctccccggtcgcggggcgggagcggcgccgacacggggtgccaggaggacccaccgggcggaggagggggcctgtcgacggcgggcccgtgccggggagctgggcccc

SEQ ID NO: 28658 - DNA, 263 bp, Homo sapiens
  source 1..263: mol_type = other DNA
ggcaggctgttaaagacaatctacctccttcaaagttccccctagggcagccccaggggagggctccagggctacaccaggcccatagtgaatgcccggaggggccctccactggcatttggcctgggtggcgcagcccgggtcccgtgcccagacggagggctagccaatggggcccggccgcttcccggcggagtggtctttacttcccctagggaagaacattctctgcctgggaggagactctctgagggtgtagagct

SEQ ID NO: 28659 - DNA, 211 bp, Homo sapiens
  source 1..211: mol_type = other DNA
aatgtagacattggcaggctgttaaagacaatctacctccttcaaagttccccctagggcagccccaggggagggctccagggctacaccaggcccatagtgaatgcccggaggggccctccactggcatttggcctgggtggcgcagcccgggtcccgtgcccagacggagggctagccaatggggcccggccgcttcccggcggagtgg

SEQ ID NO: 28660 - DNA, 351 bp, Homo sapiens
  source 1..351: mol_type = other DNA
tgtggccacgctcccccagcacttaaaatagaggagaaagcattctaagagttttcctgctagtttaggtcagctgccttccctctaaactgaggtaacagtctgcagccattaaaaagaatgttgttcttagaaagcctgaagcacatgcatatttaaagagttcttttaacacagagttatctgagagaaaattaccttaacattcattatcaatggtataaaatgtttattagaatcaattaaagtatgtttgagagatttattttttccggtcactgtttgtcttgaaaaaaagagagaaaatgtttgtcattgtgcacaatgacatagttaattcaccaacggaat

SEQ ID NO: 28661 - DNA, 397 bp, Homo sapiens
  source 1..397: mol_type = other DNA
cttaaaatagaggagaaagcattctaagagttttcctgctagtttaggtcagctgccttccctctaaactgaggtaacagtctgcagccattaaaaagaatgttgttcttagaaagcctgaagcacatgcatatttaaagagttcttttaacacagagttatctgagagaaaattaccttaacattcattatcaatggtataaaatgtttattagaatcaattaaagtatgtttgagagatttattttttccggtcactgtttgtcttgaaaaaaagagagaaaatgtttgtcattgtgcacaatgacatagttaattcaccaacggaatgagctcctccgagcttatctttgagcgctgggcacagagagcctgcttgacctttggtcaagtgagc

SEQ ID NO: 28662 - DNA, 435 bp, Homo sapiens
  source 1..435: mol_type = other DNA
acaagtattgatcaaccatgctagaagacagattgaattatctttatatcctctttggagaaaatattacaaaattgttgtcacatgacaggcattatttaataaaaatgttatacctttttggaaagagataacatgttgtatcatacacaaaaattgaataccctttttgtttttcataacattgaaatttctttttcaacatcaggaggcatatgagatcagatggccatttattggtatatttccgggaaaatgggctctgagaaccagagcgccctttctcccacagcatgcgtgcgcttgcgcagtctccaggcggcccaaacgcgcgtccgcgggaaggccgggggcggagcgcggcgcggcgcggcacgtcagtggccttccggccggaagtccgcagcctcccgagccgctgatttcaggctggcg

SEQ ID NO: 28663 - DNA, 400 bp, Homo sapiens
  source 1..400: mol_type = other DNA
cttagatttggctgcagccgaatttgggttccttccaccctggagaggtcagggatccctgagggttctgctccctggaaggtgaacagcagaggaggcccccagactcgtcccccttggggcggtcaccctggccccccgacgcccgtccggcctagagaggacggcaattgagcgtgagcctcgaggcctcgcctccagggagcgaggtcctcgggttggtggaaggggcgcacgccacccagatggcattcacaggcctggcatccccccacccccgcctgcccctctggaatccagtccgggctttgcgccgcgcccacaggccgacgcagcccggcctctggcgagagccaatcagagggcgcctctcagcacgtggaggagagagactccagag

SEQ ID NO: 28664 - DNA, 294 bp, Homo sapiens
  source 1..294: mol_type = other DNA
cagttccatggggtaatattgccacacctttaaattcgtattattttaatataatataaagaatggactaaattaggataatggtagaaattcattcatgaaggtgttgaatacagacactcactttctccttatgaattttacaggatctagtatgtgaggaccctgagtgaggactgaggggcttgcacatgctcagggaatgagagcctctatctccggttgactgattcagctcaacagacctgaaagaactttacgtgagttccctggaatctgctgcacccacagaac

SEQ ID NO: 28665 - DNA, 405 bp, Homo sapiens
  source 1..405: mol_type = other DNA
gcatcaagccaccttaagggtcttagaaccctccagcctctgcggtgacagcatgctggcagccctcacagccctcgctggcggcctgggctcccactttggtggcacttgaggagagcccaccgctgcactgtgggagcccctttctgggctggccaaggccggagccggctctctcagcttaccagggctgcacgtggtgcttgcgggacagcgcaagttcccggtgggcatgagcttggcgggcccggcactcagagcagctggcaggccccccggcccaggcagtgaggggcttagcacctgggccagtagttgctgtgctcccgtggggcagggctcaggacctgcagcccgccattccgccggcctgacgagcgccgccccccgctctgcggtgcccag

SEQ ID NO: 28666 - DNA, 428 bp, Homo sapiens
  source 1..428: mol_type = other DNA
tgtacatcaaagtttgagaatcacggaatcacatgtgagtgttatactatcccaatgtaatggtcaaggaccttaaattgagcaaataacctaatgtatttaccgtggatgggaggaggatcctcttcaataccctcccctccgggactcacagtttgcacagaggcacttttgcaaaactgccctttagaaatcttgtaatccatcttaaagtgatacggatcactctctgtatctttctgcttcctagagaaatggaaccataattccaagactgtataagcatccaaatttgccagtctgcttttgcctggaagaacagattttgaagcctcccagggtcctttccaaaagttctgagaactcaaacggattggctagtactaaaatatccattgggtggcagtaatactatcctctttatgact

SEQ ID NO: 28667 - DNA, 438 bp, Homo sapiens
  source 1..438: mol_type = other DNA
ggactcacagtttgcacagaggcacttttgcaaaactgccctttagaaatcttgtaatccatcttaaagtgatacggatcactctctgtatctttctgcttcctagagaaatggaaccataattccaagactgtataagcatccaaatttgccagtctgcttttgcctggaagaacagattttgaagcctcccagggtcctttccaaaagttctgagaactcaaacggattggctagtactaaaatatccattgggtggcagtaatactatcctctttatgacttgcagcaaaccagagaatgcattcaatcaaatgaaccgatcttgtagaaacactggaatcattttttcgctcaggattagcatcattcaaggcaaacgcaaagcccccccccgactcttttttgaaaaatcatttttgggggctgtactgtaca

SEQ ID NO: 28668 - DNA, 547 bp, Homo sapiens
  source 1..547: mol_type = other DNA
atatgtccagcactgagcaatgtgcttaacactttctgattagtttatttaattaatttatttatttttgagacggagtctcactctccaggctggagtgcagaggtgtgatctcggctcactgcaattcttgtgcctcagcctcctgagtagctgggactacaggtttcaccatggtgatcaggctggtcttctgggattacaggcatttttttttttagtttaatgtattttaatagcaaacttacaggtatagtaatggatggaatctactgtatgattacaaacacttattgcgtcaataagaaatgtacttgttttgaaaaaatccaaatgccggcattgtccagaaaaatttaacgggtttatttataattattttaaagttgaaccgctgaaacttgttcactgaaacattttaacttgcattaatgctttatgactccacatttatattaaaaattcacacacaaatgaagtcccctatttttccttaggtacattttgaccccatggaaaaaaattaatcagtaacaggaagaagaga

SEQ ID NO: 28669 - DNA, 352 bp, Homo sapiens
  source 1..352: mol_type = other DNA
taatctagtaacaggatctacatgattctggcagctgacttcatgattaatgctgaatgttcattaattttatacagttcataggggcagaatgctgtcacccttggggagaccttggactagtggaaatggccctaggtcaaagatgaggatcctaagtgttacgagggggctctcccccttgcaaagggggccaaacagagcccctcgccattgttagccctgccgctgctgtcaggcctgtgaggcccaggcaggggtggcctgtttggccagcacgcatattcgtcacgtccggtagcgtccagccgtcagccctcagacgccacgggctgccggatgtgagtcatcc

SEQ ID NO: 28670 - DNA, 409 bp, Homo sapiens
  source 1..409: mol_type = other DNA
gggaattcctgaattctttggggaacccctcccccacatcaattcctgtggggtccactggagtttttggccggcccagagttgcagccaggcgtggcactacagccatgactagtgcgaaatgcatgaataactcattgatttatctctttgttgtattttccatgatgtttcttaaaatagaaagtttatttagattcagaatataaatttagaaatggcatgcatcacacattttagtgataataattttgtttttgaaatacaaatagaaaatcctgaaataatttttgtaggttatccttagaaatttaaaataactccaaaagttgctttcataaatttaaaagttacatatgggccaaggtcaatgacagtgtctccattgtcttccctccagttgcaactg

SEQ ID NO: 28671 - DNA, 257 bp, Homo sapiens
  source 1..257: mol_type = other DNA
ccaatatgaagatcatcttctcactcactctctgctgtcagccctaggaagccttggcggagatggcaggctgaattctgcctggaaagtcttgaggcatcagacagagctatctacctaaggtcagagccctgccgctgctgtcaggcctgtgaggcccaggcaggggtggcctgtgtggcacgctcagcgacgctccacccctgccgtcagcccggaggccacgggctgccggatgtggctcatcctgacttccg

SEQ ID NO: 28672 - DNA, 259 bp, Homo sapiens
  source 1..259: mol_type = other DNA
cggcacacgcaggccccagtcagccttggtgggatgtggcccactatgactgtgaacttaggctgtccctgggagtcccaggccagagctggcaggctcaagtactccctggcttctgccaggtaccttggcgttcatcctaagccagggttagaactggattcctaggtaattccaggagtcaaagtgaaagaaacacggaattccttcctgattttcatccttgacaattgtagccagatgggaaaagtttcacttc

SEQ ID NO: 28673 - DNA, 359 bp, Homo sapiens
  source 1..359: mol_type = other DNA
gatactattacctgggttgaaaacaattctcactgtaacaatattatcccctcgtaattattatattcctaactgagcgcttatgatagcatatttagagcagtgcttttctgtatttttcaaggtctcagaaaatgagacctccctatacaaatataagtcacacaaactgtgataatttaatgaaagtttacaaagagcatagaagtagatgtttcctcttttcccctgccctcccgatccggtcttcctgagacagggaaagggcgaacacaccggagcgcagcaccgcgccccccgcctccgcgcccttgcccagaccgaggcggccgacgcgcctgcgtgcgcgctaggtagtc

SEQ ID NO: 28674 - DNA, 291 bp, Homo sapiens
  source 1..291: mol_type = other DNA
catgttctcacttgcaagtgggagctagatactattacctgggttgaaaacaattctcactgtaacaatattatcccctcgtaattattatattcctaactgagcgcttatgatagcatatttagagcagtgcttttctgtatttttcaaggtctcagaaaatgagacctccctatacaaatataagtcacacaaactgtgataatttaatgaaagtttacaaagagcatagaagtagatgtttcctcttttcccctgccctcccgatccggtcttcctgagacagggaaa

SEQ ID NO: 28675 - DNA, 544 bp, Homo sapiens
  source 1..544: mol_type = other DNA
aagcaatgctgcaacaaatatcttttcacataagtctttgtgtacaagtgtaaacatatagcttggacaaatttataaaaaatacaattgttggtattgggaaattgccctctaaatatgagggaaaactttttcgccctgtcgcccaggctggagtgcagtggcgcgatctcggccagcctcccgagtagctgggaccacaggcgcccgccaccgcgccccgagaaaatttttttcatttacatttttaaaaattataagtaccattgagaaataatacttcttaaaaattatagattagtaacgaaacagaatttcctaaagtcatatgtgactttggctttcttccagataatgtacttttctagaaaggaaatttaattctgttgcggttcttacaaaatgtgtaaccataaactattttaataagagacagtttcgtagataggtttcatttttcgaaaaaggggaagaaacaccattctgtggcttgatgtttgaacaaaaacaactctttttccatgggaccaattataaaaagaat

SEQ ID NO: 28676 - DNA, 549 bp, Homo sapiens
  source 1..549: mol_type = other DNA
cctacataggattttaagtatgcatacgttctcatacttggccaatatcttatttatggatataattttttctagtcatttattttctcaagcaatgctgcaacaaatatcttttcacataagtctttgtgtacaagtgtaaacatatagcttggacaaatttataaaaaatacaattgttggtattgggaaattgccctctaaatatgagggaaaactttttcgccctgtcgcccaggctggagtgcagtggcgcgatctcggccagcctcccgagtagctgggaccacaggcgcccgccaccgcgccccgagaaaatttttttcatttacatttttaaaaattataagtaccattgagaaataatacttcttaaaaattatagattagtaacgaaacagaatttcctaaagtcatatgtgactttggctttcttccagataatgtacttttctagaaaggaaatttaattctgttgcggttcttacaaaatgtgtaaccataaactattttaataagagacagtttcgtagataggtttcatttttc

SEQ ID NO: 28677 - DNA, 461 bp, Homo sapiens
  source 1..461: mol_type = other DNA
agtgtgggtcttggttccaagtttgaaagcccttagaacacaggatccagcaaggtcaagggagagtcccttttctgtcccctgccatccaaagcagttaatggtcaggacggagtggtgccgggcgccttctgcccgaaagaacttccgcgtttcttgtccctgaaaagcttgcaacggtgaaggggccgggtggtccacacagcgaagtggaagtgcgctcttttcgccggccaggagcgctgcctgccaaagggcagtactcgtctccgccccatgccatgcagctggatggctctgctgtccgctcgccgggcccccacgtgacctactgcgcgggccgccgcctccaccgcgcccaggccccgcccccgtgggccagcccagcccccaccccccctgacacgcccctggagccttgggggtacgcggtggggggcgggggcgcgggtaaaggggcc

SEQ ID NO: 28678 - DNA, 314 bp, Homo sapiens
  source 1..314: mol_type = other DNA
catagaacttactgcaagctcttgattaataatgtgaaccggctcctgagggatgaccaagccttaagggacgcctctctaggtcctcgggcatgcgtcattacccgcgcacgcaggcgcagtaacttcttcggtaactggtactgcccatttccgatatgggaagcgtttgctcagggggaagcctcgcgagatcgccctgggcagtacccggcggcgccatctttgtgcctggcgagcgacggcgcccgacggaagccctgaagccagagcttgcttgccaagctctcgctcagaccgggaggaaagggggc

SEQ ID NO: 28679 - DNA, 527 bp, Homo sapiens
  source 1..527: mol_type = other DNA
tgaaaatatcactaacagtttatcgtaagatgctctttggatgctaatctaaggtgttatgtgaagtttgcagaaaattcttgtgtcttttgagtatttccaagcttgaaataattgtgtgtagttaatctatcatcatactgcaaactctaaaattagaattatttgaactgttcaggccctgtaacttttccaataaaatattctattagaaacaagttccttctagatcttcctaaaagaacactggtggtattgtcttaatttagagagtccataccagtgattctcaaacattagtatgctcagagggttcaataggtctgggccgggcccagggtaactgctactttaatcttcaactgaggaggaagagaattatgtatataatttttttcttttattttttaaaaagaaaactccaagcccaccccagtctctgggtgtccgggttcccaggtccctaggtgggggcggagcccgacacggccccgccccgtctgcccgcagcgccccctccccggccc

SEQ ID NO: 28680 - DNA, 660 bp, Homo sapiens
  source 1..660: mol_type = other DNA
aaaaacactcaaacaaaaattttagtagggattattataactataaaaagaatatctttctttaaaaaatgtttccaatgttttctatcaatttcatgctgaatgacataatacaactgtattcacttaatacagaaaacaagcctctattcagaaccattaaatgatcattaactcaatgtctaaaaaaatggtgttttaagagaataatttgttagtaaagaagttttagcataattcacaactgaaatttaggatttgagaaaaatttctttcctgcattataagagtattctttattttagcaggaaaactgccttcagaattcagctgctgcattctgctgctgcttctcttattcagactgttggcatcatcaatacataacttttgattgaatcccaaggggaaaaaataactttggtagacagtggatacataacaaatgcatggattattcgataaaaaaggcatttaaaagtcaattttgaatccggattttctgctctgttaataaattcacatgaaagttacagaaagtatttatgcttttttttgtgtttagaaggctttaaaagcaaggtgctattctggtttggatattaatcagaacacagttgagcattgtttgaattcatcctggaatttgaaatatccggg

SEQ ID NO: 28681 - DNA, 363 bp, Homo sapiens
  source 1..363: mol_type = other DNA
caggaaacagttttttggtaaaactccaaggataagcatctactttgaatgaaaaccttagctattgctaggtcccttgccaagttcctcttgcaaagttaatttttcttcagtagatgatggatcacttctgaaatttttagaaaataaagtcatacgtcctaagaaaatggatagtccttggcatatattacccatgtctggtcagtgcactcatacaaaagtggggtacacacgtgtaagtgacctagacgattctgcgcagcgtggaaaagcgagtcggagctgggaacagcacctgtgggcttgacggcgccctcgccccccgcatccccatctccgtggctgagggcctagggagga

SEQ ID NO: 28682 - DNA, 664 bp, Homo sapiens
  source 1..664: mol_type = other DNA
aatacaaatctgagaggaaacatatgattttattaatttttctcatgaaaacacttaaactttcttgtgttataatttcaaaccataagtgcaaacttggaagttttagagaaaattatacggtataattgataacaattacagtttcttttaacaaatactgattcacgattagtatttttaaaatacaaaatgcattttcctgaatagcatttatttacttgttaaagaagttgtgtaagagattcagctaatctaatttcttactttgtgaagaaatcactcatctaaagtcaaaatacttctttaaatatctccagtgtgcaaaataaataatattttcttgaaatatcctcttatttgaaaatttgctatagagtcacaagaggcaaattccatttgagaaagtgcatgctatatcatcttattgcaaaaaattcagaagagagtttttacccttaaaaggctgtgaaatcagccaaaatttcagtgtgaataatatgatgtttggcgaggaactctactattgttacacttaggaaaataatctaatccaaaggctttgcatctgtacagaatctaaagagatttgcagaagtggttaccacaccgacgttgtagcagctgcatgttaggcatgcccacctaatggaattcaaataga

SEQ ID NO: 28683 - DNA, 586 bp, Homo sapiens
  source 1..586: mol_type = other DNA
ctacttaagaacaggacgatgtcctattgtgttgagctcaacaaatatttgtagactgcttagtttaccattcaggaaatatactcctattgcaggtcctgggctagatcttgctaaggacaaggacatcctaatacccaggaggggaattagatccagcttggcataatgcaaagcaataagacttacttcatatttcgcaagcgcctgcgttttcagagcaaatgcccttcattggttttgaaaagagggcaaaatgcatttagtcacttttctcctccatgagacagaggacctgtccttgctccaagagcccggcgacctggagccagcgaggctgggggcccggcgagggccgggctgggcgcggggctgcttcaaggaactgccgcgcgctgcgaatcgggggcgcgggctggcactgggctccgcccgcgggccagaggcggggtaggggcgggacaggcgcgagcctccggcactgggaactggagccgaagccaccaagtgcgcccctccccgtacggcaccgcctcccgcagcccggggaggggccggggcggagcgagcccggccgagccgggag

SEQ ID NO: 28684 - DNA, 515 bp, Homo sapiens
  source 1..515: mol_type = other DNA
taagccatggcacgggcctgctaatgtttattataatgttaattattactagaaaacattattaatcaatgctatagtaaccaataaatgtttttgatgctcaaagcaactccattaagtattattatcttccccttattacagatgaggaaattgaaagtccaggaatttagctcgtagggattaaatctaacacataggcaatgtaacaattatctctataattaagtttaaatacataggaaggaatttttaactacaggtaggggaaatcctttttaaagattgaaactttccataaatcatcaaggacagtctgcaaatttaaaacttttaaaaaaagtttaaacgtaaaataaagacaagaaacactggaagaaaatattttcgtttttctttctatgatcaatttattgactctcagctccaaatgcaaaatttcaggatgctctctgaaattgaatctgggtctttaaatatttttcctttgccaactgaaattgaatcattctcaa

SEQ ID NO: 28685 - DNA, 459 bp, Homo sapiens
  source 1..459: mol_type = other DNA
gaacagttaacaaggttcctaaagccatactgaaacagaatctgcattttgcatttaaaaagatacaggtgtcacaatttcttattgtttggtcaattttaaaatttaatactgtataatggatatctcttatgtcaacacagatctacgttattattcatcataaataaacagtaagttattgtatccatcgctactgattggtattcatattaatccaatattttgctattgtaagaaacattctgattcagaaatctaggagacactgactttgtatttttttctttgtaaatgtaaattttaattgaattataaggccagtttacagtttaaaatgcatggtactccaggccatggcaaagtgaggtgcctctgacgtttgggctgccacagtggtaacacgcgttagcaactcgcgcgggttggatggttgcctagcgacggtcgtcgacgcta

SEQ ID NO: 28686 - DNA, 282 bp, Homo sapiens
  source 1..282: mol_type = other DNA
atcaagtttacacaatagcaaaagccttttattctgtttcaagtttaagattcaagttctaagatagctctacctaaaaagcgattttttttttttttttttttttagaaaaagcagatagttggaattattcctcaaggaaagtgcaattctcgagacgtggcggcccaacggctgactacttgggcccgcgccgagccaggctttcttttctgtatgtgttataaataaacccccctgggtctagaagcggtggaggatccgcccctcgctggctccagc

SEQ ID NO: 28687 - DNA, 321 bp, Homo sapiens
  source 1..321: mol_type = other DNA
ttatgttcattgaaccttcagaaggagttttggagcacctacacaattcctaagaaagtgactgaaggcctgtggtcaccaccatcaaatgaagctgcaaacttctttttactctaatcatttttaaaatactaatggaagaactttctagctaccactacataaatgttcattgacttatagaatcattatccatgctcatttttgctaggggaaatagatgagacatacatgtaagtgtatatatgtgtgtataggcatatatacgtgtgtatgcatcaacacagtatatgtaaaactgtcttaaaaatccattaactt

SEQ ID NO: 28688 - DNA, 690 bp, Homo sapiens
  source 1..690: mol_type = other DNA
gatatctttggcttctatttaaagctaaaggtaggggtttttttctttatttttaaatgaaaattaagacaccttttaatggacccctgggttccttgagagccactatgagatcaaaatatttttattataatgtgaagacattgtcttttcactctatctcaaaaaaagtgttgcaaatgtaaaacattgccatcttctcacaaatctctttttttgtttttgaaaatatggccatttttcataaaatgttatttgtgttagcatgtaatgggtttactatgtttaaataagttaatactttaaaaattttcaggtttttttagtatggtgaatattgatagatataaacctcatgaagattctcaattgcaactttattttacattttaaactgctgatattggatataatgctgctttttagagacacctaaattgcagtatcagaatgaatgttgatgtttgaagccaaaaagccaaatgcttaaactgatcaatgactgtagctttttagactgttggtcaaagaacattctacttcacagtaatagctctatcagccacagatctcatggtggctgttgcatgataatgataggataaacaaaataccactgtcttcaagaaacattatcttatttttaaaatcccttttgctaccccatctggttttataaactgagtttct

SEQ ID NO: 28689 - DNA, 456 bp, Homo sapiens
  source 1..456: mol_type = other DNA
ggagacgtgacctctttagtcttcaagagtcaacactttcacaagaaaggcaactagcttgtgtaattgtattaaattcgtttatcctaatattaactagttaatgacctcaagatatgtattgagcttttactatgcacgcatggcaggaggggcgtgccccttcctttgactttttactcctgtatactcgaagaaaacaatacaaaaagtatttcaccgttttaatgcattaaacatgatgtaaattttgggattgaaacattcataagaaggcgcgttttgtgctgcctcaaactttaatgtgcatgcgaatcacctggcaatcttgctgaatattcagattgcccccgggtgatagaccatcacctctaccgccaggtgtgtgtatgctgagtcccctcggccttctgccagtaggggaggagtcgggggcggagcgggaggagtggcgcg

SEQ ID NO: 28690 - DNA, 510 bp, Homo sapiens
  source 1..510: mol_type = other DNA
attaaattcgtttatcctaatattaactagttaatgacctcaagatatgtattgagcttttactatgcacgcatggcaggaggggcgtgccccttcctttgactttttactcctgtatactcgaagaaaacaatacaaaaagtatttcaccgttttaatgcattaaacatgatgtaaattttgggattgaaacattcataagaaggcgcgttttgtgctgcctcaaactttaatgtgcatgcgaatcacctggcaatcttgctgaatattcagattgcccccgggtgatagaccatcacctctaccgccaggtgtgtgtatgctgagtcccctcggccttctgccagtaggggaggagtcgggggcggagcgggaggagtggcgcgggccccgcgtgggtcctgccagagatcacctcggccccttgaagaggcagccaagctgcggcggcgcaggagggggcgggttcagcgagggcgcggcctctgagggggggcgcaggacacgcat

SEQ ID NO: 28691 - DNA, 720 bp, Homo sapiens
  source 1..720: mol_type = other DNA
cctcggccttctgccagtaggggaggagtcgggggcggagcgggaggagtggcgcgggccccgcgtgggtcctgccagagatcacctcggccccttgaagaggcagccaagctgcggcggcgcaggagggggcgggttcagcgagggcgcggcctctgagggggggcgcaggacacgcatcccccgcgatcgcccgggccactcgggagcctcgcggcagcccggcgccccactccggcatccgagtgcctcagagagccggaggtggtgtgcggggctgcagggcacgacttcaagcggtcctcagctccgcacaccagggcagcctgctggcgggccagtgtgaggaggcggtggcgcccttggtcaccgccaccatcgagcgcatcctccaggagcttcccccactcgggggcggcgcggaggcccgaggggcgacggcgggggctagcgcctgccagggggggctctaccacgtctcgcagagcccgcttttcgccacggcccgggacctgcgctcggctaagcgcctcatcgacgcgtgcgcccgcgctgaggagtggggcgaaccggacgccgacacccgcgccgccttcctgctcgggggcgcgggcgtgtacgccgtggccacgctcgtataccacgccctgggccggtccgactacgtgcagccgctggtctgcgcgccggtctcccctggagtgcggctccgacgagctg

SEQ ID NO: 28692 - DNA, 856 bp, Homo sapiens
  source 1..856: mol_type = other DNA
ctccaaaaagcttttttggcataaatcacaatacttacagaaatataattgtatcattgaaaaaaacaaagctcaccttcctaatgatacatttcacaaactgcacattagggcaatttcttacttatgaggaggtacaaagaaatactctgtcaatatagtataactgcttatttcaaattgtatctaggaatgaataactactattatttaaagtactactgaattttgaggaactgatcaaagaattagtattattaataaaattgtactatttgcaatatatttgccttggcacaaatgcagagttaaaaacataaaattataaaaaaaaataatagtgattggttgttactactttaaaatcctactaatttccattagcactaaatcaaacagcacttatctgttgtatacaagtaaaattttgaaagactcggacacaaaatgaaaggctttttaaaaatgtctttgccataacaggttatatgacctcttgctaattgttatatttcctcaattaggtctaaatttagagtagaatattttgccagatattttactatatcacaaaatgtcatactactgtattttataataaaaccaaattctcaagtattctggtatgttacatattaatataccaaaacatcactttctataagtctattattatgtacataatatttttaaaaataatgggtattttggtataatgcaatacatgacattaatctttagtcaaaacccattgaggtgtctgacagggaaattagcaatcataagctataagatatatattattttcaaggacaaaatggcgatcaacttgcaaatgctcatcagaatttagctt

SEQ ID NO: 28693 - DNA, 532 bp, Homo sapiens
  source 1..532: mol_type = other DNA
tctatttgtgtttacattattttcctaaatagaaaaatgccaagagatcttataattatttaagtctaatccctttatggaacctgagtttcagaaagggtattggcacaccaataagcagaggtctgtcttggaataaaaaaaactacttccttattacatggcacagtgaaaagtgaaatcttttcccacttactttgaaaagcctgtgtggtctggttatttttaaaaggccagaaatgctggccctttgaagaatcacgcgtttcctcggcccagaaaggcgcccggactccaattctgggcccgctctaggacccagaggctgcgcgcgacgcccgcagggcgaactgcatcctgagctcccgctccatggcctgagccgtcgtagggcgcgggttcgcggcccgccaggggacggtcaccaccggcactggcgagcgagcgagcaggcggcgcacggagcgcgtgggcgtgtcccggcggggctgcgcagctcgccccaccccaccccaccccagccggtcggccg

SEQ ID NO: 28694 - DNA, 499 bp, Homo sapiens
  source 1..499: mol_type = other DNA
cagccttggtttggaagcttgtctcaaaaaccattaaccttcaaatacattctaaatcactttaatttagaagatacttaatatacagacatgtatgtccattcactttcagaactgataatttttgtttttaaattatttatattactgaattggcaaaattacagaggttgtcggcataaaacaaaccagcaattaaaatgtgtttttcagttataatttcaatttttaaatttcaggatagttgctccaactgaattgcatgtcttcaaaatatattgaagtaagttcatcaaacatgtttagacttcacagcccagtgtagagattggcacttccctgtccatcagaaagatcaaattaaataatagatgtgaaaatgctttgaaaatgtttttaagtgctatgcatatttatagagttattatagttattcaaatccataagcaggttatttttatttttttactgtttgaaaagaaataagtagtgtcattca

SEQ ID NO: 28695 - DNA, 594 bp, Homo sapiens
  source 1..594: mol_type = other DNA
tatatatatgtatatatatatatatatatatagagagagagagagagagagagagagagagagatggagtcttgctctgtcgcccaggctggggtgcaatgacacaatctgaaaagtgcctgagtagctgggacagattggtcgcctggcaacaccattataatcttatgggacatacatgtggttcatcattggccaaagcatctgtatttatatatgtatgtttcaaattatatatatatatatatatatatatatatatatatatatgatagctatacatgaacatacacacacacatatatagacatatatagaaaattggcacatattaagcattttgtaaatatcaaccattacaattgttactacttttctcagcaaggctatgaatgcttaaaaattgtgatcaaatagctggttagttaaaaagttatttcactgtgtaaaatacatcccttaaaatgcactgttatttatgtttcattttccactatgtttaatgaccaatgattattagccaatttctgataaaagaaaaggaaaccgattgccccagggctgctgttttcatttcctcattggaagaagaag

SEQ ID NO: 28696 - DNA, 392 bp, Homo sapiens
  source 1..392: mol_type = other DNA
atatgttcaagagagagtctctaaatcactgtttcccatttctgggaactaaaaccagttttatttgccccaccaatgactcttcaacttcggtaatgagatttcttaaagtttgatatgtatagaatataattgaaggaatcttttaaaatctgtcacaaataggatgaactaaataagaactcagttgttctttgtcatacctcagggcactgagggtacaattcatctattcaacagatatttattgtgttattactatgattgtttcaattctttacaccaaagtcttcaaaaccaactaagttatgaaagtagagaggtgttatccagttatgagataaaaaatgaatataagagtgcttgtcattataaaagtttccttttttatt

SEQ ID NO: 28697 - DNA, 519 bp, Homo sapiens
  source 1..519: mol_type = other DNA
ccaattctttgttcaaagagccaataagagaacaggactgtgtttctttaaggcactacatttacggtaatttgttacagtagcaataggaaagtaatatgggctctgctatcagactacttgagctcaaattaaattctctatacctcagtttcatctggaaattagtaatttattttaaaattactaatttaaaattactacatttattttaaaattactaatttaaaattactacatttattttaaaatgtagtcattgttctcgtgtatacagcttctcatcagatccttacaaccagtagtgaaaggtatgatggtaagtttccatatgagaaaactttttccaaattaactacatttatgtgccacatgatggtgaatgaacagggcactcaaccactagtgcggagtctagactattggcctgaagtgacgcctggcgttgcccgaagcccgcccagcgctgccaggtgacgccactgcgacagggggaaaggccctaggccataaacgggg

SEQ ID NO: 28698 - DNA, 355 bp, Homo sapiens
  source 1..355: mol_type = other DNA
aatttttgcaataaagtttcagattagagaatttcacttcccaagtcacagagtctcactctgtgcccaggctggagtgcagtggcgcaatctcggctcaccgcaagctgcgcagcctcccgagtagctgggactacaggtgcccgccaaactgtcacccaggctggagtgcagtggcgctatccaagtagctgggactgtgcccggccccaggcacatctatttattttcccttttctttcaaagacctgagagtcaaagagttcgagggtcagatctgacttcaagccttagaactgccctttgggttctgggaattttaactttcccgcttgttggctccgtcacaaagctg

SEQ ID NO: 28699 - DNA, 298 bp, Homo sapiens
  source 1..298: mol_type = other DNA
tgcccactttttgagttgtaagaagtctgacagctgaaatcacccttgccagggctaaaggaactcttttcttccttgcaggactgaggccaccaaaaccagtttgggtggagccttggcttaggaaggtgacccctggcaccagggtcccatcattccccacagtacttttccaagacccaggggggatcctcctccacggctcttgggcatagccatatccaccttgcaggtggatgtgctgaggagccagctgcacctgtttctgggtgagaggcttccggagccaccacaaggt

SEQ ID NO: 28700 - DNA, 415 bp, Homo sapiens
  source 1..415: mol_type = other DNA
gccaccaaaaccagtttgggtggagccttggcttaggaaggtgacccctggcaccagggtcccatcattccccacagtacttttccaagacccaggggggatcctcctccacggctcttgggcatagccatatccaccttgcaggtggatgtgctgaggagccagctgcacctgtttctgggtgagaggcttccggagccaccacaaggttgaagcccgtttggcacagcctgcaggagggactttgcaaagccgcgtttcaccccttggcagcgggcggctgccttgaggggcgggctgtgcctggcgcgactctggcgccgccgcctgggggcatccggctgtgagccccgtggatggggcgcctggagaccgcgtctctcgaggcactaggtcctggtcagcgccgagaggc

SEQ ID NO: 28701 - DNA, 489 bp, Homo sapiens
  source 1..489: mol_type = other DNA
aaaaaaatggaacaaaacatgtatctctaaactttttaaaggtgttgtattgacttcttttgtatgagttttttaacataagaaagtaataactctcttcctttggggttccccactgtagcgaagtgatcttaacaaaaatttcacttacttcaactaaagattcagacacatttgtcttctaaaagtcatacatacatagcacagtgctatgattagatacctgtggatttaactttgactccagtacttacttagtttgttcatttgtaatatggggataataatattatacacctaacacatttggaatgtaaagcacttacaacagtgcctggcacatatgtgttagaagaatattaaaagagtgaatcacctttaaaacactggtgtaaaaaatacctcatgtcaaaaaatgtttaaaatgtgctttagatgaaaatagctgtctgcaacagataaacattactctgttcaagttcctgctag

SEQ ID NO: 28702 - DNA, 476 bp, Homo sapiens
  source 1..476: mol_type = other DNA
gagccagctgcacctgtttctgggtgagaggcttccggagccaccacaaggttgaagcccgtttggcacagcctgcaggagggactttgcaaagccgcgtttcaccccttggcagcgggcggctgccttgaggggcgggctgtgcctggcgcgactctggcgccgccgcctgggggcatccggctgtgagccccgtggatggggcgcctggagaccgcgtctctcgaggcactaggtcctggtcagcgccgagaggcggacgccaagcgcgtgagtcactctgctcccctgggagcggctccagcttcagtgactcatcccagcaggctgaccccctcctgaggctggaccagctgcctctccgtctaggtctggctctctccattggagacagaaagttagacagagaatataaaatctatgctcagaccccagataaacaaaactctggggccatattcttaatttaccgggta

SEQ ID NO: 28703 - DNA, 296 bp, Homo sapiens
  source 1..296: mol_type = other DNA
attgttattggattgaattgaatagttttagcacacatgaaagtgattcaagcacatttaccaaatgtcattatttttgtaccacatttattaaatgtgcaccatgaatagaaatgaaatataacttctaatctttgattaaatatgtactgagtggcttctttgtactaaggcactacaaagctgcgcatggagtggatccattttttgcagtcaaatactaaatacagttcccctcagggccagttccagtgtgactgaccaggaacctggtcctaggacccctcagagttcac

SEQ ID NO: 28704 - DNA, 620 bp, Homo sapiens
  source 1..620: mol_type = other DNA
tcaggagtaaaaaagctgttcacctgttaattaaatttttaaactagtttagaaaccaacattgagtacgtactctgtgtcataagtacttctgatcaaacttaagtaatttataagtaactatattgatctcagtagtgcttaagctgtccaaagcattactaagaggtgcattgctctgtaacttatattttcaaaaagtgaaaacaaggtgttcttctgatgaaagactcttctggtccattaagaaatagaacttttttgtgtgaaaagaacttgctatatcacttcaaagtggcagtttagaataggttgcattgcattttatgtcaaatctgaaaacacagtgaattctctaaatattgcaagcaagaattgttaatgtttttttttctaaatttattctaagagagttttttaaagtctaggagcaaagcagttgccttaaacagcttaaaacatagcattttacagtagaacatttaacctcctgtgatagaagggtgtaattcggtcaattaccaaaatattattaaaaatagaagtatgttatcataaacagcatgaagttactgcactatttatgatctgtgcctaaaaagaatagagtcgatctgagt

SEQ ID NO: 28705 - DNA, 355 bp, Homo sapiens
  source 1..355: mol_type = other DNA
ctgtcctgatgccaggatcccacagggaagagtctttggggtggtaggaacctacagctggatccctgtgcctgtgctctcccatcagctgatcctggaaggagaaccaggcacgcacccggtccagtccttgatttattcctttgcaaaagagaaacaaactaacaaaaaatctgtagtatggactttgacgtcggcaacacacctaagttccagtccctgctctgccagtaacgggggccatagggccgcagtgggccactgatggtatccttctagacgtctgggatgttctccagcgctctctggccagaaaagggtcagagccccgaaccgcgcagtggcccggccttcc

SEQ ID NO: 28706 - DNA, 390 bp, Homo sapiens
  source 1..390: mol_type = other DNA
actttgctttgtaagtaaatgattatttgtgtaactaatagtttacacacataattcagggatccctgaatccaattgtgtctgctaccaaacgtacgtaaatctgctatgttgatgcatgggaaaccctgcatcatataacatcgctgagcaaatctagagcaatgatgttgggtggaccatgaggtaacattaaccactttacagggttgtaatagtactcatttgtccaataaatacgtaatgagcattcccagctggtcactattactagtagtgtcataattgtatgggcagggtccctgcggcgcctggacctccaacggcaaggctgcgcggcgtggccgcctctctgctccaggccgccagagggcgcgtggtctctactgc

SEQ ID NO: 28707 - DNA, 361 bp, Homo sapiens
  source 1..361: mol_type = other DNA
taggggaagagcatatggtatccccacttcccacttgtactgactgtcaggtgctgttagaatcaataggcaactatttcttttgagacagtgtctctctctgtcacccaggctggagtacagtggtgcaatctgggctcactgcaagcgccatgttggccaggctggtctcgaactcctgggctcaagtgatccgcattctcacttctttctatttgtttttgtggatagtactactcaggactgtcacatctacatctgtgttgcagtgccaattatattatatcctcaatgagtacttgtcaattgatttgtgacagtataaatatattattaaggaagctgaagggtgatattacct

SEQ ID NO: 28708 - DNA, 546 bp, Homo sapiens
  source 1..546: mol_type = other DNA
ctatagccataaacaaccaacagtattattattattatttttgttattattattatttgagacagagtctcactctgtcacccagactggagtgcagtggcatgatctcaactcactgcaacaagcgattcttgtgcctcagcctccggagtagctgggattacaagtgtgtgccacgcctttcatcatgttgaccaggctggtcaaagtgctgcagctccataaaagcagtgattttgacagtgtctcagtgtctggatgttaatggtgctcatttgtatccaatgagtgaatacaactaagactcagatttgaaatgtatgaaactcttagtctctgtcttggtttaagatattaagacattttaccacgtacattcatattattgagttgctctgtgtaatgcaaaaaaattgggaattcattccttctaacaaggcactaatactgagattaagactatttattttaaccttagtaattgctatagctctctgaaaggttatcctgcactccatcatgatgagcgcagcgaaattcggaatg

SEQ ID NO: 28709 - DNA, 460 bp, Homo sapiens
  source 1..460: mol_type = other DNA
atttggtcatccactcatcagctgacggataataatgccgctataaacattcatgtatatggttttgtgtacccaggaatggagttgtttgaggaactccaaattggttgtgaacattagcaaatgattctcaggcatattaaacatttttctgtattctgttaaacattgtatggaattcttgtcatttcgttttattatttcaaaatgtaagacaaatctgaaaaatggaggcagttcctggcacaaacaaggcctgctggttgccaaggacatgactacggggccatttccatgtgagaaggccctgggggtgcaggcctgggagaggttcccgtgacctgcgccccgtgtcgcctcgcctggcctcgcctggcctcgcctccctcctccgctgggggtctaagcctgcgcagtattgcgaacgcgggcggcgtttcccgcatgcgcagtcactgcc

SEQ ID NO: 28710 - DNA, 550 bp, Homo sapiens
  source 1..550: mol_type = other DNA
acccaggaatggagttgtttgaggaactccaaattggttgtgaacattagcaaatgattctcaggcatattaaacatttttctgtattctgttaaacattgtatggaattcttgtcatttcgttttattatttcaaaatgtaagacaaatctgaaaaatggaggcagttcctggcacaaacaaggcctgctggttgccaaggacatgactacggggccatttccatgtgagaaggccctgggggtgcaggcctgggagaggttcccgtgacctgcgccccgtgtcgcctcgcctggcctcgcctggcctcgcctccctcctccgctgggggtctaagcctgcgcagtattgcgaacgcgggcggcgtttcccgcatgcgcagtcactgcccggcccggctttttcagtaggagccccgcgcggtgcgcgctcacgcacgcgcacggcctcgcctgcgcgctcacgaggcctctcgcggcacgcgcccccgccccgcgccgccccgccccgccccgctcccgcgcgcccgcccgccgcctgccgccgccgc

SEQ ID NO: 28711 - DNA, 317 bp, Homo sapiens
  source 1..317: mol_type = other DNA
aacagagacaaatggtatagattcttgtactctttgtaacataatctgtgacccaaatcatcttataaattgcaaaatgtattgtaaatacaaaagaatgtttagtagatataggtacaatataaagaataattttaaaattctaatgggaaaatagcagctccttaaagacctttcctcgcatccagagttatgtatgtatccctaaacaatatattgtatggttttgaaaaccacattggttttgtttgatgaaagcccaccaagtctctttctcagaagcctgccttttctggttcaggcagtggagaagaaca

SEQ ID NO: 28712 - DNA, 319 bp, Homo sapiens
  source 1..319: mol_type = other DNA
gtcaaatgtggtaacagaaaaggttttgttaactttttttttttttgccttgctctgttgccaaggctggactcttgactcagccacccaagtagctgggattactggcgcctgcggccaggctggtcttgaaatcttttttttttaatttgcctcaataaagacaggtaagtgaaagttcctcactcctatggtaaaacagggatcagtttttgaccaaaacaggcctttcagaaatggacaggcccctccaattttttaaattccggagcttaaaaaccccctggtgaattttctgagtcagaaaatggggcattgc

SEQ ID NO: 28713 - DNA, 261 bp, Homo sapiens
  source 1..261: mol_type = other DNA
gcaaagcatgctttccaggttgcttaattaaaagagtgggaattagtccaagctactggagaatcacttgaaccgcagaggttgaagtgagccgagattgctccactgcactccagcctggcccagaatggatgacttctgcacctccagcctgttccagatcgggacagggaaggtgcctggggcgtgaggtcggcaactggctgcgcgccggttgccagggacgcggcagccagcttggcgtctgacggctcaagggcc

SEQ ID NO: 28714 - DNA, 522 bp, Homo sapiens
  source 1..522: mol_type = other DNA
tctctggcagccaaaaggccacgcagatctcttcaaagaatcagcagatctgagccaggagggaggcaaaagcctctgacgctcccctccccccgccagggccactgcgggagcaccgcgcgtccacgtgcacccagcatgcccggtcacccaggatggagttgtacctgctgcataataaacccgggttcctgtttcccggccgcggccactccagattcggggctgaggggctcctgcattctggtcatcccacgcggggagcgcgcgcaaggcccgcccagcccccacatgccggtccggaccggccctcctcatctggcctgcccagggcttggtgctggcggggtccagctgcccctggcctgccccggcgccctccctcagcccgggtatcaggcgagaggcggagctggcccggcgcgccccgcccccgctgtagaaagggccgggcgagtgttactcgcggtcatcccggcctggacaccaggggtggccctgagcgccggcgacacctttcct

SEQ ID NO: 28715 - DNA, 769 bp, Homo sapiens
  source 1..769: mol_type = other DNA
gctctggctctgccggcagccctcgccgccgccgccgcccaagtcggtctccggctcgcccaggacgtgcgcccgggtcgggcgtgcgcagccaactcggcccgagctggggaggggaggccgggggggagggggggcgccacccaagtcgggccgtgcatcgatgacggccggggaaactcgggcaaacctttcctggggaatcacccctcccgaaaccccgccgcggaggcgccgcagcggagggtgagcggaggagagctggaggcggcggcgggcgggcggctgtcgcccgagcgctgcgcctgcggggggaggggcgcggcgtgcggcggcagacggagcctgggctcccagcggcaaggtgaggcagagctgcgctcctcgctgaacgcgggccgagctcggcggctgcgggggagacgcgcaggagcccagaccgcgaccgagagcgggagctaggcgggcggcggcggcggagggggagcccgcgagccgccgggcggagagcccaagccgcgctgtcgccgcgcagggacgacttgggcccgagcgggcgctcgcggcgaaccgtcaacatggcgctggggctcctgcccgagcgcgggcggcggcggcagcgcgggagctgctgagctcggccaagcccagtccagctgcgggagcccggaggatcgcacggggctgtcgccacctgcccggaggccccgagcccgccccgccccgcccccacccggcccagagcccacccctcggcggggccgacccc

SEQ ID NO: 28716 - DNA, 504 bp, Homo sapiens
  source 1..504: mol_type = other DNA
ggcggatctccgctcgacgggagcacacaggccacgctccgctgggtctcggaggggacgaggccgggaggcagcgctggtggcaagaggcggcggcagcggctgctgccgctggggttttgggtagcgaggggagtctcggcgcgcggctgggagagccgcccccgccgcccccatcccttcggctctggctctgccggcagccctcgccgccgccgccgcccaagtcggtctccggctcgcccaggacgtgcgcccgggtcgggcgtgcgcagccaactcggcccgagctggggaggggaggccgggggggagggggggcgccacccaagtcgggccgtgcatcgatgacggccggggaaactcgggcaaacctttcctggggaatcacccctcccgaaaccccgccgcggaggcgccgcagcggagggtgagcggaggagagctggaggcggcggcgggcgggcggctgtcgcccgagcgctgcgcctgcggggggagggg

SEQ ID NO: 28717 - DNA, 448 bp, Homo sapiens
  source 1..448: mol_type = other DNA
cctcacagtagaagggaagccaacgaaccacgtttggcgggtgtacccttcagaatcacatcaattgcagttccaggctgcctgaccctgagcagaatcctacatagaagctgctttggctatgtaatatatttttgaataagagtttcctgttacctgcgaacactcaaaaaacagctagaggtttttatttctcttaggaagaacaatggttaggactgtttatcacttgtcatcaatgattctgtcaatcatttattctgacacccattcattccacaaatatttattgagtgcctactatatgggttttgtagacaggtttgtactgtggataccaaggtatgcactgtaacatacttacagcatgtttaaccaccctgaactcagagacctgggttcaaatcctcactaagtcacttacttagctgagtaactgagctttacc

SEQ ID NO: 28718 - DNA, 426 bp, Homo sapiens
  source 1..426: mol_type = other DNA
tatccttggatatgaaatcatgacgctatagtgtgtcccgcctcacatcataggcaaaagaggaaactgagtgaatggacaaattaagtaattaattaactttctgtcccatgaatataggatacccagttatatttgaatttcagataaccagtaatacttcttttaatacaagtatgtcccataaattaattgcgacataataacaaataatcgttgtttacatgaaattcaaatttaactgggcgccctgtattggaaggcaggggttccttcacagctggcgtccgtagccgggcggaggcacacgaccaggaaagagttggagaccgtcgctcgagcgcaccctcaccccgtgggctccgggacccctccgaccggggggcgggaccgtaggccgcggccggcagctgtcccagcgaggga

SEQ ID NO: 28719 - DNA, 420 bp, Homo sapiens
  source 1..420: mol_type = other DNA
agaaatgtaatttgcctgagatcaaattaaggttgcttaagatcaaactgctttaatgtttagactctttcctcagaggctcatgttttccaagctcagaaagctcattaaaaacagacctgacttgtcacttggagttgacaatcccagacttaaatcagacttccatgtgcaaggagcactaattatcatataatcaagaatactagataattatcgtctaacaaacgcccccttagaattgtataatgcaatcaaatagttaactgcttgttagacgtcagacgtcagacgtcacccaagtggggtggaggatgccccgccccgggatcggtggcaccgcgccgcgcaggcgcaggcgtcgctgccgccggcgcaggcgccgctgcctcgggtacttcccaggctccgcgcctgcgc

SEQ ID NO: 28720 - DNA, 647 bp, Homo sapiens
  source 1..647: mol_type = other DNA
acaaccacgctaagtaaagaccattctgacatatacatggtaaaagtattttttcagtttgtcatttggttacagagggatataaataatatgttgaaggtatctggaggatgaaatttatttattttttatttttgaatatcttcgtagataccaatggagggtgaaatttaaatatcaaattgttcaggaagtcactgctttcaaaacttgagtcttggttcatttcttagtcaacgtagtctaaataaagaatatggaaaatttccttctcctcattctacttagagtagaatgaaaatatggtttgtcaaagttggtttaaaaatataatatttctgcctttaaaggaactctgagattgtttgcttaatattttaatgcatatagtagcatacattgttacatattacatacattgaagcttgtgtgaaggtaaattttatcctctctcaagctttatatttttctaatttttgtatcatgttaaaaagtaccttacacaaaatagatgacatgttaacacacatcaagcttcagtgaaacatcttattggaagaaaaaataaaattattactgtgtaaagatttgaatgctgtcaaataattttcagttattaaaatataggttttgagaatcatttgttt

SEQ ID NO: 28721 - DNA, 554 bp, Homo sapiens
  source 1..554: mol_type = other DNA
caccttttcccacagtttggaaaaaaaaaaaaatcccactgagaatcacaagcgcgcggccgctcccatttcttcgcagaggggcctcccctggctgtgtctgacgttcccggtgacgactccggctcagccctcaccctggtttccggcggcgcgcggctccctcccacgcgccccccagcgctgcggtgctagacagctgagagaacgacacagacctgtcggaaggtcctctgcaggtcccccttcgcctcgggcagtcaacatgtacgttgcggctgtctggcgaagctgcttctgagcgtttgcggaggcgcagcttcccctctgcggggccgccctgcttctcctgtccctggggtcggcggacttcatgggggcgggcttccgcggtcggcgcacggcttcctgttctgaggcggcccggcggtaggcggtggcgactctgcccgctcccgtttcggcgcggtgaccgagcgcccgggaggctcgaggaccgcgttgcgccaagcccggtcctgcgccgccatggccccagtgcagctggagaacca

SEQ ID NO: 28722 - DNA, 412 bp, Homo sapiens
  source 1..412: mol_type = other DNA
gctgttttaaagcaggtacaaaaacaccttttcccacagtttggaaaaaaaaaaaaatcccactgagaatcacaagcgcgcggccgctcccatttcttcgcagaggggcctcccctggctgtgtctgacgttcccggtgacgactccggctcagccctcaccctggtttccggcggcgcgcggctccctcccacgcgccccccagcgctgcggtgctagacagctgagagaacgacacagacctgtcggaaggtcctctgcaggtcccccttcgcctcgggcagtcaacatgtacgttgcggctgtctggcgaagctgcttctgagcgtttgcggaggcgcagcttcccctctgcggggccgccctgcttctcctgtccctggggtcggcggacttcatgggggcgggcttc

SEQ ID NO: 28723 - DNA, 311 bp, Homo sapiens
  source 1..311: mol_type = other DNA
taagaatattctaaccttagggaacatcatgaacatctcttacacctagggcatgttagaatcaccttaggaaagttcaaaaattcacaggggtggaacccatatatctaagtatttttttaaaaaacagctcctcagataatcgctgttttaaagcaggtacaaaaacaccttttcccacagtttggaaaaaaaaaaaaatcccactgagaatcacaagcgcgcggccgctcccatttcttcgcagaggggcctcccctggctgtgtctgacgttcccggtgacgactccggctcagccctcaccctggt

SEQ ID NO: 28724 - DNA, 517 bp, Homo sapiens
  source 1..517: mol_type = other DNA
agcagactccttagtgtgatattctctccctatctcgttcgaatttccgtctcgattttaaaaattgagaagggagagagcgccggctcaccgaagccgacttggggtggcctgcctaggagggaaccacaggaagaggttccaccgacggtagaaacccggttcctcctgtcgcagcggcctgagagtcaccccgagcccaggccggtaaccccgctgcagcccctccggcaggcccaggttgcaccgggccacccgcggggtccccgcaacgccggtggtcaccggccctaagccgctgggcgccccgcgggaggaaactaggggcaaatgtagcccgcattcctgcggagagccggggtcccgggagggcgcgccagcggcggttccggatcagcgcgttgttccctcaccgcggggggcgggggcggaggcgcgcgcgcacacgtcgggggctaggcggcgcccccgctgcctaggcaaccgcgcaggaaggtgtccggccacctgcgcgcgc

SEQ ID NO: 28725 - DNA, 260 bp, Homo sapiens
  source 1..260: mol_type = other DNA
gttccctcaccgcggggggcgggggcggaggcgcgcgcgcacacgtcgggggctaggcggcgcccccgctgcctaggcaaccgcgcaggaaggtgtccggccacctgcgcgcgccgccggctcccctccaccgcacgcgacacctacggtcacgtggcctggctcccactaaggggaggctacccgaccacatctccaagcccgggtcaggcgtcttagggagacgcaagttctcgcgagatctcgagaactccgaggct

SEQ ID NO: 28726 - DNA, 513 bp, Homo sapiens
  source 1..513: mol_type = other DNA
acaatattgcaggagctacaaaacatttttattctattaatttaaaaatatcctgtcccataaatcatatttataacaaacaaaaagctctggagaatataatgttcagaagagtgtacccagaaatttatgttagatacagactaacttcttcatttcaaatgacaacaaaattttggactaggatcaaaaccaaatcccatcattatttcgcttaaaatacaggtgatgttttaatattcagaaatctcatctagtcctaataatacaagtttgttttagcaaaggtcttaaaggaatacatgaaaatatgctaaacttaagaaacagaaattcagtgcttgtgctttgaaagtccatatagcatattatgtatcatttcttacaaaacacagaaaatacatatttctgcttagaatttataaaacttttaaattttgagccaattgtcaagttggaaggtattcataaagaagatataaataatttcctaatttaatattttcaaaagga

SEQ ID NO: 28727 - DNA, 628 bp, Homo sapiens
  source 1..628: mol_type = other DNA
ctgtaaattttaagtgaagatttactgataactaaaatgctcaggtttgatgaaattagatgagagggagtgcttgatgcaagtcttcctcccatttagttagtaggtccctgaacaaaaaaattggtttcacaattctattttttatttttaaaatttttattgttttagactagtcatggtttcacaattctttataactattctgaggcatacttggcacttcccaggatttgccaaatccattatgaaatgccccaaacagtgttgggttaactcattagtaaccaaactgggacccaaccctgggtgcagtctgtgcttacagtgagttcctctgggcctcagcttaaagatgatcatgaagttctattttagctctataatatttgattctagtaagttataagaaaactttgagttttgtttctatttttgataaagatggattgcaaataagccatccacaaacaattttacaaacgagtttgcaccaatatttgtgtgtcataacttaacttcagtcaatcgtgcaaacgttactggagtgtaactagttcatgaaataatcataaggaagtataatatgtatattgtttaactattgaatttcttcaatattagttgg

SEQ ID NO: 28728 - DNA, 830 bp, Homo sapiens
  source 1..830: mol_type = other DNA
cagcccctttcgcggcttggtcgcggctaggcgcggaggcgacgaccccaaccagccccgcctcggcagctgcagccggcgcgccccactcggtgcccgcccgttcgccgtgacgcggccggcgccccgcgcatgcgccgctcggcccgctcccctttccctgggccaccgcctcccgaccggttggagtgggcggagcctgtggttctggaagccgcgccgccgacgggggaggagggggctggcgagccggtcggctgctgaggcgtaggggcggagcagaaggcggcggccgcggctcccgcccgcacagagcgccggtcccgcgaagccccctcccactcccgggcgggcggtggcggctgcgggaggaggagaaagaggagggagcgtctctgccgccgcctcctggtccccagcgccgatccgccgccgccgccaccctgccgcggccccctctgtagcccgagctgctccgcgacgcgacggagccggcctcggacagagggagcggtcgcggcctcgcggcccgcgcgggctgacgagcggagagcgcgacgccgcgcggtccccgaggatccgcacgccgggcagcgcggcccgagcagcgcgagaagcagcgggcgggcgggcggcgccgggcccgggccgccctcgctcccgcgccccggccccgccgcccgcgccggggcggtcgcctgcagaggaaggcgccgcagtctctgggcctcgcggccccactcgagcgtcctcggcaccgagggctcgcgggtcctgaggggaggaggcgatcccggggctgggcactgagctcttgggcgcccccaccc

SEQ ID NO: 28729 - DNA, 653 bp, Homo sapiens
  source 1..653: mol_type = other DNA
cctcttttcccagcaaaaaactgggaaaagcggccagagtttcgtgcctcttgccggacaaccagcccctttcgcggcttggtcgcggctaggcgcggaggcgacgaccccaaccagccccgcctcggcagctgcagccggcgcgccccactcggtgcccgcccgttcgccgtgacgcggccggcgccccgcgcatgcgccgctcggcccgctcccctttccctgggccaccgcctcccgaccggttggagtgggcggagcctgtggttctggaagccgcgccgccgacgggggaggagggggctggcgagccggtcggctgctgaggcgtaggggcggagcagaaggcggcggccgcggctcccgcccgcacagagcgccggtcccgcgaagccccctcccactcccgggcgggcggtggcggctgcgggaggaggagaaagaggagggagcgtctctgccgccgcctcctggtccccagcgccgatccgccgccgccgccaccctgccgcggccccctctgtagcccgagctgctccgcgacgcgacggagccggcctcggacagagggagcggtcgcggcctcgcggcccgcgcgggctgacgagcggagagcgcgacgccgcgcggtccccgaggatccgcacgccggg

SEQ ID NO: 28730 - DNA, 476 bp, Homo sapiens
  source 1..476: mol_type = other DNA
gatgctgccatcggctatgacgggcacaccaaagcgccagacatacacagcagtgccgtgggtctgaccacaggccaccccggtgaagccgcagcccatgcccacgctgggctgcaatcacctggaggtggaggtacacaactgccccgcacagcagctgcttgtgatgatggccaccagctcattgtgatcattgacgataggcagcgctggagccaccaccagctcggtccttggcgtcatcatctcactgaggaggatggtgtccttctcagcaagaaaggcgatgatacccaccagcttgctgccgatggtgcccgtctcagtgatggggatgccagagaagccacttggcctccagtacatcacccacggtgtgcgaggggctcagcaccacggggtccgtgatgagagccatcacgatggccatgtcggcatctgtcacagagggctgaggtcaggtccacctcatcagt

SEQ ID NO: 28731 - DNA, 305 bp, Homo sapiens
  source 1..305: mol_type = other DNA
gcggtccgtctcggatccgctagccagttcccagtggagcacgtcctcaactgccgaggccgcctcccggtcttagcgagagtactgactccgactccaagagtggcctccggggtttcagcgcttacaacccgagcagttcagcaccccacggggttgtgtccgactggatatttgtacggggacccctcagtgcctgacactccgcggggtccccccgggtatcagctgaaacatcagctccgcccctgggcgctcccggaggctccgcccccgggctccccgggggagttgatagaagggtc

SEQ ID NO: 28732 - DNA, 298 bp, Homo sapiens
  source 1..298: mol_type = other DNA
cagaagacataaacttctgtttttccagggtcacacaggtaacttggcttgctgcttctgggggctctgaccttcctgacttaataatcatgcataaagtactgagcacagtgcctggtaccttgaccccaatttgccgtcctcccagccgcagtccgcccaggcacccgccctccccgggcctgggctgcagagctgcgggcgggggcggtggccctgcgctgcacccggcctgcctgcgcgtaggcgggcgggcggggctgcgcgtccgggctcccggggctggtaatatagcggc

SEQ ID NO: 28733 - DNA, 318 bp, Homo sapiens
  source 1..318: mol_type = other DNA
tgttaattttaagctttcaaagggcaagaattatgaaatatttgcctttgtagttagtcatatatcaagttctcattgtttctaaatcagacctaaagttttattctaaatgattgtgaatttaatcatgtatatgctgctaaaaatcatttaatggatgaaaaaagaattaaattcagaatattcatttggcctcttattagttccataataccattaaaaaagaaagaaagaaagaaacttcctcgccccatcgtgcgacttgcaatggcacttttccacaacagtcctaacttttgtgtgttgcaaatataaaag

SEQ ID NO: 28734 - DNA, 451 bp, Homo sapiens
  source 1..451: mol_type = other DNA
tgaagctcccaagaaaaatttctttttgagttttataatgtattattttttccacgaaatatatatattttaaattctcagtttaattcttcatcagtagtattaataaaacaaattattctgggtctgatttacctgacataaaataattattaaatgttctttgtattttcctcctcggttttctgtgttaattttaagctttcaaagggcaagaattatgaaatatttgcctttgtagttagtcatatatcaagttctcattgtttctaaatcagacctaaagttttattctaaatgattgtgaatttaatcatgtatatgctgctaaaaatcatttaatggatgaaaaaagaattaaattcagaatattcatttggcctcttattagttccataataccattaaaaaagaaagaaagaaagaaacttcctcgccccatcgtgcgact

SEQ ID NO: 28735 - DNA, 222 bp, Homo sapiens
  source 1..222: mol_type = other DNA
tgtgtgtttgtttttctttttaaagaagaaaaccaggcaagaaacctggggttgcgatttgtgacacctgaagattcatcttgaacgttttaattacaaaataaaagctgatgcaatctttgtgtgtgcacactgcgtgtgcagagagaagactcctcactggggaggaggtacgcgccgcggaggtgtcccccgccccccacgacgccgcttcccgtctcc

SEQ ID NO: 28736 - DNA, 222 bp, Homo sapiens
  source 1..222: mol_type = other DNA
ggagtcctgcgatctcttgggcccagtaccttttctcataaaacaaatattcttgctaaagccaatttaacaggacctcctgactaaagtttggtcaaggagagagtctttgtcaatacccagaaattctaggaggggcggtccctcccccttcctagttgcggaaggcaacggatccccacattccggagtttcgcgcctgcgcagaaggcagaaggtcct

SEQ ID NO: 28737 - DNA, 264 bp, Homo sapiens
  source 1..264: mol_type = other DNA
gactactgcaataggtatcacaactattgcaatacagcctgctgggagtcctgcgatctcttgggcccagtaccttttctcataaaacaaatattcttgctaaagccaatttaacaggacctcctgactaaagtttggtcaaggagagagtctttgtcaatacccagaaattctaggaggggcggtccctcccccttcctagttgcggaaggcaacggatccccacattccggagtttcgcgcctgcgcagaaggcagaaggtc

SEQ ID NO: 28738 - DNA, 668 bp, Homo sapiens
  source 1..668: mol_type = other DNA
ttgtaagactgtaatgatgccgccaacagacagacctttggcggtggggagccatggtcggcaagccaggccccgcgggcgactcttcattccctccggcctggggcgtatgggcgggggtcaggggagcccttcccccttcactttcggcgcgggtgaggtgatcggggctgccagcgcaggtctggcctagggcggcacccggaccgcggggcacgggaccggcagccgctccccgagcgccctcctcgcggaggcccttcttcggagggcagaggtcgagggccgtgcgccgcctcccggctacgcgacctgtaccaggccctgtggggtcccgggacccctggagcgcgcgcgggacggccggagccgcggtctgggcacatcccagagctcgcgggcaggcaaatgccgtccttggcgtcttcgcccgccgctcgcgcccgccgcgggcggtgccggacctcgcccttccccacagagcccgccgcggttcccgaggtgacacggcccggacccctgcgtcccgctcccatctcggtggcggcctcggtgggcggggctcgccacggctgacgtgagtcaacaaaggtcacgtgaggcgtgcgggccgcgccgattggtggcgccagccgggcggggagggggggtcacggcggcggcgtggg

SEQ ID NO: 28739 - DNA, 674 bp, Homo sapiens
  source 1..674: mol_type = other DNA
tcggggctgccagcgcaggtctggcctagggcggcacccggaccgcggggcacgggaccggcagccgctccccgagcgccctcctcgcggaggcccttcttcggagggcagaggtcgagggccgtgcgccgcctcccggctacgcgacctgtaccaggccctgtggggtcccgggacccctggagcgcgcgcgggacggccggagccgcggtctgggcacatcccagagctcgcgggcaggcaaatgccgtccttggcgtcttcgcccgccgctcgcgcccgccgcgggcggtgccggacctcgcccttccccacagagcccgccgcggttcccgaggtgacacggcccggacccctgcgtcccgctcccatctcggtggcggcctcggtgggcggggctcgccacggctgacgtgagtcaacaaaggtcacgtgaggcgtgcgggccgcgccgattggtggcgccagccgggcggggagggggggtcacggcggcggcgtggggttcgctgtgtgacacaatcaacaccccgcgcgctccggccgttcccgccgtccccgcctgtggctgaaagccgccgctgccgacccgggggctccgcagcccctgccgccgccgccgccgccttcaccgccgccgcgttgggatttttcgtcgccgccgcccgcggcgg

SEQ ID NO: 28740 - DNA, 656 bp, Homo sapiens
  source 1..656: mol_type = other DNA
gagggcagaggtcgagggccgtgcgccgcctcccggctacgcgacctgtaccaggccctgtggggtcccgggacccctggagcgcgcgcgggacggccggagccgcggtctgggcacatcccagagctcgcgggcaggcaaatgccgtccttggcgtcttcgcccgccgctcgcgcccgccgcgggcggtgccggacctcgcccttccccacagagcccgccgcggttcccgaggtgacacggcccggacccctgcgtcccgctcccatctcggtggcggcctcggtgggcggggctcgccacggctgacgtgagtcaacaaaggtcacgtgaggcgtgcgggccgcgccgattggtggcgccagccgggcggggagggggggtcacggcggcggcgtggggttcgctgtgtgacacaatcaacaccccgcgcgctccggccgttcccgccgtccccgcctgtggctgaaagccgccgctgccgacccgggggctccgcagcccctgccgccgccgccgccgccttcaccgccgccgcgttgggatttttcgtcgccgccgcccgcggcggaggaggaggcggcgatcccgcgcgcagattgggggcgtcactgcgggccccggtccgagggggggtttccatgtgtcgctcgcta

SEQ ID NO: 28741 - DNA, 315 bp, Homo sapiens
  source 1..315: mol_type = other DNA
ctctcacagaatgtgaggcagcctgactttggtatcctgaggaacacagctgtgtgctgtcagagggctcttacagaggccaccgggttctttctggtctcttgttctcagaccagcaagagaagatggaggttttctcttgtgccagttaatggcaagcaagctaacctctagtgaggctttcaggatcctttgaaactcccaggtggaacgcaggttggacacacatcctgcatggaccgggatgagcatcctcaaagagaaacctgggaggctgggatggggtcagcacccagaagccagccccctctctgt

SEQ ID NO: 28742 - DNA, 195 bp, Homo sapiens
  source 1..195: mol_type = other DNA
gtgagcagtggtctcaggtctgcactctgacccagtgaagttgagtgaaatttagagggacaaccccttgagcgaaaccctgccttcctgagtccgggctttggatccagatttctagtctggaggggttgccaactaatgtgaaacatttgcaagagtaagcgctgagtgactcaatcaattagtcactcgctg

SEQ ID NO: 28743 - DNA, 450 bp, Homo sapiens
  source 1..450: mol_type = other DNA
aaatgtcttggacacatctatgaaagggagactctgtcatacttgacccaaagaggcccgcttggtgaccaggcaggcatagtaagcatggagaacaacacttgttctctttctcccagaccccaggaaacagaaaactttcctcaagtttactacaggattctcagaggtgtctaagatcctaggaagcccggctgctcttaggacgctctgagccaggcctagggccccgctccatgtggcctgcctggaccctagagggccgcgctctggagctgccacagatactctttttcctattcctaggagacaccccacgtccactggcttcggagccggcaggggcctgggcactggaaagcccgcgcggagttctctcgccggaaatgcgaggagcgccacatcggccacaggctttgttgccccgccttcaaagccactgcgcgtgcg

SEQ ID NO: 28744 - DNA, 383 bp, Homo sapiens
  source 1..383: mol_type = other DNA
aagtagatatgctttctatgttttattaactttacaacaccttccccaagctggtgaaaggaagctctcacttcctctgatgaaacagagcaaaatgtatcttttttggttctgtaagaattattcacattttacaaatgaccaacaacacttagaatttcacaaaggctagactttatgaaatgtgctgcgtggatgcagggtcctgtacatgaagtcattgatgaagacttcatttgggggtctggctgggtaagccggcgtcccagccccgctacagccccgcccagatctggcagagccgtgggcgaacccaggcgggcagaaaggcggggcgggcggctgccaagccggccaataggcggctctccggctgctaagcc

SEQ ID NO: 28745 - DNA, 504 bp, Homo sapiens
  source 1..504: mol_type = other DNA
cacatgaaattctgaatgagcagtaattcacttcacatgtccaagggaaaacaggctcttttcctgggacttgtaagaggatttaggttgtaactcatccaaactcatgttcaaatggaaattaaatacgtgtctgatagattacacaaatgtcttggacacatctatgaacagagggagactctgtcatacttgacccaaagaggcccgcttggtgaccaggcaggcatagtaagcatggagaacaacacttgttctctttctcccagaccccaggaaacagaaaactttcctcaagtttactacaggattctcagaggtgtctaagatcctaggaagcccggctgctcttaggacgctctgagccaggcctagggccccgctccatgtggcctgcctggaccctagagggccgcgctctggagctgccacagatactctttttcctattcctaggagacaccccacgtccactggcttcggagccggcaggggcctgggcac

SEQ ID NO: 28746 - DNA, 459 bp, Homo sapiens
  source 1..459: mol_type = other DNA
gtttcttccttgaccagaggagcaaggtggattcttaagagtcattaaaagactctcggaaggcagtcctcacatttgagtctgatgagaacagaggtttacagcccccactttactgggcccagggcggccactggtgctcccgctaggcgccggcgacctctggcgtcccctttcggaagtgcggcggcggctgcccatgaactggccccacgaccccagactgcctgggcaggtgcgccaggacggcaagcagccggcggccggcccgcagacccgagggcaacacccggccccgcctgggtggctcggttggcccgcggggcggtgcggcgtggcgcggccgggggacgaacaggtgcgcgggcggggggcggtgcttggggatcctgcgcactgcgcgcgcccctcccccgcgcggccccgggcgcagccccggcccggcgcgagtaggaggag

SEQ ID NO: 28747 - DNA, 320 bp, Homo sapiens
  source 1..320: mol_type = other DNA
cttgggcccaggagttcaagacggttgcaaagttgcaaggttgcagtgagttatgattgtgccactgcagcctctcacaactttcatcataagataaatctaatgttcaactagagatctctcccgcgccttgaacttgcaaattggggcggggccgagggcggtccgtgccacagctgtgggcggggttgtccgtgcttgcgccagagccggcccgccccgccgccaggggctgtcgcaggagccaggcgttcttcataggccgccgctgagcgttcattggctgcgctgggtcgtcagggcggagagctgcgaggccg

SEQ ID NO: 28748 - DNA, 533 bp, Homo sapiens
  source 1..533: mol_type = other DNA
gccaaaaaggtttgttgcttaaacatctatattaggattcaaccaaaccagtaggaaattatatatatatatatatatatacacacacacacatatatatatacacacacacatatatatatacatacacacacacatacatatatatatacacacacgtggtgggaatatacgtatatatactccctgttcattcatttcttcgaagctattgtcttagacgattatggcctagattatccaggattactttaagtcaactgattaggagctttaattacatttcgtggcaactgaataaatgaattatgttaatagccaccttggctttattattacaggtaagatgtatgagagtcccactttggaacttcagagttggaaggggccatgaaaagcttagtttgtattttcggcggggctggggcgtctcgggcagtggcgcacccagctggacgggaggggagcccacctggaacgcggcgccgcgggtgcgggagcggcgagtgggcggggcgtcgaggcggcgggtg

SEQ ID NO: 28749 - DNA, 522 bp, Homo sapiens
  source 1..522: mol_type = other DNA
tatatatatacacacacacatatatatatacatacacacacacatacatatatatatacacacacgtggtgggaatatacgtatatatactccctgttcattcatttcttcgaagctattgtcttagacgattatggcctagattatccaggattactttaagtcaactgattaggagctttaattacatttcgtggcaactgaataaatgaattatgttaatagccaccttggctttattattacaggtaagatgtatgagagtcccactttggaacttcagagttggaaggggccatgaaaagcttagtttgtattttcggcggggctggggcgtctcgggcagtggcgcacccagctggacgggaggggagcccacctggaacgcggcgccgcgggtgcgggagcggcgagtgggcggggcgtcgaggcggcgggtggcgacggcgcccagcccgccagaagaacgcgcggcgggcagacggctgggagccgctccggtagggcgagcgcggccggcgg

SEQ ID NO: 28750 - DNA, 510 bp, Homo sapiens
  source 1..510: mol_type = other DNA
cctagattatccaggattactttaagtcaactgattaggagctttaattacatttcgtggcaactgaataaatgaattatgttaatagccaccttggctttattattacaggtaagatgtatgagagtcccactttggaacttcagagttggaaggggccatgaaaagcttagtttgtattttcggcggggctggggcgtctcgggcagtggcgcacccagctggacgggaggggagcccacctggaacgcggcgccgcgggtgcgggagcggcgagtgggcggggcgtcgaggcggcgggtggcgacggcgcccagcccgccagaagaacgcgcggcgggcagacggctgggagccgctccggtagggcgagcgcggccggcggctccgcgccgcctcagccgccgccgccgcccaaccgcctgcccagcgctgaggcctgacgggccgggcggacgagggccgagggcgggagctgaggcgcggggggcggccccggcggggggcggg

SEQ ID NO: 28751 - DNA, 294 bp, Homo sapiens
  source 1..294: mol_type = other DNA
aaatttttagtagagacgaagtttccatatgatttgaaaatgaaatctttttaggatggagaggagctcttggttgaagtaagaggtaaactagctagtacccaccatccccgggcctgccaggggcggctttgcgggggacggggacggggacggggcggggtcccaggcccatgccatccacctgccaagccgccgggtcccgggaggcgtttcccctcccctcggcccgcctccatcctggcgagtgcccgagccaggccggcctccccgccccctccctggaaaggaaag

SEQ ID NO: 28752 - DNA, 222 bp, Homo sapiens
  source 1..222: mol_type = other DNA
gctggagtgcagtggcatgatcacggccccagactcctgggccctgagcccctgtgcctgacaaatgcaggcagtgtggatcattcgacactctttgccaaactggcacggtgtcttcctgggaagcaagaaatcactgagggcctgtcagttcctgccagcgggccctggcctctgcacccaactgccagctccctgacccgccctggggcccagggtatt

SEQ ID NO: 28753 - DNA, 303 bp, Homo sapiens
  source 1..303: mol_type = other DNA
cccgcttatctgttaaaaaggcatatgatgttttaaaacgtttgaaagtctcagctttagaacagtttaggcctaaaccatcgtttctgtacagcgcggaaaagctaaactgttctaaatctgtgactttcgaattttttaaagcatcatatgccttttaaaaaacagataagcctgtaagaccagcctggaatcccagctactcaggaggctgaggcacgagaatcgctggaaccgaggttgcagtgcactgcactccagcctgggtggaactgagtttcctctttaagggaaaccccctga

SEQ ID NO: 28754 - DNA, 396 bp, Homo sapiens
  source 1..396: mol_type = other DNA
gtcgacgctcaccttctcggcccgggctgtcaaggaagggctcccagacctcccagctcagccggagccggagcggaggggagaagcgccaagcgcgctgccctcccagggaaaccggccacagtcaccagcgtcggcgctccgaccaccgcgctctggccggccccggcgattggtcaccgcccgctaggggacagccctggcctcctctgattggcaagcgctggccacctctcccctagtggagaatgcctctttccccagtgggcgaggtcggggattggctgggaactgtatccactgtcaccgatttcttcctatgcaggaaatgagcagcctggcggttggccccacggggttgggcgatgattgtcgcgctcgcacccactgcagctg

SEQ ID NO: 28755 - DNA, 297 bp, Homo sapiens
  source 1..297: mol_type = other DNA
tctgtaggatgagtataataatagagcccacctcgaaatggggcccggctgtagtattatcgttgtactatactgcttctgttttcttctaggctttcgccggccgcgcagtcctctactgcctaagacgatcccggactgaccccttcggggtctgggggccgctttcccgccacagcggacggggcgaccacagtccgaagctagattcccagcggacgcgggcggccgggagccctcgcgtcgccgctgccgccaaaacagctgcagtgggtgcgagcgcgacaatcatcgccc

SEQ ID NO: 28756 - DNA, 254 bp, Homo sapiens
  source 1..254: mol_type = other DNA
gtggggtcgacgctcaccttctcggcccgggctgtcaaggaagggctcccagacctcccagctcagccggagccggagcggaggggagaagcgccaagcgcgctgccctcccagggaaaccggccacagtcaccagcgtcggcgctccgaccaccgcgctctggccggccccggcgattggtcaccgcccgctaggggacagccctggcctcctctgattggcaagcgctggccacctctcccctagtggagaa

SEQ ID NO: 28757 - DNA, 430 bp, Homo sapiens
  source 1..430: mol_type = other DNA
tcttctaggctttcgccggccgcgcagtcctctactgcctaagacgatcccggactgaccccttcggggtctgggggccgctttcccgccacagcggacggggcgaccacagtccgaagctagattcccagcggacgcgggcggccgggagccctcgcgtcgccgctgccgccaaaacagctgcagtgggtgcgagcgcgacaatcatcgcccaaccccgtggggccaaccgccaggctgctcatttcctgcataggaagaaatcggtgacagtggatacagttcccagccaatccccgacctcgcccactggggaaagaggcattctccactaggggagaggtggccagcgcttgccaatcagaggaggccagggctgtcccctagcgggcggtgaccaatcgccggggccggccagagcgcggtggtc

SEQ ID NO: 28758 - DNA, 463 bp, Homo sapiens
  source 1..463: mol_type = other DNA
taggcgtgagccgccgcgcccggccaagactccattgaattttgccaggcgcggcggctcgcgcctatagtcccagcactttgggccgagcgggcggtatcgcctgagctcaggagctctagtccagtctggctaacgtggcgaaatcccgtctccactatggtaacatgtaaacatagaaaagataacagtaaaattttttctgtgttataggaccgcaaaatgttatgcagcacatgattgtatatccataatttatattactgtatatagtcacagatatctattataatacgggtttgtatgtgaaactataattttacttattgttatatgggtgtgcctttccatgtggaggcacccacacgctggtgcccaccacgtgcaccagcgggagcagggactgacgcccctctagcaaagcatctgtggtacatcccagacccggggctctccaaggccc

SEQ ID NO: 28759 - DNA, 290 bp, Homo sapiens
  source 1..290: mol_type = other DNA
catctgattttcataataacacattactatcctcattttacagttgtggaaactgaggaccaaggcagcccttgttcctgccttgctcttatgcataattcataaattactgcagcagcataattcattgcagcaataggcgggctgcattattcatgaccgggcccctgcaagatcatcattattcatgaatggttgctggttgttagtctaccaaccactcaacttcatgtaggcgcggcccgcttgcatccgggtttctgggggtggggcccaaggttttgttccgg

SEQ ID NO: 28760 - DNA, 259 bp, Homo sapiens
  source 1..259: mol_type = other DNA
gtttttcaaatatttcccttgatcaaggctgccatgaaggcctgctggaggttgcagccctggtagtggagtgttctacttgtgttgactgacatcaaaacaaaacagaggctccgccagcatgcgcagtagcggctcctgcgcctctaaggaagcctgggttccaccccgggaggcccgctgtatgagagcgcaattatgatcaccttgcggaatgccacagagagcaaatcagataggccgtcctagctaaggtggt

SEQ ID NO: 28761 - DNA, 238 bp, Homo sapiens
  source 1..238: mol_type = other DNA
aggtggcatctgattttcataataacacattactatcctcattttacagttgtggaaactgaggaccaaggcagcccttgttcctgccttgctcttatgcataattcataaattactgcagcagcataattcattgcagcaataggcgggctgcattattcatgaccgggcccctgcaagatcatcattattcatgaatggttgctggttgttagtctaccaaccactcaacttcatg

SEQ ID NO: 28762 - DNA, 275 bp, Homo sapiens
  source 1..275: mol_type = other DNA
gaggctccgccagcatgcgcagtagcggctcctgcgcctctaaggaagcctgggttccaccccgggaggcccgctgtatgagagcgcaattatgatcaccttgcggaatgccacagagagcaaatcagataggccgtcctagctaaggtggtaggctgcctctcctcgaaaagtcatcttttgccaccatggccactgctcacctaggcgctagcaaggaactgagtaccctctgggctcgcgatggccgcgtcccctcccgctgcggacgggcc

SEQ ID NO: 28763 - DNA, 434 bp, Homo sapiens
  source 1..434: mol_type = other DNA
ctggcctagtccaagggttctcaaactttgggtctcgggattcctttatgttcttaaaagtttaagatattcaaaagagtttttgcttatgtcatatagcctctggattcagaagcctctggataatcagtgaaaaagtattgtgaaaatagttttcattttgttttaaggtcacagctctgaaaccagatttctcaagtctacgtccccattgttacccatgggtgacaaggacagtacctgctgcctgaggctactattttagtccaataaagcacttaaactttgtcttcaacccccagggtaggagtcctagcctaagtctacagggcgttaggaccccacaaggcacttttgtctttccaatatggcagtagccccgcgactgtttggggggctctgcttccgtttccgggaccagaatccggaagtgg

SEQ ID NO: 28764 - DNA, 246 bp, Homo sapiens
  source 1..246: mol_type = other DNA
tctaagcatttttctattgataatttgctaaaaaaacattagtataatcccagctactcgggaggctgaggcattgcactacaaacaaaccattggttgtccatatcaaaggctattattcctaactactatcattgtagtgggccaagggggggattgtacccccctcctccctgggtaggaggcgctgcttctttaaactttgcccaaacttatagaaccgagttccaaagttctcccagaatc

SEQ ID NO: 28765 - DNA, 591 bp, Homo sapiens
  source 1..591: mol_type = other DNA
caatggacttttaaataattcaggggtcacaaatcaaaactttgatctttagaagaaaacttcaaccttaatgcttccaggaggaaagcagaaaacagatccacggtcccgggcgctgaatccacagaggtgcaactgcacaggttcggtgacagccgagacgccgagtgtttcccgcagccggccggggtccaggtcggaaatgtagccagtggggccgccaggtgggctccagacgcggtgggcgcggggtcccggccgccgcgggagaggggtcgccgcgtcccacagagcagtgcggcggcaggggcgggggcgggtgcgtctcgcgacctgctcctgggaggctccccggtagggacggcctgaggccgagggcaccctgagggcggaagaggcaaagcgcctcgcccgccggggcctcggaggtgactaactcctagaggctgacattccatggcccagtgcctcggccactggaaaatcccaggggaccgcgggctccgcggcacactcccaaggagacagccatgttccttgcctgagagtcactgaactctccttcgacgcacacgcgcacgcgcacgcacg

SEQ ID NO: 28766 - DNA, 488 bp, Homo sapiens
  source 1..488: mol_type = other DNA
gcggaaatgcaaaatggtgttaagacctgtaagaataatcgattcctactgccgacagctccattgggcagcatgtccacgttcctggagcagcagccggaataatccaacaatggacttttaaataattcaggggtcaacaaatcaaaactttgatctttagaagaaaacttcaaccttaatgcttccaggaggaaagcagaaaacagatccacggtcccgggcgctgaatccacagaggtgcaactgcacaggttcggtgacagccgagacgccgagtgtttcccgcagccggccggggtccaggtcggaaatgtagccagtggggccgccaggtgggctccagacgcggtgggcgcggggtcccggccgccgcgggagaggggtcgccgcgtcccacagagcagtgcggcggcaggggcgggggcgggtgcgtctcgcgacctgctcctgggaggctccccggtagggacggcctgaggccgagg

SEQ ID NO: 28767 - DNA, 499 bp, Homo sapiens
  source 1..499: mol_type = other DNA
acaaaaccatttttgaaagctggcctcgtacttgagccttaaggcaagtttcatcaaatttcaaactcaacgttcttgggccacaaggcaaatgggcttagaaaacttcttgttcgtttgcggaaatgcaaaatggtgttaagacctgtaagaataatcgattcctactgccgacagctccattgggcagcatgtccacgttcctggagcagcagccggaataatccaacaatggacttttaaataattcaggggtcaacaaatcaaaactttgatctttagaagaaaacttcaaccttaatgcttccaggaggaaagcagaaaacagatccacggtcccgggcgctgaatccacagaggtgcaactgcacaggttcggtgacagccgagacgccgagtgtttcccgcagccggccggggtccaggtcggaaatgtagccagtggggccgccaggtgggctccagacgcggtgggcgcggggtcccggccgccgcggga

SEQ ID NO: 28768 - DNA, 384 bp, Homo sapiens
  source 1..384: mol_type = other DNA
gatacagtgttttcaatcaaggcacaaaaccatttttgaaagctggcctcgtacttgagccttaaggcaagtttcatcaaatttcaaactcaacgttcttgggccacaaggcaaatgggcttagaaaacttcttgttcgtttgcggaaatgcaaaatggtgttaagacctgtaagaataatcgattcctactgccgacagctccattgggcagcatgtccacgttcctggagcagcagccggaataatccaacaatggacttttaaataattcaggggtcaacaaatcaaaactttgatctttagaagaaaacttcaaccttaatgcttccaggaggaaagcagaaaacagatccacggtcccgggcgctgaatccacagaggt

SEQ ID NO: 28769 - DNA, 194 bp, Homo sapiens
  source 1..194: mol_type = other DNA
tgggccagtgattcacagcccagaaatgtcaacgattgcatctctaggagataattattaagaaatagaatatatgactcttgaacattagcagcatctctggcttctacaaactagatgctgatagccacctgagagaccagcctggccaacactaaatagagctatatccaagcttaactacacattcaatt

SEQ ID NO: 28770 - DNA, 308 bp, Homo sapiens
  source 1..308: mol_type = other DNA
tgtttacatttcaaagagatttttaaaaggcagagaaaattttacagttacaagttttctaaaggaaatgctctaagagagacgtctttctcttttgacaccagggaaaattcgatctttaaaaatttgtgatgaactagagctggtgaacatcgccgatcattggttctgattccaacccatttcaaagatggtcagatgccaaagccctaaggaaagccctaggcacgcaggtcttgcctcaactgcgcctgcgcgagtcaggacgagcgcttgccccagatcttgacgtttcaggcggcccctcc

SEQ ID NO: 28771 - DNA, 228 bp, Homo sapiens
  source 1..228: mol_type = other DNA
aaagctggtgggcaaggattgccccaccccaccccccaccaggggtacaggtccatggggagggggctcctgagttacaccccgggaataagaaccggtacccatctcagagacctggtatacagtaggtgctgtataaatgccggctgggtaagtcacttaacccatgtcagacatacaaaacaagggatttttgtgtgcttggcacacactctctccgctccgggc

SEQ ID NO: 28772 - DNA, 227 bp, Homo sapiens
  source 1..227: mol_type = other DNA
tcctgagttacaccccgggaataagaaccggtacccatctcagagacctggtatacagtaggtgctgtataaatgccggctgggtaagtcacttaacccatgtcagacatacaaaacaagggatttttgtgtgcttggcacacactctctccgctccgggcggtgggtggatgagtaatgcatccaggaagcctggaggcctgtggtttccgcacccgctgccaccc

SEQ ID NO: 28773 - DNA, 406 bp, Homo sapiens
  source 1..406: mol_type = other DNA
gtgtatgcatgcatgtatgtaacatgcacctaccccccttgccaccttgggcaagggtgtgtacaccacccagtgggagactaatctccccgcgggcactgcgtgtgacctcacccccctctgtgaggggggtgcctacctgacgaccgaccccgaattgcgcatcccctatcagagagggggaggggaaacaggatgcggcgaggcgcgtgcgcactgccagcttcagcaccgcggacagtgccttcgcccccgcctggcggcgcgcgccaccgccgcctcagcactgaaggcgcgctgacgtcggccaccttggtcgcgtccgcgccgccgccggcccagccggaccgcaccacgcgaggcgcgagataggggggcacgggcgcgaccatctgcgctgcggcgc

SEQ ID NO: 28774 - DNA, 193 bp, Homo sapiens
  source 1..193: mol_type = other DNA
tggacactgcacgccagcccaacacaccctacctatgttgtaggtgctgtctgtgagcacattttacagagggggtccagctgggcccaggtggaaggtggagcaactgactcgatgctccctccacccccccacgaggttgaccccgtcattatgttaagtgactcacggtcaaagcaggatgccctcccag

SEQ ID NO: 28775 - DNA, 297 bp, Homo sapiens
  source 1..297: mol_type = other DNA
tagagaatgggccaattcatggtggaggtttgttcattcccacaacaatcaaagtagagctgccctgcccgcctacgcggagcccgcagcatggcgtgcggtccttgggggctgtcttacagtccgtcagtccttgagccaatcggcgtggagcaccgtgaaggccgaacgcgcctcctcgggactccaggggccgtgagcgttccgcacagctctgtagggaagggcccgtcccccaacccctcgaggccttgctggccaatcagcgagcctcctcgggcccacgtgagctgtagg

SEQ ID NO: 28776 - DNA, 404 bp, Homo sapiens
  source 1..404: mol_type = other DNA
ttaacttgcttgggttttgagcatttgaaaaaaaaaacttgcttttacatatgaaacacaaattatctggattcatcccatggtctggattcttataagttcttgtttgaaaatctaacctgaaaaataaattcactcagtcactctagtgcataagaataccaatcttcggcagagccctctccatttgactatcaaacgaggtgattagacagattatcaaagatgaattttagaaaacctgtctctgtttaaaaccttttaaatgcttatactcagtgatcacacgggatcttccttatagaccagaaccatagtcaatttttttaagctccaggcgccgctttgcccaactggctatttggttggccagcgcgcttgccacttacgccgcgccacccgga

SEQ ID NO: 28777 - DNA, 398 bp, Homo sapiens
  source 1..398: mol_type = other DNA
gctacatttcaccatgaccacatatattttacttcatgaggaaataaaaataataaagtttcctaaagatttttattgacatattgcattggactaaggacacattaaaaattattagtattggtactacgtagtccggggaacccagcactctgagttctcccctaggagctaggagaagctatctgccaggagatagccgcggccgcccctgattcagcagacagctctaaactcacagcctgctctgtgagttcagatcctccaacatggtgtatcccatggggaagcgcgacgtgggcgcggccatgttccccacctgaccacgccgccgaaaaggtggttttgcgcacgcgcggaaccaggggtagtgaccggaagcggctgcggttctcgcc

SEQ ID NO: 28778 - DNA, 284 bp, Homo sapiens
  source 1..284: mol_type = other DNA
gagtagctgggatcacaggcgtgctaccaagcccgggacctcaggtgatccgcctaccttggcgtcccaaagtgctgagattacaggcgagcccaatatatgtgtatttttaacgttactatataatgctatgagctccctggccaaggaggccctagtgtactggatgaagccagtggccaagttcaaagtgcgaaatcggagcagtgacgtcaccggcaaggctaccttcctcaaaggcgccactgagcgtgcgcagaaccgacccctgcagccctttaggc

SEQ ID NO: 28779 - DNA, 446 bp, Homo sapiens
  source 1..446: mol_type = other DNA
taggttttaaaactgcgggaatccattttaaagttatatgttaaatgtttaaaaggcataccccaaaaatgggacatttaatctatttcagaattaatctatatattcaaatgttatttattaaatgccaaaaaaaactacactcctcccacgcccccaacttgggcgaggcccggggtcaggtgagacctcgcaggtgcctgggccgccttgcccagaagccggaaagaggccttcgggtgcgggggtgcaggttcacttcggccggagcattcacaccaggcccccacctcggggcttgggcaaggggagaggagtttaataagccccatttaaaacaagcacttccgcttcgggaccgactctttggcaccgcagcctaaagggctgcaggggtcggttctgcgcacgctcagtggcgcctttgaggaaggtagccttgccgg

SEQ ID NO: 28780 - DNA, 225 bp, Homo sapiens
  source 1..225: mol_type = other DNA
gaatggagaagtccaacttggtgtgcagtggagaaaatctgataccactcctttagtagtggtatgtcattttatggctttaaatatgaagattttcagttaattttgaactgtaaagcacattcttcagttggaggccgaggcggccggatcacgaggtcaggagaccatgtacacggtgcctgtagtcccagctactggggaatcgcgccactgcactccagc

SEQ ID NO: 28781 - DNA, 222 bp, Homo sapiens
  source 1..222: mol_type = other DNA
ggtgcaaaaggccatataagcctacttgaactagggcaggcagaaggaatctcccgggggggcctcctggtggccgggaacgcccactcacccggacaagaccacggccagcgacagaggtcctggcgctggcgtttcggagccacaccctgacatctctccgggaagactggaagggaaaggagccaagcccggcttgagagcagagccggggtgaggggc

SEQ ID NO: 28782 - DNA, 123 bp, Homo sapiens
  source 1..123: mol_type = other DNA
ttccggggctctgttaaccacatcacgtgactttactcagatttgggtctaagttaaggtgcaaaaggccatataagcctacttgaactagggcaggcagaaggaatctcccgggggggcctc

SEQ ID NO: 28783 - DNA, 163 bp, Homo sapiens
  source 1..163: mol_type = other DNA
cagtgtcacagattctcatgcctcagcctcccaagcggctaaattttgtattgccaggctggttccggggctctgttaaccacatcacgtgactttactcagatttgggtctaagttaaggtgcaaaaggccatataagcctacttgaactagggcaggcaga

SEQ ID NO: 28784 - DNA, 250 bp, Homo sapiens
  source 1..250: mol_type = other DNA
tttaaatttcttttttaaaaattttttatagagatggggcaaggcaggagtagttattttttttgtagagaaaagagacagggtattggggtgcagtggcatgatcatggctcactgcaacctctccagaagtgccgccctgcttcatatacactccttctctgaaatcagagcatgcgtactctgaacttggagtagccaatcccaggggaagcctagtccatcatcctggagcaatgacattgcagaa

SEQ ID NO: 28785 - DNA, 222 bp, Homo sapiens
  source 1..222: mol_type = other DNA
ctcgaggccacctggccaatgagaccagcctggccgtttctacatacattttcctctctcggtccacacttagattccctttcaaactgttttttcagtggcaacagatatagaagctgtgctcaagtagaaaaatcacagattgactatttttttcttccccactttttcgcagtggcgaggacacaagcctgggattcgctactttaagttcagagtacg

SEQ ID NO: 28786 - DNA, 363 bp, Homo sapiens
  source 1..363: mol_type = other DNA
attccataaaaattgatgagttcatgtcctttgtggagatgaaattggaaatcatcagcgcaccagcgtggcacatgtatacatatgtaactaacctgcacaatgtgcacatgtaccctaaaacttaaagtataataataaaagaggttggagggccttggactgtttttttagttccaacagatgtagaagtgctagtttggaaaacattgtgtctttcaaatagaaaaatcacagatcgactattttttctttgtcgcacaaagtgtgggcgtcactgtctgtcagtccaggctctagggacagaaccttcccaaggcgggggggaggggagactctgattttcccgccgatttaaattca

SEQ ID NO: 28787 - DNA, 363 bp, Homo sapiens; identical to SEQ ID NO: 28786
  source 1..363: mol_type = other DNA

SEQ ID NO: 28788 - DNA, 271 bp, Homo sapiens
  source 1..271: mol_type = other DNA
agggcttggacaagccccaccccacgcttggggtggggtccaggactacagtgcccgcccagtttgcggacagtgtgagttcacagtccaccctctgggggcccccaagatctagggtcctctcgtgcctaggctgtctgcctgaggtctgcctggaatagcctggctactacaagtgggtccagatagggggcgccccttctccacctcttcccccgcccagggccagaaggagggaaacgaaattaaaattaacatttcttctcaggaa

SEQ ID NO: 28789 - DNA, 477 bp, Homo sapiens
  source 1..477: mol_type = other DNA
tcatctgaacctggattcaggttcagatccagggccatctgaacctggatcgtgtgtgtgggaaagacccaggacccacacacaatgtcatcagctgtgtgtaattgtgcacctgtgtgcaggagtctctctcccgctgtggggaagtaaacgccccatcccttgtcctcctccaactgtgggtggggtgagggcatctaagctttgaagccccagccagctcctggcctttccgggaattcccgggcgaggggcccagacagaggcctcttgtccacctgggcttcaagcagcccagtcgaggtggtcccagaccccaagtccaccctgcctgatcctgtagcggacacgtggcttgcctgggacaggcatgcctgtcatatgcctggaagggcttggacaagccccaccccacgcttggggtggggtccaggactacagtgcccgcccagtttgcggacagtgtgagttcacagt

SEQ ID NO: 28790 - DNA, 324 bp, Homo sapiens
  source 1..324: mol_type = other DNA
aacttactcaaaactggtaacttcctaattttaccacatatctgtatggtaaaaataatacatgatagtgcactatggttaaccaagcacatggtaaacactatgataaacgttttcattatttttccgttgaatttaaaatatttgaagatcacagaatactttccagaattagctgtagtgcgatctgaaattgcagccgagcagcctccgcgcgctcgcgcattcccggcacgcgaatgcgcgtcgcgtcgctgcagccacgcagtgcgtggattcagccgctttggccgtgcccgttgccgggaaacgcagttcgcgagc

SEQ ID NO: 28791 - DNA, 290 bp, Homo sapiens
  source 1..290: mol_type = other DNA
agcccacaatgacgcgatcttggcccttaagagctttataaatgcgtccccaggggcctttcccatctgtgatgggggtgcagcggcttccctcctccctcccctcacttccaaggcttggaaatttggagattcggaagagaaatcctccggaggcagacggtctggggctgaaaccgccacaggccggaaaggtgcgggcgtgaacgtcctgcgcgccgacgtccccccgcgccgcctgctctcccattggccgagccggcggccgggccgccccgggatttaaaggg

SEQ ID NO: 28792 - DNA, 485 bp, Homo sapiens
  source 1..485: mol_type = other DNA
gcgggcgtgaacgtcctgcgcgccgacgtccccccgcgccgcctgctctcccattggccgagccggcggccgggccgccccgggatttaaagggcccgctcgccgcgccgctctgggagccgctgctggtcccggccttgcggcctgcgggggaggctgcccggaggaggcagcggcggcggcagcgcgtcctcggtccccaggaccacggcttctttcctgccaggtaggtcgccagtagtgcgcacgcggctccccagctcccatccctgggccggcctccccaggcggatctgtagcgcgagtgctagggcccccggacctgggcagggatggggggcgcggaggatacaggacaccccccctccccgtgccgccgcatccacggctggactgttcacagcactggagagatcacaggctgtgcgtgtgcatgccgaacacccacatgcacacagttggtggctcagtctgacagatctatc

SEQ ID NO: 28793 - DNA, 281 bp, Homo sapiens
  source 1..281: mol_type = other DNA
gaactcctgagctcaagtggtccactcgtcttgtctcagactggagggcagtgatgtggtcactgctcacttcagccttgaagtccccggacttgaattcctggcctcaggtgctgctcctgcatcagcgcctggcctttataggccgggcacctgtagtcccagctactcggggcagtgagccgaggtcgcaccactccactccagaagtgttacaatcctgtctgtatttacatttctcatgataataaactatttgaatttgattttattatctcatt

SEQ ID NO: 28794 - DNA, 231 bp, Homo sapiens
  source 1..231: mol_type = other DNA
cctgtagactggcttcaagtgtgtggtgccaggcacctgtaatcccagctacttgggaggctggggcaggagaatcacttgaacccgggaggcagaggttgcagtgagctgagactgcaccatctgtggacttcagttcaaatcggtactctaatctgtagaatgcttagagtatcatgttgaaactaaatctcttttttaacagaattaagtgagctagcaaggtcagca

SEQ ID NO: 28795 - DNA, 441 bp, Homo sapiens
  source 1..441: mol_type = other DNA
tcagcctcccgagtagctgggactgccgcccaggctggtctagaactcctgggctcaagcgatcagcccgccctgctgagtatatttttaaaaacactttacccgagggcctaaaccctgtttatacaagatatacaaaaattggctgggcgtggtagcacgcgcctgtagtcccagctcacagtgagctgtgatcgcgccattgccctaaaaaaataaaaaaaaaaaggatttttttctgttcagtggattcatgtatttgaaatagatgacatcatctgccagcagacttgaggcggggtgtgggcctgacgtcatcacgcagcctgctgaagagcaaaatgcccgactttgcgcagaggcgacctccaggcagggccaggtgggagggacggtggggggtagggtcgcgcggcgccctctgcgcctgcgccccggcac

SEQ ID NO: 28796 - DNA, 157 bp, Homo sapiens
  source 1..157: mol_type = other DNA
gagtaggtgggactacaggcacgtgtcccgcccgctttgcatggcttcacgccagcagtcacaaaccttaaaacgttgggtctgacatcgcctttaaagggtatggagagcacgcacgccgggacgcgcaaggggaacgttccgggacgttctcgct

SEQ ID NO: 28797 - DNA, 267 bp, Homo sapiens
  source 1..267: mol_type = other DNA
accagcctggccagctggtggcaggcgcctgtaatcccagctgcttgggaggctgaggcagggcttgaacctggtgccactgcattccagacagagtgagactccgtctttcttaaatttgttaaaacttgattttgtgaagtttcattatatcatgctacaataagctaaaacattgccgtgtaatgtaatgtgactctgaaaaggtgcctttcaacagagacctgcacgtctccacatgggccacgtaggaaggtctgtggggaa

SEQ ID NO: 28798 - DNA, 205 bp, Homo sapiens
  source 1..205: mol_type = other DNA
caaaccttaaaacgttgggtctgacatcgcctttaaagggtatggagagcacgcacgccgggacgcgcaaggggaacgttccgggacgttctcgctaatgtcctgcgaaacggcggctcctcgccacacacgcgccgcgccggccgtgaccggggaatggcgtcggtggtggcagtgaccacgcgacagccgacactggccgccg

SEQ ID NO: 28799 - DNA, 265 bp, Homo sapiens
  source 1..265: mol_type = other DNA
cgccactggactccagcatcccaggggtgtgcagaggcccactgcaagaactggttttgcttggacaagattgtgctgctaaaaagtggccaggctagagtgcagtggcgcgatctcagctcactgctgggaccaggctggtctgattacaggcgtgagccaccgcgcccggccctacaccactttttaaaagtgggaatgacattatccttgtatacacaaaaagtgctccgtccttgggcttgaacgagactcccacgccctg

SEQ ID NO: 28800 - DNA, 324 bp, Homo sapiens
  source 1..324: mol_type = other DNA
tttgcttggacaagattgtgctgctaaaaagtggccaggctagagtgcagtggcgcgatctcagctcactgctgggaccaggctggtctgattacaggcgtgagccaccgcgcccggccctacaccactttttaaaagtgggaatgacattatccttgtatacacaaaaagtgctccgtccttgggcttgaacgagactcccacgccctgctgatagcaggcagccatcttgcctgacagtggtctcagggccgctccggggggcctcaagaaccggaggcagccccggaggtggtccccgatcccgggctatgctcttggatc

SEQ ID NO: 28801 - DNA, 398 bp, Homo sapiens
  source 1..398: mol_type = other DNA
ttacatactttcataatgcttgtaatatatacttctatttcaacttacataaacatgaaatgtaaaaatttcaatctgtaaagaggtggaaaactgaggaaagtgtttattcccttacacacgcttcgccaaaggccctggcacgtagggcgtacaattaatctaactttggtatactatatccagagaccacagggggctcgctctgcgagagaaccccgctgggaggcgcccagtgcaccaggcgccaaggccccaaaagcacggctttcccggagcccgggctctggactggcacccactgcgcatgctccagagcggcgaccaatgggagcccggcgcgcagggacggaggcgggcccgggccgctaccgagccccggccctgagccaattgcc

SEQ ID NO: 28802 - DNA, 246 bp, Homo sapiens
  source 1..246: mol_type = other DNA
tgccaccgcactccagcctggcgacagagtgtcactggagtgcagtggtgcagtctcagctcactgcagagcagctaggttacggacctcgggcctcagcctcaggctacctaggtgctaggaggccacccaggcccatgactactccttgccacagggagccctgcacacagatgtgctaagctctcgctgccagccagagaggaggccaggcccaccaaggggcccctggaggacttgtttccc

SEQ ID NO: 28803 - DNA, 328 bp, Homo sapiens
  source 1..328: mol_type = other DNA
cagctggccatctcagcttcaggctgacagcccgcctgggggcatggctgaggcaggctggctaacagtgctgtctgcctgcctccagggagtcgccgctggccagggcagccagtattgactgcgcacctgtctggggcgaccgcctgtccacctgggagccccggcctgctgctgataacgtgattggctagcagtgtgacagacagaccaggcacgggcagggcctctggcaactttagctaccgccgctgtcgctcccgctgccgccgccgcccagacgcactctgggaaagcgcggcgagcacccgcctccgggaccgagccg

SEQ ID NO: 28804 - DNA, 424 bp, Homo sapiens
  source 1..424: mol_type = other DNA
caggctgacagcccgcctgggggcatggctgaggcaggctggctaacagtgctgtctgcctgcctccagggagtcgccgctggccagggcagccagtattgactgcgcacctgtctggggcgaccgcctgtccacctgggagccccggcctgctgctgataacgtgattggctagcagtgtgacagacagaccaggcacgggcagggcctctggcaactttagctaccgccgctgtcgctcccgctgccgccgccgcccagacgcactctgggaaagcgcggcgagcacccgcctccgggaccgagccgggcggcagggaggggttcggtcacggctctccggttggtccgcgcgggtgctgcgagtcgggagccgcggccaataggctgcgcgttcccggccacgcccgcgcgagcgctcttc

SEQ ID NO: 28805 - DNA, 300 bp, Homo sapiens
  source 1..300: mol_type = other DNA
cccgcctccaaggcagcatggcgggcaagaatatctgctgccccagggcaggccggagctggcgtaagccccagtggggcgctaagtgagtgtgcccctgcctcccgccagcactggcctggcctgcaggcttagcctgggtcatcaagggctttactctctgaaaagcccagtgaagtcatgaaaccatatctgctattttcattagcctgagggcctccagtgcccaagaggtgccccacaagcatgggacccgccccacccactggggcaccagccactccctggggaggagggcct

SEQ ID NO: 28806 - DNA, 221 bp, Homo sapiens
  source 1..221: mol_type = other DNA
tcagaactctagaattgtgagaccgtcaatctgtcagtctgatgagagggggtgcctagggacagctccccagacgcacacaagatagggagagctgctgcccatgagaactcccatcctcaaggccattctggccctgggccttagaatattgcggcagaatattaatagctaatattcggccagtgatagtgaatattaactcggaaaatcctcacatt

SEQ ID NO: 28807 - DNA, 423 bp, Homo sapiens
  source 1..423: mol_type = other DNA
agaatattgcggcagaatattaatagctaatattcggccagtgatagtgaatattaactcggaaaatcctcacattgcccgcgctacgtcatcacggcgcgtcgcgcgggaagtcgcggggaaaaggtaagatgccccttcctaattcagtgggcggcggctatggcatccgggacgacagcgggaaccgccggcgcctgccttttacgtaggcgcagcacagctggcgtagcacgccgacgcaccgccccgtcgcctgtgagctcgcggtgtggctcagcccagctggcgtagcacgccgacgcaccgccccgccgcttgtgagctcgcgagaggtgtggctcgcgcgaggggcgcggccttgaggcacggtcccctctggaggcgggatctgggctcgcgtccccacaggtcgccagaatg

SEQ ID NO: 28808 - DNA, 422 bp, Homo sapiens
  source 1..422: mol_type = other DNA
ggccaggcatggtggctcaacgcctgtatgagctcagaagttggagaccaccagctacttccggccactgtcctccagctccaaggtcactttgaggtttacgccgctgagagcctgagccttagaatggccaactgagctgtccatggtcacgaacccatctccctggcgcgggccgggcccactgcgggtgatccattaactatttatctaatgaccaggaagagagatgaggacctactaaggtaacagtaaggtcggttgccccagcaactgccctccgactgccatggcaaccgccccttggcatctccatggcgacgggaggtctggtggggctgccagctccccaggctgcgcctgcgtcggtcgggtgggggcctggttccgggcgtgcgcagccgcagagcgccgcagcctcg

SEQ ID NO: 28809 - DNA, 291 bp, Homo sapiens
  source 1..291: mol_type = other DNA
atgtcaggaatccacattgttaacaacgaaaaatgccgtgctgcctgtcgaggctggcactggccaagcgggtctgcagcgcaacgggcagcggcatgattcctatctggatcggtaggtggcaatatcatcgcaactcccaggtgctccagggccctgttcctctcccaggcccaggctccgcccagggatgggggagcagagggcagcacttcctcccaggtagtggaaggctgtctcgattggccaatgagagtaagctccgacgccggtgtgcgtctacgctggggg

SEQ ID NO: 28810 - DNA, 355 bp, Homo sapiens
  source 1..355: mol_type = other DNA
aagttcctaagtggaacaaacacacccccccattaaagcgagaaatggggcaaagggggagaaatattagtcttcgccctgtgtgatcaaagattaagcgtgttaaggaccgcgtcgcaccccttctccgacggtgagcccgtgcgggaagcatccaccgggggatttccaccacccctagccgggatggatcggaaacatggcgtggttcggccttcgcccgatgcctcccccgcccgacccccacggctggccttggcgtcgccatggcgctggcgtctggccgcgcagtcaggccacgcccccagcgtagacgcacaccggcgtcggagcttactctcattggccaatcgag

SEQ ID NO: 28811 - DNA, 229 bp, Homo sapiens
  source 1..229: mol_type = other DNA
accccaggggaatgaaggaaaagccctgtcagggtactggccagggcggggctggggagagtagctgggtacaggaactcctgagctcaggtgatcgcccggctcagctgggattacaggcgtgagccaccgcctctggcccggactgtgtgctctccagggggcgaggcctctctggaagacgggaagtagtttctgatacggaaagggcggcgccttatggagaagc

SEQ ID NO: 28812 - DNA, 284 bp, Homo sapiens
  source 1..284: mol_type = other DNA
agagtagctgggtacaggaactcctgagctcaggtgatcgcccggctcagctgggattacaggcgtgagccaccgcctctggcccggactgtgtgctctccagggggcgaggcctctctggaagacgggaagtagtttctgatacggaaagggcggcgccttatggagaagctggtgggtaggccgatcgggccgtgtccccggcctcccgatccgacggaatttggaaatcccggggcttctcgctccaccttcactcaggtggcccggcagcggaagtgacg

SEQ ID NO: 28813 - DNA, 237 bp, Homo sapiens
  source 1..237: mol_type = other DNA
agactagacttgctgactgggcccagggctcagggttcatggtagaggccgccagtcgcctggaggactccggtgaaggagtccttgagacggatactgcgcagttattttttaagtgtaaatacacacacatgctgcaaagggattcccagaaccggtttcctcttggtgtgagccgcaggccccgcctcctcggaagaaccgagggcggggctgtcgcccagggtgactctcccg

SEQ ID NO: 28814 - DNA, 495 bp, Homo sapiens
  source 1..495: mol_type = other DNA
ggtgccagagaaggcgtgtctgtttcccaaacaaccactgtccgcgtgacggcgtctgctgttgccggggcgaagcggtgtccgcctcccccggatgacgctacaggggccagctatgctcccggtccggctgacagcgttcaagttggaatcccgtacgtgggacaggccacgctgtccgtccgcagtaccgacgcctgagtcgactttgactgaaatttgagacggagggcaccggagggcgagcactcgcctgtgattggcccgtgggcgtcgtcgaggtcccacgcagggcggcggcggcgcgagtaaggggcggggctgtgccctggcgcgcgtgcgcagcgccccggggccccacccggtagtgcaagaacctgcgagggggcctgtttccggcgtgacccgcgcgccgccaccgccgccgccgccgccgccgcctcctccgccgccgagggttctcgaaccggtgccgcgatcggcgctcgtgcctcg

SEQ ID NO: 28815 - DNA, 329 bp, Homo sapiens
  source 1..329: mol_type = other DNA
tctctgatcctcggattagaattattgccaatttatagaatagaaattaattagcatggcactagtagctctccagctactcaatagcctttcataaacctcgatcgacccaagcaaactcagttttagaaaaaggctgggcttggccaggcgcggtgactaacgcctgtaatcccagcatggtcccagctattcgggaggctgaggcgggagtgtcgcgcctgcgcactagccggtgccagagaaggcgtgtctgtttcccaaacaaccactgtccgcgtgacggcgtctgctgttgccggggcgaagcggtgtccgcctcccccgga

SEQ ID NO: 28816 - DNA, 529 bp, Homo sapiens
  source 1..529: mol_type = other DNA
gactaccccctcggagtggggcctgcctgagatggtaggggggtgggacctggattgtccccctctaccaatcccacagccgaagtcttagagctggggctgtaacccatgctgcgcccctcaagggggcggcttcggaagcttggccagctctcctgcctttccacagtctggggggcagggaggggacagcgctgccatcgatcggatctggagagaattggcgaagttccctgccaccggaggcggagtctccccagggtccctctctggctgtcctaggggagggggctcagggagccacgaggcccctccctgcctctccatctcccggcaagctcagaggggcggggagagagaagctctgcagagggggccaggagctcgggtgtttggtacccccagccccaccgctgttgctgctcctgcagcggggacacaggtgagggagagagagggggagggggaccaccactagcgctgtcctcatcctcctgggatagtccccaggggtcccactggaccttgc

SEQ ID NO: 28817 - DNA, 444 bp, Homo sapiens
  source 1..444: mol_type = other DNA
gaaaggctaggcctggccctgcattacagtgcccctctggtgtgagctgtgtccagtgctatcacctttcacatcatgtaaagctggggtttgaacccaccgactaccccctcggagtggggcctgcctgagatggtaggggggtgggacctggattgtccccctctaccaatcccacagccgaagtcttagagctggggctgtaacccatgctgcgcccctcaagggggcggcttcggaagcttggccagctctcctgcctttccacagtctggggggcagggaggggacagcgctgccatcgatcggatctggagagaattggcgaagttccctgccaccggaggcggagtctccccagggtccctctctggctgtcctaggggagggggctcagggagccacgaggcccctccctgcctctccatctcccggcaagctcag

SEQ ID NO: 28818 - DNA, 150 bp, Homo sapiens
  source 1..150: mol_type = other DNA
gcgcctgtaatcccagctactcgggaggctgaggcaggagaatcgccatttcttactctcaggagggtaatacttgaatgagcctggtgtttcaccaccgtattccccttctgtcggcaaagacttccctagcgactgcgtctgcgcaga

SEQ ID NO: 28819 - DNA, 336 bp, Homo sapiens
  source 1..336: mol_type = other DNA
ctgaggctgggagaggggaggtccccttccctattcattaagcacatattgcgcccagctgggcccgcaccttcagtagctgcctctgcctcatagttatggctttggctgagagagcacagccagatcgagtgccaggagaccctccgtgcgccgactggccatcgatgcgcaggcgcagactccgcgtcggaggcgtcgcttagggtgggccctcgaatcgccgttcagcgattggccgcctcgctaatgggtcgtggccagacgggccatccatccccagtgcgttccccatccctgggaggactgggcgggggatgactcacagcccatccc

SEQ ID NO: 28820 - DNA, 445 bp, Homo sapiens
  source 1..445: mol_type = other DNA
agaaaatggctgtgaggaggctgggtctgtgccatcctgctacatttgtaggaaccaagagtctgtccccaacttgggaaactattattccccagtgagggtgggaattgccccaaggccttctaccactgccttgccctgggaggaaagggtaggggctcagaatgtgatgcttagtgccaagacacagatccaagttgccccttgggtgggcagcgtctaatgggaatttgggcagtaggagaggcagctgctactcccaccactctcacaggcctccatgcctggccagttttaaaaaaaatttttgtagagatgggccctgcctggcccaggctgtcttcttagacatgctgagcaccgcccccaggggtgaccctagtcctggtggcagactgggccggcccagttcctggccaggtaggctgggccattacctagtggg

SEQ ID NO: 28821 - DNA, 159 bp, Homo sapiens
  source 1..159: mol_type = other DNA
ccccaggctggagtgtccggagacgggagaccctggctcttggggcccagggtgggtggtggtccggaggccgtctctccgcccggccggctagcccttgtacccgcaggtacgtgcggccacttcatacgctcctgagcgcgctgcggcgtgctggtg

SEQ ID NO: 28822 - DNA, 356 bp, Homo sapiens
  source 1..356: mol_type = other DNA
actggagcctgtggctgtggcagcctctgacctagggacctgcagtggcagaactgcagagctgagccttggctggaagccaccagccagcagcgagctatgtctaaataaagagctctgtgtgccccaagggccccaggaagggaccccttgggatccctacctggggattttttaaaagcttcctaggaagatacgaataaaaggcccttaatggcatttacggctaggtggaatccaactcggatccttgagccgctggcaccgcccggagcagcccctgcggcgccccgcgcgggggtggatgggccgcccctgcgcaatccacctaggaggtgccccgcggtggcgagggg

SEQ ID NO: 28823 - DNA, 353 bp, Homo sapiens
  source 1..353: mol_type = other DNA
aggttggacctgaaaggattttgaggctcgcagaccctaggtcctactggagcctgtggctgtggcagcctctgacctagggacctgcagtggcagaactgcagagctgagccttggctggaagccaccagccagcagcgagctatgtctaaataaagagctctgtgtgccccaagggccccaggaagggaccccttgggatccctacctggggattttttaaaagcttcctaggaagatacgaataaaaggcccttaatggcatttacggctaggtggaatccaactcggatccttgagccgctggcaccgcccggagcagcccctgcggcgccccgcgcgggggtggatgg

SEQ ID NO: 28824 - DNA, 332 bp, Homo sapiens
  source 1..332: mol_type = other DNA
tttttaaaagctttatcatagtttttttttaacccaaagcattcataccttttactatcaaaaagctattttgtattttgtaaaaataaaagcaggcacgcctgcagtcccagctacgagatcgcgccactgcactccagcctgggagacagagcgagactctgtctcacgaaatctgttccttggcttcccgccccagcgccgcccctctgaaccggggcggctactctcggccgccgcggaggtccgcgtcccattgtgggtgaccgaactaggcgaggaaggcggtggccgcctttttccagcttcctgcgacaggctccctcccccgg

SEQ ID NO: 28825 - DNA, 490 bp, Homo sapiens
  source 1..490: mol_type = other DNA
caggctccaccaccactggtggatggtcaagaacccagaacaggcgaccgacctctctcagagctcccttctgtgaggctcagccagaggcctgcagggttgggacaggctcctggagccctccccagcccagtcaggagtgcccactccccaccctgtgggtgaccctaggggtgtccactccccagcgtgtccgaccctcggaccccagagcccgcagcccacagcctggaatggcctgccgcgcgcggggcagggacgcgcgcacgaaaaagagcccctcccccgcgcggggcccggcatgctcgtgcccatcccgtcctgttggcactcccagacccgagcggccctaggcttagtcttaccctcccgccgcggaacaagcaactggcttaaggccggggccggtagctgcccgggcgcgcctccgcccctgcgctccgggctcccagtcgccgctctggggcatgcgcagtgggtgccattcagt

SEQ ID NO: 28826 - DNA, 258 bp, Homo sapiens
  source 1..258: mol_type = other DNA
tgggattcctattttatgtctattatttattattgtacacaacccaggctggaacctcgaattcccaggcctcaggccatgcctcagtaaatgatttactaggcgctccataaatattaatgtctggcaagaatgaacggtgtcagctactcgggaggctgaggcaggagaatcgcttgggaggttgcagtgagccgagatcacgccactgcactgggcgcttggcgcgacgcgctcccaccacgtgtgccacagtgg

SEQ ID NO: 28827 - DNA, 424 bp, Homo sapiens
  source 1..424: mol_type = other DNA
accaaattggctaccaccttggatattttgttacagtagttctaaatgaataagactatgctttcttttacaggccgggcacgagtggctcacgcctgtaagcctcgcctgtaatcccaccagctactcaggaggctgagtcaggagaatcacttgaactgtctaaataaataaataaagttgcaatatcattttacatttccaccggaggtataggtcaacagttggtattgtcaggcttttaaattctaactctgcagcagagtgaggccaagcactcctcctggctcctacagccaggcctccttgctggccgccaggtaggtcaccgcgcgggtccgggagccaggcacgggacccgccagcttcagcctccagggcctgggcgggccgccaggtgagcgcgccccagagctcaaattcg

SEQ ID NO: 28828 - DNA, 348 bp, Homo sapiens
  source 1..348: mol_type = other DNA
cccagatcgcgagcagcacttcccaagaagacccggggcagcccggagcctagtccagaggcggccgccgatggccccacggtcctgagcgccgcgctgaggatcccaacgaccagatcccgggttccccggggccctggctagtgcccagcgaggaacggctctcgcgggccctaggggtccggggggcagcgcagcctgagcctacctctggatccggcgcgtgtggccgctgggcacttggcacctccccaagagcttccggtttggtccacccgctgctcagtggctctgaccacactcccctcgcagcgtcagtggtacgacccttccagccggctagcctgc

SEQ ID NO: 28829 - DNA, 177 bp, Homo sapiens
  source 1..177: mol_type = other DNA
gctggtctccggccgcctgggctaatttttaaaattatttgtagagctggcatgaactttcttgaagaaatccctcaggtgatccacccgcctctgggaaaactttctgaaatcaaaaatattccgaattctggcaacatactgtattcagttaaggaaactgagtcatttgcattc

SEQ ID NO: 28830 - DNA, 310 bp, Homo sapiens
  source 1..310: mol_type = other DNA
gccgcctgggctaatttttaaaattatttgtagagctggcatgaactttcttgaagaaatccctcaggtgatccacccgcctctgggaaaactttctgaaatcaaaaatattccgaattctggcaacatactgtattcagttaaggaaactgagtcatttgcattctggtacctggagctgccaagcacccctgcgatggggcgccccgggggctgtgcgccaggctgggagtaggggggcggggcgagggggcttccggggcggcagccacctggcccggctccggccccgcccgcgtcagctctgcgc

SEQ ID NO: 28831 - DNA, 506 bp, Homo sapiens
  source 1..506: mol_type = other DNA
cctctccactccacgggaagtgacagggacaggggggcggggagaggtccccggggcccgcgatgaagggcctggccgctgcagtctccgtgcatagagacccgggccgagttctgactgaggccatgggaccccctccccccagcccggaggcacagccaagcctgagagcgtgaaggagaggctccccgccctggaatggctagggccaggttcccaggttcccagcgagcaccagctggggctgcgggtgaggttggggcccatcaccagtggggaggagccaagaggtgccaggtcccgtgagaggccacgtggcacgccgggattctgggggtcgtgccttgtgacgccccgcaccggcccggagcgggagggcagaggcctttcccgcggggcactccgggctacgtgcagttcacctctaggcagggggcgccctggcagcggagagaccacatgcccgggggcgggccctgcggggcgcgctcctcccacgagggtgt

SEQ ID NO: 28832 - DNA, 402 bp, Homo sapiens
  source 1..402: mol_type = other DNA
agtgcagtggtgcaatctcgcctcagccaagtggctgggattacaggcgcctgccgcctggccgaagttgagcatctttcatagccatcactgttgaccttgatgggctgggcactgccagctagtagctggctgaccttgtgagagtcacttaagtctggggaattttcctctgtaagcattaaatgagtgaacatgtttaacaaactcagaaggcgagcagggaggtctcctctccccggtcacggctccagcctccgggccggaatggctgccggtgagacaacccgctgtgcgcaggcgcgtggcgggcaaggagggggcgcgaggggcggggctgcagccgcctgggctgttccaacgagcgcgcgccgcccccgccgcgccccgcgccgcccttgc

SEQ ID NO: 28833 - DNA, 544 bp, Homo sapiens
  source 1..544: mol_type = other DNA
gagagccccgcggtggccgcgcccgcctacagctacgcgctcagccggcagctcagcggcggggtctcggagaatcggcccacagcggaccgctggcgtacttcgcctccgacgagctgacggtcaagaccaaggatatggtaggacgagcatggctacatctcccgatgcttcatgtggactgtcccctgagggcacactgaccgtggaggcccccatgcccaagctagccacgcagtccaacgcccggatgcccaccccggccgccggttgttctcaaataaagttcgaagcaacccaaaatttagtgcacacctgcagtcccagctacagaggctgaggtcagaggatcacttgagcacaggaatagcctgggtgacagagcaagaccctgtctctaaaaataataataattgataatatttgatcttttttccatagagatattgcacatatattaggtacttcgaattccatatactactggaaaatgacatcgttatatatttggtaaatatttgcggccttaatccctccaaagctg

SEQ ID NO: 28834 - DNA, 418 bp, Homo sapiens
  source 1..418: mol_type = other DNA
caagaaatggttacatagatttcttttgctttatttagtagctgggactacaggcatgtcctgacctcaggtgatccacccgaactgcacccagccggttacatagatatttgctgtgtaattattctttggagtgtacaaatgtgtatcatattaaagcatttattgaatgcatggacactagtaactataactgcacatagtacaacgtgctttatataaattaattctgttttaatcctaaaaagcaggtactgtcaatagtcccattttacagactaagacaaagtagtcgctttgtgttaaaattctgcccttaatgtgtacacttttatagcctagaagatgaatgccgccttaaacgaatgagtcaggaagcactggactgcaggtggaagaactacagttcccagcagct

SEQ ID NO: 28835 - DNA, 461 bp, Homo sapiens
  source 1..461: mol_type = other DNA
ctgagggcctcagaagcatcaggccatgatgttcctgaaacaagagggtcagggtcccaatgggcctctggggttcatcgtgaggatggggggacctgctagggaccttcccagtgggacagtggctgtaaaacgtgatgaggcgagacttttctctctttcctcattcagtaactgtcagtagattctgggagccagggattctccgactcttcaagtccatgaattttaggggatgacagtgggctctccgtttctcctccttacatgcccctcaccctctgtgggaggggtgttgcagggggtgcagaactcccctcgccggcgaggcctctgggttcaaactctatacacttttgttttaaaaactgtgggaaatcatattttcaaagaaaaaaacccaaaatttcaaaatttccgtttaagtctcataatcatctttcttctcggtataaaagcaa

SEQ ID NO: 28836 - DNA, 50 bp, Homo sapiens
  source 1..50: mol_type = other DNA
agagggtaaccccatccacaccccgctgcccgccccttcaggccctgccc

SEQ ID NO: 28837 - DNA, 274 bp, Homo sapiens
  source 1..274: mol_type = other DNA
aagtcctgagctcaggtgatctggccagctcagcctcccaaaatactaggattactttcttatataggggtcttatctatataaagactaaagttaatctatgatgacttttatcattctattgatttaaagaaaactgtccttgactcaattctgttaagagaccccatggtgggtccggggcaaccttatcctcatttggggcgtggcgctgggaacggcagccctccccagcccacagccgcgcatgctccctgggctcccgcctcagtgc

SEQ ID NO: 28838 - DNA, 287 bp, Homo sapiens
  source 1..287: mol_type = other DNA
aagtcctgagctcaggtgatctggccagctcagcctcccaaaatactaggattactttcttatataggggtcttatctatataaagactaaagttaatctatgatgacttttatcattctattgatttaaagaaaactgtccttgactcaattctgttaagagaccccatggtgggtccggggcaaccttatcctcatttggggcgtggcgctgggaacggcagccctccccagcccacagccgcgcatgctccctgggctcccgcctcagtgcgcatgtactgggc

SEQ ID NO: 28839 - DNA, 244 bp, Homo sapiens
  source 1..244: mol_type = other DNA
cagagtgcagtcgcgtgaggactcccgagtagctaagatctcgaactcctgacctcaagagatccgtttataaaatagcatctttaaaggcttttctgagtaattttgaattatatgctagacatttttaatatttagttatgagactcttagtcttgtataatgctgtccttgtccctatggcagggccagagcaaggggtgtggggctgggaactgcagccctccccaccttccttcccgtc

SEQ ID NO: 28840 - DNA, 285 bp, Homo sapiens
  source 1..285: mol_type = other DNA
cttagcagggctctttgctaaaactgggttttacaagcctgacttaaaagtttggccaagcaagattgtcaacattcaagacagtttccttaacattaaagtcctagaagtagaaatgctgggtcacaggattttttattttttgactcaagtagctgggacgtcctgggcatgatgagctgccgcacctggcctgccgagcaggcccttcctccaggtggcacagagcctctagcacgtgacacacccccgaggtttgggattggcggaggcagaagtaggtag

SEQ ID NO: 28841 - DNA, 473 bp, Homo sapiens
  source 1..473: mol_type = other DNA
catccttctcctagcaggcagctatgcggtctgagtcctggaggcatatgaactgtccataaaggacggatgctggggtcctcagtgggggccagggaaagggtgggacagcccgcgcttgacagcgcctctctttcacctgagactgagactcagtgggtgggtccaccgatcggcacagtccgtggcctcggaggaggaagggcctcacaggtggtggcgccgccatgaccttgtggttgtggtatctttgagtcccagaggcacctgaaactgccgaaagaggacaggtttcggagtattaaaaaatctcttcataatggagtttagttatgaaattaagtctctttaggaaagaccccatggagatcctttgcagatagatttatttgttattattaatatggaaatctcaaaattacaatcagatggccatggaaagagtcaagtataattactcctttttattgcag

SEQ ID NO: 28842 - DNA, 539 bp, Homo sapiens
  source 1..539: mol_type = other DNA
taattagctggatcatcttaagtgagtcagtggagtaagttagacctaggttggattcccagttctaccactgttttgtaatgattaatatggagataatacagtactaacaactgcagtatagtttttgcagcgttgctggaaacatcaagttggctgttaaaagtatcactacgtttgattactattatatgagtttagacaagttacttaacctttctcctgtgtatttttatgagtaaaaatggagaaataaccaagcagctcaaattatgtgatctaatgttattagtattagatttctactactaattacagacagtttcattctaaggacaaaccttctccccatggggcattgcgttttcaaagcccgcccgcccagtcctcattaaatatggcagcgagcggggccgacgtactgcggctgctcctccccggcgggcctcccctcatctcggctgggtagaggtgccgggtgtgagctcggcgtggcgcgcacgcgcagacgctggctgggctgagccgagcgaggagcc

SEQ ID NO: 28843 - DNA, 446 bp, Homo sapiens
  source 1..446: mol_type = other DNA
accttattgcacaattaattaagacctgctttaaaatagccttacatcatagtgaatttattgtcaggctaaaatagctactttcatgttgctttctgcgtagagcattactactcagaaacaactcattttcttgactatactctgggtagaactgaccttgtatagtaagttcatatgaagttttcctttaattatgatttgtacataagcataaaacatgtgtacagtttaaagaataattattaagtgaacactcaccacatggcagtgcttctctttgaaatgtaatcacttacatttgtattctaaaatgatataacttgcttgcctggaggcatagaatcaatctagtgtattttttaaaaaaccttttttatatttaagactaagactttgacccaggtttacttctggtcacgtgactccaacagtgacatcacatt

SEQ ID NO: 28844 - DNA, 249 bp, Homo sapiens
  source 1..249: mol_type = other DNA
gagtgtgggtgttgcagtgaatttccccagcccaagacacacaccagacacacacacacacgcgcgcgcgcgcgcgcgttaacaagtttgggacctcagctcccgagcgcgaagcccagctgctgccggggcactgctctcggggaggctgcaggctgcggaaagccggggcgccagcctccctctttttaagctcacctgctgctgagagcagctaagtggttgggggattgcaaagaccctcgctga

SEQ ID NO: 28845 - DNA, 370 bp, Homo sapiens
  source 1..370: mol_type = other DNA
taaactcagtaagatgagatgaaggcatctcaaagtgtaatggataaatctctaaagggagtctgtaaaagacagaccctgtctcaactagatcagcctttctctgcagaatccttagagcttctctattcctacatgatggcgtactctgatactacaatggtaggactacagaagctgctgaggcagcctcctcatacttttatttgggatacccagaaaagattttgatcaacatttctctgtttctacgtaaatctaaagatctcttgcaatataaacaggcagcctgcaacatgcccacctttgcttaggttgtgacagttcaggcattgtgacccaacaaactctgttgccacacagaggcagc

SEQ ID NO: 28846 - DNA, 210 bp, Homo sapiens
  source 1..210: mol_type = other DNA
aagcttgaacagatgtgcagagatgttctggcaacattattaattggccagcttatcaatggatggcaagtgcaaggccgtgccattatttaaactatgctctggggcaatgtttcataatgcacctcccctcgcctgggctggctggaggggcggggaacgaggggccctgcttgaatgaaacaatgtaacaattgatgtgaggcctcg

SEQ ID NO: 28847 - DNA, 392 bp, Homo sapiens
  source 1..392: mol_type = other DNA
ctactgtgccaagaatcccgtgggttgtgcagacaacactagggcccaggccacagtgagtttgggtcaaaggcagccaaagtcgctgtgcgccaaggaggttcctggccccaggagtgcgaagcgcctgcgcagtgggccccaggcgttgcgcgctgcgggagccaggagacccccgcccctggcccctcgccccccacgccctcccctgcgaacgcgcacgtgaacgggagcgcggacgcgcccgagaatgcgcttcacctcgcagaagcgggtggtgtggagagtcgcgggctcgcgggcagcagcgcctcctccactccggcgggcccgggttcggccggccgcccatcggactggcggactggctgactgacacgcctctctccctc

SEQ ID NO: 28848 - DNA, 273 bp, Homo sapiens
  source 1..273: mol_type = other DNA
acccttagtccccaggccagcatgagcagaatgtgggctttggagtcaggaagacccagacccaaattttgcattttgtttcctggctgcctcagcttcctgatctgcaaaatcccagggctgctgtgacaggaagacaagcgggaagaaactaacgttctttctattactacactactttggcaaagggggcgggaccgccttccagcgcacatgcgcatcatggtctccaggacgtgcgcatgcgcgtaacaagaggcggggtcgcccaag

SEQ ID NO: 28849 - DNA, 443 bp, Homo sapiens
  source 1..443: mol_type = other DNA
cccccaagtggtgcttgctattctgccaagaatcccgtgggtcgttttgacaacaccggggcccaggtcccatgagtaagccgtttgggtcaaaggcacacgtggcgaacgacgttctcggcccccaggggtgcggggcgcctgcgcagtgggcccgaggcgtcgcgcgctgcgggagccaggagacccccgcccccgcccctcgccctccgccgcgaacgcgcacgtgaacgggagcgcggacgcgtccgttaatgcgcccacctcgctcaaaccctacccggcggcggagggagggagacgcgcccccgacaagcgagtggggtctgtggacagtcgcgggctcgcgggcggcggcacctcctccactccggcgggcccgggttcggccggccgcccatcggactggccgactggctgacgcgcctcgctgcctctccctc

SEQ ID NO: 28850 - DNA, 243 bp, Homo sapiens
  source 1..243: mol_type = other DNA
aggcggggggaggctctgtctccctgtgtgcctctgtccccaggccagactttggagtccggaagacccaggttcaaattttgcaggctgacatccacttcccagcgctgctgtgagaggaagtccattattaattgtgagacctcactaatgatctggcgggaagagccccccgcacctcgcatgcgcactgggggctggaggggtccgcgcatgcgcaggctacccagccgcggggggtgc

SEQ ID NO: 28851 - DNA, 245 bp, Homo sapiens
  source 1..245: mol_type = other DNA
cgaggcggggggaggctctgtctccctgtgtgcctctgtccccaggccagactttggagtccggaagacccaggttcaaattttgcaggctgacatccacttcccagcgctgctgtgagaggaagtccattattaattgtgagacctcactaatgatctggcgggaagagccccccgcacctcgcatgcgcactgggggctggaggggtccgcgcatgcgcaggctacccagccgcggggggtgc

SEQ ID NO: 28852 - DNA, 488 bp, Homo sapiens
  source 1..488: mol_type = other DNA
tgtagtgagattctgtctctaagtaaataaataaataaaatagtcccaactacttcggaggccgtctgcagtgaggtaaagtcatgccattgccctccatccagggcgacaaaaaaagcatgtataaatataaacattaaaataatttatttctgtcacaaaaggtctttctgagacacatcaaccactaagggtgacatgggactctctgttccaagagagagagaaaaaaaaatatctcttaagtccctttctttctactacaaacatactggggattctggttttcccagcagagctgtgcaaagagacatcgtgacttccttctgtcttgccgactaggagtcagccagtaggtctgcagttcaggcgggcacgatccatggcctcctaggtggaagggctttgaggtccccgtcctcatggcattccagagtcctcagtgggaaccaggggatggggtggggcgaggcggggcactgcagcac

SEQ ID NO: 28853 - DNA, 201 bp, Homo sapiens
  source 1..201: mol_type = other DNA
ccacaactgtgaaaggagacgtctccttctttcgtgctgactatgacttagccagtaggtcccatggccttgctggtgattctcctgcctcagcctcccgagtagctgggagtacaggcggaggatggtctcgatctcttgggaacccaccagcccttaaggcacgagggaacctcactgcgcctttggtgcccacctgtg

SEQ ID NO: 28854 - DNA, 290 bp, Homo sapiens
  source 1..290: mol_type = other DNA
tcttagcagaaagttatttttgtctcccatgctgataaaaaatgatcatggcatcccatgaaggattggagaaatgtctctagacatacttataataagacatacctgtgtattctgtatatttatattattgacatgtattaataacaaaactttttatctagaccaaacatttgctagtatagtttgcagcttcatgctgtccctggattttgtatgcttgaaaatacagtccttactaaatcacttgaaaccatttaatttggtgtatagaaatgtacattttttta

SEQ ID NO: 28855 - DNA, 290 bp, Homo sapiens; identical to SEQ ID NO: 28854
  source 1..290: mol_type = other DNA

SEQ ID NO: 28856 - DNA, 201 bp, Homo sapiens; identical to SEQ ID NO: 28853
  source 1..201: mol_type = other DNA

SEQ ID NO: 28857 - DNA, 385 bp, Homo sapiens
  source 1..385: mol_type = other DNA
gtctcgaggccatggcggaaggatcccttgagcccaggactggtttctacttaaaacacgacgtcaaatacattttcctctcttcagggctacaggtaaaggatggtaattgtgcgcaccatacttaagattccctttcaaaaatgttggactgttttttcagtggcaacagacatagaagccacgctagtttggaaaacatcgtgtctttcaagtagaaaaatcacagattgactatttttttcttcagagttcaaaatctgacggcgccgaccacccactttttcgcagtggcaacaaagtctgctatgtcactgcccgcttctatcagtcccggctccagggacggaacccccctgggattggctactttaagttcagagta

SEQ ID NO: 28858 - DNA, 387 bp, Homo sapiens
  source 1..387: mol_type = other DNA
gtctcgaggccatggcggaaggatcccttgagcccaggactggtttctacttaaaacacgacgtcaaatacattttcctctcttcagggctacaggtaaaggatggtaattgtgcgcaccatacttaagattccctttcaaaaatgttggactgttttttcagtggcaacagacatagaagccacgctagtttggaaaacatcgtgtctttcaagtagaaaaatcacagattgactatttttttcttcagagttcaaaatctgacggcgccgaccacccactttttcgcagtggcaacaaagtctgctatgtcactgcccgcttctatcagtcccggctccagggacggaacccccctgggattggctactttaagttcagagtacg

SEQ ID NO: 28859 - DNA, 440 bp, Homo sapiens
  source 1..440: mol_type = other DNA
tctaatatataacttctactagataaacatacaattgatttatatgttgatcgctacctcaattattgtagaagcattttttttagattgattttctacatacactcttgacaaaagaggacacaatctccagtgcaaagcttagctatgcccacattcttagtcttagattgcagtatcctgcaggtaaatactcaggacagttgggatactaaagttttgacagactgaggccattgtttcagattggaaataggaaaccaccaataattaaatgtagccacactagcttgggggatttgaggtgagacatctaaaacggcttgacagaatcaacctctcacttccatgtgaaccatgaacattaaacatggagaaggggatgctgaaacaacagcagcatttggttaagccacccttggactgccattggctgggac

SEQ ID NO: 28860 - DNA, 429 bp, Homo sapiens
  source 1..429: mol_type = other DNA
ccccaccacagtgtggtagcctccatgggacataccacgacacccatgcatatataaatgagaaagaagtatgtatgaatatatataataaaataatttatttctgtcacaaaaggtctgagacacatcatggtgacatgggactgtccccaagagagagaacgaagcctcttagtccctttccttgcagagctgtgcaaggagacatcatgacttccttctgtgctgctgactaggagtcagccagtaagtccgaagaggaggagcccgcggcgcggtctatggcctccgacggggaggtccttgaggttcctgtcctgccatggccttgctgtcgtgtcccgaggcatatgccagacacattccgaagtcttcagtggggctaggagaggcgccacagcccactaggcaggcaccgacctcactgcg

SEQ ID NO: 28861 - DNA, 414 bp, Homo sapiens
  source 1..414: mol_type = other DNA
tcccttaagggggctcttctgtcctgtagagcacagagagaaacattccctgttcagcttccacttctggggcgcctaaggcagtactgaataatttcaatgtattggcatttatcattcatgcaaaaacgtccctcgcccgggaagtcacgtccgctacagggagtgtcttcccatggcctccggaagcattcggcagtccacagccacgcttcagagaagccgctccgggaacgccgcggcgcacctccggaagggatgacctccacgccttctcccctcgcagtccacccgagcggcgtgggtcgcgagaagccacccctccgtcttccggctccggcggtccgcggcagccaatcggcgcccccttccgcgctgcggcgcctctagcccgccggagggcggctcctctcg

SEQ ID NO: 28862 - DNA, 292 bp, Homo sapiens
  source 1..292: mol_type = other DNA
gggggcccctgagatcctgctgtccctctcacccattactgacagtcaaggacagacagcatcaggccttctcctgccccttgggggactgtggctgggttcccaggccagcaggccccccgctgcttaggaacacttttctcccagtgagtatacagtcagttttggaccagcccggaatggtccatgccaaggggcgcgggatgtaccactgaggggcgcagaggaaggacagtccacaagcttttccggggcgcggagtggctccggatggaccggctagcccctgcct

SEQ ID NO: 28863 - DNA, 504 bp, Homo sapiens
  source 1..504: mol_type = other DNA
aagcttttgagaaactttcgccggacctttgtccctctcagaaaggcccgagcctgcagctattgtcctggcagcacagccgccacgccagagtcagccagccggctgctccctggcctcccccccgctccccgccccgccccagggaggaccaggctggcagctgggagtctccctgcctgctccctcctcctccgcccgcccctgaggcagggaccgtgcatccaggctgggtgtccccagcatcgtgggaccggttcccaggccaggagggtccctctggcaggcccttggtgccctcgttctaaaacccggggcacctcttccccatccccgccaggcccggggagcggggtgagcctggatgagagcccccccaacctggggctctcccaggccatggcccgtgtgctcccagggaggagccccggaccctgagcatctgctggaggcttggcagaggccccgcggggaccgtgtcttctgaggacaaaaggcggcggc

SEQ ID NO: 28864 - DNA, 92 bp, Homo sapiens
  source 1..92: mol_type = other DNA
ttttcacttatgccatccaggcagaaatctagatccagcactttgggaggccaaggcgggtggatctcctaaggtcaccagctgcactccag

SEQ ID NO: 28865 - DNA, 184 bp, Homo sapiens
  source 1..184: mol_type = other DNA
accactggtacttttcccattggataaaacgctgagagggtgagggagaggggcttcttccccactcccgtcgctgagggagtcagcccgttgagcgggcaggggtcgcgggagcgcgatcgccgccgcggcggccggcagccaatggccaggccgagcggacccctgcgtcaggagtgggcgg

SEQ ID NO: 28866 - DNA, 335 bp, Homo sapiens
  source 1..335: mol_type = other DNA
ctaaatgtacatacagttggtaccaaatgagtgcactgtaggcaaacaggtgttttacacagttgacactggataaatacgccgttgctaaacatccaatagttaaagtatacatacacacaggcttattttgtaggagtatatgccacaataaagatcccggggagagtacatctccccccatcccgcgggccagcataaggggtcctttgcaataggctcccagagccgccttccgcggcctctgcgggggagtgccggtttgactccaccacccacggcaccgccggtccatccggaaagacgatccgttgagtaaccccttccaaatagaa

SEQ ID NO: 28867 - DNA, 412 bp, Homo sapiens
  source 1..412: mol_type = other DNA
ccctcccagggccgccttctgctcagaacagccaggggcctgggctctgggaccgtgaaagcagtcccgcccatgtggaggacagagaggcacccatccataaagtcaggctgggcccccatctctaaacatagtctctttaactgtgctgaaaataagggtatttgtgaaaagcttctatggaaaggtttcaggtttgggaatagccaaaccgggtcttgaatctcaattttctgttcaggagaatagagccggagcccagcctggggtttggcccagaggagggactgtgagctctccaggccgcttcctcggaggaggagttcccagccctcctggaggagtaggggattccagttgcaatctggcccgcagcccagctggcctggccccgccttcttggttcctcctt

SEQ ID NO: 28868 - DNA, 292 bp, Homo sapiens
  source 1..292: mol_type = other DNA
gccttgatctcccaagggatgccactgcttgggattggcagacctaggggggagtccactcccgggatggctttggatgaagatccccaacctgctgtcatgggggctggccctggccgggcgccggtgccttggggccagtccagctgcgggtgcgggtggcagccgcaggtggggcgcgcgggggcgggccgggcgagccgggtgggggcaggggcggggggcgggccggcggccggggcggtcccgcgcggccgcgctgcgcagtgactccgcagcgggcggagcgccg

SEQ ID NO: 28869 - DNA, 204 bp, Homo sapiens
  source 1..204: mol_type = other DNA
agatgcagtgccactggaatataagttccctgtgagcatggaacaataagcattcaacaaatttggtaaattagttaatttcggctttctcctcactggagcgcttccccacattctccggaggggaagccggctccggccggtccggcggggagccgcgcggcggaggactgagctggcgtggcagctcggcctgtaccactg

SEQ ID NO: 28870 - DNA, 309 bp, Homo sapiens
  source 1..309: mol_type = other DNA
ctgccattacagtataaggtcactgaaggggaagattcagctgacattttaagcttcttattagtaaggaattaggggtagtatctcaggccgtagccttccccctgggacctagccttgaaagctggccaggctaaagccacagtgcccagcaagcgtgagctcaggtccaacaactcctccggggatctggtccgcaggagcaagtgtttgttgttggggcggaggcaccacgccagtctcctgccggaaggcgaaaatcccgttaggcctggacgtattctcgcgcgcccggcttgcactgcggcg

SEQ ID NO: 28871 - DNA, 520 bp, Homo sapiens
  source 1..520: mol_type = other DNA
ctggagcgcttccccacattctccggaggggaagccggctccggccggtccggcggggagccgcgcggcggaggactgagctggcgtggcagctcggcctgtaccactgggccggggcgggggccgcgcaggcacccgcgcggggagagtgggttcgagcagaaccctggacgggcaaggaacccgtaagggtccgcgacgtttcatactccggcaccggaaggggtccaggccgggacgtgcgcagggccgcggccaggtttatcaccagagccattgggtccaataatggtccgataatcctgttcagcccatgacggccgcggcgccggcggcagtaggacaggccgcgccgtacgcccgagaactgaggtagcccgcgcgggaaacgccgcagtgcaagccgggcgcgcgagaatacgtccaggcctaacgggattttcgccttccggcaggagactggcgtggtgcctccgccccaacaacaaacacttgctcctgcggaccagatccccggagg

SEQ ID NO: 28872 - DNA, 269 bp, Homo sapiens
  source 1..269: mol_type = other DNA
gaggctgaaatggctaagatttatggcctgttagatatctgggctcaagatctaatgacatagcttctggaagctgcctgaaagacctgggtcttaaataaagggtatataggagtctcaaatacattcatacttgaattaagactttttcagaggagaaaggcatcccagttgaaatatagcaggcgcgcccccacgtctcatgcggcagcggcagacgccccggcccgtcgcatccgccccttccgccgcttcgcctcggccaacga

SEQ ID NO: 28873 - DNA, 386 bp, Homo sapiens
  source 1..386: mol_type = other DNA
aaaggatcttgaagcacaagtaacataatgtttctattcatggagactcagctcctggccagctacattactacacccagtggctggtcttcattaccttgaaggaccagtaaatgtttcatttctcagtaaaaatctttgtgcctacacacacatcccagataaaatgggatgggtcattttctagaattagtacaaaaattcctacatggtggtttcagagctgactgaatcatcaatcaaatgcagatgttgcttcctggttgcaaggtggctgtagcagtgccagcattgcatgcagaccacatcctgtcaagaagaggggagtttcctcccataaatctctttttattacaaggaaaccctctggcattaagggtagagtc

SEQ ID NO: 28874 - DNA, 405 bp, Homo sapiens
  source 1..405: mol_type = other DNA
accgtgccactgcacttcaccctgggtgacagagtgatgctttgtctcaaaaaaaaaaaattgtaaaaatattcaatgaaacagtcctgagatcatatacaaaattttatgtgtaagtatatattggtggggacccattcattagattctcaattcgagggaagtggagggtataatcacagtttttttaatagtgcttttgtctttaaatactaaattaatacatactttttattaaaaattgaaaccttatcgaagtaagcccacaataattaagtagggttaaaggctcaggcgcggtcccctgcaagggacccgacttcaccgcggagggagctccctcccgaggggcaggggcggggcttcgcttgcggtgggtggagccccaaatcgagtttgagctga

SEQ ID NO: 28875 - DNA, 379 bp, Homo sapiens
  source 1..379: mol_type = other DNA
ccgaacggccgggccgctgaagcaccgttgagcggctggcgccgcgcgacccagcggggggctcgaggggaaggcgcggggactatcccagaattcgacgcgcgtcgccgtaggggccggaactaccggacgagcctccgctgaggcgcttcgcagtcccggagctagcccggctgccggcgtgtcgctggggctgagctccgcgggcgtggagtccttgcagcagggatgcagccagaaccctgtcatctttaaagtacagaacgagctggtcagtttagagatttaaggattatttaaactctccgaatttgagtaacctgaagagactttcagggatcccttaagatacccccagcctcatttttgacgctgtggt

SEQ ID NO: 28876 - DNA, 464 bp, Homo sapiens
  source 1..464: mol_type = other DNA
gccgcggtgagtactccgcctctaccccggacctcctctcataggaggagaagggccccactcaaaatggagccaaacgtcgcctctgggctcaaggtcttcagcggcgattgggaaggtggctgagaaccgccctcctttctcaaggtggcgccccgcccccccgatgacgtcacccgggagccggcggctcgcggttccccgcctccgccgcgctcacctcgcgagtccagccctcataagatggcggcctgccggcccagcgacgacgccacttgcccgttcgccgggcggccgccagactaggcccaagccgctccagtaggcccgaacggccgggccgaggctgaagcaccgttgagcggctggcgccgcgcgacccagcggggggctcgaggggaaggcgcggggactatcccagaattcgacgcgcgtcgccgtaggggccggaactaccggacgag

SEQ ID NO: 28877 - DNA, 291 bp, Homo sapiens
  source 1..291: mol_type = other DNA
aactgtatttgaactgaagtgaaagactcaagtcacttggcgccgcggtgagtactccgcctctaccccggacctcctctcataggaggagaagggccccactcaaaatggagccaaacgtcgcctctgggctcaaggtcttcagcggcgattgggaaggtggctgagaaccgccctcctttctcaaggtggcgccccgcccccccgatgacgtcacccgggagccggcggctcgcggttccccgcctccgccgcgctcacctcgcgagtccagccctcataagatggcgg

SEQ ID NO: 28878 - DNA, 286 bp, Homo sapiens
  source 1..286: mol_type = other DNA
tgcctcctgcctcagcttccccagtagctgggattacaggcacgattatctttccactaaggggaaaatcctccctcctggggagttttagctcactttagctgaattcagtcaatccacttttccaggaagtgagatgcaaggagttggagtgcaactccctgtgaccctgtgagcacaagggctgagacgactatatcctaaggccatagacaagtgactagagcccatcctcccctcgccccccgcggagtgcgcacgcgcccgcccccagcttcgcgcccag

SEQ ID NO: 28879 - DNA, 449 bp, Homo sapiens
  source 1..449: mol_type = other DNA
atctcagtatgttgaaaatacatttttcaaaagattatgactccataagaaaaaaggtacaatttgtaatgtaatttgtgttggtaattatctccctgcccaaagagatgctgagggcaaggatattcgatttaactttgtctctgcattgccttaggcaagtaaataatgtaagtttctttttatttatttatttggagtctggctctgtcaccaggctggagtacggtgacactgcactcctgcctcagcttccccagtagctgggattacaggcacgattatctttccactaaggggaaaatcctccctcctggggagttttagctcactttagctgaattcagtcaatccacttttccaggaagtgagatgcaaggagttggagtgcaactccctgtgaccctgtgagcacaagggctgagacgactatatcctaaggccataga

SEQ ID NO: 28880 - DNA, 497 bp, Homo sapiens
  source 1..497: mol_type = other DNA
ttctcgtgcctcagcctcccgagtagctgggactacaggcatgttcaactcagaagaaaaatgctgtttctagaatcgcctctttgtggttctaatttcttctcatcagtacctataattgccaaaataatatttttaaaactctgggaaatatgaattcactttggtaatagttcattccgagtatgttttaataactctagataaatatatttaaatgcccttatattttaacatccaccaaattaaatggattttgaagaatccactcaaatacatacatacatacatacatacatacatacatacatacatacatatatatatagttgttgttgttgttctggagtgcagtggcccgagtagctgggaggtcaccgtgttagccaggatgatctggacctcctgacctatccgcccgcctcggcctcccagagtgctgggattacaggcgggagccaccgcgcccgtcagcctcacgagtagctgggactaca

SEQ ID NO: 28881 - DNA, 477 bp, Homo sapiens
  source 1..477: mol_type = other DNA
cgctctagaagcctggcggcggcgagggggcgggacggccgagggccattgttcccggcaaaatggcgtcactgagggtgggagtcgcgcacccgtctgcgaggcgcagggcacgtgcccaggcctagctcccagcccccgcgcgcgcgcactgcggtcctggggggcgggggagacatgccgtggctgttgcccccgcaacgtaactgggaggccagtataaatcggtgcttcgacttcccccaggtatgggtctcgcgagaaatcccgggatcttcttcttctctgaggggagagggtagattcggaacacacaggagatgtcgcgcgtgcttcctctaagagattttctctttggaatggggagaagcctttctcctcgacgcgcatccctctctcccgcggcgccgaggggggcgggaggcgtgcgcgcactctagttggctggccactcggcacctcgctgcgataggggcg

SEQ ID NO: 28882 - DNA, 286 bp, Homo sapiens
  source 1..286: mol_type = other DNA
aagtttctagttgccatctcatgggagtcaggacctacaaaaacttatttggagaaaccacaccttgctctttcaaacggtttccttacatattctggcaaaagtcaaagataaaccattacactttatttggactttggctgttttaaagagctgaaaaagactgatttcccacacagcctcgaggggcattcgaaaagaagtgagcacacctgggttcaagctaactccacaaatagtatgaagttgagcaattggagaatgacggaaatatactgcttctggc

SEQ ID NO: 28883 - DNA, 476 bp, Homo sapiens
  source 1..476: mol_type = other DNA
tgctaaaactgtaaaataccagattttgaaaacttaatactaaaaaatgtaaaatatctcaatgttttatactgactacatgttgaaatatttcatacacaccgagtttactattttgctttattaaagtggctactaaaaaattttaaattatatgtgactagcataatatttctaatacttttatacgcattttagaaactaggaaactgagtctcagggaggtaaactgctaaagcactggaatccaggattctgattctaaaagctgaattcattccacgctgtgcaccaccaagtcagcttgggagcagacctggagtagcctggaggccgcttacgccgcccacccgggccctatgccctggccctggccccactgacctgcaaggccggccaggcctccagggccgcgcagaccctcggcccaggcagagagcctgagaacacaggattctcttttccgcagacctggc

SEQ ID NO: 28884 - DNA, 388 bp, Homo sapiens
  source 1..388: mol_type = other DNA
atggcatagtatttgcgtataacctatgaatattctactgtatactttaaatcatttccagatggaccagcatctcaggtactcggcgccactgcactccagcctgggccacagagtgacactcggtctcaaaaaaatagataaataaataatttccaggttacttataatgcctaataaagtgtaaatgctatgtatatagctgttatactgtactgtttaggagaataatgtcaagaaaaaaagtatacacatgttcaatgcagatgcaattttttcctgaatatttttcaaaatgcagcactgagtcctctgccccagggcctggaatctggccaggtctgcggaaaagagaatcctgtgttctcaggctctctgcctgggccga

SEQ ID NO: 28885 - DNA, 327 bp, Homo sapiens
  source 1..327: mol_type = other DNA
caaatctgtgaagttgaatagttttccccagcaatgtttagctgcgtcctctatcccaggcgcaaatcccgggcgagggggcggggccccggtaactgggtcccagtgccgctgtggctgcggctgcctctgcgaggctcccgccttccttcccgcccgccgccgccgagacccaggctgaagctggggaggacggtggagcccggcccaggccgttctcctgcccccgcggctggagcatcgtctgggactaagcgcagcgcacacgcgcgcccccggctcccctctcctccgcccccggcctcggctgcggcgggaggaagaacg

SEQ ID NO: 28886 - DNA, 103 bp, Homo sapiens
  source 1..103: mol_type = other DNA
cctaggcttcgtagcaaaaagtcaagagctcaaatctgtgaagttgaatagttttccccagcaatgtttagctgcgtcctctatcccaggcgcaaatcccggg

SEQ ID NO: 28887 - DNA, 418 bp, Homo sapiens
  source 1..418: mol_type = other DNA
acaggacctgcagatcctgagtccagagctccctccactcaggtctcagaggacagggagctttccagacttttgatcttgatcacttaccacacttaatcttcataagaactttatgaagtaggtgctattactattcttattttatagatgaagaaactgagtaattaacttgctcagtattatacagtcagtttcaaacccatgtggtctgggtctggagcctatcttattatgtctatgggacccaagaccagtattgggggcttgccttgccaagtgacctttctctggccccagttactgggctcctgtggatactctggtatgtttagtttccattcatcttacagctggatgaggggaaaaaagctggcccttctccaggcgatggtccctccctctcaagagaagggat

SEQ ID NO: 28888 - DNA, 566 bp, Homo sapiens
  source 1..566: mol_type = other DNA
catttatatattcagtaattaatgatgatttgtctattgttctcttgaacagatccaattggttatgttgaatccgtatagaaaataaattttgaaatgatcaaacatctaaatgtaaatgaaaaaaaaaacggggtttgttataggagatgaaggaaaaatggatatatttgactacataataattaaacatttttgtttggcaaaaattatcataaataacatgaaaaatatttgtaatatgtgacatgtacaggagagacatttttactttttaggagtaagttgacaaattttgcatcaaaatggaagacttttttgtagcatttgagctagcaaaaaataccataaaaatgtacatgtgtactggactggttcaataaattatgggacatctatgcaagaaaagatcatgcagctgtttaaaaaagatgttttatatataattagtatagtgttatatattactgcattgtttgaatttttacaacaacaacaaaagaacaacatattacctttgtaataagaaaaaatgaagatataaaaataaattcaatgaatgactt

SEQ ID NO: 28889 - DNA, 583 bp, Homo sapiens
  source 1..583: mol_type = other DNA
tgaatccgtatagaaaataaattttgaaatgatcaaacatctaaatgtaaatgaaaaaaaaaacggggtttgttataggagatgaaggaaaaatggatatatttgactacataataattaaacatttttgtttggcaaaaattatcataaataacatgaaaaatatttgtaatatgtgacatgtacaggagagacatttttactttttaggagtaagttgacaaattttgcatcaaaatggaagacttttttgtagcatttgagctagcaaaaaataccataaaaatgtacatgtgtactggactggttcaataaattatgggacatctatgcaagaaaagatcatgcagctgtttaaaaaagatgttttatatataattagtatagtgttatatattactgcattgtttgaatttttacaacaacaacaaaagaacaacatattacctttgtaataagaaaaaatgaagatataaaaataaattcaatgaatgacttgctaagagcttcagactgagcctggtagccctgagcggggccccattgccccacccccgaggaaggcgagggggggtggcagctg

SEQ ID NO: 28890 - DNA, 271 bp, Homo sapiens
  source 1..271: mol_type = other DNA
gtgttatatattactgcattgtttgaatttttacaacaacaacaaaagaacaacatattacctttgtaataagaaaaaatgaagatataaaaataaattcaatgaatgacttgctaagagcttcagactgagcctggtagccctgagcggggccccattgccccacccccgaggaaggcgagggggggtggcagctgcagagtgagacttcgctgcaccactgcagctgaagcagaggtgagaggcggaaaggggcgggaccacttccggc

SEQ ID NO: 28891 - DNA, 493 bp, Homo sapiens
  source 1..493: mol_type = other DNA
ggggtcttgaagtctcctaccatctattaatatttgttttatatatttagtgggtgcatatattaaatatgtttataattattcgatattcacgatgaatttatctcattatcattatataatgacctttaagatcttttatggtttttgactttaagtcttttgaatgattgatggaatagataaatgtcatgaattgttttctgcatgggggcacagtgcaccatgtcacaagagacagaaactgatattgttaaaacatcaatatagtcattgtgggatcaataaaaacttttcatagatttttatacattactgtttttattctgaattgcataagatggacgcaccctatcttttagtgtttagaacctctaaatgttttaatgtggtaacacttgaaaatcccctgctccagagcagctctagggaagagacaacactatgtaaatagtgttcctctggaggcggaaagaggcaggaccacttccgg

SEQ ID NO: 28892 - DNA, 408 bp, Homo sapiens
  source 1..408: mol_type = other DNA
attctgaaggatgtagccgttctgtttctcagataagtgaaatcgaagcccaatgaattcatttcattctcacagttcactctctcttacactgaagtagtagagccaggattcacaccctgtcttaattagctcaataattacttttctgagtgtttttactggggccccacggcaccctatggtccattctgtcacagtacttataatacacagctatcattgacttctatttctgctgccattagaatgccacacaaaaacgatgcatctttaggaactgcttttcctcctggaggactttgctatcagaaaatagctctgtgattaaaataaaaatttgcatgtcctgactcagaactaggacaaaggaaatgaacatttttattgctcttgcttcactttcca

SEQ ID NO: 28893 - DNA, 404 bp, Homo sapiens
  source 1..404: mol_type = other DNA
gtagagccaggattcacaccctgtcttaattagctcaataattacttttctgagtgtttttactggggccccacggcaccctatggtccattctgtcacagtacttataatacacagctatcattgacttctatttctgctgccattagaatgccacacaaaaacgatgcatctttaggaactgcttttcctcctggaggactttgctatcagaaaatagctctgtgattaaaataaaaatttgcatgtcctgactcagaactaggacaaaggaaatgaacatttttattgctcttgcttcactttccagtaagggattatgccctctgaagatcgatctgaaactcagcaccagcgaaatccagaacttgcctgtctccatggctggttttaatgtctttggc

SEQ ID NO: 28894 - DNA, 342 bp, Homo sapiens
  source 1..342: mol_type = other DNA
cctaaagatgcatcgtttttgtgtggcattctaatggcagcagaaatagaagtcaatgatagctgtgtattataagtactgtgacagaatggaccatagggtgccgtggggccccagtaaaaacactcagaaaagtaattattgagctaattaagacagggtgtgaatcctggctctactacttcagtgtaagagagagtgaactgtgagaatgaaatgaattcattgggcttcgatttcacttatctgagaaacagaacggctacatccttcagaatgtagcacttagcgccagctattcctggggcgcaagcgctgcagccatctgacttaggtgggcgg

SEQ ID NO: 28895 - DNA, 377 bp, Homo sapiens
  source 1..377: mol_type = other DNA
gacagaatggaccatagggtgccgtggggccccagtaaaaacactcagaaaagtaattattgagctaattaagacagggtgtgaatcctggctctactacttcagtgtaagagagagtgaactgtgagaatgaaatgaattcattgggcttcgatttcacttatctgagaaacagaacggctacatccttcagaatgtagcacttagcgccagctattcctggggcgcaagcgctgcagccatctgacttaggtgggcggtccgccgcactgagggcctggcttaaaaagtggcaaaatgccgtttgtccgcccgacgtgcgtcaggcgctttagtggtacgcacgagaacgcctgcgcaaacgcgcgcgggaggcg

SEQ ID NO: 28896 - DNA, 138 bp, Homo sapiens
  source 1..138: mol_type = other DNA
ttaggtctggaagggaagtggttaactgtaatcagagaatcagaaattctcaagccttttttttgaatgagaatagaaatctgtttactttctgtatagtgacactaacccactgagctctgctgtcagcccagcagg

SEQ ID NO: 28897 - DNA, 331 bp, Homo sapiens
  source 1..331: mol_type = other DNA
aaaaaagaaattgcaaatcaatatgtagactatggtcttatttatgtaaatataatattaatgatgacaatctgctctaaagatgaaattaagataagacagagaacttcacatttttaattgtatattataactacattgcctaggttcataggcgggctctgtactttctagttgggtaattatcaacaagttattcatctgtaacatagggataatagtacctatcttttaaggtccttatgtggctaaattaattcatgtaaagcacttagttaccaaattgttacaacagagctcataagcacaacactattttactgtcctatag

SEQ ID NO: 28898 - DNA, 447 bp, Homo sapiens
  source 1..447: mol_type = other DNA
aaagtgcccatgaataaatttaatttgaatgtgatgaagcaaataacacagtcattgtgtgggatatgatagagagattctaaaataggaagatggctattgtcccagagttaacatgtaatataaaaataataactagtatctcaacaggaatattttagcacctgatcaaatgattctgaagttcatctgaaaagcattatttcacatttcaaatataatttaagctacagcaattaaaatagtgtagtagtagggattcaacaaataatgttgagagattttgaacgtacaataatgcaaccaaaaactatgaatgtcttatattggaatggggaagcgtatataaaacagatattaaaatatttaagatttatttctatgatggtgaagttttctgaaacacattattagagtaaaagaaaagtgctttgcaagttcattttc

SEQ ID NO: 28899 - DNA, 471 bp, Homo sapiens
  source 1..471: mol_type = other DNA
aaagtgcccatgaataaatttaatttgaatgtgatgaagcaaataacacaatcattgtgtgggatatgtttttttttttttgatagagagattctaaaatagaaagatggttaacatgtaatataaaaataataactagtgtctcaacagtaatattttagcacctgatcaaatgattctgaagttcatctgaaagcattatttcacatttcaaatataattaagctacagcaattaaaatagtgtagtagtgggggtgaaacagggattcaacaaataatgttgagttagattttgaacgtacaataatgcaaccaaaaactatgaatgtcttatgatatatggaagcgtatataaaacaggtattaaaatatttaagatttatttctatgatggtgaatttttctgaaacacattattagagtaacctgaggctcatattctaagaaaagtgctttgcaagttcatttt

SEQ ID NO: 28900 - DNA, 393 bp, Homo sapiens
  source 1..393: mol_type = other DNA
tcaagtaggatcctgtctcttcctccagggaagcagccaagattataagtgcaggtctactattttctcaagggaatatcagtgaatatcatccgtctttcctgaggcccagggcatgaccgcgggcacccccgaggacggagaggcgccggccacggcctggtcagccccgggggcgctgaggtcgccgaggaggatcagcgcggctcgggcagtcgcgcagcagagcctgaccctcagcggatcgtccctcaggcgtcagctcccaactgcagggaagggagcctgcggagccgacctccccgggctccgatgcgcaggcccagagcccgtcaatccttggccagccccgccctccgggctgcgtttttccggcggcgcaggaacttcctg

SEQ ID NO: 28901 - DNA, 232 bp, Homo sapiens
  source 1..232: mol_type = other DNA
ttgccaactttttagataataaatacagattcaagtaggatcctgtctcttcctccagggaagcagccaagattataagtgcaggtctactattttctcaagggaatatcagtgaatatcatccgtctttcctgaggcccagggcatgaccgcgggcacccccgaggacggagaggcgccggccacggcctggtcagccccgggggcgctgaggtcgccgaggaggatcagc

SEQ ID NO: 28902 - DNA, 273 bp, Homo sapiens
  source 1..273: mol_type = other DNA
ttacaaatataattaagctacagcaattaaaatagtatactagtggtagggattcaacaaatgatgtagagtccctaccacttaatagctgccgcttgggcctcccaaagggctgggcgcctggcccggatcaatgattttgaatgtacaatcatgcaacaaaaactatgaatgtcttatcattatgaaagcagatataaaatgggtattaacatatataatatttatttctatgatggcatttctaaagaaaagtgctttgtaagttcattt

SEQ ID NO: 28903 - DNA, 448 bp, Homo sapiens
  source 1..448: mol_type = other DNA
ctgaacataaatatatgtgtgtaaacatgtatgtttgtacgtgtgtgtaaatgcctcattacattaaagatgcaaattacatttcatcaacaactatgtatttatatcaaatatgtcctttttgtctaaaaacaatgcatctttaaaggttcacattaaacttcagataacagtgtttgtttttcaaaaggcaagagttagttaatacaaactagaaaaaggatcaacaggtacaggtgccctcttgttcagggacccttactttagatgtcaaaaagtttaggaaggaaaagtaaaagagctgtgcaagcccctttcaatactctatgcatgtccgttgctgggcatgtccattattgcgcactgctgtctgctgtctgctgtctgcgctcagagctctgccctgagaggtgtctcactgactgggactcagctggtaggtccgtgc

SEQ ID NO: 28904 - DNA, 429 bp, Homo sapiens
  source 1..429: mol_type = other DNA
gtgtgtgtgtattatatatatatataacattgtgtgaaaaattgattcacacaattatgaagactgggtccccctgaacataaatatatgtgtgtaaacatgtatgtttgtacgtgtgtgtaaatgcctcattacattaaagatgcaaattacatttcatcaacaactatgtatttatatcaaatatgtcctttttgtctaaaaacaatgcatctttaaaggttcacattaaacttcagataacagtgtttgtttttcaaaaggcaagagttagttaatacaaactagaaaaaggatcaacaggtacaggtgccctcttgttcagggacccttactttagatgtcaaaaagtttaggaaggaaaagtaaaagagctgtgcaagcccctttcaatactctatgcatgtccgttgctgggcatgtccatta

SEQ ID NO: 28905 - DNA, 316 bp, Homo sapiens
  source 1..316: mol_type = other DNA
agcagcagttgctgaccacgcgcctggggcccaaggtaacccgaattctaggagaaatcataggatagaaacagagggacactttcttcctgtgagttcattttccaaaagtggccattttggagagaaaggcgccttttttaaagaagggtctccccatcagctccaggggcctctcagttgagtgggtggagcccgatgggaggggtcctgggggcgctaactgcgcaccgcggccatgacgctgggcagatcacagaagtctctctccggcctggggtccgctggatctccggaggtgggggaggagcctctc

SEQ ID NO: 28906 - DNA, 477 bp, Homo sapiens
  source 1..477: mol_type = other DNA
gggcaacaagccctggagatagctttcctccgggttgtcgaacaaacagttgtatctagcacaatctagcgctataatgagctttgaaagagaaaggcattctcttgctgattttcagggtcttttacttgatatatactatgactcagtgttcacattgggctagggttattatttcaatttctctttaaaaattgacacaactaaggctcagttaagtgttttaggcaagcatgtgcctgggctcaggtctctctgagcctgagcccagagaccaggctctgacaggatcctgagggattcctgccagagggttgccatctctggaagcccccaatctgttgctgctgttgcctccagcagagtctgtttcaggaagaggtttgcctgcctgcgcgggacagcggtgccattcatcactgcgcacgtcgagaggggaggggccagggggcggcccccttgtgaccagccctgagg

SEQ ID NO: 28907 - DNA, 183 bp, Homo sapiens
  source 1..183: mol_type = other DNA
ttcaagtgattctggtgcctcagcctcccgagtagctgggactagtgctgggaatccaggcggacaaacaggtctctgatactgcaaccaattcagagtccagagtggatattggagtaggcctgcccacggcaattattttctatttataggcagtccactggacagcccttcccacataag

SEQ ID NO: 28908 - DNA, 396 bp, Homo sapiens
  source 1..396: mol_type = other DNA
atgtagtatatcatatattaattataaataatataattaaactacacatttatttaaaataacatatttataacatattatttaagtattagttgattatattaaatataattaaatgtcatattaatcttattattatatatcatttatacattatagaaatatatatagcacagaagcttcctgttttaaacaagtgggatgatgaatccctggtttcagcaataacgataatttatacagtatttgctatttggatgtattaatcatttaattacaaactcgattgcaaatagcggatgggtggggccaggcccacccacattagagaggctgaaggctcccagcgccctaccccgcccgaggggcggagcctgagccaaggcccagtcacgt

SEQ ID NO: 28909 - DNA, 213 bp, Homo sapiens
  source 1..213: mol_type = other DNA
gaagggtcaccagtgaggacactcttctcctcaataattgctcatgggtctctggtacctgtggatggaacctcagggccctctagagctgttgtagccacttcagtccaaagactgcatgggcgtgggcggcgccaagggggcgtcgcactttctgtggcggggcctgccccctgccggaagaagtttgggtgcagcccagaacaaccaagt

SEQ ID NO: 28910 - DNA, 255 bp, Homo sapiens
  source 1..255: mol_type = other DNA
tacctgtggatggaacctcagggccctctagagctgttgtagccacttcagtccaaagactgcatgggcgtgggcggcgccaagggggcgtcgcactttctgtggcggggcctgccccctgccggaagaagtttgggtgcagcccagaacaaccaagtagaaaaaagaaaaccattgctcttgatattgctgaaaaggaaggttttagagttcacctccactccttcccgggagtgaggaccccgggtccaagag

SEQ ID NO: 28911 - DNA, 353 bp, Homo sapiens
  source 1..353: mol_type = other DNA
atcgaatcagctactgaagcttgtgcatgcatcatgaagttcagaacatgttcctttagctcatagaagtttgttattaccaaccttctgaagccagctttgttccattgctggcaaggagctgcaaaaaggtgctctatttttagacaaatattgctgcctgatcattcctctggaagctttatcccagaggggcacccccctctatgaggtgtctttcggctcctactgggaggtgtctcccagttaggctacacccaggagtaggcagtctgtccattgtcagagctcaaacgctttctctttagagctgaagtctgcagaagtttctgctcccacccagttcgagcttc

SEQ ID NO: 28912 - DNA, 313 bp, Homo sapiens
  source 1..313: mol_type = other DNA
atggcagatattattatttcctcctctttaaaagaattgtggtagggattcaggcaagcgtaaagaaatcctggaaacatggctccgagaggcggtctcagggggttgagaactctattcttagaggagaaagcctttctgaaaatgcaccaagctagacactgtgacctcgctgtccttgttcgtgttaccatggagaggtcttgcacctctgccgctgctggaggctgagggaggcggccgccggaggcgaggccagctctgtcggcccagggccccgccccaccgtggagtcctcctttgggcctagcag

SEQ ID NO: 28913 - DNA, 304 bp, Homo sapiens
  source 1..304: mol_type = other DNA
ctgccgctgctggaggctgagggaggcggccgccggaggcgaggccagctctgtcggcccagggccccgccccaccgtggagtcctcctttgggcctagcagggccagcgcgtggggcgcgaggtaccccgtggggcagctaggtgcctccaagaagcccctgccctggggctgggggttgggttggttttcatagcccccacccccggccctctccttttaaaggaagctccactttatttttgtccaaggaaaagccagctgggtgaccccctcctcattttccagcccggagaaatagggg

SEQ ID NO: 28914 - DNA, 434 bp, Homo sapiens
  source 1..434: mol_type = other DNA
taattgaaaatactctgtgatttccctataactacagtttatttcatgtatacctttaaagacactctatattttcttgtatggtaatatgataatgtgctcaactaatctcatgtaaacagatagttaatatatttaaataacattttaaaatgctacaatgtatatacattttatacataaatatttttgcatcatttctaaataaaggtggaaacattcaaaatgctgatatatattttcaaattgtgagtaccattatttttttccctgccaatatgataagccaaaagtagaattttattgttttaacttgatttctttttattagtagtgaaattaatcatcctattggccatttgcattctccatgaccgagccaaatctatcctaggcctggcgccgcgtcagcagagggggcggacggctgccct

SEQ ID NO: 28915 - DNA, 456 bp, Homo sapiens
  source 1..456: mol_type = other DNA
tgaatagtgctgcaataaacatatgtgtgcatgtgtctttgtagtagaatgatttatattccttgggtatatacccggtagttaaactagttacagtgtaaaagcattcaatgatcagtgatgctgacataaaaaatgtgtttaaattccttataaattctgaatattagacctttgtcagatgggtagattgcaagaatgttctcccaccctttatgttgggaaagacagttttttgcgactaagtttttattttttatttacaaaagtaaacatccctaatgtatctaagtttataattcaactgccaatttagtaaaaaaaaaaaaaaaaaaacattaagataatttgaatctgctaaatgtttattgtgtttttggaaccaataaaatgatcagcaaaaattctctcttatgccaatataaactgcagaatagagagtccttgtattaaaaa

SEQ ID NO: 28916 - DNA, 544 bp, Homo sapiens
  source 1..544: mol_type = other DNA
tccaagaatttaaataattactcaaagagctcagagcttgtaaacagcagagtttaacagctaagaagttccagaagccttttcttctgagattctggttaccataaatcatagaatataacatatcatcactagtaagatgggtcattattttccatacctacaagaaagaaaaaaaaaagctctaaagtatagtgtaccatcaattgttaggtcagatttcctagatattcaaatttggggaaaaacataaaattacaaatttgcttaaaaaataaagaaaaaatgatcttagattctatgacatacggtgaattcattttccacattcaattgtagctagtttcacagctctgtgatgtgcatctgcagctggcttgtaaagctcttcattcagagtttaccacttaaaggtaaacttgaatttcttctcatcttaaaattgcataaattatattaaattctcaataaatttatttacatttagtggaaacactatattaaataacgacatcggtttttaacacccatcctaatagaaaca

SEQ ID NO: 28917 - DNA, 477 bp, Homo sapiens
  source 1..477: mol_type = other DNA
taaaactgattgaatcacttctaaaatgtctttctccacagatttatgatctcacaaattcctgttttaattatagcaattgttctaagtgttcaagtgaacagaataattcatgcgcaagcacaatttataggtatttaacaattaaacgaattatgaaaaatcctaatgcttaattttatgaagctactacaaaacatgttctcagaaaatatctaaaaaattgagcaaatgtttattcttattcaaaattatccaagctttgtaagagcttagaaaaaatagtgttaatatttcactggtcaattttctgaattttacagtgtcaatattgtgcatgcaattcttttgcaatcagggtcctaccacaaatccccttcaatggagggtggggtgggctccacagcttctgatttggaggaagctgcgagaccgagagcctaggagcaccttccacgcccagggctgtggtacagg

SEQ ID NO: 28918 - DNA, 495 bp, Homo sapiens
  source 1..495: mol_type = other DNA
ggtgtgactccaaacgcacaaccaagttttaagcttttgtgcatcaaaaacgggataaaatattttcatatcatatatctgataaggttctctcatccaattcatttaaaaaatggctcatcctcattagtcatttaaaactgattgaatcacttctaaaatgtctttctccacagatttatgatctcacaaattcctgttttaattatagcaattgttctaagtgttcaagtgaacagaataattcatgcgcaagcacaatttataggtatttaacaattaaacgaattatgaaaaatcctaatgcttaattttatgaagctactacaaaacatgttctcagaaaatatctaaaaaattgagcaaatgtttattcttattcaaaattatccaagctttgtaagagcttagaaaaaatagtgttaatatttcactggtcaattttctgaattttacagtgtcaatattgtgcatgcaattcttttgcaatcaggg

SEQ ID NO: 28919 - DNA, 471 bp, Homo sapiens
  source 1..471: mol_type = other DNA
ctgatttataaaactataactttaattatttcttataaagttatttttttgcaaagctttctattccgatacatagatctgattactggttttgtggaaatattatgtcaaatgcccagtaaaagccaaattataaatcactttaaaattgagttttacggaccaagtgcaagatatgtaacaggtgctcaataaatatttgttgaatgaaaaaatcgattagaaaacatctaatttcctggaaaaattcagttttgcaaaagtttaggaaaaaggaaaaaaaactatgagcattaatattttgcattttcctcttaatattaatttcctaaaatgtagatagtgttcacgttgtacatatggcagacttaccatagtgaatttctctgttccactactccggaggcggagtcagagcccatagctccgccggggctacaggctgtgaggcctctctctgggcaggaagct

SEQ ID NO: 28920 - DNA, 636 bp, Homo sapiens
  source 1..636: mol_type = other DNA
cacatatttatttgcagcaacttaactgtccatcaataaataaatggataaaaaatgtgatatatatatatatataataaaatattattccaccatagattaagattaacctaacacttatttaacttttcagatgttagccaacatattgtacacccatttggtttgttgtcctacaacatgtaactgaaaacatcttacttgatatagcaatctaatattgttgattattttcagaattataggatactgtgaaaaactgtaactcacaataaaaatgacttcactttatgcgaaatagataaggtttgttaagtattgtaatcacattcaaaaataactctttaagcttaaaataagcctctaaaatatgcctacataatgctttggagaaacacttaatgtatgtattcgtgagtgtgtatgcatatacagagaattatatctgtgctatggataggaatttctggaactgtacacagaattcatagttttatacatgtgcatgtgcttggagatatatatatatatacatacatacacatttgcatatggtcgtaaaggattcatgtctccataaatgtatacacatggtatttctatgttaatttgtatgtttccaaagaatgtgagaaa

SEQ ID NO: 28921 - DNA, 481 bp, Homo sapiens
  source 1..481: mol_type = other DNA
attgtcagatttacatattagaaagaacactctataaataaaggcagagtgatcagctagattatttgtagaagttcatgtaaacctcagtgagatctgagccagactgagttgagaatcttctctggaagacattcacatggatatgtcaaaaaaggcatttcaagtgtccagtttagacagatgggctggagatttgatgttcatcagtactacctgttagtgatcttataaggattaaataatatgcatatggaaaatatatatatacttgccatttagttgtttgttgagcatactgaatatttgcatacaaaggtatacttacaacacttttttcacatgaaataaactataacaactaccacttatactatttaccataaattgtgctaaatgtttttacttattatctagtgtttattcccattttttttcttatgagtaaactgactagggcagctgctgggaacgaaaagct

SEQ ID NO: 28922 - DNA, 329 bp, Homo sapiens
  source 1..329: mol_type = other DNA
gaggtagggctgagagtaaatttgaaaccttcgaggattttccatggaagtttaaccctcttcccttcatagtacccagaatgctggaaaattgcaaggaaagccaaatagaattggattttggaaattctgcctttgcttcctccttggcccaggctccaaacaaagtggctgctaggcacatccccaaaccagaactggtggctggtgactctcgccggtctgaggctctgattggcggtcgcggctagcacgccagcgcaagtcccgcccctgggcagcgatcagtggctctggccgcgcctcacgcaagcgcccgcagtcgctcg

SEQ ID NO: 28923 - DNA, 249 bp, Homo sapiens
  source 1..249: mol_type = other DNA
ttgtgttccccagagttgggggaatcataatgtgcattcaactcattctcagcaaaataagcaaatggacctttcatgttccttttatttatctataacttggagatcagcgcagcgggaggcaggcagaggtagcagctgccttctcctgggcgggcggaggctattcgcccccatcctcaccccacccccacagttctcaagccttggtgggggacaaaagcaggctctcgcttgcttcagcccact

SEQ ID NO: 28924 - DNA, 194 bp, Homo sapiens
  source 1..194: mol_type = other DNA
ttatctccaggaacttctttctaatatcatactgtatgaggttataggataataacagatgttagtgtgactgacaaagtcaattttttgtgttccccagagttgggggaatcataatgtgcattcaactcattctcagcaaaataagcaaatggacctttcatgttccttttatttatctataacttggagat

SEQ ID NO: 28925 - DNA, 301 bp, Homo sapiens
  source 1..301: mol_type = other DNA
ttactgtaataatagctagcatttgttgagtactgctaggagcagttctaagtgctactgttttatagacgctatagcccgcaatttagggttgcacaagccccacccaaaccaattaaattagaatatttgggatgccctgatattcgttagcagctcaaagaaatgtatctaaccccctttagatacacggaggtccaggagttcatgtatctgccaaatttaatttgctggcagattattaacttccagtgcaaccgattgcatggcttatgcaaaattgccactgctggagctggag

SEQ ID NO: 28926 - DNA, 470 bp, Homo sapiens
  source 1..470: mol_type = other DNA
gcctgacctccggtttgggcccagacaagattttcctctcaatatttagacttttcaaggaaatggagaccttggggattccctccacattccatagggagcccggggctctggattccaaactgggtaactgtggggagggactttccccactctgggcagcagagggcccgctgcagctagctttcctggcaggtgagtccctcctctgggtggcctggcggcgcgatccgcagggccttgcctggtggcggccagggatccggcgagccccatccgggcaggactggctccttgaggccacggtgtagccacgccactaccagcccggcgtgggggcgggagtggggagccccagccagtggttccgcaccctctcagtgggcgggccggggcacgccttcccacgccatatgcctgccaatcaggacgcagatgccccacccggtggccttggagtactgggggag

SEQ ID NO: 28927 - DNA, 276 bp, Homo sapiens
  source 1..276: mol_type = other DNA
tattgtggaagatcatggaatattatagaaaagttgaactgtcagatctcaaagatatcaccctggcccgcagaggcagcagctggatctggaggctggtctcagcctgacctccggtttgggcccagacaagattttcctctcaatatttagacttttcaaggaaatggagaccttggggattccctccacattccatagggagcccggggctctggattccaaactgggtaactgtggggagggactttccccactctgggcagcagagggccc

SEQ ID NO: 28928 - DNA, 240 bp, Homo sapiens
  source 1..240: mol_type = other DNA
cgagtaattttgctagcaaatgttataagaactcaaagaagaacaaaattattttgtgattgcaaaccataacactgcaatagtagtcttccacaaatctgacttggagcacacctagagaggaggatatacctttccatatttcaaaaaatattctctggtgaggcagcctgtgttactgctgcaggatgctatcattgtaatattagagtaaaggagtgatttaaagactcgggttga

SEQ ID NO: 28929 - DNA, 205 bp, Homo sapiens
  source 1..205: mol_type = other DNA
tctgacaaattcttagtcacttgacaccacactgtactgtaatcaaaggcaaggatttgcttcttccattgactggcaaaaagtactacctttgacataattatctataacaaattgatttaacaggcatgtctcgcttggccttctgggagttgtagtcctacaggcccccgggcttcctggctggccctgaagctccggacta

SEQ ID NO: 28930 - DNA, 580 bp, Homo sapiens
  source 1..580: mol_type = other DNA
agccgggctcctgagaagcccgcggtcaggctgagcctcctgagagaatcaggctgcgtgaccgcattcctggacgccagggttgagaccagagaggcgtcagaagcttctgcaggagaaagcagcgattcgctcgcctcctggggccacggaggccggaaaggcgcactagaaccgagcgagtgcggtgccactgtcgccctgctcgacgcagcccctgcaggggggagcccctcccccgcccgccgcagggggtgggctcggcgggcgagagaaggcggcggcgcacagcttggtgccttgcgctccgtggcgccgccaacttcaccaccatcgacgtggagggacgaggggaggcgatggggggaaggcgctcgcccagcggcccggaccctcctggggtactaggcctgagcctctggagggacgcgacccccaggcctgattccagtccctgggcccccctggccacagagcagcggcggctccctcttggggccgcggtcgcagctgcatcctcctgctcacagccccggcgcggttatcgccgcggcgcccggccgccgttgcctagcaactg

SEQ ID NO: 28931 - DNA, 289 bp, Homo sapiens
  source 1..289: mol_type = other DNA
aagacctggtggcttgcacctgtagtcccagctacactgcgaaattcaaacttggctgtaatttcaaagcccattctctaagccagaaggaagtgagattagattttcatttgatcttttatttagaaaattacccggctgggagacggtcgtatcccaagtcctcggcttaggctgctggtctgagctccgacagcggcgccagcggtggcagcagtcgccgacaggggtggggcgcatgcgcacagttgctaggcaacggcggccgggcgccgcggcgataaccgcg

SEQ ID NO: 28932 - DNA, 465 bp, Homo sapiens
  source 1..465: mol_type = other DNA
gaatgttggcagagtaaaattctacaattttctgctatgactgtacaactgagactagtctaagtccacatagttagtggcaaaatttagagtaaaactcatatttatttatttatttatgtatgtatttatttaatttacttttgagacagattcttgtgcctcagcctcctgagtaactggggccaggctggtctggaactcctgacctcaagtgccacgcctggccaggcactgtaactgtttcgatatgagatgtcctgattcacggcaataaaaatatacttaaaatcgcattttcagttcacatcaagctgccacccgccgaggggagcaaaatgcttccggtctggtacagaagccggttagcccctggagggtttgctttgtgaaaagaacacttccggccggtgagtttttccaattctgacgttccgattggccatgctgacgctggaaggcggg

SEQ ID NO: 28933 - DNA, 225 bp, Homo sapiens
  source 1..225: mol_type = other DNA
ggaagaggagccaggagcctgctcgcatgtcttgaattcagctcagccctggctctgagggagggaatttttattcctcatagaaaagactggcccaatcctcagggatgggtcctggagggcacaggccacaggcaagcaggattctctctcctctgctgcaggctggaactgggtcctgctggctgggggccaggactgcctccctaaacaagcaggcggggg

SEQ ID NO: 28934 - DNA, 254 bp, Homo sapiens
  source 1..254: mol_type = other DNA
tctagagtttcctgtggacctgagatcttcaggccttgtggcctcagaactgagatccatggatggaagccatatcaggggctgagttctgtcagggcccagggtctgggccctgagtggtagctaccctaggtccgcccgggcccagccgggccccccacgtggccgctgtggcctggctgcgccgggcctggccaggcggggctgggcggggcaaggccagcggtcggggagcggcgcggaagccgggccga

SEQ ID NO: 28935 - DNA, 325 bp, Homo sapiens
  source 1..325: mol_type = other DNA
aaagtgcttattgtttcaaagcttagtagacaaagcgcagatttcccttaaaagaagtaaaaaataaattccttatgaaaaagaggagaacattaatgaaaatgaattctcccttaccatccccaatatagatatgaggctggcttgtcaattattcaagctttgatgtgtagaaagccctttaatacactaaactcttcctgtccagttgcataggctgcacaggcaagggttaacagtgttgacctagcagggggaagaattgcttcactcatcctggaacctccaaccccaaggaggtgggggaaggggggcaccccacatg

SEQ ID NO: 28936 - DNA, 590 bp, Homo sapiens
  source 1..590: mol_type = other DNA
aaaattaattttgagaaacccctttttcatgttataggttgaagccaggattcttgaaacattcttcttttttgacacaagttaatacagtttgtgtcctaacgaggaaataattatttagatttcaacaattatttagaattgaaaaattaaaaattataactctaatttttgcctttactatgttccagttattgtgctaaatagttaatacgtatagccttatttaagttcttataacagtcttataaaataggtaatattattatctccatttgaaaactgaggtttagggggattaaattactttaatcatagaatcagttcagaatatctgatttcagttttcatgctcttaacagtgatgccatattgcaaatgtctatattgaaaaaaaagtctatttagcctgctgcttgttttgtaaattaatttttattggcacaatgatataccttgagagctacaaagacaaatttgtgtagttatggcaaacagaaactgtatgctctggaaataaatgatttagtagctatttatctggtctgtagacaccaactttaaaatgtttttcaagtgactgattcaag

SEQ ID NO: 28937 - DNA, 527 bp, Homo sapiens
  source 1..527: mol_type = other DNA
acaagttaatacagtttgtgtcctaacgaggaaataattatttagatttcaacaattatttagaattgaaaaattaaaaattataactctaatttttgcctttactatgttccagttattgtgctaaatagttaatacgtatagccttatttaagttcttataacagtcttataaaataggtaatattattatctccatttgaaaactgaggtttagggggattaaattactttaatcatagaatcagttcagaatatctgatttcagttttcatgctcttaacagtgatgccatattgcaaatgtctatattgaaaaaaaagtctatttagcctgctgcttgttttgtaaattaatttttattggcacaatgatataccttgagagctacaaagacaaatttgtgtagttatggcaaacagaaactgtatgctctggaaataaatgatttagtagctatttatctggtctgtagacaccaactttaaaatgtttttcaagtgactgattcaagggcttggctaagc

SEQ ID NO: 28938 - DNA, 473 bp, Homo sapiens
  source 1..473: mol_type = other DNA
aatccagactccagttttaccctgaattgttgggggtcaggtggaaaatgttaaatatagttaatataaaatttcactctagaatctttaatgtatatataaaaaaatccaccagtgactggtggccagtaggctttcaataattgtgaagtccctcacattgtgtgttaaaagtttagacagactctcagagctgaattttcctcagttgtaaaatagagagaattagagtattcatctcacaggataattgtgagacttattagaatgtagaaaaaaagtcctttgttttattgccaattttatttttacttatgactaagcagccatgacctcagaataatagtcagggctgacaattctttcaatttctacctcatttcttaaatggaaagtgttcttcgagatcctaaccaggatttgtaaaacacccggatatgggtaaagaaccatcccgggttttgtatcaaacc

SEQ ID NO: 28939 - DNA, 468 bp, Homo sapiens
  source 1..468: mol_type = other DNA
tcaggtggaaaatgttaaatatagttaatataaaatttcactctagaatctttaatgtatatataaaaaaatccaccagtgactggtggccagtaggctttcaataattgtgaagtccctcacattgtgtgttaaaagtttagacagactctcagagctgaattttcctcagttgtaaaatagagagaattagagtattcatctcacaggataattgtgagacttattagaatgtagaaaaaaagtcctttgttttattgccaattttatttttacttatgactaagcagccatgacctcagaataatagtcagggctgacaattctttcaatttctacctcatttcttaaatggaaagtgttcttcgagatcctaaccaggatttgtaaaacacccggatatgggtaaagaaccatcccgggttttgtatcaaaccaggaattggaatcctggacttaatttaggag

SEQ ID NO: 28940 - DNA, 443 bp, Homo sapiens
  source 1..443: mol_type = other DNA
tggctgttgctataggcatatgtatgttctctgtgtatatacatgtttatctagatggccttgggcaaacgaagtttctccattgtaatatggggataataataataaatgatttaatctgtgtaaaacatttggaacagatgtaccatgcacatacgataaatatagctttattattattattctgaagttgactaagattttatataacagagtgattttatgtgtagtaagactacatgtaccagtcccaggaagtctaacgtcctgtgcattgaagtgagaggttagaatcttgggtctgattctgactcaggattagcatttcttctgagaagttttggttcattgttaacttttgaagtataatacacataaagtgcacaaatcgtgtttatagctcaatgtattttcatgaacacttttaattttgtactgtattt

SEQ ID NO: 28941 - DNA, 285 bp, Homo sapiens
  source 1..285: mol_type = other DNA
agtacaggagggtcttttaaaagctcctaatctattgaaaagcatttgcgattaataaactcccaggggcccctacccttctgaatggaaaattttggcttttccaacaataattttccctgtcaaatccaagtcatgaataaactttgatgagctgagctgcattcagctgtgaaagagacaacttgcccaggagatttgcagctcctgccataccagtggctgggtcactgttcttcagcgccaaaggcagtttcttttcgtagccacgcctaggcactcaaa

SEQ ID NO: 28942 - DNA, 244 bp, Homo sapiens
  source 1..244: mol_type = other DNA
gattaataaactcccaggggcccctacccttctgaatggaaaattttggcttttccaacaataattttccctgtcaaatccaagtcatgaataaactttgatgagctgagctgcattcagctgtgaaagagacaacttgcccaggagatttgcagctcctgccataccagtggctgggtcactgttcttcagcgccaaaggcagtttcttttcgtagccacgcctaggcactcaaatttcatat

SEQ ID NO: 28943 - DNA, 299 bp, Homo sapiens
  source 1..299: mol_type = other DNA
aagcagccctatataggttctatccttggatagttccagttgtaaagtttaaaatatgcgacgtttacagagctctggacaaaattgcctttgagagtctggatgagaaatgcatgtgaaaagaacccctggcagccaggagcaggtatagctggcctccaggaaatctggagccctggcgcctaaaccttggtttaggaaagcaggagctattcaggaagcaggggtcctccagggctagagctagcctctcctgccctcgcccacggccggcccggtgggggcgggacccgactcgc

SEQ ID NO: 28944 - DNA, 415 bp, Homo sapiens
  source 1..415: mol_type = other DNA
tcaggaaaatattaactctgaattatagtccagcgccgcgcacctgccccttggggccggtccctgcgcaggagcctgcggcaggctgggaatgccgttctgggagagcagcctcccaggcggggtccaggccgccacgctttccagctggagtcctagggcgctgactgctccccagtttccgtagggaagcgctgggctaccgcggctattgtgcgctatggagcgaggctacgtttcattgccgccctggcttaacccttccggcgcctaaaaggacggccggccggccggctcccttgcaccaggaagatccagagcgctccggtttggtcctgcccgggttgcccgcggagttcgtcttccgctcgctccggagcgaggagcctgtagagaggctgttcccagctccagc

SEQ ID NO: 28945 - DNA, 301 bp, Homo sapiens
  source 1..301: mol_type = other DNA
gctgatttaggacatcaagtttgtggtaatttgtcacagtaattcaggtgggtcacacttctgcagaattaaagggatctaaaagtctcaagacagctgcctttaaggtaagctgcaagacaatttataatattcttagactttctcaggaaaatattaactctgaattatagtccagcgccgcgcacctgccccttggggccggtccctgcgcaggagcctgcggcaggctgggaatgccgttctgggagagcagcctcccaggcggggtccaggccgccacgctttccagctggagtcc

SEQ ID NO: 28946 - DNA, 239 bp, Homo sapiens
  source 1..239: mol_type = other DNA
atcttatgtggcaaaatgaaatttgcagatgtctgtggacccagtgtaatcataagggtccttaaggggctgatttaggacatcaagtttgtggtaatttgtcacagtaattcaggtgggtcacacttctgcagaattaaagggatctaaaagtctcaagacagctgcctttaaggtaagctgcaagacaatttataatattcttagactttctcaggaaaatattaactctgaattat

SEQ ID NO: 28947 - DNA, 456 bp, Homo sapiens
  source 1..456: mol_type = other DNA
gattgcctatccaaaaatataaaacacttttatagggctatcctggatgctgatgctctgactacattttagcctggggccaacgtaaactgggacctgaagattatcttttaagttattgtcacaatagttactctcttttagaccctgaacattttcagtacttgctccaaatggtttagcaacttttgaagtgggattaacaagtttggccaatgaagcttcttccctgcccaccgccagaggtgctggagattccggagggtctggcactccaagccaacttgagtgttaaaggctaagcgtgtctagctggacccgtggccccgagctgtccctgacaccccgaggaccgagggacagcgaagggccggggccgccggccattgccaggcgccattaggtgacgcggccgtcacgcgatgacgcgctgaccggcagtggcctccacgtcgc

SEQ ID NO: 28948 - DNA, 339 bp, Homo sapiens
  source 1..339: mol_type = other DNA
gcccagaaagcctctcaagtttagatttcaggctaaacttctgaagccatcatctcttcagaagatgttcagacacccagtctatctgagctgggagagagctgcatttgtctatggactcccaggagcagcaggggagttctgagatcctcacttcacctgtctgagaggggcttctaaggctgcaagcgtctgggctctaccgagaggtccccaaggagagctggaagcaggcaggcaatgccagcatgcaggtggcggggctggcaggggagccggcaggagggccggacacccggatgtaatgttcagggaatttcaattggcattgctgtcccg

SEQ ID NO: 28949 - DNA, 276 bp, Homo sapiens
  source 1..276: mol_type = other DNA
tgggctttaagtgagtcatgcttaaagtctgtcctcaattcaacaatgaaatcaaggttgtgcttactatcagaactcctggaagccagtgccggactcattcagaagccttgcacctcctccctggcagcggtgtgaccggagggaaaggcagcggcgagggccttggaggacctgcaggcagtgccccgcccaccgcgagtccggtgggccagactgcgcccccattggccgaggggaggtgggcggggcgtccctacagccctactcgccgac

SEQ ID NO: 28950 - DNA, 212 bp, Homo sapiens
  source 1..212: mol_type = other DNA
tcaatctctctactcagatgtctgattggtgtctcggagtgtgacccagtgtcacagctcacctgggctagtgcagcagcttccggtaatacacacagacactctgcgtcagactcactgctttcagaaagctctccctttaagagtgtaaactccaagaaggcaggaaccgctcaattggatactcattagttgaatgagtaaaggaacaa

SEQ ID NO: 28951 - DNA, 172 bp, Homo sapiens
  source 1..172: mol_type = other DNA
cgaggccgggacaggctggagtccggcttctccggtccaggaggcctggtccccaggggcgatgaacacgccctgattggtgccatcgggcgcgcggcgtccttaagagctccctgaaaccccgcccccttcctgctctgggggcgtggtatggggcaaggaccccgccact

SEQ ID NO: 28952 - DNA, 690 bp, Homo sapiens
  source 1..690: mol_type = other DNA
taacttagcttttaaaaacaaaatgctcaaaataagagtttggtttttattaggagatgttaacccataatgcatgctgatatatagaaatattattactttaatggtttgaaagttatacattttatttctattatgtttttgtttccagtaagaacaaaactttgctactgttgtgaacatgggaaatgtttacattggctgtaaatactagagttccattataaagcgcaatttaaagacttcagaattcagtaaaatggtataactacaatatttttaactgcaatgcaataacagaatatgaacctgtgtttggttttgtgattagcagcaacaaattcaacatcagcttcaatttgctttaaccatcaggttaaaaaaaatttaagcttactgcaaccctaaatatggtttcacagttttaatactttcggtacaaccataacacgtaacataggatgtgatgtagtaacgtaattacacttaatcagaaagaatttgcagattttattttatttattaaaaaaccagaaggcaatatagctaaatgtttaacattagttaaacttgacgatttcatcatttaagatgaaataatgctggagagcagctgccgcccccgccacatcaaggaggcgggctccagccgccgccgcagtcgccgcccgccccgctgctgtctggcgg

SEQ ID NO: 28953 - DNA, 757 bp, Homo sapiens
  source 1..757: mol_type = other DNA
atggccagcgggagccacggggccgtgccgctgggctgcagccacagcggtgcctgcgtccggcgcctgtggcgctgccgggagccaggtggcccgcccgagccggaactccaggagcagcgggtgcggagccagagcggagcccgccagggactggccccggcgaacacccggagcgagcccgaagggcccggcaacggaccggccggccggcctaggagggcgcgagcgaggcgcggcgcggggcgaggggagcggagcggagcgcggcggcggggcccgcacggcggcgctgaggggcgcagagctgcgccgaaccgagacggccggtttggagtgcgagccgggcggccgccggcgcggagtgaagtggcacggagccgagggcagctgaggggcccgacactatgaggagtgcggcgccgccgccgcagccgccaccgccccagtgccccgcaccgcccccagccgggacgccgggcagcgcctagcgggccgggcggcggcgcccgggctgagagcgacggagcgcgggagcggcgcggagacggcaccagagcgccccgcgactccggcctgagcggggcatcgcgccggccggcctgcctcaccatgcagcccccgaggtagagcctggacggcgccgaggagcgcagagcggcgcgcagcccgcccgccccagacggccgtctggcctcgcgcctgcccagcccggacccccctgaaatatgttcaggggcgcttggatgtggcccgg

SEQ ID NO: 28954 - DNA, 464 bp, Homo sapiens
  source 1..464: mol_type = other DNA
ccagtaagggatcgatagatatttgttgaattaattaatatatcaagaaatcctaggagatgttttacccttcaagggacgagccttcagagtcactccaggagtgaggctgcttgagtcccaccgaattgcaaacacagcaggcatggtttcattccaaacccagagctgttttaattagtttaacgtctgttaaacgctttgaagatgtactggatgatgttattaacaactgcagttaattgcaaacatttctattaatgctagcgctatagggttaaactggggcgggtggggcggccaggcagaggcgaaccctcacgcccccaggccccgccccgcggctggaggcccggctggaacggcacggggcggggcgccaaggcttggcggccccgtggttgggcgtcccggcagccgcttgagggatggggcggggtcggccgggacctcctccttcattc

SEQ ID NO: 28955 - DNA, 510 bp, Homo sapiens
  source 1..510: mol_type = other DNA
cttctcaacgatatgtagtttaaaatactagtttaaaagtttattttcaggtgtgcctgctacttaaatctcctaggacaattcaggctgcgtcctaaggatcagtatgtatttatattgctttgttcaaaacaatgacgtcccttctttgaagtcctgaaattatgttttccatcagttctgtccagtagaaatataatgggagctacaaatatagttttaaattatctggcaggcacatttacaaagtgaaaagaaagaagtacaattaattctaataatatatttaatccaacatatccaaaagactatcatttcaacatgtagtccatgtaaaaagtatttacatttttcattcttttttttttaaattcaaaatagccactttcaagtgcttagtaaccacatgtagctagtaactacctactgaacaatgctgttatacacttactgatactgagtactcaggctagcttgttgtccaccggacgccggcctacgggtcgtagg

SEQ ID NO: 28956 - DNA, 289 bp, Homo sapiens
  source 1..289: mol_type = other DNA
ctacctacatacacttactgatactgagtactcaggctagcttgttgtccaccggacgccggcctacgggtcgtagggggagtggtgcggcggctagagtccctggactcctcaacctagggagctactcgcgaggtaaggggcgcgccagactggctgcttcagagcccacagaacttctcagccccgtgtcggcgacgaggagctcatgctgcctggtaaaatgagtctatggaaacggttgccagggccggctaacagcggctcccggaagtccttttgaccccgg

SEQ ID NO: 28957 - DNA, 362 bp, Homo sapiens
  source 1..362: mol_type = other DNA
ctgagacctgggaacagtcttcagttttccaaaggctattgcctcagcctgaaacatatgttacttgttcaatatgtgttacttgaactcagtgagtagtaaatcctcagaactactctaagaagtaggtactattatagtcccacttttacagatggagaaactggggcatagacagagctgagatgtgaaccccagctatctggctctatgctcaaagagctctagagagatgtaacattttccaaaggtgtcacaggaagagcatggcagagctgggactgggagccaggtctgctgccaagtcccttttcttaagtgaggcccaagcagggccatttctgcttacaattgggcacaat

SEQ ID NO: 28958 - DNA, 286 bp, Homo sapiens
  source 1..286: mol_type = other DNA
aggaagattactttgttgttgaagagacagaaatatctctaattccatgcacagatgtcaaccgcctattccctccacatgcatgtcctgccagaagaacctgtccctgggctgggaatcttatattaccttcctctccaatgagaagagaagttcaacatgtgcatacacagctcaatgcacctgctgtgcacataagctgggataatcagggtttctaaacagggctggggacgaggtactctttcccataccagccactaattttagctcagaggactgtggg

SEQ ID NO: 28959 - DNA, 356 bp, Homo sapiens
  source 1..356: mol_type = other DNA
atcatgattcatcgatagtgcccaagcacagtgcttggcacatagtatatgctcaaggaatatatatgttacgttcgagctactgctgtattgaagacttcttcctgttcagtagaggggtaggtgaaggctctgtacgcacctgaggctcaggggtgggagggcgtcctccccggttccgaccctcctcaccatgacttggccagggctggaccgcccgtcagccctgcactctaaagagagtctgagctaaggtgtgccctgcagtgcggactgcccgagggcggagcgcgcacgtcggcgcgcgcaggccggcgcggtgggaaggggagggtcagctcgttgcaccctggccc

SEQ ID NO: 28960 - DNA, 316 bp, Homo sapiens
  source 1..316: mol_type = other DNA
agatggttcccacctcatgaggaggataacttagctaaacatcttctggatgccaagcaacctgtcaggtactctagaaagaggacctcatttttcacaagaagaggaaatcagggtcgagtttaggttaactatccgcagggactcggggcaaggcaccgccccacatttcctagggacagcgacctcagactccgctcactgacaattcagtctgggaacgggccagggtgcaacgagctgaccctccccttcccaccgcgccggcctgcgcgcgccgacgtgcgcgctccgccctcgggcagtccgcactgca

SEQ ID NO: 28961 - DNA, 343 bp, Homo sapiens
  source 1..343: mol_type = other DNA
atgctgatgctatagtaacagcatctttttcctcaaaagattcttggaaagagactcatagtgtcacccaggatccacaaggcccatggggacctctggtccagaaacggcaacttgctatccagagttcaggaagtagcttgcagcttctgttgcccaggctgggtcccatgcaactacctagtctttggtagggctggtcttgaactcctgacctcaggtgatccacccgcctcggcccaaagtgttgggggctgcagcttcttatacatgcaccttgctgaatccagtgggctggctgggcctccctgagccaggacaaagccccggcagtgactgggag

SEQ ID NO: 28962 - DNA, 404 bp, Homo sapiens
  source 1..404: mol_type = other DNA
acccaggatccacaaggcccatggggacctctggtccagaaacggcaacttgctatccagagttcaggaagtagcttgcagcttctgttgcccaggctgggtcccatgcaactacctagtctttggtagggctggtcttgaactcctgacctcaggtgatccacccgcctcggcccaaagtgttgggggctgcagcttcttatacatgcaccttgctgaatccagtgggctggctgggcctccctgagccaggacaaagccccggcagtgactgggagggaattcccgagtaaagaagcagatttgctctcccgggctgtgcccaggccacagagcagctgcaggccttgggagaggacccagcctcctgtaggtggcaacagtgccacctgtttgactcatag

SEQ ID NO: 28963 - DNA, 399 bp, Homo sapiens
  source 1..399: mol_type = other DNA
ggagatgtccttggacaagtattcctccttcccccatcataaccatgcaggggtggagtggtcagggacagcgggcctcatatgctgccttcttctttggagcccctgcaactccctcttggaagtggggtgggacaagatcgggtgcctgagaacagttccctagagattgggggagctggggctgagcctgggggcgccgctgcctctgttcctgccgccgccgctgccgctgccgctgcctgcctctgcgcgctgattggctgtcttgactccactcagatccatcctggggaccagagcagaagcggtcctcacagctttgccgctgggcctcggcccagaagccacgacgggcgacacggagccgccagtgctggagggggagccgtgggtgcg

SEQ ID NO: 28964 - DNA, 364 bp, Homo sapiens
  source 1..364: mol_type = other DNA
gagccaccgtgcctggcccccagctctgttcctctttggcaaaagggagctaatgatgtatgtgctgccttcctcataggactgctgcaaggatcaaatgagatgtgagggattattattagtcacacctctagtcatgcggttggctgacaaccacataagccataattccagcctgggtttgggagagcaaggtcagctaccctgctcgctggctgaggaggacttcaccaggtaagaccccgccccagaaattggggaggggaggaatccgtttctggccggccacaggctccgaaaggataaggccctcatcactcccggctttggggtccgaggccctctctcaggccttggggaccta

SEQ ID NO: 28965 - DNA, 206 bp, Homo sapiens
  source 1..206: mol_type = other DNA
tggagtgcaatggtctggagcacccgatctcaggtgatccgcctgccttggcctcccaaagtgttgggattacaggcgacctaaactctcaggctcaaatgatccttccacgaagatcaggctggcctatcaaagctagactgggtcgcaaggcttaggctccgtgacacagcgtaaagctagcgtgacaccgctagcgtcgctag

SEQ ID NO: 28966 - DNA, 295 bp, Homo sapiens
  source 1..295: mol_type = other DNA
ggtattgtcagaatttcacatttaatagtttaatatttataggcttatagagagattggggcctataaatcaatttagactggattaattatctgtatacaggtggcttgtcctgctgcctgagtgaggtggagactcccctgctgtgtttgggttctttggccaggaagcctctacaaatgggaaaagactgccctcccccttttctcgctccccggcacgccaggcttgctagtgaggatgggacgcagtctcaggccccacgcaatccttttgggatcccatgacaaggggc

SEQ ID NO: 28967 - DNA, 425 bp, Homo sapiens
  source 1..425: mol_type = other DNA
ctctgttgaaagaatttcaggcatcagtgatatcatcaccctctatagtggagcatatgtaaattagtcatataaatattaatatttctatagatattctcatgtaaacatttattgtaccctcaatttgctgataaatgtaagataattttcctgaaaagtaagagagaaatgtctttcttttcagtggcatggctcacggggcagtgcccactgttggatgcaggttcccgggtggccacaaacatcacccggaagcctgaatatggcctccactctacagggcgcgcagcagtcagcacggccgctattcagagcccggggcccaggcccgtgcggcgtgcgcgtgcgtgcgtgggcgcgcgtgcgcgccgccgccgcctgtggggcaagcgggaggggccgtgcgcgctcctgcctcaggc

SEQ ID NO: 28968 - DNA, 210 bp, Homo sapiens
  source 1..210: mol_type = other DNA
ttggccaggctggtctccaatttaaatgcagttataaataggtcttaatgggtaattacctctaagctgctgcttggagcttacctcactgtcagagagaataattttttcccttttgccgtctcctaaatgaaggagggaaagggctaagaagtccgcgacgacttctaataattacgccgtatcgggctcctggccgcgaagcaggac

SEQ ID NO: 28969 - DNA, 158 bp, Homo sapiens
  source 1..158: mol_type = other DNA
acctcactgtcagagagaataattttttcccttttgccgtctcctaaatgaaggagggaaagggctaagaagtccgcgacgacttctaataattacgccgtatcgggctcctggccgcgaagcaggacgggccaggccgcagccgcggggacccggac

SEQ ID NO: 28970 - DNA, 254 bp, Homo sapiens
  source 1..254: mol_type = other DNA
gtgcagatggggtttcaccatgttggccaagctggtcttgaactcctgacctcaggtgatccacccacctgctctgtcacccaggctgaaacagtggcatgatcttggctcattctcctcctccggagtagctggcaaattggccaggctagtctcgaattggccaggctagtctggaacctcccaaaatgctgggattacaggctgtggctggagaatgcttacacctcaagaatccggagccttggctgatg

SEQ ID NO: 28971 - DNA, 222 bp, Homo sapiens
  source 1..222: mol_type = other DNA
aagaaccccagggtcctgtaggttcctgaaccgatgagaaataaagtttctgttgataatcatcaaaaatgtctgttgctagaaagagtactgttctggaaactgactttttgcactcattccagggttcccagcactttggccaaagcgggtggatcacgaggtcaggagatcgagaccagcctggccaaccactgcactccataactgcagtctcaggcc

SEQ ID NO: 28972 - DNA, 90 bp, Homo sapiens
  source 1..90: mol_type = other DNA
agtctagatagaatcatgactagagcttctagaatatttttgtattataaccaggaacttccattatagaagcctggtttataagggtga

SEQ ID NO: 28973 - DNA, 305 bp, Homo sapiens
  source 1..305: mol_type = other DNA
ggataagtgaattttcacactttgaaagtgtctgaaaagcatctgacacaatttcatggacccttaggggatacatggatgtaaagcaacattttgcatgtcaatatatgcatattattattattattattattatttctgggaagaaacctttaagggtttgtgaatcaaaaacgttattagagccagcctttcaatagccccttgaaggaggtgttagcgcacctatttttacagagctccgcccccaccgggccaggtacctcggcttccctcggtagtttccggcaatggtcgagagtttc

SEQ ID NO: 28974 - DNA, 326 bp, Homo sapiens
  source 1..326: mol_type = other DNA
aggatattggctctggaattcagaatcttagtgccagctctgttactcagtagctgtataatattggataagtgaattttcacactttgaaaagtgtctgaaaagcatctgacacaatttcatggacccttaggggatacatggatgtaaagcaacattttgcatgtcaatatatgcatattattattattattattattatttctgggaagaaacctttaagggtttgtgaatcaaaaacgttattagagccagcctttcaatagccccttgaaggaggtgttagcgcacctatttttacagagctccgcccccaccgggccagg

SEQ ID NO: 28975 - DNA, 349 bp, Homo sapiens
  source 1..349: mol_type = other DNA
gagagccaactggtttactacaatggagtcttggagtcttctgccctgcctagctagggctggaagaggatcagcctccaagccatagttgcctttgaggcccgctttcttctcacttatcagacaactggcatgctgacagtctgagcaggcagtgcctcagtttctccctttgggacaaagtctcaagctttgcgggtaaagtttgggctagctgcccaagatcacctgtctgatagcttgcaatctgaggtgtgtgcgcgcccgcgggggaattgggccatgccccaggacttgagccatctctggcacaagcagggaccgcgcccccccgtgtccgggaacgcgc

SEQ ID NO: 28976 - DNA, 338 bp, Homo sapiens
  source 1..338: mol_type = other DNA
agcagacctgggtgtgaatcgcacctctaataggagtgtctggcacatggtgaatattcagtcaatgcttgctgctctcaacactggttcctgtgggcaggaaccccgagggaaagcttcatctcccattttctcctggaatcagggtcagctgaggcccagcttgagcctgcccactgggccccaggagctcaggcctggggtccctgagagggtctctgtacctccttcctcactggaaaggtagacagcaggggcctgcaacaccatcatcctgatgaaggtctgggcctcagcccatcctgcctgtcctgggcccaggcccggagctggcttgc

SEQ ID NO: 28977 - DNA, 376 bp, Homo sapiens
  source 1..376: mol_type = other DNA
gttgacagtctctgtttaccttaatgattgccaagattcaactgaacaactttgcagttcaacttccatccccagccactcaggatgtggacaaaacaagtggccggagggcaccctggtactgccaactgccagctcccaccttgacctcaggtgccagcaggcatcacccaccatgcccggccctgtcatacagttttatgggagctagaagggttgaccaggatggcagcctgtacaggatccctctctgcgtccgcactgtggatctgcctaaggccagggcatgggggaagcctgagggatcgggcacaggtccagctcagtctcccagagagactaaacagtccctcccctgggctgggctgacagtacc

SEQ ID NO: 28978 - DNA, 350 bp, Homo sapiens
  source 1..350: mol_type = other DNA
tcgcccggactggagtgcagtggtgcaatcttggcccactgcaacctctgcctcctgggttccagtgcagcagcttcctgacctcaagtgatctgcccacttcagcctacagacactatctgcagaagcacagggagcctgctgtagaaagacttctgtctcagatacattgtttcatcctagcacagtgagaggatctaagcctcagggaaaatcctggtgaccttaagcttcggggccatgggggagggcctcagcccagagcctctgggtcccctggggtccccgcccccccgtggccattcttctggtggggctatggggcgcagaacttctaaagggcgttgttc

SEQ ID NO: 28979 - DNA, 424 bp, Homo sapiens
  source 1..424: mol_type = other DNA
gggagctcctgcaggaagactcagggagaagatcccagaacttacggttactgcacaggcgttgccactgagccagagccatttaacccgacctgtgtggctggggaaccccataactctgactctcagactgttttgggggccccgtagggaaggaggggcacgtgagggctgggtccctgcctccccccgtcctccagggggcggcccttgggtggaaaggggacgccgcctttcccggggggccggaacggggccccgggcgggggctcaggcgccgtctctagtggccgctttccaggcggccactggactgggagtctcgcgccgggggccggcgctgtctcgcgagccccctcctcgagccagccaatggggttggttgctggcaccgcccgcccgcctggtgcagagcgctgggcgc

SEQ ID NO: 28980 - DNA, 315 bp, Homo sapiens
  source 1..315: mol_type = other DNA
ctaaatgctctcagcccttaggggaaggcagtaggcttaacgctagtgccacctaccatccaggaggggggagcgtgtagcgcgcctgcgtgctcgtgcgcacgagaagggagctcctgcaggaagactcagggagaagatcccagaacttacggttactgcacaggcgttgccactgagccagagccatttaacccgacctgtgtggctggggaaccccataactctgactctcagactgttttgggggccccgtagggaaggaggggcacgtgagggctgggtccctgcctccccccgtcctccagggggcgg

SEQ ID NO: 28981 - DNA, 318 bp, Homo sapiens
  source 1..318: mol_type = other DNA
ctactaaatgctctcagcccttaggggaaggcagtaggcttaacgctagtgccacctaccatccaggaggggggagcgtgtagcgcgcctgcgtgctcgtgcgcacgagaagggagctcctgcaggaagactcagggagaagatcccagaacttacggttactgcacaggcgttgccactgagccagagccatttaacccgacctgtgtggctggggaaccccataactctgactctcagactgttttgggggccccgtagggaaggaggggcacgtgagggctgggtccctgcctccccccgtcctccagggggcgg

SEQ ID NO: 28982 - DNA, 234 bp, Homo sapiens
  source 1..234: mol_type = other DNA
ttccttatctgttttaaagaggagaaaactaaggcccttcacttgacaagtcacttgtccaaagtcactgatattagaaatctggtctgactccagaacccattgaaatctaaaagtaagaaactctggcttttatctctgctactaaatgctctcagcccttaggggaaggcagtaggcttaacgctagtgccacctaccatccaggaggggggagcgtgtagcgcgcctgcg

SEQ ID NO: 28983 - DNA, 193 bp, Homo sapiens
  source 1..193: mol_type = other DNA
tgcgttaaagaaacatggcggggcatttttttcagtaggaaaaggccaaatctattccattgaatacaatgacattgttacgcacaggcgcagtgcaggactgctccgagcacgcctacggccaggccgcttgcacatgcgcattaggtacaagctaaaccttgattggcagtttagctaaccaatcgagaac

SEQ ID NO: 28984 - DNA, 300 bp, Homo sapiens
  source 1..300: mol_type = other DNA
catgtcctaaagaagacattttctcttagagattttcattttagtgtatctttaaaaaaaaatcttgtgttaacttgcaggcctagtacaatcagggttactatactgaaggtctgacatggagtttttctgaaaaatggagcagtaatgcagcatcaacctattaaaatacattttaagccttttaattttctactctataaaggtaatcctttatgacctttggattacagtattagcgctattgataaagaggaagcctcagtagtggtgagctgacctcacccaagtgatcagaga

SEQ ID NO: 28985 - DNA, 262 bp, Homo sapiens
  source 1..262: mol_type = other DNA
tttaagtcttccttaaataatattggtactttggttccatagttaagatgcttatttttaggagattttactaaactttcacattttccgaaataaaacgttgggggaacaagtgctcttacccttacttccgggtattgtggtacaggaacccgaggttgcctgcgcgtaaggagcagctccttctgattggaggaagagccactgctctaattcggtgccgtctcgcgcgcgagccgttagtaaagtagttacttctttc

SEQ ID NO: 28986 - DNA, 216 bp, Homo sapiens
  source 1..216: mol_type = other DNA
attttactaaactttcacattttccgaaataaaacgttgggggaacaagtgctcttacccttacttccgggtattgtggtacaggaacccgaggttgcctgcgcgtaaggagcagctccttctgattggaggaagagccactgctctaattcggtgccgtctcgcgcgcgagccgttagtaaagtagttacttctttcccggctgcgatttgctgc

SEQ ID NO: 28987 - DNA, 288 bp, Homo sapiens
  source 1..288: mol_type = other DNA
ttctgacctcttttccaatcttgtgaaggtggcagctttttaaactgtttaattcaaacctatatttgtagtttctaaaatgttgataacagaccattttgttgttacacatgtctgcccactcccatccctataaaaggaatggctccttttctaacagctggagtgcagtggcgcgacccgagccaccgcgcccggcctctaacaacattctttaaaaatatacattttacagcaaaggtggcaatgtaatcaacacactggcttattttgggttgagactccgtt

SEQ ID NO: 28988 - DNA, 346 bp, Homo sapiens
  source 1..346: mol_type = other DNA
agtgaattcatttagaggagagtcatggattttgacgaacgtgaatcacctttaacatttttagagtattctgaataccaaaacgattttgaaatttcaggaaggtgtctgcattcaactggccctgtgaaagcttcagtctttttcatcgaagtgctgaaatcgatagaggcaattctgaattgactggctcagaatgagtcgtaaccatccgtttttgtacgaatacagttgataaacttttttagacgcctttggcatttataaaacgtatccgtcccgtgtgtgttgagtcgggttgacagggaccgtggtctgggcgctgcgcggaggactacatgtttcg

SEQ ID NO: 28989 - DNA, 283 bp, Homo sapiens
  source 1..283: mol_type = other DNA
agctgtgtgatctctaaaatgagagtgctaacagttgcctactttttaaagtgttgtatgaattaagtcgtaagacacttggaataatgcttagcacgctggagaaactggcacaatctagaaagcgctgtttagttctcgcaggataaaagtttgttatgaacgatttcacacgccaagttcacaggcgcgaagttcaaatttgtcttgtgaccactgtggagcgcgggcgagcacacgtgaattactgctaccgccccctaggtccgggcactataaaggg

SEQ ID NO: 28990 - DNA, 233 bp, Homo sapiens
  source 1..233: mol_type = other DNA
ccccgcacgtcacaagtgagttgtgtggtctatcacatagcaagttttttccccactgattagcagggagaggtggtggtaaaaagctagatttagtgtaacggctttttaaaaaaatattttaattccctttttaagagacagggcctcactctgtcaccatacaattatatctcaaggcagacttgaactccgcacctagctgaaatttttatctgcacggaaactctgtg

SEQ ID NO: 28991 - DNA, 10 bp, Homo sapiens
  source 1..10: mol_type = other DNA
gagcacgtgg

SEQ ID NO: 28992 - DNA, 404 bp, Homo sapiens
  source 1..404: mol_type = other DNA
acaaggctcatggtgtcccttggcatcttgcaaggtcaccactgccctggttctattcgccattagagttaacctttattagtatagataaaggagtgctgacaagacctcttttcatgctcaacatccactgagcacctcttggcaggtggggagggatgccccctttgtcttctggtgccaggatcccaaaggcatgggaatgtaggcccacattgtgggagtctcccacccagctctcggtgaatggcataacccatgggttcaacaggctctggagattgagctgcgcctcccgaagcagctcctctacactcgggggcctgcccgaggagaggaggctgtcgccatgacgacctcgagtgggcagtcgctgtcgcattttcccgacccgagttagctgc

SEQ ID NO: 28993 - DNA, 415 bp, Homo sapiens
  source 1..415: mol_type = other DNA
aagagtgctgacaagacctcttttcatgctcaacatccactgagcacctcttggcaggtggggagggatgccccctttgtcttctggtgccaggatcccaaaggcatgggaatgtaggcccacattgtgggagtctcccacccagctctcggtgaatggcataacccatgggttcaacaggctctggagattgagctgcgcctcccgaagcagctcctctacactcgggggcctgcccgaggagaggaggctgtcgccatgacgacctcgagtgggcagtcgctgtcgcattttcccgacccgagttagctgcagctagggctggaggggagcggcgcgcggcggccagtgggcgcccgcggttccccaaggcccgcccctgcgtggggtggggggagtgcgagaggcggggaat

SEQ ID NO: 28994 - DNA, 445 bp, Homo sapiens
  source 1..445: mol_type = other DNA
ctggcagctagagcaggagtcctggctcatggcccttccccggcccagcgctcggccatggcacctgctatttttcagaagaatatgaggccaggctgcctcatcccccacctgggagagccagcatgcactggaagctgctcagccctgctcaccagcagagctaccctgaggccccactgggataggccctgcacagcaggtgcctggcctggtggcctgtccacgccactggctcattgccaggcagccacccagggtgtgagggcccccgaggcctccctgagcctgttctgcccatcctagaggagaagcggtggcctcagctttgctccacgcagtgtgcccatcaacatctctggtagagttgaagtgagactttcgtcatggctcttgccaggatgcagaagagggggcgctggctgctctttcttcacaaattttc

SEQ ID NO: 28995 - DNA, 428 bp, Homo sapiens
  source 1..428: mol_type = other DNA
ccagaatccctatgctgcaccattatggaaattttggaaaattatattcatataacatacaatacattacatatacttcttttacaaggaatcatattctttatcttggtctaaaaatgttgtataatatcttcttgtgtggctaaaacattatttaagcagtaccgactgaggagcactcagactgcttccaatgtacaggcttttttaaaaactaccttttgaacctaattagctacaactgcaacagcggaagttggccgccaccacagtggcggccccgcgggattggccagagctggcgccgagggactgcagagccacccacccccgtggctcctactcagaggccaggcttcccgccctcccattggtccaagagccaaaggacgggtgccccaagctgtgcctgcttccggagccgcaag

SEQ ID NO: 28996 - DNA, 519 bp, Homo sapiens
  source 1..519: mol_type = other DNA
ctctctttttaagaaaataaatactgtggagaagaaaaaaattttttttaaagagacggtcccaccttagcctcccaaaaggctaggataacaggcgtgaggccacccaggctggagtgcagtggtgcaatcccggttctcgtgcctcagccacccgagtagctgggactgcgggcgcccgccacccctcacgtgatccccggaagtgctgggattacaggcgtagtttaaatcacagggactatgcctcccagggtgtttgaattcaaagcacggtcagtgccaggtacagatctccaggggtcgccgcaatgactgggcgcacgcgcgaacgatgctgcctccgtgtctcgaaggagagatcaccttctgcttcccggcgcgcgtaggcgcaggcgcccaccgtcatgggcggggctcaggcggaggcgtcgcagcgcgtggtcgcggattggccggccgcgaggccgtcggttggctgtgtccctctccacggcgcacagagcatgcgcggggcgg

SEQ ID NO: 28997 - DNA, 257 bp, Homo sapiens
  source 1..257: mol_type = other DNA
agatctacattttagttagatataaccagacgatacgttgttacgtttaagaaataacattaaatatttattaaaatgtattctattgattatatacaagttctttctcgctctgtcgcccaggctggagtgcagtggcgcgatcttcccgagtagctgggactacaggcgcccgccactaaagtaagctcactttgaactctgagctgggcggagcagctgaaaatccggcgcgcgcagtctccagccccaatttc

SEQ ID NO: 28998 - DNA, 423 bp, Homo sapiens
  source 1..423: mol_type = other DNA
acctggccccacggtccgggagagtagcatttctccgggtcgcatcctgcagaatgcctcagtgaaattactaagtggaatggcggtggggagagccggtgtcccgggccctggcccccgacagctttagaagccgggcactggccagggctccgggcgagggctgcccatagcccggactcgccagccccaccccgggagccttggccggtccacagggctgccggactcgcgtggccgcgtggactccgttccccagccggagcgcctttaaagggccacagacgccagccgctgctataaaaatgtgcccggcggcaaagctgcagaaggggcaccgctgagctgccgagaggaagctcgctctgcccggctgccctcttgtagtccgccggcggcacagcacccgcgcgggccctccgt

SEQ ID NO: 28999 - DNA, 633 bp, Homo sapiens
  source 1..633: mol_type = other DNA
cggcaatgggggcttgagagccgggtccccagcgccgggaagggagcgcggtggccgccaccgccaccgccccggagtccggcgccgaagctgcgggcgggcgggcgggcaccagctcggtcaggggctgcttggcgcggcactgtgcggtgcagcggcggcgcggcgcggtgcgggcttttcccaggcgccccggggtcgggtggccaacggcgcggccgcgggcgctgagcgcgaccggttcgcggtagcggtggcggcggcgtgcgtgccaggggctgggggctccgccgcctctcttgcggctcaccgagctccgcgcttccctctctccagggcaggcggcttctcagaggtaagccgggccgccgggctgggcgccgggctgggcggcggggccgaggactcccgcggccgccaggcgggccagctgctctgctgggggcgaggggccgcccgcccgcccgcccgccagcgctcgggttcgcttgccagcgcgcccccctgccggccagcggggccgggtgcccgcttctcccggggagacggcagcacctatctggacgctctggctccggagctgcacaaagctcaagttagcgaatttgggcaacttgcctctactgcccaggc

SEQ ID NO: 29000 - DNA, 405 bp, Homo sapiens
  source 1..405: mol_type = other DNA
tctttccagtaaggatttgtaagacaacaaagaaacgttattcttgctagaatgattatgtagttacaataaaacaggaggaatctccgcgaaccctgacctggccccacggtccgggagagtagcatttctccgggtcgcatcctgcagaatgcctcagtgaaattactaagtggaatggcggtggggagagccggtgtcccgggccctggcccccgacagctttagaagccgggcactggccagggctccgggcgagggctgcccatagcccggactcgccagccccaccccgggagccttggccggtccacagggctgccggactcgcgtggccgcgtggactccgttccccagccggagcgcctttaaagggccacagacgccagccgctgctataaaaat

SEQ ID NO: 29001 - DNA, 452 bp, Homo sapiens
  source 1..452: mol_type = other DNA
ccctaatctatgtttagctgcatgcagtttccaaacaccactgcttgcaaccttcctaccacatgaatgttcaaggagttacatttgacatcattgcttgatcggaatctaccaagcaatttccactgcaccagccagtctcttgggaaagtactatcagatttgccagagtaaattattgagattgttaactctcatggatagttaatgatgaaaagaaatgaactataaaattgcatcacagaatttactgtgtaaacttttcaaaccattatgtgtttgcagattgaaacaattcataaagagttgaggctacttttttttttttttttttttggtcttagcgctgaaactaaaaatcgcggttattttagtgtttagccaggatggttagttttgaccctacttatttgtgccataaaaacaatcgatcctaattgacagctatttgc

SEQ ID NO: 29002 - DNA, 415 bp, Homo sapiens
  source 1..415: mol_type = other DNA
cgcgcgccagtgcgcacgagggagttctggggctgccagctcccagctgtgccagttactaataatctgagcttttaaagtcaaaatctaaaatacaaatccaagtcttcagacctggaacacaagcgtgtctttcagttttgaagttcagttcctttataaaactacccaacatcctgtgtgcacagcaagtgataaacctcggaaacattctcggccccggggcgggcgagccccggggtcgcagcgcgcagctgccagaaccagtcgcgcccgccccgcctcccgctcgcgtctcccgcaaggtggaggcggcgcagcggtcgttgacctgttggcggcggccgggcgggaggctgtgggccgcggcggtctcccgggggggcaggagcggcgcctggggcgctgcggcggg

SEQ ID NO: 29003 - DNA, 348 bp, Homo sapiens
  source 1..348: mol_type = other DNA
gtcttactctgtcgcctgggctagagtgcagtggcacagcctcccgagtagctgggattacaggcgcgcgccaccgtgcgcacgagggagttctggggctgccagctcccagctgtgccagttactaataatctgagcttttaaagtcaaaatctaaaatacaaatccaagtcttcagacctggaacacaagcgtgtctttcagttttgaagttcagttcctttataaaactacccaacatcctgtgtgcacagcaagtgataaacctcggaaacattctcggccccggggcgggcgagccccggggtcgcagcgcgcagctgccagaaccagtcgcgcccgccccgc

SEQ ID NO: 29004 - DNA, 361 bp, Homo sapiens
  source 1..361: mol_type = other DNA
acaacaacaacgacgacgacgacgacgtcgaccgttttgttactaggggctgacctcaaagcaggagtcgatttaagtcctggtggtttgcaaagttagattacaattaacaatatgttgtgcattcctccacatctagatgaccacacagggtgcgtgcttacttgagcaaagcaacttcaggtagatgatctgaagaggaagctgcagaggcagccgccttctccagttattaactgggagcagcgcccccgcatccctcaggctgtagcctgcggtactgttttctgccagaagaggcactgcggggcggcgcccgcccattcccacagctccgggaagacccgggcggcggaggctt

SEQ ID NO: 29005 - DNA, 176 bp, Homo sapiens
  source 1..176: mol_type = other DNA
cccaaacgagggccccttcatatcattatgtggagatctctctttgtccctgctgggatgtaggttcctcataaagttaaaatagaacttaagtgttcatcaataaagaaaagtgtggtctatatacacaatggaatactgttctgccatgtaaaagaagcacgtggcatttccat

SEQ ID NO: 29006 - DNA, 319 bp, Homo sapiens
  source 1..319: mol_type = other DNA
tgagtattctacagatagtagattctccccctaactagattcagtgctgagtcattgcatactaattcgtgacacatttatctgtggaacataacactgattgggaatccctttaatcacatgctgaatttttaaaaggtaaattacaaaataccaagtacatgagttataaatgcatgcacaccaaatatcgtgagcgtcaagagatctcgaggttcattggtcgccagccacagcggcgggagatcttccctcagaccgtctgactggttctgacttgccggaggctgaggcaaccacaggctgacatcagaattag

SEQ ID NO: 29007 - DNA, 336 bp, Homo sapiens
  source 1..336: mol_type = other DNA
ctaggggctgacctcaaagcaggagtcgatttaagtcctggtggtttgcaaagttagattacaattaacaatatgttgtgcattcctccacatctagatgaccacacagggtgcgtgcttacttgagcaaagcaacttcaggtagatgatctgaagaggaagctgcagaggcagccgccttctccagttattaactgggagcagcgcccccgcatccctcaggctgtagcctgcggtactgttttctgccagaagaggcactgcggggcggcgcccgcccattcccacagctccgggaagacccgggcggcggaggcttagccccctcccctcccg

SEQ ID NO: 29008 - DNA, 258 bp, Homo sapiens
  source 1..258: mol_type = other DNA
tcttgtgatttcattggcatctactagcaagtctatgtctttttcaacaattggagttttacaaagaaaacttttttagtttgctgcagctctggccaataggaaagtttattatccactttaatttgtgcatatttgtaaacaacgtacgtaaccctgtccccaaacacaatactgacgctatggggaccagtgaaagtgaaatggcccttcatttgaatgcaaatgctatgtaaattggtggcctatctatacagg

SEQ ID NO: 29009 - DNA, 371 bp, Homo sapiens
  source 1..371: mol_type = other DNA
atgtaataaaatagatataatgatacttacctctcaggattaagggttaactgaaaaattcaaacatgcatattctgattcatcttttaaggaaggagaccaccaaatttaaaaccaggtcccatctgtaatataaaatcatcatgatacatacctcatagcacttagcacagtccctgagttaataagtcctccgttaagtattacataggagaagtagtaaaaagtttcctcttaagtaaaatgctaatcaagattgtggcaaagttatgacgcaaggcttttaaactgatataccttgagatattttggacaaagtcagttgggttaataatgcccagcattaattaataagcaataagttcacctct

SEQ ID NO: 29010 - DNA, 329 bp, Homo sapiens
  source 1..329: mol_type = other DNA
aattcaaacatgcatattctgattcatcttttaaggaaggagaccaccaaatttaaaaccaggtcccatctgtaatataaaatcatcatgatacatacctcatagcacttagcacagtccctgagttaataagtcctccgttaagtattacataggagaagtagtaaaaagtttcctcttaagtaaaatgctaatcaagattgtggcaaagttatgacgcaaggcttttaaactgatataccttgagatattttggacaaagtcagttgggttaataatgcccagcattaattaataagcaataagttcacctctagcgtggcggcgat

SEQ ID NO: 29011 - DNA, 423 bp, Homo sapiens
  source 1..423: mol_type = other DNA
agagcttcggctcccgactgggcctgggcccggcccccactggtgccaccctggcccggctcctggcccacactcggccctggcccggccctggcccggcccagacccggcccggccctggcccggcccagacccggccctctgaggctcctccgggctccaggttggcgcaaagcccggaggggcgggcctcgctgcatggccgcctcctcccctcccaggccgccagggatttgccgggaagagcgggggcagggggagactcccgggggtgcgcaggaccgcggggggccgagtcctcgggctcgagaagattgtgtccacccgctgctcaagtccaaggagggacggacgcgggccagctgtcgtcctagggtccccggtgccacctcagttgcgggttctagggagaacaggagggac

SEQ ID NO: 29012 - DNA, 311 bp, Homo sapiens
  source 1..311: mol_type = other DNA
taacatgatatgtactataaagactcaagagaactgggattttgatctgttttcttagccttgctctgtcacccaggctagagtgcagtggcgagatcccggctcacaggctggtctcgctgacctcaggtgatccgcccgctttttaatttcctaagcagctacaatggtgcttgacattgaataacgcaggctactttgtgatgtcagggtagactaatatcacatttctctcttcaagcagtcagaccgtgacgtccttcagttttcaaaatgggaaagcgaaggttcccggtgccgggacgcggcat

SEQ ID NO: 29013 - DNA, 267 bp, Homo sapiens
  source 1..267: mol_type = other DNA
taactgcctctcatttactctaattactggaaggcctagaacttgaaagaattagctaagtagtcttgaaaaccatacagaaaccccatacagaaggccttatagggacctaaaatgtgaagtatattttattaagatattctaacttgctcactagcatttaatgttagttgccaaatttccaaactctcttacaagtttgaaagcatttcagaactctttttcatggtaataaggattagagaagtttaaaacacatccctatat

SEQ ID NO: 29014 - DNA, 579 bp, Homo sapiens
  source 1..579: mol_type = other DNA
gcgcgccctttatgacaggtggccgcgcagtgcgcgctcccgggcgcccgaggggagggaagggcaacagcgatggtggcagcagaggcggccccactctgggcacctttctgaatggtgcctgcagaggcagtagcatcagcagcagcagcagcagccgccgccgccaccaccgccgccacagcagtagcattagcggcagtagcagcatttagcaatagctttaacagctatagcgacagtagcagccgccctcctctctccctctcgcggacggccgcagccaccgcacagagcgggctccaggcgccgagcgcgcagcccgctcgctaggtagctccagccggggcgagcgacagacccttggagcagccgggcagccgcggaggctctgagtttcagggccagagcccgacagctctgactccatctagcgcggcggcggcggagcctgagggagcgaggcgcgtccacctggcgggcccagcgtatggagctgaggcagaggcggcggcggcggcggcagcagtagcagcggcggtggcggctaaggcagctcgaacagctgcggcgacggcg

SEQ ID NO: 29015 - DNA, 291 bp, Homo sapiens
  source 1..291: mol_type = other DNA
aggctcaggccccaggactccagaagtactaaatggtcttcccaggacgtctgaattcctgggggcccaggcccttaagttagatgcttggtggatgaaaccattcaaatattactgccctaaaaggcatgggagagtggtgtccggcgtgtctgccagggcgcgccctttatgacaggtggccgcgcagtgcgcgctcccgggcgcccgaggggagggaagggcaacagcgatggtggcagcagaggcggccccactctgggcacctttctgaatggtgcctgcagaggc

SEQ ID NO: 29016 - DNA, 363 bp, Homo sapiens
  source 1..363: mol_type = other DNA
aagaagtcatacttttgcagcagtgaatataaaattgcaactgcattattgtctccggggtttcaggtaacatttacaactggaaatgcagtttcctagataactgtaaacatattttgacattttgtttgataatagtgggacaaaagaatgtcttgagtgacaaaattagtaaagatgtctgtagtcgtgtgtgtgtgtgagactgtcccacgagcaacaaaaagcagtaaatcttacaaaattaacgtctgtagtttaatctttccttaattcagaagggagtgaagatgttgtttatgtaaaattgaaacttaactaggtacaggaaaagagaaaaatacagtgttactccaatattcc

SEQ ID NO: 29017 - DNA, 355 bp, Homo sapiens
  source 1..355: mol_type = other DNA
acttataagttggagcctactgcaggtgggtactaggcttaatacctgggcgatacctatcttaaaagttaaaaaaaaaaaaagattcttgtatcccatctcggctctacaattattgtggtacatactgatacacttaaaaataagcgtctttccaagtactttaaagattcaaaatgatagtgtgtttctagaacagtctagtagaggacagcctcttcagcagcctgcgacaagctaactgaagatgatataatttctctcagaagccccaggggcccccggaagatccttcaagctgccttggcctcgctgcgggggcttagctacctgtgggaacccacgtagcaagggt

SEQ ID NO: 29018 - DNA, 251 bp, Homo sapiens
  source 1..251: mol_type = other DNA
tttgtaccaaagttgatctaacaggaaaacatttgttgaattaaatttagatgccatgctaggacatatgctcctgaatttattaatatagctcagcttaattgtttttttataccaatgtgtttgttctaaaaacatactaagcgacttacccaagcagcgactgcggcactacgtgttaagcagtctagccctgcatccagccttgaaacagggtgggaaaggggagggactgcactccctctgagcgt

SEQ ID NO: 29019 - DNA, 301 bp, Homo sapiens
  source 1..301: mol_type = other DNA
acctatcttaaaagttaaaaaaaaaaaaagattcttgtatcccatctcggctctacaattattgtggtacatactgatacacttaaaaataagcgtctttccaagtactttaaagattcaaaatgatagtgtgtttctagaacagtctagtagaggacagcctcttcagcagcctgcgacaagctaactgaagatgatataatttctctcagaagccccaggggcccccggaagatccttcaagctgccttggcctcgctgcgggggcttagctacctgtgggaacccacgtagcaagggt

SEQ ID NO: 29020 - DNA, 313 bp, Homo sapiens
  source 1..313: mol_type = other DNA
tctttacagtactttagagatttcttatgaaagctcaacttcaaatttatctctgatcatataacttaacttctcaaatcaaatcctattctgaaatctgggagtcatactagaatcgttgtgttagagtgatcataaaagttaaatctgaccatgaagctggcctacttaaaaatcttcagtagcttactgttgctctaagggtaaactacatcatccgatgctatgctgtgagcactatatctagttgttccaaggcagggactaaattcttgtatgtgtatgcgcatgtgcgtatatgcgcatatgaatg

SEQ ID NO: 29021 - DNA, 278 bp, Homo sapiens
  source 1..278: mol_type = other DNA
caaatcctattctgaaatctgggagtcatactagaatcgttgtgttagagtgatcataaaagttaaatctgaccatgaagctggcctacttaaaaatcttcagtagcttactgttgctctaagggtaaactacatcatccgatgctatgctgtgagcactatatctagttgttccaaggcagggactaaattcttgtatgtgtatgcgcatgtgcgtatatgcgcatatgaatggagattgaatttttgctgggcacacgtgaagacaagaaaggggc

SEQ ID NO: 29022 - DNA, 393 bp, Homo sapiens
  source 1..393: mol_type = other DNA
taattcttcatagataatcctaagcctaataaattgccaaaatctaagcaatcagagactgtggatcaaaattcagattctgatgaaatgctagtactgatattaatgaaattcatacaaaccataagactttgtatgatttaaagatataatttctaaaaagaaacgacaaacccagtctgagtcttctaattatgactcagaattagaaaaccaaatacaaaagattttgactcttctgaagatgagacctcacaagaaggatcatctgatgatgctgagagagactttctcttcagcagaaggcaccttcctaaggcaagcaagtgcttccactgatttctgggttttacttctttggaagttagaaaagttgctgaaacatctgatggc

SEQ ID NO: 29023 - DNA, 374 bp, Homo sapiens
  source 1..374: mol_type = other DNA
gaataaatttggaaataaatttcgaagcgattagcagagattaccaatgtaaaatcaaattaattggtttgtgctaaacatcacatcaaattaagagacactttattcaatatggaaagaattttacgtctgcacacatatacatatatataagtatattatacacatatacatttccaagcatgttggtgtgccaaatattatgtataaaacatctaggaaagcaaataacttgatgatagcctagcatataggaaagaaaatatatagtaaactctcaataaatggttgctgttattacttcgttaatatgtcaaagaaaaaaggactaaattgggtggaggggatcaaatgacgtcgaccgcggaggacgc

SEQ ID NO: 29024 - DNA, 438 bp, Homo sapiens
  source 1..438: mol_type = other DNA
taaatattaagtcaaggagtttaactaagccggccgggcttggtggcgtaatcccagaactttgggaggccgaggcgggcggatcacctgaggtcaggagttctgatggcgggcgcctgtaatcccagctactcgggaggctgaggcaggagaatcgcagtgagccgagatggcgccactgcacgccagcctgggcataaacaaaaactttaaaaaataatctttgatgtcctcttttttcaaaatgcaggataacggactaaatagctcccatttttctagaatattacatgaaggcggcgaatttcaaggacttctaaatgagtctttgaaagattctgttcttgcgcatgcgtgttatctttagcggaccaatgaaaacgctccagattatcttttttctattggccgaccggggccagcgccagcgcgctgtga

SEQ ID NO: 29025 - DNA, 319 bp, Homo sapiens
  source 1..319: mol_type = other DNA
ggccaggatggtctcgatctccgacctcgtgatccaggcgtgagccgccaggcctcttggccaggctggtctcgaactccgacctcgtgatccgcccacaaagttattttatcacgtatttatctacatattacagaagtttttcttgcaacttttctctaaacttgacgttatttgaaaactaaaagctaagccaattagtatagtagtaatctatagagctctaaaccaaaaggcctttatttttcctcgcgggaaaagggattgcaattactataggttttacaggtatcgcgagatttcgtcaaatctcattacg

SEQ ID NO: 29026 - DNA, 460 bp, Homo sapiens
  source 1..460: mol_type = other DNA
aagcaagaataaaatgacccttttttcaaatgttttctgtgtttacattttatgcatctcatttttgcatatgaaggtggtgaagtgacgtccctaccccctcaacacacatataaaaattatgaatttataaacattttcctcttgatgtaatttttcaatggagggaagaggataacgtgaatttcatacttataaggagcttttatgttacatcttgacttataaggagcttttatgttacatcttgtttcatgaactatgtggaagatgacttataaggatcttttatgttacatcttggcctgaggttaggaaactaaagatgaagtggactcgtaccctaacaaagacccactcgaggctgcgtgtcggcccgggggcagcagggggcaggagaagacgttcccgtggcggccctgcttccggcaggggcatcacccggctggccgccgcggcg

SEQ ID NO: 29027 - DNA, 454 bp, Homo sapiens
  source 1..454: mol_type = other DNA
ccagttcttagttcaagacgctaagaacttgcgagttatttcatttgcctaatgaggataacagtagtcactatatatgaaaaatgccacgtgtttgccattagcatcaatcatgccataaccagaaaaattacattgcattttttattttaaaaaaggtgggggccagagtggacctgggcctcttccaacttctgagaggtctctattactaagtaagccttactcgatcttttccaaggcagccctgggtttgcgcagggacgcggctgctctgggcgtggttccgggaaacgcagcggcgccgaccctggcgcgagggaaggttccttgcggttcgcggcgtgccggacgtgacaaacggaagcgcgcgggagcaatggcagcgcgccgaccgcgatgggctgtggccaatagcggctgctcagcagggcgcgccgagagcagcggccgg

SEQ ID NO: 29028 - DNA, 365 bp, Homo sapiens
  source 1..365: mol_type = other DNA
ctgcgacagccagagatagttaactggccctgctccagggccaagagaggctagagggttgacctttagctaataaaaattatgtgtgcaaatctgggatatacttatactaaaaatgtattccttgttgatgtgacattcaaacgttgttggaccaagccccacattggcccacttggtgccctttgccgggaaacaactctgggaagtcgagcttctcggcccctctacttctttcaggccccagcaggctccatggggaagccctggccagcggcttgctgaaactcccgcccccggcggctggcacgtaccgtttccctcctcccgctccccgcaggggtggagcctgagcgaggagcccg

SEQ ID NO: 29029 - DNA, 632 bp, Homo sapiens
  source 1..632: mol_type = other DNA
aatttaaatgtgcaagagttaaattgttgaggacagaaatataatgaaaaatattgtcagattttctcacacatattatttaacttatcctactattaattactactaatggccactgtttagtcctagtgttttgtttaaatagcacttatgtaacagaaaataatacataaaaaacatataatttcaagtgaacacttattcttaagtaatgatacatatggacaattatttataatatgttatgggttttcttcatctagcacatctatgtcctgggttggctctctgaaggttggccaccctaagactatagtaccattctagtgggaggaaaaatatataaacaagatactatttgtaaattgcacagaatatgccatctgtgaaagtgacatcagtagggtattttaaagtagtcttaaatgttgtaccttgcaaatataccacgtatttttatctgtcgcccaggctggagtgcagtggcgcagtctcgactggcgtgccctgccatgcccggctagggtttcaccacattggccaaacctcccgaacctatttttaaatgtaccttgcaaatattcaaaagcaagggacgagcacgtgctctcactggaaacaatgtattgaga

SEQ ID NO: 29030 - DNA, 214 bp, Homo sapiens
  source 1..214: mol_type = other DNA
gatttaatttccatgtattgatataagttcaatttttaaaaatttattgaggcaaatttccacaggctgttgaatagtcagtggagtactgaagttctattagtaattgttttatacttgtctgatataagaatagcaaactttactttaagtttatgtggcctctgagcctaagttaagtgatgacattatggctcatcctggctcagaaaag

SEQ ID NO: 29031 - DNA, 452 bp, Homo sapiens
  source 1..452: mol_type = other DNA
aagggccttaaagcgtgtacctaaagatacaaaatttgagtaaatgactttgttcctacagcaggtagcaagccagaaggctactgctatattttacaagtacctaaaactagttgttagttatggggcatgtttacaaagtgttaacatcaacatatttatgcccatctccatatagaatcttcttaatataactcaagataattgatgtaacaaattcacatcatgatcttaccaatttggtttttaacatcaaagtgcgcaaaaagaaaacaacagttttaatccaatggaggcaatttattgtagatgaaatttatgttacttaagatcaagtttcacataatgccagttatattagcatatactggcaggatatttcctgagaattctattcctgaagctaggaagaaaagtttatttatacatacacgcaacctgcaagtcagtca

SEQ ID NO: 29032 - DNA, 498 bp, Homo sapiens
  source 1..498: mol_type = other DNA
ccaaactcagttgaagaaatactagtttgaatgtcagtttagttactaaaactccctaggagaggattagaaagtctagtcttgaatccaaatgttaacatccctgtggttggaaagattcaagggccttaaagcgtgtacctaaagatacaaaatttgagtaaatgactttgttcctacagcaggtagcaagccagaaggctactgctatattttacaagtacctaaaactagttgttagttatggggcatgtttacaaagtgttaacatcaacatatttatgcccatctccatatagaatcttcttaatataactcaagataattgatgtaacaaattcacatcatgatcttaccaatttggtttttaacatcaaagtgcgcaaaaagaaaacaacagttttaatccaatggaggcaatttattgtagatgaaatttatgttacttaagatcaagtttcacataatgccagttatattagcatatactggcaggat

SEQ ID NO: 29033 - DNA, 459 bp, Homo sapiens
  source 1..459: mol_type = other DNA
caaatattacaaaatatttattttttaaaaacaacttcatttagagactctttaaagtgtttgaaactggccttgcttacagtaagccctcaaaataaatacttgatgaaagttgagcttaatttacttttaatatttcgcttttgatggtttgaactcaacttcatcaaatctaagaagataaaaagaataggcacactttatcgcttacttttttatcattttcgatattctcataaaattattaaaatacaaagtaatcatgtttctttcctactctgagtttgtatttttatgttataaagtcctgatacatatgaatttgttggaataagtatgcataatatcttagtctaaatcactcacaggataaagtttaaactccttagctattaatagataatgtctttaaacagctcaaaatagagcaaaaacaatgagtcatgctttagttatatt

SEQ ID NO: 29034 - DNA, 378 bp, Homo sapiens
  source 1..378: mol_type = other DNA
aggcttcagttatctgaaaacttcacataaatagatcacatcatccctgatgatggtggtatttttatatgtgtggtgtttctagaaaaataaaactttgaagaaagaataaactcgatttgcaaaagattttgtttttactttcaaagcttctgcatccattatgctgactaatgcagaactgaccatttggtgatttgaaatggccaaatgcaaaccccaaggcataactgtgatctctggagcacctgatcagttcagggaagagaccagggactcgatctgtctgtggcaaattttccaagaaaacattgcaaggctgtggtcattcaaaaatgtttgcaacttttcacaagggcagtgactgagtacatgaag

SEQ ID NO: 29035 - DNA, 432 bp, Homo sapiens
  source 1..432: mol_type = other DNA
aactctctattgtaaatagattgcatctgtgctatttattttgtattttagcaaatctctgaaattttcatggtaattagacttactgcgaggcagttccttggaagtagtactggcttaagtgagtgtagtattaaaatttactttatatcacagtgtgataggaatatttttatggtacctacttattattatcaatattgttgtaattattttaaacaagtaggagcgaacatggtatgcataattgaaacgcagtcctgcggcaaagacaggcacacaggctttctctgtggattaattggtcaggaaagacactttttatattgtcaagtggcacttaagccattaattcttgactgtgaaactgcttttcctgggcaatgctctttaaggaaataatgcctccttagccaatgaaaagcatttcct

SEQ ID NO: 29036 - DNA, 392 bp, Homo sapiens
  source 1..392: mol_type = other DNA
aaattgagtgcaaacaattaccaactataataataaaaatttatatatttcaattttgactctatttttaatccagtttatcttattataactgttatacctgtgcaactgtcattatacctgagtgtttatacttgtacaaatatgtatattaatattgcctatttacttgtgtaaaatgttttaatgtttctcaaataaatatgcttttaaaaaggtaaataattttatcaaaggccttttctgcatctattgagataatcatgcattaaaggcctcataaaatgagttagggaggagtccctctttttctgttgtttggagtagtttcaaaaataatggtaccagctcctcttgtaagctattaattacttcctgaatttcagaactct

SEQ ID NO: 29037 - DNA, 459 bp, Homo sapiens
  source 1..459: mol_type = other DNA
tgacatacatcagccaggatgatgccagtcttcacaagttatgacaaaactctcagacttagttgacactgtagtcctcaagtgacatagttttgaaggccccatatacactgtacataaaaaccagaattaatgttcatttactttgagcatttgtttatttattaattcccatatgtattcattcaataacaattcatgaaaatgccttgttataaatatacaaaaataatgaaactatgtgttaaattgaacttaagcaaaggtacttctactgattagattttcctgaaaatttcatcttaccatggaacctactggaatcagtgaaaatctagatatttgaatttctctgcaccaatgaaataaaaagaaataaaatttgagtaacgtcatttgctcaagggacttacctttcatttgtgcaaataaggtttctgtggtgagacaccagataaa

SEQ ID NO: 29038 - DNA, 333 bp, Homo sapiens
  source 1..333: mol_type = other DNA
catgtaaatgttccaagaataatttctaactcaacccctgcaggtttcacagctggtggctgaacagaaacagtctctgggttgagactttacaggaagagtgaaaaatctagattatttcaggaatttattgtaaccttaggttgagatattaaaatttcaaaacacaagaacaatttgttgaactgggtaactataaacaggattctaggtgtcctttaaaaggaagatattattatcaaggaacagaacccctaggcagaaagacacgacacagcaggcttccttcctgtcttgcgtgcaggtgaggcacgtttagcctgagccggccag

SEQ ID NO: 29039 - DNA, 631 bp, Homo sapiens
  source 1..631: mol_type = other DNA
ttagccagacaattttctaacttgatattcttattcaaacagttatgtgatagtttctataaattggacatactgtaacaaaacattattttgagaagaactctgtcttttaaatgttctttttaaaaattagttgttggcactcaaaacaattatacttatcaaccataatacttttttaactgttttgagacaaattcagccttattctcctacctcagcctcctgagtagctggaatgaggctcaagtaatcctccagcctcagccttccaaattgctgggattatctttttaattgtttaagaattttttttaaaacaaaaacatgttcacttgggggtaaaaattaaatagagaatattttcccaaattctgtatttcagaaattacaacttaattttgaagttacatgtaggcagttacaatacttacaaaacaaaaatgttttttaacttaagttcaagtatcttgaggaacctgtttttaatctttaatatatctagtataacattgtcttttttgagatttgtatttaaatttattttttgaaaattcccccatctataagagcattaatgatgcaataataatattccttgtctcctggcaacagtaaccctggaattgca

SEQ ID NO: 29040 - DNA, 342 bp, Homo sapiens
  source 1..342: mol_type = other DNA
taggcaataatacataaagattattgaaaactcttggttaaagtactttagtagtatttgaaaacacaataggatcccagccgtagatacggcacgtgttaaactttcagaaggggaaacatgcttcacggctgattgcaaatttctcatgcaatatttgtcagaatccaggagcattttaagtggtcttctaacaagtacaacattttcatttggtaaataataataattttaaacagaaacaatttgattgccttcacaggaagggaaagtcactccggagctcgcagacgcgaatgccaccacagagttccaaggcggctgccagagcgtcggccgcag

SEQ ID NO: 29041 - DNA, 475 bp, Homo sapiens
  source 1..475: mol_type = other DNA
ggcactgcggtggcccaatgcgttgaagcaatggagaaaataaatttaaaagctatagaattcgtccaattaactaatccagaatctgtcttctcttctatgagagcctcttcactagaggataaaatgagcattgatttttcaagtacctatggatcacttattgctagtaaaaatcaaacatgttctattttgcagcagaaaaatgtgtcagccaagacattggccactgagagtctctacactgcctgggaactccagagctgaaccccttgagtggagcttctgagcaggaaatgagctgactagacttgtaaagtcaatccactcagagcaggatgcagccaggtatgtgcggtaggatgcagggtgcctgcagccttgaggctctgaaagctgaaatcacagactgtcattgtgactttgataacagcaggtcttctgccacagctgagggccagaacaccacgttctc

SEQ ID NO: 29042 - DNA, 379 bp, Homo sapiens
  source 1..379: mol_type = other DNA
gtttactaattgattaaacagtgtagtcccgaacctgtaggcaataatacataaagattattgaaaactcttggttaaagtactttagtagtatttgaaaacacaataggatcccagccgtagatacggcacgtgttaaactttcagaaggggaaacatgcttcacggctgattgcaaatttctcatgcaatatttgtcagaatccaggagcattttaagtggtcttctaacaagtacaacattttcatttggtaaataataataattttaaacagaaacaatttgattgccttcacaggaagggaaagtcactccggagctcgcagacgcgaatgccaccacagagttccaaggcggctgccagagcgtcggccgcag

SEQ ID NO: 29043 - DNA, 172 bp, Homo sapiens
  source 1..172: mol_type = other DNA
gtccagactgcaagaacctagcttagctacccaccggcttcgatctgggtaggtgctgccgtggtgaagcccccatgcccgggagtcccgccgcctgcggccgacgctctggcagccgccttggaactctgtggtggcattcgcgtctgcgagctccggagtgactttccct

SEQ ID NO: 29044 - DNA, 226 bp, Homo sapiens
  source 1..226: mol_type = other DNA
aaatatcaaaaatttaaaacaagcttaaattttgtgcctgagcttcagattaaaaatctattctcagtgtttttcattctgctttgtggctttcgcctgtcattataacataaaagaaaaaaaaactgatcaagtcagctctggctttctaagtgaacgagggcttcgggcaagttcgcgggccacgcccctcaaagccggggcctgagagcctgtcactccaatg

SEQ ID NO: 29045 - DNA, 300 bp, Homo sapiens
  source 1..300: mol_type = other DNA
tttctgttcatttaacataatctgggaacctaaaactacactttgaagtatatggatgtttgctcatttccttagagctaacaaaaatcatccatctttttacacaatattttcaatcttttctaaggaaacctgaaactttccttcaaaactctgcagcattgctcagtactttagtgcctatggaatcttaaaatgcgcaaggctttgagaacatgggttttcaacattgcatatatttctgagcaggaagttatgcgcagtactttaaaacggaggcggggctctggcgagttctcc

SEQ ID NO: 29046 - DNA, 377 bp, Homo sapiens
  source 1..377: mol_type = other DNA
ctgggatgagatcagacctctgaacacaggataagaattcttaagcataacactctgttcacttgaagagaacaacaaattttgtatgtgatttacatatttatgtgttaatgtgttgtgtgttaatagagaaaaaattttatattactggtctcccatctgccagaggaggcaggaagttggttcttctaaaaatcaaggctctttgaagaccaccaagactcaagatttggttgtccccatccaaatttcatcttgaatttgaatgagttctcatgagatctcatggagtggcgtgatctcggctcactgcccacctcagcctcctgggtagctgggattacaggcggccaagatgccactgtgcccagctgatc

SEQ ID NO: 29047 - DNA, 404 bp, Homo sapiens
  source 1..404: mol_type = other DNA
ctaaccatatgattttaggaaaactatttttctgagtttcagtttcttcatctgtaaaattaatgtaatagtacccacctcttgaggttgttttaaggacaacatgtaaagagattaatttggaattagtatttatttctgttcatttaacataatctgggaacctaaaactacactttgaagtatatggatgtttgctcatttccttagagctaacaaaaatcatccatctttttacacaatattttcaatcttttctaaggaaacctgaaactttccttcaaaactctgcagcattgctcagtactttagtgcctatggaatcttaaaatgcgcaaggctttgagaacatgggttttcaacattgcatatatttctgagcaggaagttatgcgcagtacttt

SEQ ID NO: 29048 - DNA, 741 bp, Homo sapiens
  source 1..741: mol_type = other DNA
taaatggccttatattaccttccttaagataatgctatttgactagcttgtgaaattagtttgttcaatgaaaaagttatcttggatcacatttttttcattaaaagataaaatatcattattatataagaaatataaacttacaaaaatgaaataatgaaaaataaaaactaatgaattgctttttctcctgtcacatatgggcaattttacctgtatacattcctacctgcccagaaaggttttttatctataatgaataattcacatttatgggttttatataccaagtagctgtttataacttgttctaacacaactctgtgcataataagagttgttttaagctttgggtgaaaagtttttttcagatttgtcaatagtagtttaatagatagtttacttttgctgaatttacatatccaagaataagacatcttcaagttattttatggaaataccactataaatgtacatttttagaggaaaacttatattcttacatatatctcttacacacacaaatatacacacataaacacatctttgtgcacacatgcacattcaaagttagtgttaaaataggctgatatgaaataattaaatatttaataaaccaaacaggtagattcaattaatgaatactgactaattcagttcaagttttaaaaagtggagtgtgaacacatccacaatttaaaaataggtttcaaaaacacctgtgcactttaaaattttaaa

SEQ ID NO: 29049 - DNA, 232 bp, Homo sapiens
  source 1..232: mol_type = other DNA
gcctttaccttctaggaggataatgtagcgcagcatgctgagcatgtgtgaagagcgctgcgcatgctccgtggagtgtgacgccgctgtgccgccgccgtgggggggtccaggcgccgcacaggtaacgccgccgctgccgccatattgacagagcgtgggaatcaccgggcggcggcggcggcgacccccagctcccagcctctgagagacccggcggcgagggcagcgc

SEQ ID NO: 29050 - DNA, 195 bp, Homo sapiens
  source 1..195: mol_type = other DNA
tatcataaggtactaaaaactatgattattgtcactacagcctttaccttctaggaggataatgtagcgcagcatgctgagcatgtgtgaagagcgctgcgcatgctccgtggagtgtgacgccgctgtgccgccgccgtgggggggtccaggcgccgcacaggtaacgccgccgctgccgccatattgacagag

SEQ ID NO: 29051 - DNA, 494 bp, Homo sapiens
  source 1..494: mol_type = other DNA
ttttaattacataaaatgcttcatgtctccaataattaaataatgtagctcttgtctgtagttaatgactgagcacatgatcatgtactttatttattccaaacgatgttgcaagttctatgatagcagagaatcaatgaattctatatctctcatggagtgactgttaaatgatgtaacatgtggtggatgaataaaaaccatagtttctttcctcagtataatagtacacttgcttttactgtaaaattctaaaggctcgatggacaccttattgattttagtaaaactgaatatttaaaggactgtatttccttatgctatcatttgattttggcagcatgtaacaattttgttaaaacccaacatgtaactactatagtcagaggcagtccagttgcaggcagccatctctcttcccccctcccaactcttgggttctgggctgaggccagggactgtcctgagctgatcgcaggctccacgatcatgat

SEQ ID NO: 29052 - DNA, 302 bp, Homo sapiens
  source 1..302: mol_type = other DNA
aggacttttatcaaatgagcttatcagagtctttctctcattgatataaaccatttttaaaatttattatttatttttatttatttatttattttcctgcctcagcctcccgagtagctgggactgcaggcgcccgcgacggagtctcgatctcctgacctcgtgatccgcccgtcaactgcccggcacagagtatgctctccgtgactttaataagttgtttttcttactatataattaattattaaagcagctacatttgggtattaagtccttatctggacatatcacatatgccagtt

SEQ ID NO: 29053 - DNA, 557 bp, Homo sapiens
  source 1..557: mol_type = other DNA
aggtactgtgctaggactcatcttctataattctatcaaaaactttagtggtatattaggttatagagacctgaagaatgtatctagaatctagaataataacatgctttatttgtaaatattcaaatgatttgcaaagataaagagttactttctttaggatccaaacactgttattgattccaaatgcttatagaattaaagctaaaataggcaaaacataagactctttgcttaccactttttgcagacagaagctgaaagtgacacattcatgagatatttatcttcatcgaattgtctaccattacaaaatagaaaattattggggtgaggcatacctcttattactctggtcagtctaatttgtcagattcttcgtttcccttgggaaacctggaaaacagaaagatctgggcttgcgcacttggacttggccggcgctcagcccccgcctcaagccggcggggtctcgcactaacctagcgcgggcgcctcgatctcccgcgcgcgcgcgtgcgcgagaccccccttctgcagcaagggtagcgtgacgt

SEQ ID NO: 29054 - DNA, 546 bp, Homo sapiens
  source 1..546: mol_type = other DNA
ttatttgtaaatattcaaatgatttgcaaagataaagagttactttctttaggatccaaacactgttattgattccaaatgcttatagaattaaagctaaaataggcaaaacataagactctttgcttaccactttttgcagacagaagctgaaagtgacacattcatgagatatttatcttcatcgaattgtctaccattacaaaatagaaaattattggggtgaggcatacctcttattactctggtcagtctaatttgtcagattcttcgtttcccttgggaaacctggaaaacagaaagatctgggcttgcgcacttggacttggccggcgctcagcccccgcctcaagccggcggggtctcgcactaacctagcgcgggcgcctcgatctcccgcgcgcgcgcgtgcgcgagaccccccttctgcagcaagggtagcgtgacgtgcgcgcctcccagcctcggaaacccgaatgtgaggaccttaagggatccacagctgccgccccccgcagccatccagagcgcggtcacagtccgact

SEQ ID NO: 29055 - DNA, 382 bp, Homo sapiens
  source 1..382: mol_type = other DNA
acctagcgcgggcgcctcgatctcccgcgcgcgcgcgtgcgcgagaccccccttctgcagcaagggtagcgtgacgtgcgcgcctcccagcctcggaaacccgaatgtgaggaccttaagggatccacagctgccgccccccgcagccatccagagcgcggtcacagtccgactggcggcacggaggcggcggcggcggcggcggcggcagcggcggcggcagcggcggcggcagctgtagctgcagcagcaggtaaggagactcctagctttcctcccgcctcgggcggagttttcctcttcagccgcagccgggggctggaggtcctctttccctaggccagagccccagggagctagagacaactgtcgcctacgtctc

SEQ ID NO: 29056 - DNA, 546 bp, Homo sapiens
  source 1..546: mol_type = other DNA
attaggaagatactttttactaaagtcactttgaatgagagtattctattatgatcaaaatttcaagtagtaataaatgtaagttgtaaacacatttaaatctcattatgtcagttaaagctcccttaataactagatattaaaaagtcaatcaaactcagtgtttcctagggcacatataagggcaggagaaattcccttgcaccaaaatgcaaagcatttgtggaatctttcaatcatttagacaaatttccttcaacaaatgatagaaataatcttccttaactgcaattatcagatgggttttgcaaagaatgcaaatttatctgtgaaaattggtgtattcctagactaatactcattattttagtctgggaatctggaataataatacttatgctggtaactacctacttaagaaccataaaaagacactttcatataacatgtgtgactttttttctaagcccatgtgcttggaagctgggcagccttgtagctatctccgtggcaaggcagggcctctcctggcatgtaaacgtcaca

SEQ ID NO: 29057 - DNA, 299 bp, Homo sapiens
  source 1..299: mol_type = other DNA
tatgagagctatgttagctgttcaatcactttaatataaagaccattttaccttaattatttctacggtagcttatggaaactaatagattggaaactaaatgtaaactaaggagaatcttacatgaacttataacgaaaaagatatggaatatattctgaaagtattggtttttttctggaatgaaagtctcctttgttcacagagcaaaccgaataaaaatctacatttctttcctaggctaaatgagctacagcattcacttacgtgtaaacattttaaatataatactgtagagg

SEQ ID NO: 29058 - DNA, 421 bp, Homo sapiens
  source 1..421: mol_type = other DNA
ggagctccaatcactggaccttttgagtcctaaagagcaagtctctctactacgcttcctgaatgtcagtgcgagttagcaaccagaactctgatctgagtgcgctgggtaggggaaaatttacaccaagcgcacaaagggcgctgtgctagcgttcccggaagctaggcgaagccaagtggaattggagctgccacctcactttccacgatctaacccggtgtaaggtggcggaaccactttgagaactctgcgtgacatctgggagttctctcgtctggcagagatctgttcttggtcgagcctggacccactcaggtagtcggacgccggccagggagtctccacctcctcaccagcggcagccattcggagcgctcgggcgcagaagggctggggcccattggctgtgggacgctgc

SEQ ID NO: 29059 - DNA, 738 bp, Homo sapiens
  source 1..738: mol_type = other DNA
aaaatctgtctagactccgtataatatatatctaaaagcaaaatcttacaacttcagtgttctttcttatcacctgtatgcatgactggataaagtacaaactgaatttcaaaatgtcaatgataaatgcattcttgatacatgactgtcttttgtaaacatgtccatctgtacaaagtagtgattcagatctcaaagtactttgggcacagttattcctgaacagtgtgatgatttggaattaattcaaaacatactctgttcattcataagggtttttgaacaaagaaaataaacctttaacactgcctgtgaaagtaaaaggcatgataagaaggtttgtatccaggcatggagccagaatgacaagctgtggtaactgagagaagacatctcttttaacctaactagcttggaaaagcactgctttcttcctccatatgtagactaaaaataccatttctacattcccaaatggcgtcaatactttcttacatgtttctaaaatctgtcaagttttcaggtaaatattcatatagagactttcacattttcagattaattttgtaaaaactaattacgaacccgcatgagggtactgatgctttcccttaatgaaccattttcaaagtttccataaaaggaatctcaaaatagattataatgaattcctctgtcgcatattatcatggaacaaagtggcacatttttagaagtgaaataagtttaaacacttcg

SEQ ID NO: 29060 - DNA, 711 bp, Homo sapiens
  source 1..711: mol_type = other DNA
cagatctcaaagtactttgggcacagttattcctgaacagtgtgatgatttggaattaattcaaaacatactctgttcattcataagggtttttgaacaaagaaaataaacctttaacactgcctgtgaaagtaaaaggcatgataagaaggtttgtatccaggcatggagccagaatgacaagctgtggtaactgagagaagacatctcttttaacctaactagcttggaaaagcactgctttcttcctccatatgtagactaaaaataccatttctacattcccaaatggcgtcaatactttcttacatgtttctaaaatctgtcaagttttcaggtaaatattcatatagagactttcacattttcagattaattttgtaaaaactaattacgaacccgcatgagggtactgatgctttcccttaatgaaccattttcaaagtttccataaaaggaatctcaaaatagattataatgaattcctctgtcgcatattatcatggaacaaagtggcacatttttagaagtgaaataagtttaaacacttcggctgcagctactgtactttgatactgaagaagcaggagggctgcaagcctgcaaatctaacagctgtctgacctcatcatcctgtcagcatgggttcccacctacactgttagctgcagccttctgcttctgctagaaggctacaagtattcacagtgt

SEQ ID NO: 29061 - DNA, 222 bp, Homo sapiens
  source 1..222: mol_type = other DNA
aattaaaaaatatatttaaataaactgtctgtgatggtgaatttctgactgaagtttaaaagattttggccgccattgtgccactgcactccagcaaaagtctagttcaaaattattattaatatctgctttgaaaaagtacagtagttacactcttttattgaggttagtagctaatcaacaatttgttcctgatatatctagatgagccagtgattggaa

SEQ ID NO: 29062 - DNA, 619 bp, Homo sapiens
  source 1..619: mol_type = other DNA
cttcaagggtttcaagttgacaactcatgatgaaattcataattgtgtaaagtgcatatatcttaacatgtttatttcatctgtaaatattaattacatattttgtattgattctgagtttcaacgttttgtggcactaaacaccatcaaaagccggctctccaatcattaaaaccttagtattatgggatcagagaaaagatctctttgcctaccacctgaggaaaatattaccattatgtgcaacatggtcctgtgttctacttgaccctgtgatcctttagcacttgtaaactttgactttccaatgcacaacctatccttttccctaagcttaaatgattttgataattagttttttaaaacttattatttttgggcttaaatatagtgttttaaataataaataacatttaaaatataagaaacatctaaaagccatcttagatttttctctctctctttttttttaaatcttggtacagaggaagcgggaagttacttaccgttggactgtcctgcggagagaaaccccagcccatcggtctgcgctgggaccgcccgccgcgcattccgccccgcatctggccagacccgcctcgcgtcagagctgacccac

SEQ ID NO: 29063 - DNA, 448 bp, Homo sapiens
  source 1..448: mol_type = other DNA
gctagaattaaagctgttttcagatatctctcaataaatatgttcagatacaaattccattcagcatattaaatttagggcatgtttatagatttcatatttaaatttactttataggtagctttcctagcatatgtgtgtacctttacttttaaagggcatcatttaaagaggatggaagtactatattttgtcctgaggtttgtctagggattttcatttacaacaaagctttgacgttcgggaacctgaaaatagcactcaattcaattgctagctgtatgtaagtgttttggttatagaacctaacaatcccctagggattaagcggtgggcgcctgctgcttcaacaaccctgcagcaagggaataaaggaacaactgtatttcttcggtccacagactggaccacacccccggagaggcctcagggagggatactcaggttg

SEQ ID NO: 29064 - DNA, 482 bp, Homo sapiens
  source 1..482: mol_type = other DNA
tttacttttaaagggcatcatttaaagaggatggaagtactatattttgtcctgaggtttgtctagggattttcatttacaacaaagctttgacgttcgggaacctgaaaatagcactcaattcaattgctagctgtatgtaagtgttttggttatagaacctaacaatcccctagggattaagcggtgggcgcctgctgcttcaacaaccctgcagcaagggaataaaggaacaactgtatttcttcggtccacagactggaccacacccccggagaggcctcagggagggatactcaggttgacccgccagtgaaacttacaggcggatgccactaggaagtgatgagttaggctccagtcaccgcgccgggcatgctcagtagctggggccggctcggctgcgggagtaggaagcagctttgcgcgcccgggcggccgatgccaccgccctgagggcggcggcgaccgtggtaattgca

SEQ ID NO: 29065 - DNA, 580 bp, Homo sapiens
  source 1..580: mol_type = other DNA
gccggctcccagctgtcggcgacctaagcggacatgtatggcgtgcccgccccagagctcctgcccggctttgagctctgctggcttggcgcggcgcggcggcgtccgctccaccggctgaggggcaatgaaatgtgtccggccccctccgtagccctgctgggagtgcggcacggagctggatgaatgaccacctcaggggcgctttctccttccctttcttccttccactaccagagaatgagaagagaggagacaaggagaaatagagggatatatatatgtgtgtatatatatatatatgtgtatatatatgtatatattatattcaagatatgaagatatgtaaaacacgataagacaatcatatcatcctcatctttcctgtcccggcgaggctcagccgcagcgccagcacaccgcctggcctgcctggcctgtctgtccgtcctcccatgaatcccgccagggctccatgggccggggtaccacttgtccgccggtttggccccgccccaagactggagcccgctggcggcgcgctgattggccagggcctggcgtagccgggctcggcagc

SEQ ID NO: 29066 - DNA, 568 bp, Homo sapiens
  source 1..568: mol_type = other DNA
cagtaagaatataaatttctgccatttaagctactttgttatggcagccctagcaaactaatatagccaccaactaatttgagattcctggtatatccaggtggaccttgaaattaaaagatataactgggttacaggtacagatgtggaaatcactgatatgtaggtgatattttcaactgtaggaatatagagagagcttagaattagtctttattttatcctgttttcattataattagttaagtacatattgatagcaccatttaaagagctttaacttagtgaaggaggcaatatcttattcatttctgaatctcaaacaccaagcacagtgcctgacatttaatatccctgcaataaatatttgttgaaccaaatggaatcgaaattaggacttcattcccttctttgtccactgatattttaagttcatagtgaaaaatcatttcaatgtgttctaggatggaattctgtgcacagaagttatatacatatatgggtatatctatgtaacaaatcgcagcacaggagtcccctgggctccctcaggctctggtatgacata

SEQ ID NO: 29067 - DNA, 547 bp, Homo sapiens
  source 1..547: mol_type = other DNA
ctaattattactcagaaaaaggatttctgaagtaaggtgccttttaaaattttctatttggcaatatttgaagacttaactgaatgcaaaattgacccagtttttaatttttttctccaggctggagtgcagtggtcagcctctcgagtagctggaactacaggtgggactggccagtttttaatttttaaatataagctgaaataatttttttttaaagacagtgtctctctctgtcacccagtctgaagtacagtgttgtgatcatagctcactggagccttgaactcctgggttcaagtgaagtaacacttttaaatatataatccagaaggtggaaataattgggaataattatttgttctgttgagaacatatggaagagaatagatttcaataaaatgacaatcaaaggctatgatacatacatctttctgcagaggtatatgatcaaagtatttattaccataaatatatctttctgcagagttatatgatcgaagtatttattaccataaagaaaagcacaggctgcttgtgctgtaca

SEQ ID NO: 29068 - DNA, 375 bp, Homo sapiens
  source 1..375: mol_type = other DNA
acaacatagaccaatatattcacaatatataacattaggttttaatctctctgtaatcagctgggttttgatgggaaaaaccaggtatgtacagtgcctttctgtttctctctttttaaaagtttacagcgaatagctgaacttacatttcactattatgtaaaaatactttccctcaactttccaattacttaggggataaaaggtaaattctaaagtcattattatctttaatacctagcttagaaattctttcaacaagtggtgagaggtaaatttcactgtgcaaatatatagggcaccaggggccagggaggcccaatctcagagcgctgcgggctctgctttctacaaaattgtacagtgttttttccg

SEQ ID NO: 29069 - DNA, 393 bp, Homo sapiens
  source 1..393: mol_type = other DNA
ctttaccactgttaagcttgtccaggtgactcataagtacaattcttccccttatgactgagaaggggttaccaatttgtaaccactgattttccaagagcagaatagtctcattatcagatactaaaatgaaaacagtaaagcctctccaggcatgctttccctttgttttttgtgttttttttgtaaacaatataatcttaacagaaactgaagtccagagaagttaggtcactggcatagggtttcaaagcgtatctgacgtgataccatatatagggaatgtcaaagtcagctgaaattccttttcattcaattcttatgtcatgctgagtcataaaaagaagtgttcttcagtgcaacacatctctggaggccgcttaagccagcctc

SEQ ID NO: 29070 - DNA, 443 bp, Homo sapiens
  source 1..443: mol_type = other DNA
ctcataagtacaattcttccccttatgactgagaaggggttaccaatttgtaaccactgattttccaagagcagaatagtctcattatcagatactaaaatgaaaacagtaaagcctctccaggcatgctttccctttgttttttgtgttttttttgtaaacaatataatcttaacagaaactgaagtccagagaagttaggtcactggcatagggtttcaaagcgtatctgacgtgataccatatatagggaatgtcaaagtcagctgaaattccttttcattcaattcttatgtcatgctgagtcataaaaagaagtgttcttcagtgcaacacatctctggaggccgcttaagccagcctcctcttctgcagcagacggactgtctctgagagaggaataactatagcttcagggataatatagctttaaggaaactttt

SEQ ID NO: 29071 - DNA, 478 bp, Homo sapiens
  source 1..478: mol_type = other DNA
atggtattatattttatttactcaaattagatagttcatactcttttatcttcttagaagtgtgagacaatttgacaacttttgactcagctgtgtgtctcaaggctttgggtcccagagctcccttttgggctgagtggccccctgctaaggagcccggggcgctgtgcggcccctttaagagtccagctcctccccgctccagggaaagttgcagctttttccgcctcccgggagggtgagaagggccggctgccggagctgggttgcgcttcccggagccggagactcgatctctggaggcacctgttgcaagtgacaggtaggtcaacagccagcggccggcccctcgccctcggtccggtgcggctcccctcgcggggagtgcccgggctttttcccgccagcccgagctggtgcccctcccgagagctggccctgggggcgggggcggggccgagctcctagcgggaactgc

SEQ ID NO: 29072 - DNA, 212 bp, Homo sapiens
  source 1..212: mol_type = other DNA
gacctgggtcataggttctgacaatgagctcaaatactcaaacccaattggatctttcagatgagatgttctgaggatttctttaagagagatacaagattacagagttcttggttagggcctctgagcccatgtcctagctcagggtgaaataaacagccttgttgctcacacaaagcctgcaggaggactcctttgggagaccagtcccc

SEQ ID NO: 29073 - DNA, 517 bp, Homo sapiens
  source 1..517: mol_type = other DNA
taaaaattgcaatttcacctgtgaagtacattttcaatacataagaggacctgaagagggacctcctgtgtagggaggttgagctataaacattttcaagtctattgatacatgctttctaaaagggtttttaaccaacatatgctgctatcagcaattaagacagcttgtttggtggctactttgtcatcattaagtgttattaaaaaataaaaaatatctttgccaaagaatctcattattgttctaatttgcttttccaaaacgtttctattttagacagacatttatttgccataaaaatggtattatattttatttactcaaattagatagttcatactcttttatcttcttagaagtgtgagacaatttgacaacttttgactcagctgtgtgtctcaaggctttgggtcccagagctcccttttgggctgagtggccccctgctaaggagcccggggcgctgtgcggcccctttaagagtccagctcctccccgctccagggaaagttgc

SEQ ID NO: 29074 - DNA, 353 bp, Homo sapiens
  source 1..353: mol_type = other DNA
gatgcgccgcatatacttttaatacatgtggaattaataaaaacgttccaaccccggcagggtctgcctttccgggatgatacaacgacctgccctgcatgccatatcccaatttccctagggaaaggacttccctgttaccatggtaaagccgctgcgcctttaagaaggaagtctgcaggctgaaacccttcaaattagaatctcaggagtgagaatatagccctccggtggacgcaactcgcgcccagaatgtctccaggggaggggctctgcgtccgttccgcccaggcccttccggctcacgcgccgtacggaagcgtgctcagcgctgggcttgtgctccgtacgga

SEQ ID NO: 29075 - DNA, 489 bp, Homo sapiens
  source 1..489: mol_type = other DNA
atatattgcttagggatgcaattatagttagtaaaaatataaagaaaaataacccaaatttcaagatactggagaaaaatagtctattttctttaatctgagtagtgaacacatagatacttattccttaaaattattctttaagttacatatgtatgttttatatactcttctgtgtatatttcaccattttagaaaagggaaaaaaaatcagtgcttgaaccaaagtgcacttttatacttgttaaattttcaggacagtttgaaaagtgcactttgaaacagcttagactaataatcttttttatgagaaactttagcaaatcttttatctagcttcacattaggtcatgttgataagatgatgagagagaatattttcatccaagaatgttgctatttcctgaagcagtaaaatccccacaggtaaaacccttgtggttctcatagatagggctggtctatctaagctgatagcacagttctgtc

SEQ ID NO: 29076 - DNA, 394 bp, Homo sapiens
  source 1..394: mol_type = other DNA
ttactaaattttgcaagtggagaaatcaaggcataaaatatgagctttcagtgccccttcatgatattatctggagggcaataggacctagggaggttccaccctgcggcggagggagacacacctgctcctaggcagaagtgcttctgaagagcggcccaagcccctggctggccgcctgcccgggaactctccggctgcaggaccctggcagcagacggcgtccaagagtttggcgacctccgtccagccaggttggcgccccgccgaggagaagcagcccctagagcgagcgcgctcgacagggaatactccactcccgggccaggcggtcttgggggcggggcttgggggaatccgaggagctatcctgagaaccctggactcggcaaag

SEQ ID NO: 29077 - DNA, 567 bp, Homo sapiens
  source 1..567: mol_type = other DNA
tgatagggatggtcacattcctagatgcctgcagtatcaatgcaatcacttcacctaacaatatatattatgaagatttgtcccttgagtaggcctagggaaataattgtaatattaccttcgtgtctcttctgttgtccttaggcaagagcagcaggaggacaaaagccggaacatgattcatcttagttcttaaatattaagagaagaaagaaaataagaagagcctttagtcagcttatgactaaacaggtgctgataaacagattgttagaagtctattacttcattctatccaacgaaggcagccgccgccgcccgaccgccgggaggatggagttcagcgggcagcggagctgtctcagtctttgccgccgcgccggcgagcgccgcccgggaggcagcggctggaggagcggacgggccccgcggggcccgagggcaaggagcagccgcctgcctcctctgcccggccgccaccccgtctggggcctgtgaggagcccctctgcctggctgcccagtctggaaagtgaggagcgtctccacccggccgccatcccatcta

SEQ ID NO: 29078 - DNA, 456 bp, Homo sapiens
  source 1..456: mol_type = other DNA
aatattaatactacaaagtgttttccacttgagcacaattactattaagcataaaaattaaatatcattaaatgtacgttcactatttttttttttaatggcatgatctcagctcactgcctgacctcaggtgatccttccctgctgggattacaggcgtgagccactgcacccacctcttgctgtaaattttactctattaaagcaacaatattttacagcacacagatgtgtgtatacttcaagttttcactcctctaaaaattagaggtattaaaccaaaaagagacatctgtcctctttttgagttctgtagagaaaaagatttttccagtgaagaaactataaagtatttttctgaagggatctgatgtctgcaattctatcatgagaaaactattccttgagttggaacaagcacccctgggatggctaacgcagttaacactgcagtgt

SEQ ID NO: 29079 - DNA, 270 bp, Homo sapiens
  source 1..270: mol_type = other DNA
ctgggcaagttacctaccttcccagcccctcaatgtgcccatgtaaagattaaattagttaatacaagtagagggcagcgtctagcatctagtaaacagttgacaattattggttattgtccttgaattccaaatttaaaactggagttaaccactggctatgagagtcattggaagccttctttggcagcattgaaggctgacaaatttgcagttttcagaaacaactctaagcctgtctttgagagtggttgaatctcgatctctcaa

SEQ ID NO: 29080 - DNA, 242 bp, Homo sapiens
  source 1..242: mol_type = other DNA
ttctaacatcagagcttataaaatttttaatggagggaggaaagaagaaagctgcttttatcctttgctgattcaatttactcattcaacatatatttattaagtaacctactgtgttatatcataccctcttctctttaacaagcgtgacagttaaaagagtaagttttcctgaattattcactggcagactgtcctgagcccacccctgccagcaggctgctcgctcagcagcctgattg

SEQ ID NO: 29081 - DNA, 309 bp, Homo sapiens
  source 1..309: mol_type = other DNA
ggcgcctgccatcatgcctggctaattattattattattatttttatttatttttttcgctctgtcccaggctggagtgcagtggcgggatctcgggcctcccgagtagctgggactacaggcgcgacctcaggtgatccacccgagagctctgtcgccaggctggagtgcagcgctccgcgccgagccttcccgcccagcacgcggtgagcgggccactgcctcgaagtcgtgctccagtccgctgggcagcgcggccgcggaggcgtggcgaggcggggaggggccggcgcgcgccgcttttactgt

SEQ ID NO: 29082 - DNA, 319 bp, Homo sapiens
  source 1..319: mol_type = other DNA
aagaaattattgtgcctgaaatttcccgagagaattaagacagactccaacagctctttgataaaataaaattactagaaagcttgaaagtctttggtatattccagaaagctgctgtgtagcattatggcagttgggcatctgggctgtaagccctgcgatctcaaggcgcaaggcttgcggggtccggggagtggaacccgccgactccgggaacgaagcaccggcgccaaggtgtgggaggcggcggggtggagttggacgcctgcctcgcgccgacgcagtgcactcacgggggcggtcccagaggcagctagct

SEQ ID NO: 29083 - DNA, 372 bp, Homo sapiens
  source 1..372: mol_type = other DNA
gattgtcagtttaatttgcaaattgttcttatcacactaataacctgagttactaaagatgaaaagtgcacaaagactttatagagcatatatttaataaacatttgctgcttactcggttttagaaagcagatgccactttcaaaattcttctgagcaatattctagatgtcatggatgaagaatcctgagctcaatataggggagcctgaggtgggatagtggcttctgagcaaaggccaagaaattattgtgcctgaaatttcccgagagaattaagacagactccaacagctctttgataaaataaaattactagaaagcttgaaagtctttggtatattccagaaagctgctgtgtagcattatggc

SEQ ID NO: 29084 - DNA, 406 bp, Homo sapiens
  source 1..406: mol_type = other DNA
agtaactgggatttgaatatgtaaattttaaacatgtaaaccaatactgtatatcttttatagatatttacatctgtaatgataatatgaaaacgtactcaagatattggtaatctctggaattctcaattgaaatctcagttagaacgtgaactgggaagagattttccgtaggccaaatttaacctcccactagagatagttgataattctaccacatttcatagtgaagcatcagtttgtctaagtaactgagaattcattctgagatcaaaaaatcaaaataatgttcacagcagcattgtagaatgaataaatatattggaatgtattcatcatatagaatattttatgcatataaaaatgaattaaaacatatgaatgtgtaccatatatatatatataa

SEQ ID NO: 29085 - DNA, 223 bp, Homo sapiens
  source 1..223: mol_type = other DNA
acagtgccttggggcaaggaaatatggcagtgcccgggcagatcccatcatggtctgcattcaatactggctgcatttcctaggagaatccctgggggaatcgtagggggcccctgagagttaatcccctgtacatttttatcccctgagactcctctgccccggaggacaggagactcgaaaaacgctcttcctggcctgagaaaggttctttcaaagatag

SEQ ID NO: 29086 - DNA, 349 bp, Homo sapiens
  source 1..349: mol_type = other DNA
gcctcaatttcttaatctgtaaaatgagaataatagtaccacctgtctcctagaattattgtgagaattgtatgacacaatctatttaaaatgtttagcaccctaaacaatttcattgtcacttttcagtcaaagtacttagttcataattgcacatttataacacataatgggcatccaataaccatttgttgaatggaccaactggccatgtgatagatgaactggaacaattggctcctttgctgttcccagtgacgtcctggcttccctcggggacggggaggccagagggcccgcggctccgaactgagtcctctcagccgcccgagggcgctgcgctgagcct

SEQ ID NO: 29087 - DNA, 290 bp, Homo sapiens
  source 1..290: mol_type = other DNA
gaacaattggctttgctgttcccagtgacgtcctggcttccctcggggacggggaggccagagggcccgcggctccgaactgagtcctctcagccgcccgagggcgctgcgctgagccttgggggccgagtaacatccagcttaatctttcccccccttctatgccgggatgggtccaggctcctgtgtggactcgatatatcagagccggctcgacggagggaggaagctctgcttagcacatggggctggcccaaggagtcctcctggagtgcctcagctttagcttt

SEQ ID NO: 29088 - DNA, 335 bp, Homo sapiens
  source 1..335: mol_type = other DNA
gcccgcggctccgaactgagtcctctcagccgcccgagggcgctgcgctgagccttgggggccgagtaacatccagcttaatctttcccccccttctatgccgggatgggtccaggctcctgtgtggactcgatatatcagagccggctcgacggagggaggaagctctgcttagcacatggggctggcccaaggagtcctcctggagtgcctcagctttagcttttgagcgttaatatttctgctgcgaaattaagataaaacctgtaagacttacttgctgatcttcagtattttataacaaataccaattcgttttcccaggaaagcggcgt

SEQ ID NO: 29089 - DNA, 384 bp, Homo sapiens
  source 1..384: mol_type = other DNA
agttaaataattcagttgaatggacataaattctagacataattgtaggtagtcttagatggaggtttggattcaaacttgatgaacattaccacattttctctttatatatatatatttatatattatatattatatatatttttatgttttttatatatatttatatatataatatatatatatatattttttttttttttttgagaagtagcaaattcttaagagtatactgagtactatttaaagcaaagcattactattcatttgcaatgctttgctttaaatagtacttaaagtagtcatttttgaagaaagtgatcttctgtagttatttattaaggctttaatttaattttttttcaggctaaaactacaaagaag

SEQ ID NO: 29090 - DNA, 405 bp, Homo sapiens
  source 1..405: mol_type = other DNA
tgtgtatttttaaattttatactatattgttatttttcaaatgttcgaaattgaatatgtagattgttgttatcagcagaaaaataaacattattcaaatactctattcagtaaagtaatttatttacagacaatcaggcagtggagactgagtgcctgaatggatacttacggtcacccttaggggtcccccgagaccggcggcttcccggaaagaggcggaggcggcccccgaaccccgctctggtctttcttccctcaaacggctatagcgagacggtagacggctcacgtaagcgagtaatcacgtgagcgcctacgtcatgtgagatctcggtcacgtgagtatggaaataggggagaaacaataacgtcattatttaataagtcatcgtcttaaaagcc

SEQ ID NO: 29091 - DNA, 269 bp, Homo sapiens
  source 1..269: mol_type = other DNA
agctaaagaaaagcagacctatagcttatctgattcctctttttgtttatatgttctggaccatgaagaaagacaaacttatagcttatttgcttttaacatctaagaatcaaaataatatattcagtaattattttctgaacctacgatacattctttagaacatccacatatacaagatgttcttatacgagtacccgtgccccccccgatctgtgggctgagggtggcggtgactacccaagcccacaagaattcggggaggagag

SEQ ID NO: 29092 - DNA, 320 bp, Homo sapiens
  source 1..320: mol_type = other DNA
ttccctgctctgagagtcgggtgggggagctctccctcgggctcaactgttacccaatatctgatacctgatgcaggaatctggcttgcacatgaagcgctcccagtgcagccagcccatggtaggcgtccttgccaatccattgtccagtgctctagcccagcccagatgtagttctgggttcctcagctgcattgtcacggtgaccggacagcataaatttccgcgggtaacctgggcttttaagacgatgacttattaaataatgacgttattgtttctcccctatttccatactcacgtgaccgagatctcacatg

SEQ ID NO: 29093 - DNA, 323 bp, Homo sapiens
  source 1..323: mol_type = other DNA
aaagaaaagcagacctatagcttatctgattcctctttttgtttatatgttctggaccatgaagaaagacaaacttatagcttatttgcttttaacatctaagaatcaaaataatatattcagtaattattttctgaacctacgatacattctttagaacatccacatatacaagatgttcttatacgagtacccgtgccccccccgatctgtgggctgagggtggcggtgactacccaagcccacaagaattcggggaggagagtttggaaagaatccatccctcctgccccagtacatttcctttcagggaaagggacagg

SEQ ID NO: 29094 - DNA, 454 bp, Homo sapiens
  source 1..454: mol_type = other DNA
ggccagctgggctgtttgttttattattattattattattattttcagaaaggctttatataggtttcttatttaaaccaccctgaaaataaagtactattatcaccattttacagataagaagaaggactcaaatacagactttgtttaactgtggatagagttcttttttgattaaatgccaaaatgaatataaatctttaccatattttcatgacacaaaaatagtatttgttattatgaagggccactaacattaatactctgagctccatggctctaagcccctaattgctcagtttcagtaaatttgatgttctatagttctcaaactgaaatgtgtaaacatatcacctggggtatgtggttaaaatgcaggctcttatccaataggtcccgctaagctgcattgagtagcagacttaaatactcttgaaattcccggggtacttcc

SEQ ID NO: 29095 - DNA, 534 bp, Homo sapiens
  source 1..534: mol_type = other DNA
ttccaccaaataaaaatggaaaacaggttaatttgggaagtcactagtaaagcaggttaatttggtaagtcactagttagaagtcttctctgaagaaggtcttgagttcagccagaacttcaaaagttacaaatcacctgtgtaaaattgtcaatattagaaaacgaaatgtctttccaaagattaacttatagatcatattgaatacgtgctggttttgtttaggacaattttgtatttaaaatgtcaagaattactagtcaattttgaaagctgtaaaatagtttgcagtaacagaagacattttaaaatgtggcacaaaataatgtaaacaaaagaatgagtcttttgttatttttacaccctgaatattttttgtgtcaaatgaaaatggctatactgtattttctgattacaatattagaaaagaatgtcatattaaaacgaaaaagaaaattaaagctctacttgcaccttctgcttttctaagagagttgagtgggtagggggatgcagaccctcccctgtaacctt

SEQ ID NO: 29096 - DNA, 543 bp, Homo sapiens
  source 1..543: mol_type = other DNA
tagaagtcttctctgaagaaggtcttgagttcagccagaacttcaaaagttacaaatcacctgtgtaaaattgtcaatattagaaaacgaaatgtctttccaaagattaacttatagatcatattgaatacgtgctggttttgtttaggacaattttgtatttaaaatgtcaagaattactagtcaattttgaaagctgtaaaatagtttgcagtaacagaagacattttaaaatgtggcacaaaataatgtaaacaaaagaatgagtcttttgttatttttacaccctgaatattttttgtgtcaaatgaaaatggctatactgtattttctgattacaatattagaaaagaatgtcatattaaaacgaaaaagaaaattaaagctctacttgcaccttctgcttttctaagagagttgagtgggtagggggatgcagaccctcccctgtaaccttgtgggccctcaggcgtgcgcactggcaccgagcagagctcggcggtgacgcgcggtcctcacgtgacccggagctgcagagctacg

SEQ ID NO: 29097 - DNA, 476 bp, Homo sapiens
  source 1..476: mol_type = other DNA
taaatacatgcttttctttaatttaataagacagggttgtgttgctttaacttatcaaattgcaagttgattcaaaaatagaaaaagtaaggaattattttgtaaaatggccaagattagacaactggtcgtctctttgtggagtaattcatagatcatgtaaaaaaaatccattttttttaagagatagaggcttgctctctgtcacccaggctggagtgcagtggtgacatcatagctcactgcagccttaaactcccacttttcaattttaaaatgagttattttgttttaaaagctactaattggctgtaaccagtagaaatattttcctactgttacaaataaaataacgaaattaatactcaaaggaaaatagcatcattttattttctcaatataaaagtaatgcgttactgatttaaaaacaaatgagcagaaaagtttctccacattttacccctcacgtgagctgg

SEQ ID NO: 29098 - DNA, 505 bp, Homo sapiens
  source 1..505: mol_type = other DNA
taaagttcatctgaagatgtaagattcatctgaagtttctcagtatagttcacttacttaaaatggtcaaaattagaacactggtatagattcatttatccatcaatttataaatcatgttgaaagcacaactggttttgtttcagtccgaagaaaatatgttcaacttgatacaaactaacttcatcaaatcaaatcttgcttatgttatatatatatatatctgtaaaaaaaaaaaaagatttgaattatttcttctccaagtgggaaaagctttattgtttttttccgattacaaaatagtgtagttcaaaaaaatataacttaaatgttatcaaaatactaattaaaatctcacccaatgttggtgtagagactgagatgctgccccttcctaaagatgctgccccttcctggaaaaacaccagaaaggccacttctggtttctggtacaaggcaggctggcgcctgccgcactgccgcactggtgacgtggccgtcacgt

SEQ ID NO: 29099 - DNA, 280 bp, Homo sapiens
  source 1..280: mol_type = other DNA
tttcatttatagatgatattctctattttagtgtgcatgctttatctcacagatacctactgtgcactattcagaagactggtctagtcagaagacttctgtgctgtgtgctagtgtgtaacactctccaccaattttttctaaaatggaaatagctttatagtatttttttttctcataaaaagaatgcaccacactctcattccagattttttttgctgtcccaggagcttttcataaaacccaaaggaggggggcgggccctcttctgccgcactgc

SEQ ID NO: 29100 - DNA, 360 bp, Homo sapiens
  source 1..360: mol_type = other DNA
attaaataaatgtgtttctctaacagatttatttagcgtattatttgtccaaaataaacaagattgaactgaacatctctctgtggatcaatttacagatcacatggaaatatgcttatcttattgagaaatattccattttagatgttcaaataccttagcatattttaaaaactatttcctatgtgaccaaaagaattcatgttctattcggtaaaaattaaccaaaattaatggtgctttccaatggacgcaggaaaccttttttctttacaaaacatcttgttttactgaattttcttactataaaaataaagcatgatgatagttttgaaaacaaaacttttaccctcccagggc

SEQ ID NO: 29101 - DNA, 372 bp, Homo sapiens
  source 1..372: mol_type = other DNA
acaatgtgtcagaatgaaagcttctgttctggaattcaagactagcctggccaccactgcactccagcctgggctacagggcgagactgatatatttcagagatatttttgcttcccctccaaagggaggtgggggccggcgggcttaaagctctctgcaattgtccgcgcgcctcgctgcgatggcggcggcgccgagcacagtcaccccgctggcggcggagtcttcccctcaggaagctaccgtctctgccgcctcctcctcctcctacaccgcctgcgcggcagcggcggcggcggcggcggcggcggcagtaattgttcctgcctcctccgccacctccgcccctgcctgcccgcctgccggtggct

SEQ ID NO: 29102 - DNA, 262 bp, Homo sapiens
  source 1..262: mol_type = other DNA
atgatgaatttgtgcatctgaaattcatatttaaaatgttttaatgctttccctcagggacggtggcagctcagcttcctggcaggcaccactaccccccgggctctggagtcaggcagagccgctatgatcagctgtcacacctggcgataatgggccgaccgtccccagcctccggtccctcagggatggaaggtgaggcgggggcagagctccggtgacgcggtgctcacgtgacccgcccggcgcctacgtgggcacc

SEQ ID NO: 29103 - DNA, 381 bp, Homo sapiens
  source 1..381: mol_type = other DNA
ccgaccgtccccagcctccggtccctcagggatggaaggtgaggcgggggcagagctccggtgacgcggtgctcacgtgacccgcccggcgcctacgtgggcaccagcccccgcgcccgcccgccagcccgcccagcggtcgggtccgggcgcccgcgcagaatcagctgtctgagctgcccaggcggcgggggagcagcgagcgggcttcagcgagccgcaggaggcacaggcctgtcctgggtccccgcaggtcagtgtgaaggcgtgcgctgccggcggaccctgggacaggccgaagcaagcctggctcgccttcttggggggtgggaaagggaaccgagtccctgtgagcccgctaagcgcgcagtcccagcgctc

SEQ ID NO: 29104 - DNA, 297 bp, Homo sapiens
  source 1..297: mol_type = other DNA
atctgcagttcatattaaaaacgtttgaatgctttcttggaaatcaatttgggtttttacataccgtgtcggtggcagctcagcttcctggcaggcaccactaccccccgggctctggagtcaggcagagccatcgggtaccctctctgatcagctgtcacacctggcgataatgggcatcattccgcaacctcctggtccctcggggatggatggtgacccgtgacgcggtgctcacgtgagtgaccaggcgcctacgtgggcaccagcccccgcgcccgcccgcccgcccagcgg

SEQ ID NO: 29105 - DNA, 390 bp, Homo sapiens
  source 1..390: mol_type = other DNA
ttggtgtgcaatggtgctacctcggctcactacaacctctgccgcccaggttcaagcaattctcctgcctcagcctcccgagtagctgggattacaggcgcctggccacgctcccggccttatttcaaagtccttaaaggaggcaggggaatgctttctggaaggtttatatttataatatgattcagcaggagaaacagattgccatgtttttacaactcgaatcctgttttttcaactgaaaataattgtattgtctagttataaaaacaacaacaaaatgaatgaaaaaaaaatttgaataccactagttagggctttatcccgcccccaccctcctgccgcactgcgggtgtgaatggtgaaatctgagctcacagtgacgtgacc

SEQ ID NO: 29106 - DNA, 330 bp, Homo sapiens
  source 1..330: mol_type = other DNA
ctctgttggcttcactgcagaggacaacacacttctttaatatatcagagaaccagagacactaatatctgacagcctttggccatgcgtctggtagaaaccctcgctggggccaggcgcggtggctcacgcctgtgcctgtaatgccagctctggccagtgcccaggccatacacaatggcattgtgcctggtggggcaggcttataatcagaacacccctccttccctgccccccgtcccccgagccccaggagggggaggggcaggaatctggctccgcctccctcaaaggaggtcacctgaccaagctgagccaattgaagtcctc

SEQ ID NO: 29107 - DNA, 344 bp, Homo sapiens
  source 1..344: mol_type = other DNA
ataaaagatgttgagtttgtacaaaaaaatatttgttggtagtgttgctgggttatattaaaatcagccacctgcgtttactctcagcactctatcctgaaaattagagtcttcccttgatggtaccttgagaacaaggcaactcttttctttcctttcgagtaaagttgagcagagccttgggtccttgcatctctgctgcagagatttgcaaattcatcaagacttagtctatctaaaatccttttaaaatcctgtaaggggagaaacttctcaacttttttcactcatcatgagcggatgaacaaagctggacgactattcttagatattcttaaacactt

SEQ ID NO: 29108 - DNA, 365 bp, Homo sapiens
  source 1..365: mol_type = other DNA
ataaaagatgttgagtttgtacaaaaaaatatttgttggtagtgttgctgggttatattaaaatcagccacctgcgtttactctcagcactctatcctgaaaattagagtcttcccttgatggtaccttgagaacaaggcaactcttttctttcctttcgagtaaagttgagcagagccttgggtctttgcatctctgctgcagagatttgcaaattcatcaagacttagtctatctaaaatccttttaaaatcctgtaaggggagaaacttctcaacttttttcactcatcatgagcagatgaacaacctcagcttgtcttgcttctgagctggacgactattcttagatattcttaaacactt

SEQ ID NO: 29109 - DNA, 330 bp, Homo sapiens; identical to SEQ ID NO: 29106
  source 1..330: mol_type = other DNA

SEQ ID NO: 29110 - DNA, 241 bp, Homo sapiens
  source 1..241: mol_type = other DNA
tgatttacattggtgggaatgtaaattagttcaaccattgatcccattactgggtatatacccaaaggaatataaatcattctattacaaagatacacatgtggtgcatagaatgagatcatgtcctttgtatactgcatgttctcccttataagtggatgcaaggcttcctaggtcatagggcaagcacggcacacgtttgcctatttaacaaacaccccatttcagtgggcctctgtgt

SEQ ID NO: 29111 - DNA, 415 bp, Homo sapiens
  source 1..415: mol_type = other DNA
tggaaagagtgactttcgatctatatagatctataccaccacacatgatcttctaaggttctgggtgagtatccagaaaatgatcttgaacgtttagtcctttcaagtaaataccgaatcctcaattttctcttcaacagacactgggtggtgctattttcataggagagcactactgtcacagaaatgtccagttgtaggggtgaatggccctgaaccactccacgacctggccaaggcttgggccccaatggctaagccgaaagagcctaaataccggtcattcagcttggacctcggagttccagatgttcttgcttattgcagaggcctctggggaggcggggtcggctctgacttcaccaagccccgatcctagaggagagggtggacggggcctgctgggtggcttagc

SEQ ID NO: 29112 - DNA, 234 bp, Homo sapiens
  source 1..234: mol_type = other DNA
atgtggtgcatagaatgagatcatgtcctttgtatactgcatgttctcccttataagtggatgcaaggcttcctaggtcatagggcaagcacggcacacgtttgcctatttaacaaacaccccatttcagtgggcctctgtgtctgtcaggccagaagagatttcctgacaccacagctgggggagctcccgcaaaaggggaactaatacagaaacactctggtatttgtctgc

SEQ ID NO: 29113 - DNA, 391 bp, Homo sapiens
  source 1..391: mol_type = other DNA
aagctggtttgataccagccacagtcctagaccaatgggagccccctgccccggagttcacttaagtcctcccctgcgtggctccacgaagctgggaaccctctcccattaacatccaggaaggagggtcaccaagggacggtttggtatccatccgcctccgcccggccccgcagccgcccgccggtgccatataggtccgcggggtcctcctgaggcagcctggtgccaacccgcaggccccggctggggctcgtcctggccccgcccacctctgggtcggaactatggggtgagggggggcgtcctgcacctccgccccccttcccgacaccctcgcggagagcggttcttgccgcatcctgcgcagcccctgcccagtttggtgcag

SEQ ID NO: 29114 - DNA, 377 bp, Homo sapiens
  source 1..377: mol_type = other DNA
gctggttcgaagtggcgacggcgcaatgccaaatgggagccccctgccccggagttcacttaagtcctcccctgcgtggctccacgaagctgggaacccctttcccatcagcttccagaaaggagggttaggggtccctgcccgggcccccagccgcccgctggtcgttagggtccgtgggggcctcctgaggcagcctggtgccaacccgcacgcccaggctggggctcatcctggccctgcccacctcggggtcggaactacggtgggcctgggatgggggcgtcaagcactttcgcgccgtatccctccgcccccaccctcgcggcgagcggttcttgccgcatcctgcgcagcccctgcctactttggtgcag

SEQ ID NO: 29115 - DNA, 557 bp, Homo sapiens
  source 1..557: mol_type = other DNA
cccctttcccatcagcttccagaaaggagggttaggggtccctgcccgggcccccagccgcccgctggtcgttagggtccgtgggggcctcctgaggcagcctggtgccaacccgcacgcccaggctggggctcatcctggccctgcccacctcggggtcggaactacggtgggcctgggatgggggcgtcaagcactttcgcgccgtatccctccgcccccaccctcgcggcgagcggttcttgccgcatcctgcgcagcccctgcctactttggtgcagaggcgtggggggcgggacgcgtctttcccgttcggaggaggccgacgacctgggccctgggcctctgaagggggtggtctggcagggtggaccagcaggcagcctgccccgcggaccctgacagcctggcaacgaggagacgatccgcccctggcgatggggaggcggtgaccggagcgggcctggccaagggctgaggggctggctcgggaggcaccgccagatcgtttggaggagaaccgcgctgaccgcttcccagccagctttgcaggcgcc

SEQ ID NO: 29116 - DNA, 607 bp, Homo sapiens
  source 1..607: mol_type = other DNA
attaccgtaaaaaacatattaagatggttgtacaacattgataatgtactgggttgtatactttaaaatggttaaaatgttaaattttatgttatgtgtattttgccacgataatttaaaaaatgaccatacgagaaatatccaatgttttattatttttagacataacatttatttgtctgagaatgttctaaattttcaaaggtaaaattacaattcatgtaaatgtaaaaagaatatgtgaaagatttttcaacacaatcaagggtatatgtgtatatacaatatacacaatatgaagatataaacaaaacattgaatttcataaacacataggaaattaataaatgttagaataacactgccaggttaaatataaaacgggttaatatcttacagggcaataaattgtaacatttaaggttttctattgcactggacataaatcatttacatatttattgaataaaatatctacatgttaacatcagtgtctacagagttgaaaaataggtgaaatgacatccagtaactgaaggtgactttatctaagttagtttggtaaggtaatttagtatgtcgcttgagtcgtatacaaaatattaaa

SEQ ID NO: 29117 - DNA, 558 bp, Homo sapiens
  source 1..558: mol_type = other DNA
tacgagaaatatccaatgttttattatttttagacataacatttatttgtctgagaatgttctaaattttcaaaggtaaaattacaattcatgtaaatgtaaaaagaatatgtgaaagatttttcaacacaatcaagggtatatgtgtatatacaatatacacaatatgaagatataaacaaaacattgaatttcataaacacataggaaattaataaatgttagaataacactgccaggttaaatataaaacgggttaatatcttacagggcaataaattgtaacatttaaggttttctattgcactggacataaatcatttacatatttattgaataaaatatctacatgttaacatcagtgtctacagagttgaaaaataggtgaaatgacatccagtaactgaaggtgactttatctaagttagtttggtaaggtaatttagtatgtcgcttgagtcgtatacaaaatattaaaaaggccagccttccttccagctgtctggccaaggagcttcaggatcttctagctcatgtgaccaggctctgcattaggcc

SEQ ID NO: 29118 - DNA, 378 bp, Homo sapiens
  source 1..378: mol_type = other DNA
ttgaatattcaaaagcatatgttataatccttgttataggcattagatatgtagctgttcacttggaagttaattaagaaagaacaaaaacgacctcacatttgtgtacaagtataaccaaagccctagatttggaaaggcagaaattgggtttagagattagagtgtaggtctgtcaaccaaatactcagaactcgtccataggcctgcccatgagttaactaacacctatgaggtctagtggtatatattttagtggtggacctactagcagttcctgtttgatgcagagtaaaagaatgacaaattaagtagcagagttttttattaatccacttctacgtgtggctgtttgcatagagaagcacagttagacaa

SEQ ID NO: 29119 - DNA, 513 bp, Homo sapiens
  source 1..513: mol_type = other DNA
acagtgatagccactaattttagcaggtggcattagttgtcagcaaatgttttttcatatttaatgaatgtttattataatagaataaaatagaaatgtttattaataaaacttgaaatttgtcccagagataaaaacgtagattatttacataaaatggccaagatctgacaacagaactgtttcctgaagatttacttcacagattattttgaaaacaccaactgtgttcaggaaaattttctctcctttttttcataaaattttcaaacaagtgagaatgctctaaaacctagagaaaatgttttctgtgtgctatagatgaacataaactatatatatatattactttcccaggttgaagtgtttctttcaaaaataaaatttgattattttcaattttttgagggatgctgatttttaaaaaggagggccctcagcggggctgtgcgcactggggcaccgcgcacagacctggccgccggcacgcacggccctcacgtgagagctacg

SEQ ID NO: 29120 - DNA, 356 bp, Homo sapiens
  source 1..356: mol_type = other DNA
gagggagccagctctggcctcggccagcccaggaaggggctcccacagtgcagtggcgggcgctccagggctgtgagagctgccagcaagctgtcacctctcaattactttattttgtctttaagacaatattacagtgacacactaaacttttactttatccagtcacacttgtcttactttgccctaacttaagtaaaccccaaatattataagagtttagaaaagctgtgcatagaggggtcacccattaagcctcagcaccttcaggaagctggtgattctgacagagcttgagctaccataggcactctgagtctctgagtctctgagtctgcagagagtgctatgcttgg

SEQ ID NO: 29121 - DNA, 406 bp, Homo sapiens
  source 1..406: mol_type = other DNA
ctattccatttttccaaatgttcgaaattttccattaaagttaagataaagttaaactataaagactgtttcttaaacggtcaggaaatccagaccatcctggctcggtgtcccagctactcgggagatcgcgccactgcactccagcctgggcgacagagcgagactctttcctgtccccccccaaacgttctggtgtggagaaaaggtggtaacaagtaccacaaatttgacatcttgctcatcataaattttcttgcaataattgttttttaaaatgttgcattaaaatgttattttcagcttccctcttggggaggcagggctgacccgaaagccccgcctgactccgggctgcaggagggggcgtgggacgggggcggagccgttggcgatgacaacagcc

SEQ ID NO: 29122 - DNA, 480 bp, Homo sapiens
  source 1..480: mol_type = other DNA
atgttttccaagaaacatactactttgagttccaaaagaattttactcagtggaaagcaggcttttctgtggacttatctgattaacaagatactgaatcctatttagtggatgccaccagtggtttgagttctcacattaatttgggagtcaattttttaagtgctgtttggtaagattttaaaaaattctaacacatcaatatgttgtgaatattgtcatttcatttccagccattagaaaacttttccaaagtcttacacattgatataactaatttgtccttcatattaagtgttacatattgcttatgaggcatccgttttctgataccatttttaaaagtatgctgattgctgaaaacatcaagaggattagtgagaaatggtcgattacccctaaaaggctgatcctcctaacagtttattgtctccgattggcaaaactcgagctcagtgatgacgcgactctcacgtgacc

SEQ ID NO: 29123 - DNA, 411 bp, Homo sapiens
  source 1..411: mol_type = other DNA
tgaaaatagccatgagccaaattttttaaagagacatttttgaattttctttcaaccatccaacactcagtaatcaaccagctatttatgaaaaatttctaatgtatattttgcttgttgatggcaaaagttaatattatgaacctaatttggtctctcttctgagtagaaaattttgaaatcttttaagtttttctctctcttaaacactttctcataaatgaaatagctttatttaattttgtgcttataagaataacccataattaaataagatcaaaaaaatttaaaaaaataaaacccctattttaactacttgggccacatttgacctgtgggattgggaggggaactagggacccgagcccactggtgacgtttttctcacgtgatctgaagccgacgtgtgca

SEQ ID NO: 29124 - DNA, 369 bp, Homo sapiens
  source 1..369: mol_type = other DNA
aagaacaccttcccctgatcttggcgcatgaaaatagccatgagccaaattttttaaagagacatttttgaattttctttcaaccatccaacactcagtaatcaaccagctatttatgaaaaatttctaatgtatattttgcttgttgatggcaaaagttaatattatgaacctaatttggtctctcttctgagtagaaaattttgaaatcttttaagtttttctctctcttaaacactttctcataaatgaaatagctttatttaattttgtgcttataagaataacccataattaaataagatcaaaaaaatttaaaaaaataaaacccctattttaactacttgggccacatttgacctgtgggat

SEQ ID NO: 29125 - DNA, 462 bp, Homo sapiens
  source 1..462: mol_type = other DNA
ggatgggctgcctaacgcggaaccgcctacggtttcctacattcaaaggtagggccaagggctccccttgttgacattttccacgatgagattggactccattactcctaggagacagagagaaaaattcagagccctggatttcaaaggccttttttaaaagaggccccatgtaccctcgggggggcgaggggagccagtctgtgcccttctctcccggcagatccatctccaggcctctgcaggcaccaaaatttctcgacgtgaggtgcgtcgccgcaacacttggccccgcaaacctgcagacggccggggtgggaagagtgggggctgctgcagcggaacgctagagaggacccgccgccacccggccccttccccacgccgggcccgggccctcctagccgctggcaggtgcttccgaaaggtcgtagcctcaggatcgccggctcccgcggggcc

SEQ ID NO: 29126 - DNA, 566 bp, Homo sapiens
  source 1..566: mol_type = other DNA
cttgaaataatataatgtaactctcaagatttgtaggatattttaaaaaaattatttgtctattctaggtcctttgcattttcaaataaatttatgagtacgtttgtaatatttatcttgtagctgcaaccttcttaaaatttcctaaatacatgattacttgatctttaaataaagacatacttatcgtttgaaccagaaatttgtgaaaaaggccttttttttccttttagttatgaaaacccaacaatagaagggcctcatgtgtccaggggcccctcaaaaggggagccatcagcccctgtccttttccaagttctaaaaaagcagctgcgtgtagagtctatatttatataatgacttacgtctttcaagtaaaaataactttttttcctttttaaagaagtatattaattttttgtgttttacaaaagaaataatacagaaaaggtattaagaatgagaaaagcctactctcttgtcttccgtccttcctgggcaagcaggggcggtgaggatgggggcgggcccgaaagcaccacctgactccgggctgcagtctggcg

SEQ ID NO: 29127 - DNA, 289 bp, Homo sapiens
  source 1..289: mol_type = other DNA
aaaaactattcttttctgaatgagaggttaaaatttgtgacttacagttgcgatctggaaatctaataaagggtctatatttatattatgacttcagcagcagccaaatgtacatatctttatcatatttctgattattaaaagtatataataagtttatggaaaaattggaaaaccaatctggtttcaaggattggactccaattttcttttcttgtagcttagaaaaggataagtaatcacaatggttaatatgccacttttgacctcatcctcacgtgatcaggag

SEQ ID NO: 29128 - DNA, 284 bp, Homo sapiens
  source 1..284: mol_type = other DNA
taatatcacaacagctttcactttaaaagcacttactatatgccacatgtacaataagcactgtacatgtattaactcatgtcattaaagtaattttttctttgtcttttctgactataaaaagataaaagttcctgcccagatacttgggagtctgagggctgtgatcgcaccactgcaacccagcctgagagtaaagttacctttttaaaaaggatatagaagtacgaaaaataagcccacttagctcactggtgacgtagatctcatgtgaccaggagtcg

SEQ ID NO: 29129 - DNA, 218 bp, Homo sapiens
  source 1..218: mol_type = other DNA
gcccacttagctcactggtgacgtagatctcatgtgaccaggagtcgacgtgtgcagaagtcctggtaccttcagcagcgcaggcggtggtccctgttgtgggagtgccggtcaggtccgtccctccaccctccactgtggtagtttaaaaataatcatcctctgcaagatagtttggaaataatctgcttttggcgctggtcggcccaccaagcgct

SEQ ID NO: 29130 - DNA, 508 bp, Homo sapiens
  source 1..508: mol_type = other DNA
tatgtacttaacttctgagctcatactaagaagatatttgtagagggaataaaagactccctttctctgatgactgtgatatcaaaaacatcaaagttacataaaggaagatcagatcatttcgaaaacaccaatttcaggcgcctgtagtcccagctactccggaggcagtgagccgagatcgcgccactgactccagcctgggcgacagagcgagactccgtctcaaaaaaaaaagaaaaagaaagagtcccgcctttttatatatttttttctttacggagtctcgctctgccgcctagactgaagtgcagtggtgcgacgcggctcactgcaacccgagtagctgggaccaaaaataaaattttaaacgagctagtatgtattgtgtggagcccagaaaaaatattttgtgtggtacaggtcaacataaacaatgagagatttcattgtgcaggataaagcattggctggagtgcagtggtgcgatcccggctcactgcaacct

SEQ ID NO: 29131 - DNA, 320 bp, Homo sapiens
  source 1..320: mol_type = other DNA
caaaaataaaattttaaacgagctagtatgtattgtgtggagcccagaaaaaatattttgtgtggtacaggtcaacataaacaatgagagatttcattgtgcaggataaagcattggctggagtgcagtggtgcgatcccggctcactgcaacctctcctgcctcagccccccgagtagctgggattaccatgttggccaggctggtctcacaagcatttctttcaaaattaaaaacttataatttataattttctgaagcatgcagattttttaaggaaataaaaagaaatactctaaattttctagaagggtacacgt

SEQ ID NO: 29132 - DNA, 349 bp, Homo sapiens
  source 1..349: mol_type = other DNA
ataaacaatgagagatttcattgtgcaggataaagcattggctggagtgcagtggtgcgatcccggctcactgcaacctctcctgcctcagccccccgagtagctgggattaccatgttggccaggctggtctcacaagcatttctttcaaaattaaaaacttataatttataattttctgaagcatgcagattttttaaggaaataaaaagaaatactctaaattttctagaagggtacacgtgatgccacttgtgggccctcagattggagcactggccgcccaagttggggggcgagctcggtggtgacgcgcggccctcacgtgacccagagctgcagagcgacg

SEQ ID NO: 29133 - DNA, 461 bp, Homo sapiens
  source 1..461: mol_type = other DNA
ttattaagtggcacgtgactttccacaccaaaagcttatgtggagatgaacaaacaagtgctacttattcacagcttttttatatctggcagactgattggatgttgttgtttgggtttttcttgtttgtcatcaggtcaaaaaaattaaaaaggccagaaaggctagcaaattgattaaagtcctgaacatttctgcagtctcacttaagataaattaatcgttgttttattttgcttcaaatataactttattttttattcatttgaaaatttatgtttgtacatgtcaggaaaaagggacaatttcatttattttggaaaatttttcttaagttttttctaaagggcaatattctattctttatacagtacttaagttcacattcattaaaaaaaaaactgtgattttcattaagattctttctttgattaatttcttaacaagaaaaaaaggacaaa

SEQ ID NO: 29134 - DNA, 210 bp, Homo sapiens
  source 1..210: mol_type = other DNA
tcattaaaaaaaaaactgtgattttcattaagattctttctttgattaatttcttaacaagaaaaaaaggacaaacgtgatctgcacgggcgcagatgtaggcaccggtccgagtgcctgccctctgtccttccacgctgccagcggaacactggtgggctggggccgcccccgtccgtgtgagcccgctgagcgcgcagaccctgcccc

SEQ ID NO: 29135 - DNA, 472 bp, Homo sapiens
  source 1..472: mol_type = other DNA
agaggcaataaaagttaaataaatttgactactttttttaatgcatggcagaaaaacacttgcaacatatataacagttaatgtattaagaaaacttgaatatttaaattgtccttaaacacagataaggcaaaataaaatgccattgagatattacttctcaactatcatatcagtgaacatttaaaagtatgtcataggttatgttgggggtggcagctcagcttcctggcaggcagcaccaccctgggctctggagtcaggcagagactaagccgctcttggcaaagtcgggtaccctctttgatcagctgtcacacctggcgataatggcatcagagaccgtccccagcctcccggtccttcggggttggatggtgaggtgggggccgagctcgggtgacgcggcgctcacgtgacccgccgggcgcctacgtgggcaccagcccccgcgcccgcccgcccgccctgc

SEQ ID NO: 29136 - DNA, 223 bp, Homo sapiens
  source 1..223: mol_type = other DNA
gaggcaagggcgggggagcctggcccgccttctcgacgacccactggaaatggagtacgggggggcaaccccgcgggaaccgagtccctgagtgtggagggcccggccagggccgaactggggcccctgcccatccctgccagggaatcgcagaaggccctcttgggggccctgccagcttaggggaaccctcaccaggggtgagatgctccattcccatccc

SEQ ID NO: 29137 - DNA, 630 bp, Homo sapiens
  source 1..630: mol_type = other DNA
ttcacatgcaataaggaaaagaaatttttttcacttggagtcagaactctctgctgagatacctatagatctttcgcatgctttaaattaatgatttgcagctaatatacagaatgatagaatctggattcaaagattgagggagtgaatctaatgagacaaaatttaacccagaaaaaattagaagcttctatacttgagttaaaactaaaaagatttacagttgactgcaacttaaactggattcaattgtattcacaaaatctactataattttaggatgcatccatagatgtatagcacctattctaaaatgaaggaggtaagatcactccattctgatttacacattcaggaatgtgtagaataatgaatgacagaaataactggggaggttaaaccccccaaaaaagtcttggtgagaacataattctttaaggattatgaaatacttagtgcaatgcctggcataaagtacacaattaatcttaatattaaaaggatgttaattagtagtattgttagcactgtgtcatactattattattactattattatagttaatgcttatagagttgactcattgactcagttattcctcttacaattctatgatactattattgtct

SEQ ID NO: 29138 - DNA, 469 bp, Homo sapiens
  source 1..469: mol_type = other DNA
aaaatacatattgcaatgacaattgaaaatgctagcataattgtagtcctgctattcagtatgtggtcaacagaattattgcatagtttccagcagtcccagaactcaaatatttgttgatttagtgaattaatataaacttcctcaaccagaagcaagtaaaatctatttattctattatgaataactactgaataatttatatatatgtacacatgtatataaatatattttataatctattcagtgtgtatacatgcatatatatgcgtgtatatatatacacgcatatatatgtgtgtatatatatacacacatagagagaataaatttcagataataagtgttctggactgtttgtacttagatggacaaatacgtatttgatttatgaaaatcaaagtattcattctttttagatctacaaactttacaaattaccaatttagatctatttatgaacgtcagt

SEQ ID NO: 29139 - DNA, 435 bp, Homo sapiens
  source 1..435: mol_type = other DNA
actcaaatatttgttgatttagtgaattaatataaacttcctcaaccagaagcaagtaaaatctatttattctattatgaataactactgaataatttatatatatgtacacatgtatataaatatattttataatctattcagtgtgtatacatgcatatatatgcgtgtatatatatacacgcatatatatgtgtgtatatatatacacacatagagagaataaatttcagataataagtgttctggactgtttgtacttagatggacaaatacgtatttgatttatgaaaatcaaagtattcattctttttagatctacaaactttacaaattaccaatttagatctatttatgaacgtcagtccgagactagatgcggaccgtctcttgcctggtgggatctgagttcggcagtgacgcgcgtccctcacg

SEQ ID NO: 29140 - DNA, 347 bp, Homo sapiens
  source 1..347: mol_type = other DNA
atttatgaacgtcagtccgagactagatgcggaccgtctcttgcctggtgggatctgagttcggcagtgacgcgcgtccctcacgccctttggtcgagagggaaagcagaagaagtaagttccctctaccctctgcggagtccaggcctttccctccccacatttctgtgcaaaatatggctttggggcggggtggggaggcgagtacctcccccgtcccccgggaggggggtacagacatttggaaatagtttctaaaaatgcttcgcttccacttctcatctgaaaagaaatggcagtggggggtggggggtgtcagtcagtccgtccctcctccccactccccg

SEQ ID NO: 29141 - DNA, 305 bp, Homo sapiens
  source 1..305: mol_type = other DNA
aaatatttctgacagtgccctatttattttccttttcattagaacattttcaaatataacacagaaatagccatcacgcacgcgcgcgcgcccgccgtggctctcaccagtcccgacgccaggggcgcacgccggccttaacaggactgggggcgtggccccagatttgacctcgcgcttccctctcccagtggggggaagaagcaggttgctagcacccgcctttactgtgtccaatcatttgattatggaacattctaaaacttagggcatacgccctcctccagggtgacgtgtctgcctat

SEQ ID NO: 29142 - DNA, 277 bp, Homo sapiens
  source 1..277: mol_type = other DNA
aattagcgaatttatataatttataatttttctcattctattacgcgtattatttatctccataacatatacagtacacgtctctgaggtagatactattattatcaccattttacaaaccaagcccaggtttctctggcataggcagacacgtcaccctggaggagggcgtatgccctaagttttagaatgttccataatcaaatgattggacacagtaaaggcgggtgctagcaacctgcttcttccccccactgggagagggaagcgcgaggtc

SEQ ID NO: 29143 - DNA, 231 bp, Homo sapiens
  source 1..231: mol_type = other DNA
gactgggcagtattttgaaatttcttccagttatcaagttattctattgatcatggcaaagcttttgctctgtccagtttggcttccctttcctggggaaggaactctccaacaattttttcagcctgtccaaaatacctgctacaggtcctttgattttcagttttattcacgttaataataataataattcacgttaaaaaagccccaggctgctcactggtcattatg

SEQ ID NO: 29144 - DNA, 109 bp, Homo sapiens
  source 1..109: mol_type = other DNA
ccgagcctgattaggtgcagatcctgaactattataggctttaaaaggcccaggctttactccttttaaagttttccgtattgattaagaaggggacggacttaccctg

SEQ ID NO: 29145 - DNA, 309 bp, Homo sapiens
  source 1..309: mol_type = other DNA
ccttattgtttatgtaaaaatgcagattcacaaagcgatactcctctatccacctctcacatgtaaattgtgtattcagtgaaagactaatcagagactcaaaagaatgcaaccatttttctaccaatgtacatattgattgatatgaacttaaacttggcaaaataaactttctaaatttattgagatctctctcagatacttttgtcatgagagtgactcgaatcagctgagtcagtggtccctctgtgtgctggacagagcccacatgtaggctagcctagtgttaggcctctgagcccaagcctg

SEQ ID NO: 29146 - DNA, 222 bp, Homo sapiens
  source 1..222: mol_type = other DNA
gatattacactctcaggatagaatactgactacttgtctcgaagtcgattttattattgtagctataaaattattacaattctagcgacagcctgcattttgtcttcatgcagttgaaactgagaaggatttggaggaaattatcttaaaagacaattttttcttctctattgtctgagttggaagtttccaggacatcttcgcctgtccctttaagggggt

SEQ ID NO: 29147 - DNA, 419 bp, Homo sapiens
  source 1..419: mol_type = other DNA
tacagtgagcttactatctaggaatttaaaattgaaagtttgttaacaaaataagtcagtataatgacattatttcaactgtaaacaatgagatcctgagcttgcatatttgtaaactccctgaggtaaacatttaacatccaatggatgttgagacaaatctaaactgtattcatttttacttctagaaaataaatgcttagtaaggacacaacacacaataggcactgtagtgttttctcaaatcgccattaagagaaaaggaagaattcttatactttcactagcaggccctttctgagaagggtctcaaaccaaatttttcaaaaaatgcttacaaatctttgcaaacttcataagcttttcaattatctgctctatttttatgtaagaagatactgaaacagaaagattaacat

SEQ ID NO: 29148 - DNA, 230 bp, Homo sapiens
  source 1..230: mol_type = other DNA
tattctggattatgcctgtgccacaagctttgtcctccccagcagcaattccgggaaattcaagtaatgctttttttaattgcctgaaaatttcataagctgtagccagtactaccctctcttgccgctgtgcctactaatcggctagagggcgggaggcggctacaccgggtccccaccgccgagaaaggggcacgaggaggcggcgcgggccccgccccctcccctgg

SEQ ID NO: 29149 - DNA, 476 bp, Homo sapiens
  source 1..476: mol_type = other DNA
aatctaacagaatagagacctccttcacagggctgctgagaagaaagcactcagtaaatgctggtttcaggcatccggtctcaaagcgagctccacttgacgccgcgccggctcccgtgcctgtcggcctcagcccccgccagccagctcccgagtcttgctagcagcagaggctgcttgggtaggccgcctcctcgccccgctgattggccgcgtcgcgcggcttgtaccgcggctgcccggaggtccgaactggagggtggccgcagccgtgacttccctcggctacctctctgcgaagcactcgctaagccgggcagccccggggtcgcttagcggcccaggaggcgccagcgatcctgttcccctgcagagctatggggaccgacgctgcccaccagtggagcgcaggtaaagaaagagcgcgcgatttcccggcgcggagaggggtgggggaagccccaccaggactgggc

SEQ ID NO: 29150 - DNA, 383 bp, Homo sapiens
  source 1..383: mol_type = other DNA
cctcagcactatcatcacattgagactgctgttgagatggtttgagactacctgtgcaaaagtgctcttagcaacatacaggtgctaagttggatgctgtaaaagacgcttaacctctctgtctttggctcagttcttcatctgtgaaatggagaaatctaacagaatagagacctccttcacagggctgctgagaagaaagcactcagtaaatgctggtttcaggcatccggtctcaaagcgagctccacttgacgccgcgccggctcccgtgcctgtcggcctcagcccccgccagccagctcccgagtcttgctagcagcagaggctgcttgggtaggccgcctcctcgccccgctgattggccgcgtcgcgcggcttgt

SEQ ID NO: 29151 - DNA, 332 bp, Homo sapiens
  source 1..332: mol_type = other DNA
aatacatcctagaactcattatcaaaattattggtgtatagtctgttctagcatagattagctttctcaacctgctatataaaatgaaggatcccctctctgcacagacagacagactctcgacgatagtcaagttactaaggttctttatcaacgtctcggagcagatttgagaggcccctgaatcgtcccgggaattttcgtccatcggcgtcttgacacaacactaagcttctcctggatctttgaaacgtagcagaaacgcgaggtctgctctgaagtcaccaagctcctgatcttagaagagatggtggggcggcgccaggcttagc

SEQ ID NO: 29152 - DNA, 333 bp, Homo sapiens
  source 1..333: mol_type = other DNA
gaaggatcccctctctgcacagacagacagactctcgacgatagtcaagttactaaggttctttatcaacgtctcggagcagatttgagaggcccctgaatcgtcccgggaattttcgtccatcggcgtcttgacacaacactaagcttctcctggatctttgaaacgtagcagaaacgcgaggtctgctctgaagtcaccaagctcctgatcttagaagagatggtggggcggcgccaggcttagcactgcaaaggctaacctggtgcggagccagcctgggtctcagccccgcgtagagtcttcaagccttcaagtacctgcggcctcgca

SEQ ID NO: 29153 - DNA, 329 bp, Homo sapiens
  source 1..329: mol_type = other DNA
aacaaaatgggtttaaagcacttatcatagtgatttgttattttaggacagtacaaagagactctttaatatactcttctgactcctctatcccaggtgaaatgattattatcatttattatttattagcgagatcaaattcaatcattataatttatatttcaatatactgcttaacttcacctcacatgtgaaattttaatatttttactgcaactctggaggtaagtactattattataccaattcttgcccaagaaactgcaaattcggagtttgggtaagactgataagcttgcaagccaacttacaaaagatgactaagtctt

SEQ ID NO: 29154 - DNA, 454 bp, Homo sapiens
  source 1..454: mol_type = other DNA
atcgtgaaccaatttattaggagtagaataagtatacacttgaaagcctgacctttgaaatgacagttcatcgatgacctttaagatttcttaagaatctttcttgttcaattcctgcaacttaatgttacttaaatgcatttaaggaatgcctttgcgtatattatcagagactcttgaaataggagatttaaggcgatattttttaacccaatatctcttaaacttattagccatttctcattctcctgattctgatcagtatgcccaggcggccatgtcagggagttcctgctcaagccagggtggcttagatgggtgacaattgacgtggccacagtcattcttctgagctgaaattgctaaactttgggagttttcagtgacacccttcaaagtgctcacagtgggcgtgggccacaaggggcgcttaggcccgcagacgcccagtagg

SEQ ID NO: 29155 - DNA, 127 bp, Homo sapiens
  source 1..127: mol_type = other DNA
gtctccaaatgcagatagcaactccgagcagtagatctttccctgctaggctggaacgctgtcatggcggcgaccgacggcccctttcctgtggcctcagaaagcagcgacagtcgctaagcgacgc

SEQ ID NO: 29156 - DNA, 461 bp, Homo sapiens
  source 1..461: mol_type = other DNA
gctcttatatgaaaatgtgcttccttttataaaataatattaggtagttttaaaaattgtcttctttgggcaaagtaagaaattagtaatcttggggtttcctctatttttacactatataacacctaacaagttgattcaagttgaacaagttaagctcataatctcctttgggagtcagggaaggcttcactcccagtgtgaccttggccaagtcccttttctgggactgcgttcctgcttagtagtcgagtacgagtgagcagaggcgcctagcctttctagccggggcgggccgcttggggccgcggcgggcggaggttcagttcctcctccggtccagcagggggcacggggagtggcttcccgccgcccttcccctccttgcgggcgccgggcagactgctgcagtcgcaagcggcgagcgcagtgggcggggcgggcctggccgggccgggcgg

SEQ ID NO: 29157 - DNA, 373 bp, Homo sapiens
  source 1..373: mol_type = other DNA
tgccgcgcatcaaaagacggggcccccgtagcactgagttcattactaaaaagcttaagtccttggagctttctcaaaaagcacgtgcacctgagcagcggactgctcttcaaattcagccccaaattcccgctcccggaatgcacggtgggttctgaattcaaaaatccagagcaaactgtacagaactagatagtcctatccatttgtcactaagaatcgctccacccaagtgttggcggagcctctccacgggctggtgcgaggtctcaccccgccccctcgccccaatttggggccactgttccccgcaaaacacgaatgcgtcccccgggggtaccgacgcgtgtgcatacgccgctatatagggcgc

SEQ ID NO: 29158 - DNA, 415 bp, Homo sapiens
  source 1..415: mol_type = other DNA
ctctgtggctaatgcagagcgatggacaaatgctggagaacagcgctcagctgacccgttaaatgagtaccggcttcaacgctgcgtcccctgtctcgcttaaagagaggggattgaggccagggtcctgccccatgactggcggggctggagaaccctgagacttaaggaaaaagaagagttctctccggtcctggaaagctctacaggtgaactcctgactgaactagtacctgttcaagctggaaaacttttagtggcttcagccggcctactcttaaggacgctagacggcgctgccgggacacgctttccttctccggagaaaggtaagagagcgcttttttttttgttggcagcctttctcagcctcccctccccgcgctcccaaatctaaaggggtgtggaagaggag

SEQ ID NO: 29159 - DNA, 425 bp, Homo sapiens
  source 1..425: mol_type = other DNA
atcagattgacaataaaagactcagtgaaattttaacaagttagcatttgctcacttacagttgaaacaaattgttagcattgacaataggaagaaaagaaaattctaattaatataatagttaccctttctaccatccatagtagcctatgagacagagtcttactctgtcgcccaggctggagtgcagtgacatgatctcagctcactggggcctgacctcagtgatttatcagactagttttgaatattttatcacatgatttttgatgacattcttttgaaaaatcacagtttcttgaatgaatgaacctattgttcttatctagatggaacattctcaaaaagatgatgaaagaaacatctgcatgtgactttcttgtgtgtttttatcaaagtgcagcacctatcaagatgttttcaaa

SEQ ID NO: 29160 - DNA, 367 bp, Homo sapiens
  source 1..367: mol_type = other DNA
caattacaggcagtcaagtgaaaataaggcaaatgccttgctgtagccaatcaggtgatttttagtgtgtaaacaaactgttaacgttgtctaacgtttttcttttaacagggaaaagggcattctgattgtatgttagattgggagtttgacatctacaggccaaatcacaactgcctggttttataaatgaacttttattagaacatggccatggtcatttctttagtgtttgcccacttcagaaaaaggtcactaacctgtatacctctaggggggtccctactagccgttggcatgggacaaaccattgtcacaatggagtggcaggggccttcctcattggaacagtcccagagtaaaagcc

SEQ ID NO: 29161 - DNA, 379 bp, Homo sapiens
  source 1..379: mol_type = other DNA
ccgcgcgctgcgaatacgaggccgggctttggagacgagtcagtcttactcaaccctgcgcacctgagaacaggtgctgttctgagtggaactagcctggggccagatgaaggccaagctgtgacagccccggggcgtacctcgcctaggactgcagactgggagcggcgcggagcgagaccggttttccggggctggcagctgcctggaaaaagtttcctgcactcgccagcgggggcgggggcaggggcggctggcgcagcagcgggggaggccgcgaagggcctgctcgcaaacccctcggccggtggccctcctagcctgcctccccgccgggcggctgcccacctggcgacgtgacgctggcaccctgacgggg

SEQ ID NO: 29162 - DNA, 431 bp, Homo sapiens
  source 1..431: mol_type = other DNA
tcataaccatcttaaaaagtattcttagaacaattactcccttctatgtatactggatctaagtacatctattaaatattttatccttaatttttaacaaacaaacattaaacaaagtttctgaaatctctaccctagatgtatattaggccaggtattatattaaaactagctgcattttaagaagtctaatctaaaggcagccctttaaatgctaatcgcaatagcagctatgttcatactacaggaaacccatgttataacattaacatatgttaaccaactctaaattacttccggcgggcacaaggtcggacgacctgctacgtaactcgcgcgtgtgactgcctagtaacagtgtctcgagtcgagcgctgggagagctggcgcgcgcacgcgtaaagtctttgcagcctcgctacggggcggag

SEQ ID NO: 29163 - DNA, 497 bp, Homo sapiens
  source 1..497: mol_type = other DNA
ttataagtcctaccatagactgcatctaggcttagttcgaattaacacatagattcttaatgtagtactgaagatctgatgcttcacaatgtctgtaaatactcagaagcaggagttgctgttgctgctactgctactgctactactgctactactactactactagagctggaaactttgaactcaagtctcctgactgagtccagtgcttctttgcatataatcagtacacaattaatactggacagtggaatctttaagagtcctgtggccaggggaccagacatatatgtttgcagcatcagaagtctagggctggaatgtataatttctacagaacctattagaaaggactgaagacactcttgccagcatgccaaagcaatctcaaagttcaaaccttatcattttttgtttgtacatcagctttgaaaataccatcccagggttaatgctggggttaatttataactatgctctagttttgcaatacagg

SEQ ID NO: 29164 - DNA, 346 bp, Homo sapiens
  source 1..346: mol_type = other DNA
gctcttatctgggagaactaaaaatttaaaaatgtaaatgttaaaaattaaaccttcaacaaccttttttagagtataacacaacttgcaggtatcaatcaatcaacaaatatttgagtgcctgccatgggtgaaaggaaaggaattctagctactgaaatatgtttgttttccaacgaataaaccacacacacacacacacagagagagagagagagagaaagcaataaaattcattctactaatgccatagcaattaggatccaatccactccatgtttatgaaagtgcattagtcatccaatcctaataagttgacatgtagaataatattactaaggtagtc

SEQ ID NO: 29165 - DNA, 322 bp, Homo sapiens
  source 1..322: mol_type = other DNA
tcagacagcaggtatattaattcagcttaattcaaggctcatttgttaaccatctagtaaatataatagttgacagggtagacaaaaattgaatacttaagcaaggataaatcgtaatgtaataatgccatgagaaacagtcattcttttgtgaggactaaaattagttttagaagaggcatctgaagaaagggtaacagcgcgcttttcctgcccttctgcgctttttagaagtactgtatcctgccagaaagctttatgtttgtccgttttttataaaacgacgccagtcggctgggcggagcttcacgctaaagcccca

SEQ ID NO: 29166 - DNA, 358 bp, Homo sapiens
  source 1..358: mol_type = other DNA
gtggacttagttattgcaataaataaaaacatctgtcaaatatttcctcacagcgatatcatgcaaattattcaaagggatttttttaagagtttaagaaaaaaaaaaatgcacataaattgtttagattccaaaatagttattacagcagtttcctatataaccaatctatagtgagagctcattaaatgttcctggaatgaaccgatattccaaaattccagaaactttgttttctacagtttaatgccttcggctgtaaaatgataaaaacacttatttgaaccaaaaaaatgctttaaacttcccattctcaccccagtgtattgtgggaagggtagttccagaatctctctgc

SEQ ID NO: 29167 - DNA, 452 bp, Homo sapiens
  source 1..452: mol_type = other DNA
ggcccagaaggctggctaaggccgaggactgtgctcaggcctctgggcttgcccggtggtcctatgagaccactgggccagcaccctcatctcttacatgagggaactgaggcctggggagctctgtcccagcaccctggcttctgaactggaagctaagctctgaggtttggaatctcagaggcatctgggcctgctccatgcttaatacattcaggtccacctggcaaatctatctgaggttgagcctcactctccttaaaggggtcagctgtctcttcttgccaggaactggcttagttaaaggcctgtcaattcacacaaatggtgtgcgatttgcccttctgtgtttttcttctgacttggaggcaaagcaaatattcaactgggagagatttcacacccaggtaacccagctccctgaataatttataagaccaggcagggcttat

SEQ ID NO: 29168 - DNA, 123 bp, Homo sapiens
  source 1..123: mol_type = other DNA
cctaggctcaacactgaggagtcaggaaacacagtgttagaacccagtccttgaatgattgccaatctggaattcacccagccttgggaattcggctgggtgatgcccaaagactccccaggc

SEQ ID NO: 29169 - DNA, 352 bp, Homo sapiens
  source 1..352: mol_type = other DNA
ttggcaacatatggctctgagattccaaagcattgaatggcccagggaatttcagggccccctctcagtcctggaactccctcatcatccaagaggctgatgatgggagcatggacataccctggagtagattttcaccatgggcagaatgatccagggctaggccactactctctaggcccctggagattcaagaggcctctagtccaagactacattctaggatctgcaaacagcagcggaaagcagccacctgtctggctcctggctttgtccagctcctaaggctttttcctttctcatgtgttatttctaaagataacaaaggtcaaaaggctagatgccttcttga

SEQ ID NO: 29170 - DNA, 641 bp, Homo sapiens
  source 1..641: mol_type = other DNA
tagaacattacatatgtttttaatgaatctgtttttctattatcagtgtatatttatagtatattagaaaacacaggtctagttccagacccagagatatcatcttggtgtatatcatgtgtgtgtatatatatatgtatgtatgtatgtgtatatgtgtgtatgcatgcatatatatatatgtatatatgtatacatatatatttgtttttccaatagaaaaggcatcatgcgttccacaatatgttgtaactccatgaatatttttctacatcaacacatacttatctacaaacatggccttcaagaactggatggtatttcatttgtatttaagtgaatccaatctagcaagactttggagaatgccttccagaaagtttcaggcgagcttgctatcttcccagatagcaacactgtagtctttagaacttgaaagacttgtcttatcttgcctgttagtcatgcagcctaagcgggactaggctcggcggcctggcctatggcatacgccaataattaattagcggcccagaggcagcccgggcagtcgccgggtcggtagaggtgctgacagggcggagccgccgcttgcctcagccggcctcacccctcccgcccgggacaggtggctggagcgc

SEQ ID NO: 29171 - DNA, 621 bp, Homo sapiens
  source 1..621: mol_type = other DNA
aggagcattttttgtattgtcaaaattaaaaaaagaggacaacctaaattaccataaaggaatggtcaaataaattatagttcattcatgccatagaacattacatatgtttttaatgaatctgtttttctattatcagtgtatatttatagtatattagaaaacacaggtctagttccagacccagagatatcatcttggtgtatatcatgtgtgtgtatatatatatgtatgtatgtatgtgtatatgtgtgtatgcatgcatatatatatatgtatatatgtatacatatatatttgtttttccaatagaaaaggcatcatgcgttccacaatatgttgtaactccatgaatatttttctacatcaacacatacttatctacaaacatggccttcaagaactggatggtatttcatttgtatttaagtgaatccaatctagcaagactttggagaatgccttccagaaagtttcaggcgagcttgctatcttcccagatagcaacactgtagtctttagaacttgaaagacttgtcttatcttgcctgttagtcatgcagcctaagcgggactaggctcggcggcctggcctatggcatacgccaataattaattagc

SEQ ID NO: 29172 - DNA, 507 bp, Homo sapiens
  source 1..507: mol_type = other DNA
aggtgaaaaatggtagtttaatgtacttttaaaaataaactttaagttctagaacagttttagatacagaaaggttgcatagtacaaagttccaacgtacaactcagtttctctgatacatttgtcacagctaacgaaccttgttattagctaaagagcatagttaagatactgcattactttagtcatcatgcagtgtactttaaaatttgtgagattggacatcttttcatacacttaaagacatttgcatttccatttctggaaactaagagcctatgattcaccataattatcaataaaacatatgtgggatacacagacttctgattctgagtggagaaaactctcaagtctctgttacagatagaggaggtcagactcgtgtctgatgactctggctacatcgtgaaggatgaagcagattttgggtcttcttttgaacctaaatgagaaattcaaaataaatatttggacaatgttcagagctctgtgctagaagtccgc

SEQ ID NO: 29173 - DNA, 371 bp, Homo sapiens
  source 1..371: mol_type = other DNA
cattattcacgtagtaagtactggggccatttttttttcagtctgaagtgtgctaggccaggatatgctccagtttggagcacccaggtcctcctataaaatatggtttacattcccaaattagtcattattaatgggaaccagttgggaaactttcagatgtttacttttgccttctgacaggagttttgttaaattctagaaaacgcagagttataaatatctagagttctccctagttgtctctggctaggctccgaaaatagactgtgcagagcatcatagaagagtctcatctgagactgcactggaatcgaccaatccgagcgcgtccaggtcagggtcactggtcgccctttctagttaaccag

SEQ ID NO: 29174 - DNA, 396 bp, Homo sapiens
  source 1..396: mol_type = other DNA
tggcaagcgagcggcgcgcctgcttttctccactccgaggcgggaaaagcagagctcccgggtgccccacaggaaccgggtggcagttgaccaggtgctcccccggggacttggggcccggcacaacacgtgtttctgtcgcgtgaggactgtagcaaaaccttctctacccctcagatcgggaattcacgcgcgggccggccctgaactatacgggcaggcctccggccagaggggcgggtccggacctgctcgagccggaaagaatcggcctccttagtgggcaggttcccgctggtcgacctggttaactagaaagggcgaccagtgaccctgacctggacgcgctcggattggtcgattccagtgcagtctcagatgagactcttctatgat

SEQ ID NO: 29175 - DNA, 449 bp, Homo sapiens
  source 1..449: mol_type = other DNA
cctaacccatgcttaaaatatgcttaatggaaacatggtgcaagaaaaaggccacattagcaacatgtagctgatgacattgtaaaacccaggttttttcaattttctttcctttccgagggctataaaagttagatctttattgtccagatagtttggagttccagcactagaaacaaaacaactttctcttgcagtgtctcttggatgattcaggtggcatgccttcagtcacttcaactccttgcatgcacgtctgtgatgtaaaagtgttttatcctgataaacagattttcttaaaggaaactactttcgagggaggggaaataaaaaagcaggcatggttgatttcccgctctgtccccaacagcctagctacagggggccgggctatgcgttgccagcggggtgtggacttcgccgctgaccccacctccgcaatttagagc

SEQ ID NO: 29176 - DNA, 132 bp, Homo sapiens
  source 1..132: mol_type = other DNA
ctcatgcccagccggttcctgaggttgacccaccggagaatcgccttggcaatcaagtccttgattgttatgcttaaaatttaaaagcaagcctggctggggggcctttctcagaacgaaatgttctgtctt

SEQ ID NO: 29177 - DNA, 437 bp, Homo sapiens
  source 1..437: mol_type = other DNA
atgggtgtctctagaaatcctgaactgtttacagtcccagccgcccggtacaggactcatttgcatggcccctgcagccggctcctcctatataaagaagcaggagccatgtgacatacgaggtgacacccctcgagtcacttcccttcaactccagctggagcttcgccccgctcctagcctcagggccggactccagcgcagagcccagcccagcgcagcctgccagcagggaggtggcggtctaccagctgcagccgttaagctggacaacaggtaaccgctggccccagctccggcgcctcccgagccggggcgccggccggagctgggctaggagcccggtctctgagcgagctgtgtgccgccggtccctgttccccgcggtgcagcatcctgggaaggggcgggggggaggggacgcaggaagggggggg

SEQ ID NO: 29178 - DNA, 386 bp, Homo sapiens
  source 1..386: mol_type = other DNA
tatataaatgtataccgctgttttaaagaaaagtaacaaagttgtgtttttaaaaaatagagacacgggatcctggataatgttgaatgtattttcttcaaagagtagaatgtggagactaaagagaaaatcttgtggtcactccagtgctcatcctccatacatatgcatctgtagattagcatggacctgtgcatgcattacatgcatgtcacagatctgtacatgtgccggtccacagacaagtactcccacacctgaacattcgtcggcaggccagctggctgatgggtgtctctagaaatcctgaactgtttacagtcccagccgcccggtacaggactcatttgcatggcccctgcagccggctcctcctatataaagaa

SEQ ID NO: 29179 - DNA, 463 bp, Homo sapiens
  source 1..463: mol_type = other DNA
gacagagactgcctctgagcgccccccccccagaaaaaggggggctttggagggcggcagggctctcgagggcgtcgctcttctgtagcccattcgaggtggccctcacgccgagctcgagccccgcgagaccgggccactgagggggcacggcagcccgggtgggctgcgtggaggatgcgccatgagcgctgaaagagcctgaaccgaagcgtccggctcgccgagagagtgagagccgggccggctcccaggagcgcgggcgagggtgcgagcggcagcgtgggggtggagggacaggatccagccgctcggggcccccgcccgccagccggagaagtggcggaggaccgttctccgccgtcccctcgtgcagaccggccaccgctcagccgtcacagcccaggggagccccaaaggagggagggagcaagggcgcgccctggctctccctctgccctgc

SEQ ID NO: 29180 - DNA, 371 bp, Homo sapiens
  source 1..371: mol_type = other DNA
gacagagactgcctctgagcgccccccccccagaaaaaggggggctttggagggcggcagggctctcgagggcgtcgctcttctgtagcccattcgaggtggccctcacgccgagctcgagccccgcgagaccgggccactgagggggcacggcagcccgggtgggctgcgtggaggatgcgccatgagcgctgaaagagcctgaaccgaagcgtccggctcgccgagagagtgagagccgggccggctcccaggagcgcgggcgagggtgcgagcggcagcgtgggggtggagggacaggatccagccgctcggggcccccgcccgccagccggagaagtggcggaggaccgttctccgccgtcccctcg

SEQ ID NO: 29181 - DNA, 294 bp, Homo sapiens
  source 1..294: mol_type = other DNA
acgggatataccacaagttagaaacagagtctacgtcagcaaacagaagaccaatgctggattccaaatggaccaattagcttattagggacctggaatagctggatagctagctgcctcattgtccatgacaatttgaaggtacaagaaaaatcctacttttttttttcttttgatggtaataaaacacagccattctttttttgtaaaaagaaagagaggttcggtttcctatagagcagctcatagggaagctatctctgtcgctctgtcacacacacacacacgacacac

SEQ ID NO: 29182 - DNA, 347 bp, Homo sapiens
  source 1..347: mol_type = other DNA
gggatataccacaagttagaaacagagtctacgtcagcaaacagaagaccaatgctggattccaaatggaccaattagcttattagggacctggaatagctggatagctagctgcctcattgtccatgacaatttgaaggtacaagaaaaatcctacttttttttttcttttgatggtaataaaacacagccattctttttttgtaaaaagaaagagaggttcggtttcctatagagcagctcatagggaagctatctctgtcgctctgtcacacacacacacacgacacacacgcacacccgtccgggtccctctcggtgtgtcttccttgctggtacagtagtaa

SEQ ID NO: 29183 - DNA, 377 bp, Homo sapiens
  source 1..377: mol_type = other DNA
acgtcagcaaacagaagaccaatgctggattccaaatggaccaattagcttattagggacctggaatagctggatagctagctgcctcattgtccatgacaatttgaaggtacaagaaaaatcctacttttttttttcttttgatggtaataaaacacagccattctttttttgtaaaaagaaagagaggttcggtttcctatagagcagctcatagggaagctatctctgtcgctctgtcacacacacacacacgacacacacgcacacccgtccgggtccctctcggtgtgtcttccttgctggtacagtagtaagtttctccggtcactcctgccaggggagaagacaggaaggtggccgagcaccccttttcc

SEQ ID NO: 29184 - DNA, 333 bp, Homo sapiens
  source 1..333: mol_type = other DNA
tcaaatttcaggtcagtcatctgagagtcttcaatgtgtaacacattcatttattcactcattcaacaaatattttactgatagtctgttataatccctgccctcatgagactcataatcttataggcgctatcgtgcctggcactatgccaagcactcgagatgcagtgattcattcaatcctcccaggaatcctatgaggtaaagactattattggctccctcgcatgcccaggcctgcagattcctacatgcctggtgagctgctagcaaggcttagccattgcagcagtcagggttaaccgggaaggccttccaggtctttgctagaca

SEQ ID NO: 29185 - DNA, 411 bp, Homo sapiens
  source 1..411: mol_type = other DNA
aataaaacacagccattctttttttgtaaaaagaaagagaggttcggtttcctatagagcagctcatagggaagctatctctgtcgctctgtcacacacacacacacgacacacacgcacacccgtccgggtccctctcggtgtgtcttccttgctggtacagtagtaagtttctccggtcactcctgccaggggagaagacaggaaggtggccgagcaccccttttcctctgcggcggcggaaatctggactgaggggcgagctcgggaggcccagctgcggtagcatcgcggccgccgtgctgtcccctgcggggcgcgcgggctggcggatcccggctgctgcgcggcgtcggcgacggtagcggcagcggcggcgaaggcgggcggcggcctacagtggtagcggcg

SEQ ID NO: 29186 - DNA, 278 bp, Homo sapiens
  source 1..278: mol_type = other DNA
ctcagaaagtcattcatttgtttgtttgagacagagtctcactctgtcacccaggctacagtgcagtggtgcgatctcggctcactgcaagcgattctcctgtcagcctcccgagtagctgggactatcttctgacctcgtgatccgcccatctcggtatccctctgatggaagatattgagcaaacaggggataagctccgctccaccctccttgttcacaaatactgtggaatggcagaggccttggaacagtcccagagtaaaatcctcatgggt

SEQ ID NO: 29187 - DNA, 388 bp, Homo sapiens
  source 1..388: mol_type = other DNA
cacccagccaggttggcctatggtaaccggtggcctccctaggcccaggcagtgcctgctgctgcttgtttcttggcccagcctgggcaggccatcaaggatgtgctgggtcacctcagctttagaccatgggcccgttgtgtggagccctggacgaacacaagtgcagggatctagtgactctgtctttattctaccagaccttgataatggaagacagaacttttggccaatagaaagtgtccaatacactttggaaagattttctgtcccctttaagagggcctagtgtatataatttgaaaaggctgctttcagctttttttttcccaaagtaaaaaagaaatttttgctacatcttcatagttgcttattccaatgtttagaa

SEQ ID NO: 29188 - DNA, 321 bp, Homo sapiens
  source 1..321: mol_type = other DNA
cacacagtttccagggaagcaggagccactgggagtctctcgcttatccgagagtctctcctggctcccagccatgatctattcaaagtgtgattatctactcaggcaaaagagaagccgctaataaatttttcatttcagcaaaagtatttttcagtgattcctgtatgattttttaaaaaaatcaatctctgttaaatttttctgataaatttctgaattgcttttctgtgttatcttggagatcactgagtttccttaaaactactgttttaaggattagctacttataaaatatgtttgattagagattctttgcaa

SEQ ID NO: 29189 - DNA, 505 bp, Homo sapiens
  source 1..505: mol_type = other DNA
agccagagaaagtccttaggtttctccgggtaacttaagcataataggaacactattagaagttcatgttcccatgaaagttccttaccttggagatagcatttactgagtatcttaattctccaaaaaatcagaccaaagaaagtctttaagcatgtattcactaacttgattttgcaaaattacgttagcaaatacgtgctataaggtttctaacccgacagacaaaagcatgtaaatcattttactgctataccaatttactaacttaatttgtaaaaggaggttagtgaatcaattctgtaagactcatggaaatatttgaaattaattaacgttttagtaagattgattttaaacaatgagacttagagaatctgtgtacaaggagcttgaataatttaaatgcgtgggtttattattaacacagtagcaaatatatcaaagtgtttcaaagaaacacgcatgtttgcttggcgatgcccagcagataagccaggcaaac

SEQ ID NO: 29190 - DNA, 369 bp, Homo sapiens
  source 1..369: mol_type = other DNA
aaacatcatgagtctcgggatttctataaaaagaaacactattagcttaatagttgtagcaaagccttgacaacatagttaatatcgtgatattaaaatacggtgccatatgctatcactgctgtggtagaaccctgtcctgatgccacaccccgagaccccacttctttccactccctaggcggtggcagggagggggagggccccgggggacaggaaacttgactacggacggacggtcgctaggatccctgggacttgtagttctgcactgctaggggccaagtctgtgagggcagcaaaggcgcctccctgcccggaactgctctgcaactcccagaggcgccgcgccggagccggcgacgtgag

SEQ ID NO: 29191 - DNA, 517 bp, Homo sapiens
  source 1..517: mol_type = other DNA
caatgcagaaatctatctgtgtttgtatacacgtttagaactcaacagaagttaatgtaagggagtacagccattttgattgacagcatttacaaaggcaaaaaaatatttgcctacaaaaaaggtacaaatctaatcctaatataaccatatcattagaataaatctctttatgtaacaaaaaagttatttaggtcctcattcaaaaaatccaacataatagaaagagtttatggtcttttagggttcaccataacaagcccacaaggtctcagtctgtcacctcaaactactaggctggagcaatcctcctctcctgtatgtttaccttaaatcacagagtatgagtggcaaacataacattgtaaaataatgcaaccatgagtctcatgcttgatcacaagggccatgatgtaactttccagtcataaaggttacaattttctttataagctttggagtacaaagataactgggaatttatcaactcaactttatcttcaacaatttctgtatg

SEQ ID NO: 29192 - DNA, 406 bp, Homo sapiens
  source 1..406: mol_type = other DNA
ataaatatttgtgggcttactgcagaaagaaacacttctaaacttctgtctaccttctttgcaaaaacttttccaataccacaatttgtaatggcacggaaggggcgttcaatttcacatgcgttactgaatacagttactagtaaaggtaaataaatccatataaaaagccttccttttcactgattggagtttctgagaaatgctcccgcaggcctatcgcgagtcccgaggtgacccagggggactgcttggggggttctgcttctctcagaaacggggcctccgctagggccgggccccgaaagccacgtagggcttcgccgacgtcgccgactgcggagcagggatttctctgcaactacttgtcgcgcgagcaacgcccgcctcacgtcgccggctccgg

SEQ ID NO: 29193 - DNA, 458 bp, Homo sapiens
  source 1..458: mol_type = other DNA
tctttgcaaaaacttttccaataccacaatttgtaatggcacggaaggggcgttcaatttcacatgcgttactgaatacagttactagtaaaggtaaataaatccatataaaaagccttccttttcactgattggagtttctgagaaatgctcccgcaggcctatcgcgagtcccgaggtgacccagggggactgcttggggggttctgcttctctcagaaacggggcctccgctagggccgggccccgaaagccacgtagggcttcgccgacgtcgccgactgcggagcagggatttctctgcaactacttgtcgcgcgagcaacgcccgcctcacgtcgccggctccggcgcggcgcctctgggagttgcagagcagttccgggcagggaggcgcctttgctgccctcacagacttggcccctagcagtgcagaactacaagtcccagggatccta

SEQ ID NO: 29194 - DNA, 492 bp, Homo sapiens
  source 1..492: mol_type = other DNA
aataaataaagtatatgcttataaacaagtaagaaaataagtatatgtgcgtgaatactttatgtgtgttatatacgtataagatcgtaattattctatggtattatgttattataatacagctatatctctgtttagctgcattgaatcctataattaatgcctcctataaaaatttagggcagggaattaaataaatttagtgcagtgtttcttagaattaatataaacacttaattggaaatatttaaatagagttgatggcagctgaatcgatatctcccatataaagacttgaatgttcctttgataattctgatatatagattttttttaaagtaacaaaagaactagaaaatactttctgcggactccttggagaatcttcaagaatttgatgaagaattcttcacaacatttcaccactttagagtctttcaaacctaacagtaaagttgggtaggggggatgattgacagcagacagccccgc

SEQ ID NO: 29195 - DNA, 257 bp, Homo sapiens
  source 1..257: mol_type = other DNA
gccaaataacgtttcttcctaaacatgagaaagcaaatttgaattcacttaccgcagcctctgcaggctgcccccaaagactcagggagtaagaacaagccggcagccaggctgactccacgcagttttcagcacccgcacgaaaagaagaagaaggagctactcttccttccgagacagttttactccaatctcattggtgtgcgtaccaaagccaattacaaatagatctaattattgttactcattagaaacaa

SEQ ID NO: 29196 - DNA, 525 bp, Homo sapiens
  source 1..525: mol_type = other DNA
aaagactctaaagtggtgaaatgttgtgaagaattcttcatcaaattcttgaagattctccaaggagtccgcagaaagtattttctagttcttttgttactttaaaaaaaatctatatatcagaattatcaaaggaacattcaagtctttatatgggagatatcgattcagctgccatcaactctatttaaatatttccaattaagtgtttatattaattctaagaaacactgcactaaatttatttaattccctgccctaaatttttataggaggcattaattataggattcaatgcagctaaacagagatatagctgtattataataacataataccatagaataattacgatcttatacgtatataacacacataaagtattcacgcacatatacttattttcttacttgtttataagcatatactttatttattatgtagattgtttctaatgagtaacaataattagatctatttgtaattggctttggtacgcacaccaatgagattggagtaaaactg

SEQ ID NO: 29197 - DNA, 507 bp, Homo sapiens
  source 1..507: mol_type = other DNA
acagttctgtgtttgacaaacacatacagttgtgtcatttgcctattcccaaatgtcagatacattggatcatattgtatgttcacataacataatacattgaattgtgtatcagttcattttgaatataccatggtttgtttgtccatttacacactgtgttttggccattatgaataaaacttttatattcatataaaaatatttatatgaatataaatattcccatacagtttttttgtgtgtgtgtgaacatgttttttcagtaaaagttttgacaggtaattcttctacttaaaatatgtatatttgatgaaatttgtaagttattctaagggaaaaggataattcttaacaagacaggttagaattactaaattcagataaattggtttcaggatattttactaaacctcaacttacaatctctagttcaaaaatattttatattataaaatatcaagaggtaaattcaggagaacccaagttgggtcaaataaaggcagc

SEQ ID NO: 29198 - DNA, 455 bp, Homo sapiens
  source 1..455: mol_type = other DNA
tgaatataccatggtttgtttgtccatttacacactgtgttttggccattatgaataaaacttttatattcatataaaaatatttatatgaatataaatattcccatacagtttttttgtgtgtgtgtgaacatgttttttcagtaaaagttttgacaggtaattcttctacttaaaatatgtatatttgatgaaatttgtaagttattctaagggaaaaggataattcttaacaagacaggttagaattactaaattcagataaattggtttcaggatattttactaaacctcaacttacaatctctagttcaaaaatattttatattataaaatatcaagaggtaaattcaggagaacccaagttgggtcaaataaaggcagccttgcaaatagccttcttttgaaccagcagacagatcaaataatgataattctctgcaaagctctgagtt

SEQ ID NO: 29199 - DNA, 217 bp, Homo sapiens
  source 1..217: mol_type = other DNA
ggtggctggcgcctgcagtcccagctactctcctcgggaggctgcagcctgggccacagagtgagactctgtctctctaagcaagttacttagtatttctttgtaactcaatgttatgttactctatatacagagccttgcacaatctttggcacatagtgaatacttgataaatatttattgaatgaattatgatttaaattttggacgtacaagt

SEQ ID NO: 29200 - DNA, 377 bp, Homo sapiens
  source 1..377: mol_type = other DNA
catctaattaatttgccatttaaatcagaagtcattttacagtcttagctgtaaaatgaagatgataaaataatagcaattacctcagcattgttataataagtgaatatatgtaaaactgattagaattttagttattgttagaaaacttaatttttgttggtgtccgtgagacattttaaaattttcctgttcaatgtggctgggttaaaatgaaatagtaattttaggcatagtgaggatgatccttccagaacgttccagaatgctaaatctataggctacggaatctttggctccgcctcctggggcaaaaaagtcaaaagtaggtcatgtttacaaaagcaaagtggcttttaaattttaaactaagtatc

SEQ ID NO: 29201 - DNA, 389 bp, Homo sapiens
  source 1..389: mol_type = other DNA
ttttagttattgttagaaaacttaatttttgttggtgtccgtgagacattttaaaattttcctgttcaatgtggctgggttaaaatgaaatagtaattttaggcatagtgaggatgatccttccagaacgttccagaatgctaaatctataggctacggaatctttggctccgcctcctggggcaaaaaagtcaaaagtaggtcatgtttacaaaagcaaagtggcttttaaattttaaactaagtatcggaccgtgatcattccgcagccctgcggaccggacccacgtctctggtgagtgcctgggccgtggcaggacggctgggcgccggactccaggctctctgcactgcggggcggggcccacgctttgctgcccgccctgccg

SEQ ID NO: 29202 - DNA, 397 bp, Homo sapiens
  source 1..397: mol_type = other DNA
tttcatattttctattaagcaactaacaacatgttcaagtttattttaattaccagggattttaagagtatagtattttttaagatgattaaagttagctaccttcacgttattgtacttgcatatatttttaccttatagattcagaataattccagtacattcttaattcagtaaacaatttgattgatccagtcacagattcagcagcaaatgagacaaactctctgccttgtgaagcttatattctactgggagcatagtgttctttgagaatggtatgatctaacttacattttgagaatagtactctgttggctatcccatttatccacatgagagatgatattggcttaaacttgaattagattcaccttttttgtaagtcaaaccatta

SEQ ID NO: 29203 - DNA, 397 bp, Homo sapiens
  source 1..397: mol_type = other DNA
tggaagaattctttttaattttaatagcaatttatgccatgataccatcgtggaatagtcaaagtgttcaagatagctctcttaaagatgtcttttgagggcagctggaagatgacccgaggggtgcgcctcaacttgaggcgagccgttagccgcctcgccttcctcgcagcgcccctcccgcgccccgggaagcccgttcggctccgccttttcgactgacgtcccgggcgagcgggggcgggcgcgtgggtgggccgagccgtctgcagccagcgattcggctggctctgcccgcgcgcccccgctccgcccgcccctccgggcgcgtcttttccgggctcgcgctgagtcccgcctccgccggctgtccgggtgcgcgcgcgccgctgcggct

SEQ ID NO: 29204 - DNA, 247 bp, Homo sapiens
  source 1..247: mol_type = other DNA
ataatacagtagattgcattttatgttttgagcctggcttgcagccaacatccaaaagtctaactcatcgtgagtcttcaataaatattaaataaacatgaggaaggtcctgagaaggtccttttactgacccttgtctgggggagggaaagaggtcacgggaagcctcccttcctcccactggcctaccattgaaggcctgtcaggagaacctttctggccttgctgtgcacgcgtgcaggctccg

SEQ ID NO: 29205 - DNA, 349 bp, Homo sapiens
  source 1..349: mol_type = other DNA
tgtgcacgcgtgcaggctccgacggggaggaggagccgtgcgccgcggcggcggccgccaggggaaccgagcgcccggcgcggagagcgcgggagcggagcagtagcccgatccggggccgcgggccgagctgccggtgagtgaagccccgaggggcgcggcggccggtccccggggctgggcgggaggcgcgggagggcgggggggccggctttagtccaggggccggctttagtccagcccccggctggcccggcctcccgccctggcttcctccctccgctgcctgcgcgaggggggcaggtcccgggcgggccgcgggctgggggtggtgctgcccggagggcgg

SEQ ID NO: 29206 - DNA, 302 bp, Homo sapiens
  source 1..302: mol_type = other DNA
atctctaagatctgagcactacagataatattcctaattgctttgtacccaagcttttaaatgtttaattgagctggcctctgccggccggagagaggcacgagtcgggcgggacaggcgcgaggcgcccagccgcgaaagcgaggagcgcgcaccgaggcgggggcgcgcgcggggcagccgcgtggctaggcagacggggccgggagcggcgcgcgcgcgccccgccagcctctggcgcgcccccggcggcctgagccgcagcgtgctcgcccccgccgccagctcgcctcacttatggg

SEQ ID NO: 29207 - DNA, 740 bp, Homo sapiens
  source 1..740: mol_type = other DNA
ctctgataccttcatttattatatcaatattgggcctaaaacagtattctgtaaagcttaagttggtattaactatgatcatcttgatgtctatgatagataataaacaaggtcatacataccttactaagcaattttggtttttcaccaacattttattctttaaaagatttacagtaacacaattatttagcatttcaagttgtgtgctttatttagcaagtgagaaaaaattggaatattgaagtatttgcataaaaaatcaaatggtagtgttttataatctctattgtatttcctattaaatttttaatttgttatcctgtatataaacagaaacatggataggctatgagtagattattcaaaaaggaactacaaatggtcatataatcaataaacatatgaaaaagtgtcaaatatcactagtattcaaagaaataataaaccacaataagttactagttttcactaatatgatattgctaaatatcattttttaaaacttgcacactaagttttattgtatgctgctgccaatgtatataaaacaattacccttgtgaagtagaaattcataaattgtaattagcacatgtgttacagggataagcttttgtacaggcttcaaatgtatctctcttgaatattcactgaaacctttgaaagattcattgtactacaaaaagcaggcattctgcagacagaattgtttcaagtctgcagcggcctccagctgg

SEQ ID NO: 29208 - DNA, 432 bp, Homo sapiens
  source 1..432: mol_type = other DNA
gagactgacttggataacttttgcaaaatagggtaaaagcaaggattttgaaaaaaaattctttgccattttatcagaagaattatatttaatgaaattaaaaataaaaataggtgattttgatgttcacccagacatatggaaatctgaagcatacttatttcaacttatcacaccaagaatatttttttgcacctttttagtttggaaagagctatagtgctattaaattacattctacataatcctaggaattattaatgataagagctaacactttctgagtggtgaggcctcattttgaagacaagcaagctgaggctcagaccttggatttgtccaaggtacaaagccattgctctaaaagattagattatcctatgaactctattgggttttgaaaaaggcttaggctaagctcagaggactggg

SEQ ID NO: 29209 - DNA, 363 bp, Homo sapiens
  source 1..363: mol_type = other DNA
caaggcatcagcagtgctactgtgatttccaggttgagagtgtgtggcaccaagttttcttcaagagtttgtaagagaaagtgctttgtcactctgttagccacagtgtggatagtaccagaccaggtgcacacctcggggtccctttaagaccccaacgctcgcctagccaaaggatttttaaactttcgggagcggctgcgtgcttgcggacttcccgccagcgccgagcggccggcttctcgggccaagtggggagcgagcgggagggcgggcaggtggccccgggccgccgcgcccgcgccttggctctgcccccgggagccgagcaagccgctgctccctcgtggtgtgagggcggtg

SEQ ID NO: 29210 - DNA, 277 bp, Homo sapiens
  source 1..277: mol_type = other DNA
gaaaaagttactcataatactactagtttaacccaacggttacttacatcattataatttgaatgtataatttacataatctagccaaatcatggggatttataaagctttggccatctgcaaaaatttgaaccgtatcctaacttcatatgcagaaaagtctgcctggcttgaaaattcatctgaaatctcaattctcctgaggggagcaattaaggaagacccaggcgcttcctgcctggaaacaaaagattggtccccagtagcccactcaggc

SEQ ID NO: 29211 - DNA, 328 bp, Homo sapiens
  source 1..328: mol_type = other DNA
ataatttacataatctagccaaatcatggggatttataaagctttggccatctgcaaaaatttgaaccgtatcctaacttcatatgcagaaaagtctgcctggcttgaaaattcatctgaaatctcaattctcctgaggggagcaattaaggaagacccaggcgcttcctgcctggaaacaaaagattggtccccagtagcccactcaggcggttgccgagcaggggctctaccgcgggcgggcagctgtgccagctaaccgtctgggatctcgcactgggggtgcagcttttccccgcctcgagccagtgtgcgggggcgggagaag

SEQ ID NO: 29212 - DNA, 314 bp, Homo sapiens
  source 1..314: mol_type = other DNA
tcttcaactagccagcaggagggttggtggatgatgagcatctttacagtttgtgaaaatgaaacaaacaaaacaacttgagaatcatgttcctggaattgtgcttggcctttcagagcaaaaacaattattttctctccaaatgttacctgttgtttcacgaagtccagggccatgtctgaccagggccatgtctgcagaagaaatctatcagaatcctcgctgaaagtcttatttaacctcatgactcaggatcagtttctgacgcggggcaaagcctcctgaagttgctgcgaggcacctcccccttaaaa

SEQ ID NO: 29213 - DNA, 626 bp, Homo sapiens
  source 1..626: mol_type = other DNA
tgctcttagctctgagcttcctggaagccaagcaaaaatagaaccatgatagttcaaggctgctacatattgatgcatgtagcttcaattgtgaagatggtagcatcccccgcctgatctaattagttcaatagttttttttgtaacatattttatataaagaagtcagttagtgacaaataagcagtttgaggagaaatctgttaatatttattttgtagggtttgaacttccaaactctcaaaggtaaatgccacattaacctttcattaaccaaattcttacaccaagctgatagatttgcataatattctaaaattattgtctactttgttgacttcattaaaaaacaaaaaaccagttgttggatacttgagctaaactgccttaaagaatctgcagattttattttattttttttctctcaagagggtaaaaggaagagagcttggctgtctgagtctggcccccaggcagattaggccaaggttttggccaagtgaaattgccaattttctaaaagaaagggctagcacattgctcattagagcaagcctgtgaatttttttaaaagcatgtaattaatcatatggcaggaatttcttgcttggagctcagacaacaaa

SEQ ID NO: 29214 - DNA, 480 bp, Homo sapiens
  source 1..480: mol_type = other DNA
taccataataaaaattgtttatgatcatgtgttgttggatgagcaatgcactaatgatggtattctgaggaaggggaaggtctgtagctttccttagactctcaaccccatttgtaaaatgaggatcataatacccaaatcacagggctgttgtgaggattaaattaagttctttatgttaaatgtttgatatagagtagggatgaataacttatagtggaatatataccctggctagatatgactacttagaaaatgttctacttttcttagaaccccaaccagaaactcaggctgatgttacatttccacaaaatatttaaatcaaatgtattaagttggtgcctaaaaaatctttttcaaacctagaaatatacacatgcaaacattctgtttgtaaagatggaattatttattctaacattgaaagcctagaaagcttatacaaactttgtctccacaccgctgagacagagcaga

SEQ ID NO: 29215 - DNA, 278 bp, Homo sapiens
  source 1..278: mol_type = other DNA
ccccgttacagagttttctgaggtttaaataccctatagaagtttcccattggttacttggtatatgccatatgtaaaatgaattttatttttgatttacatcataataaatttggaagaaaacaaatggttctttgtagcataggctccagtttcttgaaagaaacatctaataggagcttacaaacagaaagtattcttcaagcttttttttttttttttttccagtaaaacagtgaaacatatgtcctgatgacattaccttgtgaaagtccttt

SEQ ID NO: 29216 - DNA, 355 bp, Homo sapiens
  source 1..355: mol_type = other DNA
aggctgcagtgcagtggtgtaggccttctgactagctaggaacacaggtgggtgctcccaccgtttgagacagggtctcattctgtgtcacccaggctggagtgctgggattacaggagcctgccacacctggcctaaaaaataatatttttagagacaacctgggctcaagtcttcccagtagcttgggattacagccactgtgcctggtaaggcacttttttttttttttttacccatcagttttgaaaaagttaattacatttggcaattccccattcccttatccggtgacacagcccggggccccgccgccccctggcggccaccctcacagaaggcagtcactgcaacg

SEQ ID NO: 29217 - DNA, 271 bp, Homo sapiens
  source 1..271: mol_type = other DNA
ctagtgcatctaaaatgccaattgcacattgtgacagaatctcaccctgtcaccaggctggagtgtaggtcagcttcccgagtagctgggacttggttcttttcagtttgttacaaatttgttaccaaatgtatactataaatacatctggttgcaaagggactataagcagtctgtttcctgtcgcagtgtggtaagcagtagagtctcctccccttaagtttgttacaaacttgttacaaaatgcatatacttctgggtagggtgttat

SEQ ID NO: 29218 - DNA, 469 bp, Homo sapiens
  source 1..469: mol_type = other DNA
caaatacatgcatgaatataggatcatatctttgtaagttcattaaataatcacggtacaattaatatgttaatttacggtcatattttgaattattgccacaacatgctagaaaataggcctaataaaataataataataataatgatactaggtagaagataataagtttccccaaatagagtagcagttattagtgcactgggataaattaaacactgacttttgattgtattattactataaaaatatattagttattcctttcaatgtatgatttccacaaattctgaaatgtaagctcattacatcttggagccaaaggctctgctggagcatcttccccatcctgctacctaccatggtagagattaatctctgttgttcaagcgcgggcatgcctgcgcgcatgcgcgcgcgctcgcgcggacacacatacacacacacgcgcgcgcgcgcgcgcgcgcgc

SEQ ID NO: 29219 - DNA, 223 bp, Homo sapiens
  source 1..223: mol_type = other DNA
gtcctcctggataatattctgcagagtgttttccaacttctaaatttttttcaaagttttcaagaggaactgcagttttccttctaacagacaggaccctcagctgcaggtctgttggaatacccctgctggggggtgcctcccagttacatttaagtctgcagaggttacttgccctgcccccagaggtggagcctacagaggcaggcaggcctccttgagc

SEQ ID NO: 29220 - DNA, 382 bp, Homo sapiens
  source 1..382: mol_type = other DNA
tttttgttgagaaaataaaaccaatagtatgattagaatttgaatattaaattgtgttactaaaatcagtttcagtcaacccatagtaccggatatgctaatcgtataccctttccagaaatctttatatttttcaatttctaaattttgtcagaggcacacttcaaataaaagagtatgaaaatgattttttaaaaagatgtttcagagccttatcagggatcattaggtttttgctttaaagaatacgagttaagtccagattgaatatttaactcatgctaaaagtgaaagagaaaacctagagctcttatgcctccatgttcttcatcatatcagtgctagggcctggaacaacaatctattaattttagagtcaatt

SEQ ID NO: 29221 - DNA, 378 bp, Homo sapiens
  source 1..378: mol_type = other DNA
gggcaagcgcccggggcggggggaaggaaaacgaaggagcgcttctccttcctgcattatttgcagtggggcggggagctgcactggctctcccacgcgtgccgcagttgtagtcttttgcaaagactctcacggctacggcaaccgagtcgtgcccctctagtgggaaggcgagagcgagggtcccttgctttcgcccgagctcccggaccccgcggtcccgccgccctgctccggggcggtcctagccgccttggcagtctcctgcctgtccgctgccaccaaggagagcccggacggagcagcgaggaggggagcagccgggagttggggcttcccccctgcccatccctggccgctggcccgggaccgaagcca

SEQ ID NO: 29222 - DNA, 471 bp, Homo sapiens
  source 1..471: mol_type = other DNA
cgacacactgttgcactcttttatgagactgagaaataaagcgtctcagaacatagaactacacaatagcctcttgtgccaggctgggccaaccggcttcagggacgcgctccgcccaggccggcgctcccagcccgcccaggggcggagcctccgcggagcgccgcccgcgacccctcctccctcgcccctcagcttctgcggcccgccaacgggaggggggcaagcgcccggggcgggggggaaggaaaacgaaggagcgcttctccttcctgcattatttgcagtggggcggggagctgcactggctctcccacgcgtgccgcagttgtagtcttttgcaaagactctcacggctacggcaaccgagtcgtgcccctctagtgggaaggcgagagcgagggtcccttgctttcgcccgagctcccggaccccgcggtcccgccgccctgctccggggcggtcctagcc

SEQ ID NO: 29223 - DNA, 357 bp, Homo sapiens
  source 1..357: mol_type = other DNA
gtgcctctgagccaagggggccccgttcacccttctctgcgctgccgccaggacaccgcaggcacctgcccggttgcgcctgggagcctgtgaaaagagctctgcctgaccggttagagctctgcctgaccggttgcagctcgactgggcaaccgactggctgtgggcccaaggccctgtgccagagagacccggctcgacaagagcttttctttcaaatgagtgcctcagttgcttgaagggagtttcaaagcttgatgaaatttgcaagacttgagaaaggccttgtgaatcagattaatctggggtctcgcgccccctgccagcaggctccatcccgcttttggcccaagagcg

SEQ ID NO: 29224 - DNA, 293 bp, Homo sapiens
  source 1..293: mol_type = other DNA
aaaagttcagatttgccctttagaaaggtcccggaaataaaaaattttaattaaaagaagtaattaaaactaaataaacactttttttaaactaaaaaaagaaatatttatgaggaaaaagttttgaactctctgagtcaaataactttctattttattttattttattttatttatttatttagagacagtctcgctctaggagtgcaatggctgacttcaggtgatcctcccctcagaaaagagtatttgatgatatcataacctaacggtcttccggatgaaggctattt

SEQ ID NO: 29225 - DNA, 205 bp, Homo sapiens
  source 1..205: mol_type = other DNA
ttcagtgaaagtatctacctagactaagaggtattttagttatctgactcagggcttagtaaagctaattttatttccttgaggatagatttcctcgatgggtatatggtttgtgattttgagggcctctaaaagtattaaagcagcagcagcagccgctgcatagaattctgaccactcgaaccatgcctagagtacagcctag

SEQ ID NO: 29226 - DNA, 603 bp, Homo sapiens
  source 1..603: mol_type = other DNA
atggtgtagagattggatacagccttaatccattcccttttgggaataaatgactggcatctcctccagaaaagcatcaaaagtattctggcttcttatgaacttacttaattttatctgggctgaaataaactcttgtttgattgtgtaaagaatgttttgataaattttcaatgggaaacaaaatgtacacagaattttaattgcaacaccaagaattttagatgaaaaactgacaattgctacttctgagatcctattcaataaatttttgaaactgagggccaaagaggttaaggaagtagaatccaggtttctggacgtacttaaaggtatttgaaactcaaaataataatgcctttgggtagtattgaggaagcaatcaaatgcttacctttggattatcttttaattcccaaagtgatgagtcacataaggggaaaaaaccactcagatgaactttgtaatttcctctgaatcttttgacaaatgtaaccttaaatgctgacctattttgaatgcaaattttctaatgacagttggtatttttcatggataaagcaagagctcctcctactttttaaaagaaaggctttagttcta

SEQ ID NO: 29227 - DNA, 423 bp, Homo sapiens
  source 1..423: mol_type = other DNA
ccagataaaggactttgaactttcttctctatgtcttctacattaaaaatatcttcaggttctgagaatagggttaaatcttcagaattccatctaaaaacaaaacctgtatttcagaaataacttaagattgtttgatgatcaaagagattttcatcaggcagacttcaaaactcttccaagttttggaaggcaacagtctggctgagacttacatacaggcttccttgaaaacattttacaaatcttttcctattatagaattctaaactatggagaaattttctctaacactggtaaaggattcctgaggcatttgcagtaagcttctcaatatatttgtttctgttttgcagaacggaaacagtgaatgacctatagactttggtacccaaagctttatcatacatttcttaaagcaag

SEQ ID NO: 29228 - DNA, 254 bp, Homo sapiens
  source 1..254: mol_type = other DNA
gcccaggagaccagcctggccaatgaacggagttggcgccacttcacgccagcctgggtgacaaagagatactgtgtcagtcaagattataaggttttattcctagaaacttgtagccaactacatagtgctctaggtgctccataggagaggggtaacgccaagctccaccccttggggcttagcaacaccgaagggagaggctattggaggatcaggttagtccaccactctgctcctcctgcgcggtgagg

SEQ ID NO: 29229 - DNA, 318 bp, Homo sapiens
  source 1..318: mol_type = other DNA
aagccatctcctggggaaatggcagtctgtagtaacatgtctccaaattttctcaagatgagaattgatacccatttccggtcaaaagagtggaaccaatgtggcatgaggccaaaggcttgagggccctgccccttctcccttgacttcttaaggaaaggaatgattgcacttatataggtggcacaagattgtttggacttctaacttcctcttagcccaagtaggaaggggagactcaggcgctggggaccattctcctctccctgcacacacccgagccaatggcggcggccgaggggcgggctttagagccac

SEQ ID NO: 29230 - DNA, 595 bp, Homo sapiens
  source 1..595: mol_type = other DNA
ttgcttgatttaggaattcactgattagattgctatttcaataatgagagcagttatctctatgatctaaatttatgacacatattaaatcatttaagccttacaaccatgtataaaatagtgaactgcgtggagttgctcttatcttcatcccgggatgagaaaataaataaagtgtggagccagaatttgaacccaatctggctccagatcagttagaaaattatttctaactgagatatttcctgtgtgctatgccagcagaaaatatagttcctacacagaagagcttacatttttgacataaatcaaaatgtatatacttgaaataaatgctacaacaccttagcatatggggtgtaaatgtaaactatggacttctaaaataagcaggttacttggctactgttcaaactctaaataggtatatgggttgtagctatttgacctgaactaactttaaattcccctgagtccttatatgattttggggaaaaaaaaaaaaggaagaagaaaaaagaaaacttttctctgtaaatgctgcatttaaattagaatttattaaattctctgcaatctctaaagttgcaattgt

SEQ ID NO: 29231 - DNA, 300 bp, Homo sapiens
  source 1..300: mol_type = other DNA
cccatggggagctcaccagactattattttaaaaggatctttatattattttgcaagacaaaagtgttcctttttttttttttttcaaaagaaagaagatatcagggctggaatgcacaggggtgatagggcaccggcagtgtctggtcttgcctctcacctggggagggagcaatagatacaaacttatcggttgaaaatatgcatatttaaatttcttttacgtctaaatgttttgcgaatattgaactatagatattccattgttagcaacaagtaccttattctaagggaaagaaa

SEQ ID NO: 29232 - DNA, 438 bp, Homo sapiens
  source 1..438: mol_type = other DNA
ttatatcattctcctttctcagatgagaaactgagacatgaagctatttactaaccagtgtgctatattgcctctctattaaattattgatgataaataactcatcacactgccagaaatagctagcgaatccctcttcactttatgtgctttgtatttaaaccacaaatatgaactaaacctctttttggtcgtgtaaaaattatattcattttagaagtggtagacttcaagtaaaattcctaccattctttaataaacaggggtaaaaatttcagaaagtaacaaagactttgctactataataaatttcctagtctctactcactaatttctattagaatgccaatatcaggaaaaaaggaagagaaaattctgtaaataattactatatttttctcctcagattaatgttttgcagacaaaaaaaaacctctc

SEQ ID NO: 29233 - DNA, 356 bp, Homo sapiens
  source 1..356: mol_type = other DNA
ttgcaaatggaaaatcctttgagtttcctgatgaaaaggcattccattggtaaacagcattataataattatttcctcccttttgtgtttggcttctttgaaatactacacaaagcaatccataggctccaagttgcagccagctgggtaatcttatctcagatggtttcctctgggagcagcatttgccccagggaatcaagattttggggaacagaatggcccccttctcccctctgagtcaaaggctgtcagtcatctcggctcagactgctctgctctccagcagcccagccctttcccagggctggggcaggagattgctacatgctactggagaggagagagcttctctt

SEQ ID NO: 29234 - DNA, 499 bp, Homo sapiens
  source 1..499: mol_type = other DNA
cttttgctattagtttcaaatgaatttaacacctgaatctgtttccacatttgcaaaaatagacatagtaaaaataccttggctgttttcacttataagtaggagctatggttgatctgtgcagcaggccaccatggcacacatttacatatgtaacagacctgcagatcctgcacatgtatcccggaacttaaataaaataaaaataaatgtcatggtataaacttgaaattaaaaaaaaatacctttagtacaaatttgttgtgaggtttatatgtgaaaatgtccccagaattatttcttaaactgtaaaatgatacaaatgtacataattattccaatgtaacaaagataatttgggggtaactactttttacattacattaagtgaataaagcagtggttgtagcaaagacatattttttaaaaggtaggagcactttaaatattctatttaaccaatggtaggcggtactaagtgctgtgaggtctcgcgccc

SEQ ID NO: 29235 - DNA, 482 bp, Homo sapiens
  source 1..482: mol_type = other DNA
tgtatttcttatatactaaatttggtattttggaatttttgaaaatagttccttactgtagaaacattcatgtgtgtttctaaaatacagatgaaaaagcctcttactaaatctcaatctttaaaaactaggaataatttggaaagaatattcgaacgctaactatttaagttggaagcatgagtttattgtttggatacagacttgaaagtaaatttaaaaaaatcatgatctgccttaatatcagaagtaaaattcttcagcctgtaaataaacagttcagcataatactcatttaacctatattcactttttagaattgtgtagaaaatttgtgagtttgttttggtgctttaaacagaagcttaaaagtcactttcagggcatttacaagctatttgtattttgaaacaatattgcctttgacagcagctttccctgctggacacctgcttggccagcttgatagcgtccctctgagg

SEQ ID NO: 29236 - DNA, 425 bp, Homo sapiens
  source 1..425: mol_type = other DNA
gaagcagtttgcatagtggttaagagcctgggtaccagaatcacaccgcatacacctcagttttgtcacttgtaaaatggagacaatagtgtgcagtaaaatgttaaactgttatttgtagcgcttatcccactagaagagtgatatttgccccactgaggtgaggtggcaccgcttccagggcacaccctttgctcgggccccgccgtgactatgaggaggccgaggccacggctggcacgggtggacctccttggagtggctaacccggggcggcttccgaggcgtgagggccacttagcggtcattcagcttcagggtccggccctgtccgctacagcctgggagttccgttcggacccccgccaccctgcctcccgcgcaggcgccgccggggccacccccgccgccatgttcagcagccc

SEQ ID NO: 29237 - DNA, 460 bp, Homo sapiens
  source 1..460: mol_type = other DNA
tgactcaaactgaataggagtatttatttatcccgtatgaacaatcatatatcttgctgcaaaaatattaatatatttgattacgcagtgttttccctaaactccctggggtattatagaatatacagtatatgacatttggtttttacccaagacaaagtctagtaattgaggctgcacgaacagctatgctgtgtgatcatactgaaagtcaatgttatcaccttgatggtcaaaagaaggaacatctcggttttttaaaaagtacctttctatttttatatgatatctgctcaataaatatttaccatttagctgacgcacatcggcagtatgtaagaacttctctcacactgtgttggaatactggctcagctccatatctagggatctcaattagagatctcgtagtgaatccgacgccctagggtaaacgcgtctctttggaactgcagagtta

SEQ ID NO: 29238 - DNA, 415 bp, Homo sapiens
  source 1..415: mol_type = other DNA
atgctgtgtgatcatactgaaagtcaatgttatcaccttgatggtcaaaagaaggaacatctcggttttttaaaaagtacctttctatttttatatgatatctgctcaataaatatttaccatttagctgacgcacatcggcagtatgtaagaacttctctcacactgtgttggaatactggctcagctccatatctagggatctcaattagagatctcgtagtgaatccgacgccctagggtaaacgcgtctctttggaactgcagagttagggagtaagactttctggccgcgcgctctcagagccagggcaccacgctgctcctgcgcaggtgcgcttgcgccgttttgataggcttctcgggccgaagtaatcggagcgccccctccgaaatctcgcgagggtaggtgcgc

SEQ ID NO: 29239 - DNA, 505 bp, Homo sapiens
  source 1..505: mol_type = other DNA
gctccaccacccagctctcccccgtgggggacggagcgaggggtgccgagtgttgccccctgttaggtgagccaactgagtagggggggacccagtcgagccgctcacgctggaagcagcgagcacacaaaaggcggctgctccacgttgttttccagcccctagccgcctgggccctgggggcttgcggggtggagggacgtgagagttctccagccctcctgcgggcactgcagctcggaggcgggagaggagcactagggcgggagaggagcacgccccaccccctcccggatgcggctgcaccagcaacatcagctgcgggcggagcccgagctcggagctcgggccctctaggggagggagctgccgccgccgacgccgtgggggaggagcagcgtgagccgcgccgccgccgagctgcgatgtggccggccggccggcgagtaaacagagggagcagcagcggccgcggccgccgcgggccggggcagtgagtccaccc

SEQ ID NO: 29240 - DNA, 359 bp, Homo sapiens
  source 1..359: mol_type = other DNA
atgcattggcttaattcggccaaaatacacctcattatgggtctcatcatccacctagacatgattcttttttgggagaaggtgatagaataatgtccccctcccatatgttaacttacatagcaaaaatgacttttcagttatgattaaattgatttaagctcagtgtcacttctgacctccagaactgtaataaaataaaactgttaaatcactaaatttgtggtcattctttgaaaaatatgtagaaagtttgtcgtgtgctttaaaatttaaaaaatagggctggtattactaaccctggagtcagcgctagcaaacagggcttcaagggctggaagccaggtctccagactccc

SEQ ID NO: 29241 - DNA, 547 bp, Homo sapiens
  source 1..547: mol_type = other DNA
tgatttaagctcagtgtcacttctgacctccagaactgtaataaaataaaactgttaaatcactaaatttgtggtcattctttgaaaaatatgtagaaagtttgtcgtgtgctttaaaatttaaaaaatagggctggtattactaaccctggagtcagcgctagcaaacagggcttcaagggctggaagccaggtctccagactcccaggccaaggcactctgtcctggtgtccagcagggcacagcccctagcacctccgaggccccgcaagtgtgctggcagcggcgacgccggctccgccacgcggagggaggaggcccaggcagcgcccggagtgggcgaccggacgcgggagctgcgggtgggccaggtgtccagccttgggagccgtaggagccgccagagccgccagagccgccggcgccccgccccgcctcctccggccgctctcgccggctcaggttacctgaggccggtgggcggggcggcccttcccgtctgcgccggcccccagcctccagggcggcggagccgggaagtgggag

SEQ ID NO: 29242 - DNA, 275 bp, Homo sapiens
  source 1..275: mol_type = other DNA
agcctcccaggttggagagattctctagcctcagcctcccaagtagctgggaatggtctcgatctcttgacctcgtgagccgcccgctggcttctttcacagtaaaagagtgaagccaggcagattggctccatcggtctaatcaagctgcacttgacgctccgcgggcctgctgcgcccccgccccctcaggcgaaaactcgcctctgcccaaggctgtgcggggcgtccgcccccgcacttcgctttgtctcagctggcagaggataaaagcc

SEQ ID NO: 29243 - DNA, 309 bp, Homo sapiens
  source 1..309: mol_type = other DNA
gaggaatatgtgggtgattcccagctggccgacggcttccctgaagctgctaacctcaaggacccggatctgcgaccccctgtggacagaggttgacccccgcgctcttgtttcagagttcgtgagagaccatgaggttaatgagatcttattttatttccacatgcgatcattgtactctatttggagagaatgaacagttaccgtccctctttgctaggtaggaagagaatgcagctgcagcccgctcccttatgagataggaaggcagagccacctcctctccttttctaaaaagcctaggcatct

SEQ ID NO: 29244 - DNA, 473 bp, Homo sapiens
  source 1..473: mol_type = other DNA
agcaggccgggtacatccctgccgcgcccatccggccagtggctccaggggccggcctggtgtgtctccagctgggcgcctaccgcctgccccagcgctagttctggcgttgcggggcatctccctcccagggctgagccggcagcgagcgctgcccaacttgcgccggtgggacccgctgctctgagtcactcttggaggcaaggaacccaggcggggctcccagggctctcgggctgtgtgtgtgggggggcttcacggatacccctcccaacctcatctcccccaagagggagagtcttaggcgtcccggaagaccctgcgcctcgaggtaccagcctctcctgggaggagtggggggccgctggtcagcggctggcagaggcactgttacaaaactgtctggttttttccccgccgccggccaatgaacagcgtggcggcacgtcacgtggtaccgttttatataacac

SEQ ID NO: 29245 - DNA, 577 bp, Homo sapiens
  source 1..577: mol_type = other DNA
cactgttacaaaactgtctggttttttccccgccgccggccaatgaacagcgtggcggcacgtcacgtggtaccgttttatataacactttgctgagacagcggcgcggggcggccggcatggagctcccggaggcgcggcagggtcagagctcggtggcatggcggcggtggctgccccgatttcgctgagcttgcccgctgaggtcagcagcgacaacttgggcccccacccaaaggtggctgcagagggccccgcacctctaccgacgcgggagccagagcaagagcagtctccggggacctcctgctcacgcaggcagacgccttggcgtcccgggggcgaatccgtgaagccctcgaggtgcagctctccgagcggcagcagctggtggctgagcagctggagcagctggtgcgctgcctggcggagaaagtcccgcaaggcgaggcgctggcgccggcgcccccggacgagggtagcactgcaagcggcaccgtggcggcggaagagacgggggccgccgcggctgcggcggccaccgaggtgtgggacgtgcctggaacgtgggcgggcc

SEQ ID NO: 29246 - DNA, 330 bp, Homo sapiens
  source 1..330: mol_type = other DNA
caggcctaggatctgactgccaagggtagcctgacagactcctttttcggagaacacccaaagttaactgggcgatcatcccacagcagggcgctcgcacagagcccggcaatgccgaggccctcccaacgggtcggcagcgcgtgcgtcgcgctcagctataggatggcgcgagggctgggctggggcctcccaggtagaactgaggggggcaccgcgcggccgcgggggagcggcgccggactctagaggctttggagccttcgggggaggcggggcttggaggctccgcccctcaggccccgcctcctccccggctagtctttggcc

SEQ ID NO: 29247 - DNA, 374 bp, Homo sapiens
  source 1..374: mol_type = other DNA
ttaactctgttcaaaccggtctcctgtaaatgaataccgaaaaaattataatctctgttttataaagcaactgacacacagagaggttgagtgacttccccaaggtcccacagctggtaagctgcagagccaccacacagcctctgtcaatgaggacatacgtacttagggccgttttgaggattacatgagaacgtctgtaaagcccagtacttaaaccatcaaggctttttggttaggcaggaaaaaaaaatgtttcggagactatgcccatgatatccgcggcctcggaccccggaccctccaggccctcgcgccccacccccgaccagcctcgggccaggctagggcgtagacggggcttcccgtccctc

SEQ ID NO: 29248 - DNA, 286 bp, Homo sapiens
  source 1..286: mol_type = other DNA
aaaacaactcagtaattaagacaaatgatttttcatgtactattttaaaaaaatcagaagcaattgatgaacaaatgatcaacatttgaaataaattaaactttatttacaaaacctctggacccgccccttcctctcgccgggtcaggtgccgagggcgagcacgggcggcgcggagagcagtcccggcccgccctccacgactcctcagctgggccactcagcggctctgccgcccagcgcgccggggcccagaccccgccccggccccgcctccgacgcctgc

SEQ ID NO: 29249 - DNA, 575 bp, Homo sapiens
  source 1..575: mol_type = other DNA
taaaaatccagatttatattcccacacaaatttgcggtggaagtattcttgtacatgaatgttcataggcattatcaattgatgaatgaacaaaatgtgatatatccatatgatgaaatattattcaaccataatggccacatattgtaggattccatttatatgaaatgtccagaataggcaaatcatggttacacaactttgtgaatacactaaaaaacacccaattacacattttaaaagggtgaattttatgttacgtgaattatatcaactaaaaaataagatacctaaaaaattatgtactcatctggaatagtcattaaaatcacaatcatatttagaaacacacccaaatcagtatcatatatatatatatatatatataatataaactatataatgcatagtcctttatttagctggtcttatatatacatatgtgtatatatacatataaatgcatgcgttatagaaatgtaaagaatttatataatattaagggtgttgtgcttcattgagaagtgactcccaatagtcccagctaacttggccaagacaaagtaggttctggg

SEQ ID NO: 29250 - DNA, 285 bp, Homo sapiens
  source 1..285: mol_type = other DNA
ttattttgggttgacctttaaaaattatcctttaaaactgttattgcttttgcaggtccacggactcgcttggcttgttgaactaccaaggggcctccgaccccagtctccggtgtccgaaggggggggatggaccccgttccaccacgagctcctccagcgcccggggctccggcgtaccctacgcctctgcgctcgcggccccgccccgggcctcccgtggggctccccccgccccgtcttggtacggcctgtccggcgctcgacggcccccgtctacactgg

SEQ ID NO: 29251 - DNA, 329 bp, Homo sapiens
  source 1..329: mol_type = other DNA
tttccgcagtaagacagagcattttctgaagaaaaggcacctcggggagctgacccgcggcgcaagcgcactggcctcacaaccctccgcgcagtgcgtgggtctgcggatccgtggaggtgcggagcctgactcggcctccccggctcgcgcgtgagtgcggcggaagcccttctgctcctccacgagttagaggagtgacgcgagctcgtggcccgcttgctagctgcctagctcgcggtccgtagtcctgttggggggcgacttcctgtcgcgccgccgctgccccccctcccgccgccgccgctgccgcccctcccgccgccccc

SEQ ID NO: 29252 - DNA, 229 bp, Homo sapiens
  source 1..229: mol_type = other DNA
attagaaatacgtcattaaagagttacaacagagaaaacccactttctttttttttgagcacacagtaggtgcactcattgattaactgctttcgtgcttttgcacttaagttgatacgtgaaatacagacttgcaatgatcagaactgtgtaaacagtatctgtgttcgtacgtttccgcagtaagacagagcattttctgaagaaaaggcacctcggggagctgacc

SEQ ID NO: 29253 - DNA, 449 bp, Homo sapiens
  source 1..449: mol_type = other DNA
gggcgggacagagtgactggaggccgctccccgtcacccgccccagcccttcctctggtactagaaggggtgggtcagggcctgtgccacagctcagctcagttgccgggctgcagtgcggctccccccacgggccccactgtggagcggcaggtgccgcaggcctccccggtacctcggccgcagctgcgctcccgggccatggagggaggggtggggcatcgagactccagcggccaagccactgcagagctcggccgctggaggggggaggggcgggggctcccttccagccttcggggggcagaggacgtggtcaccgaggggagcccccgccccccttcgtagaagcctatgtccgccccctctccataccctactttcaaggggtgggcggtagagggggggttggagcagcggcgagggggcccctcccttgcacctccccc

SEQ ID NO: 29254 - DNA, 371 bp, Homo sapiens
  source 1..371: mol_type = other DNA
ggataaggagggcgggcgggcgcacccctgccttcggaagcgccttggggcgggacagagtgactggaggccgctccccgtcacccgccccagcccttcctctggtactagaaggggtgggtcagggcctgtgccacagctcagctcagttgccgggctgcagtgcggctccccccacgggccccactgtggagcggcaggtgccgcaggcctccccggtacctcggccgcagctgcgctcccgggccatggagggaggggtggggcatcgagactccagcggccaagccactgcagagctcggccgctggaggggggaggggcgggggctcccttccagccttcggggggcagaggacgtggtcaccgag

SEQ ID NO: 29255 - DNA, 283 bp, Homo sapiens
  source 1..283: mol_type = other DNA
agtagctgagattacaggtttttatgtttattttatttactcatcaaaaaggaaaggtttttgcttttaaatggggaaaagtcccaaacgcattaacaatgtcaggctggacttctagcagccaaggtaggcttcgagctccgacccggcgttccgagtccccggcgcccggaggtgacggtcgcttcccctgcagcagggtgcccctagcacactgccgggcccctgggggaacgcacttctgcgcgctttcccacggcgccacgggagcgcaccggaagcg

SEQ ID NO: 29256 - DNA, 415 bp, Homo sapiens
  source 1..415: mol_type = other DNA
gttattataaataatgtaaaattggccctttttaagtgaagatggtgatcgcaactaaatcaagttgggttttatttttattcctccttttgctaaaataaggtgatgaaaacaaatcttgtatattttagtcatattactcctttaaatatcagtatcaagctggagtgcagcggcgcgattattgtagtatttactaagtatctgtaaatcctaatcaatataaggaaaataaagttttttaaatgttaggctttttcttttagttgtaggaaaataaatgctaaagccatttcgacctggaaaactctgaagatgaaaggatttgcccgggccccgaggagtctcgcgagagcttggcaggacccaatggaacgtggggcccgacttatcacaaggagcttcccgggagccg

SEQ ID NO: 29257 - DNA, 206 bp, Homo sapiens
  source 1..206: mol_type = other DNA
agacttccaaaagaacaaaacgtttattttttaaatttaagaattatgggaaactgcagtgcacagctctcgcagaaatagctttgcagctgtctccgaagccgcagaagcgctcggatggggcccttcctcaccatcccggaagagattgcccatatctctgtgtccagctcatagacagcttgaacgggtggatttataaacca

SEQ ID NO: 29258 - DNA, 332 bp, Homo sapiens
  source 1..332: mol_type = other DNA
tttgcagctgtctccgaagccgcagaagcgctcggatggggcccttcctcaccatcccggaagagattgcccatatctctgtgtccagctcatagacagcttgaacgggtggatttataaaccaggtcgcaggccgggcgctttctgcgtccagcagcccctttccgcccaggctttttgaaaaggaaggtgcgagctccgaaacagccgtggctgcctgtcactccacgttgcgcgctccgccgggaaagaggactgcgagagcccgagcgcccgtctctcttgtgctccggagccgtacgtggcaccgccccgctcgcgggcggccgcgg

SEQ ID NO: 29259 - DNA, 283 bp, Homo sapiens
  source 1..283: mol_type = other DNA
cagcacaccaacatggcacatgtacatatacgtaacaaacctgcacgttgtgcacatgtaccctagaacttaaagtatatatatatatatatttaaaaatccagccatcacgtgacatcatgctgactaccacagtactcaggtctgtggcctttactgaaaggaaagcccctgattggtttgcaaccaatcagacgtttgctatcctaaccaatcatacggattgggaactgttgattgtgggctgcaacttcatgaacatggggtgaacaccaagtggcca

SEQ ID NO: 29260 - DNA, 446 bp, Homo sapiens
  source 1..446: mol_type = other DNA
cctaggccgggcgtgatggctcaggcctgtaatcccagcaccgcaggagcctgtaatcccagctacttgggaggctgaggcagcagaatcgaatttctatagtcccagctacctgggaggctgaggtgggctgtgccactgcatttcagcctgggtgacagtgagaccctgtctttaaataaataaataaatactgaactgtctctaaactggtaaattgagacctgtttcagatactttttggtttgcaaagcaatgaagtacacatggaagtcctaacctcagaatttggaaatgaaaagtaaaagctcagccaaagaagtcagctttgggtgtgagtttgggacagtactttctgtacctcagtctgttcaactgcaatatgcaaatactaatacctcataatgctattgtgaggagtaaatgacttcagacactgaaggctt

SEQ ID NO: 29261 - DNA, 321 bp, Homo sapiens
  source 1..321: mol_type = other DNA
agccaggatagccactgcactccagcctggatgaccactttttacctataatcctcttgagcccaggagttcaagaccacctgggcaacaaggtgaaaccctgtttccccgcatgcgcctgtaatcccagctattcaggaggctgacactgtactccatccaaacttaattgaagtttatcaggcgcttaacaaaatttgatttgcttgggattggaaagaatatatatagaattaactgtcttgtgaaatgtatactgtatattgtgtttgaaatatatacttcccttcaagtgttcaagttcaaggctgagaaagaact

SEQ ID NO: 29262 - DNA, 443 bp, Homo sapiens
  source 1..443: mol_type = other DNA
aatttctatagtcccagctacctgggaggctgaggtgggctgtgccactgcatttcagcctgggtgacagtgagaccctgtctttaaataaataaataaatactgaactgtctctaaactggtaaattgagacctgtttcagatactttttggtttgcaaagcaatgaagtacacatggaagtcctaacctcagaatttggaaatgaaaagtaaaagctcagccaaagaagtcagctttgggtgtgagtttgggacagtactttctgtacctcagtctgttcaactgcaatatgcaaatactaatacctcataatgctattgtgaggagtaaatgacttcagacactgaaggcttaacacagtgactggcatattagggatgcccaatacataccagctgtgaggtaagctcatcttcggctgaagagaagctaggtatagct

SEQ ID NO: 29263 - DNA, 321 bp, Homo sapiens
  source 1..321: mol_type = other DNA
gtgctggtgcgcacctgtagttccaggtactcgggaggctgaggcactcctgagtgtgcccaaggcaaggccaagcccctgaggcatgcgcggatacactgttactgaatctaggtacgatgctctaagcatcattgtgcatgattcattactaagaattaatagtggttttacatagtgcatttgcgcagcccacaagctttgcaaatccaggcccaagctcctgctcctggagacctaggaagcatggggctagtgcaaaatctcccttatcgccagcatgcctgtctacagcatccgggcaaggccaagcccctgacg

SEQ ID NO: 29264 - DNA, 147 bp, Homo sapiens
  source 1..147: mol_type = other DNA
aaagatattcagttcctgaagagagcatggcagctctgctttcagttttctgcttaattaatagcccgcgccctgtgcatgctgccaaatatgcgtcctatggtcaccgtgagatctctggggccccatgttgcatacatatatgcc

SEQ ID NO: 29265 - DNA, 321 bp, Homo sapiens; identical to SEQ ID NO: 29263
  source 1..321: mol_type = other DNA

SEQ ID NO: 29266 - DNA, 651 bp, Homo sapiens
  source 1..651: mol_type = other DNA
ggattttaaaaaattatgtaactcacaatgtattttttcggtcattaaacaatcactgaacacatactatgtggttatggaaatagtaataataaaaaattaaaatagtaacaataaaaaattaaaaatgcaagtgttaatattattaatctttcaagatacaggtcaaatgacagcattcaatttgtgtacaaatatttttgtccatgtttgtgtacctacctactgagctccctaaagaggtagagacctttggcatagtactgcaccatttagtattcaattaagaagatagttgtccaaacactaaatttctttcttaaaagtagttactgtaatgtagttgctctcttgttatcccagaacttgaattaccataagaagttgtgaatttctttgattatatttcaagatggtttatcatctagcaaacagtctaatagagcagattcaaatcaaaatatgaaacctgtatagtctctaaaagtttgtatgccctagaagttcacattgaatttcgatgaaaacgactcgcgcacggcgccgaagtggagccgcctcaagctcgggcccttccggaccaccccggcctgcgctcggaagaggagggcgcctttggcttcagcgcttcgcccccgcgctgtgccctct

SEQ ID NO: 29267 - DNA, 297 bp, Homo sapiens
  source 1..297: mol_type = other DNA
ctaatgaattccttaggttttccatttgctatagagaataatagttcttttcagtcgccatagcaagtgctatgatgataaaatgagatccttgttataaaagcacttgggtgcagagttatactttagctgaattttctagctgactaaagaacaggataattacccaagaccctgtccaactatagagaaggttggttggcttcatgccccaagggctccctgtctggggggtcttgcgcaagcgcacgcggctgcacggaccgccaatgctgctgcctcccagagcagagggag

SEQ ID NO: 29268 - DNA, 276 bp, Homo sapiens
  source 1..276: mol_type = other DNA
ccagaatgtcagtatctgcaacattctcagccacttgagtataatggcaaaaatgctatacaatattcttaactgtttctttcccggacttccttatgtccaagaccctctttggctggcttctaaaatcagaaagaataatccacattgggaatctttcctgacatcctagatccttttgcatgtctcaattgagaagaacatgacttaaggggtgagttgctcatcctcgtgacccagaatatctccctcccttgattcagggaattaccaggc

SEQ ID NO: 29269 - DNA, 164 bp, Homo sapiens
  source 1..164: mol_type = other DNA
tcattatcactgatcattaatcatgtcctttgcagggacatggatgaagctggaatcataagtccatggcacatgtatacctatgtaacaaagctgcacattctgcacagccagggcgtggtcgccccgcccaccggccgcgccgctttcaagcgcggagattg

SEQ ID NO: 29270 - DNA, 303 bp, Homo sapiens
  source 1..303: mol_type = other DNA
cccccccactcaagtcctgcggacctgggggcttcgggcttccggtaagggcgctgcggcgcgaagcttcccgcgggaccgttagcgagcgtcgccccctcacgcgcgagctcccccgccccccgggcggctgcagcgcttcacaccgcccctccctcggcgccgcgtgaccggaaatggctgacaataacaagcagcctctcccctcccagggagagggagaaaaggaggaggagctgcagcctcacagactcgctgagtcgctcctggggagggggacggcacggccgtttacctgtctgc

SEQ ID NO: 29271 - DNA, 384 bp, Homo sapiens
  source 1..384: mol_type = other DNA
ggtgtatgctttatgcataaaacattaggccacctccaaactgtttaatatattaacataaatagagcacgtgtcaaatccttattaggtgattatggattttggccttggttacctttaaagttcttgatcactaacttcttagcagagccaggtttgctgttagccacagaagagattaatatactcttatttttaagttgctgctgctgagatgttgcagcagttggaggaggaggaggaggaggattcctcagccatcttcgcatgtatcggcgtggctggaagcagccactaggtggaatcaaagtcttctttaccatcagtggcagatctgacctcctgagcagcagcagcagctgagggaaacctacgtttatatgc

SEQ ID NO: 29272 - DNA, 494 bp, Homo sapiens
  source 1..494: mol_type = other DNA
ctcaattttcctcttaagattattcagcaaaataaatatatagaatcccatcatttccatttttttccttttattattaaatagctcccttttattttccaatatttgttataaaaatgttcaaacatgcagaaaagtttaaagaatttttacaatgaacctagattttaaaattaacattcttttgttatattccaataattttctcttattctagtaataacagaactagacattatgtgtgcatatatatatcgagaaaattttagatagctaatctagcggaacaggagcctagacttcggctcttagaaggacgtggagaatccccatggcctccccatgagggtgacgtcagcactacccaattgtgaagacattcagtttagaaactgccagtcttggtatagaacaacctaggcttatctgtttaagtcccataggtagtattattagagaataacccaggctttgggaactgtataactctgaga

SEQ ID NO: 29273 - DNA, 452 bp, Homo sapiens
  source 1..452: mol_type = other DNA
caaaggtaaagaagtaattttctcttttccttggatattgaccatgtaagagtcttaccaataaactcaattttcctcttaagattattcaagcaaaataaatatatagaatcccatcatttccatttttttccttttattattaaatagctcccttttattttccaatatttgttataaaaatgttcaaacatgcagaaaagtttaaagaatttttacaatgaacctagattttaaaattaacattcttttgttatattccaataattttctcttattctagtaataacagaactagacattatgtgtgcatatatatatcgagaaaattttagatagctaatctagcggaacaggagcctagacttcggctcttagaaggacgtggagaatccccatggcctccccatgagggtgacgtcagcactacccaattgtgaagacattcagtt

SEQ ID NO: 29274 - DNA, 438 bp, Homo sapiens
  source 1..438: mol_type = other DNA
atcagattaccttctgtaataattctatgggaattattccccagcactttgggatgccaaggtggtctctacaataataataataataataaaaataaaaaaattgcaccaccgcattcaagcctgggcaagagtgaggccctctcaattaaattcagctaaacaagcgctgtatatttttagtgtaagtatatccaaaatattaatgaggtatacttacactaaaacaaatattcattgtttacctgaaatgcaaatttaaataggcatcctgtattttcatttcactttaacatgaagccatgagggttgcctggattcatgctggtaggtaagcaccaatccattcggttgcctcagacaggacagaaacttccctctaaaaaaatcgtttactttgacataaagctgaggaaccggttgcctaaaagagcgcgg

SEQ ID NO: 29275 - DNA, 419 bp, Homo sapiens
  source 1..419: mol_type = other DNA
tgcaccattgcactagttctaatattcattaattccactaatatttgaataataacagccagtactttttagtaaatgcttacttgcactatctcatctaattttctatgaaataggcactactgtgacattttctgtactttacaagattggattccattccagtaataataggaaaccgttggtgtcataattacgagcccaggagtactggccgggagcaagaatctctcgctctcgcaatttccatgccaggaaggtgaaatgggaggtgtcagacgcacggcctcttctctggaaagggagcgcggggagaaagggcacgcagtgtgcgcgcagcgggcgcgccggcccttccgacgcctgcgcgggcgggcaaacggacggctccgcccagccgccggctcctttaccccgcc

SEQ ID NO: 29276 - DNA, 412 bp, Homo sapiens
  source 1..412: mol_type = other DNA
tgcaccattgcactagttctaatattcattaattccactaatatttgaataataacagccagtactttttagtaaatgcttacttgcactatctcatctaattttctatgaaataggcactactgtgacattttctgtactttacaagattggattccattccagtaataataggaaaccgttggtgtcataattacgagcccaggagtactggccgggagcaagaatctctcgctctcgcaatttccatgccaggaaggtgaaatgggaggtgtcagacgcacggcctcttctctggaaagggagcgcggggagaaagggcacgcagtgtgcgcgcagcgggcgcgccggcccttccgacgcctgcgcgggcgggcaaacggacggctccgcccagccgccggctccttta

SEQ ID NO: 29277 - DNA, 297 bp, Homo sapiens
  source 1..297: mol_type = other DNA
ctcttatgagatgacctggtccttttaaaaaaagtatctctttttttcccgtgatgacttaactacgttaactcagtgaccgccttgcagttcctggatcacaaggtcaggagatcgagaccatcctggccacctagccaggcgtggtggcatgtacctgtagtcccagctactcaatcactggggattgcagtgagccgagatcttgccactgcactccagcctgggcaaagctctggattctggattctcagttctagagcttaagggccttgatctagggctcactgagagccc

SEQ ID NO: 29278 - DNA, 297 bp, Homo sapiens; identical to SEQ ID NO: 29277
  source 1..297: mol_type = other DNA

SEQ ID NO: 29279 - DNA, 231 bp, Homo sapiens
  source 1..231: mol_type = other DNA
gaaatttgggagcctaggacaatttttctggctggcatgccttctacagtaactgtaaagtaaaagttaaagaggattctttttcctcattctctgaggtcatcagtcaggggcctaggctgctaagaggggagggacacgcctcccaaagctgcggggatgggggtgggggtcgccctcggatctctgctgtaaaagcggagcggcagagaccgggcatgcgcagcatct

SEQ ID NO: 29280 - DNA, 230 bp, Homo sapiens
  source 1..230: mol_type = other DNA
ctctgaggtcatcagtcaggggcctaggctgctaagaggggagggacacgcctcccaaagctgcggggatgggggtgggggtcgccctcggatctctgctgtaaaagcggagcggcagagaccgggcatgcgcagcatcttcgggccttgaaaggcaaacgccagcgcctaggctttgcagtccggggctgcagtttgcaatcatggcccaattggaagagcccaattca

SEQ ID NO: 29281 - DNA, 235 bp, Homo sapiens
  source 1..235: mol_type = other DNA
aggggagggacacgcctcccaaagctgcggggatgggggtgggggtcgccctcggatctctgctgtaaaagcggagcggcagagaccgggcatgcgcagcatcttcgggccttgaaaggcaaacgccagcgcctaggctttgcagtccggggctgcagtttgcaatcatggcccaattggaagagcccaattcactctctctctctctctctatcatagggacagaaatcgcttt

SEQ ID NO: 29282 - DNA, 235 bp, Homo sapiens; identical to SEQ ID NO: 29281
  source 1..235: mol_type = other DNA

SEQ ID NO: 29283 - DNA, 153 bp, Homo sapiens
  source 1..153: mol_type = other DNA
agaccgggcatgcgcagcatcttcgggccttgaaaggcaaacgccagcgcctaggctttgcagtccggggctgcagtttgcaatcatggcccaattggaagagcccaattcactctctctctctctctctatcatagggacagaaatcgcttt

SEQ ID NO: 29284 - DNA, 346 bp, Homo sapiens
  source 1..346: mol_type = other DNA
tttacatcctaattatgttgctgggattacaacaggccggctaatacatcttttaaatctgcaattaatgaatttgtttatgatttactggataaagaaatacttccttttttcgagaaggagtcttgctcttgactgcaacctggttcaagtgattctcttgcctcagcctccagagtagctgggattacaggcaccatgttgaccaggctggtctcgaagtatttttgaagttagtaagaaaccctttatgatatattttatcatatatcaaaggatatattttatgattatttgtgttaaaatcccatgtttttattcttaagcaacaaagctgttaaagaaa

SEQ ID NO: 29285 - DNA, 664 bp, Homo sapiens
  source 1..664: mol_type = other DNA
ggatcataatttttctttaaaagtgacaaacattgtttccttaggaatgtggaaactatccaggattccttaccatattacaggctgatcaattagactatgaaaattttcgacatgttgtacataaatggcaccaaggtaaaaaaaaaattggatttttcaaaggcaaatttttctctgtatacttgtgcttttataatccatcaggaatatcttgattgtgctaacaaaaatacttccttggtacccaaaagtttttctatggggtaacaaaattatattttaatgtgatttacaagactagatgacagaaggattctgaagactttaaaatgttttacagtgttgaagtttatcttctgccttcaggagattatgggagattatgcgatatagtttttttaaagtcatgtataatatttcttgattgggaggaaatataattttatcatcatagttaacagatcttcaagagtaaaaaaaaaaagccatcttagtttaaggattagtttatagtgaaattgtaatttttaagaaagctgggcgttctataaaaaccttcaagaacttattaaaaattggtattttttaattctctagaaccacatagtagaatgaataacttgctaattttattcttaaaaacctcatgtttatgtttttt

SEQ ID NO: 29286 - DNA, 229 bp, Homo sapiens
  source 1..229: mol_type = other DNA
agagaaggctttgtactacgagttttaagaaaattctttcctctcctccctccaagttcagaggatcatatcttgtatcacttgatttcatttgaaatgaaatattcagaatccatcatgacaatcctacaacgcatttgaaataaatccagggtatgaccagcattttatgtacacagataaacacagggttgtcaacattacaacaaagagttatatgctcactgcg

SEQ ID NO: 29287 - DNA, 337 bp, Homo sapiens
  source 1..337: mol_type = other DNA
atcttgtatcacttgatttcatttgaaatgaaatattcagaatccatcatgacaatcctacaacgcatttgaaataaatccagggtatgaccagcattttatgtacacagataaacacagggttgtcaacattacaacaaagagttatatgctcactgcgcatgtgcgcgcgactgcccccatccggttcggggaggtggcgggaccttggcggcgcccggagccggcgtggcgctcatcgagggacgcccggcccggcaggaggctgacctcccggccgggggtgggagggacacgccggggcccagtggcgcagcccgggctgggagactgacgg

SEQ ID NO: 29288 - DNA, 361 bp, Homo sapiens
  source 1..361: mol_type = other DNA
taaatccagggtatgaccagcattttatgtacacagataaacacagggttgtcaacattacaacaaagagttatatgctcactgcgcatgtgcgcgcgactgcccccatccggttcggggaggtggcgggaccttggcggcgcccggagccggcgtggcgctcatcgagggacgcccggcccggcaggaggctgacctcccggccgggggtgggagggacacgccggggcccagtggcgcagcccgggctgggagactgacggaccgcgcccggtgtctctttgaggccctgacgtggacacatctccaggggatgggccggccggcgcgtgagggagacgaagggacttccgtttccttc

SEQ ID NO: 29289 - DNA, 576 bp, Homo sapiens
  source 1..576: mol_type = other DNA
ggatgcgcgggggaggcggggtaggtccccctccactccttttcccccgccccgagagtggcgaacaaattggtcgaccggcctagcctagtagtccagttctttaggactcctagaacctggagaacagaccacgttttctcggagacagtgggctgtaaagcaaaacaatttttctttcttttccagggctaggtcttactggtagagaatcagctcgctctctctgggccacaggcccctcacaggggtgtgtgggctgccaccttagcgcctcgcgaggggcggaggggcccggggaacgagtcccggagcgaacccagccagcctctggattcccacggccgctcgatcgggtccgcggcggaagcgcggccaaacgaatgagtaagtcaggcgcgggcacggcattaccccactcggcggcgcgcccctgcgggcgcctggtttgcgggcggcgtcggagacgctgaacccgggagtcagtcggccaggagccaggcgttgcagtggcaactctctgccgctagatgccgctccctcccaacgggagccgggcgcgggttcgtggccgac

SEQ ID NO: 29290 - DNA, 362 bp, Homo sapiens
  source 1..362: mol_type = other DNA
ccactcggcggcgcgcccctgcgggcgcctggtttgcgggcggcgtcggagacgctgaacccgggagtcagtcggccaggagccaggcgttgcagtggcaactctctgccgctagatgccgctccctcccaacgggagccgggcgcgggttcgtggccgacagatggcgcctgcgcgttccattcgcctccccagcccagtttgaggggcacccggagggcgcttggcccacaagaggttgggcactctgttgccattgaatttcccctctgctttcttcgcccccatggggggcagccatggaacggggggcagagtccaggcgggaggatctttctcgcccccgcggcgccccgggcctc

SEQ ID NO: 29291 - DNA, 471 bp, Homo sapiens
  source 1..471: mol_type = other DNA
tataatagacgacatagcttcagttatttaaattcaaattttaaaagtactttacataatctaaaggtacatgtacaagaccattcagcttcagcaataaataaagtcttactctagtgaaaatgcaggaagctttgcggaaatattacctagcacattttgaaatagaagcaatgttttatttcagagaagaaaatgaaggttgaaaggttttaaaatattaaagacagtttagcctcaatcgaagaaataacattttctagaattatcaacaacttgcaaatgattcaaaacagatacatctggaacatctttggatgtactggccatgttcagtaatgattgcatactgacagtactgataaaactatcagtgttttgttctcccctacgtagtgggtccacatacttgcctctatcatcaactccttatgggctagttgagctaagttattcctggtggcctctgag

SEQ ID NO: 29292 - DNA, 251 bp, Homo sapiens
  source 1..251: mol_type = other DNA
ccagcccagtttgaggggcacccggagggcgcttggcccacaagaggttgggcactctgttgccattgaatttcccctctgctttcttcgcccccatggggggcagccatggaacggggggcagagtccaggcgggaggatctttctcgcccccgcggcgccccgggcctctacggagaccccccccccccatgggtggccggagcagcgcaagatggaggctccgcttctctgtgccgagggaggcctcc

SEQ ID NO: 29293 - DNA, 395 bp, Homo sapiens
  source 1..395: mol_type = other DNA
aatgttttatttcagagaagaaaatgaaggttgaaaggttttaaaatattaaagacagtttagcctcaatcgaagaaataacattttctagaattatcaacaacttgcaaatgattcaaaacagatacatctggaacatctttggatgtactggccatgttcagtaatgattgcatactgacagtactgataaaactatcagtgttttgttctcccctacgtagtgggtccacatacttgcctctatcatcaactccttatgggctagttgagctaagttattcctggtggcctctgagtaaaccgcaagaacagtgttggcagtacagccatggcaagctcgatcgaaccaagctactaaattgctgagctcgttttgtagacaacatcctgtt

SEQ ID NO: 29294 - DNA, 464 bp, Homo sapiens
  source 1..464: mol_type = other DNA
tgtaaagaatgaaaataagaacatttttacagggcttttaaatttacagaggactttgacatctcagatgacacttgaagtagagcagttaatgcctctactggccctaagaccatgaagtttaaaattgctatttccaaaactgatttagatcctgctgttgctgtaccagtatactcaccagaagtgtttacatcctctcagtactatgtgagcctgtcttaaatgtaatattaaaccagaagcaagaatgtgttctttctgaatgtttaccagttttcatttcaaatgtggaatgtgcagggttaatctttgtactcctcaccactttcaaatctgataacgttttttaatctaaccactgattttaacattaaaaaaacgttgtcctctatttgaattccaatacaaatatttttgaagaaaagataaatctaagaaggcttgtgtttttcccttaagga

SEQ ID NO: 29295 - DNA, 742 bp, Homo sapiens
  source 1..742: mol_type = other DNA
ttagtgaactatagttaaatgtaaaactacagtgaatggattatagtctttctttgaatagcagggtcatcattagcaataattattagagtattggctgaatccccagtcaatagatatttcttgatgacagaatgccagaacactgagggttgactgtaattcatagaaagggtcagagttagttacttcggacatttttaacctttgatatttgaaacaaacaccaaagaaataccaattcttgtttagcaaagcttctccagcactcctacaatgttggcagagtgggaagacctattagaggaattttatatataaggacatgaatactacaattaataggaaattccaaattcttattctattcaatagtgttaatcacacagctaccagtgatataacactgattctatccaaggctgaggaggagagagaatttatcattgttagcttctatctagaaatgagctcaattctcttcacttaatgttaaatccacagaagccattccataaagatttaggccaattctgtctctgccctgaaggtcaaagaaatcagtgattgctggaattcgaagatatcttccttaatggtctactatgggacctaaaagttcaaaactaaaaattaatacctttagacaaactgaatttccagatgacctctgtaaaaaattaacttgttctgggagcgtcccaattagtcattaatcattaatcatcttgaataaagtgtt

SEQ ID NO: 29296 - DNA, 473 bp, Homo sapiens
  source 1..473: mol_type = other DNA
tgggctcccactttggcggcacctgaggagcccttcagcccgccgctgcactgtgggggccccttcctgggctggccgaggccagagccggctccctcagcttcgggaacccgggctgccagcagtgcttgcgggccagaacgagttccgggtgggtgtgggctcagctgccccacactcggagtggccggccgggcaatgaagggcttagcacctgggccagtggctgcggagggtgtgctgggtcccccacagtgccggcccaccggtgctgcgcctgccttccagcggggcagggctcgggacctgcagcccgccatgcctgagccccgtgggctcctgtgcagcccgagtctccccgggcgcaccacgggactggcaggcagctccacctgcagccccagtacgagatccactgggtgaagccagctgaccctgtgtctagctcagggtttgtgaagaccactgggctc

SEQ ID NO: 29297 - DNA, 306 bp, Homo sapiens
  source 1..306: mol_type = other DNA
gggagcccaggaacctgggcggccaggcagggcaggatcccttagacgtcgtatgcgccgccagtaggctgcatgtggccggccggccttggcgctctggggtcacactgtcagcaggacgcagctcaccgacagacgcacgagagcttgtgggtcaaagttatactggcaaaagacttcgcattctaagtcagtcctgaggcttctcctgtgtgtgcgctcgtgtgcgcgcgcgtgtgtgtgcacgcgtaggaaatctaaattttgttgatccatgggcatgctcgtagcggagaaacatttttt

SEQ ID NO: 29298 - DNA, 435 bp, Homo sapiens
  source 1..435: mol_type = other DNA
gatccatgaaatccactccaagaatctattctaaggaaattctcatacaagtgaaatatataatgaaaagagaatgaattcaagaatatttatcatagcatcatttgtaatagaaaataattggttaaataaaattatagtacatcaaaatagtggactaccatgcagccattttaaaccaatatatcacctcgctatattttttagcagaaaaaacaagtaagaccagcctggatcccagctactcgggatgcaggagaatcgcttgaacgaggttgcagtgaaccgagatcgtgccattgcactccattttgaactgtagaataggctttatttacaatagcatttgctgatagcccgtggaataaactgtacttcacacaatttcgagagagagagtgatatggtttgactgtggccccaccgaaatctcaa

SEQ ID NO: 29299 - DNA, 207 bp, Homo sapiens
  source 1..207: mol_type = other DNA
cagaacctctaaacttgcattagaccctgtcccaaggtcccagggactctgcttgggcgctcaggagtggggaagaggtccccctctcaggatcccttagggctctgaggctcaaaggactgatatcaccatgggccaaatgtgggtcccagggatttaaaaaatatttgtttgaaactgtttaagacatcaacacaccaagtgcac

SEQ ID NO: 29300 - DNA, 417 bp, Homo sapiens
  source 1..417: mol_type = other DNA
ataaacatcagtttcatttatgttgctgcaaatgacatttcattcttcattcacctgctgatggacactgattgattctgtatcacgaaatgattttatatccatgatcattcatattatgtgttgtattattaccaaataataatggaggtgcaaaaaatcacagtaattcatttcaattgctaataggaatttaaaaatgcagtggtgaagtcagactttgccttgtaagtgaatgtgtttgcagctgcaatcaagagattcaaggacctacctctttagatccgggaaagggcagtcccagaggggttccgcgctttgcctgcacgcatctgcgagccgcgagttgtgggttcccgcctccctgtccgcgccccacactcaggcaacagttggtcgtgcggggccggcccgggc

SEQ ID NO: 29301 - DNA, 364 bp, Homo sapiens
  source 1..364: mol_type = other DNA
caagcacttgccacctgaactcctgggctcaagtgatcctaccattaacttgtttatattgtcttaaagtacatacattttgaaatttcatgtagctaaatgtcttattcaatttttttttctgaaagttataaagttttgcttttcacatttagatctttataattttccatatggataagcagtagtcctagtaccacttagtggataatcatatcaacctgcatacttttaattactacagatttacagtcactcttgatatctagtgtattatagattctggagcaaatgaataacacgatcgaaaaattactttgggaaaaatatttttatggctgtcaacaccacgtaaaatatatat

SEQ ID NO: 29302 - DNA, 558 bp, Homo sapiens
  source 1..558: mol_type = other DNA
tgcagtgagccaagatcgcaccactgcactccagcctgagtgacagagtgagactctgtctcggagatgctcttgtcagcttttgcttgtaatagccaaatgctggaaaccaccatagtcacacaatagaatattgtacatcaatgaaagggcatctatatacgaccacatgcatgacatactatttgccattcatataaagttcaaaagcaggcaaaagttttaatgactgcattcataagcaataaaaataatggttatgtccagggatgaccttcaaaaattttaatgaccacttgttttgggtgcctggcccagaagcgaattgtttgcactttcaaagtgctaacaatgttcaattttttaacctgggtagaggttacatagacattcactttataattatttctcaaactgtacatacacattttatgctagaaaaatataaagaagtactttataaatgtttttttcaaaacgtgactataaagaatgatcagagctcatcatgtgcttgttcattctgtaacaatattgtacaaaacagaccttgaaaag

SEQ ID NO: 29303 - DNA, 307 bp, Homo sapiens
  source 1..307: mol_type = other DNA
catatcaacctgcatacttttaattactacagatttacagtcactcttgatatctagtgtattatagattctggagcaaatgaataacacgatcgaaaaattactttgggaaaaatatttttatggctgtcaacaccacgtaaaatatatatttataaccttaagaaatatatatatatatatatatgtatttttttactgaatgagtggccttcaaagtcctcagaacaattttgatgtcacaggtggcatttaaattccgcagtttgaccgcaggggacggcggcgaaactggcgggggcgcgag

SEQ ID NO: 29304 - DNA, 297 bp, Homo sapiens
  source 1..297: mol_type = other DNA
tgggaggacccgcttctaaggagctgtcccatgtcctaatcaagccttgggcacaagcctaccaaacccttgaagctggccagcggcaagggcaaggaccaggactgagtccgcccaggtttcctgacagctgttctctggcccccggccaggcgggcattgtccggggggggcaccctctcgcgctcacgctcgggctggggctgcagagtgcgtgcctggaggggggcggtgcgggaggctcgctccctctccctcttcctgccgaccacatgaccaagtgggctcgcggccaag

SEQ ID NO: 29305 - DNA, 127 bp, Homo sapiens
  source 1..127: mol_type = other DNA
cttgaagctgccctctgattcagctgggcgtgaagacaaggcaggcctacgagtgactcacactaaccctccagatagggggagtggctctaacagttcccaaggggtacagtgggacttttccagt

SEQ ID NO: 29306 - DNA, 90 bp, Homo sapiens
  source 1..90: mol_type = other DNA
aaccctccagatagggggagtggctctaacagttcccaaggggtacagtgggacttttccagtgtccgcctcgggcagcccaaagctcct

SEQ ID NO: 29307 - DNA, 215 bp, Homo sapiens
  source 1..215: mol_type = other DNA
ttttgtaataccaagaagttattaaagttattaaaatctaaattgaatatactgcataggtgtttgataaatgtgcagctgtaaggatcaactgtagaggtgattaccatagtgacaatggctaggcagcggggatggctgcaggcctgatggctgccaacaggcagccagatggtccaacttctggtttctgctgctgctgccgggtgtccatg

SEQ ID NO: 29308 - DNA, 493 bp, Homo sapiens
  source 1..493: mol_type = other DNA
aaagagtaaaatctcaagttgcggttgattttaaaatgcaagcagcacccggatcgtgtgtgtgcgcgcgcgtgtgtgtgtgtgcgcgcgcgcgcgcgtgtgtgtaggctgggggcggccggggcggaggcgccgaggccgatcggccaatagccagtggtgggcggttgccacagctggtttagggccccgaccactggggccccttgtcaggaggagacagcctcccggcccggggaggacaagtcgctgccaccttggctgccgggacggtccgtttcctgccgtcagctgccggggctgcagggtgggctgcctccccttccgcggcgcctggaggcggggacgtcggcaccgcccttctcaactcggcagccgccgagcccctggcccggggtgactacacgtggcggtggcgcgcgtcccaacctgcctggggcggtggtccgcggcgtggcggagtcagggcgggcctcgagaggccgcgcccgcg

SEQ ID NO: 29309 - DNA, 264 bp, Homo sapiens
  source 1..264: mol_type = other DNA
tcggatcagtagcagtgctttccaaaccgaataaaaatttacaacctttttggcaatcttttgtcctcagtggagtttctttaactccattaatgtcaattagaagccgataaagagtaaaatctcaagttgcggttgattttaaaatgcaagcagcacccggatcgtgtgtgtgcgcgcgcgtgtgtgtgtgtgcgcgcgcgcgcgcgtgtgtgtaggctgggggcggccggggcggaggcgccgaggccgatcggccaatag

SEQ ID NO: 29310 - DNA, 273 bp, Homo sapiens
  source 1..273: mol_type = other DNA
agacctagtgtcttttaaagtcaccctatagtataatactgtggttcagttcagcctccctggtagctgggactacaggcgagtccaggctggtcttgaactcctgacctcaggtgatcggatcagtagcagtgctttccaaaccgaataaaaatttacaacctttttggcaatcttttgtcctcagtggagtttctttaactccattaatgtcaattagaagccgataaagagtaaaatctcaagttgcggttgattttaaaatgcaagcag

SEQ ID NO: 29311 - DNA, 487 bp, Homo sapiens
  source 1..487: mol_type = other DNA
tgtctattatttttctacaatcattaattaatatatatatatattaggccgggcttctagaccagcctggccaacgtgctagcgactcgggaggcttgcagtgagctgagatcacgccattgcactcctctcaaaaataaataaataaaattcttaaaagttgatgggagaaaaaaagttgtttaaaaaaatttttttaagttgagataaaaaaaatcttttgactcaggaaaggcgatttttccttaaatggaaggaaaccccgagctggcttgtggtcggcttgcaggacgccgtcgcacaagctttccttctggattctgcagtgacgaatgaaggcgcgggctcagcccctgagagcgcagcaccgtcgccctaagcccaccttgggccacgtggaaaccaggggccaggatctctcacgcctcgtacggaacggaagtgacgtgtacgtcgcgagcgatcggaaacagaaattgctttgcgg

SEQ ID NO: 29312 - DNA, 646 bp, Homo sapiens
  source 1..646: mol_type = other DNA
gcaggagcgaaatctttcgctctccgacccgaacggcgcgttgctcgaccccccccttcctggagccaggggctggccgaggaaggtggctccgttcttcccccgtggccagtgcggggtctgcggctgcccggcgaggttccggcttccccgggactggcagggggagccccgagaactgcaggcccgcccccccttcgcttcgcccgcttccccggcggcgtggagaagagcacgacagcggccgggggctctgcccaggcgggggcggggggaggataaagaaacttgcttcccgcggcccccaccccgcgtgggttccgatcttgcgtggaacgagcccgcgtggcgagtcgcggcaacactgccgggaccgaggccggcacctggacccggacccggaccgcgcgcttgggccggctcggcgggcgcaggcagcgggccaggccagcacccaggcaagggcggggtgggtggccgtacaccggaccgaatcggggactccggtggcgtgggcgcgggccgaaccccgaccgggccgagttgggtgggggaaaccaggcctggccagactggcctgggcgtgggggctctggaccgagcggtagggcggggcggcgctaggggctgggccggacccgcatgg

SEQ ID NO: 29313 - DNA, 497 bp, Homo sapiens
  source 1..497: mol_type = other DNA
gctgctagctgctagctgcccttcagtcccagggatggcctgggatgtaaagccgagtcctctagagcccaggtggtgttacccactgagggtggcccgccaccaagggtgggccgccctggagacgagaggcaaggcggcgagccctggcacccagcacctgtcccacttcggcgccggggctggggctgcgcccgcgggcggcctcggagcttgagcgccagaaccacgcactgaggtcgcccagggtggggggaggggcggggcatccggcggggaggtctcccccaccgcatgcgcaggagcgaaatctttcgctctccgacccgaacggcgcgttgctcgaccccccccttcctggagccaggggctggccgaggaaggtggctccgttcttcccccgtggccagtgcggggtctgcggctgcccggcgaggttccggcttccccgggactggcagggggagccccgagaactgcaggcccgcccccccttc

SEQ ID NO: 29314 - DNA, 346 bp, Homo sapiens
  source 1..346: mol_type = other DNA
tggccttgggaggcttcacaaacctggggcaagggctgcagtttcccaggcgcctcctacggccagccctgagagcggtcatcagggaggtcaccgtggtccccctccctttccttccgggccaggataaggtttgcccaccccggcactgccaagggagtgtcagtgcatggggcaggcctgggtgtgaccacccacaaccccgggcactgacagccctgaggagacgccatgtgacaccgtgagcgctgaggtgggctgcggcagacacagaagatttccggggcctgagccagccccagaggatggggaaggttccgcctgcccctcctccagtcggggctca

SEQ ID NO: 29315 - DNA, 614 bp, Homo sapiens
  source 1..614: mol_type = other DNA
gcctcacccgccgcacggcccgccctcccgctggggcctgcacaccccaggagctcatggagcgcagggcttggcccaaaggcgtcaagcaagtctccacttgcacgggccgagggtggacgaaaccttcccgagtccgcggggaagggatttctctgcgcagagtggggagcgcccgcccgggccgcggcgcacgacgcgggctctgcgggcgccctgcctcgtggtcccccgggcgcgagcgagccgcgaggggaatgagaggccgcgcgggcccctggcacggctccccatgccgtgctggcgaccgcggcgggcgggccggggcggacgggcgctgtttcctcgcgcccgccccatccgccgcctgcggggacgtgtcgccggttcgcgccccctccccgggcgcccctgccgccccgtgtcttggcccggccctccccggcgtccgccctcaggggcgccgcccttgccattggcggcgcgaagtgtgggagagccctgcgcctcgcccgcccggaccagcctgccccggcgccgaggtgagtcacgggcgcggggtgggcggggaggagggcgggggacggcggccccggcggccgcggggaccgacc

SEQ ID NO: 29316 - DNA, 696 bp, Homo sapiens
  source 1..696: mol_type = other DNA
aggcgctggcgtgaggggaccccgcacggtgcggctgctgaatcccctaggcggcggcccaggagggaacccaggctggcggctggctccctggccccagaagccccgggggcagtcggatccatctagcagctccgccgcggtccgccccacctcctctgccctcgggcgcccagcttctgggggcccgctgtcatgatcggccccgtcacggaacccaggctgccgggggcgagggaaaacaggggcccctaccccgactccccgactcggggaatccattccacttccatcccgggatcgggagcccgggttctccatcacacgcgcggcggggcgactccagggcggctcgcgacactccgcgactctcccgcccttccctgggcccccagccccacgccggggccccggcgctctcgacgtacctgaggccgagtggctcacgggcccagctcggtcgccgggccggggtctgtctccgtggtccccgctccgggggccgagacgcgggtccccagccccgccagcccgtcctctcccctcggaagccgggccgggcgagcggcgccaggaactcggcgccgtgagcgcggcgcccggtcggtccccgcggccgccggggccgccgtcccccgccctcctccccgcccaccccgcgcccgtgactcacctcggcgccggggcaggctggtc

SEQ ID NO: 29317 - DNA, 385 bp, Homo sapiens
  source 1..385: mol_type = other DNA
atccaagaggtaagtgctcaataaatacttgttaaatgaatatgtaagctgaatctttgaaacaggcacattgtatgttctgcatgcagccaaaacattatttccaatttagcttatatctggcagagtcaaagttctgcttagcagacttctcttcccagaaagtccgagaagcacgaacgctttttgccaggagactgtgtgtatctgtagcacctggtatacccggatctgggaagccaggttccgcgcctcggatcgcgaaaaccggctacctagagccagcgtctttgcgagcttgcggccagctagtgcatgcgcacctcgccgtgcggaccaatcgcaatgcggcagcgagtgctacgcctgcgcagtaggcctccgg

SEQ ID NO: 29318 - DNA, 480 bp, Homo sapiens
  source 1..480: mol_type = other DNA
ccccaggtgttacgcccaggaggcctcacccgccgcacggcccgccctcccgctggggcctgcacaccccaggagctcatggagcgcagggcttggcccaaaggcgtcaagcaagtctccacttgcacgggccgagggtggacgaaaccttcccgagtccgcggggaagggatttctctgcgcagagtggggagcgcccgcccgggccgcggcgcacgacgcgggctctgcgggcgccctgcctcgtggtcccccgggcgcgagcgagccgcgaggggaatgagaggccgcgcgggcccctggcacggctccccatgccgtgctggcgaccgcggcgggcgggccggggcggacgggcgctgtttcctcgcgcccgccccatccgccgcctgcggggacgtgtcgccggttcgcgccccctccccgggcgcccctgccgccccgtgtcttggcccggccctccccggcgtccgccctcag

SEQ ID NO: 29319 - DNA, 373 bp, Homo sapiens
  source 1..373: mol_type = other DNA
gggatccaagaggtaagtgctcaataaatacttgttaaatgaatatgtaagctgaatctttgaaacaggcacattgtatgttctgcatgcagccaaaacattatttccaatttagcttatatctggcagagtcaaagttctgcttagcagacttctcttcccagaaagtccgagaagcacgaacgctttttgccaggagactgtgtgtatctgtagcacctggtatacccggatctgggaagccaggttccgcgcctcggatcgcgaaaaccggctacctagagccagcgtctttgcgagcttgcggccagctagtgcatgcgcacctcgccgtgcggaccaatcgcaatgcggcagcgagtgctacgcctgc

SEQ ID NO: 29320 - DNA, 254 bp, Homo sapiens
  source 1..254: mol_type = other DNA
tgaagccttaaatggtacacatcctgtttggcgccgacagccagttgttctgggatccctagactcagggttcggagtctgccaatttggaagcacagggagcctaaggcgccaggccctcggacttgagccggttcctctgcctcgggcttcggacgcacacggtccgcaccaagggcaccagcctgcccggaggcctactgcgcaggcgtagcactcgctgccgcattgcgattggtccgcacggcgaggtg

SEQ ID NO: 29321 - DNA, 475 bp, Homo sapiens
  source 1..475: mol_type = other DNA
aaccctcctagggattcccaactccctctgaaactccagcgttctggattatgccattgtctcccgcggcgggccttccccattggccagccaacgactgcggcagccaataggagccgctctcctgaacattcagcctggtacgcgcccggacaacccactgcgtgtcttggcagcggcctcccaggctgcctggggcccgcgagtgcacctgctcactgagcatccctttatcccaaggcgcgggtcggtagcggggaccgggaaggcgcggctcagctgcccgctgctcccgaggtgaaagaggtgcctccgcccccaccccatccccgcagagttgcgcccgctgaccccgtgcgctcgagccagtgggggtggggaggggtggcgtgtgccgctgtttccctcgggtccgtcccgggaatgcaggcaggggagggtgtgggccgaggcgcggcggcggctggagcagcgc

SEQ ID NO: 29322 - DNA, 516 bp, Homo sapiens
  source 1..516: mol_type = other DNA
cgactgcggcagccaataggagccgctctcctgaacattcagcctggtacgcgcccggacaacccactgcgtgtcttggcagcggcctcccaggctgcctggggcccgcgagtgcacctgctcactgagcatccctttatcccaaggcgcgggtcggtagcggggaccgggaaggcgcggctcagctgcccgctgctcccgaggtgaaagaggtgcctccgcccccaccccatccccgcagagttgcgcccgctgaccccgtgcgctcgagccagtgggggtggggaggggtggcgtgtgccgctgtttccctcgggtccgtcccgggaatgcaggcaggggagggtgtgggccgaggcgcggcggcggctggagcagcgcggtagggtccttcgccagagcatccggtccgagggcgcacacaggcagaaggctcgcggctgaggggggcccggagtgagaggcacccccttcacgcgcgcgcgcgcacacggtgccggcgcacgcacacacggg

SEQ ID NO: 29323 - DNA, 421 bp, Homo sapiens
  source 1..421: mol_type = other DNA
agtgtttttcttgtaaatgtatttacaagttccagtgtagctgggattacagcgcggccagcccacggacggacggctggtacttacatgtgcacaagtgcagctactttacttactttctaagcaaacgctctacagagaaacatgaattctgggtgtacctactataggcatccatatggcaattatatgtttaaaacaaaaggtaaaaataactagtattttgagacgtgtttcaagtacagtatttccagaaaacaatatatttatatttttaactcgtgtctgacccagaattcatgtttctctgtagagcgtttgcttagaaagtagctgcacatgtgcacatgtaagtaccagccgtccgtccgtgggcggttaaaagccccggatgttcagggggtggagtcggcgtctaccc

SEQ ID NO: 29324 - DNA, 261 bp, Homo sapiens
  source 1..261: mol_type = other DNA
agggcagtggcgtgatctcagctcactgcaacctccagttcaagtgactctcctgcctcagcctcccgagtagctgggaccacaggtgccatgttggccaggctggtctcaaaactcctggcatcaagtgatgcgcccggaccctcaaattgagattacagactgagcgcgcagggcactacggggggcggtgacgaggcgacacctctttcccctctggggatgaaatggctgcgccgcggttgccgaagcaacgctttg

SEQ ID NO: 29325 - DNA, 391 bp, Homo sapiens
  source 1..391: mol_type = other DNA
catgtgcacaacgtgcaggtttgttacatatgtatacatgtgccatgttggcctacaaattattgaatatcttatgcaatttattgaacactgtattgaaagtgaaaaacagaatggctttttcatattgctagcctcggaaaatatcaaaattcaaaatttgaagtagtatttctattgaacgatgttgctttcgcactattgtgaagttgaaaaatcaattcaagccttacaggaacattaacttttccttgaagacggagtctcactctgtcacccaggctggagtgcagtggtgcgatctcggctcaccaagcaattcctcctgcctcagctgcctgagtagctgggactacagatgcgctgggattacctgcagtagccactgcgc

SEQ ID NO: 29326 - DNA, 463 bp, Homo sapiens
  source 1..463: mol_type = other DNA
atcttggccaggctggtcttgaactcccgacttcaggtgatccacccgtcttagcctcccaaagtgttgggatgacaggtacatactctagcatcgtatagtacatcatctgctcaattgttagctattaatttaacaatattaatttctgactggtctgttgcctatgtattgggataaggacaacagaagatttaccttttcacctatcttcctgccatgacagggggtccaagtgggactctgggctgagactaaagtcgccacatcaggctgcttgttccgtcagcaaatatttatagctaatctaaccggtcctgcaacagcccaggcttgtgcctttaccccatttgaggtaaccgcacgcagcgcggaaggctgctagtgcgcaggcgccacgccccggtacgccccggctcttccggcgcgaggtcaccgaatcgactggccactggcgccgggg

SEQ ID NO: 29327 - DNA, 414 bp, Homo sapiens
  source 1..414: mol_type = other DNA
aaccattttcctcaacctttaagtcacttggaagtgcttggaacatatttttactcaaaaggttaagtttcttaaagacacatatagttactcgtttgtacttaagttgctatctgttctaaattgttatttatagcagtttatgtcaaattccagggggaactataatttccaattagaaaaaaatatatacattcttccatacctttcaagtgattttaatgcaggtggttcacaaggaacacactttaacaattttaaaggactataactctcaattaaaattctaagcttaccaaagaataaacatcatcttttgaaaacaatttcaaatccgtctgaacgctggggagaagccatgggctcgggcctccggcttccccggtgaccagtagccaataggagacgccgcag

SEQ ID NO: 29328 - DNA, 369 bp, Homo sapiens
  source 1..369: mol_type = other DNA
ccatatcagtgccctgagcaaaagcattggcagtgcaactggggggcaccccacgtttttgatgatcaaccccctcagaggcaggagagcatctccctcttcgctgcggaattcgccagcatctctgagataacgctccgctaaatcagccgcaggggggctgggggacaaggaccttccctccctctcaagggctgagatggcgtctcccctcagactctgggctccctggggtaggggcagggtcccgccctcagaatcagctcctcccttcgcgtggggcaaggggctgcgggaccagcggcctctcttctggcaggagggggggttccccggaggccctgcccccttcgtgacggtgtccggtga

SEQ ID NO: 29329 - DNA, 646 bp, Homo sapiens
  source 1..646: mol_type = other DNA
tttacttatccaaataaaatcatatatatatatatatatatatatatatatatatatatatattgctagtgacaatgtaaacaaattttgagacatacaggcactttattaatctgaataataacatttgaaatattaacctatgcagttagtttttctaaattttataaaatgttttttttaaatacttgactctgctgaaattggagaatgaagaagaaagatatatcccttaaaatctcctaagatctctttacataattcaaatttagtggagaagagtagattgttcaatggattgatacaaattctaattttatgtaattacttttgaaacatgattttttttgtaaatattaacatgtttattaaaaaccaatgctaaataccacacataatattattcatggatactgtgtcatttcgccactgagactcagagaattcaactgactttcttaagatcacacagctaagaaatctagagggctttgaactcagttaattggctctaacactagtaaaagtatttgtctaaagatagtgtttctgcaaatgttttgaattctagactgaaactgagcagcaagagaggtctcttggcacctcttgaaatgtcaggcctgaagtattcaaatctcaagat

SEQ ID NO: 29330 - DNA, 365 bp, Homo sapiens
  source 1..365: mol_type = other DNA
gattagtgtcttattcatacattatcattataaaaagtctttcataatcaacatttgtgaaaggttgctctatattattaaaatcatgttactctaagacatattaatagtagtagtagtagtggtagcagcagcaaccactaccatttattgagcacctactacatgctaggcctattgtagagtttactcacttgcttgaggtcacacaactattgaatgtaaaatgtggactaaaatatacatttgtatgtctctcatctgtaaaactgaggggagtaacacttattttgcagagttgctctgggcccaggggcacagcaacctctgcggtgggctccccgagcccggcgcagggaggggct

SEQ ID NO: 29331 - DNA, 394 bp, Homo sapiens
  source 1..394: mol_type = other DNA
gttttggtacaaatgatttttttatgaaaaagtaatataatgaagttgtacaccagttaatgcaaatgctgttagcatttgggatgtttttcttcacatagttgcaatcaaaattaatacaattctgtgttttgtatttgttgttaaaaaactctttgtaaatataactttaatgattgcataatttttccatactgtggccattacaaaatttatataactaatatcattgctgttattaggatatcaaaacgctctaattaattaactaattaattaatggaaaatactatcttatttttgtttcaaagtgcttttgttaaaaaatgtttttgattttttttttcttttttagcaaaaacaaccagaggctgctctgcttgagggtgaagcc

SEQ ID NO: 29332 - DNA, 577 bp, Homo sapiens
  source 1..577: mol_type = other DNA
ctcgactattacttttttaaaaagtaattaaccctaatgaaattcctgttactattattaccagtgttactgtcgctactgttagagtactctcaaaagagcctgtctccctctcctggactgcagtgtatgtacacgtgcagaacttgtggtagagagaagccctagtttggccgttctgcaagggaaccttaagttgaagtcacctgaagcatgtgagtgtggccacagatctgcccagaggcgcgacccccagctgaggagacccttggccaggccggggagccaagccgaggctgcgtgtgccccagcctcgcacgcctccctgcaacgtggccgcatctggggcgccctcataccctcagggccaggtctccgggtccccgggttctcctctccgcgtgccgggagagtctccagcttctcagactccagcgctgcctggagccttggctcccgcgacaccgcccggctgcggggcgggggcagggccaacggcggaaccgcccccaaccgcctcccaggccaggcgagcaggcgggtggctggggcgcctccacctcctcttcctaaagcg

SEQ ID NO: 29333 - DNA, 608 bp, Homo sapiens
  source 1..608: mol_type = other DNA
tacacgtgcagaacttgtggtagagagaagccctagtttggccgttctgcaagggaaccttaagttgaagtcacctgaagcatgtgagtgtggccacagatctgcccagaggcgcgacccccagctgaggagacccttggccaggccggggagccaagccgaggctgcgtgtgccccagcctcgcacgcctccctgcaacgtggccgcatctggggcgccctcataccctcagggccaggtctccgggtccccgggttctcctctccgcgtgccgggagagtctccagcttctcagactccagcgctgcctggagccttggctcccgcgacaccgcccggctgcggggcgggggcagggccaacggcggaaccgcccccaaccgcctcccaggccaggcgagcaggcgggtggctggggcgcctccacctcctcttcctaaagcggcgaggcctgcgttcaggaagaggagcagcagcggaggcggctgcttcagcggcgggcgggcgcccccagggagctgcgccgctaacagcccacctcctagccccgggctacgcgccgccagggagggccgccgaactacccccggagggaggagccagtccg

SEQ ID NO: 29334 - DNA, 624 bp, Homo sapiens
  source 1..624: mol_type = other DNA
cagaggcccgttcccgaagccggagtcccgacccgaaaccgtccccggccggctcgctcgctcagcagggcgcggctccagcgccacccggctcgccccgaagaggtggatcccgtccagtctcggggaactggggcacctcagccagtgtgtcagggaacgttcgcctggagtccctgcggccgccgcggaaggcccccgcttctttccccgcggcgagcagcagcgctggggcagcggagagccagcgggtggccatggccttggcgtgacagagcctccccggcggccgggcgggtgcggacggcggggtaggggaggcggcggccggcgccgcaggttcggggcgggggtcagccgggtatgcgtccttctccccttcacaggccggacgacccccgcgggagccggggcccagaaacccgcccgggcagcggtaactggaacggagccctcaggcctgagccggctgggctgcgcgagcaggaagcggggtccctgggccccgcgggggaggagtgccgggcagccccgggctgcgggctcctccgacgtccgcctcgccgcagggtcccctgggggcacggggctgcagttcctataggaagggcattaccatccctt

SEQ ID NO: 29335 - DNA, 538 bp, Homo sapiens
  source 1..538: mol_type = other DNA
acaccagagttactacttgcttttgaatttcaaagactacataggatggcctttaaaacaaaattgttatacataatcaacgattaaaataaattagtctttaggcctaaaccgtttccaatcaaatctttcttggactttagtattcgctggtaaagtcaaggcggatctaccagacggtaaaagttctgtgtgtttgtcaggcacggctaagtaaaacgcactagcaaggagaataaactttctgggctgtttgatcgcaccggccagggagccgctcaagtcctagggccgggcggctggatgggacggtccgcggcagccgcgggcgggtaaggactgacgtctccagaggcccgttcccgaagccggagtcccgacccgaaaccgtccccggccggctcgctcgctcagcagggcgcggctccagcgccacccggctcgccccgaagaggtggatcccgtccagtctcggggaactggggcacctcagccagtgtgtcagggaacgttcgcctggagtccctgcggccgccgc

SEQ ID NO: 29336 - DNA, 459 bp, Homo sapiens
  source 1..459: mol_type = other DNA
tcatactcttgtgtattgtcagcctacaagagaggaatataaagtgacatttcttaatgctggactaaatgatctctaagagcctttatctttctatgatatgcccataaacatataaacttcgagcagtacaattttactatttctgaccttactaattcttaatctttgatcattccaatgaaagagtctgcattcttaatgaaaaaataaatttaggactgtgtctagcaattgcttaaatgttcacaattgtaatgtgaggaaaaagatatctatgcaaataatggctattcatctgcatgctgtttatagcgcttatgtgtgcatatagaaacatgtgctaagtagttatttcctacttttactcgaatttgagtattacctcatatactcaaaaatctgttctgtaaattcggagagggtatttaaatatactgtttatggatcaaaaattgc

SEQ ID NO: 29337 - DNA, 391 bp, Homo sapiens
  source 1..391: mol_type = other DNA
aagggagagggggaaccgtcgcctccgtccactgcaagtcccagccctgaagtaatggcattaggcaccggggccacctcgcgcagcgggcatgtgccgctgtcgctgccgctgcccctgctgctgccgctgagagcagggccccttagcctctgggtttgcgcaggctgccttcctcggacggaaataatgccttttaaacttcattttacaaaatagcaaataggaggaaaagtcatcctgcactttttaatttaaaggaacttcttgcatggcatataatcagcaaatgctttttaacaacgaatttccccattttcacgcgatatcgtactattaaaaagggaactttagtttttaacactcacacaataagcttttatggtaagaa

SEQ ID NO: 29338 - DNA, 534 bp, Homo sapiens
  source 1..534: mol_type = other DNA
attgatttcttgcctaaaattagtggagaattctatttggatcagtccatcagaattaaaaagtataattagcctgagaattcactccactttttgcactttgtgcagatacaggaaagcagccatgaattgctatgagcttgtcaccgttatcaactacaattgtcttcgtaaaattaaataaaagcacgcatttattattgtggggctccagaaacttgtaatttccctgtgcagatgcacactttttaatcaagatataaaattgcatttgctttgtccattttccaaagtatctggaaccttacctcagggttcctcttatcctgcaaactccgtggaagaaggggaacagactgatcagcatttccctgtctgaaattcttagaggtcatcgagcgtcccgctgtgaaccacactgcctttctcactggcacttcagttcctgaagaaaccctttcccttcctaatgaaatgacaaaggggctgctgggtttgggggcgaggcgccacaccccctgagaataaagcccg

SEQ ID NO: 29339 - DNA, 290 bp, Homo sapiens
  source 1..290: mol_type = other DNA
cctgtctccaggagggacatgcccccacccgtgccaacagcactgctcagaaacactgctgccaaccggtgccccttctgtagcagtgggccctgcattcctggtccagcagcagaaaagagccctggggatgtatccattcattcaacaaaccttttatgagtcaagccaagaagacagtctgtgctctaaaaaaggtcagattctcattctgtaaaagagagacggaaaagctccaatttgcgcctttgctattttccaagaaaagagaaaacccaggttctctgctt

SEQ ID NO: 29340 - DNA, 474 bp, Homo sapiens
  source 1..474: mol_type = other DNA
accatgaaattcgagagtcaagagtcccgggttctggatgggccccagttcccttaatagaaggaagggttgggccaggtgtttcacgagtacgagctcggagccccaaatgccttccccgcccagcccgggagctgcgcggataggagcgtccgcgggtgggcggatatcgcggcgggagggctccgcgcggcttttgcccataggcggcgggtcaggtggccgcgcgcaagaaggcctggggctcagacatgggcttcgggacaagtcccaggccgtcccgttccccagaacttgtggttggggggcggtgggctggctccccgcctccgaggaggaggggacgtgtcacgcgaaggagcgccgggcgcccggtgcggccccctaggaagtggatttggccgctccggatccaacccggcttccaggtttctcccggcccggcccgccgcccgcttggccaagtttgcggag

SEQ ID NO: 29341 - DNA, 583 bp, Homo sapiens
  source 1..583: mol_type = other DNA
cccagaatcaggtgctttctctgactttgtgtggctctactgaatcaaatctagcaagccacagaggctttcagacttttaagatgctgtgaaaagcccagcggtccctggcaaacggttcccgggaagctcgcggagggggacctaagtcagggacccccacctgcagccctccaggctgtaggcccttctcccggctgctgggaagcgcgcgctcgagcctgcagcccctctgcagtagttatgccagagcgccctgtgtagagcggctgcgagcgggcagctgggctcggctgccgggagccaccgcgcgggctccgcaccctccgcccggtccccgcgccgcggtgccccagtggcccccgccgcgctccacgccgcgcccccgcaccccgccggctaccggccgcaccccgccccctggccgcgcggctcgcctcgccccgccccgtccctcccccgccctgccccgcgccgccaagcggttcccgccctcgcccagcgcccaggtagctgcgaggaaacttttgcagcggctgggtagcagcagctcctcagggccactgccaggcttgccgagtcc

SEQ ID NO: 29342 - DNA, 487 bp, Homo sapiens
  source 1..487: mol_type = other DNA
cccagaatcaggtgctttctctgactttgtgtggctctactgaatcaaatctagcaagccacagaggctttcagacttttaagatgctgtgaaaagcccagcggtccctggcaaacggttcccgggaagctcgcggagggggacctaagtcagggacccccacctgcagccctccaggctgtaggcccttctcccggctgctgggaagcgcgcgctcgagcctgcagcccctctgcagtagttatgccagagcgccctgtgtagagcggctgcgagcgggcagctgggctcggctgccgggagccaccgcgcgggctccgcaccctccgcccggtccccgcgccgcggtgccccagtggcccccgccgcgctccacgccgcgcccccgcaccccgccggctaccggccgcaccccgccccctggccgcgcggctcgcctcgccccgccccgtccctcccccgccctgccccgcgccgccaagcggtt

SEQ ID NO: 29343 - DNA, 313 bp, Homo sapiens
  source 1..313: mol_type = other DNA
agtagctgggattacaggccatcttggccaggctggtcttgaactcatttctaatggtgaaataggatacctttcaaatagccttctactccatcccagaatcaggtgctttctctgactttgtgtggctctactgaatcaaatctagcaagccacagaggctttcagacttttaagatgctgtgaaaagcccagcggtccctggcaaacggttcccgggaagctcgcggagggggacctaagtcagggacccccacctgcagccctccaggctgtaggcccttctcccggctgctgggaagcgcgcgctcga

SEQ ID NO: 29344 - DNA, 402 bp, Homo sapiens
  source 1..402: mol_type = other DNA
acgaatactattatgatctccattttggacaggagatcaacccgtgtctggtttacatgtatagattataaagaaaatcaccctatcttttctgattgtgataatcccagcatttatggagagtctgttatatgccagggatgctaataacacgctttagctatttttatccccattttaaagaccaaaaaaaaaaaggtgaactggttacccagggcccctgtccaacggttgcccccaaacactcggcggagcggcggagcggagacgcgaacaggaggcggggcctgccgccttcagtccacatgcgctgtggctgtgcggcttcagctgccccctctctgcggccaatcagggcccgcggcgcgctcgggacggcgaggggggcgacgtaagggcgct

SEQ ID NO: 29345 - DNA, 297 bp, Homo sapiens
  source 1..297: mol_type = other DNA
tgagacagtcccagtttacatgttattctaacattttgtctaatttagcatttgtcccaaacttcattttctaacaaagtttaagtattaatagttgcatttaaatttatttttagagacagcgtctcgctctatcacccaagctagagtgcagtggtgcaatcactgtaacctagaattcctggcatggggtactagtttgtgagatgcatatacagagaaccaagttctcactttaacacagggttaaacctaaaagacaaccagtgataatcccaggtgggaagtgagaggagt

SEQ ID NO: 29346 - DNA, 462 bp, Homo sapiens
  source 1..462: mol_type = other DNA
gtactgtcctaagtgcatatatatatacatacacacacgcatacctacaaaatgatcctgtttatgtattgttaatatgctcattttatttttaaatttttatttatttttatttttaaagtgcagtggtgcgatctcagctcagtgccgggctaatatgctcattttagtgaggcaaaaatagaggctcagagtctgatttgtacaaaactacagagcagttaagtgtcctctcagatgtgtaccctgatactgttacaacctcacgcgatgactggaacccgaagagccggggcccggtttacggccgccatgaaggagcctcggcttcttctgccacggctacctagtgagcctgcaaactggtaggcgccggcgtaggcgcgcgggcggggccgggggcggggcctgcggggcgtggcggggcgggcagagggcggggcctgcttctcctcagcttca

SEQ ID NO: 29347 - DNA, 444 bp, Homo sapiens
  source 1..444: mol_type = other DNA
tggaatcctaaaattggaattttaacatagccttgatcaactttggaatgcctatggtattgcatcataattacacccctggtgttgcccaggactgattccattaggcctagagcatgaggagccctgagctctagtcctagctcataagtgaatcttggtttcttcagcagttgaaaagagactttcttacggctttaaaaataaaaatgcatgtttcatagcttggcatttaacaaagaattgtggatatgtaagtaatctaattttataattttctttaggtatgaaagggaccttaaatttatcatacattttccactacatttatttttaaatcaagtaatacatgagcatggtttaaaaagcgggcacctgtagtcccagctactcgggaggctgtgagtggagatcatgccactgcactccagcctgggtgacaga

SEQ ID NO: 29348 - DNA, 294 bp, Homo sapiens
  source 1..294: mol_type = other DNA
atttttgcttttgctctctacaacatatttaaatttttgaaaaaacaatgtgttttgaatggtggtttgctgcatcgatcaacccacacagtgtgagcctctcatttggcagtgggcttactgagtaaagacacaagactagcaagcactacaagtggccagctcactgcttcaaggtgacatggcttctaacacatgacagtaggtatcattcaatcactgatgattgactttcagagtgttgtttcgaaagcaccagagtaaaagtcagtatatagctctatttatataaag

SEQ ID NO: 29349 - DNA, 425 bp, Homo sapiens
  source 1..425: mol_type = other DNA
attgaaattttcccattggatcttaaaattagaaggtcctctggaggctctctggcatatgacactgatgttccatttatcatagtgataggaagctttttattacagtaaacttggcaagttgtatagtaaaggaaaggtgacttaatttaaatacatcttgagtaaatgatagtatgaatgatccatagccagatatggcccaatatctgaaatagaatagtcactcaataaaattctgttgaactaagtaactcctatcagaaatagaacagtcacttaataaaatattgttgaactaagtaaaaattttgttgacagtcactcaataaaattttgttaaactaagtaaccccacgttatcctatctgaaatagaatagtcactcaataaaattttgaaccacacactctcacctctaggag

SEQ ID NO: 29350 - DNA, 368 bp, Homo sapiens
  source 1..368: mol_type = other DNA
gggctcccacgcacgctccgtgcccgcgggcccattggagtggccgctggacgcgtgcgcaggacccgatgggtaggttcccgcttctgaagcgtgggaggcaggaggcaccgcggcggcggctgagaggccgaacccccaacctgtcctcgaggcgggaggggggcagggagaccgatcccagggctgaggagcctccgggaccgggtccgggagcatggggggctggaccgggtccccgagcatggggagctggagccgccaaggccgcccggccgggtcctacccgactgtcaggtcctcggtgctagcgctgcccgggcagccgcagcatctgtagcccggccccgctggaaagcagcatgagt

SEQ ID NO: 29351 - DNA, 486 bp, Homo sapiens
  source 1..486: mol_type = other DNA
tacaggaggtgaggaagagtcgaactgcaatgcatttcaggcagttttagaatcacgtactacgatgtgaacataccacttaattacaagttattagataaattgtgatttattaaagtaaacatctgttaatgccaggattcctaaactaagcttagaaatagcagctgttgcacatctagttccatttctgcagttccttttacagagggacaacatggccccaggtagagggggaccgtttccaagttggagattaaactttcactccaccttggctcaaagtgccttgcttgcatgggggcaaggagcccctgaatcctgtactcgctcacctgagcccatggattaggggagcgctgctggatctcctcagggttcccccataagatgtgatgtcagacttgcaggcaggcacagcgggcagtgctcagctcctggtgcttagctatggactcccaatcactgcaggactgagctgctggg

SEQ ID NO: 29352 - DNA, 383 bp, Homo sapiens
  source 1..383: mol_type = other DNA
taggtgtttgttaaataaaaaatccaggtggatcacctgaggtcaggaggcgcctgtaatcccagctacttgctctgcccgtaattcctagtaagaaaaaacatttggttcatccgaatggatgatctgaaataacatggaaaccccatgtttttctctatttcctgaatattggcccaaactcctcctgaaagctgatgctccagcattttcaaactattggcgccagggtccccaggccaatgccatcgaggaaggcgccgggccccctggaaacgctcctcccctttggaggcggatttcgaggcggggctcccacgcacgctccgtgcccgcgggcccattggagtggccgctggacgcgtgcgcaggacccgatgggt

SEQ ID NO: 29353 - DNA, 434 bp, Homo sapiens
  source 1..434: mol_type = other DNA
taaattagctgaggtctttattttttatatgaatagctgtgaggagccagattatatataatgtaaaaatacacactgagaccagcctagcacctgtaatcccagctactcgggaggctgaggccgcttgcagtgagccgagatcgcggccactgcactattatggttattcgtttgccaaatgagctcagttaggttagcaccttagcaagaccctttgggaccaagtggcctctaagcactttcagacttttgcttttctaaaattacaaaggttcaggaaggacctcactcctcccaacgctttcatttctaaataatgcttaaggaaaccatgccagggttcttaactgcgcgtgcgcccctggcaaagctgactaaggcgcctgaagtgacgtcattgcctgcatcacaacaggcgtcgtccggctggg

SEQ ID NO: 29354 - DNA, 292 bp, Homo sapiens
  source 1..292: mol_type = other DNA
cccaggctggagtgcagtggcacaatgatattggctcactgcagccttgtattcaagcgattctcatgcctcagcctccagagtagctgggactacaggcgtgagccacggcgatgagtaacgtggtcatgtgtacatcttagatcgatacttgagtactcactgagcgcagacagagatggccctctgtgagagcctccagtctgtctcttcagtggcaaggccgaagccccgccccaggctccggccccgccccccccgagccgcggctcatcctctagggcggagagag

SEQ ID NO: 29355 - DNA, 182 bp, Homo sapiens
  source 1..182: mol_type = other DNA
ttgcactccaagaaagaaagagaaagtggtccttgctttttgggcattattgaatggcacattgaacttctaaatagctagcctcccgagtagctgggactacaggtgcccgccacgatgatttttaaatttttattttttagagacaggggttttgtgtctagtgagtgagtctcacgaga

SEQ ID NO: 29356 - DNA, 451 bp, Homo sapiens
  source 1..451: mol_type = other DNA
aagccaaattatatattttaataggttattttctgcatatgtgaaatctagtgatgaattactattaattttgtactcagccacacaactaaattaggatacaaagtgtaatgcttaattttccttcctttattcttatgtattaacacgtataatgtcatgtttggtgtcttaatatagcaaattaagagatttcttagaatttaacctaatatttgggattttcccattaatcacagaactctactcaagtggcgtccagagcccagggttccaggaggccgcatcgatctccagaacatggacctgctgtcctgagagccccactggcgcgcctcgcagcaccagcgcactagtgaccacaagtctttgtgggcggagctcgcgcaagcgcctgggctctcccccatggctccgcccacagcccgtcccggcccgggcccccaccctc

SEQ ID NO: 29357 - DNA, 339 bp, Homo sapiens
  source 1..339: mol_type = other DNA
tttgtttttcaaaagtcatgaccataacaaaatttcccggctttattaaacagtccgaaaaaacgctactgggttttgattggtttacatttaataaagattgaatgaaaccacaaacgcagaattactgcactatgcgcattaaagagaaatgcgagagtcttctgcatgtgctttctgtacagcaatccgctcctgccttgggaggcgcccgaaaagaggcagggtctagtgggcggggccgctacgccgacggcctctctgccgggggcgaggctgggaccgaggcagtggcccctgagggtggggcgagggcggggcggacgtcgctctcccggc

SEQ ID NO: 29358 - DNA, 405 bp, Homo sapiens
  source 1..405: mol_type = other DNA
gaatacagcacagtcttgctgtatggtctttgcacaaactgtgtgctattgtaaagtgcaatccaataccccatgcccagcatggcatttattgccttctaacataccatatattttattatgtgatgtttaaaaaatctaccctcacagggtgaagattcttgactctttcattcattaacaaattttaggaacacagaacagtgtcctacattaatgtaagcataaccaggaatgatcataaaaggattctattataaattatcactggactaaaaatgtcctatccctggtgaggagtaactattgaccgcccactgagtggtgactccttatgctaagcaatggctccctcagccttgatgggagaagccacgatcactgcacgcccattggttggacagt

SEQ ID NO: 29359 - DNA, 285 bp, Homo sapiens
  source 1..285: mol_type = other DNA
tttaatggcaacaatgtagttatttgtccagttttagcataagaggtccacagaataaaggtgtgaagctgcactgcacacagcaatgtttaattgcagtgttcaatttctgcaactaaacactccatttacatgaattgtgtattatagacctggaactaattcctggaattttatacaaattcaggcttgaaccagaaggaagccagctgaggacaattgtgagtcaccatagtgactatgacttcacccaatcaggccctgggactcaaggaaagagaggga

SEQ ID NO: 29360 - DNA, 281 bp, Homo sapiens
  source 1..281: mol_type = other DNA
tatacttgaatctggcataatgccttctctattttgacctcaagagagattaaaggaaaaggatgctctatgatcttggtatatcagaatattttagaggaaacatgacttctttccttcccagggcctgattggttcagaaccaagtgaagtcacggttactatgattactcaccaggggtgccatctacatgtctccttcctggatgggacattcagctattgccaggttccctgggtctataatacacagttcatgtaaatggagtgtttagttgcag

SEQ ID NO: 29361 - DNA, 401 bp, Homo sapiens
  source 1..401: mol_type = other DNA
ctcttgggcgacgaggccccgacgcctggaggggagctcccagcccagaaggactcccgggaaggcccggtcgggtcgcagggagtggtggcggggaccctggccggataggggcccaccgcccaccactccttccggcgcccgccgcccggggcacagctggaagcatggccccggccacggaaaggagccccgctacccgcgcccgcgccccagggaacggccacgccctctggccgctcggggactcaccgcctcaccggcaactgcccagggcgcaggcgcgggactgcgctatctcccggcaggccacacgccgcccgccgggctgtgcgcccacagggatgctgggcttccaaccagcctcactgttacgacccggtcagtgattcacccagacc

SEQ ID NO: 29362 - DNA, 585 bp, Homo sapiens
  source 1..585: mol_type = other DNA
tgtctcagtcctctggacccaccagacccagaaccctatgaataaaggggaggctgggcctccttgaggaagatggcagctctcttttaaaagtcatacatatactttaaaagagttacacccgttgcagcttctgcaccctgctgtggatgtcctgggacaggatagtcaggactggtgtcccgggcaccagcagcctcttcagtgggtcgggcgggagcagcaggagttctggctccgggcgtaggaacttccatagtttccctctcacaggaggggaaccttttccgctcgcgggagcccaggccagacgccacagtcaggcttccgaccaccttggccccgaaaccagttgtgcccgccggccaaggcgcccggggccaggagttcagcaggagtccggcgtgctccggtttcaagttccagccggtgagcccaactttggacccttctaccaggacctccgggaggcacaaaagcaggcagctttctcctgtctgtgttggacccacgcaggttggcgtccacagaccaatttgtcagcttaggaccaacgttagggctgcgtttcccgaacgatcaagc

SEQ ID NO: 29363 - DNA, 522 bp, Homo sapiens
  source 1..522: mol_type = other DNA
catagcatctactttataaaatgttctgcatggatccaattgcatgcgaagcgaagcactcaattaaagtttattgcttgtctaggcaccatccaggaccttcgatggacccttcccagagaaacgttcatttcactggcgcggcccctgttcgctcttgggcgacgaggccccgacgcctggaggggagctcccagcccagaaggactcccgggaaggcccggtcgggtcgcagggagtggtggcggggaccctggccggataggggcccaccgcccaccactccttccggcgcccgccgcccggggcacagctggaagcatggccccggccacggaaaggagccccgctacccgcgcccgcgccccagggaacggccacgccctctggccgctcggggactcaccgcctcaccggcaactgcccagggcgcaggcgcgggactgcgctatctcccggcaggccacacgccgcccgccgggctgtgcgcccacagggatgctgggcttccaaccagcctca

SEQ ID NO: 29364 - DNA, 250 bp, Homo sapiens
  source 1..250: mol_type = other DNA
cttctaccaggacctccgggaggcacaaaagcaggcagctttctcctgtctgtgttggacccacgcaggttggcgtccacagaccaatttgtcagcttaggaccaacgttagggctgcgtttcccgaacgatcaagcggtctgggtgaatcactgaccgggtcgtaacagtgaggctggttggaagcccagcatccctgtgggcgcacagcccggcgggcggcgtgtggcctgccgggagatagcgcagt

SEQ ID NO: 29365 - DNA, 356 bp, Homo sapiens
  source 1..356: mol_type = other DNA
ttttgagagttcttaaatacccacgtcaacctttgttgtgaaaacttggggtgaccacatttccccacatcattaaaacagtctgaaaaaacgctactgggttttgactggtttacgtttaataaagattgaatgaaaccacaaaggcatgtgggcagttgcttctgcacgtgctttctatacagaatcagcgtagcggcctccactccagcctccggaggcgcccggaaagaggcggggctggcacgtcgagcaggcggggtcgcagcgctgacggcctctctgcggctcccggttgggggcgtggctaagccagcggcggacctatgctggccgggggggtggccccccgcagt

SEQ ID NO: 29366 - DNA, 396 bp, Homo sapiens
  source 1..396: mol_type = other DNA
ccataattttgcctggctcttcataggcactcaataaatgtgagttgagagcctgcccctgtggtcccagctacttgagaggctagatcctctttatttatttataaaaataaataaataaataaatatgtgagttgaatcacaacttagtgaaactgaagaagcttgtgcatacaaaaggccagtttaggtaactgtaactgtgtttaagctttagtttcctttctaagtagatatatgtggaatgcaaggcccctgccaggaaagaagtttcgattgcagttagcgaagaattttctgtgcaaactacaattcgaactgcttccaagtcctttaaaggagaatcctagcgagggtaccacataattggcagccaatggcatgggttctggtcac

SEQ ID NO: 29367 - DNA, 372 bp, Homo sapiens
  source 1..372: mol_type = other DNA
tcaattaacaactgttacctttaacagatagaggttgaatttatatttatttatttatttatttatatttttagacagagtctctggagtgcagtggtgtgatctcagctcactgcaacctcacaccatgttggccaggctggtcccgaactcctgacctcaggtggtccagctgctttggcctcccaaagtgctgagattacccagcgcccgttggggttgactttaaaacacaaccccatccaatgaagatttcagtaacttcccgagtagttgggaccacagatgttacccaggcgatttcatcccactgtgtgagcagtcagcgaaggggagggctgcgcttcctggttctctggggcacgaggccct

SEQ ID NO: 29368 - DNA, 436 bp, Homo sapiens
  source 1..436: mol_type = other DNA
aaggaatccaggtctcccaaattgctgggattacagacgtgagcgaccgcactggggccctcatttttcttatcaattaacaataatggttacctttaacagatagaggttgactttatttattttttagacagagtctcactctgttacccaggctggagtgcagtggcatgatctcagctcactgcaaatcagcctcagcctcccaagtagctggtggtgacctcaggtggtccagccccttcggcgcgggtcggggttgactttaaaacacaaccccctcaaatgaaaattgcagtttgttgttgtgggctggagtgcagtaacttcccgagtagttgggaccacaggtgcgtacccaggcgatttcatcccagcgaaggggagggctgcgcttcctggttctctggggcacgaggcttctcctcagcgctct

SEQ ID NO: 29369 - DNA, 424 bp, Homo sapiens
  source 1..424: mol_type = other DNA
aaggaatccaggtctcccaaattgctgggattacagacgtgagcgaccgcactggggccctcatttttcttatcaattaacaataatggttacctttaacagatagaggttgactttatttattttttagacagagtctcactctgttacccaggctggagtgcagtggcatgatctcagctcactgcaaatcagcctcagcctcccaagtagctggtggtgacctcaggtggtccagccccttcggcgcgggtcggggttgactttaaaacacaaccccctcaaatgaaaattgcagtttgttgttgctgggctggagtgcagtgaacttcccgagtagttgggaccacaggtgcgtacccaggcgatttcatcccagcgaaggggagggctgcgcttcctggttctctggggcacgaggctt

SEQ ID NO: 29370 - DNA, 348 bp, Homo sapiens
  source 1..348: mol_type = other DNA
cgcctgtaatcccagcactttgggaccaattgggtgagccaagatataaatgaataaataaataaataaataataagtagaatttaattagtaatttaaaatgccaagatggcttcgctttataactctatgcggccaatattaccctgatatcaaagccagagaaatatatcacaagatatatttgcctgtcgctaaggggagagctgcgcttcctggttctcccgctggcgccaactctggcgccccacacaggttcccagtgttaggctgggggagggcacgcgaaagcggtcagcttcccgtgagacgcctccccatgagcatcactccaagttacaacagtgg

SEQ ID NO: 29371 - DNA, 49 bp, Homo sapiens
  source 1..49: mol_type = other DNA
ccagtttccagggagctgtcgtgcgggccccgcgcgtcgagaggcctcc

SEQ ID NO: 29372 - DNA, 108 bp, Homo sapiens
  source 1..108: mol_type = other DNA
agaaggctgcgttattagcattttaaaatttgtaagcttttcacgaccaagtatttggggttccagatccccagtttccagggagctgtcgtgcgggccccgcgcgtc

SEQ ID NO: 29373 - DNA, 264 bp, Homo sapiens
  source 1..264: mol_type = other DNA
aagattttttcttccttatatcagatgtttacatgtaaagaaaacttttttttttttctttcccgatgaggacaatacaaggagaatccgatttaaatttaaattacgacacttatcccaagtagaaagcgcagtctgcctctgcttggttacactggccaaagggaacctggcagagcgagcttgggatgccgcggcccctttaagagcggcggcggcggcgcgcgctccgacggctacccccgggccccgcccctttcccgt

SEQ ID NO: 29374 - DNA, 300 bp, Homo sapiens
  source 1..300: mol_type = other DNA
gtgccactgcactccagcctgaaagtttccagctctaaaacttctatgatacttgtataaaacagatacgttattctttgtcaagctttttataagtgaactgaggcataaagcagatagtatctcttccctagatttatgtcagctaacaaatacttgttaaactagtataaagcagtgaagtgcctcaatttcttcatcatggaatgaatgctctatatcatagaagtaaaatctcttggaaattatgtatttttataaatgtaaattgctacaattatggaagctggttatagatct

SEQ ID NO: 29375 - DNA, 286 bp, Homo sapiens
  source 1..286: mol_type = other DNA
gactgggtcccccgcccaaggcactgtcttgcattttcatagttgatctaaaagcggtgtgaattctaggatttcacacttttagtcctttctgaataaaggtcgataaatctattctaaacgactgagtcatttgttttgattacccgggtgattgccaaatgttaatttaaaactgaaataggccatgagtgctcatgttatatgataaacagacatttggagaagtatgcagacagttttcctttaactctaagggttgtaaatacaaagtagaatgtgttac

SEQ ID NO: 29376 - DNA, 589 bp, Homo sapiens
  source 1..589: mol_type = other DNA
tccaaatttctcccagggcagggtgcgtactgtctgcagacaacgctgttatcaccagagcccggcactgagcttggcacatggcgagggctcagtaaagaatgagacgccacgcgccgctttgccatcggtgggcctttcggcgccgctgcaagccaccgggttccgaagtcggaggccgaaacggcgtgggccccgaagcggggccgcttttcccggtgaggcgagaccgcctgcagtgattcgtgactcccgcaggcctctaaggaccgctgcgcgagggagggggcccgaggcgcccccggcccgccctcctcccggtcttcggatccgagccggtcctcgggaaagagcctgccaccgcgtccccgcagccaccctctccgcgtgcccggccctctccagtggcgggggcacgtgggcgcgcggggtgcgtggcaagccgcccctctccccacgcccgtccggccgtctcccgcgcgcgcgccccgcacacagcctccgtgcagtgggcagagcccggccccgcgcgcgccccgccccgcccctggctagccgcgcccgcccccgcgcccgcgccctacatcca

SEQ ID NO: 29377 - DNA, 468 bp, Homo sapiens
  source 1..468: mol_type = other DNA
tttatatagtactttaacttagaaatatttggaatcaatttctgcttataaaggtatcaaaagcaagtgatttttcctgccaaatggcatttaggagcaactgataatttatttcttgccacttgccaagaaagcaagtctttgtcactgggacaggtacttttctctacatagttcaaggagataggccctgtgtccattgcgtctctagtttttgtttctaacccattatataaagaaacatcccagtttgctttttagagaaaagttcaagttagaaccatttaattgtgacacaactgtcctaagcaactgtccttgcacaagaatgtcactccaggaggcagaaggccctgtggctcatccagtggcctttgcccaggcggctcaaacacagggtgtggtgctgtttggttgctcatggcaacaagatccaaataacttggacatgtgtttgtataaaaaaaa

SEQ ID NO: 29378 - DNA, 495 bp, Homo sapiens
  source 1..495: mol_type = other DNA
atattatatattaatatatgtaacttatgctatcattgctaacatatgtaatatatgctattattagctggcagccccattttggtgactccacctcataagggcaagcccccatgaagtgaggtctgccccttaaagggaatgggaaaaacattctgcaacctggtagagtctctcccaaaatccggagagattgatgccaataagtcctctgcctctctttgaagactcacaaacatcttaaagatatttcacccaactttgagacctatgtgtcatgatttattgtgtcatgatggggcccttcaaggactagtaatgttctttaaatgaatgaatgacccagccggtcaggcgcaaggggcaatcctgcccggttcgcaggtccgaggcgggcgcggtggcccttcgggccccgccccgccccgccccgccccgccccgcccaccggcagcccggccacgacccaagcggaggccgcgccgacgcctgcgc

SEQ ID NO: 29379 - DNA, 391 bp, Homo sapiens
  source 1..391: mol_type = other DNA
caaactcaagcctgtcttttggggtgaatcatggattattccaatacagtcgactcagcctcctattagactgaattttctgttattctacccttgggaccccaggggcctcacctgtaaagttcagaggctgacagggatcatctctgacccctaaggggctgtaatgacaccttaaagccagttcaataaatctatttactttcaaggcgacttgaagaataaatttcaccttacagatggagtaagatgtgaatatgtttcttagtaaagtgaaatgagccttagtcaagtaaacaagtacccttttaatatatccaatttaattaaagcaataatcaactaagccctcaaattaatgggttattgcagggttgtaataatctgagaa

SEQ ID NO: 29380 - DNA, 363 bp, Homo sapiens
  source 1..363: mol_type = other DNA
tgccccatattacatattatatatattatatattaatatatgtaacttatgctatcattgctaacatatgtaatatatgctattattagctggcagccccattttggtgactccacctcataagggcaagcccccatgaagtgaggtctgccccttaaagggaatgggaaaaacattctgcaacctggtagagtctctcccaaaatccggagagattgatgccaataagtcctctgcctctctttgaagactcacaaacatcttaaagatatttcacccaactttgagacctatgtgtcatgatttattgtgtcatgatggggcccttcaaggactagtaatgttctttaaatgaatgaatga

SEQ ID NO: 29381 - DNA, 375 bp, Homo sapiens
  source 1..375: mol_type = other DNA
tttagagacaaagcaactggtgctgtgcgcgggcgcctgtaatcccagctactcatcgagccactgcactccagcctgggtgacagagtgagactccatctcaaaaaaaaaaaaaaaattaaaaaggttgttttgatagtgtacggataactgcaaagttggggtttaccacttaagcccaagtgacctgaatgatcactccttggaggtgacataacatctctctgatattaaattttgaggagttatttatcatgtaaaacaaaagggataaatggtttttttcttaaaaaaaattgacaaaacctatatgtgattctaataataaataagacgatttaatagggtctagttgtgccagatgggtaagcattt

SEQ ID NO: 29382 - DNA, 426 bp, Homo sapiens
  source 1..426: mol_type = other DNA
actcaactgctatgtttagaagtgaaggttatttatgtttacactaatgggttccttattattttaatgaattagtattttttaacagcctttcatttttgtgcagaaatattggtaagtataaaccacaaacaaacgttttttggggttttcaatgttttagtgtaaagaggacctggaaccaaaaagtttgagaactgctgtcctccagcatcgcagtgccctgcacttagtaggcctctttttgagtgtaattcctgaaaacaaagttctgtttagaacaaaaagtatgctgtgtctttctaaaagaatgacaaggtgtttacactgggatgtttacatttatgcttaagtttcaagttcgaagctcgaactgctgccctttccatccttccgagtcgaactccagtgcgaaggaggcgcgtc

SEQ ID NO: 29383 - DNA, 588 bp, Homo sapiens
  source 1..588: mol_type = other DNA
aactgctgccctttccatccttccgagtcgaactccagtgcgaaggaggcgcgtccccgcccggccacccccgcgagggaatatttccctcccgggccggccgatccgccggggaccccgcggagctcaaggcccttgaggcgccgcgggatcccagtggccctcgccccgccccaaacccgaccccggtgggcgtcgacgcgcagcagcagcgggtccccccaaccccggcgccccgcctccccgggcctcgcgccgcatgccggcgtcggcgctttttgacgccatagtgggcgtgtcggcgcgacccgcgacgtcgccacgcgccgacaatggcggctgcgtcggcctgagcagggcttcgttgccgagggagccgcagtcgcctcagatccggtcggcggcggcggcggtggcggcggcggcagcgcgcctgcgcgctcccgcagcgccctggacctagcggcggtgccgaggcccggcggagcaagccaggtgggcggcggcgcggccgagctcacagcatcagcgcgcgcgcgcggtgggcgggcagagaggggggcggtgcagccgccgagcggccgcgat

SEQ ID NO: 29384 - DNA, 447 bp, Homo sapiens
  source 1..447: mol_type = other DNA
cgcagtgccctgcacttagtaggcctctttttgagtgtaattcctgaaaacaaagttctgtttagaacaaaaagtatgctgtgtctttctaaaagaatgacaaggtgtttacactgggatgtttacatttatgcttaagtttcaagttcgaagctcgaactgctgccctttccatccttccgagtcgaactccagtgcgaaggaggcgcgtccccgcccggccacccccgcgagggaatatttccctcccgggccggccgatccgccggggaccccgcggagctcaaggcccttgaggcgccgcgggatcccagtggccctcgccccgccccaaacccgaccccggtgggcgtcgacgcgcagcagcagcgggtccccccaaccccggcgccccgcctccccgggcctcgcgccgcatgccggcgtcggcgctttttgacgccatag

SEQ ID NO: 29385 - DNA, 446 bp, Homo sapiens
  source 1..446: mol_type = other DNA
tgctgaagtgtcaccttatcagaaaatccattgtagatataatgtacatatgtgtatatatacacaaaaacatataacatttgtatgtatttattccatggggatttggtatgttttgttcactatagaacacaacctccagtggcattcaataaatatttgttgaattaatattgatgaagtagacattccaggatttggggcctgaataatggtgccatttaaaatgaggattaggatccccgattgagagaagtcctttctccctctttggccaactcctaggggtctgagctctctttttcttcctatggagagagagggaaaaacttcagttcctgagactgatgtgacatcggctaaacaagagacaatctcacaaaatgctttttttaaaccaaaaagaaagaaatgccaaccaggttgacttgttggagtatagctag

SEQ ID NO: 29386 - DNA, 528 bp, Homo sapiens
  source 1..528: mol_type = other DNA
tcaggatgagaattgtttattgcttaacgtgtttcatttagagcaaagactagaattcagatctcttaactgcagccttgaactgttacatcagcatcaacaattatctaatggattggaacagtgtacacaacgtcaagtcacgatttttactttaacttcaattccagagtcttcaaaatttatttttcttgcattatctttccagctaaattttatttaataaccatcagcatgctttatgccatgtagacttgacctgaaaacctgccaggctttcattgagtttagtcataaaatcaatccaaacttttgttgacatgcttcgtattagtaagattgaaattgaaataagtctatttgtcactttccttgaaactatactgccattgtctgttaagaagtctatgacatttcaagaatatatggaagaagaaacttgtttcttctttacttacaaaaaggaaagaaaacaaaaaacctttacgtaacgtttttgctggctacgaagcacattttccaggaagt

SEQ ID NO: 29387 - DNA, 390 bp, Homo sapiens
  source 1..390: mol_type = other DNA
agtggattatgtagtggaaccaggttatccttaacatagctttttggctgcaaagtaaaatagtgatggctgacagcaggcataatcttttgcttggcacgttgtcaccatgcaactcaacgtgttttgcaaggaatgatcgtgacacaccatctctgggagatactatgaggacatccggctatttcttggaagaattttgttgtgccagcacatctccccatgaggctcagatctgtctgacctaagagccagttggcactagacttattgacagtgttttcccagactggccacgaatttgttttgcaggttttgaaaaggaaaaaccagcgttatccagatttaaaagttgtttaagaaaagttgctttaaacctttgctctgcaa

SEQ ID NO: 29388 - DNA, 428 bp, Homo sapiens
  source 1..428: mol_type = other DNA
tcgcctgcccaggctggagtgcggtggcgcagtcttggctcactgcccgagtagctgggactacaggcgcgtgcacgcctgggtaattttttgtatttttaaaaagagacggggtttcaccgtgccaccgaccttggtcccaaagtgctgggattccagagcccaccatttacattactcatctgaaatttacatgtatttatcagaaattcccacactcactaaaaacacttgttaaagacaatttttgaaaatatattatattgccaaaacttctttgttttccgtttctgcaaaattggtatagtaggagtatctctcatcacattttgacaattagaagtggtgccctcaataaacttcagttctttattaaaggaagcctgtgcagtcgactggggagactgggaactacttcccccctccct

SEQ ID NO: 29389 - DNA, 326 bp, Homo sapiens
  source 1..326: mol_type = other DNA
tttaagggtcaggggtccccctccccaaattccttttgcgcgcatctgggacccctgcgtcccacctcaggatgggcccggctgtcccgtgaagggggcaccgggtaggtcagcggcggcaacttccccctggggcatgatgagctcccatcgcgcaaggccctcgattctcggggtacctggcgggactccccggaaactctcgcatcagcgctggcccggccagagctcgacagccgccccttcccggtcccctagtctcgagaaccgctgtccgcgggaccagctccctgactccaggggattcatttgcatgatttaagcat

SEQ ID NO: 29390 - DNA, 702 bp, Homo sapiens
  source 1..702: mol_type = other DNA
aactatcccggcctgggtcccggcctcgaggccatcagacgcagcggctggaccgggagcgcgaaactgctgcgctctccccaggatctgcgccctgcagctacagaggggacagcccaagcaggactggacgttgagcgccgcgtctcctccatcggcgcagcagtgggaccgatcctcgcggggcaaagagcccgcgaggggtgggggaaagcccgcgagagtcccggcggcgtcccgccgtttgccggctggagcctggccccagttccccgcagccactcaagcccggtggagcccactcgcggccgcccggcagccgccgcctcacctgccaggcacccggcggctgcccaatcagcgggggtcgctcggccgcggctgccatgttctccgctccgcgctgccaatcagcctcgcggcggccaatgggcagtccggccggaggtcaggtgaccgcgggccagctggctccccattggcgcgcgcctcgcggccagtgattgactttatcagtccaaggactgggactcgcgcggcgagcggcaagcggcgagtaacgagcctgcctactgcccgctgcccgcctgcccggccgctagccggctccgccacttggcgcagcccagcccggaggccggtacccagggagcctcctggccccgcggttctgtgcactcggggagaggaggggtgcccggg

SEQ ID NO: 29391 - DNA, 301 bp, Homo sapiens
  source 1..301: mol_type = other DNA
tctttcttttcctccagaataaaatataacacaggagccagactggttcctgaatgctctctgcttgaatcccaaatctgagcggacagaaaccactggtggtgtgcgctgcagtgtctgcttctgctgctaccgctggggctgaacccgtctggggaggcctcctcccctgaatggctacttcctcccgaagctcctttcgggaaaaggaggggtgggaggggcggcctgcggctccgagcctacgggctcagccccgggagggaggggccgtcgcgggagggggcttgcggcttcctgt

SEQ ID NO: 29392 - DNA, 528 bp, Homo sapiens
  source 1..528: mol_type = other DNA
ggcagcggcaggttgggggcacaaacggcgaactatcccggcctgggtcccggcctcgaggccatcagacgcagcggctggaccgggagcgcgaaactgctgcgctctccccaggatctgcgccctgcagctacagaggggacagcccaagcaggactggacgttgagcgccgcgtctcctccatcggcgcagcagtgggaccgatcctcgcggggcaaagagcccgcgaggggtgggggaaagcccgcgagagtcccggcggcgtcccgccgtttgccggctggagcctggccccagttccccgcagccactcaagcccggtggagcccactcgcggccgcccggcagccgccgcctcacctgccaggcacccggcggctgcccaatcagcgggggtcgctcggccgcggctgccatgttctccgctccgcgctgccaatcagcctcgcggcggccaatgggcagtccggccggaggtcaggtgaccgcgggccagctggctccccattggcgcgcgcctcgcggcc

SEQ ID NO: 29393 - DNA, 333 bp, Homo sapiens
  source 1..333: mol_type = other DNA
gtctctttgtttcaaaggaaatcgccaagctgcatggagttcaggtgggcttggatccaagcctttgccctccatgctgctgggagagggaagcaccgaaaaaggcaggctgcttttagaggctctcactgatccttcactgatgatacctagggacattgtagttcccaaggcattttgaacaatcgtttgtagggccagacgcagtggcttatgcccaggagttcaagctgtgattgcacctctgtaccccagcttgggcaacagagcaagatcctgtctctttgggatgtctggccctcggggtcagtgaggctgataaagcaccttatg

SEQ ID NO: 29394 - DNA, 440 bp, Homo sapiens
  source 1..440: mol_type = other DNA
aaatcagtgttttccaaaaaagtagaattttatggtgaccaagagtaaaaaaatacattttattttacagaacatactatgtggaatacactccattgcacatactaacagtgagtattttctgtgaaacttttaaaaattattttatacattttatttcttttcatttcaaagccaaaataaatcttcctggaatttttttccccattaattctggcaagtctgtccaagacctggggaggggaaaaaacagaaagatttgccaatttctcgatatttccctctcagattggaggggaatgcccactcccctgggtagtgacattttcctttccaaaggatcctaccgctctggagatgtctgagacagtgagaaagggccagccgtgagctcttgacagagccttggtccagtaagatgatctgaccacagctggtct

SEQ ID NO: 29395 - DNA, 403 bp, Homo sapiens
  source 1..403: mol_type = other DNA
tggaggaatcactctacctaatataaagtcttactacatagctacagtaattatgacagtgttatattggcagagggatattttaacaaattgtgctggataaattggacataaaaaaatgaagtttgacttaaacatcatactttacacaaatattactgtaaaatatatttaatccacgtatctatgaaaggactcatatctagaatatataatgtaaagtggtacagccattttggtaaacatcattgctctctgacaaagactgatgaactgtgctgccacagtaaatgtagccactatgcctttaataatgaccactgcccattctcttcacttgtcccaagaggccattggaaatagtccaaagacgacattatttcccagaagtaaatacagctca

SEQ ID NO: 29396 - DNA, 470 bp, Homo sapiens
  source 1..470: mol_type = other DNA
cagtaaagaacttggatcccagggtccctgaccacatgtaactggctatagcatgtcttgtggtatagtttctatactcatactcaagagcacattaattacatctcaaccattagtaactgttggttactgtttgaaataaaggtaaatattgaatgcaagctaatttcaagtgcaaaagttggcattcagaaaggatttctagtgaaatctattatttcaaacaagtgtctgtgaaataatcatacaattcaatttgaatacctttatttgtagatttcaaaacaaataaaagcatttaggttgtatttcataattaatgagaggagactttattatctcttagaaagtttgcatgttctattctttctagattattaccaggacaaaattttgcaaactatagccttttaccatcaagcctgctcctaggaagagagctggatcttcttgagcagtccagcacaagc

SEQ ID NO: 29397 - DNA, 461 bp, Homo sapiens
  source 1..461: mol_type = other DNA
cacttgtatttgaactggcagacctttctaggaaacatcacttttatagtaatgacactatcactgaaaagagtttcttatctcttcttaaactgtaataaaaattcttctgtggtgatctagaaagtaatttttggatgagaatttatctcttgagatataactttcttacctctgagatatctaaatagtgagaaaagtcagcttgaatttactgtattacagtgactcttagggtggagaaactgtatcatagttagattatgtcttaaactacaactaaaagttcaattcaacttttggtgtaagatactgatatttaaaataataacaccttaaaatacagcagagtactcatctgatgcttcctttgctgcctcccatggaagtacaggaactaggcaagccataattggctcacttcccaagttctgggaaactttacaaggatcacaggcagc

SEQ ID NO: 29398 - DNA, 410 bp, Homo sapiens
  source 1..410: mol_type = other DNA
aaattttcaaaagcagcttattcaaaagcaatagaataacattttctgatttttatacagttaaaaagtatgagcaggattatttagaccttcagggtaaaactcccaggctgcagtgcagtggcgccatctaggctcactgcaacctctattacaggtgcccaattaatgtttaattttattatattccaatggccccaaatgcataatttcaaaaggacatggtcttgctctgtcgcccaggctggagtgcagtggggctgggaccatgcccagctatggattacagctgaaaaaaaaaaaaaaagtcatttggtaaaatttgtatacagaagcttatgcttccctatggtgagattatgttgtcagagtatgacacacaatggtaatgatgtcaaactgtataaatt

SEQ ID NO: 29399 - DNA, 341 bp, Homo sapiens
  source 1..341: mol_type = other DNA
aaaagggaaagcttccccttcactctctgaaagttcaggagaaaaggtatacagatttatataatgtgtacacaccagagcctttagaatgaagactcaaagatacaagaaaaaatatccatttttatgcttcagttcaacacagtatgtgtaactgagcagcttagcagcttaacctcaaaacatgttataaaacatttttttcgtagctctgagatatactttacactctcggctagagattagctgcaagatttttccttccacaaattgaagactggaatttttttctaataaagtctcctgtggcaagcagccgggcccttttgctggttacatat

SEQ ID NO: 29400 - DNA, 282 bp, Homo sapiens
  source 1..282: mol_type = other DNA
gcaggagttcaagaccagcttggccaagatggtgagaccccgttgcagtgagctgagatcatgccactgtaaagaatgtttattcactaaagttttgacagactgaaggccattatttcagatggataattcacatctccctctgacttccatgtgaaccgtgaactttgggatgcatcttcaggggatgctgaaacaacaacagcattcccctcgcccgcaagcccagggagtggtcagcagtgggggacgtcgaagccaccctagggctgccattggctg

SEQ ID NO: 29401 - DNA, 365 bp, Homo sapiens
  source 1..365: mol_type = other DNA
tttaaaaacacatcttaacagttcatttttaagtatatttccctactaaagaagtcactgtttaaatactacctttttcatgaaaggcaggaccccctgagggtcttcatgattctaaaaggactcccacaagtgtcaatacttctctgagtgagatttaaataagaaagattcagtttgaacaaatttaccttctctgagaccggactcagcgctcgccaagtcctctgctaacgcaggcccccaactaggagctaggggagcctatcccggtggttctcccccgtcgcgccggcgcaccgtccgtccgaatggcctcgtgggcggagcttgcgtagcctcccggaccccggcgcacaccgcgc

SEQ ID NO: 29402 - DNA, 304 bp, Homo sapiens
  source 1..304: mol_type = other DNA
ggagttcaagaccagcttggccaagatggtgagacccccttgcagtgagctgagatcatgccattgcactcctaaagaatgtttattcactaaagttttgacagactgaaggccattatttcagattaattcacatctctgccaataaataaatgtagccacactagcttgggggatttgcctctgacttccatgtgaaccgtgaactttgggatgcatcttcaggggatgctgaaacaacaacagcattcccctcgcccgcaagcccagggagtggtcagcagtaccctagggctgccattgg

SEQ ID NO: 29403 - DNA, 397 bp, Homo sapiens
  source 1..397: mol_type = other DNA
agccctaaatgtgcatattaaaggaacccttagaatcaaacacaaaattgtagaaatataggattgtataaggagaccagttgtatttagatagggactacctgtcttttactggatctctgagctctgggcagagcccacactgaatgtacttttttttttttttttaacaaagacatttctaagtgtccaagctactttcttccttaaaatctctgttctaataactgttttagtcaaaaacttagaattacggataattcacatctccctctgacttccatgtgaaccgtgaactttgggatgcatcttcaggggatgctgaaacaacagcagcatttggcccctcgcccgcaagcccagggagtggtcagcagtaccctagggctgccattgg

SEQ ID NO: 29404 - DNA, 418 bp, Homo sapiens
  source 1..418: mol_type = other DNA
ttttttgatatgagtcctctgaagtccaaaagagacatattggtcttatttggtataaaaatcatacaagaagcatcgtcaaatataaaatgctgtttgactttttatagaaatgtcattgatatgtgctccaaaattatgggaaactcttataattctgaaataacttctgtatgttattaattataaactttatgttaaattgttgtatgctacagaagtaaccaaaatttacttgtcaatgagttcaagaccagcttggccaagatggtgagaccccgtttgcagtgagctgagatcatgccattgcactccagcctgactccattttaaagaatgtttattcactaaagttttgacagactgaaggccattatttcagattggaaataggaaactggataattcacatctccct

SEQ ID NO: 29405 - DNA, 299 bp, Homo sapiens
  source 1..299: mol_type = other DNA
gagttcaagaccagcttggccaagatggtgagaccccgtttgcagtgagctgagatcatgccattgcactccagcctgactccattttaaagaatgtttattcactaaagttttgacagactgaaggccattatttcagattggaaataggaaactggataattcacatctccctctgacttccatgtgaaccgtgaactttgggatgcatcttcaggggatgctgaaacaacagcagcatttggcccctcgcccgcaagcccagggagtggtcagcagtaccctagggctgccattgg

SEQ ID NO: 29406 - DNA, 312 bp, Homo sapiens
  source 1..312: mol_type = other DNA
ggagttcaagaccagcttggccattgcagtgagctgagatcatgccattgcactcctaaagaatgtttattcactaaagttttgacagactgaaggccattatttcagggataattcacatctccgccaataaataaatgtagccacactagcttgggggatttgacctctgacttccatgtgaaccgtgaactttgggatgcatcttcaggggatgctgaaacaacagcagcatttggcccctcgcccgcaagcccagggagtggtcagcagtgggggacgtcgaagccaccctagggctgccattggctg

SEQ ID NO: 29407 - DNA, 405 bp, Homo sapiens
  source 1..405: mol_type = other DNA
attttttgatatgagtcctctgaagtccaaaagagacatattggtcttatttggtataaaaatcatacaagaagcatcgtcaaatataaaatggtgtttttatagaaatgttattgatatgtgctccaaaattatgggaaactcataattctgaaataacttctgtatgttattaattataaactttatgttaaattgttgtatgctacagaagtaaccaaaatttacttgtcaatggagttcaagaccagcttggccattgcagtgagctgagatcatgccattgcactcctaaagaatgtttattcactaaagttttgacagactgaaggccattatttcagggataattcacatctccgccaataaataaatgtagccacactagcttgggggatttgacct

SEQ ID NO: 29408 - DNA, 237 bp, Homo sapiens
  source 1..237: mol_type = other DNA
tggggggtggtttttccatggagaggaggccccaccccacgctgcctctgctgtcagccctggtcagccttggcagggtgccctaagggagctgagggacttcgcaccaaggacagaagaagccccggtctgccctgcgctgccataggacttgcaggccacagacaggaagatggccgccgagggaacccccacctccagtcagctcaggctgagcggcagtcctcggcggaccca

SEQ ID NO: 29409 - DNA, 431 bp, Homo sapiens
  source 1..431: mol_type = other DNA
ctaggaggccttgagggccattagggagagacgctagcgtgctccatctccctcccagccatttcagacggagggcagtggagccctacctggagtctgggaggccataccccactgcttgcaccttgcaggtctcaaggaacacccatgactggtagtgctgcctgtcctgtcctgctgccagccatggaggagcccatcagggtccccagatttacaaatttctgacttccattttgggagtcagccagaggagattctctgaggagggcagcttcagctgtcgaaggacagtcgggggaggcacaggctgcaccctgccactccctgctgtcagcccgcggcggggggggggcgccttcctcctctgagaggaggccccgccccacgctatccgggctgtcagccctgatcaaccctgacagagttcc

SEQ ID NO: 29410 - DNA, 389 bp, Homo sapiens
  source 1..389: mol_type = other DNA
atttaaaactttaatcacgtattggttttttaaagggtcgaaaagacagtggtttttttctaatttcagggcattcccaccccatttcagagggcagtggaggcctgccttagggctaggaggccctatcccactccctctcttgcaccttgcaggtctcagggacaggcacagcctctcaggaaggctggaagggaacacccatgactggtagtgcccctccccctgccagctctggaggaccccatcagggtccccagagtacacggaggggaggcgcagactgcaccaagccactccctgctgacacccctggggggtggttcctcctcagagaggaggccccgccccacattgacgctgcgtcagccctggacaaccacggcagg

SEQ ID NO: 29411 - DNA, 412 bp, Homo sapiens
  source 1..412: mol_type = other DNA
agaggagcgctatccgggctgtcagccctgatcaaccctgacagagttccgggaacccccacctccaggtggctgaggctgagcggccaccctctcactgctgggtgagggtcccatggcaagtcagcatggggagctgcctccagttggcagagggaagattcccagctgaggggtcacatgtgcgtcagaacagacgtgaggccacagggaccgcccccgtggtagagtgctgggaggtggctgccacctcactacctcccactgctctcagtaattgaattctgagggggtcacgaacctcagaattgtgggactctgggagtctggccagccccagctgccgtcttagctggaggggctccctcccttcctcttgcaggtgctccagaaagcaggagttgaagacctg

SEQ ID NO: 29412 - DNA, 337 bp, Homo sapiens
  source 1..337: mol_type = other DNA
aactgtgcaagtcatttacatttttgttcagatttatccctaagccttaatattttttgagatattttaaattgcactgtgcttaatttcaaattccggttgttgaaattaactacctgactgttctaatatataaacttctaatatataacttctaacatataaacatacaattgatttgtgtgttgatcaaaggactggacacaatctccattacaaaatgtaacaatgcccaatgttgtctggcagactgaaggccatgatttcagactttgcctggcagaaacctgaaagttaatggtcttcaaggtgcaatggccatgaaggaatcatcctc

SEQ ID NO: 29413 - DNA, 261 bp, Homo sapiens
  source 1..261: mol_type = other DNA
caaaggactggacacaatctccattacaaaatgtaacaatgcccaatgttgtctggcagactgaaggccatgatttcagactttgcctggcagaaacctgaaagttaatggtcttcaaggtgcaatggccatgaaggaatcatcctctcacttccatgtgaaccatgaacattaaacatggagagtttgggatgcatcttcaggggatgctgaaacaacaacagcatttggttcccacaaacccagggagttgtcagaggt

SEQ ID NO: 29414 - DNA, 465 bp, Homo sapiens
  source 1..465: mol_type = other DNA
agcttttttatagattgacttttctacatatactttcatgtagtctttgacaaaagacacatgcatttttctttttgcactggacacaatcttcagtacaaagtataactagaattcatgttgggagactacatttactatgaaaatacacagtaaagaatgtttattcactaaaattttgacagactgaaggccattattgcagattgattaatgggataattaattattaattattaaatgtaactagtaattaataactaataattaaatgtagccacactagcttgggggatttgaggtgagacatctaaatcctctgacttccatgtgaaccatgaacattaaacatggagtttgggatgcatcttcaggggatgctgaaacaacaaccgcatttggttggagtggtcagcagtggggctttgtgatgtcaaagccaccttaggaccgccattggctggg

SEQ ID NO: 29415 - DNA, 535 bp, Homo sapiens
  source 1..535: mol_type = other DNA
atacatctggatttttgatgtcattaacttatcattgcaatttttttgtagttttaagtgtacaagtcatttacatttttggtcagatttatccctaagactttaatatttttagtgatattttaaattgcactgttcttagtttcaactttcatttgttgaaattaacttccatctaatatataaacatacaattgatttgtgtattgattattgtagaagcttttttatagattgacttttctacatatactttcatgtagtctttgacaaaagacacatgcatttttctttttgcactggacacaatcttcagtacaaagtataactagaattcatgttgggagactacatttactatgaaaatacacagtaaagaatgtttattcactaaaattttgacagactgaaggccattattgcagattgattaatgggataattaattattaattattaaatgtaactagtaattaataactaataattaaatgtagccacactagcttgggggatttgaggtgagacatctaaa

SEQ ID NO: 29416 - DNA, 476 bp, Homo sapiens
  source 1..476: mol_type = other DNA
gaggactggggtctccacgcctgaggaaaggggtcgctcctccaaagcgcgctcagcccgtgtgctaggcgctgggtgcgcgcgcggtgtctgctcgggtgcgcgcgcgcgccgctgcccgcctgcccgccggcccgcctgctcgcctgctggggctgctccgtgcagcagcgcaggtcacggcgccgcgggccctgcaccagacgctgggctctagaggtgggtgaattttcagcgggggctgcacaagctgcaccgacacgcgtgctgcctcttccccgctcagctcaggagagacagagagagagagagagatctcgcgcgcgcgcacgcgagccgaggccaaagtggccgaggtggctaatcctgcccgcggtctcatgccgctgaggaccggaaaggatccgggtgtccttggcatcgctgcccgcccccccccccaccataccccaagcggccagggcggcggggcaagt

SEQ ID NO: 29417 - DNA, 331 bp, Homo sapiens
  source 1..331: mol_type = other DNA
tagttttagcttaaagattttttttttcatttttaagcaagaacatttctgacacaaatacttcccatttataacttagctctacttacctaaagttgtttttcttagccaagctcctacaaaaaacatatgccttttgtttaggaaagccaggtatctgaaatacatacatttatttattttcttaacaagcttattaacgaaattatcaatttgcatgaaactggtttgaatatttcttatctcttgtggaagcactaacacacgttggatttgcagccactggatatttcagattcagctgctaaagcctaatgcctcccttataggg

SEQ ID NO: 29418 - DNA, 345 bp, Homo sapiens
  source 1..345: mol_type = other DNA
ctgtattttaaaaaatattcagtgttattgtatgaaaccagctccagtgaccagtggagattctgtgtccttcatgagggaattctgcctgaacatccaggcatttccatacatcttcaagccaccgaagcttgaagccaccaaggcttgaagcttgtaccctcatgttagtcttagattatagtatcctgcaggtaaatactcagaacaaattcatgttgggagaatggtaaagaatgtttattcactaaagttttgacagactgaaggccattatttcagataaatgggataattcacatctccaccatcttgggggatttgaggtgagacatctaaatcctc

SEQ ID NO: 29419 - DNA, 389 bp, Homo sapiens
  source 1..389: mol_type = other DNA
ccctgtggacaggacgcatgactgctacacacgtgttcacagtgcttaacacaatttttaaaaaatatatagtcaagtgaaaggctcacattttgagatcccgactcaatccatgtcccttaaagggcacagggtgtcagagggcgtagacgcctcaccttctgcctctagcctgggtcaccctggttgaatcccagagatgcaccctgcagaaatgggcgttctggaggcaagcccgcgcacgcccggcccgcgcgtctgtctttcgacccggcaccccggccggttcccagcagcgcgcatgcgcgcgctcccaggccacttgaagagagagggcggggccggctgagcccgctacacccgcagcgggccgggggttcggcctcagt

SEQ ID NO: 29420 - DNA, 326 bp, Homo sapiens
  source 1..326: mol_type = other DNA
tgccagccagctattccagcgccactccataagccacatctgttttcttaatttcatttaattttaagtaattgaaatttgcatttaaatagccacatttggctgtagtgaccatacactacagtgtgcactctaatccgagtggcaagcagtcatgccactggtgcaggcctgaagtggccacgtttcaggtctcgcgagagttggcacatgccacgcgagggccactgcccgagtcacggactgccccggaagcttctgggccacggactgccccggaagcttctgggccacggactgccccggaagcttctgggccacggact

SEQ ID NO: 29421 - DNA, 483 bp, Homo sapiens
  source 1..483: mol_type = other DNA
tgtggacaggacgcatgactgctacacacgtgttcacagtgcttaacacaatttttaaaaaatatatagtcaagtgaaaggctcacattttgagatcccgactcaatccatgtcccttaaagggcacagggtgtcagagggcgtagacgcctcaccttctgcctctagcctgggtcaccctggttgaatcccagagatgcaccctgcagaaatgggcgttctggaggcaagcccgcgcacgcccggcccgcgcgtctgtctttcgacccggcaccccggccggttcccagcagcgcgcatgcgcgcgctcccaggccacttgaagagagagggcggggccggctgagcccgctacacccgcagcgggccgggggttcggcctcagtttccggtggagggccgcctctgagcgggcggcgggccgacggcgagcgcgggcggcggcggtgacggaggcgccgctgccagggggcgtgcggcagc

SEQ ID NO: 29422 - DNA, 305 bp, Homo sapiens
  source 1..305: mol_type = other DNA
ctgccagcctctgagtgatcagaaagcgttttgctagcaggtttgggcccatatatttttagtaattctatagggcaccaatgagttaacttatatgtcattttctatagcgagagaatagtgctaaaggatagggtttagatagctggcctctatttaagtgatatttgcgattccaggggccttgcatgattaatattcaaggcaggatgccagtttggttaataattatgcaaagtgacttgattctttattaagaaaacactaacaattaacaggaagagtaagcacactcatatcagtta

SEQ ID NO: 29423 - DNA, 512 bp, Homo sapiens
  source 1..512: mol_type = other DNA
cctttctctgcacggaggccagggaacctttccctccagggaattggccactcgaggttgaagggagtaggaggctcggttaaaccctccagcgtgggatactgggcacacacccagtggttttccccagaagtcttttgctcaaggcacctacagtggaacccagtttaacagcaagggcagtcattgacctactaggtgcgcgcctaaaggcatgcctggagggcctgggtgcgggcacgtggagccacggggctggtgaaggtgaccgccttctccttcctggaaggcccgcaaagtttgctccactactcgggggctcaaggagctgtgcttgaggtggcagggggcgacctgggcttcagagaggggtcccattcccgaagcccgcgttccctgccacggcccctgcgtcccgggtccgggtccgggtcctcagctctgtggccgctcccactagctgaggcaggggcgggcgcggcgagcccctgccagatccggtgtgtgatgct

SEQ ID NO: 29424 - DNA, 712 bp, Homo sapiens
  source 1..712: mol_type = other DNA
ctactaggtgcgcgcctaaaggcatgcctggagggcctgggtgcgggcacgtggagccacggggctggtgaaggtgaccgccttctccttcctggaaggcccgcaaagtttgctccactactcgggggctcaaggagctgtgcttgaggtggcagggggcgacctgggcttcagagaggggtcccattcccgaagcccgcgttccctgccacggcccctgcgtcccgggtccgggtccgggtcctcagctctgtggccgctcccactagctgaggcaggggcgggcgcggcgagcccctgccagatccggtgtgtgatgctgccgcggccgccgccgccgcctgtgcagccgctgccgccgccgccgccgccgccgccgccgccgccgccgccgccgccgctgccgccccggctgccgcgccgcgccgctgcctctgccccggccgcccccgccgccgctgccgccgccggcccgcagccagccaggcgggcggcccagcccgcctgagcccgcagcggctgccgccgcagcgtcgggtcgctgggtgcgcgggctaccgcggaccgagcggacccgagtgggcgaccaggcgcttgcccgcccagtgccactgccgccgcttgcacaggaccagacacctccagcgcccgctgctgctgccgatgcggcccggacacttttagctgggcgggagggctgccgggggccgcc

SEQ ID NO: 29425 - DNA, 306 bp, Homo sapiens
  source 1..306: mol_type = other DNA
gaatatcctgttcctcaacagactcgagtcagttattaagttttaaaaagcgcctgttgctaaagataaatgttgtaaattaaaaaaagaaaacatatggagcccagacaggttcctttactgctcctgcctggccatggcaggaggactgcaggttccccgttccttcattagagaaggcttctgaagcattttcgattccgtgacttagacatcaaccatacgcaccatagactataggtatactgtccattgcaggatcacaatatgtataatgattcccaaggtggagatcttttccccata

SEQ ID NO: 29426 - DNA, 113 bp, Homo sapiens
  source 1..113: mol_type = other DNA
gcccggctttccctcagctccacgctgcagctgagctgtgcaccagggagtccgaggggtcctcccgcagcggggctgcgagtccgcgagctcgtatagcagctctgggccca

SEQ ID NO: 29427 - DNA, 324 bp, Homo sapiens
  source 1..324: mol_type = other DNA
gctctcaatttttcaccttatagattgattctcaaagttgaaaatcaaactgtgtttgcagtattaggacggtataatagtattcagtacagtacagtgtagggccactagtgaggccctgcctggcaataagcgatacttaataagaattagttgaagaaatgtccctttagatggaggaagggactttctcaagaatcgctatacccctagcagttctacacctaggggcctgcgggccgctgggtctgcgaagcttgcaaggcaactggccctattgctgcagacgcgcacctctagaacccgccccggaggggagggacg

SEQ ID NO: 29428 - DNA, 164 bp, Homo sapiens
  source 1..164: mol_type = other DNA
gagtccgcgagctcgtatagcagctctgggcccacccctggccttggcctggttggctggcgcgcatcagggccaggtaaatagcagccagggcgtgcgtacgttacgtgcctcccgcgtacgtgcgtggtgtgcatacatgcgtgattgcgcgcccacgtacg

SEQ ID NO: 29429 - DNA, 539 bp, Homo sapiens
  source 1..539: mol_type = other DNA
cacatactatgagtagatattaataaaatatgtgtgcatatatatagtataaagtctagaaatacaaacgaatatgtagctaaagatatatacatgtaagtaaatataagatataaagatatatatgcgtgtatgtatacatataagcatagatgtatataatgtctaaaacaggtatgtatataaacgtagatataaacaaaatgtacaataccatatataatgtacacatacagtgtaaaatttattaccatgtgaatgagaattaaaatatgaatgtaaaaataaatcttttaggacaaaaggttcaggtcctacaatcacaggtgctgcagccccccagggagcatctaaccctcctgagaggggactgaaggtccaacctccgtcagccctggaagcactgccacctcatgtgactgggagtcagagacttggtccgcaggtcaggaccccctgagggatgactgagggccccggttcagcccctactggcaacccagggaagctccaggcttgggggccggatgtgacgtcac

SEQ ID NO: 29430 - DNA, 456 bp, Homo sapiens
  source 1..456: mol_type = other DNA
gtcactgagctctgtgcccagaatcgagtcgggggagtctgtgcagaacagtgtgtgacacagacacacccacgtgcgtttctctggagacactggccgcagacacccggggtgtagaaggtctctgcctaggccgaggagaggcaggaaggaggctgcctccgactccccactggactgcatggcgacggcgtgtggtggggcagtcagctaagccatttgcctaaggggctgtcgggcgaaagggtggcgtggctacagcctgacccatgggcacgggcccatgactcagacggtgagctctgaccttcctgagccagggctttgcggctcgtgtggcagggcccctcggcactcagaatgtgcacatgcagatgggcagctacttgtctgcgctgggggtggagatgccaccccccggcagtcagagcccctttatgatgtcatggggctggt

SEQ ID NO: 29431 - DNA, 385 bp, Homo sapiens
  source 1..385: mol_type = other DNA
atctgcccaaagtgaagatggtaaactaggtcacctgctatgagcttgtcctgctcttggattccaaaagcaaacaaaatccttgaggaggttgacacacctagcatgtaccaggcagtgtgttatgaaagaggtttttatcatttccattctgcggaggagaaaaactgagacaaggaagatgaacctggtacgctcagtcgtcactggggaatctgccaagatctgcccgccagactcccgggcggcgcgctccctccctgcaggccttcagcccgtctcctccgccggtcgcgtgcggacacaaggatggggacctcccagcgaggagcgctctgggcggggctccggacgcatgcgcggccctcgtacggaagcccggaag

SEQ ID NO: 29432 - DNA, 322 bp, Homo sapiens
  source 1..322: mol_type = other DNA
tgctgataaccactaaaaagtaaataaagattggctttttaaaaattatcgttttaattgaagataaagaatggattaaattagagtattgaccattattaagtatgatttttgacactgaatgagaattaaaaaatgaaaatccaaaagtttgctaggagcccccgtaggaaggtgtgcatcttaggaccctcctgagtgaggactgacggtccaccctccccacatagagggggtcctgtcgaagaccttcactgccacctcaggggactcagagtcagagactagctccagcccacacgggcagaatcgggccaggcgt

SEQ ID NO: 29433 - DNA, 539 bp, Homo sapiens; identical to SEQ ID NO: 29429
  source 1..539: mol_type = other DNA

SEQ ID NO: 29434 - DNA, 623 bp, Homo sapiens
  source 1..623: mol_type = other DNA
taccttccaaaatactattattttaatcaaatatatataatgaactagaaatagaatagtatgagtgaatcacacattgtatgagtagatattgtttgataaaataagtacgtatagtcgacatacatatatgtataaatatatgtaaagatatatacacatacattcatataattacacatatataatataaacatatacatacatatgtgtttatgcatataaacataaatataatgcacatatacaattggcatagatttaaaattcgtttcttactatacgaatgcgaattaaattatgaaaatcactaaagtggaataggaattgttacttcaaaacgacttccacaaatttattgcagctactcagtttcttcagtgtaaaaataaatcatttagtacaaaagttttgcaaaatcctcttctagctggggaagagcccccgtgggaaggtgtgcctcttctcccagagaatgcctgggacccgcagccattctctgcaaggcagctgaccctcctgagtgaggactgagggtccacccacaccacgagctccaggctctgccagatctcaaagtgagaaccttgagggatgactgaatgtccacccaggtgagccct

SEQ ID NO: 29435 - DNA, 144 bp, Homo sapiens
  source 1..144: mol_type = other DNA
ccgcgagccctgtctcgagctccccggccttgtcctggttggctggcgcgggacaggatccggtaacgtgcgtacgtgcgtggcgacgtcactgcgtggcttcgtgaataccgtacgtgcgtggtgtacgtacgtgcgtgatta

SEQ ID NO: 29436 - DNA, 337 bp, Homo sapiens
  source 1..337: mol_type = other DNA
tgagcagctggtagtcctgacctcaggtgatttatttgattacacaatgaaggaattttggactgaaatgtttccgttcactagtcagtgaaaagtcttgtatagagaagttttccctctggatttcccctttactgaagaaaaatggggagacccagacaagggtcccgggactacgctgatggcctggctctcgggcgaagagccccgcccttcggagctgctccccaggtcgacccggcccccgtcacgtgatgcagtcccgccaaccggcacggggaggcgggcagcgggcggtggccgggggcgggcaggccgtggggggcggaccccagag

SEQ ID NO: 29437 - DNA, 368 bp, Homo sapiens
  source 1..368: mol_type = other DNA
ctcaaagttcagatctgccttttaacagtgagcacacccactcccaacttaatcaggggtgaggtgagaccaagatattggcttgatgttcatagcagtgattttttaatcaacagaagttaaatgttactcttaacataaatgggaaatcatttttgatacttgaatgtcttcccggtgtgactatagagtgaagcacgctacgcataatccgtttggggattccgaaccccagtggctctgtccaggctccgtgggcgagcgcccaggtggggctgggcgaggtgggggttcccggcgccggccccgcgcgccgccctccccgcccccgctcccgccccccgacccccgcgcgcgcggccttgtgg

SEQ ID NO: 29438 - DNA, 594 bp, Homo sapiens
  source 1..594: mol_type = other DNA
gagacggactccgttccccagtctcccgagcccgcggcgcttcggctccgggacgcccccctcccctgtcgcccacccgggcgcccccgggacgtgtcactgcttgttgaccgcagccagtcacgaaaactctccggccagggtttcactcctgcagggaacagcgggtggggacagtgcggggctccgtgctggacggtgtctggaggggccccaagggaaccaagagcccttcggaggaaatcggcgcccaccggcgctgccgcctcccgctccccggcactggtgactcactgctccaggtccgcggggccacctccgagacttcggtctcgaggaccgaggtgggacagggtctgcggaccgcgcgctgccgctggacccagcccccgggtgcccgcaggccacgcccctcgcccggagccccgcctccagaacgcggccccgcccccgatactgcaggcccaggcgccctcaggcgccggctctctagcgcgcccgacctccatcttcccggggccgcgccgcgcgcgcgcgcgggctttgggcgggaccctgcagaggcggcggggctcctcctcccgctcctcctcg

SEQ ID NO: 29439 - DNA, 476 bp, Homo sapiens
  source 1..476: mol_type = other DNA
taagaagaaaagtgttattctttgcccacaaaactacaatttctcacaaattctctgctcttgccaaccgcaatttcgggcgcaaatataggcagcgagaagcagctgccctccgccaggcatcgaggagcgagctgccgccgcgtttctgtcgcggcgccgcggccgaaccgggtagaggtggtctaccatcggcccttcgtggtgggcccaggggtgtttccccgggcaggggagctgactgcaggccaggggcgccaaggccgcggtgcggtgggagcagagggcagcgcagcggggctggacttcatcttcccacgccagaggccgaggcctccgggaatcgcagggccagcccttggcgatcccagttctgttccccgagggccggcgccggcgggtcgttggaatgaatgatcccagcagccgcgcccaatgggcgtccacgcctgcttaatatgcatgcgttttaaacg

SEQ ID NO: 29440 - DNA, 627 bp, Homo sapiens
  source 1..627: mol_type = other DNA
taagaagaaaagtgttattctttgcccacaaaactacaatttctcacaaattctctgctcttgccaaccgcaatttcgggcgcaaatataggcagcgagaagcagctgccctccgccaggcatcgaggagcgagctgccgccgcgtttctgtcgcggcgccgcggccgaaccgggtagaggtggtctaccatcggcccttcgtggtgggcccaggggtgtttccccgggcaggggagctgactgcaggccaggggcgccaaggccgcggtgcggtgggagcagagggcagcgcagcggggctggacttcatcttcccacgccagaggccgaggcctccgggaatcgcagggccagcccttggcgatcccagttctgttccccgagggccggcgccggcgggtcgttggaatgaatgatcccagcagccgcgcccaatgggcgtccacgcctgcttaatatgcatgcgttttaaacggcagagcccgctggccaatcagcggctcgcagctagcgcgaggctggggagcgctgagccgcgcgtcgtgccctgcgctgcccagactaggcaccgcccgctcccgccgccgccgccgccgccgccgccgccgccgccgccgccgccgccg

SEQ ID NO: 29441 - DNA, 361 bp, Homo sapiens
  source 1..361: mol_type = other DNA
gccgctcagtagaggagcatcccgagagggagaggcgtcagagcctctcgtcctgagtttcagcggggattggcttccgccgcctggctgccggcagctggaaaggagacgagctcccgctcccgttcgcccccaaactgaggaccgagtggcccccgctccccacttccagagtcgggcgcagggtaagcggctactcgcagctgccgctaagggagccaagaggctcctggggacccagattgggggtgggagctcccagcagtagtcccctgttccccgcgggacacagaagttcaaggggccaccggctatcccctataccctgctaaaggtaccctcttgaggctttaaaagctca

SEQ ID NO: 29442 - DNA, 326 bp, Homo sapiens
  source 1..326: mol_type = other DNA
gttgtagataatacaacaataaaattttatcaatagacgctgaaatttgaatttcatataaatttcacgtgtcatgttattcttttgacgttttcaacaatttaaaaaggaaaaaccattcttaagcctcagtttgcctaggttcttactcacctaaaggtctagatgaggcccagatagagattactattatttttattaaatattttacagtttgtttgagccagcattattcagtttgaactaaaacctggacccaggcgctgacagccagtggcaacttaattttgtcaagcctgcagctgcaaaatatgtttttaactttt

SEQ ID NO: 29443 - DNA, 481 bp, Homo sapiens
  source 1..481: mol_type = other DNA
ccaggcgctgacagccagtggcaacttaattttgtcaagcctgcagctgcaaaatatgtttttaacttttaactctcccagctgttgactaccactgcgggcagtaattaatgaggcatttatttgctcaagtagtggcgaaataatgcgctgcggcccccagctcagcgaccgagacgcagacgaggacgcgagttcagggggcggcgtagccgccgcccgcccaggaggaccatgttgcgcggcaagtcccggctcaacgtggagtggctgggctactcgccaggcctgctcctcgagcacaggcccctcctggcagggcgcacgccgcggagccaccgccggtaagtcatgtgagcgcccgcccccgcgccggcaacagccctgcgtcgctgcggcgcgccgcgccgcgccgcgcctgcgtactgtggcccgccgcccggcgcgaacgggcacttccggcgcgaacgggcacttccgg

SEQ ID NO: 29444 - DNA, 493 bp, Homo sapiens
  source 1..493: mol_type = other DNA
caggaagcggcactcctccgcaaggctcctgcgcacaggagccgacggccggggcagggaggctcgggcatggcggtctgcaggtcccaagccctgccccacagggaggcagctaaggcctgggagcacagcagctgctggcccaggtgctaagcccttcactgcccgggccttgcgggcccaccgggccactccgagtgcaggcccgctgagcccacgtccacccggaacttgcgctggcccgcaagcgccgcacgcagccccagttgccaccggtgcctagctgagggaaccggctctggccttggccagcccagaaaggggctcccacagtgcagcggtgggctgaagggctcctcaagcgcggccagagtgggcgccaagggagggttgccagctcgctgtcacctctcagaatagagccatgattggactcaaaaagacccctcttttctggagttatctcgggccccaacatcgcgaggtctaggga

SEQ ID NO: 29445 - DNA, 162 bp, Homo sapiens
  source 1..162: mol_type = other DNA
tacctgtttgccaaaaggattaggtggcatattataaaacagaagcatatgtgcttaacagcgtgactggcaatggattccacagttcatgtcttggcactctactgccatgggctttaatgcaaagagaggaagattccaggtatcttgatgaagaatgca

SEQ ID NO: 29446 - DNA, 435 bp, Homo sapiens
  source 1..435: mol_type = other DNA
cagagaaacagaactgataggatgtatatatgtatgtatgtatgtatgtatgtatgtatgtatgtatgcatgtatgtatgtatatatctgcatatgcacaagtatatagaaatttattttaagaaattggcttgtctgaaatgtgcaaggcagccctgcaggctggcaactcatagaattctcagctgattgtgtgaggcccactcacatcatcgaggatgggtccactggttgtagatgccaaccacagaggggagtcagaaggtgcagggcctgaggcccctgggggttctagtggctgcagtggatgggggaggtaggatacgctctccagagaatcccttctgaaggtgagaaatgatggagggtggaccccacccttctccccatgggctaaatatgcttctcctaagttgcttacagagtagcagagga

SEQ ID NO: 29447 - DNA, 225 bp, Homo sapiens
  source 1..225: mol_type = other DNA
gctgaatcgggttccggaatcctcaggggagcgagctgctgtctgaccagcagctgaggaggactcaggaggccaccctaccagccgtgggccacctgtgggcggacttctgagcttggggcgcccaccaccccactgcctctgaagtcgcaggggactctggagtcgctctgctcaggaccctaagagagggctaagcgtgctgaatcgggttccggaatcctc

SEQ ID NO: 29448 - DNA, 393 bp, Homo sapiens
  source 1..393: mol_type = other DNA
tattaatattattattattattattattgagactgtgctggagtgcaatgactcgacttggctcacaagtagctgggatttctatatttagtgaagacagtaggtattctttcatagaaataaatatatatgttgctacctatatatatccttggaagatatgtaaaatatatttctttgaggaaaaaaggtttaggagcccccgtgggaaggcgtgcattgctgcagccacccagggctggtacccgcaccctcctgagtgaagactgagggtaaacccccgctcaaagaggctgtcagccctgaagagcccccactgtgacctcaggggactaggaggaatccggttccacccctgctgtcaacccaggtggcccggatgtgacatccctg

SEQ ID NO: 29449 - DNA, 453 bp, Homo sapiens
  source 1..453: mol_type = other DNA
gtatgcttgagactcttgacgtgtcaagtggggcctggggccaaagcgggagccacattgtggcagtgcccccttggggttcagagaaactccctgcccccaaatacctgggaatttgccctgtggaatgctgagttacccggcttccttcatacgacaagacttgtattcacagtttgaccccgcggcgtgccagcgggcaggagggggtcgcctctggggcgtgagcacatccagccccctgaagcagctccctgccggccacagcctggggcgcgagtttcccccgcccaggccccgcgccgcgggctcgccgcctcctccctccgcctcccccgcccctggctgtctggcagcgccgcagtggcggcgtggggacggggggcctcagcaaccgggctcccgcctccttcccgcgcccgcgcgagcctccccggctccccagcagcctcc

SEQ ID NO: 29450 - DNA, 245 bp, Homo sapiens
  source 1..245: mol_type = other DNA
gtattctttcatgaaatgttatatatgtattcaatatacacttggcagacatttaaaacacatatttttactaggaatgctttcttgtagaaaatataccctttaggacaaaaagtttgccaagtgttgcagctccccagggaccatctggcctgggaaccgccctcctgagtgaggaccgagggtccacccacccctcacaagcccctgctgtcaacccagggaagccccggggaccgggccac

SEQ ID NO: 29451 - DNA, 512 bp, Homo sapiens
  source 1..512: mol_type = other DNA
cgttggcacagtctgcagaatagagaaaagttttcctccatcagcttctggaataggagattctatttggacatatgaaagtagcctttgcttcagatatcatgctgcatttatatctgagattcttgaactttgaaataaagctgatgaaaccagaatgctctggacttaagaactacatggtttttgctcttcagagagctatagcagattcctgaacatttcttgcaaatattcattccaagagcctaggccagccctgtgctaagaaagttcttccagaaatatttacattttaagtaaactatggaaatatcatttacacttattagtaattggtttgtgagcaagtaaaaacctctttgtgttttagatttttatctgttatgtaagttgaaaaattcttaccttgcttacctatcatgattgtgataaggataaaatctgataatgaatggcaaaatacatcataagagcacagatataatttattatattaatgtaacatcact

SEQ ID NO: 29452 - DNA, 223 bp, Homo sapiens
  source 1..223: mol_type = other DNA
aaactcaagttcctttatgggaatatagttcttttatactttgagtcaataatttatattccctttggaatttttgaaaagaaattgtctgtcttacctacagggaagctagaactgataatatgaagaagctcactcttcaggatgccttaaggaataaaatactactttagtatttcgtaaagctaagcaccaggcgagagagcgtgagcgcgcgcaagct

SEQ ID NO: 29453 - DNA, 296 bp, Homo sapiens
  source 1..296: mol_type = other DNA
tgaagagtttgactaagaaaacttttatactaatcattatatgtaagcagatgctgaattccagctctttattcacgtgcttatattgaatcaatgtgataagggaagggtcttttaagatcatctaccattcatttggtcactgaggatattgaaactcaagttcctttatgggaatatagttcttttatactttgagtcaataatttatattccctttggaatttttgaaaagaaattgtctgtcttacctacagggaagctagaactgataatatgaagaagctcactcttca

SEQ ID NO: 29454 - DNA, 282 bp, Homo sapiens
  source 1..282: mol_type = other DNA
tctgtggctccgagggaggagctccagagacaaggcggggttactggaggctcaagggtacggagtcaccagccgttgggtacctcagccccttgaggcggattcctggcccagcccccaaggagcccctcccccagcccggccccgccctgcctgtgtctggagatggccgggggatcgggggccgggcggcgcgcaggctacgggcggaggcaggagcgcgcgcctttttgtgcgccattggctgggcctgcgatgccgtcggagtgggcggagccagca

SEQ ID NO: 29455 - DNA, 459 bp, Homo sapiens
  source 1..459: mol_type = other DNA
accctgaaggcgcaatgagcacagagcacatttggccactgtgcccagcatgcagggctgggccccaaccccctgctgaagtggaaaaggtgcctcggtttgagacaggggtacagtgggccccctgtcctggcatgctgggtcccctcaggactccactgtcttccaggagggcctgggcccttgactcacgtgcctggccgccattcccggagcttccgtgactaccaggggcaaagcccggattctgctggccacattaagctctgtccccagagttccccgtggctaaagcggcggggcgacccagcctggaagtcttcccctgcggggtggcccaggcccggcagcagagtctgaggtgaggcccgcctcagtcctccctctgggccggcttccctccgccgacgtcaggccgtcgctcgttgctcagggcgagaatctcgcggtcttctaccc

SEQ ID NO: 29456 - DNA, 325 bp, Homo sapiens
  source 1..325: mol_type = other DNA
aatgggtagaataaaagtttgaaattttccacttcacttctttgcacaatctgaggcagcctcggcagaggaattacatttttaaaaaaaaaaaattctttcaacagaacgcgggagctgccgccccgccctgcagggagcacctggcctgggacccgcatgcagctgtgcaaatgctcacagggaggtgacgaagacgaccctcctgagtgaggactgagggtccacaccgcccccccgttccccgccacttcagggggactcagagtcagagacttggtctgagggatgaggctcagccaggcggctgagggggtagaagacc

SEQ ID NO: 29457 - DNA, 502 bp, Homo sapiens
  source 1..502: mol_type = other DNA
gagaggaattatgttttttaaaaaaattctttcaacagaacactgttagttcatagaaataaatatatatattgctacctacatatatacttagaagatatgtaaaccgtatttcttcaattcagagaataaatcatttgagcccccgtgggaaggtgtgcgtcttctcccagaggtcactatcatcgcgggagctcctgccctgcagggagcacctggcctggcacccgcagccattctacaaggggtgcagatgcgcagatgcgcagatgctcagaggtgacagatctcccaccagccaggagtgaggaagaggaccctcctgagtgaggactgaggatccaccctcacccatcgggccgactcagagtcagagacttggtctgagggatggcggtccaggctcagtctggcatccaagtcaggaccttgagtccgggcagaatccggttccacccttgccgtgaacccagggaagtcacgggcccggatgtgacgccac

SEQ ID NO: 29458 - DNA, 486 bp, Homo sapiens
  source 1..486: mol_type = other DNA
gaaggtgcaatgagcacggggcacattcggccactgtgcccaggatcccccagccgggctgggccccaaccccctgctgaagtgggtctgcatccctaggattcccgcggctgaatgaaaaggtggctcagtttgagacaggggtacagtgggccccctgtcctggcatgctgggtcccctaaggactcctccaggagggcctgggcccttccttgcttggccgccattcccggagcttcctcagtcccctcgtcctgactcctggctgagtctgggccctgagtacgccagagttccctgcggttaaagcggcgggtggtggcgactcagcctgagaagtcttcccctgcagggtggtccaggcccggcagcagaggcagcgctgggggccctctgtctggggtgaggcccgcctcagtcctcccgcttccctccgccgacgtcaggccgttgctcagggcgagaatctcgctgtccaagtcagt

SEQ ID NO: 29459 - DNA, 513 bp, Homo sapiens
  source 1..513: mol_type = other DNA
gagaggaattatgttttttaaaaaaattctttcaacagaacactgttagttcatagaaataaatatatatattgctacctacatatatacttagaagatatgtaaaccgtatttcttcaattcagagaataaatcatttgagcccccgtgggaaggtgtgcgtcttctcccagaggtcactatcatcgcgggagctcctgccctgcagggagcacctggcctggcacccgcagccattctacaaggggtgcagatgcgcagatgcgcagatgctcagaggtgacagatctcccaccagccaggagtgaggaagaggaccctcctgagtgaggactgaggatccaccctcacccatcgggccgactcagagtcagagacttggtctgagggatggcggtccaggctcagtctggcatccaagtcaggaccttgagtccgggcagaatccggttccacccttgccgtgaacccagggaagtcacgggcccggatgtgacgccactgacttggaca

SEQ ID NO: 29460 - DNA, 530 bp, Homo sapiens
  source 1..530: mol_type = other DNA
gagaggaattatgttttttaaaaaaattctttcaacagaacactgttagttcatagaaataaatatatatattgctacctacatatatacttagaagatatgtaaaccgtatttcttcaattcagagaataaatcatttgagcccccgtgggaaggtgtgcgtcttctcccagaggtcactatcatcgcgggagctcctgccctgcagggagcacctggcctggcacccgcagccattctacaaggggtgcagatgcgcagatgcgcagatgctcagaggtgacagatctcccaccagccaggagtgaggaagaggaccctcctgagtgaggactgaggatccaccctcacccatcgggccgactcagagtcagagacttggtctgagggatggcggtccaggctcagtctggcatccaagtcaggaccttgagtccgggcagaatccggttccacccttgccgtgaacccagggaagtcacgggcccggatgtgacgccactgacttggacagcgagattctcgccctg

SEQ ID NO: 29461 - DNA, 453 bp, Homo sapiens
  source 1..453: mol_type = other DNA
atggggcacattaggccactgtgcccaggatcccccagcgaaaaggtggctcagtttgagacaggggtactttgggccccgtcctggcatgcgggagccctcaggaggggcttgggcccatcctctgctcaggatccgcgtgcttggccgccattcccggagcttcgggtgcggggggttaccctcagtcccctcttggggtcctgaccttgattcctggctgagtctgggccctgagttacaccagagttccctgcggttaaagcggcggggtggtggcgactcagcctgagaagtcttcccctgcagggtggtccaggcccggcagcagaggcagcgctgggggccctctgtctggggtgaggcccgcctcagtcctcccccgacgtcaggccgttgctcagggcgagaatctcgctgttccagtgggccccgtgacttccctgggttcac

SEQ ID NO: 29462 - DNA, 582 bp, Homo sapiens
  source 1..582: mol_type = other DNA
gtgggggtaacaggatgtggcccctccctagttgatgaccttgttttcagaaggtgactcaggtcaacacaggggcccccatctggtcgacaggggccccctgccctgcccctgcggttacttcagagaccctgggcagggctgtcagctgaagtccctccattatcctgggatctttgaggtcagtagagggagggtctcaggccctgccaggagtggacgtgaggaccaagcggactcgtcacccaggacacctggactccctcgttgtccttgaccagatgtgggtcccctcatctccttctgtaccatatcagggatgtgagttcttgacatgagagattctcaagccctgaggcacagaggggaccctccacccaagtagagtggggacctcacggagtctggccaaccctgctgagacttctgggaatccgtggctgtgcttgcagtctgcacactgaaggcccggaaccaggcagtgaggccttggtctgagtcagtgtcctcaggtcacagagcagaggggacgcacactgaaggtttgcctggatgggactccagagggcctggcctcaccct

SEQ ID NO: 29463 - DNA, 456 bp, Homo sapiens
  source 1..456: mol_type = other DNA
ggaattacgtttaaaaaaaaattccttcaacttagttcgtagaaataaatatatatatcgctacctacatatatacttggaagatatgtaaaccgtatttcttcaattcagtgaataaatcatttaggaccagaggagctcccgtgggaagggagctcccgccctgcagggagctcctggcctgggacccgcagccattctctacaaggggtgcagctgtgcaaatgcacagacgttacacaaggaagaggaccctcttgagtgaggactgagggtccaccctcccccacgtagtcagtgccacttcagggggactcagagtcagagacttggtctgagagaggatggcggtccaggctcagcctggcatccaagtcaggaccttgatctggatccccatccaggaagaatccagttccacccctgctgtgaacccagggaagtcacggggcccac

SEQ ID NO: 29464 - DNA, 513 bp, Homo sapiens; identical to SEQ ID NO: 29459
  source 1..513: mol_type = other DNA

SEQ ID NO: 29465 - DNA, 486 bp, Homo sapiens; identical to SEQ ID NO: 29458
  source 1..486: mol_type = other DNA

SEQ ID NO: 29466 - DNA, 422 bp, Homo sapiens
  source 1..422: mol_type = other DNA
atcatgcttttggtgttgaatttaaaaactcatcaccaaactcaaagttatgtggattttctcttagacctatgatgtatcttggaatattaataccgacaccttttgttggaaaattcatattttgaagccctcagccccagggtgtcttgatcccagacagaagaaagtacttttgtgcctacatgattctctctctctctgcacatgcacagaggaaaggccagatctaggacttccagacttcaaaactgtgagaaaaaaaataaatttctgttgttttagctactcactcaatggcattttgttatggcagcctgagctgacttaagacataacttcaggtgacacaattttttttttgtttcctcctagaaaaaaaaaaagtaattttgacatttaaagtctgtagttcattttga

SEQ ID NO: 29467 - DNA, 338 bp, Homo sapiens
  source 1..338: mol_type = other DNA
taaagcctatgactctttcacagagaaagggtccactccaccagcctagggggaattgcaccccaattcgcccaattcggccctgtgggctcagggacttcctggcagtcctttgatgcatggggttcatgcattcttcctttactattaaagtagctacatcaggaaatcacagattctgttgccttcaactgcagatagttaaggagatttttcttctttcttttgttaaaacaattttaggttaatggtgctttattggggtataacatacatacaataaattacccagatattgtgtccaacttagtgaaaaatttaacaaatgtacactccca

SEQ ID NO: 29468 - DNA, 308 bp, Homo sapiens
  source 1..308: mol_type = other DNA
aatgggtagaataaaagtttgaaattttccacttcacttctttgcacaatctgaggcagcctcgagaggaattacattttttaaaaaaaaaaattctttcaacagaaccgcgggagctgccgccccgccctgcagggagcacctggcctgggacccgcatgcagctgtgcaaatgctcacaggccctcctgagtgaggactgagggtccacaccgcccccccgttccccgccacttcagggggactcagagtcagagacttggtctgagggatgaggctcagccaggcggctgagggggtagaagacc

SEQ ID NO: 29469 - DNA, 295 bp, Homo sapiens
  source 1..295: mol_type = other DNA
gggtgtcaaaaagagtatattttgatgataagatcgtcagtctaggggtgctctcgaagggccaccctcaaagagcgagcctgcccagtcgctgacacagggtgaccggcaagcaggcaggattggcccagctcggcgacgactcagccaattggcctgtcgccagcgtgcccctccccgcgctgggccggggctttgccaggttagtcccaccctcttcggccctgcaccaatagggagaggcggcgacgaggggagcggggctgcgcgcgcggggcggtgggaacggcgccga

SEQ ID NO: 29470 - DNA, 445 bp, Homo sapiens
  source 1..445: mol_type = other DNA
tatatcatacagtcatatttaataacatagttacagacacccatatgtatttttaaagtcatttatataaccaattccaaagctttgcttaaaacaagaacaatgaatcttcttgttcagtaagtgtgaataactagagataatcagctcttcccgaacgtggggatcctggttctgaaaacagtcttacgatgccctacttcccaattacttctagatttggccaaatattagtaagttgttaagatgtatattgtgtcagtaccgagtaataaaactttaaattgtaaaaaacattgtactgtgtgaaattttggcagaatggtctgtaccctactctcccggcgtggccgagctggggcctgggaagggctcagccgctgggcgtggggcgcgacagagcggcagcactcaccatagccaaaggagtccgctgccggttgtt

SEQ ID NO: 29471 - DNA, 464 bp, Homo sapiens
  source 1..464: mol_type = other DNA
cgtggggatcctggttctgaaaacagtcttacgatgccctacttcccaattacttctagatttggccaaatattagtaagttgttaagatgtatattgtgtcagtaccgagtaataaaactttaaattgtaaaaaacattgtactgtgtgaaattttggcagaatggtctgtaccctactctcccggcgtggccgagctggggcctgggaagggctcagccgctgggcgtggggcgcgacagagcggcagcactcaccatagccaaaggagtccgctgccggttgtttcggcgccgttcccaccgccccgcgcgcgcagccccgctcccctcgtcgccgcctctccctattggtgcagggccgaagagggtgggactaacctggcaaagccccggcccagcgcggggaggggcacgctggcgacaggccaattggctgagtcgtcgccgagctgggccaatcct

SEQ ID NO: 29472 - DNA, 363 bp, Homo sapiens
  source 1..363: mol_type = other DNA
aggccaactcctggccaagtccatgccatttcttgggctgagtctggctgtatctcgtcgcccagcctgggagagcaggacttcctggatgtgtcgttggccctgtgccggggccagatcgcgcaactaggagcgggggcccttcacgtggcggaggcttcccggcctgggggccacgggcccggaggaatttcaagccttctggagctcgccccgtgctcgacaaggggagccccagacttgatttctccagcagccccgcggggcggggccgagaaggggcgccaggcgcctctacctaccccaggaggggcagaggaaggggccggccgaggctccgggcggccggagaaaacctgtttg

SEQ ID NO: 29473 - DNA, 323 bp, Homo sapiens
  source 1..323: mol_type = other DNA
acccctcatgggcacgagagggcagcactgggctcaagggcagacagtgtggcaccgtctcctgagggccactaggatttggcagtggggccctgggctttccccactgaaggtggagccaacccccaccgcgcctctcctagcagtgaaaggtagaattttttttttaactatcattttacaaatgatgaaacagaggttagctgacctgcccaaggtctgagcctgagccaggctgttagcactctgtaggagctgcgctgggcagcagcaggtacagtgagtgctggccccatgatcttggtgtaccaggacccatatgg

SEQ ID NO: 29474 - DNA, 386 bp, Homo sapiens
  source 1..386: mol_type = other DNA
ccggtaagtgaccgcaggactctgccggctccagggagctcaccggcatctcctgggctctctttcaggggagcccatcctggcagagacagtgctctgcctatcaggccagctttcatcctgggtagggcaggaccctggaggtcctgggccactaacagtgtccttgtcctggggtcagtcctgactaggcctggccccctagccaggctgaagttgcatgcaattcaagcaccttggcatcaggcattgcctgggaggcaagagcccgctgggctgttccctgaagctcgcctacacagctgctctgagtggcgcagttcaggcagctcctggtccacctctcatgtgtccactggggcaggagggagcctgcaggtagacac

SEQ ID NO: 29475 - DNA, 307 bp, Homo sapiens
  source 1..307: mol_type = other DNA
tagggcagcaaccttaccttaggatcccgcaccagggtcctagtgaacacctatgcagagtctgaattggcatggccagggacatgtgggacagaatcacagcaaaatacctctgctttgccatcacgcctgagtcaggaactgcctaactggctgtgttattgcagcatccgcgctgccagcagggccaacccagcaaggtgagcagctgtgttgggccctgttgggaggggctctggaaccctggcacctgccagggttcacagactctgcagccatggtccatggtattctctgtatccatggc

SEQ ID NO: 29476 - DNA, 427 bp, Homo sapiens
  source 1..427: mol_type = other DNA
atgtaggccagaacactgccgtgcgagggcaatgtgtggcttgctccccagggcatgcatggaggctcccggcaccccttgccttccccagagtctgggtagcgggcgcaggacctgtccaaatgcgcaactttcaccagtgtacgctacgcgtgcgcgcctgtgcaccttgacgagcacgcagccgtcatgagtgcgcctgggagctcactgcaagcctcccgactagctgggaacagtcacagtcggtcgcagtgcccgctgggaaaatggaaacggccatcggggcgagttcggcctcggcggggattctcctgaggtcacgcccgctctggccgccagaggacgcccgggcccgaggagctggctgccccttcccacgctcaaggtctgcagccgtggccagagtggccttggggtgaccgcg

SEQ ID NO: 29477 - DNA, 642 bp, Homo sapiens
  source 1..642: mol_type = other DNA
cactgcctgagggacttcatttggctgctgccctgggatcaaacggatacgcaggcccaagggattgggctccaagtcctggaagtggtttcccaagccggtaaacctgtccactggcacctgggcagcgaagcgctttggccggagggcctcaggtcccagcagcgggatggacagcggggacctgcatgagtgcctggggcatctcctgcacggaatggcacccgcaccaggtgcccctggcctcgccagccagaggaccagtcctggacggggaggggtgaacaggccccagaacccggctccctgaccctggccataatgcagagctgcctggcgcacctcagaccactccctggccctctggtgggcacgccggggtgcagacccctcgccccgctggcacctccgtggcacgtgcgggaggggcaggagccgggcacggggactggccgccacagacctttggccaccgcagtggggatgggggtgggcgggcgcttgtgtgcccgggggcccgggggcccccgtggcgggggggctaggggagaaggtgacgtcacccggggacctggggcccccaggggcggcggcgagagcccgacctcgtgacccgtccgcgccaatggccctgcggtctcc

SEQ ID NO: 29478 - DNA, 290 bp, Homo sapiens
  source 1..290: mol_type = other DNA
ccctcccattgccacctcatgggactgggggccagggtgtccagattctgccaggcatgaaagtcaggaccctgaggggtgaccgagggtcccccaaccccggggcacgggaagcccaggccagtcctggaccatctggtggtggacttctcaggctgggccacccccagcccccttgctaaaccactggggactctgaagtcagagcggattctcaaggagggctgagggtccctaagaccgcaggatccggttcccgccaggaaacatccgggtgcccggatgtgacg

SEQ ID NO: 29479 - DNA, 532 bp, Homo sapiens
  source 1..532: mol_type = other DNA
agcaggccctgctgtgtgctgcctgcccacccagcaagccatgctgtcggctgcacgacagacacatatgctcctgtatagcatcattacagcccaaggcagggaccaggcgagcacttgctagtccaagacattgctgggcaggcacagggtcgttgatgggccaggcccctcctttcccctggctcctggcatgggtggcatgtgggggcaggggcactggggacagctggccttggcctggcttaggccccttgcccagggctgtgcctgcgcccagaagcagctacacttcatggaccagttgctcgataccatccggagcctgaccattgggtgctccagttgctcgagctggggtgtcactccccctctgatgctggctggggtgtgacaccccacttggggatctggctggccaatcaggggccgggcagcgcaaggggcagctgtgtcccaagggtgctggctgttgcccaaggccccgggcgggcaggattctgcgcggtggtgcctggccccgatgctcttc

SEQ ID NO: 29480 - DNA, 413 bp, Homo sapiens
  source 1..413: mol_type = other DNA
gctcttctgagtgatgactggcagtggtacgtgctcctggaggcctcagtggcagcaccctggcctcctgtcccagccccaggctgcttggagacacccctggcagcggtgagttgcattctctccctgcagggccagtgcctctgccaagtccgaggaggaggagaagctggcggagcttgccaggcagctgcaggagagtgctgccaagttgcacgcggggttgcttggaggcaaggccctgctttgtcacctccctcagcacgtgaggcttaggcgaggttgcctgtgcacgggatcagcctcaggtattgggtggtgcccacgcctgagcacattgccatgtgccctggctctggccgcctggctggtgggcagggcagcctcaagctttgcagtactttgcacagcat

SEQ ID NO: 29481 - DNA, 310 bp, Homo sapiens
  source 1..310: mol_type = other DNA
cccctggcccactgtgctgggaacagggtgcccggggaatggccagctcagaaaatgccctgggcaccctggcagatgtggctggatagtctgcagtgtgcacggcggtcttccacccccagggctgctggcagggtgatagcagacctttaggacatggccagatacagtgcactgtagaggttcactgacccctgtccactcctcaggcagctgctggcttcttgggtacaattccggggccactcagcaagaggcagcgctggcacctgggtgcctgcctcctgtctgggcaggtgcctgccatgat

SEQ ID NO: 29482 - DNA, 225 bp, Homo sapiens
  source 1..225: mol_type = other DNA
gttcatgcacctgccagcgagaagcactgggaacagccagctgagggctgagggtcctgagcatgcgcacagggccccaggtgggctgtgcctggcagcttgggggccagatcaggccaggccatgtgggccccagaaggacgtggcccctggcccactgtgctgggaacagggtgcccggggaatggccagctcagaaaatgccctgggcaccctggcagatgt

SEQ ID NO: 29483 - DNA, 356 bp, Homo sapiens
  source 1..356: mol_type = other DNA
gtccctgggcgtgaggggagcagcaacccagtgggtaacagctggtgagtgacaagaaatttccttctaactactgggagaggaacgcttcagtccgagttccattctgcacccaaggctccccttggtcctcctgggaaccagggtgccccttagtggtggtggcccaggagaacccgaccaaggcaggagcgccccctcctggaagagcctcgcttctcccggccggcagcaggggcgacgccagcaaggcctgcgactcagagccagcttggtgccggggcggggggtgggagcccggggcccgcgcaggcggagatgtcgccttggcggtcttgccggccagtgaagccagg

SEQ ID NO: 29484 - DNA, 356 bp, Homo sapiens; identical to SEQ ID NO: 29483
  source 1..356: mol_type = other DNA

SEQ ID NO: 29485 - DNA, 360 bp, Homo sapiens
  source 1..360: mol_type = other DNA
tgcccaatcagcaggtccctgggtaaggggcattcacgtgaggggagcagcaacccagtgggtaacagctggtgagtgacaagaaatttccttctaactactgggagaggaacgcttcagtccgagttccattctgcacccaaggctccccttggtcctcctgggaaccagggtgccccttagtggtggtggcccaggagaacccgaccaaggcaggagcgccccctcctggaagagcctcgcttctcccggccggcagcaggggcgacgccagcaaggcctgcgactcagagccagcttggtgccggggcggggggtgggagcccggggcccgcgcaggcggagatgtcgccttggcgg

SEQ ID NO: 29486 - DNA, 407 bp, Homo sapiens
  source 1..407: mol_type = other DNA
gtctcaggagctgctcttggcagtgtcgtactaagcggctctctcatttgggccctcaggaagcggctgagtcttggtggggtaacccggttagcccccgtaagtgaccagcacagggctgagcccagcaagaagactgactcgctggatccttcgtccagggcaggcaagctggggagccccctgccccgtcctgccaccaccagccggatcggggcctaacctccttgcttaggcccaagcaggttcctggcaggtcatgggcctagcagcccaaggcgcctggcgagatgccagccagcacctcagtgtccccatctgggcagtggaaagtttgactctctgccccaggcggggggaagctgccaggggggccgggaagcctgccccctcctgctcgcccgccc

SEQ ID NO: 29487 - DNA, 570 bp, Homo sapiens
  source 1..570: mol_type = other DNA
atcagaatgactccagtgactgtcactaacttgggagtgagtaccttttggagtaaatacctgagttcgatattcagtattcgaaaaggccctcttggaattttgtgcacggtggccgctgtcttctcagacctcagacaccggcgcctccccgtgaactcccgcaggcgtccctagcccagggcttggcgggcgctgccggttgtacctggcctaagccacgctgggccgacagcccggggcgacacccccttcggacggcggggatttgcggctcgggtgaccggaggtgccctcccgcgggtctcggagcagctccgcgggctctcgctccgcggggaggagcctgcgtctcccaggggcggggctcgaggcgcctaggggccggtggacacataccagccgccccgtggtgtcggcctctgcgcctgcgcctgcgcctgcgcgcgcggccaggcagcgtctgtggcgcaagcgcgcgctcacccttgggcgagggccctgaggggcggggcggggcggcgaggggcggggcggggcggggccggacgcggccgggtggggcggcag

SEQ ID NO: 29488 - DNA, 438 bp, Homo sapiens
  source 1..438: mol_type = other DNA
gcctcctgccgggtctcaggcccccactgcaggcacgaggccgggctcatacactgctggtctgggagccccagaaaggccaggtgcacagggagccacggactcagtttccctggctgtagcaatcccctcagacttccggaactgctgtaaggataaacctttgagcaggaggtggctctggggcaccaagttgcgcccagtcctcaatgggccccttcgctggggtgccagtgcagattctcctagcccaggcccagcctagttcagggccccaagcgccggagcccccactcattggcgccactggggaccggggagcgcagggcgcgtcgggcaggactgggaggtggagggagacgccgggcaggccgcggcccctccccgctccctccccgcgagccgccagctacagtgcccctcctgggcagggggcgg

SEQ ID NO: 29489 - DNA, 230 bp, Homo sapiens
  source 1..230: mol_type = other DNA
aggcctgggctggggcccttgcccactggagtccagctgcccaaagcccttggatgcggaaagcagcccagtgccagggtcctgggagtccccggctagcagcccactgccctagaggtgaccctctaactccatggctcctgagaggagtctttagatcttgatattcagattaatagcaatcttgccagcactgcgtgttctcaaaaatgagaacatttctaatgcag

SEQ ID NO: 29490 - DNA, 448 bp, Homo sapiens
  source 1..448: mol_type = other DNA
ggaggaaaggatggaggccaccagccttggacctggcctaaagctgatgaatttgagccctcggctaggtagaaactagttctttccactttgattccaggagctacccctgcctgcctagccctgcagcagacctctgggccaaagctgcacaagatgctccagtatcaccctcttctgcggcagaggggctgggctctggtcctcacccctccccctgcctcccgaggccaggctggcgccggccaggggagccgcagctggtcccctgctgggcccctgacctgcccttggcctctgccccgaccccgtcccgcctcggtggaagccccagctcagccgactcgcaggtcccacccgactgcttcggctagcacccgttggctcaccggcccgccgggcccgcccccggagccccgccccggcccgcccctcggagttgtaactc

SEQ ID NO: 29491 - DNA, 352 bp, Homo sapiens
  source 1..352: mol_type = other DNA
gattgaattcggtgggcagtcgttaggccgccccccagggttgcagggtcctggtggccgggtcagcctgtcctcggagagggcagagagccttgccgacctgtggccgaagagctctccgggagacagccaccggtggtgcaaaggccctggggccggcccagccgggccgcagctccgggaggcggcgcgagcgagcagtgggctgggcggtggcggccggcacccgagccggatcccggcgattgccttacaaggtgccctgcggcgccgcggccgcgctgggccactgcgtgcttgggcggctggcgggggcgtgcgcggagggggcggggccggcggggcgcgggcg

SEQ ID NO: 29492 - DNA, 774 bp, Homo sapiens
  source 1..774: mol_type = other DNA
ggcagcccaagtggaggctctcctgtcctgtcagtgccctggcccctgaggtcagggccttgagaggtctcgggcagagggggcgtctcttcctctcctcccccggtggcgcccctccccggggcaccaggcgcgtccgtccgctccgcagcctggctgaagcgacagtgactatccccacccactcttccccaggggcgagtcgggggaaggggagggggcgaggggcggagtccgggcgcgggagccccaccctgttctcgcccctcggcggggcccgcccacgcccctcggcggggcccctcccgcaccacagagacgtgggacggccgcgcggactagagaagcggccctcgccggcccgacaaagccccgccgccctgctcgcccggagcccgaggcgcctcttcctctcccgctcggagcgccggccctccgctccggggcggggtgggaagcggaggtgggcggagcctccggggcctcgcgagggctggtgggcggtgcccggcgggcgcttccggtttccggccgcggtaccgcctgggaaactcggtgagcgggctccgcgcgccgggctgggctccgggaccgcggaggctccccggcccatcgacgagggagagaggcgagcggcgcggggaggcccgggggccggggaatctcggggcccgcagcctacctgcgtgccgggcggcgcctctagaagctggtctcgggggcggggggcggtgaagccccacctggaggagcggccgggatgggcctccggga

SEQ ID NO: 29493 - DNA, 732 bp, Homo sapiens
  source 1..732: mol_type = other DNA
tgggcgagggccaggagcacggccgtgcgcttcagcgtgttcccccgccagggccggggcctggagagcaccggcatgtcacctgggctggcgcctgggactgttgtctaggcaactggcccccggggtggtgctggggcccctggtgcggtgggctcagggccctccagggtcgcggcctcttcgggcagcccaagtggaggaacttggctctcctgtcctgtcagtgccctggcccctgaggtcagggccttgagaggtctcgggcagagggggcgtctcttcctctcctcccccggtggcgcccctccccggggcaccaggcgcgtccgtccgctccgcagcctggctgaagcgacagtgactatccccacccactcttccccaggggcgagtcgggggaaggggagggggcgaggggcggagtccgggcgcgggagccccaccctgttctcgcccctcggcggggcccgcccacgcccctcggcggggcccctcccgcaccacagagacgtgggacggccgcgcggactagagaagcggccctcgccggcccgacaaagccccgccgccctgctcgcccggagcccgaggcgcctcttcctctcccgctcggagcgccggccctccgctccggggcggggtgggaagcggaggtgggcggagcctccggggcctcgcgagggctggtgggcggtgcccggcgggcgcttccggtttccggccgcggta

SEQ ID NO: 29494 - DNA, 473 bp, Homo sapiens
  source 1..473: mol_type = other DNA
gggccccctctgtggatggccctgccacagggggaacagtgccccagcagaaaagccccagccctgggtcccagtgccaccagcttgcagttgcccatggcgagacaagttcaagttcccctgggagacgttgaccaaccttgtgttccagtcggtgggaaacactggtttttcctcaacgccacgtgggcatgtcacgtccaggcctggcctggggtaggcctcagctccatctcctgccccaaggtcatgtagcctgacggttaagtgaaggggccctgtgattgagtgccagtgccaagcccaagcctggcatccagtaggtaggttatggaatgcccacccaataggagggcgctgccgtctctcacctggccatcatgcccgctgcggccagcagagggcagcaacatcctgccctgtgccattgggcaaaggggcgggcggagagaggctgggctgcctggccgggc

SEQ ID NO: 29495 - DNA, 717 bp, Homo sapiens
  source 1..717: mol_type = other DNA
ctccggtgggctggaggcccgcaagagcgactcaggggtccttacagtagccctcgcgggccccagcgcccacccagagcgaggggcctccgacttggccccggcctggcacaccgtcccggaggcccatcccggccgctcctccaggtggggcttcaccgccccccgcccccgagaccagcttctagaggcgccgcccggcacgcaggtaggctgcgggccccgagattccccggcccccgggcctccccgcgccgctcgcctctctccctcgtcgatgggccggggagcctccgcggtcccggagcccagcccggcgcgcggagcccgctcaccgagtttcccaggcggtaccgcggccggaaaccggaagcgcccgccgggcaccgcccaccagccctcgcgaggccccggaggctccgcccacctccgcttcccaccccgccccggagcggagggccggcgctccgagcgggagaggaagaggcgcctcgggctccgggcgagcagggcggcggggctttgtcgggccggcgagggccgcttctctagtccgcgcggccgtcccacgtctctgtggtgcgggaggggccccgccgaggggcgtgggcgggccccgccgaggggcgagaacagggtggggctcccgcgcccggactccgcccctcgccccctccccttcccccgactcgcccctggggaagagtgggtggggat

SEQ ID NO: 29496 - DNA, 715 bp, Homo sapiens
  source 1..715: mol_type = other DNA
gggtacagggtagagaggctgcccgcctggctccccacccccacagccctggcccagccaggtgacagcagcccactgccaccttgccctggagcctactgctgccgtgctgtgggggaggcagagaccccatccccagtgcacctgctcctgtgccactggccagggtggcctgtgagggtgacagggggtctagctgctaggtgcccctcccttccccatcccctgcatggatggcatctaggccagcaggacggtgcttcagagggtggggtggacagccccggcctgtggaccctctgtggcaccacttcaccagtccccaggggcagggctgggctgggggtgtgcattgagggccaggactggcacttcacccagccggcatttgcaggggctccaaggtccaccccgtgcccttcacagggacccggggagccagggaggggggctggctggaggaaaccccggccctttgtccccggatcccgggggtggctccctgagggtgggaagtggcaaggagccccctgtccagaacagcccagtgggggtgacagcactagcgagtggggccctggcctggcctcgaggcagggctgccttggcctggccactattgacaaagctgccagctgtgagggagcccggtcgctaggccctgggcgccacccccaccgccgccccaggccagctcgaatggggctgagcctcg

SEQ ID NO: 29497 - DNA, 501 bp, Homo sapiens
  source 1..501: mol_type = other DNA
cccggccagctggcggatggccaggggtggcacccctgccgacagcttgcccgccaggcctctggccacaagcaggaggtcccggccgggcaagggcaccaccagccccaccgttgccactcccggggtattggcagccactcaccagggtggtacagcacctcggccacatccccaaggcgccgtgtctcacacgccctgccgcacctgcccgcaggccaccagctcctgggcgcggctgctcaccagcagcagctggttggcattgtcagtgagctgggcctgtgggcactcggctgggtcacggaaggggctgtcgattacagggccagtgacagccacggcctcgagctgcagctcggggctgagctggaagaggcggcggccaggtgccagtgcagcgagccatcacgggggcctgtgagagggcacaggtcgtgcatgcacgcacgcacaagcacacagaattctttcatctcctactttatatgcatgtagatt

SEQ ID NO: 29498 - DNA, 370 bp, Homo sapiens
  source 1..370: mol_type = other DNA
tacatgctcttccgggccatccagtaccaggtggacaaaggccgcgggaggacgtggagttccagcccctgacgctgatggtgctggtggggcccggggctggcggggccgcaggcagcagcgagatgcagcgcgtgccagcccgggtgctcgacacggacaccatcacccaggtcaaggagaaggtgttggaccacccccttctcccagaggccctcagtgcatgccctagaccttggtgagagagccagccctgcccacccacgtggagagcaggctgtagactatctgcttccctgactccctccagagtggcgctcaggcctggctggtcacggcagggcggggctggggcggggcgaggcagggc

SEQ ID NO: 29499 - DNA, 356 bp, Homo sapiens
  source 1..356: mol_type = other DNA
cgtggagagcaggctgtagactatctgcttccctgactccctccagagtggcgctcaggcctggctggtcacggcagggcggggctggggcggggcgaggcagggcccagatggagcaacagtggggctcgtccctcagctgcaccgtggagcctggcccagaggtgccccttgggagagagtgagtccctcggccctgacctggggccactggagtccaggctgggcaggcagaactcctggccatgcatctgcccacactgccccaccttgtcgggggagtggactgggcatcccaggccaggggcagggggtatagccctgaagccaggctcctgtgccctcagacataccca

SEQ ID NO: 29500 - DNA, 408 bp, Homo sapiens
  source 1..408: mol_type = other DNA
cagggaccctgcacatctggaagaccaacaggtgcctttccccagggtggatgcgcccacctggggtttctggaacttacaggaagatctagggcccaggtcacctaggccaccaggccagcttccagcggcccctggctccgagtgtgttgccacgatggcaggccagggcctcacgcccacgcctgccctgcgcccccgtgtcggacaatgtggacgccatccgcagtgccagcagcagcagctggcaggggccctagagggctgtgcacagagctctgggtgcgggagatcccacgctacaagcagcggggaagggggctgccccacccctatcgccagagctctccggcgagctaccaggagatgagctctccggggtgaggcatggcccggggggtgcgcctg

SEQ ID NO: 29501 - DNA, 501 bp, Homo sapiens
  source 1..501: mol_type = other DNA
gcagtgccagcagcagcagctggcaggggccctagagggctgtgcacagagctctgggtgcgggagatcccacgctacaagcagcggggaagggggctgccccacccctatcgccagagctctccggcgagctaccaggagatgagctctccggggtgaggcatggcccggggggtgcgcctgtccacacgtgaggaccaggctgggacctcacgagcgggaggcccgtggaccctcccgggggagcaggggtgccagcccatgctggcggggcccaggctggggaagggactcgtctgattccccagggagacgccaggcagcccctgctggatccccaggctcctgcggtgatggaagcagggtgggtggccctgggccagcaggcagaggggcaggctcagacaggcaccctcctctgcccgggcagattatcagtgccctggaggaggaccctgtgggccagaagctgcagctggcctgccgcctgcagcaggtcgc

SEQ ID NO: 29502 - DNA, 656 bp, Homo sapiens
  source 1..656: mol_type = other DNA
ggcctctaggcagccgtggccagcacgtgaagggctggaacgcgtcttggccgcaggccttgccccactgtgccctgtgctgccctggatgcttctggggaccctgggtcacaggcccctcagtcaccaccgcactcatggggaagtggctattgtccccagcagtgagcagcttcctgctgcctcgctgggagccagagcgccaggcagcgtcgcaggagcaggttctgggctggcaagctcccaggcctcccctcagcaggcctgttgcctctggtaggggaaatgaggggtccccagtgacgccacattcagagggcacgggcacctccaggaggatgcccacagggggggcttggcctaaggaccaggttgccggagaacgggagcccgacctggggtacgggctgcttcacccccgcgtggacctccccctcagctggggtgcggaggctcagcctgggggcccagttgcccctggtccccaagcagcagccccctctgcctccagggtgggcctggagcaggaggggggcctctgcccgggggccgggctctctggggccgccgtcgcgccgccccctccccgcaccgcgcccacagccgagcagctgggaggctattagatcagcggccggccaaggctataaattcgc

SEQ ID NO: 29503 - DNA, 613 bp, Homo sapiens
  source 1..613: mol_type = other DNA
agggtaaggcagggccctccggaaaagccagtcttcggcctggcactcaaggcccagcgctacagagcttcgctccggtccgaccccgcagggagcgggagccgggacatgtgtcacgttccgtgctgcagcttgggggccgggcgcaccatggaggctcggggactcctcttcgtatgggcagacaaggaaaagcctggcctttggtccccccgtcccaaggccgcctgcctctcgggggaaggcccggcccgcagcgacggaccctgaaaggccggacgtggagccccggctgggccgctacctgagcagcgggagaggctggacagccagggcgccgagagatgccatcgccgccatcgcctcttctctgcctagaggaaaagaaacagccaatcgcgcaccgaacggctgggccggcattgtgacgtctctggcagcactgacgtggcccctccctgagccaggggcccagctggtcgcggtccccccctcaacatggcggcagcggtgcttgaatcggtgcgaccgcgcgcgtgcgcagtaccgggtccgcgcctgtccccgaaacttcgcaccccgtcgaactctcgcgagagcggtatctgcgtgt

SEQ ID NO: 29504 - DNA, 672 bp, Homo sapiens
  source 1..672: mol_type = other DNA
cccattccaggcgcctcgaggggaaggctttgagtcccggaaccggattcccgaagcggtttgagaaaggcgggccgggaactgcctcagaagggctccttcaaggacactaaggaggtgacagccgccgtggcccactctcccggcccgtccggagggccccccgccacccgatgcagaccccctgggggagccggtccagggccaacttcggccccggccggcgcgaagccctttccccgcccctggtggggcccctagccaatcggactccagactgcttcgggtgcggctaccccaccgctcccctgcgaccgctgccgcggtcccgtggctctttccctgctcacctcccagggacggcagagaagggctggcccgagcaccgccttcgcggcgctgccggcgacggtcgctaccttcagcgccatgacgtccgcacgtcccgacacgcagataccgctctcgcgagagttcgacggggtgcgaagtttcggggacaggcgcggacccggtactgcgcacgcgcgcggtcgcaccgattcaagcaccgctgccgccatgttgagggggggaccgcgaccagctgggcccctggctcagggaggggccacgtcagtgctgccagagacgtcacaatgccggcccagccgttcggtgcgcgattggctg

SEQ ID NO: 29505 - DNA, 792 bp, Homo sapiens
  source 1..792: mol_type = other DNA
tcttgttttaaacaaaggtgtccgttgcggactctctctgggggacccaggagactgctcctcctggcaggacccctctctcccagagcggcatcgcgcagacaacgcgcctggtgcccgcccctcaggaccggacgccgggtgtcgtggggtgcctaggacccccgcccgcttccgtcgagcgcccgcccccggcttcccgcgccggctccagcgcccccgccgcccctcccggcgcgcgtgcgccccgtgcccgcgcccctcccccgccgccgtgggcgcgctcgcgtgcccgtcgtcccgggcgggagctggagacggccagcggctgctggacgaagagcgggcgccgggagctccgagagcgcggccgggcgaggcgggagcgcgggcgctggcctggccgcgggcgggggccgccgccgcgccgctgcccccctgtcgcgggccgggccgcggcgccgagcgcgagggccgggctcccggggctggcggccatgggcaggagccggaggcggcagcggcagcggcgggccccgcgggcggggaggcgcgcggcccacggcccctgacggcccctggcggcccggcgcgcccccgcgctccctggggggccgtagcctggcaacgcccggcgcgcccgcccatcccccgctgcccctcctggccgggtgcgagggagcatgcccgcgcctggcctcggccagctgaggggcgagccgctgcccccacctcgggggcgtgcccccctcccccgctaggcggcccgccccccgcgccagggtatggccc

SEQ ID NO: 29506 - DNA, 697 bp, Homo sapiens
  source 1..697: mol_type = other DNA
gcggcgggcccaggctggccagtgctgtgtgcaggcccgggtcccaaggcctccgaggccatcttgttttaaacaaaggtgtccgttgcggactctctctgggggacccaggagactgctcctcctggcaggacccctctctcccagagcggcatcgcgcagacaacgcgcctggtgcccgcccctcaggaccggacgccgggtgtcgtggggtgcctaggacccccgcccgcttccgtcgagcgcccgcccccggcttcccgcgccggctccagcgcccccgccgcccctcccggcgcgcgtgcgccccgtgcccgcgcccctcccccgccgccgtgggcgcgctcgcgtgcccgtcgtcccgggcgggagctggagacggccagcggctgctggacgaagagcgggcgccgggagctccgagagcgcggccgggcgaggcgggagcgcgggcgctggcctggccgcgggcgggggccgccgccgcgccgctgcccccctgtcgcgggccgggccgcggcgccgagcgcgagggccgggctcccggggctggcggccatgggcaggagccggaggcggcagcggcagcggcgggccccgcgggcggggaggcgcgcggcccacggcccctgacggcccctggcggcccggcgcgcccccgcgctccctggggggccgtagcctggcaacgcccggc

SEQ ID NO: 29507 - DNA, 297 bp, Homo sapiens
  source 1..297: mol_type = other DNA
acagagtctcactccatcacccaggctggggggcagtggcacgatcttggctcactgcaacctccgcctctcaggctcaagtgattctcatgcctcagcctcccaagtagctggcctgaaactattttgtgaaactctgatatagctgacaagaagaattcttctctacatgtgtgtgcacacagagataatagacgtagctagcagacttgtgtgttgacacctgcacatgcagacacatacggggatgtgcatgccaggccctgctgggggcggggctgagggcggggccaagag

SEQ ID NO: 29508 - DNA, 203 bp, Homo sapiens
  source 1..203: mol_type = other DNA
ctgaaactattttgtgaaactctgatatagctgacaagaagaattcttctctacatgtgtgtgcacacagagataatagacgtagctagcagacttgtgtgttgacacctgcacatgcagacacatacggggatgtgcatgccaggccctgctgggggcggggctgagggcggggccaagagcccgggcttacccagacccct

SEQ ID NO: 29509 - DNA, 393 bp, Homo sapiens
  source 1..393: mol_type = other DNA
caccatgtccccaggagacaagggcaggagattctcctttgagaggaactccaggcagaacctgagaactgacaggcaggtgtgcagggcacatgtgcagggcaccgctggaggttcccggcagtcactcaagctccctgagggaccggctgaacccctcccgcctccctggccctttcccaccggggaggatgggtttgggaccgcagcggccactgtccactcagtgcatggctgttccctggcatggcatgggtcagccagcagtgtcacggccgtcccttgcccagtgccacaagtgggcagggccttgatgctctgttgcgtggggctttgtaggcccctcctcccaggccagcgtgacgtccacgccgggaagcccttgcctggcac
